United States Patent Application Publication US 2006/0046253 A1 - sequence listing, part 11

SEQ ID NO: 151320 - DNA, 25 bp, Saccharomyces pastorianus
aattatataccccatgtcctcggat

SEQ ID NO: 151321 - DNA, 25 bp, Saccharomyces pastorianus
atgtcctcggatgaattctttgata

SEQ ID NO: 151322 - DNA, 25 bp, Saccharomyces pastorianus
gattattgtcgattccttcagaaaa

SEQ ID NO: 151323 - DNA, 25 bp, Saccharomyces pastorianus
gcaattacaggcagttggtaccgat

SEQ ID NO: 151324 - DNA, 25 bp, Saccharomyces pastorianus
tttccatatcacaaagacccacatt

SEQ ID NO: 151325 - DNA, 25 bp, Saccharomyces pastorianus
aatcacgtcgattgacaacgagatt

SEQ ID NO: 151326 - DNA, 25 bp, Saccharomyces pastorianus
ggtaccgatgaagcaatcacgtcga

SEQ ID NO: 151327 - DNA, 25 bp, Saccharomyces pastorianus
aatttgccagccaagaccttcggtg

SEQ ID NO: 151328 - DNA, 25 bp, Saccharomyces pastorianus
ttagagccaccttcagaaacaattt

SEQ ID NO: 151329 - DNA, 25 bp, Saccharomyces pastorianus
gccaccttcagaaacaatttgccag

SEQ ID NO: 151330 - DNA, 25 bp, Saccharomyces pastorianus
ttaccagaactcacggtaactctgg

SEQ ID NO: 151331 - DNA, 25 bp, Saccharomyces pastorianus
gttagagccaccttcagaaacaatt

SEQ ID NO: 151332 - DNA, 25 bp, Saccharomyces pastorianus
caccttcagaaacaatttgccagcc

SEQ ID NO: 151333 - DNA, 25 bp, Saccharomyces pastorianus
agccaccttcagaaacaatttgcca

SEQ ID NO: 151334 - DNA, 25 bp, Saccharomyces pastorianus
cgttagagccaccttcagaaacaat

SEQ ID NO: 151335 - DNA, 25 bp, Saccharomyces pastorianus
tgtggggtaaggttaccagaactca

SEQ ID NO: 151336 - DNA, 25 bp, Saccharomyces pastorianus
agagccaccttcagaaacaatttgc

SEQ ID NO: 151337 - DNA, 25 bp, Saccharomyces pastorianus
gtaactctggtgtcgttagagccac

SEQ ID NO: 151338 - DNA, 25 bp, Saccharomyces pastorianus
agaactagacatatcctggagcaag

SEQ ID NO: 151339 - DNA, 25 bp, Saccharomyces pastorianus
tggaacgtcattttatatggcccca

SEQ ID NO: 151340 - DNA, 25 bp, Saccharomyces pastorianus
tggtccttaggattaactcttctgg

SEQ ID NO: 151341 - DNA, 25 bp, Saccharomyces pastorianus
gggaggctgttaactctttagcgat

SEQ ID NO: 151342 - DNA, 25 bp, Saccharomyces pastorianus
gaggccttctcccaggcaaatgtta

SEQ ID NO: 151343 - DNA, 25 bp, Saccharomyces pastorianus
aacgcaaaacgtggctcctatagaa

SEQ ID NO: 151344 - DNA, 25 bp, Saccharomyces pastorianus
acgttttctccccagttgaaagatg

SEQ ID NO: 151345 - DNA, 25 bp, Saccharomyces pastorianus
tgacgatgatcctgacgttttctcc

SEQ ID NO: 151346 - DNA, 25 bp, Saccharomyces pastorianus
caaattatgcgatttcggtgtcagt

SEQ ID NO: 151347 - DNA, 25 bp, Saccharomyces pastorianus
gaatacaaggccaaccatacagcgt

SEQ ID NO: 151348 - DNA, 25 bp, Saccharomyces pastorianus
gcgtaacctgtgatgtatggtcctt

SEQ ID NO: 151349 - DNA, 25 bp, Saccharomyces pastorianus
acgacttcagcagtagcgggagcaa

SEQ ID NO: 151350 - DNA, 25 bp, Saccharomyces pastorianus
ctactatctagtgctccaatttcca

SEQ ID NO: 151351 - DNA, 25 bp, Saccharomyces pastorianus
aatagcacttcagctacttccacta

SEQ ID NO: 151352 - DNA, 25 bp, Saccharomyces pastorianus
actacgtcatccatggcttcaaatt

SEQ ID NO: 151353 - DNA, 25 bp, Saccharomyces pastorianus
tgaacgaaagcccatactccaacaa

SEQ ID NO: 151354 - DNA, 25 bp, Saccharomyces pastorianus
gaaggcgaggattcatacccctcga

SEQ ID NO: 151355 - DNA, 25 bp, Saccharomyces pastorianus
aaatagaccggtaccacctccattg

SEQ ID NO: 151356 - DNA, 25 bp, Saccharomyces pastorianus
aaagatctcgacacaccagaaggcg

SEQ ID NO: 151357 - DNA, 25 bp, Saccharomyces pastorianus
agagttgccggcgatagtcagcttt

SEQ ID NO: 151358 - DNA, 25 bp, Saccharomyces pastorianus
gacacttctttctgcgtacgacttc

SEQ ID NO: 151359 - DNA, 25 bp, Saccharomyces pastorianus
ggtggttctgtagccaagtgccgat

SEQ ID NO: 151360 - DNA, 25 bp, Saccharomyces pastorianus
ggacaactggatttcattgataaca

SEQ ID NO: 151361 - DNA, 25 bp, Saccharomyces pastorianus
ggctattgttctacatacgagcgaa

SEQ ID NO: 151362 - DNA, 25 bp, Saccharomyces pastorianus
gcgaataccctgctctgtggaagaa

SEQ ID NO: 151363 - DNA, 25 bp, Saccharomyces pastorianus
aaggttgcaacatctgatacaggcc

SEQ ID NO: 151364 - DNA, 25 bp, Saccharomyces pastorianus
gttcaagagatatcgctaccattat

SEQ ID NO: 151365 - DNA, 25 bp, Saccharomyces pastorianus
taccgaaatgcgcaagctggacgat

SEQ ID NO: 151366 - DNA, 25 bp, Saccharomyces pastorianus
gaggaagccaccaaaatacatgagg

SEQ ID NO: 151367 - DNA, 25 bp, Saccharomyces pastorianus
tcaggaacaatacctccagcagatt

SEQ ID NO: 151368 - DNA, 25 bp, Saccharomyces pastorianus
gctggacgatgatgctgcaagccat

SEQ ID NO: 151369 - DNA, 25 bp, Saccharomyces pastorianus
ctccagcagattgactctttagaat

SEQ ID NO: 151370 - DNA, 25 bp, Saccharomyces pastorianus
attgggtgtctactaatcaggaaca

SEQ ID NO: 151371 - DNA, 25 bp, Saccharomyces pastorianus
aaggcagacaccttttgcatcaggt

SEQ ID NO: 151372 - DNA, 25 bp, Saccharomyces pastorianus
ggatccgtagaaacattgcctgccg

SEQ ID NO: 151373 - DNA, 25 bp, Saccharomyces pastorianus
agctggtaagtcaacttcgtctcct

SEQ ID NO: 151374 - DNA, 25 bp, Saccharomyces pastorianus
aattccatccggtgctgtcttaaga

SEQ ID NO: 151375 - DNA, 25 bp, Saccharomyces pastorianus
atagcgcttcgacatttacaccagg

SEQ ID NO: 151376 - DNA, 25 bp, Saccharomyces pastorianus
gaagtcaaagtcactgctacctatg

SEQ ID NO: 151377 - DNA, 25 bp, Saccharomyces pastorianus
gtctccttcagtttcaacttctaac

SEQ ID NO: 151378 - DNA, 25 bp, Saccharomyces pastorianus
gggtttcttcgttcagcagcagagg

SEQ ID NO: 151379 - DNA, 25 bp, Saccharomyces pastorianus
ttacaccaggcgtggattccgatgt

SEQ ID NO: 151380 - DNA, 25 bp, Saccharomyces pastorianus
gcagcagaggtctttataccctgaa

SEQ ID NO: 151381 - DNA, 25 bp, Saccharomyces pastorianus
gtatctgcgcccaataccgataaag

SEQ ID NO: 151382 - DNA, 25 bp, Saccharomyces pastorianus
tttgcacgtttactgacatcctttg

SEQ ID NO: 151383 - DNA, 25 bp, Saccharomyces pastorianus
aatgctttcctgacattttacccta

SEQ ID NO: 151384 - DNA, 25 bp, Saccharomyces pastorianus
ttagcaggtgccactacttccaata

SEQ ID NO: 151385 - DNA, 25 bp, Saccharomyces pastorianus
gtatttaccaagatttccgaacctg

SEQ ID NO: 151386 - DNA, 25 bp, Saccharomyces pastorianus
aatcgggcatcaggcttggtttagc

SEQ ID NO: 151387 - DNA, 25 bp, Saccharomyces pastorianus
cagattctcccgttcaacaaactaa

SEQ ID NO: 151388 - DNA, 25 bp, Saccharomyces pastorianus
ggttggtaaactatctgctctatca

SEQ ID NO: 151389 - DNA, 25 bp, Saccharomyces pastorianus
aagtgcaaatcgctctcgcatgtgt

SEQ ID NO: 151390 - DNA, 25 bp, Saccharomyces pastorianus
agcgtttaatgatctgtccactatg

SEQ ID NO: 151391 - DNA, 25 bp, Saccharomyces pastorianus
aaaattccttactcgtgctttgcac

SEQ ID NO: 151392 - DNA, 25 bp, Saccharomyces pastorianus
tgtctcaatataacgtccagggtgt

SEQ ID NO: 151393 - DNA, 25 bp, Saccharomyces pastorianus
aggtattaccatcgttcctcttcaa

SEQ ID NO: 151394 - DNA, 25 bp, Saccharomyces pastorianus
ttcctcttcaaatctggtttctcag

SEQ ID NO: 151395 - DNA, 25 bp, Saccharomyces pastorianus
gtagaaggcctcgatggcttcgtat

SEQ ID NO: 151396 - DNA, 25 bp, Saccharomyces pastorianus
tggcttcgtatttgtcttccgtcta

SEQ ID NO: 151397 - DNA, 25 bp, Saccharomyces pastorianus
gtctactcttacctttatacaacca

SEQ ID NO: 151398 - DNA, 25 bp, Saccharomyces pastorianus
ttggatacagatgacgacctcgcac

SEQ ID NO: 151399 - DNA, 25 bp, Saccharomyces pastorianus
gaatcgcttcggttaccgctattaa

SEQ ID NO: 151400 - DNA, 25 bp, Saccharomyces pastorianus
agacctgttaccactcgtgctattg

SEQ ID NO: 151401 - DNA, 25 bp, Saccharomyces pastorianus
ggcttatcattgctagacctgttac

SEQ ID NO: 151402 - DNA, 25 bp, Saccharomyces pastorianus
gtgctattgtctccgtttttcgaag

SEQ ID NO: 151403 - DNA, 25 bp, Saccharomyces pastorianus
gtagcggtatgttatcagtgtctga

SEQ ID NO: 151404 - DNA, 25 bp, Saccharomyces pastorianus
tgagttttcatccatcgcatcttta

SEQ ID NO: 151405 - DNA, 25 bp, Saccharomyces pastorianus
gcaatcaattgcattccatccttta

SEQ ID NO: 151406 - DNA, 25 bp, Saccharomyces pastorianus
aaaatgcacgcatgccggaatcaat

SEQ ID NO: 151407 - DNA, 25 bp, Saccharomyces pastorianus
ggatcagacgtatgattccgttgta

SEQ ID NO: 151408 - DNA, 25 bp, Saccharomyces pastorianus
taaacaagcttttaaccggatggat

SEQ ID NO: 151409 - DNA, 25 bp, Saccharomyces pastorianus
tccatcctttaactgccgaacaatt

SEQ ID NO: 151410 - DNA, 25 bp, Saccharomyces pastorianus
aatcatcgctagaatatcctacgtg

SEQ ID NO: 151411 - DNA, 25 bp, Saccharomyces pastorianus
gactggtttagttcctattttgact

SEQ ID NO: 151412 - DNA, 25 bp, Saccharomyces pastorianus
gacaatctaccaacttctaacgaaa

SEQ ID NO: 151413 - DNA, 25 bp, Saccharomyces pastorianus
atcctacgtgaatccagacgcctta

SEQ ID NO: 151414 - DNA, 25 bp, Saccharomyces pastorianus
agacgccttaatgacttttttagct

SEQ ID NO: 151415 - DNA, 25 bp, Saccharomyces pastorianus
gaagatcgatcgtcacaaatccata

SEQ ID NO: 151416 - DNA, 25 bp, Saccharomyces pastorianus
gaccaaggcactgtcattgataatc

SEQ ID NO: 151417 - DNA, 25 bp, Saccharomyces pastorianus
tgggtttccgaccaacaagacgtat

SEQ ID NO: 151418 - DNA, 25 bp, Saccharomyces pastorianus
aaaaattttgcctctctcgaacact

SEQ ID NO: 151419 - DNA, 25 bp, Saccharomyces pastorianus
accattttccagctacgggatgcca

SEQ ID NO: 151420 - DNA, 25 bp, Saccharomyces pastorianus
gtctcccacaggtcaatcagacgat

SEQ ID NO: 151421 - DNA, 25 bp, Saccharomyces pastorianus
gaaggactagctcaccagtaagaac

SEQ ID NO: 151422 - DNA, 25 bp, Saccharomyces pastorianus
gccattacatagattgtctcccaca

SEQ ID NO: 151423 - DNA, 25 bp, Saccharomyces pastorianus
gaacgaatcgtatatgaccaaggca

SEQ ID NO: 151424 - DNA, 25 bp, Saccharomyces pastorianus
taggaaagtgacgagcccgctagat

SEQ ID NO: 151425 - DNA, 25 bp, Saccharomyces pastorianus
gatatgccctatcgaagaagtagcg

SEQ ID NO: 151426 - DNA, 25 bp, Saccharomyces pastorianus
caaatgaatgaacagctgaaagagt

SEQ ID NO: 151427 - DNA, 25 bp, Saccharomyces pastorianus
aataaggtgctgcatgatagcgaag

SEQ ID NO: 151428 - DNA, 25 bp, Saccharomyces pastorianus
aatggctgaactatgcactaggtta

SEQ ID NO: 151429 - DNA, 25 bp, Saccharomyces pastorianus
aaattgaataaggtgctgcatgata

SEQ ID NO: 151430 - DNA, 25 bp, Saccharomyces pastorianus
ggaatggctgaactatgcactaggt

SEQ ID NO: 151431 - DNA, 25 bp, Saccharomyces pastorianus
ttttggaatggctgaactatgcact

SEQ ID NO: 151432 - DNA, 25 bp, Saccharomyces pastorianus
cgaagggaaagattttggaatggct

SEQ ID NO: 151433 - DNA, 25 bp, Saccharomyces pastorianus
ctgcatgatagcgaagggaaagatt

SEQ ID NO: 151434 - DNA, 25 bp, Saccharomyces pastorianus
aaaatagcggagctggaaaaattga

SEQ ID NO: 151435 - DNA, 25 bp, Saccharomyces pastorianus
ataaacaagagtgggagagtcaaat

SEQ ID NO: 151436 - DNA, 25 bp, Saccharomyces pastorianus
aatgaacagctgaaagagttggaaa

SEQ ID NO: 151437 - DNA, 25 bp, Saccharomyces pastorianus
ggacttgaagaagcctacgaaccag

SEQ ID NO: 151438 - DNA, 25 bp, Saccharomyces pastorianus
gaaaataatcacttacagcaggctt

SEQ ID NO: 151439 - DNA, 25 bp, Saccharomyces pastorianus
ggctagacaaggacaaaactttggt

SEQ ID NO: 151440 - DNA, 25 bp, Saccharomyces pastorianus
tacttgcatcaaccattcttataca

SEQ ID NO: 151441 - DNA, 25 bp, Saccharomyces pastorianus
gacactaataactatcgggtcggta

SEQ ID NO: 151442 - DNA, 25 bp, Saccharomyces pastorianus
tacgaaccagaaggaaattgcgata

SEQ ID NO: 151443 - DNA, 25 bp, Saccharomyces pastorianus
gagatggaactgtcttttattttaa

SEQ ID NO: 151444 - DNA, 25 bp, Saccharomyces pastorianus
attctcagcgaaaacaagatcattg

SEQ ID NO: 151445 - DNA, 25 bp, Saccharomyces pastorianus
gaaacaacttactcttctcaggcaa

SEQ ID NO: 151446 - DNA, 25 bp, Saccharomyces pastorianus
agcaggcttgtaaaattctcagcga

SEQ ID NO: 151447 - DNA, 25 bp, Saccharomyces pastorianus
acaatcaggaagagtggctagacaa

SEQ ID NO: 151448 - DNA, 25 bp, Saccharomyces pastorianus
gacatcgatgactacgttcacagaa

SEQ ID NO: 151449 - DNA, 25 bp, Saccharomyces pastorianus
taattatgatttgccctccgacatc

SEQ ID NO: 151450 - DNA, 25 bp, Saccharomyces pastorianus
gcgaatcaagaagttcccacgtttt

SEQ ID NO: 151451 - DNA, 25 bp, Saccharomyces pastorianus
atatcctggtcgcaacagctgtagc

SEQ ID NO: 151452 - DNA, 25 bp, Saccharomyces pastorianus
gcgtggctacttcattcttcaatag

SEQ ID NO: 151453 - DNA, 25 bp, Saccharomyces pastorianus
agaacaggccgtgctggtaacacag

SEQ ID NO: 151454 - DNA, 25 bp, Saccharomyces pastorianus
acatggtgaccgcacacaggctgaa

SEQ ID NO: 151455 - DNA, 25 bp, Saccharomyces pastorianus
gtaaacatggtggaagcggctcatt

SEQ ID NO: 151456 - DNA, 25 bp, Saccharomyces pastorianus
gaatggcggatcaactcacagattt

SEQ ID NO: 151457 - DNA, 25 bp, Saccharomyces pastorianus
gctaacgtagctgatatcctggtcg

SEQ ID NO: 151458 - DNA, 25 bp, Saccharomyces pastorianus
gaacgtgccttatctgctttcaaag

SEQ ID NO: 151459 - DNA, 25 bp, Saccharomyces pastorianus
aaattagaagccgaactgtttggtg

SEQ ID NO: 151460 - DNA, 25 bp, Saccharomyces pastorianus
aagccgaactgtttggtgtacacga

SEQ ID NO: 151461 - DNA, 25 bp, Saccharomyces pastorianus
ccattcatctggtataaagtttgat

SEQ ID NO: 151462 - DNA, 25 bp, Saccharomyces pastorianus
atggcaagcatataccggggcctaa

SEQ ID NO: 151463 - DNA, 25 bp, Saccharomyces pastorianus
aactgtttggtgtacacgaggatcc

SEQ ID NO: 151464 - DNA, 25 bp, Saccharomyces pastorianus
cgcgaaattagaagccgaactgttt

SEQ ID NO: 151465 - DNA, 25 bp, Saccharomyces pastorianus
agaagccgaactgtttggtgtacac

SEQ ID NO: 151466 - DNA, 25 bp, Saccharomyces pastorianus
agatgggtaaatggcaagcatatac

SEQ ID NO: 151467 - DNA, 25 bp, Saccharomyces pastorianus
taagaacgcgaaattagaagccgaa

SEQ ID NO: 151468 - DNA, 25 bp, Saccharomyces pastorianus
gccgaactgtttggtgtacacgagg

SEQ ID NO: 151469 - DNA, 25 bp, Saccharomyces pastorianus
gtttggtgtacacgaggatcccgat

SEQ ID NO: 151470 - DNA, 25 bp, Saccharomyces pastorianus
ccattcatctggtataaagtttgat

SEQ ID NO: 151471 - DNA, 25 bp, Saccharomyces pastorianus
gtacacgaggatcccgattaccatt

SEQ ID NO: 151472 - DNA, 25 bp, Saccharomyces pastorianus
atggcaagcatataccggggcctaa

SEQ ID NO: 151473 - DNA, 25 bp, Saccharomyces pastorianus
aactgtttggtgtacacgaggatcc

SEQ ID NO: 151474 - DNA, 25 bp, Saccharomyces pastorianus
cgcgaaattagaagccgaactgttt

SEQ ID NO: 151475 - DNA, 25 bp, Saccharomyces pastorianus
agaagccgaactgtttggtgtacac

SEQ ID NO: 151476 - DNA, 25 bp, Saccharomyces pastorianus
agatgggtaaatggcaagcatatac

SEQ ID NO: 151477 - DNA, 25 bp, Saccharomyces pastorianus
taagaacgcgaaattagaagccgaa

SEQ ID NO: 151478 - DNA, 25 bp, Saccharomyces pastorianus
gtttggtgtacacgaggatcccgat

SEQ ID NO: 151479 - DNA, 25 bp, Saccharomyces pastorianus
aggatcccgattaccattcatctgg

SEQ ID NO: 151480 - DNA, 25 bp, Saccharomyces pastorianus
agccgaactgtttggtgtacacgag

SEQ ID NO: 151481 - DNA, 25 bp, Saccharomyces pastorianus
atcgcataagacagcctcaaaacgc

SEQ ID NO: 151482 - DNA, 25 bp, Saccharomyces pastorianus
aagacagcctcaaaacgcaaataca

SEQ ID NO: 151483 - DNA, 25 bp, Saccharomyces pastorianus
gcataagacagcctcaaaacgcaaa

SEQ ID NO: 151484 - DNA, 25 bp, Saccharomyces pastorianus
acaccaacttatgacgatagtgata

SEQ ID NO: 151485 - DNA, 25 bp, Saccharomyces pastorianus
cctcaaaacgcaaatacaccaactt

SEQ ID NO: 151486 - DNA, 25 bp, Saccharomyces pastorianus
accgcatcgcataagacagcctcaa

SEQ ID NO: 151487 - DNA, 25 bp, Saccharomyces pastorianus
aattccctccaatacgaaaccgcat

SEQ ID NO: 151488 - DNA, 25 bp, Saccharomyces pastorianus
ataagacagcctcaaaacgcaaata

SEQ ID NO: 151489 - DNA, 25 bp, Saccharomyces pastorianus
gacagcctcaaaacgcaaatacacc

SEQ ID NO: 151490 - DNA, 25 bp, Saccharomyces pastorianus
gcatcgcataagacagcctcaaaac

SEQ ID NO: 151491 - DNA, 25 bp, Saccharomyces pastorianus
ccgcatcgcataagacagcctcaaa

SEQ ID NO: 151492 - DNA, 25 bp, Saccharomyces pastorianus
ttaacgttgggagaggcacatgcat

SEQ ID NO: 151493 - DNA, 25 bp, Saccharomyces pastorianus
gcaagagttacttcgcagatgggat

SEQ ID NO: 151494 - DNA, 25 bp, Saccharomyces pastorianus
gatttgatcattttggccttgccca

SEQ ID NO: 151495 - DNA, 25 bp, Saccharomyces pastorianus
agcacagttgccgacatggtcataa

SEQ ID NO: 151496 - DNA, 25 bp, Saccharomyces pastorianus
acaacgctaagtaccattctgatct

SEQ ID NO: 151497 - DNA, 25 bp, Saccharomyces pastorianus
caagctgtggtctcgatgtgtttaa

SEQ ID NO: 151498 - DNA, 25 bp, Saccharomyces pastorianus
gatgtgctactagacgctcttgaat

SEQ ID NO: 151499 - DNA, 25 bp, Saccharomyces pastorianus
gggatgttacagctttgccacatat

SEQ ID NO: 151500 - DNA, 25 bp, Saccharomyces pastorianus
taaagcagacactcatcacactcga

SEQ ID NO: 151501 - DNA, 25 bp, Saccharomyces pastorianus
cagtacggcctctacaaacaatatt

SEQ ID NO: 151502 - DNA, 25 bp, Saccharomyces pastorianus
ggtcccgtccaaaagagtctacttg

SEQ ID NO: 151503 - DNA, 25 bp, Saccharomyces pastorianus
aaatacggcatcaacgctgtcattg

SEQ ID NO: 151504 - DNA, 25 bp, Saccharomyces pastorianus
gatctggctattcatgatatccatg

SEQ ID NO: 151505 - DNA, 25 bp, Saccharomyces pastorianus
catctctgcaggttgcgccattgca

SEQ ID NO: 151506 - DNA, 25 bp, Saccharomyces pastorianus
tgaatgtaaccctgatctggctatt

SEQ ID NO: 151507 - DNA, 25 bp, Saccharomyces pastorianus
atcgctctagacgttgttgaatgta

SEQ ID NO: 151508 - DNA, 25 bp, Saccharomyces pastorianus
aaggtcccattatgtgctcctatga

SEQ ID NO: 151509 - DNA, 25 bp, Saccharomyces pastorianus
agacccattatacattcctgctaca

SEQ ID NO: 151510 - DNA, 25 bp, Saccharomyces pastorianus
atgtttcaaacaccatctctgcagg

SEQ ID NO: 151511 - DNA, 25 bp, Saccharomyces pastorianus
atgaaagccgtgcacccagaaacaa

SEQ ID NO: 151512 - DNA, 25 bp, Saccharomyces pastorianus
gaaagattggccgaatccggtaatt

SEQ ID NO: 151513 - DNA, 25 bp, Saccharomyces pastorianus
gaatccggtaatttaatcgctctag

SEQ ID NO: 151514 - DNA, 25 bp, Saccharomyces pastorianus
gaacagattccccttgaccttgggt

SEQ ID NO: 151515 - DNA, 25 bp, Saccharomyces pastorianus
gtcccgtgtcattcctaatgggttt

SEQ ID NO: 151516 - DNA, 25 bp, Saccharomyces pastorianus
gttggtgtacaactccgtgtcgaaa

SEQ ID NO: 151517 - DNA, 25 bp, Saccharomyces pastorianus
aagcttggtgtcgagaagggcccta

SEQ ID NO: 151518 - DNA, 25 bp, Saccharomyces pastorianus
gttttggacaaataccccgatgctg

SEQ ID NO: 151519 - DNA, 25 bp, Saccharomyces pastorianus
atagccattggtactgtatccgcgg

SEQ ID NO: 151520 - DNA, 25 bp, Saccharomyces pastorianus
ggatttgggctggtctacggaatta

SEQ ID NO: 151521 - DNA, 25 bp, Saccharomyces pastorianus
tggatagacgcccacgctgatataa

SEQ ID NO: 151522 - DNA, 25 bp, Saccharomyces pastorianus
tgaacaaggatgtcccacactgtcc

SEQ ID NO: 151523 - DNA, 25 bp, Saccharomyces pastorianus
ccccgatgctggtcttttatggata

SEQ ID NO: 151524 - DNA, 25 bp, Saccharomyces pastorianus
aatcgcgaattgtccatcgttctgg

SEQ ID NO: 151525 - DNA, 25 bp, Saccharomyces pastorianus
catccggatatttgcatcatgcttt

SEQ ID NO: 151526 - DNA, 25 bp, Saccharomyces pastorianus
ggtgtagatgccgtgatcgtcgata

SEQ ID NO: 151527 - DNA, 25 bp, Saccharomyces pastorianus
attcaagaaaatccctgccaacgtt

SEQ ID NO: 151528 - DNA, 25 bp, Saccharomyces pastorianus
ggttattccgatcttgttcctgacg

SEQ ID NO: 151529 - DNA, 25 bp, Saccharomyces pastorianus
aatgggctggtatgtgtcacttacg

SEQ ID NO: 151530 - DNA, 25 bp, Saccharomyces pastorianus
gaaccattgggttgacaccgtgtta

SEQ ID NO: 151531 - DNA, 25 bp, Saccharomyces pastorianus
ggccgatttgagagcctcatcgtta

SEQ ID NO: 151532 - DNA, 25 bp, Saccharomyces pastorianus
attttttcgtcatttcatccggata

SEQ ID NO: 151533 - DNA, 25 bp, Saccharomyces pastorianus
ggattgtatctgctgcagcacccat

SEQ ID NO: 151534 - DNA, 25 bp, Saccharomyces pastorianus
aatgatcccgaaaatgccagtatac

SEQ ID NO: 151535 - DNA, 25 bp, Saccharomyces pastorianus
gtaagtttcccatgcttgatgaggc

SEQ ID NO: 151536 - DNA, 25 bp, Saccharomyces pastorianus
agtagacttcaaagtgccttccaaa

SEQ ID NO: 151537 - DNA, 25 bp, Saccharomyces pastorianus
aactggccggaccaataaagtcata

SEQ ID NO: 151538 - DNA, 25 bp, Saccharomyces pastorianus
taagcccggaagcactagcaaaagt

SEQ ID NO: 151539 - DNA, 25 bp, Saccharomyces pastorianus
agcccttcaatttcattaagcccgg

SEQ ID NO: 151540 - DNA, 25 bp, Saccharomyces pastorianus
gcatccccattcacagttgaacagt

SEQ ID NO: 151541 - DNA, 25 bp, Saccharomyces pastorianus
gaaaaactttttggctggacagcta

SEQ ID NO: 151542 - DNA, 25 bp, Saccharomyces pastorianus
gacagctatcttcgttgcagcagca

SEQ ID NO: 151543 - DNA, 25 bp, Saccharomyces pastorianus
aagctcttgatagccaacaacgcga

SEQ ID NO: 151544 - DNA, 25 bp, Saccharomyces pastorianus
tattgcgcggtcatttgcacattgc

SEQ ID NO: 151545 - DNA, 25 bp, Saccharomyces pastorianus
tcagagacgaactggtcacgcatcc

SEQ ID NO: 151546 - DNA, 25 bp, Saccharomyces pastorianus
gcagcagcagaagggtttacggaca

SEQ ID NO: 151547 - DNA, 25 bp, Saccharomyces pastorianus
tacactccccaaatttgttttatcg

SEQ ID NO: 151548 - DNA, 25 bp, Saccharomyces pastorianus
aaagtcagtgatcccttcgttgacg

SEQ ID NO: 151549 - DNA, 25 bp, Saccharomyces pastorianus
tatcctccgaacttgaatcgtacag

SEQ ID NO: 151550 - DNA, 25 bp, Saccharomyces pastorianus
gcattggcccgatttgatggttata

SEQ ID NO: 151551 - DNA, 25 bp, Saccharomyces pastorianus
gcacaaacattatatcctccgaact

SEQ ID NO: 151552 - DNA, 25 bp, Saccharomyces pastorianus
ggaggaccaagatcaggactttgtt

SEQ ID NO: 151553 - DNA, 25 bp, Saccharomyces pastorianus
accatttctccccttgtcaaatagg

SEQ ID NO: 151554 - DNA, 25 bp, Saccharomyces pastorianus
gttcatgctgatttgcatccaggca

SEQ ID NO: 151555 - DNA, 25 bp, Saccharomyces pastorianus
atagctctattcaacgcattggccc

SEQ ID NO: 151556 - DNA, 25 bp, Saccharomyces pastorianus
tcgttgacgcgtttctacaaatgct

SEQ ID NO: 151557 - DNA, 25 bp, Saccharomyces pastorianus
gaataacgcacgacctgaggaagaa

SEQ ID NO: 151558 - DNA, 25 bp, Saccharomyces pastorianus
catcccaaatggctgctatggctga

SEQ ID NO: 151559 - DNA, 25 bp, Saccharomyces pastorianus
gaaggtttcgactccatcaaagcta

SEQ ID NO: 151560 - DNA, 25 bp, Saccharomyces pastorianus
gagtacatctacacattacgtggta

SEQ ID NO: 151561 - DNA, 25 bp, Saccharomyces pastorianus
tttgcttccgatgctgaaaagacga

SEQ ID NO: 151562 - DNA, 25 bp, Saccharomyces pastorianus
gacccctctgtttacacacaattga

SEQ ID NO: 151563 - DNA, 25 bp, Saccharomyces pastorianus
aagagtatgctccatttgcttccga

SEQ ID NO: 151564 - DNA, 25 bp, Saccharomyces pastorianus
atgacttaaccatcgttgcacacac

SEQ ID NO: 151565 - DNA, 25 bp, Saccharomyces pastorianus
gatctaagcaagaagcatcccaaat

SEQ ID NO: 151566 - DNA, 25 bp, Saccharomyces pastorianus
gaagaacctattccattaccagaag

SEQ ID NO: 151567 - DNA, 25 bp, Saccharomyces pastorianus
cttgctcaagataagctagttgctg

SEQ ID NO: 151568 - DNA, 25 bp, Saccharomyces pastorianus
attggcttctctaggtaacattatt

SEQ ID NO: 151569 - DNA, 25 bp, Saccharomyces pastorianus
gatgtttcctctcaattatctcgtg

SEQ ID NO: 151570 - DNA, 25 bp, Saccharomyces pastorianus
aagggtgccgcctttatttgcgcca

SEQ ID NO: 151571 - DNA, 25 bp, Saccharomyces pastorianus
gtactactcgtatcccaacattgaa

SEQ ID NO: 151572 - DNA, 25 bp, Saccharomyces pastorianus
tactaatgccccattctctgttgaa

SEQ ID NO: 151573 - DNA, 25 bp, Saccharomyces pastorianus
ataacagaacatttcgccgatgagt

SEQ ID NO: 151574 - DNA, 25 bp, Saccharomyces pastorianus
gaagccttcggcaagccattgtcca

SEQ ID NO: 151575 - DNA, 25 bp, Saccharomyces pastorianus
tgtctgctaatactaatgccccatt

SEQ ID NO: 151576 - DNA, 25 bp, Saccharomyces pastorianus
gaacgacgttgatgtttcctctcaa

SEQ ID NO: 151577 - DNA, 25 bp, Saccharomyces pastorianus
gaaagtcttaggaactgcctgcgac

SEQ ID NO: 151578 - DNA, 25 bp, Saccharomyces pastorianus
aactgcctgcgacaagcattttggt

SEQ ID NO: 151579 - DNA, 25 bp, Saccharomyces pastorianus
agatgaagccatcgccaagggtgcc

SEQ ID NO: 151580 - DNA, 25 bp, Saccharomyces pastorianus
ttcttctaagagcacaacccacatg

SEQ ID NO: 151581 - DNA, 25 bp, Saccharomyces pastorianus
ggtgttcagcccgataatgttttag

SEQ ID NO: 151582 - DNA, 25 bp, Saccharomyces pastorianus
gataccatatattcctacagttcaa

SEQ ID NO: 151583 - DNA, 25 bp, Saccharomyces pastorianus
ttttgagatggtgccgatcccaatt

SEQ ID NO: 151584 - DNA, 25 bp, Saccharomyces pastorianus
agtttggacacactgcgttcttctg

SEQ ID NO: 151585 - DNA, 25 bp, Saccharomyces pastorianus
ggagatttgccactgatttcatcaa

SEQ ID NO: 151586 - DNA, 25 bp, Saccharomyces pastorianus
atgcctgtcgctggtaaccagtcaa

SEQ ID NO: 151587 - DNA, 25 bp, Saccharomyces pastorianus
atgcctgaaggcagttccgaagact

SEQ ID NO: 151588 - DNA, 25 bp, Saccharomyces pastorianus
catccactagtatcccgactttaaa

SEQ ID NO: 151589 - DNA, 25 bp, Saccharomyces pastorianus
taatgaccccttgagctggagtgaa

SEQ ID NO: 151590 - DNA, 25 bp, Saccharomyces pastorianus
atcttcttcggcattgaactcttcg

SEQ ID NO: 151591 - DNA, 25 bp, Saccharomyces pastorianus
aaacctaatcgtactcagttagatc

SEQ ID NO: 151592 - DNA, 25 bp, Saccharomyces pastorianus
taatttggcgccttgggctaacaag

SEQ ID NO: 151593 - DNA, 25 bp, Saccharomyces pastorianus
aacccgagggtgctgtttataatca

SEQ ID NO: 151594 - DNA, 25 bp, Saccharomyces pastorianus
aaggcagaactgatggcacaaaaat

SEQ ID NO: 151595 - DNA, 25 bp, Saccharomyces pastorianus
aaaactcaaactggttctgcctggg

SEQ ID NO: 151596 - DNA, 25 bp, Saccharomyces pastorianus
ccgcaacttccataaccactaattt

SEQ ID NO: 151597 - DNA, 25 bp, Saccharomyces pastorianus
aaatattaagctcggcgcaaattcc

SEQ ID NO: 151598 - DNA, 25 bp, Saccharomyces pastorianus
cagttagatcgtgagcaggcattaa

SEQ ID NO: 151599 - DNA, 25 bp, Saccharomyces pastorianus
cagatttcatctgctcttgaagatt

SEQ ID NO: 151600 - DNA, 25 bp, Saccharomyces pastorianus
gaaacttcatcttccgaaaacaccg

SEQ ID NO: 151601 - DNA, 25 bp, Saccharomyces pastorianus
taaagccacagcaaccgatcaaagt

SEQ ID NO: 151602 - DNA, 25 bp, Saccharomyces pastorianus
ctgagagtataagggacgtaatcgc

SEQ ID NO: 151603 - DNA, 25 bp, Saccharomyces pastorianus
tccaagtgtgatacctgaaagcatt

SEQ ID NO: 151604 - DNA, 25 bp, Saccharomyces pastorianus
gccacacgctggatttgctattggt

SEQ ID NO: 151605 - DNA, 25 bp, Saccharomyces pastorianus
ctattggttttgatcgtatgtgcgc

SEQ ID NO: 151606 - DNA, 25 bp, Saccharomyces pastorianus
tcgtatgtgcgctatgatctgtgaa

SEQ ID NO: 151607 - DNA, 25 bp, Saccharomyces pastorianus
tgggaacaccgccacacgctggatt

SEQ ID NO: 151608 - DNA, 25 bp, Saccharomyces pastorianus
tataagggacgtaatcgccttccca

SEQ ID NO: 151609 - DNA, 25 bp, Saccharomyces pastorianus
cgctggatttgctattggttttgat

SEQ ID NO: 151610 - DNA, 25 bp, Saccharomyces pastorianus
gggctgatttggttgtcaagagtcc

SEQ ID NO: 151611 - DNA, 25 bp, Saccharomyces pastorianus
gatacctgaaagcattctggaacct

SEQ ID NO: 151612 - DNA, 25 bp, Saccharomyces pastorianus
gtgcgctatgatctgtgaaactgag

SEQ ID NO: 151613 - DNA, 25 bp, Saccharomyces pastorianus
gtcgagaccccaatgttatttaaag

SEQ ID NO: 151614 - DNA, 25 bp, Saccharomyces pastorianus
taaattgtcagccatatacccacct

SEQ ID NO: 151615 - DNA, 25 bp, Saccharomyces pastorianus
gcaagagagtttctggttccaacaa

SEQ ID NO: 151616 - DNA, 25 bp, Saccharomyces pastorianus
tgttatttaaagctaccccagaagg

SEQ ID NO: 151617 - DNA, 25 bp, Saccharomyces pastorianus
ggactctaacggtgacattatccag

SEQ ID NO: 151618 - DNA, 25 bp, Saccharomyces pastorianus
aaaaggactgtccagcggccagaaa

SEQ ID NO: 151619 - DNA, 25 bp, Saccharomyces pastorianus
aaaccagcgcaaatgcaggatttta

SEQ ID NO: 151620 - DNA, 25 bp, Saccharomyces pastorianus
aaaccatcgttttatgctctagatc

SEQ ID NO: 151621 - DNA, 25 bp, Saccharomyces pastorianus
acctgagttccgctatttgcaattg

SEQ ID NO: 151622 - DNA, 25 bp, Saccharomyces pastorianus
aagccgtaggtatactctctttgaa

SEQ ID NO: 151623 - DNA, 25 bp, Saccharomyces pastorianus
gacacctcgaccatcaaacagttaa

SEQ ID NO: 151624 - DNA, 25 bp, Saccharomyces pastorianus
gagccaaaccattccattttcgaga

SEQ ID NO: 151625 - DNA, 25 bp, Saccharomyces pastorianus
agcattatgacctcgtagttaacgg

SEQ ID NO: 151626 - DNA, 25 bp, Saccharomyces pastorianus
ggatagattatgttccacgcatcat

SEQ ID NO: 151627 - DNA, 25 bp, Saccharomyces pastorianus
gagaatcctactcccctgggaagat

SEQ ID NO: 151628 - DNA, 25 bp, Saccharomyces pastorianus
gctgtcaataaggacgttgcctcat

SEQ ID NO: 151629 - DNA, 25 bp, Saccharomyces pastorianus
tagagttccaatagtgcttccaatt

SEQ ID NO: 151630 - DNA, 25 bp, Saccharomyces pastorianus
acgcatcatccttttactatggtga

SEQ ID NO: 151631 - DNA, 25 bp, Saccharomyces pastorianus
gaattttcatgcaattgccacgttt

SEQ ID NO: 151632 - DNA, 25 bp, Saccharomyces pastorianus
aaaagcttgcatatccggagtacga

SEQ ID NO: 151633 - DNA, 25 bp, Saccharomyces pastorianus
gcctcatggattgtggatttcccgt

SEQ ID NO: 151634 - DNA, 25 bp, Saccharomyces pastorianus
acgccggaaaagtgcttgggtcagc

SEQ ID NO: 151635 - DNA, 25 bp, Saccharomyces pastorianus
gtaattccgtacaaacaagctagag

SEQ ID NO: 151636 - DNA, 25 bp, Saccharomyces pastorianus
ttaaatgctgcagtcgctctctcaa

SEQ ID NO: 151637 - DNA, 25 bp, Saccharomyces pastorianus
tcctggttaacaaagcaagctgccg

SEQ ID NO: 151638 - DNA, 25 bp, Saccharomyces pastorianus
tatgcgagactgacttgggtggaca

SEQ ID NO: 151639 - DNA, 25 bp, Saccharomyces pastorianus
gtttcgcacaaaccgacagttgaga

SEQ ID NO: 151640 - DNA, 25 bp, Saccharomyces pastorianus
aacggatgatccagttacaggtgaa

SEQ ID NO: 151641 - DNA, 25 bp, Saccharomyces pastorianus
atccttgtgtgttgttatgcgagac

SEQ ID NO: 151642 - DNA, 25 bp, Saccharomyces pastorianus
gggtggacatttggcttatctcgac

SEQ ID NO: 151643 - DNA, 25 bp, Saccharomyces pastorianus
tcgctctctcaaacccatgggattt

SEQ ID NO: 151644 - DNA, 25 bp, Saccharomyces pastorianus
gagaaaccagtcttttatacgtata

SEQ ID NO: 151645 - DNA, 25 bp, Saccharomyces pastorianus
ttcgataatcttttcactgccccat

SEQ ID NO: 151646 - DNA, 25 bp, Saccharomyces pastorianus
gttactatccaactgtcactcctag

SEQ ID NO: 151647 - DNA, 25 bp, Saccharomyces pastorianus
acagcttgcttttcacaggttactt

SEQ ID NO: 151648 - DNA, 25 bp, Saccharomyces pastorianus
tgtcagccggtgatttttccctaaa

SEQ ID NO: 151649 - DNA, 25 bp, Saccharomyces pastorianus
attcgtaaccaaacacgtgcctaca

SEQ ID NO: 151650 - DNA, 25 bp, Saccharomyces pastorianus
acagaccctttatttgtcagccggt

SEQ ID NO: 151651 - DNA, 25 bp, Saccharomyces pastorianus
taagcgccaaattcctcttcatgaa

SEQ ID NO: 151652 - DNA, 25 bp, Saccharomyces pastorianus
gggtctgcacttcagattgggttat

SEQ ID NO: 151653 - DNA, 25 bp, Saccharomyces pastorianus
gcctcgttttcacccaagaactaga

SEQ ID NO: 151654 - DNA, 25 bp, Saccharomyces pastorianus
taacggcaccgtcaaacatgtactg

SEQ ID NO: 151655 - DNA, 25 bp, Saccharomyces pastorianus
catgagcctctcatcagggcattat

SEQ ID NO: 151656 - DNA, 25 bp, Saccharomyces pastorianus
gaaccaagtctttggctttcagaga

SEQ ID NO: 151657 - DNA, 25 bp, Saccharomyces pastorianus
tgccactaaggctgatttcgataat

SEQ ID NO: 151658 - DNA, 25 bp, Saccharomyces pastorianus
atataaaattgtttgtgcgggacca

SEQ ID NO: 151659 - DNA, 25 bp, Saccharomyces pastorianus
atcttgcaagggttcggtgttgcta

SEQ ID NO: 151660 - DNA, 25 bp, Saccharomyces pastorianus
tcacatcctgaagccggttccattg

SEQ ID NO: 151661 - DNA, 25 bp, Saccharomyces pastorianus
aaaggttgtcggtctgcacattgtt

SEQ ID NO: 151662 - DNA, 25 bp, Saccharomyces pastorianus
ctagattacgagaacgtccccagcg

SEQ ID NO: 151663 - DNA, 25 bp, Saccharomyces pastorianus
gtaattttctcacatcctgaagccg

SEQ ID NO: 151664 - DNA, 25 bp, Saccharomyces pastorianus
taccgccatgtactatgctatgttg

SEQ ID NO: 151665 - DNA, 25 bp, Saccharomyces pastorianus
tacaattccaaatttaccgccatgt

SEQ ID NO: 151666 - DNA, 25 bp, Saccharomyces pastorianus
cgataattgtgttgctattcatccg

SEQ ID NO: 151667 - DNA, 25 bp, Saccharomyces pastorianus
gagaacgtccccagcgtaattttct

SEQ ID NO: 151668 - DNA, 25 bp, Saccharomyces pastorianus
gcttatgtccataggttgaacggta

SEQ ID NO: 151669 - DNA, 25 bp, Saccharomyces pastorianus
ctgaagtttactccgctaaccatat

SEQ ID NO: 151670 - DNA, 25 bp, Saccharomyces pastorianus
ttgcgaccggtggaaaggctatttt

SEQ ID NO: 151671 - DNA, 25 bp, Saccharomyces pastorianus
gcacttgacttttaattggccagaa

SEQ ID NO: 151672 - DNA, 25 bp, Saccharomyces pastorianus
gaaaacattccaggtttcgaattag

SEQ ID NO: 151673 - DNA, 25 bp, Saccharomyces pastorianus
tgatgaatgcatccagaacactatt

SEQ ID NO: 151674 - DNA, 25 bp, Saccharomyces pastorianus
ggaaggcatcaacgttcataaacta

SEQ ID NO: 151675 - DNA, 25 bp, Saccharomyces pastorianus
gaatccgaaacgcacttggtagtta

SEQ ID NO: 151676 - DNA, 25 bp, Saccharomyces pastorianus
aaccatattttagttgcgaccggtg

SEQ ID NO: 151677 - DNA, 25 bp, Saccharomyces pastorianus
aagttgttgttgttggtgctggtta

SEQ ID NO: 151678 - DNA, 25 bp, Saccharomyces pastorianus
tgttccatgggctggaatccgaaac

SEQ ID NO: 151679 - DNA, 25 bp, Saccharomyces pastorianus
gagaatcctacgtccttttacaata

SEQ ID NO: 151680 - DNA, 25 bp, Saccharomyces pastorianus
ttacaatagaccctctgtttttgat

SEQ ID NO: 151681 - DNA, 25 bp, Saccharomyces pastorianus
cgacttgagaagacgtaaagcagtt

SEQ ID NO: 151682 - DNA, 25 bp, Saccharomyces pastorianus
gaatcctacgtccttttacaataga

SEQ ID NO: 151683 - DNA, 25 bp, Saccharomyces pastorianus
aacgaagaacgtgaactgcaagaga

SEQ ID NO: 151684 - DNA, 25 bp, Saccharomyces pastorianus
gtccttttacaatagaccctctgtt

SEQ ID NO: 151685 - DNA, 25 bp, Saccharomyces pastorianus
ctgcaagagaatcctacgtcctttt

SEQ ID NO: 151686 - DNA, 25 bp, Saccharomyces pastorianus
acgtccttttacaatagaccctctg

SEQ ID NO: 151687 - DNA, 25 bp, Saccharomyces pastorianus
gaacgtgaactgcaagagaatccta

SEQ ID NO: 151688 - DNA, 25 bp, Saccharomyces pastorianus
gagaagacgtaaagcagttgaaaac

SEQ ID NO: 151689 - DNA, 25 bp, Saccharomyces pastorianus
gaactgcaagagaatcctacgtcct

SEQ ID NO: 151690 - DNA, 25 bp, Saccharomyces pastorianus
ggaattattcccctagatgtctatg

SEQ ID NO: 151691 - DNA, 25 bp, Saccharomyces pastorianus
atttacaaatctacccaggctcttg

SEQ ID NO: 151692 - DNA, 25 bp, Saccharomyces pastorianus
ctttctgccttacccaatgatcaaa

SEQ ID NO: 151693 - DNA, 25 bp, Saccharomyces pastorianus
tatcatgaaagcgttccagccgttg

SEQ ID NO: 151694 - DNA, 25 bp, Saccharomyces pastorianus
tcgaatacggatacacagggacaat

SEQ ID NO: 151695 - DNA, 25 bp, Saccharomyces pastorianus
aaatcttctttagtagctgcttcaa

SEQ ID NO: 151696 - DNA, 25 bp, Saccharomyces pastorianus
cagccgttgtgcaggttgattccat

SEQ ID NO: 151697 - DNA, 25 bp, Saccharomyces pastorianus
ggttgattccattaaggcgctcgat

SEQ ID NO: 151698 - DNA, 25 bp, Saccharomyces pastorianus
ggcgctcgatgcaataaaatctcca

SEQ ID NO: 151699 - DNA, 25 bp, Saccharomyces pastorianus
caggctcttgagtgatttggaaaaa

SEQ ID NO: 151700 - DNA, 25 bp, Saccharomyces pastorianus
gtagctgcttcaaactcagacgaaa

SEQ ID NO: 151701 - DNA, 25 bp, Saccharomyces pastorianus
agcatccatggatacacatcagctg

SEQ ID NO: 151702 - DNA, 25 bp, Saccharomyces pastorianus
tagcctctacagttgttaatcagca

SEQ ID NO: 151703 - DNA, 25 bp, Saccharomyces pastorianus
caaagaggcccttggtgaattgaaa

SEQ ID NO: 151704 - DNA, 25 bp, Saccharomyces pastorianus
gataacgttacctcacaggacaatg

SEQ ID NO: 151705 - DNA, 25 bp, Saccharomyces pastorianus
tctacaggcaatggacagagcacat

SEQ ID NO: 151706 - DNA, 25 bp, Saccharomyces pastorianus
ctatgggacccatctcaatacgagg

SEQ ID NO: 151707 - DNA, 25 bp, Saccharomyces pastorianus
gattcccaagcagccaagggcatgg

SEQ ID NO: 151708 - DNA, 25 bp, Saccharomyces pastorianus
caacgagactggtttaactggcaaa

SEQ ID NO: 151709 - DNA, 25 bp, Saccharomyces pastorianus
acatcagctgcttgatctcttcgac

SEQ ID NO: 151710 - DNA, 25 bp, Saccharomyces pastorianus
gaataatggcgattcccaagcagcc

SEQ ID NO: 151711 - DNA, 25 bp, Saccharomyces pastorianus
tgatctcttcgaccccgataacgtt

SEQ ID NO: 151712 - DNA, 25 bp, Saccharomyces pastorianus
ggactctgagaagcacattgacttt

SEQ ID NO: 151713 - DNA, 25 bp, Saccharomyces pastorianus
tgctgcaaggaaggcggaagcttct

SEQ ID NO: 151714 - DNA, 25 bp, Saccharomyces pastorianus
atgctgcaaggaaggcggaagcttc

SEQ ID NO: 151715 - DNA, 25 bp, Saccharomyces pastorianus
gaaggcggaagcttctggtgaagct

SEQ ID NO: 151716 - DNA, 25 bp, Saccharomyces pastorianus
agcacattgactttgctccaacatc

SEQ ID NO: 151717 - DNA, 25 bp, Saccharomyces pastorianus
gagaagcacattgactttgctccaa

SEQ ID NO: 151718 - DNA, 25 bp, Saccharomyces pastorianus
ggaaggcggaagcttctggtgaagc

SEQ ID NO: 151719 - DNA, 25 bp, Saccharomyces pastorianus
caaggaaggcggaagcttctggtga

SEQ ID NO: 151720 - DNA, 25 bp, Saccharomyces pastorianus
cagattggactctgagaagcacatt

SEQ ID NO: 151721 - DNA, 25 bp, Saccharomyces pastorianus
tccaacatctccattcggtggtgct

SEQ ID NO: 151722 - DNA, 25 bp, Saccharomyces pastorianus
attgactttgctccaacatctccat

SEQ ID NO: 151723 - DNA, 25 bp, Saccharomyces pastorianus
agagacaaccagctcaaccaagaga

SEQ ID NO: 151724 - DNA, 25 bp, Saccharomyces pastorianus
tttctactgaaggtaacgttcctca

SEQ ID NO: 151725 - DNA, 25 bp, Saccharomyces pastorianus
tatccaaaagggtatgccacacaag

SEQ ID NO: 151726 - DNA, 25 bp, Saccharomyces pastorianus
tctacaaggttggtgacattgtcga

SEQ ID NO: 151727 - DNA, 25 bp, Saccharomyces pastorianus
tccaaaagggtatgccacacaagtt

SEQ ID NO: 151728 - DNA, 25 bp, Saccharomyces pastorianus
gccaatggttctatccaaaagggta

SEQ ID NO: 151729 - DNA, 25 bp, Saccharomyces pastorianus
agacaaccagctcaaccaagagaat

SEQ ID NO: 151730 - DNA, 25 bp, Saccharomyces pastorianus
tgaagagacaaccagctcaaccaag

SEQ ID NO: 151731 - DNA, 25 bp, Saccharomyces pastorianus
gtccaattgaagagacaaccagctc

SEQ ID NO: 151732 - DNA, 25 bp, Saccharomyces pastorianus
tgaaggtaacgttcctcaaactttg

SEQ ID NO: 151733 - DNA, 25 bp, Saccharomyces pastorianus
ggttctatccaaaagggtatgccac

SEQ ID NO: 151734 - DNA, 25 bp, Saccharomyces pastorianus
caacatgcatagtagcagcgcaatt

SEQ ID NO: 151735 - DNA, 25 bp, Saccharomyces pastorianus
aacgtcgtgaagtggcggtcgcaac

SEQ ID NO: 151736 - DNA, 25 bp, Saccharomyces pastorianus
caaatggaccaaccgttgatcctga

SEQ ID NO: 151737 - DNA, 25 bp, Saccharomyces pastorianus
gctgccatgatgactagaacgccat

SEQ ID NO: 151738 - DNA, 25 bp, Saccharomyces pastorianus
tagaacgccatcaccaacaggaaaa

SEQ ID NO: 151739 - DNA, 25 bp, Saccharomyces pastorianus
gaagctacaagcaacaacatgcata

SEQ ID NO: 151740 - DNA, 25 bp, Saccharomyces pastorianus
aaatccgtcggagatgaagctacaa

SEQ ID NO: 151741 - DNA, 25 bp, Saccharomyces pastorianus
gtagcagcgcaattagaaatccaaa

SEQ ID NO: 151742 - DNA, 25 bp, Saccharomyces pastorianus
aaccgctgctgccatgatgactaga

SEQ ID NO: 151743 - DNA, 25 bp, Saccharomyces pastorianus
aagtcttgagggaccgcaatgctaa

SEQ ID NO: 151744 - DNA, 25 bp, Saccharomyces pastorianus
agtaaactacttcaagtcttgaggg

SEQ ID NO: 151745 - DNA, 25 bp, Saccharomyces pastorianus
agcatccatgagctacccaggacaa

SEQ ID NO: 151746 - DNA, 25 bp, Saccharomyces pastorianus
taccacatgtaaatccctatataag

SEQ ID NO: 151747 - DNA, 25 bp, Saccharomyces pastorianus
aaggcaaatcacgaatgaagacgat

SEQ ID NO: 151748 - DNA, 25 bp, Saccharomyces pastorianus
gacagcatccatgagctacccagga

SEQ ID NO: 151749 - DNA, 25 bp, Saccharomyces pastorianus
agatctccagagaaaaagctcagta

SEQ ID NO: 151750 - DNA, 25 bp, Saccharomyces pastorianus
gaggacagcatccatgagctaccca

SEQ ID NO: 151751 - DNA, 25 bp, Saccharomyces pastorianus
aaaagctcagtacgaaggcaaatca

SEQ ID NO: 151752 - DNA, 25 bp, Saccharomyces pastorianus
agaaatacaggattcaggccatctt

SEQ ID NO: 151753 - DNA, 25 bp, Saccharomyces pastorianus
catccatgagctacccaggacaata

SEQ ID NO: 151754 - DNA, 25 bp, Saccharomyces pastorianus
aaatacaggattcaggccatcttat

SEQ ID NO: 151755 - DNA, 25 bp, Saccharomyces pastorianus
gggaggacagcatccatgagctacc

SEQ ID NO: 151756 - DNA, 25 bp, Saccharomyces pastorianus
agatataccgctacagacacattac

SEQ ID NO: 151757 - DNA, 25 bp, Saccharomyces pastorianus
agttgccaaattccggagttatagc

SEQ ID NO: 151758 - DNA, 25 bp, Saccharomyces pastorianus
ttagctataacggagttgccaaatt

SEQ ID NO: 151759 - DNA, 25 bp, Saccharomyces pastorianus
agcgtagatataccgctacagacac

SEQ ID NO: 151760 - DNA, 25 bp, Saccharomyces pastorianus
taacggagttgccaaattccggagt

SEQ ID NO: 151761 - DNA, 25 bp, Saccharomyces pastorianus
ggagttgccaaattccggagttata

SEQ ID NO: 151762 - DNA, 25 bp, Saccharomyces pastorianus
ttccggagttatagcgtagatatac

SEQ ID NO: 151763 - DNA, 25 bp, Saccharomyces pastorianus
gctacagacacattacagactggaa

SEQ ID NO: 151764 - DNA, 25 bp, Saccharomyces pastorianus
ataccgctacagacacattacagac

SEQ ID NO: 151765 - DNA, 25 bp, Saccharomyces pastorianus
gccaaattccggagttatagcgtag

SEQ ID NO: 151766 - DNA, 25 bp, Saccharomyces pastorianus
aaattccggagttatagcgtagata

SEQ ID NO: 151767 - DNA, 25 bp, Saccharomyces pastorianus
ggcaggtttactaatcctcaacaac

SEQ ID NO: 151768 - DNA, 25 bp, Saccharomyces pastorianus
aactcggcaggtttactaatcctca

SEQ ID NO: 151769 - DNA, 25 bp, Saccharomyces pastorianus
taacggtctgactctgaattctcta

SEQ ID NO: 151770 - DNA, 25 bp, Saccharomyces pastorianus
caacaaccgagggaggatatacgga

SEQ ID NO: 151771 - DNA, 25 bp, Saccharomyces pastorianus
aaagttcaggataaataacggtctg

SEQ ID NO: 151772 - DNA, 25 bp, Saccharomyces pastorianus
gagggaggatatacggaagatttta

SEQ ID NO: 151773 - DNA, 25 bp, Saccharomyces pastorianus
tgactctgaattctctatcattgta

SEQ ID NO: 151774 - DNA, 25 bp, Saccharomyces pastorianus
atcattgtactttagaaatttaacg

SEQ ID NO: 151775 - DNA, 25 bp, Saccharomyces pastorianus
ggtctgactctgaattctctatcat

SEQ ID NO: 151776 - DNA, 25 bp, Saccharomyces pastorianus
atgtgatcgtggcataaaactcggc

SEQ ID NO: 151777 - DNA, 25 bp, Saccharomyces pastorianus
atcgtggcataaaactcggcaggtt

SEQ ID NO: 151778 - DNA, 25 bp, Saccharomyces pastorianus
ttctccatcatcttcttcaaaacta

SEQ ID NO: 151779 - DNA, 25 bp, Saccharomyces pastorianus
ctgcgctagcgccaattaacatgtt

SEQ ID NO: 151780 - DNA, 25 bp, Saccharomyces pastorianus
caaaactagctgaacgacctcgtct

SEQ ID NO: 151781 - DNA, 25 bp, Saccharomyces pastorianus
taacatgttcccgagcttaagtaat

SEQ ID NO: 151782 - DNA, 25 bp, Saccharomyces pastorianus
agcagtttcagcattctccagattt

SEQ ID NO: 151783 - DNA, 25 bp, Saccharomyces pastorianus
gactccactactagcatgcctgaaa

SEQ ID NO: 151784 - DNA, 25 bp, Saccharomyces pastorianus
tggtgagtctccctatagcaaacgc

SEQ ID NO: 151785 - DNA, 25 bp, Saccharomyces pastorianus
atgcctgaaagtcccaccgaggtag

SEQ ID NO: 151786 - DNA, 25 bp, Saccharomyces pastorianus
tagattacccctttcgacgttggct

SEQ ID NO: 151787 - DNA, 25 bp, Saccharomyces pastorianus
ggctaacacagctgtcacggaatct

SEQ ID NO: 151788 - DNA, 25 bp, Saccharomyces pastorianus
cggctcttgattccttacttacaaa

SEQ ID NO: 151789 - DNA, 25 bp, Saccharomyces pastorianus
ttctgcctgaaatcatacctactca

SEQ ID NO: 151790 - DNA, 25 bp, Saccharomyces pastorianus
atttacctgatttggcttcgcattc

SEQ ID NO: 151791 - DNA, 25 bp, Saccharomyces pastorianus
agactcatggaagcgctgtctcctt

SEQ ID NO: 151792 - DNA, 25 bp, Saccharomyces pastorianus
gaaagatttccaaatgtccagcgaa

SEQ ID NO: 151793 - DNA, 25 bp, Saccharomyces pastorianus
ggttcctttcataaatcttctgggt

SEQ ID NO: 151794 - DNA, 25 bp, Saccharomyces pastorianus
aaaaggctttgctgaggacattaca

SEQ ID NO: 151795 - DNA, 25 bp, Saccharomyces pastorianus
ggaagttatcttttcccatcgtcca

SEQ ID NO: 151796 - DNA, 25 bp, Saccharomyces pastorianus
aacaggcggccttttcagattaacg

SEQ ID NO: 151797 - DNA, 25 bp, Saccharomyces pastorianus
tactggagagactttctgcctgaaa

SEQ ID NO: 151798 - DNA, 25 bp, Saccharomyces pastorianus
tcgacaccaattcattggcctacac

SEQ ID NO: 151799 - DNA, 25 bp, Saccharomyces pastorianus
aattctaagaattctcctgttgagg

SEQ ID NO: 151800 - DNA, 25 bp, Saccharomyces pastorianus
gaatttgcattctattaacctggta

SEQ ID NO: 151801 - DNA, 25 bp, Saccharomyces pastorianus
aacacagcgttgcaaactacggcga

SEQ ID NO: 151802 - DNA, 25 bp, Saccharomyces pastorianus
gcaaaaaggaaccaaccttcgcctg

SEQ ID NO: 151803 - DNA, 25 bp, Saccharomyces pastorianus
cggcgaattcgctgacacttaatag

SEQ ID NO: 151804 - DNA, 25 bp, Saccharomyces pastorianus
gagaggaaacctccatttagccacc

SEQ ID NO: 151805 - DNA, 25 bp, Saccharomyces pastorianus
aataattctctggtatggccccata

SEQ ID NO: 151806 - DNA, 25 bp, Saccharomyces pastorianus
gacatcatccatgagatagcgaatt

SEQ ID NO: 151807 - DNA, 25 bp, Saccharomyces pastorianus
aacaattgccatacaaacaacacag

SEQ ID NO: 151808 - DNA, 25 bp, Saccharomyces pastorianus
gcactgcctaccacaatgacatcat

SEQ ID NO: 151809 - DNA, 25 bp, Saccharomyces pastorianus
gtatggccccataaaagcagattta

SEQ ID NO: 151810 - DNA, 25 bp, Saccharomyces pastorianus
cttcgcctggccaatctttaattaa

SEQ ID NO: 151811 - DNA, 25 bp, Saccharomyces pastorianus
gaaatttttggaccagttgtcactg

SEQ ID NO: 151812 - DNA, 25 bp, Saccharomyces pastorianus
aggtgtcgaaatggctaacagctct

SEQ ID NO: 151813 - DNA, 25 bp, Saccharomyces pastorianus
cagaatctttgagcacaggtttgaa

SEQ ID NO: 151814 - DNA, 25 bp, Saccharomyces pastorianus
cggtctaggttctggtatcgaaaca

SEQ ID NO: 151815 - DNA, 25 bp, Saccharomyces pastorianus
cggtaccgtctggatcaacacatac

SEQ ID NO: 151816 - DNA, 25 bp, Saccharomyces pastorianus
cagctctgaattcggtctaggttct

SEQ ID NO: 151817 - DNA, 25 bp, Saccharomyces pastorianus
agaaggcgccaagatcttaactggt

SEQ ID NO: 151818 - DNA, 25 bp, Saccharomyces pastorianus
cagaccaaccgttttctacgatgtt

SEQ ID NO: 151819 - DNA, 25 bp, Saccharomyces pastorianus
agttgtcactgtcgcaaagttcaag

SEQ ID NO: 151820 - DNA, 25 bp, Saccharomyces pastorianus
caagatgttgaaggccggtaccgtc

SEQ ID NO: 151821 - DNA, 25 bp, Saccharomyces pastorianus
atacaacgattttgactccagagtt

SEQ ID NO: 151822 - DNA, 25 bp, Saccharomyces pastorianus
tgccctatactttgcttctttatgt

SEQ ID NO: 151823 - DNA, 25 bp, Saccharomyces pastorianus
atgttggcttggaagatcgccccag

SEQ ID NO: 151824 - DNA, 25 bp, Saccharomyces pastorianus
accttagagccaatcggtgtctgtg

SEQ ID NO: 151825 - DNA, 25 bp, Saccharomyces pastorianus
tgtcacacctttaaatgccctatac

SEQ ID NO: 151826 - DNA, 25 bp, Saccharomyces pastorianus
agatccttccactgaaaacaccgtt

SEQ ID NO: 151827 - DNA, 25 bp, Saccharomyces pastorianus
ggtaagacctatcccgtcgaagatc

SEQ ID NO: 151828 - DNA, 25 bp, Saccharomyces pastorianus
actgtctaagagatgctgctgccta

SEQ ID NO: 151829 - DNA, 25 bp, Saccharomyces pastorianus
aacgtctgtatcttgaaacccgctg

SEQ ID NO: 151830 - DNA, 25 bp, Saccharomyces pastorianus
gtgctttccacgacactgaatgggc

SEQ ID NO: 151831 - DNA, 25 bp, Saccharomyces pastorianus
aacaccgtttgtgaggtctcttctg

SEQ ID NO: 151832 - DNA, 25 bp, Saccharomyces pastorianus
tatgctatcgaatgtgccgaccgtg

SEQ ID NO: 151833 - DNA, 25 bp, Saccharomyces pastorianus
aaaccgggacaggagttcatggcat

SEQ ID NO: 151834 - DNA, 25 bp, Saccharomyces pastorianus
gatcaagtgcgaatgccaatcctac

SEQ ID NO: 151835 - DNA, 25 bp, Saccharomyces pastorianus
gcagcaattacctagtcttcttcaa

SEQ ID NO: 151836 - DNA, 25 bp, Saccharomyces pastorianus
tcgcatatttttgccttcgagttcc

SEQ ID NO: 151837 - DNA, 25 bp, Saccharomyces pastorianus
aaggtggcaacgctaggccctacga

SEQ ID NO: 151838 - DNA, 25 bp, Saccharomyces pastorianus
cggatctacgcccagcagatatgat

SEQ ID NO: 151839 - DNA, 25 bp, Saccharomyces pastorianus
aagagggtacggacttggccatcga

SEQ ID NO: 151840 - DNA, 25 bp, Saccharomyces pastorianus
gaaatccgactctcatcgcatattt

SEQ ID NO: 151841 - DNA, 25 bp, Saccharomyces pastorianus
agtggcaccgcttccactgggaaaa

SEQ ID NO: 151842 - DNA, 25 bp, Saccharomyces pastorianus
tatgattcgcctttgagtggcaccg

SEQ ID NO: 151843 - DNA, 25 bp, Saccharomyces pastorianus
tgaacgggatgcattactctcggcc

SEQ ID NO: 151844 - DNA, 25 bp, Saccharomyces pastorianus
aggattctgagacagccactgcgaa

SEQ ID NO: 151845 - DNA, 25 bp, Saccharomyces pastorianus
acattttcctcctgttgctaatcaa

SEQ ID NO: 151846 - DNA, 25 bp, Saccharomyces pastorianus
attaaggacggcaacttggcttcgt

SEQ ID NO: 151847 - DNA, 25 bp, Saccharomyces pastorianus
ttggcttcgtctaactctgcacatt

SEQ ID NO: 151848 - DNA, 25 bp, Saccharomyces pastorianus
gaacgactgccgaggatacatccat

SEQ ID NO: 151849 - DNA, 25 bp, Saccharomyces pastorianus
tcaaaacgtgaaaagcgcgcccgca

SEQ ID NO: 151850 - DNA, 25 bp, Saccharomyces pastorianus
agtcggagctagagcatgtccctga

SEQ ID NO: 151851 - DNA, 25 bp, Saccharomyces pastorianus
agtcccggcgcctttgaatttatcg

SEQ ID NO: 151852 - DNA, 25 bp, Saccharomyces pastorianus
tgtccctgaggaggatgactctggt

SEQ ID NO: 151853 - DNA, 25 bp, Saccharomyces pastorianus
atggccgtatcagcccgtttgagaa

SEQ ID NO: 151854 - DNA, 25 bp, Saccharomyces pastorianus
ttcgccagacggaaacagcgttggt

SEQ ID NO: 151855 - DNA, 25 bp, Saccharomyces pastorianus
gggttttcgtgatgcaattcaacta

SEQ ID NO: 151856 - DNA, 25 bp, Saccharomyces pastorianus
atgactttagatcaaacgctttcga

SEQ ID NO: 151857 - DNA, 25 bp, Saccharomyces pastorianus
gatacctggcctttcgtatcaggaa

SEQ ID NO: 151858 - DNA, 25 bp, Saccharomyces pastorianus
tggttacatgcctttctacacatac

SEQ ID NO: 151859 - DNA, 25 bp, Saccharomyces pastorianus
cacagctttttaccgcaaattaagg

SEQ ID NO: 151860 - DNA, 25 bp, Saccharomyces pastorianus
ttataccacctaatgagccggaatt

SEQ ID NO: 151861 - DNA, 25 bp, Saccharomyces pastorianus
tactacagtttgctcagtcgcggaa

SEQ ID NO: 151862 - DNA, 25 bp, Saccharomyces pastorianus
taaggacctttatagccaagttcaa

SEQ ID NO: 151863 - DNA, 25 bp, Saccharomyces pastorianus
agtcgcggaaatcaccaattggtta

SEQ ID NO: 151864 - DNA, 25 bp, Saccharomyces pastorianus
tgttaatatgatacctggcctttcg

SEQ ID NO: 151865 - DNA, 25 bp, Saccharomyces pastorianus
gacttggctcacgtattactgcagc

SEQ ID NO: 151866 - DNA, 25 bp, Saccharomyces pastorianus
ttatagaagcagagccattggcgaa

SEQ ID NO: 151867 - DNA, 25 bp, Saccharomyces pastorianus
acgagaagctgatattggtcacgaa

SEQ ID NO: 151868 - DNA, 25 bp, Saccharomyces pastorianus
tgaaaaaccctagcttcgactggga

SEQ ID NO: 151869 - DNA, 25 bp, Saccharomyces pastorianus
gaggagttcaaatgtgccttgtcat

SEQ ID NO: 151870 - DNA, 25 bp, Saccharomyces pastorianus
attattttgggcagctgttaggcaa

SEQ ID NO: 151871 - DNA, 25 bp, Saccharomyces pastorianus
gtgccttgtcattaactgttatcgc

SEQ ID NO: 151872 - DNA, 25 bp, Saccharomyces pastorianus
aaggttggtcgccactgacgataga

SEQ ID NO: 151873 - DNA, 25 bp, Saccharomyces pastorianus
gacgatagaaagtgtcccattacag

SEQ ID NO: 151874 - DNA, 25 bp, Saccharomyces pastorianus
attaaaatggccaactcagtacgag

SEQ ID NO: 151875 - DNA, 25 bp, Saccharomyces pastorianus
ggtcacgaaaagctccatcaaaatt

SEQ ID NO: 151876 - DNA, 25 bp, Saccharomyces pastorianus
actgttatcgcggttgaaattcaag

SEQ ID NO: 151877 - DNA, 25 bp, Saccharomyces pastorianus
gttctgacgagctttgcgacatatt

SEQ ID NO: 151878 - DNA, 25 bp, Saccharomyces pastorianus
ccgatgcgtggaaaatggccgtttt

SEQ ID NO: 151879 - DNA, 25 bp, Saccharomyces pastorianus
atatagacattaatccgatgcgtgg

SEQ ID NO: 151880 - DNA, 25 bp, Saccharomyces pastorianus
atggccgtttttggactcaaatacg

SEQ ID NO: 151881 - DNA, 25 bp, Saccharomyces pastorianus
acatagtcacgttaccattttcacc

SEQ ID NO: 151882 - DNA, 25 bp, Saccharomyces pastorianus
atcacctcccattcagttctgacga

SEQ ID NO: 151883 - DNA, 25 bp, Saccharomyces pastorianus
atcgtcacctcctttgaaaactttg

SEQ ID NO: 151884 - DNA, 25 bp, Saccharomyces pastorianus
aaggcacaactgtcccagatgttgg

SEQ ID NO: 151885 - DNA, 25 bp, Saccharomyces pastorianus
gacatattgcaatcatctgctgttg

SEQ ID NO: 151886 - DNA, 25 bp, Saccharomyces pastorianus
gttggaaggccaactcagccgaaga

SEQ ID NO: 151887 - DNA, 25 bp, Saccharomyces pastorianus
aatacggaaatcgtcacctcctttg

SEQ ID NO: 151888 - DNA, 25 bp, Saccharomyces pastorianus
cttaggcttaccagctttgggtgtt

SEQ ID NO: 151889 - DNA, 25 bp, Saccharomyces pastorianus
actgtcgttctcaagatactatgga

SEQ ID NO: 151890 - DNA, 25 bp, Saccharomyces pastorianus
aattcagaaattttggcacatgcca

SEQ ID NO: 151891 - DNA, 25 bp, Saccharomyces pastorianus
tgggtcgtcatggagagtgatcaaa

SEQ ID NO: 151892 - DNA, 25 bp, Saccharomyces pastorianus
ggttgccagaaaaatatcacgacgt

SEQ ID NO: 151893 - DNA, 25 bp, Saccharomyces pastorianus
gcttaaagttgtcaaaactcccatc

SEQ ID NO: 151894 - DNA, 25 bp, Saccharomyces pastorianus
gaaatacaatttctcccgaagcaat

SEQ ID NO: 151895 - DNA, 25 bp, Saccharomyces pastorianus
gtagcgcatgaatactgtcgttctc

SEQ ID NO: 151896 - DNA, 25 bp, Saccharomyces pastorianus
aggcgatgaaaacttaggcttacca

SEQ ID NO: 151897 - DNA, 25 bp, Saccharomyces pastorianus
gtgattactcatggttttaccctag

SEQ ID NO: 151898 - DNA, 25 bp, Saccharomyces pastorianus
gtaccaagtttgtctagaaggatct

SEQ ID NO: 151899 - DNA, 25 bp, Saccharomyces pastorianus
ctcgtccactgtctacttgagggaa

SEQ ID NO: 151900 - DNA, 25 bp, Saccharomyces pastorianus
gagtatctcgaaacatctcgtccac

SEQ ID NO: 151901 - DNA, 25 bp, Saccharomyces pastorianus
ggaagagactttccccgagtatctc

SEQ ID NO: 151902 - DNA, 25 bp, Saccharomyces pastorianus
aaccgtgcaaatcaggaacacattt

SEQ ID NO: 151903 - DNA, 25 bp, Saccharomyces pastorianus
ggtataaactctttccacgatggaa

SEQ ID NO: 151904 - DNA, 25 bp, Saccharomyces pastorianus
agtgctcattaacaacatgcaggag

SEQ ID NO: 151905 - DNA, 25 bp, Saccharomyces pastorianus
gattgcatatttacccagttttgaa

SEQ ID NO: 151906 - DNA, 25 bp, Saccharomyces pastorianus
tatggtgatacaattctcgaaagca

SEQ ID NO: 151907 - DNA, 25 bp, Saccharomyces pastorianus
agaaataattcctacagtgctcatt

SEQ ID NO: 151908 - DNA, 25 bp, Saccharomyces pastorianus
gttctgcttgagtaacatttttcca

SEQ ID NO: 151909 - DNA, 25 bp, Saccharomyces pastorianus
ggaatcgaatcgactcttctcaaag

SEQ ID NO: 151910 - DNA, 25 bp, Saccharomyces pastorianus
gtaagcctttgtttcctggcaccaa

SEQ ID NO: 151911 - DNA, 25 bp, Saccharomyces pastorianus
gctcctgatgtgctaatgggttcta

SEQ ID NO: 151912 - DNA, 25 bp, Saccharomyces pastorianus
gactcttgcaacttaatccggatat

SEQ ID NO: 151913 - DNA, 25 bp, Saccharomyces pastorianus
ggtattccggtcaacacattttcaa

SEQ ID NO: 151914 - DNA, 25 bp, Saccharomyces pastorianus
aaacaagattctccaccgtgattta

SEQ ID NO: 151915 - DNA, 25 bp, Saccharomyces pastorianus
caagggctggccttttgccatgaaa

SEQ ID NO: 151916 - DNA, 25 bp, Saccharomyces pastorianus
taacgttgtggtaccgtgctcctga

SEQ ID NO: 151917 - DNA, 25 bp, Saccharomyces pastorianus
aattgatcttcgacaccatgggcac

SEQ ID NO: 151918 - DNA, 25 bp, Saccharomyces pastorianus
taatgagtccttatggcccagtgta

SEQ ID NO: 151919 - DNA, 25 bp, Saccharomyces pastorianus
atgggttctaggacgtactccacat

SEQ ID NO: 151920 - DNA, 25 bp, Saccharomyces pastorianus
atggatttcttacacggactcttgc

SEQ ID NO: 151921 - DNA, 25 bp, Saccharomyces pastorianus
actaatgacacaattcccaccagga

SEQ ID NO: 151922 - DNA, 25 bp, Saccharomyces pastorianus
gatatcccatttttcgacaagctga

SEQ ID NO: 151923 - DNA, 25 bp, Saccharomyces pastorianus
tgtcctgctgcagactatttcagat

SEQ ID NO: 151924 - DNA, 25 bp, Saccharomyces pastorianus
ggtcacaaaggcgttcaccaaattt

SEQ ID NO: 151925 - DNA, 25 bp, Saccharomyces pastorianus
gtctactgtcataccgattaccttt

SEQ ID NO: 151926 - DNA, 25 bp, Saccharomyces pastorianus
gcaacaggtacccaaactacttcat

SEQ ID NO: 151927 - DNA, 25 bp, Saccharomyces pastorianus
actgcggttacatggcccacagatg

SEQ ID NO: 151928 - DNA, 25 bp, Saccharomyces pastorianus
gacaacctgttcacgttatctgatt

SEQ ID NO: 151929 - DNA, 25 bp, Saccharomyces pastorianus
attactctatacttctggctcagca

SEQ ID NO: 151930 - DNA, 25 bp, Saccharomyces pastorianus
aatgcgcccgtgaaggacatgccta

SEQ ID NO: 151931 - DNA, 25 bp, Saccharomyces pastorianus
gcacataagccctttggttctacaa

SEQ ID NO: 151932 - DNA, 25 bp, Saccharomyces pastorianus
tccatcttacagcaagaaggaggta

SEQ ID NO: 151933 - DNA, 25 bp, Saccharomyces pastorianus
ttctggtgctagagtggttgttaca

SEQ ID NO: 151934 - DNA, 25 bp, Saccharomyces pastorianus
acactgctatccatcttacagcaag

SEQ ID NO: 151935 - DNA, 25 bp, Saccharomyces pastorianus
gttgttacactgctatccatcttac

SEQ ID NO: 151936 - DNA, 25 bp, Saccharomyces pastorianus
actgctatccatcttacagcaagaa

SEQ ID NO: 151937 - DNA, 25 bp, Saccharomyces pastorianus
gctatccatcttacagcaagaagga

SEQ ID NO: 151938 - DNA, 25 bp, Saccharomyces pastorianus
ggttgttacactgctatccatctta

SEQ ID NO: 151939 - DNA, 25 bp, Saccharomyces pastorianus
gttacactgctatccatcttacagc

SEQ ID NO: 151940 - DNA, 25 bp, Saccharomyces pastorianus
gtgctagagtggttgttacactgct

SEQ ID NO: 151941 - DNA, 25 bp, Saccharomyces pastorianus
agagtggttgttacactgctatcca

SEQ ID NO: 151942 - DNA, 25 bp, Saccharomyces pastorianus
gtggttgttacactgctatccatct

SEQ ID NO: 151943 - DNA, 25 bp, Saccharomyces pastorianus
tccatcttacagcaagaaggaggta

SEQ ID NO: 151944 - DNA, 25 bp, Saccharomyces pastorianus
ttctggtgctagagtggttgttaca

SEQ ID NO: 151945 - DNA, 25 bp, Saccharomyces pastorianus
aggtaagatcggtgttgccgccatt

SEQ ID NO: 151946 - DNA, 25 bp, Saccharomyces pastorianus
gttgttacactgctatccatcttac

SEQ ID NO: 151947 - DNA, 25 bp, Saccharomyces pastorianus
acactgctatccatcttacagcaag

SEQ ID NO: 151948 - DNA, 25 bp, Saccharomyces pastorianus
gctatccatcttacagcaagaagga

SEQ ID NO: 151949 - DNA, 25 bp, Saccharomyces pastorianus
ggttgttacactgctatccatctta

SEQ ID NO: 151950 - DNA, 25 bp, Saccharomyces pastorianus
gttacactgctatccatcttacagc

SEQ ID NO: 151951 - DNA, 25 bp, Saccharomyces pastorianus
cggtgttgccgccatttgtaatggt

SEQ ID NO: 151952 - DNA, 25 bp, Saccharomyces pastorianus
agagtggttgttacactgctatcca

SEQ ID NO: 151953 - DNA, 25 bp, Saccharomyces pastorianus
gtggttgttacactgctatccatct

SEQ ID NO: 151954 - DNA, 25 bp, Saccharomyces pastorianus
gttaacaaggtctgtgcatccgcta

SEQ ID NO: 151955 - DNA, 25 bp, Saccharomyces pastorianus
tggtctagccatgggtgtacacgca

SEQ ID NO: 151956 - DNA, 25 bp, Saccharomyces pastorianus
ggtaagcctgatactcaagtcacga

SEQ ID NO: 151957 - DNA, 25 bp, Saccharomyces pastorianus
agctccggccagacaagttgctttg

SEQ ID NO: 151958 - DNA, 25 bp, Saccharomyces pastorianus
aatttggccaaactgttcttgttga

SEQ ID NO: 151959 - DNA, 25 bp, Saccharomyces pastorianus
aacggtactgttactgccgctaacg

SEQ ID NO: 151960 - DNA, 25 bp, Saccharomyces pastorianus
aacgatgcgtacgatggtctagcca

SEQ ID NO: 151961 - DNA, 25 bp, Saccharomyces pastorianus
gtaatcatatcgttgcaagcacagt

SEQ ID NO: 151962 - DNA, 25 bp, Saccharomyces pastorianus
gacaattttgccatcgaatcctacc

SEQ ID NO: 151963 - DNA, 25 bp, Saccharomyces pastorianus
taatgctgatgttgtcgtggctggt

SEQ ID NO: 151964 - DNA, 25 bp, Saccharomyces pastorianus
ttggctgccggtttgagtaatcata

SEQ ID NO: 151965 - DNA, 25 bp, Saccharomyces pastorianus
aacttcctcaatggacagtacacct

SEQ ID NO: 151966 - DNA, 25 bp, Saccharomyces pastorianus
atgaaaacctatttttgagcgattt

SEQ ID NO: 151967 - DNA, 25 bp, Saccharomyces pastorianus
cttaccaatctgatatcgatgacgt

SEQ ID NO: 151968 - DNA, 25 bp, Saccharomyces pastorianus
gatgctgaaccggagagtgatattc

SEQ ID NO: 151969 - DNA, 25 bp, Saccharomyces pastorianus
gatgacgttagtgcttccaaagatt

SEQ ID NO: 151970 - DNA, 25 bp, Saccharomyces pastorianus
tatcacatttttctgcagaccaaga

SEQ ID NO: 151971 - DNA, 25 bp, Saccharomyces pastorianus
gtatgaatacactaacaaccacaat

SEQ ID NO: 151972 - DNA, 25 bp, Saccharomyces pastorianus
gagcgatttatcacatttttctgca

SEQ ID NO: 151973 - DNA, 25 bp, Saccharomyces pastorianus
ggagagtgatattccatcaacgtat

SEQ ID NO: 151974 - DNA, 25 bp, Saccharomyces pastorianus
gatatcgatgacgttagtgcttcca

SEQ ID NO: 151975 - DNA, 25 bp, Saccharomyces pastorianus
tagtacctttttaacttcctcaatg

SEQ ID NO: 151976 - DNA, 25 bp, Saccharomyces pastorianus
atcactgtcatcgtctcggtatata

SEQ ID NO: 151977 - DNA, 25 bp, Saccharomyces pastorianus
ttcgggctttccactaaatctaaat

SEQ ID NO: 151978 - DNA, 25 bp, Saccharomyces pastorianus
ctctcttacttctttcaccagggaa

SEQ ID NO: 151979 - DNA, 25 bp, Saccharomyces pastorianus
ttgctccgcattagatcactgtcat

SEQ ID NO: 151980 - DNA, 25 bp, Saccharomyces pastorianus
cagggaagggcccttgtctcaagtt

SEQ ID NO: 151981 - DNA, 25 bp, Saccharomyces pastorianus
atatatggtctctaggcatcatcct

SEQ ID NO: 151982 - DNA, 25 bp, Saccharomyces pastorianus
aaagtttttctgcagctttgctccg

SEQ ID NO: 151983 - DNA, 25 bp, Saccharomyces pastorianus
ttgatgtccgaagtttcctctctta

SEQ ID NO: 151984 - DNA, 25 bp, Saccharomyces pastorianus
ggatcgcaatgacaacgcttatctt

SEQ ID NO: 151985 - DNA, 25 bp, Saccharomyces pastorianus
ttgtttgaataccaccaccaacggc

SEQ ID NO: 151986 - DNA, 25 bp, Saccharomyces pastorianus
tcaagttccaatccctatcgagcga

SEQ ID NO: 151987 - DNA, 25 bp, Saccharomyces pastorianus
gtcggaacaaaagggcagtatacag

SEQ ID NO: 151988 - DNA, 25 bp, Saccharomyces pastorianus
atacagggccggcagtaccttctgt

SEQ ID NO: 151989 - DNA, 25 bp, Saccharomyces pastorianus
tctgttcctaccacaaaccttaacg

SEQ ID NO: 151990 - DNA, 25 bp, Saccharomyces pastorianus
gggccggcagtaccttctgttccta

SEQ ID NO: 151991 - DNA, 25 bp, Saccharomyces pastorianus
tgttcctaccacaaaccttaacgat

SEQ ID NO: 151992 - DNA, 25 bp, Saccharomyces pastorianus
tacagggccggcagtaccttctgtt

SEQ ID NO: 151993 - DNA, 25 bp, Saccharomyces pastorianus
aaaagggcagtatacagggccggca

SEQ ID NO: 151994 - DNA, 25 bp, Saccharomyces pastorianus
cagtaccttctgttcctaccacaaa

SEQ ID NO: 151995 - DNA, 25 bp, Saccharomyces pastorianus
acagggccggcagtaccttctgttc

SEQ ID NO: 151996 - DNA, 25 bp, Saccharomyces pastorianus
agggccggcagtaccttctgttcct

SEQ ID NO: 151997 - DNA, 25 bp, Saccharomyces pastorianus
ggcagtaccttctgttcctaccaca

SEQ ID NO: 151998 - DNA, 25 bp, Saccharomyces pastorianus
tgaatctcctggtaagaccactgat

SEQ ID NO: 151999 - DNA, 25 bp, Saccharomyces pastorianus
taatagcactgcaaagggcctgaag

SEQ ID NO: 152000 - DNA, 25 bp, Saccharomyces pastorianus
tgaaggacagtcgttttctttagaa

SEQ ID NO: 152001 - DNA, 25 bp, Saccharomyces pastorianus
tgcggtttcccactttaaagattat

SEQ ID NO: 152002 - DNA, 25 bp, Saccharomyces pastorianus
gccaaattagtattgcggtttccca

SEQ ID NO: 152003 - DNA, 25 bp, Saccharomyces pastorianus
gactgttgaatgttcctggagtgtc

SEQ ID NO: 152004 - DNA, 25 bp, Saccharomyces pastorianus
aagattatatggtcttcctcacccc

SEQ ID NO: 152005 - DNA, 25 bp, Saccharomyces pastorianus
gacgtgagcaacctgaccctagtaa

SEQ ID NO: 152006 - DNA, 25 bp, Saccharomyces pastorianus
gcatatccgacactattgattgagt

SEQ ID NO: 152007 - DNA, 25 bp, Saccharomyces pastorianus
agaccactgatgataacgctttaca

SEQ ID NO: 152008 - DNA, 25 bp, Saccharomyces pastorianus
aactgttcatcctatatcaagcaag

SEQ ID NO: 152009 - DNA, 25 bp, Saccharomyces pastorianus
aaggccatagtgaaggatttgcaac

SEQ ID NO: 152010 - DNA, 25 bp, Saccharomyces pastorianus
gtcaggacgaaattttaatctctac

SEQ ID NO: 152011 - DNA, 25 bp, Saccharomyces pastorianus
gcagcacatcacaactcatttcaat

SEQ ID NO: 152012 - DNA, 25 bp, Saccharomyces pastorianus
atgacaattgctcattgcaggagat

SEQ ID NO: 152013 - DNA, 25 bp, Saccharomyces pastorianus
gaaaatgccgcaaacgattcaaaga

SEQ ID NO: 152014 - DNA, 25 bp, Saccharomyces pastorianus
gtatacttcatgtactacggtgaaa

SEQ ID NO: 152015 - DNA, 25 bp, Saccharomyces pastorianus
aagaggtgcttcacaagttgcggcc

SEQ ID NO: 152016 - DNA, 25 bp, Saccharomyces pastorianus
caagttgcggccgttgaaaagctaa

SEQ ID NO: 152017 - DNA, 25 bp, Saccharomyces pastorianus
atgaatatgttgatcgtcaggacga

SEQ ID NO: 152018 - DNA, 25 bp, Saccharomyces pastorianus
attagagtatgtgggcgaccttccg

SEQ ID NO: 152019 - DNA, 25 bp, Saccharomyces pastorianus
ggagatgatgccctcttacattata

SEQ ID NO: 152020 - DNA, 25 bp, Saccharomyces pastorianus
caaatggctacgactgtggaatata

SEQ ID NO: 152021 - DNA, 25 bp, Saccharomyces pastorianus
gtatgaatactctctatggaagtgc

SEQ ID NO: 152022 - DNA, 25 bp, Saccharomyces pastorianus
atgcaccattggattttgattataa

SEQ ID NO: 152023 - DNA, 25 bp, Saccharomyces pastorianus
ttcatttagattgtccgcagcaacc

SEQ ID NO: 152024 - DNA, 25 bp, Saccharomyces pastorianus
agtgcagatgcaccattggattttg

SEQ ID NO: 152025 - DNA, 25 bp, Saccharomyces pastorianus
actctctatggaagtgcagatgcac

SEQ ID NO: 152026 - DNA, 25 bp, Saccharomyces pastorianus
catacaataggagaagactttgatt

SEQ ID NO: 152027 - DNA, 25 bp, Saccharomyces pastorianus
gatgcgattaggatgagaagattta

SEQ ID NO: 152028 - DNA, 25 bp, Saccharomyces pastorianus
ttagattgtccgcagcaaccaaatg

SEQ ID NO: 152029 - DNA, 25 bp, Saccharomyces pastorianus
gcaaccaaatggctacgactgtgga

SEQ ID NO: 152030 - DNA, 25 bp, Saccharomyces pastorianus
ggctacgactgtggaatatatgttt

SEQ ID NO: 152031 - DNA, 25 bp, Saccharomyces pastorianus
tcactagccgtttatccctttgcgt

SEQ ID NO: 152032 - DNA, 25 bp, Saccharomyces pastorianus
aatccaagctggcagagcatcctat

SEQ ID NO: 152033 - DNA, 25 bp, Saccharomyces pastorianus
aacgattcagagtggcttcgtgaaa

SEQ ID NO: 152034 - DNA, 25 bp, Saccharomyces pastorianus
ttggcgaagatctaccggattcctt

SEQ ID NO: 152035 - DNA, 25 bp, Saccharomyces pastorianus
gagtttgccgagcaactcgttgaag

SEQ ID NO: 152036 - DNA, 25 bp, Saccharomyces pastorianus
gaaaagatacttacggcccaaggtg

SEQ ID NO: 152037 - DNA, 25 bp, Saccharomyces pastorianus
agcagcctcttgtcatcgtcgttgg

SEQ ID NO: 152038 - DNA, 25 bp, Saccharomyces pastorianus
gaagctacagcgtctcaatgaccat

SEQ ID NO: 152039 - DNA, 25 bp, Saccharomyces pastorianus
gtctggaaaacatcctcagcagcct

SEQ ID NO: 152040 - DNA, 25 bp, Saccharomyces pastorianus
ccccacaggttttcaaatccaagct

SEQ ID NO: 152041 - DNA, 25 bp, Saccharomyces pastorianus
aagctaacaagaggcctacagattt

SEQ ID NO: 152042 - DNA, 25 bp, Saccharomyces pastorianus
ggtaacaagattggcaaacataata

SEQ ID NO: 152043 - DNA, 25 bp, Saccharomyces pastorianus
tcaaggtaacaagattggcaaacat

SEQ ID NO: 152044 - DNA, 25 bp, Saccharomyces pastorianus
caagattggcaaacataataagaaa

SEQ ID NO: 152045 - DNA, 25 bp, Saccharomyces pastorianus
caaggtaacaagattggcaaacata

SEQ ID NO: 152046 - DNA, 25 bp, Saccharomyces pastorianus
gaggaagagtaaatcaaggtaacaa

SEQ ID NO: 152047 - DNA, 25 bp, Saccharomyces pastorianus
gagaggaagagtaaatcaaggtaac

SEQ ID NO: 152048 - DNA, 25 bp, Saccharomyces pastorianus
aggtaacaagattggcaaacataat

SEQ ID NO: 152049 - DNA, 25 bp, Saccharomyces pastorianus
aatcaaggtaacaagattggcaaac

SEQ ID NO: 152050 - DNA, 25 bp, Saccharomyces pastorianus
aaggtaacaagattggcaaacataa

SEQ ID NO: 152051 - DNA, 25 bp, Saccharomyces pastorianus
atcaaggtaacaagattggcaaaca

SEQ ID NO: 152052 - DNA, 25 bp, Saccharomyces pastorianus
ggaagagtaaatcaaggtaacaaga

SEQ ID NO: 152053 - DNA, 25 bp, Saccharomyces pastorianus
gaacacactggtcatttcaaagcca

SEQ ID NO: 152054 - DNA, 25 bp, Saccharomyces pastorianus
gcgccattgggtttaccaaggtttg

SEQ ID NO: 152055 - DNA, 25 bp, Saccharomyces pastorianus
gatgtagctgccacaaagggttcaa

SEQ ID NO: 152056 - DNA, 25 bp, Saccharomyces pastorianus
agatggtctcacgaacacactggtc

SEQ ID NO: 152057 - DNA, 25 bp, Saccharomyces pastorianus
aactcgattccggtatactaatgga

SEQ ID NO: 152058 - DNA, 25 bp, Saccharomyces pastorianus
ttgtacttaacttctaactctaggg

SEQ ID NO: 152059 - DNA, 25 bp, Saccharomyces pastorianus
gaagctgtttatgggtctgatgaag

SEQ ID NO: 152060 - DNA, 25 bp, Saccharomyces pastorianus
gccaaaggtgccagagttacttcta

SEQ ID NO: 152061 - DNA, 25 bp, Saccharomyces pastorianus
atgtctgcattcgatgaagctgttt

SEQ ID NO: 152062 - DNA, 25 bp, Saccharomyces pastorianus
tacattgaagccaacttccctgaag

SEQ ID NO: 152063 - DNA, 25 bp, Saccharomyces pastorianus
gttcaattacgggttatgcttgttt

SEQ ID NO: 152064 - DNA, 25 bp, Saccharomyces pastorianus
agaatctcaaaatgtaccggcttta

SEQ ID NO: 152065 - DNA, 25 bp, Saccharomyces pastorianus
gaaggccctaaccaaaagtctcaag

SEQ ID NO: 152066 - DNA, 25 bp, Saccharomyces pastorianus
taaatcttccattctaagccgccat

SEQ ID NO: 152067 - DNA, 25 bp, Saccharomyces pastorianus
aatataaccctttcctttgaggatg

SEQ ID NO: 152068 - DNA, 25 bp, Saccharomyces pastorianus
gaggatgccttaacagagacccaag

SEQ ID NO: 152069 - DNA, 25 bp, Saccharomyces pastorianus
gataggatgccttcggcgatgaccc

SEQ ID NO: 152070 - DNA, 25 bp, Saccharomyces pastorianus
gaggagcttgaatcacttggcgaag

SEQ ID NO: 152071 - DNA, 25 bp, Saccharomyces pastorianus
agtctcctcatggtgatgaccgtga

SEQ ID NO: 152072 - DNA, 25 bp, Saccharomyces pastorianus
tatggacagcacatttcaacgtcga

SEQ ID NO: 152073 - DNA, 25 bp, Saccharomyces pastorianus
atgaccccaagagatgaggatgcct

SEQ ID NO: 152074 - DNA, 25 bp, Saccharomyces pastorianus
ggctttaccacatattgcaggctat

SEQ ID NO: 152075 - DNA, 25 bp, Saccharomyces pastorianus
gggtctcttttgctggctattgttg

SEQ ID NO: 152076 - DNA, 25 bp, Saccharomyces pastorianus
atctggatattctgattcggtagca

SEQ ID NO: 152077 - DNA, 25 bp, Saccharomyces pastorianus
gacggcgatgatattctatctggat

SEQ ID NO: 152078 - DNA, 25 bp, Saccharomyces pastorianus
ggtgcgagattctatcaattccgaa

SEQ ID NO: 152079 - DNA, 25 bp, Saccharomyces pastorianus
acacatcaggtcatttcttcaacac

SEQ ID NO: 152080 - DNA, 25 bp, Saccharomyces pastorianus
atttggcgcatgtaattcagtgctg

SEQ ID NO: 152081 - DNA, 25 bp, Saccharomyces pastorianus
aaaggaagcatttggccgctaaaat

SEQ ID NO: 152082 - DNA, 25 bp, Saccharomyces pastorianus
aaaattgtcacgttgggtgcgagat

SEQ ID NO: 152083 - DNA, 25 bp, Saccharomyces pastorianus
gtgcgatataataggcccaatttcc

SEQ ID NO: 152084 - DNA, 25 bp, Saccharomyces pastorianus
acatttacttgctcgatgtgcgata

SEQ ID NO: 152085 - DNA, 25 bp, Saccharomyces pastorianus
tgttggacgtgctatacggcatgca

SEQ ID NO: 152086 - DNA, 25 bp, Saccharomyces pastorianus
gaatttgtccctattacgcctcgag

SEQ ID NO: 152087 - DNA, 25 bp, Saccharomyces pastorianus
aaacgaatggcgtcattgtcctgat

SEQ ID NO: 152088 - DNA, 25 bp, Saccharomyces pastorianus
aattgacacgtataacccagcacta

SEQ ID NO: 152089 - DNA, 25 bp, Saccharomyces pastorianus
ggaggcacttcctattgcggaggta

SEQ ID NO: 152090 - DNA, 25 bp, Saccharomyces pastorianus
cattgtcctgatacgttagctctca

SEQ ID NO: 152091 - DNA, 25 bp, Saccharomyces pastorianus
atatattcctctcagatctcgttgg

SEQ ID NO: 152092 - DNA, 25 bp, Saccharomyces pastorianus
ttaagtccaggctcaatcccggtaa

SEQ ID NO: 152093 - DNA, 25 bp, Saccharomyces pastorianus
tattgaagatttagttcccctggga

SEQ ID NO: 152094 - DNA, 25 bp, Saccharomyces pastorianus
agtccacccgttcaagtcttcaaat

SEQ ID NO: 152095 - DNA, 25 bp, Saccharomyces pastorianus
gcggaggtagtgactttgccatatc

SEQ ID NO: 152096 - DNA, 25 bp, Saccharomyces pastorianus
aatacttactttctgagtccacccg

SEQ ID NO: 152097 - DNA, 25 bp, Saccharomyces pastorianus
ataccataggtgagtccgtcatcaa

SEQ ID NO: 152098 - DNA, 25 bp, Saccharomyces pastorianus
attgcatgctctcctatttttacct

SEQ ID NO: 152099 - DNA, 25 bp, Saccharomyces pastorianus
cattcttactggctttggtcgttac

SEQ ID NO: 152100 - DNA, 25 bp, Saccharomyces pastorianus
taggatatcaagttctttccccgaa

SEQ ID NO: 152101 - DNA, 25 bp, Saccharomyces pastorianus
gaatatgcgcagctcattcttactg

SEQ ID NO: 152102 - DNA, 25 bp, Saccharomyces pastorianus
atatgtttgcatactcgccgtttta

SEQ ID NO: 152103 - DNA, 25 bp, Saccharomyces pastorianus
tggtgctttgatggccctactaggt

SEQ ID NO: 152104 - DNA, 25 bp, Saccharomyces pastorianus
gggagtgccattatcctaatttttt

SEQ ID NO: 152105 - DNA, 25 bp, Saccharomyces pastorianus
agtttgtgtacttgcattcgcccaa

SEQ ID NO: 152106 - DNA, 25 bp, Saccharomyces pastorianus
tactaggtatctcactcaacgctgt

SEQ ID NO: 152107 - DNA, 25 bp, Saccharomyces pastorianus
agatcatttacagtggtccccagtg

SEQ ID NO: 152108 - DNA, 25 bp, Saccharomyces pastorianus
attgttccagaatcaggttccttag

SEQ ID NO: 152109 - DNA, 25 bp, Saccharomyces pastorianus
ttccctttctgttctgatcttttac

SEQ ID NO: 152110 - DNA, 25 bp, Saccharomyces pastorianus
acacaatctgtgcactttttgcatt

SEQ ID NO: 152111 - DNA, 25 bp, Saccharomyces pastorianus
aaatgtgtgtgttctgattgtcaag

SEQ ID NO: 152112 - DNA, 25 bp, Saccharomyces pastorianus
gtttatgcttgcgatgatgctcaat

SEQ ID NO: 152113 - DNA, 25 bp, Saccharomyces pastorianus
taaattttctgctaccaacggttat

SEQ ID NO: 152114 - DNA, 25 bp, Saccharomyces pastorianus
gcatttatgtggtattatctctgta

SEQ ID NO: 152115 - DNA, 25 bp, Saccharomyces pastorianus
ctaaacctatgcttggtggatcccc

SEQ ID NO: 152116 - DNA, 25 bp, Saccharomyces pastorianus
catgaattcgtcttgggcatctgaa

SEQ ID NO: 152117 - DNA, 25 bp, Saccharomyces pastorianus
gcgtgtgtaaagttggccctctgcc

SEQ ID NO: 152118 - DNA, 25 bp, Saccharomyces pastorianus
caacggttatgcgatggacctaatc

SEQ ID NO: 152119 - DNA, 25 bp, Saccharomyces pastorianus
gtcattgctatgtcaaaccggatgc

SEQ ID NO: 152120 - DNA, 25 bp, Saccharomyces pastorianus
acagctaacagcgtatgtgtccatt

SEQ ID NO: 152121 - DNA, 25 bp, Saccharomyces pastorianus
aaccggatgcttcttgatagctgca

SEQ ID NO: 152122 - DNA, 25 bp, Saccharomyces pastorianus
gttttggcttctattgtttgtgcag

SEQ ID NO: 152123 - DNA, 25 bp, Saccharomyces pastorianus
tgctatatattccacagtttctgtt

SEQ ID NO: 152124 - DNA, 25 bp, Saccharomyces pastorianus
attggctgttccacaggattcctac

SEQ ID NO: 152125 - DNA, 25 bp, Saccharomyces pastorianus
gtgcagccggatttttaactctttt

SEQ ID NO: 152126 - DNA, 25 bp, Saccharomyces pastorianus
tgtgtccattttgtctctctacgaa

SEQ ID NO: 152127 - DNA, 25 bp, Saccharomyces pastorianus
gggagaatgtctccttccattttaa

SEQ ID NO: 152128 - DNA, 25 bp, Saccharomyces pastorianus
ggattcctacctggttgactatttt

SEQ ID NO: 152129 - DNA, 25 bp, Saccharomyces pastorianus
aatcattatcttctcggcttggttt

SEQ ID NO: 152130 - DNA, 25 bp, Saccharomyces pastorianus
gggcagtcctacagtatatcaaaga

SEQ ID NO: 152131 - DNA, 25 bp, Saccharomyces pastorianus
ggttgtatccccactactttacgct

SEQ ID NO: 152132 - DNA, 25 bp, Saccharomyces pastorianus
agatcatcagaagcccacaaaccta

SEQ ID NO: 152133 - DNA, 25 bp, Saccharomyces pastorianus
gattgcggacaacttattggagaca

SEQ ID NO: 152134 - DNA, 25 bp, Saccharomyces pastorianus
aatagccacaaaggctgctttggaa

SEQ ID NO: 152135 - DNA, 25 bp, Saccharomyces pastorianus
aatcgggttaaagcaatagccacaa

SEQ ID NO: 152136 - DNA, 25 bp, Saccharomyces pastorianus
gcaacctgattgcttccgagggtga

SEQ ID NO: 152137 - DNA, 25 bp, Saccharomyces pastorianus
gcaccaatacagcacaagatcatca

SEQ ID NO: 152138 - DNA, 25 bp, Saccharomyces pastorianus
actactttacgctgcaccaatacag

SEQ ID NO: 152139 - DNA, 25 bp, Saccharomyces pastorianus
tccgagggtgagttctcttggaaaa

SEQ ID NO: 152140 - DNA, 25 bp, Saccharomyces pastorianus
ggtagtcctaatacgctatcagaaa

SEQ ID NO: 152141 - DNA, 25 bp, Saccharomyces pastorianus
ggaacaacttgaaaccgcatctaaa

SEQ ID NO: 152142 - DNA, 25 bp, Saccharomyces pastorianus
gacatgttataactttcttcgtgat

SEQ ID NO: 152143 - DNA, 25 bp, Saccharomyces pastorianus
gaagcaccctgacgatgaggtcctt

SEQ ID NO: 152144 - DNA, 25 bp, Saccharomyces pastorianus
ttagcagcaaattcactaccgattt

SEQ ID NO: 152145 - DNA, 25 bp, Saccharomyces pastorianus
gaatcatttcatgcgggtatttgct

SEQ ID NO: 152146 - DNA, 25 bp, Saccharomyces pastorianus
gatgaggtccttttttatcttagaa

SEQ ID NO: 152147 - DNA, 25 bp, Saccharomyces pastorianus
gaagtgatttggcattcctttgcta

SEQ ID NO: 152148 - DNA, 25 bp, Saccharomyces pastorianus
cccgtaagacgttctatttgtgcat

SEQ ID NO: 152149 - DNA, 25 bp, Saccharomyces pastorianus
agactcggaggcaatgaatcatttc

SEQ ID NO: 152150 - DNA, 25 bp, Saccharomyces pastorianus
acttgactatggttttcagcacttg

SEQ ID NO: 152151 - DNA, 25 bp, Saccharomyces pastorianus
ggcattcctttgctataatacttgt

SEQ ID NO: 152152 - DNA, 25 bp, Saccharomyces pastorianus
aagcctctgttcaaccttcgagaga

SEQ ID NO: 152153 - DNA, 25 bp, Saccharomyces pastorianus
gctatgaagcttctcgccaaattat

SEQ ID NO: 152154 - DNA, 25 bp, Saccharomyces pastorianus
caaaccaactctttcatttcatcag

SEQ ID NO: 152155 - DNA, 25 bp, Saccharomyces pastorianus
gagatatccccggtcaagtagtcga

SEQ ID NO: 152156 - DNA, 25 bp, Saccharomyces pastorianus
gttcgtgccgaagctgaatctttgg

SEQ ID NO: 152157 - DNA, 25 bp, Saccharomyces pastorianus
gaatcggccttggaatcttggaccc

SEQ ID NO: 152158 - DNA, 25 bp, Saccharomyces pastorianus
gaatctttggttgcggaggctcaat

SEQ ID NO: 152159 - DNA, 25 bp, Saccharomyces pastorianus
agctagaccagcgtacgatggctat

SEQ ID NO: 152160 - DNA, 25 bp, Saccharomyces pastorianus
ttgctggatacggaaaggccttatt

SEQ ID NO: 152161 - DNA, 25 bp, Saccharomyces pastorianus
gagctgctagatgactctcctgtca

SEQ ID NO: 152162 - DNA, 25 bp, Saccharomyces pastorianus
gaccctagacatggctgcagtcaaa

SEQ ID NO: 152163 - DNA, 25 bp, Saccharomyces pastorianus
gagttggctcgtaaattatctcaat

SEQ ID NO: 152164 - DNA, 25 bp, Saccharomyces pastorianus
taaccgacaaattaggcgtcttaat

SEQ ID NO: 152165 - DNA, 25 bp, Saccharomyces pastorianus
aactttgggccagagttggctcgta

SEQ ID NO: 152166 - DNA, 25 bp, Saccharomyces pastorianus
gcgaacgccgtgaagctgcaaagca

SEQ ID NO: 152167 - DNA, 25 bp, Saccharomyces pastorianus
gatgatgtttccgacgtaaccgaca

SEQ ID NO: 152168 - DNA, 25 bp, Saccharomyces pastorianus
gaagttgttgccagcgaacgccgtg

SEQ ID NO: 152169 - DNA, 25 bp, Saccharomyces pastorianus
aaaggcctctattgcgtctagtttt

SEQ ID NO: 152170 - DNA, 25 bp, Saccharomyces pastorianus
caccatcctcaacgaagtccaagtt

SEQ ID NO: 152171 - DNA, 25 bp, Saccharomyces pastorianus
aaatgcggctggtaactttgggcca

SEQ ID NO: 152172 - DNA, 25 bp, Saccharomyces pastorianus
gctgcaaagcaactgtctctatggg

SEQ ID NO: 152173 - DNA, 25 bp, Saccharomyces pastorianus
gtccaagttcttcggaaaggcctct

SEQ ID NO: 152174 - DNA, 25 bp, Saccharomyces pastorianus
gaattcaaaccgtgtgatccccggt

SEQ ID NO: 152175 - DNA, 25 bp, Saccharomyces pastorianus
ggtggtaatgtttctgctcacacca

SEQ ID NO: 152176 - DNA, 25 bp, Saccharomyces pastorianus
tagcgggtcctttgcatgggttagc

SEQ ID NO: 152177 - DNA, 25 bp, Saccharomyces pastorianus
tctaatatttccagcattgcacgag

SEQ ID NO: 152178 - DNA, 25 bp, Saccharomyces pastorianus
atttcccaatgttgactctgcatcg

SEQ ID NO: 152179 - DNA, 25 bp, Saccharomyces pastorianus
acccgtatctcagctattcatctgg

SEQ ID NO: 152180 - DNA, 25 bp, Saccharomyces pastorianus
gggatcgcattctaggtttaccaat

SEQ ID NO: 152181 - DNA, 25 bp, Saccharomyces pastorianus
gttttgcgtaaaccggatcctcgat

SEQ ID NO: 152182 - DNA, 25 bp, Saccharomyces pastorianus
gatccccggttatgggcacgcagtt

SEQ ID NO: 152183 - DNA, 25 bp, Saccharomyces pastorianus
gaagtgcgttgagtgacccgtatct

SEQ ID NO: 152184 - DNA, 25 bp, Saccharomyces pastorianus
atgggacccttgacacaacttgttt

SEQ ID NO: 152185 - DNA, 25 bp, Saccharomyces pastorianus
aggtggtgtgccaactttccagcaa

SEQ ID NO: 152186 - DNA, 25 bp, Saccharomyces pastorianus
taccgggcgcacatatatgcagaag

SEQ ID NO: 152187 - DNA, 25 bp, Saccharomyces pastorianus
gcagcacgtttgtcggaccgattac

SEQ ID NO: 152188 - DNA, 25 bp, Saccharomyces pastorianus
ggcgataatttcctgccagaatcaa

SEQ ID NO: 152189 - DNA, 25 bp, Saccharomyces pastorianus
gattaccatttcatcagttctaggt

SEQ ID NO: 152190 - DNA, 25 bp, Saccharomyces pastorianus
attagatcccgaacatggcattaaa

SEQ ID NO: 152191 - DNA, 25 bp, Saccharomyces pastorianus
agaaggtccttcaattcgtctgcaa

SEQ ID NO: 152192 - DNA, 25 bp, Saccharomyces pastorianus
cagcaagctgcttctttaaggacag

SEQ ID NO: 152193 - DNA, 25 bp, Saccharomyces pastorianus
gaaggcctgttatggcagcacgttt

SEQ ID NO: 152194 - DNA, 25 bp, Saccharomyces pastorianus
aagtcttctgcattgactctcaagg

SEQ ID NO: 152195 - DNA, 25 bp, Saccharomyces pastorianus
tggtacaaaggcttctaccgggcgc

SEQ ID NO: 152196 - DNA, 25 bp, Saccharomyces pastorianus
gaactttacgaatcttgacgactac

SEQ ID NO: 152197 - DNA, 25 bp, Saccharomyces pastorianus
gaatccaaattctggctagggtagc

SEQ ID NO: 152198 - DNA, 25 bp, Saccharomyces pastorianus
gagcctctcacatttacaaacagcg

SEQ ID NO: 152199 - DNA, 25 bp, Saccharomyces pastorianus
ggtgggatgacctcaatagattctt

SEQ ID NO: 152200 - DNA, 25 bp, Saccharomyces pastorianus
aatagattcttcagccgcccaagtg

SEQ ID NO: 152201 - DNA, 25 bp, Saccharomyces pastorianus
ggcgcaatgtctttatttaccttgt

SEQ ID NO: 152202 - DNA, 25 bp, Saccharomyces pastorianus
gagagacatatctccgtacttcgat

SEQ ID NO: 152203 - DNA, 25 bp, Saccharomyces pastorianus
gtacggttcgtctaagatacatcct

SEQ ID NO: 152204 - DNA, 25 bp, Saccharomyces pastorianus
gattgttagaatacctgagcctctc

SEQ ID NO: 152205 - DNA, 25 bp, Saccharomyces pastorianus
gaactctctggatgttgagggcaca

SEQ ID NO: 152206 - DNA, 25 bp, Saccharomyces pastorianus
atgcatcggatgtgtctattcaatt

SEQ ID NO: 152207 - DNA, 25 bp, Saccharomyces pastorianus
cagcggatgttgcttgattgtcctc

SEQ ID NO: 152208 - DNA, 25 bp, Saccharomyces pastorianus
gattgtcctctttttaacgcgtcta

SEQ ID NO: 152209 - DNA, 25 bp, Saccharomyces pastorianus
aagagcgcaatattttttccagata

SEQ ID NO: 152210 - DNA, 25 bp, Saccharomyces pastorianus
gcaaggcacttctacgaggtttcat

SEQ ID NO: 152211 - DNA, 25 bp, Saccharomyces pastorianus
ataccaacggcaatattcagcggat

SEQ ID NO: 152212 - DNA, 25 bp, Saccharomyces pastorianus
atgcggactatattctttggctatt

SEQ ID NO: 152213 - DNA, 25 bp, Saccharomyces pastorianus
ggcactatcctacttttttctggta

SEQ ID NO: 152214 - DNA, 25 bp, Saccharomyces pastorianus
ttcctcagatgatagttgggcccga

SEQ ID NO: 152215 - DNA, 25 bp, Saccharomyces pastorianus
tagtaagcttgcctcaacactacca

SEQ ID NO: 152216 - DNA, 25 bp, Saccharomyces pastorianus
gtgcaatttccttggtcgtgggaca

SEQ ID NO: 152217 - DNA, 25 bp, Saccharomyces pastorianus
ggtatcttaggttctgttcctcaga

SEQ ID NO: 152218 - DNA, 25 bp, Saccharomyces pastorianus
gtcagcagacagatagccgccagtg

SEQ ID NO: 152219 - DNA, 25 bp, Saccharomyces pastorianus
gaagacgattccagcaacagttgtt

SEQ ID NO: 152220 - DNA, 25 bp, Saccharomyces pastorianus
gagagtcgggccatctgaacagaat

SEQ ID NO: 152221 - DNA, 25 bp, Saccharomyces pastorianus
gaatatcctgttgcagatgcggtaa

SEQ ID NO: 152222 - DNA, 25 bp, Saccharomyces pastorianus
tgccttcctatccttactgaatttg

SEQ ID NO: 152223 - DNA, 25 bp, Saccharomyces pastorianus
gaagatatagttggtgccctcagaa

SEQ ID NO: 152224 - DNA, 25 bp, Saccharomyces pastorianus
acagttgtttttctgatggctctca

SEQ ID NO: 152225 - DNA, 25 bp, Saccharomyces pastorianus
gaatctacctccttcaagttttgga

SEQ ID NO: 152226 - DNA, 25 bp, Saccharomyces pastorianus
gatgctgttggttgacatcatccca

SEQ ID NO: 152227 - DNA, 25 bp, Saccharomyces pastorianus
gctccaatccgcctttcaagagaaa

SEQ ID NO: 152228 - DNA, 25 bp, Saccharomyces pastorianus
ttgtcggaagaacaacgcgctccaa

SEQ ID NO: 152229 - DNA, 25 bp, Saccharomyces pastorianus
catcgcgccgatgtaggtgggcaat

SEQ ID NO: 152230 - DNA, 25 bp, Saccharomyces pastorianus
ttctaacaggttcgagcttcatggg

SEQ ID NO: 152231 - DNA, 25 bp, Saccharomyces pastorianus
gatgtggactttaacctggacttag

SEQ ID NO: 152232 - DNA, 25 bp, Saccharomyces pastorianus
agaaattcttttccgctggatgaaa

SEQ ID NO: 152233 - DNA, 25 bp, Saccharomyces pastorianus
taggctctcactcaagttcacagaa

SEQ ID NO: 152234 - DNA, 25 bp, Saccharomyces pastorianus
gacgcgcaaagtaatctaggatcta

SEQ ID NO: 152235 - DNA, 25 bp, Saccharomyces pastorianus
ggacatgactaactcagacgcgcaa

SEQ ID NO: 152236 - DNA, 25 bp, Saccharomyces pastorianus
gccaaaattttctcacctctaacat

SEQ ID NO: 152237 - DNA, 25 bp, Saccharomyces pastorianus
ggtgggcaattttctaaggtacaat

SEQ ID NO: 152238 - DNA, 25 bp, Saccharomyces pastorianus
gggccggtagccaatctcaaagact

SEQ ID NO: 152239 - DNA, 25 bp, Saccharomyces pastorianus
aatgcaaagaggacatcgcgccgat

SEQ ID NO: 152240 - DNA, 25 bp, Saccharomyces pastorianus
atctgatatgaacgtattttccaag

SEQ ID NO: 152241 - DNA, 25 bp, Saccharomyces pastorianus
gtgccttttctcgagaggatttaca

SEQ ID NO: 152242 - DNA, 25 bp, Saccharomyces pastorianus
tgtgatgggcacatatgaagtcata

SEQ ID NO: 152243 - DNA, 25 bp, Saccharomyces pastorianus
gcacctcttgcagtagaagaaacca

SEQ ID NO: 152244 - DNA, 25 bp, Saccharomyces pastorianus
aaactgcctgatgtgatgggcacat

SEQ ID NO: 152245 - DNA, 25 bp, Saccharomyces pastorianus
tgaagtcataaaacaccttgataaa

SEQ ID NO: 152246 - DNA, 25 bp, Saccharomyces pastorianus
aatggaaagtgccttttctcgagag

SEQ ID NO: 152247 - DNA, 25 bp, Saccharomyces pastorianus
aagtatcttcgagatgactgtcgat

SEQ ID NO: 152248 - DNA, 25 bp, Saccharomyces pastorianus
aaagcctgcacctcttgcagtagaa

SEQ ID NO: 152249 - DNA, 25 bp, Saccharomyces pastorianus
aatagtccttttcaaagcctgcacc

SEQ ID NO: 152250 - DNA, 25 bp, Saccharomyces pastorianus
atgaagtttttcaggaaactgcctg

SEQ ID NO: 152251 - DNA, 25 bp, Saccharomyces pastorianus
ggttctattttgaccacgcaacaga

SEQ ID NO: 152252 - DNA, 25 bp, Saccharomyces pastorianus
gggcatggtacatcttttctattac

SEQ ID NO: 152253 - DNA, 25 bp, Saccharomyces pastorianus
gatttccaccgtttgttgtcgtcgt

SEQ ID NO: 152254 - DNA, 25 bp, Saccharomyces pastorianus
tcgttccactggtcctgtcaatagt

SEQ ID NO: 152255 - DNA, 25 bp, Saccharomyces pastorianus
aactaccacggtaatgagccaatgt

SEQ ID NO: 152256 - DNA, 25 bp, Saccharomyces pastorianus
attgaagtacttggactctgagcta

SEQ ID NO: 152257 - DNA, 25 bp, Saccharomyces pastorianus
cgtatgtcgcgagtgtggttctatt

SEQ ID NO: 152258 - DNA, 25 bp, Saccharomyces pastorianus
agactacacacaggcatccgtatgt

SEQ ID NO: 152259 - DNA, 25 bp, Saccharomyces pastorianus
gacgctttgattgggcatggtacat

SEQ ID NO: 152260 - DNA, 25 bp, Saccharomyces pastorianus
gactctgagctatccgcaatgggta

SEQ ID NO: 152261 - DNA, 25 bp, Saccharomyces pastorianus
gaaacaactacggtggccataccat

SEQ ID NO: 152262 - DNA, 25 bp, Saccharomyces pastorianus
taccacagtcagaaagttgctacct

SEQ ID NO: 152263 - DNA, 25 bp, Saccharomyces pastorianus
atctgacgtctcaagaattccttct

SEQ ID NO: 152264 - DNA, 25 bp, Saccharomyces pastorianus
agtttctggttatactgtggttgca

SEQ ID NO: 152265 - DNA, 25 bp, Saccharomyces pastorianus
tggtaacctagtgtcccagtctggg

SEQ ID NO: 152266 - DNA, 25 bp, Saccharomyces pastorianus
atattaaccgtggtatggccattaa

SEQ ID NO: 152267 - DNA, 25 bp, Saccharomyces pastorianus
tcccagtctgggttagatttacaac

SEQ ID NO: 152268 - DNA, 25 bp, Saccharomyces pastorianus
cttccctgtgttgtgtccaattgat

SEQ ID NO: 152269 - DNA, 25 bp, Saccharomyces pastorianus
cagataacccagatgctacgcaaca

SEQ ID NO: 152270 - DNA, 25 bp, Saccharomyces pastorianus
actcacttggtgttgctccggcttt

SEQ ID NO: 152271 - DNA, 25 bp, Saccharomyces pastorianus
tgtgccctgttcatacgccagatgg

SEQ ID NO: 152272 - DNA, 25 bp, Saccharomyces pastorianus
gtttattaaaccattttgcgcacaa

SEQ ID NO: 152273 - DNA, 25 bp, Saccharomyces pastorianus
ggatgcgctcgtgacaatcggcaga

SEQ ID NO: 152274 - DNA, 25 bp, Saccharomyces pastorianus
cagaaggcgttagcggttactacaa

SEQ ID NO: 152275 - DNA, 25 bp, Saccharomyces pastorianus
gcgttagcggttactacaaaggctt

SEQ ID NO: 152276 - DNA, 25 bp, Saccharomyces pastorianus
ggttactacaaaggcttagctgcaa

SEQ ID NO: 152277 - DNA, 25 bp, Saccharomyces pastorianus
aatgaactgggatttagatacacga

SEQ ID NO: 152278 - DNA, 25 bp, Saccharomyces pastorianus
ggcttagctgcaaacctttttaaag

SEQ ID NO: 152279 - DNA, 25 bp, Saccharomyces pastorianus
gttgttccttcaactgcagtgagtt

SEQ ID NO: 152280 - DNA, 25 bp, Saccharomyces pastorianus
aaagttgttccttcaactgcagtga

SEQ ID NO: 152281 - DNA, 25 bp, Saccharomyces pastorianus
tgggatgcgctcgtgacaatcggca

SEQ ID NO: 152282 - DNA, 25 bp, Saccharomyces pastorianus
tttagatacacgagtgtctgggatg

SEQ ID NO: 152283 - DNA, 25 bp, Saccharomyces pastorianus
aactgcagtgagttggctagtttac

SEQ ID NO: 152284 - DNA, 25 bp, Saccharomyces pastorianus
acatcgtctctaccatccaaaagaa

SEQ ID NO: 152285 - DNA, 25 bp, Saccharomyces pastorianus
agaccgctagccaatctcaaagtcc

SEQ ID NO: 152286 - DNA, 25 bp, Saccharomyces pastorianus
gacgcacaaaactgggagaatcttc

SEQ ID NO: 152287 - DNA, 25 bp, Saccharomyces pastorianus
gacgggccaatcgatccattcaaag

SEQ ID NO: 152288 - DNA, 25 bp, Saccharomyces pastorianus
gggttcaagacagcacgttttcttt

SEQ ID NO: 152289 - DNA, 25 bp, Saccharomyces pastorianus
gttatcatagaaaccgacgggccaa

SEQ ID NO: 152290 - DNA, 25 bp, Saccharomyces pastorianus
atttgccccgcaaatgggtaatcaa

SEQ ID NO: 152291 - DNA, 25 bp, Saccharomyces pastorianus
taattccgacttacaggcacagacc

SEQ ID NO: 152292 - DNA, 25 bp, Saccharomyces pastorianus
aatgattacagaccccatggactta

SEQ ID NO: 152293 - DNA, 25 bp, Saccharomyces pastorianus
ttctttgggtactgtgactgaaata

SEQ ID NO: 152294 - DNA, 25 bp, Saccharomyces pastorianus
catggacttacttcgactttttgat

SEQ ID NO: 152295 - DNA, 25 bp, Saccharomyces pastorianus
caaatagaagtgacgatgctctgta

SEQ ID NO: 152296 - DNA, 25 bp, Saccharomyces pastorianus
gacgatgctctgtatgtaaatacgt

SEQ ID NO: 152297 - DNA, 25 bp, Saccharomyces pastorianus
gaagtgacgatgctctgtatgtaaa

SEQ ID NO: 152298 - DNA, 25 bp, Saccharomyces pastorianus
aagtgacgatgctctgtatgtaaat

SEQ ID NO: 152299 - DNA, 25 bp, Saccharomyces pastorianus
gacaaggatccaaatagaagtgacg

SEQ ID NO: 152300 - DNA, 25 bp, Saccharomyces pastorianus
atccaaatagaagtgacgatgctct

SEQ ID NO: 152301 - DNA, 25 bp, Saccharomyces pastorianus
gcatatggacgaatacttcaatgac

SEQ ID NO: 152302 - DNA, 25 bp, Saccharomyces pastorianus
cttcaatgacaaggatccaaataga

SEQ ID NO: 152303 - DNA, 25 bp, Saccharomyces pastorianus
cgatgctctgtatgtaaatacgtct

SEQ ID NO: 152304 - DNA, 25 bp, Saccharomyces pastorianus
atagaagtgacgatgctctgtatgt

SEQ ID NO: 152305 - DNA, 25 bp, Saccharomyces pastorianus
agaagtgacgatgctctgtatgtaa

SEQ ID NO: 152306 - DNA, 25 bp, Saccharomyces pastorianus
gccagggtcccagtcacagttgagt

SEQ ID NO: 152307 - DNA, 25 bp, Saccharomyces pastorianus
gctcgtcatccgaccaaaatgggaa

SEQ ID NO: 152308 - DNA, 25 bp, Saccharomyces pastorianus
aaagaagctctccactagcctggga

SEQ ID NO: 152309 - DNA, 25 bp, Saccharomyces pastorianus
aagaattggaatcgccagggtccca

SEQ ID NO: 152310 - DNA, 25 bp, Saccharomyces pastorianus
gtaagagcacttcacagagttcctt

SEQ ID NO: 152311 - DNA, 25 bp, Saccharomyces pastorianus
atcttcttcgctatcgccaaatatg

SEQ ID NO: 152312 - DNA, 25 bp, Saccharomyces pastorianus
caagatttcccttcaaattcccata

SEQ ID NO: 152313 - DNA, 25 bp, Saccharomyces pastorianus
ggagacagccgctcgaatgctagta

SEQ ID NO: 152314 - DNA, 25 bp, Saccharomyces pastorianus
atgctacatcacattgccggttatc

SEQ ID NO: 152315 - DNA, 25 bp, Saccharomyces pastorianus
gagttccttaacatcttcagtgagc

SEQ ID NO: 152316 - DNA, 25 bp, Saccharomyces pastorianus
aaatttgcagactacccgctgatgt

SEQ ID NO: 152317 - DNA, 25 bp, Saccharomyces pastorianus
ggctgccatatgacagacttctgag

SEQ ID NO: 152318 - DNA, 25 bp, Saccharomyces pastorianus
ggatcaaaagccactagtaccaatt

SEQ ID NO: 152319 - DNA, 25 bp, Saccharomyces pastorianus
atccatctgttaaggttgataagtg

SEQ ID NO: 152320 - DNA, 25 bp, Saccharomyces pastorianus
aagccactagtaccaattaggattt

SEQ ID NO: 152321 - DNA, 25 bp, Saccharomyces pastorianus
agtgttttaccagagctgacctcgt

SEQ ID NO: 152322 - DNA, 25 bp, Saccharomyces pastorianus
gggctatccatctgttaaggttgat

SEQ ID NO: 152323 - DNA, 25 bp, Saccharomyces pastorianus
gctgacctcgtctactactatggat

SEQ ID NO: 152324 - DNA, 25 bp, Saccharomyces pastorianus
gccatatgacagacttctgagaaaa

SEQ ID NO: 152325 - DNA, 25 bp, Saccharomyces pastorianus
agagctgacctcgtctactactatg

SEQ ID NO: 152326 - DNA, 25 bp, Saccharomyces pastorianus
gttttaccagagctgacctcgtcta

SEQ ID NO: 152327 - DNA, 25 bp, Saccharomyces pastorianus
gataagtgttttaccagagctgacc

SEQ ID NO: 152328 - DNA, 25 bp, Saccharomyces pastorianus
tgtgggtctgacttgcaaagcgcca

SEQ ID NO: 152329 - DNA, 25 bp, Saccharomyces pastorianus
gggtattacttttcaattgccagaa

SEQ ID NO: 152330 - DNA, 25 bp, Saccharomyces pastorianus
gaaaacttccaccaatacagtcgta

SEQ ID NO: 152331 - DNA, 25 bp, Saccharomyces pastorianus
gaatatgaaactctagatgcccacg

SEQ ID NO: 152332 - DNA, 25 bp, Saccharomyces pastorianus
tgagctacatagacttgcgcaaggt

SEQ ID NO: 152333 - DNA, 25 bp, Saccharomyces pastorianus
acagcaagggctatggttactcaat

SEQ ID NO: 152334 - DNA, 25 bp, Saccharomyces pastorianus
gatgcccacgaaatcgaacaagttt

SEQ ID NO: 152335 - DNA, 25 bp, Saccharomyces pastorianus
gattgaacttttgaaggactccgag

SEQ ID NO: 152336 - DNA, 25 bp, Saccharomyces pastorianus
taccccgctatacaaggccacgata

SEQ ID NO: 152337 - DNA, 25 bp, Saccharomyces pastorianus
caagccagactggacgtgtgcatgg

SEQ ID NO: 152338 - DNA, 25 bp, Saccharomyces pastorianus
tgtaggacccgttaacttgtcagaa

SEQ ID NO: 152339 - DNA, 25 bp, Saccharomyces pastorianus
gcagccttttacaaacttctcttac

SEQ ID NO: 152340 - DNA, 25 bp, Saccharomyces pastorianus
gcagttaacccatcattggcgtcat

SEQ ID NO: 152341 - DNA, 25 bp, Saccharomyces pastorianus
gagccactacatgttgtcgtatctg

SEQ ID NO: 152342 - DNA, 25 bp, Saccharomyces pastorianus
ttacaatcaaactacccgcaatacg

SEQ ID NO: 152343 - DNA, 25 bp, Saccharomyces pastorianus
gagtcctgatgcacaagcagccttt

SEQ ID NO: 152344 - DNA, 25 bp, Saccharomyces pastorianus
tggaactgtacatggaggccctgca

SEQ ID NO: 152345 - DNA, 25 bp, Saccharomyces pastorianus
attctccgctttatggatctcgcaa

SEQ ID NO: 152346 - DNA, 25 bp, Saccharomyces pastorianus
aactttccatcgatgtattctccgc

SEQ ID NO: 152347 - DNA, 25 bp, Saccharomyces pastorianus
gtcatcttcatcaaaccagtcaggt

SEQ ID NO: 152348 - DNA, 25 bp, Saccharomyces pastorianus
ggtatcttaacctactctttttctg

SEQ ID NO: 152349 - DNA, 25 bp, Saccharomyces pastorianus
aaagtggctgcttgttttcggtatc

SEQ ID NO: 152350 - DNA, 25 bp, Saccharomyces pastorianus
ggataacgtgccagtgagcccaagt

SEQ ID NO: 152351 - DNA, 25 bp, Saccharomyces pastorianus
gcaagccttattgcactggaagaag

SEQ ID NO: 152352 - DNA, 25 bp, Saccharomyces pastorianus
gaggcccgcaaaaaacatttccata

SEQ ID NO: 152353 - DNA, 25 bp, Saccharomyces pastorianus
gtcgttaatcgagatattacccagt

SEQ ID NO: 152354 - DNA, 25 bp, Saccharomyces pastorianus
catatctattttgcctcattctgaa

SEQ ID NO: 152355 - DNA, 25 bp, Saccharomyces pastorianus
gaatctttggatgatgtgcaagcct

SEQ ID NO: 152356 - DNA, 25 bp, Saccharomyces pastorianus
ttcatcgtgcgaagctattgattga

SEQ ID NO: 152357 - DNA, 25 bp, Saccharomyces pastorianus
tgccggaattcctgtcgagaacgtt

SEQ ID NO: 152358 - DNA, 25 bp, Saccharomyces pastorianus
gaagcaagtcgcaaccagtcgttaa

SEQ ID NO: 152359 - DNA, 25 bp, Saccharomyces pastorianus
agtgagcccaagtgagccatactac

SEQ ID NO: 152360 - DNA, 25 bp, Saccharomyces pastorianus
ggtcaacttttagataatgccggaa

SEQ ID NO: 152361 - DNA, 25 bp, Saccharomyces pastorianus
ctattgcctttcttcccaaatgtgg

SEQ ID NO: 152362 - DNA, 25 bp, Saccharomyces pastorianus
tttgtcatcagattcctacggtggt

SEQ ID NO: 152363 - DNA, 25 bp, Saccharomyces pastorianus
gagaaatatggataccccggagcaa

SEQ ID NO: 152364 - DNA, 25 bp, Saccharomyces pastorianus
tggtatgacctttacaacgacgcct

SEQ ID NO: 152365 - DNA, 25 bp, Saccharomyces pastorianus
agcaatatacccctggacatctggt

SEQ ID NO: 152366 - DNA, 25 bp, Saccharomyces pastorianus
aattgtacttctacgggaccttgtg

SEQ ID NO: 152367 - DNA, 25 bp, Saccharomyces pastorianus
atggatggaacctgccctattgcct

SEQ ID NO: 152368 - DNA, 25 bp, Saccharomyces pastorianus
cgtgggagtttctggtttgtcatca

SEQ ID NO: 152369 - DNA, 25 bp, Saccharomyces pastorianus
aagatcgtccctattccatttacta

SEQ ID NO: 152370 - DNA, 25 bp, Saccharomyces pastorianus
gaaatgctacacattcgcaggcaaa

SEQ ID NO: 152371 - DNA, 25 bp, Saccharomyces pastorianus
acgacgccttcattgaaattccttc

SEQ ID NO: 152372 - DNA, 25 bp, Saccharomyces pastorianus
tggtccaataattcatccgggtcct

SEQ ID NO: 152373 - DNA, 25 bp, Saccharomyces pastorianus
gagaccgcggccacgctatttaaaa

SEQ ID NO: 152374 - DNA, 25 bp, Saccharomyces pastorianus
gcggccacgctatttaaaagagaca

SEQ ID NO: 152375 - DNA, 25 bp, Saccharomyces pastorianus
tatagtccgcgcacttttaccaata

SEQ ID NO: 152376 - DNA, 25 bp, Saccharomyces pastorianus
gcacttttaccaataccgactacaa

SEQ ID NO: 152377 - DNA, 25 bp, Saccharomyces pastorianus
gggaatgaaaataacgcctatagca

SEQ ID NO: 152378 - DNA, 25 bp, Saccharomyces pastorianus
taacgcctatagcaatatggacggt

SEQ ID NO: 152379 - DNA, 25 bp, Saccharomyces pastorianus
accacggtatagtccgcgcactttt

SEQ ID NO: 152380 - DNA, 25 bp, Saccharomyces pastorianus
atctttgaacaggagaccgcggcca

SEQ ID NO: 152381 - DNA, 25 bp, Saccharomyces pastorianus
tatggacggtttgctttcgcaggat

SEQ ID NO: 152382 - DNA, 25 bp, Saccharomyces pastorianus
ttgctttcgcaggatatctttgaac

SEQ ID NO: 152383 - DNA, 25 bp, Saccharomyces pastorianus
agtcctgccaccaacttttgaagag

SEQ ID NO: 152384 - DNA, 25 bp, Saccharomyces pastorianus
ggtatcgatcttttcgacccaataa

SEQ ID NO: 152385 - DNA, 25 bp, Saccharomyces pastorianus
atggccaccactgaatcttctaaag

SEQ ID NO: 152386 - DNA, 25 bp, Saccharomyces pastorianus
gcaaactagctcgaatgttcccatt

SEQ ID NO: 152387 - DNA, 25 bp, Saccharomyces pastorianus
gatcttctgtatcttattatcccga

SEQ ID NO: 152388 - DNA, 25 bp, Saccharomyces pastorianus
tgatttctgacctttgtaacacttc

SEQ ID NO: 152389 - DNA, 25 bp, Saccharomyces pastorianus
aacagggcttccaagacagttcata

SEQ ID NO: 152390 - DNA, 25 bp, Saccharomyces pastorianus
ttaccgacttatgacatggccacca

SEQ ID NO: 152391 - DNA, 25 bp, Saccharomyces pastorianus
tgtattgggctttctagtgggtcgc

SEQ ID NO: 152392 - DNA, 25 bp, Saccharomyces pastorianus
gaagtggacgctaccaaagctgcaa

SEQ ID NO: 152393 - DNA, 25 bp, Saccharomyces pastorianus
aaagctgcaagtctaccaccatatg

SEQ ID NO: 152394 - DNA, 25 bp, Saccharomyces pastorianus
aacaatgaacgaggctgttgagcag

SEQ ID NO: 152395 - DNA, 25 bp, Saccharomyces pastorianus
gaaacaatgaacgaggctgttgagc

SEQ ID NO: 152396 - DNA, 25 bp, Saccharomyces pastorianus
tgggagaaacaatgaacgaggctgt

SEQ ID NO: 152397 - DNA, 25 bp, Saccharomyces pastorianus
gaacgaggctgttgagcagactgga

SEQ ID NO: 152398 - DNA, 25 bp, Saccharomyces pastorianus
gggagaaacaatgaacgaggctgtt

SEQ ID NO: 152399 - DNA, 25 bp, Saccharomyces pastorianus
atgaacgaggctgttgagcagactg

SEQ ID NO: 152400 - DNA, 25 bp, Saccharomyces pastorianus
gagaaacaatgaacgaggctgttga

SEQ ID NO: 152401 - DNA, 25 bp, Saccharomyces pastorianus
aaacaatgaacgaggctgttgagca

SEQ ID NO: 152402 - DNA, 25 bp, Saccharomyces pastorianus
atgggagaaacaatgaacgaggctg

SEQ ID NO: 152403 - DNA, 25 bp, Saccharomyces pastorianus
caatgaacgaggctgttgagcagac

SEQ ID NO: 152404 - DNA, 25 bp, Saccharomyces pastorianus
aatgaacgaggctgttgagcagact

SEQ ID NO: 152405 - DNA, 25 bp, Saccharomyces pastorianus
gacacagatgcatccttagactgga

SEQ ID NO: 152406 - DNA, 25 bp, Saccharomyces pastorianus
gctccaggaggcgacttctcagaaa

SEQ ID NO: 152407 - DNA, 25 bp, Saccharomyces pastorianus
agggatcaactttcttccttcaaat

SEQ ID NO: 152408 - DNA, 25 bp, Saccharomyces pastorianus
gttccacaacctgattacatacgcg

SEQ ID NO: 152409 - DNA, 25 bp, Saccharomyces pastorianus
agactggatgctaatcggccttcaa

SEQ ID NO: 152410 - DNA, 25 bp, Saccharomyces pastorianus
gttattcagtccttatatcacccta

SEQ ID NO: 152411 - DNA, 25 bp, Saccharomyces pastorianus
caattccttggttttctgggatgct

SEQ ID NO: 152412 - DNA, 25 bp, Saccharomyces pastorianus
atatcaccctaattcactgcacatt

SEQ ID NO: 152413 - DNA, 25 bp, Saccharomyces pastorianus
gcgattctagtactaatgctgccaa

SEQ ID NO: 152414 - DNA, 25 bp, Saccharomyces pastorianus
gaattaccaccttttgctccaggag

SEQ ID NO: 152415 - DNA, 25 bp, Saccharomyces pastorianus
aagctcattttttccggctgcaaga

SEQ ID NO: 152416 - DNA, 25 bp, Saccharomyces pastorianus
tacaaaattcttcctgcatcaggtg

SEQ ID NO: 152417 - DNA, 25 bp, Saccharomyces pastorianus
tagcgccagtttctgacacactgta

SEQ ID NO: 152418 - DNA, 25 bp, Saccharomyces pastorianus
gaatttcaggcgtcactattttcta

SEQ ID NO: 152419 - DNA, 25 bp, Saccharomyces pastorianus
ttgccgcgacaggtttatcttacat

SEQ ID NO: 152420 - DNA, 25 bp, Saccharomyces pastorianus
aaggaacaggatacgctagcgccag

SEQ ID NO: 152421 - DNA, 25 bp, Saccharomyces pastorianus
aggtttcaaatacccgcttgccgcg

SEQ ID NO: 152422 - DNA, 25 bp, Saccharomyces pastorianus
gagtttttactattccagatttcaa

SEQ ID NO: 152423 - DNA, 25 bp, Saccharomyces pastorianus
gtaaaggcctttgcattcctggtat

SEQ ID NO: 152424 - DNA, 25 bp, Saccharomyces pastorianus
tattccatttccaattgccgcaaaa

SEQ ID NO: 152425 - DNA, 25 bp, Saccharomyces pastorianus
ttaccagtaagggtccgatacacaa

SEQ ID NO: 152426 - DNA, 25 bp, Saccharomyces pastorianus
gtttatcttacatctcaaccgttga

SEQ ID NO: 152427 - DNA, 25 bp, Saccharomyces pastorianus
acattgccgtaatcctcggtaagga

SEQ ID NO: 152428 - DNA, 25 bp, Saccharomyces pastorianus
gcagccggtggtcgatatgataatt

SEQ ID NO: 152429 - DNA, 25 bp, Saccharomyces pastorianus
tcagaattcgttggtgtcggctcta

SEQ ID NO: 152430 - DNA, 25 bp, Saccharomyces pastorianus
ggccaaatctgcagaagacgcgtca

SEQ ID NO: 152431 - DNA, 25 bp, Saccharomyces pastorianus
gaatatgtctataaggccaaggcta

SEQ ID NO: 152432 - DNA, 25 bp, Saccharomyces pastorianus
atgttctctgaagcttccggcaaaa

SEQ ID NO: 152433 - DNA, 25 bp, Saccharomyces pastorianus
aaagcgggttgtcacattgccgtaa

SEQ ID NO: 152434 - DNA, 25 bp, Saccharomyces pastorianus
aaagccaacggctacacaggtgttc

SEQ ID NO: 152435 - DNA, 25 bp, Saccharomyces pastorianus
acacaggtgttcgttatggcttttg

SEQ ID NO: 152436 - DNA, 25 bp, Saccharomyces pastorianus
ttagtgcggctgacattgttcctat

SEQ ID NO: 152437 - DNA, 25 bp, Saccharomyces pastorianus
atctgctccaccagagaatgcttca

SEQ ID NO: 152438 - DNA, 25 bp, Saccharomyces pastorianus
ggacgagcctactcctgaagaaaga

SEQ ID NO: 152439 - DNA, 25 bp, Saccharomyces pastorianus
gtatcccgtacagacatctagcagg

SEQ ID NO: 152440 - DNA, 25 bp, Saccharomyces pastorianus
tgctggcccgttttccggacgagcc

SEQ ID NO: 152441 - DNA, 25 bp, Saccharomyces pastorianus
aactgcacacgtttattgggttgta

SEQ ID NO: 152442 - DNA, 25 bp, Saccharomyces pastorianus
gctaccatcctggaggactacgatt

SEQ ID NO: 152443 - DNA, 25 bp, Saccharomyces pastorianus
gggatgccacattcacaacaaggtg

SEQ ID NO: 152444 - DNA, 25 bp, Saccharomyces pastorianus
acatctagcaggacggctgccgcaa

SEQ ID NO: 152445 - DNA, 25 bp, Saccharomyces pastorianus
aagttgattgagaagtatcccgtac

SEQ ID NO: 152446 - DNA, 25 bp, Saccharomyces pastorianus
ggatgtagtgacagcgacggtaaac

SEQ ID NO: 152447 - DNA, 25 bp, Saccharomyces pastorianus
tatatgactgtgctaccatcctgga

SEQ ID NO: 152448 - DNA, 25 bp, Saccharomyces pastorianus
gggttgtatgcagaactctatccat

SEQ ID NO: 152449 - DNA, 25 bp, Saccharomyces pastorianus
agccatgccatcagaatagttgcag

SEQ ID NO: 152450 - DNA, 25 bp, Saccharomyces pastorianus
aagaagccatgccatcagaatagtt

SEQ ID NO: 152451 - DNA, 25 bp, Saccharomyces pastorianus
ccatgccatcagaatagttgcagca

SEQ ID NO: 152452 - DNA, 25 bp, Saccharomyces pastorianus
agatagtcaaaagaagccatgccat

SEQ ID NO: 152453 - DNA, 25 bp, Saccharomyces pastorianus
gaatagttgcagcattaggaatcat

SEQ ID NO: 152454 - DNA, 25 bp, Saccharomyces pastorianus
gaagccatgccatcagaatagttgc

SEQ ID NO: 152455 - DNA, 25 bp, Saccharomyces pastorianus
aaaagaagccatgccatcagaatag

SEQ ID NO: 152456 - DNA, 25 bp, Saccharomyces pastorianus
gccatcagaatagttgcagcattag

SEQ ID NO: 152457 - DNA, 25 bp, Saccharomyces pastorianus
ccatcagaatagttgcagcattagg

SEQ ID NO: 152458 - DNA, 25 bp, Saccharomyces pastorianus
tagtcaaaagaagccatgccatcag

SEQ ID NO: 152459 - DNA, 25 bp, Saccharomyces pastorianus
gtcaaaagaagccatgccatcagaa

SEQ ID NO: 152460 - DNA, 25 bp, Saccharomyces pastorianus
tgatggcatggcttcttttgactat

SEQ ID NO: 152461 - DNA, 25 bp, Saccharomyces pastorianus
ctattctgatggcatggcttctttt

SEQ ID NO: 152462 - DNA, 25 bp, Saccharomyces pastorianus
ctgatggcatggcttcttttgacta

SEQ ID NO: 152463 - DNA, 25 bp, Saccharomyces pastorianus
attctgatggcatggcttcttttga

SEQ ID NO: 152464 - DNA, 25 bp, Saccharomyces pastorianus
ttctgatggcatggcttcttttgac

SEQ ID NO: 152465 - DNA, 25 bp, Saccharomyces pastorianus
gcaactattctgatggcatggcttc

SEQ ID NO: 152466 - DNA, 25 bp, Saccharomyces pastorianus
ctaatgctgcaactattctgatggc

SEQ ID NO: 152467 - DNA, 25 bp, Saccharomyces pastorianus
gctgcaactattctgatggcatggc

SEQ ID NO: 152468 - DNA, 25 bp, Saccharomyces pastorianus
aactattctgatggcatggcttctt

SEQ ID NO: 152469 - DNA, 25 bp, Saccharomyces pastorianus
attcctaatgctgcaactattctga

SEQ ID NO: 152470 - DNA, 25 bp, Saccharomyces pastorianus
aatgctgcaactattctgatggcat

SEQ ID NO: 152471 - DNA, 25 bp, Saccharomyces pastorianus
tgtccagactgtcctctttacgaat

SEQ ID NO: 152472 - DNA, 25 bp, Saccharomyces pastorianus
tgataaagccttttgtcctttattt

SEQ ID NO: 152473 - DNA, 25 bp, Saccharomyces pastorianus
agccttcccgtcttcttgtcttcat

SEQ ID NO: 152474 - DNA, 25 bp, Saccharomyces pastorianus
tcttcttgtcttcatcacccacgtt

SEQ ID NO: 152475 - DNA, 25 bp, Saccharomyces pastorianus
agactgtcctctttacgaatcacca

SEQ ID NO: 152476 - DNA, 25 bp, Saccharomyces pastorianus
atcacccacgtttattgtttaatga

SEQ ID NO: 152477 - DNA, 25 bp, Saccharomyces pastorianus
tgactatctgtttcatcccgtcgta

SEQ ID NO: 152478 - DNA, 25 bp, Saccharomyces pastorianus
gtcctctttacgaatcaccagcctt

SEQ ID NO: 152479 - DNA, 25 bp, Saccharomyces pastorianus
ttcatcccgtcgtaccttgcacaat

SEQ ID NO: 152480 - DNA, 25 bp, Saccharomyces pastorianus
taccttgcacaatctgtccagactg

SEQ ID NO: 152481 - DNA, 25 bp, Saccharomyces pastorianus
gcttcttttgactatctgtttcatc

SEQ ID NO: 152482 - DNA, 25 bp, Saccharomyces pastorianus
attaggcccggcgtagcgatggata

SEQ ID NO: 152483 - DNA, 25 bp, Saccharomyces pastorianus
tctttcaaccgagcgtcgttcttct

SEQ ID NO: 152484 - DNA, 25 bp, Saccharomyces pastorianus
aaccgagcgtcgttcttctcagcag

SEQ ID NO: 152485 - DNA, 25 bp, Saccharomyces pastorianus
tataccagacttcgccttgattagg

SEQ ID NO: 152486 - DNA, 25 bp, Saccharomyces pastorianus
agacttcgccttgattaggcccggc

SEQ ID NO: 152487 - DNA, 25 bp, Saccharomyces pastorianus
cttgcacttcatctataccagactt

SEQ ID NO: 152488 - DNA, 25 bp, Saccharomyces pastorianus
gcccggcgtagcgatggatagttca

SEQ ID NO: 152489 - DNA, 25 bp, Saccharomyces pastorianus
atctataccagacttcgccttgatt

SEQ ID NO: 152490 - DNA, 25 bp, Saccharomyces pastorianus
gagcgtcgttcttctcagcagccgc

SEQ ID NO: 152491 - DNA, 25 bp, Saccharomyces pastorianus
cggcgtagcgatggatagttcatta

SEQ ID NO: 152492 - DNA, 25 bp, Saccharomyces pastorianus
tgcacttcatctataccagacttcg

SEQ ID NO: 152493 - DNA, 25 bp, Saccharomyces pastorianus
gctaagccattcattacgtggttag

SEQ ID NO: 152494 - DNA, 25 bp, Saccharomyces pastorianus
gctgctaagccattcattacgtggt

SEQ ID NO: 152495 - DNA, 25 bp, Saccharomyces pastorianus
gggctgctaagccattcattacgtg

SEQ ID NO: 152496 - DNA, 25 bp, Saccharomyces pastorianus
tgtacctaaggaggtatccaaaaag

SEQ ID NO: 152497 - DNA, 25 bp, Saccharomyces pastorianus
aagccattcattacgtggttagaaa

SEQ ID NO: 152498 - DNA, 25 bp, Saccharomyces pastorianus
atccaaaaaggttcgtagggctgct

SEQ ID NO: 152499 - DNA, 25 bp, Saccharomyces pastorianus
tccaagaaatttgtacctaaggagg

SEQ ID NO: 152500 - DNA, 25 bp, Saccharomyces pastorianus
ctgctaagccattcattacgtggtt

SEQ ID NO: 152501 - DNA, 25 bp, Saccharomyces pastorianus
gccattcattacgtggttagaaacc

SEQ ID NO: 152502 - DNA, 25 bp, Saccharomyces pastorianus
caaaaaggttcgtagggctgctaag

SEQ ID NO: 152503 - DNA, 25 bp, Saccharomyces pastorianus
tccaaaaaggttcgtagggctgcta

SEQ ID NO: 152504 - DNA, 25 bp, Saccharomyces pastorianus
gaacataaggatctaatcccactat

SEQ ID NO: 152505 - DNA, 25 bp, Saccharomyces pastorianus
ggatctaatcccactattaccaaaa

SEQ ID NO: 152506 - DNA, 25 bp, Saccharomyces pastorianus
taaggagaacttaccatcagatgtg

SEQ ID NO: 152507 - DNA, 25 bp, Saccharomyces pastorianus
gcgcaatgtctattcgatgaggata

SEQ ID NO: 152508 - DNA, 25 bp, Saccharomyces pastorianus
agaaggctgcagaactagacgtctt

SEQ ID NO: 152509 - DNA, 25 bp, Saccharomyces pastorianus
tgcagaactagacgtcttgaatgat

SEQ ID NO: 152510 - DNA, 25 bp, Saccharomyces pastorianus
attttagtcactccagaatacgaaa

SEQ ID NO: 152511 - DNA, 25 bp, Saccharomyces pastorianus
gtgtcttggcgcaatgtctattcga

SEQ ID NO: 152512 - DNA, 25 bp, Saccharomyces pastorianus
gagctcactcaactggatgaatatg

SEQ ID NO: 152513 - DNA, 25 bp, Saccharomyces pastorianus
atatggtgaatggattttggagcag

SEQ ID NO: 152514 - DNA, 25 bp, Saccharomyces pastorianus
catcagatgtggagctttataagaa

SEQ ID NO: 152515 - DNA, 25 bp, Saccharomyces pastorianus
tgacatctctcacgcgctaaataga

SEQ ID NO: 152516 - DNA, 25 bp, Saccharomyces pastorianus
ttttgaacgtcgctgacatctctca

SEQ ID NO: 152517 - DNA, 25 bp, Saccharomyces pastorianus
aaacttccatctctgttgacaaaga

SEQ ID NO: 152518 - DNA, 25 bp, Saccharomyces pastorianus
cctgctccatatattgtcaagtatt

SEQ ID NO: 152519 - DNA, 25 bp, Saccharomyces pastorianus
agacgtattggatggctttattaac

SEQ ID NO: 152520 - DNA, 25 bp, Saccharomyces pastorianus
ggagatcatcataccgacctgcagg

SEQ ID NO: 152521 - DNA, 25 bp, Saccharomyces pastorianus
aattaggtgctcaaacttccatctc

SEQ ID NO: 152522 - DNA, 25 bp, Saccharomyces pastorianus
tttaccgttacaaaatgcctcccat

SEQ ID NO: 152523 - DNA, 25 bp, Saccharomyces pastorianus
aagactgccgttttgaacgtcgctg

SEQ ID NO: 152524 - DNA, 25 bp, Saccharomyces pastorianus
gcgctaaatagacctgctccatata

SEQ ID NO: 152525 - DNA, 25 bp, Saccharomyces pastorianus
aacaagtttgttctctgtggaagct

SEQ ID NO: 152526 - DNA, 25 bp, Saccharomyces pastorianus
tcagcaggaatatcacccaaacaat

SEQ ID NO: 152527 - DNA, 25 bp, Saccharomyces pastorianus
acaagtggtgtactccggaaatcaa

SEQ ID NO: 152528 - DNA, 25 bp, Saccharomyces pastorianus
aatttacaaagtcgccagttactgg

SEQ ID NO: 152529 - DNA, 25 bp, Saccharomyces pastorianus
gtaacaaatttatccctacctatag

SEQ ID NO: 152530 - DNA, 25 bp, Saccharomyces pastorianus
aaatgaatcctctaagccgctcagt

SEQ ID NO: 152531 - DNA, 25 bp, Saccharomyces pastorianus
aggtccaacgccagcattgaacttt

SEQ ID NO: 152532 - DNA, 25 bp, Saccharomyces pastorianus
gtttcattctcctggtcgcgccaga

SEQ ID NO: 152533 - DNA, 25 bp, Saccharomyces pastorianus
aacaatcctccaagaatcatcgtaa

SEQ ID NO: 152534 - DNA, 25 bp, Saccharomyces pastorianus
gccagaggcgtttctgtttccagtg

SEQ ID NO: 152535 - DNA, 25 bp, Saccharomyces pastorianus
gaagttgggctatcatcagcaggaa

SEQ ID NO: 152536 - DNA, 25 bp, Saccharomyces pastorianus
attgaactttaacccagccccgatg

SEQ ID NO: 152537 - DNA, 25 bp, Saccharomyces pastorianus
gaagttaacactttgcaagacatgg

SEQ ID NO: 152538 - DNA, 25 bp, Saccharomyces pastorianus
aatggacagaaatttgacaaacgcc

SEQ ID NO: 152539 - DNA, 25 bp, Saccharomyces pastorianus
gcaagacatggtgtgttctaaattg

SEQ ID NO: 152540 - DNA, 25 bp, Saccharomyces pastorianus
gccgaagttaacactttgcaagaca

SEQ ID NO: 152541 - DNA, 25 bp, Saccharomyces pastorianus
cagaaatttgacaaacgccgaagtt

SEQ ID NO: 152542 - DNA, 25 bp, Saccharomyces pastorianus
aacgccgaagttaacactttgcaag

SEQ ID NO: 152543 - DNA, 25 bp, Saccharomyces pastorianus
gatcaactatcaatcaatggacaga

SEQ ID NO: 152544 - DNA, 25 bp, Saccharomyces pastorianus
actttgcaagacatggtgtgttcta

SEQ ID NO: 152545 - DNA, 25 bp, Saccharomyces pastorianus
tacaggatcaactatcaatcaatgg

SEQ ID NO: 152546 - DNA, 25 bp, Saccharomyces pastorianus
gacaaacgccgaagttaacactttg

SEQ ID NO: 152547 - DNA, 25 bp, Saccharomyces pastorianus
ttgacaaacgccgaagttaacactt

SEQ ID NO: 152548 - DNA, 25 bp, Saccharomyces pastorianus
ttattcaaaacacccgggatcattt

SEQ ID NO: 152549 - DNA, 25 bp, Saccharomyces pastorianus
tctggaggttgatttgtgctctcaa

SEQ ID NO: 152550 - DNA, 25 bp, Saccharomyces pastorianus
tggcagggcgaatggctcgaactct

SEQ ID NO: 152551 - DNA, 25 bp, Saccharomyces pastorianus
ggatgttgcgttttggttaccagaa

SEQ ID NO: 152552 - DNA, 25 bp, Saccharomyces pastorianus
agtcgatagctttacgcatccgaaa

SEQ ID NO: 152553 - DNA, 25 bp, Saccharomyces pastorianus
ccttctgaaacaattgggtgggctt

SEQ ID NO: 152554 - DNA, 25 bp, Saccharomyces pastorianus
aagagccggatataaaccttctgaa

SEQ ID NO: 152555 - DNA, 25 bp, Saccharomyces pastorianus
tttggaccgcattgctatgcttctt

SEQ ID NO: 152556 - DNA, 25 bp, Saccharomyces pastorianus
ttttggcttgggtttggaccgcatt

SEQ ID NO: 152557 - DNA, 25 bp, Saccharomyces pastorianus
ggaccgcgccctcatgggaaataga

SEQ ID NO: 152558 - DNA, 25 bp, Saccharomyces pastorianus
cgaactctgcggatgcggattgatt

SEQ ID NO: 152559 - DNA, 25 bp, Saccharomyces pastorianus
gcccacgaattagagtgctttcaaa

SEQ ID NO: 152560 - DNA, 25 bp, Saccharomyces pastorianus
aactcagtcgacaacacatttaaga

SEQ ID NO: 152561 - DNA, 25 bp, Saccharomyces pastorianus
atttcaagcccgtggtaaccacaat

SEQ ID NO: 152562 - DNA, 25 bp, Saccharomyces pastorianus
gacccacagactaccaatgttacag

SEQ ID NO: 152563 - DNA, 25 bp, Saccharomyces pastorianus
gcttaccgacagatcattacatttg

SEQ ID NO: 152564 - DNA, 25 bp, Saccharomyces pastorianus
gtaggcattcttcgcgatctaattg

SEQ ID NO: 152565 - DNA, 25 bp, Saccharomyces pastorianus
catacttcagcccacgaattagagt

SEQ ID NO: 152566 - DNA, 25 bp, Saccharomyces pastorianus
gaaagaatcacatccagtaggcatt

SEQ ID NO: 152567 - DNA, 25 bp, Saccharomyces pastorianus
tgagacgcacctactgagaacacat

SEQ ID NO: 152568 - DNA, 25 bp, Saccharomyces pastorianus
ataaaatacaagaccgacccacaga

SEQ ID NO: 152569 - DNA, 25 bp, Saccharomyces pastorianus
tcaacccttaaagttccacatgtag

SEQ ID NO: 152570 - DNA, 25 bp, Saccharomyces pastorianus
gaggtacactgaagctttggagaaa

SEQ ID NO: 152571 - DNA, 25 bp, Saccharomyces pastorianus
aatttttactctttatgcggctcca

SEQ ID NO: 152572 - DNA, 25 bp, Saccharomyces pastorianus
aactccatatttattggtcttgata

SEQ ID NO: 152573 - DNA, 25 bp, Saccharomyces pastorianus
atgcggctccagtgaagctgaacta

SEQ ID NO: 152574 - DNA, 25 bp, Saccharomyces pastorianus
gatatagtcaacaactacgccttga

SEQ ID NO: 152575 - DNA, 25 bp, Saccharomyces pastorianus
gaaggagcccgcaccaagattggaa

SEQ ID NO: 152576 - DNA, 25 bp, Saccharomyces pastorianus
tgaaaaccatattgaggctgcagtt

SEQ ID NO: 152577 - DNA, 25 bp, Saccharomyces pastorianus
aatatagcttctctaatttccgaat

SEQ ID NO: 152578 - DNA, 25 bp, Saccharomyces pastorianus
actacgccttgattaagggtgccaa

SEQ ID NO: 152579 - DNA, 25 bp, Saccharomyces pastorianus
gaattaccgcattgttctgtcgaag

SEQ ID NO: 152580 - DNA, 25 bp, Saccharomyces pastorianus
gagacaaagcactagctcaactaag

SEQ ID NO: 152581 - DNA, 25 bp, Saccharomyces pastorianus
gaagaatattttggtacggctggaa

SEQ ID NO: 152582 - DNA, 25 bp, Saccharomyces pastorianus
atcgtcggctgcaagattggctatt

SEQ ID NO: 152583 - DNA, 25 bp, Saccharomyces pastorianus
agcattcctttcctgagaaggcaga

SEQ ID NO: 152584 - DNA, 25 bp, Saccharomyces pastorianus
tatgcccagcaaatgtactacagtt

SEQ ID NO: 152585 - DNA, 25 bp, Saccharomyces pastorianus
acaaccagtggttccaataccttat

SEQ ID NO: 152586 - DNA, 25 bp, Saccharomyces pastorianus
agtgtcctaaatcagcattcctttc

SEQ ID NO: 152587 - DNA, 25 bp, Saccharomyces pastorianus
acctctaagcaactttgggttctga

SEQ ID NO: 152588 - DNA, 25 bp, Saccharomyces pastorianus
gattggctattctacatactggtac

SEQ ID NO: 152589 - DNA, 25 bp, Saccharomyces pastorianus
tgaatgttgagataccagccgcggt

SEQ ID NO: 152590 - DNA, 25 bp, Saccharomyces pastorianus
aggaaggcattatcgtcggctgcaa

SEQ ID NO: 152591 - DNA, 25 bp, Saccharomyces pastorianus
gaaccgcagcatactacttttcatg

SEQ ID NO: 152592 - DNA, 25 bp, Saccharomyces pastorianus
gggcccttaaaaggcacgccatctc

SEQ ID NO: 152593 - DNA, 25 bp, Saccharomyces pastorianus
agaggacgcgtcacaaatcaagcat

SEQ ID NO: 152594 - DNA, 25 bp, Saccharomyces pastorianus
atctgattcttcagtgaatcctgat

SEQ ID NO: 152595 - DNA, 25 bp, Saccharomyces pastorianus
cgccatccttgattaggcttcaaag

SEQ ID NO: 152596 - DNA, 25 bp, Saccharomyces pastorianus
gaatcctgatgtcattgaatatctt

SEQ ID NO: 152597 - DNA, 25 bp, Saccharomyces pastorianus
gaatctgcaaaagaggacgcgtcac

SEQ ID NO: 152598 - DNA, 25 bp, Saccharomyces pastorianus
gccatctttggtcaatctcgtgcat

SEQ ID NO: 152599 - DNA, 25 bp, Saccharomyces pastorianus
gcgtcacaaatcaagcatgtacgat

SEQ ID NO: 152600 - DNA, 25 bp, Saccharomyces pastorianus
gtgcatttgcactatctgattcttc

SEQ ID NO: 152601 - DNA, 25 bp, Saccharomyces pastorianus
catctcgccatccttgattaggctt

SEQ ID NO: 152602 - DNA, 25 bp, Saccharomyces pastorianus
caagaagcactaagaaccaacgcca

SEQ ID NO: 152603 - DNA, 25 bp, Saccharomyces pastorianus
ttttggagcattgtctggcactgcc

SEQ ID NO: 152604 - DNA, 25 bp, Saccharomyces pastorianus
ttagatgtcatcaagtctgtcatgc

SEQ ID NO: 152605 - DNA, 25 bp, Saccharomyces pastorianus
aaggacattcctgcatggaaacttt

SEQ ID NO: 152606 - DNA, 25 bp, Saccharomyces pastorianus
gtagccaagactttatatgccaatg

SEQ ID NO: 152607 - DNA, 25 bp, Saccharomyces pastorianus
aatggagggataggcgcttttttca

SEQ ID NO: 152608 - DNA, 25 bp, Saccharomyces pastorianus
ggaaactttgtatttttggagcatt

SEQ ID NO: 152609 - DNA, 25 bp, Saccharomyces pastorianus
agtctgtcatgcaaacggataattt

SEQ ID NO: 152610 - DNA, 25 bp, Saccharomyces pastorianus
gtctggcactgccttatggttgatg

SEQ ID NO: 152611 - DNA, 25 bp, Saccharomyces pastorianus
atgctaagagctgctcccgccaatg

SEQ ID NO: 152612 - DNA, 25 bp, Saccharomyces pastorianus
ttctatttccagtgtagccaagact

SEQ ID NO: 152613 - DNA, 25 bp, Saccharomyces pastorianus
tgctcccgccaatggtgccactttt

SEQ ID NO: 152614 - DNA, 25 bp, Saccharomyces pastorianus
tattgcgcaagtgctagtggccagc

SEQ ID NO: 152615 - DNA, 25 bp, Saccharomyces pastorianus
tgaagaatttccatctcctcaacta

SEQ ID NO: 152616 - DNA, 25 bp, Saccharomyces pastorianus
tggccagccctttgatacgacaaaa

SEQ ID NO: 152617 - DNA, 25 bp, Saccharomyces pastorianus
atttccatctcctcaactaatcgat

SEQ ID NO: 152618 - DNA, 25 bp, Saccharomyces pastorianus
tagtggccagccctttgatacgaca

SEQ ID NO: 152619 - DNA, 25 bp, Saccharomyces pastorianus
tccatctcctcaactaatcgatgat

SEQ ID NO: 152620 - DNA, 25 bp, Saccharomyces pastorianus
gccagccctttgatacgacaaaagt

SEQ ID NO: 152621 - DNA, 25 bp, Saccharomyces pastorianus
gtctgaagaatttccatctcctcaa

SEQ ID NO: 152622 - DNA, 25 bp, Saccharomyces pastorianus
atgtctgaagaatttccatctcctc

SEQ ID NO: 152623 - DNA, 25 bp, Saccharomyces pastorianus
agccctttgatacgacaaaagttag

SEQ ID NO: 152624 - DNA, 25 bp, Saccharomyces pastorianus
aagaatttccatctcctcaactaat

SEQ ID NO: 152625 - DNA, 25 bp, Saccharomyces pastorianus
aatttactcatgacgaaagtggatt

SEQ ID NO: 152626 - DNA, 25 bp, Saccharomyces pastorianus
gcgttgttagccaaaatccaggagt

SEQ ID NO: 152627 - DNA, 25 bp, Saccharomyces pastorianus
ctagctatatgcatcgaagggactg

SEQ ID NO: 152628 - DNA, 25 bp, Saccharomyces pastorianus
caaattttccagattgaggcggttc

SEQ ID NO: 152629 - DNA, 25 bp, Saccharomyces pastorianus
ggtcttgatactgacaaattttcca

SEQ ID NO: 152630 - DNA, 25 bp, Saccharomyces pastorianus
acacgaattatggtcttgatactga

SEQ ID NO: 152631 - DNA, 25 bp, Saccharomyces pastorianus
ttcagtcatacacgaattatggtct

SEQ ID NO: 152632 - DNA, 25 bp, Saccharomyces pastorianus
gaagggactgcgttgttagccaaaa

SEQ ID NO: 152633 - DNA, 25 bp, Saccharomyces pastorianus
acgaaagtggattacatttgattca

SEQ ID NO: 152634 - DNA, 25 bp, Saccharomyces pastorianus
gtctctgagcaaggccgaatttact

SEQ ID NO: 152635 - DNA, 25 bp, Saccharomyces pastorianus
ggactttacaagtcgaaagaggatt

SEQ ID NO: 152636 - DNA, 25 bp, Saccharomyces pastorianus
ttatcatgtgtagaaaagtgtcccc

SEQ ID NO: 152637 - DNA, 25 bp, Saccharomyces pastorianus
aatggcaatagaaaacttacgataa

SEQ ID NO: 152638 - DNA, 25 bp, Saccharomyces pastorianus
ccccacaaatcacttttatagctaa

SEQ ID NO: 152639 - DNA, 25 bp, Saccharomyces pastorianus
agctaagtatgttacagcgaacgat

SEQ ID NO: 152640 - DNA, 25 bp, Saccharomyces pastorianus
cttacgataagggatgaacaatggc

SEQ ID NO: 152641 - DNA, 25 bp, Saccharomyces pastorianus
caatggcctgagttggcagatccaa

SEQ ID NO: 152642 - DNA, 25 bp, Saccharomyces pastorianus
ctccctatgatatttttggcattcc

SEQ ID NO: 152643 - DNA, 25 bp, Saccharomyces pastorianus
gcagatccaactccctatgatattt

SEQ ID NO: 152644 - DNA, 25 bp, Saccharomyces pastorianus
tttggcattccaaaggccggatctg

SEQ ID NO: 152645 - DNA, 25 bp, Saccharomyces pastorianus
tacaccataagttcgtatacccatt

SEQ ID NO: 152646 - DNA, 25 bp, Saccharomyces pastorianus
ttcaagtggcacttatcatgtgtag

SEQ ID NO: 152647 - DNA, 25 bp, Saccharomyces pastorianus
gaattcaagaaaacatcaacccatg

SEQ ID NO: 152648 - DNA, 25 bp, Saccharomyces pastorianus
caagaaaacatcaacccatggaccg

SEQ ID NO: 152649 - DNA, 25 bp, Saccharomyces pastorianus
attcaagaaaacatcaacccatgga

SEQ ID NO: 152650 - DNA, 25 bp, Saccharomyces pastorianus
ttcaagaaaacatcaacccatggac

SEQ ID NO: 152651 - DNA, 25 bp, Saccharomyces pastorianus
gaaagaattcaagaaaacatcaacc

SEQ ID NO: 152652 - DNA, 25 bp, Saccharomyces pastorianus
aagaattcaagaaaacatcaaccca

SEQ ID NO: 152653 - DNA, 25 bp, Saccharomyces pastorianus
cgaaagaattcaagaaaacatcaac

SEQ ID NO: 152654 - DNA, 25 bp, Saccharomyces pastorianus
tcaagaaaacatcaacccatggacc

SEQ ID NO: 152655 - DNA, 25 bp, Saccharomyces pastorianus
agaattcaagaaaacatcaacccat

SEQ ID NO: 152656 - DNA, 25 bp, Saccharomyces pastorianus
aattcaagaaaacatcaacccatgg

SEQ ID NO: 152657 - DNA, 25 bp, Saccharomyces pastorianus
aaatagctcaaccatcgtctagcgg

SEQ ID NO: 152658 - DNA, 25 bp, Saccharomyces pastorianus
ttaatcgggttatgcgtgtgttaca

SEQ ID NO: 152659 - DNA, 25 bp, Saccharomyces pastorianus
aaccatcgtctagcggctctaaaga

SEQ ID NO: 152660 - DNA, 25 bp, Saccharomyces pastorianus
ctggttctccctgattcagagtgta

SEQ ID NO: 152661 - DNA, 25 bp, Saccharomyces pastorianus
gaagacatcatcgttgcctataagg

SEQ ID NO: 152662 - DNA, 25 bp, Saccharomyces pastorianus
tatggccgctattttcttgaggaac

SEQ ID NO: 152663 - DNA, 25 bp, Saccharomyces pastorianus
tcctgcaatcaagctattcatgagt

SEQ ID NO: 152664 - DNA, 25 bp, Saccharomyces pastorianus
taaggcaccatctccaatggaccag

SEQ ID NO: 152665 - DNA, 25 bp, Saccharomyces pastorianus
ttttccctcaacaaatagctcaacc

SEQ ID NO: 152666 - DNA, 25 bp, Saccharomyces pastorianus
gtgtacactactacctgaacaccga

SEQ ID NO: 152667 - DNA, 25 bp, Saccharomyces pastorianus
gttacatgaacttagttttccctca

SEQ ID NO: 152668 - DNA, 25 bp, Saccharomyces pastorianus
ggtgtgttacaaagcagttttccaa

SEQ ID NO: 152669 - DNA, 25 bp, Saccharomyces pastorianus
agtacatctctacgagcctggtttt

SEQ ID NO: 152670 - DNA, 25 bp, Saccharomyces pastorianus
ggtgacaataattcgttccaaatcg

SEQ ID NO: 152671 - DNA, 25 bp, Saccharomyces pastorianus
cgagcgcacatattcctacttggag

SEQ ID NO: 152672 - DNA, 25 bp, Saccharomyces pastorianus
agaaagacacgaacctgaggcctta

SEQ ID NO: 152673 - DNA, 25 bp, Saccharomyces pastorianus
gagggctttctcgaatcatcataaa

SEQ ID NO: 152674 - DNA, 25 bp, Saccharomyces pastorianus
atgggcttctgggtgatagattcaa

SEQ ID NO: 152675 - DNA, 25 bp, Saccharomyces pastorianus
atcgcatccaaaatcgtcaatcctc

SEQ ID NO: 152676 - DNA, 25 bp, Saccharomyces pastorianus
gaaaagttatcctcgagcgcacata

SEQ ID NO: 152677 - DNA, 25 bp, Saccharomyces pastorianus
aaatcgatccatttgatgtctgtga

SEQ ID NO: 152678 - DNA, 25 bp, Saccharomyces pastorianus
gacaactacttggaattgatcgcat

SEQ ID NO: 152679 - DNA, 25 bp, Saccharomyces pastorianus
caactggtacgattggttttatggt

SEQ ID NO: 152680 - DNA, 25 bp, Saccharomyces pastorianus
gaaagcctgttctgaagttttccca

SEQ ID NO: 152681 - DNA, 25 bp, Saccharomyces pastorianus
aacttgcaatgtcaagaagccacta

SEQ ID NO: 152682 - DNA, 25 bp, Saccharomyces pastorianus
gaggctgaattatacagatactata

SEQ ID NO: 152683 - DNA, 25 bp, Saccharomyces pastorianus
acgattggttttatggtttgctcca

SEQ ID NO: 152684 - DNA, 25 bp, Saccharomyces pastorianus
ttcacttgccaatcattaaggactt

SEQ ID NO: 152685 - DNA, 25 bp, Saccharomyces pastorianus
gaaaattcacgaagcttcctttgtt

SEQ ID NO: 152686 - DNA, 25 bp, Saccharomyces pastorianus
atgtggattcacttgccaatcatta

SEQ ID NO: 152687 - DNA, 25 bp, Saccharomyces pastorianus
ggttttatggtttgctccaaagata

SEQ ID NO: 152688 - DNA, 25 bp, Saccharomyces pastorianus
tgaaatctctgatgagaaggaggct

SEQ ID NO: 152689 - DNA, 25 bp, Saccharomyces pastorianus
aaggacttaaagaaagcctgttctg

SEQ ID NO: 152690 - DNA, 25 bp, Saccharomyces pastorianus
gaaagttttacaccatgagaagtca

SEQ ID NO: 152691 - DNA, 25 bp, Saccharomyces pastorianus
cttgaattcccatccaaatcctaag

SEQ ID NO: 152692 - DNA, 25 bp, Saccharomyces pastorianus
gacccatattggtgatggtttccaa

SEQ ID NO: 152693 - DNA, 25 bp, Saccharomyces pastorianus
tagactatcaaaggagtacctacca

SEQ ID NO: 152694 - DNA, 25 bp, Saccharomyces pastorianus
tagataatgtaattcaagccaccga

SEQ ID NO: 152695 - DNA, 25 bp, Saccharomyces pastorianus
gattccgttgaggaagcctggttat

SEQ ID NO: 152696 - DNA, 25 bp, Saccharomyces pastorianus
gcctcttattctcacccaaaggtta

SEQ ID NO: 152697 - DNA, 25 bp, Saccharomyces pastorianus
aagccaccgaaagggatgaatttgc

SEQ ID NO: 152698 - DNA, 25 bp, Saccharomyces pastorianus
gaggttgtcaagcatgattccgttg

SEQ ID NO: 152699 - DNA, 25 bp, Saccharomyces pastorianus
caggccaggccatgactttaaaagt

SEQ ID NO: 152700 - DNA, 25 bp, Saccharomyces pastorianus
ttgatcttcaaatccactacatatg

SEQ ID NO: 152701 - DNA, 25 bp, Saccharomyces pastorianus
attctccacctcgactaaagacaaa

SEQ ID NO: 152702 - DNA, 25 bp, Saccharomyces pastorianus
gatggtgccaatgacctcggattca

SEQ ID NO: 152703 - DNA, 25 bp, Saccharomyces pastorianus
gtctccacacctagttcaaattcaa

SEQ ID NO: 152704 - DNA, 25 bp, Saccharomyces pastorianus
gaaattttatctgaacccgcaatag

SEQ ID NO: 152705 - DNA, 25 bp, Saccharomyces pastorianus
gatcatggtgtactgcaaggcacta

SEQ ID NO: 152706 - DNA, 25 bp, Saccharomyces pastorianus
caccgcctctgtttcgaatcaagaa

SEQ ID NO: 152707 - DNA, 25 bp, Saccharomyces pastorianus
gaatcgtcggtcttacaactaattg

SEQ ID NO: 152708 - DNA, 25 bp, Saccharomyces pastorianus
gaagatcatatcattctcgacacta

SEQ ID NO: 152709 - DNA, 25 bp, Saccharomyces pastorianus
gaaagacgtcagttctaagcctagt

SEQ ID NO: 152710 - DNA, 25 bp, Saccharomyces pastorianus
tgaacctgactatcaagctccattc

SEQ ID NO: 152711 - DNA, 25 bp, Saccharomyces pastorianus
taagcctagtaaacctgaatcgtcg

SEQ ID NO: 152712 - DNA, 25 bp, Saccharomyces pastorianus
gacggcatctaaaattatcgtgata

SEQ ID NO: 152713 - DNA, 25 bp, Saccharomyces pastorianus
gactcttatgtggagactttagact

SEQ ID NO: 152714 - DNA, 25 bp, Saccharomyces pastorianus
ggagaatataacacgactttgtcaa

SEQ ID NO: 152715 - DNA, 25 bp, Saccharomyces pastorianus
gacagaattcaagacgttaaactcg

SEQ ID NO: 152716 - DNA, 25 bp, Saccharomyces pastorianus
gttaaactcgtactagcatctaatt

SEQ ID NO: 152717 - DNA, 25 bp, Saccharomyces pastorianus
gggtctcgagtccttcacagaagaa

SEQ ID NO: 152718 - DNA, 25 bp, Saccharomyces pastorianus
gactttgtcaaactttgggtctcga

SEQ ID NO: 152719 - DNA, 25 bp, Saccharomyces pastorianus
tatcgtgatagatgttgactacaat

SEQ ID NO: 152720 - DNA, 25 bp, Saccharomyces pastorianus
tcaaggattacaaacctggttccat

SEQ ID NO: 152721 - DNA, 25 bp, Saccharomyces pastorianus
acctggttccataactttggagaat

SEQ ID NO: 152722 - DNA, 25 bp, Saccharomyces pastorianus
gaactttcaagattatcgacggcat

SEQ ID NO: 152723 - DNA, 25 bp, Saccharomyces pastorianus
ctggttccgaagtgtctttgagtgt

SEQ ID NO: 152724 - DNA, 25 bp, Saccharomyces pastorianus
tttgacaaacaacccctagaataca

SEQ ID NO: 152725 - DNA, 25 bp, Saccharomyces pastorianus
tattttagtggctactggttccgaa

SEQ ID NO: 152726 - DNA, 25 bp, Saccharomyces pastorianus
gaaagcgcttctaagggtggttacg

SEQ ID NO: 152727 - DNA, 25 bp, Saccharomyces pastorianus
ttctctaccagatttcttcactttt

SEQ ID NO: 152728 - DNA, 25 bp, Saccharomyces pastorianus
ttgacagatttggtgcctccggtaa

SEQ ID NO: 152729 - DNA, 25 bp, Saccharomyces pastorianus
cgctcatcaatccttcggtattgac

SEQ ID NO: 152730 - DNA, 25 bp, Saccharomyces pastorianus
atcaaggctcgtgttgtttctctac

SEQ ID NO: 152731 - DNA, 25 bp, Saccharomyces pastorianus
tgaagttttggctaccacatgttgg

SEQ ID NO: 152732 - DNA, 25 bp, Saccharomyces pastorianus
ggtagctctattgaaagcgcttcta

SEQ ID NO: 152733 - DNA, 25 bp, Saccharomyces pastorianus
gaagctgctaagactttggccgcaa

SEQ ID NO: 152734 - DNA, 25 bp, Saccharomyces pastorianus
ttaaagccaggtgtcgaagccaaca

SEQ ID NO: 152735 - DNA, 25 bp, Saccharomyces pastorianus
cctatgttttcttgggtgacggttg

SEQ ID NO: 152736 - DNA, 25 bp, Saccharomyces pastorianus
gtgctaccagtatctcattcgatga

SEQ ID NO: 152737 - DNA, 25 bp, Saccharomyces pastorianus
tgcacggtgccccattgaaagcaga

SEQ ID NO: 152738 - DNA, 25 bp, Saccharomyces pastorianus
tgctcaagctaagttatccaaggac

SEQ ID NO: 152739 - DNA, 25 bp, Saccharomyces pastorianus
aaccattggttacggttccttgcat

SEQ ID NO: 152740 - DNA, 25 bp, Saccharomyces pastorianus
gatcactatcgatggtgctaccagt

SEQ ID NO: 152741 - DNA, 25 bp, Saccharomyces pastorianus
taaccttgctgccacttacaacaag

SEQ ID NO: 152742 - DNA, 25 bp, Saccharomyces pastorianus
aagccaggctttaccttgtctgaca

SEQ ID NO: 152743 - DNA, 25 bp, Saccharomyces pastorianus
ttgtctgacaactacacctatgttt

SEQ ID NO: 152744 - DNA, 25 bp, Saccharomyces pastorianus
agaagcttcctccttggctggtcat

SEQ ID NO: 152745 - DNA, 25 bp, Saccharomyces pastorianus
aatcaagaagtcacgatcaagtatg

SEQ ID NO: 152746 - DNA, 25 bp, Saccharomyces pastorianus
atgaatcatgcctacgatcgtacct

SEQ ID NO: 152747 - DNA, 25 bp, Saccharomyces pastorianus
aatcatgcctacgatcgtaccttct

SEQ ID NO: 152748 - DNA, 25 bp, Saccharomyces pastorianus
gaagtcacgatcaagtatgtaggta

SEQ ID NO: 152749 - DNA, 25 bp, Saccharomyces pastorianus
ctacgatcgtaccttcttggctttc

SEQ ID NO: 152750 - DNA, 25 bp, Saccharomyces pastorianus
tggctttcccaagaaaatttttcat

SEQ ID NO: 152751 - DNA, 25 bp, Saccharomyces pastorianus
tcgtaccttcttggctttcccaaga

SEQ ID NO: 152752 - DNA, 25 bp, Saccharomyces pastorianus
aaagagtttatatatgaatcatgcc

SEQ ID NO: 152753 - DNA, 25 bp, Saccharomyces pastorianus
gtcacgatcaagtatgtaggtaaaa

SEQ ID NO: 152754 - DNA, 25 bp, Saccharomyces pastorianus
atgcctacgatcgtaccttcttggc

SEQ ID NO: 152755 - DNA, 25 bp, Saccharomyces pastorianus
gatcgtaccttcttggctttcccaa

SEQ ID NO: 152756 - DNA, 25 bp, Saccharomyces pastorianus
gatgaaacctgccaaattcactccg

SEQ ID NO: 152757 - DNA, 25 bp, Saccharomyces pastorianus
gaaataccgatatgtcaggacttct

SEQ ID NO: 152758 - DNA, 25 bp, Saccharomyces pastorianus
acagggcaagacaccatattttagt

SEQ ID NO: 152759 - DNA, 25 bp, Saccharomyces pastorianus
attatatcacccttaacacctgacg

SEQ ID NO: 152760 - DNA, 25 bp, Saccharomyces pastorianus
ttctgaacctgagaagacctccata

SEQ ID NO: 152761 - DNA, 25 bp, Saccharomyces pastorianus
cacccttaacacctgacgattttga

SEQ ID NO: 152762 - DNA, 25 bp, Saccharomyces pastorianus
gaaagcattattagcgggcctcctt

SEQ ID NO: 152763 - DNA, 25 bp, Saccharomyces pastorianus
ttcactccgcttctgaacctgagaa

SEQ ID NO: 152764 - DNA, 25 bp, Saccharomyces pastorianus
gacctccataagtcccacatttggg

SEQ ID NO: 152765 - DNA, 25 bp, Saccharomyces pastorianus
agcgggcctcctttgcaagagaata

SEQ ID NO: 152766 - DNA, 25 bp, Saccharomyces pastorianus
aagactcttttgaaataccgatatg

SEQ ID NO: 152767 - DNA, 25 bp, Saccharomyces pastorianus
accaccatgcattatcgtctgttct

SEQ ID NO: 152768 - DNA, 25 bp, Saccharomyces pastorianus
gatatttactcattggtttacagcc

SEQ ID NO: 152769 - DNA, 25 bp, Saccharomyces pastorianus
cgtctgttctcacgttaatcatgaa

SEQ ID NO: 152770 - DNA, 25 bp, Saccharomyces pastorianus
aaatccatcgagttagacccctcat

SEQ ID NO: 152771 - DNA, 25 bp, Saccharomyces pastorianus
gtttacagcctgagacatctatgga

SEQ ID NO: 152772 - DNA, 25 bp, Saccharomyces pastorianus
gtcagcgatggtggatttgaactat

SEQ ID NO: 152773 - DNA, 25 bp, Saccharomyces pastorianus
tcatgaactcgcaagcccaatgttg

SEQ ID NO: 152774 - DNA, 25 bp, Saccharomyces pastorianus
gaagctactggtttctaattccaat

SEQ ID NO: 152775 - DNA, 25 bp, Saccharomyces pastorianus
actgcatactagatgcttggactga

SEQ ID NO: 152776 - DNA, 25 bp, Saccharomyces pastorianus
tcgatgtggcggttagcttactaat

SEQ ID NO: 152777 - DNA, 25 bp, Saccharomyces pastorianus
gagcaattgagatcctataatacca

SEQ ID NO: 152778 - DNA, 25 bp, Saccharomyces pastorianus
ggtatctaggctactgtctaatatc

SEQ ID NO: 152779 - DNA, 25 bp, Saccharomyces pastorianus
tcccggtatctaggctactgtctaa

SEQ ID NO: 152780 - DNA, 25 bp, Saccharomyces pastorianus
gtctaatatcgtccacgagggtcag

SEQ ID NO: 152781 - DNA, 25 bp, Saccharomyces pastorianus
atatcgtccacgagggtcagtatcc

SEQ ID NO: 152782 - DNA, 25 bp, Saccharomyces pastorianus
aggctactgtctaatatcgtccacg

SEQ ID NO: 152783 - DNA, 25 bp, Saccharomyces pastorianus
gtccacgagggtcagtatcccataa

SEQ ID NO: 152784 - DNA, 25 bp, Saccharomyces pastorianus
ccacgagggtcagtatcccataagg

SEQ ID NO: 152785 - DNA, 25 bp, Saccharomyces pastorianus
gctactgtctaatatcgtccacgag

SEQ ID NO: 152786 - DNA, 25 bp, Saccharomyces pastorianus
agaccgtcccggtatctaggctact

SEQ ID NO: 152787 - DNA, 25 bp, Saccharomyces pastorianus
tactgtctaatatcgtccacgaggg

SEQ ID NO: 152788 - DNA, 25 bp, Saccharomyces pastorianus
ccggtatctaggctactgtctaata

SEQ ID NO: 152789 - DNA, 25 bp, Saccharomyces pastorianus
acaacagtcacaaccgctactaatg

SEQ ID NO: 152790 - DNA, 25 bp, Saccharomyces pastorianus
atcttgttgacgcatctggagtagc

SEQ ID NO: 152791 - DNA, 25 bp, Saccharomyces pastorianus
tgagaattttccagttccaccgtcg

SEQ ID NO: 152792 - DNA, 25 bp, Saccharomyces pastorianus
ctaatgatgatgtttccagttctga

SEQ ID NO: 152793 - DNA, 25 bp, Saccharomyces pastorianus
ggtgatccccatgtgaaagcttcaa

SEQ ID NO: 152794 - DNA, 25 bp, Saccharomyces pastorianus
ttctgtatcctcaaatgattctcag

SEQ ID NO: 152795 - DNA, 25 bp, Saccharomyces pastorianus
ttccaccgtcggcttcaaatatgaa

SEQ ID NO: 152796 - DNA, 25 bp, Saccharomyces pastorianus
gataatcctatccttacatccaatc

SEQ ID NO: 152797 - DNA, 25 bp, Saccharomyces pastorianus
gagaccagtaccaagaaggccttca

SEQ ID NO: 152798 - DNA, 25 bp, Saccharomyces pastorianus
gaagacctctcagaatcgttttaat

SEQ ID NO: 152799 - DNA, 25 bp, Saccharomyces pastorianus
gattctcagaattcgctcaaaaatg

SEQ ID NO: 152800 - DNA, 25 bp, Saccharomyces pastorianus
tttttaatcaaaccacctccatcta

SEQ ID NO: 152801 - DNA, 25 bp, Saccharomyces pastorianus
tattcacctctcctgagttattaga

SEQ ID NO: 152802 - DNA, 25 bp, Saccharomyces pastorianus
gaattgtctcctgagggttcgacta

SEQ ID NO: 152803 - DNA, 25 bp, Saccharomyces pastorianus
gatcctaatgtttcagctaacgcag

SEQ ID NO: 152804 - DNA, 25 bp, Saccharomyces pastorianus
aagtggctgaatgctcttcttggga

SEQ ID NO: 152805 - DNA, 25 bp, Saccharomyces pastorianus
agtaattccctctcaactggtttat

SEQ ID NO: 152806 - DNA, 25 bp, Saccharomyces pastorianus
gtcgacgtgggtgatagtgctccat

SEQ ID NO: 152807 - DNA, 25 bp, Saccharomyces pastorianus
agaatttggtatgcttttcgcaccg

SEQ ID NO: 152808 - DNA, 25 bp, Saccharomyces pastorianus
gactaagattgctatcgacgttcaa

SEQ ID NO: 152809 - DNA, 25 bp, Saccharomyces pastorianus
aaccccagggttcttggatgatttg

SEQ ID NO: 152810 - DNA, 25 bp, Saccharomyces pastorianus
agattatttctttctctgcaacaaa

SEQ ID NO: 152811 - DNA, 25 bp, Saccharomyces pastorianus
gaaacatgtctacgcgggctagctt

SEQ ID NO: 152812 - DNA, 25 bp, Saccharomyces pastorianus
aacttgctagttacgattccaggaa

SEQ ID NO: 152813 - DNA, 25 bp, Saccharomyces pastorianus
tgctgcgcttcaaggatgcctacaa

SEQ ID NO: 152814 - DNA, 25 bp, Saccharomyces pastorianus
agtacctgcctgaccagtacgatta

SEQ ID NO: 152815 - DNA, 25 bp, Saccharomyces pastorianus
agatgtttctcgattaagcctgtat

SEQ ID NO: 152816 - DNA, 25 bp, Saccharomyces pastorianus
ttgtaccgtctctctgacaacaagt

SEQ ID NO: 152817 - DNA, 25 bp, Saccharomyces pastorianus
tacgattacgactctttagcccgaa

SEQ ID NO: 152818 - DNA, 25 bp, Saccharomyces pastorianus
gcaagtatcccgcaagttgtaccgt

SEQ ID NO: 152819 - DNA, 25 bp, Saccharomyces pastorianus
taagcctgtattgccaagactgcga

SEQ ID NO: 152820 - DNA, 25 bp, Saccharomyces pastorianus
aaatgcattgctcgagctgcgcatg

SEQ ID NO: 152821 - DNA, 25 bp, Saccharomyces pastorianus
aaatccagatgcacgtgcgacgagc

SEQ ID NO: 152822 - DNA, 25 bp, Saccharomyces pastorianus
gcactctgatgcttatgggaaaatg

SEQ ID NO: 152823 - DNA, 25 bp, Saccharomyces pastorianus
gaagtgactcgcaagcaggctgaaa

SEQ ID NO: 152824 - DNA, 25 bp, Saccharomyces pastorianus
gaagcgagctgtttgtaagtatcat

SEQ ID NO: 152825 - DNA, 25 bp, Saccharomyces pastorianus
aaagcttcttattcaacgaggacag

SEQ ID NO: 152826 - DNA, 25 bp, Saccharomyces pastorianus
ggacgagtatccgattttcgaagac

SEQ ID NO: 152827 - DNA, 25 bp, Saccharomyces pastorianus
aatgccgattgtctattatacttac

SEQ ID NO: 152828 - DNA, 25 bp, Saccharomyces pastorianus
acgaggacagtttgcaagtgtgcgt

SEQ ID NO: 152829 - DNA, 25 bp, Saccharomyces pastorianus
gacttaggtctataaaatcagccaa

SEQ ID NO: 152830 - DNA, 25 bp, Saccharomyces pastorianus
taaaccgcataagacagctggctgt

SEQ ID NO: 152831 - DNA, 25 bp, Saccharomyces pastorianus
gggacaactggatcgattctatcaa

SEQ ID NO: 152832 - DNA, 25 bp, Saccharomyces pastorianus
gaatggactggttaatctacgaaat

SEQ ID NO: 152833 - DNA, 25 bp, Saccharomyces pastorianus
gtataatacccaaggaagcttccct

SEQ ID NO: 152834 - DNA, 25 bp, Saccharomyces pastorianus
atagccggtctggatgcaagaactc

SEQ ID NO: 152835 - DNA, 25 bp, Saccharomyces pastorianus
gacattaacgtttattcgcacatta

SEQ ID NO: 152836 - DNA, 25 bp, Saccharomyces pastorianus
gggtatttacgctttcacaacagtc

SEQ ID NO: 152837 - DNA, 25 bp, Saccharomyces pastorianus
tcttgcccaccaagtacgtcgggta

SEQ ID NO: 152838 - DNA, 25 bp, Saccharomyces pastorianus
catataatccaagctctagttctag

SEQ ID NO: 152839 - DNA, 25 bp, Saccharomyces pastorianus
cccaatcttttatccgctaacgaat

SEQ ID NO: 152840 - DNA, 25 bp, Saccharomyces pastorianus
ttagtgcatctggtatagccccatc

SEQ ID NO: 152841 - DNA, 25 bp, Saccharomyces pastorianus
aatagcaatagaccggcttctaact

SEQ ID NO: 152842 - DNA, 25 bp, Saccharomyces pastorianus
gaattcgatgtattctcccatagac

SEQ ID NO: 152843 - DNA, 25 bp, Saccharomyces pastorianus
gccaacctcggaacggctaacagta

SEQ ID NO: 152844 - DNA, 25 bp, Saccharomyces pastorianus
cacacagttcgatgtcgtggaagaa

SEQ ID NO: 152845 - DNA, 25 bp, Saccharomyces pastorianus
aggaccgagtgaaaggattgacttc

SEQ ID NO: 152846 - DNA, 25 bp, Saccharomyces pastorianus
ttggatctcgatacaggtgattacg

SEQ ID NO: 152847 - DNA, 25 bp, Saccharomyces pastorianus
acaggtgattacgattttttacata

SEQ ID NO: 152848 - DNA, 25 bp, Saccharomyces pastorianus
ttgaacgattcagagggcatttttg

SEQ ID NO: 152849 - DNA, 25 bp, Saccharomyces pastorianus
acgctgctggcatacttcaaaagaa

SEQ ID NO: 152850 - DNA, 25 bp, Saccharomyces pastorianus
atttggtggatttggatctcgatac

SEQ ID NO: 152851 - DNA, 25 bp, Saccharomyces pastorianus
gagatctcaagttttcgcacaggaa

SEQ ID NO: 152852 - DNA, 25 bp, Saccharomyces pastorianus
attggttatgccatccagctctgga

SEQ ID NO: 152853 - DNA, 25 bp, Saccharomyces pastorianus
aaaatagcaagcacgctgctggcat

SEQ ID NO: 152854 - DNA, 25 bp, Saccharomyces pastorianus
cagctctggatcttttggacttgga

SEQ ID NO: 152855 - DNA, 25 bp, Saccharomyces pastorianus
tatggcacaacccttcggtggtcat

SEQ ID NO: 152856 - DNA, 25 bp, Saccharomyces pastorianus
gattgaattatttatggcacaaccc

SEQ ID NO: 152857 - DNA, 25 bp, Saccharomyces pastorianus
actaatccaatagcaatcatgaggg

SEQ ID NO: 152858 - DNA, 25 bp, Saccharomyces pastorianus
ttatttatggcacaacccttcggtg

SEQ ID NO: 152859 - DNA, 25 bp, Saccharomyces pastorianus
gatcatgaaatttactaatccaata

SEQ ID NO: 152860 - DNA, 25 bp, Saccharomyces pastorianus
agtaatgggacagatcatgaaattt

SEQ ID NO: 152861 - DNA, 25 bp, Saccharomyces pastorianus
ggcacaacccttcggtggtcattcg

SEQ ID NO: 152862 - DNA, 25 bp, Saccharomyces pastorianus
tatttatggcacaacccttcggtgg

SEQ ID NO: 152863 - DNA, 25 bp, Saccharomyces pastorianus
aattatttatggcacaacccttcgg

SEQ ID NO: 152864 - DNA, 25 bp, Saccharomyces pastorianus
atttatggcacaacccttcggtggt

SEQ ID NO: 152865 - DNA, 25 bp, Saccharomyces pastorianus
tttatggcacaacccttcggtggtc

SEQ ID NO: 152866 - DNA, 25 bp, Saccharomyces pastorianus
atacgtttccaacagatggcgttag

SEQ ID NO: 152867 - DNA, 25 bp, Saccharomyces pastorianus
tgaagacctgtcaccacttttacaa

SEQ ID NO: 152868 - DNA, 25 bp, Saccharomyces pastorianus
tttaaagctgcaagactcaatgaaa

SEQ ID NO: 152869 - DNA, 25 bp, Saccharomyces pastorianus
aaatacttgatgagtctactaggag

SEQ ID NO: 152870 - DNA, 25 bp, Saccharomyces pastorianus
gatgcagaggtttctcaaagctcat

SEQ ID NO: 152871 - DNA, 25 bp, Saccharomyces pastorianus
atctgctacagaaacagtacttaca

SEQ ID NO: 152872 - DNA, 25 bp, Saccharomyces pastorianus
gatgacattagaaacagggctctga

SEQ ID NO: 152873 - DNA, 25 bp, Saccharomyces pastorianus
gcttcttcctaagtgggcctaattt

SEQ ID NO: 152874 - DNA, 25 bp, Saccharomyces pastorianus
aacagggctctgatagatgtaagta

SEQ ID NO: 152875 - DNA, 25 bp, Saccharomyces pastorianus
aaagctcatctattcgtcgcttctt

SEQ ID NO: 152876 - DNA, 25 bp, Saccharomyces pastorianus
ggagaaccaaatacgtttccaacag

SEQ ID NO: 152877 - DNA, 25 bp, Saccharomyces pastorianus
tttctatgtcgtcatgaacagacca

SEQ ID NO: 152878 - DNA, 25 bp, Saccharomyces pastorianus
acagaccaggtgctagagtcactag

SEQ ID NO: 152879 - DNA, 25 bp, Saccharomyces pastorianus
gaacagaccaggtgctagagtcact

SEQ ID NO: 152880 - DNA, 25 bp, Saccharomyces pastorianus
gttggtaactcccacaagacaacta

SEQ ID NO: 152881 - DNA, 25 bp, Saccharomyces pastorianus
aactcccacaagacaactaaggaag

SEQ ID NO: 152882 - DNA, 25 bp, Saccharomyces pastorianus
atggatttctatgtcgtcatgaaca

SEQ ID NO: 152883 - DNA, 25 bp, Saccharomyces pastorianus
agaccaggtgctagagtcactagaa

SEQ ID NO: 152884 - DNA, 25 bp, Saccharomyces pastorianus
tagagtcactagaagaaagagatgt

SEQ ID NO: 152885 - DNA, 25 bp, Saccharomyces pastorianus
ggtaactcccacaagacaactaagg

SEQ ID NO: 152886 - DNA, 25 bp, Saccharomyces pastorianus
ggatttctatgtcgtcatgaacaga

SEQ ID NO: 152887 - DNA, 25 bp, Saccharomyces pastorianus
caggtgctagagtcactagaagaaa

SEQ ID NO: 152888 - DNA, 25 bp, Saccharomyces pastorianus
gatcgaaaagttggtcttaaacatt

SEQ ID NO: 152889 - DNA, 25 bp, Saccharomyces pastorianus
ggtcttaaacatttctgttggtgaa

SEQ ID NO: 152890 - DNA, 25 bp, Saccharomyces pastorianus
agatcgaaaagttggtcttaaacat

SEQ ID NO: 152891 - DNA, 25 bp, Saccharomyces pastorianus
gttggtcttaaacatttctgttggt

SEQ ID NO: 152892 - DNA, 25 bp, Saccharomyces pastorianus
atgtctgccaaagctcaaaacccta

SEQ ID NO: 152893 - DNA, 25 bp, Saccharomyces pastorianus
taaacatttctgttggtgaatctgg

SEQ ID NO: 152894 - DNA, 25 bp, Saccharomyces pastorianus
tggtcttaaacatttctgttggtga

SEQ ID NO: 152895 - DNA, 25 bp, Saccharomyces pastorianus
agttggtcttaaacatttctgttgg

SEQ ID NO: 152896 - DNA, 25 bp, Saccharomyces pastorianus
aagttggtcttaaacatttctgttg

SEQ ID NO: 152897 - DNA, 25 bp, Saccharomyces pastorianus
tgccaaagctcaaaaccctatgcgt

SEQ ID NO: 152898 - DNA, 25 bp, Saccharomyces pastorianus
gaaaagttggtcttaaacatttctg

SEQ ID NO: 152899 - DNA, 25 bp, Saccharomyces pastorianus
gcatcatcccatcccaataattact

SEQ ID NO: 152900 - DNA, 25 bp, Saccharomyces pastorianus
gttgatgcacaacccaaacctaagc

SEQ ID NO: 152901 - DNA, 25 bp, Saccharomyces pastorianus
ggttcgtttgatccttcgtccttgt

SEQ ID NO: 152902 - DNA, 25 bp, Saccharomyces pastorianus
aaatgccagggctacatcctctgtg

SEQ ID NO: 152903 - DNA, 25 bp, Saccharomyces pastorianus
atcctctgtggcagctacgtcagtt

SEQ ID NO: 152904 - DNA, 25 bp, Saccharomyces pastorianus
atctcagttatctgcgtcggcatca

SEQ ID NO: 152905 - DNA, 25 bp, Saccharomyces pastorianus
tgcatgataaacaaccgggttcgtt

SEQ ID NO: 152906 - DNA, 25 bp, Saccharomyces pastorianus
tccagacgccgcatgtaccagatag

SEQ ID NO: 152907 - DNA, 25 bp, Saccharomyces pastorianus
cggcggctgcttctcaaaatgttga

SEQ ID NO: 152908 - DNA, 25 bp, Saccharomyces pastorianus
tcgtccttgtctcgattttttcaac

SEQ ID NO: 152909 - DNA, 25 bp, Saccharomyces pastorianus
accagataggcctccatctcagtta

SEQ ID NO: 152910 - DNA, 25 bp, Saccharomyces pastorianus
gaactaattgatagctcctccgatc

SEQ ID NO: 152911 - DNA, 25 bp, Saccharomyces pastorianus
gcagcatgagccttacaacgaactt

SEQ ID NO: 152912 - DNA, 25 bp, Saccharomyces pastorianus
gtcagaactagcattattgtccaga

SEQ ID NO: 152913 - DNA, 25 bp, Saccharomyces pastorianus
ggattttgacttctaccttgctgac

SEQ ID NO: 152914 - DNA, 25 bp, Saccharomyces pastorianus
gcagtgtcacataagctttcgttga

SEQ ID NO: 152915 - DNA, 25 bp, Saccharomyces pastorianus
atcctctccaggtattggcagttca

SEQ ID NO: 152916 - DNA, 25 bp, Saccharomyces pastorianus
taccttgctgactttacgtcggcat

SEQ ID NO: 152917 - DNA, 25 bp, Saccharomyces pastorianus
acgtcggcatttcacattaaccaaa

SEQ ID NO: 152918 - DNA, 25 bp, Saccharomyces pastorianus
aattctggttgacagactgcctcta

SEQ ID NO: 152919 - DNA, 25 bp, Saccharomyces pastorianus
cctccgatcatgttcctacatttga

SEQ ID NO: 152920 - DNA, 25 bp, Saccharomyces pastorianus
gttagtgtcgcatggatcctctcca

SEQ ID NO: 152921 - DNA, 25 bp, Saccharomyces pastorianus
tagtaaggattttgcttatcgccaa

SEQ ID NO: 152922 - DNA, 25 bp, Saccharomyces pastorianus
tttccatccataagtaacaatagta

SEQ ID NO: 152923 - DNA, 25 bp, Saccharomyces pastorianus
gtttctgatggttcctttccatcca

SEQ ID NO: 152924 - DNA, 25 bp, Saccharomyces pastorianus
gatggttcctttccatccataagta

SEQ ID NO: 152925 - DNA, 25 bp, Saccharomyces pastorianus
gttaccagggtttctgatggttcct

SEQ ID NO: 152926 - DNA, 25 bp, Saccharomyces pastorianus
cacccgttaccagggtttctgatgg

SEQ ID NO: 152927 - DNA, 25 bp, Saccharomyces pastorianus
ggttcctttccatccataagtaaca

SEQ ID NO: 152928 - DNA, 25 bp, Saccharomyces pastorianus
cagggtttctgatggttcctttcca

SEQ ID NO: 152929 - DNA, 25 bp, Saccharomyces pastorianus
atgaacagtacacctcctacgtcac

SEQ ID NO: 152930 - DNA, 25 bp, Saccharomyces pastorianus
tctgatggttcctttccatccataa

SEQ ID NO: 152931 - DNA, 25 bp, Saccharomyces pastorianus
gtcacccgttaccagggtttctgat

SEQ ID NO: 152932 - DNA, 25 bp, Saccharomyces pastorianus
tccggcaagcgcgtattcagatagt

SEQ ID NO: 152933 - DNA, 25 bp, Saccharomyces pastorianus
gtcccactaacatctactgtatcga

SEQ ID NO: 152934 - DNA, 25 bp, Saccharomyces pastorianus
aggtgtttcacccagttgtctagca

SEQ ID NO: 152935 - DNA, 25 bp, Saccharomyces pastorianus
gtagtcataaatcgtctcgtgcctc

SEQ ID NO: 152936 - DNA, 25 bp, Saccharomyces pastorianus
gagggtcagatctttcaccttttga

SEQ ID NO: 152937 - DNA, 25 bp, Saccharomyces pastorianus
atgactcacgattgatctacggcaa

SEQ ID NO: 152938 - DNA, 25 bp, Saccharomyces pastorianus
ggtgttgaagctccttacagcagtt

SEQ ID NO: 152939 - DNA, 25 bp, Saccharomyces pastorianus
aaagttcagcttgtcatattcccca

SEQ ID NO: 152940 - DNA, 25 bp, Saccharomyces pastorianus
tcaaaactgcagtggctctcgcaaa

SEQ ID NO: 152941 - DNA, 25 bp, Saccharomyces pastorianus
gaatgataagtctcttcactcgcgc

SEQ ID NO: 152942 - DNA, 25 bp, Saccharomyces pastorianus
ggttgatttttatccttcgccatta

SEQ ID NO: 152943 - DNA, 25 bp, Saccharomyces pastorianus
gggcaaatcgtcctcgttatataga

SEQ ID NO: 152944 - DNA, 25 bp, Saccharomyces pastorianus
ggcaaacatcaacgtacgccttcag

SEQ ID NO: 152945 - DNA, 25 bp, Saccharomyces pastorianus
tcttcctctgttaccacgttaaaca

SEQ ID NO: 152946 - DNA, 25 bp, Saccharomyces pastorianus
gatggtgtccgttccgaaatttcta

SEQ ID NO: 152947 - DNA, 25 bp, Saccharomyces pastorianus
atatcactccagtagacagttttgt

SEQ ID NO: 152948 - DNA, 25 bp, Saccharomyces pastorianus
tcaagcacgacctcaaatttggcat

SEQ ID NO: 152949 - DNA, 25 bp, Saccharomyces pastorianus
aaaaagtaacgccatcttcctctgt

SEQ ID NO: 152950 - DNA, 25 bp, Saccharomyces pastorianus
ggcatgtccaacaaagacgcttgct

SEQ ID NO: 152951 - DNA, 25 bp, Saccharomyces pastorianus
taaagagttcttccgtgcccaagga

SEQ ID NO: 152952 - DNA, 25 bp, Saccharomyces pastorianus
gcaagtcttgaaccaactccagagg

SEQ ID NO: 152953 - DNA, 25 bp, Saccharomyces pastorianus
gctagttatcattcaccagaggaca

SEQ ID NO: 152954 - DNA, 25 bp, Saccharomyces pastorianus
tcacacagccttttgaccgatgtta

SEQ ID NO: 152955 - DNA, 25 bp, Saccharomyces pastorianus
gggacttgcgtagtatccagagcaa

SEQ ID NO: 152956 - DNA, 25 bp, Saccharomyces pastorianus
cgattactaagtccagattctcaaa

SEQ ID NO: 152957 - DNA, 25 bp, Saccharomyces pastorianus
tccacgcactcttcagatatcagat

SEQ ID NO: 152958 - DNA, 25 bp, Saccharomyces pastorianus
agacgttgactcttgggacttgcgt

SEQ ID NO: 152959 - DNA, 25 bp, Saccharomyces pastorianus
ttatctgtgtacgacgcgaaagacg

SEQ ID NO: 152960 - DNA, 25 bp, Saccharomyces pastorianus
gtgttataagggttcacacagcctt

SEQ ID NO: 152961 - DNA, 25 bp, Saccharomyces pastorianus
taattcattttatagctccacgcac

SEQ ID NO: 152962 - DNA, 25 bp, Saccharomyces pastorianus
aattcacatatccttgaagtcgaag

SEQ ID NO: 152963 - DNA, 25 bp, Saccharomyces pastorianus
acctgattgttagagtccctgtttt

SEQ ID NO: 152964 - DNA, 25 bp, Saccharomyces pastorianus
gtcagcatcactttttgtgcaacct

SEQ ID NO: 152965 - DNA, 25 bp, Saccharomyces pastorianus
gagttaaactgacccatacgaacca

SEQ ID NO: 152966 - DNA, 25 bp, Saccharomyces pastorianus
gaacatcttttatccacatgtcatt

SEQ ID NO: 152967 - DNA, 25 bp, Saccharomyces pastorianus
atgtcatttggtgtctattcttctg

SEQ ID NO: 152968 - DNA, 25 bp, Saccharomyces pastorianus
gaggttccttccaaataggccacat

SEQ ID NO: 152969 - DNA, 25 bp, Saccharomyces pastorianus
ggttacgcatatttatcggcatatt

SEQ ID NO: 152970 - DNA, 25 bp, Saccharomyces pastorianus
gcaccttacgctttaacacatttct

SEQ ID NO: 152971 - DNA, 25 bp, Saccharomyces pastorianus
tattcttctgagcacggatccataa

SEQ ID NO: 152972 - DNA, 25 bp, Saccharomyces pastorianus
gacaaagtttggtcgctcattattt

SEQ ID NO: 152973 - DNA, 25 bp, Saccharomyces pastorianus
tcaactctgtttgatcaggaagcag

SEQ ID NO: 152974 - DNA, 25 bp, Saccharomyces pastorianus
aaatagtctttatctcgcaccttac

SEQ ID NO: 152975 - DNA, 25 bp, Saccharomyces pastorianus
atatacatctggtcctattaggcaa

SEQ ID NO: 152976 - DNA, 25 bp, Saccharomyces pastorianus
gcggaaatgctcacttcatatcgta

SEQ ID NO: 152977 - DNA, 25 bp, Saccharomyces pastorianus
atttgcattcggagcctgttgagcc

SEQ ID NO: 152978 - DNA, 25 bp, Saccharomyces pastorianus
caattcgcatatcaagtgttcaact

SEQ ID NO: 152979 - DNA, 25 bp, Saccharomyces pastorianus
agtgttcaactttacttggaatcaa

SEQ ID NO: 152980 - DNA, 25 bp, Saccharomyces pastorianus
cactacccactgaaaactttgaaca

SEQ ID NO: 152981 - DNA, 25 bp, Saccharomyces pastorianus
cacacccacacgatgataccataaa

SEQ ID NO: 152982 - DNA, 25 bp, Saccharomyces pastorianus
ttacccttaaataagcccacatggg

SEQ ID NO: 152983 - DNA, 25 bp, Saccharomyces pastorianus
agaggcatttttgcatgattttacc

SEQ ID NO: 152984 - DNA, 25 bp, Saccharomyces pastorianus
agatgctaaagccttttcactaccc

SEQ ID NO: 152985 - DNA, 25 bp, Saccharomyces pastorianus
tgagcctttttctgctggtgatgat

SEQ ID NO: 152986 - DNA, 25 bp, Saccharomyces pastorianus
taatgtctccgctttggaactttta

SEQ ID NO: 152987 - DNA, 25 bp, Saccharomyces pastorianus
tctagtgagtccaattgttcatgat

SEQ ID NO: 152988 - DNA, 25 bp, Saccharomyces pastorianus
atctagtgagtccaattgttcatga

SEQ ID NO: 152989 - DNA, 25 bp, Saccharomyces pastorianus
gattatctagtgagtccaattgttc

SEQ ID NO: 152990 - DNA, 25 bp, Saccharomyces pastorianus
ctataatttccgtccaatgggcttt

SEQ ID NO: 152991 - DNA, 25 bp, Saccharomyces pastorianus
ttatctagtgagtccaattgttcat

SEQ ID NO: 152992 - DNA, 25 bp, Saccharomyces pastorianus
gtgagtccaattgttcatgatgaat

SEQ ID NO: 152993 - DNA, 25 bp, Saccharomyces pastorianus
ggattatctagtgagtccaattgtt

SEQ ID NO: 152994 - DNA, 25 bp, Saccharomyces pastorianus
gtccaattgttcatgatgaatttca

SEQ ID NO: 152995 - DNA, 25 bp, Saccharomyces pastorianus
aaagcttctataatttccgtccaat

SEQ ID NO: 152996 - DNA, 25 bp, Saccharomyces pastorianus
tagtgagtccaattgttcatgatga

SEQ ID NO: 152997 - DNA, 25 bp, Saccharomyces pastorianus
gagtccaattgttcatgatgaattt

SEQ ID NO: 152998 - DNA, 25 bp, Saccharomyces pastorianus
catttcgcatcagagacagacggtg

SEQ ID NO: 152999 - DNA, 25 bp, Saccharomyces pastorianus
gcactgaggtagtccataactcggt

SEQ ID NO: 153000 - DNA, 25 bp, Saccharomyces pastorianus
gaatatctccaccaactagaggtta

SEQ ID NO: 153001 - DNA, 25 bp, Saccharomyces pastorianus
accggagactttgtatcttgccatt

SEQ ID NO: 153002 - DNA, 25 bp, Saccharomyces pastorianus
gaaggaagatctctatccgcataga

SEQ ID NO: 153003 - DNA, 25 bp, Saccharomyces pastorianus
taaattcggcttattaccggagact

SEQ ID NO: 153004 - DNA, 25 bp, Saccharomyces pastorianus
atccattcatggtcagcgagtacgt

SEQ ID NO: 153005 - DNA, 25 bp, Saccharomyces pastorianus
aggcgttggatcaagcactgaggta

SEQ ID NO: 153006 - DNA, 25 bp, Saccharomyces pastorianus
gaagaggtctattctcctagtataa

SEQ ID NO: 153007 - DNA, 25 bp, Saccharomyces pastorianus
attggttggcacatcatgccttttc

SEQ ID NO: 153008 - DNA, 25 bp, Saccharomyces pastorianus
gcatgatcccctaaaaggcgttgga

SEQ ID NO: 153009 - DNA, 25 bp, Saccharomyces pastorianus
tagggttttcttcccaagatggtga

SEQ ID NO: 153010 - DNA, 25 bp, Saccharomyces pastorianus
cgacacaagtccgattgttcctctt

SEQ ID NO: 153011 - DNA, 25 bp, Saccharomyces pastorianus
tacggctctatattagggttttctt

SEQ ID NO: 153012 - DNA, 25 bp, Saccharomyces pastorianus
aacgacacaagtccgattgttcctc

SEQ ID NO: 153013 - DNA, 25 bp, Saccharomyces pastorianus
ggaacaacgacacaagtccgattgt

SEQ ID NO: 153014 - DNA, 25 bp, Saccharomyces pastorianus
ccaagatggtgaaggacaagaaata

SEQ ID NO: 153015 - DNA, 25 bp, Saccharomyces pastorianus
gaatcttaagcagagatacggctct

SEQ ID NO: 153016 - DNA, 25 bp, Saccharomyces pastorianus
gagatacggctctatattagggttt

SEQ ID NO: 153017 - DNA, 25 bp, Saccharomyces pastorianus
tattagggttttcttcccaagatgg

SEQ ID NO: 153018 - DNA, 25 bp, Saccharomyces pastorianus
tttggaacaacgacacaagtccgat

SEQ ID NO: 153019 - DNA, 25 bp, Saccharomyces pastorianus
gggttttcttcccaagatggtgaag

SEQ ID NO: 153020 - DNA, 25 bp, Saccharomyces pastorianus
ttggcgcacctttgtgagcacatga

SEQ ID NO: 153021 - DNA, 25 bp, Saccharomyces pastorianus
atgaagtctcgttttacatcccgtt

SEQ ID NO: 153022 - DNA, 25 bp, Saccharomyces pastorianus
atatcggatccaacagatacttcaa

SEQ ID NO: 153023 - DNA, 25 bp, Saccharomyces pastorianus
actgccaaacggaattttagcatta

SEQ ID NO: 153024 - DNA, 25 bp, Saccharomyces pastorianus
tgtcttacagcagcaggactcataa

SEQ ID NO: 153025 - DNA, 25 bp, Saccharomyces pastorianus
gtttgcacaggttcccataacgatc

SEQ ID NO: 153026 - DNA, 25 bp, Saccharomyces pastorianus
gagcacatgattctttctgccggtt

SEQ ID NO: 153027 - DNA, 25 bp, Saccharomyces pastorianus
aggatattgccggtttggcgcacct

SEQ ID NO: 153028 - DNA, 25 bp, Saccharomyces pastorianus
catgctcactgactgtttgcacagg

SEQ ID NO: 153029 - DNA, 25 bp, Saccharomyces pastorianus
tttacatcccgttgtcttacagcag

SEQ ID NO: 153030 - DNA, 25 bp, Saccharomyces pastorianus
gatacttcaagctcatgctcactga

SEQ ID NO: 153031 - DNA, 25 bp, Saccharomyces pastorianus
gggtacattgttttgggaggactca

SEQ ID NO: 153032 - DNA, 25 bp, Saccharomyces pastorianus
aatgttccttcagctagaggccttt

SEQ ID NO: 153033 - DNA, 25 bp, Saccharomyces pastorianus
acagtttgaagggtcggctggtcct

SEQ ID NO: 153034 - DNA, 25 bp, Saccharomyces pastorianus
gaggactcagggttttaacagacac

SEQ ID NO: 153035 - DNA, 25 bp, Saccharomyces pastorianus
aggatacttctagagccgttcttaa

SEQ ID NO: 153036 - DNA, 25 bp, Saccharomyces pastorianus
tataaccgtaatgtctggcagctcg

SEQ ID NO: 153037 - DNA, 25 bp, Saccharomyces pastorianus
tcggctggtcctgtagacctattaa

SEQ ID NO: 153038 - DNA, 25 bp, Saccharomyces pastorianus
aatatttagcattcttcgagtccaa

SEQ ID NO: 153039 - DNA, 25 bp, Saccharomyces pastorianus
gattcaccgagtttgattttcgaag

SEQ ID NO: 153040 - DNA, 25 bp, Saccharomyces pastorianus
aaatctctatatattccgctcaaag

SEQ ID NO: 153041 - DNA, 25 bp, Saccharomyces pastorianus
tacttatcttacttgcagctgcagg

SEQ ID NO: 153042 - DNA, 25 bp, Saccharomyces pastorianus
atggcgtccatattcatgctgctac

SEQ ID NO: 153043 - DNA, 25 bp, Saccharomyces pastorianus
cgttttgctggcactagacatcgca

SEQ ID NO: 153044 - DNA, 25 bp, Saccharomyces pastorianus
actcgatgctattgtcttgctggcg

SEQ ID NO: 153045 - DNA, 25 bp, Saccharomyces pastorianus
ccatactcgatgctattgtcttgct

SEQ ID NO: 153046 - DNA, 25 bp, Saccharomyces pastorianus
ggatgcactagacatggcgtccata

SEQ ID NO: 153047 - DNA, 25 bp, Saccharomyces pastorianus
cataccttccattttgaatgtcaaa

SEQ ID NO: 153048 - DNA, 25 bp, Saccharomyces pastorianus
atgctcgatgctattgtcttgctgg

SEQ ID NO: 153049 - DNA, 25 bp, Saccharomyces pastorianus
catactcgatgctactgtcttggat

SEQ ID NO: 153050 - DNA, 25 bp, Saccharomyces pastorianus
tacccatattcataccttccatttt

SEQ ID NO: 153051 - DNA, 25 bp, Saccharomyces pastorianus
atatcgttttgctggcactagacat

SEQ ID NO: 153052 - DNA, 25 bp, Saccharomyces pastorianus
gatgacatgctcgataatatcgttt

SEQ ID NO: 153053 - DNA, 25 bp, Saccharomyces pastorianus
aatgtggtagacatcccgaacccag

SEQ ID NO: 153054 - DNA, 25 bp, Saccharomyces pastorianus
actgggttagctttatcggaagtct

SEQ ID NO: 153055 - DNA, 25 bp, Saccharomyces pastorianus
tgttgccgataccacttccggaagt

SEQ ID NO: 153056 - DNA, 25 bp, Saccharomyces pastorianus
aagagctgtcctggcttcggtaact

SEQ ID NO: 153057 - DNA, 25 bp, Saccharomyces pastorianus
taattgtgccacagactcaggaaag

SEQ ID NO: 153058 - DNA, 25 bp, Saccharomyces pastorianus
caagttgcaggaacagtccgggaat

SEQ ID NO: 153059 - DNA, 25 bp, Saccharomyces pastorianus
gagcgcgacatccttgagaattcca

SEQ ID NO: 153060 - DNA, 25 bp, Saccharomyces pastorianus
agcaaacatagagcgcgacatcctt

SEQ ID NO: 153061 - DNA, 25 bp, Saccharomyces pastorianus
ggaagtcttcttcaatagatgcaaa

SEQ ID NO: 153062 - DNA, 25 bp, Saccharomyces pastorianus
agccctgatccaattgctgttgccg

SEQ ID NO: 153063 - DNA, 25 bp, Saccharomyces pastorianus
agggcgttcttagtattcacctcta

SEQ ID NO: 153064 - DNA, 25 bp, Saccharomyces pastorianus
gccatgtctagtgcatccaagacag

SEQ ID NO: 153065 - DNA, 25 bp, Saccharomyces pastorianus
cagtagcatcgagtatggcgtcgat

SEQ ID NO: 153066 - DNA, 25 bp, Saccharomyces pastorianus
tagtgccagcaaaacgatattatcg

SEQ ID NO: 153067 - DNA, 25 bp, Saccharomyces pastorianus
tgcgatgtctagtgccagcaaaacg

SEQ ID NO: 153068 - DNA, 25 bp, Saccharomyces pastorianus
aagacagtagcatcgagtatggcgt

SEQ ID NO: 153069 - DNA, 25 bp, Saccharomyces pastorianus
gcatccaagacagtagcatcgagta

SEQ ID NO: 153070 - DNA, 25 bp, Saccharomyces pastorianus
aaaacgatattatcgagcatgtcat

SEQ ID NO: 153071 - DNA, 25 bp, Saccharomyces pastorianus
gaaggtatgaatatgggtagcagca

SEQ ID NO: 153072 - DNA, 25 bp, Saccharomyces pastorianus
tatggacgccatgtctagtgcatcc

SEQ ID NO: 153073 - DNA, 25 bp, Saccharomyces pastorianus
gtagcagcatgaatatggacgccat

SEQ ID NO: 153074 - DNA, 25 bp, Saccharomyces pastorianus
gacgccatgtctagtgcatccaaga

SEQ ID NO: 153075 - DNA, 25 bp, Saccharomyces pastorianus
acagtagcatcgagtatggcgtcga

SEQ ID NO: 153076 - DNA, 25 bp, Saccharomyces pastorianus
agcatggacgcaatgtccagcgcca

SEQ ID NO: 153077 - DNA, 25 bp, Saccharomyces pastorianus
tccagcgccagcaagacaatagcat

SEQ ID NO: 153078 - DNA, 25 bp, Saccharomyces pastorianus
tagtgccagcaaaacgatattatcg

SEQ ID NO: 153079 - DNA, 25 bp, Saccharomyces pastorianus
tgcgatgtctagtgccagcaaaacg

SEQ ID NO: 153080 - DNA, 25 bp, Saccharomyces pastorianus
gcatccaagacagtagcatcgagta

SEQ ID NO: 153081 - DNA, 25 bp, Saccharomyces pastorianus
agacaatagcatcgagtatggcgtc

SEQ ID NO: 153082 - DNA, 25 bp, Saccharomyces pastorianus
gaaggtatgaatatgggtagcagca

SEQ ID NO: 153083 - DNA, 25 bp, Saccharomyces pastorianus
tatggacgccatgtctagtgcatcc

SEQ ID NO: 153084 - DNA, 25 bp, Saccharomyces pastorianus
gtagcagcatgaatatggacgccat

SEQ ID NO: 153085 - DNA, 25 bp, Saccharomyces pastorianus
gacgccatgtctagtgcatccaaga

SEQ ID NO: 153086 - DNA, 25 bp, Saccharomyces pastorianus
gtgctaaggctttcggtattttctt

SEQ ID NO: 153087 - DNA, 25 bp, Saccharomyces pastorianus
cagttttgttcaccatttgcatgca

SEQ ID NO: 153088 - DNA, 25 bp, Saccharomyces pastorianus
aacaatagtgctaaggctttcggta

SEQ ID NO: 153089 - DNA, 25 bp, Saccharomyces pastorianus
tgctgtcgtctacaaattactgctt

SEQ ID NO: 153090 - DNA, 25 bp, Saccharomyces pastorianus
atttgttgtgtctgctgtcgtctac

SEQ ID NO: 153091 - DNA, 25 bp, Saccharomyces pastorianus
actcccacatatctaactatcagtt

SEQ ID NO: 153092 - DNA, 25 bp, Saccharomyces pastorianus
tattatttgttgtgtctgctgtcgt

SEQ ID NO: 153093 - DNA, 25 bp, Saccharomyces pastorianus
tttgttcaccatttgcatgcaaaca

SEQ ID NO: 153094 - DNA, 25 bp, Saccharomyces pastorianus
actatcagttttgttcaccatttgc

SEQ ID NO: 153095 - DNA, 25 bp, Saccharomyces pastorianus
gctttcggtattttcttattatttg

SEQ ID NO: 153096 - DNA, 25 bp, Saccharomyces pastorianus
gtgtctgctgtcgtctacaaattac

SEQ ID NO: 153097 - DNA, 25 bp, Saccharomyces pastorianus
gtgacgttttaatcggtatccctga

SEQ ID NO: 153098 - DNA, 25 bp, Saccharomyces pastorianus
agatgcggctgctccagacgtaaaa

SEQ ID NO: 153099 - DNA, 25 bp, Saccharomyces pastorianus
ttgaaaacagcatgcgcctccagag

SEQ ID NO: 153100 - DNA, 25 bp, Saccharomyces pastorianus
acgctgttaatcatggctactgcct

SEQ ID NO: 153101 - DNA, 25 bp, Saccharomyces pastorianus
gaatttgcaaccattcggcactgat

SEQ ID NO: 153102 - DNA, 25 bp, Saccharomyces pastorianus
actgatgtgatgctacgttaccgta

SEQ ID NO: 153103 - DNA, 25 bp, Saccharomyces pastorianus
ggctactgcctataactacggtaat

SEQ ID NO: 153104 - DNA, 25 bp, Saccharomyces pastorianus
aactctccctctctgaattgaaaac

SEQ ID NO: 153105 - DNA, 25 bp, Saccharomyces pastorianus
ataagatcccatccacgctgttaat

SEQ ID NO: 153106 - DNA, 25 bp, Saccharomyces pastorianus
aagatgaggcatccgctaagcaaaa

SEQ ID NO: 153107 - DNA, 25 bp, Saccharomyces pastorianus
gaccttacttgattgcattagcgaa

SEQ ID NO: 153108 - DNA, 25 bp, Saccharomyces pastorianus
atatcgttcggttggttccatttgc

SEQ ID NO: 153109 - DNA, 25 bp, Saccharomyces pastorianus
cggcaccaggaattactccaatttc

SEQ ID NO: 153110 - DNA, 25 bp, Saccharomyces pastorianus
tttctccccgtattatggtaagcag

SEQ ID NO: 153111 - DNA, 25 bp, Saccharomyces pastorianus
aatcgttggaactcttcggtgccag

SEQ ID NO: 153112 - DNA, 25 bp, Saccharomyces pastorianus
gtgcgagtaaggtctctccagtaaa

SEQ ID NO: 153113 - DNA, 25 bp, Saccharomyces pastorianus
aagagagcaatccatcatccggcac

SEQ ID NO: 153114 - DNA, 25 bp, Saccharomyces pastorianus
gctgaaatacaggtctttgccaatc

SEQ ID NO: 153115 - DNA, 25 bp, Saccharomyces pastorianus
tccatttgctgctttcctcattata

SEQ ID NO: 153116 - DNA, 25 bp, Saccharomyces pastorianus
gcaaaaagcccttcgtcattattgg

SEQ ID NO: 153117 - DNA, 25 bp, Saccharomyces pastorianus
attataccctttgctgaacttcttc

SEQ ID NO: 153118 - DNA, 25 bp, Saccharomyces pastorianus
gcaggctacccattgacgagacgag

SEQ ID NO: 153119 - DNA, 25 bp, Saccharomyces pastorianus
aacagtccattctgcagagtctgcc

SEQ ID NO: 153120 - DNA, 25 bp, Saccharomyces pastorianus
aagcgctggctctaaattcactact

SEQ ID NO: 153121 - DNA, 25 bp, Saccharomyces pastorianus
gcaactttttactagtcccatggct

SEQ ID NO: 153122 - DNA, 25 bp, Saccharomyces pastorianus
tttttccatgaccattccaacgatg

SEQ ID NO: 153123 - DNA, 25 bp, Saccharomyces pastorianus
ataaatccttccatcacatatgcct

SEQ ID NO: 153124 - DNA, 25 bp, Saccharomyces pastorianus
gcaacccttgattgtcgctaaagca

SEQ ID NO: 153125 - DNA, 25 bp, Saccharomyces pastorianus
gagtctgccaaatttaccaacgtta

SEQ ID NO: 153126 - DNA, 25 bp, Saccharomyces pastorianus
gcagctgccagtatatcgcaacttt

SEQ ID NO: 153127 - DNA, 25 bp, Saccharomyces pastorianus
aagggagttcttcctcaattgacaa

SEQ ID NO: 153128 - DNA, 25 bp, Saccharomyces pastorianus
gatttcgactctagttacgcaaccc

SEQ ID NO: 153129 - DNA, 25 bp, Saccharomyces pastorianus
agtgcaaaatttcatcccgggtgtc

SEQ ID NO: 153130 - DNA, 25 bp, Saccharomyces pastorianus
gactgttgatcctacgtttaagcat

SEQ ID NO: 153131 - DNA, 25 bp, Saccharomyces pastorianus
gtgacagtagctccaagattccgcc

SEQ ID NO: 153132 - DNA, 25 bp, Saccharomyces pastorianus
gcaagaccacggagtggcacactca

SEQ ID NO: 153133 - DNA, 25 bp, Saccharomyces pastorianus
aattcagccttttgaacctgtcgat

SEQ ID NO: 153134 - DNA, 25 bp, Saccharomyces pastorianus
acatgataatatggccagacctttt

SEQ ID NO: 153135 - DNA, 25 bp, Saccharomyces pastorianus
gttactttatgcatgtcctttttat

SEQ ID NO: 153136 - DNA, 25 bp, Saccharomyces pastorianus
agattccgccgaatatcgctagctt

SEQ ID NO: 153137 - DNA, 25 bp, Saccharomyces pastorianus
atcgatcttttcgtcaagtgcaata

SEQ ID NO: 153138 - DNA, 25 bp, Saccharomyces pastorianus
agtgcaataaccaattggccatcaa

SEQ ID NO: 153139 - DNA, 25 bp, Saccharomyces pastorianus
aatactttggagaccatgaccgatg

SEQ ID NO: 153140 - DNA, 25 bp, Saccharomyces pastorianus
atgaccgatgtcatgccccatgaag

SEQ ID NO: 153141 - DNA, 25 bp, Saccharomyces pastorianus
aaaaggctctttcgcttgctcatga

SEQ ID NO: 153142 - DNA, 25 bp, Saccharomyces pastorianus
gcaagcatatatggcccgagtttcc

SEQ ID NO: 153143 - DNA, 25 bp, Saccharomyces pastorianus
tgagctgccctctctcgttaaaaaa

SEQ ID NO: 153144 - DNA, 25 bp, Saccharomyces pastorianus
gtatctgcgcagcaaggttttgtca

SEQ ID NO: 153145 - DNA, 25 bp, Saccharomyces pastorianus
gttacgtttatttgcgtctgcatgc

SEQ ID NO: 153146 - DNA, 25 bp, Saccharomyces pastorianus
cttccgttgccatccgaaatggata

SEQ ID NO: 153147 - DNA, 25 bp, Saccharomyces pastorianus
acagattcctgtttctatggcggcg

SEQ ID NO: 153148 - DNA, 25 bp, Saccharomyces pastorianus
gaacgaaattggagctgacaccgaa

SEQ ID NO: 153149 - DNA, 25 bp, Saccharomyces pastorianus
agatatacatgtctggcccttggct

SEQ ID NO: 153150 - DNA, 25 bp, Saccharomyces pastorianus
ttggctttggcgtatgacacattga

SEQ ID NO: 153151 - DNA, 25 bp, Saccharomyces pastorianus
gatagagcacttactgcagccgtta

SEQ ID NO: 153152 - DNA, 25 bp, Saccharomyces pastorianus
aaagccaaaatcagagggtgccgaa

SEQ ID NO: 153153 - DNA, 25 bp, Saccharomyces pastorianus
ggacattagcgcaaacactaccacc

SEQ ID NO: 153154 - DNA, 25 bp, Saccharomyces pastorianus
gacagttctgaaattctgggcttaa

SEQ ID NO: 153155 - DNA, 25 bp, Saccharomyces pastorianus
taccacctcttttgacgaaacgcct

SEQ ID NO: 153156 - DNA, 25 bp, Saccharomyces pastorianus
aatgatgagccaccgattgaagaat

SEQ ID NO: 153157 - DNA, 25 bp, Saccharomyces pastorianus
ggtccatgacctgcgcaaaaaagtg

SEQ ID NO: 153158 - DNA, 25 bp, Saccharomyces pastorianus
gaagccacaggagaagcacatagca

SEQ ID NO: 153159 - DNA, 25 bp, Saccharomyces pastorianus
ttccagaatttccagttggtttact

SEQ ID NO: 153160 - DNA, 25 bp, Saccharomyces pastorianus
gaaacgccttctaccgaggatgaaa

SEQ ID NO: 153161 - DNA, 25 bp, Saccharomyces pastorianus
agaagcgaatgagcctactgttgat

SEQ ID NO: 153162 - DNA, 25 bp, Saccharomyces pastorianus
gcctactgttgatgacgttgctgat

SEQ ID NO: 153163 - DNA, 25 bp, Saccharomyces pastorianus
ggtggtctctcaataaagatggctg

SEQ ID NO: 153164 - DNA, 25 bp, Saccharomyces pastorianus
atcgcgaactagatttgttcaggaa

SEQ ID NO: 153165 - DNA, 25 bp, Saccharomyces pastorianus
gaagtagagggctacgactatccac

SEQ ID NO: 153166 - DNA, 25 bp, Saccharomyces pastorianus
gtaaaaggattctactggtgtccaa

SEQ ID NO: 153167 - DNA, 25 bp, Saccharomyces pastorianus
accacagtaccaattcttggagaga

SEQ ID NO: 153168 - DNA, 25 bp, Saccharomyces pastorianus
aagacccaagacactttgaacaatg

SEQ ID NO: 153169 - DNA, 25 bp, Saccharomyces pastorianus
aaggctatcaattaaatcgcgaact

SEQ ID NO: 153170 - DNA, 25 bp, Saccharomyces pastorianus
tactggtgtccaaaacgttcgaagt

SEQ ID NO: 153171 - DNA, 25 bp, Saccharomyces pastorianus
aggaatcattgggtactgtatcaga

SEQ ID NO: 153172 - DNA, 25 bp, Saccharomyces pastorianus
gggttttctctaaacaagatcaccg

SEQ ID NO: 153173 - DNA, 25 bp, Saccharomyces pastorianus
taaatgaccctcaaacaaggctatc

SEQ ID NO: 153174 - DNA, 25 bp, Saccharomyces pastorianus
aaccgcatttgcagtgccttgtcaa

SEQ ID NO: 153175 - DNA, 25 bp, Saccharomyces pastorianus
aggactttctcttcttatctctgaa

SEQ ID NO: 153176 - DNA, 25 bp, Saccharomyces pastorianus
acattactggcctgtatccgctata

SEQ ID NO: 153177 - DNA, 25 bp, Saccharomyces pastorianus
gcgtttgttttctcgttcattgtta

SEQ ID NO: 153178 - DNA, 25 bp, Saccharomyces pastorianus
acagctcattgggtacggtgggatt

SEQ ID NO: 153179 - DNA, 25 bp, Saccharomyces pastorianus
gcgggttttccttcactgggtacat

SEQ ID NO: 153180 - DNA, 25 bp, Saccharomyces pastorianus
cggcttcaactttctcatcatatat

SEQ ID NO: 153181 - DNA, 25 bp, Saccharomyces pastorianus
gattgtacttccatgtaccgttcac

SEQ ID NO: 153182 - DNA, 25 bp, Saccharomyces pastorianus
atgttcttgtgctttttctcatcga

SEQ ID NO: 153183 - DNA, 25 bp, Saccharomyces pastorianus
ctccctagcttccaaatactgtgta

SEQ ID NO: 153184 - DNA, 25 bp, Saccharomyces pastorianus
agaatatcgcgggtgagctccctag

SEQ ID NO: 153185 - DNA, 25 bp, Saccharomyces pastorianus
ggctgagaggaattctaagatttct

SEQ ID NO: 153186 - DNA, 25 bp, Saccharomyces pastorianus
tgtggtgtcctactctatagaatca

SEQ ID NO: 153187 - DNA, 25 bp, Saccharomyces pastorianus
gataattgtggtgtcctactctata

SEQ ID NO: 153188 - DNA, 25 bp, Saccharomyces pastorianus
atgggtgataattgtggtgtcctac

SEQ ID NO: 153189 - DNA, 25 bp, Saccharomyces pastorianus
aattgtggtgtcctactctatagaa

SEQ ID NO: 153190 - DNA, 25 bp, Saccharomyces pastorianus
gaattctaagatttctaatgtggag

SEQ ID NO: 153191 - DNA, 25 bp, Saccharomyces pastorianus
gaccaaaatggctgagaggaattct

SEQ ID NO: 153192 - DNA, 25 bp, Saccharomyces pastorianus
gtgataattgtggtgtcctactcta

SEQ ID NO: 153193 - DNA, 25 bp, Saccharomyces pastorianus
tctatagaatcagaccaaaatggct

SEQ ID NO: 153194 - DNA, 25 bp, Saccharomyces pastorianus
ggtgtcctactctatagaatcagac

SEQ ID NO: 153195 - DNA, 25 bp, Saccharomyces pastorianus
gtcctactctatagaatcagaccaa

SEQ ID NO: 153196 - DNA, 25 bp, Saccharomyces pastorianus
gtgctagaggcacgcatgctaatta

SEQ ID NO: 153197 - DNA, 25 bp, Saccharomyces pastorianus
taaggcgcctgctattctgatcgta

SEQ ID NO: 153198 - DNA, 25 bp, Saccharomyces pastorianus
ggaaacgcatatccccagtagcgag

SEQ ID NO: 153199 - DNA, 25 bp, Saccharomyces pastorianus
taaatggttgctcggtcatctaccc

SEQ ID NO: 153200 - DNA, 25 bp, Saccharomyces pastorianus
aacggcaattctatatccactcatg

SEQ ID NO: 153201 - DNA, 25 bp, Saccharomyces pastorianus
tgatgcgttctggtttttcttctac

SEQ ID NO: 153202 - DNA, 25 bp, Saccharomyces pastorianus
tacccattcaatcatggccctttta

SEQ ID NO: 153203 - DNA, 25 bp, Saccharomyces pastorianus
gatgagtgcgcattccagtggaaca

SEQ ID NO: 153204 - DNA, 25 bp, Saccharomyces pastorianus
tgctaattatgcatccgctgggcag

SEQ ID NO: 153205 - DNA, 25 bp, Saccharomyces pastorianus
tggacgatttcgacaaggaccctaa

SEQ ID NO: 153206 - DNA, 25 bp, Saccharomyces pastorianus
tacggaacaggctacaactctaagg

SEQ ID NO: 153207 - DNA, 25 bp, Saccharomyces pastorianus
ttttttggccacatcttgcaagaag

SEQ ID NO: 153208 - DNA, 25 bp, Saccharomyces pastorianus
gccaaagaggccgacgggccatttt

SEQ ID NO: 153209 - DNA, 25 bp, Saccharomyces pastorianus
atgtctgggtagcaaatggccaaag

SEQ ID NO: 153210 - DNA, 25 bp, Saccharomyces pastorianus
ctgggtagcaaatggccaaagaggc

SEQ ID NO: 153211 - DNA, 25 bp, Saccharomyces pastorianus
agaaccagttgatatcatatataat

SEQ ID NO: 153212 - DNA, 25 bp, Saccharomyces pastorianus
atttccaaatgtctgggtagcaaat

SEQ ID NO: 153213 - DNA, 25 bp, Saccharomyces pastorianus
gaattttttggccacatcttgcaag

SEQ ID NO: 153214 - DNA, 25 bp, Saccharomyces pastorianus
aattttttggccacatcttgcaaga

SEQ ID NO: 153215 - DNA, 25 bp, Saccharomyces pastorianus
agaggccgacgggccatttttccag

SEQ ID NO: 153216 - DNA, 25 bp, Saccharomyces pastorianus
tataatttccaaatgtctgggtagc

SEQ ID NO: 153217 - DNA, 25 bp, Saccharomyces pastorianus
aaatgtctgggtagcaaatggccaa

SEQ ID NO: 153218 - DNA, 25 bp, Saccharomyces pastorianus
gccaagcgaccccataataacatga

SEQ ID NO: 153219 - DNA, 25 bp, Saccharomyces pastorianus
attaagcactcctttgtaccaagta

SEQ ID NO: 153220 - DNA, 25 bp, Saccharomyces pastorianus
agcaacgactcttccgctaatcaga

SEQ ID NO: 153221 - DNA, 25 bp, Saccharomyces pastorianus
tgtaccaagtatttcggccaagcga

SEQ ID NO: 153222 - DNA, 25 bp, Saccharomyces pastorianus
gagcatatccagtaactaaccaacc

SEQ ID NO: 153223 - DNA, 25 bp, Saccharomyces pastorianus
ataacaatatccaaggccgccagaa

SEQ ID NO: 153224 - DNA, 25 bp, Saccharomyces pastorianus
gacggtgaagcttatgtgttgtaca

SEQ ID NO: 153225 - DNA, 25 bp, Saccharomyces pastorianus
aagtgattcaattccacttcctcca

SEQ ID NO: 153226 - DNA, 25 bp, Saccharomyces pastorianus
gtttctcggacaatggatgttccaa

SEQ ID NO: 153227 - DNA, 25 bp, Saccharomyces pastorianus
ttccgctaatcagagtcgccattga

SEQ ID NO: 153228 - DNA, 25 bp, Saccharomyces pastorianus
gtactcttcattgcatatatgtctg

SEQ ID NO: 153229 - DNA, 25 bp, Saccharomyces pastorianus
ggagaactctctcagtcaataggtt

SEQ ID NO: 153230 - DNA, 25 bp, Saccharomyces pastorianus
gttggatctggtttatttacgctaa

SEQ ID NO: 153231 - DNA, 25 bp, Saccharomyces pastorianus
ttctccctggaatagcttttggtag

SEQ ID NO: 153232 - DNA, 25 bp, Saccharomyces pastorianus
acatcagacgatccagactttcaaa

SEQ ID NO: 153233 - DNA, 25 bp, Saccharomyces pastorianus
aacgttattaagctcccaggtgcag

SEQ ID NO: 153234 - DNA, 25 bp, Saccharomyces pastorianus
agatgcgctcttcccaattaaacat

SEQ ID NO: 153235 - DNA, 25 bp, Saccharomyces pastorianus
aggatgctatgctctttcattcttc

SEQ ID NO: 153236 - DNA, 25 bp, Saccharomyces pastorianus
tgggatcatcaaaccggcaattgtt

SEQ ID NO: 153237 - DNA, 25 bp, Saccharomyces pastorianus
ggtagtattttccaagcaacgttat

SEQ ID NO: 153238 - DNA, 25 bp, Saccharomyces pastorianus
aaatccttgggctttgcgtttggag

SEQ ID NO: 153239 - DNA, 25 bp, Saccharomyces pastorianus
tgacgttttttactgcgccttagga

SEQ ID NO: 153240 - DNA, 25 bp, Saccharomyces pastorianus
ggtcgcttggccgaaatacttggta

SEQ ID NO: 153241 - DNA, 25 bp, Saccharomyces pastorianus
gttagttactggatatgctctttct

SEQ ID NO: 153242 - DNA, 25 bp, Saccharomyces pastorianus
ggcattaagttccatgacttcggca

SEQ ID NO: 153243 - DNA, 25 bp, Saccharomyces pastorianus
gctctttctaatgctgttttcatgt

SEQ ID NO: 153244 - DNA, 25 bp, Saccharomyces pastorianus
ttctggcggccttggatattgttat

SEQ ID NO: 153245 - DNA, 25 bp, Saccharomyces pastorianus
aatagggtctttgatttctgctctt

SEQ ID NO: 153246 - DNA, 25 bp, Saccharomyces pastorianus
aggagtgcttaatgatttctgttat

SEQ ID NO: 153247 - DNA, 25 bp, Saccharomyces pastorianus
ttctgctctttcgaattcaatggcg

SEQ ID NO: 153248 - DNA, 25 bp, Saccharomyces pastorianus
aactttatgtgttatatcgcttcta

SEQ ID NO: 153249 - DNA, 25 bp, Saccharomyces pastorianus
atcgcttctattaaccctttttctg

SEQ ID NO: 153250 - DNA, 25 bp, Saccharomyces pastorianus
ttcaatggcgactctgattagcgga

SEQ ID NO: 153251 - DNA, 25 bp, Saccharomyces pastorianus
gtgaagtttccgctttcggtcataa

SEQ ID NO: 153252 - DNA, 25 bp, Saccharomyces pastorianus
cggaagaaatatttccatctcttga

SEQ ID NO: 153253 - DNA, 25 bp, Saccharomyces pastorianus
gcttccgcggaagaaatatttccat

SEQ ID NO: 153254 - DNA, 25 bp, Saccharomyces pastorianus
ccatctcttgaaatccgtacaagat

SEQ ID NO: 153255 - DNA, 25 bp, Saccharomyces pastorianus
ccgcggaagaaatatttccatctct

SEQ ID NO: 153256 - DNA, 25 bp, Saccharomyces pastorianus
cgcggaagaaatatttccatctctt

SEQ ID NO: 153257 - DNA, 25 bp, Saccharomyces pastorianus
ttccatctcttgaaatccgtacaag

SEQ ID NO: 153258 - DNA, 25 bp, Saccharomyces pastorianus
ttccgcggaagaaatatttccatct

SEQ ID NO: 153259 - DNA, 25 bp, Saccharomyces pastorianus
tttccatctcttgaaatccgtacaa

SEQ ID NO: 153260 - DNA, 25 bp, Saccharomyces pastorianus
tccgcggaagaaatatttccatctc

SEQ ID NO: 153261 - DNA, 25 bp, Saccharomyces pastorianus
cttccgcggaagaaatatttccatc

SEQ ID NO: 153262 - DNA, 25 bp, Saccharomyces pastorianus
gtcctatttccaccacagaatcgaa

SEQ ID NO: 153263 - DNA, 25 bp, Saccharomyces pastorianus
gccattgtgtctacaagcactgcta

SEQ ID NO: 153264 - DNA, 25 bp, Saccharomyces pastorianus
gccattgtttcgacggccacggcta

SEQ ID NO: 153265 - DNA, 25 bp, Saccharomyces pastorianus
gttgttacggtctatcctacatgga

SEQ ID NO: 153266 - DNA, 25 bp, Saccharomyces pastorianus
gaatgaacagtctgtcagctctaaa

SEQ ID NO: 153267 - DNA, 25 bp, Saccharomyces pastorianus
atcgaagcaacaaactacgctagtt

SEQ ID NO: 153268 - DNA, 25 bp, Saccharomyces pastorianus
aaaaacagcagtcacctcttcactt

SEQ ID NO: 153269 - DNA, 25 bp, Saccharomyces pastorianus
gcgaatctggtgtgtgttccgaaac

SEQ ID NO: 153270 - DNA, 25 bp, Saccharomyces pastorianus
gctagttactgttacttcctgcgaa

SEQ ID NO: 153271 - DNA, 25 bp, Saccharomyces pastorianus
gaaactacttcacctgccattgttt

SEQ ID NO: 153272 - DNA, 25 bp, Saccharomyces pastorianus
gacggccacggctactgtgaatgat

SEQ ID NO: 153273 - DNA, 25 bp, Saccharomyces pastorianus
acggtctcaacgttcttgatgatat

SEQ ID NO: 153274 - DNA, 25 bp, Saccharomyces pastorianus
aacgtgggtctcgttggccacagaa

SEQ ID NO: 153275 - DNA, 25 bp, Saccharomyces pastorianus
aaactgttgtattgcatggtgggtc

SEQ ID NO: 153276 - DNA, 25 bp, Saccharomyces pastorianus
tgttgaccaattttactcggagaat

SEQ ID NO: 153277 - DNA, 25 bp, Saccharomyces pastorianus
gtggcacttctttgcaatgtgacaa

SEQ ID NO: 153278 - DNA, 25 bp, Saccharomyces pastorianus
gcatggtgggtctaacggtctcaac

SEQ ID NO: 153279 - DNA, 25 bp, Saccharomyces pastorianus
tagtagttggtgtcggtggcacttc

SEQ ID NO: 153280 - DNA, 25 bp, Saccharomyces pastorianus
ggcggattgatatctagacggagca

SEQ ID NO: 153281 - DNA, 25 bp, Saccharomyces pastorianus
gaacacaattgatttaagcacgcag

SEQ ID NO: 153282 - DNA, 25 bp, Saccharomyces pastorianus
atgagtctcctcgaaaacgcaaggt

SEQ ID NO: 153283 - DNA, 25 bp, Saccharomyces pastorianus
caaggtcgatacattaccgttgggt

SEQ ID NO: 153284 - DNA, 25 bp, Saccharomyces pastorianus
gaaaacctgtctttgccagggaaga

SEQ ID NO: 153285 - DNA, 25 bp, Saccharomyces pastorianus
gactctgctaaaaaccatctgcgtt

SEQ ID NO: 153286 - DNA, 25 bp, Saccharomyces pastorianus
agacgttcgtcccaatttgattcaa

SEQ ID NO: 153287 - DNA, 25 bp, Saccharomyces pastorianus
aaccatctgcgttatgacactagtg

SEQ ID NO: 153288 - DNA, 25 bp, Saccharomyces pastorianus
gacaccctgaagtatctgaacgtaa

SEQ ID NO: 153289 - DNA, 25 bp, Saccharomyces pastorianus
tttctgcccaatttgactctgctaa

SEQ ID NO: 153290 - DNA, 25 bp, Saccharomyces pastorianus
aagcctgctaacaagggcgaagctg

SEQ ID NO: 153291 - DNA, 25 bp, Saccharomyces pastorianus
gtatgccttgaatccagcccaaata

SEQ ID NO: 153292 - DNA, 25 bp, Saccharomyces pastorianus
agatggaaattatgctttctgccca

SEQ ID NO: 153293 - DNA, 25 bp, Saccharomyces pastorianus
gcgaagctggagtaccgaacgaaat

SEQ ID NO: 153294 - DNA, 25 bp, Saccharomyces pastorianus
gttcaagttactattcgatttctgg

SEQ ID NO: 153295 - DNA, 25 bp, Saccharomyces pastorianus
tactctcgcgagatgatacagaatt

SEQ ID NO: 153296 - DNA, 25 bp, Saccharomyces pastorianus
tctactgatgacttaaccaccctat

SEQ ID NO: 153297 - DNA, 25 bp, Saccharomyces pastorianus
accaccctatcatatctgaacgaac

SEQ ID NO: 153298 - DNA, 25 bp, Saccharomyces pastorianus
atcccacgctacctgtactacgaaa

SEQ ID NO: 153299 - DNA, 25 bp, Saccharomyces pastorianus
ctggtattgtccttattgccgcaaa

SEQ ID NO: 153300 - DNA, 25 bp, Saccharomyces pastorianus
aaccggcagtgctgcatgccataaa

SEQ ID NO: 153301 - DNA, 25 bp, Saccharomyces pastorianus
attgccgcaaatccctttgataaag

SEQ ID NO: 153302 - DNA, 25 bp, Saccharomyces pastorianus
aacccacctattttagagtctactg

SEQ ID NO: 153303 - DNA, 25 bp, Saccharomyces pastorianus
tatctgaacgaaccggcagtgctgc

SEQ ID NO: 153304 - DNA, 25 bp, Saccharomyces pastorianus
tgatgatgatcatcccacgctacct

SEQ ID NO: 153305 - DNA, 25 bp, Saccharomyces pastorianus
atatacttactctggtattgtcctt

SEQ ID NO: 153306 - DNA, 25 bp, Saccharomyces pastorianus
aaacgcattcattgggcgcgcgatt

SEQ ID NO: 153307 - DNA, 25 bp, Saccharomyces pastorianus
gattgtattttggtcacctgtcgcg

SEQ ID NO: 153308 - DNA, 25 bp, Saccharomyces pastorianus
actggcgatcgcaacaatgctgtca

SEQ ID NO: 153309 - DNA, 25 bp, Saccharomyces pastorianus
gtcgcggcaacttactactatgtgt

SEQ ID NO: 153310 - DNA, 25 bp, Saccharomyces pastorianus
agatttcaattctgagggccttcct

SEQ ID NO: 153311 - DNA, 25 bp, Saccharomyces pastorianus
ttcctcggaggactgccatactgat

SEQ ID NO: 153312 - DNA, 25 bp, Saccharomyces pastorianus
ttctgccgccgaactacttaacaaa

SEQ ID NO: 153313 - DNA, 25 bp, Saccharomyces pastorianus
cttttgggccaaacgcttcgtgaga

SEQ ID NO: 153314 - DNA, 25 bp, Saccharomyces pastorianus
atccggatcggtttgaccatggtgc

SEQ ID NO: 153315 - DNA, 25 bp, Saccharomyces pastorianus
gaaggtttcgccgtagaacgtgctg

SEQ ID NO: 153316 - DNA, 25 bp, Saccharomyces pastorianus
caattgtagcgcagacggagccact

SEQ ID NO: 153317 - DNA, 25 bp, Saccharomyces pastorianus
atgaaatcagtcaagagctagtgga

SEQ ID NO: 153318 - DNA, 25 bp, Saccharomyces pastorianus
gatatcaattaatgaaatcagtcaa

SEQ ID NO: 153319 - DNA, 25 bp, Saccharomyces pastorianus
taatgaaatcagtcaagagctagtg

SEQ ID NO: 153320 - DNA, 25 bp, Saccharomyces pastorianus
ggttataaactgatatcaattaatg

SEQ ID NO: 153321 - DNA, 25 bp, Saccharomyces pastorianus
gaaatcagtcaagagctagtggatt

SEQ ID NO: 153322 - DNA, 25 bp, Saccharomyces pastorianus
atatcaattaatgaaatcagtcaag

SEQ ID NO: 153323 - DNA, 25 bp, Saccharomyces pastorianus
aatcagtcaagagctagtggattat

SEQ ID NO: 153324 - DNA, 25 bp, Saccharomyces pastorianus
tgaaatcagtcaagagctagtggat

SEQ ID NO: 153325 - DNA, 25 bp, Saccharomyces pastorianus
aaatcagtcaagagctagtggatta

SEQ ID NO: 153326 - DNA, 25 bp, Saccharomyces pastorianus
gttataaactgatatcaattaatga

SEQ ID NO: 153327 - DNA, 25 bp, Saccharomyces pastorianus
aatgaaatcagtcaagagctagtgg

SEQ ID NO: 153328 - DNA, 25 bp, Saccharomyces pastorianus
gacttagccacgttccgaacgaaat

SEQ ID NO: 153329 - DNA, 25 bp, Saccharomyces pastorianus
tagccacgttccgaacgaaatgttt

SEQ ID NO: 153330 - DNA, 25 bp, Saccharomyces pastorianus
acactacatccaatgcgacttagcc

SEQ ID NO: 153331 - DNA, 25 bp, Saccharomyces pastorianus
caatgcgacttagccacgttccgaa

SEQ ID NO: 153332 - DNA, 25 bp, Saccharomyces pastorianus
agaagacattgaaggtatatacgag

SEQ ID NO: 153333 - DNA, 25 bp, Saccharomyces pastorianus
acgagaattattttacacactacat

SEQ ID NO: 153334 - DNA, 25 bp, Saccharomyces pastorianus
ttacacactacatccaatgcgactt

SEQ ID NO: 153335 - DNA, 25 bp, Saccharomyces pastorianus
tcaaacacgcaatagagaagacatt

SEQ ID NO: 153336 - DNA, 25 bp, Saccharomyces pastorianus
acatccaatgcgacttagccacgtt

SEQ ID NO: 153337 - DNA, 25 bp, Saccharomyces pastorianus
tgcgacttagccacgttccgaacga

SEQ ID NO: 153338 - DNA, 25 bp, Saccharomyces pastorianus
tattttacacactacatccaatgcg

SEQ ID NO: 153339 - DNA, 25 bp, Saccharomyces pastorianus
gcaactgatttttcttccaaggtgt

SEQ ID NO: 153340 - DNA, 25 bp, Saccharomyces pastorianus
tccaaggtgtttccaacatcacagt

SEQ ID NO: 153341 - DNA, 25 bp, Saccharomyces pastorianus
gagtcaaaccccaacagtctggatt

SEQ ID NO: 153342 - DNA, 25 bp, Saccharomyces pastorianus
aaacatttattctttgcgcacggca

SEQ ID NO: 153343 - DNA, 25 bp, Saccharomyces pastorianus
ttcaacatccactctttcgagggtt

SEQ ID NO: 153344 - DNA, 25 bp, Saccharomyces pastorianus
aagcctcacactttataccatttcg

SEQ ID NO: 153345 - DNA, 25 bp, Saccharomyces pastorianus
gcgcacggcattttgtctgaattta

SEQ ID NO: 153346 - DNA, 25 bp, Saccharomyces pastorianus
gttttaacggacaccacgaatgtat

SEQ ID NO: 153347 - DNA, 25 bp, Saccharomyces pastorianus
ccctcagcatgtgtacaggcactat

SEQ ID NO: 153348 - DNA, 25 bp, Saccharomyces pastorianus
gacagatactccgaatttggttata

SEQ ID NO: 153349 - DNA, 25 bp, Saccharomyces pastorianus
taccatttcgagtctaagctgttaa

SEQ ID NO: 153350 - DNA, 25 bp, Saccharomyces pastorianus
gactttggtaaagccaacactgatt

SEQ ID NO: 153351 - DNA, 25 bp, Saccharomyces pastorianus
tttgactttggtaaagccaacactg

SEQ ID NO: 153352 - DNA, 25 bp, Saccharomyces pastorianus
ggtaaagccaacactgattgtaagc

SEQ ID NO: 153353 - DNA, 25 bp, Saccharomyces pastorianus
ttttgactttggtaaagccaacact

SEQ ID NO: 153354 - DNA, 25 bp, Saccharomyces pastorianus
tattttgactttggtaaagccaaca

SEQ ID NO: 153355 - DNA, 25 bp, Saccharomyces pastorianus
tttggtaaagccaacactgattgta

SEQ ID NO: 153356 - DNA, 25 bp, Saccharomyces pastorianus
tgactttggtaaagccaacactgat

SEQ ID NO: 153357 - DNA, 25 bp, Saccharomyces pastorianus
ttggtaaagccaacactgattgtaa

SEQ ID NO: 153358 - DNA, 25 bp, Saccharomyces pastorianus
ttgactttggtaaagccaacactga

SEQ ID NO: 153359 - DNA, 25 bp, Saccharomyces pastorianus
ctttggtaaagccaacactgattgt

SEQ ID NO: 153360 - DNA, 25 bp, Saccharomyces pastorianus
tggtaaagccaacactgattgtaag

SEQ ID NO: 153361 - DNA, 25 bp, Saccharomyces pastorianus
gctgacgataacttaaatccttttg

SEQ ID NO: 153362 - DNA, 25 bp, Saccharomyces pastorianus
attcgggagatatttctgctgctga

SEQ ID NO: 153363 - DNA, 25 bp, Saccharomyces pastorianus
gcctattcgggagatatttctgctg

SEQ ID NO: 153364 - DNA, 25 bp, Saccharomyces pastorianus
tgacgataacttaaatccttttgaa

SEQ ID NO: 153365 - DNA, 25 bp, Saccharomyces pastorianus
ctgctgacgataacttaaatccttt

SEQ ID NO: 153366 - DNA, 25 bp, Saccharomyces pastorianus
gggcctattcgggagatatttctgc

SEQ ID NO: 153367 - DNA, 25 bp, Saccharomyces pastorianus
ctattcgggagatatttctgctgct

SEQ ID NO: 153368 - DNA, 25 bp, Saccharomyces pastorianus
ttcgggagatatttctgctgctgac

SEQ ID NO: 153369 - DNA, 25 bp, Saccharomyces pastorianus
gagagggcctattcgggagatattt

SEQ ID NO: 153370 - DNA, 25 bp, Saccharomyces pastorianus
gatacaaacgaaatgttgttcctca

SEQ ID NO: 153371 - DNA, 25 bp, Saccharomyces pastorianus
taaatccttttgaaagatacaaacg

SEQ ID NO: 153372 - DNA, 25 bp, Saccharomyces pastorianus
aaggcctccaccttctaggtctagt

SEQ ID NO: 153373 - DNA, 25 bp, Saccharomyces pastorianus
aaatatgtgtctgcatcgggatcta

SEQ ID NO: 153374 - DNA, 25 bp, Saccharomyces pastorianus
tagtccaaagaaagtgccgcctgtt

SEQ ID NO: 153375 - DNA, 25 bp, Saccharomyces pastorianus
gcctgttgtcccaaaaaagaatgat

SEQ ID NO: 153376 - DNA, 25 bp, Saccharomyces pastorianus
gggatctattactccaccaaggcct

SEQ ID NO: 153377 - DNA, 25 bp, Saccharomyces pastorianus
tgccgcctgttgtcccaaaaaagaa

SEQ ID NO: 153378 - DNA, 25 bp, Saccharomyces pastorianus
gaatgataacctgaagaaaaagcca

SEQ ID NO: 153379 - DNA, 25 bp, Saccharomyces pastorianus
tccaccttctaggtctagtccaaag

SEQ ID NO: 153380 - DNA, 25 bp, Saccharomyces pastorianus
gtctgcatcgggatctattactcca

SEQ ID NO: 153381 - DNA, 25 bp, Saccharomyces pastorianus
atcgggatctattactccaccaagg

SEQ ID NO: 153382 - DNA, 25 bp, Saccharomyces pastorianus
agaaagtgccgcctgttgtcccaaa

SEQ ID NO: 153383 - DNA, 25 bp, Saccharomyces pastorianus
gagagcaatctcacgcaaatgcgca

SEQ ID NO: 153384 - DNA, 25 bp, Saccharomyces pastorianus
gtatgccaagctgaggagctctcct

SEQ ID NO: 153385 - DNA, 25 bp, Saccharomyces pastorianus
ggagctctcctcataaggatcagca

SEQ ID NO: 153386 - DNA, 25 bp, Saccharomyces pastorianus
cgaggtattgcatgacccggaaatc

SEQ ID NO: 153387 - DNA, 25 bp, Saccharomyces pastorianus
gacgggttcccacgagattttgaga

SEQ ID NO: 153388 - DNA, 25 bp, Saccharomyces pastorianus
acccggaaatcgcacttgacggtga

SEQ ID NO: 153389 - DNA, 25 bp, Saccharomyces pastorianus
aaacctggcacctacggagacgcaa

SEQ ID NO: 153390 - DNA, 25 bp, Saccharomyces pastorianus
aaatgcgcaagtcgcacgctcaact

SEQ ID NO: 153391 - DNA, 25 bp, Saccharomyces pastorianus
cacgctcaactactgcgattaatga

SEQ ID NO: 153392 - DNA, 25 bp, Saccharomyces pastorianus
ggatcagcataattctgccacgaat

SEQ ID NO: 153393 - DNA, 25 bp, Saccharomyces pastorianus
catggtctgaaatcgatacactgga

SEQ ID NO: 153394 - DNA, 25 bp, Saccharomyces pastorianus
tattgagcagaccatgcactcgcta

SEQ ID NO: 153395 - DNA, 25 bp, Saccharomyces pastorianus
atggacaacacggatatctccccaa

SEQ ID NO: 153396 - DNA, 25 bp, Saccharomyces pastorianus
tgcttatctaggatgctgcaccgtg

SEQ ID NO: 153397 - DNA, 25 bp, Saccharomyces pastorianus
atagggccaaagtccaacagtttag

SEQ ID NO: 153398 - DNA, 25 bp, Saccharomyces pastorianus
aattagcacgccagcaattccttgt

SEQ ID NO: 153399 - DNA, 25 bp, Saccharomyces pastorianus
acagatagacgtcctgaccgcaaat

SEQ ID NO: 153400 - DNA, 25 bp, Saccharomyces pastorianus
tacaacctcgttgccaaggactacg

SEQ ID NO: 153401 - DNA, 25 bp, Saccharomyces pastorianus
gaaccatttacgagccgttgagcag

SEQ ID NO: 153402 - DNA, 25 bp, Saccharomyces pastorianus
tcccctcgatacttttgtcaagcaa

SEQ ID NO: 153403 - DNA, 25 bp, Saccharomyces pastorianus
acgtgaactccatagcagtggccaa

SEQ ID NO: 153404 - DNA, 25 bp, Saccharomyces pastorianus
gtttagctcaacttcgcatgtggat

SEQ ID NO: 153405 - DNA, 25 bp, Saccharomyces pastorianus
gataccatcaaacgactggaaaatt

SEQ ID NO: 153406 - DNA, 25 bp, Saccharomyces pastorianus
ggagtcggaattctgatcgcgtttt

SEQ ID NO: 153407 - DNA, 25 bp, Saccharomyces pastorianus
cgttgtatatagttgtcacatgtat

SEQ ID NO: 153408 - DNA, 25 bp, Saccharomyces pastorianus
caatactggagtcggaattctgatc

SEQ ID NO: 153409 - DNA, 25 bp, Saccharomyces pastorianus
gattagtattgcacttcttacgttg

SEQ ID NO: 153410 - DNA, 25 bp, Saccharomyces pastorianus
gtgagtggcagagatagtaatattt

SEQ ID NO: 153411 - DNA, 25 bp, Saccharomyces pastorianus
tctgatcgcgtttttgatatttaca

SEQ ID NO: 153412 - DNA, 25 bp, Saccharomyces pastorianus
gtattgcacttcttacgttgtatat

SEQ ID NO: 153413 - DNA, 25 bp, Saccharomyces pastorianus
gtcggaattctgatcgcgtttttga

SEQ ID NO: 153414 - DNA, 25 bp, Saccharomyces pastorianus
aaacttaatcaatactggagtcgga

SEQ ID NO: 153415 - DNA, 25 bp, Saccharomyces pastorianus
atgctaggcgacaaaactggaaaaa

SEQ ID NO: 153416 - DNA, 25 bp, Saccharomyces pastorianus
taccctccgatgatactcatttatt

SEQ ID NO: 153417 - DNA, 25 bp, Saccharomyces pastorianus
gaaatcattaagctgcgatcgcatt

SEQ ID NO: 153418 - DNA, 25 bp, Saccharomyces pastorianus
ttacggtcgcattatcatggctggg

SEQ ID NO: 153419 - DNA, 25 bp, Saccharomyces pastorianus
tttagatccaactcgtttaccaagt

SEQ ID NO: 153420 - DNA, 25 bp, Saccharomyces pastorianus
aaatcgttgtctttaccctccgatg

SEQ ID NO: 153421 - DNA, 25 bp, Saccharomyces pastorianus
acaaatatttgtccctacggaatgg

SEQ ID NO: 153422 - DNA, 25 bp, Saccharomyces pastorianus
aaatccctggataacatttcgagat

SEQ ID NO: 153423 - DNA, 25 bp, Saccharomyces pastorianus
gatcgcattccaaacttggtccgga

SEQ ID NO: 153424 - DNA, 25 bp, Saccharomyces pastorianus
ctctgctccccaaaacgagtatcaa

SEQ ID NO: 153425 - DNA, 25 bp, Saccharomyces pastorianus
attcgctggatactgcaatctctgc

SEQ ID NO: 153426 - DNA, 25 bp, Saccharomyces pastorianus
caagtttgtttttgactgtgccaca

SEQ ID NO: 153427 - DNA, 25 bp, Saccharomyces pastorianus
gaatgagatcaaacttgtacttaac

SEQ ID NO: 153428 - DNA, 25 bp, Saccharomyces pastorianus
gatcaaacttgtacttaactcttac

SEQ ID NO: 153429 - DNA, 25 bp, Saccharomyces pastorianus
gatgatgaaagtacatccaagcatg

SEQ ID NO: 153430 - DNA, 25 bp, Saccharomyces pastorianus
gaatagtgccatgaatgagatcaaa

SEQ ID NO: 153431 - DNA, 25 bp, Saccharomyces pastorianus
gtacatccaagcatgaatagtgcca

SEQ ID NO: 153432 - DNA, 25 bp, Saccharomyces pastorianus
gagatcaaacttgtacttaactctt

SEQ ID NO: 153433 - DNA, 25 bp, Saccharomyces pastorianus
tcaaacttgtacttaactcttacaa

SEQ ID NO: 153434 - DNA, 25 bp, Saccharomyces pastorianus
gaaagtacatccaagcatgaatagt

SEQ ID NO: 153435 - DNA, 25 bp, Saccharomyces pastorianus
acagattgttgtggatgatgaaagt

SEQ ID NO: 153436 - DNA, 25 bp, Saccharomyces pastorianus
atccaagcatgaatagtgccatgaa

SEQ ID NO: 153437 - DNA, 25 bp, Saccharomyces pastorianus
gtgccatgaatgagatcaaacttgt

SEQ ID NO: 153438 - DNA, 25 bp, Saccharomyces pastorianus
gagaaatcaaccaccaccaagatcg

SEQ ID NO: 153439 - DNA, 25 bp, Saccharomyces pastorianus
cggcattgaatttgacgacgacgaa

SEQ ID NO: 153440 - DNA, 25 bp, Saccharomyces pastorianus
gtccaataagcttaccaatgcatgt

SEQ ID NO: 153441 - DNA, 25 bp, Saccharomyces pastorianus
atggcaaggtttcttttcgagagac

SEQ ID NO: 153442 - DNA, 25 bp, Saccharomyces pastorianus
gagacctcgcacaacgacgatggca

SEQ ID NO: 153443 - DNA, 25 bp, Saccharomyces pastorianus
gaatctgcacgatacttctacaaca

SEQ ID NO: 153444 - DNA, 25 bp, Saccharomyces pastorianus
tatcgacagatttgcgacagtctct

SEQ ID NO: 153445 - DNA, 25 bp, Saccharomyces pastorianus
gatagaaggaattcgctgccagatt

SEQ ID NO: 153446 - DNA, 25 bp, Saccharomyces pastorianus
gctgccagattcctcatttgataaa

SEQ ID NO: 153447 - DNA, 25 bp, Saccharomyces pastorianus
gacagtctctgtcaggtccaataag

SEQ ID NO: 153448 - DNA, 25 bp, Saccharomyces pastorianus
aagatcgtccaagaggccttcatta

SEQ ID NO: 153449 - DNA, 25 bp, Saccharomyces pastorianus
tcacttttgaagatgcgttcgccgt

SEQ ID NO: 153450 - DNA, 25 bp, Saccharomyces pastorianus
agacacagactctccagtttggttt

SEQ ID NO: 153451 - DNA, 25 bp, Saccharomyces pastorianus
gtacaactaccagtcgatttccaag

SEQ ID NO: 153452 - DNA, 25 bp, Saccharomyces pastorianus
gaatccgtggacaactgctgaacct

SEQ ID NO: 153453 - DNA, 25 bp, Saccharomyces pastorianus
tgctgaaccttccttttctatcaaa

SEQ ID NO: 153454 - DNA, 25 bp, Saccharomyces pastorianus
tggtatggatccttactctcgatga

SEQ ID NO: 153455 - DNA, 25 bp, Saccharomyces pastorianus
tcttggtcacaatttctttatcttt

SEQ ID NO: 153456 - DNA, 25 bp, Saccharomyces pastorianus
gtcgatttccaagtcccaatgatag

SEQ ID NO: 153457 - DNA, 25 bp, Saccharomyces pastorianus
tcgatgatcattttcatgtgcgtgc

SEQ ID NO: 153458 - DNA, 25 bp, Saccharomyces pastorianus
tggccaattacgttagacacagact

SEQ ID NO: 153459 - DNA, 25 bp, Saccharomyces pastorianus
atcttcacaatgagtccacacttca

SEQ ID NO: 153460 - DNA, 25 bp, Saccharomyces pastorianus
ttgacgaacagttagtagcgttatc

SEQ ID NO: 153461 - DNA, 25 bp, Saccharomyces pastorianus
atatttcgtatccatcagatgttga

SEQ ID NO: 153462 - DNA, 25 bp, Saccharomyces pastorianus
acagttagtagcgttatcatttgaa

SEQ ID NO: 153463 - DNA, 25 bp, Saccharomyces pastorianus
gttatcatttgaagatgtcgcgtca

SEQ ID NO: 153464 - DNA, 25 bp, Saccharomyces pastorianus
tttcgtatccatcagatgttgacga

SEQ ID NO: 153465 - DNA, 25 bp, Saccharomyces pastorianus
gcgttatcatttgaagatgtcgcgt

SEQ ID NO: 153466 - DNA, 25 bp, Saccharomyces pastorianus
gacgaacagttagtagcgttatcat

SEQ ID NO: 153467 - DNA, 25 bp, Saccharomyces pastorianus
agtagcgttatcatttgaagatgtc

SEQ ID NO: 153468 - DNA, 25 bp, Saccharomyces pastorianus
agttagtagcgttatcatttgaaga

SEQ ID NO: 153469 - DNA, 25 bp, Saccharomyces pastorianus
gatatttcgtatccatcagatgttg

SEQ ID NO: 153470 - DNA, 25 bp, Saccharomyces pastorianus
tccatcagatgttgacgaacagtta

SEQ ID NO: 153471 - DNA, 25 bp, Saccharomyces pastorianus
ttttaactaccacgctatgtccctt

SEQ ID NO: 153472 - DNA, 25 bp, Saccharomyces pastorianus
agccttttatcttcgagttctgttt

SEQ ID NO: 153473 - DNA, 25 bp, Saccharomyces pastorianus
aggagcacgctcctggtacaataag

SEQ ID NO: 153474 - DNA, 25 bp, Saccharomyces pastorianus
gaatcctcaatgttttcctaaatta

SEQ ID NO: 153475 - DNA, 25 bp, Saccharomyces pastorianus
aagctcgtgaaccaaggctggccta

SEQ ID NO: 153476 - DNA, 25 bp, Saccharomyces pastorianus
gactttgacagctcctacgttagca

SEQ ID NO: 153477 - DNA, 25 bp, Saccharomyces pastorianus
tgtcccttttccatagtagcctata

SEQ ID NO: 153478 - DNA, 25 bp, Saccharomyces pastorianus
gggtcaccagtgactgttccaattt

SEQ ID NO: 153479 - DNA, 25 bp, Saccharomyces pastorianus
cttctggatttttattctcaacctt

SEQ ID NO: 153480 - DNA, 25 bp, Saccharomyces pastorianus
gctggcctacaatgttcttctggat

SEQ ID NO: 153481 - DNA, 25 bp, Saccharomyces pastorianus
caagagttttctttccgaggaagct

SEQ ID NO: 153482 - DNA, 25 bp, Saccharomyces pastorianus
tttcttcctcgtccctagggaccag

SEQ ID NO: 153483 - DNA, 25 bp, Saccharomyces pastorianus
tttactatttcttcctcgtccctag

SEQ ID NO: 153484 - DNA, 25 bp, Saccharomyces pastorianus
ttcatcaatatcttcgtcttcctca

SEQ ID NO: 153485 - DNA, 25 bp, Saccharomyces pastorianus
gttgtcatttactatttcttcctcg

SEQ ID NO: 153486 - DNA, 25 bp, Saccharomyces pastorianus
aagacatcttctccttcttcttcat

SEQ ID NO: 153487 - DNA, 25 bp, Saccharomyces pastorianus
gagtcaaagacatcttctccttctt

SEQ ID NO: 153488 - DNA, 25 bp, Saccharomyces pastorianus
tgtcatttactatttcttcctcgtc

SEQ ID NO: 153489 - DNA, 25 bp, Saccharomyces pastorianus
ttcgtcttcctcagaggagtcaaag

SEQ ID NO: 153490 - DNA, 25 bp, Saccharomyces pastorianus
tcgtcttcatcaatatcttcgtctt

SEQ ID NO: 153491 - DNA, 25 bp, Saccharomyces pastorianus
aatatcttcgtcttcctcagaggag

SEQ ID NO: 153492 - DNA, 25 bp, Saccharomyces pastorianus
atcttcgtcttcatcaatatcttcg

SEQ ID NO: 153493 - DNA, 25 bp, Saccharomyces pastorianus
gaatctgccttgatgcagcgacgtt

SEQ ID NO: 153494 - DNA, 25 bp, Saccharomyces pastorianus
ggtttcgtcgtcctcatcagaaaat

SEQ ID NO: 153495 - DNA, 25 bp, Saccharomyces pastorianus
tgttcctaccgttgcgtaaaccaga

SEQ ID NO: 153496 - DNA, 25 bp, Saccharomyces pastorianus
gatcctcctttgtctggtttcgtcg

SEQ ID NO: 153497 - DNA, 25 bp, Saccharomyces pastorianus
atcacgcccatattcattgttccta

SEQ ID NO: 153498 - DNA, 25 bp, Saccharomyces pastorianus
gaagtcatccaattcgtccaagatt

SEQ ID NO: 153499 - DNA, 25 bp, Saccharomyces pastorianus
aagattccacctttgtcagctgttc

SEQ ID NO: 153500 - DNA, 25 bp, Saccharomyces pastorianus
acgttgtcactttctgattctgcag

SEQ ID NO: 153501 - DNA, 25 bp, Saccharomyces pastorianus
attttcatggtcttcttcatcacgc

SEQ ID NO: 153502 - DNA, 25 bp, Saccharomyces pastorianus
tcagctgttctgttcctattttcat

SEQ ID NO: 153503 - DNA, 25 bp, Saccharomyces pastorianus
aagcttcttttcttggatcctcctt

SEQ ID NO: 153504 - DNA, 25 bp, Saccharomyces pastorianus
gatacaccatctacagacccaaagg

SEQ ID NO: 153505 - DNA, 25 bp, Saccharomyces pastorianus
gggcgtagaattgacaaatcttaga

SEQ ID NO: 153506 - DNA, 25 bp, Saccharomyces pastorianus
aagtatattgcactatatccgaatg

SEQ ID NO: 153507 - DNA, 25 bp, Saccharomyces pastorianus
tagctgaaagaatggatgcgaacac

SEQ ID NO: 153508 - DNA, 25 bp, Saccharomyces pastorianus
tacgtgataaattttcccaaaactg

SEQ ID NO: 153509 - DNA, 25 bp, Saccharomyces pastorianus
ctggcgcagatgataaagatttaca

SEQ ID NO: 153510 - DNA, 25 bp, Saccharomyces pastorianus
tatgttacgtgataaattttcccaa

SEQ ID NO: 153511 - DNA, 25 bp, Saccharomyces pastorianus
gacccaaagggcgtagaattgacaa

SEQ ID NO: 153512 - DNA, 25 bp, Saccharomyces pastorianus
gttgagagccactaaaattgaatta

SEQ ID NO: 153513 - DNA, 25 bp, Saccharomyces pastorianus
tatccgaatgatacaccatctacag

SEQ ID NO: 153514 - DNA, 25 bp, Saccharomyces pastorianus
acaacaaaagttgagagccactaaa

SEQ ID NO: 153515 - DNA, 25 bp, Saccharomyces pastorianus
acgccgtttatcacttcagcaatag

SEQ ID NO: 153516 - DNA, 25 bp, Saccharomyces pastorianus
ggatggtgttctgccttggaaatct

SEQ ID NO: 153517 - DNA, 25 bp, Saccharomyces pastorianus
ggagctgcgaccatgacggtatgta

SEQ ID NO: 153518 - DNA, 25 bp, Saccharomyces pastorianus
gctgcctagtgttttcgtattttta

SEQ ID NO: 153519 - DNA, 25 bp, Saccharomyces pastorianus
tatgtgttcctgtttatcccagaaa

SEQ ID NO: 153520 - DNA, 25 bp, Saccharomyces pastorianus
ccaccttcttttcactatattctat

SEQ ID NO: 153521 - DNA, 25 bp, Saccharomyces pastorianus
aagtgtcttttactgggagctgcga

SEQ ID NO: 153522 - DNA, 25 bp, Saccharomyces pastorianus
tcgtaaattttgcatccaccttctt

SEQ ID NO: 153523 - DNA, 25 bp, Saccharomyces pastorianus
tatcttttcttttttgcctgcacct

SEQ ID NO: 153524 - DNA, 25 bp, Saccharomyces pastorianus
gaaatctaactcttgggttccctct

SEQ ID NO: 153525 - DNA, 25 bp, Saccharomyces pastorianus
gtatgtatgctcatctatgcctctg

SEQ ID NO: 153526 - DNA, 25 bp, Saccharomyces pastorianus
acgctggcggctggtcgataacgaa

SEQ ID NO: 153527 - DNA, 25 bp, Saccharomyces pastorianus
aattacctcatccagtttcgcaaat

SEQ ID NO: 153528 - DNA, 25 bp, Saccharomyces pastorianus
ctgttatacctttcaccgttactga

SEQ ID NO: 153529 - DNA, 25 bp, Saccharomyces pastorianus
aaccgcaactgctgtttctcagatt

SEQ ID NO: 153530 - DNA, 25 bp, Saccharomyces pastorianus
aagttactatttcttcagccagtag

SEQ ID NO: 153531 - DNA, 25 bp, Saccharomyces pastorianus
ttctggcaccttggcaataacgtta

SEQ ID NO: 153532 - DNA, 25 bp, Saccharomyces pastorianus
ggtgttcttattgactccagtggta

SEQ ID NO: 153533 - DNA, 25 bp, Saccharomyces pastorianus
acaggcgggcgctatttacgctggc

SEQ ID NO: 153534 - DNA, 25 bp, Saccharomyces pastorianus
gaaggtgcctccagtagtgtcacat

SEQ ID NO: 153535 - DNA, 25 bp, Saccharomyces pastorianus
gtagtagttctgtgctttccaagag

SEQ ID NO: 153536 - DNA, 25 bp, Saccharomyces pastorianus
aaagtccacaattgctgttccaagt

SEQ ID NO: 153537 - DNA, 25 bp, Saccharomyces pastorianus
ggttccacctctataccaatgattg

SEQ ID NO: 153538 - DNA, 25 bp, Saccharomyces pastorianus
gtaaagtcgagtttctggagcccgt

SEQ ID NO: 153539 - DNA, 25 bp, Saccharomyces pastorianus
aaagttcccggcctattgagcaacg

SEQ ID NO: 153540 - DNA, 25 bp, Saccharomyces pastorianus
tgatgaaagcactcctgatcctcaa

SEQ ID NO: 153541 - DNA, 25 bp, Saccharomyces pastorianus
tactcctttggatactttatgcggg

SEQ ID NO: 153542 - DNA, 25 bp, Saccharomyces pastorianus
ataactactacatttcaccttccat

SEQ ID NO: 153543 - DNA, 25 bp, Saccharomyces pastorianus
aaaagcacattctcctcagactgac

SEQ ID NO: 153544 - DNA, 25 bp, Saccharomyces pastorianus
gtgactttatattcctgttttccta

SEQ ID NO: 153545 - DNA, 25 bp, Saccharomyces pastorianus
gggatcttgtcacctttggaccaaa

SEQ ID NO: 153546 - DNA, 25 bp, Saccharomyces pastorianus
ctggagcccgttgatttgttgaata

SEQ ID NO: 153547 - DNA, 25 bp, Saccharomyces pastorianus
gagcaacgacgttacctttttcaag

SEQ ID NO: 153548 - DNA, 25 bp, Saccharomyces pastorianus
ctccactaccggctcattatttgga

SEQ ID NO: 153549 - DNA, 25 bp, Saccharomyces pastorianus
ggagtggaaacagtctatttggaac

SEQ ID NO: 153550 - DNA, 25 bp, Saccharomyces pastorianus
atttggaactaaacctgcctccact

SEQ ID NO: 153551 - DNA, 25 bp, Saccharomyces pastorianus
cactaccggctcattatttggaaac

SEQ ID NO: 153552 - DNA, 25 bp, Saccharomyces pastorianus
gtctatttggaactaaacctgcctc

SEQ ID NO: 153553 - DNA, 25 bp, Saccharomyces pastorianus
gtcagggagtggaaacagtctattt

SEQ ID NO: 153554 - DNA, 25 bp, Saccharomyces pastorianus
ttggaactaaacctgcctccactac

SEQ ID NO: 153555 - DNA, 25 bp, Saccharomyces pastorianus
cagtcagggagtggaaacagtctat

SEQ ID NO: 153556 - DNA, 25 bp, Saccharomyces pastorianus
actgcaaaccagtcagggagtggaa

SEQ ID NO: 153557 - DNA, 25 bp, Saccharomyces pastorianus
taccggctcattatttggaaacaac

SEQ ID NO: 153558 - DNA, 25 bp, Saccharomyces pastorianus
ggctcattatttggaaacaacacag

SEQ ID NO: 153559 - DNA, 25 bp, Saccharomyces pastorianus
taactctcttttcggtactgccaat

SEQ ID NO: 153560 - DNA, 25 bp, Saccharomyces pastorianus
tagtagtggacttttcgggcagaat

SEQ ID NO: 153561 - DNA, 25 bp, Saccharomyces pastorianus
gaagtagtctttttggtgccacgaa

SEQ ID NO: 153562 - DNA, 25 bp, Saccharomyces pastorianus
gtccgggctgtttggtcaaaattct

SEQ ID NO: 153563 - DNA, 25 bp, Saccharomyces pastorianus
cacaggttctcttttcggtggtaat

SEQ ID NO: 153564 - DNA, 25 bp, Saccharomyces pastorianus
aacaacacagcttctacgacagtac

SEQ ID NO: 153565 - DNA, 25 bp, Saccharomyces pastorianus
gtggtaattcttcaacccagcctaa

SEQ ID NO: 153566 - DNA, 25 bp, Saccharomyces pastorianus
acgacagtaccttccacgaatgggt

SEQ ID NO: 153567 - DNA, 25 bp, Saccharomyces pastorianus
ctgccaatgtacctacgtctaatac

SEQ ID NO: 153568 - DNA, 25 bp, Saccharomyces pastorianus
agccgaatgcttttacccaatctaa

SEQ ID NO: 153569 - DNA, 25 bp, Saccharomyces pastorianus
ttttcggtgcaaagcctaattctca

SEQ ID NO: 153570 - DNA, 25 bp, Saccharomyces pastorianus
gtccccgctgcaattgtcgagagag

SEQ ID NO: 153571 - DNA, 25 bp, Saccharomyces pastorianus
agaccagcgtgttactagaactctt

SEQ ID NO: 153572 - DNA, 25 bp, Saccharomyces pastorianus
agaaccaccgtctttctaatggcac

SEQ ID NO: 153573 - DNA, 25 bp, Saccharomyces pastorianus
cgctctgcctataattcctgaattt

SEQ ID NO: 153574 - DNA, 25 bp, Saccharomyces pastorianus
ctcatccctagcttgtactgtattg

SEQ ID NO: 153575 - DNA, 25 bp, Saccharomyces pastorianus
gtgatccgtatatttttggccgtgg

SEQ ID NO: 153576 - DNA, 25 bp, Saccharomyces pastorianus
gatacccgctactcaacgtgatata

SEQ ID NO: 153577 - DNA, 25 bp, Saccharomyces pastorianus
gagagaggatcgtgcccagaccagc

SEQ ID NO: 153578 - DNA, 25 bp, Saccharomyces pastorianus
atattcctgtggttttaccgggcat

SEQ ID NO: 153579 - DNA, 25 bp, Saccharomyces pastorianus
gcgccaacgttctgatcacggaatt

SEQ ID NO: 153580 - DNA, 25 bp, Saccharomyces pastorianus
tactgtattggctcagatacccgct

SEQ ID NO: 153581 - DNA, 25 bp, Saccharomyces pastorianus
tagccgtaagctcccaatcagatga

SEQ ID NO: 153582 - DNA, 25 bp, Saccharomyces pastorianus
gcgctgtttaacactagaatctctt

SEQ ID NO: 153583 - DNA, 25 bp, Saccharomyces pastorianus
gaataatttccatatccgttcgaaa

SEQ ID NO: 153584 - DNA, 25 bp, Saccharomyces pastorianus
gatacggttattcaattttgtgcaa

SEQ ID NO: 153585 - DNA, 25 bp, Saccharomyces pastorianus
ggaaagcctatcttcaaacacatca

SEQ ID NO: 153586 - DNA, 25 bp, Saccharomyces pastorianus
atgcaatttcattcgttcttacaac

SEQ ID NO: 153587 - DNA, 25 bp, Saccharomyces pastorianus
cgagtatgaggtacgattcaccata

SEQ ID NO: 153588 - DNA, 25 bp, Saccharomyces pastorianus
attcaacaaacaccgttctcatgca

SEQ ID NO: 153589 - DNA, 25 bp, Saccharomyces pastorianus
aaagcttgccatgggcggatttcaa

SEQ ID NO: 153590 - DNA, 25 bp, Saccharomyces pastorianus
aacagaccaacagcaagtgatcaat

SEQ ID NO: 153591 - DNA, 25 bp, Saccharomyces pastorianus
acagtcagcggttgtccaattacga

SEQ ID NO: 153592 - DNA, 25 bp, Saccharomyces pastorianus
gcatcattgagattcgacggttcat

SEQ ID NO: 153593 - DNA, 25 bp, Saccharomyces pastorianus
tagggccgtctgtatgttgtcaaat

SEQ ID NO: 153594 - DNA, 25 bp, Saccharomyces pastorianus
aaactcacaattggccactgtggat

SEQ ID NO: 153595 - DNA, 25 bp, Saccharomyces pastorianus
caaaggcattccatgagtccaactc

SEQ ID NO: 153596 - DNA, 25 bp, Saccharomyces pastorianus
tgttgtcaaataccacatccattgc

SEQ ID NO: 153597 - DNA, 25 bp, Saccharomyces pastorianus
tggttgattggtgtccaactggttt

SEQ ID NO: 153598 - DNA, 25 bp, Saccharomyces pastorianus
acatggctacttgtctgttatacag

SEQ ID NO: 153599 - DNA, 25 bp, Saccharomyces pastorianus
accagatggtcaagtgtgatccaag

SEQ ID NO: 153600 - DNA, 25 bp, Saccharomyces pastorianus
ccactgtggatagggccgtctgtat

SEQ ID NO: 153601 - DNA, 25 bp, Saccharomyces pastorianus
gagtccaactctgtgtcagaaatta

SEQ ID NO: 153602 - DNA, 25 bp, Saccharomyces pastorianus
aagaagaccgtccaattggttgatt

SEQ ID NO: 153603 - DNA, 25 bp, Saccharomyces pastorianus
caaaaggagctttcagttcaaaact

SEQ ID NO: 153604 - DNA, 25 bp, Saccharomyces pastorianus
attgtaatcatagggcaagcctgat

SEQ ID NO: 153605 - DNA, 25 bp, Saccharomyces pastorianus
ttacatttcaactgctgcttccatt

SEQ ID NO: 153606 - DNA, 25 bp, Saccharomyces pastorianus
tatgtttccacacccgtgatttcaa

SEQ ID NO: 153607 - DNA, 25 bp, Saccharomyces pastorianus
aaaggcctgcttacatttcaactgc

SEQ ID NO: 153608 - DNA, 25 bp, Saccharomyces pastorianus
actgctgcttccattgataacaagg

SEQ ID NO: 153609 - DNA, 25 bp, Saccharomyces pastorianus
aaagttggcgtcaagaatgcatgaa

SEQ ID NO: 153610 - DNA, 25 bp, Saccharomyces pastorianus
aagcctgattactccaggttgcatt

SEQ ID NO: 153611 - DNA, 25 bp, Saccharomyces pastorianus
ggatcgcattgacgagttagtactt

SEQ ID NO: 153612 - DNA, 25 bp, Saccharomyces pastorianus
gcatgttacctaatttcacaagcta

SEQ ID NO: 153613 - DNA, 25 bp, Saccharomyces pastorianus
tcttttgaaaagttgtctgctgaac

SEQ ID NO: 153614 - DNA, 25 bp, Saccharomyces pastorianus
aaatatcttcatcctcatcgccatt

SEQ ID NO: 153615 - DNA, 25 bp, Saccharomyces pastorianus
atagcctcttcatcatctgtggaga

SEQ ID NO: 153616 - DNA, 25 bp, Saccharomyces pastorianus
agccttcaggcgtcatttgtagcca

SEQ ID NO: 153617 - DNA, 25 bp, Saccharomyces pastorianus
gcactagaattctgcaaaaccgcaa

SEQ ID NO: 153618 - DNA, 25 bp, Saccharomyces pastorianus
cagtcatcaacaaagatagcctctt

SEQ ID NO: 153619 - DNA, 25 bp, Saccharomyces pastorianus
caaaatacaggaatctcaactcggg

SEQ ID NO: 153620 - DNA, 25 bp, Saccharomyces pastorianus
gcgtcatttgtagccattataacag

SEQ ID NO: 153621 - DNA, 25 bp, Saccharomyces pastorianus
ctcttcatcatctgtggagacacaa

SEQ ID NO: 153622 - DNA, 25 bp, Saccharomyces pastorianus
aaatctttcaaacagccttcaggcg

SEQ ID NO: 153623 - DNA, 25 bp, Saccharomyces pastorianus
ggatccccaataccagcactagaat

SEQ ID NO: 153624 - DNA, 25 bp, Saccharomyces pastorianus
gccattacccaataaagcgatcggt

SEQ ID NO: 153625 - DNA, 25 bp, Saccharomyces pastorianus
aggcaataaacgtggaggaggcttc

SEQ ID NO: 153626 - DNA, 25 bp, Saccharomyces pastorianus
ggcttcatttatgcccgtcgtaaaa

SEQ ID NO: 153627 - DNA, 25 bp, Saccharomyces pastorianus
ttctaaaggcgacaagacacagagt

SEQ ID NO: 153628 - DNA, 25 bp, Saccharomyces pastorianus
aaggacgtttcaaatgtttcacaga

SEQ ID NO: 153629 - DNA, 25 bp, Saccharomyces pastorianus
tccgagcgagattctaaaggcgaca

SEQ ID NO: 153630 - DNA, 25 bp, Saccharomyces pastorianus
gaaagtgactccgagcgagattcta

SEQ ID NO: 153631 - DNA, 25 bp, Saccharomyces pastorianus
ttatgcccgtcgtaaaaatcgataa

SEQ ID NO: 153632 - DNA, 25 bp, Saccharomyces pastorianus
ctgatggactgggaattggtgccaa

SEQ ID NO: 153633 - DNA, 25 bp, Saccharomyces pastorianus
ggaggaggcttcatttatgcccgtc

SEQ ID NO: 153634 - DNA, 25 bp, Saccharomyces pastorianus
gtttcacagatacatcctgatggac

SEQ ID NO: 153635 - DNA, 25 bp, Saccharomyces pastorianus
gacacagagtcgaaacaaggacgtt

SEQ ID NO: 153636 - DNA, 25 bp, Saccharomyces pastorianus
ccacttctagggaacggctgtatca

SEQ ID NO: 153637 - DNA, 25 bp, Saccharomyces pastorianus
atgaggctgaactggccacttctag

SEQ ID NO: 153638 - DNA, 25 bp, Saccharomyces pastorianus
gaaaagatacttctgctggttcgaa

SEQ ID NO: 153639 - DNA, 25 bp, Saccharomyces pastorianus
gttacgactctaattcgcattcatg

SEQ ID NO: 153640 - DNA, 25 bp, Saccharomyces pastorianus
ggacaatacgacaggactccattcc

SEQ ID NO: 153641 - DNA, 25 bp, Saccharomyces pastorianus
tacagcttagccttcgtaataacga

SEQ ID NO: 153642 - DNA, 25 bp, Saccharomyces pastorianus
aaaggacatgcagcgggacaattat

SEQ ID NO: 153643 - DNA, 25 bp, Saccharomyces pastorianus
gaaaaaggtccttgatcaaacgatc

SEQ ID NO: 153644 - DNA, 25 bp, Saccharomyces pastorianus
agactatccgatttagagctgaaat

SEQ ID NO: 153645 - DNA, 25 bp, Saccharomyces pastorianus
gagcagcgtgagcaattccacagga

SEQ ID NO: 153646 - DNA, 25 bp, Saccharomyces pastorianus
attcgcattcatgggacactgatta

SEQ ID NO: 153647 - DNA, 25 bp, Saccharomyces pastorianus
actcatatcattattacctatacaa

SEQ ID NO: 153648 - DNA, 25 bp, Saccharomyces pastorianus
tacagcttccgatacatcatgtata

SEQ ID NO: 153649 - DNA, 25 bp, Saccharomyces pastorianus
ttttctacaggctacgaattctttg

SEQ ID NO: 153650 - DNA, 25 bp, Saccharomyces pastorianus
gaattctttgcaggcttactttact

SEQ ID NO: 153651 - DNA, 25 bp, Saccharomyces pastorianus
gcaggcttactttactcatatcatt

SEQ ID NO: 153652 - DNA, 25 bp, Saccharomyces pastorianus
acaggctacgaattctttgcaggct

SEQ ID NO: 153653 - DNA, 25 bp, Saccharomyces pastorianus
agcatacagcttccgatacatcatg

SEQ ID NO: 153654 - DNA, 25 bp, Saccharomyces pastorianus
ggcttactttactcatatcattatt

SEQ ID NO: 153655 - DNA, 25 bp, Saccharomyces pastorianus
gcttgaaaagcatacagcttccgat

SEQ ID NO: 153656 - DNA, 25 bp, Saccharomyces pastorianus
tctttgcaggcttactttactcata

SEQ ID NO: 153657 - DNA, 25 bp, Saccharomyces pastorianus
gctacgaattctttgcaggcttact

SEQ ID NO: 153658 - DNA, 25 bp, Saccharomyces pastorianus
acgatgagatcgtttcttctgtgga

SEQ ID NO: 153659 - DNA, 25 bp, Saccharomyces pastorianus
tcccggagaggatcattcaattcag

SEQ ID NO: 153660 - DNA, 25 bp, Saccharomyces pastorianus
tctgtcccggagaggatcattcaat

SEQ ID NO: 153661 - DNA, 25 bp, Saccharomyces pastorianus
atgagatcgtttcttctgtggagga

SEQ ID NO: 153662 - DNA, 25 bp, Saccharomyces pastorianus
tgtggaggattccaaaatctttgaa

SEQ ID NO: 153663 - DNA, 25 bp, Saccharomyces pastorianus
gtttctgtcccggagaggatcattc

SEQ ID NO: 153664 - DNA, 25 bp, Saccharomyces pastorianus
gcaggcttacgatgagatcgtttct

SEQ ID NO: 153665 - DNA, 25 bp, Saccharomyces pastorianus
atcgtttcttctgtggaggattcca

SEQ ID NO: 153666 - DNA, 25 bp, Saccharomyces pastorianus
gcccttacaagggtggcctacgctt

SEQ ID NO: 153667 - DNA, 25 bp, Saccharomyces pastorianus
tttcagcaggcttacgatgagatcg

SEQ ID NO: 153668 - DNA, 25 bp, Saccharomyces pastorianus
cacagtataaaaaagtgttacctat

SEQ ID NO: 153669 - DNA, 25 bp, Saccharomyces pastorianus
gagagccttagagtatttcggtaaa

SEQ ID NO: 153670 - DNA, 25 bp, Saccharomyces pastorianus
agagccttagagtatttcggtaaag

SEQ ID NO: 153671 - DNA, 25 bp, Saccharomyces pastorianus
tcggtaaaggtaacatcagattcac

SEQ ID NO: 153672 - DNA, 25 bp, Saccharomyces pastorianus
gagccttagagtatttcggtaaagg

SEQ ID NO: 153673 - DNA, 25 bp, Saccharomyces pastorianus
tgagagccttagagtatttcggtaa

SEQ ID NO: 153674 - DNA, 25 bp, Saccharomyces pastorianus
tttcggtaaaggtaacatcagattc

SEQ ID NO: 153675 - DNA, 25 bp, Saccharomyces pastorianus
gtatttcggtaaaggtaacatcaga

SEQ ID NO: 153676 - DNA, 25 bp, Saccharomyces pastorianus
gtaaaggtaacatcagattcaccaa

SEQ ID NO: 153677 - DNA, 25 bp, Saccharomyces pastorianus
ggtaaaggtaacatcagattcacca

SEQ ID NO: 153678 - DNA, 25 bp, Saccharomyces pastorianus
atgagagccttagagtatttcggta

SEQ ID NO: 153679 - DNA, 25 bp, Saccharomyces pastorianus
gagtatttcggtaaaggtaacatca

SEQ ID NO: 153680 - DNA, 25 bp, Saccharomyces pastorianus
gtagttgtcgtctctttgattttct

SEQ ID NO: 153681 - DNA, 25 bp, Saccharomyces pastorianus
tgatcatcacgggacttctggttta

SEQ ID NO: 153682 - DNA, 25 bp, Saccharomyces pastorianus
tgaccggtattgtgtttttcctatt

SEQ ID NO: 153683 - DNA, 25 bp, Saccharomyces pastorianus
ggacgtcttgtccattagtgtgcaa

SEQ ID NO: 153684 - DNA, 25 bp, Saccharomyces pastorianus
aactctccagcgattgttgttgatg

SEQ ID NO: 153685 - DNA, 25 bp, Saccharomyces pastorianus
aggcacccttttcagattatctatc

SEQ ID NO: 153686 - DNA, 25 bp, Saccharomyces pastorianus
aattactcagccaagattctcgtgt

SEQ ID NO: 153687 - DNA, 25 bp, Saccharomyces pastorianus
aagtttctcttctggcgatttggga

SEQ ID NO: 153688 - DNA, 25 bp, Saccharomyces pastorianus
gaatctatacaccacctctgagaag

SEQ ID NO: 153689 - DNA, 25 bp, Saccharomyces pastorianus
gaatttactcaggtcaactctccag

SEQ ID NO: 153690 - DNA, 25 bp, Saccharomyces pastorianus
gtgctatctctatggcatcgtctag

SEQ ID NO: 153691 - DNA, 25 bp, Saccharomyces pastorianus
attgtcacctgtacactggcattac

SEQ ID NO: 153692 - DNA, 25 bp, Saccharomyces pastorianus
tcatctgcttctcgtactaatctag

SEQ ID NO: 153693 - DNA, 25 bp, Saccharomyces pastorianus
gttctgaacgcggtgtttgctctat

SEQ ID NO: 153694 - DNA, 25 bp, Saccharomyces pastorianus
aagcacctccagtttaatgaagcct

SEQ ID NO: 153695 - DNA, 25 bp, Saccharomyces pastorianus
accagcagtggtttcgtcagtgatg

SEQ ID NO: 153696 - DNA, 25 bp, Saccharomyces pastorianus
gactagttcatcctcttttaagcaa

SEQ ID NO: 153697 - DNA, 25 bp, Saccharomyces pastorianus
gctctattcctattactgttcacta

SEQ ID NO: 153698 - DNA, 25 bp, Saccharomyces pastorianus
tgttccgtgatgacactttcggcaa

SEQ ID NO: 153699 - DNA, 25 bp, Saccharomyces pastorianus
aagcctgaatcaagtctctacctgg

SEQ ID NO: 153700 - DNA, 25 bp, Saccharomyces pastorianus
gaccgtgtgtcattcattcctaaga

SEQ ID NO: 153701 - DNA, 25 bp, Saccharomyces pastorianus
ggcggttattctgttcgttctgaac

SEQ ID NO: 153702 - DNA, 25 bp, Saccharomyces pastorianus
gactgaagccgcctgtaaacacaat

SEQ ID NO: 153703 - DNA, 25 bp, Saccharomyces pastorianus
tagaaaaactatcgtcggccgctgc

SEQ ID NO: 153704 - DNA, 25 bp, Saccharomyces pastorianus
gcagttggtcagagcttggactaca

SEQ ID NO: 153705 - DNA, 25 bp, Saccharomyces pastorianus
gaaccattcggcaatgctgttccta

SEQ ID NO: 153706 - DNA, 25 bp, Saccharomyces pastorianus
gatggcatgcgatcacgttgcgaat

SEQ ID NO: 153707 - DNA, 25 bp, Saccharomyces pastorianus
caacagtggtttacgtcagggtcct

SEQ ID NO: 153708 - DNA, 25 bp, Saccharomyces pastorianus
ttgacttaaccaacggcgaaccatt

SEQ ID NO: 153709 - DNA, 25 bp, Saccharomyces pastorianus
gaataatactccttttccaggttat

SEQ ID NO: 153710 - DNA, 25 bp, Saccharomyces pastorianus
gagcaaacgccaatagccgggatga

SEQ ID NO: 153711 - DNA, 25 bp, Saccharomyces pastorianus
ctgttcctaccttcacaaagacatg

SEQ ID NO: 153712 - DNA, 25 bp, Saccharomyces pastorianus
tgttggctttattcgatgtcattgt

SEQ ID NO: 153713 - DNA, 25 bp, Saccharomyces pastorianus
agcatccaaacagcctggccaaaag

SEQ ID NO: 153714 - DNA, 25 bp, Saccharomyces pastorianus
agcatccccaagagtccagacagta

SEQ ID NO: 153715 - DNA, 25 bp, Saccharomyces pastorianus
agtgccccgttatgcagggagataa

SEQ ID NO: 153716 - DNA, 25 bp, Saccharomyces pastorianus
gaataaacccgctgaacaatatgcc

SEQ ID NO: 153717 - DNA, 25 bp, Saccharomyces pastorianus
atatgccggagttggcagcatccaa

SEQ ID NO: 153718 - DNA, 25 bp, Saccharomyces pastorianus
tatcatccatgtcagggtgcccagt

SEQ ID NO: 153719 - DNA, 25 bp, Saccharomyces pastorianus
agtatccttctccacaacagatgta

SEQ ID NO: 153720 - DNA, 25 bp, Saccharomyces pastorianus
aaagatggacttgcccgttgatcgg

SEQ ID NO: 153721 - DNA, 25 bp, Saccharomyces pastorianus
gtcgccgaagatgcagtggagtcca

SEQ ID NO: 153722 - DNA, 25 bp, Saccharomyces pastorianus
agtcatgcacgagtcgtcgtcgtcg

SEQ ID NO: 153723 - DNA, 25 bp, Saccharomyces pastorianus
gggcagcagtatcatccatgtcagg

SEQ ID NO: 153724 - DNA, 25 bp, Saccharomyces pastorianus
tgtcttcccattcgttttcgaaaag

SEQ ID NO: 153725 - DNA, 25 bp, Saccharomyces pastorianus
ttacttgccaaactacgatgacatg

SEQ ID NO: 153726 - DNA, 25 bp, Saccharomyces pastorianus
agaaactgtactccaaagccaacct

SEQ ID NO: 153727 - DNA, 25 bp, Saccharomyces pastorianus
aacccaagaccaaccagagctgaag

SEQ ID NO: 153728 - DNA, 25 bp, Saccharomyces pastorianus
tttcgaacaaaaggccaaggctatc

SEQ ID NO: 153729 - DNA, 25 bp, Saccharomyces pastorianus
ttgaagcccgtatcaacttcggtat

SEQ ID NO: 153730 - DNA, 25 bp, Saccharomyces pastorianus
acttgtacagaggtgtcttcccatt

SEQ ID NO: 153731 - DNA, 25 bp, Saccharomyces pastorianus
aacgctatcttggatggtgctgact

SEQ ID NO: 153732 - DNA, 25 bp, Saccharomyces pastorianus
aaggctatcattgtcttgtccactt

SEQ ID NO: 153733 - DNA, 25 bp, Saccharomyces pastorianus
tggtttccaagtacagaccaaactg

SEQ ID NO: 153734 - DNA, 25 bp, Saccharomyces pastorianus
catccaaggtttcaaggccggtgct

SEQ ID NO: 153735 - DNA, 25 bp, Saccharomyces pastorianus
gtatttccatcacaaacacagtccc

SEQ ID NO: 153736 - DNA, 25 bp, Saccharomyces pastorianus
tgagtacgagtttaccaccctggtt

SEQ ID NO: 153737 - DNA, 25 bp, Saccharomyces pastorianus
gtccccggtgtcattcgttataaag

SEQ ID NO: 153738 - DNA, 25 bp, Saccharomyces pastorianus
aaactccgccagatatcttgatcaa

SEQ ID NO: 153739 - DNA, 25 bp, Saccharomyces pastorianus
cgtcaagaagatacatgcctgccat

SEQ ID NO: 153740 - DNA, 25 bp, Saccharomyces pastorianus
atgcctgccatctatgtgttaaaca

SEQ ID NO: 153741 - DNA, 25 bp, Saccharomyces pastorianus
tattgccgtggcaagaacctgtaac

SEQ ID NO: 153742 - DNA, 25 bp, Saccharomyces pastorianus
attgccttcaggtgtgatgccactg

SEQ ID NO: 153743 - DNA, 25 bp, Saccharomyces pastorianus
atcagagccgttatgagcgagtaca

SEQ ID NO: 153744 - DNA, 25 bp, Saccharomyces pastorianus
gtgaacaaacccttgcatcataagc

SEQ ID NO: 153745 - DNA, 25 bp, Saccharomyces pastorianus
ataaatagcgctgagattgccttca

SEQ ID NO: 153746 - DNA, 25 bp, Saccharomyces pastorianus
ttatatctaagccttccaagcgacc

SEQ ID NO: 153747 - DNA, 25 bp, Saccharomyces pastorianus
cattcgcattcatcagacgggagtt

SEQ ID NO: 153748 - DNA, 25 bp, Saccharomyces pastorianus
gttacagagcttgctttaccatgat

SEQ ID NO: 153749 - DNA, 25 bp, Saccharomyces pastorianus
gtcagtggctgttgatcctcttgaa

SEQ ID NO: 153750 - DNA, 25 bp, Saccharomyces pastorianus
tgcaatgcatcgttttcgcagtcgt

SEQ ID NO: 153751 - DNA, 25 bp, Saccharomyces pastorianus
aagaaacatgtttcgccctcaagac

SEQ ID NO: 153752 - DNA, 25 bp, Saccharomyces pastorianus
agacgggagttctagcacgcagaca

SEQ ID NO: 153753 - DNA, 25 bp, Saccharomyces pastorianus
atcagcgtcatatcggattgcagtt

SEQ ID NO: 153754 - DNA, 25 bp, Saccharomyces pastorianus
atcccattgggctttcgccaaaaga

SEQ ID NO: 153755 - DNA, 25 bp, Saccharomyces pastorianus
atcgacgtcattctcacagtcagtg

SEQ ID NO: 153756 - DNA, 25 bp, Saccharomyces pastorianus
gatcctcttgaacctcctggaaata

SEQ ID NO: 153757 - DNA, 25 bp, Saccharomyces pastorianus
aatggagcaccatcatgctcgtcat

SEQ ID NO: 153758 - DNA, 25 bp, Saccharomyces pastorianus
gatgaagtcttctggactctcgcca

SEQ ID NO: 153759 - DNA, 25 bp, Saccharomyces pastorianus
gctcgtcataaactgcatcgtcaag

SEQ ID NO: 153760 - DNA, 25 bp, Saccharomyces pastorianus
gcaaatgattgacgctggaacacca

SEQ ID NO: 153761 - DNA, 25 bp, Saccharomyces pastorianus
gatggcaagcctctcacagtaattt

SEQ ID NO: 153762 - DNA, 25 bp, Saccharomyces pastorianus
gtatgttcaacgcagcaccagataa

SEQ ID NO: 153763 - DNA, 25 bp, Saccharomyces pastorianus
agttattccggattacacgtctgcc

SEQ ID NO: 153764 - DNA, 25 bp, Saccharomyces pastorianus
agagctcttctaaagacagcgggat

SEQ ID NO: 153765 - DNA, 25 bp, Saccharomyces pastorianus
ctcgaccgcaatgttcagcgattgt

SEQ ID NO: 153766 - DNA, 25 bp, Saccharomyces pastorianus
gatgttggccacaaatctactgttg

SEQ ID NO: 153767 - DNA, 25 bp, Saccharomyces pastorianus
gagacccctggaagatgtaaagcaa

SEQ ID NO: 153768 - DNA, 25 bp, Saccharomyces pastorianus
gatttccaaatcaacgttctgccca

SEQ ID NO: 153769 - DNA, 25 bp, Saccharomyces pastorianus
cagtcgaagcaaccccggaggaatg

SEQ ID NO: 153770 - DNA, 25 bp, Saccharomyces pastorianus
gaaatcatcagttccgtactcagca

SEQ ID NO: 153771 - DNA, 25 bp, Saccharomyces pastorianus
gcaggtcccaaaacgttattagcta

SEQ ID NO: 153772 - DNA, 25 bp, Saccharomyces pastorianus
gtgggagctcgacatattcatcaac

SEQ ID NO: 153773 - DNA, 25 bp, Saccharomyces pastorianus
gggacgctgatgacctggatacacc

SEQ ID NO: 153774 - DNA, 25 bp, Saccharomyces pastorianus
taatgcggtaacttctcacatccag

SEQ ID NO: 153775 - DNA, 25 bp, Saccharomyces pastorianus
agagttggtcattctactgatttcc

SEQ ID NO: 153776 - DNA, 25 bp, Saccharomyces pastorianus
gatgtacatgtgttgcataggccta

SEQ ID NO: 153777 - DNA, 25 bp, Saccharomyces pastorianus
gatcgccaatttaaggcactacttg

SEQ ID NO: 153778 - DNA, 25 bp, Saccharomyces pastorianus
gcccaaactttttgcaggtgccgat

SEQ ID NO: 153779 - DNA, 25 bp, Saccharomyces pastorianus
gattcagttcttcgagagatgatat

SEQ ID NO: 153780 - DNA, 25 bp, Saccharomyces pastorianus
ggcgaacccctttaatgacaataat

SEQ ID NO: 153781 - DNA, 25 bp, Saccharomyces pastorianus
atccatttgctgatggtaatcaaaa

SEQ ID NO: 153782 - DNA, 25 bp, Saccharomyces pastorianus
gcagaaccgttcattgaaaatccat

SEQ ID NO: 153783 - DNA, 25 bp, Saccharomyces pastorianus
gaacccctttaatgacaataatgta

SEQ ID NO: 153784 - DNA, 25 bp, Saccharomyces pastorianus
gttcattgaaaatccatttgctgat

SEQ ID NO: 153785 - DNA, 25 bp, Saccharomyces pastorianus
attacaagatgcttcggcgaacccc

SEQ ID NO: 153786 - DNA, 25 bp, Saccharomyces pastorianus
cgactttgaaagtgcagaaccgttc

SEQ ID NO: 153787 - DNA, 25 bp, Saccharomyces pastorianus
caaatagattcagttcttcgagaga

SEQ ID NO: 153788 - DNA, 25 bp, Saccharomyces pastorianus
ttcggcgaacccctttaatgacaat

SEQ ID NO: 153789 - DNA, 25 bp, Saccharomyces pastorianus
tgtactgggaagtaacgactttgaa

SEQ ID NO: 153790 - DNA, 25 bp, Saccharomyces pastorianus
atcacatttcatcacttgcgctttg

SEQ ID NO: 153791 - DNA, 25 bp, Saccharomyces pastorianus
gggtatccatatcctcatcgtgccc

SEQ ID NO: 153792 - DNA, 25 bp, Saccharomyces pastorianus
ttgcgctttggatctgcctgcatta

SEQ ID NO: 153793 - DNA, 25 bp, Saccharomyces pastorianus
tatcttcctgactattgctccatca

SEQ ID NO: 153794 - DNA, 25 bp, Saccharomyces pastorianus
atttgtcagcatcacgctgtggttc

SEQ ID NO: 153795 - DNA, 25 bp, Saccharomyces pastorianus
tgttatctccacatcctaccagatt

SEQ ID NO: 153796 - DNA, 25 bp, Saccharomyces pastorianus
agtgcttgcgcactatccagttctc

SEQ ID NO: 153797 - DNA, 25 bp, Saccharomyces pastorianus
agattcccgtcatttgtcagcatca

SEQ ID NO: 153798 - DNA, 25 bp, Saccharomyces pastorianus
gatacaagcctgttatagcctttaa

SEQ ID NO: 153799 - DNA, 25 bp, Saccharomyces pastorianus
gttgcctttgcccattggacccaaa

SEQ ID NO: 153800 - DNA, 25 bp, Saccharomyces pastorianus
aaacgcatacacacaactcatcgat

SEQ ID NO: 153801 - DNA, 25 bp, Saccharomyces pastorianus
atcagcatccacaataactgtcgtg

SEQ ID NO: 153802 - DNA, 25 bp, Saccharomyces pastorianus
cagcatccacaataactgtcgtgtc

SEQ ID NO: 153803 - DNA, 25 bp, Saccharomyces pastorianus
tgctcagtgaactcgtagcaaccgc

SEQ ID NO: 153804 - DNA, 25 bp, Saccharomyces pastorianus
acggccatcagcatccacaataact

SEQ ID NO: 153805 - DNA, 25 bp, Saccharomyces pastorianus
tcagtgaactcgtagcaaccgcctc

SEQ ID NO: 153806 - DNA, 25 bp, Saccharomyces pastorianus
tacacggccatcagcatccacaata

SEQ ID NO: 153807 - DNA, 25 bp, Saccharomyces pastorianus
tcagcatccacaataactgtcgtgt

SEQ ID NO: 153808 - DNA, 25 bp, Saccharomyces pastorianus
agtgaactcgtagcaaccgcctcct

SEQ ID NO: 153809 - DNA, 25 bp, Saccharomyces pastorianus
gctcagtgaactcgtagcaaccgcc

SEQ ID NO: 153810 - DNA, 25 bp, Saccharomyces pastorianus
ggccatcagcatccacaataactgt

SEQ ID NO: 153811 - DNA, 25 bp, Saccharomyces pastorianus
atacacggccatcagcatccacaat

SEQ ID NO: 153812 - DNA, 25 bp, Saccharomyces pastorianus
gagtccttagagtttgacgttgttg

SEQ ID NO: 153813 - DNA, 25 bp, Saccharomyces pastorianus
tcctttctgaccactcaattattct

SEQ ID NO: 153814 - DNA, 25 bp, Saccharomyces pastorianus
ccagacatatttcgctcctttctga

SEQ ID NO: 153815 - DNA, 25 bp, Saccharomyces pastorianus
agtattgttgctatctgccttcctt

SEQ ID NO: 153816 - DNA, 25 bp, Saccharomyces pastorianus
atgttttaactcatccataagcaga

SEQ ID NO: 153817 - DNA, 25 bp, Saccharomyces pastorianus
actcgttagagtctgagtccttaga

SEQ ID NO: 153818 - DNA, 25 bp, Saccharomyces pastorianus
taagttccacgttagtattgttgct

SEQ ID NO: 153819 - DNA, 25 bp, Saccharomyces pastorianus
gttgttgatcttgctccagacatat

SEQ ID NO: 153820 - DNA, 25 bp, Saccharomyces pastorianus
agccaagggatataatgactcgtta

SEQ ID NO: 153821 - DNA, 25 bp, Saccharomyces pastorianus
gataccagttgttatagtcgtcgaa

SEQ ID NO: 153822 - DNA, 25 bp, Saccharomyces pastorianus
acggcacctgccgttgttgatcttg

SEQ ID NO: 153823 - DNA, 25 bp, Saccharomyces pastorianus
gactctttgttacctgccataacag

SEQ ID NO: 153824 - DNA, 25 bp, Saccharomyces pastorianus
atttggctctgattggtgtcgtgat

SEQ ID NO: 153825 - DNA, 25 bp, Saccharomyces pastorianus
taacaattttcttccgattttactg

SEQ ID NO: 153826 - DNA, 25 bp, Saccharomyces pastorianus
aagcgatttatgtctttcatggttg

SEQ ID NO: 153827 - DNA, 25 bp, Saccharomyces pastorianus
gagtacatacctatcttggcagaac

SEQ ID NO: 153828 - DNA, 25 bp, Saccharomyces pastorianus
gatcttacctgctgtgcagaatttg

SEQ ID NO: 153829 - DNA, 25 bp, Saccharomyces pastorianus
gggtttgccaagttcctaaatgatc

SEQ ID NO: 153830 - DNA, 25 bp, Saccharomyces pastorianus
gacgttcgtttaaatatcattgcca

SEQ ID NO: 153831 - DNA, 25 bp, Saccharomyces pastorianus
catggttgtgggatactgtttattc

SEQ ID NO: 153832 - DNA, 25 bp, Saccharomyces pastorianus
attgagctgctatcagactctttgt

SEQ ID NO: 153833 - DNA, 25 bp, Saccharomyces pastorianus
aagagatgagttccctgacgttcgt

SEQ ID NO: 153834 - DNA, 25 bp, Saccharomyces pastorianus
ggcctcgacgaaagtcccttacaag

SEQ ID NO: 153835 - DNA, 25 bp, Saccharomyces pastorianus
agaagaggttgtccctcaacccgtg

SEQ ID NO: 153836 - DNA, 25 bp, Saccharomyces pastorianus
aagaccgctggtaaagactgaaact

SEQ ID NO: 153837 - DNA, 25 bp, Saccharomyces pastorianus
tatcgactgggttaaatcgctgcca

SEQ ID NO: 153838 - DNA, 25 bp, Saccharomyces pastorianus
gaaacggcaatgtgcccaacaggtg

SEQ ID NO: 153839 - DNA, 25 bp, Saccharomyces pastorianus
gcagtacttcgaatggattgtggtt

SEQ ID NO: 153840 - DNA, 25 bp, Saccharomyces pastorianus
atcgctgccaaataagcagtacttc

SEQ ID NO: 153841 - DNA, 25 bp, Saccharomyces pastorianus
caattctgaggaaaagaccgctggt

SEQ ID NO: 153842 - DNA, 25 bp, Saccharomyces pastorianus
caacaggtgggccacaccattggac

SEQ ID NO: 153843 - DNA, 25 bp, Saccharomyces pastorianus
aaatactcatctatggcaattctga

SEQ ID NO: 153844 - DNA, 25 bp, Saccharomyces pastorianus
tgggccagaatcagaactcctaccg

SEQ ID NO: 153845 - DNA, 25 bp, Saccharomyces pastorianus
cgcagacctggtacgatatcaacaa

SEQ ID NO: 153846 - DNA, 25 bp, Saccharomyces pastorianus
aatcgctaccaggacattcattcac

SEQ ID NO: 153847 - DNA, 25 bp, Saccharomyces pastorianus
gaaggcctgcgcaaatatttccact

SEQ ID NO: 153848 - DNA, 25 bp, Saccharomyces pastorianus
aggagcgccgcgatatggatatagt

SEQ ID NO: 153849 - DNA, 25 bp, Saccharomyces pastorianus
ttgaacccgcttagagactccgaaa

SEQ ID NO: 153850 - DNA, 25 bp, Saccharomyces pastorianus
acgagctttcatgcatcaacacaga

SEQ ID NO: 153851 - DNA, 25 bp, Saccharomyces pastorianus
gaagattgccgcgatccgtgactac

SEQ ID NO: 153852 - DNA, 25 bp, Saccharomyces pastorianus
gtcatcccagatgtcaattaccacg

SEQ ID NO: 153853 - DNA, 25 bp, Saccharomyces pastorianus
tgcaggtctaccactcgaagattgc

SEQ ID NO: 153854 - DNA, 25 bp, Saccharomyces pastorianus
gtgactacaagctacaccgagcgta

SEQ ID NO: 153855 - DNA, 25 bp, Saccharomyces pastorianus
ggtcacacccggaattgcaggtcta

SEQ ID NO: 153856 - DNA, 25 bp, Saccharomyces pastorianus
gtgaagcaagagacgcccaccgaga

SEQ ID NO: 153857 - DNA, 25 bp, Saccharomyces pastorianus
aagctatccagcctggtgaagcaag

SEQ ID NO: 153858 - DNA, 25 bp, Saccharomyces pastorianus
ccagtgacgcaggaacagagaagat

SEQ ID NO: 153859 - DNA, 25 bp, Saccharomyces pastorianus
agttgaagtacgctcccaagctatc

SEQ ID NO: 153860 - DNA, 25 bp, Saccharomyces pastorianus
gaatactgtatatccagtgacgcag

SEQ ID NO: 153861 - DNA, 25 bp, Saccharomyces pastorianus
gacgcccaccgagagcttgaaaaga

SEQ ID NO: 153862 - DNA, 25 bp, Saccharomyces pastorianus
gaccacagcgaaagaacaggacctt

SEQ ID NO: 153863 - DNA, 25 bp, Saccharomyces pastorianus
cgacgaggagaagtcgttggccaat

SEQ ID NO: 153864 - DNA, 25 bp, Saccharomyces pastorianus
aacaggaccttgatcaagagagcgt

SEQ ID NO: 153865 - DNA, 25 bp, Saccharomyces pastorianus
ggaaagtgaacagaccacagcgaaa

SEQ ID NO: 153866 - DNA, 25 bp, Saccharomyces pastorianus
gttggccaatctgccggagttgaag

SEQ ID NO: 153867 - DNA, 25 bp, Saccharomyces pastorianus
agcaaatttatctccatggctcaaa

SEQ ID NO: 153868 - DNA, 25 bp, Saccharomyces pastorianus
gaaagtccttcgaccactagaaatg

SEQ ID NO: 153869 - DNA, 25 bp, Saccharomyces pastorianus
gatctggttccattaggccaaacat

SEQ ID NO: 153870 - DNA, 25 bp, Saccharomyces pastorianus
gattttggtgtagcttttcagtata

SEQ ID NO: 153871 - DNA, 25 bp, Saccharomyces pastorianus
tgttatcaatcaagagccgtccgat

SEQ ID NO: 153872 - DNA, 25 bp, Saccharomyces pastorianus
ggaggccggaaacgctattgttatc

SEQ ID NO: 153873 - DNA, 25 bp, Saccharomyces pastorianus
attcgcacagtgatccggtccatat

SEQ ID NO: 153874 - DNA, 25 bp, Saccharomyces pastorianus
aagtctgctgtcaaagttccactgg

SEQ ID NO: 153875 - DNA, 25 bp, Saccharomyces pastorianus
gtccgatatatcctcttgggtttta

SEQ ID NO: 153876 - DNA, 25 bp, Saccharomyces pastorianus
gagaaatgttcgacctttaacgtat

SEQ ID NO: 153877 - DNA, 25 bp, Saccharomyces pastorianus
gttccactgggcaaaccattttctc

SEQ ID NO: 153878 - DNA, 25 bp, Saccharomyces pastorianus
caactttcgaagggcgattttcata

SEQ ID NO: 153879 - DNA, 25 bp, Saccharomyces pastorianus
tcgaagggcgattttcatagcatct

SEQ ID NO: 153880 - DNA, 25 bp, Saccharomyces pastorianus
gaagggcgattttcatagcatcttc

SEQ ID NO: 153881 - DNA, 25 bp, Saccharomyces pastorianus
ctttcgaagggcgattttcatagca

SEQ ID NO: 153882 - DNA, 25 bp, Saccharomyces pastorianus
aactttcgaagggcgattttcatag

SEQ ID NO: 153883 - DNA, 25 bp, Saccharomyces pastorianus
tttcgaagggcgattttcatagcat

SEQ ID NO: 153884 - DNA, 25 bp, Saccharomyces pastorianus
ttcgaagggcgattttcatagcatc

SEQ ID NO: 153885 - DNA, 25 bp, Saccharomyces pastorianus
cgaagggcgattttcatagcatctt

SEQ ID NO: 153886 - DNA, 25 bp, Saccharomyces pastorianus
tcaactttcgaagggcgattttcat

SEQ ID NO: 153887 - DNA, 25 bp, Saccharomyces pastorianus
tggtgtgttatctggaactttgcct

SEQ ID NO: 153888 - DNA, 25 bp, Saccharomyces pastorianus
actgcagcacagcaaaatgtatttt

SEQ ID NO: 153889 - DNA, 25 bp, Saccharomyces pastorianus
gatcacatcaaacttctaaggaaat

SEQ ID NO: 153890 - DNA, 25 bp, Saccharomyces pastorianus
aactttgcctactgcagcacagcaa

SEQ ID NO: 153891 - DNA, 25 bp, Saccharomyces pastorianus
ccgctagtatttgacatagatcaca

SEQ ID NO: 153892 - DNA, 25 bp, Saccharomyces pastorianus
gtgtgttatctggaactttgcctac

SEQ ID NO: 153893 - DNA, 25 bp, Saccharomyces pastorianus
ttttgtcggtacctttgaggcttat

SEQ ID NO: 153894 - DNA, 25 bp, Saccharomyces pastorianus
tgcctactgcagcacagcaaaatgt

SEQ ID NO: 153895 - DNA, 25 bp, Saccharomyces pastorianus
gtcggtacctttgaggcttatgtta

SEQ ID NO: 153896 - DNA, 25 bp, Saccharomyces pastorianus
ggtatttgtggtgtgttatctggaa

SEQ ID NO: 153897 - DNA, 25 bp, Saccharomyces pastorianus
gacatagatcacatcaaacttctaa

SEQ ID NO: 153898 - DNA, 25 bp, Saccharomyces pastorianus
gctacggatcgtatctctgcatatg

SEQ ID NO: 153899 - DNA, 25 bp, Saccharomyces pastorianus
gtatctctgcatatgacgttattat

SEQ ID NO: 153900 - DNA, 25 bp, Saccharomyces pastorianus
aactggacggtatattgccattggt

SEQ ID NO: 153901 - DNA, 25 bp, Saccharomyces pastorianus
ctgaactggacggtatattgccatt

SEQ ID NO: 153902 - DNA, 25 bp, Saccharomyces pastorianus
atgtcaattacgaagactgaactgg

SEQ ID NO: 153903 - DNA, 25 bp, Saccharomyces pastorianus
ctggacggtatattgccattggtgg

SEQ ID NO: 153904 - DNA, 25 bp, Saccharomyces pastorianus
ggatcgtatctctgcatatgacgtt

SEQ ID NO: 153905 - DNA, 25 bp, Saccharomyces pastorianus
ctctgcatatgacgttattatggaa

SEQ ID NO: 153906 - DNA, 25 bp, Saccharomyces pastorianus
tacggatcgtatctctgcatatgac

SEQ ID NO: 153907 - DNA, 25 bp, Saccharomyces pastorianus
acgaagactgaactggacggtatat

SEQ ID NO: 153908 - DNA, 25 bp, Saccharomyces pastorianus
aagactgaactggacggtatattgc

SEQ ID NO: 153909 - DNA, 25 bp, Saccharomyces pastorianus
atgtgtgttttgtccttcctcgagc

SEQ ID NO: 153910 - DNA, 25 bp, Saccharomyces pastorianus
attgcacggatttctcagatgccct

SEQ ID NO: 153911 - DNA, 25 bp, Saccharomyces pastorianus
tcctcgagcctccaagtagaagata

SEQ ID NO: 153912 - DNA, 25 bp, Saccharomyces pastorianus
ataccttttgtgaggcagatctccc

SEQ ID NO: 153913 - DNA, 25 bp, Saccharomyces pastorianus
ctcccaatgacctgcttcaagtggt

SEQ ID NO: 153914 - DNA, 25 bp, Saccharomyces pastorianus
gacctgcttcaagtggtattgcacg

SEQ ID NO: 153915 - DNA, 25 bp, Saccharomyces pastorianus
gatgccctctggatgggagtcaagt

SEQ ID NO: 153916 - DNA, 25 bp, Saccharomyces pastorianus
ggcagatctcccgtatacaaaaata

SEQ ID NO: 153917 - DNA, 25 bp, Saccharomyces pastorianus
ggtatcggccatactgttcatggta

SEQ ID NO: 153918 - DNA, 25 bp, Saccharomyces pastorianus
agtgcttatgtgtgttttgtccttc

SEQ ID NO: 153919 - DNA, 25 bp, Saccharomyces pastorianus
caagttgactctatcggtatcggcc

SEQ ID NO: 153920 - DNA, 25 bp, Saccharomyces pastorianus
ttgcatttagtgaaccgatcggtga

SEQ ID NO: 153921 - DNA, 25 bp, Saccharomyces pastorianus
tattggatatatgaagttactcgtc

SEQ ID NO: 153922 - DNA, 25 bp, Saccharomyces pastorianus
ttgcgttgcctttgagatactattg

SEQ ID NO: 153923 - DNA, 25 bp, Saccharomyces pastorianus
caggaacatgcatggttgtaattgc

SEQ ID NO: 153924 - DNA, 25 bp, Saccharomyces pastorianus
atacggaattttgcgttgcctttga

SEQ ID NO: 153925 - DNA, 25 bp, Saccharomyces pastorianus
tttgctcgtacttattgtgacttca

SEQ ID NO: 153926 - DNA, 25 bp, Saccharomyces pastorianus
gatggaaattatcacacgtaaaccg

SEQ ID NO: 153927 - DNA, 25 bp, Saccharomyces pastorianus
taaagttaagcttctgatggaaatt

SEQ ID NO: 153928 - DNA, 25 bp, Saccharomyces pastorianus
aaagcggcagtaattttgctcgtac

SEQ ID NO: 153929 - DNA, 25 bp, Saccharomyces pastorianus
gaagttactcgtcataaagcggcag

SEQ ID NO: 153930 - DNA, 25 bp, Saccharomyces pastorianus
gatactattgttttccttttgcttt

SEQ ID NO: 153931 - DNA, 25 bp, Saccharomyces pastorianus
gtaccgacgccaagtcggattttct

SEQ ID NO: 153932 - DNA, 25 bp, Saccharomyces pastorianus
tactccctactacttttaccgtgat

SEQ ID NO: 153933 - DNA, 25 bp, Saccharomyces pastorianus
taccgtgatgaagattgccaccgtt

SEQ ID NO: 153934 - DNA, 25 bp, Saccharomyces pastorianus
gctatgggatactccctactacttt

SEQ ID NO: 153935 - DNA, 25 bp, Saccharomyces pastorianus
atgggctatgggatactccctacta

SEQ ID NO: 153936 - DNA, 25 bp, Saccharomyces pastorianus
gccaccgttattttctaagtcttat

SEQ ID NO: 153937 - DNA, 25 bp, Saccharomyces pastorianus
aaccagtatttatttgatcatgggc

SEQ ID NO: 153938 - DNA, 25 bp, Saccharomyces pastorianus
taaactgggcatgcaaacatcttca

SEQ ID NO: 153939 - DNA, 25 bp, Saccharomyces pastorianus
tccctactacttttaccgtgatgaa

SEQ ID NO: 153940 - DNA, 25 bp, Saccharomyces pastorianus
ttgccaccgttattttctaagtctt

SEQ ID NO: 153941 - DNA, 25 bp, Saccharomyces pastorianus
taacatccttcaacaccatagcaga

SEQ ID NO: 153942 - DNA, 25 bp, Saccharomyces pastorianus
tgttgagtggagatggtgccaattt

SEQ ID NO: 153943 - DNA, 25 bp, Saccharomyces pastorianus
aaaatattagactggatgtgttgag

SEQ ID NO: 153944 - DNA, 25 bp, Saccharomyces pastorianus
gcaatcgcaaccacaaaataaaaat

SEQ ID NO: 153945 - DNA, 25 bp, Saccharomyces pastorianus
gagggaaatgtggtccttcccaaag

SEQ ID NO: 153946 - DNA, 25 bp, Saccharomyces pastorianus
gaaatgtggtccttcccaaagacat

SEQ ID NO: 153947 - DNA, 25 bp, Saccharomyces pastorianus
gagtggagatggtgccaatttagtt

SEQ ID NO: 153948 - DNA, 25 bp, Saccharomyces pastorianus
atgcaatcgcaaccacaaaataaaa

SEQ ID NO: 153949 - DNA, 25 bp, Saccharomyces pastorianus
gatggtgccaatttagttgagggaa

SEQ ID NO: 153950 - DNA, 25 bp, Saccharomyces pastorianus
gttgagggaaatgtggtccttccca

SEQ ID NO: 153951 - DNA, 25 bp, Saccharomyces pastorianus
aaatgtggtccttcccaaagacatg

SEQ ID NO: 153952 - DNA, 25 bp, Saccharomyces pastorianus
ggaaatgtggtccttcccaaagaca

SEQ ID NO: 153953 - DNA, 25 bp, Saccharomyces pastorianus
ggatctatgaaatcgctcgctatac

SEQ ID NO: 153954 - DNA, 25 bp, Saccharomyces pastorianus
aaatcgctcgctatacaccagtcat

SEQ ID NO: 153955 - DNA, 25 bp, Saccharomyces pastorianus
attctgcatactacgcttatctttc

SEQ ID NO: 153956 - DNA, 25 bp, Saccharomyces pastorianus
tatgaaatcgctcgctatacaccag

SEQ ID NO: 153957 - DNA, 25 bp, Saccharomyces pastorianus
gttttcaattctgcatactacgctt

SEQ ID NO: 153958 - DNA, 25 bp, Saccharomyces pastorianus
tactacgcttatctttctcttgtag

SEQ ID NO: 153959 - DNA, 25 bp, Saccharomyces pastorianus
tacaccagtcatgattttgtccctg

SEQ ID NO: 153960 - DNA, 25 bp, Saccharomyces pastorianus
attggatctatgaaatcgctcgcta

SEQ ID NO: 153961 - DNA, 25 bp, Saccharomyces pastorianus
accagtcatgattttgtccctggta

SEQ ID NO: 153962 - DNA, 25 bp, Saccharomyces pastorianus
tgcatactacgcttatctttctctt

SEQ ID NO: 153963 - DNA, 25 bp, Saccharomyces pastorianus
gctcgctatacaccagtcatgattt

SEQ ID NO: 153964 - DNA, 25 bp, Saccharomyces pastorianus
atgcctctaggaacgtcaaacttac

SEQ ID NO: 153965 - DNA, 25 bp, Saccharomyces pastorianus
catatgtctcatgcctctaggaacg

SEQ ID NO: 153966 - DNA, 25 bp, Saccharomyces pastorianus
tatgtctcatgcctctaggaacgtc

SEQ ID NO: 153967 - DNA, 25 bp, Saccharomyces pastorianus
atgtctcatgcctctaggaacgtca

SEQ ID NO: 153968 - DNA, 25 bp, Saccharomyces pastorianus
tgccatatgtctcatgcctctagga

SEQ ID NO: 153969 - DNA, 25 bp, Saccharomyces pastorianus
gcctctaggaacgtcaaacttacct

SEQ ID NO: 153970 - DNA, 25 bp, Saccharomyces pastorianus
catgcctctaggaacgtcaaactta

SEQ ID NO: 153971 - DNA, 25 bp, Saccharomyces pastorianus
tgtgccatatgtctcatgcctctag

SEQ ID NO: 153972 - DNA, 25 bp, Saccharomyces pastorianus
gccatatgtctcatgcctctaggaa

SEQ ID NO: 153973 - DNA, 25 bp, Saccharomyces pastorianus
atgtgccatatgtctcatgcctcta

SEQ ID NO: 153974 - DNA, 25 bp, Saccharomyces pastorianus
gtctcatgcctctaggaacgtcaaa

SEQ ID NO: 153975 - DNA, 25 bp, Saccharomyces pastorianus
acactgtgggtcttcatttccaaga

SEQ ID NO: 153976 - DNA, 25 bp, Saccharomyces pastorianus
ggaattattctccatgcgagccagg

SEQ ID NO: 153977 - DNA, 25 bp, Saccharomyces pastorianus
aagccccggcaaatatatatccaat

SEQ ID NO: 153978 - DNA, 25 bp, Saccharomyces pastorianus
ttaactgcagacataaagccccggc

SEQ ID NO: 153979 - DNA, 25 bp, Saccharomyces pastorianus
aaaaccagcgatgttcagagtgccg

SEQ ID NO: 153980 - DNA, 25 bp, Saccharomyces pastorianus
gagtgccgcactgatatcaattttc

SEQ ID NO: 153981 - DNA, 25 bp, Saccharomyces pastorianus
ataagtattgttgcccacactgtgg

SEQ ID NO: 153982 - DNA, 25 bp, Saccharomyces pastorianus
gatatttccgcgaccaacgagtaga

SEQ ID NO: 153983 - DNA, 25 bp, Saccharomyces pastorianus
tcaattttcggctcccctagatatt

SEQ ID NO: 153984 - DNA, 25 bp, Saccharomyces pastorianus
gcgccgtctctactagtgctggaaa

SEQ ID NO: 153985 - DNA, 25 bp, Saccharomyces pastorianus
aatggtatcgatctactgcaatcat

SEQ ID NO: 153986 - DNA, 25 bp, Saccharomyces pastorianus
atcaccgactgcaagaactctacca

SEQ ID NO: 153987 - DNA, 25 bp, Saccharomyces pastorianus
cagtttcgttcaaattggcctcgtc

SEQ ID NO: 153988 - DNA, 25 bp, Saccharomyces pastorianus
ggtcttgcggccttggtagagttaa

SEQ ID NO: 153989 - DNA, 25 bp, Saccharomyces pastorianus
tcgtcggacacacccttaattcttt

SEQ ID NO: 153990 - DNA, 25 bp, Saccharomyces pastorianus
gttcaaattggcctcgtcggacaca

SEQ ID NO: 153991 - DNA, 25 bp, Saccharomyces pastorianus
ctgcaagaactctaccagtttcgtt

SEQ ID NO: 153992 - DNA, 25 bp, Saccharomyces pastorianus
acccttaattctttcctctaagatg

SEQ ID NO: 153993 - DNA, 25 bp, Saccharomyces pastorianus
cttctggtggaagccaaagcagcag

SEQ ID NO: 153994 - DNA, 25 bp, Saccharomyces pastorianus
tgcggccttggtagagttaattaga

SEQ ID NO: 153995 - DNA, 25 bp, Saccharomyces pastorianus
gagttaattagagttctcgatagag

SEQ ID NO: 153996 - DNA, 25 bp, Saccharomyces pastorianus
agccaaagcagcagcggcaggtctt

SEQ ID NO: 153997 - DNA, 25 bp, Saccharomyces pastorianus
agctccataggttggcggctcttgg

SEQ ID NO: 153998 - DNA, 25 bp, Saccharomyces pastorianus
ggcggctcttggtcgcactaatcaa

SEQ ID NO: 153999 - DNA, 25 bp, Saccharomyces pastorianus
atgtcaaccctctgcagctccatag

SEQ ID NO: 154000 - DNA, 25 bp, Saccharomyces pastorianus
tactgccctgttgactaatttaaat

SEQ ID NO: 154001 - DNA, 25 bp, Saccharomyces pastorianus
cactaatcaactccgctggcgtttg

SEQ ID NO: 154002 - DNA, 25 bp, Saccharomyces pastorianus
atcatcgggccacgcctttacaaac

SEQ ID NO: 154003 - DNA, 25 bp, Saccharomyces pastorianus
ctggcgtttgcggatcattcaatga

SEQ ID NO: 154004 - DNA, 25 bp, Saccharomyces pastorianus
gcaccaactcctaacgtaaaacctg

SEQ ID NO: 154005 - DNA, 25 bp, Saccharomyces pastorianus
tttacaaacgcaccaactcctaacg

SEQ ID NO: 154006 - DNA, 25 bp, Saccharomyces pastorianus
ggtaaaattactgccctgttgacta

SEQ ID NO: 154007 - DNA, 25 bp, Saccharomyces pastorianus
tggacatattggaactcaccctcga

SEQ ID NO: 154008 - DNA, 25 bp, Saccharomyces pastorianus
aaataatcatatacacctacccagt

SEQ ID NO: 154009 - DNA, 25 bp, Saccharomyces pastorianus
cctacccagtatccttatatgcagt

SEQ ID NO: 154010 - DNA, 25 bp, Saccharomyces pastorianus
acaagatgatttaatgggtccaaat

SEQ ID NO: 154011 - DNA, 25 bp, Saccharomyces pastorianus
ccatcagtgcacttggaattttgaa

SEQ ID NO: 154012 - DNA, 25 bp, Saccharomyces pastorianus
tattgaaatctgagcatggaggaaa

SEQ ID NO: 154013 - DNA, 25 bp, Saccharomyces pastorianus
gctcaacctgagcaaaacgttttcc

SEQ ID NO: 154014 - DNA, 25 bp, Saccharomyces pastorianus
tatatgcagtaaaagagctcaacct

SEQ ID NO: 154015 - DNA, 25 bp, Saccharomyces pastorianus
aaaacgttttccatcagtgcacttg

SEQ ID NO: 154016 - DNA, 25 bp, Saccharomyces pastorianus
agtaattccaaccagagtccagcga

SEQ ID NO: 154017 - DNA, 25 bp, Saccharomyces pastorianus
gggtccaaatcattttagcctacgt

SEQ ID NO: 154018 - DNA, 25 bp, Saccharomyces pastorianus
cattttagcctacgtatcatgtata

SEQ ID NO: 154019 - DNA, 25 bp, Saccharomyces pastorianus
aatcaattcagcaacgccaacgcga

SEQ ID NO: 154020 - DNA, 25 bp, Saccharomyces pastorianus
gttaatcattttcctgcgtccgttc

SEQ ID NO: 154021 - DNA, 25 bp, Saccharomyces pastorianus
attaacgggatacctctttccatgc

SEQ ID NO: 154022 - DNA, 25 bp, Saccharomyces pastorianus
aatttatccagtggcttctgtcccc

SEQ ID NO: 154023 - DNA, 25 bp, Saccharomyces pastorianus
tagtgtaattcctgatctctccatg

SEQ ID NO: 154024 - DNA, 25 bp, Saccharomyces pastorianus
tggaaccactgttaccactttagtt

SEQ ID NO: 154025 - DNA, 25 bp, Saccharomyces pastorianus
ctaatggcatgtcaattccctctaa

SEQ ID NO: 154026 - DNA, 25 bp, Saccharomyces pastorianus
aataggccaccctattccaagggag

SEQ ID NO: 154027 - DNA, 25 bp, Saccharomyces pastorianus
gtaagcactcccgttaatcattttc

SEQ ID NO: 154028 - DNA, 25 bp, Saccharomyces pastorianus
acggagattctgacggttctataat

SEQ ID NO: 154029 - DNA, 25 bp, Saccharomyces pastorianus
ttctgtccccgcttcgaataacaat

SEQ ID NO: 154030 - DNA, 25 bp, Saccharomyces pastorianus
gttgcaactgttgctgctccggttg

SEQ ID NO: 154031 - DNA, 25 bp, Saccharomyces pastorianus
atccttcaccatgacgagaatgcgt

SEQ ID NO: 154032 - DNA, 25 bp, Saccharomyces pastorianus
gaactggtgctgttgcaactgttgc

SEQ ID NO: 154033 - DNA, 25 bp, Saccharomyces pastorianus
ggtcttggtcagaatctcgattatc

SEQ ID NO: 154034 - DNA, 25 bp, Saccharomyces pastorianus
agaatctcgattatccttcaccatg

SEQ ID NO: 154035 - DNA, 25 bp, Saccharomyces pastorianus
cgattatccttcaccatgacgagaa

SEQ ID NO: 154036 - DNA, 25 bp, Saccharomyces pastorianus
ctgctccggttgtcttttcatgtga

SEQ ID NO: 154037 - DNA, 25 bp, Saccharomyces pastorianus
gccatataatctgtatacggacctt

SEQ ID NO: 154038 - DNA, 25 bp, Saccharomyces pastorianus
accatgacgagaatgcgtatacgca

SEQ ID NO: 154039 - DNA, 25 bp, Saccharomyces pastorianus
aaatcttggtcttggtcagaatctc

SEQ ID NO: 154040 - DNA, 25 bp, Saccharomyces pastorianus
gcgtatacgcagagccatataatct

SEQ ID NO: 154041 - DNA, 25 bp, Saccharomyces pastorianus
aaagttaggtgcatcgtcgtctagc

SEQ ID NO: 154042 - DNA, 25 bp, Saccharomyces pastorianus
gaagcgcatgtgacgattttgttca

SEQ ID NO: 154043 - DNA, 25 bp, Saccharomyces pastorianus
ggttggactacgacagatttcacta

SEQ ID NO: 154044 - DNA, 25 bp, Saccharomyces pastorianus
aaagatttgttgtcgggttcactga

SEQ ID NO: 154045 - DNA, 25 bp, Saccharomyces pastorianus
gtaatccatcttttgcacagggtaa

SEQ ID NO: 154046 - DNA, 25 bp, Saccharomyces pastorianus
gggacaaggctagcgcttctattga

SEQ ID NO: 154047 - DNA, 25 bp, Saccharomyces pastorianus
gcagcgtcaaagatcttagcccatt

SEQ ID NO: 154048 - DNA, 25 bp, Saccharomyces pastorianus
actcagcagctatccattgtttctg

SEQ ID NO: 154049 - DNA, 25 bp, Saccharomyces pastorianus
gcttctattgataacccttccatgg

SEQ ID NO: 154050 - DNA, 25 bp, Saccharomyces pastorianus
attcattcactggttctgcgataga

SEQ ID NO: 154051 - DNA, 25 bp, Saccharomyces pastorianus
cgtcgtctagcggattttacaaatt

SEQ ID NO: 154052 - DNA, 25 bp, Saccharomyces pastorianus
tataaatcagaacccagctcctatg

SEQ ID NO: 154053 - DNA, 25 bp, Saccharomyces pastorianus
atattcctgccttatcctcaaatga

SEQ ID NO: 154054 - DNA, 25 bp, Saccharomyces pastorianus
acgagttttcggctgctttgagaat

SEQ ID NO: 154055 - DNA, 25 bp, Saccharomyces pastorianus
gtcttccagggcaattactatcgca

SEQ ID NO: 154056 - DNA, 25 bp, Saccharomyces pastorianus
actcaactggcttctttttctataa

SEQ ID NO: 154057 - DNA, 25 bp, Saccharomyces pastorianus
gcaagtgtgggctaccgtcgatata

SEQ ID NO: 154058 - DNA, 25 bp, Saccharomyces pastorianus
tgcaaaatgctcctaaccaaccaat

SEQ ID NO: 154059 - DNA, 25 bp, Saccharomyces pastorianus
tggcgaggcagtcagaccgctcttc

SEQ ID NO: 154060 - DNA, 25 bp, Saccharomyces pastorianus
tttagaactccattatcctctcagg

SEQ ID NO: 154061 - DNA, 25 bp, Saccharomyces pastorianus
atgagagcacacctactcaactggc

SEQ ID NO: 154062 - DNA, 25 bp, Saccharomyces pastorianus
atttccgctgccctatatgagagca

SEQ ID NO: 154063 - DNA, 25 bp, Saccharomyces pastorianus
ccggttgcccatgcattatttgtga

SEQ ID NO: 154064 - DNA, 25 bp, Saccharomyces pastorianus
tatccggttgcccatgcattatttg

SEQ ID NO: 154065 - DNA, 25 bp, Saccharomyces pastorianus
aatgcaatgtatccggttgcccatg

SEQ ID NO: 154066 - DNA, 25 bp, Saccharomyces pastorianus
atgtatccggttgcccatgcattat

SEQ ID NO: 154067 - DNA, 25 bp, Saccharomyces pastorianus
gcaatgtatccggttgcccatgcat

SEQ ID NO: 154068 - DNA, 25 bp, Saccharomyces pastorianus
aatgtatccggttgcccatgcatta

SEQ ID NO: 154069 - DNA, 25 bp, Saccharomyces pastorianus
atttgtgatgttttcggatgtagtt

SEQ ID NO: 154070 - DNA, 25 bp, Saccharomyces pastorianus
gcccatgcattatttgtgatgtttt

SEQ ID NO: 154071 - DNA, 25 bp, Saccharomyces pastorianus
gttgcccatgcattatttgtgatgt

SEQ ID NO: 154072 - DNA, 25 bp, Saccharomyces pastorianus
aaactaaatgcaatgtatccggttg

SEQ ID NO: 154073 - DNA, 25 bp, Saccharomyces pastorianus
gcattatttgtgatgttttcggatg

SEQ ID NO: 154074 - DNA, 25 bp, Saccharomyces pastorianus
acgtggaagcgcacaatgctgccgt

SEQ ID NO: 154075 - DNA, 25 bp, Saccharomyces pastorianus
gtgatgttgacactctatcttccac

SEQ ID NO: 154076 - DNA, 25 bp, Saccharomyces pastorianus
atcaatacgcgttggccagtacggc

SEQ ID NO: 154077 - DNA, 25 bp, Saccharomyces pastorianus
gctcaccctgctattgaagatcaat

SEQ ID NO: 154078 - DNA, 25 bp, Saccharomyces pastorianus
aacgataacctgtctattgagcata

SEQ ID NO: 154079 - DNA, 25 bp, Saccharomyces pastorianus
gaccatggcaactactacgatttct

SEQ ID NO: 154080 - DNA, 25 bp, Saccharomyces pastorianus
aatgctaggagagacgccggcgtta

SEQ ID NO: 154081 - DNA, 25 bp, Saccharomyces pastorianus
gaggagtacgacttcgactgcgaca

SEQ ID NO: 154082 - DNA, 25 bp, Saccharomyces pastorianus
tacggcccgctctaaattggcgaga

SEQ ID NO: 154083 - DNA, 25 bp, Saccharomyces pastorianus
gagcgcgccgacaagacagaccatg

SEQ ID NO: 154084 - DNA, 25 bp, Saccharomyces pastorianus
gggccacgctaacctgctagataaa

SEQ ID NO: 154085 - DNA, 25 bp, Saccharomyces pastorianus
gacgcggttcttatatttgtgctct

SEQ ID NO: 154086 - DNA, 25 bp, Saccharomyces pastorianus
aaattgtctggtaactcgatccctg

SEQ ID NO: 154087 - DNA, 25 bp, Saccharomyces pastorianus
agtttactacggcactagcggcata

SEQ ID NO: 154088 - DNA, 25 bp, Saccharomyces pastorianus
agtgggagtttctgtgcctattggc

SEQ ID NO: 154089 - DNA, 25 bp, Saccharomyces pastorianus
atcagccgattacttcattgtcaga

SEQ ID NO: 154090 - DNA, 25 bp, Saccharomyces pastorianus
gtaccgatctgactgcattattgcc

SEQ ID NO: 154091 - DNA, 25 bp, Saccharomyces pastorianus
tcgttggttatctcattgcagcatt

SEQ ID NO: 154092 - DNA, 25 bp, Saccharomyces pastorianus
gtctccgcagcttatacattgtacg

SEQ ID NO: 154093 - DNA, 25 bp, Saccharomyces pastorianus
ggagtcccctagacattctgaacag

SEQ ID NO: 154094 - DNA, 25 bp, Saccharomyces pastorianus
catttttgcgtttgaccagctgggt

SEQ ID NO: 154095 - DNA, 25 bp, Saccharomyces pastorianus
tttgtgctctaatatcgttggcgat

SEQ ID NO: 154096 - DNA, 25 bp, Saccharomyces pastorianus
atttgcagcagacggcgacgcttta

SEQ ID NO: 154097 - DNA, 25 bp, Saccharomyces pastorianus
atcagaatactcttcggaggcgtca

SEQ ID NO: 154098 - DNA, 25 bp, Saccharomyces pastorianus
ggaggcgtcaaatacacccattgaa

SEQ ID NO: 154099 - DNA, 25 bp, Saccharomyces pastorianus
gaacccaaggtttttgattgtggtg

SEQ ID NO: 154100 - DNA, 25 bp, Saccharomyces pastorianus
ggtgataacatagtcatgtcggcga

SEQ ID NO: 154101 - DNA, 25 bp, Saccharomyces pastorianus
atggtggtacaatcctgggcattgc

SEQ ID NO: 154102 - DNA, 25 bp, Saccharomyces pastorianus
gaaatatcaccgattactcaattaa

SEQ ID NO: 154103 - DNA, 25 bp, Saccharomyces pastorianus
tgaagatttcgcagtgttagcaggc

SEQ ID NO: 154104 - DNA, 25 bp, Saccharomyces pastorianus
atgtcggcgaatggatttgcagcag

SEQ ID NO: 154105 - DNA, 25 bp, Saccharomyces pastorianus
ttaattctcgttatgaacccaaggt

SEQ ID NO: 154106 - DNA, 25 bp, Saccharomyces pastorianus
tgggcattgcaggtgaagatttcgc

SEQ ID NO: 154107 - DNA, 25 bp, Saccharomyces pastorianus
gaaagatcttatttccctcatctga

SEQ ID NO: 154108 - DNA, 25 bp, Saccharomyces pastorianus
ccaggatccatcaccaatgtactta

SEQ ID NO: 154109 - DNA, 25 bp, Saccharomyces pastorianus
gccactgttgttactgaacgctctg

SEQ ID NO: 154110 - DNA, 25 bp, Saccharomyces pastorianus
attccagaactgtatgtaggcgcca

SEQ ID NO: 154111 - DNA, 25 bp, Saccharomyces pastorianus
ggcgccattattggccgtggaatga

SEQ ID NO: 154112 - DNA, 25 bp, Saccharomyces pastorianus
cctcatctgaaaaagtcctccggtg

SEQ ID NO: 154113 - DNA, 25 bp, Saccharomyces pastorianus
ctctgattctgcttctttcttggaa

SEQ ID NO: 154114 - DNA, 25 bp, Saccharomyces pastorianus
gtcgtataatactgtggtcccgtcc

SEQ ID NO: 154115 - DNA, 25 bp, Saccharomyces pastorianus
aacttgctgagtccatgcttttgaa

SEQ ID NO: 154116 - DNA, 25 bp, Saccharomyces pastorianus
agctgccgaaggagatgccactgtt

SEQ ID NO: 154117 - DNA, 25 bp, Saccharomyces pastorianus
gacgttgacgtcagattcagcacag

SEQ ID NO: 154118 - DNA, 25 bp, Saccharomyces pastorianus
caatgatgttgagcccacgcgagat

SEQ ID NO: 154119 - DNA, 25 bp, Saccharomyces pastorianus
aagctccgcttctggaggtggacag

SEQ ID NO: 154120 - DNA, 25 bp, Saccharomyces pastorianus
aaggcggttgtgatatcggacgaaa

SEQ ID NO: 154121 - DNA, 25 bp, Saccharomyces pastorianus
tagcattaccaatagccagacggcc

SEQ ID NO: 154122 - DNA, 25 bp, Saccharomyces pastorianus
agcaaccctacattggcgctttcat

SEQ ID NO: 154123 - DNA, 25 bp, Saccharomyces pastorianus
ataactagcgctttcccgagtaaag

SEQ ID NO: 154124 - DNA, 25 bp, Saccharomyces pastorianus
tcgaaaaactccagaagctccgctt

SEQ ID NO: 154125 - DNA, 25 bp, Saccharomyces pastorianus
tttgctcggcatttcatggctacaa

SEQ ID NO: 154126 - DNA, 25 bp, Saccharomyces pastorianus
ggatgtaccagaagtatacccgcaa

SEQ ID NO: 154127 - DNA, 25 bp, Saccharomyces pastorianus
ggtggacagtcatcatccagtcgat

SEQ ID NO: 154128 - DNA, 25 bp, Saccharomyces pastorianus
atacgatgttggtgttctggctcaa

SEQ ID NO: 154129 - DNA, 25 bp, Saccharomyces pastorianus
ccggcctctgatttctctaaagaag

SEQ ID NO: 154130 - DNA, 25 bp, Saccharomyces pastorianus
tgttgcggtaccttgaaactgcccc

SEQ ID NO: 154131 - DNA, 25 bp, Saccharomyces pastorianus
tttggcctcgatggaactgtaattc

SEQ ID NO: 154132 - DNA, 25 bp, Saccharomyces pastorianus
acaacagccatgtggcgatggagta

SEQ ID NO: 154133 - DNA, 25 bp, Saccharomyces pastorianus
ctgtaattcgtagttttctgtgtgc

SEQ ID NO: 154134 - DNA, 25 bp, Saccharomyces pastorianus
aagtatcttcttggtagcgctaggc

SEQ ID NO: 154135 - DNA, 25 bp, Saccharomyces pastorianus
agcgctaggctcttggtagatgtat

SEQ ID NO: 154136 - DNA, 25 bp, Saccharomyces pastorianus
atgcggagccgcaacaaagatcacc

SEQ ID NO: 154137 - DNA, 25 bp, Saccharomyces pastorianus
gacgtcttgacgcttttggcctcga

SEQ ID NO: 154138 - DNA, 25 bp, Saccharomyces pastorianus
aagatcaccggtccctgttgcggta

SEQ ID NO: 154139 - DNA, 25 bp, Saccharomyces pastorianus
agatgtatgcctgatcagccgacgt

SEQ ID NO: 154140 - DNA, 25 bp, Saccharomyces pastorianus
tagagcagctttgcattctaacgtg

SEQ ID NO: 154141 - DNA, 25 bp, Saccharomyces pastorianus
gctttgcattctaacgtgcggtgga

SEQ ID NO: 154142 - DNA, 25 bp, Saccharomyces pastorianus
ttctaacgtgcggtggaaatggtgc

SEQ ID NO: 154143 - DNA, 25 bp, Saccharomyces pastorianus
atggtgcgaaaagtcgacacttgac

SEQ ID NO: 154144 - DNA, 25 bp, Saccharomyces pastorianus
gaaaaacatcgtgtgtctctagagc

SEQ ID NO: 154145 - DNA, 25 bp, Saccharomyces pastorianus
catcgtgtgtctctagagcagcttt

SEQ ID NO: 154146 - DNA, 25 bp, Saccharomyces pastorianus
gcagctttgcattctaacgtgcggt

SEQ ID NO: 154147 - DNA, 25 bp, Saccharomyces pastorianus
gtgtgtctctagagcagctttgcat

SEQ ID NO: 154148 - DNA, 25 bp, Saccharomyces pastorianus
aaacatcgtgtgtctctagagcagc

SEQ ID NO: 154149 - DNA, 25 bp, Saccharomyces pastorianus
gtctctagagcagctttgcattcta

SEQ ID NO: 154150 - DNA, 25 bp, Saccharomyces pastorianus
ttgcattctaacgtgcggtggaaat

SEQ ID NO: 154151 - DNA, 25 bp, Saccharomyces pastorianus
gatgaagccctcgtttggaaacttg

SEQ ID NO: 154152 - DNA, 25 bp, Saccharomyces pastorianus
ttatttggccttcttaccgttagat

SEQ ID NO: 154153 - DNA, 25 bp, Saccharomyces pastorianus
ggtgtttttgacactcttcctaatg

SEQ ID NO: 154154 - DNA, 25 bp, Saccharomyces pastorianus
agttgctgaaaatcacttcgtcgac

SEQ ID NO: 154155 - DNA, 25 bp, Saccharomyces pastorianus
atttggattactaccagcctcttct

SEQ ID NO: 154156 - DNA, 25 bp, Saccharomyces pastorianus
aaaagttatgctatcgattcctcaa

SEQ ID NO: 154157 - DNA, 25 bp, Saccharomyces pastorianus
gatacgttctcacatatttggtcaa

SEQ ID NO: 154158 - DNA, 25 bp, Saccharomyces pastorianus
ctagtatcctctttctttctcaaat

SEQ ID NO: 154159 - DNA, 25 bp, Saccharomyces pastorianus
agggtatgcaagtacctgacctcct

SEQ ID NO: 154160 - DNA, 25 bp, Saccharomyces pastorianus
tgacctcctttcttcatgtatggtt

SEQ ID NO: 154161 - DNA, 25 bp, Saccharomyces pastorianus
accgttagattctctccagtttgga

SEQ ID NO: 154162 - DNA, 25 bp, Saccharomyces pastorianus
atgcatgcgattatacgaaaaattc

SEQ ID NO: 154163 - DNA, 25 bp, Saccharomyces pastorianus
gaatattttttatcaactgttgtta

SEQ ID NO: 154164 - DNA, 25 bp, Saccharomyces pastorianus
gaaaaattcttcgtatccatatatt

SEQ ID NO: 154165 - DNA, 25 bp, Saccharomyces pastorianus
aggcctttgataatgcccttgaaaa

SEQ ID NO: 154166 - DNA, 25 bp, Saccharomyces pastorianus
actgttgttaactgtgaattacttt

SEQ ID NO: 154167 - DNA, 25 bp, Saccharomyces pastorianus
attaccattattactaaggcctttg

SEQ ID NO: 154168 - DNA, 25 bp, Saccharomyces pastorianus
acaggaagctttatcacagagtggg

SEQ ID NO: 154169 - DNA, 25 bp, Saccharomyces pastorianus
gtgagtcagacgctctttcaatgaa

SEQ ID NO: 154170 - DNA, 25 bp, Saccharomyces pastorianus
aaatctgcgccattttgtgagtcag

SEQ ID NO: 154171 - DNA, 25 bp, Saccharomyces pastorianus
aagccagaacaattacctacaaaga

SEQ ID NO: 154172 - DNA, 25 bp, Saccharomyces pastorianus
gaacaagctcaaagtaagccagaac

SEQ ID NO: 154173 - DNA, 25 bp, Saccharomyces pastorianus
aactgacaactctcttgacatcact

SEQ ID NO: 154174 - DNA, 25 bp, Saccharomyces pastorianus
aaatctaccgtcttatgctatgccc

SEQ ID NO: 154175 - DNA, 25 bp, Saccharomyces pastorianus
gatggacccaaatgacgattccgtt

SEQ ID NO: 154176 - DNA, 25 bp, Saccharomyces pastorianus
ggtgactttggaattggcgcatgta

SEQ ID NO: 154177 - DNA, 25 bp, Saccharomyces pastorianus
tccaaagttgtgagggatgtcttca

SEQ ID NO: 154178 - DNA, 25 bp, Saccharomyces pastorianus
gaaaatgtttccactactgaagtag

SEQ ID NO: 154179 - DNA, 25 bp, Saccharomyces pastorianus
gaagatcagttgacggccagtaaca

SEQ ID NO: 154180 - DNA, 25 bp, Saccharomyces pastorianus
aaatgattccttgagccggttaaat

SEQ ID NO: 154181 - DNA, 25 bp, Saccharomyces pastorianus
atgtcttcagacgtggcgatgcttg

SEQ ID NO: 154182 - DNA, 25 bp, Saccharomyces pastorianus
ggcgcatgtaggaactatggtacta

SEQ ID NO: 154183 - DNA, 25 bp, Saccharomyces pastorianus
aaattccaagggtttctgcgaagtg

SEQ ID NO: 154184 - DNA, 25 bp, Saccharomyces pastorianus
attgcacttcctagaatatccaccc

SEQ ID NO: 154185 - DNA, 25 bp, Saccharomyces pastorianus
caagattctaaaggcgctatcgctc

SEQ ID NO: 154186 - DNA, 25 bp, Saccharomyces pastorianus
aaaccaagttgccacattatctact

SEQ ID NO: 154187 - DNA, 25 bp, Saccharomyces pastorianus
gtaagggatcaagactcgctagatt

SEQ ID NO: 154188 - DNA, 25 bp, Saccharomyces pastorianus
actccagccccaatacttatgatgg

SEQ ID NO: 154189 - DNA, 25 bp, Saccharomyces pastorianus
gaggtgaaatcgctcctaaagaggt

SEQ ID NO: 154190 - DNA, 25 bp, Saccharomyces pastorianus
atatccacccgtggcacttgcaata

SEQ ID NO: 154191 - DNA, 25 bp, Saccharomyces pastorianus
ggcgctatcgctcaaattttggctg

SEQ ID NO: 154192 - DNA, 25 bp, Saccharomyces pastorianus
ggagaaacccaattgcaacggattt

SEQ ID NO: 154193 - DNA, 25 bp, Saccharomyces pastorianus
tgatagcggtatcgatgcaacaaca

SEQ ID NO: 154194 - DNA, 25 bp, Saccharomyces pastorianus
gatttagaaagtcactccagcccca

SEQ ID NO: 154195 - DNA, 25 bp, Saccharomyces pastorianus
gactcaaagtggttattcgactact

SEQ ID NO: 154196 - DNA, 25 bp, Saccharomyces pastorianus
gtagagaccacattcgagccagttg

SEQ ID NO: 154197 - DNA, 25 bp, Saccharomyces pastorianus
acatttcgcggccttactaatagga

SEQ ID NO: 154198 - DNA, 25 bp, Saccharomyces pastorianus
gaaaactcacgtcttttaatctaca

SEQ ID NO: 154199 - DNA, 25 bp, Saccharomyces pastorianus
aaggatcggagtacctcaagtgtta

SEQ ID NO: 154200 - DNA, 25 bp, Saccharomyces pastorianus
gattctatgatgctttcaatccata

SEQ ID NO: 154201 - DNA, 25 bp, Saccharomyces pastorianus
gtctcagagagcttcgaagtgtgac

SEQ ID NO: 154202 - DNA, 25 bp, Saccharomyces pastorianus
gaggaactttccgatttatctgata

SEQ ID NO: 154203 - DNA, 25 bp, Saccharomyces pastorianus
aatttatactatccccacatttcgc

SEQ ID NO: 154204 - DNA, 25 bp, Saccharomyces pastorianus
tgatgcgagcagtagctattcggat

SEQ ID NO: 154205 - DNA, 25 bp, Saccharomyces pastorianus
acacagtaggtgtagcccaattttt

SEQ ID NO: 154206 - DNA, 25 bp, Saccharomyces pastorianus
tgctgctgccggtaaggccaacaag

SEQ ID NO: 154207 - DNA, 25 bp, Saccharomyces pastorianus
tgccggtaaggccaacaagcaattt

SEQ ID NO: 154208 - DNA, 25 bp, Saccharomyces pastorianus
ccggtaaggccaacaagcaatttgc

SEQ ID NO: 154209 - DNA, 25 bp, Saccharomyces pastorianus
tgctgccggtaaggccaacaagcaa

SEQ ID NO: 154210 - DNA, 25 bp, Saccharomyces pastorianus
aaggtctctgctgctgccggtaagg

SEQ ID NO: 154211 - DNA, 25 bp, Saccharomyces pastorianus
cggtaaggccaacaagcaatttgct

SEQ ID NO: 154212 - DNA, 25 bp, Saccharomyces pastorianus
aggccaacaagcaatttgctaaatt

SEQ ID NO: 154213 - DNA, 25 bp, Saccharomyces pastorianus
gccggtaaggccaacaagcaatttg

SEQ ID NO: 154214 - DNA, 25 bp, Saccharomyces pastorianus
ctgctgccggtaaggccaacaagca

SEQ ID NO: 154215 - DNA, 25 bp, Saccharomyces pastorianus
gctgctgccggtaaggccaacaagc

SEQ ID NO: 154216 - DNA, 25 bp, Saccharomyces pastorianus
gactgttagattcaacgtcgtcaag

SEQ ID NO: 154217 - DNA, 25 bp, Saccharomyces pastorianus
acagcgcccttgttcaaagtctgaa

SEQ ID NO: 154218 - DNA, 25 bp, Saccharomyces pastorianus
tggagactatcagcgtgggcacgat

SEQ ID NO: 154219 - DNA, 25 bp, Saccharomyces pastorianus
gacgcaattattacgactgccgctg

SEQ ID NO: 154220 - DNA, 25 bp, Saccharomyces pastorianus
gctgccactgccattatcagtagta

SEQ ID NO: 154221 - DNA, 25 bp, Saccharomyces pastorianus
gtagtgtgctttgggttgactccga

SEQ ID NO: 154222 - DNA, 25 bp, Saccharomyces pastorianus
tgactccgatctcaagttatccaac

SEQ ID NO: 154223 - DNA, 25 bp, Saccharomyces pastorianus
gagaagctggtttaaggcacgcaaa

SEQ ID NO: 154224 - DNA, 25 bp, Saccharomyces pastorianus
gaattcgactgatgaacagcgccct

SEQ ID NO: 154225 - DNA, 25 bp, Saccharomyces pastorianus
agtctgaactagatccctgcattgg

SEQ ID NO: 154226 - DNA, 25 bp, Saccharomyces pastorianus
gggcacgatgttcgcgatgttccaa

SEQ ID NO: 154227 - DNA, 25 bp, Saccharomyces pastorianus
aaggcttccttctacacggttgaat

SEQ ID NO: 154228 - DNA, 25 bp, Saccharomyces pastorianus
tatctctctcccattatggcagaca

SEQ ID NO: 154229 - DNA, 25 bp, Saccharomyces pastorianus
atcacctggctcaaatcccgagttt

SEQ ID NO: 154230 - DNA, 25 bp, Saccharomyces pastorianus
gtcagttctcagcattggtaggcaa

SEQ ID NO: 154231 - DNA, 25 bp, Saccharomyces pastorianus
ctatgggatgcgatgtatctctctc

SEQ ID NO: 154232 - DNA, 25 bp, Saccharomyces pastorianus
gagaagcttcactgctcgagataat

SEQ ID NO: 154233 - DNA, 25 bp, Saccharomyces pastorianus
atggcagacaatacgcgcctggaaa

SEQ ID NO: 154234 - DNA, 25 bp, Saccharomyces pastorianus
gaagactgcctcaataatcgaagtg

SEQ ID NO: 154235 - DNA, 25 bp, Saccharomyces pastorianus
ggtgacgaacttttcctgactatgt

SEQ ID NO: 154236 - DNA, 25 bp, Saccharomyces pastorianus
gcctacgagctcacctaaaacagat

SEQ ID NO: 154237 - DNA, 25 bp, Saccharomyces pastorianus
atggtacattacttgatagcgcgaa

SEQ ID NO: 154238 - DNA, 25 bp, Saccharomyces pastorianus
acagaggtcttaacgcgatcacctg

SEQ ID NO: 154239 - DNA, 25 bp, Saccharomyces pastorianus
tatttgtgtctccatcacttacaga

SEQ ID NO: 154240 - DNA, 25 bp, Saccharomyces pastorianus
gtgtgccaattctgggtagccatcg

SEQ ID NO: 154241 - DNA, 25 bp, Saccharomyces pastorianus
gcaatattcttccttgtgtgccaat

SEQ ID NO: 154242 - DNA, 25 bp, Saccharomyces pastorianus
ttgtttcccttgtctttggatgcat

SEQ ID NO: 154243 - DNA, 25 bp, Saccharomyces pastorianus
aatgcccatcgttttgtttgcctat

SEQ ID NO: 154244 - DNA, 25 bp, Saccharomyces pastorianus
ccatggcaaagcaaggtcgttcgat

SEQ ID NO: 154245 - DNA, 25 bp, Saccharomyces pastorianus
ggatgcattgggtttgtagccacta

SEQ ID NO: 154246 - DNA, 25 bp, Saccharomyces pastorianus
tattggcaatttctagtctttcgca

SEQ ID NO: 154247 - DNA, 25 bp, Saccharomyces pastorianus
gtagccatcgcacctgttaatgaac

SEQ ID NO: 154248 - DNA, 25 bp, Saccharomyces pastorianus
aggttttcacctggttattggcaat

SEQ ID NO: 154249 - DNA, 25 bp, Saccharomyces pastorianus
aggcgtcttacctaaatgcttagca

SEQ ID NO: 154250 - DNA, 25 bp, Saccharomyces pastorianus
gatcgagtaaaaatgcctttcccag

SEQ ID NO: 154251 - DNA, 25 bp, Saccharomyces pastorianus
aaatgcctttcccagaagtagaagt

SEQ ID NO: 154252 - DNA, 25 bp, Saccharomyces pastorianus
catccatatttcaagccacatccat

SEQ ID NO: 154253 - DNA, 25 bp, Saccharomyces pastorianus
atgcctttcccagaagtagaagtag

SEQ ID NO: 154254 - DNA, 25 bp, Saccharomyces pastorianus
tgcatatattaacgcgatcgagtaa

SEQ ID NO: 154255 - DNA, 25 bp, Saccharomyces pastorianus
gagtaaaaatgcctttcccagaagt

SEQ ID NO: 154256 - DNA, 25 bp, Saccharomyces pastorianus
gtagaagtaggcaagacatccatat

SEQ ID NO: 154257 - DNA, 25 bp, Saccharomyces pastorianus
gtaaaaatgcctttcccagaagtag

SEQ ID NO: 154258 - DNA, 25 bp, Saccharomyces pastorianus
gtaggcaagacatccatatttcaag

SEQ ID NO: 154259 - DNA, 25 bp, Saccharomyces pastorianus
aacgcgatcgagtaaaaatgccttt

SEQ ID NO: 154260 - DNA, 25 bp, Saccharomyces pastorianus
agacatccatatttcaagccacatc

SEQ ID NO: 154261 - DNA, 25 bp, Saccharomyces pastorianus
acctgggtcacgtgcattcccctca

SEQ ID NO: 154262 - DNA, 25 bp, Saccharomyces pastorianus
ccgcacctgggtcacgtgcattccc

SEQ ID NO: 154263 - DNA, 25 bp, Saccharomyces pastorianus
cctgggtcacgtgcattcccctcac

SEQ ID NO: 154264 - DNA, 25 bp, Saccharomyces pastorianus
gtcacgtgcattcccctcacccgtt

SEQ ID NO: 154265 - DNA, 25 bp, Saccharomyces pastorianus
tggtacccgcacctgggtcacgtgc

SEQ ID NO: 154266 - DNA, 25 bp, Saccharomyces pastorianus
acccgcacctgggtcacgtgcattc

SEQ ID NO: 154267 - DNA, 25 bp, Saccharomyces pastorianus
gcacctgggtcacgtgcattcccct

SEQ ID NO: 154268 - DNA, 25 bp, Saccharomyces pastorianus
gtacccgcacctgggtcacgtgcat

SEQ ID NO: 154269 - DNA, 25 bp, Saccharomyces pastorianus
ggtacccgcacctgggtcacgtgca

SEQ ID NO: 154270 - DNA, 25 bp, Saccharomyces pastorianus
tgggtcacgtgcattcccctcaccc

SEQ ID NO: 154271 - DNA, 25 bp, Saccharomyces pastorianus
atggtacccgcacctgggtcacgtg

SEQ ID NO: 154272 - DNA, 25 bp, Saccharomyces pastorianus
gatccatatgcgtattccgtaactg

SEQ ID NO: 154273 - DNA, 25 bp, Saccharomyces pastorianus
aggctattttcgattcctttgacga

SEQ ID NO: 154274 - DNA, 25 bp, Saccharomyces pastorianus
aggttaacatttcccaattgcgcca

SEQ ID NO: 154275 - DNA, 25 bp, Saccharomyces pastorianus
aacgacgttttcttagctgctgtaa

SEQ ID NO: 154276 - DNA, 25 bp, Saccharomyces pastorianus
agaatgccacttgactaacacatgt

SEQ ID NO: 154277 - DNA, 25 bp, Saccharomyces pastorianus
aatccgttactattggcatctatgg

SEQ ID NO: 154278 - DNA, 25 bp, Saccharomyces pastorianus
cacataagatgttacgtcgtctgta

SEQ ID NO: 154279 - DNA, 25 bp, Saccharomyces pastorianus
gctctttgctgccaagccatttgtt

SEQ ID NO: 154280 - DNA, 25 bp, Saccharomyces pastorianus
gccatttgttcctctagatccatat

SEQ ID NO: 154281 - DNA, 25 bp, Saccharomyces pastorianus
gatagaatgctagcgctctttgctg

SEQ ID NO: 154282 - DNA, 25 bp, Saccharomyces pastorianus
aaatccatagcataacgaacgacgt

SEQ ID NO: 154283 - DNA, 25 bp, Saccharomyces pastorianus
aaacttctacttagtgcctcagacg

SEQ ID NO: 154284 - DNA, 25 bp, Saccharomyces pastorianus
cattcctggccctaaaggtgctata

SEQ ID NO: 154285 - DNA, 25 bp, Saccharomyces pastorianus
gatggtgtcccaatttttgctggaa

SEQ ID NO: 154286 - DNA, 25 bp, Saccharomyces pastorianus
ggcggtaacggcaattctcagaatt

SEQ ID NO: 154287 - DNA, 25 bp, Saccharomyces pastorianus
gttcgcctatggtcgctgaagcaga

SEQ ID NO: 154288 - DNA, 25 bp, Saccharomyces pastorianus
agaattgcttctacggacactcaca

SEQ ID NO: 154289 - DNA, 25 bp, Saccharomyces pastorianus
catagtatcggcatcatgggtcggt

SEQ ID NO: 154290 - DNA, 25 bp, Saccharomyces pastorianus
gggaccgtcatgcagcactttgaat

SEQ ID NO: 154291 - DNA, 25 bp, Saccharomyces pastorianus
ggacctatcagcgttttggagttca

SEQ ID NO: 154292 - DNA, 25 bp, Saccharomyces pastorianus
aatatcctgctcgatggatggctcc

SEQ ID NO: 154293 - DNA, 25 bp, Saccharomyces pastorianus
gcagaatacgctattggctctatca

SEQ ID NO: 154294 - DNA, 25 bp, Saccharomyces pastorianus
gttcttatactatcgacggacctga

SEQ ID NO: 154295 - DNA, 25 bp, Saccharomyces pastorianus
ctgtaacttcgtctattcaagcgca

SEQ ID NO: 154296 - DNA, 25 bp, Saccharomyces pastorianus
gagctcatatggaaacacagcctat

SEQ ID NO: 154297 - DNA, 25 bp, Saccharomyces pastorianus
gcgtgggcgtatagctaagcaccat

SEQ ID NO: 154298 - DNA, 25 bp, Saccharomyces pastorianus
aaagtcgatacctcctgtaacttcg

SEQ ID NO: 154299 - DNA, 25 bp, Saccharomyces pastorianus
gttgaaccatcgttgctacctcaat

SEQ ID NO: 154300 - DNA, 25 bp, Saccharomyces pastorianus
gcctcctcctgttgtaaagccaaaa

SEQ ID NO: 154301 - DNA, 25 bp, Saccharomyces pastorianus
cagccccatccagatctgagaagtt

SEQ ID NO: 154302 - DNA, 25 bp, Saccharomyces pastorianus
acagtctacgaagaaggcgcctcct

SEQ ID NO: 154303 - DNA, 25 bp, Saccharomyces pastorianus
ttaggcgttcacaatcgtccaattc

SEQ ID NO: 154304 - DNA, 25 bp, Saccharomyces pastorianus
atcgcaatcgcaatctcaattcaga

SEQ ID NO: 154305 - DNA, 25 bp, Saccharomyces pastorianus
ctttgtcgatttttgcatgctttga

SEQ ID NO: 154306 - DNA, 25 bp, Saccharomyces pastorianus
ttgcatgctttgactgtgactttcc

SEQ ID NO: 154307 - DNA, 25 bp, Saccharomyces pastorianus
ttaggccatatggttgatgttctca

SEQ ID NO: 154308 - DNA, 25 bp, Saccharomyces pastorianus
tgttgctaaaacaaggtcaatccaa

SEQ ID NO: 154309 - DNA, 25 bp, Saccharomyces pastorianus
ggttgatgttctcaggttctactta

SEQ ID NO: 154310 - DNA, 25 bp, Saccharomyces pastorianus
gggtgcttgaattcattaggccata

SEQ ID NO: 154311 - DNA, 25 bp, Saccharomyces pastorianus
gatatctttgtatggcttgttgcta

SEQ ID NO: 154312 - DNA, 25 bp, Saccharomyces pastorianus
gttctacttatgtttcctttgtcga

SEQ ID NO: 154313 - DNA, 25 bp, Saccharomyces pastorianus
gactttcctgtctgatatctttgta

SEQ ID NO: 154314 - DNA, 25 bp, Saccharomyces pastorianus
gtttcctttgtcgatttttgcatgc

SEQ ID NO: 154315 - DNA, 25 bp, Saccharomyces pastorianus
gactgtgactttcctgtctgatatc

SEQ ID NO: 154316 - DNA, 25 bp, Saccharomyces pastorianus
aaagcagcttctgtttctccttcta

SEQ ID NO: 154317 - DNA, 25 bp, Saccharomyces pastorianus
tctccttctacaaaaccgcttaata

SEQ ID NO: 154318 - DNA, 25 bp, Saccharomyces pastorianus
gtgagcaaccaatcgccagcagtag

SEQ ID NO: 154319 - DNA, 25 bp, Saccharomyces pastorianus
gtaaatactgctacctccattgaag

SEQ ID NO: 154320 - DNA, 25 bp, Saccharomyces pastorianus
aataccttcagtaattggcgcacag

SEQ ID NO: 154321 - DNA, 25 bp, Saccharomyces pastorianus
agagtcatctagtgtccaaccaacg

SEQ ID NO: 154322 - DNA, 25 bp, Saccharomyces pastorianus
gttcctgcagaagcaagccctgtag

SEQ ID NO: 154323 - DNA, 25 bp, Saccharomyces pastorianus
aagcatctgcaccttctactgaaga

SEQ ID NO: 154324 - DNA, 25 bp, Saccharomyces pastorianus
agcactgctgagaccatagaacttt

SEQ ID NO: 154325 - DNA, 25 bp, Saccharomyces pastorianus
ggaacctccacaggaagctagtctt

SEQ ID NO: 154326 - DNA, 25 bp, Saccharomyces pastorianus
gatgaaaccgctgctacaacgataa

SEQ ID NO: 154327 - DNA, 25 bp, Saccharomyces pastorianus
tgctccacctcctgtgattttacaa

SEQ ID NO: 154328 - DNA, 25 bp, Saccharomyces pastorianus
aagtcgttagaagcagatccctccg

SEQ ID NO: 154329 - DNA, 25 bp, Saccharomyces pastorianus
catggtaccatctcggtagagtgca

SEQ ID NO: 154330 - DNA, 25 bp, Saccharomyces pastorianus
gtaacgtacaattttatgaccctca

SEQ ID NO: 154331 - DNA, 25 bp, Saccharomyces pastorianus
gtaacaaccaattatctgacgccct

SEQ ID NO: 154332 - DNA, 25 bp, Saccharomyces pastorianus
atcttttggtgctcaatcggtgttt

SEQ ID NO: 154333 - DNA, 25 bp, Saccharomyces pastorianus
actgccgcatatgatgctttccaac

SEQ ID NO: 154334 - DNA, 25 bp, Saccharomyces pastorianus
tacagagacgccttagacgcgtaca

SEQ ID NO: 154335 - DNA, 25 bp, Saccharomyces pastorianus
gacgcgtacacaagagccataagat

SEQ ID NO: 154336 - DNA, 25 bp, Saccharomyces pastorianus
aaatcgaacggtgcgccaacgaatg

SEQ ID NO: 154337 - DNA, 25 bp, Saccharomyces pastorianus
atctgacgcccttgatgcgtataag

SEQ ID NO: 154338 - DNA, 25 bp, Saccharomyces pastorianus
gcaggcagcagttcctcagcagcca

SEQ ID NO: 154339 - DNA, 25 bp, Saccharomyces pastorianus
cagcagttcctcagcagccactgga

SEQ ID NO: 154340 - DNA, 25 bp, Saccharomyces pastorianus
aggcagcagttcctcagcagccact

SEQ ID NO: 154341 - DNA, 25 bp, Saccharomyces pastorianus
aataatggaacaacccgctcaacag

SEQ ID NO: 154342 - DNA, 25 bp, Saccharomyces pastorianus
gcaacagcaggcagcagttcctcag

SEQ ID NO: 154343 - DNA, 25 bp, Saccharomyces pastorianus
gcagcagttcctcagcagccactgg

SEQ ID NO: 154344 - DNA, 25 bp, Saccharomyces pastorianus
gcagccactggacccattaacacaa

SEQ ID NO: 154345 - DNA, 25 bp, Saccharomyces pastorianus
tggaacaacccgctcaacagcaaca

SEQ ID NO: 154346 - DNA, 25 bp, Saccharomyces pastorianus
agcagttcctcagcagccactggac

SEQ ID NO: 154347 - DNA, 25 bp, Saccharomyces pastorianus
ggacccattaacacaatcaactgcg

SEQ ID NO: 154348 - DNA, 25 bp, Saccharomyces pastorianus
atcaactgcggaaacttggctctct

SEQ ID NO: 154349 - DNA, 25 bp, Saccharomyces pastorianus
gaactgctgcctgctgttgctgtcg

SEQ ID NO: 154350 - DNA, 25 bp, Saccharomyces pastorianus
actgctgcctgctgttgctgtcgct

SEQ ID NO: 154351 - DNA, 25 bp, Saccharomyces pastorianus
ggaactgctgcctgctgttgctgtc

SEQ ID NO: 154352 - DNA, 25 bp, Saccharomyces pastorianus
ctgaggaactgctgcctgctgttgc

SEQ ID NO: 154353 - DNA, 25 bp, Saccharomyces pastorianus
tgctgcctgctgttgctgtcgctgc

SEQ ID NO: 154354 - DNA, 25 bp, Saccharomyces pastorianus
ctgcctgctgttgctgtcgctgctg

SEQ ID NO: 154355 - DNA, 25 bp, Saccharomyces pastorianus
tccagtggctgctgaggaactgctg

SEQ ID NO: 154356 - DNA, 25 bp, Saccharomyces pastorianus
aactgctgcctgctgttgctgtcgc

SEQ ID NO: 154357 - DNA, 25 bp, Saccharomyces pastorianus
tggctgctgaggaactgctgcctgc

SEQ ID NO: 154358 - DNA, 25 bp, Saccharomyces pastorianus
cagtggctgctgaggaactgctgcc

SEQ ID NO: 154359 - DNA, 25 bp, Saccharomyces pastorianus
agtggctgctgaggaactgctgcct

SEQ ID NO: 154360 - DNA, 25 bp, Saccharomyces pastorianus
gaactgctgcctgctgttgctgtcg

SEQ ID NO: 154361 - DNA, 25 bp, Saccharomyces pastorianus
actgctgcctgctgttgctgtcgct

SEQ ID NO: 154362 - DNA, 25 bp, Saccharomyces pastorianus
ggaactgctgcctgctgttgctgtc

SEQ ID NO: 154363 - DNA, 25 bp, Saccharomyces pastorianus
tcaccgcccggattcatttttccta

SEQ ID NO: 154364 - DNA, 25 bp, Saccharomyces pastorianus
ctgaggaactgctgcctgctgttgc

SEQ ID NO: 154365 - DNA, 25 bp, Saccharomyces pastorianus
ctgcctgctgttgctgtcgctgctg

SEQ ID NO: 154366 - DNA, 25 bp, Saccharomyces pastorianus
tccagtggctgctgaggaactgctg

SEQ ID NO: 154367 - DNA, 25 bp, Saccharomyces pastorianus
ctgttgagcgggttgttccattatt

SEQ ID NO: 154368 - DNA, 25 bp, Saccharomyces pastorianus
attattgtttgttcaccgcccggat

SEQ ID NO: 154369 - DNA, 25 bp, Saccharomyces pastorianus
tggctgctgaggaactgctgcctgc

SEQ ID NO: 154370 - DNA, 25 bp, Saccharomyces pastorianus
agtggctgctgaggaactgctgcct

SEQ ID NO: 154371 - DNA, 25 bp, Saccharomyces pastorianus
tatgcatatgcaaactgaacccttt

SEQ ID NO: 154372 - DNA, 25 bp, Saccharomyces pastorianus
agaagaggaacgtccgcacaattcc

SEQ ID NO: 154373 - DNA, 25 bp, Saccharomyces pastorianus
gcatatgcaaactgaaccctttgta

SEQ ID NO: 154374 - DNA, 25 bp, Saccharomyces pastorianus
gacaccaacaaatacgttgctatgc

SEQ ID NO: 154375 - DNA, 25 bp, Saccharomyces pastorianus
atgattaaagcctggtttgacacca

SEQ ID NO: 154376 - DNA, 25 bp, Saccharomyces pastorianus
acaaatacgttgctatgcatatgca

SEQ ID NO: 154377 - DNA, 25 bp, Saccharomyces pastorianus
aaagcctggtttgacaccaacaaat

SEQ ID NO: 154378 - DNA, 25 bp, Saccharomyces pastorianus
attaaagcctggtttgacaccaaca

SEQ ID NO: 154379 - DNA, 25 bp, Saccharomyces pastorianus
gcctggtttgacaccaacaaatacg

SEQ ID NO: 154380 - DNA, 25 bp, Saccharomyces pastorianus
aaaagaagaggaacgtccgcacaat

SEQ ID NO: 154381 - DNA, 25 bp, Saccharomyces pastorianus
gtttgacaccaacaaatacgttgct

SEQ ID NO: 154382 - DNA, 25 bp, Saccharomyces pastorianus
atagtcgccactgcttactgtgact

SEQ ID NO: 154383 - DNA, 25 bp, Saccharomyces pastorianus
atgtgttatacaggtctccgctatg

SEQ ID NO: 154384 - DNA, 25 bp, Saccharomyces pastorianus
gtaaagctgcaggtcgttgtcgtag

SEQ ID NO: 154385 - DNA, 25 bp, Saccharomyces pastorianus
gacgtgcataattatcctggctgtg

SEQ ID NO: 154386 - DNA, 25 bp, Saccharomyces pastorianus
ctccgctatgtcgaccagtatatga

SEQ ID NO: 154387 - DNA, 25 bp, Saccharomyces pastorianus
tgactctgcacttttggaaccgtac

SEQ ID NO: 154388 - DNA, 25 bp, Saccharomyces pastorianus
atacgatgccggtcatatggtgccc

SEQ ID NO: 154389 - DNA, 25 bp, Saccharomyces pastorianus
gaaacgctagggtccgacgtgcata

SEQ ID NO: 154390 - DNA, 25 bp, Saccharomyces pastorianus
actatggccctttcacctttttgag

SEQ ID NO: 154391 - DNA, 25 bp, Saccharomyces pastorianus
aagtttaccatgcatagtcgccact

SEQ ID NO: 154392 - DNA, 25 bp, Saccharomyces pastorianus
ggctgggaaaccatgcttggtccaa

SEQ ID NO: 154393 - DNA, 25 bp, Saccharomyces pastorianus
atccgtcatgaagatactacttgta

SEQ ID NO: 154394 - DNA, 25 bp, Saccharomyces pastorianus
tgaagatactacttgtaaaaaggta

SEQ ID NO: 154395 - DNA, 25 bp, Saccharomyces pastorianus
tgcttggatacactatgaatccgtc

SEQ ID NO: 154396 - DNA, 25 bp, Saccharomyces pastorianus
gcaaatgcttggatacactatgaat

SEQ ID NO: 154397 - DNA, 25 bp, Saccharomyces pastorianus
ttctgcaaaattttgggcaaatgct

SEQ ID NO: 154398 - DNA, 25 bp, Saccharomyces pastorianus
ttgggcaaatgcttggatacactat

SEQ ID NO: 154399 - DNA, 25 bp, Saccharomyces pastorianus
aattttgggcaaatgcttggataca

SEQ ID NO: 154400 - DNA, 25 bp, Saccharomyces pastorianus
gaatccgtcatgaagatactacttg

SEQ ID NO: 154401 - DNA, 25 bp, Saccharomyces pastorianus
gggcaaatgcttggatacactatga

SEQ ID NO: 154402 - DNA, 25 bp, Saccharomyces pastorianus
ccgtcatgaagatactacttgtaaa

SEQ ID NO: 154403 - DNA, 25 bp, Saccharomyces pastorianus
tttgggcaaatgcttggatacacta

SEQ ID NO: 154404 - DNA, 25 bp, Saccharomyces pastorianus
gcaccattatcctatacagaaaaca

SEQ ID NO: 154405 - DNA, 25 bp, Saccharomyces pastorianus
agagaacatatattgcgcccctgtc

SEQ ID NO: 154406 - DNA, 25 bp, Saccharomyces pastorianus
ggcgcaccattatcctatacagaaa

SEQ ID NO: 154407 - DNA, 25 bp, Saccharomyces pastorianus
gtcagagaacatatattgcgcccct

SEQ ID NO: 154408 - DNA, 25 bp, Saccharomyces pastorianus
aatggcgcaccattatcctatacag

SEQ ID NO: 154409 - DNA, 25 bp, Saccharomyces pastorianus
atcagtcatttttcgcgggacttga

SEQ ID NO: 154410 - DNA, 25 bp, Saccharomyces pastorianus
cgcgggacttgaatggcgcaccatt

SEQ ID NO: 154411 - DNA, 25 bp, Saccharomyces pastorianus
ctgtgtatcagtcatttttcgcggg

SEQ ID NO: 154412 - DNA, 25 bp, Saccharomyces pastorianus
gcccctgtcctgtgtatcagtcatt

SEQ ID NO: 154413 - DNA, 25 bp, Saccharomyces pastorianus
tatattgcgcccctgtcctgtgtat

SEQ ID NO: 154414 - DNA, 25 bp, Saccharomyces pastorianus
ttttcgcgggacttgaatggcgcac

SEQ ID NO: 154415 - DNA, 25 bp, Saccharomyces pastorianus
tagcagaacaaacacatgatatatt

SEQ ID NO: 154416 - DNA, 25 bp, Saccharomyces pastorianus
gctctgttagcgtacccttctacaa

SEQ ID NO: 154417 - DNA, 25 bp, Saccharomyces pastorianus
tgttagcgtacccttctacaagcag

SEQ ID NO: 154418 - DNA, 25 bp, Saccharomyces pastorianus
gcgtacccttctacaagcagatagc

SEQ ID NO: 154419 - DNA, 25 bp, Saccharomyces pastorianus
tagcgtacccttctacaagcagata

SEQ ID NO: 154420 - DNA, 25 bp, Saccharomyces pastorianus
aatgccgccggctctgttagcgtac

SEQ ID NO: 154421 - DNA, 25 bp, Saccharomyces pastorianus
atattcaaaaggtgcaatgtcagag

SEQ ID NO: 154422 - DNA, 25 bp, Saccharomyces pastorianus
gcagatagcagaacaaacacatgat

SEQ ID NO: 154423 - DNA, 25 bp, Saccharomyces pastorianus
acccttctacaagcagatagcagaa

SEQ ID NO: 154424 - DNA, 25 bp, Saccharomyces pastorianus
gtacccttctacaagcagatagcag

SEQ ID NO: 154425 - DNA, 25 bp, Saccharomyces pastorianus
ttagcgtacccttctacaagcagat

SEQ ID NO: 154426 - DNA, 25 bp, Saccharomyces pastorianus
tagcagaacaaacacatgatatatt

SEQ ID NO: 154427 - DNA, 25 bp, Saccharomyces pastorianus
gctctgttagcgtacccttctacaa

SEQ ID NO: 154428 - DNA, 25 bp, Saccharomyces pastorianus
tgttagcgtacccttctacaagcag

SEQ ID NO: 154429 - DNA, 25 bp, Saccharomyces pastorianus
agagaacatatattgcgcccctgtc

SEQ ID NO: 154430 - DNA, 25 bp, Saccharomyces pastorianus
gcgtacccttctacaagcagatagc

SEQ ID NO: 154431 - DNA, 25 bp, Saccharomyces pastorianus
tagcgtacccttctacaagcagata

SEQ ID NO: 154432 - DNA, 25 bp, Saccharomyces pastorianus
aatgccgccggctctgttagcgtac

SEQ ID NO: 154433 - DNA, 25 bp, Saccharomyces pastorianus
ctgtgtatcagtcatttttcgcggg

SEQ ID NO: 154434 - DNA, 25 bp, Saccharomyces pastorianus
atattcaaaaggtgcaatgtcagag

SEQ ID NO: 154435 - DNA, 25 bp, Saccharomyces pastorianus
gcagatagcagaacaaacacatgat

SEQ ID NO: 154436 - DNA, 25 bp, Saccharomyces pastorianus
gtacccttctacaagcagatagcag

SEQ ID NO: 154437 - DNA, 25 bp, Saccharomyces pastorianus
gagtattgaattcgcatctttgaca

SEQ ID NO: 154438 - DNA, 25 bp, Saccharomyces pastorianus
ttaggttcacatggcgcaccaaact

SEQ ID NO: 154439 - DNA, 25 bp, Saccharomyces pastorianus
gttctgctttatgcacgacattctg

SEQ ID NO: 154440 - DNA, 25 bp, Saccharomyces pastorianus
gctgccgacggtgactatttagaaa

SEQ ID NO: 154441 - DNA, 25 bp, Saccharomyces pastorianus
ggcactatcgtaattccaagatcct

SEQ ID NO: 154442 - DNA, 25 bp, Saccharomyces pastorianus
tcaccctcacttaccacaaatggaa

SEQ ID NO: 154443 - DNA, 25 bp, Saccharomyces pastorianus
gttaacagcatactcaccattaggt

SEQ ID NO: 154444 - DNA, 25 bp, Saccharomyces pastorianus
tcatcgtgtgagagccattggtgtc

SEQ ID NO: 154445 - DNA, 25 bp, Saccharomyces pastorianus
atttgcagccatccttccagagttt

SEQ ID NO: 154446 - DNA, 25 bp, Saccharomyces pastorianus
gaaaaacaatgtatgctgccgacgg

SEQ ID NO: 154447 - DNA, 25 bp, Saccharomyces pastorianus
actggtgaagactccggttgatgat

SEQ ID NO: 154448 - DNA, 25 bp, Saccharomyces pastorianus
aggcgaggaatatcatcatagtaat

SEQ ID NO: 154449 - DNA, 25 bp, Saccharomyces pastorianus
gacaatgacaacaatatcaaagatg

SEQ ID NO: 154450 - DNA, 25 bp, Saccharomyces pastorianus
gccaggcgaggaatatcatcatagt

SEQ ID NO: 154451 - DNA, 25 bp, Saccharomyces pastorianus
tggtaccaatactgataataacgag

SEQ ID NO: 154452 - DNA, 25 bp, Saccharomyces pastorianus
aataacgagactactggcgctgatg

SEQ ID NO: 154453 - DNA, 25 bp, Saccharomyces pastorianus
cttgagccaggcgaggaatatcatc

SEQ ID NO: 154454 - DNA, 25 bp, Saccharomyces pastorianus
atcatcatagtaatggtaccaatac

SEQ ID NO: 154455 - DNA, 25 bp, Saccharomyces pastorianus
agactactggcgctgatgatactga

SEQ ID NO: 154456 - DNA, 25 bp, Saccharomyces pastorianus
gagccaggcgaggaatatcatcata

SEQ ID NO: 154457 - DNA, 25 bp, Saccharomyces pastorianus
aacgagactactggcgctgatgata

SEQ ID NO: 154458 - DNA, 25 bp, Saccharomyces pastorianus
gataataacgagactactggcgctg

SEQ ID NO: 154459 - DNA, 25 bp, Saccharomyces pastorianus
gagtttctgtatttttctctcacaa

SEQ ID NO: 154460 - DNA, 25 bp, Saccharomyces pastorianus
gtactactattctattgcatctcag

SEQ ID NO: 154461 - DNA, 25 bp, Saccharomyces pastorianus
aaagttcccggcatgatatagctga

SEQ ID NO: 154462 - DNA, 25 bp, Saccharomyces pastorianus
gaacgctgtctttcagtacacaatc

SEQ ID NO: 154463 - DNA, 25 bp, Saccharomyces pastorianus
ttatctctggagtcttcgaagttag

SEQ ID NO: 154464 - DNA, 25 bp, Saccharomyces pastorianus
gtttatttgtcatatccatcattgg

SEQ ID NO: 154465 - DNA, 25 bp, Saccharomyces pastorianus
tctctcacaacggttttttccatgt

SEQ ID NO: 154466 - DNA, 25 bp, Saccharomyces pastorianus
gcgaaattgcatcgaggtacttaat

SEQ ID NO: 154467 - DNA, 25 bp, Saccharomyces pastorianus
gaatactaccctactgttcagaatg

SEQ ID NO: 154468 - DNA, 25 bp, Saccharomyces pastorianus
gacgatttgcctaccatattatcat

SEQ ID NO: 154469 - DNA, 25 bp, Saccharomyces pastorianus
acatacccgtatgcttggatctgaa

SEQ ID NO: 154470 - DNA, 25 bp, Saccharomyces pastorianus
tggcaagttctttcttggacaaaga

SEQ ID NO: 154471 - DNA, 25 bp, Saccharomyces pastorianus
ttcttcaccggatacttcatatacc

SEQ ID NO: 154472 - DNA, 25 bp, Saccharomyces pastorianus
aaacgcaagcggtagattcgggagt

SEQ ID NO: 154473 - DNA, 25 bp, Saccharomyces pastorianus
tttttgctcataaagtggaaactgg

SEQ ID NO: 154474 - DNA, 25 bp, Saccharomyces pastorianus
aatgtccccgaaaaacacaatcatg

SEQ ID NO: 154475 - DNA, 25 bp, Saccharomyces pastorianus
gcaaaatttttgctcataaagtgga

SEQ ID NO: 154476 - DNA, 25 bp, Saccharomyces pastorianus
gaatatcattcttcaccggatactt

SEQ ID NO: 154477 - DNA, 25 bp, Saccharomyces pastorianus
aacttcattggcaagttctttcttg

SEQ ID NO: 154478 - DNA, 25 bp, Saccharomyces pastorianus
caagcggtagattcgggagtttgaa

SEQ ID NO: 154479 - DNA, 25 bp, Saccharomyces pastorianus
ggatacttcatatacccaccaaatg

SEQ ID NO: 154480 - DNA, 25 bp, Saccharomyces pastorianus
acaattaagaagaaacgcaagcggt

SEQ ID NO: 154481 - DNA, 25 bp, Saccharomyces pastorianus
agtgttctttcatctgcagtgccct

SEQ ID NO: 154482 - DNA, 25 bp, Saccharomyces pastorianus
cttgccagacacattacgccagcaa

SEQ ID NO: 154483 - DNA, 25 bp, Saccharomyces pastorianus
agtatacaccgtgacatactactga

SEQ ID NO: 154484 - DNA, 25 bp, Saccharomyces pastorianus
ggaacagtatcgacaaatatttggc

SEQ ID NO: 154485 - DNA, 25 bp, Saccharomyces pastorianus
ggtgcagtacctctttccacacaat

SEQ ID NO: 154486 - DNA, 25 bp, Saccharomyces pastorianus
atatttggcattgccgaaccaatga

SEQ ID NO: 154487 - DNA, 25 bp, Saccharomyces pastorianus
aatcgtcaatcgtaccgacttcaac

SEQ ID NO: 154488 - DNA, 25 bp, Saccharomyces pastorianus
gacagacatccattagaatcaacat

SEQ ID NO: 154489 - DNA, 25 bp, Saccharomyces pastorianus
tccacacaattgaatgacagacatc

SEQ ID NO: 154490 - DNA, 25 bp, Saccharomyces pastorianus
gaactgggaaaccacacagcgccaa

SEQ ID NO: 154491 - DNA, 25 bp, Saccharomyces pastorianus
aagaaggcggtgcagtacctctttc

SEQ ID NO: 154492 - DNA, 25 bp, Saccharomyces pastorianus
ttcaccgacaatatgcgaaactgta

SEQ ID NO: 154493 - DNA, 25 bp, Saccharomyces pastorianus
aacttctgacatatcggaaactttt

SEQ ID NO: 154494 - DNA, 25 bp, Saccharomyces pastorianus
atgagctttgttttttacgcaacta

SEQ ID NO: 154495 - DNA, 25 bp, Saccharomyces pastorianus
gctattacttccagggacatccgat

SEQ ID NO: 154496 - DNA, 25 bp, Saccharomyces pastorianus
attgctggccatttggaaacttctg

SEQ ID NO: 154497 - DNA, 25 bp, Saccharomyces pastorianus
cattgtatccccaatggaatgggtt

SEQ ID NO: 154498 - DNA, 25 bp, Saccharomyces pastorianus
atggaaccattttcaccgacaatat

SEQ ID NO: 154499 - DNA, 25 bp, Saccharomyces pastorianus
gttttttacgcaactactatcaatg

SEQ ID NO: 154500 - DNA, 25 bp, Saccharomyces pastorianus
acatccgatatctgacgccttttaa

SEQ ID NO: 154501 - DNA, 25 bp, Saccharomyces pastorianus
aatactcgaggagctattacttcca

SEQ ID NO: 154502 - DNA, 25 bp, Saccharomyces pastorianus
gcgaaactgtaccattgtatcccca

SEQ ID NO: 154503 - DNA, 25 bp, Saccharomyces pastorianus
aaaaccttcttgatcgcagccttga

SEQ ID NO: 154504 - DNA, 25 bp, Saccharomyces pastorianus
tactgcagctactgatgcggagaca

SEQ ID NO: 154505 - DNA, 25 bp, Saccharomyces pastorianus
gcaggtattttattcttagtgttcg

SEQ ID NO: 154506 - DNA, 25 bp, Saccharomyces pastorianus
aaggcatctttaatagccctcctac

SEQ ID NO: 154507 - DNA, 25 bp, Saccharomyces pastorianus
gttgcttttctttctgaacgctata

SEQ ID NO: 154508 - DNA, 25 bp, Saccharomyces pastorianus
tatctccctcgctattatgaccatc

SEQ ID NO: 154509 - DNA, 25 bp, Saccharomyces pastorianus
cagccttgatggcaatgcgtcacaa

SEQ ID NO: 154510 - DNA, 25 bp, Saccharomyces pastorianus
tatgaccatcctttctggtgtggtg

SEQ ID NO: 154511 - DNA, 25 bp, Saccharomyces pastorianus
gaatctgggagttcttcacatttga

SEQ ID NO: 154512 - DNA, 25 bp, Saccharomyces pastorianus
agacttctggtattctcagcagcag

SEQ ID NO: 154513 - DNA, 25 bp, Saccharomyces pastorianus
tgtggtgggtcattcagccgttgct

SEQ ID NO: 154514 - DNA, 25 bp, Saccharomyces pastorianus
aaccagctgggcaaaacaggcaaaa

SEQ ID NO: 154515 - DNA, 25 bp, Saccharomyces pastorianus
gatttatcactagaaagggaccaag

SEQ ID NO: 154516 - DNA, 25 bp, Saccharomyces pastorianus
gtgattcaaacaggacagagctcta

SEQ ID NO: 154517 - DNA, 25 bp, Saccharomyces pastorianus
gaattaaatcagttacgagcccgta

SEQ ID NO: 154518 - DNA, 25 bp, Saccharomyces pastorianus
ttacgagcccgtatcaaccagctgg

SEQ ID NO: 154519 - DNA, 25 bp, Saccharomyces pastorianus
tatgacacggtgattcaaacaggac

SEQ ID NO: 154520 - DNA, 25 bp, Saccharomyces pastorianus
aacgcaacgaatagttttgtgcaag

SEQ ID NO: 154521 - DNA, 25 bp, Saccharomyces pastorianus
gccctctctgcgagatttatcacta

SEQ ID NO: 154522 - DNA, 25 bp, Saccharomyces pastorianus
caagtgaacctgtatatgacacggt

SEQ ID NO: 154523 - DNA, 25 bp, Saccharomyces pastorianus
aggacagagctctaacgcaacgaat

SEQ ID NO: 154524 - DNA, 25 bp, Saccharomyces pastorianus
gagtggtcagccatatatcatcccc

SEQ ID NO: 154525 - DNA, 25 bp, Saccharomyces pastorianus
ggttcacttaaaggcaaagagcgac

SEQ ID NO: 154526 - DNA, 25 bp, Saccharomyces pastorianus
gaaaccctcagctggttcacttaaa

SEQ ID NO: 154527 - DNA, 25 bp, Saccharomyces pastorianus
gcaaaccccaccagtccaggtgaaa

SEQ ID NO: 154528 - DNA, 25 bp, Saccharomyces pastorianus
gtaagcgacgcggattccaccaaca

SEQ ID NO: 154529 - DNA, 25 bp, Saccharomyces pastorianus
acagaaggaaatctagtagccagga

SEQ ID NO: 154530 - DNA, 25 bp, Saccharomyces pastorianus
gtagccaggaaggaaaccctcagct

SEQ ID NO: 154531 - DNA, 25 bp, Saccharomyces pastorianus
gacgcggattccaccaacagaagga

SEQ ID NO: 154532 - DNA, 25 bp, Saccharomyces pastorianus
ctcagctggttcacttaaaggcaaa

SEQ ID NO: 154533 - DNA, 25 bp, Saccharomyces pastorianus
taaaagaaagggatcttcagattcc

SEQ ID NO: 154534 - DNA, 25 bp, Saccharomyces pastorianus
ccaggtgaaagtaagcgacgcggat

SEQ ID NO: 154535 - DNA, 25 bp, Saccharomyces pastorianus
gggagtgaagcaaaccccaccagtc

SEQ ID NO: 154536 - DNA, 25 bp, Saccharomyces pastorianus
tgaccaagtcgaattttacccagtt

SEQ ID NO: 154537 - DNA, 25 bp, Saccharomyces pastorianus
gacttcccagaaggtgcagaaattg

SEQ ID NO: 154538 - DNA, 25 bp, Saccharomyces pastorianus
gattatcaagatttgccatggcaat

SEQ ID NO: 154539 - DNA, 25 bp, Saccharomyces pastorianus
gtgtcacagtcaaacctgacgagga

SEQ ID NO: 154540 - DNA, 25 bp, Saccharomyces pastorianus
agcattccaggagggccagcttggt

SEQ ID NO: 154541 - DNA, 25 bp, Saccharomyces pastorianus
gacaaactatgtctggccgcatctt

SEQ ID NO: 154542 - DNA, 25 bp, Saccharomyces pastorianus
aaagattccatcacagcattccagg

SEQ ID NO: 154543 - DNA, 25 bp, Saccharomyces pastorianus
gcatcttctgaggttccgtggttga

SEQ ID NO: 154544 - DNA, 25 bp, Saccharomyces pastorianus
atattctgagtattctgggcgtttt

SEQ ID NO: 154545 - DNA, 25 bp, Saccharomyces pastorianus
gattatatccgctcctaaatcgggt

SEQ ID NO: 154546 - DNA, 25 bp, Saccharomyces pastorianus
gaagcaggtcaagggctactaatta

SEQ ID NO: 154547 - DNA, 25 bp, Saccharomyces pastorianus
aacgcacatttctcggtagggctag

SEQ ID NO: 154548 - DNA, 25 bp, Saccharomyces pastorianus
gcacatttctcggtagggctaggaa

SEQ ID NO: 154549 - DNA, 25 bp, Saccharomyces pastorianus
catattggtttcattatagagcgtc

SEQ ID NO: 154550 - DNA, 25 bp, Saccharomyces pastorianus
aggcaccaaactataaacgcacatt

SEQ ID NO: 154551 - DNA, 25 bp, Saccharomyces pastorianus
tctcggtagggctaggaacgctttc

SEQ ID NO: 154552 - DNA, 25 bp, Saccharomyces pastorianus
gcgtcaatcaagaaagaggcaccaa

SEQ ID NO: 154553 - DNA, 25 bp, Saccharomyces pastorianus
aacgcatattggtttcattatagag

SEQ ID NO: 154554 - DNA, 25 bp, Saccharomyces pastorianus
taaacgcacatttctcggtagggct

SEQ ID NO: 154555 - DNA, 25 bp, Saccharomyces pastorianus
aactataaacgcacatttctcggta

SEQ ID NO: 154556 - DNA, 25 bp, Saccharomyces pastorianus
catttctcggtagggctaggaacgc

SEQ ID NO: 154557 - DNA, 25 bp, Saccharomyces pastorianus
ggtttcattatagagcgtcaatcaa

SEQ ID NO: 154558 - DNA, 25 bp, Saccharomyces pastorianus
atccggtattgttcagcgaagcctc

SEQ ID NO: 154559 - DNA, 25 bp, Saccharomyces pastorianus
gaatccaacggccaaatcacaaaag

SEQ ID NO: 154560 - DNA, 25 bp, Saccharomyces pastorianus
gtcgattaccaatctccagtgcaat

SEQ ID NO: 154561 - DNA, 25 bp, Saccharomyces pastorianus
gaggatactcttgtcatccggtatt

SEQ ID NO: 154562 - DNA, 25 bp, Saccharomyces pastorianus
gtggtatcagggttcttatatccat

SEQ ID NO: 154563 - DNA, 25 bp, Saccharomyces pastorianus
ttaagaccttttgcggaatccaacg

SEQ ID NO: 154564 - DNA, 25 bp, Saccharomyces pastorianus
gtcaatgctccggaaggtttacctt

SEQ ID NO: 154565 - DNA, 25 bp, Saccharomyces pastorianus
aacaagtcttctgccttaactgcat

SEQ ID NO: 154566 - DNA, 25 bp, Saccharomyces pastorianus
gattccaaggaatccgtcgccggat

SEQ ID NO: 154567 - DNA, 25 bp, Saccharomyces pastorianus
atgcgtgtgttcagcgggtttatca

SEQ ID NO: 154568 - DNA, 25 bp, Saccharomyces pastorianus
tcaactttcggtatttccgcattga

SEQ ID NO: 154569 - DNA, 25 bp, Saccharomyces pastorianus
gttggctatccccttaaagcggagg

SEQ ID NO: 154570 - DNA, 25 bp, Saccharomyces pastorianus
tggaaagctgttcaccagacgctgc

SEQ ID NO: 154571 - DNA, 25 bp, Saccharomyces pastorianus
aaatatacacctccataaatgcccc

SEQ ID NO: 154572 - DNA, 25 bp, Saccharomyces pastorianus
gtaacatttcccgagttggctatcc

SEQ ID NO: 154573 - DNA, 25 bp, Saccharomyces pastorianus
atttggtctctgtatccctggaaag

SEQ ID NO: 154574 - DNA, 25 bp, Saccharomyces pastorianus
aaagattattgccacgggacccatc

SEQ ID NO: 154575 - DNA, 25 bp, Saccharomyces pastorianus
gtttattctattctactgggaccaa

SEQ ID NO: 154576 - DNA, 25 bp, Saccharomyces pastorianus
ttagtgcccgttgattcagctgata

SEQ ID NO: 154577 - DNA, 25 bp, Saccharomyces pastorianus
gcgtgttctgtaactttaaccgagg

SEQ ID NO: 154578 - DNA, 25 bp, Saccharomyces pastorianus
gcaagttaatcttttcgcgaaccat

SEQ ID NO: 154579 - DNA, 25 bp, Saccharomyces pastorianus
cagccaagattgtagcttcgcaagt

SEQ ID NO: 154580 - DNA, 25 bp, Saccharomyces pastorianus
aggttatcggtatcctcgcacggga

SEQ ID NO: 154581 - DNA, 25 bp, Saccharomyces pastorianus
acgatattgggtcattctcgcctga

SEQ ID NO: 154582 - DNA, 25 bp, Saccharomyces pastorianus
cgcacgggagccttaaatctactac

SEQ ID NO: 154583 - DNA, 25 bp, Saccharomyces pastorianus
gatcagtataatgcgcaggccaccg

SEQ ID NO: 154584 - DNA, 25 bp, Saccharomyces pastorianus
aggccaccggcgatcgtacaaagga

SEQ ID NO: 154585 - DNA, 25 bp, Saccharomyces pastorianus
atggccacccgaaaaataactactg

SEQ ID NO: 154586 - DNA, 25 bp, Saccharomyces pastorianus
gacttcagaggattgccacatcgca

SEQ ID NO: 154587 - DNA, 25 bp, Saccharomyces pastorianus
aaatctactacgtggacgaccattt

SEQ ID NO: 154588 - DNA, 25 bp, Saccharomyces pastorianus
ggagagtttgaattcaccgctttta

SEQ ID NO: 154589 - DNA, 25 bp, Saccharomyces pastorianus
gcgccatcaaaagcacaggttatcg

SEQ ID NO: 154590 - DNA, 25 bp, Saccharomyces pastorianus
gacgaccatttaatatggccacccg

SEQ ID NO: 154591 - DNA, 25 bp, Saccharomyces pastorianus
ttcgcgcgtaggtttgcctaattac

SEQ ID NO: 154592 - DNA, 25 bp, Saccharomyces pastorianus
caaatcatttcaacacctctttttt

SEQ ID NO: 154593 - DNA, 25 bp, Saccharomyces pastorianus
gattaccattatacgtcgccgtttc

SEQ ID NO: 154594 - DNA, 25 bp, Saccharomyces pastorianus
attcctcatcaataaagccgccaac

SEQ ID NO: 154595 - DNA, 25 bp, Saccharomyces pastorianus
ctgggaactcggctaacgcttgtaa

SEQ ID NO: 154596 - DNA, 25 bp, Saccharomyces pastorianus
atgaagttcccagccgattaccatt

SEQ ID NO: 154597 - DNA, 25 bp, Saccharomyces pastorianus
actacacttcatatctttgcttctt

SEQ ID NO: 154598 - DNA, 25 bp, Saccharomyces pastorianus
gccgccaacaaagagcacagggtag

SEQ ID NO: 154599 - DNA, 25 bp, Saccharomyces pastorianus
tgcttcttatattttcgcgcgtagg

SEQ ID NO: 154600 - DNA, 25 bp, Saccharomyces pastorianus
gtcgccgtttcgttcatgtaaatat

SEQ ID NO: 154601 - DNA, 25 bp, Saccharomyces pastorianus
tagaaactctgctgtctgggaactc

SEQ ID NO: 154602 - DNA, 25 bp, Saccharomyces pastorianus
gacaagtcgaattccattttgccgg

SEQ ID NO: 154603 - DNA, 25 bp, Saccharomyces pastorianus
ggatttttcccaagttgctcaagtg

SEQ ID NO: 154604 - DNA, 25 bp, Saccharomyces pastorianus
aatatcaataccacagttcggcctc

SEQ ID NO: 154605 - DNA, 25 bp, Saccharomyces pastorianus
tatcgctggccattctagttttcac

SEQ ID NO: 154606 - DNA, 25 bp, Saccharomyces pastorianus
accgctgttcaaagcctggttgatc

SEQ ID NO: 154607 - DNA, 25 bp, Saccharomyces pastorianus
tactgaaagtcgtctgcctggattt

SEQ ID NO: 154608 - DNA, 25 bp, Saccharomyces pastorianus
tccaccaggtgtcatagtctatcgt

SEQ ID NO: 154609 - DNA, 25 bp, Saccharomyces pastorianus
agtgacgactctattatcgctggcc

SEQ ID NO: 154610 - DNA, 25 bp, Saccharomyces pastorianus
tgctcaagtggattcaaccgctgtt

SEQ ID NO: 154611 - DNA, 25 bp, Saccharomyces pastorianus
cgtaaagtgggttccgttcgatcat

SEQ ID NO: 154612 - DNA, 25 bp, Saccharomyces pastorianus
gaatagtgacccaccgatatcgaat

SEQ ID NO: 154613 - DNA, 25 bp, Saccharomyces pastorianus
gattccattccagcgtatgaagaga

SEQ ID NO: 154614 - DNA, 25 bp, Saccharomyces pastorianus
acagagacggacttcacaatggtga

SEQ ID NO: 154615 - DNA, 25 bp, Saccharomyces pastorianus
tactcgtgccccaatctatgtcata

SEQ ID NO: 154616 - DNA, 25 bp, Saccharomyces pastorianus
aagagctcgactgaatatgtgcata

SEQ ID NO: 154617 - DNA, 25 bp, Saccharomyces pastorianus
cgcacaaatcgctagtttatctcct

SEQ ID NO: 154618 - DNA, 25 bp, Saccharomyces pastorianus
atatattctttgtttgccacatcga

SEQ ID NO: 154619 - DNA, 25 bp, Saccharomyces pastorianus
attacagttggctgcgtactcgtgc

SEQ ID NO: 154620 - DNA, 25 bp, Saccharomyces pastorianus
cctcgtatctctttttcctattata

SEQ ID NO: 154621 - DNA, 25 bp, Saccharomyces pastorianus
tgtattcctcctttattggtgcgtt

SEQ ID NO: 154622 - DNA, 25 bp, Saccharomyces pastorianus
tcagatgtcctgtacgattccattc

SEQ ID NO: 154623 - DNA, 25 bp, Saccharomyces pastorianus
ggcaggaagttacctcgtatctctt

SEQ ID NO: 154624 - DNA, 25 bp, Saccharomyces pastorianus
gatccaaatcatgttacctacgtta

SEQ ID NO: 154625 - DNA, 25 bp, Saccharomyces pastorianus
aactttttataccttgcccagagcg

SEQ ID NO: 154626 - DNA, 25 bp, Saccharomyces pastorianus
tcttacgttgtttgtatcatcccac

SEQ ID NO: 154627 - DNA, 25 bp, Saccharomyces pastorianus
tttttataccttgcccagagcgcct

SEQ ID NO: 154628 - DNA, 25 bp, Saccharomyces pastorianus
tacgttgtttgtatcatcccacgat

SEQ ID NO: 154629 - DNA, 25 bp, Saccharomyces pastorianus
taccttgcccagagcgcctcaagaa

SEQ ID NO: 154630 - DNA, 25 bp, Saccharomyces pastorianus
ggaactttttataccttgcccagag

SEQ ID NO: 154631 - DNA, 25 bp, Saccharomyces pastorianus
catcttacgttgtttgtatcatccc

SEQ ID NO: 154632 - DNA, 25 bp, Saccharomyces pastorianus
ttataccttgcccagagcgcctcaa

SEQ ID NO: 154633 - DNA, 25 bp, Saccharomyces pastorianus
ccaaatcatgttacctacgttaggt

SEQ ID NO: 154634 - DNA, 25 bp, Saccharomyces pastorianus
gaactttttataccttgcccagagc

SEQ ID NO: 154635 - DNA, 25 bp, Saccharomyces pastorianus
atgcgggctctatcattgaatgtgg

SEQ ID NO: 154636 - DNA, 25 bp, Saccharomyces pastorianus
gaaatctatgcgggctctatcattg

SEQ ID NO: 154637 - DNA, 25 bp, Saccharomyces pastorianus
agaaatctatgcgggctctatcatt

SEQ ID NO: 154638 - DNA, 25 bp, Saccharomyces pastorianus
cgggctctatcattgaatgtggaac

SEQ ID NO: 154639 - DNA, 25 bp, Saccharomyces pastorianus
atctatgcgggctctatcattgaat

SEQ ID NO: 154640 - DNA, 25 bp, Saccharomyces pastorianus
tgcgggctctatcattgaatgtgga

SEQ ID NO: 154641 - DNA, 25 bp, Saccharomyces pastorianus
tatgcgggctctatcattgaatgtg

SEQ ID NO: 154642 - DNA, 25 bp, Saccharomyces pastorianus
tctatgcgggctctatcattgaatg

SEQ ID NO: 154643 - DNA, 25 bp, Saccharomyces pastorianus
ctatgcgggctctatcattgaatgt

SEQ ID NO: 154644 - DNA, 25 bp, Saccharomyces pastorianus
gcgggctctatcattgaatgtggaa

SEQ ID NO: 154645 - DNA, 25 bp, Saccharomyces pastorianus
aaatctatgcgggctctatcattga

SEQ ID NO: 154646 - DNA, 25 bp, Saccharomyces pastorianus
aagtctaccgaaaaggatcgccatt

SEQ ID NO: 154647 - DNA, 25 bp, Saccharomyces pastorianus
aagctgatgaagcaattcgccgtca

SEQ ID NO: 154648 - DNA, 25 bp, Saccharomyces pastorianus
aattcgccgtcagctgattgacaaa

SEQ ID NO: 154649 - DNA, 25 bp, Saccharomyces pastorianus
gaaagctgatgaaagtctaccgaaa

SEQ ID NO: 154650 - DNA, 25 bp, Saccharomyces pastorianus
ggagaggataccgacaaatttcaag

SEQ ID NO: 154651 - DNA, 25 bp, Saccharomyces pastorianus
gatctgacgactatgattctgacct

SEQ ID NO: 154652 - DNA, 25 bp, Saccharomyces pastorianus
atcagactctgataccgaagtcgaa

SEQ ID NO: 154653 - DNA, 25 bp, Saccharomyces pastorianus
gaagtcgaagccaaacccaaagaga

SEQ ID NO: 154654 - DNA, 25 bp, Saccharomyces pastorianus
gatcgccattaatctgggccattac

SEQ ID NO: 154655 - DNA, 25 bp, Saccharomyces pastorianus
agaggtgtcacaaacttctttgaag

SEQ ID NO: 154656 - DNA, 25 bp, Saccharomyces pastorianus
aatcccaccacgtgaaacatatcat

SEQ ID NO: 154657 - DNA, 25 bp, Saccharomyces pastorianus
attggcgatgatgcaaagcttgtta

SEQ ID NO: 154658 - DNA, 25 bp, Saccharomyces pastorianus
ggaggatttcgtaataaaagagcaa

SEQ ID NO: 154659 - DNA, 25 bp, Saccharomyces pastorianus
cgagcgcattttttgaaagtatggt

SEQ ID NO: 154660 - DNA, 25 bp, Saccharomyces pastorianus
acaatatcgtctcaaaaggagagaa

SEQ ID NO: 154661 - DNA, 25 bp, Saccharomyces pastorianus
aagtcgagcgcattttttgaaagta

SEQ ID NO: 154662 - DNA, 25 bp, Saccharomyces pastorianus
gttaaaaacccaaagtcgagcgcat

SEQ ID NO: 154663 - DNA, 25 bp, Saccharomyces pastorianus
agacgacgtactacaacaatatcgt

SEQ ID NO: 154664 - DNA, 25 bp, Saccharomyces pastorianus
acccaaagtcgagcgcattttttga

SEQ ID NO: 154665 - DNA, 25 bp, Saccharomyces pastorianus
atagcttagagctagaactaagtga

SEQ ID NO: 154666 - DNA, 25 bp, Saccharomyces pastorianus
gatgaagacgacgtactacaacaat

SEQ ID NO: 154667 - DNA, 25 bp, Saccharomyces pastorianus
gatgcaaagcttgttaaaaacccaa

SEQ ID NO: 154668 - DNA, 25 bp, Saccharomyces pastorianus
cagaacatggctcctgaatacgtta

SEQ ID NO: 154669 - DNA, 25 bp, Saccharomyces pastorianus
cgactctttccatgaataccttcag

SEQ ID NO: 154670 - DNA, 25 bp, Saccharomyces pastorianus
aagccgccgagactttagttgagaa

SEQ ID NO: 154671 - DNA, 25 bp, Saccharomyces pastorianus
gaatacgttaaagccgccgagactt

SEQ ID NO: 154672 - DNA, 25 bp, Saccharomyces pastorianus
tgtcgttcagttggccaccgactct

SEQ ID NO: 154673 - DNA, 25 bp, Saccharomyces pastorianus
gaaaaacattaccttggcccgatcg

SEQ ID NO: 154674 - DNA, 25 bp, Saccharomyces pastorianus
atgaataccttcagtcgcacgactt

SEQ ID NO: 154675 - DNA, 25 bp, Saccharomyces pastorianus
cacgacttggtgcttgcggagttat

SEQ ID NO: 154676 - DNA, 25 bp, Saccharomyces pastorianus
gttattagctccatggtgtggccac

SEQ ID NO: 154677 - DNA, 25 bp, Saccharomyces pastorianus
cttggcccgatcgactgtacttgca

SEQ ID NO: 154678 - DNA, 25 bp, Saccharomyces pastorianus
tgaagactccgctgtcgttcagttg

SEQ ID NO: 154679 - DNA, 25 bp, Saccharomyces pastorianus
atgttgttgggaattctcttctgcc

SEQ ID NO: 154680 - DNA, 25 bp, Saccharomyces pastorianus
gacgccttgggtcaactaaactgga

SEQ ID NO: 154681 - DNA, 25 bp, Saccharomyces pastorianus
ctcttctgcccatttttgtcaagga

SEQ ID NO: 154682 - DNA, 25 bp, Saccharomyces pastorianus
agatttattctctggctgggcttta

SEQ ID NO: 154683 - DNA, 25 bp, Saccharomyces pastorianus
gtatcccggtgagcaagacgccttg

SEQ ID NO: 154684 - DNA, 25 bp, Saccharomyces pastorianus
gtatctatgttcttagtcgcatcta

SEQ ID NO: 154685 - DNA, 25 bp, Saccharomyces pastorianus
aagtgccctcattgttcagatcgta

SEQ ID NO: 154686 - DNA, 25 bp, Saccharomyces pastorianus
aagagctgacgattctacatccgcc

SEQ ID NO: 154687 - DNA, 25 bp, Saccharomyces pastorianus
gatgatttttcttattgcgtggttt

SEQ ID NO: 154688 - DNA, 25 bp, Saccharomyces pastorianus
caagtggctgttcttttcgttggga

SEQ ID NO: 154689 - DNA, 25 bp, Saccharomyces pastorianus
catatggttgggtttcgcttttcga

SEQ ID NO: 154690 - DNA, 25 bp, Saccharomyces pastorianus
gataagtgttttgaccgttgtaaat

SEQ ID NO: 154691 - DNA, 25 bp, Saccharomyces pastorianus
gttttgaccgttgtaaatgcaatgc

SEQ ID NO: 154692 - DNA, 25 bp, Saccharomyces pastorianus
tttgaccgttgtaaatgcaatgctg

SEQ ID NO: 154693 - DNA, 25 bp, Saccharomyces pastorianus
taaatgcaatgctgggtgcctttat

SEQ ID NO: 154694 - DNA, 25 bp, Saccharomyces pastorianus
gtgttttgaccgttgtaaatgcaat

SEQ ID NO: 154695 - DNA, 25 bp, Saccharomyces pastorianus
ttgtaaatgcaatgctgggtgcctt

SEQ ID NO: 154696 - DNA, 25 bp, Saccharomyces pastorianus
taagtgttttgaccgttgtaaatgc

SEQ ID NO: 154697 - DNA, 25 bp, Saccharomyces pastorianus
tgaccgttgtaaatgcaatgctggg

SEQ ID NO: 154698 - DNA, 25 bp, Saccharomyces pastorianus
aaatgcaatgctgggtgcctttatg

SEQ ID NO: 154699 - DNA, 25 bp, Saccharomyces pastorianus
atgataagtgttttgaccgttgtaa

SEQ ID NO: 154700 - DNA, 25 bp, Saccharomyces pastorianus
gtaaatgcaatgctgggtgccttta

SEQ ID NO: 154701 - DNA, 25 bp, Saccharomyces pastorianus
tattgctcacagtacgatcgttctt

SEQ ID NO: 154702 - DNA, 25 bp, Saccharomyces pastorianus
ttgctgtcacaagccgaacacggta

SEQ ID NO: 154703 - DNA, 25 bp, Saccharomyces pastorianus
gacactcaagctctatgttccattg

SEQ ID NO: 154704 - DNA, 25 bp, Saccharomyces pastorianus
agagattcaagatgctgtccacaat

SEQ ID NO: 154705 - DNA, 25 bp, Saccharomyces pastorianus
agattgttctagctggtggtgccca

SEQ ID NO: 154706 - DNA, 25 bp, Saccharomyces pastorianus
tgccagctggcccaagtgaagtttt

SEQ ID NO: 154707 - DNA, 25 bp, Saccharomyces pastorianus
gtgactgccgccaaaatgtatgttc

SEQ ID NO: 154708 - DNA, 25 bp, Saccharomyces pastorianus
cgttgctgctatggcttacgggaca

SEQ ID NO: 154709 - DNA, 25 bp, Saccharomyces pastorianus
aagctttacaactgccacgtgtgga

SEQ ID NO: 154710 - DNA, 25 bp, Saccharomyces pastorianus
gaagcccttgaaatgtccaaccaat

SEQ ID NO: 154711 - DNA, 25 bp, Saccharomyces pastorianus
aagttggcgcttccaagattgttct

SEQ ID NO: 154712 - DNA, 25 bp, Saccharomyces pastorianus
aatgaaaatgctctcccggataagt

SEQ ID NO: 154713 - DNA, 25 bp, Saccharomyces pastorianus
aataacacgcctctggatgcaaatg

SEQ ID NO: 154714 - DNA, 25 bp, Saccharomyces pastorianus
taatgcctgacgaacgatcgcccat

SEQ ID NO: 154715 - DNA, 25 bp, Saccharomyces pastorianus
ggcaagaccccattcagtgatatac

SEQ ID NO: 154716 - DNA, 25 bp, Saccharomyces pastorianus
ttgtcacgttctaaaccattgccgc

SEQ ID NO: 154717 - DNA, 25 bp, Saccharomyces pastorianus
tccactatctcgatggttcttgagg

SEQ ID NO: 154718 - DNA, 25 bp, Saccharomyces pastorianus
gagttacgaatctccactatctcga

SEQ ID NO: 154719 - DNA, 25 bp, Saccharomyces pastorianus
tacggtactactgcacaacaaactt

SEQ ID NO: 154720 - DNA, 25 bp, Saccharomyces pastorianus
gattatggcttatcaaagacctctt

SEQ ID NO: 154721 - DNA, 25 bp, Saccharomyces pastorianus
acacgagttgataatacccacccca

SEQ ID NO: 154722 - DNA, 25 bp, Saccharomyces pastorianus
catcgatctaatcacggcaagaccc

SEQ ID NO: 154723 - DNA, 25 bp, Saccharomyces pastorianus
ggtttgtctcagcttttcacatgga

SEQ ID NO: 154724 - DNA, 25 bp, Saccharomyces pastorianus
aaagcctcgccatatgtcattgctg

SEQ ID NO: 154725 - DNA, 25 bp, Saccharomyces pastorianus
gttattgccttctgtgctgcatctc

SEQ ID NO: 154726 - DNA, 25 bp, Saccharomyces pastorianus
actgccatttgtttatcccatctta

SEQ ID NO: 154727 - DNA, 25 bp, Saccharomyces pastorianus
tattggccatttctggtttgtctca

SEQ ID NO: 154728 - DNA, 25 bp, Saccharomyces pastorianus
ttgattgcactttatgtcggctaca

SEQ ID NO: 154729 - DNA, 25 bp, Saccharomyces pastorianus
ggtggtggtactaaagcctcgccat

SEQ ID NO: 154730 - DNA, 25 bp, Saccharomyces pastorianus
tttcgaaaactacttggctatgcca

SEQ ID NO: 154731 - DNA, 25 bp, Saccharomyces pastorianus
gtgtttctgcattgtttgccgttat

SEQ ID NO: 154732 - DNA, 25 bp, Saccharomyces pastorianus
aaggttttctcctacatcgacagag

SEQ ID NO: 154733 - DNA, 25 bp, Saccharomyces pastorianus
gggatctgcctacgcttgcattatg

SEQ ID NO: 154734 - DNA, 25 bp, Saccharomyces pastorianus
attctgctgctaaaccatcgagtac

SEQ ID NO: 154735 - DNA, 25 bp, Saccharomyces pastorianus
gtgctgccatacaacatcgagcgtg

SEQ ID NO: 154736 - DNA, 25 bp, Saccharomyces pastorianus
atttcatactgccatgcgctaggaa

SEQ ID NO: 154737 - DNA, 25 bp, Saccharomyces pastorianus
caacatgagcgcacgggccatagaa

SEQ ID NO: 154738 - DNA, 25 bp, Saccharomyces pastorianus
aacactgggctttggtagcaccggc

SEQ ID NO: 154739 - DNA, 25 bp, Saccharomyces pastorianus
agtaacgacgattcagtgctgccat

SEQ ID NO: 154740 - DNA, 25 bp, Saccharomyces pastorianus
gtaacctgtaccttatcctggaata

SEQ ID NO: 154741 - DNA, 25 bp, Saccharomyces pastorianus
gagcgtgaggccatcaattgcttca

SEQ ID NO: 154742 - DNA, 25 bp, Saccharomyces pastorianus
actgttcaacttgcttgtggaccac

SEQ ID NO: 154743 - DNA, 25 bp, Saccharomyces pastorianus
aaggtccaacttgcgcaacatgagc

SEQ ID NO: 154744 - DNA, 25 bp, Saccharomyces pastorianus
catcgagtactataggcccatggaa

SEQ ID NO: 154745 - DNA, 25 bp, Saccharomyces pastorianus
atattccccactattcctaggttag

SEQ ID NO: 154746 - DNA, 25 bp, Saccharomyces pastorianus
ttgacgcagaaactctctccacaag

SEQ ID NO: 154747 - DNA, 25 bp, Saccharomyces pastorianus
acagctcgagtaatttgtttccaga

SEQ ID NO: 154748 - DNA, 25 bp, Saccharomyces pastorianus
acgcgcagctgatgttgaaaactta

SEQ ID NO: 154749 - DNA, 25 bp, Saccharomyces pastorianus
tttccagagggaaaggtgccccaag

SEQ ID NO: 154750 - DNA, 25 bp, Saccharomyces pastorianus
ttagcgccgccagcttcaaaaatta

SEQ ID NO: 154751 - DNA, 25 bp, Saccharomyces pastorianus
gaagatgcatctacattgacgcaga

SEQ ID NO: 154752 - DNA, 25 bp, Saccharomyces pastorianus
cattataactggaaacgcttggcta

SEQ ID NO: 154753 - DNA, 25 bp, Saccharomyces pastorianus
ggtcaccatcctatattgagctctt

SEQ ID NO: 154754 - DNA, 25 bp, Saccharomyces pastorianus
gacctctttggtgattttattccta

SEQ ID NO: 154755 - DNA, 25 bp, Saccharomyces pastorianus
cgcttggctagtcaagtctccttaa

SEQ ID NO: 154756 - DNA, 25 bp, Saccharomyces pastorianus
caattggaagaggtcaagcaccctt

SEQ ID NO: 154757 - DNA, 25 bp, Saccharomyces pastorianus
atctgatttcgatgctactcacgag

SEQ ID NO: 154758 - DNA, 25 bp, Saccharomyces pastorianus
aagaggtcaagcacccttcaacaga

SEQ ID NO: 154759 - DNA, 25 bp, Saccharomyces pastorianus
gatttcgatgctactcacgagaaga

SEQ ID NO: 154760 - DNA, 25 bp, Saccharomyces pastorianus
gaacatagggctgttaatagcaaac

SEQ ID NO: 154761 - DNA, 25 bp, Saccharomyces pastorianus
aatagcaaactttccggtgcatctg

SEQ ID NO: 154762 - DNA, 25 bp, Saccharomyces pastorianus
atacggcaccataacaacatttaga

SEQ ID NO: 154763 - DNA, 25 bp, Saccharomyces pastorianus
atggccaaagatttactctgtgtaa

SEQ ID NO: 154764 - DNA, 25 bp, Saccharomyces pastorianus
aagcacccttcaacagacgaacata

SEQ ID NO: 154765 - DNA, 25 bp, Saccharomyces pastorianus
agaaaagatcatacggcaccataac

SEQ ID NO: 154766 - DNA, 25 bp, Saccharomyces pastorianus
aactttccggtgcatctgatttcga

SEQ ID NO: 154767 - DNA, 25 bp, Saccharomyces pastorianus
ctggcccgtggaactgcaatacaaa

SEQ ID NO: 154768 - DNA, 25 bp, Saccharomyces pastorianus
agcactctacgttttgatcgattga

SEQ ID NO: 154769 - DNA, 25 bp, Saccharomyces pastorianus
gaacataccaccatccaaggagata

SEQ ID NO: 154770 - DNA, 25 bp, Saccharomyces pastorianus
agaattagccaaatgctggcccgtg

SEQ ID NO: 154771 - DNA, 25 bp, Saccharomyces pastorianus
ttatctcttcttcgtcagttgctga

SEQ ID NO: 154772 - DNA, 25 bp, Saccharomyces pastorianus
gccctccaagatccctaagttgaaa

SEQ ID NO: 154773 - DNA, 25 bp, Saccharomyces pastorianus
cattatattctactgctcacgagct

SEQ ID NO: 154774 - DNA, 25 bp, Saccharomyces pastorianus
attatcctctgcatttatctcttct

SEQ ID NO: 154775 - DNA, 25 bp, Saccharomyces pastorianus
agttactacacttcagatggatcaa

SEQ ID NO: 154776 - DNA, 25 bp, Saccharomyces pastorianus
gttgctgacttgattacgaaggcta

SEQ ID NO: 154777 - DNA, 25 bp, Saccharomyces pastorianus
gagctttgcgcttatgattccgaaa

SEQ ID NO: 154778 - DNA, 25 bp, Saccharomyces pastorianus
gactggacggataatgtgttcactc

SEQ ID NO: 154779 - DNA, 25 bp, Saccharomyces pastorianus
atgtgttcactcaatcagtattcta

SEQ ID NO: 154780 - DNA, 25 bp, Saccharomyces pastorianus
acctgtcgtctctttactctgaaaa

SEQ ID NO: 154781 - DNA, 25 bp, Saccharomyces pastorianus
atcagtattctatcacgggtcagat

SEQ ID NO: 154782 - DNA, 25 bp, Saccharomyces pastorianus
caaactatccaaatctgttgtcgag

SEQ ID NO: 154783 - DNA, 25 bp, Saccharomyces pastorianus
tgttgtcgagaccacaccgctaaat

SEQ ID NO: 154784 - DNA, 25 bp, Saccharomyces pastorianus
gggaagttctttgtctgcgtgtaca

SEQ ID NO: 154785 - DNA, 25 bp, Saccharomyces pastorianus
gataaatcactttcagactggacgg

SEQ ID NO: 154786 - DNA, 25 bp, Saccharomyces pastorianus
caccgctaaatggtcattcattgtt

SEQ ID NO: 154787 - DNA, 25 bp, Saccharomyces pastorianus
gagaacgatgaaaccttatttaaca

SEQ ID NO: 154788 - DNA, 25 bp, Saccharomyces pastorianus
ttctttgtctgcgtgtacaagtccc

SEQ ID NO: 154789 - DNA, 25 bp, Saccharomyces pastorianus
aacgaacccggtgtcttgtccagag

SEQ ID NO: 154790 - DNA, 25 bp, Saccharomyces pastorianus
gacaaatcgaagacttggtccccgt

SEQ ID NO: 154791 - DNA, 25 bp, Saccharomyces pastorianus
ctggaatgccaacagtgccgtttca

SEQ ID NO: 154792 - DNA, 25 bp, Saccharomyces pastorianus
gactcccaagaattggtcgccgaaa

SEQ ID NO: 154793 - DNA, 25 bp, Saccharomyces pastorianus
gggtggttgcttcttcatgtgctac

SEQ ID NO: 154794 - DNA, 25 bp, Saccharomyces pastorianus
atgtgctaccatggtgcgttgcagt

SEQ ID NO: 154795 - DNA, 25 bp, Saccharomyces pastorianus
tgccgtttcatccatcatttacgaa

SEQ ID NO: 154796 - DNA, 25 bp, Saccharomyces pastorianus
gctagtgatggccagaatctcttta

SEQ ID NO: 154797 - DNA, 25 bp, Saccharomyces pastorianus
gccgtcctagactataccaattctg

SEQ ID NO: 154798 - DNA, 25 bp, Saccharomyces pastorianus
agagtctcgggtacgttagctgcca

SEQ ID NO: 154799 - DNA, 25 bp, Saccharomyces pastorianus
gctgccagaggctttaacattgatt

SEQ ID NO: 154800 - DNA, 25 bp, Saccharomyces pastorianus
ttagcgctgctggacaattttcaca

SEQ ID NO: 154801 - DNA, 25 bp, Saccharomyces pastorianus
attcctgtgatcatgtgggtaccca

SEQ ID NO: 154802 - DNA, 25 bp, Saccharomyces pastorianus
aactttccacgattctttagcgctg

SEQ ID NO: 154803 - DNA, 25 bp, Saccharomyces pastorianus
gatggttcatctcctcacagtattc

SEQ ID NO: 154804 - DNA, 25 bp, Saccharomyces pastorianus
gaatacatcgactcacatgggtgga

SEQ ID NO: 154805 - DNA, 25 bp, Saccharomyces pastorianus
agggtatttacgcactctgacggca

SEQ ID NO: 154806 - DNA, 25 bp, Saccharomyces pastorianus
tgacggcactccacaactactgttg

SEQ ID NO: 154807 - DNA, 25 bp, Saccharomyces pastorianus
catgggtggattgcgctgaccatac

SEQ ID NO: 154808 - DNA, 25 bp, Saccharomyces pastorianus
ggctgttcaaagtcattcaacccat

SEQ ID NO: 154809 - DNA, 25 bp, Saccharomyces pastorianus
ttcccgaggcggtggtcaattggct

SEQ ID NO: 154810 - DNA, 25 bp, Saccharomyces pastorianus
caccatcagtagttacttgcccata

SEQ ID NO: 154811 - DNA, 25 bp, Saccharomyces pastorianus
ttatccagaacagcacggacatggc

SEQ ID NO: 154812 - DNA, 25 bp, Saccharomyces pastorianus
actcattactctttgttctttatta

SEQ ID NO: 154813 - DNA, 25 bp, Saccharomyces pastorianus
ttggacgcgcagagagttagtagaa

SEQ ID NO: 154814 - DNA, 25 bp, Saccharomyces pastorianus
aacagcacggacatggcactaacca

SEQ ID NO: 154815 - DNA, 25 bp, Saccharomyces pastorianus
gtatagctaaattggacgcgcagag

SEQ ID NO: 154816 - DNA, 25 bp, Saccharomyces pastorianus
aaaatcactgtacttctccaaacac

SEQ ID NO: 154817 - DNA, 25 bp, Saccharomyces pastorianus
atggccaatgtcaaaatcactgtac

SEQ ID NO: 154818 - DNA, 25 bp, Saccharomyces pastorianus
gtaatatggagacacatcgtacaaa

SEQ ID NO: 154819 - DNA, 25 bp, Saccharomyces pastorianus
cacatacgcttggttgttctttgga

SEQ ID NO: 154820 - DNA, 25 bp, Saccharomyces pastorianus
tacttctccaaacactgtacgacaa

SEQ ID NO: 154821 - DNA, 25 bp, Saccharomyces pastorianus
aaatgttgcacatacgcttggttgt

SEQ ID NO: 154822 - DNA, 25 bp, Saccharomyces pastorianus
ggcatatttacatatggctgttcca

SEQ ID NO: 154823 - DNA, 25 bp, Saccharomyces pastorianus
catttttggctgaatctatcgattt

SEQ ID NO: 154824 - DNA, 25 bp, Saccharomyces pastorianus
gtcaccttattggtcatactttgtc

SEQ ID NO: 154825 - DNA, 25 bp, Saccharomyces pastorianus
gtataaactggatgggatgctcaac

SEQ ID NO: 154826 - DNA, 25 bp, Saccharomyces pastorianus
gctgttccatctctaatttaccgtt

SEQ ID NO: 154827 - DNA, 25 bp, Saccharomyces pastorianus
tttggcgttttctatttggaacaca

SEQ ID NO: 154828 - DNA, 25 bp, Saccharomyces pastorianus
accgaccaatgcattgttttacgaa

SEQ ID NO: 154829 - DNA, 25 bp, Saccharomyces pastorianus
aaatgtttcaagtatgtgcctcaaa

SEQ ID NO: 154830 - DNA, 25 bp, Saccharomyces pastorianus
ggatgctcaacagtaggtttatcat

SEQ ID NO: 154831 - DNA, 25 bp, Saccharomyces pastorianus
aagtgtgttccttgtattaggcata

SEQ ID NO: 154832 - DNA, 25 bp, Saccharomyces pastorianus
taccatttaattcaacgcccttttg

SEQ ID NO: 154833 - DNA, 25 bp, Saccharomyces pastorianus
agacgataacaaagcatggtatggc

SEQ ID NO: 154834 - DNA, 25 bp, Saccharomyces pastorianus
tcccgtatcatggacgattttcttg

SEQ ID NO: 154835 - DNA, 25 bp, Saccharomyces pastorianus
gattttcttgaacatttgagcaaag

SEQ ID NO: 154836 - DNA, 25 bp, Saccharomyces pastorianus
ggacgattttcttgaacatttgagc

SEQ ID NO: 154837 - DNA, 25 bp, Saccharomyces pastorianus
agtgcataacactaaaaagttgaaa

SEQ ID NO: 154838 - DNA, 25 bp, Saccharomyces pastorianus
aaagttgaaagaatcccgtatcatg

SEQ ID NO: 154839 - DNA, 25 bp, Saccharomyces pastorianus
atcatggacgattttcttgaacatt

SEQ ID NO: 154840 - DNA, 25 bp, Saccharomyces pastorianus
gaatcccgtatcatggacgattttc

SEQ ID NO: 154841 - DNA, 25 bp, Saccharomyces pastorianus
gaaagaatcccgtatcatggacgat

SEQ ID NO: 154842 - DNA, 25 bp, Saccharomyces pastorianus
ccgtatcatggacgattttcttgaa

SEQ ID NO: 154843 - DNA, 25 bp, Saccharomyces pastorianus
tcttgaacatttgagcaaagacgat

SEQ ID NO: 154844 - DNA, 25 bp, Saccharomyces pastorianus
tcctgggagttgttgttgctttcat

SEQ ID NO: 154845 - DNA, 25 bp, Saccharomyces pastorianus
ggtggtaccgcattatgttcttacg

SEQ ID NO: 154846 - DNA, 25 bp, Saccharomyces pastorianus
tgtcgtcggttgtgctatgttttat

SEQ ID NO: 154847 - DNA, 25 bp, Saccharomyces pastorianus
gtttcgctgcaatttacattccttg

SEQ ID NO: 154848 - DNA, 25 bp, Saccharomyces pastorianus
tgtcacaagagctggtggcgtcctg

SEQ ID NO: 154849 - DNA, 25 bp, Saccharomyces pastorianus
gaaatccactgttatgttctttttg

SEQ ID NO: 154850 - DNA, 25 bp, Saccharomyces pastorianus
acattccttggtttggtatcttgga

SEQ ID NO: 154851 - DNA, 25 bp, Saccharomyces pastorianus
aaccgtttgtaccatgaaatccact

SEQ ID NO: 154852 - DNA, 25 bp, Saccharomyces pastorianus
ttcctactgttgtctattggtcact

SEQ ID NO: 154853 - DNA, 25 bp, Saccharomyces pastorianus
tgggttttggttgagtttcgctgca

SEQ ID NO: 154854 - DNA, 25 bp, Saccharomyces pastorianus
ttgctttcattgcttggtacaacgc

SEQ ID NO: 154855 - DNA, 25 bp, Saccharomyces pastorianus
caatgtgtgaaaaccagttgcatca

SEQ ID NO: 154856 - DNA, 25 bp, Saccharomyces pastorianus
tgaaaaccagttgcatcacaaagtg

SEQ ID NO: 154857 - DNA, 25 bp, Saccharomyces pastorianus
gttgcatcacaaagtgggtccagaa

SEQ ID NO: 154858 - DNA, 25 bp, Saccharomyces pastorianus
gggtccagaatgataaatttgcgtt

SEQ ID NO: 154859 - DNA, 25 bp, Saccharomyces pastorianus
gaaagatattttccaaagggaagca

SEQ ID NO: 154860 - DNA, 25 bp, Saccharomyces pastorianus
tttcttggtaagattgaacagtcag

SEQ ID NO: 154861 - DNA, 25 bp, Saccharomyces pastorianus
gatgtcgatgaatttcttggtaaga

SEQ ID NO: 154862 - DNA, 25 bp, Saccharomyces pastorianus
agcaggcttaaatgatgtcgatgaa

SEQ ID NO: 154863 - DNA, 25 bp, Saccharomyces pastorianus
gcatttgactcagaaagatattttc

SEQ ID NO: 154864 - DNA, 25 bp, Saccharomyces pastorianus
gaacagtcaggaattcaatgtgtga

SEQ ID NO: 154865 - DNA, 25 bp, Saccharomyces pastorianus
ggaagcaggcttaaatgatgtcgat

SEQ ID NO: 154866 - DNA, 25 bp, Saccharomyces pastorianus
aaaacctcttaagcgactcttacag

SEQ ID NO: 154867 - DNA, 25 bp, Saccharomyces pastorianus
ttcaaaacctcttaagcgactctta

SEQ ID NO: 154868 - DNA, 25 bp, Saccharomyces pastorianus
gagcttcccttgttactgacaaaac

SEQ ID NO: 154869 - DNA, 25 bp, Saccharomyces pastorianus
ggaagagcttcccttgttactgaca

SEQ ID NO: 154870 - DNA, 25 bp, Saccharomyces pastorianus
aacctcttaagcgactcttacaggg

SEQ ID NO: 154871 - DNA, 25 bp, Saccharomyces pastorianus
gcttcccttgttactgacaaaacga

SEQ ID NO: 154872 - DNA, 25 bp, Saccharomyces pastorianus
taagcgactcttacagggggataaa

SEQ ID NO: 154873 - DNA, 25 bp, Saccharomyces pastorianus
tcccttgttactgacaaaacgaagt

SEQ ID NO: 154874 - DNA, 25 bp, Saccharomyces pastorianus
gatacaagcttcaaaacctcttaag

SEQ ID NO: 154875 - DNA, 25 bp, Saccharomyces pastorianus
aagagcttcccttgttactgacaaa

SEQ ID NO: 154876 - DNA, 25 bp, Saccharomyces pastorianus
aaggaagagcttcccttgttactga

SEQ ID NO: 154877 - DNA, 25 bp, Saccharomyces pastorianus
atatgtctctgaatgccaaggatgg

SEQ ID NO: 154878 - DNA, 25 bp, Saccharomyces pastorianus
tggctatatccattgttttttacag

SEQ ID NO: 154879 - DNA, 25 bp, Saccharomyces pastorianus
tttttacagctaacgccaaacttgg

SEQ ID NO: 154880 - DNA, 25 bp, Saccharomyces pastorianus
tattggcagcgcaaaaaggcttcaa

SEQ ID NO: 154881 - DNA, 25 bp, Saccharomyces pastorianus
gaaagctttaacgaacgcagaattt

SEQ ID NO: 154882 - DNA, 25 bp, Saccharomyces pastorianus
gaaataatatccttctcgaaagctt

SEQ ID NO: 154883 - DNA, 25 bp, Saccharomyces pastorianus
aaagaggtggtattcttctgagata

SEQ ID NO: 154884 - DNA, 25 bp, Saccharomyces pastorianus
ggcttcaagcttacacaacacggtt

SEQ ID NO: 154885 - DNA, 25 bp, Saccharomyces pastorianus
aagccgttttgtaatgacacgaccg

SEQ ID NO: 154886 - DNA, 25 bp, Saccharomyces pastorianus
gacacgaccgagttggcaaaaatca

SEQ ID NO: 154887 - DNA, 25 bp, Saccharomyces pastorianus
atagtggagagatttcgtacagcga

SEQ ID NO: 154888 - DNA, 25 bp, Saccharomyces pastorianus
gttattttcatttttcccatagttg

SEQ ID NO: 154889 - DNA, 25 bp, Saccharomyces pastorianus
ggcctgattaggacatattctctgc

SEQ ID NO: 154890 - DNA, 25 bp, Saccharomyces pastorianus
gctggtgtactgtcgtctacttgta

SEQ ID NO: 154891 - DNA, 25 bp, Saccharomyces pastorianus
gaagacagtctgtaggcctgattag

SEQ ID NO: 154892 - DNA, 25 bp, Saccharomyces pastorianus
tgaaccagaacaaaccggtactctt

SEQ ID NO: 154893 - DNA, 25 bp, Saccharomyces pastorianus
tatgatttagccgtagatccagaaa

SEQ ID NO: 154894 - DNA, 25 bp, Saccharomyces pastorianus
gaatgaacggattcctagctggtgt

SEQ ID NO: 154895 - DNA, 25 bp, Saccharomyces pastorianus
caacagacgctgtgcatgccaatat

SEQ ID NO: 154896 - DNA, 25 bp, Saccharomyces pastorianus
tgtacgttatggttccttacgttgt

SEQ ID NO: 154897 - DNA, 25 bp, Saccharomyces pastorianus
atatagatacagctccagacggttg

SEQ ID NO: 154898 - DNA, 25 bp, Saccharomyces pastorianus
gaactttagtcaagctgtaccctat

SEQ ID NO: 154899 - DNA, 25 bp, Saccharomyces pastorianus
tgttcgcttttttccttttatcact

SEQ ID NO: 154900 - DNA, 25 bp, Saccharomyces pastorianus
tcccgtaaaatccaaattgttcgct

SEQ ID NO: 154901 - DNA, 25 bp, Saccharomyces pastorianus
gcttttttccttttatcactattat

SEQ ID NO: 154902 - DNA, 25 bp, Saccharomyces pastorianus
tcgcttttttccttttatcactatt

SEQ ID NO: 154903 - DNA, 25 bp, Saccharomyces pastorianus
gtttcgtatttagacagatcccgta

SEQ ID NO: 154904 - DNA, 25 bp, Saccharomyces pastorianus
gatcccgtaaaatccaaattgttcg

SEQ ID NO: 154905 - DNA, 25 bp, Saccharomyces pastorianus
ttcgcttttttccttttatcactat

SEQ ID NO: 154906 - DNA, 25 bp, Saccharomyces pastorianus
atttagacagatcccgtaaaatcca

SEQ ID NO: 154907 - DNA, 25 bp, Saccharomyces pastorianus
ttcgtatttagacagatcccgtaaa

SEQ ID NO: 154908 - DNA, 25 bp, Saccharomyces pastorianus
gacagatcccgtaaaatccaaattg

SEQ ID NO: 154909 - DNA, 25 bp, Saccharomyces pastorianus
gtgtttcgtatttagacagatcccg

SEQ ID NO: 154910 - DNA, 25 bp, Saccharomyces pastorianus
ctatacctgttttgcactttcgaaa

SEQ ID NO: 154911 - DNA, 25 bp, Saccharomyces pastorianus
gaaaacttggtacagcatgaactaa

SEQ ID NO: 154912 - DNA, 25 bp, Saccharomyces pastorianus
tctcactttatctaacatttcgcta

SEQ ID NO: 154913 - DNA, 25 bp, Saccharomyces pastorianus
taatacaaggttatcccatacagga

SEQ ID NO: 154914 - DNA, 25 bp, Saccharomyces pastorianus
agcgcagccgaaacgatggatacaa

SEQ ID NO: 154915 - DNA, 25 bp, Saccharomyces pastorianus
agaaatttcaacatagcgcagccga

SEQ ID NO: 154916 - DNA, 25 bp, Saccharomyces pastorianus
taactgactcagttagtttcgcagt

SEQ ID NO: 154917 - DNA, 25 bp, Saccharomyces pastorianus
aatgctgcttcgaaagtcttaagac

SEQ ID NO: 154918 - DNA, 25 bp, Saccharomyces pastorianus
atgcgaactcaataactatacctgt

SEQ ID NO: 154919 - DNA, 25 bp, Saccharomyces pastorianus
gaaaagctttgatttatgccatgat

SEQ ID NO: 154920 - DNA, 25 bp, Saccharomyces pastorianus
ttaagactccaagacgatgtgaaga

SEQ ID NO: 154921 - DNA, 25 bp, Saccharomyces pastorianus
gacgatctgtttcatcatgtatcac

SEQ ID NO: 154922 - DNA, 25 bp, Saccharomyces pastorianus
gaattttgcgggtgggatttcaacg

SEQ ID NO: 154923 - DNA, 25 bp, Saccharomyces pastorianus
ggatcaaagttctctggcgtcaggc

SEQ ID NO: 154924 - DNA, 25 bp, Saccharomyces pastorianus
gatggaagcctctatttattctaag

SEQ ID NO: 154925 - DNA, 25 bp, Saccharomyces pastorianus
gtttaagctatcaggctgtcacaaa

SEQ ID NO: 154926 - DNA, 25 bp, Saccharomyces pastorianus
ataattctagatactgatgcctacg

SEQ ID NO: 154927 - DNA, 25 bp, Saccharomyces pastorianus
gatttcttttcttccaaatttcaag

SEQ ID NO: 154928 - DNA, 25 bp, Saccharomyces pastorianus
gatgcctacgaaaacatagtcctta

SEQ ID NO: 154929 - DNA, 25 bp, Saccharomyces pastorianus
gtgtccattgattctatacggcttg

SEQ ID NO: 154930 - DNA, 25 bp, Saccharomyces pastorianus
acaagatttatctcagcctctgaat

SEQ ID NO: 154931 - DNA, 25 bp, Saccharomyces pastorianus
tacggcttgcgtttttaaacatgac

SEQ ID NO: 154932 - DNA, 25 bp, Saccharomyces pastorianus
tggtctaacatggagggtggcccat

SEQ ID NO: 154933 - DNA, 25 bp, Saccharomyces pastorianus
tttcatttctcgagacggtggtcta

SEQ ID NO: 154934 - DNA, 25 bp, Saccharomyces pastorianus
atatcccgtctccttcatataaaga

SEQ ID NO: 154935 - DNA, 25 bp, Saccharomyces pastorianus
gacaggttctgttggcgatgacaat

SEQ ID NO: 154936 - DNA, 25 bp, Saccharomyces pastorianus
ttattgtatatatcccgtctccttc

SEQ ID NO: 154937 - DNA, 25 bp, Saccharomyces pastorianus
ccttctgctgggatcatattaatga

SEQ ID NO: 154938 - DNA, 25 bp, Saccharomyces pastorianus
ttaagcggacatctcatcactacgg

SEQ ID NO: 154939 - DNA, 25 bp, Saccharomyces pastorianus
ggtggcccataattcttctggatta

SEQ ID NO: 154940 - DNA, 25 bp, Saccharomyces pastorianus
gagcttgccgatgctttattttata

SEQ ID NO: 154941 - DNA, 25 bp, Saccharomyces pastorianus
ggaatcaatatgagcttgccgatgc

SEQ ID NO: 154942 - DNA, 25 bp, Saccharomyces pastorianus
aaaactttcaaatccttctgctggg

SEQ ID NO: 154943 - DNA, 25 bp, Saccharomyces pastorianus
gctaccgccggtgtgaaactaaacg

SEQ ID NO: 154944 - DNA, 25 bp, Saccharomyces pastorianus
aaagatacaactgaacccgctaccg

SEQ ID NO: 154945 - DNA, 25 bp, Saccharomyces pastorianus
caagctttcgaaatttctctctcac

SEQ ID NO: 154946 - DNA, 25 bp, Saccharomyces pastorianus
gactacgcaaatccatgaacccatt

SEQ ID NO: 154947 - DNA, 25 bp, Saccharomyces pastorianus
gaacccatttgatgactcggacgaa

SEQ ID NO: 154948 - DNA, 25 bp, Saccharomyces pastorianus
gtcttgttctttcatgaccaactct

SEQ ID NO: 154949 - DNA, 25 bp, Saccharomyces pastorianus
aaatggttggtatgtcggatctctg

SEQ ID NO: 154950 - DNA, 25 bp, Saccharomyces pastorianus
tctctggtaatatatcccttgacgg

SEQ ID NO: 154951 - DNA, 25 bp, Saccharomyces pastorianus
atgtccaacttctacaccatttgtt

SEQ ID NO: 154952 - DNA, 25 bp, Saccharomyces pastorianus
tgacggaacagtttacgggctttca

SEQ ID NO: 154953 - DNA, 25 bp, Saccharomyces pastorianus
taggcctcctagtccaaatggttgg

SEQ ID NO: 154954 - DNA, 25 bp, Saccharomyces pastorianus
acaggtgttgctttccaattgttca

SEQ ID NO: 154955 - DNA, 25 bp, Saccharomyces pastorianus
ctgcctgtgtaggttccttgatttt

SEQ ID NO: 154956 - DNA, 25 bp, Saccharomyces pastorianus
aatttggcatggagtacccctacag

SEQ ID NO: 154957 - DNA, 25 bp, Saccharomyces pastorianus
tatgcatgcgttattggtcccggta

SEQ ID NO: 154958 - DNA, 25 bp, Saccharomyces pastorianus
gatccttgcaggtatctactacaaa

SEQ ID NO: 154959 - DNA, 25 bp, Saccharomyces pastorianus
ggtccagcaaccaatttgtcggatg

SEQ ID NO: 154960 - DNA, 25 bp, Saccharomyces pastorianus
gtggattctaaatactcggtccctt

SEQ ID NO: 154961 - DNA, 25 bp, Saccharomyces pastorianus
acggtttgcccctatcaaagtatat

SEQ ID NO: 154962 - DNA, 25 bp, Saccharomyces pastorianus
tattttggttatgttcccctctcaa

SEQ ID NO: 154963 - DNA, 25 bp, Saccharomyces pastorianus
gtttgattgatgatgccgccactga

SEQ ID NO: 154964 - DNA, 25 bp, Saccharomyces pastorianus
tttcgctattttggctgcctgtgta

SEQ ID NO: 154965 - DNA, 25 bp, Saccharomyces pastorianus
gggagactatcgaagcattacaagc

SEQ ID NO: 154966 - DNA, 25 bp, Saccharomyces pastorianus
gtacaaatccccaccaatgtgactt

SEQ ID NO: 154967 - DNA, 25 bp, Saccharomyces pastorianus
atgtgactttggtggacccctttga

SEQ ID NO: 154968 - DNA, 25 bp, Saccharomyces pastorianus
aaaagcatcgctaaccagagggaga

SEQ ID NO: 154969 - DNA, 25 bp, Saccharomyces pastorianus
gaaatctgcgccaagttacaggact

SEQ ID NO: 154970 - DNA, 25 bp, Saccharomyces pastorianus
aatgtattcctgagctggtcgacaa

SEQ ID NO: 154971 - DNA, 25 bp, Saccharomyces pastorianus
gaacgcaactacgatgaatacactt

SEQ ID NO: 154972 - DNA, 25 bp, Saccharomyces pastorianus
gttagatgagattcacacgttccat

SEQ ID NO: 154973 - DNA, 25 bp, Saccharomyces pastorianus
agaggatttgttcgctatccaggaa

SEQ ID NO: 154974 - DNA, 25 bp, Saccharomyces pastorianus
agccaatctcacgatgttatcctac

SEQ ID NO: 154975 - DNA, 25 bp, Saccharomyces pastorianus
gttcgacttccctctagcaaagaag

SEQ ID NO: 154976 - DNA, 25 bp, Saccharomyces pastorianus
taccacactcatcaattgactggag

SEQ ID NO: 154977 - DNA, 25 bp, Saccharomyces pastorianus
cttactactacttcatagatttttt

SEQ ID NO: 154978 - DNA, 25 bp, Saccharomyces pastorianus
gtgatatgcttcttcaccgtcctct

SEQ ID NO: 154979 - DNA, 25 bp, Saccharomyces pastorianus
tggcctatcttactactacttcata

SEQ ID NO: 154980 - DNA, 25 bp, Saccharomyces pastorianus
tttttttcatctatccccttccatc

SEQ ID NO: 154981 - DNA, 25 bp, Saccharomyces pastorianus
gcctaataccacactcatcaattga

SEQ ID NO: 154982 - DNA, 25 bp, Saccharomyces pastorianus
ggagatctggcctatcttactacta

SEQ ID NO: 154983 - DNA, 25 bp, Saccharomyces pastorianus
tggttctaccccttcagcgtgaaaa

SEQ ID NO: 154984 - DNA, 25 bp, Saccharomyces pastorianus
caattgactggagatctggcctatc

SEQ ID NO: 154985 - DNA, 25 bp, Saccharomyces pastorianus
tctaccccttcagcgtgaaaaatca

SEQ ID NO: 154986 - DNA, 25 bp, Saccharomyces pastorianus
tgcttctgcctaataccacactcat

SEQ ID NO: 154987 - DNA, 25 bp, Saccharomyces pastorianus
gggtgctttgccaagggtaccaatg

SEQ ID NO: 154988 - DNA, 25 bp, Saccharomyces pastorianus
cgttatctctcaatctttgtccaag

SEQ ID NO: 154989 - DNA, 25 bp, Saccharomyces pastorianus
gaaactatgtacagtgtcgtgcaga

SEQ ID NO: 154990 - DNA, 25 bp, Saccharomyces pastorianus
caagttcacgtgtaatgcgactcat

SEQ ID NO: 154991 - DNA, 25 bp, Saccharomyces pastorianus
catacttggcctgttcgtgttccaa

SEQ ID NO: 154992 - DNA, 25 bp, Saccharomyces pastorianus
gtgactcaagtcgtgaaatgccaga

SEQ ID NO: 154993 - DNA, 25 bp, Saccharomyces pastorianus
gaaaagtcaacacagagcccataaa

SEQ ID NO: 154994 - DNA, 25 bp, Saccharomyces pastorianus
tggatgctttgtttccttgtgttca

SEQ ID NO: 154995 - DNA, 25 bp, Saccharomyces pastorianus
caagtactccaattctgacgccatt

SEQ ID NO: 154996 - DNA, 25 bp, Saccharomyces pastorianus
gttatctgctgactatcctttgtta

SEQ ID NO: 154997 - DNA, 25 bp, Saccharomyces pastorianus
acgccattatctatgtcgggtgctt

SEQ ID NO: 154998 - DNA, 25 bp, Saccharomyces pastorianus
atctgggagctaaaggttcctgcca

SEQ ID NO: 154999 - DNA, 25 bp, Saccharomyces pastorianus
ggttattgcgttatggctcactaca

SEQ ID NO: 155000 - DNA, 25 bp, Saccharomyces pastorianus
taagagattttgaccctgtatcagg

SEQ ID NO: 155001 - DNA, 25 bp, Saccharomyces pastorianus
ggttgcaaccaacgctggaggacta

SEQ ID NO: 155002 - DNA, 25 bp, Saccharomyces pastorianus
gactgttcctaagccaaaagcgttt

SEQ ID NO: 155003 - DNA, 25 bp, Saccharomyces pastorianus
atgctgccttccctttggaggatga

SEQ ID NO: 155004 - DNA, 25 bp, Saccharomyces pastorianus
ggtgtttcaatcttgactgttccta

SEQ ID NO: 155005 - DNA, 25 bp, Saccharomyces pastorianus
atcggtatcatcactggtgtttcaa

SEQ ID NO: 155006 - DNA, 25 bp, Saccharomyces pastorianus
atatgtttccgttggatctgggagc

SEQ ID NO: 155007 - DNA, 25 bp, Saccharomyces pastorianus
aaaagtcttcgtcagagccaggcaa

SEQ ID NO: 155008 - DNA, 25 bp, Saccharomyces pastorianus
gaaacagctgttcattggctcagaa

SEQ ID NO: 155009 - DNA, 25 bp, Saccharomyces pastorianus
gtcaagtgtcatgtcaagcccaaag

SEQ ID NO: 155010 - DNA, 25 bp, Saccharomyces pastorianus
ggttgcattgctaattcttgttcag

SEQ ID NO: 155011 - DNA, 25 bp, Saccharomyces pastorianus
aaaggtcgcgctatggtctgtgcta

SEQ ID NO: 155012 - DNA, 25 bp, Saccharomyces pastorianus
tgactatagtgttgccggacgggac

SEQ ID NO: 155013 - DNA, 25 bp, Saccharomyces pastorianus
cgcatgtgcttctaatctgactcag

SEQ ID NO: 155014 - DNA, 25 bp, Saccharomyces pastorianus
gggagatctcccaacattgtcaatg

SEQ ID NO: 155015 - DNA, 25 bp, Saccharomyces pastorianus
gaagttaaggctgtcgcccagttaa

SEQ ID NO: 155016 - DNA, 25 bp, Saccharomyces pastorianus
aaactgttgcggtggtatcctttga

SEQ ID NO: 155017 - DNA, 25 bp, Saccharomyces pastorianus
ttgttcaggaaccaacgcgtaccgt

SEQ ID NO: 155018 - DNA, 25 bp, Saccharomyces pastorianus
gatactatcaaggatgcggccgcat

SEQ ID NO: 155019 - DNA, 25 bp, Saccharomyces pastorianus
ttgatcaacgcatctgaatccacgg

SEQ ID NO: 155020 - DNA, 25 bp, Saccharomyces pastorianus
gaggtggtgccggtaatatctttca

SEQ ID NO: 155021 - DNA, 25 bp, Saccharomyces pastorianus
gacatcgacgattatatttccccta

SEQ ID NO: 155022 - DNA, 25 bp, Saccharomyces pastorianus
gacaacctgtttgtggtgacttcca

SEQ ID NO: 155023 - DNA, 25 bp, Saccharomyces pastorianus
aggttcctcgttttgcaattggtag

SEQ ID NO: 155024 - DNA, 25 bp, Saccharomyces pastorianus
caaggagccatcagtctttgcatgc

SEQ ID NO: 155025 - DNA, 25 bp, Saccharomyces pastorianus
aacgccccaattgtcgttggtagag

SEQ ID NO: 155026 - DNA, 25 bp, Saccharomyces pastorianus
ttcccctataacttcggatatggtg

SEQ ID NO: 155027 - DNA, 25 bp, Saccharomyces pastorianus
aatggcaatgctttggcggctatca

SEQ ID NO: 155028 - DNA, 25 bp, Saccharomyces pastorianus
gcggctatcaagtccacgttcaaga

SEQ ID NO: 155029 - DNA, 25 bp, Saccharomyces pastorianus
aggtctcgtatcagcgctacaagga

SEQ ID NO: 155030 - DNA, 25 bp, Saccharomyces pastorianus
aatatctttcatgatccgcacctga

SEQ ID NO: 155031 - DNA, 25 bp, Saccharomyces pastorianus
gaaggtctacttcgtaatgtcaaca

SEQ ID NO: 155032 - DNA, 25 bp, Saccharomyces pastorianus
aattcaccatttctgtgtcctactg

SEQ ID NO: 155033 - DNA, 25 bp, Saccharomyces pastorianus
aatgggtgccaaccgtgtttccatc

SEQ ID NO: 155034 - DNA, 25 bp, Saccharomyces pastorianus
tttccatctcctctttgattgcaat

SEQ ID NO: 155035 - DNA, 25 bp, Saccharomyces pastorianus
gtgtattcatcatcacctaatcaga

SEQ ID NO: 155036 - DNA, 25 bp, Saccharomyces pastorianus
gtgtcctactgggttatggttgtga

SEQ ID NO: 155037 - DNA, 25 bp, Saccharomyces pastorianus
tgggtatctccactttagcatccta

SEQ ID NO: 155038 - DNA, 25 bp, Saccharomyces pastorianus
tggtgtttatccatacttagccatg

SEQ ID NO: 155039 - DNA, 25 bp, Saccharomyces pastorianus
gccttttctttacatgagcgtggtt

SEQ ID NO: 155040 - DNA, 25 bp, Saccharomyces pastorianus
gcagcgttcccaagttgctttgatt

SEQ ID NO: 155041 - DNA, 25 bp, Saccharomyces pastorianus
tatttggctcaagatgccttttctt

SEQ ID NO: 155042 - DNA, 25 bp, Saccharomyces pastorianus
gctgaaactcaccagactttagtct

SEQ ID NO: 155043 - DNA, 25 bp, Saccharomyces pastorianus
acttcatactacttgtcagatgctg

SEQ ID NO: 155044 - DNA, 25 bp, Saccharomyces pastorianus
gttgttgtccaaaccgatggtcaat

SEQ ID NO: 155045 - DNA, 25 bp, Saccharomyces pastorianus
tggtgaactaccagcccacaaagtg

SEQ ID NO: 155046 - DNA, 25 bp, Saccharomyces pastorianus
taagattgctcagggtgctaagccg

SEQ ID NO: 155047 - DNA, 25 bp, Saccharomyces pastorianus
gcttccgctagattcggtgtaactt

SEQ ID NO: 155048 - DNA, 25 bp, Saccharomyces pastorianus
gttgcctctggtgtagctaaggcta

SEQ ID NO: 155049 - DNA, 25 bp, Saccharomyces pastorianus
taatgttgggttaatctctcctcct

SEQ ID NO: 155050 - DNA, 25 bp, Saccharomyces pastorianus
gccgatcatatcttagtttctggtc

SEQ ID NO: 155051 - DNA, 25 bp, Saccharomyces pastorianus
gggcagaatcttttaccttggcaac

SEQ ID NO: 155052 - DNA, 25 bp, Saccharomyces pastorianus
gatatcgcaaaaaccaggcactcca

SEQ ID NO: 155053 - DNA, 25 bp, Saccharomyces pastorianus
tggtagagaccctcgtgaatactgc

SEQ ID NO: 155054 - DNA, 25 bp, Saccharomyces pastorianus
aagacttttgcatgtggtgactgta

SEQ ID NO: 155055 - DNA, 25 bp, Saccharomyces pastorianus
gtttcgtgggtcctgaattgatcaa

SEQ ID NO: 155056 - DNA, 25 bp, Saccharomyces pastorianus
gacacggtgcagcatcagttttgaa

SEQ ID NO: 155057 - DNA, 25 bp, Saccharomyces pastorianus
gggtgaagtcactgccatcagaact

SEQ ID NO: 155058 - DNA, 25 bp, Saccharomyces pastorianus
tcaatggccgcgtgtcatgagagtg

SEQ ID NO: 155059 - DNA, 25 bp, Saccharomyces pastorianus
gacgtggtacgattgccacactcga

SEQ ID NO: 155060 - DNA, 25 bp, Saccharomyces pastorianus
aatttcgaattgttgcctgagccac

SEQ ID NO: 155061 - DNA, 25 bp, Saccharomyces pastorianus
gagccaccagtggaacgtgccaaag

SEQ ID NO: 155062 - DNA, 25 bp, Saccharomyces pastorianus
tatcattttgttgtccatgggtttc

SEQ ID NO: 155063 - DNA, 25 bp, Saccharomyces pastorianus
aatctttgattgtctgggccatcca

SEQ ID NO: 155064 - DNA, 25 bp, Saccharomyces pastorianus
taaagttaaggtctgtctctttgca

SEQ ID NO: 155065 - DNA, 25 bp, Saccharomyces pastorianus
tttcaaggcgaaacttttacgtcag

SEQ ID NO: 155066 - DNA, 25 bp, Saccharomyces pastorianus
agaattccaatacgcgactcagata

SEQ ID NO: 155067 - DNA, 25 bp, Saccharomyces pastorianus
gaaagggctcaggtgcatttactaa

SEQ ID NO: 155068 - DNA, 25 bp, Saccharomyces pastorianus
tgaaacccatgttagccaagcctac

SEQ ID NO: 155069 - DNA, 25 bp, Saccharomyces pastorianus
tttgcctttccaggtcttaagtaca

SEQ ID NO: 155070 - DNA, 25 bp, Saccharomyces pastorianus
aaaattccttgatgagtccgttaat

SEQ ID NO: 155071 - DNA, 25 bp, Saccharomyces pastorianus
gttgtcccgggagaattccaatacg

SEQ ID NO: 155072 - DNA, 25 bp, Saccharomyces pastorianus
attctagactgtgaggctgttgctt

SEQ ID NO: 155073 - DNA, 25 bp, Saccharomyces pastorianus
ttgctacaacgatgaaaggctgatt

SEQ ID NO: 155074 - DNA, 25 bp, Saccharomyces pastorianus
gtccgttaatcactcatgcgaaggt

SEQ ID NO: 155075 - DNA, 25 bp, Saccharomyces pastorianus
tgaaatcctgttttccttacaagaa

SEQ ID NO: 155076 - DNA, 25 bp, Saccharomyces pastorianus
ggatggcattccaaaccttcaatgg

SEQ ID NO: 155077 - DNA, 25 bp, Saccharomyces pastorianus
gcagggttcttgagctggatgaaac

SEQ ID NO: 155078 - DNA, 25 bp, Saccharomyces pastorianus
atcgttcgctcaagtgtctgctgaa

SEQ ID NO: 155079 - DNA, 25 bp, Saccharomyces pastorianus
agcgtcttaatggaacctttattgg

SEQ ID NO: 155080 - DNA, 25 bp, Saccharomyces pastorianus
gatggcgggctattttctgaattaa

SEQ ID NO: 155081 - DNA, 25 bp, Saccharomyces pastorianus
gaatcattgtagtcactggcgctaa

SEQ ID NO: 155082 - DNA, 25 bp, Saccharomyces pastorianus
gaaagactcaactcactgcttacaa

SEQ ID NO: 155083 - DNA, 25 bp, Saccharomyces pastorianus
aaataggttgttttgttccagcaga

SEQ ID NO: 155084 - DNA, 25 bp, Saccharomyces pastorianus
gtcactggcgctaatgcatctggaa

SEQ ID NO: 155085 - DNA, 25 bp, Saccharomyces pastorianus
tttatggcgcgatttcagattttga

SEQ ID NO: 155086 - DNA, 25 bp, Saccharomyces pastorianus
agaagcagctgcgtccaaagtaaag

SEQ ID NO: 155087 - DNA, 25 bp, Saccharomyces pastorianus
gaattcgaggcacgcaatctcatag

SEQ ID NO: 155088 - DNA, 25 bp, Saccharomyces pastorianus
gacaatggtgctgagagctccgata

SEQ ID NO: 155089 - DNA, 25 bp, Saccharomyces pastorianus
tccattggcggctgggaattttgta

SEQ ID NO: 155090 - DNA, 25 bp, Saccharomyces pastorianus
aagcgggtcatctcttgtgcaaaag

SEQ ID NO: 155091 - DNA, 25 bp, Saccharomyces pastorianus
gacctgtccgcgtaagacacgaaga

SEQ ID NO: 155092 - DNA, 25 bp, Saccharomyces pastorianus
aacacacacgttatctctagcggtc

SEQ ID NO: 155093 - DNA, 25 bp, Saccharomyces pastorianus
agttattccctgtgagacctgtccg

SEQ ID NO: 155094 - DNA, 25 bp, Saccharomyces pastorianus
gaaggtgtagcgtccaaatctaaga

SEQ ID NO: 155095 - DNA, 25 bp, Saccharomyces pastorianus
atctgccaagccctcattaaagttt

SEQ ID NO: 155096 - DNA, 25 bp, Saccharomyces pastorianus
gaataaaagagtaaccggcgctggc

SEQ ID NO: 155097 - DNA, 25 bp, Saccharomyces pastorianus
gattcatttctcaacaataagtatt

SEQ ID NO: 155098 - DNA, 25 bp, Saccharomyces pastorianus
tcatttctcaacaataagtattctt

SEQ ID NO: 155099 - DNA, 25 bp, Saccharomyces pastorianus
aaggcgattcatttctcaacaataa

SEQ ID NO: 155100 - DNA, 25 bp, Saccharomyces pastorianus
gcgattcatttctcaacaataagta

SEQ ID NO: 155101 - DNA, 25 bp, Saccharomyces pastorianus
gaaggcgattcatttctcaacaata

SEQ ID NO: 155102 - DNA, 25 bp, Saccharomyces pastorianus
ggcgattcatttctcaacaataagt

SEQ ID NO: 155103 - DNA, 25 bp, Saccharomyces pastorianus
ttctcaacaataagtattcttggag

SEQ ID NO: 155104 - DNA, 25 bp, Saccharomyces pastorianus
ataagtattcttggagaaagcaatt

SEQ ID NO: 155105 - DNA, 25 bp, Saccharomyces pastorianus
caacaataagtattcttggagaaag

SEQ ID NO: 155106 - DNA, 25 bp, Saccharomyces pastorianus
aggcgattcatttctcaacaataag

SEQ ID NO: 155107 - DNA, 25 bp, Saccharomyces pastorianus
tgaaggcgattcatttctcaacaat

SEQ ID NO: 155108 - DNA, 25 bp, Saccharomyces pastorianus
gggaagtaccaattgcctgcaaaaa

SEQ ID NO: 155109 - DNA, 25 bp, Saccharomyces pastorianus
ttttgagggaactcactagcctgat

SEQ ID NO: 155110 - DNA, 25 bp, Saccharomyces pastorianus
ctagcctgatgataacaccgtttgt

SEQ ID NO: 155111 - DNA, 25 bp, Saccharomyces pastorianus
ttgccgtgaacggaagtcatacact

SEQ ID NO: 155112 - DNA, 25 bp, Saccharomyces pastorianus
cagccggcaggattgtagatttctt

SEQ ID NO: 155113 - DNA, 25 bp, Saccharomyces pastorianus
aaggctatccgaataatgaaggcga

SEQ ID NO: 155114 - DNA, 25 bp, Saccharomyces pastorianus
tttcgaccccgaagagacgctcaag

SEQ ID NO: 155115 - DNA, 25 bp, Saccharomyces pastorianus
gaagatacacacagcatggatggag

SEQ ID NO: 155116 - DNA, 25 bp, Saccharomyces pastorianus
tgtactttggttttcgttgccctcg

SEQ ID NO: 155117 - DNA, 25 bp, Saccharomyces pastorianus
atttaccgccgaagaccatagcgat

SEQ ID NO: 155118 - DNA, 25 bp, Saccharomyces pastorianus
gaatatacacactatctaccaaagg

SEQ ID NO: 155119 - DNA, 25 bp, Saccharomyces pastorianus
acaccgctgttttactgagacacat

SEQ ID NO: 155120 - DNA, 25 bp, Saccharomyces pastorianus
gagacacatcattattctaagcaat

SEQ ID NO: 155121 - DNA, 25 bp, Saccharomyces pastorianus
gctgttttactgagacacatcatta

SEQ ID NO: 155122 - DNA, 25 bp, Saccharomyces pastorianus
gacaatacaccgctgttttactgag

SEQ ID NO: 155123 - DNA, 25 bp, Saccharomyces pastorianus
ggtaataaggccacgttcggacaat

SEQ ID NO: 155124 - DNA, 25 bp, Saccharomyces pastorianus
ggatcgacggtaataaggccacgtt

SEQ ID NO: 155125 - DNA, 25 bp, Saccharomyces pastorianus
gttcggacaatacaccgctgtttta

SEQ ID NO: 155126 - DNA, 25 bp, Saccharomyces pastorianus
ttattctaagcaatcaacactacct

SEQ ID NO: 155127 - DNA, 25 bp, Saccharomyces pastorianus
gcaatcaacactaccttaaaaacgt

SEQ ID NO: 155128 - DNA, 25 bp, Saccharomyces pastorianus
taaggccacgttcggacaatacacc

SEQ ID NO: 155129 - DNA, 25 bp, Saccharomyces pastorianus
aatacaccgctgttttactgagaca

SEQ ID NO: 155130 - DNA, 25 bp, Saccharomyces pastorianus
atgacggtattgctgattctgatga

SEQ ID NO: 155131 - DNA, 25 bp, Saccharomyces pastorianus
gacgcaacccaagaagaatccaatg

SEQ ID NO: 155132 - DNA, 25 bp, Saccharomyces pastorianus
aaaaagaacatttccatttcatgcc

SEQ ID NO: 155133 - DNA, 25 bp, Saccharomyces pastorianus
atgccctagaactcatgatgcgtta

SEQ ID NO: 155134 - DNA, 25 bp, Saccharomyces pastorianus
gagctgcaccttctgatagaactaa

SEQ ID NO: 155135 - DNA, 25 bp, Saccharomyces pastorianus
gaaagaggtcattgccaaatcaaaa

SEQ ID NO: 155136 - DNA, 25 bp, Saccharomyces pastorianus
tggagcaacagcgtcttgatcgtat

SEQ ID NO: 155137 - DNA, 25 bp, Saccharomyces pastorianus
tccaatggaacctaagaccgatcta

SEQ ID NO: 155138 - DNA, 25 bp, Saccharomyces pastorianus
gaattgatgatgacgcaacccaaga

SEQ ID NO: 155139 - DNA, 25 bp, Saccharomyces pastorianus
aatttcgaggatgttatgtctgaat

SEQ ID NO: 155140 - DNA, 25 bp, Saccharomyces pastorianus
attggacaaaagagctgcaccttct

SEQ ID NO: 155141 - DNA, 25 bp, Saccharomyces pastorianus
atcagggttaactgtacgctttaag

SEQ ID NO: 155142 - DNA, 25 bp, Saccharomyces pastorianus
attctatcatgtgttatcagggtta

SEQ ID NO: 155143 - DNA, 25 bp, Saccharomyces pastorianus
ctcactaggagggaatatgctacca

SEQ ID NO: 155144 - DNA, 25 bp, Saccharomyces pastorianus
gggaatatgctaccaatccgagtaa

SEQ ID NO: 155145 - DNA, 25 bp, Saccharomyces pastorianus
gaactataccgaaaaggccattcta

SEQ ID NO: 155146 - DNA, 25 bp, Saccharomyces pastorianus
gcattacttcggagaactataccga

SEQ ID NO: 155147 - DNA, 25 bp, Saccharomyces pastorianus
aatcttttcagagatctcactagga

SEQ ID NO: 155148 - DNA, 25 bp, Saccharomyces pastorianus
attcatgctccgcattacttcggag

SEQ ID NO: 155149 - DNA, 25 bp, Saccharomyces pastorianus
aggccattctatcatgtgttatcag

SEQ ID NO: 155150 - DNA, 25 bp, Saccharomyces pastorianus
aatggtgcccatttattcatgctcc

SEQ ID NO: 155151 - DNA, 25 bp, Saccharomyces pastorianus
taccaatccgagtaaaactcctcat

SEQ ID NO: 155152 - DNA, 25 bp, Saccharomyces pastorianus
ttttctcacctgaagaagttagagc

SEQ ID NO: 155153 - DNA, 25 bp, Saccharomyces pastorianus
tacagtaaaagaggtccaattcggt

SEQ ID NO: 155154 - DNA, 25 bp, Saccharomyces pastorianus
taaacgaccctaggttaggctctat

SEQ ID NO: 155155 - DNA, 25 bp, Saccharomyces pastorianus
gagcgaaaattggtggtctaaacga

SEQ ID NO: 155156 - DNA, 25 bp, Saccharomyces pastorianus
ggttaggctctattgatcgtaattt

SEQ ID NO: 155157 - DNA, 25 bp, Saccharomyces pastorianus
gtcctggtcattttggtcacataga

SEQ ID NO: 155158 - DNA, 25 bp, Saccharomyces pastorianus
gtcacatagatttagcaaaacctgt

SEQ ID NO: 155159 - DNA, 25 bp, Saccharomyces pastorianus
gtgctccactccgtacagtaaaaga

SEQ ID NO: 155160 - DNA, 25 bp, Saccharomyces pastorianus
gcaaaacctgtatttcatgttggtt

SEQ ID NO: 155161 - DNA, 25 bp, Saccharomyces pastorianus
acagtattctagtgctccactccgt

SEQ ID NO: 155162 - DNA, 25 bp, Saccharomyces pastorianus
tatgaacgaatgtcctggtcatttt

SEQ ID NO: 155163 - DNA, 25 bp, Saccharomyces pastorianus
aaaatagtcatctgaatcctggaaa

SEQ ID NO: 155164 - DNA, 25 bp, Saccharomyces pastorianus
gaacgatagccaaaactgcctacga

SEQ ID NO: 155165 - DNA, 25 bp, Saccharomyces pastorianus
aaatcataacaacatgccacaccgc

SEQ ID NO: 155166 - DNA, 25 bp, Saccharomyces pastorianus
gaatgacacggaagcaaagtccata

SEQ ID NO: 155167 - DNA, 25 bp, Saccharomyces pastorianus
atcctggaaatgacttcggccacca

SEQ ID NO: 155168 - DNA, 25 bp, Saccharomyces pastorianus
tgccacaccgcaatgcatacacaga

SEQ ID NO: 155169 - DNA, 25 bp, Saccharomyces pastorianus
gaatctacgaatgacacggaagcaa

SEQ ID NO: 155170 - DNA, 25 bp, Saccharomyces pastorianus
gcaatgcatacacagaatctacgaa

SEQ ID NO: 155171 - DNA, 25 bp, Saccharomyces pastorianus
accaccagggtgcagaatgtacgat

SEQ ID NO: 155172 - DNA, 25 bp, Saccharomyces pastorianus
aaactgcctacgacagagggaagaa

SEQ ID NO: 155173 - DNA, 25 bp, Saccharomyces pastorianus
aatgacttcggccaccaccagggtg

SEQ ID NO: 155174 - DNA, 25 bp, Saccharomyces pastorianus
ttagtaccgctgttatcttttccat

SEQ ID NO: 155175 - DNA, 25 bp, Saccharomyces pastorianus
aaatggcccgtcttcatatagaata

SEQ ID NO: 155176 - DNA, 25 bp, Saccharomyces pastorianus
cattcatatttcaccactagccaaa

SEQ ID NO: 155177 - DNA, 25 bp, Saccharomyces pastorianus
gttaatcgctccctatatttcagat

SEQ ID NO: 155178 - DNA, 25 bp, Saccharomyces pastorianus
aatagccatactcgtatcattcctc

SEQ ID NO: 155179 - DNA, 25 bp, Saccharomyces pastorianus
atcgggataatctctgctgtggttc

SEQ ID NO: 155180 - DNA, 25 bp, Saccharomyces pastorianus
ctgtggttcctctttatcaagctga

SEQ ID NO: 155181 - DNA, 25 bp, Saccharomyces pastorianus
cggtggcttggtgctattaatcgtc

SEQ ID NO: 155182 - DNA, 25 bp, Saccharomyces pastorianus
aactcattacaggtggcatccggtg

SEQ ID NO: 155183 - DNA, 25 bp, Saccharomyces pastorianus
ttaaaacctacattgctccgaacca

SEQ ID NO: 155184 - DNA, 25 bp, Saccharomyces pastorianus
gggcatgatattccttccagagagt

SEQ ID NO: 155185 - DNA, 25 bp, Saccharomyces pastorianus
taatgaaagtttccccgacgacata

SEQ ID NO: 155186 - DNA, 25 bp, Saccharomyces pastorianus
ggtgctttcatcaacatcaacgagt

SEQ ID NO: 155187 - DNA, 25 bp, Saccharomyces pastorianus
tgctgtcgccctgaagaatgaacca

SEQ ID NO: 155188 - DNA, 25 bp, Saccharomyces pastorianus
ggatctccaaaaagtgccacctcga

SEQ ID NO: 155189 - DNA, 25 bp, Saccharomyces pastorianus
taatgcgtgtggtgctttcatcaac

SEQ ID NO: 155190 - DNA, 25 bp, Saccharomyces pastorianus
atagaagacttttcgccaagcgttt

SEQ ID NO: 155191 - DNA, 25 bp, Saccharomyces pastorianus
cgaagacttccgagatgctagctaa

SEQ ID NO: 155192 - DNA, 25 bp, Saccharomyces pastorianus
cccgacgacatacctttagctaaag

SEQ ID NO: 155193 - DNA, 25 bp, Saccharomyces pastorianus
attcatggcacttcaacatcagcag

SEQ ID NO: 155194 - DNA, 25 bp, Saccharomyces pastorianus
aacgagttcgcattacctgctggat

SEQ ID NO: 155195 - DNA, 25 bp, Saccharomyces pastorianus
tggaagacgattttgctgtcgccct

SEQ ID NO: 155196 - DNA, 25 bp, Saccharomyces pastorianus
attctgcaatcgctatccggtggag

SEQ ID NO: 155197 - DNA, 25 bp, Saccharomyces pastorianus
aaactgattcaacaggtcccaccag

SEQ ID NO: 155198 - DNA, 25 bp, Saccharomyces pastorianus
acatcgcagcggcaatggtaccatt

SEQ ID NO: 155199 - DNA, 25 bp, Saccharomyces pastorianus
aagagggcacgagcttaaccattca

SEQ ID NO: 155200 - DNA, 25 bp, Saccharomyces pastorianus
tggaggccacgataatcacggtaat

SEQ ID NO: 155201 - DNA, 25 bp, Saccharomyces pastorianus
gcaggatgccgttcaactttacggt

SEQ ID NO: 155202 - DNA, 25 bp, Saccharomyces pastorianus
gaccaatattaatttcgctagcgga

SEQ ID NO: 155203 - DNA, 25 bp, Saccharomyces pastorianus
accagggctagatgctctcgtgaaa

SEQ ID NO: 155204 - DNA, 25 bp, Saccharomyces pastorianus
ttaaccattcagcacatcgcagcgg

SEQ ID NO: 155205 - DNA, 25 bp, Saccharomyces pastorianus
cacaattcaagctatcacgtcctta

SEQ ID NO: 155206 - DNA, 25 bp, Saccharomyces pastorianus
aacgatgctgatgtattaaccttag

SEQ ID NO: 155207 - DNA, 25 bp, Saccharomyces pastorianus
atttcctttgctgctttcatcctag

SEQ ID NO: 155208 - DNA, 25 bp, Saccharomyces pastorianus
ctgactctattatttcctttgctgc

SEQ ID NO: 155209 - DNA, 25 bp, Saccharomyces pastorianus
ctttcatcctagctgatgctggttt

SEQ ID NO: 155210 - DNA, 25 bp, Saccharomyces pastorianus
attatttcctttgctgctttcatcc

SEQ ID NO: 155211 - DNA, 25 bp, Saccharomyces pastorianus
tctattatttcctttgctgctttca

SEQ ID NO: 155212 - DNA, 25 bp, Saccharomyces pastorianus
gatgctggtttggaaatcacctctg

SEQ ID NO: 155213 - DNA, 25 bp, Saccharomyces pastorianus
tggtttggaaatcacctctgacaac

SEQ ID NO: 155214 - DNA, 25 bp, Saccharomyces pastorianus
ctttgctgctttcatcctagctgat

SEQ ID NO: 155215 - DNA, 25 bp, Saccharomyces pastorianus
gactctattatttcctttgctgctt

SEQ ID NO: 155216 - DNA, 25 bp, Saccharomyces pastorianus
gctgctttcatcctagctgatgctg

SEQ ID NO: 155217 - DNA, 25 bp, Saccharomyces pastorianus
atcctagctgatgctggtttggaaa

SEQ ID NO: 155218 - DNA, 25 bp, Saccharomyces pastorianus
tttaattacatgtctctcgccattc

SEQ ID NO: 155219 - DNA, 25 bp, Saccharomyces pastorianus
ctcgccattcttgaagcctatcaaa

SEQ ID NO: 155220 - DNA, 25 bp, Saccharomyces pastorianus
gactctgatggctacctctgtatat

SEQ ID NO: 155221 - DNA, 25 bp, Saccharomyces pastorianus
accctctccactttggaatctagaa

SEQ ID NO: 155222 - DNA, 25 bp, Saccharomyces pastorianus
cctcttaacaaacactgggccgaat

SEQ ID NO: 155223 - DNA, 25 bp, Saccharomyces pastorianus
ttagcgacaagttttctccgcggac

SEQ ID NO: 155224 - DNA, 25 bp, Saccharomyces pastorianus
ggtatagagaccaccaggcatagaa

SEQ ID NO: 155225 - DNA, 25 bp, Saccharomyces pastorianus
taacgttcaaactccgactctgatg

SEQ ID NO: 155226 - DNA, 25 bp, Saccharomyces pastorianus
acggccttctcatcctaagggaggt

SEQ ID NO: 155227 - DNA, 25 bp, Saccharomyces pastorianus
gcgctcatcgtccaatatgtctatc

SEQ ID NO: 155228 - DNA, 25 bp, Saccharomyces pastorianus
atatgtctatcccatctttagcttc

SEQ ID NO: 155229 - DNA, 25 bp, Saccharomyces pastorianus
tgtttatgctctgaagttacctggc

SEQ ID NO: 155230 - DNA, 25 bp, Saccharomyces pastorianus
gaagatgggcactgactatgtcgat

SEQ ID NO: 155231 - DNA, 25 bp, Saccharomyces pastorianus
tcaagatgtcagattccccagcgga

SEQ ID NO: 155232 - DNA, 25 bp, Saccharomyces pastorianus
gttacctggcattattcacattgat

SEQ ID NO: 155233 - DNA, 25 bp, Saccharomyces pastorianus
gatgctaccttttccaacagtttgg

SEQ ID NO: 155234 - DNA, 25 bp, Saccharomyces pastorianus
atatcggtgtttccaactttgctgt

SEQ ID NO: 155235 - DNA, 25 bp, Saccharomyces pastorianus
tataccttttgcatagcccatttgt

SEQ ID NO: 155236 - DNA, 25 bp, Saccharomyces pastorianus
gactatgtcgatctataccttttgc

SEQ ID NO: 155237 - DNA, 25 bp, Saccharomyces pastorianus
gaaagttgcggaagtcaagccccaa

SEQ ID NO: 155238 - DNA, 25 bp, Saccharomyces pastorianus
gcaatcgccatcattgggacaggta

SEQ ID NO: 155239 - DNA, 25 bp, Saccharomyces pastorianus
gacaagtactcacctcaaatcaaga

SEQ ID NO: 155240 - DNA, 25 bp, Saccharomyces pastorianus
cttcagaaataataatagccttagc

SEQ ID NO: 155241 - DNA, 25 bp, Saccharomyces pastorianus
gaccatctaaactacattgttgaga

SEQ ID NO: 155242 - DNA, 25 bp, Saccharomyces pastorianus
tggttcccgacaagattttttgaga

SEQ ID NO: 155243 - DNA, 25 bp, Saccharomyces pastorianus
cgatttatttattaatttttggcat

SEQ ID NO: 155244 - DNA, 25 bp, Saccharomyces pastorianus
accagaccatctaaactacattgtt

SEQ ID NO: 155245 - DNA, 25 bp, Saccharomyces pastorianus
tacattgttgagagcgttagtgaaa

SEQ ID NO: 155246 - DNA, 25 bp, Saccharomyces pastorianus
aaaccagaccatctaaactacattg

SEQ ID NO: 155247 - DNA, 25 bp, Saccharomyces pastorianus
tgaaacttggagtaacaacaataac

SEQ ID NO: 155248 - DNA, 25 bp, Saccharomyces pastorianus
gagagcgttagtgaaatgacaacaa

SEQ ID NO: 155249 - DNA, 25 bp, Saccharomyces pastorianus
ttggttcccgacaagattttttgag

SEQ ID NO: 155250 - DNA, 25 bp, Saccharomyces pastorianus
tctaaactacattgttgagagcgtt

SEQ ID NO: 155251 - DNA, 25 bp, Saccharomyces pastorianus
ggcagcttgcgttagatttggctaa

SEQ ID NO: 155252 - DNA, 25 bp, Saccharomyces pastorianus
actgttactggttttcaggaacgct

SEQ ID NO: 155253 - DNA, 25 bp, Saccharomyces pastorianus
ataagagagtttcgctcagccgcgg

SEQ ID NO: 155254 - DNA, 25 bp, Saccharomyces pastorianus
gaagaagctaaactttccgacaata

SEQ ID NO: 155255 - DNA, 25 bp, Saccharomyces pastorianus
caggaacgctgatcttgatctagat

SEQ ID NO: 155256 - DNA, 25 bp, Saccharomyces pastorianus
ggaacttcatccttataactcgagg

SEQ ID NO: 155257 - DNA, 25 bp, Saccharomyces pastorianus
acgaattaattttggccggtgcgat

SEQ ID NO: 155258 - DNA, 25 bp, Saccharomyces pastorianus
gagaaaacaccaatgtcctcgatgt

SEQ ID NO: 155259 - DNA, 25 bp, Saccharomyces pastorianus
ttgacccgttcaacatcataagaga

SEQ ID NO: 155260 - DNA, 25 bp, Saccharomyces pastorianus
agctgtgacttggattttcctttac

SEQ ID NO: 155261 - DNA, 25 bp, Saccharomyces pastorianus
taatgagcaaaaccccattgacccg

SEQ ID NO: 155262 - DNA, 25 bp, Saccharomyces pastorianus
ggaagaattctcgtacgatcacgat

SEQ ID NO: 155263 - DNA, 25 bp, Saccharomyces pastorianus
atcagatagtggacctcagaggccc

SEQ ID NO: 155264 - DNA, 25 bp, Saccharomyces pastorianus
aacacacattttgctacagatttgg

SEQ ID NO: 155265 - DNA, 25 bp, Saccharomyces pastorianus
agaggcccaagagaactcgcgcaaa

SEQ ID NO: 155266 - DNA, 25 bp, Saccharomyces pastorianus
aactcgcgcaaagggtgaagcacta

SEQ ID NO: 155267 - DNA, 25 bp, Saccharomyces pastorianus
tgaaataaatccaacaccctctttg

SEQ ID NO: 155268 - DNA, 25 bp, Saccharomyces pastorianus
acaaccacaaccaattcaaactcaa

SEQ ID NO: 155269 - DNA, 25 bp, Saccharomyces pastorianus
gagtgcttcatcgaatgcatcagat

SEQ ID NO: 155270 - DNA, 25 bp, Saccharomyces pastorianus
gaagcactagatgtcctaaagcgta

SEQ ID NO: 155271 - DNA, 25 bp, Saccharomyces pastorianus
tacgatcacgattttaacacacatt

SEQ ID NO: 155272 - DNA, 25 bp, Saccharomyces pastorianus
acgaccacgaccaacatactaatga

SEQ ID NO: 155273 - DNA, 25 bp, Saccharomyces pastorianus
gacactacagaagcacgatacaaag

SEQ ID NO: 155274 - DNA, 25 bp, Saccharomyces pastorianus
gaatatagaacctgctctcacgaaa

SEQ ID NO: 155275 - DNA, 25 bp, Saccharomyces pastorianus
gtcgtcgatatagcgcatgtagatt

SEQ ID NO: 155276 - DNA, 25 bp, Saccharomyces pastorianus
agcactagatgcttcacaaccgtgg

SEQ ID NO: 155277 - DNA, 25 bp, Saccharomyces pastorianus
accagttatggaaagagtcgtcgat

SEQ ID NO: 155278 - DNA, 25 bp, Saccharomyces pastorianus
gatgtcgcttttgagatatcgttac

SEQ ID NO: 155279 - DNA, 25 bp, Saccharomyces pastorianus
tgagatatcgttacctccacaaatg

SEQ ID NO: 155280 - DNA, 25 bp, Saccharomyces pastorianus
aaagcaatccaaccattgatgaagg

SEQ ID NO: 155281 - DNA, 25 bp, Saccharomyces pastorianus
aaggaactagaaaccgacactacag

SEQ ID NO: 155282 - DNA, 25 bp, Saccharomyces pastorianus
aaatgtacttggatgtcgcttttga

SEQ ID NO: 155283 - DNA, 25 bp, Saccharomyces pastorianus
gaacctgctctcacgaaagagtttc

SEQ ID NO: 155284 - DNA, 25 bp, Saccharomyces pastorianus
aatgggacatcctcaacagtaccga

SEQ ID NO: 155285 - DNA, 25 bp, Saccharomyces pastorianus
agccaacctatatacgtactctgca

SEQ ID NO: 155286 - DNA, 25 bp, Saccharomyces pastorianus
attggtgattgtaccgcacacacgg

SEQ ID NO: 155287 - DNA, 25 bp, Saccharomyces pastorianus
tatgggcgactcatcataccagttg

SEQ ID NO: 155288 - DNA, 25 bp, Saccharomyces pastorianus
gaaactgaggtatcacgtctacaaa

SEQ ID NO: 155289 - DNA, 25 bp, Saccharomyces pastorianus
aagcatatgggtgcccttgcgtaca

SEQ ID NO: 155290 - DNA, 25 bp, Saccharomyces pastorianus
caagttggagcttctcggttctgag

SEQ ID NO: 155291 - DNA, 25 bp, Saccharomyces pastorianus
gtacatcggctctgaaaccgcaatt

SEQ ID NO: 155292 - DNA, 25 bp, Saccharomyces pastorianus
aatacgggatgctggtttgggccac

SEQ ID NO: 155293 - DNA, 25 bp, Saccharomyces pastorianus
gccatgtgtctctctatcaggaata

SEQ ID NO: 155294 - DNA, 25 bp, Saccharomyces pastorianus
ttggaaatccgcttatttggccatg

SEQ ID NO: 155295 - DNA, 25 bp, Saccharomyces pastorianus
accgcgcccgccttatatataaaat

SEQ ID NO: 155296 - DNA, 25 bp, Saccharomyces pastorianus
aattgcttgagcctcttcccaatat

SEQ ID NO: 155297 - DNA, 25 bp, Saccharomyces pastorianus
gagtcattctctgccgctttattat

SEQ ID NO: 155298 - DNA, 25 bp, Saccharomyces pastorianus
gtgtcactgtgcacgagcaacgaaa

SEQ ID NO: 155299 - DNA, 25 bp, Saccharomyces pastorianus
atcgcgcatttatttgagtcattct

SEQ ID NO: 155300 - DNA, 25 bp, Saccharomyces pastorianus
atagccgccgaggtttatttcgctc

SEQ ID NO: 155301 - DNA, 25 bp, Saccharomyces pastorianus
aaaaactggcgtcggttgcgcctca

SEQ ID NO: 155302 - DNA, 25 bp, Saccharomyces pastorianus
ggtttatttcgctcaatctgtttgt

SEQ ID NO: 155303 - DNA, 25 bp, Saccharomyces pastorianus
tcttcccaatatcatcgcgcattta

SEQ ID NO: 155304 - DNA, 25 bp, Saccharomyces pastorianus
atctgtttgtttcactttttccgcg

SEQ ID NO: 155305 - DNA, 25 bp, Saccharomyces pastorianus
ggttgcgcctcacgaattgcttgag

SEQ ID NO: 155306 - DNA, 25 bp, Saccharomyces pastorianus
attgcagggcaacgtgtatcattca

SEQ ID NO: 155307 - DNA, 25 bp, Saccharomyces pastorianus
ggaagcggaggaactaccaccacac

SEQ ID NO: 155308 - DNA, 25 bp, Saccharomyces pastorianus
agatgctagaccgtttctgaagccg

SEQ ID NO: 155309 - DNA, 25 bp, Saccharomyces pastorianus
ttcagtagagcaagtcacatcggac

SEQ ID NO: 155310 - DNA, 25 bp, Saccharomyces pastorianus
cgagcaccctttgggcctagaacgg

SEQ ID NO: 155311 - DNA, 25 bp, Saccharomyces pastorianus
acaatatcaatgtcggcgtcggtga

SEQ ID NO: 155312 - DNA, 25 bp, Saccharomyces pastorianus
atcactaacctgaattcttcatccc

SEQ ID NO: 155313 - DNA, 25 bp, Saccharomyces pastorianus
ttttaagctccattaaggcgaccaa

SEQ ID NO: 155314 - DNA, 25 bp, Saccharomyces pastorianus
aacagagccggcgttggaagctgaa

SEQ ID NO: 155315 - DNA, 25 bp, Saccharomyces pastorianus
gtctcccatttccattagtaatgca

SEQ ID NO: 155316 - DNA, 25 bp, Saccharomyces pastorianus
aattacaaacttgcgagcagcggta

SEQ ID NO: 155317 - DNA, 25 bp, Saccharomyces pastorianus
gaaaatttaacccatttagctcatt

SEQ ID NO: 155318 - DNA, 25 bp, Saccharomyces pastorianus
tttaacccatttagctcatttgcga

SEQ ID NO: 155319 - DNA, 25 bp, Saccharomyces pastorianus
aaatttaacccatttagctcatttg

SEQ ID NO: 155320 - DNA, 25 bp, Saccharomyces pastorianus
tttagctcatttgcgaatacctgcc

SEQ ID NO: 155321 - DNA, 25 bp, Saccharomyces pastorianus
atttaacccatttagctcatttgcg

SEQ ID NO: 155322 - DNA, 25 bp, Saccharomyces pastorianus
tcatttgcgaatacctgcccatttg

SEQ ID NO: 155323 - DNA, 25 bp, Saccharomyces pastorianus
tagctcatttgcgaatacctgccca

SEQ ID NO: 155324 - DNA, 25 bp, Saccharomyces pastorianus
acccatttagctcatttgcgaatac

SEQ ID NO: 155325 - DNA, 25 bp, Saccharomyces pastorianus
taacccatttagctcatttgcgaat

SEQ ID NO: 155326 - DNA, 25 bp, Saccharomyces pastorianus
ttgaaaatttaacccatttagctca

SEQ ID NO: 155327 - DNA, 25 bp, Saccharomyces pastorianus
aatttaacccatttagctcatttgc

SEQ ID NO: 155328 - DNA, 25 bp, Saccharomyces pastorianus
aattaacctattagctcatttgcga

SEQ ID NO: 155329 - DNA, 25 bp, Saccharomyces pastorianus
gttgaaaattaacctattagctcat

SEQ ID NO: 155330 - DNA, 25 bp, Saccharomyces pastorianus
ataacttagatcgagctcgagtagt

SEQ ID NO: 155331 - DNA, 25 bp, Saccharomyces pastorianus
acatggactcgataagctggcttat

SEQ ID NO: 155332 - DNA, 25 bp, Saccharomyces pastorianus
gatcgagctcgagtagtgaacatgg

SEQ ID NO: 155333 - DNA, 25 bp, Saccharomyces pastorianus
aacttcaattacattcataacttag

SEQ ID NO: 155334 - DNA, 25 bp, Saccharomyces pastorianus
gaacatggactcgataagctggctt

SEQ ID NO: 155335 - DNA, 25 bp, Saccharomyces pastorianus
gactcgataagctggcttatcaaga

SEQ ID NO: 155336 - DNA, 25 bp, Saccharomyces pastorianus
aacatttacgaatttcaatcagttt

SEQ ID NO: 155337 - DNA, 25 bp, Saccharomyces pastorianus
attcataacttagatcgagctcgag

SEQ ID NO: 155338 - DNA, 25 bp, Saccharomyces pastorianus
tcgagctcgagtagtgaacatggac

SEQ ID NO: 155339 - DNA, 25 bp, Saccharomyces pastorianus
taactaaactgctatataccacaag

SEQ ID NO: 155340 - DNA, 25 bp, Saccharomyces pastorianus
gtacgagtaccaatgactggagact

SEQ ID NO: 155341 - DNA, 25 bp, Saccharomyces pastorianus
gtccttgaagttaatcctgacggat

SEQ ID NO: 155342 - DNA, 25 bp, Saccharomyces pastorianus
agcaggaatatgttggtacgagtac

SEQ ID NO: 155343 - DNA, 25 bp, Saccharomyces pastorianus
ggaaaggaacgcataccgactaaag

SEQ ID NO: 155344 - DNA, 25 bp, Saccharomyces pastorianus
gacaaaagtgtttgcaactactgtt

SEQ ID NO: 155345 - DNA, 25 bp, Saccharomyces pastorianus
ttcccatcagaactataaacacggt

SEQ ID NO: 155346 - DNA, 25 bp, Saccharomyces pastorianus
ggattcgcaggaatattcccatcag

SEQ ID NO: 155347 - DNA, 25 bp, Saccharomyces pastorianus
aactactgttgctcgaatatctggg

SEQ ID NO: 155348 - DNA, 25 bp, Saccharomyces pastorianus
ggagacttgagcacaggaaatacat

SEQ ID NO: 155349 - DNA, 25 bp, Saccharomyces pastorianus
gaaaaactgtgtgaagtccttgaag

SEQ ID NO: 155350 - DNA, 25 bp, Saccharomyces pastorianus
acttggctttggcttgcggtaacaa

SEQ ID NO: 155351 - DNA, 25 bp, Saccharomyces pastorianus
ggacaatactcctgctttgtgtaaa

SEQ ID NO: 155352 - DNA, 25 bp, Saccharomyces pastorianus
gtcttttaagctggccattgacaaa

SEQ ID NO: 155353 - DNA, 25 bp, Saccharomyces pastorianus
gacatcgtcgctcaaggatttggct

SEQ ID NO: 155354 - DNA, 25 bp, Saccharomyces pastorianus
aacattttggaatccgccactttga

SEQ ID NO: 155355 - DNA, 25 bp, Saccharomyces pastorianus
ttctacaaactccattgcatccatt

SEQ ID NO: 155356 - DNA, 25 bp, Saccharomyces pastorianus
tgcatccattttcgcgtggtcgaga

SEQ ID NO: 155357 - DNA, 25 bp, Saccharomyces pastorianus
ggctccttaggtttgatgacttcta

SEQ ID NO: 155358 - DNA, 25 bp, Saccharomyces pastorianus
aaaggtggctttatcatggcgctaa

SEQ ID NO: 155359 - DNA, 25 bp, Saccharomyces pastorianus
gaagctgctcatggtaccgtgacaa

SEQ ID NO: 155360 - DNA, 25 bp, Saccharomyces pastorianus
gggatccactatgaacaccgtttaa

SEQ ID NO: 155361 - DNA, 25 bp, Saccharomyces pastorianus
gttgaaatcctcaatggaaaccata

SEQ ID NO: 155362 - DNA, 25 bp, Saccharomyces pastorianus
gaaacggagttgaaatcctcaatgg

SEQ ID NO: 155363 - DNA, 25 bp, Saccharomyces pastorianus
cggagttgaaatcctcaatggaaac

SEQ ID NO: 155364 - DNA, 25 bp, Saccharomyces pastorianus
gtacgattgagagcaatgaaacgga

SEQ ID NO: 155365 - DNA, 25 bp, Saccharomyces pastorianus
gagttgaaatcctcaatggaaacca

SEQ ID NO: 155366 - DNA, 25 bp, Saccharomyces pastorianus
ctagagagtacgattgagagcaatg

SEQ ID NO: 155367 - DNA, 25 bp, Saccharomyces pastorianus
gcaatgaaacggagttgaaatcctc

SEQ ID NO: 155368 - DNA, 25 bp, Saccharomyces pastorianus
ggaaaccataaggaaatcagatgaa

SEQ ID NO: 155369 - DNA, 25 bp, Saccharomyces pastorianus
gatgaaaaagctagagagtacgatt

SEQ ID NO: 155370 - DNA, 25 bp, Saccharomyces pastorianus
aacggagttgaaatcctcaatggaa

SEQ ID NO: 155371 - DNA, 25 bp, Saccharomyces pastorianus
gaaatcctcaatggaaaccataagg

SEQ ID NO: 155372 - DNA, 25 bp, Saccharomyces pastorianus
taacttgaaggcagagaactctaag

SEQ ID NO: 155373 - DNA, 25 bp, Saccharomyces pastorianus
ttaaaaagaccaccgattctcagag

SEQ ID NO: 155374 - DNA, 25 bp, Saccharomyces pastorianus
tacaacgatttggtgaataaagagc

SEQ ID NO: 155375 - DNA, 25 bp, Saccharomyces pastorianus
ctctaagttgaaggaggctaacgaa

SEQ ID NO: 155376 - DNA, 25 bp, Saccharomyces pastorianus
ttgcttgaaactaaatacaacgatt

SEQ ID NO: 155377 - DNA, 25 bp, Saccharomyces pastorianus
ggaaaagggatgaagatactgttaa

SEQ ID NO: 155378 - DNA, 25 bp, Saccharomyces pastorianus
ggataacttgaaggcagagaactct

SEQ ID NO: 155379 - DNA, 25 bp, Saccharomyces pastorianus
agttggctaaagaactggataactt

SEQ ID NO: 155380 - DNA, 25 bp, Saccharomyces pastorianus
gatactgttaaaaagaccaccgatt

SEQ ID NO: 155381 - DNA, 25 bp, Saccharomyces pastorianus
taaagagcaagcatggaaaagggat

SEQ ID NO: 155382 - DNA, 25 bp, Saccharomyces pastorianus
gagaactctaagttgaaggaggcta

SEQ ID NO: 155383 - DNA, 25 bp, Saccharomyces pastorianus
tacaagagttgcgtgtcctagacta

SEQ ID NO: 155384 - DNA, 25 bp, Saccharomyces pastorianus
caactccgttcacacgtttgataca

SEQ ID NO: 155385 - DNA, 25 bp, Saccharomyces pastorianus
tatttcgatccttcattacctgtaa

SEQ ID NO: 155386 - DNA, 25 bp, Saccharomyces pastorianus
aattggatgctctatgccaactccg

SEQ ID NO: 155387 - DNA, 25 bp, Saccharomyces pastorianus
taagaggctctctcgtcgtcaatga

SEQ ID NO: 155388 - DNA, 25 bp, Saccharomyces pastorianus
accaaaatgcgttgcttgactcaag

SEQ ID NO: 155389 - DNA, 25 bp, Saccharomyces pastorianus
gtgttgcgacttgcattctttcata

SEQ ID NO: 155390 - DNA, 25 bp, Saccharomyces pastorianus
atcgtcagcctaacagtagagccag

SEQ ID NO: 155391 - DNA, 25 bp, Saccharomyces pastorianus
gctcttttgactgccgcaaacatga

SEQ ID NO: 155392 - DNA, 25 bp, Saccharomyces pastorianus
agttagaccggttgctcttttgact

SEQ ID NO: 155393 - DNA, 25 bp, Saccharomyces pastorianus
actgtcaccactaagcaccaaaatg

SEQ ID NO: 155394 - DNA, 25 bp, Saccharomyces pastorianus
gagcttgttgagtacaaatcccgct

SEQ ID NO: 155395 - DNA, 25 bp, Saccharomyces pastorianus
gctggaagccgagttagcagcttat

SEQ ID NO: 155396 - DNA, 25 bp, Saccharomyces pastorianus
gagtcatgacaatctagtagcgaaa

SEQ ID NO: 155397 - DNA, 25 bp, Saccharomyces pastorianus
aaatcccgctttcagagtcatgaca

SEQ ID NO: 155398 - DNA, 25 bp, Saccharomyces pastorianus
atgagtcccagattagtctcttgaa

SEQ ID NO: 155399 - DNA, 25 bp, Saccharomyces pastorianus
aaaaaccatctctgacttagaacaa

SEQ ID NO: 155400 - DNA, 25 bp, Saccharomyces pastorianus
atgcaagctgaaaatgagtctctaa

SEQ ID NO: 155401 - DNA, 25 bp, Saccharomyces pastorianus
ggaaattatctctaaatccgattct

SEQ ID NO: 155402 - DNA, 25 bp, Saccharomyces pastorianus
gaaacggcgacaacagcaaacgatg

SEQ ID NO: 155403 - DNA, 25 bp, Saccharomyces pastorianus
aggaacatatttcgaaggagcttgt

SEQ ID NO: 155404 - DNA, 25 bp, Saccharomyces pastorianus
acgaaagcagcatacaattgtctaa

SEQ ID NO: 155405 - DNA, 25 bp, Saccharomyces pastorianus
taccgccggcccctatgccggctga

SEQ ID NO: 155406 - DNA, 25 bp, Saccharomyces pastorianus
gccggcccctatgccggctgataat

SEQ ID NO: 155407 - DNA, 25 bp, Saccharomyces pastorianus
cggcccctatgccggctgataatgg

SEQ ID NO: 155408 - DNA, 25 bp, Saccharomyces pastorianus
ggcccctatgccggctgataatggc

SEQ ID NO: 155409 - DNA, 25 bp, Saccharomyces pastorianus
ccggcccctatgccggctgataatg

SEQ ID NO: 155410 - DNA, 25 bp, Saccharomyces pastorianus
atgctaccgccggcccctatgccgg

SEQ ID NO: 155411 - DNA, 25 bp, Saccharomyces pastorianus
ccgccggcccctatgccggctgata

SEQ ID NO: 155412 - DNA, 25 bp, Saccharomyces pastorianus
cgccggcccctatgccggctgataa

SEQ ID NO: 155413 - DNA, 25 bp, Saccharomyces pastorianus
tgctaccgccggcccctatgccggc

SEQ ID NO: 155414 - DNA, 25 bp, Saccharomyces pastorianus
accgccggcccctatgccggctgat

SEQ ID NO: 155415 - DNA, 25 bp, Saccharomyces pastorianus
gctaccgccggcccctatgccggct

SEQ ID NO: 155416 - DNA, 25 bp, Saccharomyces pastorianus
gataaccattgcaccggaggcacaa

SEQ ID NO: 155417 - DNA, 25 bp, Saccharomyces pastorianus
gtctttgcgcaaacagctatcggtt

SEQ ID NO: 155418 - DNA, 25 bp, Saccharomyces pastorianus
gtgttcgggtaccaatgccatgata

SEQ ID NO: 155419 - DNA, 25 bp, Saccharomyces pastorianus
ggacggacggtgtttacttcataca

SEQ ID NO: 155420 - DNA, 25 bp, Saccharomyces pastorianus
atacacgtttactctgtgttcgggt

SEQ ID NO: 155421 - DNA, 25 bp, Saccharomyces pastorianus
ggtgttgtgaaatatgctcccatgc

SEQ ID NO: 155422 - DNA, 25 bp, Saccharomyces pastorianus
gtgggtgccacgattgattctaaga

SEQ ID NO: 155423 - DNA, 25 bp, Saccharomyces pastorianus
gattctaagagtttcaccgttccct

SEQ ID NO: 155424 - DNA, 25 bp, Saccharomyces pastorianus
caatggctactcttcaaacactcag

SEQ ID NO: 155425 - DNA, 25 bp, Saccharomyces pastorianus
atgcaactccaaccggctactaagg

SEQ ID NO: 155426 - DNA, 25 bp, Saccharomyces pastorianus
gctccagaacccaactcagtttatg

SEQ ID NO: 155427 - DNA, 25 bp, Saccharomyces pastorianus
ttaaacaagccgaacaagaacaagc

SEQ ID NO: 155428 - DNA, 25 bp, Saccharomyces pastorianus
tctttaaacaagccgaacaagaaca

SEQ ID NO: 155429 - DNA, 25 bp, Saccharomyces pastorianus
acaagccgaacaagaacaagccgat

SEQ ID NO: 155430 - DNA, 25 bp, Saccharomyces pastorianus
aacaagccgaacaagaacaagccga

SEQ ID NO: 155431 - DNA, 25 bp, Saccharomyces pastorianus
aaacaagccgaacaagaacaagccg

SEQ ID NO: 155432 - DNA, 25 bp, Saccharomyces pastorianus
tttaaacaagccgaacaagaacaag

SEQ ID NO: 155433 - DNA, 25 bp, Saccharomyces pastorianus
caagccgaacaagaacaagccgatg

SEQ ID NO: 155434 - DNA, 25 bp, Saccharomyces pastorianus
taaacaagccgaacaagaacaagcc

SEQ ID NO: 155435 - DNA, 25 bp, Saccharomyces pastorianus
gagagaaggccaaacaactcatgat

SEQ ID NO: 155436 - DNA, 25 bp, Saccharomyces pastorianus
tcatgatttccgacaaccacaaaag

SEQ ID NO: 155437 - DNA, 25 bp, Saccharomyces pastorianus
aacaactcatgatttccgacaacca

SEQ ID NO: 155438 - DNA, 25 bp, Saccharomyces pastorianus
aaggccaaacaactcatgatttccg

SEQ ID NO: 155439 - DNA, 25 bp, Saccharomyces pastorianus
atgatttccgacaaccacaaaagat

SEQ ID NO: 155440 - DNA, 25 bp, Saccharomyces pastorianus
aagttctctagggagagaaggccaa

SEQ ID NO: 155441 - DNA, 25 bp, Saccharomyces pastorianus
tctagggagagaaggccaaacaact

SEQ ID NO: 155442 - DNA, 25 bp, Saccharomyces pastorianus
tttccgacaaccacaaaagataatt

SEQ ID NO: 155443 - DNA, 25 bp, Saccharomyces pastorianus
ggccaaacaactcatgatttccgac

SEQ ID NO: 155444 - DNA, 25 bp, Saccharomyces pastorianus
gatttccgacaaccacaaaagataa

SEQ ID NO: 155445 - DNA, 25 bp, Saccharomyces pastorianus
aactcatgatttccgacaaccacaa

SEQ ID NO: 155446 - DNA, 25 bp, Saccharomyces pastorianus
ggtggtggtatagcctcagaatctc

SEQ ID NO: 155447 - DNA, 25 bp, Saccharomyces pastorianus
cgtggtccagcgttgaaaggcattt

SEQ ID NO: 155448 - DNA, 25 bp, Saccharomyces pastorianus
gaatcattccggtaaactggtttgt

SEQ ID NO: 155449 - DNA, 25 bp, Saccharomyces pastorianus
ttagaaggcgttgggtcaaagaaag

SEQ ID NO: 155450 - DNA, 25 bp, Saccharomyces pastorianus
aatgcacatgtcgtggtccagcgtt

SEQ ID NO: 155451 - DNA, 25 bp, Saccharomyces pastorianus
gaagtcgaatcattacttagtaaag

SEQ ID NO: 155452 - DNA, 25 bp, Saccharomyces pastorianus
gaatctcagtttaacgtacaacgaa

SEQ ID NO: 155453 - DNA, 25 bp, Saccharomyces pastorianus
gtggtatagcctcagaatctcagtt

SEQ ID NO: 155454 - DNA, 25 bp, Saccharomyces pastorianus
taaaggcgaaaatgtcccgtacact

SEQ ID NO: 155455 - DNA, 25 bp, Saccharomyces pastorianus
accaagtaaggtccaatccgtacat

SEQ ID NO: 155456 - DNA, 25 bp, Saccharomyces pastorianus
aaatgtcccgtacactttccaagat

SEQ ID NO: 155457 - DNA, 25 bp, Saccharomyces pastorianus
ctggtttcaaaacgtcattggacat

SEQ ID NO: 155458 - DNA, 25 bp, Saccharomyces pastorianus
atgattggccccttgggcgtctctg

SEQ ID NO: 155459 - DNA, 25 bp, Saccharomyces pastorianus
gaagctgctgacactgccaagggat

SEQ ID NO: 155460 - DNA, 25 bp, Saccharomyces pastorianus
catgtcattagttggtttgagctcc

SEQ ID NO: 155461 - DNA, 25 bp, Saccharomyces pastorianus
cattggacattgacactactgaagc

SEQ ID NO: 155462 - DNA, 25 bp, Saccharomyces pastorianus
agttggtttgagctccatcgatgcc

SEQ ID NO: 155463 - DNA, 25 bp, Saccharomyces pastorianus
tttgagctccatcgatgccacttct

SEQ ID NO: 155464 - DNA, 25 bp, Saccharomyces pastorianus
actgccaagggatccatgtcattag

SEQ ID NO: 155465 - DNA, 25 bp, Saccharomyces pastorianus
tgctgacactgccaagggatccatg

SEQ ID NO: 155466 - DNA, 25 bp, Saccharomyces pastorianus
ttgacactactgaagctgctgacac

SEQ ID NO: 155467 - DNA, 25 bp, Saccharomyces pastorianus
gggcgtctctggtttcaaaacgtca

SEQ ID NO: 155468 - DNA, 25 bp, Saccharomyces pastorianus
agacgcgtccattgtttatagaact

SEQ ID NO: 155469 - DNA, 25 bp, Saccharomyces pastorianus
ctggacatcattggctgtggcacaa

SEQ ID NO: 155470 - DNA, 25 bp, Saccharomyces pastorianus
ttactggaagtatccttgggaatcc

SEQ ID NO: 155471 - DNA, 25 bp, Saccharomyces pastorianus
gaatgatatcgagccatgcgtcttt

SEQ ID NO: 155472 - DNA, 25 bp, Saccharomyces pastorianus
gggtcaattgaaagacgcgtccatt

SEQ ID NO: 155473 - DNA, 25 bp, Saccharomyces pastorianus
tgggaagcattccttggttaccgtg

SEQ ID NO: 155474 - DNA, 25 bp, Saccharomyces pastorianus
tcgagccatgcgtctttgataaatt

SEQ ID NO: 155475 - DNA, 25 bp, Saccharomyces pastorianus
acacagcgagtgtttgatgtacaaa

SEQ ID NO: 155476 - DNA, 25 bp, Saccharomyces pastorianus
caaaaatgctttagtgtccaggaaa

SEQ ID NO: 155477 - DNA, 25 bp, Saccharomyces pastorianus
ggttaccgtgctaactggacatcat

SEQ ID NO: 155478 - DNA, 25 bp, Saccharomyces pastorianus
aaagctgccagtgataaccaagaca

SEQ ID NO: 155479 - DNA, 25 bp, Saccharomyces pastorianus
agtgttgctgcttatccgagtgatc

SEQ ID NO: 155480 - DNA, 25 bp, Saccharomyces pastorianus
ccaatggaggacttcgctaccgaat

SEQ ID NO: 155481 - DNA, 25 bp, Saccharomyces pastorianus
tagctttgtgctttgcttctctaaa

SEQ ID NO: 155482 - DNA, 25 bp, Saccharomyces pastorianus
ataactactccatgcaagtcagaga

SEQ ID NO: 155483 - DNA, 25 bp, Saccharomyces pastorianus
ttggcaccacgagcggtttatttgg

SEQ ID NO: 155484 - DNA, 25 bp, Saccharomyces pastorianus
gttggatttccattcatactgtatg

SEQ ID NO: 155485 - DNA, 25 bp, Saccharomyces pastorianus
aggtacgccaagagcctatctggag

SEQ ID NO: 155486 - DNA, 25 bp, Saccharomyces pastorianus
agttgattgaaacctccactccaat

SEQ ID NO: 155487 - DNA, 25 bp, Saccharomyces pastorianus
aaggcactttataccaaacccatgt

SEQ ID NO: 155488 - DNA, 25 bp, Saccharomyces pastorianus
aattcgctaagagatttggcaccac

SEQ ID NO: 155489 - DNA, 25 bp, Saccharomyces pastorianus
aaacccatgtatgttcgcgcaatga

SEQ ID NO: 155490 - DNA, 25 bp, Saccharomyces pastorianus
gcaagcgtcaccgatattgtcagta

SEQ ID NO: 155491 - DNA, 25 bp, Saccharomyces pastorianus
gttctgtttctgtagttgacgcatt

SEQ ID NO: 155492 - DNA, 25 bp, Saccharomyces pastorianus
atatggtttcctcaactggttcagc

SEQ ID NO: 155493 - DNA, 25 bp, Saccharomyces pastorianus
agtatatccaacagcttcgaccgga

SEQ ID NO: 155494 - DNA, 25 bp, Saccharomyces pastorianus
gagcgtctcatccattcaaagatct

SEQ ID NO: 155495 - DNA, 25 bp, Saccharomyces pastorianus
aggaatttcggccacttcaagttct

SEQ ID NO: 155496 - DNA, 25 bp, Saccharomyces pastorianus
gaacttatgcatcagctcacgcaag

SEQ ID NO: 155497 - DNA, 25 bp, Saccharomyces pastorianus
aaatggtttagtcggctcatcttcc

SEQ ID NO: 155498 - DNA, 25 bp, Saccharomyces pastorianus
gtagagttactgactcgactcgcca

SEQ ID NO: 155499 - DNA, 25 bp, Saccharomyces pastorianus
aagcactttcgctgtctcgaatagc

SEQ ID NO: 155500 - DNA, 25 bp, Saccharomyces pastorianus
gattcggcttcctcgagtaggtcaa

SEQ ID NO: 155501 - DNA, 25 bp, Saccharomyces pastorianus
ggagagtttgctttattcgtcacac

SEQ ID NO: 155502 - DNA, 25 bp, Saccharomyces pastorianus
gaatcaactctcttttctagtaagg

SEQ ID NO: 155503 - DNA, 25 bp, Saccharomyces pastorianus
acttcggatcacttgtttgtcgttt

SEQ ID NO: 155504 - DNA, 25 bp, Saccharomyces pastorianus
ccagcagctggttaaccgtggtagt

SEQ ID NO: 155505 - DNA, 25 bp, Saccharomyces pastorianus
agaacattccgaggcaaccggcaat

SEQ ID NO: 155506 - DNA, 25 bp, Saccharomyces pastorianus
gatgaccctttcaacgcgtttaaat

SEQ ID NO: 155507 - DNA, 25 bp, Saccharomyces pastorianus
tgaatgtagaggtcatccccggcaa

SEQ ID NO: 155508 - DNA, 25 bp, Saccharomyces pastorianus
actgcaacagttgcggagccgtgaa

SEQ ID NO: 155509 - DNA, 25 bp, Saccharomyces pastorianus
taagggacacggcagacgcagttat

SEQ ID NO: 155510 - DNA, 25 bp, Saccharomyces pastorianus
gggaaatccctcagttatcattttg

SEQ ID NO: 155511 - DNA, 25 bp, Saccharomyces pastorianus
ttattcgtcacacttcggatcactt

SEQ ID NO: 155512 - DNA, 25 bp, Saccharomyces pastorianus
gtatcgaaccctcttcagtattcaa

SEQ ID NO: 155513 - DNA, 25 bp, Saccharomyces pastorianus
aatgggcgacgcacttttgaaagac

SEQ ID NO: 155514 - DNA, 25 bp, Saccharomyces pastorianus
ggtcaactgcaggaagagcacctct

SEQ ID NO: 155515 - DNA, 25 bp, Saccharomyces pastorianus
agacatcttccgttttcgaaagcca

SEQ ID NO: 155516 - DNA, 25 bp, Saccharomyces pastorianus
taaatcgtttgacatgccactgggt

SEQ ID NO: 155517 - DNA, 25 bp, Saccharomyces pastorianus
gtatctattgccctttttgttcgag

SEQ ID NO: 155518 - DNA, 25 bp, Saccharomyces pastorianus
gggtccggatggattgcctatgcca

SEQ ID NO: 155519 - DNA, 25 bp, Saccharomyces pastorianus
gttcgaggtggttcaagacatcttc

SEQ ID NO: 155520 - DNA, 25 bp, Saccharomyces pastorianus
gagcacctctctggtaaatcgtttg

SEQ ID NO: 155521 - DNA, 25 bp, Saccharomyces pastorianus
gaagcacctgcatatgattcgacgg

SEQ ID NO: 155522 - DNA, 25 bp, Saccharomyces pastorianus
gcttgacagagagtatcgctgcgaa

SEQ ID NO: 155523 - DNA, 25 bp, Saccharomyces pastorianus
atcaccagactagcatgacgacgat

SEQ ID NO: 155524 - DNA, 25 bp, Saccharomyces pastorianus
acaggagttcatcaaggagtcaccc

SEQ ID NO: 155525 - DNA, 25 bp, Saccharomyces pastorianus
ataatcttcccacaagtgaccttcc

SEQ ID NO: 155526 - DNA, 25 bp, Saccharomyces pastorianus
gtggaattaccacttgaggattctc

SEQ ID NO: 155527 - DNA, 25 bp, Saccharomyces pastorianus
cggtcatactagtacctcatcgcat

SEQ ID NO: 155528 - DNA, 25 bp, Saccharomyces pastorianus
atcgcattcaaccttgttcggacga

SEQ ID NO: 155529 - DNA, 25 bp, Saccharomyces pastorianus
gaggattctcaccaaacaaacttta

SEQ ID NO: 155530 - DNA, 25 bp, Saccharomyces pastorianus
cctccaccgtcaatgggcaatttga

SEQ ID NO: 155531 - DNA, 25 bp, Saccharomyces pastorianus
gacaacgaagctgggtcctgcaaag

SEQ ID NO: 155532 - DNA, 25 bp, Saccharomyces pastorianus
gggcaatttgacatccggtcatact

SEQ ID NO: 155533 - DNA, 25 bp, Saccharomyces pastorianus
tgaggatgtgcctaactctccaaac

SEQ ID NO: 155534 - DNA, 25 bp, Saccharomyces pastorianus
tccaatcacagttaccttgaaaggc

SEQ ID NO: 155535 - DNA, 25 bp, Saccharomyces pastorianus
tacaattgtcggcaaccaccttggc

SEQ ID NO: 155536 - DNA, 25 bp, Saccharomyces pastorianus
ataggagtaccccagttaccagatc

SEQ ID NO: 155537 - DNA, 25 bp, Saccharomyces pastorianus
cagttaccagatccaatcacagtta

SEQ ID NO: 155538 - DNA, 25 bp, Saccharomyces pastorianus
gagtaccccagttaccagatccaat

SEQ ID NO: 155539 - DNA, 25 bp, Saccharomyces pastorianus
ccagatccaatcacagttaccttga

SEQ ID NO: 155540 - DNA, 25 bp, Saccharomyces pastorianus
ggcaaccaccttggctataggagta

SEQ ID NO: 155541 - DNA, 25 bp, Saccharomyces pastorianus
aattgtcggcaaccaccttggctat

SEQ ID NO: 155542 - DNA, 25 bp, Saccharomyces pastorianus
gtcggcaaccaccttggctatagga

SEQ ID NO: 155543 - DNA, 25 bp, Saccharomyces pastorianus
accttggctataggagtaccccagt

SEQ ID NO: 155544 - DNA, 25 bp, Saccharomyces pastorianus
ggctataggagtaccccagttacca

SEQ ID NO: 155545 - DNA, 25 bp, Saccharomyces pastorianus
tggccgacaaactatcatcaaccga

SEQ ID NO: 155546 - DNA, 25 bp, Saccharomyces pastorianus
gaagttcgcattttgcgctacgaaa

SEQ ID NO: 155547 - DNA, 25 bp, Saccharomyces pastorianus
tggagtcccaccttctgttttattt

SEQ ID NO: 155548 - DNA, 25 bp, Saccharomyces pastorianus
atcctgcagccatattgtccatatt

SEQ ID NO: 155549 - DNA, 25 bp, Saccharomyces pastorianus
aagtcggcatagcagcatattccct

SEQ ID NO: 155550 - DNA, 25 bp, Saccharomyces pastorianus
agagctccccttattcgtggtagaa

SEQ ID NO: 155551 - DNA, 25 bp, Saccharomyces pastorianus
atctctaccgtcaagaagttcgcat

SEQ ID NO: 155552 - DNA, 25 bp, Saccharomyces pastorianus
tcatcaaccgatgctatgggctgtt

SEQ ID NO: 155553 - DNA, 25 bp, Saccharomyces pastorianus
gaagtttcctcttttatctctaccg

SEQ ID NO: 155554 - DNA, 25 bp, Saccharomyces pastorianus
atattccctggaagatcctgcagcc

SEQ ID NO: 155555 - DNA, 25 bp, Saccharomyces pastorianus
aatttcttcgtctacttcagagctc

SEQ ID NO: 155556 - DNA, 25 bp, Saccharomyces pastorianus
agggaatatgctgctatgccgactt

SEQ ID NO: 155557 - DNA, 25 bp, Saccharomyces pastorianus
taaaagcacctgttcatatagcaag

SEQ ID NO: 155558 - DNA, 25 bp, Saccharomyces pastorianus
aacagcccatagcatcggttgatga

SEQ ID NO: 155559 - DNA, 25 bp, Saccharomyces pastorianus
ttgttgttagtgtttttcgtagcgc

SEQ ID NO: 155560 - DNA, 25 bp, Saccharomyces pastorianus
gaaggtgggactccaacagcccata

SEQ ID NO: 155561 - DNA, 25 bp, Saccharomyces pastorianus
atatggctgcaggatcttccaggga

SEQ ID NO: 155562 - DNA, 25 bp, Saccharomyces pastorianus
tatgccgacttctaccacgaataag

SEQ ID NO: 155563 - DNA, 25 bp, Saccharomyces pastorianus
ctagacttgtctccgattataatat

SEQ ID NO: 155564 - DNA, 25 bp, Saccharomyces pastorianus
ggtgaccggtagaggaactgttcca

SEQ ID NO: 155565 - DNA, 25 bp, Saccharomyces pastorianus
aatgcgaacttcttgacggtagaga

SEQ ID NO: 155566 - DNA, 25 bp, Saccharomyces pastorianus
gaatactccctcatactagacttgt

SEQ ID NO: 155567 - DNA, 25 bp, Saccharomyces pastorianus
gtcttggacaaaaaagcttcttcgt

SEQ ID NO: 155568 - DNA, 25 bp, Saccharomyces pastorianus
caactccgaaatgccttgtgctagg

SEQ ID NO: 155569 - DNA, 25 bp, Saccharomyces pastorianus
tatgttttcacaacccttttaagag

SEQ ID NO: 155570 - DNA, 25 bp, Saccharomyces pastorianus
tttccaactacactgcatttcacga

SEQ ID NO: 155571 - DNA, 25 bp, Saccharomyces pastorianus
atttcacgacctaatcattcacgac

SEQ ID NO: 155572 - DNA, 25 bp, Saccharomyces pastorianus
ggcattaagcgttttatgttttcac

SEQ ID NO: 155573 - DNA, 25 bp, Saccharomyces pastorianus
atagcttctttagtccaactccgaa

SEQ ID NO: 155574 - DNA, 25 bp, Saccharomyces pastorianus
acccttttaagagatgtcttggaca

SEQ ID NO: 155575 - DNA, 25 bp, Saccharomyces pastorianus
aatcattcacgacctctttatttat

SEQ ID NO: 155576 - DNA, 25 bp, Saccharomyces pastorianus
gcttcttcgttgatgatagcttctt

SEQ ID NO: 155577 - DNA, 25 bp, Saccharomyces pastorianus
ttgtgctaggaaaactacgcctttc

SEQ ID NO: 155578 - DNA, 25 bp, Saccharomyces pastorianus
cgtcgctaagcgttcatatgcagaa

SEQ ID NO: 155579 - DNA, 25 bp, Saccharomyces pastorianus
gttcaaccagactcgcagttatgtg

SEQ ID NO: 155580 - DNA, 25 bp, Saccharomyces pastorianus
tcaagtgaacctgcctgctaagtca

SEQ ID NO: 155581 - DNA, 25 bp, Saccharomyces pastorianus
tgctgccgcatcatcaggtttgaag

SEQ ID NO: 155582 - DNA, 25 bp, Saccharomyces pastorianus
agaacgttagttcatctgatgccag

SEQ ID NO: 155583 - DNA, 25 bp, Saccharomyces pastorianus
tagtggctccgaagttactcaagtg

SEQ ID NO: 155584 - DNA, 25 bp, Saccharomyces pastorianus
gttacaatttgctctaccacacgaa

SEQ ID NO: 155585 - DNA, 25 bp, Saccharomyces pastorianus
tatcaggtggatttgcaacagttca

SEQ ID NO: 155586 - DNA, 25 bp, Saccharomyces pastorianus
gaacaattactaccaggtgtcgttg

SEQ ID NO: 155587 - DNA, 25 bp, Saccharomyces pastorianus
aaccatgttcccaccgttgaacaat

SEQ ID NO: 155588 - DNA, 25 bp, Saccharomyces pastorianus
gtattggtgtactggccaaccatgt

SEQ ID NO: 155589 - DNA, 25 bp, Saccharomyces pastorianus
gaatactaaggccagctctgttaag

SEQ ID NO: 155590 - DNA, 25 bp, Saccharomyces pastorianus
aacgtaaatgttaccgctggccttg

SEQ ID NO: 155591 - DNA, 25 bp, Saccharomyces pastorianus
gttaccgctggccttgttagaaatc

SEQ ID NO: 155592 - DNA, 25 bp, Saccharomyces pastorianus
ccaactctgctttcttttgatcatg

SEQ ID NO: 155593 - DNA, 25 bp, Saccharomyces pastorianus
tgccgatatacgtcaaattgtttgt

SEQ ID NO: 155594 - DNA, 25 bp, Saccharomyces pastorianus
gagactcttctttaacaaggttaat

SEQ ID NO: 155595 - DNA, 25 bp, Saccharomyces pastorianus
ggtgagagagtacccaactctgctt

SEQ ID NO: 155596 - DNA, 25 bp, Saccharomyces pastorianus
ttgccgtttacttttccaacaattg

SEQ ID NO: 155597 - DNA, 25 bp, Saccharomyces pastorianus
agattgattcttttgcgtgccgata

SEQ ID NO: 155598 - DNA, 25 bp, Saccharomyces pastorianus
aagttctatcactatccctgatgtc

SEQ ID NO: 155599 - DNA, 25 bp, Saccharomyces pastorianus
aattggtggccaacgatccttcaat

SEQ ID NO: 155600 - DNA, 25 bp, Saccharomyces pastorianus
gttgcagtcttttggaaatacgagt

SEQ ID NO: 155601 - DNA, 25 bp, Saccharomyces pastorianus
actggcaaaccgaggaactcttggt

SEQ ID NO: 155602 - DNA, 25 bp, Saccharomyces pastorianus
cagtcttttggaaatacgagtcttt

SEQ ID NO: 155603 - DNA, 25 bp, Saccharomyces pastorianus
tggcaaaccgaggaactcttggtat

SEQ ID NO: 155604 - DNA, 25 bp, Saccharomyces pastorianus
tgcagtcttttggaaatacgagtct

SEQ ID NO: 155605 - DNA, 25 bp, Saccharomyces pastorianus
ataactggcaaaccgaggaactctt

SEQ ID NO: 155606 - DNA, 25 bp, Saccharomyces pastorianus
gtcttttaataactggcaaaccgag

SEQ ID NO: 155607 - DNA, 25 bp, Saccharomyces pastorianus
taataactggcaaaccgaggaactc

SEQ ID NO: 155608 - DNA, 25 bp, Saccharomyces pastorianus
atacgagtcttttaataactggcaa

SEQ ID NO: 155609 - DNA, 25 bp, Saccharomyces pastorianus
gagtcttttaataactggcaaaccg

SEQ ID NO: 155610 - DNA, 25 bp, Saccharomyces pastorianus
atgttgcagtcttttggaaatacga

SEQ ID NO: 155611 - DNA, 25 bp, Saccharomyces pastorianus
gttaccatggtcacataacctctgt

SEQ ID NO: 155612 - DNA, 25 bp, Saccharomyces pastorianus
gatcgaaaggcatccgcggaaactt

SEQ ID NO: 155613 - DNA, 25 bp, Saccharomyces pastorianus
tttatgtctccgttcttttccaaat

SEQ ID NO: 155614 - DNA, 25 bp, Saccharomyces pastorianus
tgcgcggaaccagacgactgggaaa

SEQ ID NO: 155615 - DNA, 25 bp, Saccharomyces pastorianus
gaaacttaaaatagctccgcggatg

SEQ ID NO: 155616 - DNA, 25 bp, Saccharomyces pastorianus
ctccgcggatgctagatttctacga

SEQ ID NO: 155617 - DNA, 25 bp, Saccharomyces pastorianus
aaatgtgtacggttaccatggtcac

SEQ ID NO: 155618 - DNA, 25 bp, Saccharomyces pastorianus
acgagtcatacatagtctggcgtga

SEQ ID NO: 155619 - DNA, 25 bp, Saccharomyces pastorianus
ataacctctgtgtgcggagccactc

SEQ ID NO: 155620 - DNA, 25 bp, Saccharomyces pastorianus
gcgccacttccttgccgtggaaaaa

SEQ ID NO: 155621 - DNA, 25 bp, Saccharomyces pastorianus
tgactcgcatcaaccgggctatggt

SEQ ID NO: 155622 - DNA, 25 bp, Saccharomyces pastorianus
attgccgaggctttggcagccaaag

SEQ ID NO: 155623 - DNA, 25 bp, Saccharomyces pastorianus
cactgtcctttattctggtaagcaa

SEQ ID NO: 155624 - DNA, 25 bp, Saccharomyces pastorianus
gcagccaaaggttccatttactgtt

SEQ ID NO: 155625 - DNA, 25 bp, Saccharomyces pastorianus
atgcaaccattttcggtctaaggca

SEQ ID NO: 155626 - DNA, 25 bp, Saccharomyces pastorianus
acagctgaatttttaaccgcgttga

SEQ ID NO: 155627 - DNA, 25 bp, Saccharomyces pastorianus
ggatttcgctattgcctgcaaaacg

SEQ ID NO: 155628 - DNA, 25 bp, Saccharomyces pastorianus
aaccgcgttgactgatccaaatgga

SEQ ID NO: 155629 - DNA, 25 bp, Saccharomyces pastorianus
gggttatttgtgtcctccaaggcaa

SEQ ID NO: 155630 - DNA, 25 bp, Saccharomyces pastorianus
aaaacgcctgctctcagagtcaata

SEQ ID NO: 155631 - DNA, 25 bp, Saccharomyces pastorianus
tttggatgcgtctacggccttagaa

SEQ ID NO: 155632 - DNA, 25 bp, Saccharomyces pastorianus
ggattccatctgatcaagccaggtt

SEQ ID NO: 155633 - DNA, 25 bp, Saccharomyces pastorianus
gggtgaaatgattttggttcttgga

SEQ ID NO: 155634 - DNA, 25 bp, Saccharomyces pastorianus
tgtcaatgccctggcagaagcgggt

SEQ ID NO: 155635 - DNA, 25 bp, Saccharomyces pastorianus
ataagcaatgtcaatgccctggcag

SEQ ID NO: 155636 - DNA, 25 bp, Saccharomyces pastorianus
tggcagaagcgggtgaaatgatttt

SEQ ID NO: 155637 - DNA, 25 bp, Saccharomyces pastorianus
atgccctggcagaagcgggtgaaat

SEQ ID NO: 155638 - DNA, 25 bp, Saccharomyces pastorianus
aatgtcaatgccctggcagaagcgg

SEQ ID NO: 155639 - DNA, 25 bp, Saccharomyces pastorianus
caatgccctggcagaagcgggtgaa

SEQ ID NO: 155640 - DNA, 25 bp, Saccharomyces pastorianus
aagcaatgtcaatgccctggcagaa

SEQ ID NO: 155641 - DNA, 25 bp, Saccharomyces pastorianus
agcgggtgaaatgattttggttctt

SEQ ID NO: 155642 - DNA, 25 bp, Saccharomyces pastorianus
agcaatgtcaatgccctggcagaag

SEQ ID NO: 155643 - DNA, 25 bp, Saccharomyces pastorianus
gatcataagcaatgtcaatgccctg

SEQ ID NO: 155644 - DNA, 25 bp, Saccharomyces pastorianus
gagtcatttgcagatgcgctatccc

SEQ ID NO: 155645 - DNA, 25 bp, Saccharomyces pastorianus
aagatgagcagagcgataccccggc

SEQ ID NO: 155646 - DNA, 25 bp, Saccharomyces pastorianus
cgatgcccatgccatctttgaaagt

SEQ ID NO: 155647 - DNA, 25 bp, Saccharomyces pastorianus
ctgcgagccagattagtgccactgt

SEQ ID NO: 155648 - DNA, 25 bp, Saccharomyces pastorianus
tcatacaacgagaagcggtgccttt

SEQ ID NO: 155649 - DNA, 25 bp, Saccharomyces pastorianus
aagcgcttcttttgcagcttcagaa

SEQ ID NO: 155650 - DNA, 25 bp, Saccharomyces pastorianus
gaaatggcgccagatgtcgtatcta

SEQ ID NO: 155651 - DNA, 25 bp, Saccharomyces pastorianus
gataccccggcggataaactgacaa

SEQ ID NO: 155652 - DNA, 25 bp, Saccharomyces pastorianus
taatgctgtcgctagaagctcaagc

SEQ ID NO: 155653 - DNA, 25 bp, Saccharomyces pastorianus
gacctgcaagagacactgcgagcca

SEQ ID NO: 155654 - DNA, 25 bp, Saccharomyces pastorianus
gaagaatcatttacgggcataaccc

SEQ ID NO: 155655 - DNA, 25 bp, Saccharomyces pastorianus
aaatacttcatcgagcaaaggaata

SEQ ID NO: 155656 - DNA, 25 bp, Saccharomyces pastorianus
aatcttgaatggtctgaatggtctc

SEQ ID NO: 155657 - DNA, 25 bp, Saccharomyces pastorianus
agttgatatcaaccactgacaaata

SEQ ID NO: 155658 - DNA, 25 bp, Saccharomyces pastorianus
gtattgcaggagatcaatgatacta

SEQ ID NO: 155659 - DNA, 25 bp, Saccharomyces pastorianus
gatatcaaccactgacaaatacttc

SEQ ID NO: 155660 - DNA, 25 bp, Saccharomyces pastorianus
ggtctgaatggtctcaatatatcat

SEQ ID NO: 155661 - DNA, 25 bp, Saccharomyces pastorianus
gatggctagtacatccaatgatgaa

SEQ ID NO: 155662 - DNA, 25 bp, Saccharomyces pastorianus
gaatggtctgaatggtctcaatata

SEQ ID NO: 155663 - DNA, 25 bp, Saccharomyces pastorianus
atgatactatgaattcaatcttgaa

SEQ ID NO: 155664 - DNA, 25 bp, Saccharomyces pastorianus
gaatggtctcaatatatcattggag

SEQ ID NO: 155665 - DNA, 25 bp, Saccharomyces pastorianus
atatcattggagagctcgatagctg

SEQ ID NO: 155666 - DNA, 25 bp, Saccharomyces pastorianus
tctggtggctttcctttgtttcaaa

SEQ ID NO: 155667 - DNA, 25 bp, Saccharomyces pastorianus
tattggatattctcccgccttgaga

SEQ ID NO: 155668 - DNA, 25 bp, Saccharomyces pastorianus
accattactgggatttggcatgcga

SEQ ID NO: 155669 - DNA, 25 bp, Saccharomyces pastorianus
aagagcacatttggaccatgtccga

SEQ ID NO: 155670 - DNA, 25 bp, Saccharomyces pastorianus
gaacggaatacgtcggcaccaaatt

SEQ ID NO: 155671 - DNA, 25 bp, Saccharomyces pastorianus
aaatgaatccattgccgcttataat

SEQ ID NO: 155672 - DNA, 25 bp, Saccharomyces pastorianus
aagacatttgttactaccgcactct

SEQ ID NO: 155673 - DNA, 25 bp, Saccharomyces pastorianus
aacgccaagccatgctttcgattta

SEQ ID NO: 155674 - DNA, 25 bp, Saccharomyces pastorianus
ggtggtaacgtttatatcatcctga

SEQ ID NO: 155675 - DNA, 25 bp, Saccharomyces pastorianus
gttccctgagggtacaaatctaagc

SEQ ID NO: 155676 - DNA, 25 bp, Saccharomyces pastorianus
ttactaccgcactctaaaggcttga

SEQ ID NO: 155677 - DNA, 25 bp, Saccharomyces pastorianus
aacccagagttaatcagacaatctc

SEQ ID NO: 155678 - DNA, 25 bp, Saccharomyces pastorianus
aattatttccgcctaccaagattgg

SEQ ID NO: 155679 - DNA, 25 bp, Saccharomyces pastorianus
tttccgcctaccaagattgggtcaa

SEQ ID NO: 155680 - DNA, 25 bp, Saccharomyces pastorianus
tatttccgcctaccaagattgggtc

SEQ ID NO: 155681 - DNA, 25 bp, Saccharomyces pastorianus
gatgaaattatttccgcctaccaag

SEQ ID NO: 155682 - DNA, 25 bp, Saccharomyces pastorianus
attatttccgcctaccaagattggg

SEQ ID NO: 155683 - DNA, 25 bp, Saccharomyces pastorianus
aatcagacaatctcagaaagcaaga

SEQ ID NO: 155684 - DNA, 25 bp, Saccharomyces pastorianus
gttaatcagacaatctcagaaagca

SEQ ID NO: 155685 - DNA, 25 bp, Saccharomyces pastorianus
gccagtgttgaaatcgtcgatgaaa

SEQ ID NO: 155686 - DNA, 25 bp, Saccharomyces pastorianus
gaaagcaagaaatgccagtgttgaa

SEQ ID NO: 155687 - DNA, 25 bp, Saccharomyces pastorianus
tccgcctaccaagattgggtcaaaa

SEQ ID NO: 155688 - DNA, 25 bp, Saccharomyces pastorianus
gaatttcagtccatgctagtaaaca

SEQ ID NO: 155689 - DNA, 25 bp, Saccharomyces pastorianus
gaaagttcagcctacaattatcgat

SEQ ID NO: 155690 - DNA, 25 bp, Saccharomyces pastorianus
gcaatttgaggacgataccagcttt

SEQ ID NO: 155691 - DNA, 25 bp, Saccharomyces pastorianus
gagttggactaggtgttggccctat

SEQ ID NO: 155692 - DNA, 25 bp, Saccharomyces pastorianus
taacgagtgcctttgacctatacag

SEQ ID NO: 155693 - DNA, 25 bp, Saccharomyces pastorianus
ggagcaaactcctgcagaatttcag

SEQ ID NO: 155694 - DNA, 25 bp, Saccharomyces pastorianus
tttgccaacagagaatgcacacgct

SEQ ID NO: 155695 - DNA, 25 bp, Saccharomyces pastorianus
gataccagctttgtcagcaacgaga

SEQ ID NO: 155696 - DNA, 25 bp, Saccharomyces pastorianus
agggaaaaatctatcactgagctta

SEQ ID NO: 155697 - DNA, 25 bp, Saccharomyces pastorianus
acaatggctctactagtgggtctaa

SEQ ID NO: 155698 - DNA, 25 bp, Saccharomyces pastorianus
tgcacacgctgacaataaccacgat

SEQ ID NO: 155699 - DNA, 25 bp, Saccharomyces pastorianus
gtcgtttgaagcaaatctgaggcaa

SEQ ID NO: 155700 - DNA, 25 bp, Saccharomyces pastorianus
tgagggacaggctaaacgatttttt

SEQ ID NO: 155701 - DNA, 25 bp, Saccharomyces pastorianus
catgaggagtcgtttgaagcaaatc

SEQ ID NO: 155702 - DNA, 25 bp, Saccharomyces pastorianus
cataaagtgttggacgctatcgatt

SEQ ID NO: 155703 - DNA, 25 bp, Saccharomyces pastorianus
actagacatgaagagacaagcggaa

SEQ ID NO: 155704 - DNA, 25 bp, Saccharomyces pastorianus
tcagacaaatttcaagtaggtaacc

SEQ ID NO: 155705 - DNA, 25 bp, Saccharomyces pastorianus
gggatgccgagctaataaatagtat

SEQ ID NO: 155706 - DNA, 25 bp, Saccharomyces pastorianus
tggacgctatcgatttatttgtaac

SEQ ID NO: 155707 - DNA, 25 bp, Saccharomyces pastorianus
taaccctcgaacttttcataaagtg

SEQ ID NO: 155708 - DNA, 25 bp, Saccharomyces pastorianus
acctgacttgtacttttcagacaaa

SEQ ID NO: 155709 - DNA, 25 bp, Saccharomyces pastorianus
atagtatacctgacttgtacttttc

SEQ ID NO: 155710 - DNA, 25 bp, Saccharomyces pastorianus
gaaaaactggctcaattaccccact

SEQ ID NO: 155711 - DNA, 25 bp, Saccharomyces pastorianus
attgttgttcctgagggatcgcctt

SEQ ID NO: 155712 - DNA, 25 bp, Saccharomyces pastorianus
gattctaggacactttctgttgcaa

SEQ ID NO: 155713 - DNA, 25 bp, Saccharomyces pastorianus
gatattccacaagttagcctaagca

SEQ ID NO: 155714 - DNA, 25 bp, Saccharomyces pastorianus
gctggtcgtcctaaaattgttgttc

SEQ ID NO: 155715 - DNA, 25 bp, Saccharomyces pastorianus
aattaccccactgttgctgatattc

SEQ ID NO: 155716 - DNA, 25 bp, Saccharomyces pastorianus
gatacttcccttaatgacgacttgt

SEQ ID NO: 155717 - DNA, 25 bp, Saccharomyces pastorianus
tgcaaaaagcggctggtcgtcctaa

SEQ ID NO: 155718 - DNA, 25 bp, Saccharomyces pastorianus
tagtgggtccatggacttttcgcca

SEQ ID NO: 155719 - DNA, 25 bp, Saccharomyces pastorianus
aagtctggattcaataacgccgcga

SEQ ID NO: 155720 - DNA, 25 bp, Saccharomyces pastorianus
gggatcgccttctcgtaatagtgat

SEQ ID NO: 155721 - DNA, 25 bp, Saccharomyces pastorianus
cacaggcagatgataatggacactc

SEQ ID NO: 155722 - DNA, 25 bp, Saccharomyces pastorianus
aaaatgcagatcaccccactatttc

SEQ ID NO: 155723 - DNA, 25 bp, Saccharomyces pastorianus
agtactccagaaatgggtgctccga

SEQ ID NO: 155724 - DNA, 25 bp, Saccharomyces pastorianus
atgacctcgccgtcaaattcgaata

SEQ ID NO: 155725 - DNA, 25 bp, Saccharomyces pastorianus
tgaaaatgcaggtcatcccactact

SEQ ID NO: 155726 - DNA, 25 bp, Saccharomyces pastorianus
ccctaatcctgctgtaacttcaact

SEQ ID NO: 155727 - DNA, 25 bp, Saccharomyces pastorianus
tacagtaaaacggaagtactccaga

SEQ ID NO: 155728 - DNA, 25 bp, Saccharomyces pastorianus
aatgggtgctccgagtgtaagagac

SEQ ID NO: 155729 - DNA, 25 bp, Saccharomyces pastorianus
gtcatcccactacttcagagcaaga

SEQ ID NO: 155730 - DNA, 25 bp, Saccharomyces pastorianus
accccactatttcacaggcagatga

SEQ ID NO: 155731 - DNA, 25 bp, Saccharomyces pastorianus
gtaacttcaactgttacggataaga

SEQ ID NO: 155732 - DNA, 25 bp, Saccharomyces pastorianus
ttcgtccgaaaagtccaaagaccag

SEQ ID NO: 155733 - DNA, 25 bp, Saccharomyces pastorianus
aaattcttagacagtgactcgccgc

SEQ ID NO: 155734 - DNA, 25 bp, Saccharomyces pastorianus
agaagttgccatcagctggtatgat

SEQ ID NO: 155735 - DNA, 25 bp, Saccharomyces pastorianus
tgctgtattgattgcaggtttgaat

SEQ ID NO: 155736 - DNA, 25 bp, Saccharomyces pastorianus
gactcgccgccacaaaattcaagga

SEQ ID NO: 155737 - DNA, 25 bp, Saccharomyces pastorianus
gctggtatgatatttctcatcagac

SEQ ID NO: 155738 - DNA, 25 bp, Saccharomyces pastorianus
gacaatcagtcacaccctagaatta

SEQ ID NO: 155739 - DNA, 25 bp, Saccharomyces pastorianus
agactatctgcttttatcatcccaa

SEQ ID NO: 155740 - DNA, 25 bp, Saccharomyces pastorianus
gccaaaagagtcaagtaccattcaa

SEQ ID NO: 155741 - DNA, 25 bp, Saccharomyces pastorianus
ggaattataccctcagacaatcagt

SEQ ID NO: 155742 - DNA, 25 bp, Saccharomyces pastorianus
ttatcatcccaaacttcgtccgaaa

SEQ ID NO: 155743 - DNA, 25 bp, Saccharomyces pastorianus
gttgattaacgaccctgatatgaat

SEQ ID NO: 155744 - DNA, 25 bp, Saccharomyces pastorianus
tagttatcgtgatcgggccatgttc

SEQ ID NO: 155745 - DNA, 25 bp, Saccharomyces pastorianus
actgatggtggtttgcaagtcgcca

SEQ ID NO: 155746 - DNA, 25 bp, Saccharomyces pastorianus
gagaattagcatccggtctatcttt

SEQ ID NO: 155747 - DNA, 25 bp, Saccharomyces pastorianus
gatgttggataccatttctccgcag

SEQ ID NO: 155748 - DNA, 25 bp, Saccharomyces pastorianus
gatctgcttcaacatgaatttccaa

SEQ ID NO: 155749 - DNA, 25 bp, Saccharomyces pastorianus
ccatttctccgcagtttttgagtga

SEQ ID NO: 155750 - DNA, 25 bp, Saccharomyces pastorianus
gaatttccaatttcagccaaaggtg

SEQ ID NO: 155751 - DNA, 25 bp, Saccharomyces pastorianus
aaagccgcttacgattacgctgaca

SEQ ID NO: 155752 - DNA, 25 bp, Saccharomyces pastorianus
tacgctgacagattggctaaaattt

SEQ ID NO: 155753 - DNA, 25 bp, Saccharomyces pastorianus
attacccattgctggtgagatgttg

SEQ ID NO: 155754 - DNA, 25 bp, Saccharomyces pastorianus
aaatggccctgtatctatgtcttac

SEQ ID NO: 155755 - DNA, 25 bp, Saccharomyces pastorianus
agatgtaggctcaacttttgctctc

SEQ ID NO: 155756 - DNA, 25 bp, Saccharomyces pastorianus
gacgaattcgtatcaccattaccaa

SEQ ID NO: 155757 - DNA, 25 bp, Saccharomyces pastorianus
acagtctgcatacttcttcgggatg

SEQ ID NO: 155758 - DNA, 25 bp, Saccharomyces pastorianus
gcagacgcttatatgctcggcttag

SEQ ID NO: 155759 - DNA, 25 bp, Saccharomyces pastorianus
tgaagcctgttttaacttgtctaaa

SEQ ID NO: 155760 - DNA, 25 bp, Saccharomyces pastorianus
gaaggtaaggctttcgcacaagaat

SEQ ID NO: 155761 - DNA, 25 bp, Saccharomyces pastorianus
tttaataacgatccacagtctgcat

SEQ ID NO: 155762 - DNA, 25 bp, Saccharomyces pastorianus
catgcccgagatggacattggtttt

SEQ ID NO: 155763 - DNA, 25 bp, Saccharomyces pastorianus
ttttgctctccctagaatcgtgaca

SEQ ID NO: 155764 - DNA, 25 bp, Saccharomyces pastorianus
ggcttagcgtctcattacgtcagta

SEQ ID NO: 155765 - DNA, 25 bp, Saccharomyces pastorianus
attccatcaaattttttactgatga

SEQ ID NO: 155766 - DNA, 25 bp, Saccharomyces pastorianus
gtggcaatattcaattttaacaaag

SEQ ID NO: 155767 - DNA, 25 bp, Saccharomyces pastorianus
ccaattccatcaaattttttactga

SEQ ID NO: 155768 - DNA, 25 bp, Saccharomyces pastorianus
gccaattccatcaaattttttactg

SEQ ID NO: 155769 - DNA, 25 bp, Saccharomyces pastorianus
ttattcattttaaattcatccaacc

SEQ ID NO: 155770 - DNA, 25 bp, Saccharomyces pastorianus
aaagaatttgccaattccatcaaat

SEQ ID NO: 155771 - DNA, 25 bp, Saccharomyces pastorianus
tactgtggcaatattcaattttaac

SEQ ID NO: 155772 - DNA, 25 bp, Saccharomyces pastorianus
ttgccaattccatcaaattttttac

SEQ ID NO: 155773 - DNA, 25 bp, Saccharomyces pastorianus
taacaaagaatttgccaattccatc

SEQ ID NO: 155774 - DNA, 25 bp, Saccharomyces pastorianus
ctactgtggcaatattcaattttaa

SEQ ID NO: 155775 - DNA, 25 bp, Saccharomyces pastorianus
gaatttgccaattccatcaaatttt

SEQ ID NO: 155776 - DNA, 25 bp, Saccharomyces pastorianus
gaacgccgaaatgtcagaatccatg

SEQ ID NO: 155777 - DNA, 25 bp, Saccharomyces pastorianus
taccgttcaagatacagctagagtt

SEQ ID NO: 155778 - DNA, 25 bp, Saccharomyces pastorianus
agtcatattaaagtcatccaaccga

SEQ ID NO: 155779 - DNA, 25 bp, Saccharomyces pastorianus
aaatgtgcccaattgtcgtctaaat

SEQ ID NO: 155780 - DNA, 25 bp, Saccharomyces pastorianus
aataggcccaaaaagctcaatgctt

SEQ ID NO: 155781 - DNA, 25 bp, Saccharomyces pastorianus
atgactactcaaccccagctaaatg

SEQ ID NO: 155782 - DNA, 25 bp, Saccharomyces pastorianus
ctaccacacgtacattcatgactac

SEQ ID NO: 155783 - DNA, 25 bp, Saccharomyces pastorianus
gagttatcacgctaaataggcccaa

SEQ ID NO: 155784 - DNA, 25 bp, Saccharomyces pastorianus
aagctcaatgctttgaacgccgaaa

SEQ ID NO: 155785 - DNA, 25 bp, Saccharomyces pastorianus
cacctgtgctatttaccgttcaaga

SEQ ID NO: 155786 - DNA, 25 bp, Saccharomyces pastorianus
taaatgtcaccgacgcaccacctgt

SEQ ID NO: 155787 - DNA, 25 bp, Saccharomyces pastorianus
ttgcttctattttgaatgctgtcga

SEQ ID NO: 155788 - DNA, 25 bp, Saccharomyces pastorianus
gctaggtctagaaaaggctgctcca

SEQ ID NO: 155789 - DNA, 25 bp, Saccharomyces pastorianus
acagggtcctgtatggcttcattta

SEQ ID NO: 155790 - DNA, 25 bp, Saccharomyces pastorianus
gaaaatgttgctcaggctttgtatt

SEQ ID NO: 155791 - DNA, 25 bp, Saccharomyces pastorianus
aaatcagtatttcccttatcaccag

SEQ ID NO: 155792 - DNA, 25 bp, Saccharomyces pastorianus
aacattcagaagtttgtcctacaat

SEQ ID NO: 155793 - DNA, 25 bp, Saccharomyces pastorianus
tgtggattattgtcgtcacctcttg

SEQ ID NO: 155794 - DNA, 25 bp, Saccharomyces pastorianus
tcacctcttgttttcctgctatggg

SEQ ID NO: 155795 - DNA, 25 bp, Saccharomyces pastorianus
ttatagatcacgttctgcggctttc

SEQ ID NO: 155796 - DNA, 25 bp, Saccharomyces pastorianus
gcgtctgatattgttctaagcgatg

SEQ ID NO: 155797 - DNA, 25 bp, Saccharomyces pastorianus
gtgcgctttgattctggcttgggaa

SEQ ID NO: 155798 - DNA, 25 bp, Saccharomyces pastorianus
agtgaggaggaagtggacgatttgc

SEQ ID NO: 155799 - DNA, 25 bp, Saccharomyces pastorianus
tggacgatttgcccgtcttaccttt

SEQ ID NO: 155800 - DNA, 25 bp, Saccharomyces pastorianus
ggaagtggacgatttgcccgtctta

SEQ ID NO: 155801 - DNA, 25 bp, Saccharomyces pastorianus
ctaagtgaggaggaagtggacgatt

SEQ ID NO: 155802 - DNA, 25 bp, Saccharomyces pastorianus
gtggacgatttgcccgtcttacctt

SEQ ID NO: 155803 - DNA, 25 bp, Saccharomyces pastorianus
aggaagtggacgatttgcccgtctt

SEQ ID NO: 155804 - DNA, 25 bp, Saccharomyces pastorianus
gaagtggacgatttgcccgtcttac

SEQ ID NO: 155805 - DNA, 25 bp, Saccharomyces pastorianus
aagtgaggaggaagtggacgatttg

SEQ ID NO: 155806 - DNA, 25 bp, Saccharomyces pastorianus
agtggacgatttgcccgtcttacct

SEQ ID NO: 155807 - DNA, 25 bp, Saccharomyces pastorianus
taagtgaggaggaagtggacgattt

SEQ ID NO: 155808 - DNA, 25 bp, Saccharomyces pastorianus
gaggaagtggacgatttgcccgtct

SEQ ID NO: 155809 - DNA, 25 bp, Saccharomyces pastorianus
gaacatattgctgaattcccattcg

SEQ ID NO: 155810 - DNA, 25 bp, Saccharomyces pastorianus
taagagtcttgggttttgcctccaa

SEQ ID NO: 155811 - DNA, 25 bp, Saccharomyces pastorianus
attacttcaaacagggccaccgcag

SEQ ID NO: 155812 - DNA, 25 bp, Saccharomyces pastorianus
gaatgtcatctgtctactacaacaa

SEQ ID NO: 155813 - DNA, 25 bp, Saccharomyces pastorianus
ctgccggtgcagtcaagaagtttca

SEQ ID NO: 155814 - DNA, 25 bp, Saccharomyces pastorianus
gaagcctggcagtgcacaattcgaa

SEQ ID NO: 155815 - DNA, 25 bp, Saccharomyces pastorianus
gttttgcctccaaatctttcactaa

SEQ ID NO: 155816 - DNA, 25 bp, Saccharomyces pastorianus
aatcctctctttcacaacacaatga

SEQ ID NO: 155817 - DNA, 25 bp, Saccharomyces pastorianus
ttggtatttacgatccacccagaaa

SEQ ID NO: 155818 - DNA, 25 bp, Saccharomyces pastorianus
gaattcccattcgactcaactgtga

SEQ ID NO: 155819 - DNA, 25 bp, Saccharomyces pastorianus
catcatcagttgttgcagttcttgg

SEQ ID NO: 155820 - DNA, 25 bp, Saccharomyces pastorianus
aggacactttcctttagcaaagctt

SEQ ID NO: 155821 - DNA, 25 bp, Saccharomyces pastorianus
tttaccattttcagattagcggagt

SEQ ID NO: 155822 - DNA, 25 bp, Saccharomyces pastorianus
acacatccctgaatgtccaacattt

SEQ ID NO: 155823 - DNA, 25 bp, Saccharomyces pastorianus
gaaactttctcaatatgaatccaga

SEQ ID NO: 155824 - DNA, 25 bp, Saccharomyces pastorianus
gtccaacatttcaggtggattcgaa

SEQ ID NO: 155825 - DNA, 25 bp, Saccharomyces pastorianus
tgattccactactctgctcgaaagt

SEQ ID NO: 155826 - DNA, 25 bp, Saccharomyces pastorianus
tctaaaggtcctcattttttctatt

SEQ ID NO: 155827 - DNA, 25 bp, Saccharomyces pastorianus
gtatacaaactctctgaccagaagt

SEQ ID NO: 155828 - DNA, 25 bp, Saccharomyces pastorianus
gattccatatctgctaccaagaatg

SEQ ID NO: 155829 - DNA, 25 bp, Saccharomyces pastorianus
gttggagtactgagcgaaactttct

SEQ ID NO: 155830 - DNA, 25 bp, Saccharomyces pastorianus
gaagtatcggttacacacatccctg

SEQ ID NO: 155831 - DNA, 25 bp, Saccharomyces pastorianus
gaagagccgaaagccaacgtttaga

SEQ ID NO: 155832 - DNA, 25 bp, Saccharomyces pastorianus
gttacgttatggtgtccttcgtcac

SEQ ID NO: 155833 - DNA, 25 bp, Saccharomyces pastorianus
aacagcttcactaactccggagatt

SEQ ID NO: 155834 - DNA, 25 bp, Saccharomyces pastorianus
cttcgtcacgtattttatggtccaa

SEQ ID NO: 155835 - DNA, 25 bp, Saccharomyces pastorianus
gatgggtgtcacttatccgacgctt

SEQ ID NO: 155836 - DNA, 25 bp, Saccharomyces pastorianus
gatcctatagtaacgtcttccaaaa

SEQ ID NO: 155837 - DNA, 25 bp, Saccharomyces pastorianus
ggtctttagtcatcggttacgttat

SEQ ID NO: 155838 - DNA, 25 bp, Saccharomyces pastorianus
gaacaggtcttctagttgccaacgc

SEQ ID NO: 155839 - DNA, 25 bp, Saccharomyces pastorianus
caaaggtttgagtcttgcaggcccg

SEQ ID NO: 155840 - DNA, 25 bp, Saccharomyces pastorianus
gttagttcacagattcgtcgactca

SEQ ID NO: 155841 - DNA, 25 bp, Saccharomyces pastorianus
gacgcttccaggtaacttcaatgca

SEQ ID NO: 155842 - DNA, 25 bp, Saccharomyces pastorianus
attgaacactgcttctatcccagaa

SEQ ID NO: 155843 - DNA, 25 bp, Saccharomyces pastorianus
ttgttatctgtcctccagctaccta

SEQ ID NO: 155844 - DNA, 25 bp, Saccharomyces pastorianus
gaagttgttatctgtcctccagcta

SEQ ID NO: 155845 - DNA, 25 bp, Saccharomyces pastorianus
tgtctctttggttaagaagccacaa

SEQ ID NO: 155846 - DNA, 25 bp, Saccharomyces pastorianus
ttatctgtcctccagctacctactt

SEQ ID NO: 155847 - DNA, 25 bp, Saccharomyces pastorianus
aagattgaacactgcttctatccca

SEQ ID NO: 155848 - DNA, 25 bp, Saccharomyces pastorianus
gattgaacactgcttctatcccaga

SEQ ID NO: 155849 - DNA, 25 bp, Saccharomyces pastorianus
aagttgttatctgtcctccagctac

SEQ ID NO: 155850 - DNA, 25 bp, Saccharomyces pastorianus
actctgtctctttggttaagaagcc

SEQ ID NO: 155851 - DNA, 25 bp, Saccharomyces pastorianus
tgaacactgcttctatcccagaaaa

SEQ ID NO: 155852 - DNA, 25 bp, Saccharomyces pastorianus
gactactctgtctctttggttaaga

SEQ ID NO: 155853 - DNA, 25 bp, Saccharomyces pastorianus
tgagatttccggaagactttccctt

SEQ ID NO: 155854 - DNA, 25 bp, Saccharomyces pastorianus
gaaagctattccctcatttcatata

SEQ ID NO: 155855 - DNA, 25 bp, Saccharomyces pastorianus
ttagaggaccccaatatcaactcgc

SEQ ID NO: 155856 - DNA, 25 bp, Saccharomyces pastorianus
atcaactcgccagcaaatgtcgatg

SEQ ID NO: 155857 - DNA, 25 bp, Saccharomyces pastorianus
atgtcgatgccgctgttgattacag

SEQ ID NO: 155858 - DNA, 25 bp, Saccharomyces pastorianus
atgaccgacgaacctgatgctgaaa

SEQ ID NO: 155859 - DNA, 25 bp, Saccharomyces pastorianus
aaggtttcataatgcccacttctga

SEQ ID NO: 155860 - DNA, 25 bp, Saccharomyces pastorianus
gaatcggcgtacatatctcaaagta

SEQ ID NO: 155861 - DNA, 25 bp, Saccharomyces pastorianus
agtttcgatttacgccggctatcta

SEQ ID NO: 155862 - DNA, 25 bp, Saccharomyces pastorianus
gtgtgttgatctctatagtatctct

SEQ ID NO: 155863 - DNA, 25 bp, Saccharomyces pastorianus
ttttctccaccacagtttcgattta

SEQ ID NO: 155864 - DNA, 25 bp, Saccharomyces pastorianus
atcgaagttgacgatctggatataa

SEQ ID NO: 155865 - DNA, 25 bp, Saccharomyces pastorianus
gaaaactttaactctgaaatcgaag

SEQ ID NO: 155866 - DNA, 25 bp, Saccharomyces pastorianus
ctctgaaatcgaagttgacgatctg

SEQ ID NO: 155867 - DNA, 25 bp, Saccharomyces pastorianus
cgaagttgacgatctggatataaag

SEQ ID NO: 155868 - DNA, 25 bp, Saccharomyces pastorianus
gttgacgatctggatataaaggata

SEQ ID NO: 155869 - DNA, 25 bp, Saccharomyces pastorianus
actttaactctgaaatcgaagttga

SEQ ID NO: 155870 - DNA, 25 bp, Saccharomyces pastorianus
aactctgaaatcgaagttgacgatc

SEQ ID NO: 155871 - DNA, 25 bp, Saccharomyces pastorianus
gaaatcgaagttgacgatctggata

SEQ ID NO: 155872 - DNA, 25 bp, Saccharomyces pastorianus
taaagtttccctggattaccgtgcg

SEQ ID NO: 155873 - DNA, 25 bp, Saccharomyces pastorianus
ttaactctgaaatcgaagttgacga

SEQ ID NO: 155874 - DNA, 25 bp, Saccharomyces pastorianus
gataaagtttccctggattaccgtg

SEQ ID NO: 155875 - DNA, 25 bp, Saccharomyces pastorianus
gaaagttttcatattggagtacggt

SEQ ID NO: 155876 - DNA, 25 bp, Saccharomyces pastorianus
tgataatatctctcgtggtagcatg

SEQ ID NO: 155877 - DNA, 25 bp, Saccharomyces pastorianus
ggtagcatgtatgagaaagttttca

SEQ ID NO: 155878 - DNA, 25 bp, Saccharomyces pastorianus
ctctcgtggtagcatgtatgagaaa

SEQ ID NO: 155879 - DNA, 25 bp, Saccharomyces pastorianus
cgaatggtgaattgataatatctct

SEQ ID NO: 155880 - DNA, 25 bp, Saccharomyces pastorianus
atctctcgtggtagcatgtatgaga

SEQ ID NO: 155881 - DNA, 25 bp, Saccharomyces pastorianus
aatatctctcgtggtagcatgtatg

SEQ ID NO: 155882 - DNA, 25 bp, Saccharomyces pastorianus
atatctctcgtggtagcatgtatga

SEQ ID NO: 155883 - DNA, 25 bp, Saccharomyces pastorianus
attgataatatctctcgtggtagca

SEQ ID NO: 155884 - DNA, 25 bp, Saccharomyces pastorianus
taatatctctcgtggtagcatgtat

SEQ ID NO: 155885 - DNA, 25 bp, Saccharomyces pastorianus
gataatatctctcgtggtagcatgt

SEQ ID NO: 155886 - DNA, 25 bp, Saccharomyces pastorianus
aaatacatattatctttgacaccag

SEQ ID NO: 155887 - DNA, 25 bp, Saccharomyces pastorianus
acactagtgactccgttacaatttt

SEQ ID NO: 155888 - DNA, 25 bp, Saccharomyces pastorianus
ttcgaccgtacagccaaatttatat

SEQ ID NO: 155889 - DNA, 25 bp, Saccharomyces pastorianus
cattcctgagaacccttagattgaa

SEQ ID NO: 155890 - DNA, 25 bp, Saccharomyces pastorianus
gaacctttgagcactgatcctctaa

SEQ ID NO: 155891 - DNA, 25 bp, Saccharomyces pastorianus
gagaaatcaatctcccattcctgag

SEQ ID NO: 155892 - DNA, 25 bp, Saccharomyces pastorianus
agcactgatcctctaatggtaaagt

SEQ ID NO: 155893 - DNA, 25 bp, Saccharomyces pastorianus
tttgacaccagaacctttgagcact

SEQ ID NO: 155894 - DNA, 25 bp, Saccharomyces pastorianus
atatagaggatcttacccacgagaa

SEQ ID NO: 155895 - DNA, 25 bp, Saccharomyces pastorianus
ggcagacaagaccaaaccccagatt

SEQ ID NO: 155896 - DNA, 25 bp, Saccharomyces pastorianus
tgactccgttacaattttcgaccgt

SEQ ID NO: 155897 - DNA, 25 bp, Saccharomyces pastorianus
attgcctcgtcaattgagtgggaac

SEQ ID NO: 155898 - DNA, 25 bp, Saccharomyces pastorianus
ataccaaccttttacggtgctgtca

SEQ ID NO: 155899 - DNA, 25 bp, Saccharomyces pastorianus
ggacaatacgcctcactactaaaat

SEQ ID NO: 155900 - DNA, 25 bp, Saccharomyces pastorianus
acaggactgccaagagttttgccaa

SEQ ID NO: 155901 - DNA, 25 bp, Saccharomyces pastorianus
gggaacgattcttgactactgattt

SEQ ID NO: 155902 - DNA, 25 bp, Saccharomyces pastorianus
ttaagactgcatcccaacaggactg

SEQ ID NO: 155903 - DNA, 25 bp, Saccharomyces pastorianus
tgctgtcaatccctattcctaaaaa

SEQ ID NO: 155904 - DNA, 25 bp, Saccharomyces pastorianus
gagttttgccaattccttctagatg

SEQ ID NO: 155905 - DNA, 25 bp, Saccharomyces pastorianus
atgcggttcaaacccacctttgaag

SEQ ID NO: 155906 - DNA, 25 bp, Saccharomyces pastorianus
aaaactgtctttgcgaattgcctcg

SEQ ID NO: 155907 - DNA, 25 bp, Saccharomyces pastorianus
aagtctgtagtcatacctcgacaat

SEQ ID NO: 155908 - DNA, 25 bp, Saccharomyces pastorianus
tagccatttgggtactcatttgaac

SEQ ID NO: 155909 - DNA, 25 bp, Saccharomyces pastorianus
ggatttcacatgtctcctattgtgt

SEQ ID NO: 155910 - DNA, 25 bp, Saccharomyces pastorianus
gtatacttatacgtcttccaaccac

SEQ ID NO: 155911 - DNA, 25 bp, Saccharomyces pastorianus
tatttttcattacccctgcaagcgc

SEQ ID NO: 155912 - DNA, 25 bp, Saccharomyces pastorianus
ccttgcccctgtttacatttgttat

SEQ ID NO: 155913 - DNA, 25 bp, Saccharomyces pastorianus
ttactggcttggttctcctatgtca

SEQ ID NO: 155914 - DNA, 25 bp, Saccharomyces pastorianus
catggtttactcatctgtacggtat

SEQ ID NO: 155915 - DNA, 25 bp, Saccharomyces pastorianus
tttggtttcaaggtccaccagctta

SEQ ID NO: 155916 - DNA, 25 bp, Saccharomyces pastorianus
aatgctttagttttgccctaggatt

SEQ ID NO: 155917 - DNA, 25 bp, Saccharomyces pastorianus
gatcatttctttgcttaccagtcgg

SEQ ID NO: 155918 - DNA, 25 bp, Saccharomyces pastorianus
gacaattttcataccgtttgccttg

SEQ ID NO: 155919 - DNA, 25 bp, Saccharomyces pastorianus
ttctgcctggctctaatgggtacaa

SEQ ID NO: 155920 - DNA, 25 bp, Saccharomyces pastorianus
agatgagtcctgtactatagtggtc

SEQ ID NO: 155921 - DNA, 25 bp, Saccharomyces pastorianus
tactatagtggtcttctgcctggct

SEQ ID NO: 155922 - DNA, 25 bp, Saccharomyces pastorianus
aaatgtgccgctaccagatgagtcc

SEQ ID NO: 155923 - DNA, 25 bp, Saccharomyces pastorianus
acgccataaagtccacagttttgat

SEQ ID NO: 155924 - DNA, 25 bp, Saccharomyces pastorianus
aatttttcaagccacctgcggagat

SEQ ID NO: 155925 - DNA, 25 bp, Saccharomyces pastorianus
aagccacctgcggagattattgaag

SEQ ID NO: 155926 - DNA, 25 bp, Saccharomyces pastorianus
aatgctccaggtgggttaccaggtc

SEQ ID NO: 155927 - DNA, 25 bp, Saccharomyces pastorianus
gggtacaaatttcctcgatttcata

SEQ ID NO: 155928 - DNA, 25 bp, Saccharomyces pastorianus
aagcttataggattttagcgccaag

SEQ ID NO: 155929 - DNA, 25 bp, Saccharomyces pastorianus
cgctttgaagctgatgggatttttt

SEQ ID NO: 155930 - DNA, 25 bp, Saccharomyces pastorianus
gatctcgctcgttataacgaactga

SEQ ID NO: 155931 - DNA, 25 bp, Saccharomyces pastorianus
gtgggatccggtatgcagttatttt

SEQ ID NO: 155932 - DNA, 25 bp, Saccharomyces pastorianus
tttgccgcagtaggtcttgtgtcac

SEQ ID NO: 155933 - DNA, 25 bp, Saccharomyces pastorianus
ttttcgtggaccctattggaaggcg

SEQ ID NO: 155934 - DNA, 25 bp, Saccharomyces pastorianus
ggatttgtaggatcctacgcctcaa

SEQ ID NO: 155935 - DNA, 25 bp, Saccharomyces pastorianus
aaccccatctaagtcgatgctgcta

SEQ ID NO: 155936 - DNA, 25 bp, Saccharomyces pastorianus
ggtgacgtatttagaaccccatcta

SEQ ID NO: 155937 - DNA, 25 bp, Saccharomyces pastorianus
tccctgccaactgtaatgtttgttc

SEQ ID NO: 155938 - DNA, 25 bp, Saccharomyces pastorianus
ttgtgtcacctgtttccagaggatc

SEQ ID NO: 155939 - DNA, 25 bp, Saccharomyces pastorianus
gatgctgctatccattcttgtggga

SEQ ID NO: 155940 - DNA, 25 bp, Saccharomyces pastorianus
acgcctcaatgggtgtctacaaatt

SEQ ID NO: 155941 - DNA, 25 bp, Saccharomyces pastorianus
cctggcgcatgttctacaacgggaa

SEQ ID NO: 155942 - DNA, 25 bp, Saccharomyces pastorianus
gacagcccaagaatgttaagcctaa

SEQ ID NO: 155943 - DNA, 25 bp, Saccharomyces pastorianus
aaactattacggcacaggatttgag

SEQ ID NO: 155944 - DNA, 25 bp, Saccharomyces pastorianus
aagagcttacttcagaggcctcaaa

SEQ ID NO: 155945 - DNA, 25 bp, Saccharomyces pastorianus
atcgaaagatcgtcacctggcgcat

SEQ ID NO: 155946 - DNA, 25 bp, Saccharomyces pastorianus
ggtaaagcagttcccagtacgatgg

SEQ ID NO: 155947 - DNA, 25 bp, Saccharomyces pastorianus
gtgtcattgtaaaccctgtatctat

SEQ ID NO: 155948 - DNA, 25 bp, Saccharomyces pastorianus
cagccggagtcgttaggttcagtca

SEQ ID NO: 155949 - DNA, 25 bp, Saccharomyces pastorianus
taacgaggtttacttcacttattct

SEQ ID NO: 155950 - DNA, 25 bp, Saccharomyces pastorianus
acaacgggaaaacctctgatactag

SEQ ID NO: 155951 - DNA, 25 bp, Saccharomyces pastorianus
gttatattggatgctcgacagccca

SEQ ID NO: 155952 - DNA, 25 bp, Saccharomyces pastorianus
gacgatgcgtttcatgattatgtat

SEQ ID NO: 155953 - DNA, 25 bp, Saccharomyces pastorianus
gacctttcgacgatgcgtttcatga

SEQ ID NO: 155954 - DNA, 25 bp, Saccharomyces pastorianus
agtcttctggaagcgcttaagttgt

SEQ ID NO: 155955 - DNA, 25 bp, Saccharomyces pastorianus
aacgtttctcagtgagtttctccgg

SEQ ID NO: 155956 - DNA, 25 bp, Saccharomyces pastorianus
gtacctcacggcttctatgggaaaa

SEQ ID NO: 155957 - DNA, 25 bp, Saccharomyces pastorianus
gagtttctccggtagttatttcact

SEQ ID NO: 155958 - DNA, 25 bp, Saccharomyces pastorianus
cgatcacgtgatccgagcttcaaat

SEQ ID NO: 155959 - DNA, 25 bp, Saccharomyces pastorianus
tatctatacagtcttctggaagcgc

SEQ ID NO: 155960 - DNA, 25 bp, Saccharomyces pastorianus
aaattccttacagctttcgatcacg

SEQ ID NO: 155961 - DNA, 25 bp, Saccharomyces pastorianus
gagcttcaaatgacctttcgacgat

SEQ ID NO: 155962 - DNA, 25 bp, Saccharomyces pastorianus
ttatttcacttgttgtacctcacgg

SEQ ID NO: 155963 - DNA, 25 bp, Saccharomyces pastorianus
gcccacaaaccggtatgctcttaaa

SEQ ID NO: 155964 - DNA, 25 bp, Saccharomyces pastorianus
aacagttcaccattgaagaccccgt

SEQ ID NO: 155965 - DNA, 25 bp, Saccharomyces pastorianus
ttctttctctgctctatctgtgtta

SEQ ID NO: 155966 - DNA, 25 bp, Saccharomyces pastorianus
atctatatcttctttctctgctcta

SEQ ID NO: 155967 - DNA, 25 bp, Saccharomyces pastorianus
cttcacaccgttgggatttggctta

SEQ ID NO: 155968 - DNA, 25 bp, Saccharomyces pastorianus
gctctatctgtgttacgcccacaaa

SEQ ID NO: 155969 - DNA, 25 bp, Saccharomyces pastorianus
gtcactatttgcaaggctctgccag

SEQ ID NO: 155970 - DNA, 25 bp, Saccharomyces pastorianus
gctctgccagcctcaatcaagaaga

SEQ ID NO: 155971 - DNA, 25 bp, Saccharomyces pastorianus
aatgttttcatctatatcttctttc

SEQ ID NO: 155972 - DNA, 25 bp, Saccharomyces pastorianus
accggtatgctcttaaacagttcac

SEQ ID NO: 155973 - DNA, 25 bp, Saccharomyces pastorianus
gccagcctcaatcaagaagaatgtt

SEQ ID NO: 155974 - DNA, 25 bp, Saccharomyces pastorianus
aagcgcatccctagtgtttccaaaa

SEQ ID NO: 155975 - DNA, 25 bp, Saccharomyces pastorianus
ggaagaagcgcatccctagtgtttc

SEQ ID NO: 155976 - DNA, 25 bp, Saccharomyces pastorianus
tatcggtggatggaagaagcgcatc

SEQ ID NO: 155977 - DNA, 25 bp, Saccharomyces pastorianus
atgcaccgcgaaggtatcggtggat

SEQ ID NO: 155978 - DNA, 25 bp, Saccharomyces pastorianus
agcgcatccctagtgtttccaaaag

SEQ ID NO: 155979 - DNA, 25 bp, Saccharomyces pastorianus
gaagaagcgcatccctagtgtttcc

SEQ ID NO: 155980 - DNA, 25 bp, Saccharomyces pastorianus
gcgcatccctagtgtttccaaaaga

SEQ ID NO: 155981 - DNA, 25 bp, Saccharomyces pastorianus
atggaagaagcgcatccctagtgtt

SEQ ID NO: 155982 - DNA, 25 bp, Saccharomyces pastorianus
agaagcgcatccctagtgtttccaa

SEQ ID NO: 155983 - DNA, 25 bp, Saccharomyces pastorianus
gaagcgcatccctagtgtttccaaa

SEQ ID NO: 155984 - DNA, 25 bp, Saccharomyces pastorianus
gcatccctagtgtttccaaaagaaa

SEQ ID NO: 155985 - DNA, 25 bp, Saccharomyces pastorianus
ggtacacgaatcagccccaaagttt

SEQ ID NO: 155986 - DNA, 25 bp, Saccharomyces pastorianus
aagcacgctacggaatcttcagatt

SEQ ID NO: 155987 - DNA, 25 bp, Saccharomyces pastorianus
acttgcagagagattgtccccattc

SEQ ID NO: 155988 - DNA, 25 bp, Saccharomyces pastorianus
tccttgggtggttatgtcttccaca

SEQ ID NO: 155989 - DNA, 25 bp, Saccharomyces pastorianus
tgttttaagcggagccaccctgtta

SEQ ID NO: 155990 - DNA, 25 bp, Saccharomyces pastorianus
accctgttactatatgtggcactta

SEQ ID NO: 155991 - DNA, 25 bp, Saccharomyces pastorianus
cacctatcagtggttctatcgtata

SEQ ID NO: 155992 - DNA, 25 bp, Saccharomyces pastorianus
cccattctttttctccattgtactg

SEQ ID NO: 155993 - DNA, 25 bp, Saccharomyces pastorianus
atcgtatattgtttcggtgccgtgg

SEQ ID NO: 155994 - DNA, 25 bp, Saccharomyces pastorianus
atgtttgtctctgccatttttgggc

SEQ ID NO: 155995 - DNA, 25 bp, Saccharomyces pastorianus
gggctcctctatgatattgacctta

SEQ ID NO: 155996 - DNA, 25 bp, Saccharomyces pastorianus
gaacagcggctaatcaaatctcata

SEQ ID NO: 155997 - DNA, 25 bp, Saccharomyces pastorianus
gctccttacattccaagatcttctg

SEQ ID NO: 155998 - DNA, 25 bp, Saccharomyces pastorianus
aagagatttgcctcctattgaagga

SEQ ID NO: 155999 - DNA, 25 bp, Saccharomyces pastorianus
atgcgactcgctatcaaaaacccgt

SEQ ID NO: 156000 - DNA, 25 bp, Saccharomyces pastorianus
tggagaatccgcctataagtttgag

SEQ ID NO: 156001 - DNA, 25 bp, Saccharomyces pastorianus
gtgccgttattacaggcttttaaat

SEQ ID NO: 156002 - DNA, 25 bp, Saccharomyces pastorianus
aaaaacccgtgaacagccagcaaat

SEQ ID NO: 156003 - DNA, 25 bp, Saccharomyces pastorianus
tttccagcttcttctgcattttcaa

SEQ ID NO: 156004 - DNA, 25 bp, Saccharomyces pastorianus
aacctcgccctactttgaagacgat

SEQ ID NO: 156005 - DNA, 25 bp, Saccharomyces pastorianus
gggaggagcatccatcgatctagat

SEQ ID NO: 156006 - DNA, 25 bp, Saccharomyces pastorianus
aaaaggcatcacttttccagcttct

SEQ ID NO: 156007 - DNA, 25 bp, Saccharomyces pastorianus
gactcctctgaaagctcagttcgag

SEQ ID NO: 156008 - DNA, 25 bp, Saccharomyces pastorianus
gagagccccaatgacgttttttgaa

SEQ ID NO: 156009 - DNA, 25 bp, Saccharomyces pastorianus
ggatctaatccaaatgccgcgcgtt

SEQ ID NO: 156010 - DNA, 25 bp, Saccharomyces pastorianus
gaatgaattcggtgactcctctgaa

SEQ ID NO: 156011 - DNA, 25 bp, Saccharomyces pastorianus
ttggcaactctgacgccataagttt

SEQ ID NO: 156012 - DNA, 25 bp, Saccharomyces pastorianus
tcgatgttcctctctgttatgggta

SEQ ID NO: 156013 - DNA, 25 bp, Saccharomyces pastorianus
gacaaactctgtgttgagagcccca

SEQ ID NO: 156014 - DNA, 25 bp, Saccharomyces pastorianus
cttgcaacccgaaaagcgtttgtgt

SEQ ID NO: 156015 - DNA, 25 bp, Saccharomyces pastorianus
agacaatcgttctctgggttttttg

SEQ ID NO: 156016 - DNA, 25 bp, Saccharomyces pastorianus
ggtattggttcagcactggcaacat

SEQ ID NO: 156017 - DNA, 25 bp, Saccharomyces pastorianus
gttacttggccatttatttcgcact

SEQ ID NO: 156018 - DNA, 25 bp, Saccharomyces pastorianus
ggtgcttgatgaagccacggccgca

SEQ ID NO: 156019 - DNA, 25 bp, Saccharomyces pastorianus
atacctcaggattctcaagtttttg

SEQ ID NO: 156020 - DNA, 25 bp, Saccharomyces pastorianus
ggaaaatcctcattaacgctagcat

SEQ ID NO: 156021 - DNA, 25 bp, Saccharomyces pastorianus
gcaagagcaatgttggttccatcaa

SEQ ID NO: 156022 - DNA, 25 bp, Saccharomyces pastorianus
gacagaactatcttgaccatcgcgc

SEQ ID NO: 156023 - DNA, 25 bp, Saccharomyces pastorianus
gagacgattcgtactgctttcaagg

SEQ ID NO: 156024 - DNA, 25 bp, Saccharomyces pastorianus
gactctccgggccagttattaagtg

SEQ ID NO: 156025 - DNA, 25 bp, Saccharomyces pastorianus
ttagatgcccaactaaccgaaggtg

SEQ ID NO: 156026 - DNA, 25 bp, Saccharomyces pastorianus
aaagtagccgagtttgactctccgg

SEQ ID NO: 156027 - DNA, 25 bp, Saccharomyces pastorianus
gttcgtgagaacattgatcccatta

SEQ ID NO: 156028 - DNA, 25 bp, Saccharomyces pastorianus
tgaccatcgcgcatagactgaacac

SEQ ID NO: 156029 - DNA, 25 bp, Saccharomyces pastorianus
atgtatcgattctgtgcgcacgcat

SEQ ID NO: 156030 - DNA, 25 bp, Saccharomyces pastorianus
gccccgtaggtatcaaagcttcttt

SEQ ID NO: 156031 - DNA, 25 bp, Saccharomyces pastorianus
tagctttcgctgtttgtttcgactg

SEQ ID NO: 156032 - DNA, 25 bp, Saccharomyces pastorianus
gttcatgaatgtttctcttgcgcga

SEQ ID NO: 156033 - DNA, 25 bp, Saccharomyces pastorianus
aacgtttccacctcacggagaaatg

SEQ ID NO: 156034 - DNA, 25 bp, Saccharomyces pastorianus
agacgcgccttacgctttataggag

SEQ ID NO: 156035 - DNA, 25 bp, Saccharomyces pastorianus
atagtacgcttgttatgctgcatca

SEQ ID NO: 156036 - DNA, 25 bp, Saccharomyces pastorianus
gtgcgcacgcatatcttcttttaaa

SEQ ID NO: 156037 - DNA, 25 bp, Saccharomyces pastorianus
ttgcgcgagcagatctactggtcag

SEQ ID NO: 156038 - DNA, 25 bp, Saccharomyces pastorianus
aaaatagcactttggagacgcgcct

SEQ ID NO: 156039 - DNA, 25 bp, Saccharomyces pastorianus
gaagacttttatcgttctccgtgag

SEQ ID NO: 156040 - DNA, 25 bp, Saccharomyces pastorianus
agacgcttgtattttctgaaatttc

SEQ ID NO: 156041 - DNA, 25 bp, Saccharomyces pastorianus
cttttaataccacagacgcttgtat

SEQ ID NO: 156042 - DNA, 25 bp, Saccharomyces pastorianus
gaacattctattttaaatccacaag

SEQ ID NO: 156043 - DNA, 25 bp, Saccharomyces pastorianus
ctgaaatttctttagaaccaggtga

SEQ ID NO: 156044 - DNA, 25 bp, Saccharomyces pastorianus
caaggtatcttataatcgaacggac

SEQ ID NO: 156045 - DNA, 25 bp, Saccharomyces pastorianus
accacagacgcttgtattttctgaa

SEQ ID NO: 156046 - DNA, 25 bp, Saccharomyces pastorianus
tcttttctcagaaagcggttctagg

SEQ ID NO: 156047 - DNA, 25 bp, Saccharomyces pastorianus
tatcttataatcgaacggacgctta

SEQ ID NO: 156048 - DNA, 25 bp, Saccharomyces pastorianus
gatatcaacacgatacctagtataa

SEQ ID NO: 156049 - DNA, 25 bp, Saccharomyces pastorianus
gaacggacgcttaatgatatcaaca

SEQ ID NO: 156050 - DNA, 25 bp, Saccharomyces pastorianus
gaaccaggtgaagtaagaacattct

SEQ ID NO: 156051 - DNA, 25 bp, Saccharomyces pastorianus
aattctgttcttgcattggaagatg

SEQ ID NO: 156052 - DNA, 25 bp, Saccharomyces pastorianus
acgacaaattctgttcttgcattgg

SEQ ID NO: 156053 - DNA, 25 bp, Saccharomyces pastorianus
atcaaacctggtccctaaaatcatt

SEQ ID NO: 156054 - DNA, 25 bp, Saccharomyces pastorianus
atatccggttatgttcaaatatcgg

SEQ ID NO: 156055 - DNA, 25 bp, Saccharomyces pastorianus
taaaatcattactaggtgccttcaa

SEQ ID NO: 156056 - DNA, 25 bp, Saccharomyces pastorianus
atcaacctgtaacgttaatatccgg

SEQ ID NO: 156057 - DNA, 25 bp, Saccharomyces pastorianus
gcaaatgtattttcatcaacctgta

SEQ ID NO: 156058 - DNA, 25 bp, Saccharomyces pastorianus
tactaggtgccttcaaaagaacagg

SEQ ID NO: 156059 - DNA, 25 bp, Saccharomyces pastorianus
acgattcagaggtaatttcagagtc

SEQ ID NO: 156060 - DNA, 25 bp, Saccharomyces pastorianus
ggactagatattgtacctggacata

SEQ ID NO: 156061 - DNA, 25 bp, Saccharomyces pastorianus
gatattgtacctggacatacgacaa

SEQ ID NO: 156062 - DNA, 25 bp, Saccharomyces pastorianus
caacaaagacttatattccagggaa

SEQ ID NO: 156063 - DNA, 25 bp, Saccharomyces pastorianus
tcagatctcgtatatcacatcaagg

SEQ ID NO: 156064 - DNA, 25 bp, Saccharomyces pastorianus
gttcattcagtggttaattatcttt

SEQ ID NO: 156065 - DNA, 25 bp, Saccharomyces pastorianus
atctctgttgagctgaaggaatcag

SEQ ID NO: 156066 - DNA, 25 bp, Saccharomyces pastorianus
agatctcgtatatcacatcaaggaa

SEQ ID NO: 156067 - DNA, 25 bp, Saccharomyces pastorianus
gaaggaatcagatctcgtatatcac

SEQ ID NO: 156068 - DNA, 25 bp, Saccharomyces pastorianus
tcattcagtggttaattatctttta

SEQ ID NO: 156069 - DNA, 25 bp, Saccharomyces pastorianus
ttccagggaaaacaaatgtatgttc

SEQ ID NO: 156070 - DNA, 25 bp, Saccharomyces pastorianus
gaatcagatctcgtatatcacatca

SEQ ID NO: 156071 - DNA, 25 bp, Saccharomyces pastorianus
atgtatgttcattcagtggttaatt

SEQ ID NO: 156072 - DNA, 25 bp, Saccharomyces pastorianus
gagatctctgttgagctgaaggaat

SEQ ID NO: 156073 - DNA, 25 bp, Saccharomyces pastorianus
atcatttggctcagtagtgccttcc

SEQ ID NO: 156074 - DNA, 25 bp, Saccharomyces pastorianus
ggtgcactctacctctcaaaagaag

SEQ ID NO: 156075 - DNA, 25 bp, Saccharomyces pastorianus
gagcttttgtacaagatccctggga

SEQ ID NO: 156076 - DNA, 25 bp, Saccharomyces pastorianus
ttacaaaatctctcacactcacctt

SEQ ID NO: 156077 - DNA, 25 bp, Saccharomyces pastorianus
aaacgatgccaagaccattcaactt

SEQ ID NO: 156078 - DNA, 25 bp, Saccharomyces pastorianus
gaagtcgcaacaaccgttacaaaat

SEQ ID NO: 156079 - DNA, 25 bp, Saccharomyces pastorianus
actgatttcctctcctgataatttg

SEQ ID NO: 156080 - DNA, 25 bp, Saccharomyces pastorianus
aaatgtcttcatggtgcactctacc

SEQ ID NO: 156081 - DNA, 25 bp, Saccharomyces pastorianus
agatccctgggacaaggctaatcaa

SEQ ID NO: 156082 - DNA, 25 bp, Saccharomyces pastorianus
tcaacttgtaggtccactgatttcc

SEQ ID NO: 156083 - DNA, 25 bp, Saccharomyces pastorianus
agtgccttccactaatttcaatttt

SEQ ID NO: 156084 - DNA, 25 bp, Saccharomyces pastorianus
gaagagcccatctctcataagggat

SEQ ID NO: 156085 - DNA, 25 bp, Saccharomyces pastorianus
agatgatcctatgaaactggccaag

SEQ ID NO: 156086 - DNA, 25 bp, Saccharomyces pastorianus
gagcgctgcagagtctaatattctt

SEQ ID NO: 156087 - DNA, 25 bp, Saccharomyces pastorianus
ggaagcaactccttcagaagctctt

SEQ ID NO: 156088 - DNA, 25 bp, Saccharomyces pastorianus
gttccgcaaactttcatcgatttta

SEQ ID NO: 156089 - DNA, 25 bp, Saccharomyces pastorianus
ggagcacttacctattatttcagac

SEQ ID NO: 156090 - DNA, 25 bp, Saccharomyces pastorianus
tgccagccgttaccaaattcttgaa

SEQ ID NO: 156091 - DNA, 25 bp, Saccharomyces pastorianus
gaaattcttactggagcacttacct

SEQ ID NO: 156092 - DNA, 25 bp, Saccharomyces pastorianus
agaagctctttcgagcgctgcagag

SEQ ID NO: 156093 - DNA, 25 bp, Saccharomyces pastorianus
tgaaagttctcttactgatttgcca

SEQ ID NO: 156094 - DNA, 25 bp, Saccharomyces pastorianus
ctagcaaaatcatcagttccgcaaa

SEQ ID NO: 156095 - DNA, 25 bp, Saccharomyces pastorianus
ttcgtcaagcaaattggaatgcccc

SEQ ID NO: 156096 - DNA, 25 bp, Saccharomyces pastorianus
ctgcgacttctcgagtgagaatgtt

SEQ ID NO: 156097 - DNA, 25 bp, Saccharomyces pastorianus
gtctctaaaacaaatgcagtcacag

SEQ ID NO: 156098 - DNA, 25 bp, Saccharomyces pastorianus
gtgctagtggcttgagatcttcgtc

SEQ ID NO: 156099 - DNA, 25 bp, Saccharomyces pastorianus
ggaatgcccccagattctcaaacaa

SEQ ID NO: 156100 - DNA, 25 bp, Saccharomyces pastorianus
gcagtcacagagattttctgcgact

SEQ ID NO: 156101 - DNA, 25 bp, Saccharomyces pastorianus
ttttctgcgacttctcgagtgagaa

SEQ ID NO: 156102 - DNA, 25 bp, Saccharomyces pastorianus
agattttctgcgacttctcgagtga

SEQ ID NO: 156103 - DNA, 25 bp, Saccharomyces pastorianus
gctagtggcttgagatcttcgtcaa

SEQ ID NO: 156104 - DNA, 25 bp, Saccharomyces pastorianus
gtgagaatgttgcttattggtgcta

SEQ ID NO: 156105 - DNA, 25 bp, Saccharomyces pastorianus
tgttgcttattggtgctagtggctt

SEQ ID NO: 156106 - DNA, 25 bp, Saccharomyces pastorianus
ccaacctgcaggtgggtactaccaa

SEQ ID NO: 156107 - DNA, 25 bp, Saccharomyces pastorianus
tcagcagcaattcaatccacaaggt

SEQ ID NO: 156108 - DNA, 25 bp, Saccharomyces pastorianus
ttgacacaaaacctgccgaatctga

SEQ ID NO: 156109 - DNA, 25 bp, Saccharomyces pastorianus
atcctcaaggcggttatcagcagca

SEQ ID NO: 156110 - DNA, 25 bp, Saccharomyces pastorianus
gatgccggttaccagcaacagtata

SEQ ID NO: 156111 - DNA, 25 bp, Saccharomyces pastorianus
aggatatcaagctggtttccaacca

SEQ ID NO: 156112 - DNA, 25 bp, Saccharomyces pastorianus
tgaagcttgtctccagttccggtat

SEQ ID NO: 156113 - DNA, 25 bp, Saccharomyces pastorianus
ttctgggtaccaacaaggtggctat

SEQ ID NO: 156114 - DNA, 25 bp, Saccharomyces pastorianus
gtggctatcaacagtacaatcccga

SEQ ID NO: 156115 - DNA, 25 bp, Saccharomyces pastorianus
ggtttccaaccacagtctcaaggta

SEQ ID NO: 156116 - DNA, 25 bp, Saccharomyces pastorianus
gccgctcccaaaccaaagaagactt

SEQ ID NO: 156117 - DNA, 25 bp, Saccharomyces pastorianus
cagtatccggctacagtggtgcaaa

SEQ ID NO: 156118 - DNA, 25 bp, Saccharomyces pastorianus
tcacatccatgctccattcatgttg

SEQ ID NO: 156119 - DNA, 25 bp, Saccharomyces pastorianus
ggataccatgaaccacgtcgaccgt

SEQ ID NO: 156120 - DNA, 25 bp, Saccharomyces pastorianus
agatgatcggtggtgcttctcaagc

SEQ ID NO: 156121 - DNA, 25 bp, Saccharomyces pastorianus
gacagacgttgtatttatgccagta

SEQ ID NO: 156122 - DNA, 25 bp, Saccharomyces pastorianus
gtgttttggtcatttccgccagaaa

SEQ ID NO: 156123 - DNA, 25 bp, Saccharomyces pastorianus
ccatattggatgctcctggtcataa

SEQ ID NO: 156124 - DNA, 25 bp, Saccharomyces pastorianus
attcatgttgcctattgccgctaag

SEQ ID NO: 156125 - DNA, 25 bp, Saccharomyces pastorianus
accggcccaactctgttagaatatc

SEQ ID NO: 156126 - DNA, 25 bp, Saccharomyces pastorianus
aaagaatgcccatggtacaccggcc

SEQ ID NO: 156127 - DNA, 25 bp, Saccharomyces pastorianus
atggatgacccaaccgttaactggt

SEQ ID NO: 156128 - DNA, 25 bp, Saccharomyces pastorianus
gtcagtgagacgacgacttcaggat

SEQ ID NO: 156129 - DNA, 25 bp, Saccharomyces pastorianus
aattaggcaaaactttgtatgattc

SEQ ID NO: 156130 - DNA, 25 bp, Saccharomyces pastorianus
cgacgacttcaggatctttgggttt

SEQ ID NO: 156131 - DNA, 25 bp, Saccharomyces pastorianus
acgacgacttcaggatctttgggtt

SEQ ID NO: 156132 - DNA, 25 bp, Saccharomyces pastorianus
aagagtcagtgagacgacgacttca

SEQ ID NO: 156133 - DNA, 25 bp, Saccharomyces pastorianus
gacgacttcaggatctttgggtttc

SEQ ID NO: 156134 - DNA, 25 bp, Saccharomyces pastorianus
gagacgacgacttcaggatctttgg

SEQ ID NO: 156135 - DNA, 25 bp, Saccharomyces pastorianus
tcgaaggcatcattggaaaaaagag

SEQ ID NO: 156136 - DNA, 25 bp, Saccharomyces pastorianus
gacgacgacttcaggatctttgggt

SEQ ID NO: 156137 - DNA, 25 bp, Saccharomyces pastorianus
cagtgagacgacgacttcaggatct

SEQ ID NO: 156138 - DNA, 25 bp, Saccharomyces pastorianus
gtgagacgacgacttcaggatcttt

SEQ ID NO: 156139 - DNA, 25 bp, Saccharomyces pastorianus
gttgacaaacttatgcgagatgatt

SEQ ID NO: 156140 - DNA, 25 bp, Saccharomyces pastorianus
aatcctcatctgtcggatgcgagaa

SEQ ID NO: 156141 - DNA, 25 bp, Saccharomyces pastorianus
atttacgaaggagacccggagcgat

SEQ ID NO: 156142 - DNA, 25 bp, Saccharomyces pastorianus
gacccggagcgatgggaattactaa

SEQ ID NO: 156143 - DNA, 25 bp, Saccharomyces pastorianus
ggttctttgagttccatgtcactaa

SEQ ID NO: 156144 - DNA, 25 bp, Saccharomyces pastorianus
gctgaatcagctttcgctcgaatat

SEQ ID NO: 156145 - DNA, 25 bp, Saccharomyces pastorianus
tattttaacaatcctcatctgtcgg

SEQ ID NO: 156146 - DNA, 25 bp, Saccharomyces pastorianus
gaaccgatcaaaatgtttcagatgc

SEQ ID NO: 156147 - DNA, 25 bp, Saccharomyces pastorianus
gtatggtcgttcaagaaccgatcaa

SEQ ID NO: 156148 - DNA, 25 bp, Saccharomyces pastorianus
aaaatccctctgtgctgaatcagct

SEQ ID NO: 156149 - DNA, 25 bp, Saccharomyces pastorianus
aaacaactggttctttgagttccat

SEQ ID NO: 156150 - DNA, 25 bp, Saccharomyces pastorianus
gattctttcttttctgtcatgcttt

SEQ ID NO: 156151 - DNA, 25 bp, Saccharomyces pastorianus
agaagagcttaactatcccattttt

SEQ ID NO: 156152 - DNA, 25 bp, Saccharomyces pastorianus
gcggtctccctttttggaatctata

SEQ ID NO: 156153 - DNA, 25 bp, Saccharomyces pastorianus
ggtccgttatccactgcagctgatt

SEQ ID NO: 156154 - DNA, 25 bp, Saccharomyces pastorianus
gaaaaaatctttgccttgtccgtcg

SEQ ID NO: 156155 - DNA, 25 bp, Saccharomyces pastorianus
gtattaccccagaaaccaggtggtg

SEQ ID NO: 156156 - DNA, 25 bp, Saccharomyces pastorianus
tggctacgacggctatgctgacaac

SEQ ID NO: 156157 - DNA, 25 bp, Saccharomyces pastorianus
ggagaattttccatactgccacagt

SEQ ID NO: 156158 - DNA, 25 bp, Saccharomyces pastorianus
ggaatttaactcttgtatcaccgat

SEQ ID NO: 156159 - DNA, 25 bp, Saccharomyces pastorianus
attagagggctcataccactggtat

SEQ ID NO: 156160 - DNA, 25 bp, Saccharomyces pastorianus
atatgttgggacttggttctgcggt

SEQ ID NO: 156161 - DNA, 25 bp, Saccharomyces pastorianus
ccagtccacttcaccaaaagttagt

SEQ ID NO: 156162 - DNA, 25 bp, Saccharomyces pastorianus
attaatgagcgtcgctttgcccagt

SEQ ID NO: 156163 - DNA, 25 bp, Saccharomyces pastorianus
tggacactgtcggtacggacgcagc

SEQ ID NO: 156164 - DNA, 25 bp, Saccharomyces pastorianus
tacggacgcagcagccgcgagcatt

SEQ ID NO: 156165 - DNA, 25 bp, Saccharomyces pastorianus
gcagcagccgcgagcattaatgagc

SEQ ID NO: 156166 - DNA, 25 bp, Saccharomyces pastorianus
gacactgtcggtacggacgcagcag

SEQ ID NO: 156167 - DNA, 25 bp, Saccharomyces pastorianus
actgtcggtacggacgcagcagccg

SEQ ID NO: 156168 - DNA, 25 bp, Saccharomyces pastorianus
aatgagcgtcgctttgcccagtcca

SEQ ID NO: 156169 - DNA, 25 bp, Saccharomyces pastorianus
tttgcccagtccacttcaccaaaag

SEQ ID NO: 156170 - DNA, 25 bp, Saccharomyces pastorianus
cgagcattaatgagcgtcgctttgc

SEQ ID NO: 156171 - DNA, 25 bp, Saccharomyces pastorianus
cagccgcgagcattaatgagcgtcg

SEQ ID NO: 156172 - DNA, 25 bp, Saccharomyces pastorianus
gggcaggtagatccactttgaaaga

SEQ ID NO: 156173 - DNA, 25 bp, Saccharomyces pastorianus
gaacataggtgattcttgcgaccct

SEQ ID NO: 156174 - DNA, 25 bp, Saccharomyces pastorianus
ccaagtcttgcaccatcttaatcaa

SEQ ID NO: 156175 - DNA, 25 bp, Saccharomyces pastorianus
atcgccctttcgagatacctaagat

SEQ ID NO: 156176 - DNA, 25 bp, Saccharomyces pastorianus
attatgccctcgctcaaacaaagga

SEQ ID NO: 156177 - DNA, 25 bp, Saccharomyces pastorianus
tttgggattcctaccgtgtactaag

SEQ ID NO: 156178 - DNA, 25 bp, Saccharomyces pastorianus
gtctcagagctgtggcaaacgttct

SEQ ID NO: 156179 - DNA, 25 bp, Saccharomyces pastorianus
agacaggtattgaggcgttcgcaga

SEQ ID NO: 156180 - DNA, 25 bp, Saccharomyces pastorianus
taatcaagggctccacacattatgc

SEQ ID NO: 156181 - DNA, 25 bp, Saccharomyces pastorianus
gttggatgacgctcaggattctgac

SEQ ID NO: 156182 - DNA, 25 bp, Saccharomyces pastorianus
gaactcaggattcgacccattggac

SEQ ID NO: 156183 - DNA, 25 bp, Saccharomyces pastorianus
gcctgaaaagaaaaccatcccgata

SEQ ID NO: 156184 - DNA, 25 bp, Saccharomyces pastorianus
aaaacctccaagaatgggcacattc

SEQ ID NO: 156185 - DNA, 25 bp, Saccharomyces pastorianus
atggaccctttaaacagctctcaaa

SEQ ID NO: 156186 - DNA, 25 bp, Saccharomyces pastorianus
aatttggagactactgacagttacc

SEQ ID NO: 156187 - DNA, 25 bp, Saccharomyces pastorianus
attgttctttacttgacatcaacga

SEQ ID NO: 156188 - DNA, 25 bp, Saccharomyces pastorianus
acattatccggtatctatggcttaa

SEQ ID NO: 156189 - DNA, 25 bp, Saccharomyces pastorianus
aagatggatccgattccgctttcaa

SEQ ID NO: 156190 - DNA, 25 bp, Saccharomyces pastorianus
gacagttacctatacatcgacccaa

SEQ ID NO: 156191 - DNA, 25 bp, Saccharomyces pastorianus
gttggtggcggtaactacctagaat

SEQ ID NO: 156192 - DNA, 25 bp, Saccharomyces pastorianus
acattcccagttgcataatcccaaa

SEQ ID NO: 156193 - DNA, 25 bp, Saccharomyces pastorianus
tgacatcaacgacaggcttaccaaa

SEQ ID NO: 156194 - DNA, 25 bp, Saccharomyces pastorianus
tatctcacatgtaattgtcgggctc

SEQ ID NO: 156195 - DNA, 25 bp, Saccharomyces pastorianus
gctcaagtctgccaagggtaccaag

SEQ ID NO: 156196 - DNA, 25 bp, Saccharomyces pastorianus
gaactaacccctgaagacgcagaga

SEQ ID NO: 156197 - DNA, 25 bp, Saccharomyces pastorianus
caggtaagacggcattggctctcgc

SEQ ID NO: 156198 - DNA, 25 bp, Saccharomyces pastorianus
ggctctcgccatttcacaagagtta

SEQ ID NO: 156199 - DNA, 25 bp, Saccharomyces pastorianus
tagctggtggcccttctacaggtaa

SEQ ID NO: 156200 - DNA, 25 bp, Saccharomyces pastorianus
acagcagtaattctggtgcagttac

SEQ ID NO: 156201 - DNA, 25 bp, Saccharomyces pastorianus
agctcgtgaagcgtgcggtgtaatt

SEQ ID NO: 156202 - DNA, 25 bp, Saccharomyces pastorianus
attctgtcctcttgttggtaccgaa

SEQ ID NO: 156203 - DNA, 25 bp, Saccharomyces pastorianus
gaactgcggcacatacacatattaa

SEQ ID NO: 156204 - DNA, 25 bp, Saccharomyces pastorianus
ttaggcccaaaagttccattctgtc

SEQ ID NO: 156205 - DNA, 25 bp, Saccharomyces pastorianus
aaaatccccggagcacaagatataa

SEQ ID NO: 156206 - DNA, 25 bp, Saccharomyces pastorianus
agagttgtaccgagccattattggc

SEQ ID NO: 156207 - DNA, 25 bp, Saccharomyces pastorianus
agttgacgttgggaccatacatcaa

SEQ ID NO: 156208 - DNA, 25 bp, Saccharomyces pastorianus
ataggttccgatctagttagttttg

SEQ ID NO: 156209 - DNA, 25 bp, Saccharomyces pastorianus
ttgcaaagattgatggttttcctcg

SEQ ID NO: 156210 - DNA, 25 bp, Saccharomyces pastorianus
tatcgatggcgctttgatgaggcaa

SEQ ID NO: 156211 - DNA, 25 bp, Saccharomyces pastorianus
tggtttccaggatttgttcttcact

SEQ ID NO: 156212 - DNA, 25 bp, Saccharomyces pastorianus
gagcagctgtcaattatcgatcgat

SEQ ID NO: 156213 - DNA, 25 bp, Saccharomyces pastorianus
agggaaatttccaggctacgatctg

SEQ ID NO: 156214 - DNA, 25 bp, Saccharomyces pastorianus
gggctttacaacaccagttgacgtt

SEQ ID NO: 156215 - DNA, 25 bp, Saccharomyces pastorianus
gaatttcaactgtctctcaaagtga

SEQ ID NO: 156216 - DNA, 25 bp, Saccharomyces pastorianus
actttagtgccgtatgtcgatttca

SEQ ID NO: 156217 - DNA, 25 bp, Saccharomyces pastorianus
ttaccattagatgcggcgatcacct

SEQ ID NO: 156218 - DNA, 25 bp, Saccharomyces pastorianus
gaggataacctctgcttacaactta

SEQ ID NO: 156219 - DNA, 25 bp, Saccharomyces pastorianus
ggcgatcacctctatgacaacatta

SEQ ID NO: 156220 - DNA, 25 bp, Saccharomyces pastorianus
agacgcttagcgagttgacagaaaa

SEQ ID NO: 156221 - DNA, 25 bp, Saccharomyces pastorianus
gtcgatttcatgaaccacatttgtg

SEQ ID NO: 156222 - DNA, 25 bp, Saccharomyces pastorianus
tgtgagtcggatttgcactgctatc

SEQ ID NO: 156223 - DNA, 25 bp, Saccharomyces pastorianus
ggaactacttagacatatctgacga

SEQ ID NO: 156224 - DNA, 25 bp, Saccharomyces pastorianus
gaattattggtctccttaactgcaa

SEQ ID NO: 156225 - DNA, 25 bp, Saccharomyces pastorianus
tgctatcctcagttaagtcctcagt

SEQ ID NO: 156226 - DNA, 25 bp, Saccharomyces pastorianus
atgacaacattaacgaggagctctt

SEQ ID NO: 156227 - DNA, 25 bp, Saccharomyces pastorianus
taggactggaacttacgctttgtag

SEQ ID NO: 156228 - DNA, 25 bp, Saccharomyces pastorianus
ttcacattgttgtcagattcccaca

SEQ ID NO: 156229 - DNA, 25 bp, Saccharomyces pastorianus
aatgttccaggattgttactcagtc

SEQ ID NO: 156230 - DNA, 25 bp, Saccharomyces pastorianus
aaatcctcctagagacctggtattc

SEQ ID NO: 156231 - DNA, 25 bp, Saccharomyces pastorianus
cacagctcacatcctaggactggaa

SEQ ID NO: 156232 - DNA, 25 bp, Saccharomyces pastorianus
atgcctgtatctaatggtattccca

SEQ ID NO: 156233 - DNA, 25 bp, Saccharomyces pastorianus
gtaaaagaatgctcctggctcatcg

SEQ ID NO: 156234 - DNA, 25 bp, Saccharomyces pastorianus
tgttactcagtctgcgaatccacag

SEQ ID NO: 156235 - DNA, 25 bp, Saccharomyces pastorianus
gaaatcgtcaaaccgcaattaccca

SEQ ID NO: 156236 - DNA, 25 bp, Saccharomyces pastorianus
gcgaattcgtatccaaatttggcgt

SEQ ID NO: 156237 - DNA, 25 bp, Saccharomyces pastorianus
ggcgtggccatggaacttttgaacc

SEQ ID NO: 156238 - DNA, 25 bp, Saccharomyces pastorianus
aagtgattcctctgggaggcgcatt

SEQ ID NO: 156239 - DNA, 25 bp, Saccharomyces pastorianus
ctgctgtttgcaatttccggttgga

SEQ ID NO: 156240 - DNA, 25 bp, Saccharomyces pastorianus
tttgccagtgaaatgccaacgtcgt

SEQ ID NO: 156241 - DNA, 25 bp, Saccharomyces pastorianus
ggaacctcggtacaacggccatgtt

SEQ ID NO: 156242 - DNA, 25 bp, Saccharomyces pastorianus
gagatcttgcatatggaccaactag

SEQ ID NO: 156243 - DNA, 25 bp, Saccharomyces pastorianus
tgttccccttcatcggtacgagaaa

SEQ ID NO: 156244 - DNA, 25 bp, Saccharomyces pastorianus
ggcggcaatgtacaccttaggctca

SEQ ID NO: 156245 - DNA, 25 bp, Saccharomyces pastorianus
tgcattgccggtcttcttggagaat

SEQ ID NO: 156246 - DNA, 25 bp, Saccharomyces pastorianus
aatactcggccaatggaacctcggt

SEQ ID NO: 156247 - DNA, 25 bp, Saccharomyces pastorianus
tgggctaatattacctgcggcggca

SEQ ID NO: 156248 - DNA, 25 bp, Saccharomyces pastorianus
cgagttacgtattagggccctggct

SEQ ID NO: 156249 - DNA, 25 bp, Saccharomyces pastorianus
gaagagtttaccactttattgcaac

SEQ ID NO: 156250 - DNA, 25 bp, Saccharomyces pastorianus
gacactagccgtttctattgttgga

SEQ ID NO: 156251 - DNA, 25 bp, Saccharomyces pastorianus
aaatgccggctcaagaatgtatgat

SEQ ID NO: 156252 - DNA, 25 bp, Saccharomyces pastorianus
ttaggtcccaaggacgctgtggtga

SEQ ID NO: 156253 - DNA, 25 bp, Saccharomyces pastorianus
cttgatgatcagacactagccgttt

SEQ ID NO: 156254 - DNA, 25 bp, Saccharomyces pastorianus
tgagcagtttgaccaagaccttgat

SEQ ID NO: 156255 - DNA, 25 bp, Saccharomyces pastorianus
aaagaaggtattgccaccgtggagc

SEQ ID NO: 156256 - DNA, 25 bp, Saccharomyces pastorianus
agtgacgattcaatttcttccgcca

SEQ ID NO: 156257 - DNA, 25 bp, Saccharomyces pastorianus
tgccaccgtggagcgtgctatggaa

SEQ ID NO: 156258 - DNA, 25 bp, Saccharomyces pastorianus
aacaatcatgatcttgacacagcat

SEQ ID NO: 156259 - DNA, 25 bp, Saccharomyces pastorianus
ttacgaaagcgaggtgtctgacgat

SEQ ID NO: 156260 - DNA, 25 bp, Saccharomyces pastorianus
ggtaaatctgccactgaatcactgt

SEQ ID NO: 156261 - DNA, 25 bp, Saccharomyces pastorianus
gaatcactgttggtgccaggttatg

SEQ ID NO: 156262 - DNA, 25 bp, Saccharomyces pastorianus
gttgtagatgctcttttggctgtta

SEQ ID NO: 156263 - DNA, 25 bp, Saccharomyces pastorianus
gcaatgcctaaacgtatcgccggtg

SEQ ID NO: 156264 - DNA, 25 bp, Saccharomyces pastorianus
atcgccggtggcaatgtgaaaatcg

SEQ ID NO: 156265 - DNA, 25 bp, Saccharomyces pastorianus
tcaagtatcccgtaaaggctgtcaa

SEQ ID NO: 156266 - DNA, 25 bp, Saccharomyces pastorianus
gtgctcaagttgtgttaaccaccaa

SEQ ID NO: 156267 - DNA, 25 bp, Saccharomyces pastorianus
ctaagatcattggtgctgactctga

SEQ ID NO: 156268 - DNA, 25 bp, Saccharomyces pastorianus
gagaagaattgcacgcgctacaggc

SEQ ID NO: 156269 - DNA, 25 bp, Saccharomyces pastorianus
tgccaggttatgctttgaattgtac

SEQ ID NO: 156270 - DNA, 25 bp, Saccharomyces pastorianus
acaggcgccactttggttagttcta

SEQ ID NO: 156271 - DNA, 25 bp, Saccharomyces pastorianus
gacatcgattccagttcagcaaaat

SEQ ID NO: 156272 - DNA, 25 bp, Saccharomyces pastorianus
tccaggctgcggtgacaatgtcgac

SEQ ID NO: 156273 - DNA, 25 bp, Saccharomyces pastorianus
atatcatattgtttccaggctgcgg

SEQ ID NO: 156274 - DNA, 25 bp, Saccharomyces pastorianus
tgagtcctgggctgaagcttgtcac

SEQ ID NO: 156275 - DNA, 25 bp, Saccharomyces pastorianus
attgtgcgccaagaaatctctcaga

SEQ ID NO: 156276 - DNA, 25 bp, Saccharomyces pastorianus
gggaggcctcatgtttgtttatact

SEQ ID NO: 156277 - DNA, 25 bp, Saccharomyces pastorianus
ataaaacagcccatttgagtcctgg

SEQ ID NO: 156278 - DNA, 25 bp, Saccharomyces pastorianus
ggcgaaacattagctctgtacgata

SEQ ID NO: 156279 - DNA, 25 bp, Saccharomyces pastorianus
aaaagtgacaccctaggcgaaacat

SEQ ID NO: 156280 - DNA, 25 bp, Saccharomyces pastorianus
gaacgatgaactaggcgtacccata

SEQ ID NO: 156281 - DNA, 25 bp, Saccharomyces pastorianus
aagccgatggtctcacagaaactga

SEQ ID NO: 156282 - DNA, 25 bp, Saccharomyces pastorianus
gctgttatcggctcaaacgggaata

SEQ ID NO: 156283 - DNA, 25 bp, Saccharomyces pastorianus
atgccgctggaggaaaggtccctga

SEQ ID NO: 156284 - DNA, 25 bp, Saccharomyces pastorianus
gaaaggtccctgacaaacttaccat

SEQ ID NO: 156285 - DNA, 25 bp, Saccharomyces pastorianus
ttgttccgaatattgtctcacctgg

SEQ ID NO: 156286 - DNA, 25 bp, Saccharomyces pastorianus
taccattaaacctattgttccgaat

SEQ ID NO: 156287 - DNA, 25 bp, Saccharomyces pastorianus
aatgttcttgttgatgtctttgatg

SEQ ID NO: 156288 - DNA, 25 bp, Saccharomyces pastorianus
gggaaaacttgcaccttgctgagga

SEQ ID NO: 156289 - DNA, 25 bp, Saccharomyces pastorianus
ttcttgtagtgtacagatgccgctg

SEQ ID NO: 156290 - DNA, 25 bp, Saccharomyces pastorianus
acagaaatgctgttatcggctcaaa

SEQ ID NO: 156291 - DNA, 25 bp, Saccharomyces pastorianus
gtctcacctggatatgaatgattta

SEQ ID NO: 156292 - DNA, 25 bp, Saccharomyces pastorianus
caccttgctgaggatgctggcgaat

SEQ ID NO: 156293 - DNA, 25 bp, Saccharomyces pastorianus
gaaattatccagttcgttaagtgct

SEQ ID NO: 156294 - DNA, 25 bp, Saccharomyces pastorianus
gcctacatctactgaatcgtctgac

SEQ ID NO: 156295 - DNA, 25 bp, Saccharomyces pastorianus
gattgaaaggcattatcccgatttt

SEQ ID NO: 156296 - DNA, 25 bp, Saccharomyces pastorianus
tcccttctccgacattttctaatta

SEQ ID NO: 156297 - DNA, 25 bp, Saccharomyces pastorianus
gaatcgtctgactcaatcacaagat

SEQ ID NO: 156298 - DNA, 25 bp, Saccharomyces pastorianus
gatttcactaagtcacgagatcctg

SEQ ID NO: 156299 - DNA, 25 bp, Saccharomyces pastorianus
ccccttctgacatactaccgaaagt

SEQ ID NO: 156300 - DNA, 25 bp, Saccharomyces pastorianus
aacggtgaaacaactaatcctctag

SEQ ID NO: 156301 - DNA, 25 bp, Saccharomyces pastorianus
ctgtattttcaagttcatcgcccaa

SEQ ID NO: 156302 - DNA, 25 bp, Saccharomyces pastorianus
aaagtaggcagaaggagcgtctcaa

SEQ ID NO: 156303 - DNA, 25 bp, Saccharomyces pastorianus
tcgcccaaactactggacgatgatt

SEQ ID NO: 156304 - DNA, 25 bp, Saccharomyces pastorianus
gagattccgctcttgtgaaagtcaa

SEQ ID NO: 156305 - DNA, 25 bp, Saccharomyces pastorianus
gcaggaaatctgactgagcttttag

SEQ ID NO: 156306 - DNA, 25 bp, Saccharomyces pastorianus
aacatgcaacattacgtattcggga

SEQ ID NO: 156307 - DNA, 25 bp, Saccharomyces pastorianus
gtcttgacgacatactggacaacta

SEQ ID NO: 156308 - DNA, 25 bp, Saccharomyces pastorianus
gggatcacaatcctattgtcttgac

SEQ ID NO: 156309 - DNA, 25 bp, Saccharomyces pastorianus
ttcaacgtccaatgaccgaaggtgt

SEQ ID NO: 156310 - DNA, 25 bp, Saccharomyces pastorianus
gtgaaagtcaagtcagtctcctgga

SEQ ID NO: 156311 - DNA, 25 bp, Saccharomyces pastorianus
acttagcagctatacaggacgatga

SEQ ID NO: 156312 - DNA, 25 bp, Saccharomyces pastorianus
gtacactatatgctttcaacgtcca

SEQ ID NO: 156313 - DNA, 25 bp, Saccharomyces pastorianus
tacgcagaacatttaaaggccacat

SEQ ID NO: 156314 - DNA, 25 bp, Saccharomyces pastorianus
gcgatcatatcggtacttctggaga

SEQ ID NO: 156315 - DNA, 25 bp, Saccharomyces pastorianus
gatgagaaaacacttgcaccttcga

SEQ ID NO: 156316 - DNA, 25 bp, Saccharomyces pastorianus
gaaacagccgaaatttttccactag

SEQ ID NO: 156317 - DNA, 25 bp, Saccharomyces pastorianus
aaagtcacctcatttgtcgaaaagt

SEQ ID NO: 156318 - DNA, 25 bp, Saccharomyces pastorianus
tgttacaccatcaaagaggccccag

SEQ ID NO: 156319 - DNA, 25 bp, Saccharomyces pastorianus
gaggccccagctaggagaaataccg

SEQ ID NO: 156320 - DNA, 25 bp, Saccharomyces pastorianus
gaggccgcctgaaatcatgagcact

SEQ ID NO: 156321 - DNA, 25 bp, Saccharomyces pastorianus
aactataactctacttctcgaagca

SEQ ID NO: 156322 - DNA, 25 bp, Saccharomyces pastorianus
caaaacttgcttttcttgttgaata

SEQ ID NO: 156323 - DNA, 25 bp, Saccharomyces pastorianus
gcaccttcgaagcatcagcctataa

SEQ ID NO: 156324 - DNA, 25 bp, Saccharomyces pastorianus
aaagtccagctgacagacctcaagg

SEQ ID NO: 156325 - DNA, 25 bp, Saccharomyces pastorianus
aggaagacgccgacctcaagaggat

SEQ ID NO: 156326 - DNA, 25 bp, Saccharomyces pastorianus
acccaataggtccagcactcccaaa

SEQ ID NO: 156327 - DNA, 25 bp, Saccharomyces pastorianus
aatgacaataagacacccaataggt

SEQ ID NO: 156328 - DNA, 25 bp, Saccharomyces pastorianus
tgacaataagacacccaataggtcc

SEQ ID NO: 156329 - DNA, 25 bp, Saccharomyces pastorianus
agacacccaataggtccagcactcc

SEQ ID NO: 156330 - DNA, 25 bp, Saccharomyces pastorianus
atgacaataagacacccaataggtc

SEQ ID NO: 156331 - DNA, 25 bp, Saccharomyces pastorianus
aataagacacccaataggtccagca

SEQ ID NO: 156332 - DNA, 25 bp, Saccharomyces pastorianus
ataagacacccaataggtccagcac

SEQ ID NO: 156333 - DNA, 25 bp, Saccharomyces pastorianus
taagacacccaataggtccagcact

SEQ ID NO: 156334 - DNA, 25 bp, Saccharomyces pastorianus
aagacacccaataggtccagcactc

SEQ ID NO: 156335 - DNA, 25 bp, Saccharomyces pastorianus
gacaataagacacccaataggtcca

SEQ ID NO: 156336 - DNA, 25 bp, Saccharomyces pastorianus
caataagacacccaataggtccagc

SEQ ID NO: 156337 - DNA, 25 bp, Saccharomyces pastorianus
tattgctaacatgaccaccgagtgg

SEQ ID NO: 156338 - DNA, 25 bp, Saccharomyces pastorianus
ctgccggtagaggtattggtcatca

SEQ ID NO: 156339 - DNA, 25 bp, Saccharomyces pastorianus
aggtcaattgcctcagggtgtttcc

SEQ ID NO: 156340 - DNA, 25 bp, Saccharomyces pastorianus
gtgaacactctggaccacgatattc

SEQ ID NO: 156341 - DNA, 25 bp, Saccharomyces pastorianus
attgaggagggctatgctttcccct

SEQ ID NO: 156342 - DNA, 25 bp, Saccharomyces pastorianus
ttaatccaaagactatccgcgcact

SEQ ID NO: 156343 - DNA, 25 bp, Saccharomyces pastorianus
aaatcacgccattgaattcacgggt

SEQ ID NO: 156344 - DNA, 25 bp, Saccharomyces pastorianus
gtcgctgggcactccaatagtgaga

SEQ ID NO: 156345 - DNA, 25 bp, Saccharomyces pastorianus
tcacgggtgactctttgaatgcatt

SEQ ID NO: 156346 - DNA, 25 bp, Saccharomyces pastorianus
atgactgtcgcatctgactcgcatt

SEQ ID NO: 156347 - DNA, 25 bp, Saccharomyces pastorianus
ttgcctatcgatcacagactcacta

SEQ ID NO: 156348 - DNA, 25 bp, Saccharomyces pastorianus
ggtaagattagttctcctgctgagg

SEQ ID NO: 156349 - DNA, 25 bp, Saccharomyces pastorianus
gcttctgccgtgctgggtaagatta

SEQ ID NO: 156350 - DNA, 25 bp, Saccharomyces pastorianus
gaaggtttcccaagagagttttctg

SEQ ID NO: 156351 - DNA, 25 bp, Saccharomyces pastorianus
gttaacgctcaaacagaggctccaa

SEQ ID NO: 156352 - DNA, 25 bp, Saccharomyces pastorianus
gcgaaattccattcagcggcgttaa

SEQ ID NO: 156353 - DNA, 25 bp, Saccharomyces pastorianus
cagaggctccaaaacaatccgttga

SEQ ID NO: 156354 - DNA, 25 bp, Saccharomyces pastorianus
gaattagttttatgtgatgccgata

SEQ ID NO: 156355 - DNA, 25 bp, Saccharomyces pastorianus
gatgcattggcttacttagcttccc

SEQ ID NO: 156356 - DNA, 25 bp, Saccharomyces pastorianus
gataattgagaatcccgtggttgaa

SEQ ID NO: 156357 - DNA, 25 bp, Saccharomyces pastorianus
ctcctgctgaggtattgtccacaag

SEQ ID NO: 156358 - DNA, 25 bp, Saccharomyces pastorianus
acacttatcaggatgatgtgcctaa

SEQ ID NO: 156359 - DNA, 25 bp, Saccharomyces pastorianus
ggagacttactcgagtaccgatttt

SEQ ID NO: 156360 - DNA, 25 bp, Saccharomyces pastorianus
gagtaccgattttcagaaagctctt

SEQ ID NO: 156361 - DNA, 25 bp, Saccharomyces pastorianus
gacacgatgaaatcacttttagtta

SEQ ID NO: 156362 - DNA, 25 bp, Saccharomyces pastorianus
gatgaaatcacttttagttacaatg

SEQ ID NO: 156363 - DNA, 25 bp, Saccharomyces pastorianus
gacttactcgagtaccgattttcag

SEQ ID NO: 156364 - DNA, 25 bp, Saccharomyces pastorianus
gtatggagacttactcgagtaccga

SEQ ID NO: 156365 - DNA, 25 bp, Saccharomyces pastorianus
atggagacttactcgagtaccgatt

SEQ ID NO: 156366 - DNA, 25 bp, Saccharomyces pastorianus
ctcgagtaccgattttcagaaagct

SEQ ID NO: 156367 - DNA, 25 bp, Saccharomyces pastorianus
attgacacgatgaaatcacttttag

SEQ ID NO: 156368 - DNA, 25 bp, Saccharomyces pastorianus
cttactcgagtaccgattttcagaa

SEQ ID NO: 156369 - DNA, 25 bp, Saccharomyces pastorianus
taccgattttcagaaagctcttgaa

SEQ ID NO: 156370 - DNA, 25 bp, Saccharomyces pastorianus
gaaagctcttgaaaagggatctgat

SEQ ID NO: 156371 - DNA, 25 bp, Saccharomyces pastorianus
ggagacttactcgagtaccgatttt

SEQ ID NO: 156372 - DNA, 25 bp, Saccharomyces pastorianus
gatgaaatcacttttagttacaatg

SEQ ID NO: 156373 - DNA, 25 bp, Saccharomyces pastorianus
gacttactcgagtaccgattttcag

SEQ ID NO: 156374 - DNA, 25 bp, Saccharomyces pastorianus
gtatggagacttactcgagtaccga

SEQ ID NO: 156375 - DNA, 25 bp, Saccharomyces pastorianus
agcgtacacgttggttttcgatcct

SEQ ID NO: 156376 - DNA, 25 bp, Saccharomyces pastorianus
tcacagccagcgtacacgttggttt

SEQ ID NO: 156377 - DNA, 25 bp, Saccharomyces pastorianus
ctcgagtaccgattttcagaaagct

SEQ ID NO: 156378 - DNA, 25 bp, Saccharomyces pastorianus
attgacacgatgaaatcacttttag

SEQ ID NO: 156379 - DNA, 25 bp, Saccharomyces pastorianus
ttttcgatccttctccgagtatgga

SEQ ID NO: 156380 - DNA, 25 bp, Saccharomyces pastorianus
gtaccgattttcagaaagctcttga

SEQ ID NO: 156381 - DNA, 25 bp, Saccharomyces pastorianus
aatagccgacaacttcctaaggaag

SEQ ID NO: 156382 - DNA, 25 bp, Saccharomyces pastorianus
tcagcggaattttaccaacgacgaa

SEQ ID NO: 156383 - DNA, 25 bp, Saccharomyces pastorianus
tgaccgacccaagagtacatccaat

SEQ ID NO: 156384 - DNA, 25 bp, Saccharomyces pastorianus
taaccggcctgaagtttgtcgctat

SEQ ID NO: 156385 - DNA, 25 bp, Saccharomyces pastorianus
aataccatcccatatataccttacg

SEQ ID NO: 156386 - DNA, 25 bp, Saccharomyces pastorianus
caggcggactaatctatcagcggaa

SEQ ID NO: 156387 - DNA, 25 bp, Saccharomyces pastorianus
tataccttacgtgggcatgtccagc

SEQ ID NO: 156388 - DNA, 25 bp, Saccharomyces pastorianus
aattcttgctagtacactgcacggt

SEQ ID NO: 156389 - DNA, 25 bp, Saccharomyces pastorianus
gttcatatatcagaccctaaccggc

SEQ ID NO: 156390 - DNA, 25 bp, Saccharomyces pastorianus
aactatgcacggatcagttcacgat

SEQ ID NO: 156391 - DNA, 25 bp, Saccharomyces pastorianus
gactccgaaggcattacagctaact

SEQ ID NO: 156392 - DNA, 25 bp, Saccharomyces pastorianus
gtgccttagatattcgtaccgatag

SEQ ID NO: 156393 - DNA, 25 bp, Saccharomyces pastorianus
ttcgtaccgatagacaatacgctat

SEQ ID NO: 156394 - DNA, 25 bp, Saccharomyces pastorianus
gtgaaattgcaaaagaagctcgcta

SEQ ID NO: 156395 - DNA, 25 bp, Saccharomyces pastorianus
gttgttcaaagttacggtgttagca

SEQ ID NO: 156396 - DNA, 25 bp, Saccharomyces pastorianus
accgtgccttagatattcgtaccga

SEQ ID NO: 156397 - DNA, 25 bp, Saccharomyces pastorianus
gcgaaggcgcgtacggaatagtata

SEQ ID NO: 156398 - DNA, 25 bp, Saccharomyces pastorianus
atacgctatcaaagcggttgttcaa

SEQ ID NO: 156399 - DNA, 25 bp, Saccharomyces pastorianus
acttaataacttctcaaattggcga

SEQ ID NO: 156400 - DNA, 25 bp, Saccharomyces pastorianus
tagcaaggaggctgatatgggcaat

SEQ ID NO: 156401 - DNA, 25 bp, Saccharomyces pastorianus
gaatagtataccgtgccttagatat

SEQ ID NO: 156402 - DNA, 25 bp, Saccharomyces pastorianus
aagttacggtgttagcaaggaggct

SEQ ID NO: 156403 - DNA, 25 bp, Saccharomyces pastorianus
aggttattgtattggcaggtactgc

SEQ ID NO: 156404 - DNA, 25 bp, Saccharomyces pastorianus
ttaaggttattgtattggcaggtac

SEQ ID NO: 156405 - DNA, 25 bp, Saccharomyces pastorianus
gaaatttaaggttattgtattggca

SEQ ID NO: 156406 - DNA, 25 bp, Saccharomyces pastorianus
ggttattgtattggcaggtactgca

SEQ ID NO: 156407 - DNA, 25 bp, Saccharomyces pastorianus
atttaaggttattgtattggcaggt

SEQ ID NO: 156408 - DNA, 25 bp, Saccharomyces pastorianus
aatttaaggttattgtattggcagg

SEQ ID NO: 156409 - DNA, 25 bp, Saccharomyces pastorianus
atgacagagaaacacaaaacgatgg

SEQ ID NO: 156410 - DNA, 25 bp, Saccharomyces pastorianus
taaggttattgtattggcaggtact

SEQ ID NO: 156411 - DNA, 25 bp, Saccharomyces pastorianus
tttaaggttattgtattggcaggta

SEQ ID NO: 156412 - DNA, 25 bp, Saccharomyces pastorianus
aaggttattgtattggcaggtactg

SEQ ID NO: 156413 - DNA, 25 bp, Saccharomyces pastorianus
tgacagagaaacacaaaacgatggg

SEQ ID NO: 156414 - DNA, 25 bp, Saccharomyces pastorianus
gtgatatccccttttatagaatggt

SEQ ID NO: 156415 - DNA, 25 bp, Saccharomyces pastorianus
gtgatccctacattatttgagcatg

SEQ ID NO: 156416 - DNA, 25 bp, Saccharomyces pastorianus
aactttgcaagatttacctgtagag

SEQ ID NO: 156417 - DNA, 25 bp, Saccharomyces pastorianus
aaatatcttttcgatcccctggagt

SEQ ID NO: 156418 - DNA, 25 bp, Saccharomyces pastorianus
aaatatttctcattttcttcccaga

SEQ ID NO: 156419 - DNA, 25 bp, Saccharomyces pastorianus
agagctagacttgtgttcaatgaac

SEQ ID NO: 156420 - DNA, 25 bp, Saccharomyces pastorianus
gatcccctggagtttggcgtaagta

SEQ ID NO: 156421 - DNA, 25 bp, Saccharomyces pastorianus
tgaaccgtcgatggtcaccttgaac

SEQ ID NO: 156422 - DNA, 25 bp, Saccharomyces pastorianus
gaacaggttcttctatagttgcttg

SEQ ID NO: 156423 - DNA, 25 bp, Saccharomyces pastorianus
actactagatcatcatcctatcctg

SEQ ID NO: 156424 - DNA, 25 bp, Saccharomyces pastorianus
caaggaactgacctaagccctaagt

SEQ ID NO: 156425 - DNA, 25 bp, Saccharomyces pastorianus
gatatgggcaatggagcctagtttc

SEQ ID NO: 156426 - DNA, 25 bp, Saccharomyces pastorianus
agcaccagaggaaataccgccccgg

SEQ ID NO: 156427 - DNA, 25 bp, Saccharomyces pastorianus
tggagcctagtttcgtaagaggtaa

SEQ ID NO: 156428 - DNA, 25 bp, Saccharomyces pastorianus
gccccggctacataattctcaagta

SEQ ID NO: 156429 - DNA, 25 bp, Saccharomyces pastorianus
gttagcaccagaggaaataccgccc

SEQ ID NO: 156430 - DNA, 25 bp, Saccharomyces pastorianus
taagaacgtcgtcaacttaattact

SEQ ID NO: 156431 - DNA, 25 bp, Saccharomyces pastorianus
aattactttcacagattcaaatggc

SEQ ID NO: 156432 - DNA, 25 bp, Saccharomyces pastorianus
gtaagaggtaagaacgtcgtcaact

SEQ ID NO: 156433 - DNA, 25 bp, Saccharomyces pastorianus
ggcaatggagcctagtttcgtaaga

SEQ ID NO: 156434 - DNA, 25 bp, Saccharomyces pastorianus
gattcaaatggcaagctgcacaaga

SEQ ID NO: 156435 - DNA, 25 bp, Saccharomyces pastorianus
aagctgcacaagaggttagcaccag

SEQ ID NO: 156436 - DNA, 25 bp, Saccharomyces pastorianus
ggcttactgcctcaattaaagagaa

SEQ ID NO: 156437 - DNA, 25 bp, Saccharomyces pastorianus
atacatgtatcaaacattagccatt

SEQ ID NO: 156438 - DNA, 25 bp, Saccharomyces pastorianus
acctggcttactgcctcaattaaag

SEQ ID NO: 156439 - DNA, 25 bp, Saccharomyces pastorianus
ggtgtccctgaaaaaatacatgtat

SEQ ID NO: 156440 - DNA, 25 bp, Saccharomyces pastorianus
gtgtgcttttgaacttgtgatgaat

SEQ ID NO: 156441 - DNA, 25 bp, Saccharomyces pastorianus
gagaattcaaaaacaggtgtccctg

SEQ ID NO: 156442 - DNA, 25 bp, Saccharomyces pastorianus
gctacacagggcttcttgtgcgtgt

SEQ ID NO: 156443 - DNA, 25 bp, Saccharomyces pastorianus
ggaatacctggcttactgcctcaat

SEQ ID NO: 156444 - DNA, 25 bp, Saccharomyces pastorianus
attagccattgatggttatgcgtgg

SEQ ID NO: 156445 - DNA, 25 bp, Saccharomyces pastorianus
gtgcgtgtgcttttgaacttgtgat

SEQ ID NO: 156446 - DNA, 25 bp, Saccharomyces pastorianus
acacagggcttcttgtgcgtgtgct

SEQ ID NO: 156447 - DNA, 25 bp, Saccharomyces pastorianus
ggtctttggttgtaaaacactcata

SEQ ID NO: 156448 - DNA, 25 bp, Saccharomyces pastorianus
gctttacctgaaaatttccctctag

SEQ ID NO: 156449 - DNA, 25 bp, Saccharomyces pastorianus
attccctacattgttgcaccatttg

SEQ ID NO: 156450 - DNA, 25 bp, Saccharomyces pastorianus
aagacgatttttcagctttacctga

SEQ ID NO: 156451 - DNA, 25 bp, Saccharomyces pastorianus
aaatgggccttatacagggtatcat

SEQ ID NO: 156452 - DNA, 25 bp, Saccharomyces pastorianus
gttgcaccatttgaagcagatccgc

SEQ ID NO: 156453 - DNA, 25 bp, Saccharomyces pastorianus
gcagatccgcaaatggtttacttgg

SEQ ID NO: 156454 - DNA, 25 bp, Saccharomyces pastorianus
gattctgatttgttggtctttggtt

SEQ ID NO: 156455 - DNA, 25 bp, Saccharomyces pastorianus
agaaattgtggtcagccggcaacag

SEQ ID NO: 156456 - DNA, 25 bp, Saccharomyces pastorianus
tgcaagctacattcaattccctaca

SEQ ID NO: 156457 - DNA, 25 bp, Saccharomyces pastorianus
tgttgacatcacaccagaaatggcg

SEQ ID NO: 156458 - DNA, 25 bp, Saccharomyces pastorianus
actgagggcgtgtttagactgtgca

SEQ ID NO: 156459 - DNA, 25 bp, Saccharomyces pastorianus
agaactttcgagatggacctgctag

SEQ ID NO: 156460 - DNA, 25 bp, Saccharomyces pastorianus
atggacctgctagctattatcgaag

SEQ ID NO: 156461 - DNA, 25 bp, Saccharomyces pastorianus
gactgtgcagtggaagcgacgattc

SEQ ID NO: 156462 - DNA, 25 bp, Saccharomyces pastorianus
actgggaatgtgttgctgtcttaaa

SEQ ID NO: 156463 - DNA, 25 bp, Saccharomyces pastorianus
gattccactgtatctatctgggcta

SEQ ID NO: 156464 - DNA, 25 bp, Saccharomyces pastorianus
gatattacctagcaacctgttccag

SEQ ID NO: 156465 - DNA, 25 bp, Saccharomyces pastorianus
gtgttgctgtcttaaatggccatga

SEQ ID NO: 156466 - DNA, 25 bp, Saccharomyces pastorianus
aagttcttatgatgacaccgtcagg

SEQ ID NO: 156467 - DNA, 25 bp, Saccharomyces pastorianus
ggaactgtttggtcttctgattttg

SEQ ID NO: 156468 - DNA, 25 bp, Saccharomyces pastorianus
ttagcggctggctcttttgattcca

SEQ ID NO: 156469 - DNA, 25 bp, Saccharomyces pastorianus
ttgcctattatcatactggacgcga

SEQ ID NO: 156470 - DNA, 25 bp, Saccharomyces pastorianus
tggcattttccagttgatgtgctct

SEQ ID NO: 156471 - DNA, 25 bp, Saccharomyces pastorianus
gtcatcgtattgctgttgcctatta

SEQ ID NO: 156472 - DNA, 25 bp, Saccharomyces pastorianus
gatgtgctctttgggtgtcatcgta

SEQ ID NO: 156473 - DNA, 25 bp, Saccharomyces pastorianus
atagatcatcattaccggtggcaga

SEQ ID NO: 156474 - DNA, 25 bp, Saccharomyces pastorianus
gatcaatcatactacagctggtctg

SEQ ID NO: 156475 - DNA, 25 bp, Saccharomyces pastorianus
ggtactatctttgacgtggcactgc

SEQ ID NO: 156476 - DNA, 25 bp, Saccharomyces pastorianus
gattacggttgcaagttattccact

SEQ ID NO: 156477 - DNA, 25 bp, Saccharomyces pastorianus
aagaccagtggtcccataagcggaa

SEQ ID NO: 156478 - DNA, 25 bp, Saccharomyces pastorianus
tggacgcgatcgatctattcctcta

SEQ ID NO: 156479 - DNA, 25 bp, Saccharomyces pastorianus
tattcctctacatgggcaggttgct

SEQ ID NO: 156480 - DNA, 25 bp, Saccharomyces pastorianus
caggccattccggaaaacacgatga

SEQ ID NO: 156481 - DNA, 25 bp, Saccharomyces pastorianus
aaaaagattattggcctcctcacct

SEQ ID NO: 156482 - DNA, 25 bp, Saccharomyces pastorianus
tgctcctccggagtacactgataga

SEQ ID NO: 156483 - DNA, 25 bp, Saccharomyces pastorianus
agaactttgtgaatgctcctccgga

SEQ ID NO: 156484 - DNA, 25 bp, Saccharomyces pastorianus
gcttcttttcaaagtttgccactat

SEQ ID NO: 156485 - DNA, 25 bp, Saccharomyces pastorianus
ctcaatccacgacttcttcgagaag

SEQ ID NO: 156486 - DNA, 25 bp, Saccharomyces pastorianus
ggcagtgataatgcttcttttcaaa

SEQ ID NO: 156487 - DNA, 25 bp, Saccharomyces pastorianus
gtttgccactatcaatgagtagctc

SEQ ID NO: 156488 - DNA, 25 bp, Saccharomyces pastorianus
atgagtagctctcaatccacgactt

SEQ ID NO: 156489 - DNA, 25 bp, Saccharomyces pastorianus
aacgacgtccattagaatcgactaa

SEQ ID NO: 156490 - DNA, 25 bp, Saccharomyces pastorianus
aatcatgggtttgcaagctccctac

SEQ ID NO: 156491 - DNA, 25 bp, Saccharomyces pastorianus
aactctactcataatcctagtgaca

SEQ ID NO: 156492 - DNA, 25 bp, Saccharomyces pastorianus
ggcgttactaatattagcaccacag

SEQ ID NO: 156493 - DNA, 25 bp, Saccharomyces pastorianus
gaaagcggtatccataaactgcaaa

SEQ ID NO: 156494 - DNA, 25 bp, Saccharomyces pastorianus
aactgcaaagcacactggacgatga

SEQ ID NO: 156495 - DNA, 25 bp, Saccharomyces pastorianus
ctgctaaagacccatccagattaaa

SEQ ID NO: 156496 - DNA, 25 bp, Saccharomyces pastorianus
gatgatagatccaatgacagcaatt

SEQ ID NO: 156497 - DNA, 25 bp, Saccharomyces pastorianus
gatccatccagctcagtttacgagg

SEQ ID NO: 156498 - DNA, 25 bp, Saccharomyces pastorianus
atgacagcaattatggcgttactaa

SEQ ID NO: 156499 - DNA, 25 bp, Saccharomyces pastorianus
atgcaccataatgtttgcgcgatga

SEQ ID NO: 156500 - DNA, 25 bp, Saccharomyces pastorianus
gaattcgttttatctgctaaagacc

SEQ ID NO: 156501 - DNA, 25 bp, Saccharomyces pastorianus
gatgaattggatccatccagctcag

SEQ ID NO: 156502 - DNA, 25 bp, Saccharomyces pastorianus
tatgttgctcatccagaatccttgc

SEQ ID NO: 156503 - DNA, 25 bp, Saccharomyces pastorianus
agatttttaccatggccgtccaagt

SEQ ID NO: 156504 - DNA, 25 bp, Saccharomyces pastorianus
tggccgtccaagtgtgtatctttga

SEQ ID NO: 156505 - DNA, 25 bp, Saccharomyces pastorianus
aagtgactcgcctgttgatcaacat

SEQ ID NO: 156506 - DNA, 25 bp, Saccharomyces pastorianus
gggtaccacgccagtaatagatttt

SEQ ID NO: 156507 - DNA, 25 bp, Saccharomyces pastorianus
gaatctcatcttcgcaaaatctgtg

SEQ ID NO: 156508 - DNA, 25 bp, Saccharomyces pastorianus
aggacacatacaatgcgctgctttc

SEQ ID NO: 156509 - DNA, 25 bp, Saccharomyces pastorianus
aaggctgtcatatctaccaatgctc

SEQ ID NO: 156510 - DNA, 25 bp, Saccharomyces pastorianus
cgctgctttcgaactgccaataaat

SEQ ID NO: 156511 - DNA, 25 bp, Saccharomyces pastorianus
gcggtttcccactatcaatggcgaa

SEQ ID NO: 156512 - DNA, 25 bp, Saccharomyces pastorianus
aatctgtgttgaacgcttacatcac

SEQ ID NO: 156513 - DNA, 25 bp, Saccharomyces pastorianus
ttccgccttaatactctttacacct

SEQ ID NO: 156514 - DNA, 25 bp, Saccharomyces pastorianus
gacctagccatggttatggcgctaa

SEQ ID NO: 156515 - DNA, 25 bp, Saccharomyces pastorianus
gaaagcatgttgtgcctacatttaa

SEQ ID NO: 156516 - DNA, 25 bp, Saccharomyces pastorianus
gaccgatgcctttagaaattttgaa

SEQ ID NO: 156517 - DNA, 25 bp, Saccharomyces pastorianus
tttgacttcaataatggcggctttc

SEQ ID NO: 156518 - DNA, 25 bp, Saccharomyces pastorianus
ctttacacctttttgatttgcagaa

SEQ ID NO: 156519 - DNA, 25 bp, Saccharomyces pastorianus
aatggcggctttcagcagaaggaaa

SEQ ID NO: 156520 - DNA, 25 bp, Saccharomyces pastorianus
gtggacctatagaaactgctttgaa

SEQ ID NO: 156521 - DNA, 25 bp, Saccharomyces pastorianus
gggagtggaaagaccgatgccttta

SEQ ID NO: 156522 - DNA, 25 bp, Saccharomyces pastorianus
ggcgctaatgccaagagaatgtgtt

SEQ ID NO: 156523 - DNA, 25 bp, Saccharomyces pastorianus
ctgtgacgaaagaagacctagccat

SEQ ID NO: 156524 - DNA, 25 bp, Saccharomyces pastorianus
tagagtcccgggagtcacctcaata

SEQ ID NO: 156525 - DNA, 25 bp, Saccharomyces pastorianus
gatttgcaccaaaaggctcgtcagt

SEQ ID NO: 156526 - DNA, 25 bp, Saccharomyces pastorianus
aaatcctgcttggactggcgggtta

SEQ ID NO: 156527 - DNA, 25 bp, Saccharomyces pastorianus
tccaggcctggtgctattgtcgtag

SEQ ID NO: 156528 - DNA, 25 bp, Saccharomyces pastorianus
tattgtcgtaggttgttgggccact

SEQ ID NO: 156529 - DNA, 25 bp, Saccharomyces pastorianus
acgacatatcaagtggacctgggaa

SEQ ID NO: 156530 - DNA, 25 bp, Saccharomyces pastorianus
gaagctacgccacgtggagctagat

SEQ ID NO: 156531 - DNA, 25 bp, Saccharomyces pastorianus
gggtacattgagtcgtgccaagaaa

SEQ ID NO: 156532 - DNA, 25 bp, Saccharomyces pastorianus
aacatctgccattacttgactttag

SEQ ID NO: 156533 - DNA, 25 bp, Saccharomyces pastorianus
aaacagcgacttacgaatgcatcag

SEQ ID NO: 156534 - DNA, 25 bp, Saccharomyces pastorianus
cgctccaaactttcctcatggtatt

SEQ ID NO: 156535 - DNA, 25 bp, Saccharomyces pastorianus
atgtccgctttgaagatctttgcag

SEQ ID NO: 156536 - DNA, 25 bp, Saccharomyces pastorianus
tttacctttgccaccatgaagactg

SEQ ID NO: 156537 - DNA, 25 bp, Saccharomyces pastorianus
atctttgcaggctttttattcgttg

SEQ ID NO: 156538 - DNA, 25 bp, Saccharomyces pastorianus
tgaccactgtgggtatgctttgcca

SEQ ID NO: 156539 - DNA, 25 bp, Saccharomyces pastorianus
ggaaccggtattgccatgacgttaa

SEQ ID NO: 156540 - DNA, 25 bp, Saccharomyces pastorianus
agaccttcctcggattattccagat

SEQ ID NO: 156541 - DNA, 25 bp, Saccharomyces pastorianus
ttacggtgctcttttcaacaatcct

SEQ ID NO: 156542 - DNA, 25 bp, Saccharomyces pastorianus
gacgttaactcatttgactcacaga

SEQ ID NO: 156543 - DNA, 25 bp, Saccharomyces pastorianus
cgaactttgctcaaccatttttcac

SEQ ID NO: 156544 - DNA, 25 bp, Saccharomyces pastorianus
atacgtgccatatgcttacggtgct

SEQ ID NO: 156545 - DNA, 25 bp, Saccharomyces pastorianus
aacaatcctgttgagggcttcttgt

SEQ ID NO: 156546 - DNA, 25 bp, Saccharomyces pastorianus
gacaatctgaatgaaaccatcgaca

SEQ ID NO: 156547 - DNA, 25 bp, Saccharomyces pastorianus
gacggcattaacgaagacaatctga

SEQ ID NO: 156548 - DNA, 25 bp, Saccharomyces pastorianus
ctgcgacaatgtgaccactcaatgg

SEQ ID NO: 156549 - DNA, 25 bp, Saccharomyces pastorianus
cattgggtcaggacggcattaacga

SEQ ID NO: 156550 - DNA, 25 bp, Saccharomyces pastorianus
cataacgtaacactgccggcattgg

SEQ ID NO: 156551 - DNA, 25 bp, Saccharomyces pastorianus
taacactgccggcattgggtcagga

SEQ ID NO: 156552 - DNA, 25 bp, Saccharomyces pastorianus
gacaacatgttaatttttgacttcc

SEQ ID NO: 156553 - DNA, 25 bp, Saccharomyces pastorianus
ggatgtttccccataacgtaacact

SEQ ID NO: 156554 - DNA, 25 bp, Saccharomyces pastorianus
gaatgaaaccatcgacaacatgtta

SEQ ID NO: 156555 - DNA, 25 bp, Saccharomyces pastorianus
caatgtgaccactcaatggagagag

SEQ ID NO: 156556 - DNA, 25 bp, Saccharomyces pastorianus
ggagagagtggatgtttccccataa

SEQ ID NO: 156557 - DNA, 25 bp, Saccharomyces pastorianus
tgtgtggacagcacggaaatcctat

SEQ ID NO: 156558 - DNA, 25 bp, Saccharomyces pastorianus
aggtaccaagttcctttgctgacta

SEQ ID NO: 156559 - DNA, 25 bp, Saccharomyces pastorianus
ttacgtgcccggtagaagtttgcct

SEQ ID NO: 156560 - DNA, 25 bp, Saccharomyces pastorianus
gtgcggagaactcaggtaccaagtt

SEQ ID NO: 156561 - DNA, 25 bp, Saccharomyces pastorianus
gaagtttgcctagtctgtgtgatat

SEQ ID NO: 156562 - DNA, 25 bp, Saccharomyces pastorianus
gctagttatcttgaggccaggtccg

SEQ ID NO: 156563 - DNA, 25 bp, Saccharomyces pastorianus
tttgctgactattacttacctttta

SEQ ID NO: 156564 - DNA, 25 bp, Saccharomyces pastorianus
actatggtgtgctctttgggctcca

SEQ ID NO: 156565 - DNA, 25 bp, Saccharomyces pastorianus
ggctccacctcagctagagtgcgga

SEQ ID NO: 156566 - DNA, 25 bp, Saccharomyces pastorianus
ggccaaaattgcttccacggatatt

SEQ ID NO: 156567 - DNA, 25 bp, Saccharomyces pastorianus
ggtggttacaactgcctttaataat

SEQ ID NO: 156568 - DNA, 25 bp, Saccharomyces pastorianus
acagttgaaggctacttgtgccgtt

SEQ ID NO: 156569 - DNA, 25 bp, Saccharomyces pastorianus
atgttatgctttcttctcctaaact

SEQ ID NO: 156570 - DNA, 25 bp, Saccharomyces pastorianus
ttgaaggctacttgtgccgttcgtg

SEQ ID NO: 156571 - DNA, 25 bp, Saccharomyces pastorianus
ttctcctaaactcacttcttttcct

SEQ ID NO: 156572 - DNA, 25 bp, Saccharomyces pastorianus
tttcttctcctaaactcacttcttt

SEQ ID NO: 156573 - DNA, 25 bp, Saccharomyces pastorianus
taaactcacttcttttcctccctat

SEQ ID NO: 156574 - DNA, 25 bp, Saccharomyces pastorianus
cctccctatctgcttttgtttatta

SEQ ID NO: 156575 - DNA, 25 bp, Saccharomyces pastorianus
tttcctccctatctgcttttgttta

SEQ ID NO: 156576 - DNA, 25 bp, Saccharomyces pastorianus
tccctatctgcttttgtttattaca

SEQ ID NO: 156577 - DNA, 25 bp, Saccharomyces pastorianus
tatgctttcttctcctaaactcact

SEQ ID NO: 156578 - DNA, 25 bp, Saccharomyces pastorianus
ctgcttttgtttattacagttgaag

SEQ ID NO: 156579 - DNA, 25 bp, Saccharomyces pastorianus
gacggtggtcctcatagatatctct

SEQ ID NO: 156580 - DNA, 25 bp, Saccharomyces pastorianus
atgggtcgtctattacacactatga

SEQ ID NO: 156581 - DNA, 25 bp, Saccharomyces pastorianus
aaaccagtcatttaaggcgcacgat

SEQ ID NO: 156582 - DNA, 25 bp, Saccharomyces pastorianus
ggtgattctacaggctccattaaat

SEQ ID NO: 156583 - DNA, 25 bp, Saccharomyces pastorianus
catagatatctctggcgggcctggt

SEQ ID NO: 156584 - DNA, 25 bp, Saccharomyces pastorianus
ggcgcacgatgcagacgtactgtgt

SEQ ID NO: 156585 - DNA, 25 bp, Saccharomyces pastorianus
aggtgcagattttctagtttcagga

SEQ ID NO: 156586 - DNA, 25 bp, Saccharomyces pastorianus
gaactgatcagattgcctctggtga

SEQ ID NO: 156587 - DNA, 25 bp, Saccharomyces pastorianus
ctgtgtctaactaccgatactgata

SEQ ID NO: 156588 - DNA, 25 bp, Saccharomyces pastorianus
taggttgcttcatggaaacgacatt

SEQ ID NO: 156589 - DNA, 25 bp, Saccharomyces pastorianus
gggatttccagtttgccacgctaaa

SEQ ID NO: 156590 - DNA, 25 bp, Saccharomyces pastorianus
agcaacctgttatggaaagaagtaa

SEQ ID NO: 156591 - DNA, 25 bp, Saccharomyces pastorianus
aataccgcagcaaaatcatccctat

SEQ ID NO: 156592 - DNA, 25 bp, Saccharomyces pastorianus
gaatctaccaataccgcagcaaaat

SEQ ID NO: 156593 - DNA, 25 bp, Saccharomyces pastorianus
gaaagaatctaccaataccgcagca

SEQ ID NO: 156594 - DNA, 25 bp, Saccharomyces pastorianus
agctactcgcaaaaaaaggtcattt

SEQ ID NO: 156595 - DNA, 25 bp, Saccharomyces pastorianus
cgcagcaaaatcatccctatcattc

SEQ ID NO: 156596 - DNA, 25 bp, Saccharomyces pastorianus
gaccactcgtacaaggaaagaatct

SEQ ID NO: 156597 - DNA, 25 bp, Saccharomyces pastorianus
atgagggatgaagctactcgcaaaa

SEQ ID NO: 156598 - DNA, 25 bp, Saccharomyces pastorianus
gaagtaagaccactcgtacaaggaa

SEQ ID NO: 156599 - DNA, 25 bp, Saccharomyces pastorianus
tgtcaaggaaaaagcaacctgttat

SEQ ID NO: 156600 - DNA, 25 bp, Saccharomyces pastorianus
aaggtcatttagtgatggtcatttt

SEQ ID NO: 156601 - DNA, 25 bp, Saccharomyces pastorianus
agattcactctcatgtgggtgtcag

SEQ ID NO: 156602 - DNA, 25 bp, Saccharomyces pastorianus
aataatgtgctggatttggccttgg

SEQ ID NO: 156603 - DNA, 25 bp, Saccharomyces pastorianus
ttccacgttaactttgcaggacctc

SEQ ID NO: 156604 - DNA, 25 bp, Saccharomyces pastorianus
gtgcaaaacgtaattcctgatgatt

SEQ ID NO: 156605 - DNA, 25 bp, Saccharomyces pastorianus
gattcattcaccttcgaaaagattc

SEQ ID NO: 156606 - DNA, 25 bp, Saccharomyces pastorianus
tgatctgtttgataggaatccgtca

SEQ ID NO: 156607 - DNA, 25 bp, Saccharomyces pastorianus
cacctattactgtttggatttccta

SEQ ID NO: 156608 - DNA, 25 bp, Saccharomyces pastorianus
gatgattcaaaacctctttccgtaa

SEQ ID NO: 156609 - DNA, 25 bp, Saccharomyces pastorianus
ttgcaggacctcttcgattcattca

SEQ ID NO: 156610 - DNA, 25 bp, Saccharomyces pastorianus
tctttccgtaagtcattatcatcat

SEQ ID NO: 156611 - DNA, 25 bp, Saccharomyces pastorianus
ttggccttggagacttaccgcaaaa

SEQ ID NO: 156612 - DNA, 25 bp, Saccharomyces pastorianus
tgggccgtattagtatccacgtcgc

SEQ ID NO: 156613 - DNA, 25 bp, Saccharomyces pastorianus
ggcacatggctaatgtccttagtat

SEQ ID NO: 156614 - DNA, 25 bp, Saccharomyces pastorianus
acagatgctgcacacgaagttatag

SEQ ID NO: 156615 - DNA, 25 bp, Saccharomyces pastorianus
cacgtcgcggttctggttcaattac

SEQ ID NO: 156616 - DNA, 25 bp, Saccharomyces pastorianus
gctgagtgatgatgtggcctgcaat

SEQ ID NO: 156617 - DNA, 25 bp, Saccharomyces pastorianus
ggatcacgctattgacctttacgga

SEQ ID NO: 156618 - DNA, 25 bp, Saccharomyces pastorianus
ccatcctaaatctaaacggttgttg

SEQ ID NO: 156619 - DNA, 25 bp, Saccharomyces pastorianus
tgacctttacggagactctgtagag

SEQ ID NO: 156620 - DNA, 25 bp, Saccharomyces pastorianus
gacaggacatggtggcgatgatttt

SEQ ID NO: 156621 - DNA, 25 bp, Saccharomyces pastorianus
ttactacccctttcaggtgcaaata

SEQ ID NO: 156622 - DNA, 25 bp, Saccharomyces pastorianus
gtggcctgcaattcaaggaatctat

SEQ ID NO: 156623 - DNA, 25 bp, Saccharomyces pastorianus
tagagccttatttaggtgccctctc

SEQ ID NO: 156624 - DNA, 25 bp, Saccharomyces pastorianus
aacccaagcttaatcgttagcggat

SEQ ID NO: 156625 - DNA, 25 bp, Saccharomyces pastorianus
aattatttcagctctccatttggtc

SEQ ID NO: 156626 - DNA, 25 bp, Saccharomyces pastorianus
cattaggttgatttcttgcgtcgaa

SEQ ID NO: 156627 - DNA, 25 bp, Saccharomyces pastorianus
gtcagcaggtcttaagttccacatt

SEQ ID NO: 156628 - DNA, 25 bp, Saccharomyces pastorianus
gatgaatacttacccaagctggaga

SEQ ID NO: 156629 - DNA, 25 bp, Saccharomyces pastorianus
gaaatatgtcattcctgatctacta

SEQ ID NO: 156630 - DNA, 25 bp, Saccharomyces pastorianus
gccctctcccaatacatgattgttg

SEQ ID NO: 156631 - DNA, 25 bp, Saccharomyces pastorianus
tgccgcggatgctttagtctattat

SEQ ID NO: 156632 - DNA, 25 bp, Saccharomyces pastorianus
tcttgcgtcgaattagaccttactt

SEQ ID NO: 156633 - DNA, 25 bp, Saccharomyces pastorianus
tgatctactacagtttgccgcggat

SEQ ID NO: 156634 - DNA, 25 bp, Saccharomyces pastorianus
tgaggccgaccaagtacttaccaac

SEQ ID NO: 156635 - DNA, 25 bp, Saccharomyces pastorianus
caagtacttaccaacccaaatacag

SEQ ID NO: 156636 - DNA, 25 bp, Saccharomyces pastorianus
tgccttcgaatagctctcaggtaat

SEQ ID NO: 156637 - DNA, 25 bp, Saccharomyces pastorianus
ggtgcatatgtcactgtgtctatct

SEQ ID NO: 156638 - DNA, 25 bp, Saccharomyces pastorianus
gatttccaagctgaggccgaccaag

SEQ ID NO: 156639 - DNA, 25 bp, Saccharomyces pastorianus
gaatagctctcaggtaatgaacatg

SEQ ID NO: 156640 - DNA, 25 bp, Saccharomyces pastorianus
gatttctgaagtcgctcctaaggaa

SEQ ID NO: 156641 - DNA, 25 bp, Saccharomyces pastorianus
gacctgccttcgaatagctctcagg

SEQ ID NO: 156642 - DNA, 25 bp, Saccharomyces pastorianus
atatgtcactgtgtctatctgttgt

SEQ ID NO: 156643 - DNA, 25 bp, Saccharomyces pastorianus
tacaggtaaaggtgcatatgtcact

SEQ ID NO: 156644 - DNA, 25 bp, Saccharomyces pastorianus
aagctgaggccgaccaagtacttac

SEQ ID NO: 156645 - DNA, 25 bp, Saccharomyces pastorianus
tatggtactaccgtttttaaggctg

SEQ ID NO: 156646 - DNA, 25 bp, Saccharomyces pastorianus
aactgtttgttatatggtgccattg

SEQ ID NO: 156647 - DNA, 25 bp, Saccharomyces pastorianus
cactgtcgatcgttttggacgtcgt

SEQ ID NO: 156648 - DNA, 25 bp, Saccharomyces pastorianus
tccaaagttaacaaggttgccccag

SEQ ID NO: 156649 - DNA, 25 bp, Saccharomyces pastorianus
gttcactggtaagccggccatgttt

SEQ ID NO: 156650 - DNA, 25 bp, Saccharomyces pastorianus
gcttctgttggtgtcaccagactat

SEQ ID NO: 156651 - DNA, 25 bp, Saccharomyces pastorianus
tagtttacgcttctgttggtgtcac

SEQ ID NO: 156652 - DNA, 25 bp, Saccharomyces pastorianus
taagccggccatgtttaagcgtact

SEQ ID NO: 156653 - DNA, 25 bp, Saccharomyces pastorianus
ggtctgctgttatgtagtttacgct

SEQ ID NO: 156654 - DNA, 25 bp, Saccharomyces pastorianus
tgttgttctttgtacactgtcgatc

SEQ ID NO: 156655 - DNA, 25 bp, Saccharomyces pastorianus
gaagcaagagcatctctttccaaag

SEQ ID NO: 156656 - DNA, 25 bp, Saccharomyces pastorianus
ccagctaaccaccactacagaaatt

SEQ ID NO: 156657 - DNA, 25 bp, Saccharomyces pastorianus
tatcattggttcaggtccagctgca

SEQ ID NO: 156658 - DNA, 25 bp, Saccharomyces pastorianus
tgccgtccccattttcagaaacaag

SEQ ID NO: 156659 - DNA, 25 bp, Saccharomyces pastorianus
taagagaatgcatttgccgggcgag

SEQ ID NO: 156660 - DNA, 25 bp, Saccharomyces pastorianus
aaagttgatctgtcttccaaaccat

SEQ ID NO: 156661 - DNA, 25 bp, Saccharomyces pastorianus
gaacctgtgacgactgacgctataa

SEQ ID NO: 156662 - DNA, 25 bp, Saccharomyces pastorianus
ggccacaggcgcttctgctaagaga

SEQ ID NO: 156663 - DNA, 25 bp, Saccharomyces pastorianus
gaacaatccacgaagtttggcactg

SEQ ID NO: 156664 - DNA, 25 bp, Saccharomyces pastorianus
tgccgtgtgtgatggtgccgtcccc

SEQ ID NO: 156665 - DNA, 25 bp, Saccharomyces pastorianus
ggtttcccagatggtctaacaggta

SEQ ID NO: 156666 - DNA, 25 bp, Saccharomyces pastorianus
aaaaggtatttctgcctgtgccgtg

SEQ ID NO: 156667 - DNA, 25 bp, Saccharomyces pastorianus
gtcagttttctatctctttcatcaa

SEQ ID NO: 156668 - DNA, 25 bp, Saccharomyces pastorianus
atagctggcctttgaaaatttcgcg

SEQ ID NO: 156669 - DNA, 25 bp, Saccharomyces pastorianus
taacgcctacgggtaatagctggcc

SEQ ID NO: 156670 - DNA, 25 bp, Saccharomyces pastorianus
tccttccgaagtttgttttcatctg

SEQ ID NO: 156671 - DNA, 25 bp, Saccharomyces pastorianus
attaggcactgctgaacttggacgt

SEQ ID NO: 156672 - DNA, 25 bp, Saccharomyces pastorianus
aactctagcagctggttcaagcggg

SEQ ID NO: 156673 - DNA, 25 bp, Saccharomyces pastorianus
ggatacgcagtatagttcggtcagt

SEQ ID NO: 156674 - DNA, 25 bp, Saccharomyces pastorianus
tatattctatctgttcggcggctaa

SEQ ID NO: 156675 - DNA, 25 bp, Saccharomyces pastorianus
aaatttacttctatcactgctctgg

SEQ ID NO: 156676 - DNA, 25 bp, Saccharomyces pastorianus
actgctctggtcctcactgagtgat

SEQ ID NO: 156677 - DNA, 25 bp, Saccharomyces pastorianus
aacttggacgtgaggacatctttga

SEQ ID NO: 156678 - DNA, 25 bp, Saccharomyces pastorianus
agcagaagttccctatgatagcttg

SEQ ID NO: 156679 - DNA, 25 bp, Saccharomyces pastorianus
tggtagcagaagttccctatgatag

SEQ ID NO: 156680 - DNA, 25 bp, Saccharomyces pastorianus
gtggtagcagaagttccctatgata

SEQ ID NO: 156681 - DNA, 25 bp, Saccharomyces pastorianus
atctgtggtagcagaagttccctat

SEQ ID NO: 156682 - DNA, 25 bp, Saccharomyces pastorianus
ctgtggtagcagaagttccctatga

SEQ ID NO: 156683 - DNA, 25 bp, Saccharomyces pastorianus
gacctagaaaatctgtggtagcaga

SEQ ID NO: 156684 - DNA, 25 bp, Saccharomyces pastorianus
gtagcagaagttccctatgatagct

SEQ ID NO: 156685 - DNA, 25 bp, Saccharomyces pastorianus
aatctgtggtagcagaagttcccta

SEQ ID NO: 156686 - DNA, 25 bp, Saccharomyces pastorianus
aaatctgtggtagcagaagttccct

SEQ ID NO: 156687 - DNA, 25 bp, Saccharomyces pastorianus
tgtggtagcagaagttccctatgat

SEQ ID NO: 156688 - DNA, 25 bp, Saccharomyces pastorianus
ggtagcagaagttccctatgatagc

SEQ ID NO: 156689 - DNA, 25 bp, Saccharomyces pastorianus
aagagttgctatttatccaagtgaa

SEQ ID NO: 156690 - DNA, 25 bp, Saccharomyces pastorianus
gatgaattcacttcttctgattctg

SEQ ID NO: 156691 - DNA, 25 bp, Saccharomyces pastorianus
gcgaggaagttgaaggacctccaaa

SEQ ID NO: 156692 - DNA, 25 bp, Saccharomyces pastorianus
gattatgttagctcttctgatgaat

SEQ ID NO: 156693 - DNA, 25 bp, Saccharomyces pastorianus
gaggtccagcataaatctaaggttg

SEQ ID NO: 156694 - DNA, 25 bp, Saccharomyces pastorianus
accagaatctggtgacatctctaag

SEQ ID NO: 156695 - DNA, 25 bp, Saccharomyces pastorianus
catctctaagaatttggccgtcgta

SEQ ID NO: 156696 - DNA, 25 bp, Saccharomyces pastorianus
gatgattaccttttccagtttcgtt

SEQ ID NO: 156697 - DNA, 25 bp, Saccharomyces pastorianus
aaaacagtagtggaccgtgcccgtg

SEQ ID NO: 156698 - DNA, 25 bp, Saccharomyces pastorianus
tctgattctgaatcgtccggagaaa

SEQ ID NO: 156699 - DNA, 25 bp, Saccharomyces pastorianus
ttggccgtcgtaaatttagattggg

SEQ ID NO: 156700 - DNA, 25 bp, Saccharomyces pastorianus
aacttgcctcgggtttactctacag

SEQ ID NO: 156701 - DNA, 25 bp, Saccharomyces pastorianus
gtgatgtccggaaaagcttctacag

SEQ ID NO: 156702 - DNA, 25 bp, Saccharomyces pastorianus
gcagagattattagtgatgtccgga

SEQ ID NO: 156703 - DNA, 25 bp, Saccharomyces pastorianus
agcttctacagagggtagcgttact

SEQ ID NO: 156704 - DNA, 25 bp, Saccharomyces pastorianus
ttcaataatgcacaagacgccatat

SEQ ID NO: 156705 - DNA, 25 bp, Saccharomyces pastorianus
caagacgccatattaacgagaaaat

SEQ ID NO: 156706 - DNA, 25 bp, Saccharomyces pastorianus
aatatggcattgcacagtataagca

SEQ ID NO: 156707 - DNA, 25 bp, Saccharomyces pastorianus
aaataagcaacgtcgcagcaaccca

SEQ ID NO: 156708 - DNA, 25 bp, Saccharomyces pastorianus
acgtcgcagcaacccattcaataat

SEQ ID NO: 156709 - DNA, 25 bp, Saccharomyces pastorianus
agcgttactacggagtttctctctg

SEQ ID NO: 156710 - DNA, 25 bp, Saccharomyces pastorianus
gagtttctctctgatatcattggta

SEQ ID NO: 156711 - DNA, 25 bp, Saccharomyces pastorianus
gatacgaaattacggaactattgca

SEQ ID NO: 156712 - DNA, 25 bp, Saccharomyces pastorianus
caagaacaactcaaaatagcctatg

SEQ ID NO: 156713 - DNA, 25 bp, Saccharomyces pastorianus
actcagacaagtagcaccagaccac

SEQ ID NO: 156714 - DNA, 25 bp, Saccharomyces pastorianus
gaaggttcattttattatcctacag

SEQ ID NO: 156715 - DNA, 25 bp, Saccharomyces pastorianus
aaaattcaccacatatctcccgttg

SEQ ID NO: 156716 - DNA, 25 bp, Saccharomyces pastorianus
atggaactctcatcaaacttaaaag

SEQ ID NO: 156717 - DNA, 25 bp, Saccharomyces pastorianus
acatatctcccgttgaggctccttc

SEQ ID NO: 156718 - DNA, 25 bp, Saccharomyces pastorianus
ggaactattgcaaaattcaccacat

SEQ ID NO: 156719 - DNA, 25 bp, Saccharomyces pastorianus
gttgaggctccttccttaactcaga

SEQ ID NO: 156720 - DNA, 25 bp, Saccharomyces pastorianus
gctccttccttaactcagacaagta

SEQ ID NO: 156721 - DNA, 25 bp, Saccharomyces pastorianus
gtagcaccagaccaccaaagaggac

SEQ ID NO: 156722 - DNA, 25 bp, Saccharomyces pastorianus
aaagttctacagtgtcttcgccatc

SEQ ID NO: 156723 - DNA, 25 bp, Saccharomyces pastorianus
gtgtcagcccactactaaataacct

SEQ ID NO: 156724 - DNA, 25 bp, Saccharomyces pastorianus
gaagttcctaatagtgtcagcccac

SEQ ID NO: 156725 - DNA, 25 bp, Saccharomyces pastorianus
attctaatgtacttcgcactgtcca

SEQ ID NO: 156726 - DNA, 25 bp, Saccharomyces pastorianus
tacaagtcctggtcattttaaccct

SEQ ID NO: 156727 - DNA, 25 bp, Saccharomyces pastorianus
gaaggagacctgaccccagaagaag

SEQ ID NO: 156728 - DNA, 25 bp, Saccharomyces pastorianus
gcatcgttaaactgggactggccaa

SEQ ID NO: 156729 - DNA, 25 bp, Saccharomyces pastorianus
agaaattctctctgctaaactggaa

SEQ ID NO: 156730 - DNA, 25 bp, Saccharomyces pastorianus
tagaaaccgtgatgctgttaccgag

SEQ ID NO: 156731 - DNA, 25 bp, Saccharomyces pastorianus
aaacttatgttcaacctctgctaga

SEQ ID NO: 156732 - DNA, 25 bp, Saccharomyces pastorianus
gagagacattccattattcagcaaa

SEQ ID NO: 156733 - DNA, 25 bp, Saccharomyces pastorianus
gtctctgctcatgttccaggtatga

SEQ ID NO: 156734 - DNA, 25 bp, Saccharomyces pastorianus
tttttggacacttcatcgtgccatt

SEQ ID NO: 156735 - DNA, 25 bp, Saccharomyces pastorianus
aaacgatagcgctgtattcggaaga

SEQ ID NO: 156736 - DNA, 25 bp, Saccharomyces pastorianus
tagattcgatgccaattccagtgat

SEQ ID NO: 156737 - DNA, 25 bp, Saccharomyces pastorianus
atcggaaacctacagcgcaagtgac

SEQ ID NO: 156738 - DNA, 25 bp, Saccharomyces pastorianus
tcgtgccattgttatcgcaggataa

SEQ ID NO: 156739 - DNA, 25 bp, Saccharomyces pastorianus
ttaccagtccaaattgaggccgcag

SEQ ID NO: 156740 - DNA, 25 bp, Saccharomyces pastorianus
attgtatccaatcctcaaatccacc

SEQ ID NO: 156741 - DNA, 25 bp, Saccharomyces pastorianus
gagattttcagatgaactatcccca

SEQ ID NO: 156742 - DNA, 25 bp, Saccharomyces pastorianus
gatttagcttcaaacctagtcgaac

SEQ ID NO: 156743 - DNA, 25 bp, Saccharomyces pastorianus
tagatgagccatccgttctggagaa

SEQ ID NO: 156744 - DNA, 25 bp, Saccharomyces pastorianus
aaagcgctagaagagttggagtata

SEQ ID NO: 156745 - DNA, 25 bp, Saccharomyces pastorianus
gcgaccgtacaaaagatgatatctg

SEQ ID NO: 156746 - DNA, 25 bp, Saccharomyces pastorianus
ggacaacgaggctaagaaaaccata

SEQ ID NO: 156747 - DNA, 25 bp, Saccharomyces pastorianus
actggaccaggatttgatgtttacc

SEQ ID NO: 156748 - DNA, 25 bp, Saccharomyces pastorianus
gttcaagaagtcaggtctctcggaa

SEQ ID NO: 156749 - DNA, 25 bp, Saccharomyces pastorianus
cgagcacgtgatcaaagcgctagaa

SEQ ID NO: 156750 - DNA, 25 bp, Saccharomyces pastorianus
tcataatgatcctgtcctcgatggc

SEQ ID NO: 156751 - DNA, 25 bp, Saccharomyces pastorianus
tcaactccggcatagaattcataat

SEQ ID NO: 156752 - DNA, 25 bp, Saccharomyces pastorianus
agaaatcatcatcaactccggcata

SEQ ID NO: 156753 - DNA, 25 bp, Saccharomyces pastorianus
gatttgatgtttaccaaggatgcaa

SEQ ID NO: 156754 - DNA, 25 bp, Saccharomyces pastorianus
gaaactagggattccaagttcaaga

SEQ ID NO: 156755 - DNA, 25 bp, Saccharomyces pastorianus
atagctcttccagcaaccataatgc

SEQ ID NO: 156756 - DNA, 25 bp, Saccharomyces pastorianus
gttggctagaacactcacatcgcag

SEQ ID NO: 156757 - DNA, 25 bp, Saccharomyces pastorianus
gctaacatcgtaccaaagctgctta

SEQ ID NO: 156758 - DNA, 25 bp, Saccharomyces pastorianus
tccgccgatgtgtcataccagtcaa

SEQ ID NO: 156759 - DNA, 25 bp, Saccharomyces pastorianus
ggaagaatctaagcgcctccggaga

SEQ ID NO: 156760 - DNA, 25 bp, Saccharomyces pastorianus
taccagtcaactttcgctaacatcg

SEQ ID NO: 156761 - DNA, 25 bp, Saccharomyces pastorianus
aaaccatactcactcggttgtgtat

SEQ ID NO: 156762 - DNA, 25 bp, Saccharomyces pastorianus
gcaaatatttgtacttcggacccgg

SEQ ID NO: 156763 - DNA, 25 bp, Saccharomyces pastorianus
gacagcatccatactgcggtttcga

SEQ ID NO: 156764 - DNA, 25 bp, Saccharomyces pastorianus
acgaaattcgcggagctcgagctca

SEQ ID NO: 156765 - DNA, 25 bp, Saccharomyces pastorianus
cagtgatcaattctccagtacggcg

SEQ ID NO: 156766 - DNA, 25 bp, Saccharomyces pastorianus
atgttctcaggatgcttatgatctt

SEQ ID NO: 156767 - DNA, 25 bp, Saccharomyces pastorianus
tttggactctgctactgctttagaa

SEQ ID NO: 156768 - DNA, 25 bp, Saccharomyces pastorianus
gaaagaccgcggctactgtggccat

SEQ ID NO: 156769 - DNA, 25 bp, Saccharomyces pastorianus
tactgctttagaattcatccgtgct

SEQ ID NO: 156770 - DNA, 25 bp, Saccharomyces pastorianus
catccgtgctttaaaaacccaggct

SEQ ID NO: 156771 - DNA, 25 bp, Saccharomyces pastorianus
aaagcgtgtatccattgcggaagtc

SEQ ID NO: 156772 - DNA, 25 bp, Saccharomyces pastorianus
ataatgccaccagaggtttggactc

SEQ ID NO: 156773 - DNA, 25 bp, Saccharomyces pastorianus
tggccacatatggtctttcgcatac

SEQ ID NO: 156774 - DNA, 25 bp, Saccharomyces pastorianus
gccgcaaaatcgtatcaagggtgtt

SEQ ID NO: 156775 - DNA, 25 bp, Saccharomyces pastorianus
gaagcgtacgccaatcacgtgacag

SEQ ID NO: 156776 - DNA, 25 bp, Saccharomyces pastorianus
tctgcggcgccagatttcaatgttg

SEQ ID NO: 156777 - DNA, 25 bp, Saccharomyces pastorianus
tcccagacagaccactgcagatttt

SEQ ID NO: 156778 - DNA, 25 bp, Saccharomyces pastorianus
gcttcaagttacaagtcctagctga

SEQ ID NO: 156779 - DNA, 25 bp, Saccharomyces pastorianus
accactgcagattttgtaagcttca

SEQ ID NO: 156780 - DNA, 25 bp, Saccharomyces pastorianus
atatggccagaatatcggctacaat

SEQ ID NO: 156781 - DNA, 25 bp, Saccharomyces pastorianus
aagtcctagctgacatagaagttat

SEQ ID NO: 156782 - DNA, 25 bp, Saccharomyces pastorianus
tacgtattgtctcccagacagacca

SEQ ID NO: 156783 - DNA, 25 bp, Saccharomyces pastorianus
ttgggctacgtattgtctcccagac

SEQ ID NO: 156784 - DNA, 25 bp, Saccharomyces pastorianus
cagtgcctcagagcgccaaaggata

SEQ ID NO: 156785 - DNA, 25 bp, Saccharomyces pastorianus
aggtactagcagtgcctcagagcgc

SEQ ID NO: 156786 - DNA, 25 bp, Saccharomyces pastorianus
ttatcgataaaggtactagcagtgc

SEQ ID NO: 156787 - DNA, 25 bp, Saccharomyces pastorianus
gaatatcggctacaatcagaaaact

SEQ ID NO: 156788 - DNA, 25 bp, Saccharomyces pastorianus
ttgtatcatccaagcgctgacgcat

SEQ ID NO: 156789 - DNA, 25 bp, Saccharomyces pastorianus
gtatacagggtttgccatccctaaa

SEQ ID NO: 156790 - DNA, 25 bp, Saccharomyces pastorianus
tgctggccctgcttatcagaacatc

SEQ ID NO: 156791 - DNA, 25 bp, Saccharomyces pastorianus
gctagcctacctgtttgaatcttta

SEQ ID NO: 156792 - DNA, 25 bp, Saccharomyces pastorianus
agatgcgtgggctccttgaccaaaa

SEQ ID NO: 156793 - DNA, 25 bp, Saccharomyces pastorianus
ccacattcactttatcccatttatt

SEQ ID NO: 156794 - DNA, 25 bp, Saccharomyces pastorianus
gtagattcccttgtgcccaatacat

SEQ ID NO: 156795 - DNA, 25 bp, Saccharomyces pastorianus
atggtccccgcttcaatgttattat

SEQ ID NO: 156796 - DNA, 25 bp, Saccharomyces pastorianus
aattccatgaccgtagattcccttg

SEQ ID NO: 156797 - DNA, 25 bp, Saccharomyces pastorianus
aacattacaggaggccatggtcccc

SEQ ID NO: 156798 - DNA, 25 bp, Saccharomyces pastorianus
gaacatcacaggtactcaacgcgtc

SEQ ID NO: 156799 - DNA, 25 bp, Saccharomyces pastorianus
agcagcaatcaccttccgttattag

SEQ ID NO: 156800 - DNA, 25 bp, Saccharomyces pastorianus
atcactctgatggaactgctgaaag

SEQ ID NO: 156801 - DNA, 25 bp, Saccharomyces pastorianus
gaccttatcaggaatttcttgcaga

SEQ ID NO: 156802 - DNA, 25 bp, Saccharomyces pastorianus
aaggccgttctacaggaccttatca

SEQ ID NO: 156803 - DNA, 25 bp, Saccharomyces pastorianus
ttcatcatcttttgctgtaccgaca

SEQ ID NO: 156804 - DNA, 25 bp, Saccharomyces pastorianus
gagtgctatcacagtacgttctatg

SEQ ID NO: 156805 - DNA, 25 bp, Saccharomyces pastorianus
ggcggaaaacgtctaccacatcttc

SEQ ID NO: 156806 - DNA, 25 bp, Saccharomyces pastorianus
ggcaagtctgatccttatagagttc

SEQ ID NO: 156807 - DNA, 25 bp, Saccharomyces pastorianus
gaatgaacctttgcctgtttataaa

SEQ ID NO: 156808 - DNA, 25 bp, Saccharomyces pastorianus
gttattaggcagtctcccactcaac

SEQ ID NO: 156809 - DNA, 25 bp, Saccharomyces pastorianus
aaagggtaccccattgagtgctatc

SEQ ID NO: 156810 - DNA, 25 bp, Saccharomyces pastorianus
gattccctgattcaacattgcgtgg

SEQ ID NO: 156811 - DNA, 25 bp, Saccharomyces pastorianus
aatgcaagttcgagcgctctcagta

SEQ ID NO: 156812 - DNA, 25 bp, Saccharomyces pastorianus
tgcttcagaaactactactccggtg

SEQ ID NO: 156813 - DNA, 25 bp, Saccharomyces pastorianus
tatcagattcatttgtccagcctca

SEQ ID NO: 156814 - DNA, 25 bp, Saccharomyces pastorianus
aagaatcttcagtttttccaccacg

SEQ ID NO: 156815 - DNA, 25 bp, Saccharomyces pastorianus
taaggcctcccataaattccaacag

SEQ ID NO: 156816 - DNA, 25 bp, Saccharomyces pastorianus
gataattcatcccacttaatctctc

SEQ ID NO: 156817 - DNA, 25 bp, Saccharomyces pastorianus
cagtacccctcccttaataagaatg

SEQ ID NO: 156818 - DNA, 25 bp, Saccharomyces pastorianus
gacaaaattctacgcctgtacttcc

SEQ ID NO: 156819 - DNA, 25 bp, Saccharomyces pastorianus
agatgttagcgtatcatccccaacg

SEQ ID NO: 156820 - DNA, 25 bp, Saccharomyces pastorianus
atatggatatgtcctttccttccac

SEQ ID NO: 156821 - DNA, 25 bp, Saccharomyces pastorianus
gatggtggttatgtccctagtttaa

SEQ ID NO: 156822 - DNA, 25 bp, Saccharomyces pastorianus
tgcattttttgctttccgtcataga

SEQ ID NO: 156823 - DNA, 25 bp, Saccharomyces pastorianus
tcaagcgtcttggattcttcaaaag

SEQ ID NO: 156824 - DNA, 25 bp, Saccharomyces pastorianus
gaaagtgtttactctgcggtagatg

SEQ ID NO: 156825 - DNA, 25 bp, Saccharomyces pastorianus
cggtgatctattgtacagggacgca

SEQ ID NO: 156826 - DNA, 25 bp, Saccharomyces pastorianus
ttgaaagtaccgagctttcccgctc

SEQ ID NO: 156827 - DNA, 25 bp, Saccharomyces pastorianus
gtactcttgtggttattcgttgcat

SEQ ID NO: 156828 - DNA, 25 bp, Saccharomyces pastorianus
cctagtttaacctcatcaagcgtct

SEQ ID NO: 156829 - DNA, 25 bp, Saccharomyces pastorianus
gattgacgttatatggctctggaga

SEQ ID NO: 156830 - DNA, 25 bp, Saccharomyces pastorianus
gttttaactattggcgtactcttgt

SEQ ID NO: 156831 - DNA, 25 bp, Saccharomyces pastorianus
aaaccccactgcgaagtttagctgg

SEQ ID NO: 156832 - DNA, 25 bp, Saccharomyces pastorianus
gccgtgaatctaacactttcgcagt

SEQ ID NO: 156833 - DNA, 25 bp, Saccharomyces pastorianus
gtgcttcggatactgttgtttcaac

SEQ ID NO: 156834 - DNA, 25 bp, Saccharomyces pastorianus
tgttgtagtaccttctgcctatgcg

SEQ ID NO: 156835 - DNA, 25 bp, Saccharomyces pastorianus
ttcaccatcggcttctgttgtagta

SEQ ID NO: 156836 - DNA, 25 bp, Saccharomyces pastorianus
aagaactgattgtcgatcgcccggc

SEQ ID NO: 156837 - DNA, 25 bp, Saccharomyces pastorianus
agcacctgctgtaatatcctcaacg

SEQ ID NO: 156838 - DNA, 25 bp, Saccharomyces pastorianus
gtcgacttatatttcttcttccctt

SEQ ID NO: 156839 - DNA, 25 bp, Saccharomyces pastorianus
tacctgttgcagtatcctcgacgta

SEQ ID NO: 156840 - DNA, 25 bp, Saccharomyces pastorianus
atatctttctcatcagtacccgttg

SEQ ID NO: 156841 - DNA, 25 bp, Saccharomyces pastorianus
attcaacctttgttcatgcgacttc

SEQ ID NO: 156842 - DNA, 25 bp, Saccharomyces pastorianus
gcagtatcttcgatttccacgacaa

SEQ ID NO: 156843 - DNA, 25 bp, Saccharomyces pastorianus
attgggactactatcggcgaagctc

SEQ ID NO: 156844 - DNA, 25 bp, Saccharomyces pastorianus
gcagatgcggaaactgaaccttttg

SEQ ID NO: 156845 - DNA, 25 bp, Saccharomyces pastorianus
agagcatctacgtcatcttcaacct

SEQ ID NO: 156846 - DNA, 25 bp, Saccharomyces pastorianus
gcagcacatctgacatggatctctc

SEQ ID NO: 156847 - DNA, 25 bp, Saccharomyces pastorianus
ttgtcgatgtctactactgctacta

SEQ ID NO: 156848 - DNA, 25 bp, Saccharomyces pastorianus
gcgaagctcgcccagagaacgaaaa

SEQ ID NO: 156849 - DNA, 25 bp, Saccharomyces pastorianus
ttcttcatcgtctttgccatctagc

SEQ ID NO: 156850 - DNA, 25 bp, Saccharomyces pastorianus
gaaccttttgtttccttgtcgatgt

SEQ ID NO: 156851 - DNA, 25 bp, Saccharomyces pastorianus
aacctcttctcatgccgtagtggaa

SEQ ID NO: 156852 - DNA, 25 bp, Saccharomyces pastorianus
atcacctatatgcttctggaattgg

SEQ ID NO: 156853 - DNA, 25 bp, Saccharomyces pastorianus
gataataatccattcgtcggcactc

SEQ ID NO: 156854 - DNA, 25 bp, Saccharomyces pastorianus
agaggttacatctgaccctaacacc

SEQ ID NO: 156855 - DNA, 25 bp, Saccharomyces pastorianus
aattttcttatcacctcagactctg

SEQ ID NO: 156856 - DNA, 25 bp, Saccharomyces pastorianus
gaaagttcttatccgcttattagca

SEQ ID NO: 156857 - DNA, 25 bp, Saccharomyces pastorianus
atagattgcacagcttgttagacaa

SEQ ID NO: 156858 - DNA, 25 bp, Saccharomyces pastorianus
agctgcttgcccaatggaccaaaga

SEQ ID NO: 156859 - DNA, 25 bp, Saccharomyces pastorianus
gcatcttcaaacacatcttctgtag

SEQ ID NO: 156860 - DNA, 25 bp, Saccharomyces pastorianus
attctgccgcacattatagatcaag

SEQ ID NO: 156861 - DNA, 25 bp, Saccharomyces pastorianus
gcagatgccggtcatgcatttgcaa

SEQ ID NO: 156862 - DNA, 25 bp, Saccharomyces pastorianus
cgaagaccgaccacatttttgaatt

SEQ ID NO: 156863 - DNA, 25 bp, Saccharomyces pastorianus
agcctcgcctgattttcgggtttga

SEQ ID NO: 156864 - DNA, 25 bp, Saccharomyces pastorianus
agagattacctcatggcagctgctt

SEQ ID NO: 156865 - DNA, 25 bp, Saccharomyces pastorianus
atatctgtcaatgcttgttcaacaa

SEQ ID NO: 156866 - DNA, 25 bp, Saccharomyces pastorianus
tactacctttatcatagagcccctc

SEQ ID NO: 156867 - DNA, 25 bp, Saccharomyces pastorianus
aattcaatgatttactactaccttt

SEQ ID NO: 156868 - DNA, 25 bp, Saccharomyces pastorianus
atggaatatacctccaactggatat

SEQ ID NO: 156869 - DNA, 25 bp, Saccharomyces pastorianus
caattgcttgttatcatatctgtca

SEQ ID NO: 156870 - DNA, 25 bp, Saccharomyces pastorianus
gccttctaattggtggcttattgat

SEQ ID NO: 156871 - DNA, 25 bp, Saccharomyces pastorianus
ggacgcaaatcgctgaaaccgcaac

SEQ ID NO: 156872 - DNA, 25 bp, Saccharomyces pastorianus
ggatattttctaacggcctgtgctt

SEQ ID NO: 156873 - DNA, 25 bp, Saccharomyces pastorianus
gtgcttgggcatacgaggacgcaaa

SEQ ID NO: 156874 - DNA, 25 bp, Saccharomyces pastorianus
gcccctccgtatatttatcactgta

SEQ ID NO: 156875 - DNA, 25 bp, Saccharomyces pastorianus
ctttattcttttgagtagccttcta

SEQ ID NO: 156876 - DNA, 25 bp, Saccharomyces pastorianus
ctttgtggacaataacagggtcgct

SEQ ID NO: 156877 - DNA, 25 bp, Saccharomyces pastorianus
taattcctcagtgcgatgttatcct

SEQ ID NO: 156878 - DNA, 25 bp, Saccharomyces pastorianus
gaagcctcacttatcagatcaactt

SEQ ID NO: 156879 - DNA, 25 bp, Saccharomyces pastorianus
agaacttttgcccaatttcctatct

SEQ ID NO: 156880 - DNA, 25 bp, Saccharomyces pastorianus
agtgcgatgttatcctcgtaaataa

SEQ ID NO: 156881 - DNA, 25 bp, Saccharomyces pastorianus
acagggtcgctgaactaattcctca

SEQ ID NO: 156882 - DNA, 25 bp, Saccharomyces pastorianus
tgcgtagtacaagctgcgttggaat

SEQ ID NO: 156883 - DNA, 25 bp, Saccharomyces pastorianus
tttcatggacgcatagtggcggaga

SEQ ID NO: 156884 - DNA, 25 bp, Saccharomyces pastorianus
gatgtgcattaagcttcggatgtga

SEQ ID NO: 156885 - DNA, 25 bp, Saccharomyces pastorianus
gctagcgatttaactatactgcagt

SEQ ID NO: 156886 - DNA, 25 bp, Saccharomyces pastorianus
gggtgacactttcatggatctcggt

SEQ ID NO: 156887 - DNA, 25 bp, Saccharomyces pastorianus
tgccgggtgagtgtgcttctataac

SEQ ID NO: 156888 - DNA, 25 bp, Saccharomyces pastorianus
tctgtctatttttcatatgcctctg

SEQ ID NO: 156889 - DNA, 25 bp, Saccharomyces pastorianus
gttgtcgtggatgatgttctcgcca

SEQ ID NO: 156890 - DNA, 25 bp, Saccharomyces pastorianus
ttcatatttccttctcgctttgtat

SEQ ID NO: 156891 - DNA, 25 bp, Saccharomyces pastorianus
gattaattgtcttgctctcttcata

SEQ ID NO: 156892 - DNA, 25 bp, Saccharomyces pastorianus
gaagctagaggccttctatttgggc

SEQ ID NO: 156893 - DNA, 25 bp, Saccharomyces pastorianus
attccctttgattccaacgtggttg

SEQ ID NO: 156894 - DNA, 25 bp, Saccharomyces pastorianus
tgcgggcgaccttatcagacaagtg

SEQ ID NO: 156895 - DNA, 25 bp, Saccharomyces pastorianus
aacggcatatgctgcgggcgacctt

SEQ ID NO: 156896 - DNA, 25 bp, Saccharomyces pastorianus
gttggtacacacgttcaagacgcat

SEQ ID NO: 156897 - DNA, 25 bp, Saccharomyces pastorianus
gacaagtgggtgctcatattctgga

SEQ ID NO: 156898 - DNA, 25 bp, Saccharomyces pastorianus
tgtcctattacttccaaaaataagt

SEQ ID NO: 156899 - DNA, 25 bp, Saccharomyces pastorianus
ttccaacgaaatagccttgttggcg

SEQ ID NO: 156900 - DNA, 25 bp, Saccharomyces pastorianus
taatgtcctattacttccaaaaata

SEQ ID NO: 156901 - DNA, 25 bp, Saccharomyces pastorianus
tttccaacgaaatagccttgttggc

SEQ ID NO: 156902 - DNA, 25 bp, Saccharomyces pastorianus
tagtttttccaacgaaatagccttg

SEQ ID NO: 156903 - DNA, 25 bp, Saccharomyces pastorianus
tcctattacttccaaaaataagtag

SEQ ID NO: 156904 - DNA, 25 bp, Saccharomyces pastorianus
ttttccaacgaaatagccttgttgg

SEQ ID NO: 156905 - DNA, 25 bp, Saccharomyces pastorianus
tttttccaacgaaatagccttgttg

SEQ ID NO: 156906 - DNA, 25 bp, Saccharomyces pastorianus
tccaacgaaatagccttgttggcgc

SEQ ID NO: 156907 - DNA, 25 bp, Saccharomyces pastorianus
atgtcctattacttccaaaaataag

SEQ ID NO: 156908 - DNA, 25 bp, Saccharomyces pastorianus
ttaatgtcctattacttccaaaaat

SEQ ID NO: 156909 - DNA, 25 bp, Saccharomyces pastorianus
gtattcctgaaatggatgacttggt

SEQ ID NO: 156910 - DNA, 25 bp, Saccharomyces pastorianus
cgaacagtctatctgattggtctat

SEQ ID NO: 156911 - DNA, 25 bp, Saccharomyces pastorianus
atcagcttctaaagttgcacccaac

SEQ ID NO: 156912 - DNA, 25 bp, Saccharomyces pastorianus
cgtgccaagcggtgtaagagaatct

SEQ ID NO: 156913 - DNA, 25 bp, Saccharomyces pastorianus
ggacatttggattagttgtgcgaaa

SEQ ID NO: 156914 - DNA, 25 bp, Saccharomyces pastorianus
cacaagatttaaagttttgggcaat

SEQ ID NO: 156915 - DNA, 25 bp, Saccharomyces pastorianus
gtcaataaattacgtgccaagcggt

SEQ ID NO: 156916 - DNA, 25 bp, Saccharomyces pastorianus
gattaaattccagagggtctagcat

SEQ ID NO: 156917 - DNA, 25 bp, Saccharomyces pastorianus
gttgcacccaacgaatgtggacatt

SEQ ID NO: 156918 - DNA, 25 bp, Saccharomyces pastorianus
ggtggagaaaggactattcactaaa

SEQ ID NO: 156919 - DNA, 25 bp, Saccharomyces pastorianus
aaagaactgattttgagcatagatt

SEQ ID NO: 156920 - DNA, 25 bp, Saccharomyces pastorianus
gactgacacctagggagccagtaat

SEQ ID NO: 156921 - DNA, 25 bp, Saccharomyces pastorianus
catcctgtcgacctgtgttttgttt

SEQ ID NO: 156922 - DNA, 25 bp, Saccharomyces pastorianus
ttgtttttcctcgtgtttataattg

SEQ ID NO: 156923 - DNA, 25 bp, Saccharomyces pastorianus
cgatattcatcctgacccttattat

SEQ ID NO: 156924 - DNA, 25 bp, Saccharomyces pastorianus
aaatcattgattgccatcctgtcga

SEQ ID NO: 156925 - DNA, 25 bp, Saccharomyces pastorianus
ggaaggaagctctattgatgcagtt

SEQ ID NO: 156926 - DNA, 25 bp, Saccharomyces pastorianus
aatttacaaagctaggactgacacc

SEQ ID NO: 156927 - DNA, 25 bp, Saccharomyces pastorianus
gaaaattacatggacggttccttca

SEQ ID NO: 156928 - DNA, 25 bp, Saccharomyces pastorianus
caatatgtttccgttttctccaaat

SEQ ID NO: 156929 - DNA, 25 bp, Saccharomyces pastorianus
gggacaacgagtcacttcaattgct

SEQ ID NO: 156930 - DNA, 25 bp, Saccharomyces pastorianus
ggttccttcatattaccgatattca

SEQ ID NO: 156931 - DNA, 25 bp, Saccharomyces pastorianus
aatgtctggatgtgattctcccgtt

SEQ ID NO: 156932 - DNA, 25 bp, Saccharomyces pastorianus
gtggcacccaagtttgggaaggcaa

SEQ ID NO: 156933 - DNA, 25 bp, Saccharomyces pastorianus
ggcaatgtctggatgtgattctccc

SEQ ID NO: 156934 - DNA, 25 bp, Saccharomyces pastorianus
atgtggcacccaagtttgggaaggc

SEQ ID NO: 156935 - DNA, 25 bp, Saccharomyces pastorianus
atgtctggatgtgattctcccgtta

SEQ ID NO: 156936 - DNA, 25 bp, Saccharomyces pastorianus
aaggcaatgtctggatgtgattctc

SEQ ID NO: 156937 - DNA, 25 bp, Saccharomyces pastorianus
caatgtctggatgtgattctcccgt

SEQ ID NO: 156938 - DNA, 25 bp, Saccharomyces pastorianus
gtctggatgtgattctcccgttatt

SEQ ID NO: 156939 - DNA, 25 bp, Saccharomyces pastorianus
cccaagtttgggaaggcaatgtctg

SEQ ID NO: 156940 - DNA, 25 bp, Saccharomyces pastorianus
aaaaggatgtggcacccaagtttgg

SEQ ID NO: 156941 - DNA, 25 bp, Saccharomyces pastorianus
aaaggatgtggcacccaagtttggg

SEQ ID NO: 156942 - DNA, 25 bp, Saccharomyces pastorianus
gggcccatattctgacaacaattct

SEQ ID NO: 156943 - DNA, 25 bp, Saccharomyces pastorianus
tacgtggtgctgttggtgtcgcctt

SEQ ID NO: 156944 - DNA, 25 bp, Saccharomyces pastorianus
tattcagacagatttgggcccatat

SEQ ID NO: 156945 - DNA, 25 bp, Saccharomyces pastorianus
tgtcgccttggcgttgggaattcaa

SEQ ID NO: 156946 - DNA, 25 bp, Saccharomyces pastorianus
gttcactttattggcaacggtcctt

SEQ ID NO: 156947 - DNA, 25 bp, Saccharomyces pastorianus
gtttctccatccttacaagattcgg

SEQ ID NO: 156948 - DNA, 25 bp, Saccharomyces pastorianus
caagaatctccccaataacatatcc

SEQ ID NO: 156949 - DNA, 25 bp, Saccharomyces pastorianus
taacccggcaaggtcttctatggat

SEQ ID NO: 156950 - DNA, 25 bp, Saccharomyces pastorianus
accaattcgcggtcagcagtaacaa

SEQ ID NO: 156951 - DNA, 25 bp, Saccharomyces pastorianus
aagattcggctacgcaatcacctgc

SEQ ID NO: 156952 - DNA, 25 bp, Saccharomyces pastorianus
gtattcttggacaacgtttctccat

SEQ ID NO: 156953 - DNA, 25 bp, Saccharomyces pastorianus
gatgaccctattgcaggtgatcctg

SEQ ID NO: 156954 - DNA, 25 bp, Saccharomyces pastorianus
tagggcagtgcatgaaactgtgctt

SEQ ID NO: 156955 - DNA, 25 bp, Saccharomyces pastorianus
ggcattgttcattatgttgctccta

SEQ ID NO: 156956 - DNA, 25 bp, Saccharomyces pastorianus
atgttgctcctattgatctctgcat

SEQ ID NO: 156957 - DNA, 25 bp, Saccharomyces pastorianus
gttaaccaccgccaagagagcagtt

SEQ ID NO: 156958 - DNA, 25 bp, Saccharomyces pastorianus
gatctctgcattgtggtctagttac

SEQ ID NO: 156959 - DNA, 25 bp, Saccharomyces pastorianus
gatctcccgggtagcgatgacccta

SEQ ID NO: 156960 - DNA, 25 bp, Saccharomyces pastorianus
gatcctgatgtagacttaaaccctg

SEQ ID NO: 156961 - DNA, 25 bp, Saccharomyces pastorianus
gacgatgatgatgaacttctacctt

SEQ ID NO: 156962 - DNA, 25 bp, Saccharomyces pastorianus
ttggcttgataataaggatgtcccc

SEQ ID NO: 156963 - DNA, 25 bp, Saccharomyces pastorianus
aaggtgctgttaaccaccgccaaga

SEQ ID NO: 156964 - DNA, 25 bp, Saccharomyces pastorianus
agcacttttctcttgtcgatctata

SEQ ID NO: 156965 - DNA, 25 bp, Saccharomyces pastorianus
taacatatcgcatggtctgttggga

SEQ ID NO: 156966 - DNA, 25 bp, Saccharomyces pastorianus
gtgaacactcactacagcaaatatt

SEQ ID NO: 156967 - DNA, 25 bp, Saccharomyces pastorianus
tggtgctcagacattatcagaaatc

SEQ ID NO: 156968 - DNA, 25 bp, Saccharomyces pastorianus
tatggcccttttacccgcagaaagt

SEQ ID NO: 156969 - DNA, 25 bp, Saccharomyces pastorianus
tttgttaacaccattttctcggctc

SEQ ID NO: 156970 - DNA, 25 bp, Saccharomyces pastorianus
atccttgaagcatgtctggtgctca

SEQ ID NO: 156971 - DNA, 25 bp, Saccharomyces pastorianus
tcggctcctcaagtaagctcgaagt

SEQ ID NO: 156972 - DNA, 25 bp, Saccharomyces pastorianus
gaacggatgctttattcacattgga

SEQ ID NO: 156973 - DNA, 25 bp, Saccharomyces pastorianus
tttctcaataaaagcttcggtggcg

SEQ ID NO: 156974 - DNA, 25 bp, Saccharomyces pastorianus
atgacgacccaagaactgtgtgaac

SEQ ID NO: 156975 - DNA, 25 bp, Saccharomyces pastorianus
tctttcaacacagttcccagatcaa

SEQ ID NO: 156976 - DNA, 25 bp, Saccharomyces pastorianus
gaaagtggctttacctcggacaaca

SEQ ID NO: 156977 - DNA, 25 bp, Saccharomyces pastorianus
gatacggtggacatactcgctaagc

SEQ ID NO: 156978 - DNA, 25 bp, Saccharomyces pastorianus
gcgcagtctagcctcgatattggac

SEQ ID NO: 156979 - DNA, 25 bp, Saccharomyces pastorianus
gatcaaaggtatcttcgcccttaga

SEQ ID NO: 156980 - DNA, 25 bp, Saccharomyces pastorianus
agaatttcctggcatgcagatccct

SEQ ID NO: 156981 - DNA, 25 bp, Saccharomyces pastorianus
aatgccgactacttctccgggaata

SEQ ID NO: 156982 - DNA, 25 bp, Saccharomyces pastorianus
agtacctaccatgcgtatctttcaa

SEQ ID NO: 156983 - DNA, 25 bp, Saccharomyces pastorianus
tgtatgtcaggcaggaccagctgga

SEQ ID NO: 156984 - DNA, 25 bp, Saccharomyces pastorianus
gcagatccctgcagattatacaatg

SEQ ID NO: 156985 - DNA, 25 bp, Saccharomyces pastorianus
attggactcgagcagttccgtcgaa

SEQ ID NO: 156986 - DNA, 25 bp, Saccharomyces pastorianus
ggacgcaacggcctcttgatagata

SEQ ID NO: 156987 - DNA, 25 bp, Saccharomyces pastorianus
gtacgcggatcatgacagccacgat

SEQ ID NO: 156988 - DNA, 25 bp, Saccharomyces pastorianus
gacagaggtttctgcgtcaggccag

SEQ ID NO: 156989 - DNA, 25 bp, Saccharomyces pastorianus
tgaaaccactgctgccgacgaaaat

SEQ ID NO: 156990 - DNA, 25 bp, Saccharomyces pastorianus
aacgctagttttgcgcggctggaga

SEQ ID NO: 156991 - DNA, 25 bp, Saccharomyces pastorianus
aaggcgtcttggttgtggtttatct

SEQ ID NO: 156992 - DNA, 25 bp, Saccharomyces pastorianus
tatcgctcaggagtatgacccagga

SEQ ID NO: 156993 - DNA, 25 bp, Saccharomyces pastorianus
gaactagccaaaccttttcttgttg

SEQ ID NO: 156994 - DNA, 25 bp, Saccharomyces pastorianus
gcggcaacgctgagcaacgctagtt

SEQ ID NO: 156995 - DNA, 25 bp, Saccharomyces pastorianus
actactgatgctgtcgccattgaaa

SEQ ID NO: 156996 - DNA, 25 bp, Saccharomyces pastorianus
gtggtttatctacgattgccgccgg

SEQ ID NO: 156997 - DNA, 25 bp, Saccharomyces pastorianus
attattccgcccatggcgtctatta

SEQ ID NO: 156998 - DNA, 25 bp, Saccharomyces pastorianus
ggtcgttaccattcatattcatatt

SEQ ID NO: 156999 - DNA, 25 bp, Saccharomyces pastorianus
tcatctcgtaatgggaaacatcgtc

SEQ ID NO: 157000 - DNA, 25 bp, Saccharomyces pastorianus
tcattttccggttctatagagccaa

SEQ ID NO: 157001 - DNA, 25 bp, Saccharomyces pastorianus
ggcgtctattaccaagcgtcataat

SEQ ID NO: 157002 - DNA, 25 bp, Saccharomyces pastorianus
taccaagcgtcataatgtgcaatat

SEQ ID NO: 157003 - DNA, 25 bp, Saccharomyces pastorianus
atagagccaatttctttttcctttg

SEQ ID NO: 157004 - DNA, 25 bp, Saccharomyces pastorianus
attagagcttccttcattattccgc

SEQ ID NO: 157005 - DNA, 25 bp, Saccharomyces pastorianus
gaaacatcgtcaaggtcgttaccat

SEQ ID NO: 157006 - DNA, 25 bp, Saccharomyces pastorianus
tggttgtatttccttcatctcgtaa

SEQ ID NO: 157007 - DNA, 25 bp, Saccharomyces pastorianus
atattctacttcattttccggttct

SEQ ID NO: 157008 - DNA, 25 bp, Saccharomyces pastorianus
gaggaattatctcccattacacaag

SEQ ID NO: 157009 - DNA, 25 bp, Saccharomyces pastorianus
actgaggcaaacgttcctggattta

SEQ ID NO: 157010 - DNA, 25 bp, Saccharomyces pastorianus
agaccgaaatagttcctctctctaa

SEQ ID NO: 157011 - DNA, 25 bp, Saccharomyces pastorianus
taaccaacccaagttcttcatcatt

SEQ ID NO: 157012 - DNA, 25 bp, Saccharomyces pastorianus
attgtatctcatattctcaaccgaa

SEQ ID NO: 157013 - DNA, 25 bp, Saccharomyces pastorianus
aataccctcttcaaaatcgcttgta

SEQ ID NO: 157014 - DNA, 25 bp, Saccharomyces pastorianus
gaatgtatgatcgtgcgcgcgacga

SEQ ID NO: 157015 - DNA, 25 bp, Saccharomyces pastorianus
attcaggctgcccaaatgctcaagc

SEQ ID NO: 157016 - DNA, 25 bp, Saccharomyces pastorianus
gtacgcaaccagttttcgagcttga

SEQ ID NO: 157017 - DNA, 25 bp, Saccharomyces pastorianus
gtccttatttacttcatgggcaaac

SEQ ID NO: 157018 - DNA, 25 bp, Saccharomyces pastorianus
attacacaagactctccaacatcat

SEQ ID NO: 157019 - DNA, 25 bp, Saccharomyces pastorianus
accgttcccatttagctgttttcat

SEQ ID NO: 157020 - DNA, 25 bp, Saccharomyces pastorianus
aatccactcttccaataccaactta

SEQ ID NO: 157021 - DNA, 25 bp, Saccharomyces pastorianus
tttgaatccactcttccaataccaa

SEQ ID NO: 157022 - DNA, 25 bp, Saccharomyces pastorianus
atttagctgttttcatgcaccgtct

SEQ ID NO: 157023 - DNA, 25 bp, Saccharomyces pastorianus
ttagctgttttcatgcaccgtctga

SEQ ID NO: 157024 - DNA, 25 bp, Saccharomyces pastorianus
gttcccatttagctgttttcatgca

SEQ ID NO: 157025 - DNA, 25 bp, Saccharomyces pastorianus
agctgttttcatgcaccgtctgatg

SEQ ID NO: 157026 - DNA, 25 bp, Saccharomyces pastorianus
aaaatcagacgaaacaacagctacc

SEQ ID NO: 157027 - DNA, 25 bp, Saccharomyces pastorianus
gagttttgaatccactcttccaata

SEQ ID NO: 157028 - DNA, 25 bp, Saccharomyces pastorianus
aacaaggtattgttcatctgggagt

SEQ ID NO: 157029 - DNA, 25 bp, Saccharomyces pastorianus
aactctaaagagttttgaatccact

SEQ ID NO: 157030 - DNA, 25 bp, Saccharomyces pastorianus
taacatatacgctccttcttcatta

SEQ ID NO: 157031 - DNA, 25 bp, Saccharomyces pastorianus
aggtgctactcttttcctgtaatga

SEQ ID NO: 157032 - DNA, 25 bp, Saccharomyces pastorianus
agactcaccatcattttctgtacga

SEQ ID NO: 157033 - DNA, 25 bp, Saccharomyces pastorianus
agatcatgcctatttgacctttata

SEQ ID NO: 157034 - DNA, 25 bp, Saccharomyces pastorianus
gtcaatcttatgttacgttcccaga

SEQ ID NO: 157035 - DNA, 25 bp, Saccharomyces pastorianus
tcataaccgattcctaccaacaaga

SEQ ID NO: 157036 - DNA, 25 bp, Saccharomyces pastorianus
atccaaatcatctagcataccgtca

SEQ ID NO: 157037 - DNA, 25 bp, Saccharomyces pastorianus
aaacctcctgctcgagttcaaatat

SEQ ID NO: 157038 - DNA, 25 bp, Saccharomyces pastorianus
ggtcactttcacaaggtcaaacgct

SEQ ID NO: 157039 - DNA, 25 bp, Saccharomyces pastorianus
gtgtctaaaatatcgaacttgccct

SEQ ID NO: 157040 - DNA, 25 bp, Saccharomyces pastorianus
tcaaaactcctccttaaattcctct

SEQ ID NO: 157041 - DNA, 25 bp, Saccharomyces pastorianus
caggccaacggcaaatgctaagcta

SEQ ID NO: 157042 - DNA, 25 bp, Saccharomyces pastorianus
gctaagctatttccaagggtttgtg

SEQ ID NO: 157043 - DNA, 25 bp, Saccharomyces pastorianus
aacggcaaatgctaagctatttcca

SEQ ID NO: 157044 - DNA, 25 bp, Saccharomyces pastorianus
ggtttgtgcccatacacacaatatt

SEQ ID NO: 157045 - DNA, 25 bp, Saccharomyces pastorianus
gccaacggcaaatgctaagctattt

SEQ ID NO: 157046 - DNA, 25 bp, Saccharomyces pastorianus
aatgctaagctatttccaagggttt

SEQ ID NO: 157047 - DNA, 25 bp, Saccharomyces pastorianus
tcatcaggccaacggcaaatgctaa

SEQ ID NO: 157048 - DNA, 25 bp, Saccharomyces pastorianus
gtgcccatacacacaatattttatt

SEQ ID NO: 157049 - DNA, 25 bp, Saccharomyces pastorianus
ggcaaatgctaagctatttccaagg

SEQ ID NO: 157050 - DNA, 25 bp, Saccharomyces pastorianus
agggtttgtgcccatacacacaata

SEQ ID NO: 157051 - DNA, 25 bp, Saccharomyces pastorianus
cacaatattttattccgtgttccat

SEQ ID NO: 157052 - DNA, 25 bp, Saccharomyces pastorianus
cttctttctgtctcttggtggttcc

SEQ ID NO: 157053 - DNA, 25 bp, Saccharomyces pastorianus
ttctgtctcttggtggttccttcaa

SEQ ID NO: 157054 - DNA, 25 bp, Saccharomyces pastorianus
ccttctttctgtctcttggtggttc

SEQ ID NO: 157055 - DNA, 25 bp, Saccharomyces pastorianus
tccttctttctgtctcttggtggtt

SEQ ID NO: 157056 - DNA, 25 bp, Saccharomyces pastorianus
tttctgtctcttggtggttccttca

SEQ ID NO: 157057 - DNA, 25 bp, Saccharomyces pastorianus
ctttctgtctcttggtggttccttc

SEQ ID NO: 157058 - DNA, 25 bp, Saccharomyces pastorianus
ttctttctgtctcttggtggttcct

SEQ ID NO: 157059 - DNA, 25 bp, Saccharomyces pastorianus
tctttctgtctcttggtggttcctt

SEQ ID NO: 157060 - DNA, 25 bp, Saccharomyces pastorianus
ctaccgttgctaaattcgagtgaaa

SEQ ID NO: 157061 - DNA, 25 bp, Saccharomyces pastorianus
gggcggattactaccgttgctaaat

SEQ ID NO: 157062 - DNA, 25 bp, Saccharomyces pastorianus
ggaagaccagaaaatcctcatttca

SEQ ID NO: 157063 - DNA, 25 bp, Saccharomyces pastorianus
tgccgttggaaatcactgggaaata

SEQ ID NO: 157064 - DNA, 25 bp, Saccharomyces pastorianus
gaaatccattcaactaacatcacac

SEQ ID NO: 157065 - DNA, 25 bp, Saccharomyces pastorianus
gagaacttcatgtgggtcctaggat

SEQ ID NO: 157066 - DNA, 25 bp, Saccharomyces pastorianus
gagcagacgctcatcaataaaatcg

SEQ ID NO: 157067 - DNA, 25 bp, Saccharomyces pastorianus
cagagcgagagcatttttgaatatc

SEQ ID NO: 157068 - DNA, 25 bp, Saccharomyces pastorianus
aatttcatcaatgggtgccgttgga

SEQ ID NO: 157069 - DNA, 25 bp, Saccharomyces pastorianus
gaatttgcagtggtaacgctagagc

SEQ ID NO: 157070 - DNA, 25 bp, Saccharomyces pastorianus
ggcacatcaatgcatcaatccgtgt

SEQ ID NO: 157071 - DNA, 25 bp, Saccharomyces pastorianus
aggttttattgcttccgactccgat

SEQ ID NO: 157072 - DNA, 25 bp, Saccharomyces pastorianus
aacgcggaggatgacatttctactg

SEQ ID NO: 157073 - DNA, 25 bp, Saccharomyces pastorianus
ttccgactccgataaagatattgcg

SEQ ID NO: 157074 - DNA, 25 bp, Saccharomyces pastorianus
tttctactgttcaaccagacgctga

SEQ ID NO: 157075 - DNA, 25 bp, Saccharomyces pastorianus
ttgccatccggacaaagtaagcttg

SEQ ID NO: 157076 - DNA, 25 bp, Saccharomyces pastorianus
gacgctgattctgttttcattttaa

SEQ ID NO: 157077 - DNA, 25 bp, Saccharomyces pastorianus
cttcccattctggtatttggataga

SEQ ID NO: 157078 - DNA, 25 bp, Saccharomyces pastorianus
gttgaacactgacctacataaccct

SEQ ID NO: 157079 - DNA, 25 bp, Saccharomyces pastorianus
gaaagaatcatcgaagccttctcgt

SEQ ID NO: 157080 - DNA, 25 bp, Saccharomyces pastorianus
gccttctcgtctgcgtattgtgaaa

SEQ ID NO: 157081 - DNA, 25 bp, Saccharomyces pastorianus
aacaatcggtttgctactttgccat

SEQ ID NO: 157082 - DNA, 25 bp, Saccharomyces pastorianus
gtagatcccgtcactatcataatca

SEQ ID NO: 157083 - DNA, 25 bp, Saccharomyces pastorianus
tagatcccgtcactatcataatcaa

SEQ ID NO: 157084 - DNA, 25 bp, Saccharomyces pastorianus
tcgtcacggtagatcccgtcactat

SEQ ID NO: 157085 - DNA, 25 bp, Saccharomyces pastorianus
gatcccgtcactatcataatcaaag

SEQ ID NO: 157086 - DNA, 25 bp, Saccharomyces pastorianus
ggtagatcccgtcactatcataatc

SEQ ID NO: 157087 - DNA, 25 bp, Saccharomyces pastorianus
cggtagatcccgtcactatcataat

SEQ ID NO: 157088 - DNA, 25 bp, Saccharomyces pastorianus
cccgtcactatcataatcaaagaat

SEQ ID NO: 157089 - DNA, 25 bp, Saccharomyces pastorianus
gtcacggtagatcccgtcactatca

SEQ ID NO: 157090 - DNA, 25 bp, Saccharomyces pastorianus
gtcactatcataatcaaagaatgca

SEQ ID NO: 157091 - DNA, 25 bp, Saccharomyces pastorianus
atcccgtcactatcataatcaaaga

SEQ ID NO: 157092 - DNA, 25 bp, Saccharomyces pastorianus
ttcgtcacggtagatcccgtcacta

SEQ ID NO: 157093 - DNA, 25 bp, Saccharomyces pastorianus
atgcaaggcatctcatccggaactc

SEQ ID NO: 157094 - DNA, 25 bp, Saccharomyces pastorianus
aacgttatcattgagcctggcgaac

SEQ ID NO: 157095 - DNA, 25 bp, Saccharomyces pastorianus
gatattgcgcgtatttcattcccta

SEQ ID NO: 157096 - DNA, 25 bp, Saccharomyces pastorianus
tccggaactcgatgtggtgctgatt

SEQ ID NO: 157097 - DNA, 25 bp, Saccharomyces pastorianus
ctttgaggcctcttatcgatgatta

SEQ ID NO: 157098 - DNA, 25 bp, Saccharomyces pastorianus
aagaactgccgttacgatctcgtag

SEQ ID NO: 157099 - DNA, 25 bp, Saccharomyces pastorianus
gcgccgtttagacgcagggaccaac

SEQ ID NO: 157100 - DNA, 25 bp, Saccharomyces pastorianus
gtgatttacctccaacggcactaag

SEQ ID NO: 157101 - DNA, 25 bp, Saccharomyces pastorianus
cagctggcattggtcatcgttgtga

SEQ ID NO: 157102 - DNA, 25 bp, Saccharomyces pastorianus
gctgattcagggtgattccgcattt

SEQ ID NO: 157103 - DNA, 25 bp, Saccharomyces pastorianus
attgggctcggatatgctcttgcat

SEQ ID NO: 157104 - DNA, 25 bp, Saccharomyces pastorianus
aaaacaacgttatgcctggctttgg

SEQ ID NO: 157105 - DNA, 25 bp, Saccharomyces pastorianus
tttccaaaattgaaggttctctgcc

SEQ ID NO: 157106 - DNA, 25 bp, Saccharomyces pastorianus
ttgccctcagaattttattgagttt

SEQ ID NO: 157107 - DNA, 25 bp, Saccharomyces pastorianus
ctgccaattgccctcagaattttat

SEQ ID NO: 157108 - DNA, 25 bp, Saccharomyces pastorianus
attgagtttgcaaccattctgctgt

SEQ ID NO: 157109 - DNA, 25 bp, Saccharomyces pastorianus
aacgttatgcctggctttggttcct

SEQ ID NO: 157110 - DNA, 25 bp, Saccharomyces pastorianus
gtttgcaaccattctgctgtaacat

SEQ ID NO: 157111 - DNA, 25 bp, Saccharomyces pastorianus
caaccattctgctgtaacatttaca

SEQ ID NO: 157112 - DNA, 25 bp, Saccharomyces pastorianus
atgcctggctttggttccttctgtt

SEQ ID NO: 157113 - DNA, 25 bp, Saccharomyces pastorianus
attgaaggttctctgccaattgccc

SEQ ID NO: 157114 - DNA, 25 bp, Saccharomyces pastorianus
agtgaagagcacgtccggaaacaca

SEQ ID NO: 157115 - DNA, 25 bp, Saccharomyces pastorianus
gaaactcagtattacaccaccggtg

SEQ ID NO: 157116 - DNA, 25 bp, Saccharomyces pastorianus
aagctatccgtcaccttgctaatga

SEQ ID NO: 157117 - DNA, 25 bp, Saccharomyces pastorianus
agacaagtggatccgtactaccgtc

SEQ ID NO: 157118 - DNA, 25 bp, Saccharomyces pastorianus
tactaccgtctaacattgtcgccaa

SEQ ID NO: 157119 - DNA, 25 bp, Saccharomyces pastorianus
gatatttttgtgtttctttcgtcgg

SEQ ID NO: 157120 - DNA, 25 bp, Saccharomyces pastorianus
cagaccgccatggagtgtttacatt

SEQ ID NO: 157121 - DNA, 25 bp, Saccharomyces pastorianus
ccatttgtggcgtcattgttgcgtg

SEQ ID NO: 157122 - DNA, 25 bp, Saccharomyces pastorianus
gtaagattggcctgtcgttcactac

SEQ ID NO: 157123 - DNA, 25 bp, Saccharomyces pastorianus
gaatggctaccacatatcgctgatg

SEQ ID NO: 157124 - DNA, 25 bp, Saccharomyces pastorianus
tgcggttcattcacatgcggatggt

SEQ ID NO: 157125 - DNA, 25 bp, Saccharomyces pastorianus
tgtttacattcctcactgactatcg

SEQ ID NO: 157126 - DNA, 25 bp, Saccharomyces pastorianus
gagacttttcatgagatggttccaa

SEQ ID NO: 157127 - DNA, 25 bp, Saccharomyces pastorianus
atgtttctaataccatccaccctaa

SEQ ID NO: 157128 - DNA, 25 bp, Saccharomyces pastorianus
gttccaaccaatttccattagctgt

SEQ ID NO: 157129 - DNA, 25 bp, Saccharomyces pastorianus
gcttcttacccaagttcgatcataa

SEQ ID NO: 157130 - DNA, 25 bp, Saccharomyces pastorianus
tagccggtcgtggtattgtattgag

SEQ ID NO: 157131 - DNA, 25 bp, Saccharomyces pastorianus
tatgctgctagaagtcctgatttca

SEQ ID NO: 157132 - DNA, 25 bp, Saccharomyces pastorianus
tagagcaaggcttcttacccaagtt

SEQ ID NO: 157133 - DNA, 25 bp, Saccharomyces pastorianus
tatgagcgccaaagtagccggtcgt

SEQ ID NO: 157134 - DNA, 25 bp, Saccharomyces pastorianus
atactttaccgatccaagtggtcta

SEQ ID NO: 157135 - DNA, 25 bp, Saccharomyces pastorianus
gataattctaccaatgttccacaag

SEQ ID NO: 157136 - DNA, 25 bp, Saccharomyces pastorianus
gtggttctactcaatcttttgcaag

SEQ ID NO: 157137 - DNA, 25 bp, Saccharomyces pastorianus
gtaaacacgataatgctgctaaaga

SEQ ID NO: 157138 - DNA, 25 bp, Saccharomyces pastorianus
gttcttggccgcaggtcacacttat

SEQ ID NO: 157139 - DNA, 25 bp, Saccharomyces pastorianus
gcagggagtgtattccggagctatt

SEQ ID NO: 157140 - DNA, 25 bp, Saccharomyces pastorianus
atttggccaaaaatacagcccactg

SEQ ID NO: 157141 - DNA, 25 bp, Saccharomyces pastorianus
aggtcacacttatgcactgcaggga

SEQ ID NO: 157142 - DNA, 25 bp, Saccharomyces pastorianus
tggaggtaccttttgtaaacacgat

SEQ ID NO: 157143 - DNA, 25 bp, Saccharomyces pastorianus
atgcttgctgctatgattcatttgg

SEQ ID NO: 157144 - DNA, 25 bp, Saccharomyces pastorianus
cagcccactgcacacatggtgataa

SEQ ID NO: 157145 - DNA, 25 bp, Saccharomyces pastorianus
ttccgggcaaatagcacatatgtct

SEQ ID NO: 157146 - DNA, 25 bp, Saccharomyces pastorianus
tttctggttagggttcttggccgca

SEQ ID NO: 157147 - DNA, 25 bp, Saccharomyces pastorianus
gctgcagtcgaaatatgttccgggc

SEQ ID NO: 157148 - DNA, 25 bp, Saccharomyces pastorianus
gtaatgatggacgtggattcctctg

SEQ ID NO: 157149 - DNA, 25 bp, Saccharomyces pastorianus
gtcaatgacttgcaccattctgaga

SEQ ID NO: 157150 - DNA, 25 bp, Saccharomyces pastorianus
gcaccattctgagaagaaatatgcg

SEQ ID NO: 157151 - DNA, 25 bp, Saccharomyces pastorianus
caatgacttgcaccattctgagaag

SEQ ID NO: 157152 - DNA, 25 bp, Saccharomyces pastorianus
ctagcactgcagtaatgatggacgt

SEQ ID NO: 157153 - DNA, 25 bp, Saccharomyces pastorianus
gggtcaatgacttgcaccattctga

SEQ ID NO: 157154 - DNA, 25 bp, Saccharomyces pastorianus
atgacttgcaccattctgagaagaa

SEQ ID NO: 157155 - DNA, 25 bp, Saccharomyces pastorianus
atggctagcactgcagtaatgatgg

SEQ ID NO: 157156 - DNA, 25 bp, Saccharomyces pastorianus
aatgatggacgtggattcctctggg

SEQ ID NO: 157157 - DNA, 25 bp, Saccharomyces pastorianus
actgcagtaatgatggacgtggatt

SEQ ID NO: 157158 - DNA, 25 bp, Saccharomyces pastorianus
acgtggattcctctggggtcaatga

SEQ ID NO: 157159 - DNA, 25 bp, Saccharomyces pastorianus
ggcaccgtaaaactcgttctgatgt

SEQ ID NO: 157160 - DNA, 25 bp, Saccharomyces pastorianus
atattagccaagtatctccgctgaa

SEQ ID NO: 157161 - DNA, 25 bp, Saccharomyces pastorianus
ggtcatttagtcgacatgcactcta

SEQ ID NO: 157162 - DNA, 25 bp, Saccharomyces pastorianus
cattagaaatatctctgccgcccta

SEQ ID NO: 157163 - DNA, 25 bp, Saccharomyces pastorianus
gcaggttcgattttccattccagat

SEQ ID NO: 157164 - DNA, 25 bp, Saccharomyces pastorianus
aggactccccactgaaaattgtatt

SEQ ID NO: 157165 - DNA, 25 bp, Saccharomyces pastorianus
atactggtcgatgtccctaaagaag

SEQ ID NO: 157166 - DNA, 25 bp, Saccharomyces pastorianus
gaatttatcatttgacaggcctcct

SEQ ID NO: 157167 - DNA, 25 bp, Saccharomyces pastorianus
tgagcatacacaatcgcaggttcga

SEQ ID NO: 157168 - DNA, 25 bp, Saccharomyces pastorianus
atttatatctcactcctgaatcgcc

SEQ ID NO: 157169 - DNA, 25 bp, Saccharomyces pastorianus
gaacacatatcgtgcaaccgaggtt

SEQ ID NO: 157170 - DNA, 25 bp, Saccharomyces pastorianus
ccagacttattcaggcggttacgtg

SEQ ID NO: 157171 - DNA, 25 bp, Saccharomyces pastorianus
aaaacggctgcaatggctgctaaga

SEQ ID NO: 157172 - DNA, 25 bp, Saccharomyces pastorianus
tacgaagaagagtcaccccattttg

SEQ ID NO: 157173 - DNA, 25 bp, Saccharomyces pastorianus
gaaaacgagtatccatccttccaga

SEQ ID NO: 157174 - DNA, 25 bp, Saccharomyces pastorianus
ctatccgtttttgagaccagactta

SEQ ID NO: 157175 - DNA, 25 bp, Saccharomyces pastorianus
gaaagtcccaaattccagttcgaag

SEQ ID NO: 157176 - DNA, 25 bp, Saccharomyces pastorianus
atgccacttccctaaatgagcaaag

SEQ ID NO: 157177 - DNA, 25 bp, Saccharomyces pastorianus
atttttgccgaaatcgtagtgcacg

SEQ ID NO: 157178 - DNA, 25 bp, Saccharomyces pastorianus
gaagatgccactgaacatgccactt

SEQ ID NO: 157179 - DNA, 25 bp, Saccharomyces pastorianus
atactcgcatggtgcatcccagaat

SEQ ID NO: 157180 - DNA, 25 bp, Saccharomyces pastorianus
gagtaaccccgcattaaacactacg

SEQ ID NO: 157181 - DNA, 25 bp, Saccharomyces pastorianus
gacaatatattacttgaacctagaa

SEQ ID NO: 157182 - DNA, 25 bp, Saccharomyces pastorianus
gagacaatatattacttgaacctag

SEQ ID NO: 157183 - DNA, 25 bp, Saccharomyces pastorianus
ccgactttacagaactttacagtag

SEQ ID NO: 157184 - DNA, 25 bp, Saccharomyces pastorianus
taaccgactttacagaactttacag

SEQ ID NO: 157185 - DNA, 25 bp, Saccharomyces pastorianus
aactttacagtagaattgccaatga

SEQ ID NO: 157186 - DNA, 25 bp, Saccharomyces pastorianus
ctttacagtagaattgccaatgaga

SEQ ID NO: 157187 - DNA, 25 bp, Saccharomyces pastorianus
gaaaaaacgatataaagaagcttgg

SEQ ID NO: 157188 - DNA, 25 bp, Saccharomyces pastorianus
gactttacagaactttacagtagaa

SEQ ID NO: 157189 - DNA, 25 bp, Saccharomyces pastorianus
tacagtagaattgccaatgagacaa

SEQ ID NO: 157190 - DNA, 25 bp, Saccharomyces pastorianus
ttgccaatgagacaatatattactt

SEQ ID NO: 157191 - DNA, 25 bp, Saccharomyces pastorianus
tatattacttgaacctagaagagaa

SEQ ID NO: 157192 - DNA, 25 bp, Saccharomyces pastorianus
atcgtggttccataagttctttgcc

SEQ ID NO: 157193 - DNA, 25 bp, Saccharomyces pastorianus
ttccatactgaatgctgcgtccatg

SEQ ID NO: 157194 - DNA, 25 bp, Saccharomyces pastorianus
atttgggccggttgtctgatcatta

SEQ ID NO: 157195 - DNA, 25 bp, Saccharomyces pastorianus
ggttgatatttgttgcgttcttttc

SEQ ID NO: 157196 - DNA, 25 bp, Saccharomyces pastorianus
gtatccgcacaactgctgaatatgg

SEQ ID NO: 157197 - DNA, 25 bp, Saccharomyces pastorianus
taggacccatggtgttcggtctaaa

SEQ ID NO: 157198 - DNA, 25 bp, Saccharomyces pastorianus
catatgctttgggtgccttaggacc

SEQ ID NO: 157199 - DNA, 25 bp, Saccharomyces pastorianus
attgtgaatacctcagtatccgcac

SEQ ID NO: 157200 - DNA, 25 bp, Saccharomyces pastorianus
gtaacggcaagaattttctctctta

SEQ ID NO: 157201 - DNA, 25 bp, Saccharomyces pastorianus
gtctgatcattattggtggtaccgt

SEQ ID NO: 157202 - DNA, 25 bp, Saccharomyces pastorianus
ctgtctttggtgcagaactgggttt

SEQ ID NO: 157203 - DNA, 25 bp, Saccharomyces pastorianus
ctaggtagactattttacgtcattt

SEQ ID NO: 157204 - DNA, 25 bp, Saccharomyces pastorianus
tattattgattaatgccgttgcagt

SEQ ID NO: 157205 - DNA, 25 bp, Saccharomyces pastorianus
ggactaggtagactattttacgtca

SEQ ID NO: 157206 - DNA, 25 bp, Saccharomyces pastorianus
ttgattaatgccgttgcagtactga

SEQ ID NO: 157207 - DNA, 25 bp, Saccharomyces pastorianus
actattttacgtcattttattattg

SEQ ID NO: 157208 - DNA, 25 bp, Saccharomyces pastorianus
gattaatgccgttgcagtactgagc

SEQ ID NO: 157209 - DNA, 25 bp, Saccharomyces pastorianus
ttattgattaatgccgttgcagtac

SEQ ID NO: 157210 - DNA, 25 bp, Saccharomyces pastorianus
ggtagactattttacgtcattttat

SEQ ID NO: 157211 - DNA, 25 bp, Saccharomyces pastorianus
tttggactaggtagactattttacg

SEQ ID NO: 157212 - DNA, 25 bp, Saccharomyces pastorianus
gactaggtagactattttacgtcat

SEQ ID NO: 157213 - DNA, 25 bp, Saccharomyces pastorianus
ttattattgattaatgccgttgcag

SEQ ID NO: 157214 - DNA, 25 bp, Saccharomyces pastorianus
tattgttatgcgcatgcacacgtgc

SEQ ID NO: 157215 - DNA, 25 bp, Saccharomyces pastorianus
acctcaggatactataccgtctcat

SEQ ID NO: 157216 - DNA, 25 bp, Saccharomyces pastorianus
ttttatgcgatcttattgttatgcg

SEQ ID NO: 157217 - DNA, 25 bp, Saccharomyces pastorianus
gatcttattgttatgcgcatgcaca

SEQ ID NO: 157218 - DNA, 25 bp, Saccharomyces pastorianus
ctcaggatactataccgtctcattt

SEQ ID NO: 157219 - DNA, 25 bp, Saccharomyces pastorianus
atgacctcaggatactataccgtct

SEQ ID NO: 157220 - DNA, 25 bp, Saccharomyces pastorianus
caggatactataccgtctcattttt

SEQ ID NO: 157221 - DNA, 25 bp, Saccharomyces pastorianus
tcttattgttatgcgcatgcacacg

SEQ ID NO: 157222 - DNA, 25 bp, Saccharomyces pastorianus
taccgtctcatttttttatgcgatc

SEQ ID NO: 157223 - DNA, 25 bp, Saccharomyces pastorianus
cgatcttattgttatgcgcatgcac

SEQ ID NO: 157224 - DNA, 25 bp, Saccharomyces pastorianus
attgttatgcgcatgcacacgtgct

SEQ ID NO: 157225 - DNA, 25 bp, Saccharomyces pastorianus
ctctctgcgctatatctttgggaaa

SEQ ID NO: 157226 - DNA, 25 bp, Saccharomyces pastorianus
tacatttcgtatttctttcctctct

SEQ ID NO: 157227 - DNA, 25 bp, Saccharomyces pastorianus
ttgtcccctttcaattcttgtgtta

SEQ ID NO: 157228 - DNA, 25 bp, Saccharomyces pastorianus
agtcgtgctcttctttccaaattaa

SEQ ID NO: 157229 - DNA, 25 bp, Saccharomyces pastorianus
gaatgagtccttggattctcgctaa

SEQ ID NO: 157230 - DNA, 25 bp, Saccharomyces pastorianus
tagtcttcttctttcttatcagtcg

SEQ ID NO: 157231 - DNA, 25 bp, Saccharomyces pastorianus
tatttagaaccttccacacatcgtc

SEQ ID NO: 157232 - DNA, 25 bp, Saccharomyces pastorianus
atatttgtatttctttcgccctgga

SEQ ID NO: 157233 - DNA, 25 bp, Saccharomyces pastorianus
gaatcacctggaattcgttctcatt

SEQ ID NO: 157234 - DNA, 25 bp, Saccharomyces pastorianus
caccatgcacctttacatttcgtat

SEQ ID NO: 157235 - DNA, 25 bp, Saccharomyces pastorianus
acatctttttccaccacgatacggg

SEQ ID NO: 157236 - DNA, 25 bp, Saccharomyces pastorianus
atatttcgcaatacttcccaagcag

SEQ ID NO: 157237 - DNA, 25 bp, Saccharomyces pastorianus
gatctgctgctacgtcatttaaagg

SEQ ID NO: 157238 - DNA, 25 bp, Saccharomyces pastorianus
gtttcatgcatcgatgtcttttctc

SEQ ID NO: 157239 - DNA, 25 bp, Saccharomyces pastorianus
gaattcgagcaagaacccttcctct

SEQ ID NO: 157240 - DNA, 25 bp, Saccharomyces pastorianus
agaaagactcgttgccttcgtttca

SEQ ID NO: 157241 - DNA, 25 bp, Saccharomyces pastorianus
gactcctaacgcgtgtcagttcaga

SEQ ID NO: 157242 - DNA, 25 bp, Saccharomyces pastorianus
tgagttcactacaacgtcatccatc

SEQ ID NO: 157243 - DNA, 25 bp, Saccharomyces pastorianus
atgtgatccactacgatgctcaacg

SEQ ID NO: 157244 - DNA, 25 bp, Saccharomyces pastorianus
tcaagatcacccacggcgatgaaac

SEQ ID NO: 157245 - DNA, 25 bp, Saccharomyces pastorianus
gatcgacatcaacacctatacgggc

SEQ ID NO: 157246 - DNA, 25 bp, Saccharomyces pastorianus
ttgggaccctcaagatgatctgctg

SEQ ID NO: 157247 - DNA, 25 bp, Saccharomyces pastorianus
gaagagaagacacaagacaccacca

SEQ ID NO: 157248 - DNA, 25 bp, Saccharomyces pastorianus
agaagacacaagacaccaccagaac

SEQ ID NO: 157249 - DNA, 25 bp, Saccharomyces pastorianus
cgaaccgaacgaacagaaagagaag

SEQ ID NO: 157250 - DNA, 25 bp, Saccharomyces pastorianus
tacatacctatatacgaaccgaacg

SEQ ID NO: 157251 - DNA, 25 bp, Saccharomyces pastorianus
gaaccaagagcatacaccactacca

SEQ ID NO: 157252 - DNA, 25 bp, Saccharomyces pastorianus
acaccaccagaaccaagagcataca

SEQ ID NO: 157253 - DNA, 25 bp, Saccharomyces pastorianus
ttgcaatgaaggatcttccatcctt

SEQ ID NO: 157254 - DNA, 25 bp, Saccharomyces pastorianus
aagacaccaccagaaccaagagcat

SEQ ID NO: 157255 - DNA, 25 bp, Saccharomyces pastorianus
cccacttgcaatgaaggatcttcca

SEQ ID NO: 157256 - DNA, 25 bp, Saccharomyces pastorianus
cttccatccttcattatatatacat

SEQ ID NO: 157257 - DNA, 25 bp, Saccharomyces pastorianus
gatcttccatccttcattatatata

SEQ ID NO: 157258 - DNA, 25 bp, Saccharomyces pastorianus
tcttagggattaccggtctggctac

SEQ ID NO: 157259 - DNA, 25 bp, Saccharomyces pastorianus
gagcctgaaacgtttacccaattag

SEQ ID NO: 157260 - DNA, 25 bp, Saccharomyces pastorianus
gaacgagatgttccgctacaagacg

SEQ ID NO: 157261 - DNA, 25 bp, Saccharomyces pastorianus
tggctaccgacgtgactactctgaa

SEQ ID NO: 157262 - DNA, 25 bp, Saccharomyces pastorianus
tccgggaagccctttattgcgggat

SEQ ID NO: 157263 - DNA, 25 bp, Saccharomyces pastorianus
tattgcgggattcgacctaatcggc

SEQ ID NO: 157264 - DNA, 25 bp, Saccharomyces pastorianus
atcttccactatgggcatgtgttct

SEQ ID NO: 157265 - DNA, 25 bp, Saccharomyces pastorianus
gttcatggcaatctcatggtcccaa

SEQ ID NO: 157266 - DNA, 25 bp, Saccharomyces pastorianus
tatcgttagcggtactgcatccgac

SEQ ID NO: 157267 - DNA, 25 bp, Saccharomyces pastorianus
atgtgtgagtccctgtacgaaccta

SEQ ID NO: 157268 - DNA, 25 bp, Saccharomyces pastorianus
tgaccgtgacgctctatcaggctgg

SEQ ID NO: 157269 - DNA, 25 bp, Saccharomyces pastorianus
ccggaaatcgcgtttattaatgtca

SEQ ID NO: 157270 - DNA, 25 bp, Saccharomyces pastorianus
cttctgttcctttccaaacgatatg

SEQ ID NO: 157271 - DNA, 25 bp, Saccharomyces pastorianus
gtcaatgcgcgatttctattatggg

SEQ ID NO: 157272 - DNA, 25 bp, Saccharomyces pastorianus
cgtttattaatgtcaatgcgcgatt

SEQ ID NO: 157273 - DNA, 25 bp, Saccharomyces pastorianus
atgcgcgatttctattatgggttga

SEQ ID NO: 157274 - DNA, 25 bp, Saccharomyces pastorianus
aaagttgcacttctgttcctttcca

SEQ ID NO: 157275 - DNA, 25 bp, Saccharomyces pastorianus
gcacttctgttcctttccaaacgat

SEQ ID NO: 157276 - DNA, 25 bp, Saccharomyces pastorianus
attaatgtcaatgcgcgatttctat

SEQ ID NO: 157277 - DNA, 25 bp, Saccharomyces pastorianus
tatgggttgaaaaagttgcacttct

SEQ ID NO: 157278 - DNA, 25 bp, Saccharomyces pastorianus
gaaaaagttgcacttctgttccttt

SEQ ID NO: 157279 - DNA, 25 bp, Saccharomyces pastorianus
agttgcacttctgttcctttccaaa

SEQ ID NO: 157280 - DNA, 25 bp, Saccharomyces pastorianus
cagccaacacaaaaattggtgctaa

SEQ ID NO: 157281 - DNA, 25 bp, Saccharomyces pastorianus
gccaacacaaaaattggtgctaaga

SEQ ID NO: 157282 - DNA, 25 bp, Saccharomyces pastorianus
tcgtcacaaaagatcagccactggt

SEQ ID NO: 157283 - DNA, 25 bp, Saccharomyces pastorianus
aattggtgctaagagaatccactct

SEQ ID NO: 157284 - DNA, 25 bp, Saccharomyces pastorianus
tcaaccagccaacacaaaaattggt

SEQ ID NO: 157285 - DNA, 25 bp, Saccharomyces pastorianus
atcagccactggtgctaaacgtgct

SEQ ID NO: 157286 - DNA, 25 bp, Saccharomyces pastorianus
tggtgctaaacgtgctcaattcaga

SEQ ID NO: 157287 - DNA, 25 bp, Saccharomyces pastorianus
gagctctaagaattgaaaccggtaa

SEQ ID NO: 157288 - DNA, 25 bp, Saccharomyces pastorianus
accagccaacacaaaaattggtgct

SEQ ID NO: 157289 - DNA, 25 bp, Saccharomyces pastorianus
aaattggtgctaagagaatccactc

SEQ ID NO: 157290 - DNA, 25 bp, Saccharomyces pastorianus
acaaaaattggtgctaagagaatcc

SEQ ID NO: 157291 - DNA, 25 bp, Saccharomyces pastorianus
atcgatttctatacttccattacaa

SEQ ID NO: 157292 - DNA, 25 bp, Saccharomyces pastorianus
taacgggtgaccagtcgtcgacgac

SEQ ID NO: 157293 - DNA, 25 bp, Saccharomyces pastorianus
gatcccaagaaattcgactatccca

SEQ ID NO: 157294 - DNA, 25 bp, Saccharomyces pastorianus
tacaggctgccatcttaacgggtga

SEQ ID NO: 157295 - DNA, 25 bp, Saccharomyces pastorianus
cgtcgacgacccaagatttactgtt

SEQ ID NO: 157296 - DNA, 25 bp, Saccharomyces pastorianus
aagtgttttccacctacgctgacaa

SEQ ID NO: 157297 - DNA, 25 bp, Saccharomyces pastorianus
gtcgcttatggtgctgccgtacagg

SEQ ID NO: 157298 - DNA, 25 bp, Saccharomyces pastorianus
tgctggatgttgcaccattatctct

SEQ ID NO: 157299 - DNA, 25 bp, Saccharomyces pastorianus
aaaccgttcgattaaccctgatgag

SEQ ID NO: 157300 - DNA, 25 bp, Saccharomyces pastorianus
taaccctgatgaggccgtcgcttat

SEQ ID NO: 157301 - DNA, 25 bp, Saccharomyces pastorianus
aatttgagttgagcggtattccacc

SEQ ID NO: 157302 - DNA, 25 bp, Saccharomyces pastorianus
tttttgccgcaaagtgtcctgataa

SEQ ID NO: 157303 - DNA, 25 bp, Saccharomyces pastorianus
gtgatcattgtctttgtagcacaga

SEQ ID NO: 157304 - DNA, 25 bp, Saccharomyces pastorianus
gtgtattccgcaattgatgagtcgt

SEQ ID NO: 157305 - DNA, 25 bp, Saccharomyces pastorianus
gacgactttcatttggatgcacgaa

SEQ ID NO: 157306 - DNA, 25 bp, Saccharomyces pastorianus
ataggacaattactgatacccaata

SEQ ID NO: 157307 - DNA, 25 bp, Saccharomyces pastorianus
aatccattcagctcttcaccaaata

SEQ ID NO: 157308 - DNA, 25 bp, Saccharomyces pastorianus
ggttctaaacgatttgagcgccact

SEQ ID NO: 157309 - DNA, 25 bp, Saccharomyces pastorianus
tcacgactttggttcctttttgagt

SEQ ID NO: 157310 - DNA, 25 bp, Saccharomyces pastorianus
gagcgccacttctgaaaatccattc

SEQ ID NO: 157311 - DNA, 25 bp, Saccharomyces pastorianus
gagaacttaatgatattgcctgtga

SEQ ID NO: 157312 - DNA, 25 bp, Saccharomyces pastorianus
gaatgaaaatctccgccttagttgc

SEQ ID NO: 157313 - DNA, 25 bp, Saccharomyces pastorianus
tggcgggtcaaacagcagaaacaac

SEQ ID NO: 157314 - DNA, 25 bp, Saccharomyces pastorianus
gaacttcgaggtttacaacagactg

SEQ ID NO: 157315 - DNA, 25 bp, Saccharomyces pastorianus
taagtttaatactccggctggcggg

SEQ ID NO: 157316 - DNA, 25 bp, Saccharomyces pastorianus
tatgtcttataactcccgacgtaaa

SEQ ID NO: 157317 - DNA, 25 bp, Saccharomyces pastorianus
tctgctttaaacttgaacttcgagg

SEQ ID NO: 157318 - DNA, 25 bp, Saccharomyces pastorianus
aagctcggttttaattgcatcacaa

SEQ ID NO: 157319 - DNA, 25 bp, Saccharomyces pastorianus
gttagctcgaaaccttcctcaaaag

SEQ ID NO: 157320 - DNA, 25 bp, Saccharomyces pastorianus
attgagcttgggtcagcaggactac

SEQ ID NO: 157321 - DNA, 25 bp, Saccharomyces pastorianus
tatagggaacactccactgcattta

SEQ ID NO: 157322 - DNA, 25 bp, Saccharomyces pastorianus
gactggtatatcttggtgcgtcaac

SEQ ID NO: 157323 - DNA, 25 bp, Saccharomyces pastorianus
gaatcgcctgcgtcaataatgaata

SEQ ID NO: 157324 - DNA, 25 bp, Saccharomyces pastorianus
cactctggagcatggttgcttgtca

SEQ ID NO: 157325 - DNA, 25 bp, Saccharomyces pastorianus
gcgcgtgtgacccaaataagcagca

SEQ ID NO: 157326 - DNA, 25 bp, Saccharomyces pastorianus
atttgagaggtaccaggtgcccgct

SEQ ID NO: 157327 - DNA, 25 bp, Saccharomyces pastorianus
tcaggacccgtgactctacgtttcg

SEQ ID NO: 157328 - DNA, 25 bp, Saccharomyces pastorianus
taaagtcatcatttacagcagaaat

SEQ ID NO: 157329 - DNA, 25 bp, Saccharomyces pastorianus
atcaaggaaaccaatcactctggag

SEQ ID NO: 157330 - DNA, 25 bp, Saccharomyces pastorianus
catggttgcttgtcaggacccgtga

SEQ ID NO: 157331 - DNA, 25 bp, Saccharomyces pastorianus
aaaacatggtgtccatcgacctgca

SEQ ID NO: 157332 - DNA, 25 bp, Saccharomyces pastorianus
aattgttgctacagggcgcgtgtga

SEQ ID NO: 157333 - DNA, 25 bp, Saccharomyces pastorianus
ataagcagcagaattaccttcaggg

SEQ ID NO: 157334 - DNA, 25 bp, Saccharomyces pastorianus
tggatttatcctctgtataccaata

SEQ ID NO: 157335 - DNA, 25 bp, Saccharomyces pastorianus
aattgcacacaatagacgttctttc

SEQ ID NO: 157336 - DNA, 25 bp, Saccharomyces pastorianus
gtagcgaccataacaccagtaacaa

SEQ ID NO: 157337 - DNA, 25 bp, Saccharomyces pastorianus
gccgacaacgaaccctggaacaaat

SEQ ID NO: 157338 - DNA, 25 bp, Saccharomyces pastorianus
agcccagaggccgtagtcgaaatca

SEQ ID NO: 157339 - DNA, 25 bp, Saccharomyces pastorianus
agtgcttccccgatgcttgacgcag

SEQ ID NO: 157340 - DNA, 25 bp, Saccharomyces pastorianus
ttcacaaacagcaaacactccgagt

SEQ ID NO: 157341 - DNA, 25 bp, Saccharomyces pastorianus
gataactgccatgacagcccagagg

SEQ ID NO: 157342 - DNA, 25 bp, Saccharomyces pastorianus
gatttgttttgaacctccagagaca

SEQ ID NO: 157343 - DNA, 25 bp, Saccharomyces pastorianus
acgtcttttgttgtccatgcttatt

SEQ ID NO: 157344 - DNA, 25 bp, Saccharomyces pastorianus
gagacagccctcatgacgttatgtg

SEQ ID NO: 157345 - DNA, 25 bp, Saccharomyces pastorianus
gatttatctctctttagagcacttg

SEQ ID NO: 157346 - DNA, 25 bp, Saccharomyces pastorianus
gtgctgacacttttacacacggcgt

SEQ ID NO: 157347 - DNA, 25 bp, Saccharomyces pastorianus
atctcttctgtagcgtacttgtgtg

SEQ ID NO: 157348 - DNA, 25 bp, Saccharomyces pastorianus
gttgcactatgtagcaccatcagat

SEQ ID NO: 157349 - DNA, 25 bp, Saccharomyces pastorianus
attgtgtttgacctagcgatcgcta

SEQ ID NO: 157350 - DNA, 25 bp, Saccharomyces pastorianus
tggtgtgggcgtctcttatatgatt

SEQ ID NO: 157351 - DNA, 25 bp, Saccharomyces pastorianus
ttgaggtacgcttccatggtggcca

SEQ ID NO: 157352 - DNA, 25 bp, Saccharomyces pastorianus
tcagtgctctgacgcggttgattaa

SEQ ID NO: 157353 - DNA, 25 bp, Saccharomyces pastorianus
gccccgctgtcttttctgaagaagt

SEQ ID NO: 157354 - DNA, 25 bp, Saccharomyces pastorianus
gatctgatgccccaaataatgtctg

SEQ ID NO: 157355 - DNA, 25 bp, Saccharomyces pastorianus
ggcgtgcgctatgcaaagcttgttc

SEQ ID NO: 157356 - DNA, 25 bp, Saccharomyces pastorianus
gagattcttcgcttgaaaggccgga

SEQ ID NO: 157357 - DNA, 25 bp, Saccharomyces pastorianus
atcaccttcagtacaatcttcctct

SEQ ID NO: 157358 - DNA, 25 bp, Saccharomyces pastorianus
gggtttgacgtttcctctaatgaag

SEQ ID NO: 157359 - DNA, 25 bp, Saccharomyces pastorianus
gaagccctctttaattccggacgct

SEQ ID NO: 157360 - DNA, 25 bp, Saccharomyces pastorianus
tcttcttctcatggcttagtggtga

SEQ ID NO: 157361 - DNA, 25 bp, Saccharomyces pastorianus
aagtctcttcctcttgagcaagaaa

SEQ ID NO: 157362 - DNA, 25 bp, Saccharomyces pastorianus
gaagacacgcggaaggaagccctct

SEQ ID NO: 157363 - DNA, 25 bp, Saccharomyces pastorianus
acgttaaaactcacgcttccttatg

SEQ ID NO: 157364 - DNA, 25 bp, Saccharomyces pastorianus
tccggacgcttccaagcaatttggt

SEQ ID NO: 157365 - DNA, 25 bp, Saccharomyces pastorianus
ggatatctctactcaaagcattgct

SEQ ID NO: 157366 - DNA, 25 bp, Saccharomyces pastorianus
gagtgaccacgcgataataaatccg

SEQ ID NO: 157367 - DNA, 25 bp, Saccharomyces pastorianus
ttggctgccatatcagaaccatcca

SEQ ID NO: 157368 - DNA, 25 bp, Saccharomyces pastorianus
gtactcaacttgtaattgtgatcca

SEQ ID NO: 157369 - DNA, 25 bp, Saccharomyces pastorianus
gcttgtgacaatctgactatatcat

SEQ ID NO: 157370 - DNA, 25 bp, Saccharomyces pastorianus
ttagccaggacatccatagcttgtg

SEQ ID NO: 157371 - DNA, 25 bp, Saccharomyces pastorianus
ttgtgatccatctttttgctttgaa

SEQ ID NO: 157372 - DNA, 25 bp, Saccharomyces pastorianus
ccatctttttgctttgaaatgatca

SEQ ID NO: 157373 - DNA, 25 bp, Saccharomyces pastorianus
acttatgctcgtactcaacttgtaa

SEQ ID NO: 157374 - DNA, 25 bp, Saccharomyces pastorianus
ctttcaacttatgctcgtactcaac

SEQ ID NO: 157375 - DNA, 25 bp, Saccharomyces pastorianus
ggacatccatagcttgtgacaatct

SEQ ID NO: 157376 - DNA, 25 bp, Saccharomyces pastorianus
aatttctccaattctttcaacttat

SEQ ID NO: 157377 - DNA, 25 bp, Saccharomyces pastorianus
gaaatgatcaacttagccaggacat

SEQ ID NO: 157378 - DNA, 25 bp, Saccharomyces pastorianus
ctgactatatcattttctgttggaa

SEQ ID NO: 157379 - DNA, 25 bp, Saccharomyces pastorianus
gaaaaagcgcccctgagtagaagaa

SEQ ID NO: 157380 - DNA, 25 bp, Saccharomyces pastorianus
attgccacgagaaagcgttgttact

SEQ ID NO: 157381 - DNA, 25 bp, Saccharomyces pastorianus
gttactgtaaacttagattcttcag

SEQ ID NO: 157382 - DNA, 25 bp, Saccharomyces pastorianus
aacagggttgaatgaattgccacga

SEQ ID NO: 157383 - DNA, 25 bp, Saccharomyces pastorianus
gagtcagaaggaagaaccagcccct

SEQ ID NO: 157384 - DNA, 25 bp, Saccharomyces pastorianus
ttcttcagatgatggcgtcgttacg

SEQ ID NO: 157385 - DNA, 25 bp, Saccharomyces pastorianus
taaggaaggctcttaacgagaaaga

SEQ ID NO: 157386 - DNA, 25 bp, Saccharomyces pastorianus
agcccctaccagatgccaagaagaa

SEQ ID NO: 157387 - DNA, 25 bp, Saccharomyces pastorianus
cgagaaagcgttgttactgtaaact

SEQ ID NO: 157388 - DNA, 25 bp, Saccharomyces pastorianus
agaggcagaaaaagcgcccctgagt

SEQ ID NO: 157389 - DNA, 25 bp, Saccharomyces pastorianus
agcgcccctgagtagaagaagaaga

SEQ ID NO: 157390 - DNA, 25 bp, Saccharomyces pastorianus
atttgcagaactaaggaggctcttt

SEQ ID NO: 157391 - DNA, 25 bp, Saccharomyces pastorianus
ctaaggaggctctttttcaacttga

SEQ ID NO: 157392 - DNA, 25 bp, Saccharomyces pastorianus
actatcggatgtatttgcagaacta

SEQ ID NO: 157393 - DNA, 25 bp, Saccharomyces pastorianus
cctgccctactatcggatgtatttg

SEQ ID NO: 157394 - DNA, 25 bp, Saccharomyces pastorianus
aatttgaattcctcactgttcatca

SEQ ID NO: 157395 - DNA, 25 bp, Saccharomyces pastorianus
ggctctttttcaacttgagtctcga

SEQ ID NO: 157396 - DNA, 25 bp, Saccharomyces pastorianus
gtgggtgatagcatagaggacatac

SEQ ID NO: 157397 - DNA, 25 bp, Saccharomyces pastorianus
tcactgttcatcataaaggccgcaa

SEQ ID NO: 157398 - DNA, 25 bp, Saccharomyces pastorianus
taaaggccgcaattggctgtttacc

SEQ ID NO: 157399 - DNA, 25 bp, Saccharomyces pastorianus
aaatttgattgggactcctgcccta

SEQ ID NO: 157400 - DNA, 25 bp, Saccharomyces pastorianus
aattggctgtttaccagaggtgggt

SEQ ID NO: 157401 - DNA, 25 bp, Saccharomyces pastorianus
gatgttccggataagtttaaatttg

SEQ ID NO: 157402 - DNA, 25 bp, Saccharomyces pastorianus
ggtcaagcttcgtgttttcaaagac

SEQ ID NO: 157403 - DNA, 25 bp, Saccharomyces pastorianus
aacgaaaactggaatggtcaagctt

SEQ ID NO: 157404 - DNA, 25 bp, Saccharomyces pastorianus
cagaagaagaaacctacgctaacaa

SEQ ID NO: 157405 - DNA, 25 bp, Saccharomyces pastorianus
aagacaggaaggatgttccggataa

SEQ ID NO: 157406 - DNA, 25 bp, Saccharomyces pastorianus
aatggtcaagcttcgtgttttcaaa

SEQ ID NO: 157407 - DNA, 25 bp, Saccharomyces pastorianus
atcctaatggttacgagcctcgagt

SEQ ID NO: 157408 - DNA, 25 bp, Saccharomyces pastorianus
gttacgagcctcgagtaaaggctac

SEQ ID NO: 157409 - DNA, 25 bp, Saccharomyces pastorianus
gagcctcgagtaaaggctacagaag

SEQ ID NO: 157410 - DNA, 25 bp, Saccharomyces pastorianus
gcatcctaatggttacgagcctcga

SEQ ID NO: 157411 - DNA, 25 bp, Saccharomyces pastorianus
ctacgctaacaaagacaggaaggat

SEQ ID NO: 157412 - DNA, 25 bp, Saccharomyces pastorianus
acaggctctatacctgatcgtgcca

SEQ ID NO: 157413 - DNA, 25 bp, Saccharomyces pastorianus
ccgtgccaggtggtcatttgggact

SEQ ID NO: 157414 - DNA, 25 bp, Saccharomyces pastorianus
aggattcagcgggtatgcagtacat

SEQ ID NO: 157415 - DNA, 25 bp, Saccharomyces pastorianus
gacagcagcggttattgtcgcagca

SEQ ID NO: 157416 - DNA, 25 bp, Saccharomyces pastorianus
tggaacccacattagcacgagtagc

SEQ ID NO: 157417 - DNA, 25 bp, Saccharomyces pastorianus
tgggtcgcagcaatctgtctcgcaa

SEQ ID NO: 157418 - DNA, 25 bp, Saccharomyces pastorianus
aactgctagcgaggtgtgtgcacct

SEQ ID NO: 157419 - DNA, 25 bp, Saccharomyces pastorianus
tatagctggtgctgttttggcgaca

SEQ ID NO: 157420 - DNA, 25 bp, Saccharomyces pastorianus
aagagttcgggctcggcaacaaagc

SEQ ID NO: 157421 - DNA, 25 bp, Saccharomyces pastorianus
tgttactttaatgcgccgtgccagg

SEQ ID NO: 157422 - DNA, 25 bp, Saccharomyces pastorianus
gatcgtgccaacactgttactttaa

SEQ ID NO: 157423 - DNA, 25 bp, Saccharomyces pastorianus
gaccatactatccaggtgagtttgt

SEQ ID NO: 157424 - DNA, 25 bp, Saccharomyces pastorianus
gaaacattgtagtcgatttggctag

SEQ ID NO: 157425 - DNA, 25 bp, Saccharomyces pastorianus
tgatcagttcaaatcaggttacctt

SEQ ID NO: 157426 - DNA, 25 bp, Saccharomyces pastorianus
tgatgcctacctacctaggaaagtt

SEQ ID NO: 157427 - DNA, 25 bp, Saccharomyces pastorianus
ttatcacgctacagaaggaccttca

SEQ ID NO: 157428 - DNA, 25 bp, Saccharomyces pastorianus
ggatatgcttttttaccaccttagg

SEQ ID NO: 157429 - DNA, 25 bp, Saccharomyces pastorianus
ggactagcttgtgcttacaacgtaa

SEQ ID NO: 157430 - DNA, 25 bp, Saccharomyces pastorianus
ggaccttcagaatttgaacggcatg

SEQ ID NO: 157431 - DNA, 25 bp, Saccharomyces pastorianus
gtacaagttacgatcgcgtcatttt

SEQ ID NO: 157432 - DNA, 25 bp, Saccharomyces pastorianus
gaatacggttttgggcctgatgata

SEQ ID NO: 157433 - DNA, 25 bp, Saccharomyces pastorianus
taccaccttaggactagcttgtgct

SEQ ID NO: 157434 - DNA, 25 bp, Saccharomyces pastorianus
atgaaagtttccgataagcgtaaat

SEQ ID NO: 157435 - DNA, 25 bp, Saccharomyces pastorianus
gagttggctctaaataacaaaaacg

SEQ ID NO: 157436 - DNA, 25 bp, Saccharomyces pastorianus
aatcgatgcgcacggaagtgcgatc

SEQ ID NO: 157437 - DNA, 25 bp, Saccharomyces pastorianus
atcgatgcgcacggaagtgcgatca

SEQ ID NO: 157438 - DNA, 25 bp, Saccharomyces pastorianus
gtgcgatcattctacgaagacgaaa

SEQ ID NO: 157439 - DNA, 25 bp, Saccharomyces pastorianus
gatgcgcacggaagtgcgatcattc

SEQ ID NO: 157440 - DNA, 25 bp, Saccharomyces pastorianus
tgaaagtttccgataagcgtaaatt

SEQ ID NO: 157441 - DNA, 25 bp, Saccharomyces pastorianus
aactttgaggagtttgagttggctc

SEQ ID NO: 157442 - DNA, 25 bp, Saccharomyces pastorianus
cgatgcgcacggaagtgcgatcatt

SEQ ID NO: 157443 - DNA, 25 bp, Saccharomyces pastorianus
tcgatgcgcacggaagtgcgatcat

SEQ ID NO: 157444 - DNA, 25 bp, Saccharomyces pastorianus
atgcgcacggaagtgcgatcattct

SEQ ID NO: 157445 - DNA, 25 bp, Saccharomyces pastorianus
agtagcatcctacgcaaatgaagtt

SEQ ID NO: 157446 - DNA, 25 bp, Saccharomyces pastorianus
ataatgggccttgaggtgccgtcat

SEQ ID NO: 157447 - DNA, 25 bp, Saccharomyces pastorianus
aaattacggcgatattgacactagt

SEQ ID NO: 157448 - DNA, 25 bp, Saccharomyces pastorianus
gggaacttttcaattttagtagcat

SEQ ID NO: 157449 - DNA, 25 bp, Saccharomyces pastorianus
cccgcagcaagcgtggaagtacgat

SEQ ID NO: 157450 - DNA, 25 bp, Saccharomyces pastorianus
atcatgggatgttttatttactgca

SEQ ID NO: 157451 - DNA, 25 bp, Saccharomyces pastorianus
agtacttcaagtatccaactccttt

SEQ ID NO: 157452 - DNA, 25 bp, Saccharomyces pastorianus
ggtttactaatttgccggatgatca

SEQ ID NO: 157453 - DNA, 25 bp, Saccharomyces pastorianus
ctttacaacaaggtttactcatggg

SEQ ID NO: 157454 - DNA, 25 bp, Saccharomyces pastorianus
gtctggagacttcccaagatgccga

SEQ ID NO: 157455 - DNA, 25 bp, Saccharomyces pastorianus
aggtgccgtcattggcaacttttct

SEQ ID NO: 157456 - DNA, 25 bp, Saccharomyces pastorianus
accaccgtgagctcatatttttcaa

SEQ ID NO: 157457 - DNA, 25 bp, Saccharomyces pastorianus
gtatcgactcgtcaacattgtcaag

SEQ ID NO: 157458 - DNA, 25 bp, Saccharomyces pastorianus
gttcttgtttgtgagcctataccga

SEQ ID NO: 157459 - DNA, 25 bp, Saccharomyces pastorianus
aatagctcggattcacctacgatga

SEQ ID NO: 157460 - DNA, 25 bp, Saccharomyces pastorianus
ttttcgcaacggaccaattccagtg

SEQ ID NO: 157461 - DNA, 25 bp, Saccharomyces pastorianus
gaaaatttgggctgtaccgtcgtca

SEQ ID NO: 157462 - DNA, 25 bp, Saccharomyces pastorianus
gcacttctgagattggataccacat

SEQ ID NO: 157463 - DNA, 25 bp, Saccharomyces pastorianus
gcgaccgactacaggctatatcaag

SEQ ID NO: 157464 - DNA, 25 bp, Saccharomyces pastorianus
agccttgaagcttccaaaacttggt

SEQ ID NO: 157465 - DNA, 25 bp, Saccharomyces pastorianus
tggccgaaagagctcgagcacttct

SEQ ID NO: 157466 - DNA, 25 bp, Saccharomyces pastorianus
aattccagtgatctctcggcagagg

SEQ ID NO: 157467 - DNA, 25 bp, Saccharomyces pastorianus
tgttctgttcatcgcatgtgcatat

SEQ ID NO: 157468 - DNA, 25 bp, Saccharomyces pastorianus
attgcccgattctaaccgtattttg

SEQ ID NO: 157469 - DNA, 25 bp, Saccharomyces pastorianus
gataaccagcaattcttcctttcag

SEQ ID NO: 157470 - DNA, 25 bp, Saccharomyces pastorianus
aaatctgggacctgtactcgagcgc

SEQ ID NO: 157471 - DNA, 25 bp, Saccharomyces pastorianus
acctttcttggcgtttgcataaccg

SEQ ID NO: 157472 - DNA, 25 bp, Saccharomyces pastorianus
taactctattatggacttctccgcc

SEQ ID NO: 157473 - DNA, 25 bp, Saccharomyces pastorianus
tcagacctgctcaacgacatggaca

SEQ ID NO: 157474 - DNA, 25 bp, Saccharomyces pastorianus
acgtctttccatcgaattaaccgca

SEQ ID NO: 157475 - DNA, 25 bp, Saccharomyces pastorianus
tgagcacgaacagagtcccgaacct

SEQ ID NO: 157476 - DNA, 25 bp, Saccharomyces pastorianus
gaacctcaacggatcttctgttttt

SEQ ID NO: 157477 - DNA, 25 bp, Saccharomyces pastorianus
gacctcgatgacaccgatactgata

SEQ ID NO: 157478 - DNA, 25 bp, Saccharomyces pastorianus
tacagcaagtgtgcagcgtccaaga

SEQ ID NO: 157479 - DNA, 25 bp, Saccharomyces pastorianus
aataataacagtcccagcatcgcca

SEQ ID NO: 157480 - DNA, 25 bp, Saccharomyces pastorianus
tccgctgtggaggaaggaccccaag

SEQ ID NO: 157481 - DNA, 25 bp, Saccharomyces pastorianus
catctatagtgaagcctggctcgcg

SEQ ID NO: 157482 - DNA, 25 bp, Saccharomyces pastorianus
gaacacctcatccaatccggatata

SEQ ID NO: 157483 - DNA, 25 bp, Saccharomyces pastorianus
tacttctgtgcaatcttcggctact

SEQ ID NO: 157484 - DNA, 25 bp, Saccharomyces pastorianus
agacaccaatagtcctttactgaga

SEQ ID NO: 157485 - DNA, 25 bp, Saccharomyces pastorianus
tcgcgaagaaattcctccgtgagga

SEQ ID NO: 157486 - DNA, 25 bp, Saccharomyces pastorianus
gatcaagtcttctacttctgtgcaa

SEQ ID NO: 157487 - DNA, 25 bp, Saccharomyces pastorianus
aagggtcttcccctgtgcaatgctt

SEQ ID NO: 157488 - DNA, 25 bp, Saccharomyces pastorianus
tcacaaggcctctgtcgttgaagac

SEQ ID NO: 157489 - DNA, 25 bp, Saccharomyces pastorianus
acccgctaggcttgcagaccgtcat

SEQ ID NO: 157490 - DNA, 25 bp, Saccharomyces pastorianus
cataatatccctagaggctctagat

SEQ ID NO: 157491 - DNA, 25 bp, Saccharomyces pastorianus
tacagcaatactattttctaatttg

SEQ ID NO: 157492 - DNA, 25 bp, Saccharomyces pastorianus
aataaccacccgctaggcttgcaga

SEQ ID NO: 157493 - DNA, 25 bp, Saccharomyces pastorianus
ttctaatttgcatttccacgcctgc

SEQ ID NO: 157494 - DNA, 25 bp, Saccharomyces pastorianus
taatttgcatttccacgcctgcgtt

SEQ ID NO: 157495 - DNA, 25 bp, Saccharomyces pastorianus
gcatttccacgcctgcgttgctaaa

SEQ ID NO: 157496 - DNA, 25 bp, Saccharomyces pastorianus
tgcgttgctaaacccacatttttca

SEQ ID NO: 157497 - DNA, 25 bp, Saccharomyces pastorianus
cgttgctaaacccacatttttcata

SEQ ID NO: 157498 - DNA, 25 bp, Saccharomyces pastorianus
cctctatgtactatacagcaatact

SEQ ID NO: 157499 - DNA, 25 bp, Saccharomyces pastorianus
aatatccctagaggctctagatgcc

SEQ ID NO: 157500 - DNA, 25 bp, Saccharomyces pastorianus
tatccccttaacagatgccagcaat

SEQ ID NO: 157501 - DNA, 25 bp, Saccharomyces pastorianus
tggcttctagtccttgtcccaagag

SEQ ID NO: 157502 - DNA, 25 bp, Saccharomyces pastorianus
ctgcaagttgcaacatatcccctta

SEQ ID NO: 157503 - DNA, 25 bp, Saccharomyces pastorianus
tttccttctttcaatttctacgtca

SEQ ID NO: 157504 - DNA, 25 bp, Saccharomyces pastorianus
aagggcccgtcaacacgtcgtcatt

SEQ ID NO: 157505 - DNA, 25 bp, Saccharomyces pastorianus
tcccctctttactacgtttctatgt

SEQ ID NO: 157506 - DNA, 25 bp, Saccharomyces pastorianus
tagtcttgctatttttaccgcctct

SEQ ID NO: 157507 - DNA, 25 bp, Saccharomyces pastorianus
atgcttgcgtatacctttccttctt

SEQ ID NO: 157508 - DNA, 25 bp, Saccharomyces pastorianus
agattttcacttggatttgcgcgtc

SEQ ID NO: 157509 - DNA, 25 bp, Saccharomyces pastorianus
ttctcccacttttctgtgtatcaag

SEQ ID NO: 157510 - DNA, 25 bp, Saccharomyces pastorianus
gtttctatgttattttgtgccgccc

SEQ ID NO: 157511 - DNA, 25 bp, Saccharomyces pastorianus
tcgtccttgcccaaaaagtcttgat

SEQ ID NO: 157512 - DNA, 25 bp, Saccharomyces pastorianus
gcaagtatatatctgtatgtatcca

SEQ ID NO: 157513 - DNA, 25 bp, Saccharomyces pastorianus
gagcttatatcattttatcgtcctt

SEQ ID NO: 157514 - DNA, 25 bp, Saccharomyces pastorianus
tatatcattttatcgtccttgccca

SEQ ID NO: 157515 - DNA, 25 bp, Saccharomyces pastorianus
ttctatgtagtataatggaccgatc

SEQ ID NO: 157516 - DNA, 25 bp, Saccharomyces pastorianus
atgtatccatatttagatggcagca

SEQ ID NO: 157517 - DNA, 25 bp, Saccharomyces pastorianus
atggaccgatctttgcaagtatata

SEQ ID NO: 157518 - DNA, 25 bp, Saccharomyces pastorianus
tcattttatcgtccttgcccaaaaa

SEQ ID NO: 157519 - DNA, 25 bp, Saccharomyces pastorianus
gatggcagcaagcaatatagatttg

SEQ ID NO: 157520 - DNA, 25 bp, Saccharomyces pastorianus
tttatcgtccttgcccaaaaagtct

SEQ ID NO: 157521 - DNA, 25 bp, Saccharomyces pastorianus
ttatcttttaattgctttctatgta

SEQ ID NO: 157522 - DNA, 25 bp, Saccharomyces pastorianus
gtaaaagtaatcctcctcaagtgcc

SEQ ID NO: 157523 - DNA, 25 bp, Saccharomyces pastorianus
aggtcctccaccaggtgttaacaat

SEQ ID NO: 157524 - DNA, 25 bp, Saccharomyces pastorianus
tcgtcaacaggcagaccaggctcct

SEQ ID NO: 157525 - DNA, 25 bp, Saccharomyces pastorianus
gaacaacatggccaagacccaaagg

SEQ ID NO: 157526 - DNA, 25 bp, Saccharomyces pastorianus
ttctggctggaaggctgtttttgat

SEQ ID NO: 157527 - DNA, 25 bp, Saccharomyces pastorianus
gcaagtgcaagcacgggcccaagca

SEQ ID NO: 157528 - DNA, 25 bp, Saccharomyces pastorianus
agcacagcaacctcgttactatcag

SEQ ID NO: 157529 - DNA, 25 bp, Saccharomyces pastorianus
tacgaacagctctcagtgggaacca

SEQ ID NO: 157530 - DNA, 25 bp, Saccharomyces pastorianus
ttattcttctcaatcaacaccgcaa

SEQ ID NO: 157531 - DNA, 25 bp, Saccharomyces pastorianus
tttgatgatgaataccagacttggt

SEQ ID NO: 157532 - DNA, 25 bp, Saccharomyces pastorianus
gagaagagttctcgtcaacaggcag

SEQ ID NO: 157533 - DNA, 25 bp, Saccharomyces pastorianus
agtgccgctgcagatggttcaataa

SEQ ID NO: 157534 - DNA, 25 bp, Saccharomyces pastorianus
tcgtccgtcgtctttggaatccatt

SEQ ID NO: 157535 - DNA, 25 bp, Saccharomyces pastorianus
gatgggcagagctttttagaaattc

SEQ ID NO: 157536 - DNA, 25 bp, Saccharomyces pastorianus
gggcaaaacacttgttgcagcagtt

SEQ ID NO: 157537 - DNA, 25 bp, Saccharomyces pastorianus
gcagggtcatacagctttggtcggt

SEQ ID NO: 157538 - DNA, 25 bp, Saccharomyces pastorianus
acaaatttttggtcagtgccgctgc

SEQ ID NO: 157539 - DNA, 25 bp, Saccharomyces pastorianus
gaaattggtccacgcaaatattcta

SEQ ID NO: 157540 - DNA, 25 bp, Saccharomyces pastorianus
ggaatccatttctacttctttgggt

SEQ ID NO: 157541 - DNA, 25 bp, Saccharomyces pastorianus
ttctacttctttgggtctaacgagg

SEQ ID NO: 157542 - DNA, 25 bp, Saccharomyces pastorianus
gttagcaatcccgtaaactcctcgt

SEQ ID NO: 157543 - DNA, 25 bp, Saccharomyces pastorianus
gttcaacatctataatctacggagt

SEQ ID NO: 157544 - DNA, 25 bp, Saccharomyces pastorianus
gagctattatatcagcgttccccta

SEQ ID NO: 157545 - DNA, 25 bp, Saccharomyces pastorianus
gatttgcaaagggtctcgacgtcaa

SEQ ID NO: 157546 - DNA, 25 bp, Saccharomyces pastorianus
acagccgttgttgagtttaatcgag

SEQ ID NO: 157547 - DNA, 25 bp, Saccharomyces pastorianus
aggtgagagttcgtgcggcatccat

SEQ ID NO: 157548 - DNA, 25 bp, Saccharomyces pastorianus
gaaagaaccatgttgccgccattgt

SEQ ID NO: 157549 - DNA, 25 bp, Saccharomyces pastorianus
gccgccattgttgactatgtttgtt

SEQ ID NO: 157550 - DNA, 25 bp, Saccharomyces pastorianus
agcggaactgcttcaacttactgag

SEQ ID NO: 157551 - DNA, 25 bp, Saccharomyces pastorianus
gctagctttcatccaacacttttta

SEQ ID NO: 157552 - DNA, 25 bp, Saccharomyces pastorianus
gtgcggcatccattttgtctgatat

SEQ ID NO: 157553 - DNA, 25 bp, Saccharomyces pastorianus
gtagcactatcttcaaaccaaacga

SEQ ID NO: 157554 - DNA, 25 bp, Saccharomyces pastorianus
ttgtctgatatcgtccataactgga

SEQ ID NO: 157555 - DNA, 25 bp, Saccharomyces pastorianus
tgaagttggctaatgaggtttatcc

SEQ ID NO: 157556 - DNA, 25 bp, Saccharomyces pastorianus
tgctgtttggagtgaagttggctaa

SEQ ID NO: 157557 - DNA, 25 bp, Saccharomyces pastorianus
atgctgtttggagtgaagttggcta

SEQ ID NO: 157558 - DNA, 25 bp, Saccharomyces pastorianus
aagttggctaatgaggtttatcctc

SEQ ID NO: 157559 - DNA, 25 bp, Saccharomyces pastorianus
gaagttggctaatgaggtttatcct

SEQ ID NO: 157560 - DNA, 25 bp, Saccharomyces pastorianus
gttggctaatgaggtttatcctcct

SEQ ID NO: 157561 - DNA, 25 bp, Saccharomyces pastorianus
gctgtttggagtgaagttggctaat

SEQ ID NO: 157562 - DNA, 25 bp, Saccharomyces pastorianus
agtgaagttggctaatgaggtttat

SEQ ID NO: 157563 - DNA, 25 bp, Saccharomyces pastorianus
ggctaatgaggtttatcctccttgg

SEQ ID NO: 157564 - DNA, 25 bp, Saccharomyces pastorianus
ttggctaatgaggtttatcctcctt

SEQ ID NO: 157565 - DNA, 25 bp, Saccharomyces pastorianus
tggctaatgaggtttatcctccttg

SEQ ID NO: 157566 - DNA, 25 bp, Saccharomyces pastorianus
gttgcaaatcccttgaaattcctga

SEQ ID NO: 157567 - DNA, 25 bp, Saccharomyces pastorianus
gatgtctgccagttctatgatttct

SEQ ID NO: 157568 - DNA, 25 bp, Saccharomyces pastorianus
agacaggatcctaagcaagcatatg

SEQ ID NO: 157569 - DNA, 25 bp, Saccharomyces pastorianus
atttggaggcagacggttcatccga

SEQ ID NO: 157570 - DNA, 25 bp, Saccharomyces pastorianus
tgagcgtattacctctcaaggtgat

SEQ ID NO: 157571 - DNA, 25 bp, Saccharomyces pastorianus
aagagcctcaacatcaagcagcagt

SEQ ID NO: 157572 - DNA, 25 bp, Saccharomyces pastorianus
ttcattggattcttcgatgtctgcc

SEQ ID NO: 157573 - DNA, 25 bp, Saccharomyces pastorianus
gaggcgagtatgctaagtttcctta

SEQ ID NO: 157574 - DNA, 25 bp, Saccharomyces pastorianus
agcagtaccggtatctcacgaggaa

SEQ ID NO: 157575 - DNA, 25 bp, Saccharomyces pastorianus
gattcattcgacagagagcgtccaa

SEQ ID NO: 157576 - DNA, 25 bp, Saccharomyces pastorianus
tagagaccctaatacctggcataga

SEQ ID NO: 157577 - DNA, 25 bp, Saccharomyces pastorianus
agatggtgatccttatcgtctagct

SEQ ID NO: 157578 - DNA, 25 bp, Saccharomyces pastorianus
catctcgcttctcaaactattactt

SEQ ID NO: 157579 - DNA, 25 bp, Saccharomyces pastorianus
tccttatcgtctagctgtctacaag

SEQ ID NO: 157580 - DNA, 25 bp, Saccharomyces pastorianus
ggacgcggagaatgatcctgtttat

SEQ ID NO: 157581 - DNA, 25 bp, Saccharomyces pastorianus
gggatatcaggttcgcaaacatact

SEQ ID NO: 157582 - DNA, 25 bp, Saccharomyces pastorianus
gacccttttgttaagtgggctctat

SEQ ID NO: 157583 - DNA, 25 bp, Saccharomyces pastorianus
gggctctatggattggctattgact

SEQ ID NO: 157584 - DNA, 25 bp, Saccharomyces pastorianus
gattgatagctcaacgcgcttgacc

SEQ ID NO: 157585 - DNA, 25 bp, Saccharomyces pastorianus
gatgtcgagttatgccatgaggcgt

SEQ ID NO: 157586 - DNA, 25 bp, Saccharomyces pastorianus
aatatcgtatggaccatctcgcttc

SEQ ID NO: 157587 - DNA, 25 bp, Saccharomyces pastorianus
atgaaggacctaccgatgtcgagtt

SEQ ID NO: 157588 - DNA, 25 bp, Saccharomyces pastorianus
aagaagccaggaggcaatgcctaca

SEQ ID NO: 157589 - DNA, 25 bp, Saccharomyces pastorianus
gcagttttgcagcttcgagcaactc

SEQ ID NO: 157590 - DNA, 25 bp, Saccharomyces pastorianus
gatgatggatcctcttcttccggat

SEQ ID NO: 157591 - DNA, 25 bp, Saccharomyces pastorianus
gatatgctgcatttttcatccacaa

SEQ ID NO: 157592 - DNA, 25 bp, Saccharomyces pastorianus
aactcaagatcctccaagaagccag

SEQ ID NO: 157593 - DNA, 25 bp, Saccharomyces pastorianus
aaaaagaccaagatatgctgcattt

SEQ ID NO: 157594 - DNA, 25 bp, Saccharomyces pastorianus
atgcctacaaggcacaatgtaagat

SEQ ID NO: 157595 - DNA, 25 bp, Saccharomyces pastorianus
aagaggttcccgcagttttgcagct

SEQ ID NO: 157596 - DNA, 25 bp, Saccharomyces pastorianus
gcagcttcgagcaactcaagatcct

SEQ ID NO: 157597 - DNA, 25 bp, Saccharomyces pastorianus
cagatgatgatggatcctcttcttc

SEQ ID NO: 157598 - DNA, 25 bp, Saccharomyces pastorianus
gaagagtgcaaccatcattcagatg

SEQ ID NO: 157599 - DNA, 25 bp, Saccharomyces pastorianus
agccattggattactcagctgtatg

SEQ ID NO: 157600 - DNA, 25 bp, Saccharomyces pastorianus
gcctgaggccagtgagtctgttaca

SEQ ID NO: 157601 - DNA, 25 bp, Saccharomyces pastorianus
aacagcgttgatgatctcccacaaa

SEQ ID NO: 157602 - DNA, 25 bp, Saccharomyces pastorianus
gtttgaccgtaacagtgatcatcct

SEQ ID NO: 157603 - DNA, 25 bp, Saccharomyces pastorianus
gccggaattttcaccctttgaagat

SEQ ID NO: 157604 - DNA, 25 bp, Saccharomyces pastorianus
gaactaacgcgattaccgcagtttt

SEQ ID NO: 157605 - DNA, 25 bp, Saccharomyces pastorianus
gactctcgatttgccggaattttca

SEQ ID NO: 157606 - DNA, 25 bp, Saccharomyces pastorianus
aattttgcacgtcaagtatcgctta

SEQ ID NO: 157607 - DNA, 25 bp, Saccharomyces pastorianus
gaagccgagcttttattttctgaag

SEQ ID NO: 157608 - DNA, 25 bp, Saccharomyces pastorianus
tcctctactagcaccgtttttgaac

SEQ ID NO: 157609 - DNA, 25 bp, Saccharomyces pastorianus
accattttgggttctgactctcgat

SEQ ID NO: 157610 - DNA, 25 bp, Saccharomyces pastorianus
atttatggagcacgccgattagccg

SEQ ID NO: 157611 - DNA, 25 bp, Saccharomyces pastorianus
atgggccgttgagacgcaagccttt

SEQ ID NO: 157612 - DNA, 25 bp, Saccharomyces pastorianus
agtatcgaattctaccttgggtgta

SEQ ID NO: 157613 - DNA, 25 bp, Saccharomyces pastorianus
gcctttgaggagaacggttaccgct

SEQ ID NO: 157614 - DNA, 25 bp, Saccharomyces pastorianus
tagtgctcgctgctcattatgatac

SEQ ID NO: 157615 - DNA, 25 bp, Saccharomyces pastorianus
tatatacggcccagttcctaacgca

SEQ ID NO: 157616 - DNA, 25 bp, Saccharomyces pastorianus
gttaccgcttcaataaccttgttat

SEQ ID NO: 157617 - DNA, 25 bp, Saccharomyces pastorianus
gcacttcaacaatacgctggcggga

SEQ ID NO: 157618 - DNA, 25 bp, Saccharomyces pastorianus
ccaatggcttgctgacggcacgatg

SEQ ID NO: 157619 - DNA, 25 bp, Saccharomyces pastorianus
tatgataccaagatagcgcccacgg

SEQ ID NO: 157620 - DNA, 25 bp, Saccharomyces pastorianus
tcgtgtgccgcgctgctatatacgg

SEQ ID NO: 157621 - DNA, 25 bp, Saccharomyces pastorianus
gaactccccacacatgagagatctt

SEQ ID NO: 157622 - DNA, 25 bp, Saccharomyces pastorianus
atattaccagtactcacatgcgaat

SEQ ID NO: 157623 - DNA, 25 bp, Saccharomyces pastorianus
cttctacatattctgggttcatcaa

SEQ ID NO: 157624 - DNA, 25 bp, Saccharomyces pastorianus
catcgtcacgacatcttgggaaaga

SEQ ID NO: 157625 - DNA, 25 bp, Saccharomyces pastorianus
aaatgtgcacggaatagctgagtat

SEQ ID NO: 157626 - DNA, 25 bp, Saccharomyces pastorianus
gagagatctttcgtcaatgaatagc

SEQ ID NO: 157627 - DNA, 25 bp, Saccharomyces pastorianus
ttctcatccacaaattaccccatat

SEQ ID NO: 157628 - DNA, 25 bp, Saccharomyces pastorianus
aaatttaagcgctgtctgcaataag

SEQ ID NO: 157629 - DNA, 25 bp, Saccharomyces pastorianus
gtaggaggaagcatcgtcacgacat

SEQ ID NO: 157630 - DNA, 25 bp, Saccharomyces pastorianus
tgcgaatagtttgaactccccacac

SEQ ID NO: 157631 - DNA, 25 bp, Saccharomyces pastorianus
ggaatgcgcaatatacacacctctt

SEQ ID NO: 157632 - DNA, 25 bp, Saccharomyces pastorianus
gacagtacaaaaagatcacgagaag

SEQ ID NO: 157633 - DNA, 25 bp, Saccharomyces pastorianus
gaacgaccaggatttgacagtacaa

SEQ ID NO: 157634 - DNA, 25 bp, Saccharomyces pastorianus
tgaatattttgaacgaccaggattt

SEQ ID NO: 157635 - DNA, 25 bp, Saccharomyces pastorianus
ttttgaacgaccaggatttgacagt

SEQ ID NO: 157636 - DNA, 25 bp, Saccharomyces pastorianus
aatattttgaacgaccaggatttga

SEQ ID NO: 157637 - DNA, 25 bp, Saccharomyces pastorianus
tattttgaacgaccaggatttgaca

SEQ ID NO: 157638 - DNA, 25 bp, Saccharomyces pastorianus
gaccaggatttgacagtacaaaaag

SEQ ID NO: 157639 - DNA, 25 bp, Saccharomyces pastorianus
acgaccaggatttgacagtacaaaa

SEQ ID NO: 157640 - DNA, 25 bp, Saccharomyces pastorianus
acgagaagaaactctcattcacccc

SEQ ID NO: 157641 - DNA, 25 bp, Saccharomyces pastorianus
gatcacgagaagaaactctcattca

SEQ ID NO: 157642 - DNA, 25 bp, Saccharomyces pastorianus
ttgaacgaccaggatttgacagtac

SEQ ID NO: 157643 - DNA, 25 bp, Saccharomyces pastorianus
atcacgctgggtggtaacgtctccg

SEQ ID NO: 157644 - DNA, 25 bp, Saccharomyces pastorianus
tttctgctgggcctcttggtagaag

SEQ ID NO: 157645 - DNA, 25 bp, Saccharomyces pastorianus
tggtaggataagaccgcctccagca

SEQ ID NO: 157646 - DNA, 25 bp, Saccharomyces pastorianus
tggtgtggctgcagtttttgcctat

SEQ ID NO: 157647 - DNA, 25 bp, Saccharomyces pastorianus
ggatgctgttaagtcgttttctgaa

SEQ ID NO: 157648 - DNA, 25 bp, Saccharomyces pastorianus
ccattgtttcgtgttttagagtcca

SEQ ID NO: 157649 - DNA, 25 bp, Saccharomyces pastorianus
agagtccagggcgtttaattacaga

SEQ ID NO: 157650 - DNA, 25 bp, Saccharomyces pastorianus
caacggtggtcgtggcagtttcgat

SEQ ID NO: 157651 - DNA, 25 bp, Saccharomyces pastorianus
gcctccagcagttgatccattgttt

SEQ ID NO: 157652 - DNA, 25 bp, Saccharomyces pastorianus
taattacagaccctccaacggtggt

SEQ ID NO: 157653 - DNA, 25 bp, Saccharomyces pastorianus
tgaatttgggaccatcacgctgggt

SEQ ID NO: 157654 - DNA, 25 bp, Saccharomyces pastorianus
gttgcactctatttgctcgaaaatt

SEQ ID NO: 157655 - DNA, 25 bp, Saccharomyces pastorianus
gttgagtagctcatcaagggcaatc

SEQ ID NO: 157656 - DNA, 25 bp, Saccharomyces pastorianus
cactactttctattccctggaatgg

SEQ ID NO: 157657 - DNA, 25 bp, Saccharomyces pastorianus
attaaccattactacaacaccacga

SEQ ID NO: 157658 - DNA, 25 bp, Saccharomyces pastorianus
cttttccgccatcaaatctcagagg

SEQ ID NO: 157659 - DNA, 25 bp, Saccharomyces pastorianus
caagggcaatcaaggttccaatctt

SEQ ID NO: 157660 - DNA, 25 bp, Saccharomyces pastorianus
ggaatggacctcctgagtcattgag

SEQ ID NO: 157661 - DNA, 25 bp, Saccharomyces pastorianus
attaatcttattgaactcgaaccgc

SEQ ID NO: 157662 - DNA, 25 bp, Saccharomyces pastorianus
gaactcgaaccgcaagttgcactct

SEQ ID NO: 157663 - DNA, 25 bp, Saccharomyces pastorianus
aacaattcatgtgtcgcttttccgc

SEQ ID NO: 157664 - DNA, 25 bp, Saccharomyces pastorianus
tatgcaactgcactactttctattc

SEQ ID NO: 157665 - DNA, 25 bp, Saccharomyces pastorianus
gagtcatatgtataccggcaatagt

SEQ ID NO: 157666 - DNA, 25 bp, Saccharomyces pastorianus
ccttctcgctgtcttttcgaaagag

SEQ ID NO: 157667 - DNA, 25 bp, Saccharomyces pastorianus
gtaatccaacttcccatgcgaatag

SEQ ID NO: 157668 - DNA, 25 bp, Saccharomyces pastorianus
gttttatgccatttttccagtgtcc

SEQ ID NO: 157669 - DNA, 25 bp, Saccharomyces pastorianus
taatgccgcagatgataccatacta

SEQ ID NO: 157670 - DNA, 25 bp, Saccharomyces pastorianus
aaatgatatctcctctgcttcatcg

SEQ ID NO: 157671 - DNA, 25 bp, Saccharomyces pastorianus
gaagataacgaacccagcgcaacga

SEQ ID NO: 157672 - DNA, 25 bp, Saccharomyces pastorianus
atcattatcccaaagtttcgcgcaa

SEQ ID NO: 157673 - DNA, 25 bp, Saccharomyces pastorianus
aatgccgttgtatttgctagccagt

SEQ ID NO: 157674 - DNA, 25 bp, Saccharomyces pastorianus
gagaaggactacaagcgccgccggt

SEQ ID NO: 157675 - DNA, 25 bp, Saccharomyces pastorianus
atccatgcaggataccaacggcaca

SEQ ID NO: 157676 - DNA, 25 bp, Saccharomyces pastorianus
ccacgtttctaatcggtccatacga

SEQ ID NO: 157677 - DNA, 25 bp, Saccharomyces pastorianus
gttttggctaatattctgccgccaa

SEQ ID NO: 157678 - DNA, 25 bp, Saccharomyces pastorianus
aattgtccgatgacgtctgcacagg

SEQ ID NO: 157679 - DNA, 25 bp, Saccharomyces pastorianus
aattctgaaaccattccttttgaga

SEQ ID NO: 157680 - DNA, 25 bp, Saccharomyces pastorianus
gacgtctgggaaattacaaatctta

SEQ ID NO: 157681 - DNA, 25 bp, Saccharomyces pastorianus
tttacacccagaagacttgactttg

SEQ ID NO: 157682 - DNA, 25 bp, Saccharomyces pastorianus
tttatttcccatatttacacccaga

SEQ ID NO: 157683 - DNA, 25 bp, Saccharomyces pastorianus
gatttccaatttacacacaattctg

SEQ ID NO: 157684 - DNA, 25 bp, Saccharomyces pastorianus
gaatatatcggccacgtttctaatc

SEQ ID NO: 157685 - DNA, 25 bp, Saccharomyces pastorianus
atagaatcaatccaaccttgttgca

SEQ ID NO: 157686 - DNA, 25 bp, Saccharomyces pastorianus
cggtccatacgagatttcatcaatt

SEQ ID NO: 157687 - DNA, 25 bp, Saccharomyces pastorianus
gctactgagggccaactgactgata

SEQ ID NO: 157688 - DNA, 25 bp, Saccharomyces pastorianus
acaaagcgggtgtcaatgtcactaa

SEQ ID NO: 157689 - DNA, 25 bp, Saccharomyces pastorianus
ttgaccaacagatctcttgaagcgt

SEQ ID NO: 157690 - DNA, 25 bp, Saccharomyces pastorianus
tgaagcgtacaaggccaacagagtc

SEQ ID NO: 157691 - DNA, 25 bp, Saccharomyces pastorianus
acaggtgtcaccgtattggccaaga

SEQ ID NO: 157692 - DNA, 25 bp, Saccharomyces pastorianus
atgttatattgaccagagcggccaa

SEQ ID NO: 157693 - DNA, 25 bp, Saccharomyces pastorianus
tttacaagccatggacaggtgtcac

SEQ ID NO: 157694 - DNA, 25 bp, Saccharomyces pastorianus
gtattggccaagaatcaccggttat

SEQ ID NO: 157695 - DNA, 25 bp, Saccharomyces pastorianus
gtccaggagttatctatgcttttaa

SEQ ID NO: 157696 - DNA, 25 bp, Saccharomyces pastorianus
acagagtcgtagatctaccgcacgt

SEQ ID NO: 157697 - DNA, 25 bp, Saccharomyces pastorianus
tttcctattgtccacaagggcggca

SEQ ID NO: 157698 - DNA, 25 bp, Saccharomyces pastorianus
taccaggtgccgaggactgtcaatt

SEQ ID NO: 157699 - DNA, 25 bp, Saccharomyces pastorianus
ctggatttggctgcttggctcggaa

SEQ ID NO: 157700 - DNA, 25 bp, Saccharomyces pastorianus
caaatacaaccgtcattttcctcga

SEQ ID NO: 157701 - DNA, 25 bp, Saccharomyces pastorianus
cactcttttttgatgctcatgcgca

SEQ ID NO: 157702 - DNA, 25 bp, Saccharomyces pastorianus
caggcttattttccattgtccttaa

SEQ ID NO: 157703 - DNA, 25 bp, Saccharomyces pastorianus
tgggttcgtgactacaaaggttctt

SEQ ID NO: 157704 - DNA, 25 bp, Saccharomyces pastorianus
tattggtctggcctccgcaaatgaa

SEQ ID NO: 157705 - DNA, 25 bp, Saccharomyces pastorianus
aggatattccagctttggtctctgt

SEQ ID NO: 157706 - DNA, 25 bp, Saccharomyces pastorianus
ttgggtggtcattcagatcttctta

SEQ ID NO: 157707 - DNA, 25 bp, Saccharomyces pastorianus
atgcgcatggtatcgatatttcggt

SEQ ID NO: 157708 - DNA, 25 bp, Saccharomyces pastorianus
cgcctttgaagattgtcccggacat

SEQ ID NO: 157709 - DNA, 25 bp, Saccharomyces pastorianus
ttggacctactagtgtctatagtaa

SEQ ID NO: 157710 - DNA, 25 bp, Saccharomyces pastorianus
atatttggacctactagtgtctata

SEQ ID NO: 157711 - DNA, 25 bp, Saccharomyces pastorianus
tagtgtctatagtaagtgctcggcc

SEQ ID NO: 157712 - DNA, 25 bp, Saccharomyces pastorianus
gatatttggacctactagtgtctat

SEQ ID NO: 157713 - DNA, 25 bp, Saccharomyces pastorianus
tgatatttggacctactagtgtcta

SEQ ID NO: 157714 - DNA, 25 bp, Saccharomyces pastorianus
atttggacctactagtgtctatagt

SEQ ID NO: 157715 - DNA, 25 bp, Saccharomyces pastorianus
tatttggacctactagtgtctatag

SEQ ID NO: 157716 - DNA, 25 bp, Saccharomyces pastorianus
ggacctactagtgtctatagtaagt

SEQ ID NO: 157717 - DNA, 25 bp, Saccharomyces pastorianus
atgatatttggacctactagtgtct

SEQ ID NO: 157718 - DNA, 25 bp, Saccharomyces pastorianus
tttggacctactagtgtctatagta

SEQ ID NO: 157719 - DNA, 25 bp, Saccharomyces pastorianus
tggacctactagtgtctatagtaag

SEQ ID NO: 157720 - DNA, 25 bp, Saccharomyces pastorianus
tcacttggcccaatactacatgttc

SEQ ID NO: 157721 - DNA, 25 bp, Saccharomyces pastorianus
gctgccatcgctgctactgcttccg

SEQ ID NO: 157722 - DNA, 25 bp, Saccharomyces pastorianus
cacttggcccaatactacatgttcc

SEQ ID NO: 157723 - DNA, 25 bp, Saccharomyces pastorianus
tgccatcgctgctactgcttccgca

SEQ ID NO: 157724 - DNA, 25 bp, Saccharomyces pastorianus
acttggcccaatactacatgttcca

SEQ ID NO: 157725 - DNA, 25 bp, Saccharomyces pastorianus
gccgctggtgtcgctgccatcgctg

SEQ ID NO: 157726 - DNA, 25 bp, Saccharomyces pastorianus
tactgcttccgcaaccaccactcta

SEQ ID NO: 157727 - DNA, 25 bp, Saccharomyces pastorianus
tgttccaagccgcccacccaacgga

SEQ ID NO: 157728 - DNA, 25 bp, Saccharomyces pastorianus
cgccgctggtgtcgctgccatcgct

SEQ ID NO: 157729 - DNA, 25 bp, Saccharomyces pastorianus
ccgctggtgtcgctgccatcgctgc

SEQ ID NO: 157730 - DNA, 25 bp, Saccharomyces pastorianus
cttggcccaatactacatgttccaa

SEQ ID NO: 157731 - DNA, 25 bp, Saccharomyces pastorianus
tattgttttatggcactcatgtgta

SEQ ID NO: 157732 - DNA, 25 bp, Saccharomyces pastorianus
ttgttttatggcactcatgtgtatt

SEQ ID NO: 157733 - DNA, 25 bp, Saccharomyces pastorianus
gtattgttttatggcactcatgtgt

SEQ ID NO: 157734 - DNA, 25 bp, Saccharomyces pastorianus
tggagtattgttttatggcactcat

SEQ ID NO: 157735 - DNA, 25 bp, Saccharomyces pastorianus
attgttttatggcactcatgtgtat

SEQ ID NO: 157736 - DNA, 25 bp, Saccharomyces pastorianus
ggagtattgttttatggcactcatg

SEQ ID NO: 157737 - DNA, 25 bp, Saccharomyces pastorianus
ttcatagacttcgtatgtggagtat

SEQ ID NO: 157738 - DNA, 25 bp, Saccharomyces pastorianus
agtattgttttatggcactcatgtg

SEQ ID NO: 157739 - DNA, 25 bp, Saccharomyces pastorianus
tgtggagtattgttttatggcactc

SEQ ID NO: 157740 - DNA, 25 bp, Saccharomyces pastorianus
gtggagtattgttttatggcactca

SEQ ID NO: 157741 - DNA, 25 bp, Saccharomyces pastorianus
gagtattgttttatggcactcatgt

SEQ ID NO: 157742 - DNA, 25 bp, Saccharomyces pastorianus
tatgcgtcaagcctacaataccctt

SEQ ID NO: 157743 - DNA, 25 bp, Saccharomyces pastorianus
acatcctatgcgtcaagcctacaat

SEQ ID NO: 157744 - DNA, 25 bp, Saccharomyces pastorianus
actttgggagcatcttattcggtgc

SEQ ID NO: 157745 - DNA, 25 bp, Saccharomyces pastorianus
ttggacggcaacttgtatggtaaaa

SEQ ID NO: 157746 - DNA, 25 bp, Saccharomyces pastorianus
aattatcacagcacagagtgttgca

SEQ ID NO: 157747 - DNA, 25 bp, Saccharomyces pastorianus
gttgtagatattcagtttccagtgc

SEQ ID NO: 157748 - DNA, 25 bp, Saccharomyces pastorianus
aaagtaagtacgcagaacagctctg

SEQ ID NO: 157749 - DNA, 25 bp, Saccharomyces pastorianus
cagagtgttgcaattttggacggca

SEQ ID NO: 157750 - DNA, 25 bp, Saccharomyces pastorianus
gcatcttattcggtgcagtcgataa

SEQ ID NO: 157751 - DNA, 25 bp, Saccharomyces pastorianus
gcctacaatacccttgattcaaact

SEQ ID NO: 157752 - DNA, 25 bp, Saccharomyces pastorianus
agaacagctctgcacacatcctatg

SEQ ID NO: 157753 - DNA, 25 bp, Saccharomyces pastorianus
gttaaaccgaatccatcttgcgtct

SEQ ID NO: 157754 - DNA, 25 bp, Saccharomyces pastorianus
cgggtcctctttgccactttttgat

SEQ ID NO: 157755 - DNA, 25 bp, Saccharomyces pastorianus
ttgcgtctccaactgcctcaaattt

SEQ ID NO: 157756 - DNA, 25 bp, Saccharomyces pastorianus
aaagcacctgctaatctggtggata

SEQ ID NO: 157757 - DNA, 25 bp, Saccharomyces pastorianus
gaagcaataactgattcggccagaa

SEQ ID NO: 157758 - DNA, 25 bp, Saccharomyces pastorianus
atcggacatcctactattttctctt

SEQ ID NO: 157759 - DNA, 25 bp, Saccharomyces pastorianus
tcggccagaaatttagctacggttt

SEQ ID NO: 157760 - DNA, 25 bp, Saccharomyces pastorianus
ataacggcaggtttgtggaagcaat

SEQ ID NO: 157761 - DNA, 25 bp, Saccharomyces pastorianus
cggtttccaaatcggacatcctact

SEQ ID NO: 157762 - DNA, 25 bp, Saccharomyces pastorianus
gtagcaataaacagagcgggtcctc

SEQ ID NO: 157763 - DNA, 25 bp, Saccharomyces pastorianus
aactgcctcaaatttctttccgaag

SEQ ID NO: 157764 - DNA, 25 bp, Saccharomyces pastorianus
aaactctacgagtgcattcccgatt

SEQ ID NO: 157765 - DNA, 25 bp, Saccharomyces pastorianus
tgcaaactactcttgaaccgcgtac

SEQ ID NO: 157766 - DNA, 25 bp, Saccharomyces pastorianus
catcccaatgcatgttgtcaccaaa

SEQ ID NO: 157767 - DNA, 25 bp, Saccharomyces pastorianus
caatacgggcgcttcaaaatttcaa

SEQ ID NO: 157768 - DNA, 25 bp, Saccharomyces pastorianus
gagccgataacgcagacttcagact

SEQ ID NO: 157769 - DNA, 25 bp, Saccharomyces pastorianus
gcattcccgatttacccattaattt

SEQ ID NO: 157770 - DNA, 25 bp, Saccharomyces pastorianus
acggattcaaggtatcactgcggca

SEQ ID NO: 157771 - DNA, 25 bp, Saccharomyces pastorianus
ttgccgcaagattacgattaccgtc

SEQ ID NO: 157772 - DNA, 25 bp, Saccharomyces pastorianus
ggattatatctcctgtccgtttaag

SEQ ID NO: 157773 - DNA, 25 bp, Saccharomyces pastorianus
agactgacgccgattggtgctcaac

SEQ ID NO: 157774 - DNA, 25 bp, Saccharomyces pastorianus
accgcgtacagccattgaccatagg

SEQ ID NO: 157775 - DNA, 25 bp, Saccharomyces pastorianus
gtgggacgatgatttactttctata

SEQ ID NO: 157776 - DNA, 25 bp, Saccharomyces pastorianus
gtttaagactcagatctcatcccgc

SEQ ID NO: 157777 - DNA, 25 bp, Saccharomyces pastorianus
ggcactgtatctccacttgatgatg

SEQ ID NO: 157778 - DNA, 25 bp, Saccharomyces pastorianus
atgccctcaagagacactgacagat

SEQ ID NO: 157779 - DNA, 25 bp, Saccharomyces pastorianus
aacggtgcagcctacgattgaaatc

SEQ ID NO: 157780 - DNA, 25 bp, Saccharomyces pastorianus
gtcgattttgtgaattcgtccacct

SEQ ID NO: 157781 - DNA, 25 bp, Saccharomyces pastorianus
gagaccatctcattcggagaaccgt

SEQ ID NO: 157782 - DNA, 25 bp, Saccharomyces pastorianus
atacgaacctcaatgatggcactgt

SEQ ID NO: 157783 - DNA, 25 bp, Saccharomyces pastorianus
gaatccctattcgagacactattta

SEQ ID NO: 157784 - DNA, 25 bp, Saccharomyces pastorianus
ggagttttcctcgaagtgggacgat

SEQ ID NO: 157785 - DNA, 25 bp, Saccharomyces pastorianus
cacacatttggatacactctctact

SEQ ID NO: 157786 - DNA, 25 bp, Saccharomyces pastorianus
tgtttgatgaaacctcttcccaagc

SEQ ID NO: 157787 - DNA, 25 bp, Saccharomyces pastorianus
cttcccaagcccgtgtatacaaaga

SEQ ID NO: 157788 - DNA, 25 bp, Saccharomyces pastorianus
cttacggtgctactggttgtggcaa

SEQ ID NO: 157789 - DNA, 25 bp, Saccharomyces pastorianus
aagcttgtagacttgacctcgcaac

SEQ ID NO: 157790 - DNA, 25 bp, Saccharomyces pastorianus
taaacaggactacgtcaccgacgga

SEQ ID NO: 157791 - DNA, 25 bp, Saccharomyces pastorianus
gaatttgtcgtatcaccacccaaat

SEQ ID NO: 157792 - DNA, 25 bp, Saccharomyces pastorianus
tatactgtgagtggcacaccttcac

SEQ ID NO: 157793 - DNA, 25 bp, Saccharomyces pastorianus
gcccgctcctagattctgttttaga

SEQ ID NO: 157794 - DNA, 25 bp, Saccharomyces pastorianus
cgagatttcactgtcttacttggaa

SEQ ID NO: 157795 - DNA, 25 bp, Saccharomyces pastorianus
gggatcatatttctagccatggagg

SEQ ID NO: 157796 - DNA, 25 bp, Saccharomyces pastorianus
aagtatcttcacgatctcatgcagt

SEQ ID NO: 157797 - DNA, 25 bp, Saccharomyces pastorianus
gatgtggatatctgtcgtcaaataa

SEQ ID NO: 157798 - DNA, 25 bp, Saccharomyces pastorianus
ttatagacatcatccaaagtggcga

SEQ ID NO: 157799 - DNA, 25 bp, Saccharomyces pastorianus
tttgttgacggcaatagatgcgcta

SEQ ID NO: 157800 - DNA, 25 bp, Saccharomyces pastorianus
aagaatctggaagcagtgaggccca

SEQ ID NO: 157801 - DNA, 25 bp, Saccharomyces pastorianus
catgttgctggaaggactggagaaa

SEQ ID NO: 157802 - DNA, 25 bp, Saccharomyces pastorianus
ttctgccgatggtgcagccttgaag

SEQ ID NO: 157803 - DNA, 25 bp, Saccharomyces pastorianus
gagaatgacacttctgccgatggtg

SEQ ID NO: 157804 - DNA, 25 bp, Saccharomyces pastorianus
catttgcaaggcgtgcatgttgctg

SEQ ID NO: 157805 - DNA, 25 bp, Saccharomyces pastorianus
cgctggaaagagagtcgtcaaattt

SEQ ID NO: 157806 - DNA, 25 bp, Saccharomyces pastorianus
agcccaagtggcaatcgagaatgac

SEQ ID NO: 157807 - DNA, 25 bp, Saccharomyces pastorianus
tgaggcccagttgcattatagacat

SEQ ID NO: 157808 - DNA, 25 bp, Saccharomyces pastorianus
aacgacatttcagccaattgcgacc

SEQ ID NO: 157809 - DNA, 25 bp, Saccharomyces pastorianus
agtgctgaatgccttagtctcgcag

SEQ ID NO: 157810 - DNA, 25 bp, Saccharomyces pastorianus
gtctcgcagatactacttccattgg

SEQ ID NO: 157811 - DNA, 25 bp, Saccharomyces pastorianus
gttctcgagcctatttgtgtctagt

SEQ ID NO: 157812 - DNA, 25 bp, Saccharomyces pastorianus
gtcctgtcgctcatgaaactggtgg

SEQ ID NO: 157813 - DNA, 25 bp, Saccharomyces pastorianus
ttctctatttgtatcgcatgcgcgg

SEQ ID NO: 157814 - DNA, 25 bp, Saccharomyces pastorianus
gggtattgcttattcccacaagtgc

SEQ ID NO: 157815 - DNA, 25 bp, Saccharomyces pastorianus
ttatcgagatataccctctggcact

SEQ ID NO: 157816 - DNA, 25 bp, Saccharomyces pastorianus
gagggtgtcgctgatttcgtacatc

SEQ ID NO: 157817 - DNA, 25 bp, Saccharomyces pastorianus
acgctcgacgagactgtgctgcaaa

SEQ ID NO: 157818 - DNA, 25 bp, Saccharomyces pastorianus
cgccccttgcgtttatcatattgta

SEQ ID NO: 157819 - DNA, 25 bp, Saccharomyces pastorianus
aaacaattgggccacggacttccat

SEQ ID NO: 157820 - DNA, 25 bp, Saccharomyces pastorianus
aagaatttcggtaggcctgcttccg

SEQ ID NO: 157821 - DNA, 25 bp, Saccharomyces pastorianus
accctgttgcgttccagagtttatt

SEQ ID NO: 157822 - DNA, 25 bp, Saccharomyces pastorianus
aagagggcaggtcttgctttcgact

SEQ ID NO: 157823 - DNA, 25 bp, Saccharomyces pastorianus
gtggcgtaccaatcaaatttcgtgc

SEQ ID NO: 157824 - DNA, 25 bp, Saccharomyces pastorianus
gacttccattggctaaacgcactac

SEQ ID NO: 157825 - DNA, 25 bp, Saccharomyces pastorianus
atatagtttaccctgttgcgttcca

SEQ ID NO: 157826 - DNA, 25 bp, Saccharomyces pastorianus
gcctgcttccggcaagaaatggtcg

SEQ ID NO: 157827 - DNA, 25 bp, Saccharomyces pastorianus
tttcgtgcacacgtaaaaacgcata

SEQ ID NO: 157828 - DNA, 25 bp, Saccharomyces pastorianus
gagtttattcctcttttgagcaatt

SEQ ID NO: 157829 - DNA, 25 bp, Saccharomyces pastorianus
gctttcgactctccagaatttttga

SEQ ID NO: 157830 - DNA, 25 bp, Saccharomyces pastorianus
cagcggttaccgatcttccagaatg

SEQ ID NO: 157831 - DNA, 25 bp, Saccharomyces pastorianus
attcaagtctgaatgccaattctta

SEQ ID NO: 157832 - DNA, 25 bp, Saccharomyces pastorianus
gtccgttttctttactgttatccat

SEQ ID NO: 157833 - DNA, 25 bp, Saccharomyces pastorianus
tttcctatagctccagcggttaccg

SEQ ID NO: 157834 - DNA, 25 bp, Saccharomyces pastorianus
gtttataacaagtttcacaagcacg

SEQ ID NO: 157835 - DNA, 25 bp, Saccharomyces pastorianus
ttttctttactgttatccatctccc

SEQ ID NO: 157836 - DNA, 25 bp, Saccharomyces pastorianus
caatgttaacttatatggtccgttt

SEQ ID NO: 157837 - DNA, 25 bp, Saccharomyces pastorianus
gtctgaatgccaattcttatttttt

SEQ ID NO: 157838 - DNA, 25 bp, Saccharomyces pastorianus
tgttatccatctccctttcctatag

SEQ ID NO: 157839 - DNA, 25 bp, Saccharomyces pastorianus
tatatggtccgttttctttactgtt

SEQ ID NO: 157840 - DNA, 25 bp, Saccharomyces pastorianus
gttaccgatcttccagaatgccggg

SEQ ID NO: 157841 - DNA, 25 bp, Saccharomyces pastorianus
gacagctcaaagatgtgtattcact

SEQ ID NO: 157842 - DNA, 25 bp, Saccharomyces pastorianus
agttccatgccttctactatacatt

SEQ ID NO: 157843 - DNA, 25 bp, Saccharomyces pastorianus
ataacaagttccatgccttctacta

SEQ ID NO: 157844 - DNA, 25 bp, Saccharomyces pastorianus
acagttttggaatgatcttcaggat

SEQ ID NO: 157845 - DNA, 25 bp, Saccharomyces pastorianus
attatatttgcaacgccgcagtcca

SEQ ID NO: 157846 - DNA, 25 bp, Saccharomyces pastorianus
gatgacatcctaagagcaccgcttt

SEQ ID NO: 157847 - DNA, 25 bp, Saccharomyces pastorianus
gccgcagtccattcaatttgaccag

SEQ ID NO: 157848 - DNA, 25 bp, Saccharomyces pastorianus
accgctttctggacagctcaaagat

SEQ ID NO: 157849 - DNA, 25 bp, Saccharomyces pastorianus
gtcttacagtttgaacagttttgga

SEQ ID NO: 157850 - DNA, 25 bp, Saccharomyces pastorianus
taagagcaccgctttctggacagct

SEQ ID NO: 157851 - DNA, 25 bp, Saccharomyces pastorianus
tgatccagaattatgatgacatcct

SEQ ID NO: 157852 - DNA, 25 bp, Saccharomyces pastorianus
tatccacctacattcggctttcata

SEQ ID NO: 157853 - DNA, 25 bp, Saccharomyces pastorianus
gggcgctacttcatttatggttcaa

SEQ ID NO: 157854 - DNA, 25 bp, Saccharomyces pastorianus
aaggcctaatgcttatatctggaat

SEQ ID NO: 157855 - DNA, 25 bp, Saccharomyces pastorianus
agatatcggatgacgggcgctactt

SEQ ID NO: 157856 - DNA, 25 bp, Saccharomyces pastorianus
ggaaatattaccctctatccaatag

SEQ ID NO: 157857 - DNA, 25 bp, Saccharomyces pastorianus
ttccagtttgaatctatccacctac

SEQ ID NO: 157858 - DNA, 25 bp, Saccharomyces pastorianus
gaggacattctgaccgaaatcccgg

SEQ ID NO: 157859 - DNA, 25 bp, Saccharomyces pastorianus
gtttgatgctgtggaacctctaggt

SEQ ID NO: 157860 - DNA, 25 bp, Saccharomyces pastorianus
gagagcagtacttcaccttacgata

SEQ ID NO: 157861 - DNA, 25 bp, Saccharomyces pastorianus
tagcagatacgttcctggaggacat

SEQ ID NO: 157862 - DNA, 25 bp, Saccharomyces pastorianus
tacagtactccaagaccaacggtat

SEQ ID NO: 157863 - DNA, 25 bp, Saccharomyces pastorianus
agataatataaagcgacaatgtgtt

SEQ ID NO: 157864 - DNA, 25 bp, Saccharomyces pastorianus
gacgaaccagtacagaaaagataat

SEQ ID NO: 157865 - DNA, 25 bp, Saccharomyces pastorianus
ttcgcatatctgaaaatcaaagcat

SEQ ID NO: 157866 - DNA, 25 bp, Saccharomyces pastorianus
aatcaaagcatttctaccacgggaa

SEQ ID NO: 157867 - DNA, 25 bp, Saccharomyces pastorianus
tattatgatagagaacgtcgacgtt

SEQ ID NO: 157868 - DNA, 25 bp, Saccharomyces pastorianus
agaacgtcgacgttattttcgcata

SEQ ID NO: 157869 - DNA, 25 bp, Saccharomyces pastorianus
cacgggaacgacgaaccagtacaga

SEQ ID NO: 157870 - DNA, 25 bp, Saccharomyces pastorianus
gcgacaatgtgttgaggaaaattac

SEQ ID NO: 157871 - DNA, 25 bp, Saccharomyces pastorianus
agcatttctaccacgggaacgacga

SEQ ID NO: 157872 - DNA, 25 bp, Saccharomyces pastorianus
acttaccagggttttattatgatag

SEQ ID NO: 157873 - DNA, 25 bp, Saccharomyces pastorianus
tctaccacgggaacgacgaaccagt

SEQ ID NO: 157874 - DNA, 25 bp, Saccharomyces pastorianus
gattcgaattctattactccaggta

SEQ ID NO: 157875 - DNA, 25 bp, Saccharomyces pastorianus
gaagattttctacatggctattgat

SEQ ID NO: 157876 - DNA, 25 bp, Saccharomyces pastorianus
gacgagattcctaagggtgagccat

SEQ ID NO: 157877 - DNA, 25 bp, Saccharomyces pastorianus
gagttcgataacttatacctggata

SEQ ID NO: 157878 - DNA, 25 bp, Saccharomyces pastorianus
gagctcgtagattcagaaccgctat

SEQ ID NO: 157879 - DNA, 25 bp, Saccharomyces pastorianus
tgtggcccctcgtgccaagatgaat

SEQ ID NO: 157880 - DNA, 25 bp, Saccharomyces pastorianus
ttcagaaccgctatggatgcagaaa

SEQ ID NO: 157881 - DNA, 25 bp, Saccharomyces pastorianus
gctattgatggtgtggcccctcgtg

SEQ ID NO: 157882 - DNA, 25 bp, Saccharomyces pastorianus
gggtgagccatttgattcgaattct

SEQ ID NO: 157883 - DNA, 25 bp, Saccharomyces pastorianus
aatctgtacgtatattgatcacctt

SEQ ID NO: 157884 - DNA, 25 bp, Saccharomyces pastorianus
acgacgatgatgtaaccaagcgatt

SEQ ID NO: 157885 - DNA, 25 bp, Saccharomyces pastorianus
gaatttcctgacttttcaattgtct

SEQ ID NO: 157886 - DNA, 25 bp, Saccharomyces pastorianus
agaagcctcagatatggtcttaact

SEQ ID NO: 157887 - DNA, 25 bp, Saccharomyces pastorianus
aattactacaaggtggtgtccatat

SEQ ID NO: 157888 - DNA, 25 bp, Saccharomyces pastorianus
ctcgtgctacgcctgagcataagtt

SEQ ID NO: 157889 - DNA, 25 bp, Saccharomyces pastorianus
agcgtttaaactacccaatccactg

SEQ ID NO: 157890 - DNA, 25 bp, Saccharomyces pastorianus
gtcatcgaccacgttaatatttttg

SEQ ID NO: 157891 - DNA, 25 bp, Saccharomyces pastorianus
gatcaactggccaatgtcatcgacc

SEQ ID NO: 157892 - DNA, 25 bp, Saccharomyces pastorianus
caatccactgaacgcaatgcaaatt

SEQ ID NO: 157893 - DNA, 25 bp, Saccharomyces pastorianus
gttgccgcactatcattagttgcac

SEQ ID NO: 157894 - DNA, 25 bp, Saccharomyces pastorianus
ggatgggccaccagctcaatcctta

SEQ ID NO: 157895 - DNA, 25 bp, Saccharomyces pastorianus
agttgcactatccacagcgtttaaa

SEQ ID NO: 157896 - DNA, 25 bp, Saccharomyces pastorianus
gtccaataagctaaacgtcctctca

SEQ ID NO: 157897 - DNA, 25 bp, Saccharomyces pastorianus
atatcggtatccttagcggttgctg

SEQ ID NO: 157898 - DNA, 25 bp, Saccharomyces pastorianus
gtgttctgagaatggccaagcgtaa

SEQ ID NO: 157899 - DNA, 25 bp, Saccharomyces pastorianus
gttactttggcattgggtgttctga

SEQ ID NO: 157900 - DNA, 25 bp, Saccharomyces pastorianus
ggacttgtcactggttagcttcata

SEQ ID NO: 157901 - DNA, 25 bp, Saccharomyces pastorianus
gcggttgctgctattccagaagggt

SEQ ID NO: 157902 - DNA, 25 bp, Saccharomyces pastorianus
taggctctgtcaacgttatctgctc

SEQ ID NO: 157903 - DNA, 25 bp, Saccharomyces pastorianus
ggtacactaacctcaaaccacatga

SEQ ID NO: 157904 - DNA, 25 bp, Saccharomyces pastorianus
aaaccgaagactccattgcagttaa

SEQ ID NO: 157905 - DNA, 25 bp, Saccharomyces pastorianus
gtatctaaactttggtgcttggaca

SEQ ID NO: 157906 - DNA, 25 bp, Saccharomyces pastorianus
gggaaactctaactatcggtaatct

SEQ ID NO: 157907 - DNA, 25 bp, Saccharomyces pastorianus
gaataactcgactgctggaaagggt

SEQ ID NO: 157908 - DNA, 25 bp, Saccharomyces pastorianus
gcagtaaggcagaatccgcaccatt

SEQ ID NO: 157909 - DNA, 25 bp, Saccharomyces pastorianus
accgtacctgatagcccaaacatga

SEQ ID NO: 157910 - DNA, 25 bp, Saccharomyces pastorianus
tgctgtatggatcactgccacggtg

SEQ ID NO: 157911 - DNA, 25 bp, Saccharomyces pastorianus
ctgccacggtggtaatgatcaattt

SEQ ID NO: 157912 - DNA, 25 bp, Saccharomyces pastorianus
attgtccgcggtactgacgtttaga

SEQ ID NO: 157913 - DNA, 25 bp, Saccharomyces pastorianus
gagcccaacccatttgatgatgcca

SEQ ID NO: 157914 - DNA, 25 bp, Saccharomyces pastorianus
gatgattttggcaacgagcccaacc

SEQ ID NO: 157915 - DNA, 25 bp, Saccharomyces pastorianus
ttgatgatgccaccgtacctgatag

SEQ ID NO: 157916 - DNA, 25 bp, Saccharomyces pastorianus
gaatccgcaccattacagggtcaaa

SEQ ID NO: 157917 - DNA, 25 bp, Saccharomyces pastorianus
aatacttccagatcgatttgacgca

SEQ ID NO: 157918 - DNA, 25 bp, Saccharomyces pastorianus
atatcgctccacataatctcatcga

SEQ ID NO: 157919 - DNA, 25 bp, Saccharomyces pastorianus
aaagcgcttgcattttggtagattc

SEQ ID NO: 157920 - DNA, 25 bp, Saccharomyces pastorianus
aaggtaatggcgctgtttctaacag

SEQ ID NO: 157921 - DNA, 25 bp, Saccharomyces pastorianus
tggtaccggtctccaagcattttgg

SEQ ID NO: 157922 - DNA, 25 bp, Saccharomyces pastorianus
aatcgattccaatatcgctccacat

SEQ ID NO: 157923 - DNA, 25 bp, Saccharomyces pastorianus
acttgtttttgaggcagttgctaaa

SEQ ID NO: 157924 - DNA, 25 bp, Saccharomyces pastorianus
tactctagagcccaacttgtttttg

SEQ ID NO: 157925 - DNA, 25 bp, Saccharomyces pastorianus
gaagttacaaaccagtgatgcacga

SEQ ID NO: 157926 - DNA, 25 bp, Saccharomyces pastorianus
atcatgtcagggattgttggcgaat

SEQ ID NO: 157927 - DNA, 25 bp, Saccharomyces pastorianus
atctttggttgtctacctactctag

SEQ ID NO: 157928 - DNA, 25 bp, Saccharomyces pastorianus
taacatgttttggtaccggtctcca

SEQ ID NO: 157929 - DNA, 25 bp, Saccharomyces pastorianus
taagattgtgctacacactgcctcc

SEQ ID NO: 157930 - DNA, 25 bp, Saccharomyces pastorianus
tggcgcaaccggtttcattgctcta

SEQ ID NO: 157931 - DNA, 25 bp, Saccharomyces pastorianus
aaatatgctgcagacactgttgaaa

SEQ ID NO: 157932 - DNA, 25 bp, Saccharomyces pastorianus
ttcgtctactgctgctctggtgaca

SEQ ID NO: 157933 - DNA, 25 bp, Saccharomyces pastorianus
gcctccccattccattttgaaacta

SEQ ID NO: 157934 - DNA, 25 bp, Saccharomyces pastorianus
gaacgatctgttgaaagctggctat

SEQ ID NO: 157935 - DNA, 25 bp, Saccharomyces pastorianus
atgaccactgataccactgttttcg

SEQ ID NO: 157936 - DNA, 25 bp, Saccharomyces pastorianus
aggatttactaacccctgcagtgaa

SEQ ID NO: 157937 - DNA, 25 bp, Saccharomyces pastorianus
tggctatacagtcatcggctcaggt

SEQ ID NO: 157938 - DNA, 25 bp, Saccharomyces pastorianus
gaacggtacacaatctatcttggaa

SEQ ID NO: 157939 - DNA, 25 bp, Saccharomyces pastorianus
actgttttcgtttctggcgcaaccg

SEQ ID NO: 157940 - DNA, 25 bp, Saccharomyces pastorianus
gaagccggatcttacgatcgtttga

SEQ ID NO: 157941 - DNA, 25 bp, Saccharomyces pastorianus
gtaaataaacttcttccaccgcatc

SEQ ID NO: 157942 - DNA, 25 bp, Saccharomyces pastorianus
ggaagaacgcacacatctactgctg

SEQ ID NO: 157943 - DNA, 25 bp, Saccharomyces pastorianus
gcttactagagcttcgaccgggtgt

SEQ ID NO: 157944 - DNA, 25 bp, Saccharomyces pastorianus
gctgccgtggttgtgttacctcaaa

SEQ ID NO: 157945 - DNA, 25 bp, Saccharomyces pastorianus
gaaacgacctcctcaagattggtaa

SEQ ID NO: 157946 - DNA, 25 bp, Saccharomyces pastorianus
tgaagccatgatttttacccagaat

SEQ ID NO: 157947 - DNA, 25 bp, Saccharomyces pastorianus
tcttgcggcattcattttgacgtga

SEQ ID NO: 157948 - DNA, 25 bp, Saccharomyces pastorianus
gacaaagacctttcttgcggcattc

SEQ ID NO: 157949 - DNA, 25 bp, Saccharomyces pastorianus
gcatccgttcgcagataaacctagc

SEQ ID NO: 157950 - DNA, 25 bp, Saccharomyces pastorianus
cagcgctcactgatacatttattga

SEQ ID NO: 157951 - DNA, 25 bp, Saccharomyces pastorianus
gatacctaagataactgcgcatttg

SEQ ID NO: 157952 - DNA, 25 bp, Saccharomyces pastorianus
tgatatttggcctagcttacgcaat

SEQ ID NO: 157953 - DNA, 25 bp, Saccharomyces pastorianus
tagggagttcttggcatgagctaac

SEQ ID NO: 157954 - DNA, 25 bp, Saccharomyces pastorianus
atttgggagcagctcctgcgatgct

SEQ ID NO: 157955 - DNA, 25 bp, Saccharomyces pastorianus
atggctgtattatttcccctgtgac

SEQ ID NO: 157956 - DNA, 25 bp, Saccharomyces pastorianus
ttgcgcagcgatgtttagggagttc

SEQ ID NO: 157957 - DNA, 25 bp, Saccharomyces pastorianus
aatcgactgttaatactacggtagc

SEQ ID NO: 157958 - DNA, 25 bp, Saccharomyces pastorianus
tagcttacgcaatcttcggccggtt

SEQ ID NO: 157959 - DNA, 25 bp, Saccharomyces pastorianus
ggcacagcagcacgtattgcactat

SEQ ID NO: 157960 - DNA, 25 bp, Saccharomyces pastorianus
ccctgtgacagaatcctcgcgaaga

SEQ ID NO: 157961 - DNA, 25 bp, Saccharomyces pastorianus
atccatggtgctatctattgcataa

SEQ ID NO: 157962 - DNA, 25 bp, Saccharomyces pastorianus
agtcataaatcatgttttccctttc

SEQ ID NO: 157963 - DNA, 25 bp, Saccharomyces pastorianus
tcctctcagtcataaatcatgtttt

SEQ ID NO: 157964 - DNA, 25 bp, Saccharomyces pastorianus
tgccgtcgtcctctcagtcataaat

SEQ ID NO: 157965 - DNA, 25 bp, Saccharomyces pastorianus
tcataaatcatgttttccctttccc

SEQ ID NO: 157966 - DNA, 25 bp, Saccharomyces pastorianus
cataaatcatgttttccctttccct

SEQ ID NO: 157967 - DNA, 25 bp, Saccharomyces pastorianus
ctcagtcataaatcatgttttccct

SEQ ID NO: 157968 - DNA, 25 bp, Saccharomyces pastorianus
cgtcgtcctctcagtcataaatcat

SEQ ID NO: 157969 - DNA, 25 bp, Saccharomyces pastorianus
gtcgtcctctcagtcataaatcatg

SEQ ID NO: 157970 - DNA, 25 bp, Saccharomyces pastorianus
ttactgccgtcgtcctctcagtcat

SEQ ID NO: 157971 - DNA, 25 bp, Saccharomyces pastorianus
gtcctctcagtcataaatcatgttt

SEQ ID NO: 157972 - DNA, 25 bp, Saccharomyces pastorianus
tcgtcctctcagtcataaatcatgt

SEQ ID NO: 157973 - DNA, 25 bp, Saccharomyces pastorianus
gtatccagtttctctcaccaaagaa

SEQ ID NO: 157974 - DNA, 25 bp, Saccharomyces pastorianus
aacaatctgctcaagctgcccaatg

SEQ ID NO: 157975 - DNA, 25 bp, Saccharomyces pastorianus
ttcaaagtatccagtttctctcacc

SEQ ID NO: 157976 - DNA, 25 bp, Saccharomyces pastorianus
caacaccttcattgtgtccattttg

SEQ ID NO: 157977 - DNA, 25 bp, Saccharomyces pastorianus
taaggatttagtggcaagctccaag

SEQ ID NO: 157978 - DNA, 25 bp, Saccharomyces pastorianus
gtgtccattttgtacccaacatcta

SEQ ID NO: 157979 - DNA, 25 bp, Saccharomyces pastorianus
ttttgtacccaacatctaccgacgt

SEQ ID NO: 157980 - DNA, 25 bp, Saccharomyces pastorianus
gtcaagtcaatttataccacataca

SEQ ID NO: 157981 - DNA, 25 bp, Saccharomyces pastorianus
aagctgcccaatgggaatcggttct

SEQ ID NO: 157982 - DNA, 25 bp, Saccharomyces pastorianus
gaaatggatcgattacatgcaaaac

SEQ ID NO: 157983 - DNA, 25 bp, Saccharomyces pastorianus
aagctccaaggatgtcaagtcaatt

SEQ ID NO: 157984 - DNA, 25 bp, Saccharomyces pastorianus
agcctattagcatttcccgaggtaa

SEQ ID NO: 157985 - DNA, 25 bp, Saccharomyces pastorianus
attggtccttctccacagagaggca

SEQ ID NO: 157986 - DNA, 25 bp, Saccharomyces pastorianus
tggcacaacctcatccggtaaatga

SEQ ID NO: 157987 - DNA, 25 bp, Saccharomyces pastorianus
ataagtacgaactcggtccgcggat

SEQ ID NO: 157988 - DNA, 25 bp, Saccharomyces pastorianus
tagcagttggtagcccagttaaccc

SEQ ID NO: 157989 - DNA, 25 bp, Saccharomyces pastorianus
aggcattcagaatcacaacgctatt

SEQ ID NO: 157990 - DNA, 25 bp, Saccharomyces pastorianus
tatctcaactcccaatttctatcaa

SEQ ID NO: 157991 - DNA, 25 bp, Saccharomyces pastorianus
taccaaaggccaccgtttcaattct

SEQ ID NO: 157992 - DNA, 25 bp, Saccharomyces pastorianus
tcgcagcccgagtatgagcatatct

SEQ ID NO: 157993 - DNA, 25 bp, Saccharomyces pastorianus
ggtggttatacaaatcctcagccta

SEQ ID NO: 157994 - DNA, 25 bp, Saccharomyces pastorianus
caacctaatccttcatttgttccta

SEQ ID NO: 157995 - DNA, 25 bp, Saccharomyces pastorianus
gactttccttcactatttatttact

SEQ ID NO: 157996 - DNA, 25 bp, Saccharomyces pastorianus
attgctttattcgactttccttcac

SEQ ID NO: 157997 - DNA, 25 bp, Saccharomyces pastorianus
atgcagcatccattgctttattcga

SEQ ID NO: 157998 - DNA, 25 bp, Saccharomyces pastorianus
attcgactttccttcactatttatt

SEQ ID NO: 157999 - DNA, 25 bp, Saccharomyces pastorianus
ttttcttagctataaaaggcagatc

SEQ ID NO: 158000 - DNA, 25 bp, Saccharomyces pastorianus
tccattgctttattcgactttcctt

SEQ ID NO: 158001 - DNA, 25 bp, Saccharomyces pastorianus
tactttccatttcttattttagtgt

SEQ ID NO: 158002 - DNA, 25 bp, Saccharomyces pastorianus
cactatttatttactttccatttct

SEQ ID NO: 158003 - DNA, 25 bp, Saccharomyces pastorianus
gatcaatgcagcatccattgcttta

SEQ ID NO: 158004 - DNA, 25 bp, Saccharomyces pastorianus
ctttattcgactttccttcactatt

SEQ ID NO: 158005 - DNA, 25 bp, Saccharomyces pastorianus
gcatccattgctttattcgactttc

SEQ ID NO: 158006 - DNA, 25 bp, Saccharomyces pastorianus
atcctacgcgattcctataacagag

SEQ ID NO: 158007 - DNA, 25 bp, Saccharomyces pastorianus
gttcattcttcaacacccagtatta

SEQ ID NO: 158008 - DNA, 25 bp, Saccharomyces pastorianus
atgattcgatcagcaccactagcaa

SEQ ID NO: 158009 - DNA, 25 bp, Saccharomyces pastorianus
gattctgctgatttctcagaggcac

SEQ ID NO: 158010 - DNA, 25 bp, Saccharomyces pastorianus
taacgatatccctcagtcaagcaat

SEQ ID NO: 158011 - DNA, 25 bp, Saccharomyces pastorianus
aagagactttttcggctgttcattc

SEQ ID NO: 158012 - DNA, 25 bp, Saccharomyces pastorianus
caagcaatttgctacccacggatgc

SEQ ID NO: 158013 - DNA, 25 bp, Saccharomyces pastorianus
gtattaattctcaatcctacgcgat

SEQ ID NO: 158014 - DNA, 25 bp, Saccharomyces pastorianus
ggatcctggtccaatatttgacgtt

SEQ ID NO: 158015 - DNA, 25 bp, Saccharomyces pastorianus
gaggcactttctctacagaccaaaa

SEQ ID NO: 158016 - DNA, 25 bp, Saccharomyces pastorianus
gcaactcaagtggtagcttcgatag

SEQ ID NO: 158017 - DNA, 25 bp, Saccharomyces pastorianus
ttgaccccagaatctcagttgaaga

SEQ ID NO: 158018 - DNA, 25 bp, Saccharomyces pastorianus
atcttgaccccagaatctcagttga

SEQ ID NO: 158019 - DNA, 25 bp, Saccharomyces pastorianus
tcttgaccccagaatctcagttgaa

SEQ ID NO: 158020 - DNA, 25 bp, Saccharomyces pastorianus
tcagttgaagaagtctaaggctcaa

SEQ ID NO: 158021 - DNA, 25 bp, Saccharomyces pastorianus
gaccccagaatctcagttgaagaag

SEQ ID NO: 158022 - DNA, 25 bp, Saccharomyces pastorianus
aatcttgaccccagaatctcagttg

SEQ ID NO: 158023 - DNA, 25 bp, Saccharomyces pastorianus
ccagaatctcagttgaagaagtcta

SEQ ID NO: 158024 - DNA, 25 bp, Saccharomyces pastorianus
taaggctcaacaaaagactgctgaa

SEQ ID NO: 158025 - DNA, 25 bp, Saccharomyces pastorianus
tctcagttgaagaagtctaaggctc

SEQ ID NO: 158026 - DNA, 25 bp, Saccharomyces pastorianus
aaatcttgaccccagaatctcagtt

SEQ ID NO: 158027 - DNA, 25 bp, Saccharomyces pastorianus
cttgaccccagaatctcagttgaag

SEQ ID NO: 158028 - DNA, 25 bp, Saccharomyces pastorianus
agatattattaacccctcgttggat

SEQ ID NO: 158029 - DNA, 25 bp, Saccharomyces pastorianus
tcgttggatccgcagtcagcagcat

SEQ ID NO: 158030 - DNA, 25 bp, Saccharomyces pastorianus
ttccacagccattgaagatattatt

SEQ ID NO: 158031 - DNA, 25 bp, Saccharomyces pastorianus
tgagtcaaacgtgagcgatgctccc

SEQ ID NO: 158032 - DNA, 25 bp, Saccharomyces pastorianus
tacgaccgatcgtaccgatgcaagt

SEQ ID NO: 158033 - DNA, 25 bp, Saccharomyces pastorianus
accgaacgatatctttacgaccgat

SEQ ID NO: 158034 - DNA, 25 bp, Saccharomyces pastorianus
agtcagcagcatcgccggttccttc

SEQ ID NO: 158035 - DNA, 25 bp, Saccharomyces pastorianus
tccttcttcctcttttttacatgac

SEQ ID NO: 158036 - DNA, 25 bp, Saccharomyces pastorianus
gatgctccccgtattgagcctttac

SEQ ID NO: 158037 - DNA, 25 bp, Saccharomyces pastorianus
cctcttttttacatgactcaaggaa

SEQ ID NO: 158038 - DNA, 25 bp, Saccharomyces pastorianus
atgcaagtactacatcttccacagc

SEQ ID NO: 158039 - DNA, 25 bp, Saccharomyces pastorianus
agatcacattgcgagaggacacagt

SEQ ID NO: 158040 - DNA, 25 bp, Saccharomyces pastorianus
ccggagttctcttttgcatcgaaac

SEQ ID NO: 158041 - DNA, 25 bp, Saccharomyces pastorianus
tggaatgcaatacaacccaccacac

SEQ ID NO: 158042 - DNA, 25 bp, Saccharomyces pastorianus
tcttcgacgtaggagccatttccga

SEQ ID NO: 158043 - DNA, 25 bp, Saccharomyces pastorianus
atgagctgtgccgtttgcaggacac

SEQ ID NO: 158044 - DNA, 25 bp, Saccharomyces pastorianus
actgtggcagcggatactatggaat

SEQ ID NO: 158045 - DNA, 25 bp, Saccharomyces pastorianus
gtgagattctcaccaagctcttcga

SEQ ID NO: 158046 - DNA, 25 bp, Saccharomyces pastorianus
ggtaccaataccttatcccagaatt

SEQ ID NO: 158047 - DNA, 25 bp, Saccharomyces pastorianus
gaaaaattcctttatggcagcggca

SEQ ID NO: 158048 - DNA, 25 bp, Saccharomyces pastorianus
gtttaatgctagatccgcgtgcgat

SEQ ID NO: 158049 - DNA, 25 bp, Saccharomyces pastorianus
gctatgttgaatctactgtcgctaa

SEQ ID NO: 158050 - DNA, 25 bp, Saccharomyces pastorianus
tctaacctcaataacacgaccaata

SEQ ID NO: 158051 - DNA, 25 bp, Saccharomyces pastorianus
taacttgccagtatacgttaatcaa

SEQ ID NO: 158052 - DNA, 25 bp, Saccharomyces pastorianus
ggtatgtaaatctacgaattccatt

SEQ ID NO: 158053 - DNA, 25 bp, Saccharomyces pastorianus
ggagcaagcgataatatttcggcta

SEQ ID NO: 158054 - DNA, 25 bp, Saccharomyces pastorianus
atcacaacgcaatccttactcaaag

SEQ ID NO: 158055 - DNA, 25 bp, Saccharomyces pastorianus
cattctcaagctggttatattcata

SEQ ID NO: 158056 - DNA, 25 bp, Saccharomyces pastorianus
tcggctaacagcaattctataagat

SEQ ID NO: 158057 - DNA, 25 bp, Saccharomyces pastorianus
gatcaacattcattctcaagctggt

SEQ ID NO: 158058 - DNA, 25 bp, Saccharomyces pastorianus
gataaaaaatgttacggccgcatta

SEQ ID NO: 158059 - DNA, 25 bp, Saccharomyces pastorianus
gatgggagtactttacacaacgtga

SEQ ID NO: 158060 - DNA, 25 bp, Saccharomyces pastorianus
aactgattccacagattttcaatga

SEQ ID NO: 158061 - DNA, 25 bp, Saccharomyces pastorianus
acactccctactgcttttatgatga

SEQ ID NO: 158062 - DNA, 25 bp, Saccharomyces pastorianus
acctttccaaggcagctgagatcga

SEQ ID NO: 158063 - DNA, 25 bp, Saccharomyces pastorianus
tattttttcatgatggccccggtac

SEQ ID NO: 158064 - DNA, 25 bp, Saccharomyces pastorianus
ggttgcatctgtaggcgagttcatt

SEQ ID NO: 158065 - DNA, 25 bp, Saccharomyces pastorianus
agattgccaccattattttctacgc

SEQ ID NO: 158066 - DNA, 25 bp, Saccharomyces pastorianus
gtattttcattgttctgttcccttc

SEQ ID NO: 158067 - DNA, 25 bp, Saccharomyces pastorianus
agtgattatcttcctgcttaacgtg

SEQ ID NO: 158068 - DNA, 25 bp, Saccharomyces pastorianus
tgaatcttttacttttcactccggc

SEQ ID NO: 158069 - DNA, 25 bp, Saccharomyces pastorianus
tagcccaccaattggagccactgaa

SEQ ID NO: 158070 - DNA, 25 bp, Saccharomyces pastorianus
aatgtggctcttcctgatgaaatat

SEQ ID NO: 158071 - DNA, 25 bp, Saccharomyces pastorianus
gggattcaccaaccagcaatgttac

SEQ ID NO: 158072 - DNA, 25 bp, Saccharomyces pastorianus
gttctagaaatcttacatgtcttgg

SEQ ID NO: 158073 - DNA, 25 bp, Saccharomyces pastorianus
gctgcagttctagaaatcttacatg

SEQ ID NO: 158074 - DNA, 25 bp, Saccharomyces pastorianus
gaaatcttacatgtcttggataaag

SEQ ID NO: 158075 - DNA, 25 bp, Saccharomyces pastorianus
atggatagtaaggaagtactggtac

SEQ ID NO: 158076 - DNA, 25 bp, Saccharomyces pastorianus
ctggtacatgttaagaatctagaaa

SEQ ID NO: 158077 - DNA, 25 bp, Saccharomyces pastorianus
gatgctgcagttctagaaatcttac

SEQ ID NO: 158078 - DNA, 25 bp, Saccharomyces pastorianus
gcagttctagaaatcttacatgtct

SEQ ID NO: 158079 - DNA, 25 bp, Saccharomyces pastorianus
gtactggtacatgttaagaatctag

SEQ ID NO: 158080 - DNA, 25 bp, Saccharomyces pastorianus
agaacaaaagtaatgatgctgcagt

SEQ ID NO: 158081 - DNA, 25 bp, Saccharomyces pastorianus
cgtccccactgaaaagttactgaga

SEQ ID NO: 158082 - DNA, 25 bp, Saccharomyces pastorianus
ctagaaatcttacatgtcttggata

SEQ ID NO: 158083 - DNA, 25 bp, Saccharomyces pastorianus
caaagtctacaggatgattgggatc

SEQ ID NO: 158084 - DNA, 25 bp, Saccharomyces pastorianus
atgattgggatccagcaaatgatga

SEQ ID NO: 158085 - DNA, 25 bp, Saccharomyces pastorianus
caaatgatgagattgtcaagcggat

SEQ ID NO: 158086 - DNA, 25 bp, Saccharomyces pastorianus
gattgtcaagcggataatgtctgaa

SEQ ID NO: 158087 - DNA, 25 bp, Saccharomyces pastorianus
tggtatgtattttgaacattttcga

SEQ ID NO: 158088 - DNA, 25 bp, Saccharomyces pastorianus
aatgtctgaagatacgctgctacaa

SEQ ID NO: 158089 - DNA, 25 bp, Saccharomyces pastorianus
ctacaggatgattgggatccagcaa

SEQ ID NO: 158090 - DNA, 25 bp, Saccharomyces pastorianus
tacgctgctacaaaaagaaatcacg

SEQ ID NO: 158091 - DNA, 25 bp, Saccharomyces pastorianus
gaagatctcctaacaatcattgaaa

SEQ ID NO: 158092 - DNA, 25 bp, Saccharomyces pastorianus
agatttgcaaaaacctaattgctac

SEQ ID NO: 158093 - DNA, 25 bp, Saccharomyces pastorianus
gaatcaaaattacaaagtctacagg

SEQ ID NO: 158094 - DNA, 25 bp, Saccharomyces pastorianus
gcgccgagcgaaattttaaagagaa

SEQ ID NO: 158095 - DNA, 25 bp, Saccharomyces pastorianus
agaaacagtcaccaagacttcttca

SEQ ID NO: 158096 - DNA, 25 bp, Saccharomyces pastorianus
gcgcaaaacggacacaacagcagta

SEQ ID NO: 158097 - DNA, 25 bp, Saccharomyces pastorianus
ggaatggactcgattataccggcag

SEQ ID NO: 158098 - DNA, 25 bp, Saccharomyces pastorianus
gacacaacagcagtaaagacaaccg

SEQ ID NO: 158099 - DNA, 25 bp, Saccharomyces pastorianus
gacaaccggaatggactcgattata

SEQ ID NO: 158100 - DNA, 25 bp, Saccharomyces pastorianus
tggactcgattataccggcaggcgt

SEQ ID NO: 158101 - DNA, 25 bp, Saccharomyces pastorianus
aaagacaaccggaatggactcgatt

SEQ ID NO: 158102 - DNA, 25 bp, Saccharomyces pastorianus
gagaacaacagaaacagtcaccaag

SEQ ID NO: 158103 - DNA, 25 bp, Saccharomyces pastorianus
acttcttcaattaggcagcgcaaaa

SEQ ID NO: 158104 - DNA, 25 bp, Saccharomyces pastorianus
agacttcttcaattaggcagcgcaa

SEQ ID NO: 158105 - DNA, 25 bp, Saccharomyces pastorianus
gtaaatcatctagcttgacgcctgc

SEQ ID NO: 158106 - DNA, 25 bp, Saccharomyces pastorianus
aatcgcaacggcagaatttcatcgc

SEQ ID NO: 158107 - DNA, 25 bp, Saccharomyces pastorianus
tataatcgagtccattccggttgtc

SEQ ID NO: 158108 - DNA, 25 bp, Saccharomyces pastorianus
tgacgcctgccggtataatcgagtc

SEQ ID NO: 158109 - DNA, 25 bp, Saccharomyces pastorianus
tactgctgttgtgtccgttttgcgc

SEQ ID NO: 158110 - DNA, 25 bp, Saccharomyces pastorianus
tccgttttgcgctgcctaattgaag

SEQ ID NO: 158111 - DNA, 25 bp, Saccharomyces pastorianus
attccggttgtctttactgctgttg

SEQ ID NO: 158112 - DNA, 25 bp, Saccharomyces pastorianus
gtttcattctcgttcttagccaata

SEQ ID NO: 158113 - DNA, 25 bp, Saccharomyces pastorianus
tgactgtttctgttgttctctttaa

SEQ ID NO: 158114 - DNA, 25 bp, Saccharomyces pastorianus
aatttcatcgcgtgcttcgttgatc

SEQ ID NO: 158115 - DNA, 25 bp, Saccharomyces pastorianus
tcgttgatctgcttacacactttgt

SEQ ID NO: 158116 - DNA, 25 bp, Saccharomyces pastorianus
atcatcacgtttgtttgcagtcatc

SEQ ID NO: 158117 - DNA, 25 bp, Saccharomyces pastorianus
atagggctaccaaatatctcgtcaa

SEQ ID NO: 158118 - DNA, 25 bp, Saccharomyces pastorianus
tatagccattgtccccggttatata

SEQ ID NO: 158119 - DNA, 25 bp, Saccharomyces pastorianus
gaattcgacccctggttcaattata

SEQ ID NO: 158120 - DNA, 25 bp, Saccharomyces pastorianus
aagactggctctatcatgcacgcaa

SEQ ID NO: 158121 - DNA, 25 bp, Saccharomyces pastorianus
aaacgtttgtgtgctatttgcgcca

SEQ ID NO: 158122 - DNA, 25 bp, Saccharomyces pastorianus
ggatacgtgttcatcaccaacttga

SEQ ID NO: 158123 - DNA, 25 bp, Saccharomyces pastorianus
gcagctttattctacttctacatgg

SEQ ID NO: 158124 - DNA, 25 bp, Saccharomyces pastorianus
atgacgactagtgcgttcatctggc

SEQ ID NO: 158125 - DNA, 25 bp, Saccharomyces pastorianus
tgggcttgcccattgacatcagaaa

SEQ ID NO: 158126 - DNA, 25 bp, Saccharomyces pastorianus
gaggccattgccattacactattaa

SEQ ID NO: 158127 - DNA, 25 bp, Saccharomyces pastorianus
actttctcttcttccactgttaaga

SEQ ID NO: 158128 - DNA, 25 bp, Saccharomyces pastorianus
gttgaaggtgtttctccagacgact

SEQ ID NO: 158129 - DNA, 25 bp, Saccharomyces pastorianus
ttgaaggtgtttctccagacgactt

SEQ ID NO: 158130 - DNA, 25 bp, Saccharomyces pastorianus
attggttttggtcattgccactttg

SEQ ID NO: 158131 - DNA, 25 bp, Saccharomyces pastorianus
aactttctcttcttccactgttaag

SEQ ID NO: 158132 - DNA, 25 bp, Saccharomyces pastorianus
tgaaggtgtttctccagacgacttg

SEQ ID NO: 158133 - DNA, 25 bp, Saccharomyces pastorianus
tattggttttggtcattgccacttt

SEQ ID NO: 158134 - DNA, 25 bp, Saccharomyces pastorianus
ttattggttttggtcattgccactt

SEQ ID NO: 158135 - DNA, 25 bp, Saccharomyces pastorianus
ttggttttggtcattgccactttgt

SEQ ID NO: 158136 - DNA, 25 bp, Saccharomyces pastorianus
cttattggttttggtcattgccact

SEQ ID NO: 158137 - DNA, 25 bp, Saccharomyces pastorianus
acaacactttcgttggtagagctgc

SEQ ID NO: 158138 - DNA, 25 bp, Saccharomyces pastorianus
ttggtattatcttattggttttggt

SEQ ID NO: 158139 - DNA, 25 bp, Saccharomyces pastorianus
ggtgtcgaaatcttgtgttccgaca

SEQ ID NO: 158140 - DNA, 25 bp, Saccharomyces pastorianus
gctaccggtgacaacactttcgttg

SEQ ID NO: 158141 - DNA, 25 bp, Saccharomyces pastorianus
gaaggtttcatggttgttaccgcta

SEQ ID NO: 158142 - DNA, 25 bp, Saccharomyces pastorianus
gaacggtattggtattatcttattg

SEQ ID NO: 158143 - DNA, 25 bp, Saccharomyces pastorianus
gtctggactgcttgtttctacagaa

SEQ ID NO: 158144 - DNA, 25 bp, Saccharomyces pastorianus
tcatggttgttaccgctaccggtga

SEQ ID NO: 158145 - DNA, 25 bp, Saccharomyces pastorianus
cactgaagttttgaacggtattggt

SEQ ID NO: 158146 - DNA, 25 bp, Saccharomyces pastorianus
gttgttaccgctaccggtgacaaca

SEQ ID NO: 158147 - DNA, 25 bp, Saccharomyces pastorianus
aacggtattgttagaatcttgagat

SEQ ID NO: 158148 - DNA, 25 bp, Saccharomyces pastorianus
gatctccgtatcgagaactgagttg

SEQ ID NO: 158149 - DNA, 25 bp, Saccharomyces pastorianus
caattaccggaagcggccgactaga

SEQ ID NO: 158150 - DNA, 25 bp, Saccharomyces pastorianus
tcgcataggtttttccggccgggtg

SEQ ID NO: 158151 - DNA, 25 bp, Saccharomyces pastorianus
tactgtttacatttgcccgcttcgg

SEQ ID NO: 158152 - DNA, 25 bp, Saccharomyces pastorianus
ggtgctctgccgatgtactgtttac

SEQ ID NO: 158153 - DNA, 25 bp, Saccharomyces pastorianus
gaaattctcgcataggtttttccgg

SEQ ID NO: 158154 - DNA, 25 bp, Saccharomyces pastorianus
tgggtgtgcccatgcggcaattatt

SEQ ID NO: 158155 - DNA, 25 bp, Saccharomyces pastorianus
gcaattattgccagatctccgtatc

SEQ ID NO: 158156 - DNA, 25 bp, Saccharomyces pastorianus
aagcggccgactagacccgtcgtgg

SEQ ID NO: 158157 - DNA, 25 bp, Saccharomyces pastorianus
cccgcttcgggcaaatgtattttcg

SEQ ID NO: 158158 - DNA, 25 bp, Saccharomyces pastorianus
aactgagttgttggccaattaccgg

SEQ ID NO: 158159 - DNA, 25 bp, Saccharomyces pastorianus
gactcaccaaatatagctgctcttg

SEQ ID NO: 158160 - DNA, 25 bp, Saccharomyces pastorianus
gctatttaacagtcacaagggctta

SEQ ID NO: 158161 - DNA, 25 bp, Saccharomyces pastorianus
ggcaagaaccctttattggctctaa

SEQ ID NO: 158162 - DNA, 25 bp, Saccharomyces pastorianus
tcagagccataagtgttgcccacaa

SEQ ID NO: 158163 - DNA, 25 bp, Saccharomyces pastorianus
gttgcccacaaagatttctgcgaat

SEQ ID NO: 158164 - DNA, 25 bp, Saccharomyces pastorianus
aacagccttactcagtttggcaaga

SEQ ID NO: 158165 - DNA, 25 bp, Saccharomyces pastorianus
ttctgcgaatgtgatagctggcccc

SEQ ID NO: 158166 - DNA, 25 bp, Saccharomyces pastorianus
agttctcgtaaatgggccggcttag

SEQ ID NO: 158167 - DNA, 25 bp, Saccharomyces pastorianus
agaccctttacgtgcaggcgttagg

SEQ ID NO: 158168 - DNA, 25 bp, Saccharomyces pastorianus
tggtttacttgggatccagaccctt

SEQ ID NO: 158169 - DNA, 25 bp, Saccharomyces pastorianus
gctgctcttgacttgctatttaaca

SEQ ID NO: 158170 - DNA, 25 bp, Saccharomyces pastorianus
acaggtctggttagttagattgccc

SEQ ID NO: 158171 - DNA, 25 bp, Saccharomyces pastorianus
aacttgcatggccaagaactgggta

SEQ ID NO: 158172 - DNA, 25 bp, Saccharomyces pastorianus
gtacagtttgccacgaatgtcaggt

SEQ ID NO: 158173 - DNA, 25 bp, Saccharomyces pastorianus
aaaccgccattgtgggtacagtttg

SEQ ID NO: 158174 - DNA, 25 bp, Saccharomyces pastorianus
agcaaaggcaagcttacctgaagaa

SEQ ID NO: 158175 - DNA, 25 bp, Saccharomyces pastorianus
ataccatatgtgaagacgattccca

SEQ ID NO: 158176 - DNA, 25 bp, Saccharomyces pastorianus
tggagggacagaaacaacttgcatg

SEQ ID NO: 158177 - DNA, 25 bp, Saccharomyces pastorianus
agattgcccatgtttctagcagaga

SEQ ID NO: 158178 - DNA, 25 bp, Saccharomyces pastorianus
tgataacgattctataccgcacgaa

SEQ ID NO: 158179 - DNA, 25 bp, Saccharomyces pastorianus
ccacgaatgtcaggttatgccatca

SEQ ID NO: 158180 - DNA, 25 bp, Saccharomyces pastorianus
gggagtaaaatcacacttctattga

SEQ ID NO: 158181 - DNA, 25 bp, Saccharomyces pastorianus
tatcatccggagctgttcttagaca

SEQ ID NO: 158182 - DNA, 25 bp, Saccharomyces pastorianus
ggcattcatgctcgtagtgcacatt

SEQ ID NO: 158183 - DNA, 25 bp, Saccharomyces pastorianus
ttgcgaccgttctctatcatttaca

SEQ ID NO: 158184 - DNA, 25 bp, Saccharomyces pastorianus
ctggcctattggtgttactagcgta

SEQ ID NO: 158185 - DNA, 25 bp, Saccharomyces pastorianus
gaaggaaccagcttgccccggattt

SEQ ID NO: 158186 - DNA, 25 bp, Saccharomyces pastorianus
gatattaggaccaccattagcaaat

SEQ ID NO: 158187 - DNA, 25 bp, Saccharomyces pastorianus
aaatttagccgttcagtcctatatg

SEQ ID NO: 158188 - DNA, 25 bp, Saccharomyces pastorianus
aaggcgtctttggaagcttatcatc

SEQ ID NO: 158189 - DNA, 25 bp, Saccharomyces pastorianus
aaggaggccggaatgctgctaacat

SEQ ID NO: 158190 - DNA, 25 bp, Saccharomyces pastorianus
atattatctcgttggaaggcgtctt

SEQ ID NO: 158191 - DNA, 25 bp, Saccharomyces pastorianus
gatttatttatttcccttgcgaccg

SEQ ID NO: 158192 - DNA, 25 bp, Saccharomyces pastorianus
actgctataagttggtgaaagagat

SEQ ID NO: 158193 - DNA, 25 bp, Saccharomyces pastorianus
tttgcaggctcgtcgaacagtttca

SEQ ID NO: 158194 - DNA, 25 bp, Saccharomyces pastorianus
atgttgttcatggtgatgatatcac

SEQ ID NO: 158195 - DNA, 25 bp, Saccharomyces pastorianus
gaagcggcgccatatgttacagatc

SEQ ID NO: 158196 - DNA, 25 bp, Saccharomyces pastorianus
catgcgggagccattttgcaggctc

SEQ ID NO: 158197 - DNA, 25 bp, Saccharomyces pastorianus
catatgttacagatcccaattggat

SEQ ID NO: 158198 - DNA, 25 bp, Saccharomyces pastorianus
ccattttgcaggctcgtcgaacagt

SEQ ID NO: 158199 - DNA, 25 bp, Saccharomyces pastorianus
ggcgccatatgttacagatcccaat

SEQ ID NO: 158200 - DNA, 25 bp, Saccharomyces pastorianus
gatgatatcaccttagatgctaatg

SEQ ID NO: 158201 - DNA, 25 bp, Saccharomyces pastorianus
gagcatactagatcaaataggtggt

SEQ ID NO: 158202 - DNA, 25 bp, Saccharomyces pastorianus
atatcagtgccaatatgttgttcat

SEQ ID NO: 158203 - DNA, 25 bp, Saccharomyces pastorianus
gattctttccctccgtggaacaatc

SEQ ID NO: 158204 - DNA, 25 bp, Saccharomyces pastorianus
gagggccgattctttccctccgtgg

SEQ ID NO: 158205 - DNA, 25 bp, Saccharomyces pastorianus
attatctccgcaagtgatagaactc

SEQ ID NO: 158206 - DNA, 25 bp, Saccharomyces pastorianus
gaaaaaagtgagttcacccgcggcg

SEQ ID NO: 158207 - DNA, 25 bp, Saccharomyces pastorianus
gagggtattatctccgcaagtgata

SEQ ID NO: 158208 - DNA, 25 bp, Saccharomyces pastorianus
aaagtgagttcacccgcggcgctct

SEQ ID NO: 158209 - DNA, 25 bp, Saccharomyces pastorianus
cccgcggcgtcagagggtattatct

SEQ ID NO: 158210 - DNA, 25 bp, Saccharomyces pastorianus
gcgtcagagggtattatctccgcaa

SEQ ID NO: 158211 - DNA, 25 bp, Saccharomyces pastorianus
tctttccctccgtggaacaatcggc

SEQ ID NO: 158212 - DNA, 25 bp, Saccharomyces pastorianus
gctctcgtaaaacccgagggccgat

SEQ ID NO: 158213 - DNA, 25 bp, Saccharomyces pastorianus
gcggcgctctcgtaaaacccgaggg

SEQ ID NO: 158214 - DNA, 25 bp, Saccharomyces pastorianus
tctaacttccttttacctgttgcaa

SEQ ID NO: 158215 - DNA, 25 bp, Saccharomyces pastorianus
agctgtctcatacccgcgctgaaaa

SEQ ID NO: 158216 - DNA, 25 bp, Saccharomyces pastorianus
tccagatacttccatgtgcaatttc

SEQ ID NO: 158217 - DNA, 25 bp, Saccharomyces pastorianus
tcaggcagcatcatcgttcccttca

SEQ ID NO: 158218 - DNA, 25 bp, Saccharomyces pastorianus
tttgttctcaggcagcatcatcgtt

SEQ ID NO: 158219 - DNA, 25 bp, Saccharomyces pastorianus
ttgtcccaatattacgctcggcttt

SEQ ID NO: 158220 - DNA, 25 bp, Saccharomyces pastorianus
gctgagaactgggtattgtcccaat

SEQ ID NO: 158221 - DNA, 25 bp, Saccharomyces pastorianus
tattacgctcggcttttcttttcaa

SEQ ID NO: 158222 - DNA, 25 bp, Saccharomyces pastorianus
gaagctgcatttttgttctcaggca

SEQ ID NO: 158223 - DNA, 25 bp, Saccharomyces pastorianus
ttacctgttgcaagctgtctcatac

SEQ ID NO: 158224 - DNA, 25 bp, Saccharomyces pastorianus
aactttgtattccagatacttccat

SEQ ID NO: 158225 - DNA, 25 bp, Saccharomyces pastorianus
tagtccaaacaatagtggtcccacc

SEQ ID NO: 158226 - DNA, 25 bp, Saccharomyces pastorianus
gaaatcgttttcagtagcatcatgt

SEQ ID NO: 158227 - DNA, 25 bp, Saccharomyces pastorianus
aactgtaataagattctcctgcccc

SEQ ID NO: 158228 - DNA, 25 bp, Saccharomyces pastorianus
gggcaacaggaaacaatatcaattt

SEQ ID NO: 158229 - DNA, 25 bp, Saccharomyces pastorianus
agtagcatcatgtttgccactctct

SEQ ID NO: 158230 - DNA, 25 bp, Saccharomyces pastorianus
ccactctctcctaatttcctaaaga

SEQ ID NO: 158231 - DNA, 25 bp, Saccharomyces pastorianus
aagccattgaacctatctcaacgag

SEQ ID NO: 158232 - DNA, 25 bp, Saccharomyces pastorianus
gaacaaccattgttaagggcaacag

SEQ ID NO: 158233 - DNA, 25 bp, Saccharomyces pastorianus
gtcccaccccaggtaaacatggaat

SEQ ID NO: 158234 - DNA, 25 bp, Saccharomyces pastorianus
tgaactcggcccctaagcaacaaga

SEQ ID NO: 158235 - DNA, 25 bp, Saccharomyces pastorianus
gtaattacacctacgtgaactcggc

SEQ ID NO: 158236 - DNA, 25 bp, Saccharomyces pastorianus
gtaaaccccaatgttcacctaatgt

SEQ ID NO: 158237 - DNA, 25 bp, Saccharomyces pastorianus
gtcagagctacctttcatcaacaga

SEQ ID NO: 158238 - DNA, 25 bp, Saccharomyces pastorianus
atgtttcgtaatgcagcagccgatc

SEQ ID NO: 158239 - DNA, 25 bp, Saccharomyces pastorianus
cccctctttatttgcgaacgttatg

SEQ ID NO: 158240 - DNA, 25 bp, Saccharomyces pastorianus
attgcaagctcggatgtttcaccat

SEQ ID NO: 158241 - DNA, 25 bp, Saccharomyces pastorianus
tacttcatcattcttcctcatttgt

SEQ ID NO: 158242 - DNA, 25 bp, Saccharomyces pastorianus
attaccgacattgtcagcttccaac

SEQ ID NO: 158243 - DNA, 25 bp, Saccharomyces pastorianus
aggtatcgacctcgtgcttacttca

SEQ ID NO: 158244 - DNA, 25 bp, Saccharomyces pastorianus
tgaaactagtgcaaacccctcttta

SEQ ID NO: 158245 - DNA, 25 bp, Saccharomyces pastorianus
agtctttcacgctggcatctttaaa

SEQ ID NO: 158246 - DNA, 25 bp, Saccharomyces pastorianus
gaaaccttgatcaccacgaacttat

SEQ ID NO: 158247 - DNA, 25 bp, Saccharomyces pastorianus
tgtttcattttccttctatttcttt

SEQ ID NO: 158248 - DNA, 25 bp, Saccharomyces pastorianus
ttgccatcttatactcatcctaatc

SEQ ID NO: 158249 - DNA, 25 bp, Saccharomyces pastorianus
gccatcttatactcatcctaatcat

SEQ ID NO: 158250 - DNA, 25 bp, Saccharomyces pastorianus
atactcatcctaatcatctgtttca

SEQ ID NO: 158251 - DNA, 25 bp, Saccharomyces pastorianus
tcttatactcatcctaatcatctgt

SEQ ID NO: 158252 - DNA, 25 bp, Saccharomyces pastorianus
atcctaatcatctgtttcattttcc

SEQ ID NO: 158253 - DNA, 25 bp, Saccharomyces pastorianus
atctgtttcattttccttctatttc

SEQ ID NO: 158254 - DNA, 25 bp, Saccharomyces pastorianus
ttttttacttttgccatcttatact

SEQ ID NO: 158255 - DNA, 25 bp, Saccharomyces pastorianus
actcatcctaatcatctgtttcatt

SEQ ID NO: 158256 - DNA, 25 bp, Saccharomyces pastorianus
acttttgccatcttatactcatcct

SEQ ID NO: 158257 - DNA, 25 bp, Saccharomyces pastorianus
aatcatctgtttcattttccttcta

SEQ ID NO: 158258 - DNA, 25 bp, Saccharomyces pastorianus
agcttcgatggatctcactttacaa

SEQ ID NO: 158259 - DNA, 25 bp, Saccharomyces pastorianus
aacagaattgcgcatgagctgccta

SEQ ID NO: 158260 - DNA, 25 bp, Saccharomyces pastorianus
ggaatggtgcctaaatcccatggaa

SEQ ID NO: 158261 - DNA, 25 bp, Saccharomyces pastorianus
ttaaccgcaccactaacagaagatt

SEQ ID NO: 158262 - DNA, 25 bp, Saccharomyces pastorianus
gatattcatattcctatctcggatt

SEQ ID NO: 158263 - DNA, 25 bp, Saccharomyces pastorianus
gtaaattcgacatcttcaatacggt

SEQ ID NO: 158264 - DNA, 25 bp, Saccharomyces pastorianus
gacgtagagcttttatgtaacacca

SEQ ID NO: 158265 - DNA, 25 bp, Saccharomyces pastorianus
ggatcaattttcgatgcttgcctag

SEQ ID NO: 158266 - DNA, 25 bp, Saccharomyces pastorianus
gagctgcctaatgcataccatgact

SEQ ID NO: 158267 - DNA, 25 bp, Saccharomyces pastorianus
gcttgcctagtgacattatattcca

SEQ ID NO: 158268 - DNA, 25 bp, Saccharomyces pastorianus
ttcgggatgatctattacgctatgt

SEQ ID NO: 158269 - DNA, 25 bp, Saccharomyces pastorianus
tacacgtagacacggctatgattcg

SEQ ID NO: 158270 - DNA, 25 bp, Saccharomyces pastorianus
gatccctcctttaactaccaatata

SEQ ID NO: 158271 - DNA, 25 bp, Saccharomyces pastorianus
aatttaccgctgaacttctttgaga

SEQ ID NO: 158272 - DNA, 25 bp, Saccharomyces pastorianus
tatgattcgttaaccttcaattccg

SEQ ID NO: 158273 - DNA, 25 bp, Saccharomyces pastorianus
atttcccaattagtagccatagtca

SEQ ID NO: 158274 - DNA, 25 bp, Saccharomyces pastorianus
ggaatcaaatcaacctctttacttg

SEQ ID NO: 158275 - DNA, 25 bp, Saccharomyces pastorianus
tacacaattaccctttactatccat

SEQ ID NO: 158276 - DNA, 25 bp, Saccharomyces pastorianus
gaatttcacagtgggagactccaat

SEQ ID NO: 158277 - DNA, 25 bp, Saccharomyces pastorianus
tggtcccattttctagcaattgaaa

SEQ ID NO: 158278 - DNA, 25 bp, Saccharomyces pastorianus
gtagccatagtcatagcctcagaaa

SEQ ID NO: 158279 - DNA, 25 bp, Saccharomyces pastorianus
gcagtaattacctttctatttccca

SEQ ID NO: 158280 - DNA, 25 bp, Saccharomyces pastorianus
gtacttgactggaggacagcaacct

SEQ ID NO: 158281 - DNA, 25 bp, Saccharomyces pastorianus
aatcttacctgattccttgaacctg

SEQ ID NO: 158282 - DNA, 25 bp, Saccharomyces pastorianus
ggacagcaacctactgcaagtgaca

SEQ ID NO: 158283 - DNA, 25 bp, Saccharomyces pastorianus
gaacagtaatggtattgcgatggct

SEQ ID NO: 158284 - DNA, 25 bp, Saccharomyces pastorianus
attgcgatggctagtctgtacttga

SEQ ID NO: 158285 - DNA, 25 bp, Saccharomyces pastorianus
tgcgcaatgagcaggttaccataga

SEQ ID NO: 158286 - DNA, 25 bp, Saccharomyces pastorianus
acctggattcacttttggttgacca

SEQ ID NO: 158287 - DNA, 25 bp, Saccharomyces pastorianus
tgaatgctatcttaactgacgtgaa

SEQ ID NO: 158288 - DNA, 25 bp, Saccharomyces pastorianus
aagtgacaacatagcaagtttgcaa

SEQ ID NO: 158289 - DNA, 25 bp, Saccharomyces pastorianus
gggcacactgcagtcagtatcacca

SEQ ID NO: 158290 - DNA, 25 bp, Saccharomyces pastorianus
tgaagttgaccctaccacaacctcg

SEQ ID NO: 158291 - DNA, 25 bp, Saccharomyces pastorianus
gaatcccggacttggaaaacacatt

SEQ ID NO: 158292 - DNA, 25 bp, Saccharomyces pastorianus
taagttccaagaacggctttctaag

SEQ ID NO: 158293 - DNA, 25 bp, Saccharomyces pastorianus
cgcaggctccattcatcgaaaatgt

SEQ ID NO: 158294 - DNA, 25 bp, Saccharomyces pastorianus
gcaatcacagcgacgagggcgatgc

SEQ ID NO: 158295 - DNA, 25 bp, Saccharomyces pastorianus
aatgccagaggcataccgcaggctc

SEQ ID NO: 158296 - DNA, 25 bp, Saccharomyces pastorianus
atgcaggaatctaaattggctacga

SEQ ID NO: 158297 - DNA, 25 bp, Saccharomyces pastorianus
agcgacttcgaattgtgcttcaata

SEQ ID NO: 158298 - DNA, 25 bp, Saccharomyces pastorianus
ttaaggacccaagcgacttcgaatt

SEQ ID NO: 158299 - DNA, 25 bp, Saccharomyces pastorianus
agggcgatgcgagcgatgaacctat

SEQ ID NO: 158300 - DNA, 25 bp, Saccharomyces pastorianus
tatgccaaagtctgcgcaatcacag

SEQ ID NO: 158301 - DNA, 25 bp, Saccharomyces pastorianus
gcagctgaagactagaatcccggac

SEQ ID NO: 158302 - DNA, 25 bp, Saccharomyces pastorianus
tgcggcatgtttggctttagttgat

SEQ ID NO: 158303 - DNA, 25 bp, Saccharomyces pastorianus
gtgatatcattgtcgatcccactgc

SEQ ID NO: 158304 - DNA, 25 bp, Saccharomyces pastorianus
gtaacaggccctattgaaccaaaag

SEQ ID NO: 158305 - DNA, 25 bp, Saccharomyces pastorianus
agctctgccagataacttgtcaaat

SEQ ID NO: 158306 - DNA, 25 bp, Saccharomyces pastorianus
gtcattgttacccaagacagctctg

SEQ ID NO: 158307 - DNA, 25 bp, Saccharomyces pastorianus
agatgaagccgaattctccctgaga

SEQ ID NO: 158308 - DNA, 25 bp, Saccharomyces pastorianus
aattgaagatttcgctctctgtcca

SEQ ID NO: 158309 - DNA, 25 bp, Saccharomyces pastorianus
taaattacgggcagttctgacccca

SEQ ID NO: 158310 - DNA, 25 bp, Saccharomyces pastorianus
acactttagctctggagttcgtcaa

SEQ ID NO: 158311 - DNA, 25 bp, Saccharomyces pastorianus
ggttcatctgaattcgtatcacaag

SEQ ID NO: 158312 - DNA, 25 bp, Saccharomyces pastorianus
tagtatgtgcgcaagcatccctatt

SEQ ID NO: 158313 - DNA, 25 bp, Saccharomyces pastorianus
aaaatatctctgcatatatggtaat

SEQ ID NO: 158314 - DNA, 25 bp, Saccharomyces pastorianus
gaaccagttaagatgcataaaatat

SEQ ID NO: 158315 - DNA, 25 bp, Saccharomyces pastorianus
atctctgcatatatggtaataacaa

SEQ ID NO: 158316 - DNA, 25 bp, Saccharomyces pastorianus
gttaagatgcataaaatatctctgc

SEQ ID NO: 158317 - DNA, 25 bp, Saccharomyces pastorianus
atggtaataacaaggagcccaatac

SEQ ID NO: 158318 - DNA, 25 bp, Saccharomyces pastorianus
gtaataacaaggagcccaataccaa

SEQ ID NO: 158319 - DNA, 25 bp, Saccharomyces pastorianus
taataacaaggagcccaataccaag

SEQ ID NO: 158320 - DNA, 25 bp, Saccharomyces pastorianus
taacaaggagcccaataccaagaat

SEQ ID NO: 158321 - DNA, 25 bp, Saccharomyces pastorianus
gcataaaatatctctgcatatatgg

SEQ ID NO: 158322 - DNA, 25 bp, Saccharomyces pastorianus
atatctctgcatatatggtaataac

SEQ ID NO: 158323 - DNA, 25 bp, Saccharomyces pastorianus
catatatggtaataacaaggagccc

SEQ ID NO: 158324 - DNA, 25 bp, Saccharomyces pastorianus
aaacattgttatggcacattcttta

SEQ ID NO: 158325 - DNA, 25 bp, Saccharomyces pastorianus
gagagataatattcacagcgttcaa

SEQ ID NO: 158326 - DNA, 25 bp, Saccharomyces pastorianus
aaagaaatcttgtgaaccgacctga

SEQ ID NO: 158327 - DNA, 25 bp, Saccharomyces pastorianus
tccattcgagtatccgagagataat

SEQ ID NO: 158328 - DNA, 25 bp, Saccharomyces pastorianus
accgacctgagaaaaacattgttat

SEQ ID NO: 158329 - DNA, 25 bp, Saccharomyces pastorianus
gtttccattcgagtatccgagagat

SEQ ID NO: 158330 - DNA, 25 bp, Saccharomyces pastorianus
tcttcaagacctaagtttccattcg

SEQ ID NO: 158331 - DNA, 25 bp, Saccharomyces pastorianus
aagtttccattcgagtatccgagag

SEQ ID NO: 158332 - DNA, 25 bp, Saccharomyces pastorianus
cctaagtttccattcgagtatccga

SEQ ID NO: 158333 - DNA, 25 bp, Saccharomyces pastorianus
aaatcttgtgaaccgacctgagaaa

SEQ ID NO: 158334 - DNA, 25 bp, Saccharomyces pastorianus
aagacctaagtttccattcgagtat

SEQ ID NO: 158335 - DNA, 25 bp, Saccharomyces pastorianus
gggtcttacttgatggctttatatt

SEQ ID NO: 158336 - DNA, 25 bp, Saccharomyces pastorianus
gtttgaagccttgcatagatacgca

SEQ ID NO: 158337 - DNA, 25 bp, Saccharomyces pastorianus
aaccgcctccttggtggtatgtcaa

SEQ ID NO: 158338 - DNA, 25 bp, Saccharomyces pastorianus
gatttcaacaatactgcttcagagg

SEQ ID NO: 158339 - DNA, 25 bp, Saccharomyces pastorianus
atggcacattctttagggtcttact

SEQ ID NO: 158340 - DNA, 25 bp, Saccharomyces pastorianus
aaaaagctgatcctttgttccccag

SEQ ID NO: 158341 - DNA, 25 bp, Saccharomyces pastorianus
gtgatccagaacagtcaaaacggtt

SEQ ID NO: 158342 - DNA, 25 bp, Saccharomyces pastorianus
aggaatctccatcttttaaaaagct

SEQ ID NO: 158343 - DNA, 25 bp, Saccharomyces pastorianus
gtcatatcggcgctttaagcacatt

SEQ ID NO: 158344 - DNA, 25 bp, Saccharomyces pastorianus
cgccagttaggttcgaagattacaa

SEQ ID NO: 158345 - DNA, 25 bp, Saccharomyces pastorianus
tccccagcaggcgtgtcttatagag

SEQ ID NO: 158346 - DNA, 25 bp, Saccharomyces pastorianus
aaacatctggttttcattcatgggt

SEQ ID NO: 158347 - DNA, 25 bp, Saccharomyces pastorianus
tgacccatcgaatacacggccacag

SEQ ID NO: 158348 - DNA, 25 bp, Saccharomyces pastorianus
tagagcctccgcaagagatgttaca

SEQ ID NO: 158349 - DNA, 25 bp, Saccharomyces pastorianus
aatgaattttgcatacgccctcgaa

SEQ ID NO: 158350 - DNA, 25 bp, Saccharomyces pastorianus
tcattcatgggtatggcgccggatt

SEQ ID NO: 158351 - DNA, 25 bp, Saccharomyces pastorianus
gatattaagaactccgtcagcacca

SEQ ID NO: 158352 - DNA, 25 bp, Saccharomyces pastorianus
ttttgaaaacgctgccattctaccc

SEQ ID NO: 158353 - DNA, 25 bp, Saccharomyces pastorianus
gtcagcaccaactgcaataccatta

SEQ ID NO: 158354 - DNA, 25 bp, Saccharomyces pastorianus
tatagagtcccaagcttgtttcctc

SEQ ID NO: 158355 - DNA, 25 bp, Saccharomyces pastorianus
gtgcctgaggctgacttaaaacatc

SEQ ID NO: 158356 - DNA, 25 bp, Saccharomyces pastorianus
gaggatgcattccagactgaacttt

SEQ ID NO: 158357 - DNA, 25 bp, Saccharomyces pastorianus
agccaagaggtttgaactctgctag

SEQ ID NO: 158358 - DNA, 25 bp, Saccharomyces pastorianus
gccaagaggtttgaactctgctaga

SEQ ID NO: 158359 - DNA, 25 bp, Saccharomyces pastorianus
ccaagaggtttgaactctgctagaa

SEQ ID NO: 158360 - DNA, 25 bp, Saccharomyces pastorianus
agaggtttgaactctgctagaaagc

SEQ ID NO: 158361 - DNA, 25 bp, Saccharomyces pastorianus
aagaggtttgaactctgctagaaag

SEQ ID NO: 158362 - DNA, 25 bp, Saccharomyces pastorianus
aagccaagaggtttgaactctgcta

SEQ ID NO: 158363 - DNA, 25 bp, Saccharomyces pastorianus
gtaagccaagaggtttgaactctgc

SEQ ID NO: 158364 - DNA, 25 bp, Saccharomyces pastorianus
aggtaagccaagaggtttgaactct

SEQ ID NO: 158365 - DNA, 25 bp, Saccharomyces pastorianus
gaggtttgaactctgctagaaagct

SEQ ID NO: 158366 - DNA, 25 bp, Saccharomyces pastorianus
aggtttgaactctgctagaaagcta

SEQ ID NO: 158367 - DNA, 25 bp, Saccharomyces pastorianus
taagccaagaggtttgaactctgct

SEQ ID NO: 158368 - DNA, 25 bp, Saccharomyces pastorianus
atggatgtgcatcgcaaagggaaaa

SEQ ID NO: 158369 - DNA, 25 bp, Saccharomyces pastorianus
agaaatacgtttgtccctaagtgct

SEQ ID NO: 158370 - DNA, 25 bp, Saccharomyces pastorianus
gtcaagacacaagtacaagttatgg

SEQ ID NO: 158371 - DNA, 25 bp, Saccharomyces pastorianus
tacgtttgtccctaagtgctcttat

SEQ ID NO: 158372 - DNA, 25 bp, Saccharomyces pastorianus
atacgtttgtccctaagtgctctta

SEQ ID NO: 158373 - DNA, 25 bp, Saccharomyces pastorianus
acgtttgtccctaagtgctcttatg

SEQ ID NO: 158374 - DNA, 25 bp, Saccharomyces pastorianus
gtttgtccctaagtgctcttatgct

SEQ ID NO: 158375 - DNA, 25 bp, Saccharomyces pastorianus
gtacaagttatggatgtgcatcgca

SEQ ID NO: 158376 - DNA, 25 bp, Saccharomyces pastorianus
gaaatacgtttgtccctaagtgctc

SEQ ID NO: 158377 - DNA, 25 bp, Saccharomyces pastorianus
aaatacgtttgtccctaagtgctct

SEQ ID NO: 158378 - DNA, 25 bp, Saccharomyces pastorianus
atgtgcatcgcaaagggaaaaaggg

SEQ ID NO: 158379 - DNA, 25 bp, Saccharomyces pastorianus
aaaactcaactatcggcaattacca

SEQ ID NO: 158380 - DNA, 25 bp, Saccharomyces pastorianus
aaacgctgatgaggccttgaagcaa

SEQ ID NO: 158381 - DNA, 25 bp, Saccharomyces pastorianus
aataccaaatgaccgttcacaaaag

SEQ ID NO: 158382 - DNA, 25 bp, Saccharomyces pastorianus
gctgaaggtatacacgcggctgaaa

SEQ ID NO: 158383 - DNA, 25 bp, Saccharomyces pastorianus
gcgcatcaggctcaattagatcatg

SEQ ID NO: 158384 - DNA, 25 bp, Saccharomyces pastorianus
gaggaacaagcgcatcaggctcaat

SEQ ID NO: 158385 - DNA, 25 bp, Saccharomyces pastorianus
aatgaccaattgactgaactacagg

SEQ ID NO: 158386 - DNA, 25 bp, Saccharomyces pastorianus
actacaggataagctggcagccgaa

SEQ ID NO: 158387 - DNA, 25 bp, Saccharomyces pastorianus
gctattgaggaacaaacgcgccaga

SEQ ID NO: 158388 - DNA, 25 bp, Saccharomyces pastorianus
gcgccgcgctcatgaagaacagttg

SEQ ID NO: 158389 - DNA, 25 bp, Saccharomyces pastorianus
aagactcgaagatgagcgccgcgct

SEQ ID NO: 158390 - DNA, 25 bp, Saccharomyces pastorianus
ataccacagaataaagatgctaatt

SEQ ID NO: 158391 - DNA, 25 bp, Saccharomyces pastorianus
aacgaattgtgctaaaactcatgcg

SEQ ID NO: 158392 - DNA, 25 bp, Saccharomyces pastorianus
gtgctaaaactcatgcgattttcag

SEQ ID NO: 158393 - DNA, 25 bp, Saccharomyces pastorianus
gctaaaactcatgcgattttcagca

SEQ ID NO: 158394 - DNA, 25 bp, Saccharomyces pastorianus
aactcatgcgattttcagcaaaata

SEQ ID NO: 158395 - DNA, 25 bp, Saccharomyces pastorianus
gcgattttcagcaaaataccacaga

SEQ ID NO: 158396 - DNA, 25 bp, Saccharomyces pastorianus
attgtgctaaaactcatgcgatttt

SEQ ID NO: 158397 - DNA, 25 bp, Saccharomyces pastorianus
aaaactcatgcgattttcagcaaaa

SEQ ID NO: 158398 - DNA, 25 bp, Saccharomyces pastorianus
gaattgtgctaaaactcatgcgatt

SEQ ID NO: 158399 - DNA, 25 bp, Saccharomyces pastorianus
agattaggtctaaaatgccaaagga

SEQ ID NO: 158400 - DNA, 25 bp, Saccharomyces pastorianus
ttaggtctaaaatgccaaaggagta

SEQ ID NO: 158401 - DNA, 25 bp, Saccharomyces pastorianus
caacaaattccaattccttttcaga

SEQ ID NO: 158402 - DNA, 25 bp, Saccharomyces pastorianus
cgcgctagctattatatcgaatttt

SEQ ID NO: 158403 - DNA, 25 bp, Saccharomyces pastorianus
ggtcttccaaaggtttggcttacag

SEQ ID NO: 158404 - DNA, 25 bp, Saccharomyces pastorianus
aatgcatcgcgctagctattatatc

SEQ ID NO: 158405 - DNA, 25 bp, Saccharomyces pastorianus
aatctctgctggaaaaatgcatcgc

SEQ ID NO: 158406 - DNA, 25 bp, Saccharomyces pastorianus
ttttcatttgttattgggtcttcca

SEQ ID NO: 158407 - DNA, 25 bp, Saccharomyces pastorianus
tgctaattcgaatttctcaacaaat

SEQ ID NO: 158408 - DNA, 25 bp, Saccharomyces pastorianus
ggttctgcattaccagtcacattat

SEQ ID NO: 158409 - DNA, 25 bp, Saccharomyces pastorianus
gtcacattatgaaacactaacgaat

SEQ ID NO: 158410 - DNA, 25 bp, Saccharomyces pastorianus
tttaggtattggactggttctgcat

SEQ ID NO: 158411 - DNA, 25 bp, Saccharomyces pastorianus
tggcttacagtttaccaaatacttt

SEQ ID NO: 158412 - DNA, 25 bp, Saccharomyces pastorianus
ggtcccggctagaaggtcgtctcca

SEQ ID NO: 158413 - DNA, 25 bp, Saccharomyces pastorianus
agctgtagcacgtgatccttgcaga

SEQ ID NO: 158414 - DNA, 25 bp, Saccharomyces pastorianus
aaaaaatcaactgcaccatccggtc

SEQ ID NO: 158415 - DNA, 25 bp, Saccharomyces pastorianus
ggtcgtctccatttttcgaaggcga

SEQ ID NO: 158416 - DNA, 25 bp, Saccharomyces pastorianus
gatccttgcagactttcgacgtcgt

SEQ ID NO: 158417 - DNA, 25 bp, Saccharomyces pastorianus
gctacctccagagccgtaaacatga

SEQ ID NO: 158418 - DNA, 25 bp, Saccharomyces pastorianus
acaaacttcagttacaagagccatg

SEQ ID NO: 158419 - DNA, 25 bp, Saccharomyces pastorianus
aagagccatgacaccagctgtagca

SEQ ID NO: 158420 - DNA, 25 bp, Saccharomyces pastorianus
aagaaggctgttgccaaaccatgca

SEQ ID NO: 158421 - DNA, 25 bp, Saccharomyces pastorianus
aagacgctattgtagtaagacttct

SEQ ID NO: 158422 - DNA, 25 bp, Saccharomyces pastorianus
tcttcgtcaccaatgtcagcacaga

SEQ ID NO: 158423 - DNA, 25 bp, Saccharomyces pastorianus
gctttattttctccagtttcacttc

SEQ ID NO: 158424 - DNA, 25 bp, Saccharomyces pastorianus
gaagagtcttcttcctacgataaga

SEQ ID NO: 158425 - DNA, 25 bp, Saccharomyces pastorianus
tatggagtttgaaccgtacccgcag

SEQ ID NO: 158426 - DNA, 25 bp, Saccharomyces pastorianus
cttcagggtctctctgatgcagaac

SEQ ID NO: 158427 - DNA, 25 bp, Saccharomyces pastorianus
atcatgctgttcacctttgtcatag

SEQ ID NO: 158428 - DNA, 25 bp, Saccharomyces pastorianus
ttcgccctaaggaccatatctgatg

SEQ ID NO: 158429 - DNA, 25 bp, Saccharomyces pastorianus
gcagcagcccgatactgtttggaac

SEQ ID NO: 158430 - DNA, 25 bp, Saccharomyces pastorianus
aaatatcttagtctgcatcatgctg

SEQ ID NO: 158431 - DNA, 25 bp, Saccharomyces pastorianus
gatctagcttataccttcctgttga

SEQ ID NO: 158432 - DNA, 25 bp, Saccharomyces pastorianus
ggcgttaacaacgttctctagacag

SEQ ID NO: 158433 - DNA, 25 bp, Saccharomyces pastorianus
gtttcacttcgtcagactgttacag

SEQ ID NO: 158434 - DNA, 25 bp, Saccharomyces pastorianus
gcttgtatgcaaaggttgatccgtt

SEQ ID NO: 158435 - DNA, 25 bp, Saccharomyces pastorianus
tgtactaatacctcaagtctcaata

SEQ ID NO: 158436 - DNA, 25 bp, Saccharomyces pastorianus
gaaacctctttcgtattcaaagcta

SEQ ID NO: 158437 - DNA, 25 bp, Saccharomyces pastorianus
gatactaccgagtttgacgaagcac

SEQ ID NO: 158438 - DNA, 25 bp, Saccharomyces pastorianus
ggttgatccgttaaagttgctgaat

SEQ ID NO: 158439 - DNA, 25 bp, Saccharomyces pastorianus
tctctgttttcgtcgagcctaaggg

SEQ ID NO: 158440 - DNA, 25 bp, Saccharomyces pastorianus
agcacttgaagaagtctctgttttc

SEQ ID NO: 158441 - DNA, 25 bp, Saccharomyces pastorianus
ggccttgccgacaatggtgttttta

SEQ ID NO: 158442 - DNA, 25 bp, Saccharomyces pastorianus
gttcctgactacctaactgaagata

SEQ ID NO: 158443 - DNA, 25 bp, Saccharomyces pastorianus
gagcctaagggccttgccgacaatg

SEQ ID NO: 158444 - DNA, 25 bp, Saccharomyces pastorianus
aagctactaagatcagttcctgact

SEQ ID NO: 158445 - DNA, 25 bp, Saccharomyces pastorianus
aacggcagcaattctagttccccag

SEQ ID NO: 158446 - DNA, 25 bp, Saccharomyces pastorianus
agacgcaatccaccaggcagtagaa

SEQ ID NO: 158447 - DNA, 25 bp, Saccharomyces pastorianus
atgtccagacgcaatccaccaggca

SEQ ID NO: 158448 - DNA, 25 bp, Saccharomyces pastorianus
gacgcaatccaccaggcagtagaaa

SEQ ID NO: 158449 - DNA, 25 bp, Saccharomyces pastorianus
gggtcaaaacggcagcaattctagt

SEQ ID NO: 158450 - DNA, 25 bp, Saccharomyces pastorianus
ggaggtccgacgaatgcctctccct

SEQ ID NO: 158451 - DNA, 25 bp, Saccharomyces pastorianus
acgaatgcctctcccttcattaaaa

SEQ ID NO: 158452 - DNA, 25 bp, Saccharomyces pastorianus
cggcagcaattctagttccccagcg

SEQ ID NO: 158453 - DNA, 25 bp, Saccharomyces pastorianus
gagaatgggtcaaaacggcagcaat

SEQ ID NO: 158454 - DNA, 25 bp, Saccharomyces pastorianus
aaacggcagcaattctagttcccca

SEQ ID NO: 158455 - DNA, 25 bp, Saccharomyces pastorianus
caatccaccaggcagtagaaacggg

SEQ ID NO: 158456 - DNA, 25 bp, Saccharomyces pastorianus
ctgaatcagacaaaaatagcttatg

SEQ ID NO: 158457 - DNA, 25 bp, Saccharomyces pastorianus
tagctcatctcaaaaagagcagcat

SEQ ID NO: 158458 - DNA, 25 bp, Saccharomyces pastorianus
tttccgcaatcgaaaggcgttagct

SEQ ID NO: 158459 - DNA, 25 bp, Saccharomyces pastorianus
atcgaaaggcgttagctcatctcaa

SEQ ID NO: 158460 - DNA, 25 bp, Saccharomyces pastorianus
agagcagcatagtcaactgaatcag

SEQ ID NO: 158461 - DNA, 25 bp, Saccharomyces pastorianus
tacgaggctatgaatcagataaaga

SEQ ID NO: 158462 - DNA, 25 bp, Saccharomyces pastorianus
atagcttatgaacagagacttctaa

SEQ ID NO: 158463 - DNA, 25 bp, Saccharomyces pastorianus
gcagcatagtcaactgaatcagaca

SEQ ID NO: 158464 - DNA, 25 bp, Saccharomyces pastorianus
gataaagacacatttccgcaatcga

SEQ ID NO: 158465 - DNA, 25 bp, Saccharomyces pastorianus
gacacatttccgcaatcgaaaggcg

SEQ ID NO: 158466 - DNA, 25 bp, Saccharomyces pastorianus
atgaacagagacttctaaatgattt

SEQ ID NO: 158467 - DNA, 25 bp, Saccharomyces pastorianus
ggtggtgacccagacaatgctgctg

SEQ ID NO: 158468 - DNA, 25 bp, Saccharomyces pastorianus
gggttacccacaatctcctatgtac

SEQ ID NO: 158469 - DNA, 25 bp, Saccharomyces pastorianus
aagtgagggttacccacaatctcct

SEQ ID NO: 158470 - DNA, 25 bp, Saccharomyces pastorianus
gacccagacaatgctgctggtacca

SEQ ID NO: 158471 - DNA, 25 bp, Saccharomyces pastorianus
gacaatgctgctggtaccattgaat

SEQ ID NO: 158472 - DNA, 25 bp, Saccharomyces pastorianus
tgagggttacccacaatctcctatg

SEQ ID NO: 158473 - DNA, 25 bp, Saccharomyces pastorianus
tggtgaaaccaactacaatgacgct

SEQ ID NO: 158474 - DNA, 25 bp, Saccharomyces pastorianus
gggctggtggtgaaaccaactacaa

SEQ ID NO: 158475 - DNA, 25 bp, Saccharomyces pastorianus
ttatcaaacacatcaagtgagggtt

SEQ ID NO: 158476 - DNA, 25 bp, Saccharomyces pastorianus
cagagtattatcaaacacatcaagt

SEQ ID NO: 158477 - DNA, 25 bp, Saccharomyces pastorianus
ggtgacccagacaatgctgctggta

SEQ ID NO: 158478 - DNA, 25 bp, Saccharomyces pastorianus
gggttcttccaacgttgacatcgcc

SEQ ID NO: 158479 - DNA, 25 bp, Saccharomyces pastorianus
gttcttccaacgttgacatcgccat

SEQ ID NO: 158480 - DNA, 25 bp, Saccharomyces pastorianus
agcacatcattgtcgatggtaagaa

SEQ ID NO: 158481 - DNA, 25 bp, Saccharomyces pastorianus
taagaagattgctacttaccaagaa

SEQ ID NO: 158482 - DNA, 25 bp, Saccharomyces pastorianus
ttgtctagaccaaacgtcgaagttg

SEQ ID NO: 158483 - DNA, 25 bp, Saccharomyces pastorianus
ggttcttccaacgttgacatcgcca

SEQ ID NO: 158484 - DNA, 25 bp, Saccharomyces pastorianus
gtctagaccaaacgtcgaagttgtt

SEQ ID NO: 158485 - DNA, 25 bp, Saccharomyces pastorianus
acaagcacatcattgtcgatggtaa

SEQ ID NO: 158486 - DNA, 25 bp, Saccharomyces pastorianus
tcttccaacgttgacatcgccattg

SEQ ID NO: 158487 - DNA, 25 bp, Saccharomyces pastorianus
ttcttccaacgttgacatcgccatt

SEQ ID NO: 158488 - DNA, 25 bp, Saccharomyces pastorianus
tcgatggtaagaagattgctactta

SEQ ID NO: 158489 - DNA, 25 bp, Saccharomyces pastorianus
gcgaactcgatacttgctcatcatt

SEQ ID NO: 158490 - DNA, 25 bp, Saccharomyces pastorianus
acttgatccatctgtcgagcgacaa

SEQ ID NO: 158491 - DNA, 25 bp, Saccharomyces pastorianus
tgtgcgccagttgttgggtcccgaa

SEQ ID NO: 158492 - DNA, 25 bp, Saccharomyces pastorianus
aagaggcttagtgcgttccttgaag

SEQ ID NO: 158493 - DNA, 25 bp, Saccharomyces pastorianus
tattcatcccttttaatagccgcac

SEQ ID NO: 158494 - DNA, 25 bp, Saccharomyces pastorianus
taatagccgcacctttaaacgacac

SEQ ID NO: 158495 - DNA, 25 bp, Saccharomyces pastorianus
attgatttcggcatccttgtgtaga

SEQ ID NO: 158496 - DNA, 25 bp, Saccharomyces pastorianus
ggaccgcatgacgagtggacgctta

SEQ ID NO: 158497 - DNA, 25 bp, Saccharomyces pastorianus
aggtgacttcaaaactcgtgcagat

SEQ ID NO: 158498 - DNA, 25 bp, Saccharomyces pastorianus
ggctattgactactacttgatccat

SEQ ID NO: 158499 - DNA, 25 bp, Saccharomyces pastorianus
gtgacgcccagcaactttacgaaaa

SEQ ID NO: 158500 - DNA, 25 bp, Saccharomyces pastorianus
gctgttacaaggacgtggtttacca

SEQ ID NO: 158501 - DNA, 25 bp, Saccharomyces pastorianus
gggcccacaaggctcaggcaaaagt

SEQ ID NO: 158502 - DNA, 25 bp, Saccharomyces pastorianus
gatgatttttatttaactcacgagg

SEQ ID NO: 158503 - DNA, 25 bp, Saccharomyces pastorianus
ggtgaaaaatctatcggttacgcct

SEQ ID NO: 158504 - DNA, 25 bp, Saccharomyces pastorianus
aaatgccccttgttcattttcttct

SEQ ID NO: 158505 - DNA, 25 bp, Saccharomyces pastorianus
caaggctcaggcaaaagttttacaa

SEQ ID NO: 158506 - DNA, 25 bp, Saccharomyces pastorianus
tatcggttacgcctcaattgatgat

SEQ ID NO: 158507 - DNA, 25 bp, Saccharomyces pastorianus
gagacgggaaataaatgccccttgt

SEQ ID NO: 158508 - DNA, 25 bp, Saccharomyces pastorianus
ttcattttcttctcgggcccacaag

SEQ ID NO: 158509 - DNA, 25 bp, Saccharomyces pastorianus
taactcacgaggaccaattgaaact

SEQ ID NO: 158510 - DNA, 25 bp, Saccharomyces pastorianus
gtggtttaccaggtactcatgatat

SEQ ID NO: 158511 - DNA, 25 bp, Saccharomyces pastorianus
gagattgaacactccgcgttacgta

SEQ ID NO: 158512 - DNA, 25 bp, Saccharomyces pastorianus
gatattgctgtcgaagaagccatca

SEQ ID NO: 158513 - DNA, 25 bp, Saccharomyces pastorianus
tggctccgccaaagctcaggatatt

SEQ ID NO: 158514 - DNA, 25 bp, Saccharomyces pastorianus
ttgaagcctccttaccaatggttat

SEQ ID NO: 158515 - DNA, 25 bp, Saccharomyces pastorianus
taagaccttaactgggattgcaacc

SEQ ID NO: 158516 - DNA, 25 bp, Saccharomyces pastorianus
ttggccacaggcaacaaatgcggca

SEQ ID NO: 158517 - DNA, 25 bp, Saccharomyces pastorianus
tattctaagaaattgcctcgctaag

SEQ ID NO: 158518 - DNA, 25 bp, Saccharomyces pastorianus
gacacctgtagtttaattgactctg

SEQ ID NO: 158519 - DNA, 25 bp, Saccharomyces pastorianus
acgcatgcagtttctattggctccg

SEQ ID NO: 158520 - DNA, 25 bp, Saccharomyces pastorianus
gcgttacgtaggactgcccaaagta

SEQ ID NO: 158521 - DNA, 25 bp, Saccharomyces pastorianus
gatttccagatcaagcctagagtaa

SEQ ID NO: 158522 - DNA, 25 bp, Saccharomyces pastorianus
aagttcgttgagtacttccctgacg

SEQ ID NO: 158523 - DNA, 25 bp, Saccharomyces pastorianus
gtacttccctgacgaaaccttatgg

SEQ ID NO: 158524 - DNA, 25 bp, Saccharomyces pastorianus
aaatcagaggccttttggcacccca

SEQ ID NO: 158525 - DNA, 25 bp, Saccharomyces pastorianus
ttcaagccccttgctatattaagga

SEQ ID NO: 158526 - DNA, 25 bp, Saccharomyces pastorianus
ttccatttaggatcatatcgccggg

SEQ ID NO: 158527 - DNA, 25 bp, Saccharomyces pastorianus
attttatcagcttgctttacaggca

SEQ ID NO: 158528 - DNA, 25 bp, Saccharomyces pastorianus
gaaatatggtatcccacagttggta

SEQ ID NO: 158529 - DNA, 25 bp, Saccharomyces pastorianus
ggattcttcgacttgtaaacgtgga

SEQ ID NO: 158530 - DNA, 25 bp, Saccharomyces pastorianus
tggatactggtatgccctcaattct

SEQ ID NO: 158531 - DNA, 25 bp, Saccharomyces pastorianus
atcttctgtcagtttttggctaggt

SEQ ID NO: 158532 - DNA, 25 bp, Saccharomyces pastorianus
ccaagagcctttgcgagatcatcgt

SEQ ID NO: 158533 - DNA, 25 bp, Saccharomyces pastorianus
ggagcggtatctatattggaccatc

SEQ ID NO: 158534 - DNA, 25 bp, Saccharomyces pastorianus
cagcaagtctgtggtacgttattaa

SEQ ID NO: 158535 - DNA, 25 bp, Saccharomyces pastorianus
attccacttatcaagctcaggcaca

SEQ ID NO: 158536 - DNA, 25 bp, Saccharomyces pastorianus
gatgcaccttgcctgagaaatgatt

SEQ ID NO: 158537 - DNA, 25 bp, Saccharomyces pastorianus
taccgtgtattggatgcaccttgcc

SEQ ID NO: 158538 - DNA, 25 bp, Saccharomyces pastorianus
gttgctccgtatacatctggtctga

SEQ ID NO: 158539 - DNA, 25 bp, Saccharomyces pastorianus
gtgtctcattctgtccttacaatac

SEQ ID NO: 158540 - DNA, 25 bp, Saccharomyces pastorianus
gtcacatattccataccgtgtattg

SEQ ID NO: 158541 - DNA, 25 bp, Saccharomyces pastorianus
aatggcaatgtgagcctcttcgaaa

SEQ ID NO: 158542 - DNA, 25 bp, Saccharomyces pastorianus
aaatccaaagacctgctaaacgagt

SEQ ID NO: 158543 - DNA, 25 bp, Saccharomyces pastorianus
taaagagtttgcatttccccataaa

SEQ ID NO: 158544 - DNA, 25 bp, Saccharomyces pastorianus
aagtggcagctgaacagccttctac

SEQ ID NO: 158545 - DNA, 25 bp, Saccharomyces pastorianus
aaaatctcaacctgacacatccttg

SEQ ID NO: 158546 - DNA, 25 bp, Saccharomyces pastorianus
gatacgaaatttgtcattgctgaaa

SEQ ID NO: 158547 - DNA, 25 bp, Saccharomyces pastorianus
gaatttctgttatcgtttgccaacg

SEQ ID NO: 158548 - DNA, 25 bp, Saccharomyces pastorianus
gaagacgaacagcaaccaaaggttg

SEQ ID NO: 158549 - DNA, 25 bp, Saccharomyces pastorianus
gtacaatctgttcaagatcacgaat

SEQ ID NO: 158550 - DNA, 25 bp, Saccharomyces pastorianus
gaaatacgtgcctgccttgcaaaag

SEQ ID NO: 158551 - DNA, 25 bp, Saccharomyces pastorianus
gacacatccttgcaggagcagaaat

SEQ ID NO: 158552 - DNA, 25 bp, Saccharomyces pastorianus
agccttggacaagcagagcatgaaa

SEQ ID NO: 158553 - DNA, 25 bp, Saccharomyces pastorianus
ctaccctcaacgcagaatccataaa

SEQ ID NO: 158554 - DNA, 25 bp, Saccharomyces pastorianus
gaacctagcgaagcggagactacaa

SEQ ID NO: 158555 - DNA, 25 bp, Saccharomyces pastorianus
tttcgccagagtttacgaacgctgt

SEQ ID NO: 158556 - DNA, 25 bp, Saccharomyces pastorianus
ttgcccaccatatacagaaccttag

SEQ ID NO: 158557 - DNA, 25 bp, Saccharomyces pastorianus
tgtagtggcccaatttaatgcgtca

SEQ ID NO: 158558 - DNA, 25 bp, Saccharomyces pastorianus
agaccggatgtggtgcaattgccca

SEQ ID NO: 158559 - DNA, 25 bp, Saccharomyces pastorianus
gccaaatccgccgaactgattggtg

SEQ ID NO: 158560 - DNA, 25 bp, Saccharomyces pastorianus
atgttgcttctttaacaggtaccaa

SEQ ID NO: 158561 - DNA, 25 bp, Saccharomyces pastorianus
aaagtttccaggttgattcgcgaga

SEQ ID NO: 158562 - DNA, 25 bp, Saccharomyces pastorianus
agagtgttgccttccattgttaatg

SEQ ID NO: 158563 - DNA, 25 bp, Saccharomyces pastorianus
aaagatcttggctagctctccaaat

SEQ ID NO: 158564 - DNA, 25 bp, Saccharomyces pastorianus
acagccagggacattgcaaagatct

SEQ ID NO: 158565 - DNA, 25 bp, Saccharomyces pastorianus
attacgtacatgactttttcgccag

SEQ ID NO: 158566 - DNA, 25 bp, Saccharomyces pastorianus
cagaacagagagtagctatgacgaa

SEQ ID NO: 158567 - DNA, 25 bp, Saccharomyces pastorianus
atatattatgttagggctggtgggc

SEQ ID NO: 158568 - DNA, 25 bp, Saccharomyces pastorianus
ggttcctgcacatagcttagacaac

SEQ ID NO: 158569 - DNA, 25 bp, Saccharomyces pastorianus
tcaacggcgtagacacaactaaggc

SEQ ID NO: 158570 - DNA, 25 bp, Saccharomyces pastorianus
agcttagacaacatcaacggcgtag

SEQ ID NO: 158571 - DNA, 25 bp, Saccharomyces pastorianus
atacggttcctgcacatagcttaga

SEQ ID NO: 158572 - DNA, 25 bp, Saccharomyces pastorianus
ggcacaaagagttgtgagaactcca

SEQ ID NO: 158573 - DNA, 25 bp, Saccharomyces pastorianus
ggagaggctatacggttcctgcaca

SEQ ID NO: 158574 - DNA, 25 bp, Saccharomyces pastorianus
taccgaccgcatacatgaggagagg

SEQ ID NO: 158575 - DNA, 25 bp, Saccharomyces pastorianus
gattcaggaatatactcagaggcac

SEQ ID NO: 158576 - DNA, 25 bp, Saccharomyces pastorianus
caactaaggcgtctgttatgggtac

SEQ ID NO: 158577 - DNA, 25 bp, Saccharomyces pastorianus
tgaagacgttgatgccaactgggaa

SEQ ID NO: 158578 - DNA, 25 bp, Saccharomyces pastorianus
gaatgccgccatggaagtacaagaa

SEQ ID NO: 158579 - DNA, 25 bp, Saccharomyces pastorianus
gctgcaggcattaataccattagag

SEQ ID NO: 158580 - DNA, 25 bp, Saccharomyces pastorianus
gtgcacctttggctatcgatgagat

SEQ ID NO: 158581 - DNA, 25 bp, Saccharomyces pastorianus
agaaatatgctctcgtgcacctttg

SEQ ID NO: 158582 - DNA, 25 bp, Saccharomyces pastorianus
gatgagattctactacaggatctgg

SEQ ID NO: 158583 - DNA, 25 bp, Saccharomyces pastorianus
gttgtatagagacgtggcaccagaa

SEQ ID NO: 158584 - DNA, 25 bp, Saccharomyces pastorianus
attgctggtatcgaactgttagcca

SEQ ID NO: 158585 - DNA, 25 bp, Saccharomyces pastorianus
gatatagatcccgaagctgccttcc

SEQ ID NO: 158586 - DNA, 25 bp, Saccharomyces pastorianus
tttggtgccgacaacagtgttcaag

SEQ ID NO: 158587 - DNA, 25 bp, Saccharomyces pastorianus
aaagaccgcaatttggtgccgacaa

SEQ ID NO: 158588 - DNA, 25 bp, Saccharomyces pastorianus
gatccaatgactattcctggcttga

SEQ ID NO: 158589 - DNA, 25 bp, Saccharomyces pastorianus
gaggcctggtttagagcaattcaaa

SEQ ID NO: 158590 - DNA, 25 bp, Saccharomyces pastorianus
aagcgtggtccacacgatgcagcaa

SEQ ID NO: 158591 - DNA, 25 bp, Saccharomyces pastorianus
tttctgtgccatcagttcgacggaa

SEQ ID NO: 158592 - DNA, 25 bp, Saccharomyces pastorianus
aaagaagccggctggactcccgaga

SEQ ID NO: 158593 - DNA, 25 bp, Saccharomyces pastorianus
tattattacaagaagcggccctgcg

SEQ ID NO: 158594 - DNA, 25 bp, Saccharomyces pastorianus
aaaatcatgcagcagcttggccctt

SEQ ID NO: 158595 - DNA, 25 bp, Saccharomyces pastorianus
acgcggttatggtgcgcatctaatg

SEQ ID NO: 158596 - DNA, 25 bp, Saccharomyces pastorianus
ggtacgctgatgcaatgttctatgt

SEQ ID NO: 158597 - DNA, 25 bp, Saccharomyces pastorianus
ttcgacggaacaggtacgcggttat

SEQ ID NO: 158598 - DNA, 25 bp, Saccharomyces pastorianus
gaaatcgcatattgtgaggcctggt

SEQ ID NO: 158599 - DNA, 25 bp, Saccharomyces pastorianus
aacctgagcaggctgagaccaataa

SEQ ID NO: 158600 - DNA, 25 bp, Saccharomyces pastorianus
tgaagaaatacaacctgagcaggct

SEQ ID NO: 158601 - DNA, 25 bp, Saccharomyces pastorianus
gatcacttggatggagctacgacgg

SEQ ID NO: 158602 - DNA, 25 bp, Saccharomyces pastorianus
catcagattgaagaggatcacttgg

SEQ ID NO: 158603 - DNA, 25 bp, Saccharomyces pastorianus
gagctacgacggatcccgaagttaa

SEQ ID NO: 158604 - DNA, 25 bp, Saccharomyces pastorianus
gaccaataaacagagggcaccgata

SEQ ID NO: 158605 - DNA, 25 bp, Saccharomyces pastorianus
cagagggcaccgataaagagaataa

SEQ ID NO: 158606 - DNA, 25 bp, Saccharomyces pastorianus
gatggagctacgacggatcccgaag

SEQ ID NO: 158607 - DNA, 25 bp, Saccharomyces pastorianus
atacaacctgagcaggctgagacca

SEQ ID NO: 158608 - DNA, 25 bp, Saccharomyces pastorianus
ctgagcaggctgagaccaataaaca

SEQ ID NO: 158609 - DNA, 25 bp, Saccharomyces pastorianus
cacttggatggagctacgacggatc

SEQ ID NO: 158610 - DNA, 25 bp, Saccharomyces pastorianus
gatccaaattttgtccacgttaata

SEQ ID NO: 158611 - DNA, 25 bp, Saccharomyces pastorianus
gatcatatggaatcccacaacctct

SEQ ID NO: 158612 - DNA, 25 bp, Saccharomyces pastorianus
cgttttccccaaagatcctattgtg

SEQ ID NO: 158613 - DNA, 25 bp, Saccharomyces pastorianus
gcaattcacttcttatcgatcttag

SEQ ID NO: 158614 - DNA, 25 bp, Saccharomyces pastorianus
ttatctcgatgtggccaattgtcaa

SEQ ID NO: 158615 - DNA, 25 bp, Saccharomyces pastorianus
gcttctgtcctagatgcatacgtga

SEQ ID NO: 158616 - DNA, 25 bp, Saccharomyces pastorianus
atggcggttaagtcattatctcgat

SEQ ID NO: 158617 - DNA, 25 bp, Saccharomyces pastorianus
gaccagacactatttttaccctaca

SEQ ID NO: 158618 - DNA, 25 bp, Saccharomyces pastorianus
atgtccggacgttttgaggaggcta

SEQ ID NO: 158619 - DNA, 25 bp, Saccharomyces pastorianus
ttgccagtgctcatttcccagaaaa

SEQ ID NO: 158620 - DNA, 25 bp, Saccharomyces pastorianus
gagtttggctgataatgctcgtgca

SEQ ID NO: 158621 - DNA, 25 bp, Saccharomyces pastorianus
tcggcaaggttcatatcgggtatat

SEQ ID NO: 158622 - DNA, 25 bp, Saccharomyces pastorianus
aaccattaggtgtagccgttgttat

SEQ ID NO: 158623 - DNA, 25 bp, Saccharomyces pastorianus
cgggatcttctacggtaacttcttg

SEQ ID NO: 158624 - DNA, 25 bp, Saccharomyces pastorianus
atttggtgccatttttcggcaaggt

SEQ ID NO: 158625 - DNA, 25 bp, Saccharomyces pastorianus
gcaatggccctaagtgatattctaa

SEQ ID NO: 158626 - DNA, 25 bp, Saccharomyces pastorianus
ggaacgaattcaacgcatttcaggc

SEQ ID NO: 158627 - DNA, 25 bp, Saccharomyces pastorianus
agccgttgttatggaagcttctcat

SEQ ID NO: 158628 - DNA, 25 bp, Saccharomyces pastorianus
atgcgagaaggctccaagttcaaga

SEQ ID NO: 158629 - DNA, 25 bp, Saccharomyces pastorianus
acggtaacttcttgtatgcttggag

SEQ ID NO: 158630 - DNA, 25 bp, Saccharomyces pastorianus
ggtctactagatactccacaaagat

SEQ ID NO: 158631 - DNA, 25 bp, Saccharomyces pastorianus
gcatttcaggcgctatcaagacaat

SEQ ID NO: 158632 - DNA, 25 bp, Saccharomyces pastorianus
gtttcttactatggcaaccctacga

SEQ ID NO: 158633 - DNA, 25 bp, Saccharomyces pastorianus
aagagctacgtcagcaagagataga

SEQ ID NO: 158634 - DNA, 25 bp, Saccharomyces pastorianus
gaaaatggacccacagacgctcatt

SEQ ID NO: 158635 - DNA, 25 bp, Saccharomyces pastorianus
gtaccaaccatctaaggtgagctcc

SEQ ID NO: 158636 - DNA, 25 bp, Saccharomyces pastorianus
gacatcgcacactaagggtgataca

SEQ ID NO: 158637 - DNA, 25 bp, Saccharomyces pastorianus
tgctccttctgctaaccaaggagat

SEQ ID NO: 158638 - DNA, 25 bp, Saccharomyces pastorianus
ggtgagctccaatgtgcagcaacca

SEQ ID NO: 158639 - DNA, 25 bp, Saccharomyces pastorianus
tacaagtaaggccaacggtgctcct

SEQ ID NO: 158640 - DNA, 25 bp, Saccharomyces pastorianus
aaagtcgttgatgacatcgcacact

SEQ ID NO: 158641 - DNA, 25 bp, Saccharomyces pastorianus
gatgaagctcttagtgtggatgata

SEQ ID NO: 158642 - DNA, 25 bp, Saccharomyces pastorianus
gacgctcattactaaggccaataag

SEQ ID NO: 158643 - DNA, 25 bp, Saccharomyces pastorianus
aactgttgactttacccatggtggc

SEQ ID NO: 158644 - DNA, 25 bp, Saccharomyces pastorianus
tgatggcgcctggttccaagatgac

SEQ ID NO: 158645 - DNA, 25 bp, Saccharomyces pastorianus
gatttggttctatccgaacaacagt

SEQ ID NO: 158646 - DNA, 25 bp, Saccharomyces pastorianus
agttctgttcattccaggtttacaa

SEQ ID NO: 158647 - DNA, 25 bp, Saccharomyces pastorianus
gtttcatacatttcccgtgatggcg

SEQ ID NO: 158648 - DNA, 25 bp, Saccharomyces pastorianus
tcccacatctttgcactagactgtg

SEQ ID NO: 158649 - DNA, 25 bp, Saccharomyces pastorianus
ggagaaattgcctccacgtttcata

SEQ ID NO: 158650 - DNA, 25 bp, Saccharomyces pastorianus
ggcaaacgattacccactggattct

SEQ ID NO: 158651 - DNA, 25 bp, Saccharomyces pastorianus
tcttttcgccctacaattcatttat

SEQ ID NO: 158652 - DNA, 25 bp, Saccharomyces pastorianus
ggtgaaacctgatgtccccatagtg

SEQ ID NO: 158653 - DNA, 25 bp, Saccharomyces pastorianus
ggttccaagatgacgctcttttcgc

SEQ ID NO: 158654 - DNA, 25 bp, Saccharomyces pastorianus
tcacgaatccaggttatttttacag

SEQ ID NO: 158655 - DNA, 25 bp, Saccharomyces pastorianus
gtttccgctggaaggagacgacgaa

SEQ ID NO: 158656 - DNA, 25 bp, Saccharomyces pastorianus
ttactgccataggattgggcctgct

SEQ ID NO: 158657 - DNA, 25 bp, Saccharomyces pastorianus
ttaaggctaaactccagcaagcttg

SEQ ID NO: 158658 - DNA, 25 bp, Saccharomyces pastorianus
agagagtcacaaccaacccaagggc

SEQ ID NO: 158659 - DNA, 25 bp, Saccharomyces pastorianus
ccagcaagcttgacggaatgtttcc

SEQ ID NO: 158660 - DNA, 25 bp, Saccharomyces pastorianus
gattgggcctgctcacagaggatat

SEQ ID NO: 158661 - DNA, 25 bp, Saccharomyces pastorianus
gaatttcttccaatggactgtctta

SEQ ID NO: 158662 - DNA, 25 bp, Saccharomyces pastorianus
aaaacgtgctagatccagaactcca

SEQ ID NO: 158663 - DNA, 25 bp, Saccharomyces pastorianus
gatcaagatcgccatttacagtgga

SEQ ID NO: 158664 - DNA, 25 bp, Saccharomyces pastorianus
caggactccgccaagaagaccgaaa

SEQ ID NO: 158665 - DNA, 25 bp, Saccharomyces pastorianus
atctgactcaaacatggacggcccc

SEQ ID NO: 158666 - DNA, 25 bp, Saccharomyces pastorianus
ctttagcagtgtctttctcatggga

SEQ ID NO: 158667 - DNA, 25 bp, Saccharomyces pastorianus
ataggtcagcattccatatttggtt

SEQ ID NO: 158668 - DNA, 25 bp, Saccharomyces pastorianus
gaagccgctttagtctgtgatgtct

SEQ ID NO: 158669 - DNA, 25 bp, Saccharomyces pastorianus
gaccgtgttgcagcggattttaact

SEQ ID NO: 158670 - DNA, 25 bp, Saccharomyces pastorianus
tatcgtgaacgcaccttcgggaaac

SEQ ID NO: 158671 - DNA, 25 bp, Saccharomyces pastorianus
cattcggccatcgttatcttagtta

SEQ ID NO: 158672 - DNA, 25 bp, Saccharomyces pastorianus
aatccaggttttttgaggcgtcatt

SEQ ID NO: 158673 - DNA, 25 bp, Saccharomyces pastorianus
atgtctttgaatcctccaatgccaa

SEQ ID NO: 158674 - DNA, 25 bp, Saccharomyces pastorianus
gaagttcctttacttggtattgcta

SEQ ID NO: 158675 - DNA, 25 bp, Saccharomyces pastorianus
gaaggttttttcaggcatcggtggt

SEQ ID NO: 158676 - DNA, 25 bp, Saccharomyces pastorianus
taagattccctccaactgcttgtct

SEQ ID NO: 158677 - DNA, 25 bp, Saccharomyces pastorianus
aagtttagtctgttgcgctcttgct

SEQ ID NO: 158678 - DNA, 25 bp, Saccharomyces pastorianus
agcatcccctataggagctggcgcg

SEQ ID NO: 158679 - DNA, 25 bp, Saccharomyces pastorianus
tgaatcgattacatcctgtctctgg

SEQ ID NO: 158680 - DNA, 25 bp, Saccharomyces pastorianus
ggtcttgtaagatctccttgtggcg

SEQ ID NO: 158681 - DNA, 25 bp, Saccharomyces pastorianus
gctcttccagtggtcttgtaagatc

SEQ ID NO: 158682 - DNA, 25 bp, Saccharomyces pastorianus
tccttgtggcgctgcagttgggaaa

SEQ ID NO: 158683 - DNA, 25 bp, Saccharomyces pastorianus
ggcgcgtccgttgtggaattagcaa

SEQ ID NO: 158684 - DNA, 25 bp, Saccharomyces pastorianus
tacatcctgtctctggcctaagatt

SEQ ID NO: 158685 - DNA, 25 bp, Saccharomyces pastorianus
gattgccgggttagaatcgcagatt

SEQ ID NO: 158686 - DNA, 25 bp, Saccharomyces pastorianus
agcaatatcgttcttcacgctgaat

SEQ ID NO: 158687 - DNA, 25 bp, Saccharomyces pastorianus
tgcgttgcattcctggtccaaaaat

SEQ ID NO: 158688 - DNA, 25 bp, Saccharomyces pastorianus
gatacttggcctagtttcgtttact

SEQ ID NO: 158689 - DNA, 25 bp, Saccharomyces pastorianus
ttaggcttactagtctccacttttg

SEQ ID NO: 158690 - DNA, 25 bp, Saccharomyces pastorianus
tctccacttttgcatacgtcggtat

SEQ ID NO: 158691 - DNA, 25 bp, Saccharomyces pastorianus
tcgccttgctgatatctcttggata

SEQ ID NO: 158692 - DNA, 25 bp, Saccharomyces pastorianus
aaaactggaccgtacattgctaaga

SEQ ID NO: 158693 - DNA, 25 bp, Saccharomyces pastorianus
gattactgctatccccttagtatta

SEQ ID NO: 158694 - DNA, 25 bp, Saccharomyces pastorianus
gtattatgtctattcgctttctatt

SEQ ID NO: 158695 - DNA, 25 bp, Saccharomyces pastorianus
aacgtcgctcttcatgtctatatgg

SEQ ID NO: 158696 - DNA, 25 bp, Saccharomyces pastorianus
tcatatcgatctttagcgccggtaa

SEQ ID NO: 158697 - DNA, 25 bp, Saccharomyces pastorianus
ttcgtttacttcttggtcttcgtca

SEQ ID NO: 158698 - DNA, 25 bp, Saccharomyces pastorianus
aagggtcccaactatcgcaatcatc

SEQ ID NO: 158699 - DNA, 25 bp, Saccharomyces pastorianus
tggatcccgggtactttgacgaatt

SEQ ID NO: 158700 - DNA, 25 bp, Saccharomyces pastorianus
actgactccgaaccttctttggtga

SEQ ID NO: 158701 - DNA, 25 bp, Saccharomyces pastorianus
ggtcttccacacaatcctacatata

SEQ ID NO: 158702 - DNA, 25 bp, Saccharomyces pastorianus
aagcctgacttgctggtcgtattaa

SEQ ID NO: 158703 - DNA, 25 bp, Saccharomyces pastorianus
gactctaatgacaatcccaccgaaa

SEQ ID NO: 158704 - DNA, 25 bp, Saccharomyces pastorianus
tatgtgtctaccagatggatcccgg

SEQ ID NO: 158705 - DNA, 25 bp, Saccharomyces pastorianus
ttgtcctatttgaagagagccgcca

SEQ ID NO: 158706 - DNA, 25 bp, Saccharomyces pastorianus
ttaatgtctgctggtgttcacttgg

SEQ ID NO: 158707 - DNA, 25 bp, Saccharomyces pastorianus
ttcggaatccggtggcattatccta

SEQ ID NO: 158708 - DNA, 25 bp, Saccharomyces pastorianus
ggcattatcctatttctgggtacaa

SEQ ID NO: 158709 - DNA, 25 bp, Saccharomyces pastorianus
tctattgttaaagcctccaactgga

SEQ ID NO: 158710 - DNA, 25 bp, Saccharomyces pastorianus
ttctattgttaaagcctccaactgg

SEQ ID NO: 158711 - DNA, 25 bp, Saccharomyces pastorianus
gggtcaatccgcaggtaaattggct

SEQ ID NO: 158712 - DNA, 25 bp, Saccharomyces pastorianus
ttgttaaagcctccaactggagatt

SEQ ID NO: 158713 - DNA, 25 bp, Saccharomyces pastorianus
gtcggccgtgtcgttttgatcaaaa

SEQ ID NO: 158714 - DNA, 25 bp, Saccharomyces pastorianus
actgattctattgttaaagcctcca

SEQ ID NO: 158715 - DNA, 25 bp, Saccharomyces pastorianus
gatcaaaaagggtcaatccgcaggt

SEQ ID NO: 158716 - DNA, 25 bp, Saccharomyces pastorianus
gtccactgattctattgttaaagcc

SEQ ID NO: 158717 - DNA, 25 bp, Saccharomyces pastorianus
gattctattgttaaagcctccaact

SEQ ID NO: 158718 - DNA, 25 bp, Saccharomyces pastorianus
tattgttaaagcctccaactggaga

SEQ ID NO: 158719 - DNA, 25 bp, Saccharomyces pastorianus
taaagcctccaactggagattagtc

SEQ ID NO: 158720 - DNA, 25 bp, Saccharomyces pastorianus
gtttcaattggagggctcagctgca

SEQ ID NO: 158721 - DNA, 25 bp, Saccharomyces pastorianus
gacacgttattgaactctaagtggt

SEQ ID NO: 158722 - DNA, 25 bp, Saccharomyces pastorianus
ggctcagctgcatactactttgata

SEQ ID NO: 158723 - DNA, 25 bp, Saccharomyces pastorianus
gatatttttgagcttggacctgcag

SEQ ID NO: 158724 - DNA, 25 bp, Saccharomyces pastorianus
ttaccagggacgtgtcggcgatgca

SEQ ID NO: 158725 - DNA, 25 bp, Saccharomyces pastorianus
agtgctttgcacgttctaatgagtt

SEQ ID NO: 158726 - DNA, 25 bp, Saccharomyces pastorianus
aaattcaaggttctcgacgctggtg

SEQ ID NO: 158727 - DNA, 25 bp, Saccharomyces pastorianus
gaagacattttgaagggccgtataa

SEQ ID NO: 158728 - DNA, 25 bp, Saccharomyces pastorianus
cgaatttaacatcggctcgtccaaa

SEQ ID NO: 158729 - DNA, 25 bp, Saccharomyces pastorianus
agaaagtactttcctgattaccagg

SEQ ID NO: 158730 - DNA, 25 bp, Saccharomyces pastorianus
atacgaccagatgttgtttgaggat

SEQ ID NO: 158731 - DNA, 25 bp, Saccharomyces pastorianus
tttttccttgttctctctcgcttcc

SEQ ID NO: 158732 - DNA, 25 bp, Saccharomyces pastorianus
tctttttccttgttctctctcgctt

SEQ ID NO: 158733 - DNA, 25 bp, Saccharomyces pastorianus
ttttctttttccttgttctctctcg

SEQ ID NO: 158734 - DNA, 25 bp, Saccharomyces pastorianus
ttttccttgttctctctcgcttcct

SEQ ID NO: 158735 - DNA, 25 bp, Saccharomyces pastorianus
agacaatacaaccaaccttcctcca

SEQ ID NO: 158736 - DNA, 25 bp, Saccharomyces pastorianus
caatacaaccaaccttcctccactt

SEQ ID NO: 158737 - DNA, 25 bp, Saccharomyces pastorianus
gacaatacaaccaaccttcctccac

SEQ ID NO: 158738 - DNA, 25 bp, Saccharomyces pastorianus
ctttttccttgttctctctcgcttc

SEQ ID NO: 158739 - DNA, 25 bp, Saccharomyces pastorianus
acaatacaaccaaccttcctccact

SEQ ID NO: 158740 - DNA, 25 bp, Saccharomyces pastorianus
tttctttttccttgttctctctcgc

SEQ ID NO: 158741 - DNA, 25 bp, Saccharomyces pastorianus
ttctttttccttgttctctctcgct

SEQ ID NO: 158742 - DNA, 25 bp, Saccharomyces pastorianus
gcggcgaaggcgacactttggtcaa

SEQ ID NO: 158743 - DNA, 25 bp, Saccharomyces pastorianus
aagacagtttcaccttacgctattc

SEQ ID NO: 158744 - DNA, 25 bp, Saccharomyces pastorianus
aaagggccatctcttgcggaaacaa

SEQ ID NO: 158745 - DNA, 25 bp, Saccharomyces pastorianus
taagctgggtacaatcttcaacgat

SEQ ID NO: 158746 - DNA, 25 bp, Saccharomyces pastorianus
gtaccttccatctgtcgtcaagaat

SEQ ID NO: 158747 - DNA, 25 bp, Saccharomyces pastorianus
agtatgggaccctggacttccaaga

SEQ ID NO: 158748 - DNA, 25 bp, Saccharomyces pastorianus
acgtatccaaattatcgccaactct

SEQ ID NO: 158749 - DNA, 25 bp, Saccharomyces pastorianus
gtgttcattctcttaagtaccttcc

SEQ ID NO: 158750 - DNA, 25 bp, Saccharomyces pastorianus
atttctggattgagagcccactctg

SEQ ID NO: 158751 - DNA, 25 bp, Saccharomyces pastorianus
gaaacaagcctgttttttgccagtt

SEQ ID NO: 158752 - DNA, 25 bp, Saccharomyces pastorianus
ttcctacaagttctggtcccttaat

SEQ ID NO: 158753 - DNA, 25 bp, Saccharomyces pastorianus
gacgcctattcaacaggttcttctt

SEQ ID NO: 158754 - DNA, 25 bp, Saccharomyces pastorianus
actccatgctgattgccacaggtgt

SEQ ID NO: 158755 - DNA, 25 bp, Saccharomyces pastorianus
ctccttggttgctgtttctgataga

SEQ ID NO: 158756 - DNA, 25 bp, Saccharomyces pastorianus
cttaacaactgtagagcactccatg

SEQ ID NO: 158757 - DNA, 25 bp, Saccharomyces pastorianus
cgatggatatgctagctaccgactt

SEQ ID NO: 158758 - DNA, 25 bp, Saccharomyces pastorianus
agctaccgacttggcagattacttg

SEQ ID NO: 158759 - DNA, 25 bp, Saccharomyces pastorianus
gtaattggtaactccttggttgctg

SEQ ID NO: 158760 - DNA, 25 bp, Saccharomyces pastorianus
gctggtcatccttacggcattgata

SEQ ID NO: 158761 - DNA, 25 bp, Saccharomyces pastorianus
ttcatacagttgagcgacgcctatt

SEQ ID NO: 158762 - DNA, 25 bp, Saccharomyces pastorianus
atggaagctgctctcacgatggata

SEQ ID NO: 158763 - DNA, 25 bp, Saccharomyces pastorianus
gattgaatcaatcaccactgggtgc

SEQ ID NO: 158764 - DNA, 25 bp, Saccharomyces pastorianus
tcctatcgttgtggtggctttgcaa

SEQ ID NO: 158765 - DNA, 25 bp, Saccharomyces pastorianus
gtggctttgcaatctactactactc

SEQ ID NO: 158766 - DNA, 25 bp, Saccharomyces pastorianus
cctgctgaatctgccgttgcggtga

SEQ ID NO: 158767 - DNA, 25 bp, Saccharomyces pastorianus
tgattgccaacgctacgtccagtaa

SEQ ID NO: 158768 - DNA, 25 bp, Saccharomyces pastorianus
ccgttgcggtgaagtctttggtctt

SEQ ID NO: 158769 - DNA, 25 bp, Saccharomyces pastorianus
aagcgtttgccaagttgtgtgtgaa

SEQ ID NO: 158770 - DNA, 25 bp, Saccharomyces pastorianus
atgcctgtttcggaagcgtttgcca

SEQ ID NO: 158771 - DNA, 25 bp, Saccharomyces pastorianus
actactactccttctgcgttgattg

SEQ ID NO: 158772 - DNA, 25 bp, Saccharomyces pastorianus
gaatgagaagcctcctgctgaatct

SEQ ID NO: 158773 - DNA, 25 bp, Saccharomyces pastorianus
gaatccgctagagctttcatcttgg

SEQ ID NO: 158774 - DNA, 25 bp, Saccharomyces pastorianus
taaggatccaagattggctcgcgat

SEQ ID NO: 158775 - DNA, 25 bp, Saccharomyces pastorianus
atgacagctcttttgccagcttaga

SEQ ID NO: 158776 - DNA, 25 bp, Saccharomyces pastorianus
gtttcgattctactaatgacagctc

SEQ ID NO: 158777 - DNA, 25 bp, Saccharomyces pastorianus
gcaatttcctagaagagcgcctgat

SEQ ID NO: 158778 - DNA, 25 bp, Saccharomyces pastorianus
aacttctctagttcgcaattggcta

SEQ ID NO: 158779 - DNA, 25 bp, Saccharomyces pastorianus
taaaatactatcgtacctttggcgt

SEQ ID NO: 158780 - DNA, 25 bp, Saccharomyces pastorianus
gtacctttcggagctaactactctt

SEQ ID NO: 158781 - DNA, 25 bp, Saccharomyces pastorianus
gagcgcctgatcaatgccaataaat

SEQ ID NO: 158782 - DNA, 25 bp, Saccharomyces pastorianus
gtattattcaccacgtacgtttgga

SEQ ID NO: 158783 - DNA, 25 bp, Saccharomyces pastorianus
tagggtttcggacctctaccacaag

SEQ ID NO: 158784 - DNA, 25 bp, Saccharomyces pastorianus
aatcgactgctcaaagacgcaccag

SEQ ID NO: 158785 - DNA, 25 bp, Saccharomyces pastorianus
agacgcaccagtattgatgttcaag

SEQ ID NO: 158786 - DNA, 25 bp, Saccharomyces pastorianus
attgcaaagacttcaaacgtggtaa

SEQ ID NO: 158787 - DNA, 25 bp, Saccharomyces pastorianus
gaacgaaagttctaacggaggatgg

SEQ ID NO: 158788 - DNA, 25 bp, Saccharomyces pastorianus
aatcctcatgcagagctatgggttt

SEQ ID NO: 158789 - DNA, 25 bp, Saccharomyces pastorianus
gcagagctatgggtttacagtatga

SEQ ID NO: 158790 - DNA, 25 bp, Saccharomyces pastorianus
ggaaaatcgtctttacttcatttct

SEQ ID NO: 158791 - DNA, 25 bp, Saccharomyces pastorianus
ggaacatcgttccatccaagaataa

SEQ ID NO: 158792 - DNA, 25 bp, Saccharomyces pastorianus
tcataatactctgtttattccggca

SEQ ID NO: 158793 - DNA, 25 bp, Saccharomyces pastorianus
ggttatgttgatattcttccgattg

SEQ ID NO: 158794 - DNA, 25 bp, Saccharomyces pastorianus
gtttattccggcaaatgaaacattt

SEQ ID NO: 158795 - DNA, 25 bp, Saccharomyces pastorianus
atttgataggcctcataatggttat

SEQ ID NO: 158796 - DNA, 25 bp, Saccharomyces pastorianus
tggtgaatggcccacttgcctttga

SEQ ID NO: 158797 - DNA, 25 bp, Saccharomyces pastorianus
tatatatatttattctgccatttcc

SEQ ID NO: 158798 - DNA, 25 bp, Saccharomyces pastorianus
tattctgccatttccaaaaagacca

SEQ ID NO: 158799 - DNA, 25 bp, Saccharomyces pastorianus
tgtgaccaacgacggaagctccttt

SEQ ID NO: 158800 - DNA, 25 bp, Saccharomyces pastorianus
aatgatattgcatacgtccaagata

SEQ ID NO: 158801 - DNA, 25 bp, Saccharomyces pastorianus
atacgggctgtgaccaacgacggaa

SEQ ID NO: 158802 - DNA, 25 bp, Saccharomyces pastorianus
attctaatgatattgcatacgtcca

SEQ ID NO: 158803 - DNA, 25 bp, Saccharomyces pastorianus
gaccatacgggctgtgaccaacgac

SEQ ID NO: 158804 - DNA, 25 bp, Saccharomyces pastorianus
tttccaaaaagaccatacgggctgt

SEQ ID NO: 158805 - DNA, 25 bp, Saccharomyces pastorianus
cgggctgtgaccaacgacggaagct

SEQ ID NO: 158806 - DNA, 25 bp, Saccharomyces pastorianus
tgccatttccaaaaagaccatacgg

SEQ ID NO: 158807 - DNA, 25 bp, Saccharomyces pastorianus
gaccaacgacggaagctcctttctt

SEQ ID NO: 158808 - DNA, 25 bp, Saccharomyces pastorianus
gggcactgttttgttgctaaaaagt

SEQ ID NO: 158809 - DNA, 25 bp, Saccharomyces pastorianus
aagagtagctcgtcctttgaggaga

SEQ ID NO: 158810 - DNA, 25 bp, Saccharomyces pastorianus
ggaataatccttgtactcctgatat

SEQ ID NO: 158811 - DNA, 25 bp, Saccharomyces pastorianus
taaaggtgtcgttttctgttgtaag

SEQ ID NO: 158812 - DNA, 25 bp, Saccharomyces pastorianus
gctaaaaagtatacctcaccattca

SEQ ID NO: 158813 - DNA, 25 bp, Saccharomyces pastorianus
tggctctagcaatatggtcccctaa

SEQ ID NO: 158814 - DNA, 25 bp, Saccharomyces pastorianus
gttaaatctgtctacgatgactcat

SEQ ID NO: 158815 - DNA, 25 bp, Saccharomyces pastorianus
tttcaacccaaatatcacgagctgc

SEQ ID NO: 158816 - DNA, 25 bp, Saccharomyces pastorianus
ctcactgtggagtcaataactgcgt

SEQ ID NO: 158817 - DNA, 25 bp, Saccharomyces pastorianus
gcaacgatctaggtctttatgttac

SEQ ID NO: 158818 - DNA, 25 bp, Saccharomyces pastorianus
gaacccaactctaattacaccaatg

SEQ ID NO: 158819 - DNA, 25 bp, Saccharomyces pastorianus
atctaacaaatgcttcttttttgta

SEQ ID NO: 158820 - DNA, 25 bp, Saccharomyces pastorianus
gagcttatctaacaaatgcttcttt

SEQ ID NO: 158821 - DNA, 25 bp, Saccharomyces pastorianus
gcttatctaacaaatgcttcttttt

SEQ ID NO: 158822 - DNA, 25 bp, Saccharomyces pastorianus
tcgaaaagttcatcaggaatgcgct

SEQ ID NO: 158823 - DNA, 25 bp, Saccharomyces pastorianus
cgaaaagttcatcaggaatgcgctc

SEQ ID NO: 158824 - DNA, 25 bp, Saccharomyces pastorianus
tttttgtatcgaaaagttcatcagg

SEQ ID NO: 158825 - DNA, 25 bp, Saccharomyces pastorianus
ttgtatcgaaaagttcatcaggaat

SEQ ID NO: 158826 - DNA, 25 bp, Saccharomyces pastorianus
gaaaagttcatcaggaatgcgctca

SEQ ID NO: 158827 - DNA, 25 bp, Saccharomyces pastorianus
aaaagttcatcaggaatgcgctcaa

SEQ ID NO: 158828 - DNA, 25 bp, Saccharomyces pastorianus
atgagcttatctaacaaatgcttct

SEQ ID NO: 158829 - DNA, 25 bp, Saccharomyces pastorianus
cttatctaacaaatgcttctttttt

SEQ ID NO: 158830 - DNA, 25 bp, Saccharomyces pastorianus
ttggcttattggtatgttgcaaaaa

SEQ ID NO: 158831 - DNA, 25 bp, Saccharomyces pastorianus
gctttcttgataaggaattccccgt

SEQ ID NO: 158832 - DNA, 25 bp, Saccharomyces pastorianus
ttcggcacttcttatgtacactttg

SEQ ID NO: 158833 - DNA, 25 bp, Saccharomyces pastorianus
gaatacttcgaatttcggcacttct

SEQ ID NO: 158834 - DNA, 25 bp, Saccharomyces pastorianus
gaattccccgtctatttcctacata

SEQ ID NO: 158835 - DNA, 25 bp, Saccharomyces pastorianus
tgataaggaattccccgtctatttc

SEQ ID NO: 158836 - DNA, 25 bp, Saccharomyces pastorianus
gaatttcggcacttcttatgtacac

SEQ ID NO: 158837 - DNA, 25 bp, Saccharomyces pastorianus
aatactctctgaaagaatacttcga

SEQ ID NO: 158838 - DNA, 25 bp, Saccharomyces pastorianus
gcacttcttatgtacactttgatgg

SEQ ID NO: 158839 - DNA, 25 bp, Saccharomyces pastorianus
gtaatttggcttattggtatgttgc

SEQ ID NO: 158840 - DNA, 25 bp, Saccharomyces pastorianus
acactttgatggaagctttcttgat

SEQ ID NO: 158841 - DNA, 25 bp, Saccharomyces pastorianus
aagtttacagatattgctaccacat

SEQ ID NO: 158842 - DNA, 25 bp, Saccharomyces pastorianus
gaccagttaccgttcctcgtctatt

SEQ ID NO: 158843 - DNA, 25 bp, Saccharomyces pastorianus
aatgcacttttaataacagttttcg

SEQ ID NO: 158844 - DNA, 25 bp, Saccharomyces pastorianus
gctgaaaaaggcagaaactcaattc

SEQ ID NO: 158845 - DNA, 25 bp, Saccharomyces pastorianus
aacagttttcgaccccaaagatgtg

SEQ ID NO: 158846 - DNA, 25 bp, Saccharomyces pastorianus
aatcgttcttttagtcaatctttca

SEQ ID NO: 158847 - DNA, 25 bp, Saccharomyces pastorianus
attgtagaccagttaccgttcctcg

SEQ ID NO: 158848 - DNA, 25 bp, Saccharomyces pastorianus
cccctactgagaaagtcgaagaaga

SEQ ID NO: 158849 - DNA, 25 bp, Saccharomyces pastorianus
gaaattgacgtgaatgaactgctga

SEQ ID NO: 158850 - DNA, 25 bp, Saccharomyces pastorianus
cagatattgctaccacatccttgaa

SEQ ID NO: 158851 - DNA, 25 bp, Saccharomyces pastorianus
taaccacagctagattaaattgtag

SEQ ID NO: 158852 - DNA, 25 bp, Saccharomyces pastorianus
ggctccaggagcgttgatattgtaa

SEQ ID NO: 158853 - DNA, 25 bp, Saccharomyces pastorianus
aatcatcaaatccaagtccggcact

SEQ ID NO: 158854 - DNA, 25 bp, Saccharomyces pastorianus
tccaagtccggcactcaaaaggatt

SEQ ID NO: 158855 - DNA, 25 bp, Saccharomyces pastorianus
aattcctctgtgaactggctactga

SEQ ID NO: 158856 - DNA, 25 bp, Saccharomyces pastorianus
gtaactgctatcgataaacaggtcg

SEQ ID NO: 158857 - DNA, 25 bp, Saccharomyces pastorianus
ctatcgagaaattcctctgtgaact

SEQ ID NO: 158858 - DNA, 25 bp, Saccharomyces pastorianus
tatgacttgaagactggctccagga

SEQ ID NO: 158859 - DNA, 25 bp, Saccharomyces pastorianus
ggagcgttgatattgtaactgctat

SEQ ID NO: 158860 - DNA, 25 bp, Saccharomyces pastorianus
cctctgtgaactggctactgaaaaa

SEQ ID NO: 158861 - DNA, 25 bp, Saccharomyces pastorianus
ccggcactcaaaaggattatgactt

SEQ ID NO: 158862 - DNA, 25 bp, Saccharomyces pastorianus
gaccattgatctagcttctatcgag

SEQ ID NO: 158863 - DNA, 25 bp, Saccharomyces pastorianus
tttttctgccgtttctcttctgcat

SEQ ID NO: 158864 - DNA, 25 bp, Saccharomyces pastorianus
ttctgccgtttctcttctgcattat

SEQ ID NO: 158865 - DNA, 25 bp, Saccharomyces pastorianus
tttctgccgtttctcttctgcatta

SEQ ID NO: 158866 - DNA, 25 bp, Saccharomyces pastorianus
ctgccgtttctcttctgcattattt

SEQ ID NO: 158867 - DNA, 25 bp, Saccharomyces pastorianus
ttctcttctgcattattttcttcct

SEQ ID NO: 158868 - DNA, 25 bp, Saccharomyces pastorianus
gaagcaaaaggagactgattctgaa

SEQ ID NO: 158869 - DNA, 25 bp, Saccharomyces pastorianus
ggagactgattctgaaatttaatat

SEQ ID NO: 158870 - DNA, 25 bp, Saccharomyces pastorianus
gactagaagcaaaaggagactgatt

SEQ ID NO: 158871 - DNA, 25 bp, Saccharomyces pastorianus
ttttttctgccgtttctcttctgca

SEQ ID NO: 158872 - DNA, 25 bp, Saccharomyces pastorianus
gcaaaaggagactgattctgaaatt

SEQ ID NO: 158873 - DNA, 25 bp, Saccharomyces pastorianus
gtttctcttctgcattattttcttc

SEQ ID NO: 158874 - DNA, 25 bp, Saccharomyces pastorianus
catcttaccaggtccatctggataa

SEQ ID NO: 158875 - DNA, 25 bp, Saccharomyces pastorianus
tttacaccatttccctgactaaaat

SEQ ID NO: 158876 - DNA, 25 bp, Saccharomyces pastorianus
attacgtttttctgatttacaccat

SEQ ID NO: 158877 - DNA, 25 bp, Saccharomyces pastorianus
gagaagttggatgcctctatcgacg

SEQ ID NO: 158878 - DNA, 25 bp, Saccharomyces pastorianus
taatcggatactgcgtttgaatcat

SEQ ID NO: 158879 - DNA, 25 bp, Saccharomyces pastorianus
agtccggcttgttatacttgacgca

SEQ ID NO: 158880 - DNA, 25 bp, Saccharomyces pastorianus
attgccgtgcgtggacatcccggac

SEQ ID NO: 158881 - DNA, 25 bp, Saccharomyces pastorianus
atggttggaaccttggccattgccg

SEQ ID NO: 158882 - DNA, 25 bp, Saccharomyces pastorianus
agagggcacagcgaccatcttacca

SEQ ID NO: 158883 - DNA, 25 bp, Saccharomyces pastorianus
tgcctctatcgacgtttgcataatc

SEQ ID NO: 158884 - DNA, 25 bp, Saccharomyces pastorianus
actgcatcgcggtatccacagaggg

SEQ ID NO: 158885 - DNA, 25 bp, Saccharomyces pastorianus
aagagcagtgtacgacctaccggcg

SEQ ID NO: 158886 - DNA, 25 bp, Saccharomyces pastorianus
gagtttgcctatgtggatccggcaa

SEQ ID NO: 158887 - DNA, 25 bp, Saccharomyces pastorianus
agagagcctgacttctgggttatca

SEQ ID NO: 158888 - DNA, 25 bp, Saccharomyces pastorianus
gatgtccacgagctaccatctaaat

SEQ ID NO: 158889 - DNA, 25 bp, Saccharomyces pastorianus
aagtacctacggacactagcacgac

SEQ ID NO: 158890 - DNA, 25 bp, Saccharomyces pastorianus
aacaattctggtgtgggaagcgcta

SEQ ID NO: 158891 - DNA, 25 bp, Saccharomyces pastorianus
gccaatatggcgactgttccctcaa

SEQ ID NO: 158892 - DNA, 25 bp, Saccharomyces pastorianus
gaccagagattattccattgcaaga

SEQ ID NO: 158893 - DNA, 25 bp, Saccharomyces pastorianus
tagacaacggtaccggtcgtactgg

SEQ ID NO: 158894 - DNA, 25 bp, Saccharomyces pastorianus
gattgagtttcaaccttcccaagga

SEQ ID NO: 158895 - DNA, 25 bp, Saccharomyces pastorianus
gtgcaaacgtttaccaatcgccaac

SEQ ID NO: 158896 - DNA, 25 bp, Saccharomyces pastorianus
gatattatcatgcaaggacccttct

SEQ ID NO: 158897 - DNA, 25 bp, Saccharomyces pastorianus
gaaatgcatccaaccttttctcgaa

SEQ ID NO: 158898 - DNA, 25 bp, Saccharomyces pastorianus
ttaccagtcaccttagaccaggagt

SEQ ID NO: 158899 - DNA, 25 bp, Saccharomyces pastorianus
tattaatgtacaccaatgcacccgc

SEQ ID NO: 158900 - DNA, 25 bp, Saccharomyces pastorianus
aagactgcagtcaagatgcccgtcg

SEQ ID NO: 158901 - DNA, 25 bp, Saccharomyces pastorianus
gatgtctttgaatccgcaccgaatt

SEQ ID NO: 158902 - DNA, 25 bp, Saccharomyces pastorianus
tatgtcagtctttaagctcttcgag

SEQ ID NO: 158903 - DNA, 25 bp, Saccharomyces pastorianus
gaccaggagtatacatgccacgaat

SEQ ID NO: 158904 - DNA, 25 bp, Saccharomyces pastorianus
gtacagtcgctatgttgaaggctac

SEQ ID NO: 158905 - DNA, 25 bp, Saccharomyces pastorianus
gaaaccctgatttacgctaccgtag

SEQ ID NO: 158906 - DNA, 25 bp, Saccharomyces pastorianus
gatgcccgtcggagaggagaactat

SEQ ID NO: 158907 - DNA, 25 bp, Saccharomyces pastorianus
gattcgtgtagcagcacacctttcg

SEQ ID NO: 158908 - DNA, 25 bp, Saccharomyces pastorianus
gtatgggaacactcctgacatcttg

SEQ ID NO: 158909 - DNA, 25 bp, Saccharomyces pastorianus
tagcagcacacctttcgtgactggg

SEQ ID NO: 158910 - DNA, 25 bp, Saccharomyces pastorianus
ccatctgcagtctttagtttcttgt

SEQ ID NO: 158911 - DNA, 25 bp, Saccharomyces pastorianus
tgtacacttgtcagttcgtcctttg

SEQ ID NO: 158912 - DNA, 25 bp, Saccharomyces pastorianus
ctcgcatttggcgattcacgggtgg

SEQ ID NO: 158913 - DNA, 25 bp, Saccharomyces pastorianus
ggtattattaccatctgcagtcttt

SEQ ID NO: 158914 - DNA, 25 bp, Saccharomyces pastorianus
agttcgtcctttggcttggatgagt

SEQ ID NO: 158915 - DNA, 25 bp, Saccharomyces pastorianus
tgagtttaacttaacaacgtgcggg

SEQ ID NO: 158916 - DNA, 25 bp, Saccharomyces pastorianus
acacactgatatttttgggttcggg

SEQ ID NO: 158917 - DNA, 25 bp, Saccharomyces pastorianus
agtttcttgttctgtacacttgtca

SEQ ID NO: 158918 - DNA, 25 bp, Saccharomyces pastorianus
aggtgtgctgctacacgaatccatc

SEQ ID NO: 158919 - DNA, 25 bp, Saccharomyces pastorianus
gaactcccgattgcacacagagcat

SEQ ID NO: 158920 - DNA, 25 bp, Saccharomyces pastorianus
aaaattgcctgaggacgccttggcg

SEQ ID NO: 158921 - DNA, 25 bp, Saccharomyces pastorianus
tgcgcaccgagttcaaaccattcga

SEQ ID NO: 158922 - DNA, 25 bp, Saccharomyces pastorianus
aggaatccaactgcactttcaaatt

SEQ ID NO: 158923 - DNA, 25 bp, Saccharomyces pastorianus
tgaggagattcttcgagccgtgctg

SEQ ID NO: 158924 - DNA, 25 bp, Saccharomyces pastorianus
agcctggccaagtagtctgcgatgt

SEQ ID NO: 158925 - DNA, 25 bp, Saccharomyces pastorianus
gggttttacaatcacaggccacatt

SEQ ID NO: 158926 - DNA, 25 bp, Saccharomyces pastorianus
attgccacacagttcaggacttttc

SEQ ID NO: 158927 - DNA, 25 bp, Saccharomyces pastorianus
atacgtgctcgattatgatttctgg

SEQ ID NO: 158928 - DNA, 25 bp, Saccharomyces pastorianus
gaaggatgtcatcgttttggctaac

SEQ ID NO: 158929 - DNA, 25 bp, Saccharomyces pastorianus
aaccatgaaatgctcgttctgtccc

SEQ ID NO: 158930 - DNA, 25 bp, Saccharomyces pastorianus
caaatacttttctgtgcctctgatg

SEQ ID NO: 158931 - DNA, 25 bp, Saccharomyces pastorianus
atacgttgctggataccgtgctgta

SEQ ID NO: 158932 - DNA, 25 bp, Saccharomyces pastorianus
gaggccctacctattctagttgagg

SEQ ID NO: 158933 - DNA, 25 bp, Saccharomyces pastorianus
aagaatggtctagtcttacccacgc

SEQ ID NO: 158934 - DNA, 25 bp, Saccharomyces pastorianus
gcaacccacttacttacatctgaaa

SEQ ID NO: 158935 - DNA, 25 bp, Saccharomyces pastorianus
agttccgccatcgagaaatcgtcaa

SEQ ID NO: 158936 - DNA, 25 bp, Saccharomyces pastorianus
gattcgatagtcactccattggacg

SEQ ID NO: 158937 - DNA, 25 bp, Saccharomyces pastorianus
gcctctgatgcgcaattcatggaat

SEQ ID NO: 158938 - DNA, 25 bp, Saccharomyces pastorianus
ggaattgtactcttgccagaagtta

SEQ ID NO: 158939 - DNA, 25 bp, Saccharomyces pastorianus
atccaccgtggcaatcagcgaaatt

SEQ ID NO: 158940 - DNA, 25 bp, Saccharomyces pastorianus
aatatcttcttctccacagaaagag

SEQ ID NO: 158941 - DNA, 25 bp, Saccharomyces pastorianus
gggaaatatcttcttctccacagaa

SEQ ID NO: 158942 - DNA, 25 bp, Saccharomyces pastorianus
gacgcaggccaggaaaaatgtggaa

SEQ ID NO: 158943 - DNA, 25 bp, Saccharomyces pastorianus
atcttcttctccacagaaagagacg

SEQ ID NO: 158944 - DNA, 25 bp, Saccharomyces pastorianus
gaaagagacgcaggccaggaaaaat

SEQ ID NO: 158945 - DNA, 25 bp, Saccharomyces pastorianus
aaactgctcggggaaatatcttctt

SEQ ID NO: 158946 - DNA, 25 bp, Saccharomyces pastorianus
gaaatatcttcttctccacagaaag

SEQ ID NO: 158947 - DNA, 25 bp, Saccharomyces pastorianus
ggaaatatcttcttctccacagaaa

SEQ ID NO: 158948 - DNA, 25 bp, Saccharomyces pastorianus
tccacagaaagagacgcaggccagg

SEQ ID NO: 158949 - DNA, 25 bp, Saccharomyces pastorianus
ttcttctccacagaaagagacgcag

SEQ ID NO: 158950 - DNA, 25 bp, Saccharomyces pastorianus
gcaggccaggaaaaatgtggaatat

SEQ ID NO: 158951 - DNA, 25 bp, Saccharomyces pastorianus
agtgtcataatcctttgcgctgtct

SEQ ID NO: 158952 - DNA, 25 bp, Saccharomyces pastorianus
gcatatttgtcagtccttcacggaa

SEQ ID NO: 158953 - DNA, 25 bp, Saccharomyces pastorianus
aatgccctgcagcatttcttcctag

SEQ ID NO: 158954 - DNA, 25 bp, Saccharomyces pastorianus
cctttgcgctgtctctttgaagaaa

SEQ ID NO: 158955 - DNA, 25 bp, Saccharomyces pastorianus
agagcactgggtcacttcggaaaaa

SEQ ID NO: 158956 - DNA, 25 bp, Saccharomyces pastorianus
ggttagtcttagtttaactctcttg

SEQ ID NO: 158957 - DNA, 25 bp, Saccharomyces pastorianus
ttttccgaatttccattacgtattg

SEQ ID NO: 158958 - DNA, 25 bp, Saccharomyces pastorianus
agatatcgattaattccttggaagt

SEQ ID NO: 158959 - DNA, 25 bp, Saccharomyces pastorianus
ttacgtattggatcttgtgcgcata

SEQ ID NO: 158960 - DNA, 25 bp, Saccharomyces pastorianus
ggttttttcagttggccaacactct

SEQ ID NO: 158961 - DNA, 25 bp, Saccharomyces pastorianus
aaaagatcggcacggcaatgccctg

SEQ ID NO: 158962 - DNA, 25 bp, Saccharomyces pastorianus
gcttttacaagactgcccttctgaa

SEQ ID NO: 158963 - DNA, 25 bp, Saccharomyces pastorianus
tacaagcagttgactagcacctcgc

SEQ ID NO: 158964 - DNA, 25 bp, Saccharomyces pastorianus
aaggccacgtctttcttggcttacg

SEQ ID NO: 158965 - DNA, 25 bp, Saccharomyces pastorianus
acatttcacttctatatcgacggag

SEQ ID NO: 158966 - DNA, 25 bp, Saccharomyces pastorianus
atcatccacggagccaaggtttgaa

SEQ ID NO: 158967 - DNA, 25 bp, Saccharomyces pastorianus
atcctttctgaatgccctattacaa

SEQ ID NO: 158968 - DNA, 25 bp, Saccharomyces pastorianus
gcccttctgaactatcatctgctag

SEQ ID NO: 158969 - DNA, 25 bp, Saccharomyces pastorianus
gaaggaacttttgcatgccactaga

SEQ ID NO: 158970 - DNA, 25 bp, Saccharomyces pastorianus
gagattatcaacagaccggcttact

SEQ ID NO: 158971 - DNA, 25 bp, Saccharomyces pastorianus
tgaaaactctacctcatcaaacggg

SEQ ID NO: 158972 - DNA, 25 bp, Saccharomyces pastorianus
ccggaattcactcctcttattatga

SEQ ID NO: 158973 - DNA, 25 bp, Saccharomyces pastorianus
ttgtgcttcggaggaattgcaaaac

SEQ ID NO: 158974 - DNA, 25 bp, Saccharomyces pastorianus
actgtgttgaaatatttgttgctta

SEQ ID NO: 158975 - DNA, 25 bp, Saccharomyces pastorianus
ggaggaattgcaaaaccagaccaat

SEQ ID NO: 158976 - DNA, 25 bp, Saccharomyces pastorianus
ggaagcttttgtgcttcggaggaat

SEQ ID NO: 158977 - DNA, 25 bp, Saccharomyces pastorianus
tgtgtggaagcttttgtgcttcgga

SEQ ID NO: 158978 - DNA, 25 bp, Saccharomyces pastorianus
agcttttgtgcttcggaggaattgc

SEQ ID NO: 158979 - DNA, 25 bp, Saccharomyces pastorianus
gcttttgtgcttcggaggaattgca

SEQ ID NO: 158980 - DNA, 25 bp, Saccharomyces pastorianus
ttttgtgcttcggaggaattgcaaa

SEQ ID NO: 158981 - DNA, 25 bp, Saccharomyces pastorianus
tattatgtgtggaagcttttgtgct

SEQ ID NO: 158982 - DNA, 25 bp, Saccharomyces pastorianus
tatttgttgcttattatgtgtggaa

SEQ ID NO: 158983 - DNA, 25 bp, Saccharomyces pastorianus
ttcggaggaattgcaaaaccagacc

SEQ ID NO: 158984 - DNA, 25 bp, Saccharomyces pastorianus
gaactacgctggctcacgagtcgat

SEQ ID NO: 158985 - DNA, 25 bp, Saccharomyces pastorianus
gatttccagccctttattgatagcg

SEQ ID NO: 158986 - DNA, 25 bp, Saccharomyces pastorianus
atgactatactccacgattttcaga

SEQ ID NO: 158987 - DNA, 25 bp, Saccharomyces pastorianus
attttcagagccaccttcggagtat

SEQ ID NO: 158988 - DNA, 25 bp, Saccharomyces pastorianus
tgtcatttacacctcgttaaaccca

SEQ ID NO: 158989 - DNA, 25 bp, Saccharomyces pastorianus
agtcgatcatccctatccaaatatt

SEQ ID NO: 158990 - DNA, 25 bp, Saccharomyces pastorianus
atgtgcctcgtctgtcgtttaatga

SEQ ID NO: 158991 - DNA, 25 bp, Saccharomyces pastorianus
gaagcattccgccattatgacaagt

SEQ ID NO: 158992 - DNA, 25 bp, Saccharomyces pastorianus
gagttcaaccgcgattaagttcgaa

SEQ ID NO: 158993 - DNA, 25 bp, Saccharomyces pastorianus
cgcagattccgtcgccagaacaaaa

SEQ ID NO: 158994 - DNA, 25 bp, Saccharomyces pastorianus
ggtagacctattgcctcaagattta

SEQ ID NO: 158995 - DNA, 25 bp, Saccharomyces pastorianus
caactattcccagagctactattat

SEQ ID NO: 158996 - DNA, 25 bp, Saccharomyces pastorianus
gtcaactattcccagagctactatt

SEQ ID NO: 158997 - DNA, 25 bp, Saccharomyces pastorianus
tagtagtcaactattcccagagcta

SEQ ID NO: 158998 - DNA, 25 bp, Saccharomyces pastorianus
gagctactattatagccccatctac

SEQ ID NO: 158999 - DNA, 25 bp, Saccharomyces pastorianus
gtagtcaactattcccagagctact

SEQ ID NO: 159000 - DNA, 25 bp, Saccharomyces pastorianus
tcatggatatgatagtagtcaacta

SEQ ID NO: 159001 - DNA, 25 bp, Saccharomyces pastorianus
gatagtagtcaactattcccagagc

SEQ ID NO: 159002 - DNA, 25 bp, Saccharomyces pastorianus
aactattcccagagctactattata

SEQ ID NO: 159003 - DNA, 25 bp, Saccharomyces pastorianus
attcccagagctactattatagccc

SEQ ID NO: 159004 - DNA, 25 bp, Saccharomyces pastorianus
tagtcaactattcccagagctacta

SEQ ID NO: 159005 - DNA, 25 bp, Saccharomyces pastorianus
cccagagctactattatagccccat

SEQ ID NO: 159006 - DNA, 25 bp, Saccharomyces pastorianus
aactccttttccatcatttcttggt

SEQ ID NO: 159007 - DNA, 25 bp, Saccharomyces pastorianus
gtgagtgaatcatttcagaacctgg

SEQ ID NO: 159008 - DNA, 25 bp, Saccharomyces pastorianus
acagagcaagactaggtttattacc

SEQ ID NO: 159009 - DNA, 25 bp, Saccharomyces pastorianus
tatctcatcacagggtatagtcacc

SEQ ID NO: 159010 - DNA, 25 bp, Saccharomyces pastorianus
ggagtgtataaactctacacctggt

SEQ ID NO: 159011 - DNA, 25 bp, Saccharomyces pastorianus
gaaactcctcgttacaaagcctaag

SEQ ID NO: 159012 - DNA, 25 bp, Saccharomyces pastorianus
gtcgtagccggttatttatcgcaaa

SEQ ID NO: 159013 - DNA, 25 bp, Saccharomyces pastorianus
ttgggacactccatttagtgacgaa

SEQ ID NO: 159014 - DNA, 25 bp, Saccharomyces pastorianus
tagtcaccggtgatgaactcctttt

SEQ ID NO: 159015 - DNA, 25 bp, Saccharomyces pastorianus
aactaggtcaacaatttacagcgaa

SEQ ID NO: 159016 - DNA, 25 bp, Saccharomyces pastorianus
attcaaccatttcatgagctacagg

SEQ ID NO: 159017 - DNA, 25 bp, Saccharomyces pastorianus
agaaggaataaaaagcccatcggca

SEQ ID NO: 159018 - DNA, 25 bp, Saccharomyces pastorianus
atatggcgggctcccagagaatccc

SEQ ID NO: 159019 - DNA, 25 bp, Saccharomyces pastorianus
gaacccgcacattcaaaaagtggct

SEQ ID NO: 159020 - DNA, 25 bp, Saccharomyces pastorianus
aagcccatcggcaaaataccatgat

SEQ ID NO: 159021 - DNA, 25 bp, Saccharomyces pastorianus
ataccatgatatggcgggctcccag

SEQ ID NO: 159022 - DNA, 25 bp, Saccharomyces pastorianus
ggaagatgcgctaaatttactaaag

SEQ ID NO: 159023 - DNA, 25 bp, Saccharomyces pastorianus
gctgttttgcaaagtaagcccaata

SEQ ID NO: 159024 - DNA, 25 bp, Saccharomyces pastorianus
aatcgcacataaagtttcctatcta

SEQ ID NO: 159025 - DNA, 25 bp, Saccharomyces pastorianus
agagaatccctcacaagaacccgca

SEQ ID NO: 159026 - DNA, 25 bp, Saccharomyces pastorianus
cgcacattcaaaaagtggctgtttt

SEQ ID NO: 159027 - DNA, 25 bp, Saccharomyces pastorianus
gtaagcccaataaggaagatgcgct

SEQ ID NO: 159028 - DNA, 25 bp, Saccharomyces pastorianus
attctgaatggcactcccaatatcc

SEQ ID NO: 159029 - DNA, 25 bp, Saccharomyces pastorianus
tacgcgtactacttcggccaagaag

SEQ ID NO: 159030 - DNA, 25 bp, Saccharomyces pastorianus
cggcactgccagatatatgtccatt

SEQ ID NO: 159031 - DNA, 25 bp, Saccharomyces pastorianus
ttggtcattgatcttttgggtccct

SEQ ID NO: 159032 - DNA, 25 bp, Saccharomyces pastorianus
gtacccgtcgcgatcaaattcgagc

SEQ ID NO: 159033 - DNA, 25 bp, Saccharomyces pastorianus
gacttgcacgcacatgacttgatat

SEQ ID NO: 159034 - DNA, 25 bp, Saccharomyces pastorianus
aacggttgtgcaagttgctgtccaa

SEQ ID NO: 159035 - DNA, 25 bp, Saccharomyces pastorianus
agaaaaaatcactcagcggcactgc

SEQ ID NO: 159036 - DNA, 25 bp, Saccharomyces pastorianus
gatgactctactattgtcggcctac

SEQ ID NO: 159037 - DNA, 25 bp, Saccharomyces pastorianus
aatatgatcaatggcgtacccgtcg

SEQ ID NO: 159038 - DNA, 25 bp, Saccharomyces pastorianus
atttcttgattggaaggcccggcca

SEQ ID NO: 159039 - DNA, 25 bp, Saccharomyces pastorianus
ggcactttacccctcgtgaagaccg

SEQ ID NO: 159040 - DNA, 25 bp, Saccharomyces pastorianus
tactatgcccgtgaagctagccaac

SEQ ID NO: 159041 - DNA, 25 bp, Saccharomyces pastorianus
attactatgcccgtgaagctagcca

SEQ ID NO: 159042 - DNA, 25 bp, Saccharomyces pastorianus
gagtagtgaactcatgttcaactat

SEQ ID NO: 159043 - DNA, 25 bp, Saccharomyces pastorianus
cctgctggtccaaaagatgttattt

SEQ ID NO: 159044 - DNA, 25 bp, Saccharomyces pastorianus
ctggcctgctggtccaaaagatgtt

SEQ ID NO: 159045 - DNA, 25 bp, Saccharomyces pastorianus
aacaggaacgtttgatgactggagg

SEQ ID NO: 159046 - DNA, 25 bp, Saccharomyces pastorianus
tagctggcctgctggtccaaaagat

SEQ ID NO: 159047 - DNA, 25 bp, Saccharomyces pastorianus
cgaaattactatgcccgtgaagcta

SEQ ID NO: 159048 - DNA, 25 bp, Saccharomyces pastorianus
tgaagaccgccaagggaaatttcga

SEQ ID NO: 159049 - DNA, 25 bp, Saccharomyces pastorianus
gttcaactatacttttagctggcct

SEQ ID NO: 159050 - DNA, 25 bp, Saccharomyces pastorianus
attagatgaatatcacggcctgtac

SEQ ID NO: 159051 - DNA, 25 bp, Saccharomyces pastorianus
aattcgagacattatatggtccacg

SEQ ID NO: 159052 - DNA, 25 bp, Saccharomyces pastorianus
atcacggcctgtacacgaactatga

SEQ ID NO: 159053 - DNA, 25 bp, Saccharomyces pastorianus
aaccgcttagaagttcaggatgcta

SEQ ID NO: 159054 - DNA, 25 bp, Saccharomyces pastorianus
acagtactggaatccttgggcaggt

SEQ ID NO: 159055 - DNA, 25 bp, Saccharomyces pastorianus
attcacggaatcgagctattatctg

SEQ ID NO: 159056 - DNA, 25 bp, Saccharomyces pastorianus
atggtccacgaagcattaaatcttt

SEQ ID NO: 159057 - DNA, 25 bp, Saccharomyces pastorianus
gactcctccagaatagttaaccata

SEQ ID NO: 159058 - DNA, 25 bp, Saccharomyces pastorianus
gaactatgaaatgtcttattggcaa

SEQ ID NO: 159059 - DNA, 25 bp, Saccharomyces pastorianus
gaatttttcgatgactcctccagaa

SEQ ID NO: 159060 - DNA, 25 bp, Saccharomyces pastorianus
aacaagctgcgaaaaattgccattt

SEQ ID NO: 159061 - DNA, 25 bp, Saccharomyces pastorianus
aagcttagcgatgagttacataatc

SEQ ID NO: 159062 - DNA, 25 bp, Saccharomyces pastorianus
tctagcgttgaagattctacagata

SEQ ID NO: 159063 - DNA, 25 bp, Saccharomyces pastorianus
gctaagcagggcagaatatgattct

SEQ ID NO: 159064 - DNA, 25 bp, Saccharomyces pastorianus
tacccgaacagctcaaaactgaaaa

SEQ ID NO: 159065 - DNA, 25 bp, Saccharomyces pastorianus
tctgattctgattctagcgttgaag

SEQ ID NO: 159066 - DNA, 25 bp, Saccharomyces pastorianus
gaagatcacgttgaagaccatagaa

SEQ ID NO: 159067 - DNA, 25 bp, Saccharomyces pastorianus
taaaattcagcttttggatattgca

SEQ ID NO: 159068 - DNA, 25 bp, Saccharomyces pastorianus
tgaacacgacgaaaagcttagcgat

SEQ ID NO: 159069 - DNA, 25 bp, Saccharomyces pastorianus
atcagatcggtaattcagagagcaa

SEQ ID NO: 159070 - DNA, 25 bp, Saccharomyces pastorianus
aatagtgatcgacgtgaacacgacg

SEQ ID NO: 159071 - DNA, 25 bp, Saccharomyces pastorianus
aacttagccgacttagattatcaga

SEQ ID NO: 159072 - DNA, 25 bp, Saccharomyces pastorianus
ggttctacgttgtttgatgctaaag

SEQ ID NO: 159073 - DNA, 25 bp, Saccharomyces pastorianus
cttgcagaagctattgatgttgatc

SEQ ID NO: 159074 - DNA, 25 bp, Saccharomyces pastorianus
gttgatcaaacacactctttagccg

SEQ ID NO: 159075 - DNA, 25 bp, Saccharomyces pastorianus
aacgggtttggcctatcagagactg

SEQ ID NO: 159076 - DNA, 25 bp, Saccharomyces pastorianus
gatgtcactaatccataccttaagt

SEQ ID NO: 159077 - DNA, 25 bp, Saccharomyces pastorianus
gactgagtatgacctgtacctcctt

SEQ ID NO: 159078 - DNA, 25 bp, Saccharomyces pastorianus
ttcagctacgaaaggctgccacaga

SEQ ID NO: 159079 - DNA, 25 bp, Saccharomyces pastorianus
agcagaggcgctagcaggtcttgca

SEQ ID NO: 159080 - DNA, 25 bp, Saccharomyces pastorianus
tacctccttggttctacgttgtttg

SEQ ID NO: 159081 - DNA, 25 bp, Saccharomyces pastorianus
ttatcacgatggaagctatacggct

SEQ ID NO: 159082 - DNA, 25 bp, Saccharomyces pastorianus
ctctttagccgatgaatcgccacta

SEQ ID NO: 159083 - DNA, 25 bp, Saccharomyces pastorianus
gacgaaagttcctgataatgcacca

SEQ ID NO: 159084 - DNA, 25 bp, Saccharomyces pastorianus
gagaattacggcttgaaagattttt

SEQ ID NO: 159085 - DNA, 25 bp, Saccharomyces pastorianus
aagtccgaccatgatgtcagttaca

SEQ ID NO: 159086 - DNA, 25 bp, Saccharomyces pastorianus
taccaagagtatattcgacgaaagt

SEQ ID NO: 159087 - DNA, 25 bp, Saccharomyces pastorianus
aagttcctgataatgcaccaagagc

SEQ ID NO: 159088 - DNA, 25 bp, Saccharomyces pastorianus
aagacctataactcacccagaacag

SEQ ID NO: 159089 - DNA, 25 bp, Saccharomyces pastorianus
ccgaccatgatgtcagttacacaag

SEQ ID NO: 159090 - DNA, 25 bp, Saccharomyces pastorianus
aatggctagaaaccctaagacctat

SEQ ID NO: 159091 - DNA, 25 bp, Saccharomyces pastorianus
atgtcgatagcttggtctagcgttt

SEQ ID NO: 159092 - DNA, 25 bp, Saccharomyces pastorianus
gcggctgacaatgaacaatggctag

SEQ ID NO: 159093 - DNA, 25 bp, Saccharomyces pastorianus
atagcttggtctagcgttttcaaaa

SEQ ID NO: 159094 - DNA, 25 bp, Saccharomyces pastorianus
gagaaatccgaatcttttgccaagt

SEQ ID NO: 159095 - DNA, 25 bp, Saccharomyces pastorianus
agtatgtctgctgaaaggtggccaa

SEQ ID NO: 159096 - DNA, 25 bp, Saccharomyces pastorianus
tgagccctacgattggcacagtttc

SEQ ID NO: 159097 - DNA, 25 bp, Saccharomyces pastorianus
atagggcactggcaattcaccacac

SEQ ID NO: 159098 - DNA, 25 bp, Saccharomyces pastorianus
gccaaggtggactcggtaacatgca

SEQ ID NO: 159099 - DNA, 25 bp, Saccharomyces pastorianus
tcttttgccaagtacctacaggttg

SEQ ID NO: 159100 - DNA, 25 bp, Saccharomyces pastorianus
gcacagtttccttgggttttgggca

SEQ ID NO: 159101 - DNA, 25 bp, Saccharomyces pastorianus
tggactcattggtttgcctaacgct

SEQ ID NO: 159102 - DNA, 25 bp, Saccharomyces pastorianus
aaagcattgctgatcttggactcat

SEQ ID NO: 159103 - DNA, 25 bp, Saccharomyces pastorianus
gtatttgtccttgacctctctaata

SEQ ID NO: 159104 - DNA, 25 bp, Saccharomyces pastorianus
agacgtcttcactgtggccgatata

SEQ ID NO: 159105 - DNA, 25 bp, Saccharomyces pastorianus
tagagccctccgttagactggaagt

SEQ ID NO: 159106 - DNA, 25 bp, Saccharomyces pastorianus
gtgttactggcgacaagcactcgtc

SEQ ID NO: 159107 - DNA, 25 bp, Saccharomyces pastorianus
actcgtctgtcaatctgcacaattt

SEQ ID NO: 159108 - DNA, 25 bp, Saccharomyces pastorianus
agctttccatttatagagccctccg

SEQ ID NO: 159109 - DNA, 25 bp, Saccharomyces pastorianus
actacattattttcgccacaggcta

SEQ ID NO: 159110 - DNA, 25 bp, Saccharomyces pastorianus
atagcattccacgtagggtcggtca

SEQ ID NO: 159111 - DNA, 25 bp, Saccharomyces pastorianus
aactttcgactctaatgcctgcgga

SEQ ID NO: 159112 - DNA, 25 bp, Saccharomyces pastorianus
tagggtcggtcatttcgaaccagtt

SEQ ID NO: 159113 - DNA, 25 bp, Saccharomyces pastorianus
ggcggctattatggtcgaagtattc

SEQ ID NO: 159114 - DNA, 25 bp, Saccharomyces pastorianus
gttgtcggaactacaggcggctatt

SEQ ID NO: 159115 - DNA, 25 bp, Saccharomyces pastorianus
gtaaaagatcctacgctgtccttta

SEQ ID NO: 159116 - DNA, 25 bp, Saccharomyces pastorianus
atgtaaacataaccacctccacaac

SEQ ID NO: 159117 - DNA, 25 bp, Saccharomyces pastorianus
tattttgccagctcctcgtatgaat

SEQ ID NO: 159118 - DNA, 25 bp, Saccharomyces pastorianus
gatccatactcttcgaggtcgggtc

SEQ ID NO: 159119 - DNA, 25 bp, Saccharomyces pastorianus
tggcgtgtcgccttcagtgatatat

SEQ ID NO: 159120 - DNA, 25 bp, Saccharomyces pastorianus
taatacatacaatactctcccgcaa

SEQ ID NO: 159121 - DNA, 25 bp, Saccharomyces pastorianus
gcatgattaccgacaaccaaaacca

SEQ ID NO: 159122 - DNA, 25 bp, Saccharomyces pastorianus
aatgcaatcactctaaggcgcctat

SEQ ID NO: 159123 - DNA, 25 bp, Saccharomyces pastorianus
tactgcagcaccttatgaacggcgt

SEQ ID NO: 159124 - DNA, 25 bp, Saccharomyces pastorianus
gtacaccatatacttgtgcatgatt

SEQ ID NO: 159125 - DNA, 25 bp, Saccharomyces pastorianus
aggtcgggtcctgaatgcaatcact

SEQ ID NO: 159126 - DNA, 25 bp, Saccharomyces pastorianus
gatatattcctccaatacattgagc

SEQ ID NO: 159127 - DNA, 25 bp, Saccharomyces pastorianus
aacgtgcaggtctttatcatcttct

SEQ ID NO: 159128 - DNA, 25 bp, Saccharomyces pastorianus
cttccataaatttcgaccttcacag

SEQ ID NO: 159129 - DNA, 25 bp, Saccharomyces pastorianus
attcaatatggatcccaccgacagc

SEQ ID NO: 159130 - DNA, 25 bp, Saccharomyces pastorianus
ataataggctgggttccacgcacga

SEQ ID NO: 159131 - DNA, 25 bp, Saccharomyces pastorianus
taaattacctctcccgtatatgcag

SEQ ID NO: 159132 - DNA, 25 bp, Saccharomyces pastorianus
ttccagttaggaccgcagttcagtt

SEQ ID NO: 159133 - DNA, 25 bp, Saccharomyces pastorianus
gatctaccgctgcataatgtacctg

SEQ ID NO: 159134 - DNA, 25 bp, Saccharomyces pastorianus
taacgctcctcgagaaatgcaccaa

SEQ ID NO: 159135 - DNA, 25 bp, Saccharomyces pastorianus
tcagttacctttaaccaccttcaat

SEQ ID NO: 159136 - DNA, 25 bp, Saccharomyces pastorianus
ggaaatggcagatctaacccgtcta

SEQ ID NO: 159137 - DNA, 25 bp, Saccharomyces pastorianus
atcttctccgagctattgtgatctc

SEQ ID NO: 159138 - DNA, 25 bp, Saccharomyces pastorianus
gaatctttgtccactttacaaacta

SEQ ID NO: 159139 - DNA, 25 bp, Saccharomyces pastorianus
gaggttctctctgattataattcaa

SEQ ID NO: 159140 - DNA, 25 bp, Saccharomyces pastorianus
gccggagcacactgatgtgcctgaa

SEQ ID NO: 159141 - DNA, 25 bp, Saccharomyces pastorianus
ggcaaaaaatatcagctcctcaact

SEQ ID NO: 159142 - DNA, 25 bp, Saccharomyces pastorianus
ttagttgaacttctcgctcaggaaa

SEQ ID NO: 159143 - DNA, 25 bp, Saccharomyces pastorianus
aatgaatcacttgtacgggaaacta

SEQ ID NO: 159144 - DNA, 25 bp, Saccharomyces pastorianus
tttgggcaaaagctaatcctgatcc

SEQ ID NO: 159145 - DNA, 25 bp, Saccharomyces pastorianus
gcgaaagaacttgagcccgatcaat

SEQ ID NO: 159146 - DNA, 25 bp, Saccharomyces pastorianus
attacaaaactcacagccggagcac

SEQ ID NO: 159147 - DNA, 25 bp, Saccharomyces pastorianus
gacacattgagtttttcggaagaat

SEQ ID NO: 159148 - DNA, 25 bp, Saccharomyces pastorianus
tatgaatttggcgtttgagtactac

SEQ ID NO: 159149 - DNA, 25 bp, Saccharomyces pastorianus
tgacagtatgtcaccacagctttct

SEQ ID NO: 159150 - DNA, 25 bp, Saccharomyces pastorianus
aaattccgacatatttcagtccacg

SEQ ID NO: 159151 - DNA, 25 bp, Saccharomyces pastorianus
gaagctctccgattgctgagataat

SEQ ID NO: 159152 - DNA, 25 bp, Saccharomyces pastorianus
aataagataccaccagattgcggga

SEQ ID NO: 159153 - DNA, 25 bp, Saccharomyces pastorianus
ttgccaaatttgtatccccacggta

SEQ ID NO: 159154 - DNA, 25 bp, Saccharomyces pastorianus
gaacaactttcgaagctctccgatt

SEQ ID NO: 159155 - DNA, 25 bp, Saccharomyces pastorianus
aacacaaaacatgccttgttccgaa

SEQ ID NO: 159156 - DNA, 25 bp, Saccharomyces pastorianus
atttcctgagttcaatccagcgtta

SEQ ID NO: 159157 - DNA, 25 bp, Saccharomyces pastorianus
tacgctaccattaccaaacccttat

SEQ ID NO: 159158 - DNA, 25 bp, Saccharomyces pastorianus
gacaacacgaacagtggcctgcata

SEQ ID NO: 159159 - DNA, 25 bp, Saccharomyces pastorianus
ggcctgcatacgaaaaaccaataag

SEQ ID NO: 159160 - DNA, 25 bp, Saccharomyces pastorianus
tgatataggagctccccttttcaat

SEQ ID NO: 159161 - DNA, 25 bp, Saccharomyces pastorianus
tgccacgcgtcagtttcatttaaga

SEQ ID NO: 159162 - DNA, 25 bp, Saccharomyces pastorianus
acactggcctatttcatgctgggca

SEQ ID NO: 159163 - DNA, 25 bp, Saccharomyces pastorianus
gacacggtgtcgcagattggtataa

SEQ ID NO: 159164 - DNA, 25 bp, Saccharomyces pastorianus
tgatctgctactctcatttgcattc

SEQ ID NO: 159165 - DNA, 25 bp, Saccharomyces pastorianus
gagcggattgttttgttcttcttta

SEQ ID NO: 159166 - DNA, 25 bp, Saccharomyces pastorianus
aattgtggtcgcaagtgcaggccat

SEQ ID NO: 159167 - DNA, 25 bp, Saccharomyces pastorianus
ccggcggtcatatgcttctgatata

SEQ ID NO: 159168 - DNA, 25 bp, Saccharomyces pastorianus
cattgttggaatctactgccacgcg

SEQ ID NO: 159169 - DNA, 25 bp, Saccharomyces pastorianus
atccgtacgacgaagcactggtgtt

SEQ ID NO: 159170 - DNA, 25 bp, Saccharomyces pastorianus
gggacagttgccacatgctggaaaa

SEQ ID NO: 159171 - DNA, 25 bp, Saccharomyces pastorianus
aatttgtgacgcatctttcttcttt

SEQ ID NO: 159172 - DNA, 25 bp, Saccharomyces pastorianus
tgacccgaacgactactttattatg

SEQ ID NO: 159173 - DNA, 25 bp, Saccharomyces pastorianus
taaggcctattgtcgggtacatcaa

SEQ ID NO: 159174 - DNA, 25 bp, Saccharomyces pastorianus
tactcctgtcactttctgtacatat

SEQ ID NO: 159175 - DNA, 25 bp, Saccharomyces pastorianus
ctttcttctttctacactgcggaaa

SEQ ID NO: 159176 - DNA, 25 bp, Saccharomyces pastorianus
gatgagtctcggtgctatcgcgtga

SEQ ID NO: 159177 - DNA, 25 bp, Saccharomyces pastorianus
agcatcgttctttctatcagtttat

SEQ ID NO: 159178 - DNA, 25 bp, Saccharomyces pastorianus
tgggcttatggtcacctgcaactta

SEQ ID NO: 159179 - DNA, 25 bp, Saccharomyces pastorianus
atgtcaaagccgaagtgcctctgtt

SEQ ID NO: 159180 - DNA, 25 bp, Saccharomyces pastorianus
gagggctcctggaccatatatgatt

SEQ ID NO: 159181 - DNA, 25 bp, Saccharomyces pastorianus
tctccccggccgttgatgaaattga

SEQ ID NO: 159182 - DNA, 25 bp, Saccharomyces pastorianus
ggaaagcagctattcaataccctta

SEQ ID NO: 159183 - DNA, 25 bp, Saccharomyces pastorianus
aatacccttatttcttctgtagcga

SEQ ID NO: 159184 - DNA, 25 bp, Saccharomyces pastorianus
tcgagagaagcactggttcccaaat

SEQ ID NO: 159185 - DNA, 25 bp, Saccharomyces pastorianus
gaacttgttctaccagtactacaga

SEQ ID NO: 159186 - DNA, 25 bp, Saccharomyces pastorianus
ttcggttatttcttcatcacatgga

SEQ ID NO: 159187 - DNA, 25 bp, Saccharomyces pastorianus
atcagactatgcttctttaggcact

SEQ ID NO: 159188 - DNA, 25 bp, Saccharomyces pastorianus
gtctcaatacgagcccgaacttgtt

SEQ ID NO: 159189 - DNA, 25 bp, Saccharomyces pastorianus
aggtcaattgcttgctgccatttat

SEQ ID NO: 159190 - DNA, 25 bp, Saccharomyces pastorianus
cctctgttgtgatttgcgcctataa

SEQ ID NO: 159191 - DNA, 25 bp, Saccharomyces pastorianus
ataatccactggtcttatcgactca

SEQ ID NO: 159192 - DNA, 25 bp, Saccharomyces pastorianus
ggaaaggatgtcacacctctgttgt

SEQ ID NO: 159193 - DNA, 25 bp, Saccharomyces pastorianus
aattgccaagggtaatgagtttcat

SEQ ID NO: 159194 - DNA, 25 bp, Saccharomyces pastorianus
atgagtttcataccattttggcgac

SEQ ID NO: 159195 - DNA, 25 bp, Saccharomyces pastorianus
gctagaaacctggaaattgccaagg

SEQ ID NO: 159196 - DNA, 25 bp, Saccharomyces pastorianus
gtttcataccattttggcgactttg

SEQ ID NO: 159197 - DNA, 25 bp, Saccharomyces pastorianus
tttatcgcagtttctactttggcta

SEQ ID NO: 159198 - DNA, 25 bp, Saccharomyces pastorianus
accattttggcgactttgagatcac

SEQ ID NO: 159199 - DNA, 25 bp, Saccharomyces pastorianus
ctactttggctagaaacctggaaat

SEQ ID NO: 159200 - DNA, 25 bp, Saccharomyces pastorianus
atcgcagtttctactttggctagaa

SEQ ID NO: 159201 - DNA, 25 bp, Saccharomyces pastorianus
ctttggctagaaacctggaaattgc

SEQ ID NO: 159202 - DNA, 25 bp, Saccharomyces pastorianus
ggcgactttgagatcaccagtttat

SEQ ID NO: 159203 - DNA, 25 bp, Saccharomyces pastorianus
ttggcgactttgagatcaccagttt

SEQ ID NO: 159204 - DNA, 25 bp, Saccharomyces pastorianus
aaatagtcattgtacgttgctttct

SEQ ID NO: 159205 - DNA, 25 bp, Saccharomyces pastorianus
tagtcattgtacgttgctttctttt

SEQ ID NO: 159206 - DNA, 25 bp, Saccharomyces pastorianus
gattgtggcctctttccaccacttg

SEQ ID NO: 159207 - DNA, 25 bp, Saccharomyces pastorianus
gaagaaatagtcattgtacgttgct

SEQ ID NO: 159208 - DNA, 25 bp, Saccharomyces pastorianus
agaaatagtcattgtacgttgcttt

SEQ ID NO: 159209 - DNA, 25 bp, Saccharomyces pastorianus
ctggatgtgcagaagaaatagtcat

SEQ ID NO: 159210 - DNA, 25 bp, Saccharomyces pastorianus
aatagtcattgtacgttgctttctt

SEQ ID NO: 159211 - DNA, 25 bp, Saccharomyces pastorianus
atagtcattgtacgttgctttcttt

SEQ ID NO: 159212 - DNA, 25 bp, Saccharomyces pastorianus
attgtggcctctttccaccacttgg

SEQ ID NO: 159213 - DNA, 25 bp, Saccharomyces pastorianus
tgtggcctctttccaccacttgggt

SEQ ID NO: 159214 - DNA, 25 bp, Saccharomyces pastorianus
agattgtggcctctttccaccactt

SEQ ID NO: 159215 - DNA, 25 bp, Saccharomyces pastorianus
caatggttgtaacgtcaagataatc

SEQ ID NO: 159216 - DNA, 25 bp, Saccharomyces pastorianus
gttgtaacgtcaagataatcacctc

SEQ ID NO: 159217 - DNA, 25 bp, Saccharomyces pastorianus
atggttgtaacgtcaagataatcac

SEQ ID NO: 159218 - DNA, 25 bp, Saccharomyces pastorianus
acaatggttgtaacgtcaagataat

SEQ ID NO: 159219 - DNA, 25 bp, Saccharomyces pastorianus
tggttgtaacgtcaagataatcacc

SEQ ID NO: 159220 - DNA, 25 bp, Saccharomyces pastorianus
ttgtaacgtcaagataatcacctct

SEQ ID NO: 159221 - DNA, 25 bp, Saccharomyces pastorianus
ggttgtaacgtcaagataatcacct

SEQ ID NO: 159222 - DNA, 25 bp, Saccharomyces pastorianus
aatggttgtaacgtcaagataatca

SEQ ID NO: 159223 - DNA, 25 bp, Saccharomyces pastorianus
ctcaatgtgatgacaatggttgtaa

SEQ ID NO: 159224 - DNA, 25 bp, Saccharomyces pastorianus
agtgctgcccctaagacatacacta

SEQ ID NO: 159225 - DNA, 25 bp, Saccharomyces pastorianus
gttactcaatgtgatgacaatggtt

SEQ ID NO: 159226 - DNA, 25 bp, Saccharomyces pastorianus
atacactactgccactgttactcaa

SEQ ID NO: 159227 - DNA, 25 bp, Saccharomyces pastorianus
gccactgttactcaatgtgatgaca

SEQ ID NO: 159228 - DNA, 25 bp, Saccharomyces pastorianus
taagacatacactactgccactgtt

SEQ ID NO: 159229 - DNA, 25 bp, Saccharomyces pastorianus
cactactgccactgttactcaatgt

SEQ ID NO: 159230 - DNA, 25 bp, Saccharomyces pastorianus
ctactgccactgttactcaatgtga

SEQ ID NO: 159231 - DNA, 25 bp, Saccharomyces pastorianus
ctaagacatacactactgccactgt

SEQ ID NO: 159232 - DNA, 25 bp, Saccharomyces pastorianus
actgccactgttactcaatgtgatg

SEQ ID NO: 159233 - DNA, 25 bp, Saccharomyces pastorianus
gctgcccctaagacatacactactg

SEQ ID NO: 159234 - DNA, 25 bp, Saccharomyces pastorianus
catgagtggatttgcgtcgctgttt

SEQ ID NO: 159235 - DNA, 25 bp, Saccharomyces pastorianus
agcggccgttctttgcatgagtgga

SEQ ID NO: 159236 - DNA, 25 bp, Saccharomyces pastorianus
ttgtgcgtacggatggtgcattact

SEQ ID NO: 159237 - DNA, 25 bp, Saccharomyces pastorianus
aagcagtagcggattttgtgcgtac

SEQ ID NO: 159238 - DNA, 25 bp, Saccharomyces pastorianus
tttcccacgaagacatctacggcta

SEQ ID NO: 159239 - DNA, 25 bp, Saccharomyces pastorianus
gtgcattactgtcaaagccccttta

SEQ ID NO: 159240 - DNA, 25 bp, Saccharomyces pastorianus
gtcgctgttttccaattgcattttg

SEQ ID NO: 159241 - DNA, 25 bp, Saccharomyces pastorianus
gttgcaacccgcatttgttaccttg

SEQ ID NO: 159242 - DNA, 25 bp, Saccharomyces pastorianus
agatgcattctgtctgctgtgttta

SEQ ID NO: 159243 - DNA, 25 bp, Saccharomyces pastorianus
tatcttcaaggcgaggttgcaaccc

SEQ ID NO: 159244 - DNA, 25 bp, Saccharomyces pastorianus
taatagttgatctttttcccacgaa

SEQ ID NO: 159245 - DNA, 25 bp, Saccharomyces pastorianus
agcatatttccatggacttttgtat

SEQ ID NO: 159246 - DNA, 25 bp, Saccharomyces pastorianus
ccaagcatatttccatggacttttg

SEQ ID NO: 159247 - DNA, 25 bp, Saccharomyces pastorianus
caagcatatttccatggacttttgt

SEQ ID NO: 159248 - DNA, 25 bp, Saccharomyces pastorianus
gaaaccgtgatgagaaatccgggat

SEQ ID NO: 159249 - DNA, 25 bp, Saccharomyces pastorianus
aagcatatttccatggacttttgta

SEQ ID NO: 159250 - DNA, 25 bp, Saccharomyces pastorianus
tgtatggaaaccgtgatgagaaatc

SEQ ID NO: 159251 - DNA, 25 bp, Saccharomyces pastorianus
accgtgatgagaaatccgggatttc

SEQ ID NO: 159252 - DNA, 25 bp, Saccharomyces pastorianus
tatggaaaccgtgatgagaaatccg

SEQ ID NO: 159253 - DNA, 25 bp, Saccharomyces pastorianus
atggacttttgtatggaaaccgtga

SEQ ID NO: 159254 - DNA, 25 bp, Saccharomyces pastorianus
gccaagcatatttccatggactttt

SEQ ID NO: 159255 - DNA, 25 bp, Saccharomyces pastorianus
tgccaagcatatttccatggacttt

SEQ ID NO: 159256 - DNA, 25 bp, Saccharomyces pastorianus
gccagatatctacgaactagcggtg

SEQ ID NO: 159257 - DNA, 25 bp, Saccharomyces pastorianus
taaaagagtctaccaacttcgccag

SEQ ID NO: 159258 - DNA, 25 bp, Saccharomyces pastorianus
aaaagagtctaccaacttcgccaga

SEQ ID NO: 159259 - DNA, 25 bp, Saccharomyces pastorianus
gtctaccaacttcgccagatatcta

SEQ ID NO: 159260 - DNA, 25 bp, Saccharomyces pastorianus
taccaacttcgccagatatctacga

SEQ ID NO: 159261 - DNA, 25 bp, Saccharomyces pastorianus
aaagagtctaccaacttcgccagat

SEQ ID NO: 159262 - DNA, 25 bp, Saccharomyces pastorianus
aacttcgccagatatctacgaacta

SEQ ID NO: 159263 - DNA, 25 bp, Saccharomyces pastorianus
atatctacgaactagcggtgtactc

SEQ ID NO: 159264 - DNA, 25 bp, Saccharomyces pastorianus
agatatctacgaactagcggtgtac

SEQ ID NO: 159265 - DNA, 25 bp, Saccharomyces pastorianus
gagtctaccaacttcgccagatatc

SEQ ID NO: 159266 - DNA, 25 bp, Saccharomyces pastorianus
agagtctaccaacttcgccagatat

SEQ ID NO: 159267 - DNA, 25 bp, Saccharomyces pastorianus
gggctgatcaaatccactgacgtga

SEQ ID NO: 159268 - DNA, 25 bp, Saccharomyces pastorianus
gagattctgcgccagcaagtcgtct

SEQ ID NO: 159269 - DNA, 25 bp, Saccharomyces pastorianus
gaccataggttgctacaaactcggt

SEQ ID NO: 159270 - DNA, 25 bp, Saccharomyces pastorianus
gaatgcctatattatctgaccatag

SEQ ID NO: 159271 - DNA, 25 bp, Saccharomyces pastorianus
caaactcggtgaatactctatggcg

SEQ ID NO: 159272 - DNA, 25 bp, Saccharomyces pastorianus
tttggccaactcttaaggacgcata

SEQ ID NO: 159273 - DNA, 25 bp, Saccharomyces pastorianus
catttacaaagaggccgagtcccgt

SEQ ID NO: 159274 - DNA, 25 bp, Saccharomyces pastorianus
caccgctaccatacagtcaaggttt

SEQ ID NO: 159275 - DNA, 25 bp, Saccharomyces pastorianus
gagtcccgtagacgagaatgcctat

SEQ ID NO: 159276 - DNA, 25 bp, Saccharomyces pastorianus
actctatccgcagcagctggagatt

SEQ ID NO: 159277 - DNA, 25 bp, Saccharomyces pastorianus
gacactttatttgagcatgagcgta

SEQ ID NO: 159278 - DNA, 25 bp, Saccharomyces pastorianus
gagaaatcgttccataccaagcaaa

SEQ ID NO: 159279 - DNA, 25 bp, Saccharomyces pastorianus
gattttgtattgcttgtgtcgtcta

SEQ ID NO: 159280 - DNA, 25 bp, Saccharomyces pastorianus
gtttttgccctgtcaattcttttag

SEQ ID NO: 159281 - DNA, 25 bp, Saccharomyces pastorianus
tggaaactacgtgttgcctgtccct

SEQ ID NO: 159282 - DNA, 25 bp, Saccharomyces pastorianus
gtgtcgtctacactggcagagatac

SEQ ID NO: 159283 - DNA, 25 bp, Saccharomyces pastorianus
tgtcccttgacccaaaatctatcgg

SEQ ID NO: 159284 - DNA, 25 bp, Saccharomyces pastorianus
ttcccgctgatttggttcttttaca

SEQ ID NO: 159285 - DNA, 25 bp, Saccharomyces pastorianus
ttagttgcatttgccggtttccaca

SEQ ID NO: 159286 - DNA, 25 bp, Saccharomyces pastorianus
ctttgtgcatgtgtttttgccctgt

SEQ ID NO: 159287 - DNA, 25 bp, Saccharomyces pastorianus
tataacagcctctgctcctgagaaa

SEQ ID NO: 159288 - DNA, 25 bp, Saccharomyces pastorianus
tgggcgaatactgttctagcttcca

SEQ ID NO: 159289 - DNA, 25 bp, Saccharomyces pastorianus
tgttgccaatgttcacctattcagg

SEQ ID NO: 159290 - DNA, 25 bp, Saccharomyces pastorianus
taccgtggatgataggttctcccga

SEQ ID NO: 159291 - DNA, 25 bp, Saccharomyces pastorianus
tattcagggttaccggtgacgctcc

SEQ ID NO: 159292 - DNA, 25 bp, Saccharomyces pastorianus
cgcttaccgtgggactttcagaaga

SEQ ID NO: 159293 - DNA, 25 bp, Saccharomyces pastorianus
aataatcctcacagttttgccgaac

SEQ ID NO: 159294 - DNA, 25 bp, Saccharomyces pastorianus
ttgcgcaggtcggtgatgattctat

SEQ ID NO: 159295 - DNA, 25 bp, Saccharomyces pastorianus
gaaggtcctccgtgtttgagaacat

SEQ ID NO: 159296 - DNA, 25 bp, Saccharomyces pastorianus
gggcacatgcaactgatttccaaag

SEQ ID NO: 159297 - DNA, 25 bp, Saccharomyces pastorianus
aaagccttttcatcacttaacgaca

SEQ ID NO: 159298 - DNA, 25 bp, Saccharomyces pastorianus
gaacatttcgagatccattccttgg

SEQ ID NO: 159299 - DNA, 25 bp, Saccharomyces pastorianus
aagaccaactgtcaataccgtggat

SEQ ID NO: 159300 - DNA, 25 bp, Saccharomyces pastorianus
cgttgctcacaatactacttcttac

SEQ ID NO: 159301 - DNA, 25 bp, Saccharomyces pastorianus
agacgacttgtatttagctggtaaa

SEQ ID NO: 159302 - DNA, 25 bp, Saccharomyces pastorianus
ccgcctgggatttagttatggattg

SEQ ID NO: 159303 - DNA, 25 bp, Saccharomyces pastorianus
gtatacgcaattgctcctcaaacaa

SEQ ID NO: 159304 - DNA, 25 bp, Saccharomyces pastorianus
gacgtcgtttatattggcccttttg

SEQ ID NO: 159305 - DNA, 25 bp, Saccharomyces pastorianus
ggattgtatacgcaattgctcctca

SEQ ID NO: 159306 - DNA, 25 bp, Saccharomyces pastorianus
aacggcagttattcattcagtagga

SEQ ID NO: 159307 - DNA, 25 bp, Saccharomyces pastorianus
gctcctcaaacaattcagcagagtg

SEQ ID NO: 159308 - DNA, 25 bp, Saccharomyces pastorianus
agagtgctgtgacgtcgtttatatt

SEQ ID NO: 159309 - DNA, 25 bp, Saccharomyces pastorianus
ggaagttagtttattactttgctat

SEQ ID NO: 159310 - DNA, 25 bp, Saccharomyces pastorianus
actttgctatgatttgggatatcct

SEQ ID NO: 159311 - DNA, 25 bp, Saccharomyces pastorianus
gaaagcactcgcacgcatagtttta

SEQ ID NO: 159312 - DNA, 25 bp, Saccharomyces pastorianus
cttgaaagcactcgcacgcatagtt

SEQ ID NO: 159313 - DNA, 25 bp, Saccharomyces pastorianus
tgaagacccttgaaagcactcgcac

SEQ ID NO: 159314 - DNA, 25 bp, Saccharomyces pastorianus
tcgcacgcatagttttatatttttt

SEQ ID NO: 159315 - DNA, 25 bp, Saccharomyces pastorianus
gaagacccttgaaagcactcgcacg

SEQ ID NO: 159316 - DNA, 25 bp, Saccharomyces pastorianus
aaagcactcgcacgcatagttttat

SEQ ID NO: 159317 - DNA, 25 bp, Saccharomyces pastorianus
gcactcgcacgcatagttttatatt

SEQ ID NO: 159318 - DNA, 25 bp, Saccharomyces pastorianus
tgaaagcactcgcacgcatagtttt

SEQ ID NO: 159319 - DNA, 25 bp, Saccharomyces pastorianus
gatgaagacccttgaaagcactcgc

SEQ ID NO: 159320 - DNA, 25 bp, Saccharomyces pastorianus
agcactcgcacgcatagttttatat

SEQ ID NO: 159321 - DNA, 25 bp, Saccharomyces pastorianus
gacccttgaaagcactcgcacgcat

SEQ ID NO: 159322 - DNA, 25 bp, Saccharomyces pastorianus
caagattctgtttgggatgagggca

SEQ ID NO: 159323 - DNA, 25 bp, Saccharomyces pastorianus
tgagggcagagataatcctatactc

SEQ ID NO: 159324 - DNA, 25 bp, Saccharomyces pastorianus
cagcgcgacaagcaagggatcaaat

SEQ ID NO: 159325 - DNA, 25 bp, Saccharomyces pastorianus
atgcacaacttctctctaattatgg

SEQ ID NO: 159326 - DNA, 25 bp, Saccharomyces pastorianus
atgtggcatttagtagtccaactag

SEQ ID NO: 159327 - DNA, 25 bp, Saccharomyces pastorianus
gagataatcctatactcttggaaga

SEQ ID NO: 159328 - DNA, 25 bp, Saccharomyces pastorianus
tgaaaataaccagtctcaagattct

SEQ ID NO: 159329 - DNA, 25 bp, Saccharomyces pastorianus
agaaccagcgcgacaagcaagggat

SEQ ID NO: 159330 - DNA, 25 bp, Saccharomyces pastorianus
actcttggaagatgaagacccttga

SEQ ID NO: 159331 - DNA, 25 bp, Saccharomyces pastorianus
gggatcaaatgcacaacttctctct

SEQ ID NO: 159332 - DNA, 25 bp, Saccharomyces pastorianus
gggtattccaagaaccagcgcgaca

SEQ ID NO: 159333 - DNA, 25 bp, Saccharomyces pastorianus
gattctgacgttaatgtctccaggt

SEQ ID NO: 159334 - DNA, 25 bp, Saccharomyces pastorianus
atggatgttgattctgacgttaatg

SEQ ID NO: 159335 - DNA, 25 bp, Saccharomyces pastorianus
tctgacgttaatgtctccaggttaa

SEQ ID NO: 159336 - DNA, 25 bp, Saccharomyces pastorianus
agatgaactgcataaggtggcaaac

SEQ ID NO: 159337 - DNA, 25 bp, Saccharomyces pastorianus
aatgtctccaggttaagagatgaac

SEQ ID NO: 159338 - DNA, 25 bp, Saccharomyces pastorianus
gacgttaatgtctccaggttaagag

SEQ ID NO: 159339 - DNA, 25 bp, Saccharomyces pastorianus
gttgattctgacgttaatgtctcca

SEQ ID NO: 159340 - DNA, 25 bp, Saccharomyces pastorianus
ctgacgttaatgtctccaggttaag

SEQ ID NO: 159341 - DNA, 25 bp, Saccharomyces pastorianus
ctccaggttaagagatgaactgcat

SEQ ID NO: 159342 - DNA, 25 bp, Saccharomyces pastorianus
aaacgaggaaacagataccgccact

SEQ ID NO: 159343 - DNA, 25 bp, Saccharomyces pastorianus
ggatgttgattctgacgttaatgtc

SEQ ID NO: 159344 - DNA, 25 bp, Saccharomyces pastorianus
atatattatcggtgttcctttggta

SEQ ID NO: 159345 - DNA, 25 bp, Saccharomyces pastorianus
cacgagagcaattttttaccaactt

SEQ ID NO: 159346 - DNA, 25 bp, Saccharomyces pastorianus
aagagcatcttgacatttttcgaaa

SEQ ID NO: 159347 - DNA, 25 bp, Saccharomyces pastorianus
gatgctagatggatcatccccttat

SEQ ID NO: 159348 - DNA, 25 bp, Saccharomyces pastorianus
atgcatgaatcctgtctgttggaat

SEQ ID NO: 159349 - DNA, 25 bp, Saccharomyces pastorianus
atccccttatcctggtgatttccta

SEQ ID NO: 159350 - DNA, 25 bp, Saccharomyces pastorianus
gaaaacatgcccgaaaagatacctt

SEQ ID NO: 159351 - DNA, 25 bp, Saccharomyces pastorianus
catttcaaaaccaggcgcggatgtt

SEQ ID NO: 159352 - DNA, 25 bp, Saccharomyces pastorianus
gttatgatcagtcagcaactccaga

SEQ ID NO: 159353 - DNA, 25 bp, Saccharomyces pastorianus
tttggccgctgtactatatattatc

SEQ ID NO: 159354 - DNA, 25 bp, Saccharomyces pastorianus
gctttaacgattggtttggccgctg

SEQ ID NO: 159355 - DNA, 25 bp, Saccharomyces pastorianus
ttgtgtctaatctcatgggccgtaa

SEQ ID NO: 159356 - DNA, 25 bp, Saccharomyces pastorianus
gatagcagagattcccactttagcc

SEQ ID NO: 159357 - DNA, 25 bp, Saccharomyces pastorianus
ctctccgtagagtcatgatagcaga

SEQ ID NO: 159358 - DNA, 25 bp, Saccharomyces pastorianus
gccattgattcagtcgaagtcgaaa

SEQ ID NO: 159359 - DNA, 25 bp, Saccharomyces pastorianus
caaatactacggttttggccgatga

SEQ ID NO: 159360 - DNA, 25 bp, Saccharomyces pastorianus
agtactacaaacgtctacagcaagg

SEQ ID NO: 159361 - DNA, 25 bp, Saccharomyces pastorianus
attcccactttagccattgattcag

SEQ ID NO: 159362 - DNA, 25 bp, Saccharomyces pastorianus
atctaatgtggatttggctatggcc

SEQ ID NO: 159363 - DNA, 25 bp, Saccharomyces pastorianus
gctatggccaattctctccgtagag

SEQ ID NO: 159364 - DNA, 25 bp, Saccharomyces pastorianus
gttaacattgcaagcgttcggcgaa

SEQ ID NO: 159365 - DNA, 25 bp, Saccharomyces pastorianus
aacgtcgactttatactatctaatg

SEQ ID NO: 159366 - DNA, 25 bp, Saccharomyces pastorianus
acgcttgcaaatgggttaacaacca

SEQ ID NO: 159367 - DNA, 25 bp, Saccharomyces pastorianus
ttcacaagtgggtccctcaacaaaa

SEQ ID NO: 159368 - DNA, 25 bp, Saccharomyces pastorianus
actttattcacaagtgggtccctca

SEQ ID NO: 159369 - DNA, 25 bp, Saccharomyces pastorianus
atcttgtataataggatgcccaata

SEQ ID NO: 159370 - DNA, 25 bp, Saccharomyces pastorianus
ctgtagacgttgtagtatttcactt

SEQ ID NO: 159371 - DNA, 25 bp, Saccharomyces pastorianus
caaccaacttggaacactttattca

SEQ ID NO: 159372 - DNA, 25 bp, Saccharomyces pastorianus
caccgttaccttctttatcttgtat

SEQ ID NO: 159373 - DNA, 25 bp, Saccharomyces pastorianus
tagtatttcactttcgcgctttcag

SEQ ID NO: 159374 - DNA, 25 bp, Saccharomyces pastorianus
cagccgaacgcttgcaaatgggtta

SEQ ID NO: 159375 - DNA, 25 bp, Saccharomyces pastorianus
gcgctttcagccgaacgcttgcaaa

SEQ ID NO: 159376 - DNA, 25 bp, Saccharomyces pastorianus
gaacaccgttaccttctttatcttg

SEQ ID NO: 159377 - DNA, 25 bp, Saccharomyces pastorianus
gagagtctcacttattgagcgcttt

SEQ ID NO: 159378 - DNA, 25 bp, Saccharomyces pastorianus
gagcgctttcaataacggtggaagt

SEQ ID NO: 159379 - DNA, 25 bp, Saccharomyces pastorianus
gatggcatagtataccaggatgatc

SEQ ID NO: 159380 - DNA, 25 bp, Saccharomyces pastorianus
gacgtttatgttcctccaagtaaga

SEQ ID NO: 159381 - DNA, 25 bp, Saccharomyces pastorianus
aacagtggtgtatcgttgactctac

SEQ ID NO: 159382 - DNA, 25 bp, Saccharomyces pastorianus
ggtcattagattcaacgggcctagt

SEQ ID NO: 159383 - DNA, 25 bp, Saccharomyces pastorianus
gggcctagtgacgtttatgttcctc

SEQ ID NO: 159384 - DNA, 25 bp, Saccharomyces pastorianus
actctcaagggtgaatggtcatcag

SEQ ID NO: 159385 - DNA, 25 bp, Saccharomyces pastorianus
cggtggaagtggttctacaaacagt

SEQ ID NO: 159386 - DNA, 25 bp, Saccharomyces pastorianus
ggaatgatcgacaagcacgtcaaga

SEQ ID NO: 159387 - DNA, 25 bp, Saccharomyces pastorianus
ttgggaaggccagatcgcgtacact

SEQ ID NO: 159388 - DNA, 25 bp, Saccharomyces pastorianus
ttgcaccacttccatgattgggctt

SEQ ID NO: 159389 - DNA, 25 bp, Saccharomyces pastorianus
gtattgcaccacttccatgattggg

SEQ ID NO: 159390 - DNA, 25 bp, Saccharomyces pastorianus
atgtgtattgcaccacttccatgat

SEQ ID NO: 159391 - DNA, 25 bp, Saccharomyces pastorianus
gggcgtcacagtggaaaataacgac

SEQ ID NO: 159392 - DNA, 25 bp, Saccharomyces pastorianus
aaataacgacaggagaatctcggtg

SEQ ID NO: 159393 - DNA, 25 bp, Saccharomyces pastorianus
caccacttccatgattgggcttttt

SEQ ID NO: 159394 - DNA, 25 bp, Saccharomyces pastorianus
aatctcggtgtgtaagttggaatgt

SEQ ID NO: 159395 - DNA, 25 bp, Saccharomyces pastorianus
gaatgtgtattgcaccacttccatg

SEQ ID NO: 159396 - DNA, 25 bp, Saccharomyces pastorianus
gttggaatgtgtattgcaccacttc

SEQ ID NO: 159397 - DNA, 25 bp, Saccharomyces pastorianus
tttttcctggcgcaaaatgttgctt

SEQ ID NO: 159398 - DNA, 25 bp, Saccharomyces pastorianus
gagaatctcggtgtgtaagttggaa

SEQ ID NO: 159399 - DNA, 25 bp, Saccharomyces pastorianus
gaatcgtcagataggtggtaaaact

SEQ ID NO: 159400 - DNA, 25 bp, Saccharomyces pastorianus
gagcctaattagctcattatttcat

SEQ ID NO: 159401 - DNA, 25 bp, Saccharomyces pastorianus
cacccatacgagacattggccttat

SEQ ID NO: 159402 - DNA, 25 bp, Saccharomyces pastorianus
ttgaacgagacattggcttctgccc

SEQ ID NO: 159403 - DNA, 25 bp, Saccharomyces pastorianus
agacattggcttctgccctacatca

SEQ ID NO: 159404 - DNA, 25 bp, Saccharomyces pastorianus
ttatacgcagagagagaatcgtcag

SEQ ID NO: 159405 - DNA, 25 bp, Saccharomyces pastorianus
atacgagacattggccttatacgag

SEQ ID NO: 159406 - DNA, 25 bp, Saccharomyces pastorianus
tcaacatttttcttatacgcagaga

SEQ ID NO: 159407 - DNA, 25 bp, Saccharomyces pastorianus
cctacatcacccatacgagacattg

SEQ ID NO: 159408 - DNA, 25 bp, Saccharomyces pastorianus
aaaacttggagcctaattagctcat

SEQ ID NO: 159409 - DNA, 25 bp, Saccharomyces pastorianus
agctcattatttcatttgaacgaga

SEQ ID NO: 159410 - DNA, 25 bp, Saccharomyces pastorianus
gtttatcgcaatactcaaaggtcca

SEQ ID NO: 159411 - DNA, 25 bp, Saccharomyces pastorianus
attccataatgtcctcagtttccta

SEQ ID NO: 159412 - DNA, 25 bp, Saccharomyces pastorianus
aacgctgtcggtatcctaggaaata

SEQ ID NO: 159413 - DNA, 25 bp, Saccharomyces pastorianus
tgacttctaacaaccctcaattgct

SEQ ID NO: 159414 - DNA, 25 bp, Saccharomyces pastorianus
gctctatacagctctaagttgaagg

SEQ ID NO: 159415 - DNA, 25 bp, Saccharomyces pastorianus
gagagaagcattcgtgtccttaaat

SEQ ID NO: 159416 - DNA, 25 bp, Saccharomyces pastorianus
aattttggcaactccttgacttcta

SEQ ID NO: 159417 - DNA, 25 bp, Saccharomyces pastorianus
atgcgtgaagagattccccatatgg

SEQ ID NO: 159418 - DNA, 25 bp, Saccharomyces pastorianus
cagtttcctagacataatccacggg

SEQ ID NO: 159419 - DNA, 25 bp, Saccharomyces pastorianus
aactatcctttatttcacgtatcaa

SEQ ID NO: 159420 - DNA, 25 bp, Saccharomyces pastorianus
ggcatgcccggttacttaattgtta

SEQ ID NO: 159421 - DNA, 25 bp, Saccharomyces pastorianus
gacactaaaaagacgccattgagaa

SEQ ID NO: 159422 - DNA, 25 bp, Saccharomyces pastorianus
aaaagctcgtttgcttgcagctgtc

SEQ ID NO: 159423 - DNA, 25 bp, Saccharomyces pastorianus
gtgttttcctgacaaacgactcatt

SEQ ID NO: 159424 - DNA, 25 bp, Saccharomyces pastorianus
gtcaacttgtttagtgttttcctga

SEQ ID NO: 159425 - DNA, 25 bp, Saccharomyces pastorianus
aacactagcttggtcgattggcaaa

SEQ ID NO: 159426 - DNA, 25 bp, Saccharomyces pastorianus
cttctggtgcgaattgactcccata

SEQ ID NO: 159427 - DNA, 25 bp, Saccharomyces pastorianus
atcgattcttggtgtatctcctaat

SEQ ID NO: 159428 - DNA, 25 bp, Saccharomyces pastorianus
gggtcgtctcgttgaagatggcaaa

SEQ ID NO: 159429 - DNA, 25 bp, Saccharomyces pastorianus
gatgtggcattttcgagcagttgag

SEQ ID NO: 159430 - DNA, 25 bp, Saccharomyces pastorianus
ctttttggtctctcgatgtggcatt

SEQ ID NO: 159431 - DNA, 25 bp, Saccharomyces pastorianus
aaataccctttgacagtacatttgc

SEQ ID NO: 159432 - DNA, 25 bp, Saccharomyces pastorianus
ttctccgatcgtggtggtgctttca

SEQ ID NO: 159433 - DNA, 25 bp, Saccharomyces pastorianus
aatagcgcttctccgatcgtggtgg

SEQ ID NO: 159434 - DNA, 25 bp, Saccharomyces pastorianus
cttacatgttctggcaaggcttagc

SEQ ID NO: 159435 - DNA, 25 bp, Saccharomyces pastorianus
atctgcttacatgttctggcaaggc

SEQ ID NO: 159436 - DNA, 25 bp, Saccharomyces pastorianus
gtttgcatctgcttacatgttctgg

SEQ ID NO: 159437 - DNA, 25 bp, Saccharomyces pastorianus
cgatcgtggtggtgctttcaggctc

SEQ ID NO: 159438 - DNA, 25 bp, Saccharomyces pastorianus
ggaatagaaatactttcaaccaagt

SEQ ID NO: 159439 - DNA, 25 bp, Saccharomyces pastorianus
accaagtaggtgatgtcgtggtgta

SEQ ID NO: 159440 - DNA, 25 bp, Saccharomyces pastorianus
ctttcaaccaagtaggtgatgtcgt

SEQ ID NO: 159441 - DNA, 25 bp, Saccharomyces pastorianus
cgtttgctttttgtttgcatctgct

SEQ ID NO: 159442 - DNA, 25 bp, Saccharomyces pastorianus
actaatagcgcttctccgatcgtgg

SEQ ID NO: 159443 - DNA, 25 bp, Saccharomyces pastorianus
actgcccactaaacaataccgatgg

SEQ ID NO: 159444 - DNA, 25 bp, Saccharomyces pastorianus
gcactgcccactaaacaataccgat

SEQ ID NO: 159445 - DNA, 25 bp, Saccharomyces pastorianus
atgcactgcccactaaacaataccg

SEQ ID NO: 159446 - DNA, 25 bp, Saccharomyces pastorianus
cactgcccactaaacaataccgatg

SEQ ID NO: 159447 - DNA, 25 bp, Saccharomyces pastorianus
agaccgatgcactgcccactaaaca

SEQ ID NO: 159448 - DNA, 25 bp, Saccharomyces pastorianus
tgcactgcccactaaacaataccga

SEQ ID NO: 159449 - DNA, 25 bp, Saccharomyces pastorianus
taagaccgatgcactgcccactaaa

SEQ ID NO: 159450 - DNA, 25 bp, Saccharomyces pastorianus
cactaaacaataccgatgggaccat

SEQ ID NO: 159451 - DNA, 25 bp, Saccharomyces pastorianus
gatgcactgcccactaaacaatacc

SEQ ID NO: 159452 - DNA, 25 bp, Saccharomyces pastorianus
gggttcctaagaccgatgcactgcc

SEQ ID NO: 159453 - DNA, 25 bp, Saccharomyces pastorianus
cgatgcactgcccactaaacaatac

SEQ ID NO: 159454 - DNA, 25 bp, Saccharomyces pastorianus
tatagagaactcactgcgcctttac

SEQ ID NO: 159455 - DNA, 25 bp, Saccharomyces pastorianus
agactattcgaatcgcttacccagt

SEQ ID NO: 159456 - DNA, 25 bp, Saccharomyces pastorianus
gattttgacacgacccttcatagta

SEQ ID NO: 159457 - DNA, 25 bp, Saccharomyces pastorianus
gaaaatctggtacatccgcacggtc

SEQ ID NO: 159458 - DNA, 25 bp, Saccharomyces pastorianus
tcatccttttcttccaattttacac

SEQ ID NO: 159459 - DNA, 25 bp, Saccharomyces pastorianus
tattgggattttcatcctgcacttt

SEQ ID NO: 159460 - DNA, 25 bp, Saccharomyces pastorianus
gcttacccagtagcatgctctatag

SEQ ID NO: 159461 - DNA, 25 bp, Saccharomyces pastorianus
taagaaaggtgtctcctaccgcaca

SEQ ID NO: 159462 - DNA, 25 bp, Saccharomyces pastorianus
cgcacggtcaccttttagtagagat

SEQ ID NO: 159463 - DNA, 25 bp, Saccharomyces pastorianus
tttactcgcatccatttactcactg

SEQ ID NO: 159464 - DNA, 25 bp, Saccharomyces pastorianus
aataacatgccaacctcttcaaact

SEQ ID NO: 159465 - DNA, 25 bp, Saccharomyces pastorianus
tggccaacctacggtacgaacgagg

SEQ ID NO: 159466 - DNA, 25 bp, Saccharomyces pastorianus
tctggccaacctacggtacgaacga

SEQ ID NO: 159467 - DNA, 25 bp, Saccharomyces pastorianus
gtctggccaacctacggtacgaacg

SEQ ID NO: 159468 - DNA, 25 bp, Saccharomyces pastorianus
acggtacgaacgaggactgctttgc

SEQ ID NO: 159469 - DNA, 25 bp, Saccharomyces pastorianus
cctacggtacgaacgaggactgctt

SEQ ID NO: 159470 - DNA, 25 bp, Saccharomyces pastorianus
caacctacggtacgaacgaggactg

SEQ ID NO: 159471 - DNA, 25 bp, Saccharomyces pastorianus
acctacggtacgaacgaggactgct

SEQ ID NO: 159472 - DNA, 25 bp, Saccharomyces pastorianus
ctggccaacctacggtacgaacgag

SEQ ID NO: 159473 - DNA, 25 bp, Saccharomyces pastorianus
ctacggtacgaacgaggactgcttt

SEQ ID NO: 159474 - DNA, 25 bp, Saccharomyces pastorianus
atgagcttcttctatcatttggaaa

SEQ ID NO: 159475 - DNA, 25 bp, Saccharomyces pastorianus
tggaaacaatcctcattggtaccgt

SEQ ID NO: 159476 - DNA, 25 bp, Saccharomyces pastorianus
atcatttggaaacaatcctcattgg

SEQ ID NO: 159477 - DNA, 25 bp, Saccharomyces pastorianus
tcattggtaccgtaacgtggccaaa

SEQ ID NO: 159478 - DNA, 25 bp, Saccharomyces pastorianus
atcgtaacccatatcttcttgagga

SEQ ID NO: 159479 - DNA, 25 bp, Saccharomyces pastorianus
acaatcctcattggtaccgtaacgt

SEQ ID NO: 159480 - DNA, 25 bp, Saccharomyces pastorianus
aatcctcattggtaccgtaacgtgg

SEQ ID NO: 159481 - DNA, 25 bp, Saccharomyces pastorianus
tcctcattggtaccgtaacgtggcc

SEQ ID NO: 159482 - DNA, 25 bp, Saccharomyces pastorianus
acccatatcttcttgaggagagtca

SEQ ID NO: 159483 - DNA, 25 bp, Saccharomyces pastorianus
gaaacaatcctcattggtaccgtaa

SEQ ID NO: 159484 - DNA, 25 bp, Saccharomyces pastorianus
gtaacccatatcttcttgaggagag

SEQ ID NO: 159485 - DNA, 25 bp, Saccharomyces pastorianus
gatgatattccgtcgtccaaaagat

SEQ ID NO: 159486 - DNA, 25 bp, Saccharomyces pastorianus
aagagttcatgcctttcatgcgaag

SEQ ID NO: 159487 - DNA, 25 bp, Saccharomyces pastorianus
taattccagccgcttggcaggtagg

SEQ ID NO: 159488 - DNA, 25 bp, Saccharomyces pastorianus
aaatttctccggctttttctgtgag

SEQ ID NO: 159489 - DNA, 25 bp, Saccharomyces pastorianus
gaccatgccagttcatattatttta

SEQ ID NO: 159490 - DNA, 25 bp, Saccharomyces pastorianus
ggcaggtaggctaaattacacattt

SEQ ID NO: 159491 - DNA, 25 bp, Saccharomyces pastorianus
ggcccggtcacggaattattctcgg

SEQ ID NO: 159492 - DNA, 25 bp, Saccharomyces pastorianus
ttattctcgggataattccagccgc

SEQ ID NO: 159493 - DNA, 25 bp, Saccharomyces pastorianus
agagttcaggaacaggcccggtcac

SEQ ID NO: 159494 - DNA, 25 bp, Saccharomyces pastorianus
catgcctttcatgcgaagaagcgtt

SEQ ID NO: 159495 - DNA, 25 bp, Saccharomyces pastorianus
gtccaaaagattacgaccatgccag

SEQ ID NO: 159496 - DNA, 25 bp, Saccharomyces pastorianus
aaccaacccagctaaatctgcgtca

SEQ ID NO: 159497 - DNA, 25 bp, Saccharomyces pastorianus
ctgcgtcagctcgtggttcttattt

SEQ ID NO: 159498 - DNA, 25 bp, Saccharomyces pastorianus
agctcgtggttcttatttgcgtgtt

SEQ ID NO: 159499 - DNA, 25 bp, Saccharomyces pastorianus
taaatctgcgtcagctcgtggttct

SEQ ID NO: 159500 - DNA, 25 bp, Saccharomyces pastorianus
atctgcgtcagctcgtggttcttat

SEQ ID NO: 159501 - DNA, 25 bp, Saccharomyces pastorianus
gcgtcagctcgtggttcttatttgc

SEQ ID NO: 159502 - DNA, 25 bp, Saccharomyces pastorianus
aatctgcgtcagctcgtggttctta

SEQ ID NO: 159503 - DNA, 25 bp, Saccharomyces pastorianus
cagctcgtggttcttatttgcgtgt

SEQ ID NO: 159504 - DNA, 25 bp, Saccharomyces pastorianus
gtcagctcgtggttcttatttgcgt

SEQ ID NO: 159505 - DNA, 25 bp, Saccharomyces pastorianus
aacccagctaaatctgcgtcagctc

SEQ ID NO: 159506 - DNA, 25 bp, Saccharomyces pastorianus
gctaaatctgcgtcagctcgtggtt

SEQ ID NO: 159507 - DNA, 25 bp, Saccharomyces pastorianus
tcagctcgtggttcttatttgcgtg

SEQ ID NO: 159508 - DNA, 25 bp, Saccharomyces pastorianus
aaccaacccagctaaatctgcgtca

SEQ ID NO: 159509 - DNA, 25 bp, Saccharomyces pastorianus
ctgcgtcagctcgtggttcttattt

SEQ ID NO: 159510 - DNA, 25 bp, Saccharomyces pastorianus
agatacggtgctacttcaaccaacc

SEQ ID NO: 159511 - DNA, 25 bp, Saccharomyces pastorianus
agctcgtggttcttatttgcgtgtt

SEQ ID NO: 159512 - DNA, 25 bp, Saccharomyces pastorianus
taaatctgcgtcagctcgtggttct

SEQ ID NO: 159513 - DNA, 25 bp, Saccharomyces pastorianus
gcgtcagctcgtggttcttatttgc

SEQ ID NO: 159514 - DNA, 25 bp, Saccharomyces pastorianus
aatctgcgtcagctcgtggttctta

SEQ ID NO: 159515 - DNA, 25 bp, Saccharomyces pastorianus
actcctctattggtagaactgccca

SEQ ID NO: 159516 - DNA, 25 bp, Saccharomyces pastorianus
aacccagctaaatctgcgtcagctc

SEQ ID NO: 159517 - DNA, 25 bp, Saccharomyces pastorianus
gctaaatctgcgtcagctcgtggtt

SEQ ID NO: 159518 - DNA, 25 bp, Saccharomyces pastorianus
aaggatgaagcaactgttccgaaca

SEQ ID NO: 159519 - DNA, 25 bp, Saccharomyces pastorianus
ggttgccaatacagatactgctggt

SEQ ID NO: 159520 - DNA, 25 bp, Saccharomyces pastorianus
agcaacgctaatgcagctgtggcag

SEQ ID NO: 159521 - DNA, 25 bp, Saccharomyces pastorianus
gatgagtctctgaaggatgaagcaa

SEQ ID NO: 159522 - DNA, 25 bp, Saccharomyces pastorianus
acagatactgctggtgaagaatcgc

SEQ ID NO: 159523 - DNA, 25 bp, Saccharomyces pastorianus
taaacgcttccgtggacgtggacca

SEQ ID NO: 159524 - DNA, 25 bp, Saccharomyces pastorianus
ggtgaagaatcgcagcaacaagatg

SEQ ID NO: 159525 - DNA, 25 bp, Saccharomyces pastorianus
tgttccgaacacacgcgatgcagaa

SEQ ID NO: 159526 - DNA, 25 bp, Saccharomyces pastorianus
ggacgtggaccaacatggcaatgac

SEQ ID NO: 159527 - DNA, 25 bp, Saccharomyces pastorianus
tgacaacaatagtgatagcaacgct

SEQ ID NO: 159528 - DNA, 25 bp, Saccharomyces pastorianus
agcgaggcgataacggtaacggcaa

SEQ ID NO: 159529 - DNA, 25 bp, Saccharomyces pastorianus
gagcagatacgcagttcagtgatat

SEQ ID NO: 159530 - DNA, 25 bp, Saccharomyces pastorianus
gaagcttaacgtgcagctgtttaat

SEQ ID NO: 159531 - DNA, 25 bp, Saccharomyces pastorianus
attccggaatttgatgcagtggctg

SEQ ID NO: 159532 - DNA, 25 bp, Saccharomyces pastorianus
tcaagtatcattacagcgcctgaga

SEQ ID NO: 159533 - DNA, 25 bp, Saccharomyces pastorianus
aaggtggaacttttgcccaagcaga

SEQ ID NO: 159534 - DNA, 25 bp, Saccharomyces pastorianus
aatcacagcgactcaatcgacatag

SEQ ID NO: 159535 - DNA, 25 bp, Saccharomyces pastorianus
gaattgttccaatctttaccaagag

SEQ ID NO: 159536 - DNA, 25 bp, Saccharomyces pastorianus
taaaaagccgaagaccactcagagt

SEQ ID NO: 159537 - DNA, 25 bp, Saccharomyces pastorianus
cagtggctgaccttgaaacattgaa

SEQ ID NO: 159538 - DNA, 25 bp, Saccharomyces pastorianus
gacttgctgtttcgtcgggatgaaa

SEQ ID NO: 159539 - DNA, 25 bp, Saccharomyces pastorianus
ggaattacacccgagatcttagatt

SEQ ID NO: 159540 - DNA, 25 bp, Saccharomyces pastorianus
ggtggtgttaccgactacgcttcca

SEQ ID NO: 159541 - DNA, 25 bp, Saccharomyces pastorianus
atccaagctactactaagactaccg

SEQ ID NO: 159542 - DNA, 25 bp, Saccharomyces pastorianus
caacagccacttacagcggtggtgt

SEQ ID NO: 159543 - DNA, 25 bp, Saccharomyces pastorianus
ttctgtctctaccaagagtaccgct

SEQ ID NO: 159544 - DNA, 25 bp, Saccharomyces pastorianus
agctgcttcccaaattggtgatggt

SEQ ID NO: 159545 - DNA, 25 bp, Saccharomyces pastorianus
gtctctaccaagagtaccgctgccg

SEQ ID NO: 159546 - DNA, 25 bp, Saccharomyces pastorianus
aagtccaagctgctaccactactgc

SEQ ID NO: 159547 - DNA, 25 bp, Saccharomyces pastorianus
tactgcttctgtctctaccaagagt

SEQ ID NO: 159548 - DNA, 25 bp, Saccharomyces pastorianus
gcctatgctccatctgagccttggt

SEQ ID NO: 159549 - DNA, 25 bp, Saccharomyces pastorianus
gtgttaccgactacgcttccacctt

SEQ ID NO: 159550 - DNA, 25 bp, Saccharomyces pastorianus
acagcggtggtgttaccgactacgc

SEQ ID NO: 159551 - DNA, 25 bp, Saccharomyces pastorianus
aagaccaggatttcacccggtgaat

SEQ ID NO: 159552 - DNA, 25 bp, Saccharomyces pastorianus
tctccattgcatcctataaccattt

SEQ ID NO: 159553 - DNA, 25 bp, Saccharomyces pastorianus
gggtacattcattgcgggagacgat

SEQ ID NO: 159554 - DNA, 25 bp, Saccharomyces pastorianus
taggtggccataaccggatttccat

SEQ ID NO: 159555 - DNA, 25 bp, Saccharomyces pastorianus
ggtattaaaccggtctccattgcat

SEQ ID NO: 159556 - DNA, 25 bp, Saccharomyces pastorianus
agttgaccactgcattgtcatcaaa

SEQ ID NO: 159557 - DNA, 25 bp, Saccharomyces pastorianus
ggatttccattcacaatgtttgcga

SEQ ID NO: 159558 - DNA, 25 bp, Saccharomyces pastorianus
caagttgaagtctgttctggcccag

SEQ ID NO: 159559 - DNA, 25 bp, Saccharomyces pastorianus
ttctggcccagttcttagtggatgc

SEQ ID NO: 159560 - DNA, 25 bp, Saccharomyces pastorianus
ggagacgatctcaagtcgggacaaa

SEQ ID NO: 159561 - DNA, 25 bp, Saccharomyces pastorianus
gaagattctttactggctacgccct

SEQ ID NO: 159562 - DNA, 25 bp, Saccharomyces pastorianus
gagagctgttgtttgttgtccatca

SEQ ID NO: 159563 - DNA, 25 bp, Saccharomyces pastorianus
tgagattcctctgcagggtgagctt

SEQ ID NO: 159564 - DNA, 25 bp, Saccharomyces pastorianus
tggcctccgcatatttcacattcaa

SEQ ID NO: 159565 - DNA, 25 bp, Saccharomyces pastorianus
aaagagctcgttccgatcactaagt

SEQ ID NO: 159566 - DNA, 25 bp, Saccharomyces pastorianus
taagtacggccggaagagagctgtt

SEQ ID NO: 159567 - DNA, 25 bp, Saccharomyces pastorianus
atcgtcttcatcatatgctggaggc

SEQ ID NO: 159568 - DNA, 25 bp, Saccharomyces pastorianus
acattcaacactttcgattccgcat

SEQ ID NO: 159569 - DNA, 25 bp, Saccharomyces pastorianus
atttagccgccgaaacgcatacttg

SEQ ID NO: 159570 - DNA, 25 bp, Saccharomyces pastorianus
gttgtccatcaagggcacatcggca

SEQ ID NO: 159571 - DNA, 25 bp, Saccharomyces pastorianus
cggaacaccggcacgtatttcataa

SEQ ID NO: 159572 - DNA, 25 bp, Saccharomyces pastorianus
gctggaggctgtgcttgagattcct

SEQ ID NO: 159573 - DNA, 25 bp, Saccharomyces pastorianus
aaggagaatatatctggcgacatct

SEQ ID NO: 159574 - DNA, 25 bp, Saccharomyces pastorianus
ggcgacatctccaataattttgctg

SEQ ID NO: 159575 - DNA, 25 bp, Saccharomyces pastorianus
gaagggccaacaagcgcgttcaata

SEQ ID NO: 159576 - DNA, 25 bp, Saccharomyces pastorianus
ctggtggtgctgatagcgtcgacat

SEQ ID NO: 159577 - DNA, 25 bp, Saccharomyces pastorianus
gaagtgcgaaggactctagtaacaa

SEQ ID NO: 159578 - DNA, 25 bp, Saccharomyces pastorianus
gcgtcgacattggtgctatcagtaa

SEQ ID NO: 159579 - DNA, 25 bp, Saccharomyces pastorianus
ctatgtctataatcctagctctgcc

SEQ ID NO: 159580 - DNA, 25 bp, Saccharomyces pastorianus
aatcctagctctgccactggtggtg

SEQ ID NO: 159581 - DNA, 25 bp, Saccharomyces pastorianus
aattttgctgttactcattctgttc

SEQ ID NO: 159582 - DNA, 25 bp, Saccharomyces pastorianus
aatacaggccacaactatgtctata

SEQ ID NO: 159583 - DNA, 25 bp, Saccharomyces pastorianus
actcattctgttcaagaagggccaa

SEQ ID NO: 159584 - DNA, 25 bp, Saccharomyces pastorianus
gagtgagtctcttgtttctctacaa

SEQ ID NO: 159585 - DNA, 25 bp, Saccharomyces pastorianus
gaacctaactgtggctggcggttaa

SEQ ID NO: 159586 - DNA, 25 bp, Saccharomyces pastorianus
gagcattggtggtttcctttgttta

SEQ ID NO: 159587 - DNA, 25 bp, Saccharomyces pastorianus
aggaatatggtgctccaagctccca

SEQ ID NO: 159588 - DNA, 25 bp, Saccharomyces pastorianus
tagacgaatgtccttgcttccaaga

SEQ ID NO: 159589 - DNA, 25 bp, Saccharomyces pastorianus
caggtttccgggtttacgcattgag

SEQ ID NO: 159590 - DNA, 25 bp, Saccharomyces pastorianus
caagaatcttctgtcatggtccaac

SEQ ID NO: 159591 - DNA, 25 bp, Saccharomyces pastorianus
agagcacctccattacatcgaatta

SEQ ID NO: 159592 - DNA, 25 bp, Saccharomyces pastorianus
gtcaccctggtgtacaatttggaac

SEQ ID NO: 159593 - DNA, 25 bp, Saccharomyces pastorianus
gcctaccgtgcgttgttatctggaa

SEQ ID NO: 159594 - DNA, 25 bp, Saccharomyces pastorianus
gttcatgggcgttgtgtcaggtatt

SEQ ID NO: 159595 - DNA, 25 bp, Saccharomyces pastorianus
tgatgttcccgatagatgcccttaa

SEQ ID NO: 159596 - DNA, 25 bp, Saccharomyces pastorianus
gcgaaatcgctgtctgccaagaata

SEQ ID NO: 159597 - DNA, 25 bp, Saccharomyces pastorianus
gaaggaactctagccctatggaagg

SEQ ID NO: 159598 - DNA, 25 bp, Saccharomyces pastorianus
tgtcatactaggtgcgggacctgca

SEQ ID NO: 159599 - DNA, 25 bp, Saccharomyces pastorianus
cgcgccattgtaccatcaacttata

SEQ ID NO: 159600 - DNA, 25 bp, Saccharomyces pastorianus
ggatctacccgattatgaggcgctc

SEQ ID NO: 159601 - DNA, 25 bp, Saccharomyces pastorianus
tctcacatctctacttccgaaggaa

SEQ ID NO: 159602 - DNA, 25 bp, Saccharomyces pastorianus
gatgcccttaagacgcgaatacaat

SEQ ID NO: 159603 - DNA, 25 bp, Saccharomyces pastorianus
gaagggtgttcagtctgtcatacta

SEQ ID NO: 159604 - DNA, 25 bp, Saccharomyces pastorianus
attcaacaaggccaattccagcaat

SEQ ID NO: 159605 - DNA, 25 bp, Saccharomyces pastorianus
cagcaatacctatggatctacccga

SEQ ID NO: 159606 - DNA, 25 bp, Saccharomyces pastorianus
tacaaaatgcttcatcttctccggc

SEQ ID NO: 159607 - DNA, 25 bp, Saccharomyces pastorianus
gaagccagctagatccagcgtaaat

SEQ ID NO: 159608 - DNA, 25 bp, Saccharomyces pastorianus
gaaagtcagaattccactgctgtga

SEQ ID NO: 159609 - DNA, 25 bp, Saccharomyces pastorianus
gaattccactgctgtgacattacaa

SEQ ID NO: 159610 - DNA, 25 bp, Saccharomyces pastorianus
aaaactccatcaacagacctaagct

SEQ ID NO: 159611 - DNA, 25 bp, Saccharomyces pastorianus
gtagcgttggacctatacttccaaa

SEQ ID NO: 159612 - DNA, 25 bp, Saccharomyces pastorianus
gaaagagctggtctcttgaagccag

SEQ ID NO: 159613 - DNA, 25 bp, Saccharomyces pastorianus
atcaccacgaggacactttccaaaa

SEQ ID NO: 159614 - DNA, 25 bp, Saccharomyces pastorianus
aattattggttgacgcaagcgctaa

SEQ ID NO: 159615 - DNA, 25 bp, Saccharomyces pastorianus
agctgacttcaaatttgcaccacaa

SEQ ID NO: 159616 - DNA, 25 bp, Saccharomyces pastorianus
caccacaaggtgcactctttaaata

SEQ ID NO: 159617 - DNA, 25 bp, Saccharomyces pastorianus
ggtgcgagaagcaacgaatctgtat

SEQ ID NO: 159618 - DNA, 25 bp, Saccharomyces pastorianus
ggtcttagccgcacgtaaaacctgt

SEQ ID NO: 159619 - DNA, 25 bp, Saccharomyces pastorianus
gacaacggtcttagccgcacgtaaa

SEQ ID NO: 159620 - DNA, 25 bp, Saccharomyces pastorianus
acagttgatacagaacgtcggatca

SEQ ID NO: 159621 - DNA, 25 bp, Saccharomyces pastorianus
tgatacagaacgtcggatcaacaaa

SEQ ID NO: 159622 - DNA, 25 bp, Saccharomyces pastorianus
tagccgcacgtaaaacctgtgtggt

SEQ ID NO: 159623 - DNA, 25 bp, Saccharomyces pastorianus
aaccacttgacaacggtcttagccg

SEQ ID NO: 159624 - DNA, 25 bp, Saccharomyces pastorianus
ttgacaacggtcttagccgcacgta

SEQ ID NO: 159625 - DNA, 25 bp, Saccharomyces pastorianus
aaacctgtgtggtgcgagaagcaac

SEQ ID NO: 159626 - DNA, 25 bp, Saccharomyces pastorianus
gcaacgaatctgtatacagttgata

SEQ ID NO: 159627 - DNA, 25 bp, Saccharomyces pastorianus
atgaaccacttgacaacggtcttag

SEQ ID NO: 159628 - DNA, 25 bp, Saccharomyces pastorianus
tcaacgactgctactcgtgccaata

SEQ ID NO: 159629 - DNA, 25 bp, Saccharomyces pastorianus
gactgctactcgtgccaataatgaa

SEQ ID NO: 159630 - DNA, 25 bp, Saccharomyces pastorianus
gaaaagcatgaagccatcactgttt

SEQ ID NO: 159631 - DNA, 25 bp, Saccharomyces pastorianus
gaaactgaaaagcatgaagccatca

SEQ ID NO: 159632 - DNA, 25 bp, Saccharomyces pastorianus
aacgactgctactcgtgccaataat

SEQ ID NO: 159633 - DNA, 25 bp, Saccharomyces pastorianus
tgctactcgtgccaataatgaaact

SEQ ID NO: 159634 - DNA, 25 bp, Saccharomyces pastorianus
ctgaaaagcatgaagccatcactgt

SEQ ID NO: 159635 - DNA, 25 bp, Saccharomyces pastorianus
actgctactcgtgccaataatgaaa

SEQ ID NO: 159636 - DNA, 25 bp, Saccharomyces pastorianus
actcgtgccaataatgaaactgaaa

SEQ ID NO: 159637 - DNA, 25 bp, Saccharomyces pastorianus
gctactcgtgccaataatgaaactg

SEQ ID NO: 159638 - DNA, 25 bp, Saccharomyces pastorianus
acgactgctactcgtgccaataatg

SEQ ID NO: 159639 - DNA, 25 bp, Saccharomyces pastorianus
acccggcaaagttcactgatccata

SEQ ID NO: 159640 - DNA, 25 bp, Saccharomyces pastorianus
aaacaacccggcaaagttcactgat

SEQ ID NO: 159641 - DNA, 25 bp, Saccharomyces pastorianus
taaacaacccggcaaagttcactga

SEQ ID NO: 159642 - DNA, 25 bp, Saccharomyces pastorianus
aacccggcaaagttcactgatccat

SEQ ID NO: 159643 - DNA, 25 bp, Saccharomyces pastorianus
ccggcaaagttcactgatccatatg

SEQ ID NO: 159644 - DNA, 25 bp, Saccharomyces pastorianus
cccggcaaagttcactgatccatat

SEQ ID NO: 159645 - DNA, 25 bp, Saccharomyces pastorianus
cggcaaagttcactgatccatatga

SEQ ID NO: 159646 - DNA, 25 bp, Saccharomyces pastorianus
ggcaaagttcactgatccatatgag

SEQ ID NO: 159647 - DNA, 25 bp, Saccharomyces pastorianus
caacccggcaaagttcactgatcca

SEQ ID NO: 159648 - DNA, 25 bp, Saccharomyces pastorianus
aacaacccggcaaagttcactgatc

SEQ ID NO: 159649 - DNA, 25 bp, Saccharomyces pastorianus
acaacccggcaaagttcactgatcc

SEQ ID NO: 159650 - DNA, 25 bp, Saccharomyces pastorianus
acttttgggtttgatcatgctgcgt

SEQ ID NO: 159651 - DNA, 25 bp, Saccharomyces pastorianus
ggtcatataccgatggaatcccgaa

SEQ ID NO: 159652 - DNA, 25 bp, Saccharomyces pastorianus
tggcttattaaacatccgaacagaa

SEQ ID NO: 159653 - DNA, 25 bp, Saccharomyces pastorianus
gaagatgccgtagcttgtctaagaa

SEQ ID NO: 159654 - DNA, 25 bp, Saccharomyces pastorianus
ggaaactgaattctatcaagcttct

SEQ ID NO: 159655 - DNA, 25 bp, Saccharomyces pastorianus
gtggtccacaatctgtgaatctgat

SEQ ID NO: 159656 - DNA, 25 bp, Saccharomyces pastorianus
attcgaccccgtaagttgccagcag

SEQ ID NO: 159657 - DNA, 25 bp, Saccharomyces pastorianus
ttgggtccgatttgtggtccacaat

SEQ ID NO: 159658 - DNA, 25 bp, Saccharomyces pastorianus
ctgattaattatgtctcccctcaag

SEQ ID NO: 159659 - DNA, 25 bp, Saccharomyces pastorianus
catgctgcgtacctggcattgggaa

SEQ ID NO: 159660 - DNA, 25 bp, Saccharomyces pastorianus
tattgcgataaagttgggtccgatt

SEQ ID NO: 159661 - DNA, 25 bp, Saccharomyces pastorianus
gaagaaaagtcgtcgctctaagata

SEQ ID NO: 159662 - DNA, 25 bp, Saccharomyces pastorianus
aatttaccgcaagacggcctgatgc

SEQ ID NO: 159663 - DNA, 25 bp, Saccharomyces pastorianus
agatactcgtatttgcgcttgctgc

SEQ ID NO: 159664 - DNA, 25 bp, Saccharomyces pastorianus
ggcctgatgcttaacttagtcgtaa

SEQ ID NO: 159665 - DNA, 25 bp, Saccharomyces pastorianus
tgtaccatcagactcagacacagat

SEQ ID NO: 159666 - DNA, 25 bp, Saccharomyces pastorianus
agttgggagtagtacctctgtcctt

SEQ ID NO: 159667 - DNA, 25 bp, Saccharomyces pastorianus
ggtggccctctctcgcgaatgaaga

SEQ ID NO: 159668 - DNA, 25 bp, Saccharomyces pastorianus
ttacacacgcaccatcatacaagtt

SEQ ID NO: 159669 - DNA, 25 bp, Saccharomyces pastorianus
ataacccgaattctcatcacttaca

SEQ ID NO: 159670 - DNA, 25 bp, Saccharomyces pastorianus
gatgaaacttttccctacgacagaa

SEQ ID NO: 159671 - DNA, 25 bp, Saccharomyces pastorianus
gtctcacttacagcccttaaattta

SEQ ID NO: 159672 - DNA, 25 bp, Saccharomyces pastorianus
ctttacattctttgaaaggcagtgt

SEQ ID NO: 159673 - DNA, 25 bp, Saccharomyces pastorianus
atgtcggtgcctaataatgggccca

SEQ ID NO: 159674 - DNA, 25 bp, Saccharomyces pastorianus
ggcagtgttgttccagtgaaagact

SEQ ID NO: 159675 - DNA, 25 bp, Saccharomyces pastorianus
gccgtgagtgaatcttcagtaacaa

SEQ ID NO: 159676 - DNA, 25 bp, Saccharomyces pastorianus
atgggcccaaagacatttctttaca

SEQ ID NO: 159677 - DNA, 25 bp, Saccharomyces pastorianus
gttgttccagtgaaagactcaaata

SEQ ID NO: 159678 - DNA, 25 bp, Saccharomyces pastorianus
gtcggtgcctaataatgggcccaaa

SEQ ID NO: 159679 - DNA, 25 bp, Saccharomyces pastorianus
gtcagccgtgagtgaatcttcagta

SEQ ID NO: 159680 - DNA, 25 bp, Saccharomyces pastorianus
gaaaggcagtgttgttccagtgaaa

SEQ ID NO: 159681 - DNA, 25 bp, Saccharomyces pastorianus
aaaagtcagccgtgagtgaatcttc

SEQ ID NO: 159682 - DNA, 25 bp, Saccharomyces pastorianus
gtgaatcttcagtaacaaatagcaa

SEQ ID NO: 159683 - DNA, 25 bp, Saccharomyces pastorianus
gggctccttctgttgctaatgtagc

SEQ ID NO: 159684 - DNA, 25 bp, Saccharomyces pastorianus
caaaggccaagtatgagtctgcgca

SEQ ID NO: 159685 - DNA, 25 bp, Saccharomyces pastorianus
gctccttctgttgctaatgtagcaa

SEQ ID NO: 159686 - DNA, 25 bp, Saccharomyces pastorianus
ctctgtcaatgaagaaggaaatcgt

SEQ ID NO: 159687 - DNA, 25 bp, Saccharomyces pastorianus
ggccaagtatgagtctgcgcagatt

SEQ ID NO: 159688 - DNA, 25 bp, Saccharomyces pastorianus
agcatcgtcttttcctgttgttggt

SEQ ID NO: 159689 - DNA, 25 bp, Saccharomyces pastorianus
caagcatcgtcttttcctgttgttg

SEQ ID NO: 159690 - DNA, 25 bp, Saccharomyces pastorianus
atgagtctgcgcagattgataggca

SEQ ID NO: 159691 - DNA, 25 bp, Saccharomyces pastorianus
gtctgcgcagattgataggcagcag

SEQ ID NO: 159692 - DNA, 25 bp, Saccharomyces pastorianus
atcgtcttttcctgttgttggtggg

SEQ ID NO: 159693 - DNA, 25 bp, Saccharomyces pastorianus
atgtagcaactacctctgtcaatga

SEQ ID NO: 159694 - DNA, 25 bp, Saccharomyces pastorianus
gtatgtgccattgctttgattctgg

SEQ ID NO: 159695 - DNA, 25 bp, Saccharomyces pastorianus
gtcagaagactgtatgtgccattgc

SEQ ID NO: 159696 - DNA, 25 bp, Saccharomyces pastorianus
aaatggttgaccctgcttccttcta

SEQ ID NO: 159697 - DNA, 25 bp, Saccharomyces pastorianus
aactgcatgttgaacagctctcagg

SEQ ID NO: 159698 - DNA, 25 bp, Saccharomyces pastorianus
gcaatccaaatggttgaccctgctt

SEQ ID NO: 159699 - DNA, 25 bp, Saccharomyces pastorianus
tttctgtttccttcaattctaaaca

SEQ ID NO: 159700 - DNA, 25 bp, Saccharomyces pastorianus
aacagctctcaggtggtcagaagac

SEQ ID NO: 159701 - DNA, 25 bp, Saccharomyces pastorianus
ttgctttgattctggcaatccaaat

SEQ ID NO: 159702 - DNA, 25 bp, Saccharomyces pastorianus
tacaggtgtttcaatttctgtttcc

SEQ ID NO: 159703 - DNA, 25 bp, Saccharomyces pastorianus
ctgcttccttctatctgtttgatga

SEQ ID NO: 159704 - DNA, 25 bp, Saccharomyces pastorianus
aaattgatgctgcactcgacaagca

SEQ ID NO: 159705 - DNA, 25 bp, Saccharomyces pastorianus
ccacgaccacgaagcggtactgata

SEQ ID NO: 159706 - DNA, 25 bp, Saccharomyces pastorianus
tactgatagttattgtatgctcgac

SEQ ID NO: 159707 - DNA, 25 bp, Saccharomyces pastorianus
attgctatgcaagttccacgaccac

SEQ ID NO: 159708 - DNA, 25 bp, Saccharomyces pastorianus
gtgccataattctgttaggagcgga

SEQ ID NO: 159709 - DNA, 25 bp, Saccharomyces pastorianus
ctgtttttgcgcctagcaagtttca

SEQ ID NO: 159710 - DNA, 25 bp, Saccharomyces pastorianus
acagagactgtttttgcgcctagca

SEQ ID NO: 159711 - DNA, 25 bp, Saccharomyces pastorianus
gtatgctcgacattgttatatggaa

SEQ ID NO: 159712 - DNA, 25 bp, Saccharomyces pastorianus
gatatcgtttatcacagagactgtt

SEQ ID NO: 159713 - DNA, 25 bp, Saccharomyces pastorianus
aggtgccattgctatcgcattgcta

SEQ ID NO: 159714 - DNA, 25 bp, Saccharomyces pastorianus
ggaataccgtcactgatatcgttta

SEQ ID NO: 159715 - DNA, 25 bp, Saccharomyces pastorianus
attttgcattgccactgatcaccat

SEQ ID NO: 159716 - DNA, 25 bp, Saccharomyces pastorianus
tcacaagccgtaatccaactggacg

SEQ ID NO: 159717 - DNA, 25 bp, Saccharomyces pastorianus
gcatatgtgctgttattcccataac

SEQ ID NO: 159718 - DNA, 25 bp, Saccharomyces pastorianus
aactggacgatcttcgtcgccgtaa

SEQ ID NO: 159719 - DNA, 25 bp, Saccharomyces pastorianus
ttgcgccgtttaggattttgtactc

SEQ ID NO: 159720 - DNA, 25 bp, Saccharomyces pastorianus
attcccgtgctggatcctgttaaaa

SEQ ID NO: 159721 - DNA, 25 bp, Saccharomyces pastorianus
atcatgctttgcattccaagaacgc

SEQ ID NO: 159722 - DNA, 25 bp, Saccharomyces pastorianus
aacacaaagttatcctccaatccct

SEQ ID NO: 159723 - DNA, 25 bp, Saccharomyces pastorianus
ccaaagatattagagccagcggtca

SEQ ID NO: 159724 - DNA, 25 bp, Saccharomyces pastorianus
tcgccgtaaaagagttttgcgccgt

SEQ ID NO: 159725 - DNA, 25 bp, Saccharomyces pastorianus
caatcccttaaccaattccatgaga

SEQ ID NO: 159726 - DNA, 25 bp, Saccharomyces pastorianus
gaggttcccggatggtattcccgtg

SEQ ID NO: 159727 - DNA, 25 bp, Saccharomyces pastorianus
gaactcaaatagacaccagtgctac

SEQ ID NO: 159728 - DNA, 25 bp, Saccharomyces pastorianus
ccagtgctactaatgcggttttaat

SEQ ID NO: 159729 - DNA, 25 bp, Saccharomyces pastorianus
taatggatatattggttctaccgaa

SEQ ID NO: 159730 - DNA, 25 bp, Saccharomyces pastorianus
aagtttcaaaataacctcgctcaag

SEQ ID NO: 159731 - DNA, 25 bp, Saccharomyces pastorianus
aaacaggcgagattactatctgaaa

SEQ ID NO: 159732 - DNA, 25 bp, Saccharomyces pastorianus
gaaagcagtagcgaggatctattaa

SEQ ID NO: 159733 - DNA, 25 bp, Saccharomyces pastorianus
ataacctcgctcaagtaagaactca

SEQ ID NO: 159734 - DNA, 25 bp, Saccharomyces pastorianus
aagaaccaggatttgcacgagccaa

SEQ ID NO: 159735 - DNA, 25 bp, Saccharomyces pastorianus
gaccagagtttaatgagctgccgaa

SEQ ID NO: 159736 - DNA, 25 bp, Saccharomyces pastorianus
agggtcatgaccgtaccgaagaggt

SEQ ID NO: 159737 - DNA, 25 bp, Saccharomyces pastorianus
gaaggacctgtgcaagataatgaaa

SEQ ID NO: 159738 - DNA, 25 bp, Saccharomyces pastorianus
aagcacgccagaaagtgcggtgtac

SEQ ID NO: 159739 - DNA, 25 bp, Saccharomyces pastorianus
cttgcaggtctactacttttctact

SEQ ID NO: 159740 - DNA, 25 bp, Saccharomyces pastorianus
attgccttgcaggtctactactttt

SEQ ID NO: 159741 - DNA, 25 bp, Saccharomyces pastorianus
tgcggtgtactggtgcaacctttta

SEQ ID NO: 159742 - DNA, 25 bp, Saccharomyces pastorianus
cttgcattgccttgcaggtctacta

SEQ ID NO: 159743 - DNA, 25 bp, Saccharomyces pastorianus
aagtgcggtgtactggtgcaacctt

SEQ ID NO: 159744 - DNA, 25 bp, Saccharomyces pastorianus
gcaagccagatccaagcacgccaga

SEQ ID NO: 159745 - DNA, 25 bp, Saccharomyces pastorianus
acgaggccgcgcaagccagatccaa

SEQ ID NO: 159746 - DNA, 25 bp, Saccharomyces pastorianus
aaccttttatcgatttctcatcata

SEQ ID NO: 159747 - DNA, 25 bp, Saccharomyces pastorianus
ggtgtactggtgcaaccttttatcg

SEQ ID NO: 159748 - DNA, 25 bp, Saccharomyces pastorianus
gccagatccaagcacgccagaaagt

SEQ ID NO: 159749 - DNA, 25 bp, Saccharomyces pastorianus
ttttctacttacttggcacgaggcc

SEQ ID NO: 159750 - DNA, 25 bp, Saccharomyces pastorianus
ttgcattgccttgcaggtctactac

SEQ ID NO: 159751 - DNA, 25 bp, Saccharomyces pastorianus
aagcacgccagaaagtgcggtgtac

SEQ ID NO: 159752 - DNA, 25 bp, Saccharomyces pastorianus
cttgcaggtctactacttttctact

SEQ ID NO: 159753 - DNA, 25 bp, Saccharomyces pastorianus
attgccttgcaggtctactactttt

SEQ ID NO: 159754 - DNA, 25 bp, Saccharomyces pastorianus
tgccaagcttgcattgccttgcagg

SEQ ID NO: 159755 - DNA, 25 bp, Saccharomyces pastorianus
aagtgcggtgtactggtgcaacctt

SEQ ID NO: 159756 - DNA, 25 bp, Saccharomyces pastorianus
acgaggccgcgcaagccagatccaa

SEQ ID NO: 159757 - DNA, 25 bp, Saccharomyces pastorianus
aaccttttatcgatttctcatcata

SEQ ID NO: 159758 - DNA, 25 bp, Saccharomyces pastorianus
ggtgtactggtgcaaccttttatcg

SEQ ID NO: 159759 - DNA, 25 bp, Saccharomyces pastorianus
gccagatccaagcacgccagaaagt

SEQ ID NO: 159760 - DNA, 25 bp, Saccharomyces pastorianus
gaactcgccgttcaattttaaggat

SEQ ID NO: 159761 - DNA, 25 bp, Saccharomyces pastorianus
agttcctgcaattcaataatggcca

SEQ ID NO: 159762 - DNA, 25 bp, Saccharomyces pastorianus
tcaagcgttggagagttcctgcaat

SEQ ID NO: 159763 - DNA, 25 bp, Saccharomyces pastorianus
gctcgttggtaatgtacgcttttgc

SEQ ID NO: 159764 - DNA, 25 bp, Saccharomyces pastorianus
ggcacagtgatttcctcttatgggc

SEQ ID NO: 159765 - DNA, 25 bp, Saccharomyces pastorianus
gcatatcattttgaactcgccgttc

SEQ ID NO: 159766 - DNA, 25 bp, Saccharomyces pastorianus
tcaatgcggcagaaccttctaaaaa

SEQ ID NO: 159767 - DNA, 25 bp, Saccharomyces pastorianus
tttattcctgacaatgagtacgttc

SEQ ID NO: 159768 - DNA, 25 bp, Saccharomyces pastorianus
ggccagctatctatcacatgtaacg

SEQ ID NO: 159769 - DNA, 25 bp, Saccharomyces pastorianus
tcatagattccccttccaacataaa

SEQ ID NO: 159770 - DNA, 25 bp, Saccharomyces pastorianus
acgcttttgcagtgatacggacttt

SEQ ID NO: 159771 - DNA, 25 bp, Saccharomyces pastorianus
acttgattgcaatttatgacattat

SEQ ID NO: 159772 - DNA, 25 bp, Saccharomyces pastorianus
tggccttgggccttgaggtgctctt

SEQ ID NO: 159773 - DNA, 25 bp, Saccharomyces pastorianus
ttggtcccagttacctggccttggg

SEQ ID NO: 159774 - DNA, 25 bp, Saccharomyces pastorianus
gatgcaaacaaatcagtcttcttgg

SEQ ID NO: 159775 - DNA, 25 bp, Saccharomyces pastorianus
atgacattatattctgctgtttgca

SEQ ID NO: 159776 - DNA, 25 bp, Saccharomyces pastorianus
acccgccttctttgccatgataatt

SEQ ID NO: 159777 - DNA, 25 bp, Saccharomyces pastorianus
aaatcagtcttcttggtcccagtta

SEQ ID NO: 159778 - DNA, 25 bp, Saccharomyces pastorianus
gataatttggtcaatggaaagcaca

SEQ ID NO: 159779 - DNA, 25 bp, Saccharomyces pastorianus
ttgaggtgctcttggaccacccgcc

SEQ ID NO: 159780 - DNA, 25 bp, Saccharomyces pastorianus
gctgtttgcaggtatatctactttg

SEQ ID NO: 159781 - DNA, 25 bp, Saccharomyces pastorianus
gatacagcctagcaagtttgaaaac

SEQ ID NO: 159782 - DNA, 25 bp, Saccharomyces pastorianus
gcttttaatggccacgctttgggta

SEQ ID NO: 159783 - DNA, 25 bp, Saccharomyces pastorianus
gcagacgttcgcatttgtgacatat

SEQ ID NO: 159784 - DNA, 25 bp, Saccharomyces pastorianus
gggtactctaacaactttgcttgga

SEQ ID NO: 159785 - DNA, 25 bp, Saccharomyces pastorianus
tcaaggtacgcatttgtgcctcaat

SEQ ID NO: 159786 - DNA, 25 bp, Saccharomyces pastorianus
tgatctttctaccattttacctctc

SEQ ID NO: 159787 - DNA, 25 bp, Saccharomyces pastorianus
tttacctctcaagaacgcacattgg

SEQ ID NO: 159788 - DNA, 25 bp, Saccharomyces pastorianus
actcaatatcggtttgggtactcta

SEQ ID NO: 159789 - DNA, 25 bp, Saccharomyces pastorianus
ggatcaggcatacttgtaccactta

SEQ ID NO: 159790 - DNA, 25 bp, Saccharomyces pastorianus
gaaaccagggtccacgaacacaact

SEQ ID NO: 159791 - DNA, 25 bp, Saccharomyces pastorianus
gtgcctcaattgctgcttgttttag

SEQ ID NO: 159792 - DNA, 25 bp, Saccharomyces pastorianus
cacaacttacatcgctactcaatat

SEQ ID NO: 159793 - DNA, 25 bp, Saccharomyces pastorianus
gggctctttacgacaccagtaagta

SEQ ID NO: 159794 - DNA, 25 bp, Saccharomyces pastorianus
ataacagttccatggtagtgccctc

SEQ ID NO: 159795 - DNA, 25 bp, Saccharomyces pastorianus
ttataacagttctaccttccaggcc

SEQ ID NO: 159796 - DNA, 25 bp, Saccharomyces pastorianus
ataagaaagcgtttcctccttcgag

SEQ ID NO: 159797 - DNA, 25 bp, Saccharomyces pastorianus
atatcgtatgccttgcctactttta

SEQ ID NO: 159798 - DNA, 25 bp, Saccharomyces pastorianus
ttccaggccaagttcgacgtaaata

SEQ ID NO: 159799 - DNA, 25 bp, Saccharomyces pastorianus
gatgctgtctcacaaggtgtgccag

SEQ ID NO: 159800 - DNA, 25 bp, Saccharomyces pastorianus
aacggattcttcgaaggaccctgag

SEQ ID NO: 159801 - DNA, 25 bp, Saccharomyces pastorianus
gcttactggccataatttgctttac

SEQ ID NO: 159802 - DNA, 25 bp, Saccharomyces pastorianus
ggaccctgagccaaattccgaggat

SEQ ID NO: 159803 - DNA, 25 bp, Saccharomyces pastorianus
cgatatacatgacctttccagcgtg

SEQ ID NO: 159804 - DNA, 25 bp, Saccharomyces pastorianus
aatccaactcccgaatggttctatc

SEQ ID NO: 159805 - DNA, 25 bp, Saccharomyces pastorianus
aatcaatccaactcccgaatggttc

SEQ ID NO: 159806 - DNA, 25 bp, Saccharomyces pastorianus
atgattgtcggtgggcctaatgaaa

SEQ ID NO: 159807 - DNA, 25 bp, Saccharomyces pastorianus
ggattcactgtgatgattgtcggtg

SEQ ID NO: 159808 - DNA, 25 bp, Saccharomyces pastorianus
acaatcaatccaactcccgaatggt

SEQ ID NO: 159809 - DNA, 25 bp, Saccharomyces pastorianus
tgatgattgtcggtgggcctaatga

SEQ ID NO: 159810 - DNA, 25 bp, Saccharomyces pastorianus
tccaactcccgaatggttctatcaa

SEQ ID NO: 159811 - DNA, 25 bp, Saccharomyces pastorianus
ctgtgatgattgtcggtgggcctaa

SEQ ID NO: 159812 - DNA, 25 bp, Saccharomyces pastorianus
actgtgatgattgtcggtgggccta

SEQ ID NO: 159813 - DNA, 25 bp, Saccharomyces pastorianus
tgtcggtgggcctaatgaaagaacc

SEQ ID NO: 159814 - DNA, 25 bp, Saccharomyces pastorianus
caactcccgaatggttctatcaaaa

SEQ ID NO: 159815 - DNA, 25 bp, Saccharomyces pastorianus
tacgctgtgcgcaagctgctaagtt

SEQ ID NO: 159816 - DNA, 25 bp, Saccharomyces pastorianus
agatgttcaacttcggattccttcc

SEQ ID NO: 159817 - DNA, 25 bp, Saccharomyces pastorianus
gatctcacgctgtctatacgctgtg

SEQ ID NO: 159818 - DNA, 25 bp, Saccharomyces pastorianus
ataactcccgtctccatgatataaa

SEQ ID NO: 159819 - DNA, 25 bp, Saccharomyces pastorianus
aaagtagccaggcatcatccctttc

SEQ ID NO: 159820 - DNA, 25 bp, Saccharomyces pastorianus
atcaacggtatcttcgtcttcatgc

SEQ ID NO: 159821 - DNA, 25 bp, Saccharomyces pastorianus
agttcttcacttctgttatcttctg

SEQ ID NO: 159822 - DNA, 25 bp, Saccharomyces pastorianus
gaaggaaccttgtacccgagagagt

SEQ ID NO: 159823 - DNA, 25 bp, Saccharomyces pastorianus
gctataccgacatattttcccagga

SEQ ID NO: 159824 - DNA, 25 bp, Saccharomyces pastorianus
ttcgtcttcatgcttcagtcgtaat

SEQ ID NO: 159825 - DNA, 25 bp, Saccharomyces pastorianus
tgatgtttggaagccgtctcgagta

SEQ ID NO: 159826 - DNA, 25 bp, Saccharomyces pastorianus
tattagacgacttcttgcaaccacc

SEQ ID NO: 159827 - DNA, 25 bp, Saccharomyces pastorianus
ctctccttcatattctcagcataaa

SEQ ID NO: 159828 - DNA, 25 bp, Saccharomyces pastorianus
atttctactgctaggatgaggccca

SEQ ID NO: 159829 - DNA, 25 bp, Saccharomyces pastorianus
agcatattctgctattggcgccatg

SEQ ID NO: 159830 - DNA, 25 bp, Saccharomyces pastorianus
atactggatgagttcgtctctcctt

SEQ ID NO: 159831 - DNA, 25 bp, Saccharomyces pastorianus
aattccctcgctcaaagttcttctt

SEQ ID NO: 159832 - DNA, 25 bp, Saccharomyces pastorianus
aatagcacttcttcaaattccctcg

SEQ ID NO: 159833 - DNA, 25 bp, Saccharomyces pastorianus
gagtcacctaatccaaagttaccga

SEQ ID NO: 159834 - DNA, 25 bp, Saccharomyces pastorianus
aagcgccaaacgactctgtgggtga

SEQ ID NO: 159835 - DNA, 25 bp, Saccharomyces pastorianus
tggctcgccaagtgcttcagatata

SEQ ID NO: 159836 - DNA, 25 bp, Saccharomyces pastorianus
ggcgtctgaaccaatttctactgct

SEQ ID NO: 159837 - DNA, 25 bp, Saccharomyces pastorianus
tcttgggcattgcactcagacaata

SEQ ID NO: 159838 - DNA, 25 bp, Saccharomyces pastorianus
acataacctcatggaatcgcgctcg

SEQ ID NO: 159839 - DNA, 25 bp, Saccharomyces pastorianus
tatcttctattgaccgccacataac

SEQ ID NO: 159840 - DNA, 25 bp, Saccharomyces pastorianus
tattatcttctattgaccgccacat

SEQ ID NO: 159841 - DNA, 25 bp, Saccharomyces pastorianus
acctcatggaatcgcgctcgagaat

SEQ ID NO: 159842 - DNA, 25 bp, Saccharomyces pastorianus
ctattgaccgccacataacctcatg

SEQ ID NO: 159843 - DNA, 25 bp, Saccharomyces pastorianus
ggaatcgcgctcgagaatatagaat

SEQ ID NO: 159844 - DNA, 25 bp, Saccharomyces pastorianus
gtgtcttgggcattgcactcagaca

SEQ ID NO: 159845 - DNA, 25 bp, Saccharomyces pastorianus
ataacctcatggaatcgcgctcgag

SEQ ID NO: 159846 - DNA, 25 bp, Saccharomyces pastorianus
tattattatcttctattgaccgcca

SEQ ID NO: 159847 - DNA, 25 bp, Saccharomyces pastorianus
gggcattgcactcagacaataaaga

SEQ ID NO: 159848 - DNA, 25 bp, Saccharomyces pastorianus
atccatacccctgtttcaataagac

SEQ ID NO: 159849 - DNA, 25 bp, Saccharomyces pastorianus
taacgaaaacaactttgccttatct

SEQ ID NO: 159850 - DNA, 25 bp, Saccharomyces pastorianus
tgatccatacccctgtttcaataag

SEQ ID NO: 159851 - DNA, 25 bp, Saccharomyces pastorianus
gtctctagcacttactgagcaacta

SEQ ID NO: 159852 - DNA, 25 bp, Saccharomyces pastorianus
gcacttactgagcaactaacgaaaa

SEQ ID NO: 159853 - DNA, 25 bp, Saccharomyces pastorianus
tatccggtcgaatctttccctgatc

SEQ ID NO: 159854 - DNA, 25 bp, Saccharomyces pastorianus
gtgtctctagcacttactgagcaac

SEQ ID NO: 159855 - DNA, 25 bp, Saccharomyces pastorianus
gagactatccggtcgaatctttccc

SEQ ID NO: 159856 - DNA, 25 bp, Saccharomyces pastorianus
gatagagactatccggtcgaatctt

SEQ ID NO: 159857 - DNA, 25 bp, Saccharomyces pastorianus
ctgtttcaataagacagtgtctcta

SEQ ID NO: 159858 - DNA, 25 bp, Saccharomyces pastorianus
ggtcgaatctttccctgatccatac

SEQ ID NO: 159859 - DNA, 25 bp, Saccharomyces pastorianus
gccaaagcattgtctctatcggatt

SEQ ID NO: 159860 - DNA, 25 bp, Saccharomyces pastorianus
gaccctgtacatcaaacttttgtga

SEQ ID NO: 159861 - DNA, 25 bp, Saccharomyces pastorianus
gctcataatataggcgactccgtat

SEQ ID NO: 159862 - DNA, 25 bp, Saccharomyces pastorianus
gtaatgtcactatgggacctgaaca

SEQ ID NO: 159863 - DNA, 25 bp, Saccharomyces pastorianus
atgattacacgaacaacacacctag

SEQ ID NO: 159864 - DNA, 25 bp, Saccharomyces pastorianus
ggatacgctttactttatactcaat

SEQ ID NO: 159865 - DNA, 25 bp, Saccharomyces pastorianus
aagatctccattattgaccctgtac

SEQ ID NO: 159866 - DNA, 25 bp, Saccharomyces pastorianus
gaagtctctttaacacgtggtattt

SEQ ID NO: 159867 - DNA, 25 bp, Saccharomyces pastorianus
acacacctagttacctacctattga

SEQ ID NO: 159868 - DNA, 25 bp, Saccharomyces pastorianus
gtaacaggcctttgatttctttgat

SEQ ID NO: 159869 - DNA, 25 bp, Saccharomyces pastorianus
gcacgtttgttgttgcttccggaaa

SEQ ID NO: 159870 - DNA, 25 bp, Saccharomyces pastorianus
gaagacctgcggttcagaggccaac

SEQ ID NO: 159871 - DNA, 25 bp, Saccharomyces pastorianus
agaatggcgaagacctcatccgaat

SEQ ID NO: 159872 - DNA, 25 bp, Saccharomyces pastorianus
gctggtttcagcttggacactgcaa

SEQ ID NO: 159873 - DNA, 25 bp, Saccharomyces pastorianus
gttcttgcggtagtcaaaggtcatc

SEQ ID NO: 159874 - DNA, 25 bp, Saccharomyces pastorianus
gatcactgcatttggacacaaggct

SEQ ID NO: 159875 - DNA, 25 bp, Saccharomyces pastorianus
atacccggtgaaatatactcgctgt

SEQ ID NO: 159876 - DNA, 25 bp, Saccharomyces pastorianus
tcatccgaatattcccgacgcaaaa

SEQ ID NO: 159877 - DNA, 25 bp, Saccharomyces pastorianus
aatagccagttcaaaatacccggtg

SEQ ID NO: 159878 - DNA, 25 bp, Saccharomyces pastorianus
atgggtgaaacaacgttcttgcggt

SEQ ID NO: 159879 - DNA, 25 bp, Saccharomyces pastorianus
aaaggtcatcggacttgccagaatg

SEQ ID NO: 159880 - DNA, 25 bp, Saccharomyces pastorianus
gaggatgacaatctcagcgatcaag

SEQ ID NO: 159881 - DNA, 25 bp, Saccharomyces pastorianus
aagtatgtaggtggcttctccgatg

SEQ ID NO: 159882 - DNA, 25 bp, Saccharomyces pastorianus
aagttgggactatccattgcagaag

SEQ ID NO: 159883 - DNA, 25 bp, Saccharomyces pastorianus
aattcgtaacggcatctgatcgtat

SEQ ID NO: 159884 - DNA, 25 bp, Saccharomyces pastorianus
gaaatgtgccaataacccaaagtaa

SEQ ID NO: 159885 - DNA, 25 bp, Saccharomyces pastorianus
tgccattggctcatacatgttttaa

SEQ ID NO: 159886 - DNA, 25 bp, Saccharomyces pastorianus
agacgtcttttctttaacatttgag

SEQ ID NO: 159887 - DNA, 25 bp, Saccharomyces pastorianus
tcgtatacctgcaacgggtatctct

SEQ ID NO: 159888 - DNA, 25 bp, Saccharomyces pastorianus
aattagcttgctagggtcgcatgat

SEQ ID NO: 159889 - DNA, 25 bp, Saccharomyces pastorianus
gggtatctctactatcccattcaaa

SEQ ID NO: 159890 - DNA, 25 bp, Saccharomyces pastorianus
gatagtgatgatttgccattggctc

SEQ ID NO: 159891 - DNA, 25 bp, Saccharomyces pastorianus
ttctccgatgattccagagcggttt

SEQ ID NO: 159892 - DNA, 25 bp, Saccharomyces pastorianus
atgctgtgttgctgtaacgatctac

SEQ ID NO: 159893 - DNA, 25 bp, Saccharomyces pastorianus
gaacgcctacggataatttttcata

SEQ ID NO: 159894 - DNA, 25 bp, Saccharomyces pastorianus
tatacctacaatacgaacctgcctt

SEQ ID NO: 159895 - DNA, 25 bp, Saccharomyces pastorianus
ggccatgaattcctgagtactagac

SEQ ID NO: 159896 - DNA, 25 bp, Saccharomyces pastorianus
agatgcgatctcgtcttcgtcggca

SEQ ID NO: 159897 - DNA, 25 bp, Saccharomyces pastorianus
gaacctgccttattagagatcggaa

SEQ ID NO: 159898 - DNA, 25 bp, Saccharomyces pastorianus
gcggtgtcttatgagttggccaaac

SEQ ID NO: 159899 - DNA, 25 bp, Saccharomyces pastorianus
ggtttcacgcatcccgtcaataata

SEQ ID NO: 159900 - DNA, 25 bp, Saccharomyces pastorianus
ggcatcacactactggccatgaatt

SEQ ID NO: 159901 - DNA, 25 bp, Saccharomyces pastorianus
tattggctacttgtctaacctatca

SEQ ID NO: 159902 - DNA, 25 bp, Saccharomyces pastorianus
gattcaatcattacggcgaacgcct

SEQ ID NO: 159903 - DNA, 25 bp, Saccharomyces pastorianus
ttccgtcctttacactagcggctaa

SEQ ID NO: 159904 - DNA, 25 bp, Saccharomyces pastorianus
acgtgcgccttcctgatttgggtaa

SEQ ID NO: 159905 - DNA, 25 bp, Saccharomyces pastorianus
tagcggctaaggaccgttccgacgt

SEQ ID NO: 159906 - DNA, 25 bp, Saccharomyces pastorianus
gatgccgaagagttccgcttattgc

SEQ ID NO: 159907 - DNA, 25 bp, Saccharomyces pastorianus
gtgggacaccacaacataggcaatt

SEQ ID NO: 159908 - DNA, 25 bp, Saccharomyces pastorianus
atttgggtaacctgttcttagtatg

SEQ ID NO: 159909 - DNA, 25 bp, Saccharomyces pastorianus
gttccgcttattgcttttgctattt

SEQ ID NO: 159910 - DNA, 25 bp, Saccharomyces pastorianus
acagatccatctctaccgtcttttt

SEQ ID NO: 159911 - DNA, 25 bp, Saccharomyces pastorianus
tagcaactccttcgacacagatcca

SEQ ID NO: 159912 - DNA, 25 bp, Saccharomyces pastorianus
gacaggatttatcttcttcccctga

SEQ ID NO: 159913 - DNA, 25 bp, Saccharomyces pastorianus
tgctatttgagcaacttccgtcctt

SEQ ID NO: 159914 - DNA, 25 bp, Saccharomyces pastorianus
tgcctccacggcgtatggtgtaaga

SEQ ID NO: 159915 - DNA, 25 bp, Saccharomyces pastorianus
gatgattgttacgaaactcaacgat

SEQ ID NO: 159916 - DNA, 25 bp, Saccharomyces pastorianus
aatgcaaacagtggcggtggtacga

SEQ ID NO: 159917 - DNA, 25 bp, Saccharomyces pastorianus
gaaggccatgatgaacaatgagcaa

SEQ ID NO: 159918 - DNA, 25 bp, Saccharomyces pastorianus
gaaactcaacgatgtctcactgtat

SEQ ID NO: 159919 - DNA, 25 bp, Saccharomyces pastorianus
gatgtctcactgtatttcttaacaa

SEQ ID NO: 159920 - DNA, 25 bp, Saccharomyces pastorianus
aaagattcatctctcgtgaacggca

SEQ ID NO: 159921 - DNA, 25 bp, Saccharomyces pastorianus
atctctcgtgaacggcaatgcaaac

SEQ ID NO: 159922 - DNA, 25 bp, Saccharomyces pastorianus
ggtggtacgagcattaacggaacaa

SEQ ID NO: 159923 - DNA, 25 bp, Saccharomyces pastorianus
gaagctccctgttgaataaagattc

SEQ ID NO: 159924 - DNA, 25 bp, Saccharomyces pastorianus
gaactcaggatatcgacaacgccaa

SEQ ID NO: 159925 - DNA, 25 bp, Saccharomyces pastorianus
gctacctcacctgtttggatgacat

SEQ ID NO: 159926 - DNA, 25 bp, Saccharomyces pastorianus
aatgatatcctttcaaactcgcagg

SEQ ID NO: 159927 - DNA, 25 bp, Saccharomyces pastorianus
aactctttaaccaaacatcagggct

SEQ ID NO: 159928 - DNA, 25 bp, Saccharomyces pastorianus
gagcaacctcctacaaagcaagcga

SEQ ID NO: 159929 - DNA, 25 bp, Saccharomyces pastorianus
gtgacaagactttaccgggtggcta

SEQ ID NO: 159930 - DNA, 25 bp, Saccharomyces pastorianus
tttagactttctatgccgcctttaa

SEQ ID NO: 159931 - DNA, 25 bp, Saccharomyces pastorianus
gtgactgctgacgagttaagggctt

SEQ ID NO: 159932 - DNA, 25 bp, Saccharomyces pastorianus
agttcagtgaaaaccaacaccgcga

SEQ ID NO: 159933 - DNA, 25 bp, Saccharomyces pastorianus
taagtgtcgaacatcctcctaggaa

SEQ ID NO: 159934 - DNA, 25 bp, Saccharomyces pastorianus
ggaatcaagtttacctccagagcaa

SEQ ID NO: 159935 - DNA, 25 bp, Saccharomyces pastorianus
ttaagggcttggtgctataaacgaa

SEQ ID NO: 159936 - DNA, 25 bp, Saccharomyces pastorianus
aattcttcagcaacagtctttaagt

SEQ ID NO: 159937 - DNA, 25 bp, Saccharomyces pastorianus
agctctaaatctgttggccaaaact

SEQ ID NO: 159938 - DNA, 25 bp, Saccharomyces pastorianus
gtctttaagttgaacagagctctaa

SEQ ID NO: 159939 - DNA, 25 bp, Saccharomyces pastorianus
agatgtcccttagttgctctagagt

SEQ ID NO: 159940 - DNA, 25 bp, Saccharomyces pastorianus
gcttcctctggcttagtggcaaatt

SEQ ID NO: 159941 - DNA, 25 bp, Saccharomyces pastorianus
ctgttttgccagacttgttgactaa

SEQ ID NO: 159942 - DNA, 25 bp, Saccharomyces pastorianus
atctgttggccaaaactgttttgcc

SEQ ID NO: 159943 - DNA, 25 bp, Saccharomyces pastorianus
gtggcaaattcttcagcaacagtct

SEQ ID NO: 159944 - DNA, 25 bp, Saccharomyces pastorianus
gacttgttgactaagatgtccctta

SEQ ID NO: 159945 - DNA, 25 bp, Saccharomyces pastorianus
gctctagagtgcattcatcgacgtt

SEQ ID NO: 159946 - DNA, 25 bp, Saccharomyces pastorianus
ttcttggcttcctctggcttagtgg

SEQ ID NO: 159947 - DNA, 25 bp, Saccharomyces pastorianus
gaccaaacttcccatgattgtcgtt

SEQ ID NO: 159948 - DNA, 25 bp, Saccharomyces pastorianus
tgcgtcgggtgccattatcacggaa

SEQ ID NO: 159949 - DNA, 25 bp, Saccharomyces pastorianus
gttccaaaactgcatcatcgacact

SEQ ID NO: 159950 - DNA, 25 bp, Saccharomyces pastorianus
gtacgcctgttccattctgtataag

SEQ ID NO: 159951 - DNA, 25 bp, Saccharomyces pastorianus
taccggagacggattcgacgaattt

SEQ ID NO: 159952 - DNA, 25 bp, Saccharomyces pastorianus
ttatcacggaatcttttgcctccag

SEQ ID NO: 159953 - DNA, 25 bp, Saccharomyces pastorianus
gacactccaggccaaatcgaatgtt

SEQ ID NO: 159954 - DNA, 25 bp, Saccharomyces pastorianus
ctccgggtacatgagctcattggtc

SEQ ID NO: 159955 - DNA, 25 bp, Saccharomyces pastorianus
gaattctattcccagctagacgtcg

SEQ ID NO: 159956 - DNA, 25 bp, Saccharomyces pastorianus
ggtcaattctatgtcactgatgctt

SEQ ID NO: 159957 - DNA, 25 bp, Saccharomyces pastorianus
cagctttcccacagtgattgcatat

SEQ ID NO: 159958 - DNA, 25 bp, Saccharomyces pastorianus
gagcctccagtttcaggaggttgat

SEQ ID NO: 159959 - DNA, 25 bp, Saccharomyces pastorianus
gatatctatttcacaattctaatgc

SEQ ID NO: 159960 - DNA, 25 bp, Saccharomyces pastorianus
ttcacaattctaatgctactgattt

SEQ ID NO: 159961 - DNA, 25 bp, Saccharomyces pastorianus
attctaatgctactgatttacaaaa

SEQ ID NO: 159962 - DNA, 25 bp, Saccharomyces pastorianus
cattagcatttggagttagatatct

SEQ ID NO: 159963 - DNA, 25 bp, Saccharomyces pastorianus
aatagccctcatctcattagcattt

SEQ ID NO: 159964 - DNA, 25 bp, Saccharomyces pastorianus
gatattcgcgataatagccctcatc

SEQ ID NO: 159965 - DNA, 25 bp, Saccharomyces pastorianus
agccctcatctcattagcatttgga

SEQ ID NO: 159966 - DNA, 25 bp, Saccharomyces pastorianus
caggaggttgatgatattcgcgata

SEQ ID NO: 159967 - DNA, 25 bp, Saccharomyces pastorianus
acaaaaagagcctccagtttcagga

SEQ ID NO: 159968 - DNA, 25 bp, Saccharomyces pastorianus
gcgataatagccctcatctcattag

SEQ ID NO: 159969 - DNA, 25 bp, Saccharomyces pastorianus
gacggcagagttcattgttgtcttt

SEQ ID NO: 159970 - DNA, 25 bp, Saccharomyces pastorianus
gactacattcgccaccaatatgatg

SEQ ID NO: 159971 - DNA, 25 bp, Saccharomyces pastorianus
gcaggttgtagacacttcgacgaca

SEQ ID NO: 159972 - DNA, 25 bp, Saccharomyces pastorianus
gggattcggtgattctctcgacaat

SEQ ID NO: 159973 - DNA, 25 bp, Saccharomyces pastorianus
gtgttgataatttccctttcgatga

SEQ ID NO: 159974 - DNA, 25 bp, Saccharomyces pastorianus
ttacccacagatacgtccacagaaa

SEQ ID NO: 159975 - DNA, 25 bp, Saccharomyces pastorianus
tataaatactttgtgcggtcagcag

SEQ ID NO: 159976 - DNA, 25 bp, Saccharomyces pastorianus
tcgacgacaatcttgttacccacag

SEQ ID NO: 159977 - DNA, 25 bp, Saccharomyces pastorianus
atttaatcaacccaactggccacgg

SEQ ID NO: 159978 - DNA, 25 bp, Saccharomyces pastorianus
gaggtataaccttcactgtgatgat

SEQ ID NO: 159979 - DNA, 25 bp, Saccharomyces pastorianus
atatcatcgatactccgggattcgg

SEQ ID NO: 159980 - DNA, 25 bp, Saccharomyces pastorianus
acgcttctaaccgtgcattgcaaga

SEQ ID NO: 159981 - DNA, 25 bp, Saccharomyces pastorianus
aagaggcctatggacgttgcatttc

SEQ ID NO: 159982 - DNA, 25 bp, Saccharomyces pastorianus
gaacgtactaagtccaatcgagccc

SEQ ID NO: 159983 - DNA, 25 bp, Saccharomyces pastorianus
agtatcggatcttttctggcgggtc

SEQ ID NO: 159984 - DNA, 25 bp, Saccharomyces pastorianus
atgctgcgcattcttcccaaggaga

SEQ ID NO: 159985 - DNA, 25 bp, Saccharomyces pastorianus
gggtccaatgcgcaaagctcgttga

SEQ ID NO: 159986 - DNA, 25 bp, Saccharomyces pastorianus
agttgcctcatctaagactatcgga

SEQ ID NO: 159987 - DNA, 25 bp, Saccharomyces pastorianus
gaatacgtttctcgtaacgcttcta

SEQ ID NO: 159988 - DNA, 25 bp, Saccharomyces pastorianus
gtacattattttgccctccaattca

SEQ ID NO: 159989 - DNA, 25 bp, Saccharomyces pastorianus
aagctcgttgatacagacactggac

SEQ ID NO: 159990 - DNA, 25 bp, Saccharomyces pastorianus
actggacatccttttgggcgtgaaa

SEQ ID NO: 159991 - DNA, 25 bp, Saccharomyces pastorianus
gcagaagcctcgcaacttaaagctt

SEQ ID NO: 159992 - DNA, 25 bp, Saccharomyces pastorianus
gcctcgcaacttaaagcttttcagt

SEQ ID NO: 159993 - DNA, 25 bp, Saccharomyces pastorianus
agcttttcagttgtttcttctcggt

SEQ ID NO: 159994 - DNA, 25 bp, Saccharomyces pastorianus
ttttcagttgtttcttctcggtcat

SEQ ID NO: 159995 - DNA, 25 bp, Saccharomyces pastorianus
cttttcagttgtttcttctcggtca

SEQ ID NO: 159996 - DNA, 25 bp, Saccharomyces pastorianus
gaagcctcgcaacttaaagcttttc

SEQ ID NO: 159997 - DNA, 25 bp, Saccharomyces pastorianus
tgatgcagaagcctcgcaacttaaa

SEQ ID NO: 159998 - DNA, 25 bp, Saccharomyces pastorianus
aaagcttttcagttgtttcttctcg

SEQ ID NO: 159999 - DNA, 25 bp, Saccharomyces pastorianus
aagcttttcagttgtttcttctcgg

SEQ ID NO: 160000 - DNA, 25 bp, Saccharomyces pastorianus
gttgatgcagaagcctcgcaactta

SEQ ID NO: 160001 - DNA, 25 bp, Saccharomyces pastorianus
atgcagaagcctcgcaacttaaagc

SEQ ID NO: 160002 - DNA, 25 bp, Saccharomyces pastorianus
ttttggatctacaatttcccctaga

SEQ ID NO: 160003 - DNA, 25 bp, Saccharomyces pastorianus
tcaagaagaccgtccttgtttttct

SEQ ID NO: 160004 - DNA, 25 bp, Saccharomyces pastorianus
atggaaaacttcacgctgccttaga

SEQ ID NO: 160005 - DNA, 25 bp, Saccharomyces pastorianus
atgatgaatccgcatctacgttcca

SEQ ID NO: 160006 - DNA, 25 bp, Saccharomyces pastorianus
tgcacaatggcaactggtcctgaaa

SEQ ID NO: 160007 - DNA, 25 bp, Saccharomyces pastorianus
tgattctcagcctatttccaaggaa

SEQ ID NO: 160008 - DNA, 25 bp, Saccharomyces pastorianus
agtaccagatcctcttcattatcat

SEQ ID NO: 160009 - DNA, 25 bp, Saccharomyces pastorianus
tattgattctcagcctgattctcag

SEQ ID NO: 160010 - DNA, 25 bp, Saccharomyces pastorianus
ctacgttccactcatcattcaataa

SEQ ID NO: 160011 - DNA, 25 bp, Saccharomyces pastorianus
agaagatggtttcttcctctttcct

SEQ ID NO: 160012 - DNA, 25 bp, Saccharomyces pastorianus
tgacaaaattgcctcatctcagctg

SEQ ID NO: 160013 - DNA, 25 bp, Saccharomyces pastorianus
gaataagctcagttccgccgacgga

SEQ ID NO: 160014 - DNA, 25 bp, Saccharomyces pastorianus
gtgggcactcaataccatccagagt

SEQ ID NO: 160015 - DNA, 25 bp, Saccharomyces pastorianus
ggacgagacactactagctcctgaa

SEQ ID NO: 160016 - DNA, 25 bp, Saccharomyces pastorianus
aaaggccatccatactacgtgggca

SEQ ID NO: 160017 - DNA, 25 bp, Saccharomyces pastorianus
gtgttggaaccatcaagaccgtttt

SEQ ID NO: 160018 - DNA, 25 bp, Saccharomyces pastorianus
atggagtctcgtggctttatttttg

SEQ ID NO: 160019 - DNA, 25 bp, Saccharomyces pastorianus
tttcttggtgtctgtcttggattac

SEQ ID NO: 160020 - DNA, 25 bp, Saccharomyces pastorianus
tacaagttgccgctatcgagttcgc

SEQ ID NO: 160021 - DNA, 25 bp, Saccharomyces pastorianus
gagttcgcccgcaatgtgataggcc

SEQ ID NO: 160022 - DNA, 25 bp, Saccharomyces pastorianus
tgggtttgaggcctaccattttcca

SEQ ID NO: 160023 - DNA, 25 bp, Saccharomyces pastorianus
gaaggtatgattcttgctgccaaat

SEQ ID NO: 160024 - DNA, 25 bp, Saccharomyces pastorianus
aagtgggacatgtgttgctcgcttc

SEQ ID NO: 160025 - DNA, 25 bp, Saccharomyces pastorianus
atgctgcattgtgcgaggaggtata

SEQ ID NO: 160026 - DNA, 25 bp, Saccharomyces pastorianus
gctcgcttccagtcgtcagtacgaa

SEQ ID NO: 160027 - DNA, 25 bp, Saccharomyces pastorianus
gtcagtacgaacaccagctagcgaa

SEQ ID NO: 160028 - DNA, 25 bp, Saccharomyces pastorianus
agctagcgaaccatcggcagagaaa

SEQ ID NO: 160029 - DNA, 25 bp, Saccharomyces pastorianus
cacgtctcctgtggcaaagtgggac

SEQ ID NO: 160030 - DNA, 25 bp, Saccharomyces pastorianus
cgagctaagggaagagttctctgca

SEQ ID NO: 160031 - DNA, 25 bp, Saccharomyces pastorianus
caccgggccagtccaaagtagacct

SEQ ID NO: 160032 - DNA, 25 bp, Saccharomyces pastorianus
gtatatgttagtcaggccacgtctc

SEQ ID NO: 160033 - DNA, 25 bp, Saccharomyces pastorianus
gtggcttgaagcgatcaacgagcta

SEQ ID NO: 160034 - DNA, 25 bp, Saccharomyces pastorianus
aagaatacctgccagagacctcgct

SEQ ID NO: 160035 - DNA, 25 bp, Saccharomyces pastorianus
ctattattcgtctcttgaaggcctc

SEQ ID NO: 160036 - DNA, 25 bp, Saccharomyces pastorianus
cttgaaggcctctcgtttaaatttg

SEQ ID NO: 160037 - DNA, 25 bp, Saccharomyces pastorianus
gctgttttcattcagtcgatttaaa

SEQ ID NO: 160038 - DNA, 25 bp, Saccharomyces pastorianus
gtattggcgcagtcacgtatcagga

SEQ ID NO: 160039 - DNA, 25 bp, Saccharomyces pastorianus
gagagcaatacaacgcgccgaatca

SEQ ID NO: 160040 - DNA, 25 bp, Saccharomyces pastorianus
aacttattttcttcactggtaggtg

SEQ ID NO: 160041 - DNA, 25 bp, Saccharomyces pastorianus
atgccagccgcctattgagagtgat

SEQ ID NO: 160042 - DNA, 25 bp, Saccharomyces pastorianus
gtatcaggacttgccatgcggtatt

SEQ ID NO: 160043 - DNA, 25 bp, Saccharomyces pastorianus
ggtaggtgctgattgctgttttcat

SEQ ID NO: 160044 - DNA, 25 bp, Saccharomyces pastorianus
ttaaatttgcccctagagtccctat

SEQ ID NO: 160045 - DNA, 25 bp, Saccharomyces pastorianus
ggatgcatggtcagttgacgactat

SEQ ID NO: 160046 - DNA, 25 bp, Saccharomyces pastorianus
ttcatcttccttctatcatacctaa

SEQ ID NO: 160047 - DNA, 25 bp, Saccharomyces pastorianus
gtatgggtttcattcgacgcatgca

SEQ ID NO: 160048 - DNA, 25 bp, Saccharomyces pastorianus
gttattatctatctccatggtcgga

SEQ ID NO: 160049 - DNA, 25 bp, Saccharomyces pastorianus
tattctgaccctatttcccatagtt

SEQ ID NO: 160050 - DNA, 25 bp, Saccharomyces pastorianus
agaggcgtcgtgatagcgtcatgat

SEQ ID NO: 160051 - DNA, 25 bp, Saccharomyces pastorianus
acgacgatgttctcactttgtcttt

SEQ ID NO: 160052 - DNA, 25 bp, Saccharomyces pastorianus
atccaattttttcagctcaaggcaa

SEQ ID NO: 160053 - DNA, 25 bp, Saccharomyces pastorianus
taatatcgattcaggagccttcccc

SEQ ID NO: 160054 - DNA, 25 bp, Saccharomyces pastorianus
gatttgttatctccgttttctgtcc

SEQ ID NO: 160055 - DNA, 25 bp, Saccharomyces pastorianus
tttccccggcgaaactgattctaat

SEQ ID NO: 160056 - DNA, 25 bp, Saccharomyces pastorianus
gtcccttcagtatctcaagtgcttt

SEQ ID NO: 160057 - DNA, 25 bp, Saccharomyces pastorianus
aaaccattctgctacctcattaaat

SEQ ID NO: 160058 - DNA, 25 bp, Saccharomyces pastorianus
gcttcccgaatactataccgtctaa

SEQ ID NO: 160059 - DNA, 25 bp, Saccharomyces pastorianus
atagtaatatcgatcctgctgccat

SEQ ID NO: 160060 - DNA, 25 bp, Saccharomyces pastorianus
gatttgggctgcttcagtcatgata

SEQ ID NO: 160061 - DNA, 25 bp, Saccharomyces pastorianus
ggagggtacatgtctagccaccatt

SEQ ID NO: 160062 - DNA, 25 bp, Saccharomyces pastorianus
gtctaattctactacggcttctaat

SEQ ID NO: 160063 - DNA, 25 bp, Saccharomyces pastorianus
ttcctcttccacgatcaatttcaat

SEQ ID NO: 160064 - DNA, 25 bp, Saccharomyces pastorianus
ggtccatctttaaccgatcttttga

SEQ ID NO: 160065 - DNA, 25 bp, Saccharomyces pastorianus
tttatttattctccaccttcatcaa

SEQ ID NO: 160066 - DNA, 25 bp, Saccharomyces pastorianus
gtatctcttaagtagcggtccatct

SEQ ID NO: 160067 - DNA, 25 bp, Saccharomyces pastorianus
atgagcagccgcttatgtcactatc

SEQ ID NO: 160068 - DNA, 25 bp, Saccharomyces pastorianus
gccatttcccaaaggttatttctct

SEQ ID NO: 160069 - DNA, 25 bp, Saccharomyces pastorianus
aatgcgaacggttccatccgaaaca

SEQ ID NO: 160070 - DNA, 25 bp, Saccharomyces pastorianus
ggccgcggttcgtatgcataatgca

SEQ ID NO: 160071 - DNA, 25 bp, Saccharomyces pastorianus
aattgtccagatttattcgagcggc

SEQ ID NO: 160072 - DNA, 25 bp, Saccharomyces pastorianus
gacagacggaaaagtgcccagcaac

SEQ ID NO: 160073 - DNA, 25 bp, Saccharomyces pastorianus
gtgcccagcaacacggaacaaaatt

SEQ ID NO: 160074 - DNA, 25 bp, Saccharomyces pastorianus
tccgaaacaggccatttcccaaagg

SEQ ID NO: 160075 - DNA, 25 bp, Saccharomyces pastorianus
gcccctcgtccaaatgcgaacggtt

SEQ ID NO: 160076 - DNA, 25 bp, Saccharomyces pastorianus
cagatttattcgagcggccgcggtt

SEQ ID NO: 160077 - DNA, 25 bp, Saccharomyces pastorianus
tatgcataatgcaggcgcccctcgt

SEQ ID NO: 160078 - DNA, 25 bp, Saccharomyces pastorianus
gaacggttccatccgaaacaggcca

SEQ ID NO: 160079 - DNA, 25 bp, Saccharomyces pastorianus
tgtttccgtgtgtttgcccacatgg

SEQ ID NO: 160080 - DNA, 25 bp, Saccharomyces pastorianus
accattggtgaatctattccgccca

SEQ ID NO: 160081 - DNA, 25 bp, Saccharomyces pastorianus
ttccgcccaacacaaaacatgctgt

SEQ ID NO: 160082 - DNA, 25 bp, Saccharomyces pastorianus
atgctgtttccgtgtgtttgcccac

SEQ ID NO: 160083 - DNA, 25 bp, Saccharomyces pastorianus
attggtgaatctattccgcccaaca

SEQ ID NO: 160084 - DNA, 25 bp, Saccharomyces pastorianus
aacatgctgtttccgtgtgtttgcc

SEQ ID NO: 160085 - DNA, 25 bp, Saccharomyces pastorianus
acaaaacatgctgtttccgtgtgtt

SEQ ID NO: 160086 - DNA, 25 bp, Saccharomyces pastorianus
ggtgaatctattccgcccaacacaa

SEQ ID NO: 160087 - DNA, 25 bp, Saccharomyces pastorianus
ggaccattggtgaatctattccgcc

SEQ ID NO: 160088 - DNA, 25 bp, Saccharomyces pastorianus
atatctaggaccattggtgaatcta

SEQ ID NO: 160089 - DNA, 25 bp, Saccharomyces pastorianus
atctattccgcccaacacaaaacat

SEQ ID NO: 160090 - DNA, 25 bp, Saccharomyces pastorianus
aagtgatttcatgctagccttaaat

SEQ ID NO: 160091 - DNA, 25 bp, Saccharomyces pastorianus
ggatgacagtttacctcaacaatac

SEQ ID NO: 160092 - DNA, 25 bp, Saccharomyces pastorianus
ctactggcggatgttgtcggctcta

SEQ ID NO: 160093 - DNA, 25 bp, Saccharomyces pastorianus
gagagatatcacacccatcagctgg

SEQ ID NO: 160094 - DNA, 25 bp, Saccharomyces pastorianus
gacatcgaagatttctatcgcgaat

SEQ ID NO: 160095 - DNA, 25 bp, Saccharomyces pastorianus
agggttggttcttgcattggatgac

SEQ ID NO: 160096 - DNA, 25 bp, Saccharomyces pastorianus
gtcgactacgatatctattctgttg

SEQ ID NO: 160097 - DNA, 25 bp, Saccharomyces pastorianus
tgtcggctctattctaacgcaaaag

SEQ ID NO: 160098 - DNA, 25 bp, Saccharomyces pastorianus
gagaactctacattcctactgagag

SEQ ID NO: 160099 - DNA, 25 bp, Saccharomyces pastorianus
gcggcgctaggtattttgtcgacta

SEQ ID NO: 160100 - DNA, 25 bp, Saccharomyces pastorianus
atccagctgcagagtttattttgaa

SEQ ID NO: 160101 - DNA, 25 bp, Saccharomyces pastorianus
taatcttggtctcaaacccacgctt

SEQ ID NO: 160102 - DNA, 25 bp, Saccharomyces pastorianus
aaggcattccgttattctacgtaat

SEQ ID NO: 160103 - DNA, 25 bp, Saccharomyces pastorianus
acccacgcttggaatgtctttgaaa

SEQ ID NO: 160104 - DNA, 25 bp, Saccharomyces pastorianus
aattatgtgcgtccttatttctaag

SEQ ID NO: 160105 - DNA, 25 bp, Saccharomyces pastorianus
tatggcgggtcgttttcccaacgat

SEQ ID NO: 160106 - DNA, 25 bp, Saccharomyces pastorianus
ccctccctcatacaatgctgatgaa

SEQ ID NO: 160107 - DNA, 25 bp, Saccharomyces pastorianus
attaaacttcgtggtgttctgctcc

SEQ ID NO: 160108 - DNA, 25 bp, Saccharomyces pastorianus
ttacagccactacttttaaaacgca

SEQ ID NO: 160109 - DNA, 25 bp, Saccharomyces pastorianus
gtcagggtggcttgaaaggcattcc

SEQ ID NO: 160110 - DNA, 25 bp, Saccharomyces pastorianus
gttctgctcctacagacgctattaa

SEQ ID NO: 160111 - DNA, 25 bp, Saccharomyces pastorianus
gacatatctacgaatctttcttgga

SEQ ID NO: 160112 - DNA, 25 bp, Saccharomyces pastorianus
ggtcttatttctttgacgttcatcc

SEQ ID NO: 160113 - DNA, 25 bp, Saccharomyces pastorianus
atatatcgcgtaccgttctttcaac

SEQ ID NO: 160114 - DNA, 25 bp, Saccharomyces pastorianus
ttgttaccttattagcgtttgctgc

SEQ ID NO: 160115 - DNA, 25 bp, Saccharomyces pastorianus
aggacgtagacgatccttcgttgaa

SEQ ID NO: 160116 - DNA, 25 bp, Saccharomyces pastorianus
atgaaactcatccagctccatatat

SEQ ID NO: 160117 - DNA, 25 bp, Saccharomyces pastorianus
ggccgcgcctaaatgtgaacaagtt

SEQ ID NO: 160118 - DNA, 25 bp, Saccharomyces pastorianus
tgggaagttaccaccttccactaag

SEQ ID NO: 160119 - DNA, 25 bp, Saccharomyces pastorianus
gttgaagtacacgaaggccgcgcct

SEQ ID NO: 160120 - DNA, 25 bp, Saccharomyces pastorianus
ggaaccggaatcacgttatagcttt

SEQ ID NO: 160121 - DNA, 25 bp, Saccharomyces pastorianus
agttgctgaacattggctcttgcag

SEQ ID NO: 160122 - DNA, 25 bp, Saccharomyces pastorianus
tctttcaacgcgatattgggcacat

SEQ ID NO: 160123 - DNA, 25 bp, Saccharomyces pastorianus
cagaatgtgggaatgccaattatag

SEQ ID NO: 160124 - DNA, 25 bp, Saccharomyces pastorianus
atgcgcagaatgtgggaatgccaat

SEQ ID NO: 160125 - DNA, 25 bp, Saccharomyces pastorianus
gcagaatgtgggaatgccaattata

SEQ ID NO: 160126 - DNA, 25 bp, Saccharomyces pastorianus
agaatgtgggaatgccaattatagg

SEQ ID NO: 160127 - DNA, 25 bp, Saccharomyces pastorianus
ccttttccgtgcctgtgatttccgt

SEQ ID NO: 160128 - DNA, 25 bp, Saccharomyces pastorianus
tatgcgcagaatgtgggaatgccaa

SEQ ID NO: 160129 - DNA, 25 bp, Saccharomyces pastorianus
gtgccggggtgccttatgaaaccct

SEQ ID NO: 160130 - DNA, 25 bp, Saccharomyces pastorianus
tgccggggtgccttatgaaaccctt

SEQ ID NO: 160131 - DNA, 25 bp, Saccharomyces pastorianus
tgcgcagaatgtgggaatgccaatt

SEQ ID NO: 160132 - DNA, 25 bp, Saccharomyces pastorianus
atgccaattataggggtgccggggt

SEQ ID NO: 160133 - DNA, 25 bp, Saccharomyces pastorianus
cgcagaatgtgggaatgccaattat

SEQ ID NO: 160134 - DNA, 25 bp, Saccharomyces pastorianus
ttcgtttcgtttttacatccactgt

SEQ ID NO: 160135 - DNA, 25 bp, Saccharomyces pastorianus
cgtccttggtgcaatgttcttttat

SEQ ID NO: 160136 - DNA, 25 bp, Saccharomyces pastorianus
tttacatccactgtacttctggcag

SEQ ID NO: 160137 - DNA, 25 bp, Saccharomyces pastorianus
gtggatatacactgctattgcgatt

SEQ ID NO: 160138 - DNA, 25 bp, Saccharomyces pastorianus
ttggatcgttgaccggattattaga

SEQ ID NO: 160139 - DNA, 25 bp, Saccharomyces pastorianus
ccatggagggccaaacctgggcaat

SEQ ID NO: 160140 - DNA, 25 bp, Saccharomyces pastorianus
tttcttcatatcgtccttggtgcaa

SEQ ID NO: 160141 - DNA, 25 bp, Saccharomyces pastorianus
atggtgaactggttattatcctgaa

SEQ ID NO: 160142 - DNA, 25 bp, Saccharomyces pastorianus
cctgggcaatatgttttcgtttcgt

SEQ ID NO: 160143 - DNA, 25 bp, Saccharomyces pastorianus
ggatgatctcattcgtttaacagtt

SEQ ID NO: 160144 - DNA, 25 bp, Saccharomyces pastorianus
caaagcttccttacaactaatcggg

SEQ ID NO: 160145 - DNA, 25 bp, Saccharomyces pastorianus
taatatggccagtttcatccctcaa

SEQ ID NO: 160146 - DNA, 25 bp, Saccharomyces pastorianus
ttattcttatgcaactacctttccc

SEQ ID NO: 160147 - DNA, 25 bp, Saccharomyces pastorianus
gaccggtattatctgtcaggacctg

SEQ ID NO: 160148 - DNA, 25 bp, Saccharomyces pastorianus
gctcgggctaaatccagtctacaac

SEQ ID NO: 160149 - DNA, 25 bp, Saccharomyces pastorianus
aagctggagaggttcctaatccctt

SEQ ID NO: 160150 - DNA, 25 bp, Saccharomyces pastorianus
gtattttatttctgtgctcgggcta

SEQ ID NO: 160151 - DNA, 25 bp, Saccharomyces pastorianus
gcatgcgatggctaacgatttgact

SEQ ID NO: 160152 - DNA, 25 bp, Saccharomyces pastorianus
gatgggttagctccatttcatggta

SEQ ID NO: 160153 - DNA, 25 bp, Saccharomyces pastorianus
ttcaggctgggataggtggccctca

SEQ ID NO: 160154 - DNA, 25 bp, Saccharomyces pastorianus
ctaatcccttcaacgatccaagtat

SEQ ID NO: 160155 - DNA, 25 bp, Saccharomyces pastorianus
tgtcttccgatgcatttgctgcgaa

SEQ ID NO: 160156 - DNA, 25 bp, Saccharomyces pastorianus
actggtttccgcgattactgtgacg

SEQ ID NO: 160157 - DNA, 25 bp, Saccharomyces pastorianus
accactacgtacgagaatccgcggg

SEQ ID NO: 160158 - DNA, 25 bp, Saccharomyces pastorianus
agcggcgaggccctatttacactta

SEQ ID NO: 160159 - DNA, 25 bp, Saccharomyces pastorianus
gaacccattccttaagagccgagtc

SEQ ID NO: 160160 - DNA, 25 bp, Saccharomyces pastorianus
gggtttccatatcgctacagatgtt

SEQ ID NO: 160161 - DNA, 25 bp, Saccharomyces pastorianus
ccgggaatggagtatcgcttggcta

SEQ ID NO: 160162 - DNA, 25 bp, Saccharomyces pastorianus
agaatggacatgcatctcgcgtggc

SEQ ID NO: 160163 - DNA, 25 bp, Saccharomyces pastorianus
aaaactttatccgtcttcacgatcg

SEQ ID NO: 160164 - DNA, 25 bp, Saccharomyces pastorianus
aatggtagatatagccgcccatcct

SEQ ID NO: 160165 - DNA, 25 bp, Saccharomyces pastorianus
gaatcctgcagctttgacactggtt

SEQ ID NO: 160166 - DNA, 25 bp, Saccharomyces pastorianus
gcgcattccgcaatcgtggcaatta

SEQ ID NO: 160167 - DNA, 25 bp, Saccharomyces pastorianus
agaagatttaactcttccatcggta

SEQ ID NO: 160168 - DNA, 25 bp, Saccharomyces pastorianus
aatccgcttctgctcgtggttccta

SEQ ID NO: 160169 - DNA, 25 bp, Saccharomyces pastorianus
aagatttaactcttccatcggtaga

SEQ ID NO: 160170 - DNA, 25 bp, Saccharomyces pastorianus
gatttaactcttccatcggtagaac

SEQ ID NO: 160171 - DNA, 25 bp, Saccharomyces pastorianus
taaatccgcttctgctcgtggttcc

SEQ ID NO: 160172 - DNA, 25 bp, Saccharomyces pastorianus
cgcttctgctcgtggttcctacttg

SEQ ID NO: 160173 - DNA, 25 bp, Saccharomyces pastorianus
gctaaatccgcttctgctcgtggtt

SEQ ID NO: 160174 - DNA, 25 bp, Saccharomyces pastorianus
ctaaatccgcttctgctcgtggttc

SEQ ID NO: 160175 - DNA, 25 bp, Saccharomyces pastorianus
ttctgctcgtggttcctacttgcgt

SEQ ID NO: 160176 - DNA, 25 bp, Saccharomyces pastorianus
tgctaaatccgcttctgctcgtggt

SEQ ID NO: 160177 - DNA, 25 bp, Saccharomyces pastorianus
agatttaactcttccatcggtagaa

SEQ ID NO: 160178 - DNA, 25 bp, Saccharomyces pastorianus
taaaatctgtcatcaaggtaatcga

SEQ ID NO: 160179 - DNA, 25 bp, Saccharomyces pastorianus
ggctccaccgttgcattcggagata

SEQ ID NO: 160180 - DNA, 25 bp, Saccharomyces pastorianus
aagagtcctgcaatggttggagaca

SEQ ID NO: 160181 - DNA, 25 bp, Saccharomyces pastorianus
ggtctaaacagcgtaacatgtgcag

SEQ ID NO: 160182 - DNA, 25 bp, Saccharomyces pastorianus
ggtaatcgacaattcaggtgcacaa

SEQ ID NO: 160183 - DNA, 25 bp, Saccharomyces pastorianus
cattcggagatactgcttgcgtttt

SEQ ID NO: 160184 - DNA, 25 bp, Saccharomyces pastorianus
atactgcttgcgttttgattaataa

SEQ ID NO: 160185 - DNA, 25 bp, Saccharomyces pastorianus
gtgcagaaaggatggctccaccgtt

SEQ ID NO: 160186 - DNA, 25 bp, Saccharomyces pastorianus
ttgtcacgcaattgtcgtaaggtct

SEQ ID NO: 160187 - DNA, 25 bp, Saccharomyces pastorianus
acattacgggaacagccaacaccaa

SEQ ID NO: 160188 - DNA, 25 bp, Saccharomyces pastorianus
caattcaggtgcacaattagcagaa

SEQ ID NO: 160189 - DNA, 25 bp, Saccharomyces pastorianus
taaagggccgattacatccgttaga

SEQ ID NO: 160190 - DNA, 25 bp, Saccharomyces pastorianus
gccctgctggtgacctttatggtat

SEQ ID NO: 160191 - DNA, 25 bp, Saccharomyces pastorianus
acatccgttagaagccgattgtttc

SEQ ID NO: 160192 - DNA, 25 bp, Saccharomyces pastorianus
aagtaatggaattttgccctgctgg

SEQ ID NO: 160193 - DNA, 25 bp, Saccharomyces pastorianus
taattggatcagagccttacgtagc

SEQ ID NO: 160194 - DNA, 25 bp, Saccharomyces pastorianus
gggagtattacgatccaagactgat

SEQ ID NO: 160195 - DNA, 25 bp, Saccharomyces pastorianus
tattctcttttatccgcatggtcta

SEQ ID NO: 160196 - DNA, 25 bp, Saccharomyces pastorianus
aagcaactgcttcatggtgttaagt

SEQ ID NO: 160197 - DNA, 25 bp, Saccharomyces pastorianus
tatggtatgctggtcggtaagtcga

SEQ ID NO: 160198 - DNA, 25 bp, Saccharomyces pastorianus
gccttacgtagctccagaagagttt

SEQ ID NO: 160199 - DNA, 25 bp, Saccharomyces pastorianus
atgtgacttcggtacaagttctgta

SEQ ID NO: 160200 - DNA, 25 bp, Saccharomyces pastorianus
gttttacccagttatagtcctgaat

SEQ ID NO: 160201 - DNA, 25 bp, Saccharomyces pastorianus
ggatgccattcctcaagaagttgta

SEQ ID NO: 160202 - DNA, 25 bp, Saccharomyces pastorianus
gtaagccaacttccatcactaacta

SEQ ID NO: 160203 - DNA, 25 bp, Saccharomyces pastorianus
aatacttggaacaccacctgaggaa

SEQ ID NO: 160204 - DNA, 25 bp, Saccharomyces pastorianus
aacatcctattagcggtgattcccc

SEQ ID NO: 160205 - DNA, 25 bp, Saccharomyces pastorianus
gtcctgaattttcctatgtaagcca

SEQ ID NO: 160206 - DNA, 25 bp, Saccharomyces pastorianus
gtgctaatccagaagcgcttgaatt

SEQ ID NO: 160207 - DNA, 25 bp, Saccharomyces pastorianus
gatcgtttgaaagcatactacctgg

SEQ ID NO: 160208 - DNA, 25 bp, Saccharomyces pastorianus
aagacctttagattcgaattcgagc

SEQ ID NO: 160209 - DNA, 25 bp, Saccharomyces pastorianus
tgtacaggtccatccttctaggaaa

SEQ ID NO: 160210 - DNA, 25 bp, Saccharomyces pastorianus
taactacaacccagccatatcaaaa

SEQ ID NO: 160211 - DNA, 25 bp, Saccharomyces pastorianus
gtttggctcaatcactggacactat

SEQ ID NO: 160212 - DNA, 25 bp, Saccharomyces pastorianus
tggtctttcaatgctaggctccgtc

SEQ ID NO: 160213 - DNA, 25 bp, Saccharomyces pastorianus
accatgtttggtgctgcttgtgccg

SEQ ID NO: 160214 - DNA, 25 bp, Saccharomyces pastorianus
gtaaagagactacctcctggtcttt

SEQ ID NO: 160215 - DNA, 25 bp, Saccharomyces pastorianus
gatatttgtttgatggcactgtctt

SEQ ID NO: 160216 - DNA, 25 bp, Saccharomyces pastorianus
aggaagccatcccagcattgattaa

SEQ ID NO: 160217 - DNA, 25 bp, Saccharomyces pastorianus
taggctccgtcgtcacattaggtac

SEQ ID NO: 160218 - DNA, 25 bp, Saccharomyces pastorianus
aggtacctctggctttacatcaatg

SEQ ID NO: 160219 - DNA, 25 bp, Saccharomyces pastorianus
tgcttgtgccgcaagggacgcagac

SEQ ID NO: 160220 - DNA, 25 bp, Saccharomyces pastorianus
gaaattctttgccactaaatccacg

SEQ ID NO: 160221 - DNA, 25 bp, Saccharomyces pastorianus
gacactattacttcgaaagcgcagt

SEQ ID NO: 160222 - DNA, 25 bp, Saccharomyces pastorianus
gattgttctacatgaattagctcac

SEQ ID NO: 160223 - DNA, 25 bp, Saccharomyces pastorianus
gtgcttgatctactactagtcaaag

SEQ ID NO: 160224 - DNA, 25 bp, Saccharomyces pastorianus
cagtagatcgtattcaaagagtgac

SEQ ID NO: 160225 - DNA, 25 bp, Saccharomyces pastorianus
catgaattagctcaccaatggtttg

SEQ ID NO: 160226 - DNA, 25 bp, Saccharomyces pastorianus
gttctacatgaattagctcaccaat

SEQ ID NO: 160227 - DNA, 25 bp, Saccharomyces pastorianus
aagagtgactgagattgttctacat

SEQ ID NO: 160228 - DNA, 25 bp, Saccharomyces pastorianus
agagtgcttgatctactactagtca

SEQ ID NO: 160229 - DNA, 25 bp, Saccharomyces pastorianus
gtgactgagattgttctacatgaat

SEQ ID NO: 160230 - DNA, 25 bp, Saccharomyces pastorianus
gctcaccaatggtttggtaacttag

SEQ ID NO: 160231 - DNA, 25 bp, Saccharomyces pastorianus
actactagtcaaagagaactctaca

SEQ ID NO: 160232 - DNA, 25 bp, Saccharomyces pastorianus
aactctacagtagatcgtattcaaa

SEQ ID NO: 160233 - DNA, 25 bp, Saccharomyces pastorianus
gtgatgtcacatcttccgagattat

SEQ ID NO: 160234 - DNA, 25 bp, Saccharomyces pastorianus
aaacatggtcagtttgccgctgatt

SEQ ID NO: 160235 - DNA, 25 bp, Saccharomyces pastorianus
gccgctgatttgactgccaagactt

SEQ ID NO: 160236 - DNA, 25 bp, Saccharomyces pastorianus
gaaagcctcttttgctattacttta

SEQ ID NO: 160237 - DNA, 25 bp, Saccharomyces pastorianus
tcactttgttcaatacgacccctaa

SEQ ID NO: 160238 - DNA, 25 bp, Saccharomyces pastorianus
aaaaactttcgtattcctgtcagag

SEQ ID NO: 160239 - DNA, 25 bp, Saccharomyces pastorianus
agtttcagacccatctttgacacac

SEQ ID NO: 160240 - DNA, 25 bp, Saccharomyces pastorianus
gtcgatatcgacatccattctgcaa

SEQ ID NO: 160241 - DNA, 25 bp, Saccharomyces pastorianus
aagggccttcccatgttttgatgag

SEQ ID NO: 160242 - DNA, 25 bp, Saccharomyces pastorianus
aagtcaccacatttgcgtttcctaa

SEQ ID NO: 160243 - DNA, 25 bp, Saccharomyces pastorianus
gggaccatgtcttctttcaagggta

SEQ ID NO: 160244 - DNA, 25 bp, Saccharomyces pastorianus
catgcaccgcttcattgttcacaag

SEQ ID NO: 160245 - DNA, 25 bp, Saccharomyces pastorianus
tgtactgcctccgttgttatttttt

SEQ ID NO: 160246 - DNA, 25 bp, Saccharomyces pastorianus
tcacttcaagcgtgccattgttaca

SEQ ID NO: 160247 - DNA, 25 bp, Saccharomyces pastorianus
attgtaggctgttactcgggtttct

SEQ ID NO: 160248 - DNA, 25 bp, Saccharomyces pastorianus
tattaccgttgctattgccaccgtt

SEQ ID NO: 160249 - DNA, 25 bp, Saccharomyces pastorianus
agacgcatgcgagattcctgtactg

SEQ ID NO: 160250 - DNA, 25 bp, Saccharomyces pastorianus
tgcttctacttctactattaccgtt

SEQ ID NO: 160251 - DNA, 25 bp, Saccharomyces pastorianus
ggtttcttatcaagtggcgtgccac

SEQ ID NO: 160252 - DNA, 25 bp, Saccharomyces pastorianus
tttagcaaaccacctgtagttccac

SEQ ID NO: 160253 - DNA, 25 bp, Saccharomyces pastorianus
agcagcggcggcttttttagcaaac

SEQ ID NO: 160254 - DNA, 25 bp, Saccharomyces pastorianus
ggctcagggttatttatgctcactt

SEQ ID NO: 160255 - DNA, 25 bp, Saccharomyces pastorianus
gaattcgccagctgattacactaac

SEQ ID NO: 160256 - DNA, 25 bp, Saccharomyces pastorianus
ggctgcctcctggtggaattattca

SEQ ID NO: 160257 - DNA, 25 bp, Saccharomyces pastorianus
gtaagttgccacgaatatgaagtca

SEQ ID NO: 160258 - DNA, 25 bp, Saccharomyces pastorianus
ttagtgcaaccgaagctttacaaag

SEQ ID NO: 160259 - DNA, 25 bp, Saccharomyces pastorianus
ggtacagaccaccagaactattgtt

SEQ ID NO: 160260 - DNA, 25 bp, Saccharomyces pastorianus
gttttaccatcttcaaaatgtctgc

SEQ ID NO: 160261 - DNA, 25 bp, Saccharomyces pastorianus
actgcaattttccagggctctaatg

SEQ ID NO: 160262 - DNA, 25 bp, Saccharomyces pastorianus
atagctggccaacgctttacgatat

SEQ ID NO: 160263 - DNA, 25 bp, Saccharomyces pastorianus
aaccgtgtcattacgttgtggtaca

SEQ ID NO: 160264 - DNA, 25 bp, Saccharomyces pastorianus
tacaccgtgatgttaaaggctcaaa

SEQ ID NO: 160265 - DNA, 25 bp, Saccharomyces pastorianus
tacgatatgccgtggttttttatga

SEQ ID NO: 160266 - DNA, 25 bp, Saccharomyces pastorianus
tctaggctacctatatgggtgctaa

SEQ ID NO: 160267 - DNA, 25 bp, Saccharomyces pastorianus
atgggtgctaagtcctcgcgaagaa

SEQ ID NO: 160268 - DNA, 25 bp, Saccharomyces pastorianus
aagaacttgaagacggaaacataca

SEQ ID NO: 160269 - DNA, 25 bp, Saccharomyces pastorianus
agtttttcccacttgtgataagcaa

SEQ ID NO: 160270 - DNA, 25 bp, Saccharomyces pastorianus
gaacaacaggctcgcaagaacttga

SEQ ID NO: 160271 - DNA, 25 bp, Saccharomyces pastorianus
caatggcagattgtgctaaggcaaa

SEQ ID NO: 160272 - DNA, 25 bp, Saccharomyces pastorianus
gtcctcgcgaagaacaacaggctcg

SEQ ID NO: 160273 - DNA, 25 bp, Saccharomyces pastorianus
attttgttcaagcaatggcagattg

SEQ ID NO: 160274 - DNA, 25 bp, Saccharomyces pastorianus
gatccgcagatgatctcgaaacata

SEQ ID NO: 160275 - DNA, 25 bp, Saccharomyces pastorianus
tcgaaacatagttctaggctaccta

SEQ ID NO: 160276 - DNA, 25 bp, Saccharomyces pastorianus
ggaatgaaagtttttcccacttgtg

SEQ ID NO: 160277 - DNA, 25 bp, Saccharomyces pastorianus
ggcgtaggagtcttcaacactctaa

SEQ ID NO: 160278 - DNA, 25 bp, Saccharomyces pastorianus
ttgccgtcaacgaagccgcggagaa

SEQ ID NO: 160279 - DNA, 25 bp, Saccharomyces pastorianus
taaaacgcatgttctacccacgtac

SEQ ID NO: 160280 - DNA, 25 bp, Saccharomyces pastorianus
ttaaggtctggagcagccgacggta

SEQ ID NO: 160281 - DNA, 25 bp, Saccharomyces pastorianus
gtcgtacattgcgagggccaagaaa

SEQ ID NO: 160282 - DNA, 25 bp, Saccharomyces pastorianus
tacccacgtactataccaggtcgat

SEQ ID NO: 160283 - DNA, 25 bp, Saccharomyces pastorianus
gatagatatttcatttgccgtcaac

SEQ ID NO: 160284 - DNA, 25 bp, Saccharomyces pastorianus
aattggactctatcttaactttggt

SEQ ID NO: 160285 - DNA, 25 bp, Saccharomyces pastorianus
gggccaagaaactatccagaactca

SEQ ID NO: 160286 - DNA, 25 bp, Saccharomyces pastorianus
taactttggtaagcacgcatgtgga

SEQ ID NO: 160287 - DNA, 25 bp, Saccharomyces pastorianus
ttgcaagctatttaacgtcctggtt

SEQ ID NO: 160288 - DNA, 25 bp, Saccharomyces pastorianus
atgaacgaattcaccccagagaagt

SEQ ID NO: 160289 - DNA, 25 bp, Saccharomyces pastorianus
gtcaagcagcacttacagagggaaa

SEQ ID NO: 160290 - DNA, 25 bp, Saccharomyces pastorianus
gaccaattagcccaagatatttcaa

SEQ ID NO: 160291 - DNA, 25 bp, Saccharomyces pastorianus
ggaacgcttcatcaataatgccaaa

SEQ ID NO: 160292 - DNA, 25 bp, Saccharomyces pastorianus
aattatgtgaggacgctgaggcaaa

SEQ ID NO: 160293 - DNA, 25 bp, Saccharomyces pastorianus
gaaacgtgctcaagacttccacagg

SEQ ID NO: 160294 - DNA, 25 bp, Saccharomyces pastorianus
ggaagcagtccactttgaaagtcct

SEQ ID NO: 160295 - DNA, 25 bp, Saccharomyces pastorianus
acaatattcgtcgattcccgagaga

SEQ ID NO: 160296 - DNA, 25 bp, Saccharomyces pastorianus
agacgaatcgctttccatggatcaa

SEQ ID NO: 160297 - DNA, 25 bp, Saccharomyces pastorianus
gaagtttttcaataccacctccgag

SEQ ID NO: 160298 - DNA, 25 bp, Saccharomyces pastorianus
aaggactgctgatcagctcacgtca

SEQ ID NO: 160299 - DNA, 25 bp, Saccharomyces pastorianus
tattcgatgatggtgcaagggccac

SEQ ID NO: 160300 - DNA, 25 bp, Saccharomyces pastorianus
gtggaagacacgatatctgaaagac

SEQ ID NO: 160301 - DNA, 25 bp, Saccharomyces pastorianus
tagaacgaagggtccggctaagaat

SEQ ID NO: 160302 - DNA, 25 bp, Saccharomyces pastorianus
gaaaaactacttcgcaaagctataa

SEQ ID NO: 160303 - DNA, 25 bp, Saccharomyces pastorianus
aagtatgtcggtagtgccgtaccaa

SEQ ID NO: 160304 - DNA, 25 bp, Saccharomyces pastorianus
acgcagatggtgtaatgtttcaaaa

SEQ ID NO: 160305 - DNA, 25 bp, Saccharomyces pastorianus
ggtgcaagggccacttcagatttac

SEQ ID NO: 160306 - DNA, 25 bp, Saccharomyces pastorianus
aaattgcgtctgattccgatatgga

SEQ ID NO: 160307 - DNA, 25 bp, Saccharomyces pastorianus
gggccacttcagatttacaaaggtt

SEQ ID NO: 160308 - DNA, 25 bp, Saccharomyces pastorianus
gaaggactcagaaattaacgcagat

SEQ ID NO: 160309 - DNA, 25 bp, Saccharomyces pastorianus
aagtctgcgattgaatggagcgaac

SEQ ID NO: 160310 - DNA, 25 bp, Saccharomyces pastorianus
agatacttctcttcaccaatatgct

SEQ ID NO: 160311 - DNA, 25 bp, Saccharomyces pastorianus
gattatagctgtcccaccaaagaat

SEQ ID NO: 160312 - DNA, 25 bp, Saccharomyces pastorianus
ggttgccacctcactttaacatcaa

SEQ ID NO: 160313 - DNA, 25 bp, Saccharomyces pastorianus
attcctcgtgaatttaactactcgg

SEQ ID NO: 160314 - DNA, 25 bp, Saccharomyces pastorianus
gaatctctctaaatgcaagtctgaa

SEQ ID NO: 160315 - DNA, 25 bp, Saccharomyces pastorianus
aaagagcatgactctgctgccagtt

SEQ ID NO: 160316 - DNA, 25 bp, Saccharomyces pastorianus
aatatgcttctcttgtcgacacaga

SEQ ID NO: 160317 - DNA, 25 bp, Saccharomyces pastorianus
tagaacaatctttgcgcgtccagtt

SEQ ID NO: 160318 - DNA, 25 bp, Saccharomyces pastorianus
ggccaagacagcttatgtcgatgtt

SEQ ID NO: 160319 - DNA, 25 bp, Saccharomyces pastorianus
tggatttcttggtggcaatgccttc

SEQ ID NO: 160320 - DNA, 25 bp, Saccharomyces pastorianus
atctgttttgcgttacgggttgcca

SEQ ID NO: 160321 - DNA, 25 bp, Saccharomyces pastorianus
aggcgttgaaaaacactgtgcggtc

SEQ ID NO: 160322 - DNA, 25 bp, Saccharomyces pastorianus
aaggatgataattatgttgcccaaa

SEQ ID NO: 160323 - DNA, 25 bp, Saccharomyces pastorianus
gtagttctaccagtgaagatcctaa

SEQ ID NO: 160324 - DNA, 25 bp, Saccharomyces pastorianus
cactgtgcggtccttgtcaatgaaa

SEQ ID NO: 160325 - DNA, 25 bp, Saccharomyces pastorianus
catagttctgcttaccgtgaatcgc

SEQ ID NO: 160326 - DNA, 25 bp, Saccharomyces pastorianus
gcgtgattcagcctacagcgcaata

SEQ ID NO: 160327 - DNA, 25 bp, Saccharomyces pastorianus
cagcgcaataggatcacatagttct

SEQ ID NO: 160328 - DNA, 25 bp, Saccharomyces pastorianus
gcttaccgtgaatcgcaattaactg

SEQ ID NO: 160329 - DNA, 25 bp, Saccharomyces pastorianus
agtcttcacaataaatctcttcccg

SEQ ID NO: 160330 - DNA, 25 bp, Saccharomyces pastorianus
aatctcttcccgaagacgacgagaa

SEQ ID NO: 160331 - DNA, 25 bp, Saccharomyces pastorianus
ccaactaccctatcaacactagaat

SEQ ID NO: 160332 - DNA, 25 bp, Saccharomyces pastorianus
ggcatcgctttatcaacatgttcat

SEQ ID NO: 160333 - DNA, 25 bp, Saccharomyces pastorianus
tgccggtgtcactttttctgaaaaa

SEQ ID NO: 160334 - DNA, 25 bp, Saccharomyces pastorianus
ctttagagcatgatggtaggccaaa

SEQ ID NO: 160335 - DNA, 25 bp, Saccharomyces pastorianus
agaaacaccaaatccattgaaacct

SEQ ID NO: 160336 - DNA, 25 bp, Saccharomyces pastorianus
actcctacggtcattgccggtgtca

SEQ ID NO: 160337 - DNA, 25 bp, Saccharomyces pastorianus
cacgatagtatacttatcttctttt

SEQ ID NO: 160338 - DNA, 25 bp, Saccharomyces pastorianus
agaattagtcactcctacggtcatt

SEQ ID NO: 160339 - DNA, 25 bp, Saccharomyces pastorianus
gttcatggtgcaagacaagtcgttc

SEQ ID NO: 160340 - DNA, 25 bp, Saccharomyces pastorianus
gacaagtcgttcgtccaaaggagaa

SEQ ID NO: 160341 - DNA, 25 bp, Saccharomyces pastorianus
accttgggtatctttagagcatgat

SEQ ID NO: 160342 - DNA, 25 bp, Saccharomyces pastorianus
tatcttcttttctttggcatcgctt

SEQ ID NO: 160343 - DNA, 25 bp, Saccharomyces pastorianus
caatcactggtgttagcggcgtgtt

SEQ ID NO: 160344 - DNA, 25 bp, Saccharomyces pastorianus
gcctgtggtggatcaaatggactca

SEQ ID NO: 160345 - DNA, 25 bp, Saccharomyces pastorianus
gggcacgattttacccattgtaacg

SEQ ID NO: 160346 - DNA, 25 bp, Saccharomyces pastorianus
tagttctgccagtgctaggtcaatc

SEQ ID NO: 160347 - DNA, 25 bp, Saccharomyces pastorianus
ggcaccggtgaagattccattgcaa

SEQ ID NO: 160348 - DNA, 25 bp, Saccharomyces pastorianus
gatgatgggcctaaaacaccaacct

SEQ ID NO: 160349 - DNA, 25 bp, Saccharomyces pastorianus
gagttcgcgattccaacgattccaa

SEQ ID NO: 160350 - DNA, 25 bp, Saccharomyces pastorianus
cattgtaacgacaacggccgccggt

SEQ ID NO: 160351 - DNA, 25 bp, Saccharomyces pastorianus
taaatcttcaagaccagcggcgaac

SEQ ID NO: 160352 - DNA, 25 bp, Saccharomyces pastorianus
tagtggcttttctcaaggttcgata

SEQ ID NO: 160353 - DNA, 25 bp, Saccharomyces pastorianus
agcggcgaacagtggaggctccata

SEQ ID NO: 160354 - DNA, 25 bp, Saccharomyces pastorianus
tgatcaccttgattcctatggcgct

SEQ ID NO: 160355 - DNA, 25 bp, Saccharomyces pastorianus
ttcctatggcgcttgcattaatcat

SEQ ID NO: 160356 - DNA, 25 bp, Saccharomyces pastorianus
ggcgatttgcaatcgtttgacgatc

SEQ ID NO: 160357 - DNA, 25 bp, Saccharomyces pastorianus
tatttgaccgacatggaggcaccat

SEQ ID NO: 160358 - DNA, 25 bp, Saccharomyces pastorianus
tgacgcaagtatcatcactggtgag

SEQ ID NO: 160359 - DNA, 25 bp, Saccharomyces pastorianus
atgcgtcctttttgagtgtactagc

SEQ ID NO: 160360 - DNA, 25 bp, Saccharomyces pastorianus
catcgcgttcttatggagaccaaca

SEQ ID NO: 160361 - DNA, 25 bp, Saccharomyces pastorianus
tcattgttttcgttaccatcgcgtt

SEQ ID NO: 160362 - DNA, 25 bp, Saccharomyces pastorianus
gctggtagtatagtttcgtcattta

SEQ ID NO: 160363 - DNA, 25 bp, Saccharomyces pastorianus
atctccactaatcttgatcaccttg

SEQ ID NO: 160364 - DNA, 25 bp, Saccharomyces pastorianus
ggaggtcaaggttcttcgttactga

SEQ ID NO: 160365 - DNA, 25 bp, Saccharomyces pastorianus
gatggtcttctcatcaacacagagg

SEQ ID NO: 160366 - DNA, 25 bp, Saccharomyces pastorianus
atgacacatcctgtagcagtgaagg

SEQ ID NO: 160367 - DNA, 25 bp, Saccharomyces pastorianus
gacatggatggtcttctcatcaaca

SEQ ID NO: 160368 - DNA, 25 bp, Saccharomyces pastorianus
gtctatttgacatggatggtcttct

SEQ ID NO: 160369 - DNA, 25 bp, Saccharomyces pastorianus
tcctgtagcagtgaaggcatgtcta

SEQ ID NO: 160370 - DNA, 25 bp, Saccharomyces pastorianus
ggtcttctcatcaacacagaggata

SEQ ID NO: 160371 - DNA, 25 bp, Saccharomyces pastorianus
catggatggtcttctcatcaacaca

SEQ ID NO: 160372 - DNA, 25 bp, Saccharomyces pastorianus
cttctcatcaacacagaggatattt

SEQ ID NO: 160373 - DNA, 25 bp, Saccharomyces pastorianus
agcagtgaaggcatgtctatttgac

SEQ ID NO: 160374 - DNA, 25 bp, Saccharomyces pastorianus
cagaggatatttatactgaaacttt

SEQ ID NO: 160375 - DNA, 25 bp, Saccharomyces pastorianus
acacatcctgtagcagtgaaggcat

SEQ ID NO: 160376 - DNA, 25 bp, Saccharomyces pastorianus
tattgctttggaggcctttataccc

SEQ ID NO: 160377 - DNA, 25 bp, Saccharomyces pastorianus
gttacgcacagatgggaagacgcat

SEQ ID NO: 160378 - DNA, 25 bp, Saccharomyces pastorianus
atcatttgcaatcactattctagag

SEQ ID NO: 160379 - DNA, 25 bp, Saccharomyces pastorianus
gaggcattagcgacatttgtatcaa

SEQ ID NO: 160380 - DNA, 25 bp, Saccharomyces pastorianus
gcgtgatccgatgtccaaattacca

SEQ ID NO: 160381 - DNA, 25 bp, Saccharomyces pastorianus
agacctgcacaagctaagtgacatt

SEQ ID NO: 160382 - DNA, 25 bp, Saccharomyces pastorianus
ttcgcacgctagaggttctggcaaa

SEQ ID NO: 160383 - DNA, 25 bp, Saccharomyces pastorianus
ataaggtgtgtgttcgcacgctaga

SEQ ID NO: 160384 - DNA, 25 bp, Saccharomyces pastorianus
ggacctattgttttgttacgcacag

SEQ ID NO: 160385 - DNA, 25 bp, Saccharomyces pastorianus
ggttgacggcaacttctgggcaaat

SEQ ID NO: 160386 - DNA, 25 bp, Saccharomyces pastorianus
gtgttggtatccactttagtacatt

SEQ ID NO: 160387 - DNA, 25 bp, Saccharomyces pastorianus
tgcgctgtggttaagcaccaatgtt

SEQ ID NO: 160388 - DNA, 25 bp, Saccharomyces pastorianus
ggttaagcaccaatgttataaaggc

SEQ ID NO: 160389 - DNA, 25 bp, Saccharomyces pastorianus
ggaggaagaagtctatctactattt

SEQ ID NO: 160390 - DNA, 25 bp, Saccharomyces pastorianus
atagttgcgctgtggttaagcacca

SEQ ID NO: 160391 - DNA, 25 bp, Saccharomyces pastorianus
aaaggctatggtaaagcaaccgaag

SEQ ID NO: 160392 - DNA, 25 bp, Saccharomyces pastorianus
gcaaccgaaggaggaagaagtctat

SEQ ID NO: 160393 - DNA, 25 bp, Saccharomyces pastorianus
caagttgattctccaagtacgcaga

SEQ ID NO: 160394 - DNA, 25 bp, Saccharomyces pastorianus
gcagaagatagttgcgctgtggtta

SEQ ID NO: 160395 - DNA, 25 bp, Saccharomyces pastorianus
gtcagaacaagttgattctccaagt

SEQ ID NO: 160396 - DNA, 25 bp, Saccharomyces pastorianus
gattctccaagtacgcagaagatag

SEQ ID NO: 160397 - DNA, 25 bp, Saccharomyces pastorianus
atctactatttgaatctgattccaa

SEQ ID NO: 160398 - DNA, 25 bp, Saccharomyces pastorianus
tatactgaccagtggacgtcaccta

SEQ ID NO: 160399 - DNA, 25 bp, Saccharomyces pastorianus
agtgcgtcctatgctctgattattc

SEQ ID NO: 160400 - DNA, 25 bp, Saccharomyces pastorianus
gtaagcatgtcaaattcccaccagt

SEQ ID NO: 160401 - DNA, 25 bp, Saccharomyces pastorianus
agagagccagatagcgacgacgatg

SEQ ID NO: 160402 - DNA, 25 bp, Saccharomyces pastorianus
tgattattcgatcgttcagcccgca

SEQ ID NO: 160403 - DNA, 25 bp, Saccharomyces pastorianus
aggcttatatttcccttgctatcaa

SEQ ID NO: 160404 - DNA, 25 bp, Saccharomyces pastorianus
ggattgatccaacggtgcacaacca

SEQ ID NO: 160405 - DNA, 25 bp, Saccharomyces pastorianus
tattctggtgattttgtcgccaaga

SEQ ID NO: 160406 - DNA, 25 bp, Saccharomyces pastorianus
acgtcacctataccatcagattcat

SEQ ID NO: 160407 - DNA, 25 bp, Saccharomyces pastorianus
atgggactccatcatacagtgcgtc

SEQ ID NO: 160408 - DNA, 25 bp, Saccharomyces pastorianus
gaacgacgtcgattttttgaaggat

SEQ ID NO: 160409 - DNA, 25 bp, Saccharomyces pastorianus
gggccgtgtctatacttggctccac

SEQ ID NO: 160410 - DNA, 25 bp, Saccharomyces pastorianus
atgcgccgggccgtgtctatacttg

SEQ ID NO: 160411 - DNA, 25 bp, Saccharomyces pastorianus
gaggataacgaagtaaaccacattt

SEQ ID NO: 160412 - DNA, 25 bp, Saccharomyces pastorianus
acgattacggtacagaggataacga

SEQ ID NO: 160413 - DNA, 25 bp, Saccharomyces pastorianus
tggctccaccagctgatgtgtgcat

SEQ ID NO: 160414 - DNA, 25 bp, Saccharomyces pastorianus
ccaccagctgatgtgtgcatttttt

SEQ ID NO: 160415 - DNA, 25 bp, Saccharomyces pastorianus
gtgtgcatttttttttggttcccat

SEQ ID NO: 160416 - DNA, 25 bp, Saccharomyces pastorianus
tatacttggctccaccagctgatgt

SEQ ID NO: 160417 - DNA, 25 bp, Saccharomyces pastorianus
tttacagcgagaacgagagacagaa

SEQ ID NO: 160418 - DNA, 25 bp, Saccharomyces pastorianus
aaaccacatttacagcgagaacgag

SEQ ID NO: 160419 - DNA, 25 bp, Saccharomyces pastorianus
atgcagtacgattacggtacagagg

SEQ ID NO: 160420 - DNA, 25 bp, Saccharomyces pastorianus
agtagtagacgtgccggtgctaact

SEQ ID NO: 160421 - DNA, 25 bp, Saccharomyces pastorianus
ataaatcctggtaatgaacctgcac

SEQ ID NO: 160422 - DNA, 25 bp, Saccharomyces pastorianus
ggatacagctggcaccgcaaagaca

SEQ ID NO: 160423 - DNA, 25 bp, Saccharomyces pastorianus
gattactacgctgctttggctaaaa

SEQ ID NO: 160424 - DNA, 25 bp, Saccharomyces pastorianus
gacagaatcaaacgcctccaatggc

SEQ ID NO: 160425 - DNA, 25 bp, Saccharomyces pastorianus
taacagaactctgaccgagcaagaa

SEQ ID NO: 160426 - DNA, 25 bp, Saccharomyces pastorianus
agtaccatcggtaaaactgctcttg

SEQ ID NO: 160427 - DNA, 25 bp, Saccharomyces pastorianus
gatcctgtagttactgcatctgcca

SEQ ID NO: 160428 - DNA, 25 bp, Saccharomyces pastorianus
gtgctaactctcaagccacattaca

SEQ ID NO: 160429 - DNA, 25 bp, Saccharomyces pastorianus
aaactgctcttggtagactggataa

SEQ ID NO: 160430 - DNA, 25 bp, Saccharomyces pastorianus
tacacatcaacattaccacggcaag

SEQ ID NO: 160431 - DNA, 25 bp, Saccharomyces pastorianus
ttgatagtcaatgtagcatctcatt

SEQ ID NO: 160432 - DNA, 25 bp, Saccharomyces pastorianus
agcatctcattgtgcgttcacactc

SEQ ID NO: 160433 - DNA, 25 bp, Saccharomyces pastorianus
actccctgcgtaacacagtggtttt

SEQ ID NO: 160434 - DNA, 25 bp, Saccharomyces pastorianus
aacacagtggttttgatagtcaatg

SEQ ID NO: 160435 - DNA, 25 bp, Saccharomyces pastorianus
gtagcatctcattgtgcgttcacac

SEQ ID NO: 160436 - DNA, 25 bp, Saccharomyces pastorianus
atctcattgtgcgttcacactcaat

SEQ ID NO: 160437 - DNA, 25 bp, Saccharomyces pastorianus
gtgcgttcacactcaatacaggaat

SEQ ID NO: 160438 - DNA, 25 bp, Saccharomyces pastorianus
ccctgcgtaacacagtggttttgat

SEQ ID NO: 160439 - DNA, 25 bp, Saccharomyces pastorianus
ttgtgcgttcacactcaatacagga

SEQ ID NO: 160440 - DNA, 25 bp, Saccharomyces pastorianus
gcgttcacactcaatacaggaatag

SEQ ID NO: 160441 - DNA, 25 bp, Saccharomyces pastorianus
tcaactccctgcgtaacacagtggt

SEQ ID NO: 160442 - DNA, 25 bp, Saccharomyces pastorianus
atcgaaagtcgtccgtgttcgttgc

SEQ ID NO: 160443 - DNA, 25 bp, Saccharomyces pastorianus
aggagactagtatgcccgttatcga

SEQ ID NO: 160444 - DNA, 25 bp, Saccharomyces pastorianus
gttcttaattgacggatttcctagg

SEQ ID NO: 160445 - DNA, 25 bp, Saccharomyces pastorianus
tgttcgttgcgacagatccgtcgaa

SEQ ID NO: 160446 - DNA, 25 bp, Saccharomyces pastorianus
acgtccaagacgctatccgtgatag

SEQ ID NO: 160447 - DNA, 25 bp, Saccharomyces pastorianus
tactttggcgcttttacgcaacgct

SEQ ID NO: 160448 - DNA, 25 bp, Saccharomyces pastorianus
gcagggcagagcaggttcccaatat

SEQ ID NO: 160449 - DNA, 25 bp, Saccharomyces pastorianus
ttacgcaacgctatttccgataacg

SEQ ID NO: 160450 - DNA, 25 bp, Saccharomyces pastorianus
ctgttctttgactgccctgaagata

SEQ ID NO: 160451 - DNA, 25 bp, Saccharomyces pastorianus
gggccagattgtccctcaagagatt

SEQ ID NO: 160452 - DNA, 25 bp, Saccharomyces pastorianus
cggagaccttctacgtgctgagcag

SEQ ID NO: 160453 - DNA, 25 bp, Saccharomyces pastorianus
aatcctcaatactggacccaagctt

SEQ ID NO: 160454 - DNA, 25 bp, Saccharomyces pastorianus
acgtggtttagcgttgcgacctatt

SEQ ID NO: 160455 - DNA, 25 bp, Saccharomyces pastorianus
ggaaactttcccgaagtctgcgata

SEQ ID NO: 160456 - DNA, 25 bp, Saccharomyces pastorianus
tgcacacacgtataccctagaaggt

SEQ ID NO: 160457 - DNA, 25 bp, Saccharomyces pastorianus
taaggtggatatctgctatacgcaa

SEQ ID NO: 160458 - DNA, 25 bp, Saccharomyces pastorianus
aataagcttttccttctgtcgcatc

SEQ ID NO: 160459 - DNA, 25 bp, Saccharomyces pastorianus
catggctgggatttgcacacacgta

SEQ ID NO: 160460 - DNA, 25 bp, Saccharomyces pastorianus
atgcacttaccaaaactgtttctcg

SEQ ID NO: 160461 - DNA, 25 bp, Saccharomyces pastorianus
atactctacagcctccagattcttt

SEQ ID NO: 160462 - DNA, 25 bp, Saccharomyces pastorianus
gaatcgtattttgttctggcatatg

SEQ ID NO: 160463 - DNA, 25 bp, Saccharomyces pastorianus
acatttgtccaaacgatccattagt

SEQ ID NO: 160464 - DNA, 25 bp, Saccharomyces pastorianus
caatgatagcggtccaaacgaaggg

SEQ ID NO: 160465 - DNA, 25 bp, Saccharomyces pastorianus
ccagtatcagttgggcggctggata

SEQ ID NO: 160466 - DNA, 25 bp, Saccharomyces pastorianus
gacgcatcaatgatagcggtccaaa

SEQ ID NO: 160467 - DNA, 25 bp, Saccharomyces pastorianus
gttgggcggctggatacatagatat

SEQ ID NO: 160468 - DNA, 25 bp, Saccharomyces pastorianus
acgttctaaatttttcagaaagcag

SEQ ID NO: 160469 - DNA, 25 bp, Saccharomyces pastorianus
gagagatgtgctacacaaggacgct

SEQ ID NO: 160470 - DNA, 25 bp, Saccharomyces pastorianus
acacaaggacgctgaggatggttaa

SEQ ID NO: 160471 - DNA, 25 bp, Saccharomyces pastorianus
ttacaaccagtatcagttgggcggc

SEQ ID NO: 160472 - DNA, 25 bp, Saccharomyces pastorianus
cgctgaggatggttaaacgttctaa

SEQ ID NO: 160473 - DNA, 25 bp, Saccharomyces pastorianus
ggctggatacatagatatctgtcat

SEQ ID NO: 160474 - DNA, 25 bp, Saccharomyces pastorianus
ggacgggtttggacgcatcaatgat

SEQ ID NO: 160475 - DNA, 25 bp, Saccharomyces pastorianus
gttccacaaactagtccttgctggt

SEQ ID NO: 160476 - DNA, 25 bp, Saccharomyces pastorianus
gatgaagtctcacaggccatggaac

SEQ ID NO: 160477 - DNA, 25 bp, Saccharomyces pastorianus
taacgcctcttgtgccgaataattt

SEQ ID NO: 160478 - DNA, 25 bp, Saccharomyces pastorianus
ctggatcccactaattgcacatcaa

SEQ ID NO: 160479 - DNA, 25 bp, Saccharomyces pastorianus
gagagaactatgctccctttataga

SEQ ID NO: 160480 - DNA, 25 bp, Saccharomyces pastorianus
atagtcgtcaccactttacacggtt

SEQ ID NO: 160481 - DNA, 25 bp, Saccharomyces pastorianus
aatttccagcttttcgatactttga

SEQ ID NO: 160482 - DNA, 25 bp, Saccharomyces pastorianus
gaatcttaatttgtgggccttccaa

SEQ ID NO: 160483 - DNA, 25 bp, Saccharomyces pastorianus
tacgattctggagaggctaacgcct

SEQ ID NO: 160484 - DNA, 25 bp, Saccharomyces pastorianus
taagaatcggtcatcctgctaggct

SEQ ID NO: 160485 - DNA, 25 bp, Saccharomyces pastorianus
gagacactctcttgatatacttagt

SEQ ID NO: 160486 - DNA, 25 bp, Saccharomyces pastorianus
aaattcgacgccaatagttcaagag

SEQ ID NO: 160487 - DNA, 25 bp, Saccharomyces pastorianus
cattggagacacgaggctgattacc

SEQ ID NO: 160488 - DNA, 25 bp, Saccharomyces pastorianus
tattctctttattcagcatcgaccc

SEQ ID NO: 160489 - DNA, 25 bp, Saccharomyces pastorianus
catcgacccggtcgtaaattcgacg

SEQ ID NO: 160490 - DNA, 25 bp, Saccharomyces pastorianus
gaaaggcctcaagtccctgaattat

SEQ ID NO: 160491 - DNA, 25 bp, Saccharomyces pastorianus
ggtgttgatatgtacgatccattat

SEQ ID NO: 160492 - DNA, 25 bp, Saccharomyces pastorianus
tgatgctactacaaggtgtgaccta

SEQ ID NO: 160493 - DNA, 25 bp, Saccharomyces pastorianus
tcacaccgctacttcatggacaaac

SEQ ID NO: 160494 - DNA, 25 bp, Saccharomyces pastorianus
tactccggtactatttccagtaacg

SEQ ID NO: 160495 - DNA, 25 bp, Saccharomyces pastorianus
gataccgaacgatctggtgttgata

SEQ ID NO: 160496 - DNA, 25 bp, Saccharomyces pastorianus
agaaactatcgaatctcacaccgct

SEQ ID NO: 160497 - DNA, 25 bp, Saccharomyces pastorianus
gcaactgcctgtgagctaactggca

SEQ ID NO: 160498 - DNA, 25 bp, Saccharomyces pastorianus
caattggttcgaagcaactgcctgt

SEQ ID NO: 160499 - DNA, 25 bp, Saccharomyces pastorianus
aactgcctgtgagctaactggcaag

SEQ ID NO: 160500 - DNA, 25 bp, Saccharomyces pastorianus
cctgtgagctaactggcaagattgc

SEQ ID NO: 160501 - DNA, 25 bp, Saccharomyces pastorianus
gacaattggttcgaagcaactgcct

SEQ ID NO: 160502 - DNA, 25 bp, Saccharomyces pastorianus
tgtgagctaactggcaagattgcta

SEQ ID NO: 160503 - DNA, 25 bp, Saccharomyces pastorianus
gctaactggcaagattgctagctac

SEQ ID NO: 160504 - DNA, 25 bp, Saccharomyces pastorianus
tgtatatgacaattggttcgaagca

SEQ ID NO: 160505 - DNA, 25 bp, Saccharomyces pastorianus
aagcaactgcctgtgagctaactgg

SEQ ID NO: 160506 - DNA, 25 bp, Saccharomyces pastorianus
ttctgttgtatatgacaattggttc

SEQ ID NO: 160507 - DNA, 25 bp, Saccharomyces pastorianus
ctgcctgtgagctaactggcaagat

SEQ ID NO: 160508 - DNA, 25 bp, Saccharomyces pastorianus
taaaaatgtctttcctgaggtctct

SEQ ID NO: 160509 - DNA, 25 bp, Saccharomyces pastorianus
gaatatccaacttgctcgatgagct

SEQ ID NO: 160510 - DNA, 25 bp, Saccharomyces pastorianus
gaagagctcatcttttttccagtat

SEQ ID NO: 160511 - DNA, 25 bp, Saccharomyces pastorianus
ggctttcccttcaagtttctgaaat

SEQ ID NO: 160512 - DNA, 25 bp, Saccharomyces pastorianus
gacgaaactatatctcgtgtcgtaa

SEQ ID NO: 160513 - DNA, 25 bp, Saccharomyces pastorianus
ctcccttcataatgtgcctttcaga

SEQ ID NO: 160514 - DNA, 25 bp, Saccharomyces pastorianus
tttccagtatatttcggcgcttcca

SEQ ID NO: 160515 - DNA, 25 bp, Saccharomyces pastorianus
tcggcgcttccatctaaaaatctaa

SEQ ID NO: 160516 - DNA, 25 bp, Saccharomyces pastorianus
tcctgaggtctctgatcatgatgtt

SEQ ID NO: 160517 - DNA, 25 bp, Saccharomyces pastorianus
tgaatagtcttcaagggctttccct

SEQ ID NO: 160518 - DNA, 25 bp, Saccharomyces pastorianus
agtataactacatttctcccttcat

SEQ ID NO: 160519 - DNA, 25 bp, Saccharomyces pastorianus
ggcagcagcttttaaatcactatgt

SEQ ID NO: 160520 - DNA, 25 bp, Saccharomyces pastorianus
ggcacttcaaagtcttaacccacga

SEQ ID NO: 160521 - DNA, 25 bp, Saccharomyces pastorianus
accagagaccgtattgctagagata

SEQ ID NO: 160522 - DNA, 25 bp, Saccharomyces pastorianus
tgaaactttcatagcctggcagcag

SEQ ID NO: 160523 - DNA, 25 bp, Saccharomyces pastorianus
gatgccgatagcgacgagatcacca

SEQ ID NO: 160524 - DNA, 25 bp, Saccharomyces pastorianus
gaatggctcgtcctgccttgattta

SEQ ID NO: 160525 - DNA, 25 bp, Saccharomyces pastorianus
aaatgagctccgactgcgcaattat

SEQ ID NO: 160526 - DNA, 25 bp, Saccharomyces pastorianus
ctcatataaagtctgatccgcgctt

SEQ ID NO: 160527 - DNA, 25 bp, Saccharomyces pastorianus
ggtattataacaacatcatcctctg

SEQ ID NO: 160528 - DNA, 25 bp, Saccharomyces pastorianus
gatccgcgctttttacatatgcttg

SEQ ID NO: 160529 - DNA, 25 bp, Saccharomyces pastorianus
gatatatggcgaaccggcacttcaa

SEQ ID NO: 160530 - DNA, 25 bp, Saccharomyces pastorianus
aggacttgggcaacatccggttgga

SEQ ID NO: 160531 - DNA, 25 bp, Saccharomyces pastorianus
gatgaacatgagtcccatagcgaaa

SEQ ID NO: 160532 - DNA, 25 bp, Saccharomyces pastorianus
cccctacatttacctgacattttgg

SEQ ID NO: 160533 - DNA, 25 bp, Saccharomyces pastorianus
aattcgcacaaccttgatgaacatg

SEQ ID NO: 160534 - DNA, 25 bp, Saccharomyces pastorianus
gttggaagaacactacccgagattt

SEQ ID NO: 160535 - DNA, 25 bp, Saccharomyces pastorianus
agatggacttgaacgttctcacgat

SEQ ID NO: 160536 - DNA, 25 bp, Saccharomyces pastorianus
tgacattttggaaacattcgcacaa

SEQ ID NO: 160537 - DNA, 25 bp, Saccharomyces pastorianus
taataatgaatttggcagcaacccc

SEQ ID NO: 160538 - DNA, 25 bp, Saccharomyces pastorianus
ttcggcaaggaatgagcggatttct

SEQ ID NO: 160539 - DNA, 25 bp, Saccharomyces pastorianus
actacccgagattttatcgatgatt

SEQ ID NO: 160540 - DNA, 25 bp, Saccharomyces pastorianus
tagaactcagaatggcagtgacgaa

SEQ ID NO: 160541 - DNA, 25 bp, Saccharomyces pastorianus
caacgtgcggaattgcatccctata

SEQ ID NO: 160542 - DNA, 25 bp, Saccharomyces pastorianus
attgcatccctatagaagtcaacgg

SEQ ID NO: 160543 - DNA, 25 bp, Saccharomyces pastorianus
gaggtcatcaacaagatcatcaatg

SEQ ID NO: 160544 - DNA, 25 bp, Saccharomyces pastorianus
agatcatcaatgacagccctccagg

SEQ ID NO: 160545 - DNA, 25 bp, Saccharomyces pastorianus
atactattttggatgctattgagaa

SEQ ID NO: 160546 - DNA, 25 bp, Saccharomyces pastorianus
gctattgagaattacaacgtgcgga

SEQ ID NO: 160547 - DNA, 25 bp, Saccharomyces pastorianus
gtaaattcgaagaggtcatcaacaa

SEQ ID NO: 160548 - DNA, 25 bp, Saccharomyces pastorianus
gtcaacgggaactctgtaattattt

SEQ ID NO: 160549 - DNA, 25 bp, Saccharomyces pastorianus
gatcacaagtgaaaactccaaaaat

SEQ ID NO: 160550 - DNA, 25 bp, Saccharomyces pastorianus
gaagtatacgacgatctaatcaaga

SEQ ID NO: 160551 - DNA, 25 bp, Saccharomyces pastorianus
tcaatgacagccctccaggagaatt

SEQ ID NO: 160552 - DNA, 25 bp, Saccharomyces pastorianus
caaggcttctaactggagattagtc

SEQ ID NO: 160553 - DNA, 25 bp, Saccharomyces pastorianus
caccgattctattgtcaaggcttct

SEQ ID NO: 160554 - DNA, 25 bp, Saccharomyces pastorianus
tattgtcaaggcttctaactggaga

SEQ ID NO: 160555 - DNA, 25 bp, Saccharomyces pastorianus
accgattctattgtcaaggcttcta

SEQ ID NO: 160556 - DNA, 25 bp, Saccharomyces pastorianus
ttctattgtcaaggcttctaactgg

SEQ ID NO: 160557 - DNA, 25 bp, Saccharomyces pastorianus
tgtcaaggcttctaactggagatta

SEQ ID NO: 160558 - DNA, 25 bp, Saccharomyces pastorianus
ccgattctattgtcaaggcttctaa

SEQ ID NO: 160559 - DNA, 25 bp, Saccharomyces pastorianus
ttgtcaaggcttctaactggagatt

SEQ ID NO: 160560 - DNA, 25 bp, Saccharomyces pastorianus
gattctattgtcaaggcttctaact

SEQ ID NO: 160561 - DNA, 25 bp, Saccharomyces pastorianus
tccaccgattctattgtcaaggctt

SEQ ID NO: 160562 - DNA, 25 bp, Saccharomyces pastorianus
ctattgtcaaggcttctaactggag

SEQ ID NO: 160563 - DNA, 25 bp, Saccharomyces pastorianus
gaacaatgaatctacctcagttgca

SEQ ID NO: 160564 - DNA, 25 bp, Saccharomyces pastorianus
attggcgccggatcagaatttcacg

SEQ ID NO: 160565 - DNA, 25 bp, Saccharomyces pastorianus
aaagcacgcctcaaaatctggtttc

SEQ ID NO: 160566 - DNA, 25 bp, Saccharomyces pastorianus
tgggtcaacgacaggaattcatgga

SEQ ID NO: 160567 - DNA, 25 bp, Saccharomyces pastorianus
aatacaggccgttcgaagtagtgac

SEQ ID NO: 160568 - DNA, 25 bp, Saccharomyces pastorianus
caacttcaggcgatatcattgagaa

SEQ ID NO: 160569 - DNA, 25 bp, Saccharomyces pastorianus
aggccactggtcttttggctggaat

SEQ ID NO: 160570 - DNA, 25 bp, Saccharomyces pastorianus
gacacgttctatgagcgaggccact

SEQ ID NO: 160571 - DNA, 25 bp, Saccharomyces pastorianus
aagcagagtgatttgatgggtcaac

SEQ ID NO: 160572 - DNA, 25 bp, Saccharomyces pastorianus
taatgcgccgatcgcagaaacagcg

SEQ ID NO: 160573 - DNA, 25 bp, Saccharomyces pastorianus
aatctggtttctaatgcgccgatcg

SEQ ID NO: 160574 - DNA, 25 bp, Saccharomyces pastorianus
gtcggttcccagtcgtcaggaaagt

SEQ ID NO: 160575 - DNA, 25 bp, Saccharomyces pastorianus
gaaagtcgtccgttttggagaacat

SEQ ID NO: 160576 - DNA, 25 bp, Saccharomyces pastorianus
acagatcactgttgtcggttcccag

SEQ ID NO: 160577 - DNA, 25 bp, Saccharomyces pastorianus
ccgcatgttcttactttgacgttag

SEQ ID NO: 160578 - DNA, 25 bp, Saccharomyces pastorianus
ggtattgtcaccaggagacctttag

SEQ ID NO: 160579 - DNA, 25 bp, Saccharomyces pastorianus
aggtatttcttctgtgcccattaac

SEQ ID NO: 160580 - DNA, 25 bp, Saccharomyces pastorianus
gtgaatttttgcatttacctggtaa

SEQ ID NO: 160581 - DNA, 25 bp, Saccharomyces pastorianus
ttggcgcccttaggaggaggatctc

SEQ ID NO: 160582 - DNA, 25 bp, Saccharomyces pastorianus
atttattctccgcatgttcttactt

SEQ ID NO: 160583 - DNA, 25 bp, Saccharomyces pastorianus
gacaggtgccaattcaggtatttct

SEQ ID NO: 160584 - DNA, 25 bp, Saccharomyces pastorianus
cgttagtggatttgcctgggttgac

SEQ ID NO: 160585 - DNA, 25 bp, Saccharomyces pastorianus
aaaaattacatcctcgccaagtcgc

SEQ ID NO: 160586 - DNA, 25 bp, Saccharomyces pastorianus
gccaagtcgctgttgacccaaagac

SEQ ID NO: 160587 - DNA, 25 bp, Saccharomyces pastorianus
gttgtcgatatcatcaaagctgaac

SEQ ID NO: 160588 - DNA, 25 bp, Saccharomyces pastorianus
attggcagctttggaatcaccacct

SEQ ID NO: 160589 - DNA, 25 bp, Saccharomyces pastorianus
agtactcaaggtatcctgctctaag

SEQ ID NO: 160590 - DNA, 25 bp, Saccharomyces pastorianus
ccatcgtctagtaaggcgccagtta

SEQ ID NO: 160591 - DNA, 25 bp, Saccharomyces pastorianus
gaaccattgccgatattataccaaa

SEQ ID NO: 160592 - DNA, 25 bp, Saccharomyces pastorianus
tcctgttttaaaagctactggccaa

SEQ ID NO: 160593 - DNA, 25 bp, Saccharomyces pastorianus
atcccgacctcttgaagggttctca

SEQ ID NO: 160594 - DNA, 25 bp, Saccharomyces pastorianus
ggatgctactattcctacgaatgag

SEQ ID NO: 160595 - DNA, 25 bp, Saccharomyces pastorianus
aatcagttcattcagttcttaaagg

SEQ ID NO: 160596 - DNA, 25 bp, Saccharomyces pastorianus
gaaggtctcggcaatggttataatc

SEQ ID NO: 160597 - DNA, 25 bp, Saccharomyces pastorianus
gaaacagcgcaatccgaagtcaaaa

SEQ ID NO: 160598 - DNA, 25 bp, Saccharomyces pastorianus
aaacgctttctccttcatgttacaa

SEQ ID NO: 160599 - DNA, 25 bp, Saccharomyces pastorianus
gcaggcaactaagcctttaccgggt

SEQ ID NO: 160600 - DNA, 25 bp, Saccharomyces pastorianus
tcactctcagagcaacacaccatgg

SEQ ID NO: 160601 - DNA, 25 bp, Saccharomyces pastorianus
taccgggttcaaggccatcatgcaa

SEQ ID NO: 160602 - DNA, 25 bp, Saccharomyces pastorianus
tattgagccagaatctaaccgtgaa

SEQ ID NO: 160603 - DNA, 25 bp, Saccharomyces pastorianus
cagccgcagcaggtgcgttagctat

SEQ ID NO: 160604 - DNA, 25 bp, Saccharomyces pastorianus
ataatcgttctctcctaactgaaga

SEQ ID NO: 160605 - DNA, 25 bp, Saccharomyces pastorianus
gcgttagctatatctgctcttgata

SEQ ID NO: 160606 - DNA, 25 bp, Saccharomyces pastorianus
cacaccatggagtataagccctata

SEQ ID NO: 160607 - DNA, 25 bp, Saccharomyces pastorianus
attatgccgctgcaaaagccgccat

SEQ ID NO: 160608 - DNA, 25 bp, Saccharomyces pastorianus
ctgaaagtccaccttttttccacat

SEQ ID NO: 160609 - DNA, 25 bp, Saccharomyces pastorianus
tatcaatactacttctacctcagga

SEQ ID NO: 160610 - DNA, 25 bp, Saccharomyces pastorianus
ttgttaatgttatcgctcctcatgc

SEQ ID NO: 160611 - DNA, 25 bp, Saccharomyces pastorianus
tcgctcctcatgcagaaacggctat

SEQ ID NO: 160612 - DNA, 25 bp, Saccharomyces pastorianus
agtctccccacttgttgttttgttg

SEQ ID NO: 160613 - DNA, 25 bp, Saccharomyces pastorianus
tggtttgctgtcctgaaagtccacc

SEQ ID NO: 160614 - DNA, 25 bp, Saccharomyces pastorianus
aagccgccattttaggattcagtaa

SEQ ID NO: 160615 - DNA, 25 bp, Saccharomyces pastorianus
ggacaggccaattatgccgctgcaa

SEQ ID NO: 160616 - DNA, 25 bp, Saccharomyces pastorianus
gacaaagactatattctcggagaag

SEQ ID NO: 160617 - DNA, 25 bp, Saccharomyces pastorianus
aaccactttgatgcatctcaagtct

SEQ ID NO: 160618 - DNA, 25 bp, Saccharomyces pastorianus
tttaccaccacatatcttgaaacag

SEQ ID NO: 160619 - DNA, 25 bp, Saccharomyces pastorianus
aacgttttaccaccacatatcttga

SEQ ID NO: 160620 - DNA, 25 bp, Saccharomyces pastorianus
gaaaacgttttaccaccacatatct

SEQ ID NO: 160621 - DNA, 25 bp, Saccharomyces pastorianus
caccacatatcttgaaacagttagg

SEQ ID NO: 160622 - DNA, 25 bp, Saccharomyces pastorianus
tatcttgaaacagttaggaccggtt

SEQ ID NO: 160623 - DNA, 25 bp, Saccharomyces pastorianus
taccaccacatatcttgaaacagtt

SEQ ID NO: 160624 - DNA, 25 bp, Saccharomyces pastorianus
tgaaacagttaggaccggttaatat

SEQ ID NO: 160625 - DNA, 25 bp, Saccharomyces pastorianus
aaacgttttaccaccacatatcttg

SEQ ID NO: 160626 - DNA, 25 bp, Saccharomyces pastorianus
cgttttaccaccacatatcttgaaa

SEQ ID NO: 160627 - DNA, 25 bp, Saccharomyces pastorianus
cagaaaacgttttaccaccacatat

SEQ ID NO: 160628 - DNA, 25 bp, Saccharomyces pastorianus
acgttttaccaccacatatcttgaa

SEQ ID NO: 160629 - DNA, 25 bp, Saccharomyces pastorianus
ataagctatcgcgtgctgcttggcc

SEQ ID NO: 160630 - DNA, 25 bp, Saccharomyces pastorianus
tatatgcgctctcagaaatttggta

SEQ ID NO: 160631 - DNA, 25 bp, Saccharomyces pastorianus
atctgtggtagatgttcatttgaca

SEQ ID NO: 160632 - DNA, 25 bp, Saccharomyces pastorianus
gatgttcatttgacaggtggctata

SEQ ID NO: 160633 - DNA, 25 bp, Saccharomyces pastorianus
ggtagaatcattaacaccgcttccc

SEQ ID NO: 160634 - DNA, 25 bp, Saccharomyces pastorianus
tcccctgccggtctatttggaaatt

SEQ ID NO: 160635 - DNA, 25 bp, Saccharomyces pastorianus
ttggccttatatgcgctctcagaaa

SEQ ID NO: 160636 - DNA, 25 bp, Saccharomyces pastorianus
tatcgcgtgctgcttggccttatat

SEQ ID NO: 160637 - DNA, 25 bp, Saccharomyces pastorianus
agaatcattaacaccgcttcccctg

SEQ ID NO: 160638 - DNA, 25 bp, Saccharomyces pastorianus
aggtggctataagctatcgcgtgct

SEQ ID NO: 160639 - DNA, 25 bp, Saccharomyces pastorianus
gaacgtgagtttgcatctgtggtag

SEQ ID NO: 160640 - DNA, 25 bp, Saccharomyces pastorianus
actagcttacgcaagcagaggtgca

SEQ ID NO: 160641 - DNA, 25 bp, Saccharomyces pastorianus
aaagttgttgtaatcacgggcgctg

SEQ ID NO: 160642 - DNA, 25 bp, Saccharomyces pastorianus
aaagccggaggtatagctgtggcaa

SEQ ID NO: 160643 - DNA, 25 bp, Saccharomyces pastorianus
caaagctgcagacttagtggtggat

SEQ ID NO: 160644 - DNA, 25 bp, Saccharomyces pastorianus
cagaggtgcaaaagtggtcgtcaat

SEQ ID NO: 160645 - DNA, 25 bp, Saccharomyces pastorianus
ggtcgtcaatgatctaggtggcact

SEQ ID NO: 160646 - DNA, 25 bp, Saccharomyces pastorianus
gggtggttcaggacataactccaaa

SEQ ID NO: 160647 - DNA, 25 bp, Saccharomyces pastorianus
gggcttaggtaaggtgtatgcacta

SEQ ID NO: 160648 - DNA, 25 bp, Saccharomyces pastorianus
gctgtggcaaattacgactctgtta

SEQ ID NO: 160649 - DNA, 25 bp, Saccharomyces pastorianus
ggacataactccaaagctgcagact

SEQ ID NO: 160650 - DNA, 25 bp, Saccharomyces pastorianus
gtgtatgcactagcttacgcaagca

SEQ ID NO: 160651 - DNA, 25 bp, Saccharomyces pastorianus
aaaggcttcgcacaaatttcgcaat

SEQ ID NO: 160652 - DNA, 25 bp, Saccharomyces pastorianus
gggtctagccagcataaacacaggg

SEQ ID NO: 160653 - DNA, 25 bp, Saccharomyces pastorianus
tttgccgaggatttactagaaacat

SEQ ID NO: 160654 - DNA, 25 bp, Saccharomyces pastorianus
tgctttgtcagcgacagctttctac

SEQ ID NO: 160655 - DNA, 25 bp, Saccharomyces pastorianus
gcgacagctttctacgctggaggta

SEQ ID NO: 160656 - DNA, 25 bp, Saccharomyces pastorianus
actatcacgataggccaacattgtt

SEQ ID NO: 160657 - DNA, 25 bp, Saccharomyces pastorianus
ggtagttcacaaacgcgcagatcta

SEQ ID NO: 160658 - DNA, 25 bp, Saccharomyces pastorianus
gctggaggtatcatatattcgcaaa

SEQ ID NO: 160659 - DNA, 25 bp, Saccharomyces pastorianus
tggtgactttttctctaataacgtt

SEQ ID NO: 160660 - DNA, 25 bp, Saccharomyces pastorianus
acacagggactaccgttgcatcaaa

SEQ ID NO: 160661 - DNA, 25 bp, Saccharomyces pastorianus
taataacgttccttttgccgaggat

SEQ ID NO: 160662 - DNA, 25 bp, Saccharomyces pastorianus
accaagtggttctcctgaggaggtt

SEQ ID NO: 160663 - DNA, 25 bp, Saccharomyces pastorianus
aggttaccaagtggttctcctgagg

SEQ ID NO: 160664 - DNA, 25 bp, Saccharomyces pastorianus
attaggttaccaagtggttctcctg

SEQ ID NO: 160665 - DNA, 25 bp, Saccharomyces pastorianus
ggttaccaagtggttctcctgagga

SEQ ID NO: 160666 - DNA, 25 bp, Saccharomyces pastorianus
ttaggttaccaagtggttctcctga

SEQ ID NO: 160667 - DNA, 25 bp, Saccharomyces pastorianus
taggttaccaagtggttctcctgag

SEQ ID NO: 160668 - DNA, 25 bp, Saccharomyces pastorianus
ttaccaagtggttctcctgaggagg

SEQ ID NO: 160669 - DNA, 25 bp, Saccharomyces pastorianus
taccaagtggttctcctgaggaggt

SEQ ID NO: 160670 - DNA, 25 bp, Saccharomyces pastorianus
ttctcctgaggaggttggaattgat

SEQ ID NO: 160671 - DNA, 25 bp, Saccharomyces pastorianus
gttaccaagtggttctcctgaggag

SEQ ID NO: 160672 - DNA, 25 bp, Saccharomyces pastorianus
tggttctcctgaggaggttggaatt

SEQ ID NO: 160673 - DNA, 25 bp, Saccharomyces pastorianus
attgcaggttcagatgatgacatca

SEQ ID NO: 160674 - DNA, 25 bp, Saccharomyces pastorianus
gataatgctagcgattttgacatga

SEQ ID NO: 160675 - DNA, 25 bp, Saccharomyces pastorianus
gacaagcgagcgagcatgaccataa

SEQ ID NO: 160676 - DNA, 25 bp, Saccharomyces pastorianus
gaaaacccggagttgttagcagcac

SEQ ID NO: 160677 - DNA, 25 bp, Saccharomyces pastorianus
gaaagagctcttgcgttgaagaagc

SEQ ID NO: 160678 - DNA, 25 bp, Saccharomyces pastorianus
tatatttccaagacacttcggcaga

SEQ ID NO: 160679 - DNA, 25 bp, Saccharomyces pastorianus
ttagcagcacaagaacgattagata

SEQ ID NO: 160680 - DNA, 25 bp, Saccharomyces pastorianus
ggcgcgagaagtacgttgttagcat

SEQ ID NO: 160681 - DNA, 25 bp, Saccharomyces pastorianus
gttactatgacagaagtccctaagg

SEQ ID NO: 160682 - DNA, 25 bp, Saccharomyces pastorianus
tcgtccttatccaatgcgtcaaatg

SEQ ID NO: 160683 - DNA, 25 bp, Saccharomyces pastorianus
gcgtcaaatggagctaatgtcccaa

SEQ ID NO: 160684 - DNA, 25 bp, Saccharomyces pastorianus
atatcatgtttgttccacgcttgtg

SEQ ID NO: 160685 - DNA, 25 bp, Saccharomyces pastorianus
tgttgatcgtacttctggtgcattc

SEQ ID NO: 160686 - DNA, 25 bp, Saccharomyces pastorianus
gcattggttattgctcctacacgag

SEQ ID NO: 160687 - DNA, 25 bp, Saccharomyces pastorianus
ttgtcactacttggtcccatgttta

SEQ ID NO: 160688 - DNA, 25 bp, Saccharomyces pastorianus
gcaatttcataatcggtacaccagg

SEQ ID NO: 160689 - DNA, 25 bp, Saccharomyces pastorianus
ttgttcacgatattcccatcaactc

SEQ ID NO: 160690 - DNA, 25 bp, Saccharomyces pastorianus
ttttttcattcacgcccaaacaggc

SEQ ID NO: 160691 - DNA, 25 bp, Saccharomyces pastorianus
gagcatccagaagcaggccatacct

SEQ ID NO: 160692 - DNA, 25 bp, Saccharomyces pastorianus
gaaaaatttcccaagctaccgcata

SEQ ID NO: 160693 - DNA, 25 bp, Saccharomyces pastorianus
caccaggtcgtgttttggatcattt

SEQ ID NO: 160694 - DNA, 25 bp, Saccharomyces pastorianus
cacgcttgtgtcatgttgtcactac

SEQ ID NO: 160695 - DNA, 25 bp, Saccharomyces pastorianus
gacccagtgatcgaagagtttccat

SEQ ID NO: 160696 - DNA, 25 bp, Saccharomyces pastorianus
gatataaacccaagtcgcacctatg

SEQ ID NO: 160697 - DNA, 25 bp, Saccharomyces pastorianus
agaggagtcactgcacgtgtttcag

SEQ ID NO: 160698 - DNA, 25 bp, Saccharomyces pastorianus
attcctttggatgagcaggccttct

SEQ ID NO: 160699 - DNA, 25 bp, Saccharomyces pastorianus
gaggacgccagaaggaaccctaatc

SEQ ID NO: 160700 - DNA, 25 bp, Saccharomyces pastorianus
acaacgcgctcaagtggttaccatg

SEQ ID NO: 160701 - DNA, 25 bp, Saccharomyces pastorianus
gtaggacgcaaacctgctgagcatc

SEQ ID NO: 160702 - DNA, 25 bp, Saccharomyces pastorianus
tgagcatccgtttatctctgcagca

SEQ ID NO: 160703 - DNA, 25 bp, Saccharomyces pastorianus
gggtagcacaattgaagccattttt

SEQ ID NO: 160704 - DNA, 25 bp, Saccharomyces pastorianus
gaacggaacaaacagcgctatagct

SEQ ID NO: 160705 - DNA, 25 bp, Saccharomyces pastorianus
gtgtttcagtatgctaatagaccaa

SEQ ID NO: 160706 - DNA, 25 bp, Saccharomyces pastorianus
tgtcacattttcaccctttattcat

SEQ ID NO: 160707 - DNA, 25 bp, Saccharomyces pastorianus
gaagctttttgaactaaaacattca

SEQ ID NO: 160708 - DNA, 25 bp, Saccharomyces pastorianus
gctccacttttttcgcatataggtc

SEQ ID NO: 160709 - DNA, 25 bp, Saccharomyces pastorianus
cacattttcaccctttattcatcaa

SEQ ID NO: 160710 - DNA, 25 bp, Saccharomyces pastorianus
attgctccacttttttcgcatatag

SEQ ID NO: 160711 - DNA, 25 bp, Saccharomyces pastorianus
gaactaaaacattcacattgtcaca

SEQ ID NO: 160712 - DNA, 25 bp, Saccharomyces pastorianus
attgtcacattttcaccctttattc

SEQ ID NO: 160713 - DNA, 25 bp, Saccharomyces pastorianus
ttttattgctccacttttttcgcat

SEQ ID NO: 160714 - DNA, 25 bp, Saccharomyces pastorianus
acattgtcacattttcaccctttat

SEQ ID NO: 160715 - DNA, 25 bp, Saccharomyces pastorianus
ttcaccctttattcatcaatttttt

SEQ ID NO: 160716 - DNA, 25 bp, Saccharomyces pastorianus
ttcacattgtcacattttcaccctt

SEQ ID NO: 160717 - DNA, 25 bp, Saccharomyces pastorianus
aacaccaccaagaccgaagactatt

SEQ ID NO: 160718 - DNA, 25 bp, Saccharomyces pastorianus
ttcttttcaattctttatccgcatt

SEQ ID NO: 160719 - DNA, 25 bp, Saccharomyces pastorianus
atttttcaccatcagtttgactttg

SEQ ID NO: 160720 - DNA, 25 bp, Saccharomyces pastorianus
ggtcacaaccttcagatcctaaact

SEQ ID NO: 160721 - DNA, 25 bp, Saccharomyces pastorianus
ggatcctaatgatgatggccagtca

SEQ ID NO: 160722 - DNA, 25 bp, Saccharomyces pastorianus
gccagacctggtaatccattgtata

SEQ ID NO: 160723 - DNA, 25 bp, Saccharomyces pastorianus
aaagtgccgaatcagagtttaccga

SEQ ID NO: 160724 - DNA, 25 bp, Saccharomyces pastorianus
gatggccagtcatatgccagacctg

SEQ ID NO: 160725 - DNA, 25 bp, Saccharomyces pastorianus
atggacatcgggtacttcattgttc

SEQ ID NO: 160726 - DNA, 25 bp, Saccharomyces pastorianus
ttcattgttccctccagaccatttt

SEQ ID NO: 160727 - DNA, 25 bp, Saccharomyces pastorianus
taggcaccagtgttgatgatcgaat

SEQ ID NO: 160728 - DNA, 25 bp, Saccharomyces pastorianus
aaattatctcactgacccacgaaac

SEQ ID NO: 160729 - DNA, 25 bp, Saccharomyces pastorianus
agggtcattttccattcccattggc

SEQ ID NO: 160730 - DNA, 25 bp, Saccharomyces pastorianus
ggccgatatatatagatgcacgctt

SEQ ID NO: 160731 - DNA, 25 bp, Saccharomyces pastorianus
ggcagtgggattcaaaacatcctat

SEQ ID NO: 160732 - DNA, 25 bp, Saccharomyces pastorianus
agagatacgcgcaaagtctttataa

SEQ ID NO: 160733 - DNA, 25 bp, Saccharomyces pastorianus
aattttgagtaacggcgaatgcggc

SEQ ID NO: 160734 - DNA, 25 bp, Saccharomyces pastorianus
tttccattcccattggccgatatat

SEQ ID NO: 160735 - DNA, 25 bp, Saccharomyces pastorianus
agggcatgacaatagactctttaga

SEQ ID NO: 160736 - DNA, 25 bp, Saccharomyces pastorianus
gcacgcttatcaggcaattcaacta

SEQ ID NO: 160737 - DNA, 25 bp, Saccharomyces pastorianus
gacccacgaaaccattacaggatat

SEQ ID NO: 160738 - DNA, 25 bp, Saccharomyces pastorianus
attttaggcgaattggacttctata

SEQ ID NO: 160739 - DNA, 25 bp, Saccharomyces pastorianus
ttttccagaatagaaaccttcggat

SEQ ID NO: 160740 - DNA, 25 bp, Saccharomyces pastorianus
gtctcttctttctcttgaatatttt

SEQ ID NO: 160741 - DNA, 25 bp, Saccharomyces pastorianus
taagcagtctcttctttctcttgaa

SEQ ID NO: 160742 - DNA, 25 bp, Saccharomyces pastorianus
ccttcggattattcgtaggtaatga

SEQ ID NO: 160743 - DNA, 25 bp, Saccharomyces pastorianus
agttgtaagcagtctcttctttctc

SEQ ID NO: 160744 - DNA, 25 bp, Saccharomyces pastorianus
tatttgggtcgttagaatgggtatt

SEQ ID NO: 160745 - DNA, 25 bp, Saccharomyces pastorianus
atggacccgctcaccataaactttt

SEQ ID NO: 160746 - DNA, 25 bp, Saccharomyces pastorianus
atgaaccaccaccagttgtaagcag

SEQ ID NO: 160747 - DNA, 25 bp, Saccharomyces pastorianus
tagaaaccttcggattattcgtagg

SEQ ID NO: 160748 - DNA, 25 bp, Saccharomyces pastorianus
gtaggtaatgaaccaccaccagttg

SEQ ID NO: 160749 - DNA, 25 bp, Saccharomyces pastorianus
gcagtctcttctttctcttgaatat

SEQ ID NO: 160750 - DNA, 25 bp, Saccharomyces pastorianus
tgtcacgtaattctgcagcaggttt

SEQ ID NO: 160751 - DNA, 25 bp, Saccharomyces pastorianus
gcagcaggtttggaaaacactcttt

SEQ ID NO: 160752 - DNA, 25 bp, Saccharomyces pastorianus
ttctgcagcaggtttggaaaacact

SEQ ID NO: 160753 - DNA, 25 bp, Saccharomyces pastorianus
atgtcacgtaattctgcagcaggtt

SEQ ID NO: 160754 - DNA, 25 bp, Saccharomyces pastorianus
gtcacgtaattctgcagcaggtttg

SEQ ID NO: 160755 - DNA, 25 bp, Saccharomyces pastorianus
attctgcagcaggtttggaaaacac

SEQ ID NO: 160756 - DNA, 25 bp, Saccharomyces pastorianus
ctgcagcaggtttggaaaacactct

SEQ ID NO: 160757 - DNA, 25 bp, Saccharomyces pastorianus
aattctgcagcaggtttggaaaaca

SEQ ID NO: 160758 - DNA, 25 bp, Saccharomyces pastorianus
cacgtaattctgcagcaggtttgga

SEQ ID NO: 160759 - DNA, 25 bp, Saccharomyces pastorianus
cagcaggtttggaaaacactctttt

SEQ ID NO: 160760 - DNA, 25 bp, Saccharomyces pastorianus
cgtaattctgcagcaggtttggaaa

SEQ ID NO: 160761 - DNA, 25 bp, Saccharomyces pastorianus
gattgccgtgttatctgtcggtaac

SEQ ID NO: 160762 - DNA, 25 bp, Saccharomyces pastorianus
tgtcacatctgcattcggtcttatt

SEQ ID NO: 160763 - DNA, 25 bp, Saccharomyces pastorianus
actgttgttgggttcatcatcttag

SEQ ID NO: 160764 - DNA, 25 bp, Saccharomyces pastorianus
gtcttgctgccagtgaatccgtaga

SEQ ID NO: 160765 - DNA, 25 bp, Saccharomyces pastorianus
gctgccttttcttttaacggttcag

SEQ ID NO: 160766 - DNA, 25 bp, Saccharomyces pastorianus
cagaaatcttttcctacgttgaccg

SEQ ID NO: 160767 - DNA, 25 bp, Saccharomyces pastorianus
aacgtcgttatcttgattgccgtgt

SEQ ID NO: 160768 - DNA, 25 bp, Saccharomyces pastorianus
gatcctggtgcctttgctggtgaca

SEQ ID NO: 160769 - DNA, 25 bp, Saccharomyces pastorianus
gactcacggtatcaagggtttgcca

SEQ ID NO: 160770 - DNA, 25 bp, Saccharomyces pastorianus
gaaagtccgttcctaaggctgctaa

SEQ ID NO: 160771 - DNA, 25 bp, Saccharomyces pastorianus
aaaggtgtttgttctgtcttcgtca

SEQ ID NO: 160772 - DNA, 25 bp, Saccharomyces pastorianus
actaccacaactaacgcatcggtct

SEQ ID NO: 160773 - DNA, 25 bp, Saccharomyces pastorianus
gaaagtcctagcatgtcaaacagtc

SEQ ID NO: 160774 - DNA, 25 bp, Saccharomyces pastorianus
cagtcatcatacatcccagggaaga

SEQ ID NO: 160775 - DNA, 25 bp, Saccharomyces pastorianus
agggaaagtcctagcatgtcaaaca

SEQ ID NO: 160776 - DNA, 25 bp, Saccharomyces pastorianus
taacgcatcggtctcgagcagtaaa

SEQ ID NO: 160777 - DNA, 25 bp, Saccharomyces pastorianus
ataataaacaccactaccacaacta

SEQ ID NO: 160778 - DNA, 25 bp, Saccharomyces pastorianus
gtcctagcatgtcaaacagtcatca

SEQ ID NO: 160779 - DNA, 25 bp, Saccharomyces pastorianus
ataaacaccactaccacaactaacg

SEQ ID NO: 160780 - DNA, 25 bp, Saccharomyces pastorianus
tggtgccaagggaaagtcctagcat

SEQ ID NO: 160781 - DNA, 25 bp, Saccharomyces pastorianus
acaactaacgcatcggtctcgagca

SEQ ID NO: 160782 - DNA, 25 bp, Saccharomyces pastorianus
catcccagggaagaagaaacaaact

SEQ ID NO: 160783 - DNA, 25 bp, Saccharomyces pastorianus
gcagttactgaagggagacgtctct

SEQ ID NO: 160784 - DNA, 25 bp, Saccharomyces pastorianus
caaaggaggcgctttgggtccgact

SEQ ID NO: 160785 - DNA, 25 bp, Saccharomyces pastorianus
cgtgggaccagctgcaatacatgag

SEQ ID NO: 160786 - DNA, 25 bp, Saccharomyces pastorianus
attcgacgtggaaatcgccaaccgc

SEQ ID NO: 160787 - DNA, 25 bp, Saccharomyces pastorianus
gcaaggcccagtttcgttgcaaagg

SEQ ID NO: 160788 - DNA, 25 bp, Saccharomyces pastorianus
attgcagagacagccacgtaccatc

SEQ ID NO: 160789 - DNA, 25 bp, Saccharomyces pastorianus
agctggattcagtgctcaaatacaa

SEQ ID NO: 160790 - DNA, 25 bp, Saccharomyces pastorianus
atacatgagaacttcgtgcccgcaa

SEQ ID NO: 160791 - DNA, 25 bp, Saccharomyces pastorianus
gcaaaggcagattccaaagctggat

SEQ ID NO: 160792 - DNA, 25 bp, Saccharomyces pastorianus
agacgtctctcatcgattcgacgtg

SEQ ID NO: 160793 - DNA, 25 bp, Saccharomyces pastorianus
acgtaccatctcgttgtttaccaat

SEQ ID NO: 160794 - DNA, 25 bp, Saccharomyces pastorianus
tattcatgggtttttggcctttgtc

SEQ ID NO: 160795 - DNA, 25 bp, Saccharomyces pastorianus
gatgtgccgatggactctcctgaca

SEQ ID NO: 160796 - DNA, 25 bp, Saccharomyces pastorianus
tggacccgctttcattgtgcaggaa

SEQ ID NO: 160797 - DNA, 25 bp, Saccharomyces pastorianus
ttttcgagcgagaccaatggacccg

SEQ ID NO: 160798 - DNA, 25 bp, Saccharomyces pastorianus
gtttccagagaagacccacgacaat

SEQ ID NO: 160799 - DNA, 25 bp, Saccharomyces pastorianus
gagtttcaaggacaacctgttccgt

SEQ ID NO: 160800 - DNA, 25 bp, Saccharomyces pastorianus
attgtcctcaatctcaccgttgaat

SEQ ID NO: 160801 - DNA, 25 bp, Saccharomyces pastorianus
aactccacggattctttttcgagcg

SEQ ID NO: 160802 - DNA, 25 bp, Saccharomyces pastorianus
accgttgaatgtttcctcctctaag

SEQ ID NO: 160803 - DNA, 25 bp, Saccharomyces pastorianus
gacaatccgcttcagatgtgccgat

SEQ ID NO: 160804 - DNA, 25 bp, Saccharomyces pastorianus
aagacggaccatgacgttgcaacaa

SEQ ID NO: 160805 - DNA, 25 bp, Saccharomyces pastorianus
aaagacgtagattcagaactgacaa

SEQ ID NO: 160806 - DNA, 25 bp, Saccharomyces pastorianus
ctcaagctttgatgttggctccaac

SEQ ID NO: 160807 - DNA, 25 bp, Saccharomyces pastorianus
atggctttggctttccacatggaca

SEQ ID NO: 160808 - DNA, 25 bp, Saccharomyces pastorianus
gttgtcatggctttggctttccaca

SEQ ID NO: 160809 - DNA, 25 bp, Saccharomyces pastorianus
tctggtttcaaggaacaaatctacc

SEQ ID NO: 160810 - DNA, 25 bp, Saccharomyces pastorianus
gctcctcaagctttgatgttggctc

SEQ ID NO: 160811 - DNA, 25 bp, Saccharomyces pastorianus
aactgacaagatcaagatgttcatc

SEQ ID NO: 160812 - DNA, 25 bp, Saccharomyces pastorianus
aaggctcctcaagctttgatgttgg

SEQ ID NO: 160813 - DNA, 25 bp, Saccharomyces pastorianus
ggctttccacatggacatcaaggtc

SEQ ID NO: 160814 - DNA, 25 bp, Saccharomyces pastorianus
gatgaaatgttgtcttctggtttca

SEQ ID NO: 160815 - DNA, 25 bp, Saccharomyces pastorianus
gctttggctttccacatggacatca

SEQ ID NO: 160816 - DNA, 25 bp, Saccharomyces pastorianus
tccatggagggattttgctgaacta

SEQ ID NO: 160817 - DNA, 25 bp, Saccharomyces pastorianus
ataccaccacgaatcgttccatgga

SEQ ID NO: 160818 - DNA, 25 bp, Saccharomyces pastorianus
atcaggattctattcctatccggtt

SEQ ID NO: 160819 - DNA, 25 bp, Saccharomyces pastorianus
agataagcgacagcgtgcagtgcaa

SEQ ID NO: 160820 - DNA, 25 bp, Saccharomyces pastorianus
ataacatgtgcggtattgctagacg

SEQ ID NO: 160821 - DNA, 25 bp, Saccharomyces pastorianus
tcacgtggtggactctacagcacaa

SEQ ID NO: 160822 - DNA, 25 bp, Saccharomyces pastorianus
aagagtacagagctaccgactaaag

SEQ ID NO: 160823 - DNA, 25 bp, Saccharomyces pastorianus
ctagaggagctgaaactttggtttt

SEQ ID NO: 160824 - DNA, 25 bp, Saccharomyces pastorianus
cgtgtttaggagtacatcaggattc

SEQ ID NO: 160825 - DNA, 25 bp, Saccharomyces pastorianus
attcctatccggttatcgtatgtaa

SEQ ID NO: 160826 - DNA, 25 bp, Saccharomyces pastorianus
gggttcccaatatttacctcacgtg

SEQ ID NO: 160827 - DNA, 25 bp, Saccharomyces pastorianus
attcaatgcctggaaagaactacaa

SEQ ID NO: 160828 - DNA, 25 bp, Saccharomyces pastorianus
aatttggtgaactatgatgccgaaa

SEQ ID NO: 160829 - DNA, 25 bp, Saccharomyces pastorianus
aaagttcacacgcaagttcatcaga

SEQ ID NO: 160830 - DNA, 25 bp, Saccharomyces pastorianus
gatcagggaaaatttgcgtcaatgg

SEQ ID NO: 160831 - DNA, 25 bp, Saccharomyces pastorianus
gaaaatgcgtcatacttgatattgt

SEQ ID NO: 160832 - DNA, 25 bp, Saccharomyces pastorianus
gtatttttgccaatctatgctggcc

SEQ ID NO: 160833 - DNA, 25 bp, Saccharomyces pastorianus
tatcacaatgtggttcttgagaaat

SEQ ID NO: 160834 - DNA, 25 bp, Saccharomyces pastorianus
aattatgacccacttttactcaaag

SEQ ID NO: 160835 - DNA, 25 bp, Saccharomyces pastorianus
tatgctggccaaactagagactgaa

SEQ ID NO: 160836 - DNA, 25 bp, Saccharomyces pastorianus
gtagctaggaattacagaacccaac

SEQ ID NO: 160837 - DNA, 25 bp, Saccharomyces pastorianus
ggaagcgacttagaaacgagtttct

SEQ ID NO: 160838 - DNA, 25 bp, Saccharomyces pastorianus
gaaacaaattgatagcacagtggat

SEQ ID NO: 160839 - DNA, 25 bp, Saccharomyces pastorianus
gaaaaagattccgttccattgaaga

SEQ ID NO: 160840 - DNA, 25 bp, Saccharomyces pastorianus
tcgaggccaaactgaaagaatacat

SEQ ID NO: 160841 - DNA, 25 bp, Saccharomyces pastorianus
tattcctgcggaaaaagattccgtt

SEQ ID NO: 160842 - DNA, 25 bp, Saccharomyces pastorianus
gctgtatgattttattcctgcggaa

SEQ ID NO: 160843 - DNA, 25 bp, Saccharomyces pastorianus
aaagattccgttccattgaagaagg

SEQ ID NO: 160844 - DNA, 25 bp, Saccharomyces pastorianus
aaagctgtatgattttattcctgcg

SEQ ID NO: 160845 - DNA, 25 bp, Saccharomyces pastorianus
gcacagtggatatcgaggccaaact

SEQ ID NO: 160846 - DNA, 25 bp, Saccharomyces pastorianus
gaatacatagaccatttatcattga

SEQ ID NO: 160847 - DNA, 25 bp, Saccharomyces pastorianus
agaccatttatcattgaggtttaat

SEQ ID NO: 160848 - DNA, 25 bp, Saccharomyces pastorianus
gatagcacagtggatatcgaggcca

SEQ ID NO: 160849 - DNA, 25 bp, Saccharomyces pastorianus
gtacactatttgacgccagaagccc

SEQ ID NO: 160850 - DNA, 25 bp, Saccharomyces pastorianus
gaacactaaggctcaagctgcatca

SEQ ID NO: 160851 - DNA, 25 bp, Saccharomyces pastorianus
aaccaaactgtttctataccactga

SEQ ID NO: 160852 - DNA, 25 bp, Saccharomyces pastorianus
tgaaccaaaagtctaccgagtcgta

SEQ ID NO: 160853 - DNA, 25 bp, Saccharomyces pastorianus
acagacagcttcaaaccacctagtt

SEQ ID NO: 160854 - DNA, 25 bp, Saccharomyces pastorianus
aagctagttcttcaacctctaattt

SEQ ID NO: 160855 - DNA, 25 bp, Saccharomyces pastorianus
aagcagatcacagtaggcaacctat

SEQ ID NO: 160856 - DNA, 25 bp, Saccharomyces pastorianus
tacttttaatacatccggcggtgac

SEQ ID NO: 160857 - DNA, 25 bp, Saccharomyces pastorianus
atttctgtcttagctgactcattga

SEQ ID NO: 160858 - DNA, 25 bp, Saccharomyces pastorianus
cggtgactacaacgccagagctagt

SEQ ID NO: 160859 - DNA, 25 bp, Saccharomyces pastorianus
ggattcctctaaactcaaccaaact

SEQ ID NO: 160860 - DNA, 25 bp, Saccharomyces pastorianus
gttgggtttgtcaaatctcatgttg

SEQ ID NO: 160861 - DNA, 25 bp, Saccharomyces pastorianus
gcaacatctctctgtccgtaaagaa

SEQ ID NO: 160862 - DNA, 25 bp, Saccharomyces pastorianus
ccatagatttcaatttacctccaga

SEQ ID NO: 160863 - DNA, 25 bp, Saccharomyces pastorianus
gagatttttcattccaacggcaagt

SEQ ID NO: 160864 - DNA, 25 bp, Saccharomyces pastorianus
aagcctaagatatttatacctcaga

SEQ ID NO: 160865 - DNA, 25 bp, Saccharomyces pastorianus
actcaaaattggactctagctattc

SEQ ID NO: 160866 - DNA, 25 bp, Saccharomyces pastorianus
agaatgctaacgataccaatgaggt

SEQ ID NO: 160867 - DNA, 25 bp, Saccharomyces pastorianus
taatgttccccaatgctgttgtcat

SEQ ID NO: 160868 - DNA, 25 bp, Saccharomyces pastorianus
gataattggttctggttacgactca

SEQ ID NO: 160869 - DNA, 25 bp, Saccharomyces pastorianus
gtcattactcaggtgaactcaaaat

SEQ ID NO: 160870 - DNA, 25 bp, Saccharomyces pastorianus
gatcaagctgtttatttctccaaaa

SEQ ID NO: 160871 - DNA, 25 bp, Saccharomyces pastorianus
cattgcggtggttgaaaacgaatcc

SEQ ID NO: 160872 - DNA, 25 bp, Saccharomyces pastorianus
ttcgtttgcggaaggaacttagcgt

SEQ ID NO: 160873 - DNA, 25 bp, Saccharomyces pastorianus
aaaagtacatcttcgtttgcggaag

SEQ ID NO: 160874 - DNA, 25 bp, Saccharomyces pastorianus
ggaaggaacttagcgtacccattgc

SEQ ID NO: 160875 - DNA, 25 bp, Saccharomyces pastorianus
tacccattgcggtggttgaaaacga

SEQ ID NO: 160876 - DNA, 25 bp, Saccharomyces pastorianus
agcgtacccattgcggtggttgaaa

SEQ ID NO: 160877 - DNA, 25 bp, Saccharomyces pastorianus
gaacttagcgtacccattgcggtgg

SEQ ID NO: 160878 - DNA, 25 bp, Saccharomyces pastorianus
ttagcgtacccattgcggtggttga

SEQ ID NO: 160879 - DNA, 25 bp, Saccharomyces pastorianus
aggaacttagcgtacccattgcggt

SEQ ID NO: 160880 - DNA, 25 bp, Saccharomyces pastorianus
gtacatcttcgtttgcggaaggaac

SEQ ID NO: 160881 - DNA, 25 bp, Saccharomyces pastorianus
gcggaaggaacttagcgtacccatt

SEQ ID NO: 160882 - DNA, 25 bp, Saccharomyces pastorianus
gagtcaagctctagcgggtcatcgt

SEQ ID NO: 160883 - DNA, 25 bp, Saccharomyces pastorianus
aaagctcttcctcatcggagtcaag

SEQ ID NO: 160884 - DNA, 25 bp, Saccharomyces pastorianus
gattctgactcaagttctagctcaa

SEQ ID NO: 160885 - DNA, 25 bp, Saccharomyces pastorianus
ttctcaatcaagttctagctccagc

SEQ ID NO: 160886 - DNA, 25 bp, Saccharomyces pastorianus
tagttctgacgaatcttcctcggaa

SEQ ID NO: 160887 - DNA, 25 bp, Saccharomyces pastorianus
aagcagttcttctgattccgaatca

SEQ ID NO: 160888 - DNA, 25 bp, Saccharomyces pastorianus
ggtcatcgtcatcttcggaatcaga

SEQ ID NO: 160889 - DNA, 25 bp, Saccharomyces pastorianus
gactcaagctcgtctgattcaagtt

SEQ ID NO: 160890 - DNA, 25 bp, Saccharomyces pastorianus
agttccgacgaatctacatcttctt

SEQ ID NO: 160891 - DNA, 25 bp, Saccharomyces pastorianus
agactctggttctagctctgaattg

SEQ ID NO: 160892 - DNA, 25 bp, Saccharomyces pastorianus
ctcttcctcggattcagattcggat

SEQ ID NO: 160893 - DNA, 25 bp, Saccharomyces pastorianus
aaggcgtaccaaggaacatcttcaa

SEQ ID NO: 160894 - DNA, 25 bp, Saccharomyces pastorianus
ttatcctctataactgacgaagcag

SEQ ID NO: 160895 - DNA, 25 bp, Saccharomyces pastorianus
aataacgctgcattgttactagagc

SEQ ID NO: 160896 - DNA, 25 bp, Saccharomyces pastorianus
gaatgtctacgtttatcctctataa

SEQ ID NO: 160897 - DNA, 25 bp, Saccharomyces pastorianus
ttactagagcatacatcgaacgaga

SEQ ID NO: 160898 - DNA, 25 bp, Saccharomyces pastorianus
gagttagaacataaagtgcccatta

SEQ ID NO: 160899 - DNA, 25 bp, Saccharomyces pastorianus
accaattctgtttctaatgactcga

SEQ ID NO: 160900 - DNA, 25 bp, Saccharomyces pastorianus
gtgcccattataaactctttcaaag

SEQ ID NO: 160901 - DNA, 25 bp, Saccharomyces pastorianus
gtctcgatctatgccgtcaaataca

SEQ ID NO: 160902 - DNA, 25 bp, Saccharomyces pastorianus
ctttaaccaaacaacgtctcgatct

SEQ ID NO: 160903 - DNA, 25 bp, Saccharomyces pastorianus
ttctaatgactcgaagggaccctta

SEQ ID NO: 160904 - DNA, 25 bp, Saccharomyces pastorianus
gcctgtgcaccataacgttttaact

SEQ ID NO: 160905 - DNA, 25 bp, Saccharomyces pastorianus
tcttccgccaaccagggtattcaaa

SEQ ID NO: 160906 - DNA, 25 bp, Saccharomyces pastorianus
tagatgtgcctacccaattgactac

SEQ ID NO: 160907 - DNA, 25 bp, Saccharomyces pastorianus
tggtccgaccatggtgtcttcaata

SEQ ID NO: 160908 - DNA, 25 bp, Saccharomyces pastorianus
ttttcgacgctatcaagtttggttc

SEQ ID NO: 160909 - DNA, 25 bp, Saccharomyces pastorianus
tgacgttactttattctttggccta

SEQ ID NO: 160910 - DNA, 25 bp, Saccharomyces pastorianus
cgactatgacgactcttctattact

SEQ ID NO: 160911 - DNA, 25 bp, Saccharomyces pastorianus
tcctgctaacttgtgatgcttcggg

SEQ ID NO: 160912 - DNA, 25 bp, Saccharomyces pastorianus
tatgttttacttgatgcctgtgcac

SEQ ID NO: 160913 - DNA, 25 bp, Saccharomyces pastorianus
gattccatgtttggcggactctcat

SEQ ID NO: 160914 - DNA, 25 bp, Saccharomyces pastorianus
atgcttcgggtgttttaccaccagt

SEQ ID NO: 160915 - DNA, 25 bp, Saccharomyces pastorianus
tatcatcttcccaacggcatataac

SEQ ID NO: 160916 - DNA, 25 bp, Saccharomyces pastorianus
agctccaatgtttccttatcatctt

SEQ ID NO: 160917 - DNA, 25 bp, Saccharomyces pastorianus
gaaggaccaaagtttttcgcagatc

SEQ ID NO: 160918 - DNA, 25 bp, Saccharomyces pastorianus
ttcgcagatccttccagtgatacta

SEQ ID NO: 160919 - DNA, 25 bp, Saccharomyces pastorianus
gatgaagcagcactagccagctccg

SEQ ID NO: 160920 - DNA, 25 bp, Saccharomyces pastorianus
taatgccaggcagaagtccgttgtg

SEQ ID NO: 160921 - DNA, 25 bp, Saccharomyces pastorianus
gcagtatgtttctggtttaacctac

SEQ ID NO: 160922 - DNA, 25 bp, Saccharomyces pastorianus
gaaagtggtttcgtgtcctttgaca

SEQ ID NO: 160923 - DNA, 25 bp, Saccharomyces pastorianus
ggttcatcggaaggatctgctcatc

SEQ ID NO: 160924 - DNA, 25 bp, Saccharomyces pastorianus
actatgtgccagcataccgtaggaa

SEQ ID NO: 160925 - DNA, 25 bp, Saccharomyces pastorianus
aaaatcctgatcacacttctggttc

SEQ ID NO: 160926 - DNA, 25 bp, Saccharomyces pastorianus
ggttctgtatttgcttctgtcaagt

SEQ ID NO: 160927 - DNA, 25 bp, Saccharomyces pastorianus
ttcggctgtatcttaaatgttctgt

SEQ ID NO: 160928 - DNA, 25 bp, Saccharomyces pastorianus
gtcggcctttagttggcatggctat

SEQ ID NO: 160929 - DNA, 25 bp, Saccharomyces pastorianus
ccccgtttgttattgccttgagcaa

SEQ ID NO: 160930 - DNA, 25 bp, Saccharomyces pastorianus
aattcctgcgtttatgcatcctcta

SEQ ID NO: 160931 - DNA, 25 bp, Saccharomyces pastorianus
atattactgcttccccgtttgttat

SEQ ID NO: 160932 - DNA, 25 bp, Saccharomyces pastorianus
gtattttctgtttgcaattcctgcg

SEQ ID NO: 160933 - DNA, 25 bp, Saccharomyces pastorianus
ggtcatcttgatagccgtattttct

SEQ ID NO: 160934 - DNA, 25 bp, Saccharomyces pastorianus
aggccaacttccaaagatctgcgct

SEQ ID NO: 160935 - DNA, 25 bp, Saccharomyces pastorianus
atgatcctcgtctgattagcggttc

SEQ ID NO: 160936 - DNA, 25 bp, Saccharomyces pastorianus
gcgttgtgttccatttcatttttca

SEQ ID NO: 160937 - DNA, 25 bp, Saccharomyces pastorianus
gagtattcccataatgattgctgta

SEQ ID NO: 160938 - DNA, 25 bp, Saccharomyces pastorianus
ttgctgtatatattggccatagagt

SEQ ID NO: 160939 - DNA, 25 bp, Saccharomyces pastorianus
gtagtcccagattctgctgctaatt

SEQ ID NO: 160940 - DNA, 25 bp, Saccharomyces pastorianus
gtgggtagtcccagattctgctgct

SEQ ID NO: 160941 - DNA, 25 bp, Saccharomyces pastorianus
attcccataatgattgctgtatata

SEQ ID NO: 160942 - DNA, 25 bp, Saccharomyces pastorianus
gattctgctgctaatttcttagact

SEQ ID NO: 160943 - DNA, 25 bp, Saccharomyces pastorianus
cccagattctgctgctaatttctta

SEQ ID NO: 160944 - DNA, 25 bp, Saccharomyces pastorianus
gattgctgtatatattggccataga

SEQ ID NO: 160945 - DNA, 25 bp, Saccharomyces pastorianus
gtcccagattctgctgctaatttct

SEQ ID NO: 160946 - DNA, 25 bp, Saccharomyces pastorianus
gctgctaatttcttagactattgta

SEQ ID NO: 160947 - DNA, 25 bp, Saccharomyces pastorianus
gggtagtcccagattctgctgctaa

SEQ ID NO: 160948 - DNA, 25 bp, Saccharomyces pastorianus
gatagcggacattccttagaggact

SEQ ID NO: 160949 - DNA, 25 bp, Saccharomyces pastorianus
gcggacattccttagaggacttcga

SEQ ID NO: 160950 - DNA, 25 bp, Saccharomyces pastorianus
ccttgatagcggacattccttagag

SEQ ID NO: 160951 - DNA, 25 bp, Saccharomyces pastorianus
ggacattccttagaggacttcgaag

SEQ ID NO: 160952 - DNA, 25 bp, Saccharomyces pastorianus
accttgatagcggacattccttaga

SEQ ID NO: 160953 - DNA, 25 bp, Saccharomyces pastorianus
ggatattgaccttgatagcggacat

SEQ ID NO: 160954 - DNA, 25 bp, Saccharomyces pastorianus
atggatattgaccttgatagcggac

SEQ ID NO: 160955 - DNA, 25 bp, Saccharomyces pastorianus
tggatattgaccttgatagcggaca

SEQ ID NO: 160956 - DNA, 25 bp, Saccharomyces pastorianus
tagcggacattccttagaggacttc

SEQ ID NO: 160957 - DNA, 25 bp, Saccharomyces pastorianus
acattccttagaggacttcgaagcc

SEQ ID NO: 160958 - DNA, 25 bp, Saccharomyces pastorianus
ttgatagcggacattccttagagga

SEQ ID NO: 160959 - DNA, 25 bp, Saccharomyces pastorianus
atactgcatcatccttgcaacacaa

SEQ ID NO: 160960 - DNA, 25 bp, Saccharomyces pastorianus
aatcacctgtaggagtgaacctcga

SEQ ID NO: 160961 - DNA, 25 bp, Saccharomyces pastorianus
cgcttcctgcagaagttttcgaaca

SEQ ID NO: 160962 - DNA, 25 bp, Saccharomyces pastorianus
tttctcgaaggaatcacctgtagga

SEQ ID NO: 160963 - DNA, 25 bp, Saccharomyces pastorianus
tgcaacacaacgcttcctgcagaag

SEQ ID NO: 160964 - DNA, 25 bp, Saccharomyces pastorianus
cacctgtaggagtgaacctcgaaaa

SEQ ID NO: 160965 - DNA, 25 bp, Saccharomyces pastorianus
aaaggcttggcaatcctcacttaca

SEQ ID NO: 160966 - DNA, 25 bp, Saccharomyces pastorianus
gcatcatccttgcaacacaacgctt

SEQ ID NO: 160967 - DNA, 25 bp, Saccharomyces pastorianus
acaacgcttcctgcagaagttttcg

SEQ ID NO: 160968 - DNA, 25 bp, Saccharomyces pastorianus
aaaacacatatttcatactgcatca

SEQ ID NO: 160969 - DNA, 25 bp, Saccharomyces pastorianus
tttcgaacaaaaggcttggcaatcc

SEQ ID NO: 160970 - DNA, 25 bp, Saccharomyces pastorianus
agagatggcccagtttcaagcgaag

SEQ ID NO: 160971 - DNA, 25 bp, Saccharomyces pastorianus
gagcgccatagcatgtaacgttttt

SEQ ID NO: 160972 - DNA, 25 bp, Saccharomyces pastorianus
aagaattgtcagactcccattctcg

SEQ ID NO: 160973 - DNA, 25 bp, Saccharomyces pastorianus
gaaattttgaatgttcccgtggcct

SEQ ID NO: 160974 - DNA, 25 bp, Saccharomyces pastorianus
tttggatacggctcctctgttcaga

SEQ ID NO: 160975 - DNA, 25 bp, Saccharomyces pastorianus
gcgaactatcgctcaaactgacttg

SEQ ID NO: 160976 - DNA, 25 bp, Saccharomyces pastorianus
gggcggctgtacatcgtttggatac

SEQ ID NO: 160977 - DNA, 25 bp, Saccharomyces pastorianus
ggtcttctgaagatatccgtgcgaa

SEQ ID NO: 160978 - DNA, 25 bp, Saccharomyces pastorianus
cttcctcacttgttttgtcactaga

SEQ ID NO: 160979 - DNA, 25 bp, Saccharomyces pastorianus
gatggcagccacaacaaatcggtct

SEQ ID NO: 160980 - DNA, 25 bp, Saccharomyces pastorianus
ctctatccctgttgatgacgcggaa

SEQ ID NO: 160981 - DNA, 25 bp, Saccharomyces pastorianus
ggataggtccttttcgtacacatca

SEQ ID NO: 160982 - DNA, 25 bp, Saccharomyces pastorianus
agttgttcgcttttcgatacatcga

SEQ ID NO: 160983 - DNA, 25 bp, Saccharomyces pastorianus
gctgtctgcgtttatatccgactac

SEQ ID NO: 160984 - DNA, 25 bp, Saccharomyces pastorianus
atggatctcttctgcatttacggga

SEQ ID NO: 160985 - DNA, 25 bp, Saccharomyces pastorianus
agatcctctgcagccatgggaatgt

SEQ ID NO: 160986 - DNA, 25 bp, Saccharomyces pastorianus
gaaccttttgggtttgccactcaga

SEQ ID NO: 160987 - DNA, 25 bp, Saccharomyces pastorianus
agagctatctcggttcgttcatttc

SEQ ID NO: 160988 - DNA, 25 bp, Saccharomyces pastorianus
aggccaccttgctcgtgagattatt

SEQ ID NO: 160989 - DNA, 25 bp, Saccharomyces pastorianus
tcaccgctttacttttaccgctata

SEQ ID NO: 160990 - DNA, 25 bp, Saccharomyces pastorianus
atcgattactcatattccaggccac

SEQ ID NO: 160991 - DNA, 25 bp, Saccharomyces pastorianus
ttatttggtggatactgacgcgctg

SEQ ID NO: 160992 - DNA, 25 bp, Saccharomyces pastorianus
gtctctttacgtttagcaaatgtca

SEQ ID NO: 160993 - DNA, 25 bp, Saccharomyces pastorianus
tcgttcataaactatttggccttgt

SEQ ID NO: 160994 - DNA, 25 bp, Saccharomyces pastorianus
ggtgtgcattgtttatcattgtctc

SEQ ID NO: 160995 - DNA, 25 bp, Saccharomyces pastorianus
taaaactgacagctggattactcca

SEQ ID NO: 160996 - DNA, 25 bp, Saccharomyces pastorianus
attgctggattcatatgctgggctt

SEQ ID NO: 160997 - DNA, 25 bp, Saccharomyces pastorianus
gagttcacccaacaaggtacgatta

SEQ ID NO: 160998 - DNA, 25 bp, Saccharomyces pastorianus
atatcgattaaccttgcccttttct

SEQ ID NO: 160999 - DNA, 25 bp, Saccharomyces pastorianus
ttcttgctactcttttttgcgagga

SEQ ID NO: 161000 - DNA, 25 bp, Saccharomyces pastorianus
ctttcgttccattttcattcaccat

SEQ ID NO: 161001 - DNA, 25 bp, Saccharomyces pastorianus
tttggccttgtttatctctatgatt

SEQ ID NO: 161002 - DNA, 25 bp, Saccharomyces pastorianus
gaaatctatggtcggtatcgttcat

SEQ ID NO: 161003 - DNA, 25 bp, Saccharomyces pastorianus
gattgtttcatttttagcttccttg

SEQ ID NO: 161004 - DNA, 25 bp, Saccharomyces pastorianus
aactcttctgctaacttagccgcaa

SEQ ID NO: 161005 - DNA, 25 bp, Saccharomyces pastorianus
agcttccttgttcttgatagcccaa

SEQ ID NO: 161006 - DNA, 25 bp, Saccharomyces pastorianus
tggcgtcagctgaaaaccaaccttc

SEQ ID NO: 161007 - DNA, 25 bp, Saccharomyces pastorianus
aaccttccagtggacactctacaat

SEQ ID NO: 161008 - DNA, 25 bp, Saccharomyces pastorianus
taatcattggttttgctcaggcttt

SEQ ID NO: 161009 - DNA, 25 bp, Saccharomyces pastorianus
ttattcccagagcacaacgcgttat

SEQ ID NO: 161010 - DNA, 25 bp, Saccharomyces pastorianus
aactcctcccaatttgaagccaaga

SEQ ID NO: 161011 - DNA, 25 bp, Saccharomyces pastorianus
aacgcgttattgcatttatctccaa

SEQ ID NO: 161012 - DNA, 25 bp, Saccharomyces pastorianus
ttaagtaacctacccgctgtcaaag

SEQ ID NO: 161013 - DNA, 25 bp, Saccharomyces pastorianus
ggctcgtcccaaatcagtatggcgt

SEQ ID NO: 161014 - DNA, 25 bp, Saccharomyces pastorianus
gctaatagaagagatagagttttat

SEQ ID NO: 161015 - DNA, 25 bp, Saccharomyces pastorianus
gagatagagttttataacgtcaacg

SEQ ID NO: 161016 - DNA, 25 bp, Saccharomyces pastorianus
aatagaagagatagagttttataac

SEQ ID NO: 161017 - DNA, 25 bp, Saccharomyces pastorianus
aagagatagagttttataacgtcaa

SEQ ID NO: 161018 - DNA, 25 bp, Saccharomyces pastorianus
tagaagagatagagttttataacgt

SEQ ID NO: 161019 - DNA, 25 bp, Saccharomyces pastorianus
atagaagagatagagttttataacg

SEQ ID NO: 161020 - DNA, 25 bp, Saccharomyces pastorianus
tgctaatagaagagatagagtttta

SEQ ID NO: 161021 - DNA, 25 bp, Saccharomyces pastorianus
gatagagttttataacgtcaacgga

SEQ ID NO: 161022 - DNA, 25 bp, Saccharomyces pastorianus
agagatagagttttataacgtcaac

SEQ ID NO: 161023 - DNA, 25 bp, Saccharomyces pastorianus
gaagagatagagttttataacgtca

SEQ ID NO: 161024 - DNA, 25 bp, Saccharomyces pastorianus
agaagagatagagttttataacgtc

SEQ ID NO: 161025 - DNA, 25 bp, Saccharomyces pastorianus
gaaaaacattcccatgaaatcgaca

SEQ ID NO: 161026 - DNA, 25 bp, Saccharomyces pastorianus
tgatctcaagccactatccacaaat

SEQ ID NO: 161027 - DNA, 25 bp, Saccharomyces pastorianus
accggcgaagccttcatcaagtttg

SEQ ID NO: 161028 - DNA, 25 bp, Saccharomyces pastorianus
gccaaaatctttggtgttgacccta

SEQ ID NO: 161029 - DNA, 25 bp, Saccharomyces pastorianus
aaaaaactgctcctgatctcaagcc

SEQ ID NO: 161030 - DNA, 25 bp, Saccharomyces pastorianus
aatcgacaaatgaagaccttgccaa

SEQ ID NO: 161031 - DNA, 25 bp, Saccharomyces pastorianus
ccgttgaaaaggtttgcatttatag

SEQ ID NO: 161032 - DNA, 25 bp, Saccharomyces pastorianus
taaaggtcggaaggcaagtaatggt

SEQ ID NO: 161033 - DNA, 25 bp, Saccharomyces pastorianus
ccactatccacaaatactctctatg

SEQ ID NO: 161034 - DNA, 25 bp, Saccharomyces pastorianus
gccttcatcaagtttgacaacctgg

SEQ ID NO: 161035 - DNA, 25 bp, Saccharomyces pastorianus
gaaaaagccactcaagaaaccgttg

SEQ ID NO: 161036 - DNA, 25 bp, Saccharomyces pastorianus
ttagccaaagcagcttcgtcttcgg

SEQ ID NO: 161037 - DNA, 25 bp, Saccharomyces pastorianus
agccaaagcagcttcgtcttcggct

SEQ ID NO: 161038 - DNA, 25 bp, Saccharomyces pastorianus
aacttagccaaagcagcttcgtctt

SEQ ID NO: 161039 - DNA, 25 bp, Saccharomyces pastorianus
atggtggaaaccaacttagccaaag

SEQ ID NO: 161040 - DNA, 25 bp, Saccharomyces pastorianus
agcagcttcgtcttcggctctgact

SEQ ID NO: 161041 - DNA, 25 bp, Saccharomyces pastorianus
accaacttagccaaagcagcttcgt

SEQ ID NO: 161042 - DNA, 25 bp, Saccharomyces pastorianus
gaaaccaacttagccaaagcagctt

SEQ ID NO: 161043 - DNA, 25 bp, Saccharomyces pastorianus
acttagccaaagcagcttcgtcttc

SEQ ID NO: 161044 - DNA, 25 bp, Saccharomyces pastorianus
aaagcagcttcgtcttcggctctga

SEQ ID NO: 161045 - DNA, 25 bp, Saccharomyces pastorianus
ggtggaaaccaacttagccaaagca

SEQ ID NO: 161046 - DNA, 25 bp, Saccharomyces pastorianus
cagcttcgtcttcggctctgacttc

SEQ ID NO: 161047 - DNA, 25 bp, Saccharomyces pastorianus
ttagccaaagcagcttcgtcttcgg

SEQ ID NO: 161048 - DNA, 25 bp, Saccharomyces pastorianus
atggtggaaaccaacttagccaaag

SEQ ID NO: 161049 - DNA, 25 bp, Saccharomyces pastorianus
ggtcaaagcggcaacagcagaagtc

SEQ ID NO: 161050 - DNA, 25 bp, Saccharomyces pastorianus
caacagcagaagtcttttggttaac

SEQ ID NO: 161051 - DNA, 25 bp, Saccharomyces pastorianus
aaagcggcaacagcagaagtctttt

SEQ ID NO: 161052 - DNA, 25 bp, Saccharomyces pastorianus
ggcaacagcagaagtcttttggtta

SEQ ID NO: 161053 - DNA, 25 bp, Saccharomyces pastorianus
cggtcaaagcggcaacagcagaagt

SEQ ID NO: 161054 - DNA, 25 bp, Saccharomyces pastorianus
tcaaagcggcaacagcagaagtctt

SEQ ID NO: 161055 - DNA, 25 bp, Saccharomyces pastorianus
aagcggcaacagcagaagtcttttg

SEQ ID NO: 161056 - DNA, 25 bp, Saccharomyces pastorianus
gcggcaacagcagaagtcttttggt

SEQ ID NO: 161057 - DNA, 25 bp, Saccharomyces pastorianus
tcttcggctctgacttcggtcaaag

SEQ ID NO: 161058 - DNA, 25 bp, Saccharomyces pastorianus
gtcttgcttagacttaccttcagcg

SEQ ID NO: 161059 - DNA, 25 bp, Saccharomyces pastorianus
ttgcttagacttaccttcagcgata

SEQ ID NO: 161060 - DNA, 25 bp, Saccharomyces pastorianus
tgcttagacttaccttcagcgatag

SEQ ID NO: 161061 - DNA, 25 bp, Saccharomyces pastorianus
tcttgcttagacttaccttcagcga

SEQ ID NO: 161062 - DNA, 25 bp, Saccharomyces pastorianus
cttagacttaccttcagcgatagcg

SEQ ID NO: 161063 - DNA, 25 bp, Saccharomyces pastorianus
cttgcttagacttaccttcagcgat

SEQ ID NO: 161064 - DNA, 25 bp, Saccharomyces pastorianus
agacttaccttcagcgatagcggca

SEQ ID NO: 161065 - DNA, 25 bp, Saccharomyces pastorianus
ttagacttaccttcagcgatagcgg

SEQ ID NO: 161066 - DNA, 25 bp, Saccharomyces pastorianus
tagacttaccttcagcgatagcggc

SEQ ID NO: 161067 - DNA, 25 bp, Saccharomyces pastorianus
gacttaccttcagcgatagcggcag

SEQ ID NO: 161068 - DNA, 25 bp, Saccharomyces pastorianus
cttaccttcagcgatagcggcagct

SEQ ID NO: 161069 - DNA, 25 bp, Saccharomyces pastorianus
ggaggaaccttcaatctgatggaca

SEQ ID NO: 161070 - DNA, 25 bp, Saccharomyces pastorianus
gatcttcttttgtctttgcaatctg

SEQ ID NO: 161071 - DNA, 25 bp, Saccharomyces pastorianus
ataccgaagttctttggagtagagt

SEQ ID NO: 161072 - DNA, 25 bp, Saccharomyces pastorianus
gcttgaccaataccgaagttctttg

SEQ ID NO: 161073 - DNA, 25 bp, Saccharomyces pastorianus
gtattctggccatttgacgtatctg

SEQ ID NO: 161074 - DNA, 25 bp, Saccharomyces pastorianus
gtttctctttggttggacagcttga

SEQ ID NO: 161075 - DNA, 25 bp, Saccharomyces pastorianus
atctgacgtattctggccatttgac

SEQ ID NO: 161076 - DNA, 25 bp, Saccharomyces pastorianus
gacgtatctggacaagtttctcttt

SEQ ID NO: 161077 - DNA, 25 bp, Saccharomyces pastorianus
ttgcaatctgacgtattctggccat

SEQ ID NO: 161078 - DNA, 25 bp, Saccharomyces pastorianus
ggacagcttgaccaataccgaagtt

SEQ ID NO: 161079 - DNA, 25 bp, Saccharomyces pastorianus
caatctgatggacaagatcttcttt

SEQ ID NO: 161080 - DNA, 25 bp, Saccharomyces pastorianus
taccaatggcaatttcagatcgatg

SEQ ID NO: 161081 - DNA, 25 bp, Saccharomyces pastorianus
taataccagccaatcaggagcctca

SEQ ID NO: 161082 - DNA, 25 bp, Saccharomyces pastorianus
ggaggagcccaagccatcaaaggat

SEQ ID NO: 161083 - DNA, 25 bp, Saccharomyces pastorianus
aaaagagcccttggatggaacatct

SEQ ID NO: 161084 - DNA, 25 bp, Saccharomyces pastorianus
ccacaacgccacaaaatgcctgtta

SEQ ID NO: 161085 - DNA, 25 bp, Saccharomyces pastorianus
tagggtctgcctccagcaagagtaa

SEQ ID NO: 161086 - DNA, 25 bp, Saccharomyces pastorianus
aagagccgctaacgaattggtcaat

SEQ ID NO: 161087 - DNA, 25 bp, Saccharomyces pastorianus
gagaaggaccttatcacttttactt

SEQ ID NO: 161088 - DNA, 25 bp, Saccharomyces pastorianus
gaataatgccaaaagtcgtacgacc

SEQ ID NO: 161089 - DNA, 25 bp, Saccharomyces pastorianus
acctaattgttgttccatttttgca

SEQ ID NO: 161090 - DNA, 25 bp, Saccharomyces pastorianus
acgaccatcgataataccagccaat

SEQ ID NO: 161091 - DNA, 25 bp, Saccharomyces pastorianus
ggtcgacgacaagttggcctctaag

SEQ ID NO: 161092 - DNA, 25 bp, Saccharomyces pastorianus
aagaatgaccgctcttgcacagaac

SEQ ID NO: 161093 - DNA, 25 bp, Saccharomyces pastorianus
aagaaaggcgctgatcaccctgagt

SEQ ID NO: 161094 - DNA, 25 bp, Saccharomyces pastorianus
gagtccgaaggcaatcaagcattta

SEQ ID NO: 161095 - DNA, 25 bp, Saccharomyces pastorianus
attcataccgaagacagtgcccgca

SEQ ID NO: 161096 - DNA, 25 bp, Saccharomyces pastorianus
aaggcgttattcagcatcattggta

SEQ ID NO: 161097 - DNA, 25 bp, Saccharomyces pastorianus
atttaagggcactgctagctcagcc

SEQ ID NO: 161098 - DNA, 25 bp, Saccharomyces pastorianus
agactctgtctctccagatagtcaa

SEQ ID NO: 161099 - DNA, 25 bp, Saccharomyces pastorianus
gttggcctctaagtttgtcttcaag

SEQ ID NO: 161100 - DNA, 25 bp, Saccharomyces pastorianus
aagcccgaagtggtcgagctacgca

SEQ ID NO: 161101 - DNA, 25 bp, Saccharomyces pastorianus
tagctcagccggaacctaaattgat

SEQ ID NO: 161102 - DNA, 25 bp, Saccharomyces pastorianus
tgaatactatatgttccaagccggt

SEQ ID NO: 161103 - DNA, 25 bp, Saccharomyces pastorianus
tgcaccagctaccaccactttatct

SEQ ID NO: 161104 - DNA, 25 bp, Saccharomyces pastorianus
tcgccgctattgccgctggtgtcgc

SEQ ID NO: 161105 - DNA, 25 bp, Saccharomyces pastorianus
atactatatgttccaagccggtcat

SEQ ID NO: 161106 - DNA, 25 bp, Saccharomyces pastorianus
ctgaatactatatgttccaagccgg

SEQ ID NO: 161107 - DNA, 25 bp, Saccharomyces pastorianus
gaatactatatgttccaagccggtc

SEQ ID NO: 161108 - DNA, 25 bp, Saccharomyces pastorianus
gctgcaccagctaccaccactttat

SEQ ID NO: 161109 - DNA, 25 bp, Saccharomyces pastorianus
taccaccactttatctccatctgac

SEQ ID NO: 161110 - DNA, 25 bp, Saccharomyces pastorianus
gctgaatactatatgttccaagccg

SEQ ID NO: 161111 - DNA, 25 bp, Saccharomyces pastorianus
tggtgtcgccgctgcaccagctacc

SEQ ID NO: 161112 - DNA, 25 bp, Saccharomyces pastorianus
aatactatatgttccaagccggtca

SEQ ID NO: 161113 - DNA, 25 bp, Saccharomyces pastorianus
aaacttcaatgacccagaggtccaa

SEQ ID NO: 161114 - DNA, 25 bp, Saccharomyces pastorianus
tgacccagaggtccaaggtgatatg

SEQ ID NO: 161115 - DNA, 25 bp, Saccharomyces pastorianus
agaaacttcaatgacccagaggtcc

SEQ ID NO: 161116 - DNA, 25 bp, Saccharomyces pastorianus
ctactcctgtgttgctcacttttct

SEQ ID NO: 161117 - DNA, 25 bp, Saccharomyces pastorianus
ttcaatgacccagaggtccaaggtg

SEQ ID NO: 161118 - DNA, 25 bp, Saccharomyces pastorianus
gaaacttcaatgacccagaggtcca

SEQ ID NO: 161119 - DNA, 25 bp, Saccharomyces pastorianus
atgacccagaggtccaaggtgatat

SEQ ID NO: 161120 - DNA, 25 bp, Saccharomyces pastorianus
caatgacccagaggtccaaggtgat

SEQ ID NO: 161121 - DNA, 25 bp, Saccharomyces pastorianus
aatgacccagaggtccaaggtgata

SEQ ID NO: 161122 - DNA, 25 bp, Saccharomyces pastorianus
acttcaatgacccagaggtccaagg

SEQ ID NO: 161123 - DNA, 25 bp, Saccharomyces pastorianus
tccatctttcgttggtttcactgat

SEQ ID NO: 161124 - DNA, 25 bp, Saccharomyces pastorianus
tgatttaggtactacctactcctgt

SEQ ID NO: 161125 - DNA, 25 bp, Saccharomyces pastorianus
tgacccagaggtccaaggtgatatg

SEQ ID NO: 161126 - DNA, 25 bp, Saccharomyces pastorianus
agctaacactgttttcgacgctaag

SEQ ID NO: 161127 - DNA, 25 bp, Saccharomyces pastorianus
gaacccagctaacactgttttcgac

SEQ ID NO: 161128 - DNA, 25 bp, Saccharomyces pastorianus
agaaacttcaatgacccagaggtcc

SEQ ID NO: 161129 - DNA, 25 bp, Saccharomyces pastorianus
ctactcctgtgttgctcacttttct

SEQ ID NO: 161130 - DNA, 25 bp, Saccharomyces pastorianus
gaacaaatctcctctatggtcttgg

SEQ ID NO: 161131 - DNA, 25 bp, Saccharomyces pastorianus
ctttcgttggtttcactgatactga

SEQ ID NO: 161132 - DNA, 25 bp, Saccharomyces pastorianus
acttttctaatgatcgtgttgacat

SEQ ID NO: 161133 - DNA, 25 bp, Saccharomyces pastorianus
aatctcctctatggtcttgggtaag

SEQ ID NO: 161134 - DNA, 25 bp, Saccharomyces pastorianus
tccatctttcgttggtttcactgat

SEQ ID NO: 161135 - DNA, 25 bp, Saccharomyces pastorianus
gtttattgtcgcacgttaccatatt

SEQ ID NO: 161136 - DNA, 25 bp, Saccharomyces pastorianus
attcccgtccacgagaggaaaggct

SEQ ID NO: 161137 - DNA, 25 bp, Saccharomyces pastorianus
gctgctgtactacaaccaggattta

SEQ ID NO: 161138 - DNA, 25 bp, Saccharomyces pastorianus
gtaaaaagatgcctataacgtcaag

SEQ ID NO: 161139 - DNA, 25 bp, Saccharomyces pastorianus
gatttagatgtttattgtcgcacgt

SEQ ID NO: 161140 - DNA, 25 bp, Saccharomyces pastorianus
cgcacgttaccatatttaccacaaa

SEQ ID NO: 161141 - DNA, 25 bp, Saccharomyces pastorianus
tggcttggtcacctattcccgtcca

SEQ ID NO: 161142 - DNA, 25 bp, Saccharomyces pastorianus
gactattcgtcttttcctgcaatat

SEQ ID NO: 161143 - DNA, 25 bp, Saccharomyces pastorianus
gtcttttcctgcaatatcgaagata

SEQ ID NO: 161144 - DNA, 25 bp, Saccharomyces pastorianus
aaggctgctgtaagctgctgtacta

SEQ ID NO: 161145 - DNA, 25 bp, Saccharomyces pastorianus
gaaaccgtgaacgactattcgtctt

SEQ ID NO: 161146 - DNA, 25 bp, Saccharomyces pastorianus
gaacgagtttatcagttttgccaat

SEQ ID NO: 161147 - DNA, 25 bp, Saccharomyces pastorianus
tttgccacccaattaacgatactag

SEQ ID NO: 161148 - DNA, 25 bp, Saccharomyces pastorianus
ggcactttatactctaccacggaat

SEQ ID NO: 161149 - DNA, 25 bp, Saccharomyces pastorianus
caagcaatattggttcccgggctat

SEQ ID NO: 161150 - DNA, 25 bp, Saccharomyces pastorianus
gaagcgactgcaccaatgaaaacgt

SEQ ID NO: 161151 - DNA, 25 bp, Saccharomyces pastorianus
gccaagctactctctcattttattt

SEQ ID NO: 161152 - DNA, 25 bp, Saccharomyces pastorianus
taacttttcttccatgactgcaatt

SEQ ID NO: 161153 - DNA, 25 bp, Saccharomyces pastorianus
ggaatccattttggccgtcgatcca

SEQ ID NO: 161154 - DNA, 25 bp, Saccharomyces pastorianus
gatcttgcgaccctaaatctggatt

SEQ ID NO: 161155 - DNA, 25 bp, Saccharomyces pastorianus
gatcaacagatctgccaggagcatt

SEQ ID NO: 161156 - DNA, 25 bp, Saccharomyces pastorianus
gccgtcgatccagttttatttgcca

SEQ ID NO: 161157 - DNA, 25 bp, Saccharomyces pastorianus
gtaagcgtctcaaccagcatatgtc

SEQ ID NO: 161158 - DNA, 25 bp, Saccharomyces pastorianus
gaaattccagcttccaaacagggca

SEQ ID NO: 161159 - DNA, 25 bp, Saccharomyces pastorianus
ggcacttcatgctcgtcagaaacgt

SEQ ID NO: 161160 - DNA, 25 bp, Saccharomyces pastorianus
tacatttcctctcaaatcctaacga

SEQ ID NO: 161161 - DNA, 25 bp, Saccharomyces pastorianus
agccgttgctggtgcttcaggaatt

SEQ ID NO: 161162 - DNA, 25 bp, Saccharomyces pastorianus
aaagagaagccatagcctcccagaa

SEQ ID NO: 161163 - DNA, 25 bp, Saccharomyces pastorianus
ttcattttctactgcgtctactaca

SEQ ID NO: 161164 - DNA, 25 bp, Saccharomyces pastorianus
tttggtttcattccacatcgtttga

SEQ ID NO: 161165 - DNA, 25 bp, Saccharomyces pastorianus
tgcctcaattgactcctcgattttt

SEQ ID NO: 161166 - DNA, 25 bp, Saccharomyces pastorianus
ccatcagccccgtttcaaagaagga

SEQ ID NO: 161167 - DNA, 25 bp, Saccharomyces pastorianus
ggaagttccgatgagtctgacacca

SEQ ID NO: 161168 - DNA, 25 bp, Saccharomyces pastorianus
taacgccagcttagacacacagaat

SEQ ID NO: 161169 - DNA, 25 bp, Saccharomyces pastorianus
gaatctcaagatagacccgacgctg

SEQ ID NO: 161170 - DNA, 25 bp, Saccharomyces pastorianus
actaacagtggttcgctttaccgct

SEQ ID NO: 161171 - DNA, 25 bp, Saccharomyces pastorianus
atcatactgcggctaatctcgggaa

SEQ ID NO: 161172 - DNA, 25 bp, Saccharomyces pastorianus
aggtcaaccatcttctgggccagta

SEQ ID NO: 161173 - DNA, 25 bp, Saccharomyces pastorianus
gaacgtagccaacacaccagtattt

SEQ ID NO: 161174 - DNA, 25 bp, Saccharomyces pastorianus
ggtcccgtttactacaatggcaatc

SEQ ID NO: 161175 - DNA, 25 bp, Saccharomyces pastorianus
aaattcaggctcatctgcgtcttta

SEQ ID NO: 161176 - DNA, 25 bp, Saccharomyces pastorianus
tttaccgctccagttcaaattcagg

SEQ ID NO: 161177 - DNA, 25 bp, Saccharomyces pastorianus
tagacctagtaacaatccagccgct

SEQ ID NO: 161178 - DNA, 25 bp, Saccharomyces pastorianus
tgggccagtattcagcttccattgc

SEQ ID NO: 161179 - DNA, 25 bp, Saccharomyces pastorianus
attctattgttctttacgacttgag

SEQ ID NO: 161180 - DNA, 25 bp, Saccharomyces pastorianus
aatgcagcatgttttccaggttaaa

SEQ ID NO: 161181 - DNA, 25 bp, Saccharomyces pastorianus
gacgaatgctatttgctggaatcca

SEQ ID NO: 161182 - DNA, 25 bp, Saccharomyces pastorianus
gtattcaaagatcacgtcagcgcag

SEQ ID NO: 161183 - DNA, 25 bp, Saccharomyces pastorianus
gaatccaatggaggccttcaacttt

SEQ ID NO: 161184 - DNA, 25 bp, Saccharomyces pastorianus
gccttcaactttgtaactgccaatg

SEQ ID NO: 161185 - DNA, 25 bp, Saccharomyces pastorianus
aggtctaatgtcaaaactactcgtg

SEQ ID NO: 161186 - DNA, 25 bp, Saccharomyces pastorianus
ggccaagatccatctttgggacgtt

SEQ ID NO: 161187 - DNA, 25 bp, Saccharomyces pastorianus
atggatgttgacttttctcctacgg

SEQ ID NO: 161188 - DNA, 25 bp, Saccharomyces pastorianus
gattgaagccagtttccgatctatc

SEQ ID NO: 161189 - DNA, 25 bp, Saccharomyces pastorianus
gagattgttactggttcgtacgata

SEQ ID NO: 161190 - DNA, 25 bp, Saccharomyces pastorianus
agagaagctaatgaaaggcgtacta

SEQ ID NO: 161191 - DNA, 25 bp, Saccharomyces pastorianus
acatagacacgtgccacaagtcatc

SEQ ID NO: 161192 - DNA, 25 bp, Saccharomyces pastorianus
acaagtcatcaaaaaggctcaggaa

SEQ ID NO: 161193 - DNA, 25 bp, Saccharomyces pastorianus
gatatgccatacatttccgaaagga

SEQ ID NO: 161194 - DNA, 25 bp, Saccharomyces pastorianus
gaaagatttagacatatgccggaga

SEQ ID NO: 161195 - DNA, 25 bp, Saccharomyces pastorianus
aaggatatgccatacatttccgaaa

SEQ ID NO: 161196 - DNA, 25 bp, Saccharomyces pastorianus
atttagacatatgccggagatcaaa

SEQ ID NO: 161197 - DNA, 25 bp, Saccharomyces pastorianus
tatgccatacatttccgaaaggaag

SEQ ID NO: 161198 - DNA, 25 bp, Saccharomyces pastorianus
aaaaggctcaggaaattaagaacat

SEQ ID NO: 161199 - DNA, 25 bp, Saccharomyces pastorianus
gcgtactagaaaggatatgccatac

SEQ ID NO: 161200 - DNA, 25 bp, Saccharomyces pastorianus
acacgtgccacaagtcatcaaaaag

SEQ ID NO: 161201 - DNA, 25 bp, Saccharomyces pastorianus
cgcagccgtggcattgtacaggaaa

SEQ ID NO: 161202 - DNA, 25 bp, Saccharomyces pastorianus
cgatacggtgatcctttgcttgata

SEQ ID NO: 161203 - DNA, 25 bp, Saccharomyces pastorianus
acggctagtgtctctcgatacggtg

SEQ ID NO: 161204 - DNA, 25 bp, Saccharomyces pastorianus
tgaaaccttggtacactcttctttc

SEQ ID NO: 161205 - DNA, 25 bp, Saccharomyces pastorianus
gtatcatgcgccaggttacaacact

SEQ ID NO: 161206 - DNA, 25 bp, Saccharomyces pastorianus
aagtagcagctctcaagccagtgaa

SEQ ID NO: 161207 - DNA, 25 bp, Saccharomyces pastorianus
attcgaggttgtagtcttcacggct

SEQ ID NO: 161208 - DNA, 25 bp, Saccharomyces pastorianus
agtgaaacttccaacgatgccgacg

SEQ ID NO: 161209 - DNA, 25 bp, Saccharomyces pastorianus
gcggattttgttttgcctgtggaaa

SEQ ID NO: 161210 - DNA, 25 bp, Saccharomyces pastorianus
agcagcgagggcctactgtacaagt

SEQ ID NO: 161211 - DNA, 25 bp, Saccharomyces pastorianus
aacgcttttgcagcagggccagtat

SEQ ID NO: 161212 - DNA, 25 bp, Saccharomyces pastorianus
ataggcgtcgtgcatggattttctg

SEQ ID NO: 161213 - DNA, 25 bp, Saccharomyces pastorianus
tacatcaatggtcgcttcaagattt

SEQ ID NO: 161214 - DNA, 25 bp, Saccharomyces pastorianus
aatacgcacctacccaaatttatga

SEQ ID NO: 161215 - DNA, 25 bp, Saccharomyces pastorianus
tgatcttcaattaccgggcgactta

SEQ ID NO: 161216 - DNA, 25 bp, Saccharomyces pastorianus
gacttagactttttacgaacgcata

SEQ ID NO: 161217 - DNA, 25 bp, Saccharomyces pastorianus
gtacttgcacggtttgaactgctca

SEQ ID NO: 161218 - DNA, 25 bp, Saccharomyces pastorianus
aggaattttcctcattgcgcccgat

SEQ ID NO: 161219 - DNA, 25 bp, Saccharomyces pastorianus
aaaccatcacttctgtaccattttg

SEQ ID NO: 161220 - DNA, 25 bp, Saccharomyces pastorianus
aaatttatgactccgccttttgctc

SEQ ID NO: 161221 - DNA, 25 bp, Saccharomyces pastorianus
tttgtaccacaagcctcttttaatg

SEQ ID NO: 161222 - DNA, 25 bp, Saccharomyces pastorianus
gacttagtgttgtcgttagcaccag

SEQ ID NO: 161223 - DNA, 25 bp, Saccharomyces pastorianus
cgcaggacgctatttctccagataa

SEQ ID NO: 161224 - DNA, 25 bp, Saccharomyces pastorianus
gagctgttatttagtcggtcgtgaa

SEQ ID NO: 161225 - DNA, 25 bp, Saccharomyces pastorianus
cagcactgcgtcatccagttcagga

SEQ ID NO: 161226 - DNA, 25 bp, Saccharomyces pastorianus
gcccttccggtctgttagagctgga

SEQ ID NO: 161227 - DNA, 25 bp, Saccharomyces pastorianus
aacggagatcgttgtcgcagacatt

SEQ ID NO: 161228 - DNA, 25 bp, Saccharomyces pastorianus
gaaacatcctcaaagcagcactgcg

SEQ ID NO: 161229 - DNA, 25 bp, Saccharomyces pastorianus
gatattatgccagacttcagccctt

SEQ ID NO: 161230 - DNA, 25 bp, Saccharomyces pastorianus
gtcgtgaactggtccacagtctgga

SEQ ID NO: 161231 - DNA, 25 bp, Saccharomyces pastorianus
aaaacatgtggagccgcaggacgct

SEQ ID NO: 161232 - DNA, 25 bp, Saccharomyces pastorianus
gtttcacagacgcaaaagaccttat

SEQ ID NO: 161233 - DNA, 25 bp, Saccharomyces pastorianus
agttcaggaacgttcgtggcatttt

SEQ ID NO: 161234 - DNA, 25 bp, Saccharomyces pastorianus
attactgttttacgtgctccacaaa

SEQ ID NO: 161235 - DNA, 25 bp, Saccharomyces pastorianus
agcgtgtacgcgtttatgcttcccc

SEQ ID NO: 161236 - DNA, 25 bp, Saccharomyces pastorianus
taacgatataaactggcgctctctc

SEQ ID NO: 161237 - DNA, 25 bp, Saccharomyces pastorianus
agagattttcttaccgagctcccca

SEQ ID NO: 161238 - DNA, 25 bp, Saccharomyces pastorianus
gagaatgaccaccactctgtgggta

SEQ ID NO: 161239 - DNA, 25 bp, Saccharomyces pastorianus
atgcttcccctctgagacaatttat

SEQ ID NO: 161240 - DNA, 25 bp, Saccharomyces pastorianus
gctctctcgtttcaatactcaattc

SEQ ID NO: 161241 - DNA, 25 bp, Saccharomyces pastorianus
gaggaccctggagttcgagaatgac

SEQ ID NO: 161242 - DNA, 25 bp, Saccharomyces pastorianus
gaagattctgacctgtctataacca

SEQ ID NO: 161243 - DNA, 25 bp, Saccharomyces pastorianus
tttaatgacccaagcgacgcgttca

SEQ ID NO: 161244 - DNA, 25 bp, Saccharomyces pastorianus
tggtgacccctttgcctttaatgac

SEQ ID NO: 161245 - DNA, 25 bp, Saccharomyces pastorianus
tcaaaacagcattactgatgatata

SEQ ID NO: 161246 - DNA, 25 bp, Saccharomyces pastorianus
atcctaatcaaaacagcattactga

SEQ ID NO: 161247 - DNA, 25 bp, Saccharomyces pastorianus
acagcattactgatgatataatgga

SEQ ID NO: 161248 - DNA, 25 bp, Saccharomyces pastorianus
cctaatcaaaacagcattactgatg

SEQ ID NO: 161249 - DNA, 25 bp, Saccharomyces pastorianus
aaaacagcattactgatgatataat

SEQ ID NO: 161250 - DNA, 25 bp, Saccharomyces pastorianus
taatcaaaacagcattactgatgat

SEQ ID NO: 161251 - DNA, 25 bp, Saccharomyces pastorianus
atcaaaacagcattactgatgatat

SEQ ID NO: 161252 - DNA, 25 bp, Saccharomyces pastorianus
gcatcctaatcaaaacagcattact

SEQ ID NO: 161253 - DNA, 25 bp, Saccharomyces pastorianus
tcctaatcaaaacagcattactgat

SEQ ID NO: 161254 - DNA, 25 bp, Saccharomyces pastorianus
catcctaatcaaaacagcattactg

SEQ ID NO: 161255 - DNA, 25 bp, Saccharomyces pastorianus
tgcatcctaatcaaaacagcattac

SEQ ID NO: 161256 - DNA, 25 bp, Saccharomyces pastorianus
gtagccgttgttaatgaatgcattc

SEQ ID NO: 161257 - DNA, 25 bp, Saccharomyces pastorianus
aagcgactttgtctacagtcagaga

SEQ ID NO: 161258 - DNA, 25 bp, Saccharomyces pastorianus
gaactgatggttacttacctctcaa

SEQ ID NO: 161259 - DNA, 25 bp, Saccharomyces pastorianus
gtcgcagagactattaatttccagg

SEQ ID NO: 161260 - DNA, 25 bp, Saccharomyces pastorianus
gacaaactacattaatctcttcgaa

SEQ ID NO: 161261 - DNA, 25 bp, Saccharomyces pastorianus
atcagaatctgctttgtcaacccta

SEQ ID NO: 161262 - DNA, 25 bp, Saccharomyces pastorianus
atgcattctgtcatcgattcaattg

SEQ ID NO: 161263 - DNA, 25 bp, Saccharomyces pastorianus
atatgagccaatgcctgcttctttg

SEQ ID NO: 161264 - DNA, 25 bp, Saccharomyces pastorianus
aaacggaactccaattactcaccag

SEQ ID NO: 161265 - DNA, 25 bp, Saccharomyces pastorianus
gtcaaccctagtcctaatcgggcaa

SEQ ID NO: 161266 - DNA, 25 bp, Saccharomyces pastorianus
atatcacctgataacgcatcaacga

SEQ ID NO: 161267 - DNA, 25 bp, Saccharomyces pastorianus
aaggatgcctatgctgtgcgtctag

SEQ ID NO: 161268 - DNA, 25 bp, Saccharomyces pastorianus
atgcgggatgttctcctttacagga

SEQ ID NO: 161269 - DNA, 25 bp, Saccharomyces pastorianus
gttaccatgtcctccagaattacga

SEQ ID NO: 161270 - DNA, 25 bp, Saccharomyces pastorianus
tttagtcaagttgggcactcctggc

SEQ ID NO: 161271 - DNA, 25 bp, Saccharomyces pastorianus
gcactcctggcaactgggatcatat

SEQ ID NO: 161272 - DNA, 25 bp, Saccharomyces pastorianus
gtggagaagctttcgacggtctctc

SEQ ID NO: 161273 - DNA, 25 bp, Saccharomyces pastorianus
caaatcgttgatgctatcgcctcaa

SEQ ID NO: 161274 - DNA, 25 bp, Saccharomyces pastorianus
aagcctgctgttacatctcaattgg

SEQ ID NO: 161275 - DNA, 25 bp, Saccharomyces pastorianus
gcctaccaagggtttgccactggag

SEQ ID NO: 161276 - DNA, 25 bp, Saccharomyces pastorianus
gaggcacgcattaagagaccattta

SEQ ID NO: 161277 - DNA, 25 bp, Saccharomyces pastorianus
gcagtttacttggttgcctcaggta

SEQ ID NO: 161278 - DNA, 25 bp, Saccharomyces pastorianus
tgttgctggtgtcgctgctattgct

SEQ ID NO: 161279 - DNA, 25 bp, Saccharomyces pastorianus
caattgttgctggtgtcgctgctat

SEQ ID NO: 161280 - DNA, 25 bp, Saccharomyces pastorianus
tcaattgttgctggtgtcgctgcta

SEQ ID NO: 161281 - DNA, 25 bp, Saccharomyces pastorianus
ttcaattgttgctggtgtcgctgct

SEQ ID NO: 161282 - DNA, 25 bp, Saccharomyces pastorianus
ttgctggtgtcgctgctattgctgc

SEQ ID NO: 161283 - DNA, 25 bp, Saccharomyces pastorianus
tactttatctccctctgacgaaaga

SEQ ID NO: 161284 - DNA, 25 bp, Saccharomyces pastorianus
attgttgctggtgtcgctgctattg

SEQ ID NO: 161285 - DNA, 25 bp, Saccharomyces pastorianus
ctgaatactatatgttccaagctgc

SEQ ID NO: 161286 - DNA, 25 bp, Saccharomyces pastorianus
ggtcgaattaggtgtctacgtctca

SEQ ID NO: 161287 - DNA, 25 bp, Saccharomyces pastorianus
ttgttgctggtgtcgctgctattgc

SEQ ID NO: 161288 - DNA, 25 bp, Saccharomyces pastorianus
aattgttgctggtgtcgctgctatt

SEQ ID NO: 161289 - DNA, 25 bp, Saccharomyces pastorianus
acctacggtatctctcaagtcttat

SEQ ID NO: 161290 - DNA, 25 bp, Saccharomyces pastorianus
aaacaacacctacggtatctctcaa

SEQ ID NO: 161291 - DNA, 25 bp, Saccharomyces pastorianus
ccttgtccaagccagaagttaagga

SEQ ID NO: 161292 - DNA, 25 bp, Saccharomyces pastorianus
aaggaagccgttgaatctgctgact

SEQ ID NO: 161293 - DNA, 25 bp, Saccharomyces pastorianus
aagccagaagttaaggaagccgttg

SEQ ID NO: 161294 - DNA, 25 bp, Saccharomyces pastorianus
taagggttacaagccagttgctgtc

SEQ ID NO: 161295 - DNA, 25 bp, Saccharomyces pastorianus
aagccgttgaatctgctgacttgat

SEQ ID NO: 161296 - DNA, 25 bp, Saccharomyces pastorianus
cgccgctaagggttacaagccagtt

SEQ ID NO: 161297 - DNA, 25 bp, Saccharomyces pastorianus
cctacggtatctctcaagtcttatg

SEQ ID NO: 161298 - DNA, 25 bp, Saccharomyces pastorianus
ggaagccgttgaatctgctgacttg

SEQ ID NO: 161299 - DNA, 25 bp, Saccharomyces pastorianus
aacacctacggtatctctcaagtct

SEQ ID NO: 161300 - DNA, 25 bp, Saccharomyces pastorianus
acctacggtatctctcaagtcttat

SEQ ID NO: 161301 - DNA, 25 bp, Saccharomyces pastorianus
aaacaacacctacggtatctctcaa

SEQ ID NO: 161302 - DNA, 25 bp, Saccharomyces pastorianus
ccttgtccaagccagaagttaagga

SEQ ID NO: 161303 - DNA, 25 bp, Saccharomyces pastorianus
aagccagaagttaaggaagccgttg

SEQ ID NO: 161304 - DNA, 25 bp, Saccharomyces pastorianus
taagggttacaagccagttgctgtc

SEQ ID NO: 161305 - DNA, 25 bp, Saccharomyces pastorianus
aagccgttgaatctgctgacttgat

SEQ ID NO: 161306 - DNA, 25 bp, Saccharomyces pastorianus
cgccgctaagggttacaagccagtt

SEQ ID NO: 161307 - DNA, 25 bp, Saccharomyces pastorianus
cctacggtatctctcaagtcttatg

SEQ ID NO: 161308 - DNA, 25 bp, Saccharomyces pastorianus
gttgttgaccactattgctgacgcc

SEQ ID NO: 161309 - DNA, 25 bp, Saccharomyces pastorianus
aggaagccgttgaatctgctgactt

SEQ ID NO: 161310 - DNA, 25 bp, Saccharomyces pastorianus
aacacctacggtatctctcaagtct

SEQ ID NO: 161311 - DNA, 25 bp, Saccharomyces pastorianus
agggatcctacattatttgcacaat

SEQ ID NO: 161312 - DNA, 25 bp, Saccharomyces pastorianus
tgctgcggcagtcaattgtgtttat

SEQ ID NO: 161313 - DNA, 25 bp, Saccharomyces pastorianus
agctgtatactctcactatgtggtc

SEQ ID NO: 161314 - DNA, 25 bp, Saccharomyces pastorianus
acatggacaccattgcttgtggaaa

SEQ ID NO: 161315 - DNA, 25 bp, Saccharomyces pastorianus
ggcttaacgtcctcaagggctacaa

SEQ ID NO: 161316 - DNA, 25 bp, Saccharomyces pastorianus
agacgcagtcgatgagctgtatact

SEQ ID NO: 161317 - DNA, 25 bp, Saccharomyces pastorianus
acatctattacgcaatcggtggaat

SEQ ID NO: 161318 - DNA, 25 bp, Saccharomyces pastorianus
ggtcgctcaagaacaagccattgtt

SEQ ID NO: 161319 - DNA, 25 bp, Saccharomyces pastorianus
gcctttgcgtcatcgtctttgaaaa

SEQ ID NO: 161320 - DNA, 25 bp, Saccharomyces pastorianus
agaaactccgttggcgacatcagta

SEQ ID NO: 161321 - DNA, 25 bp, Saccharomyces pastorianus
tgatggctgcattcgggctcactaa

SEQ ID NO: 161322 - DNA, 25 bp, Saccharomyces pastorianus
acaggctgtagacatcgcgtcacag

SEQ ID NO: 161323 - DNA, 25 bp, Saccharomyces pastorianus
gcgtcacagtcacaaagcttgccaa

SEQ ID NO: 161324 - DNA, 25 bp, Saccharomyces pastorianus
agacatcgcgtcacagtcacaaagc

SEQ ID NO: 161325 - DNA, 25 bp, Saccharomyces pastorianus
tcacaggctgtagacatcgcgtcac

SEQ ID NO: 161326 - DNA, 25 bp, Saccharomyces pastorianus
tgtagacatcgcgtcacagtcacaa

SEQ ID NO: 161327 - DNA, 25 bp, Saccharomyces pastorianus
ggctgtagacatcgcgtcacagtca

SEQ ID NO: 161328 - DNA, 25 bp, Saccharomyces pastorianus
cgtcacagtcacaaagcttgccaaa

SEQ ID NO: 161329 - DNA, 25 bp, Saccharomyces pastorianus
gtagacatcgcgtcacagtcacaaa

SEQ ID NO: 161330 - DNA, 25 bp, Saccharomyces pastorianus
acatcgcgtcacagtcacaaagctt

SEQ ID NO: 161331 - DNA, 25 bp, Saccharomyces pastorianus
aggctgtagacatcgcgtcacagtc

SEQ ID NO: 161332 - DNA, 25 bp, Saccharomyces pastorianus
atcgcgtcacagtcacaaagcttgc

SEQ ID NO: 161333 - DNA, 25 bp, Saccharomyces pastorianus
gttttcgatgcccttggaactccat

SEQ ID NO: 161334 - DNA, 25 bp, Saccharomyces pastorianus
tggtggacaccgaccctgaagtgga

SEQ ID NO: 161335 - DNA, 25 bp, Saccharomyces pastorianus
gttgatcacctctcatttggtggac

SEQ ID NO: 161336 - DNA, 25 bp, Saccharomyces pastorianus
aaggttcttgttgctggtacttcag

SEQ ID NO: 161337 - DNA, 25 bp, Saccharomyces pastorianus
gatgggtctatacctaccagatggt

SEQ ID NO: 161338 - DNA, 25 bp, Saccharomyces pastorianus
gaaagctttccatgttactccagac

SEQ ID NO: 161339 - DNA, 25 bp, Saccharomyces pastorianus
ggaactccattgtccaacaaatatt

SEQ ID NO: 161340 - DNA, 25 bp, Saccharomyces pastorianus
ggtacttcagcatactgtcgtttaa

SEQ ID NO: 161341 - DNA, 25 bp, Saccharomyces pastorianus
gtccaaactttatctggttctcctg

SEQ ID NO: 161342 - DNA, 25 bp, Saccharomyces pastorianus
ggttctcctgctaacttgcaagttt

SEQ ID NO: 161343 - DNA, 25 bp, Saccharomyces pastorianus
tgaaaatttcacctcaacctccgtt

SEQ ID NO: 161344 - DNA, 25 bp, Saccharomyces pastorianus
agagcgtcatccattatggtcccga

SEQ ID NO: 161345 - DNA, 25 bp, Saccharomyces pastorianus
ggacaactacttgaagccaccacag

SEQ ID NO: 161346 - DNA, 25 bp, Saccharomyces pastorianus
aagctgcccacactgcttatagtga

SEQ ID NO: 161347 - DNA, 25 bp, Saccharomyces pastorianus
agatgagctgctcgagtacatccag

SEQ ID NO: 161348 - DNA, 25 bp, Saccharomyces pastorianus
gtgtacatatggaccgcttgttcat

SEQ ID NO: 161349 - DNA, 25 bp, Saccharomyces pastorianus
agaacgttggcgtcttggcaggcaa

SEQ ID NO: 161350 - DNA, 25 bp, Saccharomyces pastorianus
gagtcggtcgagtcaatcggatctg

SEQ ID NO: 161351 - DNA, 25 bp, Saccharomyces pastorianus
ccgcgagtttcccaaggtcattgat

SEQ ID NO: 161352 - DNA, 25 bp, Saccharomyces pastorianus
ggtcattgatcatctcttttacaga

SEQ ID NO: 161353 - DNA, 25 bp, Saccharomyces pastorianus
catcttcatctacctcatctttgaa

SEQ ID NO: 161354 - DNA, 25 bp, Saccharomyces pastorianus
ggccgatggccaaggagactcgcat

SEQ ID NO: 161355 - DNA, 25 bp, Saccharomyces pastorianus
aaggtgtgctcctgccgtattaaga

SEQ ID NO: 161356 - DNA, 25 bp, Saccharomyces pastorianus
aaaggtgtgctcctgccgtattaag

SEQ ID NO: 161357 - DNA, 25 bp, Saccharomyces pastorianus
aggtgtgctcctgccgtattaagaa

SEQ ID NO: 161358 - DNA, 25 bp, Saccharomyces pastorianus
atgaaaaggtgtgctcctgccgtat

SEQ ID NO: 161359 - DNA, 25 bp, Saccharomyces pastorianus
gaaaaggtgtgctcctgccgtatta

SEQ ID NO: 161360 - DNA, 25 bp, Saccharomyces pastorianus
aaaaggtgtgctcctgccgtattaa

SEQ ID NO: 161361 - DNA, 25 bp, Saccharomyces pastorianus
gtgtgctcctgccgtattaagaaat

SEQ ID NO: 161362 - DNA, 25 bp, Saccharomyces pastorianus
tgaaaaggtgtgctcctgccgtatt

SEQ ID NO: 161363 - DNA, 25 bp, Saccharomyces pastorianus
ggtgtgctcctgccgtattaagaaa

SEQ ID NO: 161364 - DNA, 25 bp, Saccharomyces pastorianus
ggatgcctcattacctgaattgaaa

SEQ ID NO: 161365 - DNA, 25 bp, Saccharomyces pastorianus
gaggcaatcaaatgttcgccccgat

SEQ ID NO: 161366 - DNA, 25 bp, Saccharomyces pastorianus
gacctcattaactcgattttctcta

SEQ ID NO: 161367 - DNA, 25 bp, Saccharomyces pastorianus
gacgtcaccattatgctcacaggat

SEQ ID NO: 161368 - DNA, 25 bp, Saccharomyces pastorianus
gaaacctggtctcatattttatggc

SEQ ID NO: 161369 - DNA, 25 bp, Saccharomyces pastorianus
tgttcgccccgattatttatcttat

SEQ ID NO: 161370 - DNA, 25 bp, Saccharomyces pastorianus
tgttcctctaaagtcggttggcagt

SEQ ID NO: 161371 - DNA, 25 bp, Saccharomyces pastorianus
aaagtatctttatcggcaccaggcc

SEQ ID NO: 161372 - DNA, 25 bp, Saccharomyces pastorianus
tatggcgcgcggaaatgttcctcta

SEQ ID NO: 161373 - DNA, 25 bp, Saccharomyces pastorianus
agtaattcagctaccacaacatttg

SEQ ID NO: 161374 - DNA, 25 bp, Saccharomyces pastorianus
gcaccaggcctatgggaacgttata

SEQ ID NO: 161375 - DNA, 25 bp, Saccharomyces pastorianus
gttttagccacttcgaactattcaa

SEQ ID NO: 161376 - DNA, 25 bp, Saccharomyces pastorianus
gggcactttgctttattgatacaaa

SEQ ID NO: 161377 - DNA, 25 bp, Saccharomyces pastorianus
aaagtcggagatttcgcagcctgtt

SEQ ID NO: 161378 - DNA, 25 bp, Saccharomyces pastorianus
gccaacagaggcaatagcattattt

SEQ ID NO: 161379 - DNA, 25 bp, Saccharomyces pastorianus
gtgttgcaaaactacgaaccattta

SEQ ID NO: 161380 - DNA, 25 bp, Saccharomyces pastorianus
gacatacgccgttttacaatcttta

SEQ ID NO: 161381 - DNA, 25 bp, Saccharomyces pastorianus
agatttcgcagcctgttttagccac

SEQ ID NO: 161382 - DNA, 25 bp, Saccharomyces pastorianus
cgaaccatttaatcgctcaagaatt

SEQ ID NO: 161383 - DNA, 25 bp, Saccharomyces pastorianus
taaatgaccttgatggtgcgtttag

SEQ ID NO: 161384 - DNA, 25 bp, Saccharomyces pastorianus
aagtatctctgcattgatggatgta

SEQ ID NO: 161385 - DNA, 25 bp, Saccharomyces pastorianus
aacagcaacgcataccataatgctt

SEQ ID NO: 161386 - DNA, 25 bp, Saccharomyces pastorianus
atccgaggataagacgcagtccagt

SEQ ID NO: 161387 - DNA, 25 bp, Saccharomyces pastorianus
gcatattcagcggattgttccctta

SEQ ID NO: 161388 - DNA, 25 bp, Saccharomyces pastorianus
aggatccaagaaccctttcgtatgg

SEQ ID NO: 161389 - DNA, 25 bp, Saccharomyces pastorianus
atatatcgtggaacagcgctgtaga

SEQ ID NO: 161390 - DNA, 25 bp, Saccharomyces pastorianus
cagtgataaatcttggccaacatta

SEQ ID NO: 161391 - DNA, 25 bp, Saccharomyces pastorianus
cagcgggctttagagttatacaacc

SEQ ID NO: 161392 - DNA, 25 bp, Saccharomyces pastorianus
aacatgatagcccacagcgggcttt

SEQ ID NO: 161393 - DNA, 25 bp, Saccharomyces pastorianus
tgccatcatctacaacgccaaatat

SEQ ID NO: 161394 - DNA, 25 bp, Saccharomyces pastorianus
aatcgatgagctgccattactgtgg

SEQ ID NO: 161395 - DNA, 25 bp, Saccharomyces pastorianus
aacacttttcgctaaatacatggat

SEQ ID NO: 161396 - DNA, 25 bp, Saccharomyces pastorianus
gttgatgacacactaattcatgggt

SEQ ID NO: 161397 - DNA, 25 bp, Saccharomyces pastorianus
agaatctactttactgtccctaatg

SEQ ID NO: 161398 - DNA, 25 bp, Saccharomyces pastorianus
aactttcacgtactaatcgatctgt

SEQ ID NO: 161399 - DNA, 25 bp, Saccharomyces pastorianus
ttgggaggccaaatctacctacaca

SEQ ID NO: 161400 - DNA, 25 bp, Saccharomyces pastorianus
gaaaatacgtttcttacagctgatt

SEQ ID NO: 161401 - DNA, 25 bp, Saccharomyces pastorianus
aagcggtgtcagtaactctatggat

SEQ ID NO: 161402 - DNA, 25 bp, Saccharomyces pastorianus
cgtgcttgtgaaatggacccgtact

SEQ ID NO: 161403 - DNA, 25 bp, Saccharomyces pastorianus
ggcaaatgagcctaactccgcaaag

SEQ ID NO: 161404 - DNA, 25 bp, Saccharomyces pastorianus
atggccaaagttcccattggattga

SEQ ID NO: 161405 - DNA, 25 bp, Saccharomyces pastorianus
acagtcccctctgttttttgtggat

SEQ ID NO: 161406 - DNA, 25 bp, Saccharomyces pastorianus
gaaaactaatgttcacacccaggca

SEQ ID NO: 161407 - DNA, 25 bp, Saccharomyces pastorianus
ttgcccaacgtggatttggtcaccg

SEQ ID NO: 161408 - DNA, 25 bp, Saccharomyces pastorianus
aaggctaccgtcgatgaattcccat

SEQ ID NO: 161409 - DNA, 25 bp, Saccharomyces pastorianus
gatcagaatctacgatttgggtaag

SEQ ID NO: 161410 - DNA, 25 bp, Saccharomyces pastorianus
gctaccgtcgatgaattcccattgt

SEQ ID NO: 161411 - DNA, 25 bp, Saccharomyces pastorianus
aagaaggctaccgtcgatgaattcc

SEQ ID NO: 161412 - DNA, 25 bp, Saccharomyces pastorianus
aggctaccgtcgatgaattcccatt

SEQ ID NO: 161413 - DNA, 25 bp, Saccharomyces pastorianus
ctccaagatcagaatctacgatttg

SEQ ID NO: 161414 - DNA, 25 bp, Saccharomyces pastorianus
ggtcaacaacagattattttgtcta

SEQ ID NO: 161415 - DNA, 25 bp, Saccharomyces pastorianus
gaatctacgatttgggtaagaagaa

SEQ ID NO: 161416 - DNA, 25 bp, Saccharomyces pastorianus
gaaggctaccgtcgatgaattccca

SEQ ID NO: 161417 - DNA, 25 bp, Saccharomyces pastorianus
gggtaagaagaaggctaccgtcgat

SEQ ID NO: 161418 - DNA, 25 bp, Saccharomyces pastorianus
taccgtcgatgaattcccattgtgt

SEQ ID NO: 161419 - DNA, 25 bp, Saccharomyces pastorianus
gtgccggtgcggatagattgcaaca

SEQ ID NO: 161420 - DNA, 25 bp, Saccharomyces pastorianus
gaagaccagctagatgttacagata

SEQ ID NO: 161421 - DNA, 25 bp, Saccharomyces pastorianus
tacagataccaaaagaacaagcctt

SEQ ID NO: 161422 - DNA, 25 bp, Saccharomyces pastorianus
atgttgtcttgtgccggtgcggata

SEQ ID NO: 161423 - DNA, 25 bp, Saccharomyces pastorianus
ttggtcaaattatcttctctgtcag

SEQ ID NO: 161424 - DNA, 25 bp, Saccharomyces pastorianus
tgtcttctgaagctttggaagctgc

SEQ ID NO: 161425 - DNA, 25 bp, Saccharomyces pastorianus
gagccagatacaagttcccaggtca

SEQ ID NO: 161426 - DNA, 25 bp, Saccharomyces pastorianus
ttggaacaattgtcttctgaagctt

SEQ ID NO: 161427 - DNA, 25 bp, Saccharomyces pastorianus
aagtctagatacaacagagctgttc

SEQ ID NO: 161428 - DNA, 25 bp, Saccharomyces pastorianus
atcttctctgtcagaaccaaggaca

SEQ ID NO: 161429 - DNA, 25 bp, Saccharomyces pastorianus
gagctgttccagactccaagatcag

SEQ ID NO: 161430 - DNA, 25 bp, Saccharomyces pastorianus
gaaagcaccgtcgtccttgacttca

SEQ ID NO: 161431 - DNA, 25 bp, Saccharomyces pastorianus
ttaacgaaagcaccgtcgtccttga

SEQ ID NO: 161432 - DNA, 25 bp, Saccharomyces pastorianus
gtattctgggaattctctgatgttg

SEQ ID NO: 161433 - DNA, 25 bp, Saccharomyces pastorianus
accagcttctctcttcttcaagtat

SEQ ID NO: 161434 - DNA, 25 bp, Saccharomyces pastorianus
aagcttgagcagcaaagtattctgg

SEQ ID NO: 161435 - DNA, 25 bp, Saccharomyces pastorianus
tccaaagaacccttcttggacaaga

SEQ ID NO: 161436 - DNA, 25 bp, Saccharomyces pastorianus
tgatgttgttttccaaagaaccctt

SEQ ID NO: 161437 - DNA, 25 bp, Saccharomyces pastorianus
gtcgtccttgacttcaccagcttct

SEQ ID NO: 161438 - DNA, 25 bp, Saccharomyces pastorianus
gcttctctcttcttcaagtattctg

SEQ ID NO: 161439 - DNA, 25 bp, Saccharomyces pastorianus
attctctgatgttgttttccaaaga

SEQ ID NO: 161440 - DNA, 25 bp, Saccharomyces pastorianus
tcttggacaagaacttaacgaaagc

SEQ ID NO: 161441 - DNA, 25 bp, Saccharomyces pastorianus
catgtctgtgttttcgacttggaga

SEQ ID NO: 161442 - DNA, 25 bp, Saccharomyces pastorianus
aacgtaccttcctgatgattggcaa

SEQ ID NO: 161443 - DNA, 25 bp, Saccharomyces pastorianus
atatggcaaattattcacggcagaa

SEQ ID NO: 161444 - DNA, 25 bp, Saccharomyces pastorianus
ttggcaaagcaacatcgacgaagtg

SEQ ID NO: 161445 - DNA, 25 bp, Saccharomyces pastorianus
ggtcatggaccaaacgaagctgatg

SEQ ID NO: 161446 - DNA, 25 bp, Saccharomyces pastorianus
gttgaagtgtaccatgggatcattt

SEQ ID NO: 161447 - DNA, 25 bp, Saccharomyces pastorianus
tccggtgacaagcttaccttcaaat

SEQ ID NO: 161448 - DNA, 25 bp, Saccharomyces pastorianus
agtgaactgcaactggtcatggacc

SEQ ID NO: 161449 - DNA, 25 bp, Saccharomyces pastorianus
aagatcttattccactcattgcagc

SEQ ID NO: 161450 - DNA, 25 bp, Saccharomyces pastorianus
taatggatttgacgcctccggtgac

SEQ ID NO: 161451 - DNA, 25 bp, Saccharomyces pastorianus
gttgttgcggatgccaatctggtaa

SEQ ID NO: 161452 - DNA, 25 bp, Saccharomyces pastorianus
gatcgtcggtggtactatcattgat

SEQ ID NO: 161453 - DNA, 25 bp, Saccharomyces pastorianus
gatctctcagtgaatatctcctctt

SEQ ID NO: 161454 - DNA, 25 bp, Saccharomyces pastorianus
ctatttgcttgctctttttcagaca

SEQ ID NO: 161455 - DNA, 25 bp, Saccharomyces pastorianus
tcaaaggtccagatttcgccaatat

SEQ ID NO: 161456 - DNA, 25 bp, Saccharomyces pastorianus
ggaatctagggcctgtagacttcat

SEQ ID NO: 161457 - DNA, 25 bp, Saccharomyces pastorianus
gcattatgcttccaagatcgtcggt

SEQ ID NO: 161458 - DNA, 25 bp, Saccharomyces pastorianus
gacaaagtctctatacgttccgaaa

SEQ ID NO: 161459 - DNA, 25 bp, Saccharomyces pastorianus
tgcagcgctttctacttccaaagaa

SEQ ID NO: 161460 - DNA, 25 bp, Saccharomyces pastorianus
gttcgtcgatcccaggtagcaaata

SEQ ID NO: 161461 - DNA, 25 bp, Saccharomyces pastorianus
tagatgtttctgcagcgctttctac

SEQ ID NO: 161462 - DNA, 25 bp, Saccharomyces pastorianus
gaatatctcctcttcaaaggtccag

SEQ ID NO: 161463 - DNA, 25 bp, Saccharomyces pastorianus
ggcggatttggcatctactgtagat

SEQ ID NO: 161464 - DNA, 25 bp, Saccharomyces pastorianus
ctacgaaaagctcggtggcggattt

SEQ ID NO: 161465 - DNA, 25 bp, Saccharomyces pastorianus
agtacacgggtgtccttggcgctag

SEQ ID NO: 161466 - DNA, 25 bp, Saccharomyces pastorianus
aactgttatttatcccttcatggtg

SEQ ID NO: 161467 - DNA, 25 bp, Saccharomyces pastorianus
ggagagcatacgactttacaattaa

SEQ ID NO: 161468 - DNA, 25 bp, Saccharomyces pastorianus
ttcttaccttctccattctgagtta

SEQ ID NO: 161469 - DNA, 25 bp, Saccharomyces pastorianus
tttcaattgatgtcacggtaccccg

SEQ ID NO: 161470 - DNA, 25 bp, Saccharomyces pastorianus
cagtacttcactgctatgggtttgt

SEQ ID NO: 161471 - DNA, 25 bp, Saccharomyces pastorianus
ttcggtttgggatggtgctctgata

SEQ ID NO: 161472 - DNA, 25 bp, Saccharomyces pastorianus
gataatgtcgatacgctagtcatag

SEQ ID NO: 161473 - DNA, 25 bp, Saccharomyces pastorianus
atgtcctacgagatctcaactccaa

SEQ ID NO: 161474 - DNA, 25 bp, Saccharomyces pastorianus
agatgaccatctgttgaagacctgc

SEQ ID NO: 161475 - DNA, 25 bp, Saccharomyces pastorianus
gagaccgacggttcgattgcatcta

SEQ ID NO: 161476 - DNA, 25 bp, Saccharomyces pastorianus
gatctcgatttgttcgacgactggg

SEQ ID NO: 161477 - DNA, 25 bp, Saccharomyces pastorianus
tgagccggtcgtgcccaaaatgaaa

SEQ ID NO: 161478 - DNA, 25 bp, Saccharomyces pastorianus
tctagcgagctcttgcccaataaaa

SEQ ID NO: 161479 - DNA, 25 bp, Saccharomyces pastorianus
aggatttagtcgatatcttccctcc

SEQ ID NO: 161480 - DNA, 25 bp, Saccharomyces pastorianus
tttcactggtttctgcatcgtccga

SEQ ID NO: 161481 - DNA, 25 bp, Saccharomyces pastorianus
aagcgactgttcttcattgagctcc

SEQ ID NO: 161482 - DNA, 25 bp, Saccharomyces pastorianus
tagaacaatggccatctgcatcacc

SEQ ID NO: 161483 - DNA, 25 bp, Saccharomyces pastorianus
ctctaaacttcatcccttgacagat

SEQ ID NO: 161484 - DNA, 25 bp, Saccharomyces pastorianus
attgctgacgctgtcgatttgcaga

SEQ ID NO: 161485 - DNA, 25 bp, Saccharomyces pastorianus
ctatgcttgttctatttggccaggc

SEQ ID NO: 161486 - DNA, 25 bp, Saccharomyces pastorianus
gtccgatcctaagtatctttcgttg

SEQ ID NO: 161487 - DNA, 25 bp, Saccharomyces pastorianus
agttgatttactgcacttggccacc

SEQ ID NO: 161488 - DNA, 25 bp, Saccharomyces pastorianus
aatacggttctgctacctctaggga

SEQ ID NO: 161489 - DNA, 25 bp, Saccharomyces pastorianus
gatacaactggtgggcgtcaagtct

SEQ ID NO: 161490 - DNA, 25 bp, Saccharomyces pastorianus
tttcacctatttcggcatgctatgc

SEQ ID NO: 161491 - DNA, 25 bp, Saccharomyces pastorianus
agccattccttctccaaatatttga

SEQ ID NO: 161492 - DNA, 25 bp, Saccharomyces pastorianus
ggttataaagctgccaatgccccag

SEQ ID NO: 161493 - DNA, 25 bp, Saccharomyces pastorianus
aggaggttttcaccaatccattgga

SEQ ID NO: 161494 - DNA, 25 bp, Saccharomyces pastorianus
agggctccaagcgtttagttgattt

SEQ ID NO: 161495 - DNA, 25 bp, Saccharomyces pastorianus
gtaaaattctgcctcaattgaccag

SEQ ID NO: 161496 - DNA, 25 bp, Saccharomyces pastorianus
ccttttttgcttcacgtgtatatat

SEQ ID NO: 161497 - DNA, 25 bp, Saccharomyces pastorianus
atcagttgatatgcgttttctatac

SEQ ID NO: 161498 - DNA, 25 bp, Saccharomyces pastorianus
tttttgcttcacgtgtatatatatc

SEQ ID NO: 161499 - DNA, 25 bp, Saccharomyces pastorianus
gttgatatgcgttttctatacagac

SEQ ID NO: 161500 - DNA, 25 bp, Saccharomyces pastorianus
atgccttttttgcttcacgtgtata

SEQ ID NO: 161501 - DNA, 25 bp, Saccharomyces pastorianus
gccttttttgcttcacgtgtatata

SEQ ID NO: 161502 - DNA, 25 bp, Saccharomyces pastorianus
gcgttttctatacagacatacatgt

SEQ ID NO: 161503 - DNA, 25 bp, Saccharomyces pastorianus
atatacatatgtacgcagagatata

SEQ ID NO: 161504 - DNA, 25 bp, Saccharomyces pastorianus
cagacatacatgtatatacacacat

SEQ ID NO: 161505 - DNA, 25 bp, Saccharomyces pastorianus
tgatatgcgttttctatacagacat

SEQ ID NO: 161506 - DNA, 25 bp, Saccharomyces pastorianus
atgcgttttctatacagacatacat

SEQ ID NO: 161507 - DNA, 25 bp, Saccharomyces pastorianus
tagaactctcggatatcgtgggtcc

SEQ ID NO: 161508 - DNA, 25 bp, Saccharomyces pastorianus
gaggcattcttcattgtacgacagt

SEQ ID NO: 161509 - DNA, 25 bp, Saccharomyces pastorianus
gatgggtttcgaatttttggctcag

SEQ ID NO: 161510 - DNA, 25 bp, Saccharomyces pastorianus
atgtcaatgccaaactatccttatg

SEQ ID NO: 161511 - DNA, 25 bp, Saccharomyces pastorianus
gggtataccattaagtactgcacaa

SEQ ID NO: 161512 - DNA, 25 bp, Saccharomyces pastorianus
tttggctcagttgggatgctctaga

SEQ ID NO: 161513 - DNA, 25 bp, Saccharomyces pastorianus
aaagacccctgatacattgacgtta

SEQ ID NO: 161514 - DNA, 25 bp, Saccharomyces pastorianus
ttgacgttaaacatccaaccggatt

SEQ ID NO: 161515 - DNA, 25 bp, Saccharomyces pastorianus
gtcgaagcactaacagctcttttgg

SEQ ID NO: 161516 - DNA, 25 bp, Saccharomyces pastorianus
cggattactaccttttcttactgag

SEQ ID NO: 161517 - DNA, 25 bp, Saccharomyces pastorianus
taagtgccagtgaatttgtcgaagc

SEQ ID NO: 161518 - DNA, 25 bp, Saccharomyces pastorianus
attgcctcacaattccgtaaagata

SEQ ID NO: 161519 - DNA, 25 bp, Saccharomyces pastorianus
aggctggagggttatctattgtcaa

SEQ ID NO: 161520 - DNA, 25 bp, Saccharomyces pastorianus
aactggtccgccgtgctagagaaaa

SEQ ID NO: 161521 - DNA, 25 bp, Saccharomyces pastorianus
gaagttcactcatttgaccaacaat

SEQ ID NO: 161522 - DNA, 25 bp, Saccharomyces pastorianus
gaaacttgtggctgaatctactaaa

SEQ ID NO: 161523 - DNA, 25 bp, Saccharomyces pastorianus
acgtgctcgcgctatggtacataat

SEQ ID NO: 161524 - DNA, 25 bp, Saccharomyces pastorianus
aatttttgaacgtgctcgcgctatg

SEQ ID NO: 161525 - DNA, 25 bp, Saccharomyces pastorianus
ggtctccaagacgttaactcagcta

SEQ ID NO: 161526 - DNA, 25 bp, Saccharomyces pastorianus
gaatctggcgcaagagcttttcaat

SEQ ID NO: 161527 - DNA, 25 bp, Saccharomyces pastorianus
gattgcgcttgatgattctaagtct

SEQ ID NO: 161528 - DNA, 25 bp, Saccharomyces pastorianus
cggatcattccatatattgcctcac

SEQ ID NO: 161529 - DNA, 25 bp, Saccharomyces pastorianus
gacagtgaaatcttgtaagatgcca

SEQ ID NO: 161530 - DNA, 25 bp, Saccharomyces pastorianus
agaaattcccagctggcgactacaa

SEQ ID NO: 161531 - DNA, 25 bp, Saccharomyces pastorianus
aaattcccagctggcgactacaaat

SEQ ID NO: 161532 - DNA, 25 bp, Saccharomyces pastorianus
atgtctgacttagttaacaagaaat

SEQ ID NO: 161533 - DNA, 25 bp, Saccharomyces pastorianus
acaaacagttgaatggtccaaatta

SEQ ID NO: 161534 - DNA, 25 bp, Saccharomyces pastorianus
cccagctggcgactacaaattccaa

SEQ ID NO: 161535 - DNA, 25 bp, Saccharomyces pastorianus
caaattccaatacatgctatcagcc

SEQ ID NO: 161536 - DNA, 25 bp, Saccharomyces pastorianus
aatacatgctatcagccaaagtgat

SEQ ID NO: 161537 - DNA, 25 bp, Saccharomyces pastorianus
tgatgctgacagtgaaatcttgtaa

SEQ ID NO: 161538 - DNA, 25 bp, Saccharomyces pastorianus
ttccaatacatgctatcagccaaag

SEQ ID NO: 161539 - DNA, 25 bp, Saccharomyces pastorianus
acaagaaattcccagctggcgacta

SEQ ID NO: 161540 - DNA, 25 bp, Saccharomyces pastorianus
aagaatacagacaagccagcagcca

SEQ ID NO: 161541 - DNA, 25 bp, Saccharomyces pastorianus
gtctgtttcccaaatttctgtaaat

SEQ ID NO: 161542 - DNA, 25 bp, Saccharomyces pastorianus
ttattacagcaacgatttttggcca

SEQ ID NO: 161543 - DNA, 25 bp, Saccharomyces pastorianus
ttgtttcctccgaagcatatatata

SEQ ID NO: 161544 - DNA, 25 bp, Saccharomyces pastorianus
gacgatgttactgaatccacggaag

SEQ ID NO: 161545 - DNA, 25 bp, Saccharomyces pastorianus
gaagctctagcaactcttcaagcaa

SEQ ID NO: 161546 - DNA, 25 bp, Saccharomyces pastorianus
gaatactgctaatgacgatgttact

SEQ ID NO: 161547 - DNA, 25 bp, Saccharomyces pastorianus
gccgacactctgtctttattacagc

SEQ ID NO: 161548 - DNA, 25 bp, Saccharomyces pastorianus
atatataacggtgccgacactctgt

SEQ ID NO: 161549 - DNA, 25 bp, Saccharomyces pastorianus
atcgaacgcgatacagaaagctatg

SEQ ID NO: 161550 - DNA, 25 bp, Saccharomyces pastorianus
aagccagcagccaacttatggaatt

SEQ ID NO: 161551 - DNA, 25 bp, Saccharomyces pastorianus
gggatttttagctcagtatttacaa

SEQ ID NO: 161552 - DNA, 25 bp, Saccharomyces pastorianus
tcttggaatgggatcctagtttttc

SEQ ID NO: 161553 - DNA, 25 bp, Saccharomyces pastorianus
ttgtttttcctaatgctccagagct

SEQ ID NO: 161554 - DNA, 25 bp, Saccharomyces pastorianus
agccagcacgccaaactatcatatt

SEQ ID NO: 161555 - DNA, 25 bp, Saccharomyces pastorianus
agcaaaaattcagccagcacgccaa

SEQ ID NO: 161556 - DNA, 25 bp, Saccharomyces pastorianus
cagggtgccgcattagctctcgcaa

SEQ ID NO: 161557 - DNA, 25 bp, Saccharomyces pastorianus
ttatcggaggtttctctcagggtgc

SEQ ID NO: 161558 - DNA, 25 bp, Saccharomyces pastorianus
tttccaaagttgacagtgacggttt

SEQ ID NO: 161559 - DNA, 25 bp, Saccharomyces pastorianus
tgccgctttccagcatactaatttt

SEQ ID NO: 161560 - DNA, 25 bp, Saccharomyces pastorianus
gctctcgcaacatcagttactttac

SEQ ID NO: 161561 - DNA, 25 bp, Saccharomyces pastorianus
tttacaacagagagaccctgccgct

SEQ ID NO: 161562 - DNA, 25 bp, Saccharomyces pastorianus
gaaaaagtgtctatatatagtgtct

SEQ ID NO: 161563 - DNA, 25 bp, Saccharomyces pastorianus
gtgtctatatatagtgtctattgtt

SEQ ID NO: 161564 - DNA, 25 bp, Saccharomyces pastorianus
ggaaaaagtgtctatatatagtgtc

SEQ ID NO: 161565 - DNA, 25 bp, Saccharomyces pastorianus
ggaaaggaaaaagtgtctatatata

SEQ ID NO: 161566 - DNA, 25 bp, Saccharomyces pastorianus
aaaagtgtctatatatagtgtctat

SEQ ID NO: 161567 - DNA, 25 bp, Saccharomyces pastorianus
gtctatatatagtgtctattgtttt

SEQ ID NO: 161568 - DNA, 25 bp, Saccharomyces pastorianus
aagtgtctatatatagtgtctattg

SEQ ID NO: 161569 - DNA, 25 bp, Saccharomyces pastorianus
aaggaaaaagtgtctatatatagtg

SEQ ID NO: 161570 - DNA, 25 bp, Saccharomyces pastorianus
agtgtctatatatagtgtctattgt

SEQ ID NO: 161571 - DNA, 25 bp, Saccharomyces pastorianus
ctatatatagtgtctattgtttttt

SEQ ID NO: 161572 - DNA, 25 bp, Saccharomyces pastorianus
aaaaagtgtctatatatagtgtcta

SEQ ID NO: 161573 - DNA, 25 bp, Saccharomyces pastorianus
tcagtggtctatcgtttgccgtggc

SEQ ID NO: 161574 - DNA, 25 bp, Saccharomyces pastorianus
aactcaacctttggtgtgctcggga

SEQ ID NO: 161575 - DNA, 25 bp, Saccharomyces pastorianus
tggccaacgaatctaactcaacctt

SEQ ID NO: 161576 - DNA, 25 bp, Saccharomyces pastorianus
actgtacactatcccgttggttaat

SEQ ID NO: 161577 - DNA, 25 bp, Saccharomyces pastorianus
cccaggcagtggctttgctagcaaa

SEQ ID NO: 161578 - DNA, 25 bp, Saccharomyces pastorianus
agggcttaggactgcaaaccgacaa

SEQ ID NO: 161579 - DNA, 25 bp, Saccharomyces pastorianus
ggcgttcgatgtcactttacagggc

SEQ ID NO: 161580 - DNA, 25 bp, Saccharomyces pastorianus
acgcttgaagtcacctattctggaa

SEQ ID NO: 161581 - DNA, 25 bp, Saccharomyces pastorianus
cgagtatgataactttcccctgttc

SEQ ID NO: 161582 - DNA, 25 bp, Saccharomyces pastorianus
aaatgacgagtcacagtcctccggc

SEQ ID NO: 161583 - DNA, 25 bp, Saccharomyces pastorianus
gcatactctcttttcctaaatgacg

SEQ ID NO: 161584 - DNA, 25 bp, Saccharomyces pastorianus
aataattccacaagcgggcaacgcc

SEQ ID NO: 161585 - DNA, 25 bp, Saccharomyces pastorianus
gatttccctagctcaagccaagtat

SEQ ID NO: 161586 - DNA, 25 bp, Saccharomyces pastorianus
gggacctgtgtcttggcaataattc

SEQ ID NO: 161587 - DNA, 25 bp, Saccharomyces pastorianus
aagctctaccactactgcaaagtcg

SEQ ID NO: 161588 - DNA, 25 bp, Saccharomyces pastorianus
gtactgccaccactacgaggtcaag

SEQ ID NO: 161589 - DNA, 25 bp, Saccharomyces pastorianus
agagggcactccagagggctgctac

SEQ ID NO: 161590 - DNA, 25 bp, Saccharomyces pastorianus
aacaacacttggtctaactacgcct

SEQ ID NO: 161591 - DNA, 25 bp, Saccharomyces pastorianus
gaaacgcctatgtggtctacgattt

SEQ ID NO: 161592 - DNA, 25 bp, Saccharomyces pastorianus
tatccttggtgattccttcttgaga

SEQ ID NO: 161593 - DNA, 25 bp, Saccharomyces pastorianus
ttaccaccgtgcgaactttcaatgg

SEQ ID NO: 161594 - DNA, 25 bp, Saccharomyces pastorianus
aaatctaccgttcccagtgcaataa

SEQ ID NO: 161595 - DNA, 25 bp, Saccharomyces pastorianus
aagtctattgaagttagcgtggata

SEQ ID NO: 161596 - DNA, 25 bp, Saccharomyces pastorianus
tttgcgtccgtttgtgcgcttcgat

SEQ ID NO: 161597 - DNA, 25 bp, Saccharomyces pastorianus
tacccttcggcccaattacacgtgg

SEQ ID NO: 161598 - DNA, 25 bp, Saccharomyces pastorianus
ctacacagatgtttgcgtccgtttg

SEQ ID NO: 161599 - DNA, 25 bp, Saccharomyces pastorianus
aagattgctctcagaattcctaccc

SEQ ID NO: 161600 - DNA, 25 bp, Saccharomyces pastorianus
ggcgttacatggcacatcagctgaa

SEQ ID NO: 161601 - DNA, 25 bp, Saccharomyces pastorianus
gattttttacataatgctggaagca

SEQ ID NO: 161602 - DNA, 25 bp, Saccharomyces pastorianus
tagcgtggatagaacggcgttacat

SEQ ID NO: 161603 - DNA, 25 bp, Saccharomyces pastorianus
gtgcgcttcgattttttacataatg

SEQ ID NO: 161604 - DNA, 25 bp, Saccharomyces pastorianus
taactgcatgtttctctacgtctac

SEQ ID NO: 161605 - DNA, 25 bp, Saccharomyces pastorianus
gtttctctacgtctacacagatgtt

SEQ ID NO: 161606 - DNA, 25 bp, Saccharomyces pastorianus
gaagtacacgccttggttaatggga

SEQ ID NO: 161607 - DNA, 25 bp, Saccharomyces pastorianus
gaccatcaagatgtctcccagttgg

SEQ ID NO: 161608 - DNA, 25 bp, Saccharomyces pastorianus
gggattagccttcacgttaacgtca

SEQ ID NO: 161609 - DNA, 25 bp, Saccharomyces pastorianus
gtcagacactcttggatacctggct

SEQ ID NO: 161610 - DNA, 25 bp, Saccharomyces pastorianus
tttggcattatctttcactctgtat

SEQ ID NO: 161611 - DNA, 25 bp, Saccharomyces pastorianus
tcccagttggctacacgtatcgagg

SEQ ID NO: 161612 - DNA, 25 bp, Saccharomyces pastorianus
actctgtatttgtgggtctttcgct

SEQ ID NO: 161613 - DNA, 25 bp, Saccharomyces pastorianus
gttaacgtcacctatagcagtcgcg

SEQ ID NO: 161614 - DNA, 25 bp, Saccharomyces pastorianus
gttcgaaggtttgggtctaggcaca

SEQ ID NO: 161615 - DNA, 25 bp, Saccharomyces pastorianus
actgggctagtcgaattaatggctc

SEQ ID NO: 161616 - DNA, 25 bp, Saccharomyces pastorianus
aaatctcgcttctgtacctggaaaa

SEQ ID NO: 161617 - DNA, 25 bp, Saccharomyces pastorianus
gctagagttccaattaccaagtcta

SEQ ID NO: 161618 - DNA, 25 bp, Saccharomyces pastorianus
ccttgtctagaccagaagttaagaa

SEQ ID NO: 161619 - DNA, 25 bp, Saccharomyces pastorianus
tttgccttgcaaaaattgttggatg

SEQ ID NO: 161620 - DNA, 25 bp, Saccharomyces pastorianus
aattaccaagtctactccagctaac

SEQ ID NO: 161621 - DNA, 25 bp, Saccharomyces pastorianus
ggactacaaaccagttgctgtccca

SEQ ID NO: 161622 - DNA, 25 bp, Saccharomyces pastorianus
tgctattccagaagtcgtcaaggac

SEQ ID NO: 161623 - DNA, 25 bp, Saccharomyces pastorianus
gttccaattaccaagtctactccag

SEQ ID NO: 161624 - DNA, 25 bp, Saccharomyces pastorianus
tagacatgatgtcaaggctgaaact

SEQ ID NO: 161625 - DNA, 25 bp, Saccharomyces pastorianus
ttacgttggtaccttgtctagacca

SEQ ID NO: 161626 - DNA, 25 bp, Saccharomyces pastorianus
ctactccagctaacactccaatgaa

SEQ ID NO: 161627 - DNA, 25 bp, Saccharomyces pastorianus
gtcgtcaaggactacaaaccagttg

SEQ ID NO: 161628 - DNA, 25 bp, Saccharomyces pastorianus
agtacagcccactcaagtttaacca

SEQ ID NO: 161629 - DNA, 25 bp, Saccharomyces pastorianus
gaaacctggtactgcttatttagat

SEQ ID NO: 161630 - DNA, 25 bp, Saccharomyces pastorianus
agagctttaacagcagtaggactaa

SEQ ID NO: 161631 - DNA, 25 bp, Saccharomyces pastorianus
gcgtaccgcctccagtagatgaaga

SEQ ID NO: 161632 - DNA, 25 bp, Saccharomyces pastorianus
aagccatcgaaggaccctccaggaa

SEQ ID NO: 161633 - DNA, 25 bp, Saccharomyces pastorianus
aaccgcccaagaaacgatagtgttg

SEQ ID NO: 161634 - DNA, 25 bp, Saccharomyces pastorianus
agacaatctgttaatcatcgagaat

SEQ ID NO: 161635 - DNA, 25 bp, Saccharomyces pastorianus
cacaatgaccaatctatccagtagt

SEQ ID NO: 161636 - DNA, 25 bp, Saccharomyces pastorianus
gagaattttaactcccacatcttta

SEQ ID NO: 161637 - DNA, 25 bp, Saccharomyces pastorianus
agttagtgttgatagtacagcccac

SEQ ID NO: 161638 - DNA, 25 bp, Saccharomyces pastorianus
agagcaaagcgaacagcggcgtacc

SEQ ID NO: 161639 - DNA, 25 bp, Saccharomyces pastorianus
tttaacgattaaggatcttttgcca

SEQ ID NO: 161640 - DNA, 25 bp, Saccharomyces pastorianus
gatttacaggatactagagccaggt

SEQ ID NO: 161641 - DNA, 25 bp, Saccharomyces pastorianus
agttcattgttttcccctgtggcca

SEQ ID NO: 161642 - DNA, 25 bp, Saccharomyces pastorianus
gaatgtggtaaatttctacagatca

SEQ ID NO: 161643 - DNA, 25 bp, Saccharomyces pastorianus
gaacgattttaaatgattccaacga

SEQ ID NO: 161644 - DNA, 25 bp, Saccharomyces pastorianus
tatggctgaaaattgcaaaacactt

SEQ ID NO: 161645 - DNA, 25 bp, Saccharomyces pastorianus
acacgtttaaacttattcgaggatg

SEQ ID NO: 161646 - DNA, 25 bp, Saccharomyces pastorianus
ctgtggccactgttttcactggaac

SEQ ID NO: 161647 - DNA, 25 bp, Saccharomyces pastorianus
agagccaggtaagtcttgtgatgaa

SEQ ID NO: 161648 - DNA, 25 bp, Saccharomyces pastorianus
gccactgttttcactggaactgtat

SEQ ID NO: 161649 - DNA, 25 bp, Saccharomyces pastorianus
ttattcgaggatgccattgacttgg

SEQ ID NO: 161650 - DNA, 25 bp, Saccharomyces pastorianus
ctcagctcgctacattggatcaacg

SEQ ID NO: 161651 - DNA, 25 bp, Saccharomyces pastorianus
gaagacgcccaagttgtaccgagtt

SEQ ID NO: 161652 - DNA, 25 bp, Saccharomyces pastorianus
ataaaaaatctcgacctcagctcgc

SEQ ID NO: 161653 - DNA, 25 bp, Saccharomyces pastorianus
aatggactctttgcttgggtcacat

SEQ ID NO: 161654 - DNA, 25 bp, Saccharomyces pastorianus
ggagggctctctgctattaactata

SEQ ID NO: 161655 - DNA, 25 bp, Saccharomyces pastorianus
aactctctggtggaattgatggcat

SEQ ID NO: 161656 - DNA, 25 bp, Saccharomyces pastorianus
atagttttgactgctttccacatcc

SEQ ID NO: 161657 - DNA, 25 bp, Saccharomyces pastorianus
gctttccacatcctgcttttgagaa

SEQ ID NO: 161658 - DNA, 25 bp, Saccharomyces pastorianus
atcttcgtcgaaggttctactcaat

SEQ ID NO: 161659 - DNA, 25 bp, Saccharomyces pastorianus
atttcgaactgcctgactaccagaa

SEQ ID NO: 161660 - DNA, 25 bp, Saccharomyces pastorianus
gaaaccacctttctgatgggaatca

SEQ ID NO: 161661 - DNA, 25 bp, Saccharomyces pastorianus
aagtcttggcacacctgctgctgat

SEQ ID NO: 161662 - DNA, 25 bp, Saccharomyces pastorianus
caccaaccgccgattattctaataa

SEQ ID NO: 161663 - DNA, 25 bp, Saccharomyces pastorianus
tgccctctatgccaaatgtaaccac

SEQ ID NO: 161664 - DNA, 25 bp, Saccharomyces pastorianus
ggcggattatcggtctttatcaaga

SEQ ID NO: 161665 - DNA, 25 bp, Saccharomyces pastorianus
tgctgctgattctatcgcaacttcg

SEQ ID NO: 161666 - DNA, 25 bp, Saccharomyces pastorianus
ttggagccgcaaattctaccttttc

SEQ ID NO: 161667 - DNA, 25 bp, Saccharomyces pastorianus
gaatcggttctgttttctacgaaag

SEQ ID NO: 161668 - DNA, 25 bp, Saccharomyces pastorianus
aagtgacgtagctcatccatacaag

SEQ ID NO: 161669 - DNA, 25 bp, Saccharomyces pastorianus
aagagacgatgttcattcagggtaa

SEQ ID NO: 161670 - DNA, 25 bp, Saccharomyces pastorianus
agaagaagattttcgctgccctcta

SEQ ID NO: 161671 - DNA, 25 bp, Saccharomyces pastorianus
acatcagggcagagtacacgttgta

SEQ ID NO: 161672 - DNA, 25 bp, Saccharomyces pastorianus
gagtacttggaatttgatgccactt

SEQ ID NO: 161673 - DNA, 25 bp, Saccharomyces pastorianus
ggtaacgagggtgctatcagagaca

SEQ ID NO: 161674 - DNA, 25 bp, Saccharomyces pastorianus
gaagtccaacaccagaagggccact

SEQ ID NO: 161675 - DNA, 25 bp, Saccharomyces pastorianus
gccaaagaccgctcaattgtctttg

SEQ ID NO: 161676 - DNA, 25 bp, Saccharomyces pastorianus
agaccaagaccttctggtaacgagg

SEQ ID NO: 161677 - DNA, 25 bp, Saccharomyces pastorianus
aaccagttcaacaaggtcccagaag

SEQ ID NO: 161678 - DNA, 25 bp, Saccharomyces pastorianus
tgatgccacttttgttgaatctaac

SEQ ID NO: 161679 - DNA, 25 bp, Saccharomyces pastorianus
aaaggaagtcactgactctgccacc

SEQ ID NO: 161680 - DNA, 25 bp, Saccharomyces pastorianus
atcagagacaagaccgctggtagaa

SEQ ID NO: 161681 - DNA, 25 bp, Saccharomyces pastorianus
ttgaaccaacaagctaacaaccagt

SEQ ID NO: 161682 - DNA, 25 bp, Saccharomyces pastorianus
gacgctgcagaagctgaagacgctg

SEQ ID NO: 161683 - DNA, 25 bp, Saccharomyces pastorianus
attggtgctattcactctgttgtct

SEQ ID NO: 161684 - DNA, 25 bp, Saccharomyces pastorianus
tacttgcattgggatgctccataca

SEQ ID NO: 161685 - DNA, 25 bp, Saccharomyces pastorianus
gatcgtgtcgttgatgctaattcta

SEQ ID NO: 161686 - DNA, 25 bp, Saccharomyces pastorianus
tctgttgtctttgcagggttctccg

SEQ ID NO: 161687 - DNA, 25 bp, Saccharomyces pastorianus
ggatgctccatacaccaaagttcaa

SEQ ID NO: 161688 - DNA, 25 bp, Saccharomyces pastorianus
atgattccagaagcggtcattgcta

SEQ ID NO: 161689 - DNA, 25 bp, Saccharomyces pastorianus
gacacagtggctatctatttgccaa

SEQ ID NO: 161690 - DNA, 25 bp, Saccharomyces pastorianus
ctgtggctcgtattggtgctattca

SEQ ID NO: 161691 - DNA, 25 bp, Saccharomyces pastorianus
gaagctgatgacgaatccgacaaca

SEQ ID NO: 161692 - DNA, 25 bp, Saccharomyces pastorianus
gtcattgctatgttggctgtggctc

SEQ ID NO: 161693 - DNA, 25 bp, Saccharomyces pastorianus
aagtttcccaaatcgctggtgtctt

SEQ ID NO: 161694 - DNA, 25 bp, Saccharomyces pastorianus
tttaccattccttttctgccaaaga

SEQ ID NO: 161695 - DNA, 25 bp, Saccharomyces pastorianus
gtaccattggattgtcgagcgcgga

SEQ ID NO: 161696 - DNA, 25 bp, Saccharomyces pastorianus
caaatgattcctcttatatgccgcc

SEQ ID NO: 161697 - DNA, 25 bp, Saccharomyces pastorianus
ttgggctcctttttatcgttcgtcg

SEQ ID NO: 161698 - DNA, 25 bp, Saccharomyces pastorianus
aagcagagctcagggttcgtaccat

SEQ ID NO: 161699 - DNA, 25 bp, Saccharomyces pastorianus
agctggtcttattgcctctttaaaa

SEQ ID NO: 161700 - DNA, 25 bp, Saccharomyces pastorianus
agtttttgaaaccactctgcaggat

SEQ ID NO: 161701 - DNA, 25 bp, Saccharomyces pastorianus
ggtcctgctaggtcattgtcatatc

SEQ ID NO: 161702 - DNA, 25 bp, Saccharomyces pastorianus
taagggcttttcatacttcaattgc

SEQ ID NO: 161703 - DNA, 25 bp, Saccharomyces pastorianus
ttcaattgccagatcctttaccatt

SEQ ID NO: 161704 - DNA, 25 bp, Saccharomyces pastorianus
tttaccgacacatttctttccttgg

SEQ ID NO: 161705 - DNA, 25 bp, Saccharomyces pastorianus
atgagctgttagagaattttaattc

SEQ ID NO: 161706 - DNA, 25 bp, Saccharomyces pastorianus
aaacaataaacacaaagctggttat

SEQ ID NO: 161707 - DNA, 25 bp, Saccharomyces pastorianus
actagagacaagttcagtaccaaaa

SEQ ID NO: 161708 - DNA, 25 bp, Saccharomyces pastorianus
tgaaaagtactctgaaatgatggaa

SEQ ID NO: 161709 - DNA, 25 bp, Saccharomyces pastorianus
agctggttattgaaaagtactctga

SEQ ID NO: 161710 - DNA, 25 bp, Saccharomyces pastorianus
gacaagttcagtaccaaaaacaata

SEQ ID NO: 161711 - DNA, 25 bp, Saccharomyces pastorianus
aagtccgtgaaattaatgaagaatc

SEQ ID NO: 161712 - DNA, 25 bp, Saccharomyces pastorianus
gatattatcatccaaactagagaca

SEQ ID NO: 161713 - DNA, 25 bp, Saccharomyces pastorianus
gaattttaattctgcatatagagag

SEQ ID NO: 161714 - DNA, 25 bp, Saccharomyces pastorianus
gaagaatctattgatattatcatcc

SEQ ID NO: 161715 - DNA, 25 bp, Saccharomyces pastorianus
aaatgatggaaaatgagctgttaga

SEQ ID NO: 161716 - DNA, 25 bp, Saccharomyces pastorianus
caacgtgactggatacggtacatca

SEQ ID NO: 161717 - DNA, 25 bp, Saccharomyces pastorianus
gaacggaaaatgactcggacgccag

SEQ ID NO: 161718 - DNA, 25 bp, Saccharomyces pastorianus
acgtgaccacattcgatggagatct

SEQ ID NO: 161719 - DNA, 25 bp, Saccharomyces pastorianus
gttggcatggaacccatttgtttta

SEQ ID NO: 161720 - DNA, 25 bp, Saccharomyces pastorianus
tatgggctctgacctgaacaatgat

SEQ ID NO: 161721 - DNA, 25 bp, Saccharomyces pastorianus
tcggacgccagaagccaacgtgact

SEQ ID NO: 161722 - DNA, 25 bp, Saccharomyces pastorianus
gttttaatttggctcaccgacagat

SEQ ID NO: 161723 - DNA, 25 bp, Saccharomyces pastorianus
ggcaacgccccttcggatgattcaa

SEQ ID NO: 161724 - DNA, 25 bp, Saccharomyces pastorianus
gttcgattatgacaaatggccagga

SEQ ID NO: 161725 - DNA, 25 bp, Saccharomyces pastorianus
caaactggtggagtttcagcttgat

SEQ ID NO: 161726 - DNA, 25 bp, Saccharomyces pastorianus
caggtaagtatttgcaggtgtctat

SEQ ID NO: 161727 - DNA, 25 bp, Saccharomyces pastorianus
gagtcattatatcatatccattgca

SEQ ID NO: 161728 - DNA, 25 bp, Saccharomyces pastorianus
gtatgatcaaactattgcccgaaca

SEQ ID NO: 161729 - DNA, 25 bp, Saccharomyces pastorianus
aagcgctagtgcaaaggaagttatc

SEQ ID NO: 161730 - DNA, 25 bp, Saccharomyces pastorianus
aatgcattattcttctctaactcta

SEQ ID NO: 161731 - DNA, 25 bp, Saccharomyces pastorianus
tatatcgcccacgatgtttaatcta

SEQ ID NO: 161732 - DNA, 25 bp, Saccharomyces pastorianus
gcaacatttacaagggttctgtcaa

SEQ ID NO: 161733 - DNA, 25 bp, Saccharomyces pastorianus
gagatcagtgactcaatcattcaaa

SEQ ID NO: 161734 - DNA, 25 bp, Saccharomyces pastorianus
tctaactctaactctatatcgccca

SEQ ID NO: 161735 - DNA, 25 bp, Saccharomyces pastorianus
agttcttaaattcctctatgagcgt

SEQ ID NO: 161736 - DNA, 25 bp, Saccharomyces pastorianus
gttctgtcaagttttcgtaacaaag

SEQ ID NO: 161737 - DNA, 25 bp, Saccharomyces pastorianus
gtgacttaatcacctatacagggtt

SEQ ID NO: 161738 - DNA, 25 bp, Saccharomyces pastorianus
aaatccaatattaccgccacttatc

SEQ ID NO: 161739 - DNA, 25 bp, Saccharomyces pastorianus
gaatatcccgcccatagcgagcaaa

SEQ ID NO: 161740 - DNA, 25 bp, Saccharomyces pastorianus
tgccacatactcagtgtatccagcg

SEQ ID NO: 161741 - DNA, 25 bp, Saccharomyces pastorianus
cagctttgcagctggcggaacaaaa

SEQ ID NO: 161742 - DNA, 25 bp, Saccharomyces pastorianus
gaaacgaatctcttccatttcaagg

SEQ ID NO: 161743 - DNA, 25 bp, Saccharomyces pastorianus
agatcgaattcatctgcttacccac

SEQ ID NO: 161744 - DNA, 25 bp, Saccharomyces pastorianus
catcgtcaatatacagcctgctaca

SEQ ID NO: 161745 - DNA, 25 bp, Saccharomyces pastorianus
cttacccactttctttcaagtcaga

SEQ ID NO: 161746 - DNA, 25 bp, Saccharomyces pastorianus
gtatccagcgtctatcagcctgaat

SEQ ID NO: 161747 - DNA, 25 bp, Saccharomyces pastorianus
actgctgccaaacgtactaatacct

SEQ ID NO: 161748 - DNA, 25 bp, Saccharomyces pastorianus
tcccctcaattccaagcagtactaa

SEQ ID NO: 161749 - DNA, 25 bp, Saccharomyces pastorianus
gcgaacgttcaacaaacaccattat

SEQ ID NO: 161750 - DNA, 25 bp, Saccharomyces pastorianus
acaccattattccaattacaacagg

SEQ ID NO: 161751 - DNA, 25 bp, Saccharomyces pastorianus
gacgcgaaatgcgttggtgtcattt

SEQ ID NO: 161752 - DNA, 25 bp, Saccharomyces pastorianus
aaatcacctggcttttgcgaacgtt

SEQ ID NO: 161753 - DNA, 25 bp, Saccharomyces pastorianus
gacgaattgcgtacgatcttgagcg

SEQ ID NO: 161754 - DNA, 25 bp, Saccharomyces pastorianus
aggttaactcgcaaatttctgaatt

SEQ ID NO: 161755 - DNA, 25 bp, Saccharomyces pastorianus
gctggtaaaccattagacgaagaat

SEQ ID NO: 161756 - DNA, 25 bp, Saccharomyces pastorianus
tggtgtcatttatcgtcacggtaaa

SEQ ID NO: 161757 - DNA, 25 bp, Saccharomyces pastorianus
cgtacgatcttgagcgacgcgaaat

SEQ ID NO: 161758 - DNA, 25 bp, Saccharomyces pastorianus
atattttgacaaatcacctggcttt

SEQ ID NO: 161759 - DNA, 25 bp, Saccharomyces pastorianus
gtaaagatgccgctggtaaaccatt

SEQ ID NO: 161760 - DNA, 25 bp, Saccharomyces pastorianus
ggattaatcgttacctatcgtaagc

SEQ ID NO: 161761 - DNA, 25 bp, Saccharomyces pastorianus
caatgtgatgttgcgctctgtaaga

SEQ ID NO: 161762 - DNA, 25 bp, Saccharomyces pastorianus
gcaggttttacttcgcatttcgtta

SEQ ID NO: 161763 - DNA, 25 bp, Saccharomyces pastorianus
aaactttcttctccttcaaggcata

SEQ ID NO: 161764 - DNA, 25 bp, Saccharomyces pastorianus
atataggcttgttcccagattctct

SEQ ID NO: 161765 - DNA, 25 bp, Saccharomyces pastorianus
gagggagacaccgtttatatgacat

SEQ ID NO: 161766 - DNA, 25 bp, Saccharomyces pastorianus
atcagcaccattactgtagggcgca

SEQ ID NO: 161767 - DNA, 25 bp, Saccharomyces pastorianus
tgacacttcgatggacagacccaaa

SEQ ID NO: 161768 - DNA, 25 bp, Saccharomyces pastorianus
gcatccattgatttttactgacact

SEQ ID NO: 161769 - DNA, 25 bp, Saccharomyces pastorianus
gttcatatccagagtacacgctagt

SEQ ID NO: 161770 - DNA, 25 bp, Saccharomyces pastorianus
aaaactctccttcagagccgttaag

SEQ ID NO: 161771 - DNA, 25 bp, Saccharomyces pastorianus
gtccctcatccaattatgagaaagc

SEQ ID NO: 161772 - DNA, 25 bp, Saccharomyces pastorianus
aaacagcagcctaattgtccctcat

SEQ ID NO: 161773 - DNA, 25 bp, Saccharomyces pastorianus
acaaacagcagcctaattgtccctc

SEQ ID NO: 161774 - DNA, 25 bp, Saccharomyces pastorianus
gcctaattgtccctcatccaattat

SEQ ID NO: 161775 - DNA, 25 bp, Saccharomyces pastorianus
attacaaacagcagcctaattgtcc

SEQ ID NO: 161776 - DNA, 25 bp, Saccharomyces pastorianus
atccaattatgagaaagctggtaaa

SEQ ID NO: 161777 - DNA, 25 bp, Saccharomyces pastorianus
ttgtccctcatccaattatgagaaa

SEQ ID NO: 161778 - DNA, 25 bp, Saccharomyces pastorianus
aacagcagcctaattgtccctcatc

SEQ ID NO: 161779 - DNA, 25 bp, Saccharomyces pastorianus
gcagcctaattgtccctcatccaat

SEQ ID NO: 161780 - DNA, 25 bp, Saccharomyces pastorianus
taattgtccctcatccaattatgag

SEQ ID NO: 161781 - DNA, 25 bp, Saccharomyces pastorianus
aattgtccctcatccaattatgaga

SEQ ID NO: 161782 - DNA, 25 bp, Saccharomyces pastorianus
aaacagcagcctaattgtccctcat

SEQ ID NO: 161783 - DNA, 25 bp, Saccharomyces pastorianus
acaaacagcagcctaattgtccctc

SEQ ID NO: 161784 - DNA, 25 bp, Saccharomyces pastorianus
aaactgcgtcagaatcaattggaaa

SEQ ID NO: 161785 - DNA, 25 bp, Saccharomyces pastorianus
ggagattatcaactcatttccttct

SEQ ID NO: 161786 - DNA, 25 bp, Saccharomyces pastorianus
gcctaattgtccctcatccaattat

SEQ ID NO: 161787 - DNA, 25 bp, Saccharomyces pastorianus
atccaattatgagaaagctggtaaa

SEQ ID NO: 161788 - DNA, 25 bp, Saccharomyces pastorianus
tgtccctcatccaattatgagaaag

SEQ ID NO: 161789 - DNA, 25 bp, Saccharomyces pastorianus
aacagcagcctaattgtccctcatc

SEQ ID NO: 161790 - DNA, 25 bp, Saccharomyces pastorianus
tctccaccaaattacaaacagcagc

SEQ ID NO: 161791 - DNA, 25 bp, Saccharomyces pastorianus
gcagcctaattgtccctcatccaat

SEQ ID NO: 161792 - DNA, 25 bp, Saccharomyces pastorianus
aattgtccctcatccaattatgaga

SEQ ID NO: 161793 - DNA, 25 bp, Saccharomyces pastorianus
agagtttccattgatgaattttagt

SEQ ID NO: 161794 - DNA, 25 bp, Saccharomyces pastorianus
tttacgtcgactgccgctgttcatt

SEQ ID NO: 161795 - DNA, 25 bp, Saccharomyces pastorianus
actgccgctgttcattctcatcaaa

SEQ ID NO: 161796 - DNA, 25 bp, Saccharomyces pastorianus
gaattttagtttacgtcgactgccg

SEQ ID NO: 161797 - DNA, 25 bp, Saccharomyces pastorianus
cgctgttcattctcatcaaaacacg

SEQ ID NO: 161798 - DNA, 25 bp, Saccharomyces pastorianus
gagaaagagtttccattgatgaatt

SEQ ID NO: 161799 - DNA, 25 bp, Saccharomyces pastorianus
gcaaaccatagagatgaacttaaga

SEQ ID NO: 161800 - DNA, 25 bp, Saccharomyces pastorianus
attttagtttacgtcgactgccgct

SEQ ID NO: 161801 - DNA, 25 bp, Saccharomyces pastorianus
aaacacgaaagcaaaccatagagat

SEQ ID NO: 161802 - DNA, 25 bp, Saccharomyces pastorianus
ttagtttacgtcgactgccgctgtt

SEQ ID NO: 161803 - DNA, 25 bp, Saccharomyces pastorianus
gccgctgttcattctcatcaaaaca

SEQ ID NO: 161804 - DNA, 25 bp, Saccharomyces pastorianus
aatcagcaggattccaggccaactg

SEQ ID NO: 161805 - DNA, 25 bp, Saccharomyces pastorianus
aggcgctgttactggatttgcacaa

SEQ ID NO: 161806 - DNA, 25 bp, Saccharomyces pastorianus
gtaatgctcagtctttaagtgcgat

SEQ ID NO: 161807 - DNA, 25 bp, Saccharomyces pastorianus
cttcgttagaggagccacagcgtaa

SEQ ID NO: 161808 - DNA, 25 bp, Saccharomyces pastorianus
tagtgcaagtgagtctgctcccgaa

SEQ ID NO: 161809 - DNA, 25 bp, Saccharomyces pastorianus
taaaccttgggagaccagtgcttcg

SEQ ID NO: 161810 - DNA, 25 bp, Saccharomyces pastorianus
ctctggtacctacggcgaatcgaat

SEQ ID NO: 161811 - DNA, 25 bp, Saccharomyces pastorianus
cgaaggccacctttcagttaataga

SEQ ID NO: 161812 - DNA, 25 bp, Saccharomyces pastorianus
tattcaccatgatatccgtcgcaga

SEQ ID NO: 161813 - DNA, 25 bp, Saccharomyces pastorianus
ttatatggccacacacaactcgtta

SEQ ID NO: 161814 - DNA, 25 bp, Saccharomyces pastorianus
ggaggatcgtactatggcaacaatt

SEQ ID NO: 161815 - DNA, 25 bp, Saccharomyces pastorianus
tcctaccgattttgcctctgtttca

SEQ ID NO: 161816 - DNA, 25 bp, Saccharomyces pastorianus
taatagataccccaatccatactcc

SEQ ID NO: 161817 - DNA, 25 bp, Saccharomyces pastorianus
gtactatccatagacacaatatcaa

SEQ ID NO: 161818 - DNA, 25 bp, Saccharomyces pastorianus
ttcctaccgattttgcctctgtttc

SEQ ID NO: 161819 - DNA, 25 bp, Saccharomyces pastorianus
atcaaggaacgttgatcaagaagga

SEQ ID NO: 161820 - DNA, 25 bp, Saccharomyces pastorianus
tttcctaccgattttgcctctgttt

SEQ ID NO: 161821 - DNA, 25 bp, Saccharomyces pastorianus
gtttcacgcgccttttttaatagat

SEQ ID NO: 161822 - DNA, 25 bp, Saccharomyces pastorianus
catagacacaatatcaaggaacgtt

SEQ ID NO: 161823 - DNA, 25 bp, Saccharomyces pastorianus
gacacaatatcaaggaacgttgatc

SEQ ID NO: 161824 - DNA, 25 bp, Saccharomyces pastorianus
ctatccatagacacaatatcaagga

SEQ ID NO: 161825 - DNA, 25 bp, Saccharomyces pastorianus
ccccatgtactatccatagacacaa

SEQ ID NO: 161826 - DNA, 25 bp, Saccharomyces pastorianus
tttcctgtgcgttcacaaacagcta

SEQ ID NO: 161827 - DNA, 25 bp, Saccharomyces pastorianus
cacagggttaccagatgggcacaca

SEQ ID NO: 161828 - DNA, 25 bp, Saccharomyces pastorianus
gacttcttctcattttactcattgc

SEQ ID NO: 161829 - DNA, 25 bp, Saccharomyces pastorianus
tatgtagtcgaacagcccgatggaa

SEQ ID NO: 161830 - DNA, 25 bp, Saccharomyces pastorianus
agcacctgtgagtacgtgtcgttat

SEQ ID NO: 161831 - DNA, 25 bp, Saccharomyces pastorianus
gccaccgatgcagatttccaattca

SEQ ID NO: 161832 - DNA, 25 bp, Saccharomyces pastorianus
gatatcaatccaggttcgaactaat

SEQ ID NO: 161833 - DNA, 25 bp, Saccharomyces pastorianus
cctaggcatcgggtacttgtattat

SEQ ID NO: 161834 - DNA, 25 bp, Saccharomyces pastorianus
ggcaggtattgttttgccagcacct

SEQ ID NO: 161835 - DNA, 25 bp, Saccharomyces pastorianus
ttatactcatcgtcccttgaattgg

SEQ ID NO: 161836 - DNA, 25 bp, Saccharomyces pastorianus
gattgctgagaatgcgttaccggcc

SEQ ID NO: 161837 - DNA, 25 bp, Saccharomyces pastorianus
attacgattgggtctttgctgcaca

SEQ ID NO: 161838 - DNA, 25 bp, Saccharomyces pastorianus
ggctgctctcaggtatactttatat

SEQ ID NO: 161839 - DNA, 25 bp, Saccharomyces pastorianus
gagtttggttttccccaacagcaag

SEQ ID NO: 161840 - DNA, 25 bp, Saccharomyces pastorianus
taggtgcacgtgctgaagctcaatt

SEQ ID NO: 161841 - DNA, 25 bp, Saccharomyces pastorianus
gtacgtcaagtctactacgccggta

SEQ ID NO: 161842 - DNA, 25 bp, Saccharomyces pastorianus
acagagttccaattagccgcagtca

SEQ ID NO: 161843 - DNA, 25 bp, Saccharomyces pastorianus
tccagtttcttttcccagagcagag

SEQ ID NO: 161844 - DNA, 25 bp, Saccharomyces pastorianus
aggtctaaaatctctggctgctctc

SEQ ID NO: 161845 - DNA, 25 bp, Saccharomyces pastorianus
attggacccgaatgcctgtataaaa

SEQ ID NO: 161846 - DNA, 25 bp, Saccharomyces pastorianus
tgcacaaattttccccgtattcatt

SEQ ID NO: 161847 - DNA, 25 bp, Saccharomyces pastorianus
gagaattttcatcctaggtgcacgt

SEQ ID NO: 161848 - DNA, 25 bp, Saccharomyces pastorianus
tcagactgagctggacagggcgttt

SEQ ID NO: 161849 - DNA, 25 bp, Saccharomyces pastorianus
gtagagcttacatggccgttcagac

SEQ ID NO: 161850 - DNA, 25 bp, Saccharomyces pastorianus
aatgatcagcagattcaagccgatg

SEQ ID NO: 161851 - DNA, 25 bp, Saccharomyces pastorianus
gttcccaatccgctggatgatgata

SEQ ID NO: 161852 - DNA, 25 bp, Saccharomyces pastorianus
gaaacgctatacctgacgattaata

SEQ ID NO: 161853 - DNA, 25 bp, Saccharomyces pastorianus
tggcccactttggatgatctagttt

SEQ ID NO: 161854 - DNA, 25 bp, Saccharomyces pastorianus
atcggctttatttattgctgccaag

SEQ ID NO: 161855 - DNA, 25 bp, Saccharomyces pastorianus
gatgaccttattagagcggaacagt

SEQ ID NO: 161856 - DNA, 25 bp, Saccharomyces pastorianus
gcttccgacatattctattacttga

SEQ ID NO: 161857 - DNA, 25 bp, Saccharomyces pastorianus
atggttgtggagtacgcttccgaca

SEQ ID NO: 161858 - DNA, 25 bp, Saccharomyces pastorianus
caattggttggtgtatcggctttat

SEQ ID NO: 161859 - DNA, 25 bp, Saccharomyces pastorianus
ttaaacttccacacccatatgatag

SEQ ID NO: 161860 - DNA, 25 bp, Saccharomyces pastorianus
ggattcggtcaatggctggtatttt

SEQ ID NO: 161861 - DNA, 25 bp, Saccharomyces pastorianus
ttttcccagtagtctatctattcgg

SEQ ID NO: 161862 - DNA, 25 bp, Saccharomyces pastorianus
tgtacactcaattgtcatgaccgcc

SEQ ID NO: 161863 - DNA, 25 bp, Saccharomyces pastorianus
gaaataatcccttcatccctaacag

SEQ ID NO: 161864 - DNA, 25 bp, Saccharomyces pastorianus
aaatggtctgcctacgtttgtttca

SEQ ID NO: 161865 - DNA, 25 bp, Saccharomyces pastorianus
gaggcaagggtctcgtcgtattaat

SEQ ID NO: 161866 - DNA, 25 bp, Saccharomyces pastorianus
agacttgatggccattgcacttttc

SEQ ID NO: 161867 - DNA, 25 bp, Saccharomyces pastorianus
gtatggcctttgtgagtcgtagagc

SEQ ID NO: 161868 - DNA, 25 bp, Saccharomyces pastorianus
ttcatgttggccgttgtacactcaa

SEQ ID NO: 161869 - DNA, 25 bp, Saccharomyces pastorianus
caggctttccttttctacatttaat

SEQ ID NO: 161870 - DNA, 25 bp, Saccharomyces pastorianus
gtttttgagttgtacaatgacatag

SEQ ID NO: 161871 - DNA, 25 bp, Saccharomyces pastorianus
ccaaggccgtatagtttttgagttg

SEQ ID NO: 161872 - DNA, 25 bp, Saccharomyces pastorianus
tgagttgtacaatgacatagtgcct

SEQ ID NO: 161873 - DNA, 25 bp, Saccharomyces pastorianus
tgatatttctattggaggtaaaccc

SEQ ID NO: 161874 - DNA, 25 bp, Saccharomyces pastorianus
ttttttgatatttctattggaggta

SEQ ID NO: 161875 - DNA, 25 bp, Saccharomyces pastorianus
gagttgtacaatgacatagtgccta

SEQ ID NO: 161876 - DNA, 25 bp, Saccharomyces pastorianus
agttgtacaatgacatagtgcctaa

SEQ ID NO: 161877 - DNA, 25 bp, Saccharomyces pastorianus
gttgtacaatgacatagtgcctaaa

SEQ ID NO: 161878 - DNA, 25 bp, Saccharomyces pastorianus
agtttttgagttgtacaatgacata

SEQ ID NO: 161879 - DNA, 25 bp, Saccharomyces pastorianus
caaggccgtatagtttttgagttgt

SEQ ID NO: 161880 - DNA, 25 bp, Saccharomyces pastorianus
ttgatatttctattggaggtaaacc

SEQ ID NO: 161881 - DNA, 25 bp, Saccharomyces pastorianus
tctcaccgccagtaccattaaaatt

SEQ ID NO: 161882 - DNA, 25 bp, Saccharomyces pastorianus
attatcatcctcgaattttacaccg

SEQ ID NO: 161883 - DNA, 25 bp, Saccharomyces pastorianus
ggtaaaatcaccaaattgacacatg

SEQ ID NO: 161884 - DNA, 25 bp, Saccharomyces pastorianus
gacacatgaagtctttgatcactct

SEQ ID NO: 161885 - DNA, 25 bp, Saccharomyces pastorianus
tgtggagaatggaacccttgtacga

SEQ ID NO: 161886 - DNA, 25 bp, Saccharomyces pastorianus
attttacaccgtatatgctctcacc

SEQ ID NO: 161887 - DNA, 25 bp, Saccharomyces pastorianus
tgaagtctttgatcactctgtggag

SEQ ID NO: 161888 - DNA, 25 bp, Saccharomyces pastorianus
accgtatatgctctcaccgccagta

SEQ ID NO: 161889 - DNA, 25 bp, Saccharomyces pastorianus
tcaccgccagtaccattaaaattgg

SEQ ID NO: 161890 - DNA, 25 bp, Saccharomyces pastorianus
atcatcctcgaattttacaccgtat

SEQ ID NO: 161891 - DNA, 25 bp, Saccharomyces pastorianus
tcactctgtggagaatggaaccctt

SEQ ID NO: 161892 - DNA, 25 bp, Saccharomyces pastorianus
aatcaaatcacctttcgtttacaat

SEQ ID NO: 161893 - DNA, 25 bp, Saccharomyces pastorianus
tgactttgccttattctactctgaa

SEQ ID NO: 161894 - DNA, 25 bp, Saccharomyces pastorianus
tttcgtttacaatatcatcatcagt

SEQ ID NO: 161895 - DNA, 25 bp, Saccharomyces pastorianus
gccttattctactctgaattttgct

SEQ ID NO: 161896 - DNA, 25 bp, Saccharomyces pastorianus
aatcacctttcgtttacaatatcat

SEQ ID NO: 161897 - DNA, 25 bp, Saccharomyces pastorianus
gaattttgctttatcgttggttgaa

SEQ ID NO: 161898 - DNA, 25 bp, Saccharomyces pastorianus
gttactacaatcaaatcacctttcg

SEQ ID NO: 161899 - DNA, 25 bp, Saccharomyces pastorianus
actctgaattttgctttatcgttgg

SEQ ID NO: 161900 - DNA, 25 bp, Saccharomyces pastorianus
atgtgactttgccttattctactct

SEQ ID NO: 161901 - DNA, 25 bp, Saccharomyces pastorianus
catcatcagtatgtgactttgcctt

SEQ ID NO: 161902 - DNA, 25 bp, Saccharomyces pastorianus
cagtatgtgactttgccttattcta

SEQ ID NO: 161903 - DNA, 25 bp, Saccharomyces pastorianus
agtgtggttcttggatagcgtatca

SEQ ID NO: 161904 - DNA, 25 bp, Saccharomyces pastorianus
acagatgctttggtggctagtgctc

SEQ ID NO: 161905 - DNA, 25 bp, Saccharomyces pastorianus
aaaggcgccgtaactatactaactg

SEQ ID NO: 161906 - DNA, 25 bp, Saccharomyces pastorianus
gattcaccgtacttgataactttag

SEQ ID NO: 161907 - DNA, 25 bp, Saccharomyces pastorianus
atactaactgctgtatggcccctgt

SEQ ID NO: 161908 - DNA, 25 bp, Saccharomyces pastorianus
atatttggacaaactgcatcgcgaa

SEQ ID NO: 161909 - DNA, 25 bp, Saccharomyces pastorianus
ttctcatttcctgctcttttggata

SEQ ID NO: 161910 - DNA, 25 bp, Saccharomyces pastorianus
gagaggctgtgctcgaaatttcaga

SEQ ID NO: 161911 - DNA, 25 bp, Saccharomyces pastorianus
aagcagctcaccaacggcatggatt

SEQ ID NO: 161912 - DNA, 25 bp, Saccharomyces pastorianus
gatatcggaactcgtatgctttgac

SEQ ID NO: 161913 - DNA, 25 bp, Saccharomyces pastorianus
ggattttccatgttaaaggcgccgt

SEQ ID NO: 161914 - DNA, 25 bp, Saccharomyces pastorianus
atgtgatgaaggcaaaccattttgc

SEQ ID NO: 161915 - DNA, 25 bp, Saccharomyces pastorianus
gcaagacttcgacagggaaacggaa

SEQ ID NO: 161916 - DNA, 25 bp, Saccharomyces pastorianus
agtatcataacaagtccaagaccgg

SEQ ID NO: 161917 - DNA, 25 bp, Saccharomyces pastorianus
gaaggcaaaccattttgcaagaaat

SEQ ID NO: 161918 - DNA, 25 bp, Saccharomyces pastorianus
tcataacaagtccaagaccggttgc

SEQ ID NO: 161919 - DNA, 25 bp, Saccharomyces pastorianus
gaaattggactgtgtttacagccct

SEQ ID NO: 161920 - DNA, 25 bp, Saccharomyces pastorianus
agtgagcaagacttcgacagggaaa

SEQ ID NO: 161921 - DNA, 25 bp, Saccharomyces pastorianus
gtttacagccctattcagccaagaa

SEQ ID NO: 161922 - DNA, 25 bp, Saccharomyces pastorianus
gaagaagaaggattcttcgtcgtca

SEQ ID NO: 161923 - DNA, 25 bp, Saccharomyces pastorianus
gacagggaaacggaagtatcataac

SEQ ID NO: 161924 - DNA, 25 bp, Saccharomyces pastorianus
acagccctattcagccaagaagaag

SEQ ID NO: 161925 - DNA, 25 bp, Saccharomyces pastorianus
agatttgtcgaaagcttcagcccca

SEQ ID NO: 161926 - DNA, 25 bp, Saccharomyces pastorianus
atgcctctgctctcaaggaaatgac

SEQ ID NO: 161927 - DNA, 25 bp, Saccharomyces pastorianus
agcgcaaacgctcagacatctacaa

SEQ ID NO: 161928 - DNA, 25 bp, Saccharomyces pastorianus
taagggcactgcaacaataaatgat

SEQ ID NO: 161929 - DNA, 25 bp, Saccharomyces pastorianus
acaaacttcaatgtctgtaggcgac

SEQ ID NO: 161930 - DNA, 25 bp, Saccharomyces pastorianus
tcctataaaaccatcagcgcaaacg

SEQ ID NO: 161931 - DNA, 25 bp, Saccharomyces pastorianus
gtctgtaggcgacaatgctttagca

SEQ ID NO: 161932 - DNA, 25 bp, Saccharomyces pastorianus
ttcagccccatgtcgaggtgtattc

SEQ ID NO: 161933 - DNA, 25 bp, Saccharomyces pastorianus
aatgctttagcacttatgcctctgc

SEQ ID NO: 161934 - DNA, 25 bp, Saccharomyces pastorianus
gccagtccgtatgcacaaacttcaa

SEQ ID NO: 161935 - DNA, 25 bp, Saccharomyces pastorianus
aggtgtattcgccagtccgtatgca

SEQ ID NO: 161936 - DNA, 25 bp, Saccharomyces pastorianus
gctcaagtcggcagcatcgtatctt

SEQ ID NO: 161937 - DNA, 25 bp, Saccharomyces pastorianus
aagtcggcagcatcgtatcttgata

SEQ ID NO: 161938 - DNA, 25 bp, Saccharomyces pastorianus
tcgtatcttgatacagttccagatg

SEQ ID NO: 161939 - DNA, 25 bp, Saccharomyces pastorianus
tcttgatacagttccagatgagcat

SEQ ID NO: 161940 - DNA, 25 bp, Saccharomyces pastorianus
aaaggctcaagtcggcagcatcgta

SEQ ID NO: 161941 - DNA, 25 bp, Saccharomyces pastorianus
atatcgaaaggctcaagtcggcagc

SEQ ID NO: 161942 - DNA, 25 bp, Saccharomyces pastorianus
gacatcatatatcgaaaggctcaag

SEQ ID NO: 161943 - DNA, 25 bp, Saccharomyces pastorianus
atcgaaaggctcaagtcggcagcat

SEQ ID NO: 161944 - DNA, 25 bp, Saccharomyces pastorianus
ggcagcatcgtatcttgatacagtt

SEQ ID NO: 161945 - DNA, 25 bp, Saccharomyces pastorianus
gaaaggctcaagtcggcagcatcgt

SEQ ID NO: 161946 - DNA, 25 bp, Saccharomyces pastorianus
gtcggcagcatcgtatcttgataca

SEQ ID NO: 161947 - DNA, 25 bp, Saccharomyces pastorianus
aagttaatatcttacctgaggctaa

SEQ ID NO: 161948 - DNA, 25 bp, Saccharomyces pastorianus
ggtgctatcattaagtgtggacatt

SEQ ID NO: 161949 - DNA, 25 bp, Saccharomyces pastorianus
gctgatccgccacaagttattctat

SEQ ID NO: 161950 - DNA, 25 bp, Saccharomyces pastorianus
gctacgagcccatagtaaatgccct

SEQ ID NO: 161951 - DNA, 25 bp, Saccharomyces pastorianus
attgagctgctctatctgtttggga

SEQ ID NO: 161952 - DNA, 25 bp, Saccharomyces pastorianus
gagttgtatccttacgtggctacga

SEQ ID NO: 161953 - DNA, 25 bp, Saccharomyces pastorianus
ggcgccgattcgtctcaagataatt

SEQ ID NO: 161954 - DNA, 25 bp, Saccharomyces pastorianus
tataaataacttcatacgccagcct

SEQ ID NO: 161955 - DNA, 25 bp, Saccharomyces pastorianus
ggcatgtctatctaatacagccaat

SEQ ID NO: 161956 - DNA, 25 bp, Saccharomyces pastorianus
gttgtatcacattgaacacttggca

SEQ ID NO: 161957 - DNA, 25 bp, Saccharomyces pastorianus
aatgccctatatgcaaaggtttctg

SEQ ID NO: 161958 - DNA, 25 bp, Saccharomyces pastorianus
gatccagacgttaaagtcgttcaca

SEQ ID NO: 161959 - DNA, 25 bp, Saccharomyces pastorianus
ctatataaagtaactgccacggcag

SEQ ID NO: 161960 - DNA, 25 bp, Saccharomyces pastorianus
ggtcaccactccgattttgaactag

SEQ ID NO: 161961 - DNA, 25 bp, Saccharomyces pastorianus
agagactttcttcgcgttacatgat

SEQ ID NO: 161962 - DNA, 25 bp, Saccharomyces pastorianus
aagcgtgttgttagccttattatga

SEQ ID NO: 161963 - DNA, 25 bp, Saccharomyces pastorianus
atggtatgggacaacacgatgaatc

SEQ ID NO: 161964 - DNA, 25 bp, Saccharomyces pastorianus
gattacactccagagactttcttcg

SEQ ID NO: 161965 - DNA, 25 bp, Saccharomyces pastorianus
accacctgatggtttatcctgggag

SEQ ID NO: 161966 - DNA, 25 bp, Saccharomyces pastorianus
tgtattttctttggctttcactcta

SEQ ID NO: 161967 - DNA, 25 bp, Saccharomyces pastorianus
ggaaaatgaggcaccacctgatggt

SEQ ID NO: 161968 - DNA, 25 bp, Saccharomyces pastorianus
aaaacgatattctatctctctacgg

SEQ ID NO: 161969 - DNA, 25 bp, Saccharomyces pastorianus
ttcgtcccagaagaggtgtcccgtt

SEQ ID NO: 161970 - DNA, 25 bp, Saccharomyces pastorianus
ggattatccctctgacatggcaaat

SEQ ID NO: 161971 - DNA, 25 bp, Saccharomyces pastorianus
tgccccattgaccattcaagcatga

SEQ ID NO: 161972 - DNA, 25 bp, Saccharomyces pastorianus
ttccccattttccactaaagctatg

SEQ ID NO: 161973 - DNA, 25 bp, Saccharomyces pastorianus
gagatgttgccaccaaagcgcgtta

SEQ ID NO: 161974 - DNA, 25 bp, Saccharomyces pastorianus
gcgcgttatcgcattattcatcgag

SEQ ID NO: 161975 - DNA, 25 bp, Saccharomyces pastorianus
attgtcttcgatgaatcccacagtt

SEQ ID NO: 161976 - DNA, 25 bp, Saccharomyces pastorianus
aaatacagcggccttaccagcttca

SEQ ID NO: 161977 - DNA, 25 bp, Saccharomyces pastorianus
caaattcttcttcgaacccggcaag

SEQ ID NO: 161978 - DNA, 25 bp, Saccharomyces pastorianus
gaatccgcctcagtcaaaatgtcct

SEQ ID NO: 161979 - DNA, 25 bp, Saccharomyces pastorianus
aatgatgccgcccaaggacgagacg

SEQ ID NO: 161980 - DNA, 25 bp, Saccharomyces pastorianus
ggatcctaatatttcgaacaaccta

SEQ ID NO: 161981 - DNA, 25 bp, Saccharomyces pastorianus
gatttgatgtgttgttcgcagcctt

SEQ ID NO: 161982 - DNA, 25 bp, Saccharomyces pastorianus
gatatctcgtgatctggcagattct

SEQ ID NO: 161983 - DNA, 25 bp, Saccharomyces pastorianus
agatgaaggtatccctagtgactgg

SEQ ID NO: 161984 - DNA, 25 bp, Saccharomyces pastorianus
tggcagattctagtgctgatcaaat

SEQ ID NO: 161985 - DNA, 25 bp, Saccharomyces pastorianus
aagactcccacttgatatctcgtga

SEQ ID NO: 161986 - DNA, 25 bp, Saccharomyces pastorianus
gttcgcagccttcttatgcaagaga

SEQ ID NO: 161987 - DNA, 25 bp, Saccharomyces pastorianus
gagagcacccaaagttatcattttt

SEQ ID NO: 161988 - DNA, 25 bp, Saccharomyces pastorianus
agggtcgttagaattccagcatatt

SEQ ID NO: 161989 - DNA, 25 bp, Saccharomyces pastorianus
caacctaagtatcttctatacgggt

SEQ ID NO: 161990 - DNA, 25 bp, Saccharomyces pastorianus
gatgcggatgacgaagactcccact

SEQ ID NO: 161991 - DNA, 25 bp, Saccharomyces pastorianus
atctcaaccgaagagggagagaaaa

SEQ ID NO: 161992 - DNA, 25 bp, Saccharomyces pastorianus
atgaaaggcaaatctcaaccgaaga

SEQ ID NO: 161993 - DNA, 25 bp, Saccharomyces pastorianus
aaatctcaaccgaagagggagagaa

SEQ ID NO: 161994 - DNA, 25 bp, Saccharomyces pastorianus
gttatattgtgcattgttggtaaca

SEQ ID NO: 161995 - DNA, 25 bp, Saccharomyces pastorianus
aaggcaaatctcaaccgaagaggga

SEQ ID NO: 161996 - DNA, 25 bp, Saccharomyces pastorianus
ggcaaatctcaaccgaagagggaga

SEQ ID NO: 161997 - DNA, 25 bp, Saccharomyces pastorianus
aggcaaatctcaaccgaagagggag

SEQ ID NO: 161998 - DNA, 25 bp, Saccharomyces pastorianus
gaaaggcaaatctcaaccgaagagg

SEQ ID NO: 161999 - DNA, 25 bp, Saccharomyces pastorianus
tatattgtgcattgttggtaacaaa

SEQ ID NO: 162000 - DNA, 25 bp, Saccharomyces pastorianus
gatgaaaggcaaatctcaaccgaag

SEQ ID NO: 162001 - DNA, 25 bp, Saccharomyces pastorianus
atgttatattgtgcattgttggtaa

SEQ ID NO: 162002 - DNA, 25 bp, Saccharomyces pastorianus
gccacgattggtatagattttcttt

SEQ ID NO: 162003 - DNA, 25 bp, Saccharomyces pastorianus
catcgctgatcactagatttatgta

SEQ ID NO: 162004 - DNA, 25 bp, Saccharomyces pastorianus
gcagatccgggaaatcattgacaaa

SEQ ID NO: 162005 - DNA, 25 bp, Saccharomyces pastorianus
gctattatcgtttacgacattacga

SEQ ID NO: 162006 - DNA, 25 bp, Saccharomyces pastorianus
ttggtatagattttctttccaagac

SEQ ID NO: 162007 - DNA, 25 bp, Saccharomyces pastorianus
atgatacgttcgatgatcattacca

SEQ ID NO: 162008 - DNA, 25 bp, Saccharomyces pastorianus
gatcattaataccttcatatatcag

SEQ ID NO: 162009 - DNA, 25 bp, Saccharomyces pastorianus
atgatcattaccaagccacgattgg

SEQ ID NO: 162010 - DNA, 25 bp, Saccharomyces pastorianus
tatatcagagattcgagagttgcta

SEQ ID NO: 162011 - DNA, 25 bp, Saccharomyces pastorianus
gagattcgagagttgctattatcgt

SEQ ID NO: 162012 - DNA, 25 bp, Saccharomyces pastorianus
ggaaaaacatcgctgatcactagat

SEQ ID NO: 162013 - DNA, 25 bp, Saccharomyces pastorianus
agcgaccagtagaatcagcctcttg

SEQ ID NO: 162014 - DNA, 25 bp, Saccharomyces pastorianus
agggaaagctcatctccggaaattt

SEQ ID NO: 162015 - DNA, 25 bp, Saccharomyces pastorianus
acaacctcattaccattttttccag

SEQ ID NO: 162016 - DNA, 25 bp, Saccharomyces pastorianus
acgagacgccattacacgatgatga

SEQ ID NO: 162017 - DNA, 25 bp, Saccharomyces pastorianus
tgaaccgcctgattctcaaactaat

SEQ ID NO: 162018 - DNA, 25 bp, Saccharomyces pastorianus
ggaaagcgctggctgactcagatat

SEQ ID NO: 162019 - DNA, 25 bp, Saccharomyces pastorianus
gctctcagttatccattgcaaccat

SEQ ID NO: 162020 - DNA, 25 bp, Saccharomyces pastorianus
atccgaaaccagagccttttagcag

SEQ ID NO: 162021 - DNA, 25 bp, Saccharomyces pastorianus
tgagcatagaacttccttcacctac

SEQ ID NO: 162022 - DNA, 25 bp, Saccharomyces pastorianus
gaggacatgtccgatagctcatatg

SEQ ID NO: 162023 - DNA, 25 bp, Saccharomyces pastorianus
tttagcaggcctcccataatagatg

SEQ ID NO: 162024 - DNA, 25 bp, Saccharomyces pastorianus
tacccgcaggtgaaaattttagcaa

SEQ ID NO: 162025 - DNA, 25 bp, Saccharomyces pastorianus
caatgtattgttgttccagggtttt

SEQ ID NO: 162026 - DNA, 25 bp, Saccharomyces pastorianus
gcaggagcaggaactattcaatgta

SEQ ID NO: 162027 - DNA, 25 bp, Saccharomyces pastorianus
tgcagtgtgcaggagcaggaactat

SEQ ID NO: 162028 - DNA, 25 bp, Saccharomyces pastorianus
tgttgttccagggtttttgttcgca

SEQ ID NO: 162029 - DNA, 25 bp, Saccharomyces pastorianus
tctcaacgtgcagtgtgcaggagca

SEQ ID NO: 162030 - DNA, 25 bp, Saccharomyces pastorianus
tgtgcaggagcaggaactattcaat

SEQ ID NO: 162031 - DNA, 25 bp, Saccharomyces pastorianus
tgaccgacggtacccgcaggtgaaa

SEQ ID NO: 162032 - DNA, 25 bp, Saccharomyces pastorianus
tttttgttcgcaacccacgtcttga

SEQ ID NO: 162033 - DNA, 25 bp, Saccharomyces pastorianus
attcaatgtattgttgttccagggt

SEQ ID NO: 162034 - DNA, 25 bp, Saccharomyces pastorianus
gcaacccacgtcttgaccgacggta

SEQ ID NO: 162035 - DNA, 25 bp, Saccharomyces pastorianus
ggcacagggatttagtccgtgtttg

SEQ ID NO: 162036 - DNA, 25 bp, Saccharomyces pastorianus
agaacgttccaaactggcacaggga

SEQ ID NO: 162037 - DNA, 25 bp, Saccharomyces pastorianus
ttgtgaaaacatcccaattgtcttg

SEQ ID NO: 162038 - DNA, 25 bp, Saccharomyces pastorianus
acagggatttagtccgtgtttgtga

SEQ ID NO: 162039 - DNA, 25 bp, Saccharomyces pastorianus
agtccgtgtttgtgaaaacatccca

SEQ ID NO: 162040 - DNA, 25 bp, Saccharomyces pastorianus
gtttgtgaaaacatcccaattgtct

SEQ ID NO: 162041 - DNA, 25 bp, Saccharomyces pastorianus
cagggatttagtccgtgtttgtgaa

SEQ ID NO: 162042 - DNA, 25 bp, Saccharomyces pastorianus
atcccaattgtcttgtgtggtaaca

SEQ ID NO: 162043 - DNA, 25 bp, Saccharomyces pastorianus
gcacagggatttagtccgtgtttgt

SEQ ID NO: 162044 - DNA, 25 bp, Saccharomyces pastorianus
aagacaggtcaaggccaagactatc

SEQ ID NO: 162045 - DNA, 25 bp, Saccharomyces pastorianus
ccgtgtttgtgaaaacatcccaatt

SEQ ID NO: 162046 - DNA, 25 bp, Saccharomyces pastorianus
ttatccttttacaccaactttggtg

SEQ ID NO: 162047 - DNA, 25 bp, Saccharomyces pastorianus
gacggttactacattaacgcccaat

SEQ ID NO: 162048 - DNA, 25 bp, Saccharomyces pastorianus
tcgatgtacttccagaattacttac

SEQ ID NO: 162049 - DNA, 25 bp, Saccharomyces pastorianus
aatttgatgtctgggatactgccgg

SEQ ID NO: 162050 - DNA, 25 bp, Saccharomyces pastorianus
acattaacgcccaatgtgccatcat

SEQ ID NO: 162051 - DNA, 25 bp, Saccharomyces pastorianus
cgccaccattggtgtcgaagtgcat

SEQ ID NO: 162052 - DNA, 25 bp, Saccharomyces pastorianus
gtacatcgccaccattggtgtcgaa

SEQ ID NO: 162053 - DNA, 25 bp, Saccharomyces pastorianus
gtgccatcatcatgttcgatgtact

SEQ ID NO: 162054 - DNA, 25 bp, Saccharomyces pastorianus
gaagtacatcgccaccattggtgtc

SEQ ID NO: 162055 - DNA, 25 bp, Saccharomyces pastorianus
taacgcccaatgtgccatcatcatg

SEQ ID NO: 162056 - DNA, 25 bp, Saccharomyces pastorianus
atcatgttcgatgtacttccagaat

SEQ ID NO: 162057 - DNA, 25 bp, Saccharomyces pastorianus
tttccccaaaagctcataatcgatc

SEQ ID NO: 162058 - DNA, 25 bp, Saccharomyces pastorianus
aatcagcttaccaatgtcacataaa

SEQ ID NO: 162059 - DNA, 25 bp, Saccharomyces pastorianus
atgggcagttctcgcgttattcgtc

SEQ ID NO: 162060 - DNA, 25 bp, Saccharomyces pastorianus
aaacaacactcttccggtacgacag

SEQ ID NO: 162061 - DNA, 25 bp, Saccharomyces pastorianus
tacgacagccgctgcggcaattact

SEQ ID NO: 162062 - DNA, 25 bp, Saccharomyces pastorianus
ttatgcccaatcagcttaccaatgt

SEQ ID NO: 162063 - DNA, 25 bp, Saccharomyces pastorianus
tgcggcaattacttttccccaaaag

SEQ ID NO: 162064 - DNA, 25 bp, Saccharomyces pastorianus
ccactattatccctttttggtaatg

SEQ ID NO: 162065 - DNA, 25 bp, Saccharomyces pastorianus
taatcgatcaattaacgcgtaaacg

SEQ ID NO: 162066 - DNA, 25 bp, Saccharomyces pastorianus
tcgcgttattcgtcatcaggcaagt

SEQ ID NO: 162067 - DNA, 25 bp, Saccharomyces pastorianus
atgtcacataaaggaaccactatta

SEQ ID NO: 162068 - DNA, 25 bp, Saccharomyces pastorianus
aagggcgccaatttcatccctgata

SEQ ID NO: 162069 - DNA, 25 bp, Saccharomyces pastorianus
aatccatgattgatactgtcgcaaa

SEQ ID NO: 162070 - DNA, 25 bp, Saccharomyces pastorianus
gaaactacctatcatttgcttgaaa

SEQ ID NO: 162071 - DNA, 25 bp, Saccharomyces pastorianus
gctgcactacttgcggcgttaagga

SEQ ID NO: 162072 - DNA, 25 bp, Saccharomyces pastorianus
aacaagtagcggctcaagttccggg

SEQ ID NO: 162073 - DNA, 25 bp, Saccharomyces pastorianus
gggaatgctgtttccttgacaacca

SEQ ID NO: 162074 - DNA, 25 bp, Saccharomyces pastorianus
ataacccgcatggaactgaccactt

SEQ ID NO: 162075 - DNA, 25 bp, Saccharomyces pastorianus
gctggacgctttatgatccggcata

SEQ ID NO: 162076 - DNA, 25 bp, Saccharomyces pastorianus
aaccaccatcaacctgttgttcggt

SEQ ID NO: 162077 - DNA, 25 bp, Saccharomyces pastorianus
atgaccccgatcactggattgcaaa

SEQ ID NO: 162078 - DNA, 25 bp, Saccharomyces pastorianus
tgttgttcggttccttagtccacga

SEQ ID NO: 162079 - DNA, 25 bp, Saccharomyces pastorianus
cacagttttcatgaggatggcgcct

SEQ ID NO: 162080 - DNA, 25 bp, Saccharomyces pastorianus
aacttaattagtcatttgccaacca

SEQ ID NO: 162081 - DNA, 25 bp, Saccharomyces pastorianus
taacagacgctttacttaaccttat

SEQ ID NO: 162082 - DNA, 25 bp, Saccharomyces pastorianus
tttcatcgagcgtgttcaattggac

SEQ ID NO: 162083 - DNA, 25 bp, Saccharomyces pastorianus
gacgaccctgtattacacgaaggaa

SEQ ID NO: 162084 - DNA, 25 bp, Saccharomyces pastorianus
gatggcgccttgactaacttaatta

SEQ ID NO: 162085 - DNA, 25 bp, Saccharomyces pastorianus
gtgccatttgccatttgcgatcatg

SEQ ID NO: 162086 - DNA, 25 bp, Saccharomyces pastorianus
aaggtgccaccttttcgacacttcg

SEQ ID NO: 162087 - DNA, 25 bp, Saccharomyces pastorianus
aatatcgacagcttcacgtgccatt

SEQ ID NO: 162088 - DNA, 25 bp, Saccharomyces pastorianus
gtatctatgtatctgacgaccctgt

SEQ ID NO: 162089 - DNA, 25 bp, Saccharomyces pastorianus
gacacttcggttattatgttacaca

SEQ ID NO: 162090 - DNA, 25 bp, Saccharomyces pastorianus
tactgttcaactacacgccggccaa

SEQ ID NO: 162091 - DNA, 25 bp, Saccharomyces pastorianus
ctacacgccggccaagagaacactg

SEQ ID NO: 162092 - DNA, 25 bp, Saccharomyces pastorianus
cgatactgttcaactacacgccggc

SEQ ID NO: 162093 - DNA, 25 bp, Saccharomyces pastorianus
atgccatctcatttcgatactgttc

SEQ ID NO: 162094 - DNA, 25 bp, Saccharomyces pastorianus
acacgccggccaagagaacactggt

SEQ ID NO: 162095 - DNA, 25 bp, Saccharomyces pastorianus
tgttcaactacacgccggccaagag

SEQ ID NO: 162096 - DNA, 25 bp, Saccharomyces pastorianus
ctgttcaactacacgccggccaaga

SEQ ID NO: 162097 - DNA, 25 bp, Saccharomyces pastorianus
actgttcaactacacgccggccaag

SEQ ID NO: 162098 - DNA, 25 bp, Saccharomyces pastorianus
atactgttcaactacacgccggcca

SEQ ID NO: 162099 - DNA, 25 bp, Saccharomyces pastorianus
gatactgttcaactacacgccggcc

SEQ ID NO: 162100 - DNA, 25 bp, Saccharomyces pastorianus
tacacgccggccaagagaacactgg

SEQ ID NO: 162101 - DNA, 25 bp, Saccharomyces pastorianus
atatttcgattcagcttttcacaga

SEQ ID NO: 162102 - DNA, 25 bp, Saccharomyces pastorianus
gaggacagttctacgagatcgaagc

SEQ ID NO: 162103 - DNA, 25 bp, Saccharomyces pastorianus
ttaggctgcaggctaatgcaacatg

SEQ ID NO: 162104 - DNA, 25 bp, Saccharomyces pastorianus
atcaagggtagttgccccaagtcgc

SEQ ID NO: 162105 - DNA, 25 bp, Saccharomyces pastorianus
aattcaatgaggctggtccttcatc

SEQ ID NO: 162106 - DNA, 25 bp, Saccharomyces pastorianus
aaacggctcacaagatgttccttaa

SEQ ID NO: 162107 - DNA, 25 bp, Saccharomyces pastorianus
actggccaagagtgacatcttttat

SEQ ID NO: 162108 - DNA, 25 bp, Saccharomyces pastorianus
aatagtcttcacacagttaggctgc

SEQ ID NO: 162109 - DNA, 25 bp, Saccharomyces pastorianus
aggtctaatctcttcattgtcaagg

SEQ ID NO: 162110 - DNA, 25 bp, Saccharomyces pastorianus
cattaaattctttatctgctccaga

SEQ ID NO: 162111 - DNA, 25 bp, Saccharomyces pastorianus
aagtcgctcttctatactggccaag

SEQ ID NO: 162112 - DNA, 25 bp, Saccharomyces pastorianus
ggatctgaggactatattgaacgca

SEQ ID NO: 162113 - DNA, 25 bp, Saccharomyces pastorianus
tatgccctgatttacaggtactact

SEQ ID NO: 162114 - DNA, 25 bp, Saccharomyces pastorianus
gaaactagtcttgtctatgactcaa

SEQ ID NO: 162115 - DNA, 25 bp, Saccharomyces pastorianus
gatttctaatcttgcgtgtattatt

SEQ ID NO: 162116 - DNA, 25 bp, Saccharomyces pastorianus
actccgacgattttaaagatgcttg

SEQ ID NO: 162117 - DNA, 25 bp, Saccharomyces pastorianus
gtcatgaacttgttgatgcggcttt

SEQ ID NO: 162118 - DNA, 25 bp, Saccharomyces pastorianus
tgaatttttaaacaactccgacgat

SEQ ID NO: 162119 - DNA, 25 bp, Saccharomyces pastorianus
gcactctccttatttcacgtattgg

SEQ ID NO: 162120 - DNA, 25 bp, Saccharomyces pastorianus
atgaacaattggcactctccttatt

SEQ ID NO: 162121 - DNA, 25 bp, Saccharomyces pastorianus
ggtttgatatttattccgaggacta

SEQ ID NO: 162122 - DNA, 25 bp, Saccharomyces pastorianus
gatgcggctttcaatgttacaatgt

SEQ ID NO: 162123 - DNA, 25 bp, Saccharomyces pastorianus
aggattatcaggcatcacctccgaa

SEQ ID NO: 162124 - DNA, 25 bp, Saccharomyces pastorianus
gagtgagccatctccgcgagaaagt

SEQ ID NO: 162125 - DNA, 25 bp, Saccharomyces pastorianus
agctgcagacgtactttactcgcca

SEQ ID NO: 162126 - DNA, 25 bp, Saccharomyces pastorianus
aaatttgctctcaactctggtcttg

SEQ ID NO: 162127 - DNA, 25 bp, Saccharomyces pastorianus
cagtggttgtagcatcgccatcaat

SEQ ID NO: 162128 - DNA, 25 bp, Saccharomyces pastorianus
agtactgctgttagttttccatcct

SEQ ID NO: 162129 - DNA, 25 bp, Saccharomyces pastorianus
aagccgtatgcaaatattccgccag

SEQ ID NO: 162130 - DNA, 25 bp, Saccharomyces pastorianus
gtttgcctctgaaagttgtctcgaa

SEQ ID NO: 162131 - DNA, 25 bp, Saccharomyces pastorianus
tactcgccaaccgtgaccaaaatga

SEQ ID NO: 162132 - DNA, 25 bp, Saccharomyces pastorianus
aggtaacacattgccgctaattggt

SEQ ID NO: 162133 - DNA, 25 bp, Saccharomyces pastorianus
attctgatgtcaactcaaccacgca

SEQ ID NO: 162134 - DNA, 25 bp, Saccharomyces pastorianus
attatagaggcctctgtaccagaag

SEQ ID NO: 162135 - DNA, 25 bp, Saccharomyces pastorianus
attcgggtgcggatgcatcactaaa

SEQ ID NO: 162136 - DNA, 25 bp, Saccharomyces pastorianus
aattttggcaactgacgactgatgt

SEQ ID NO: 162137 - DNA, 25 bp, Saccharomyces pastorianus
tatgggcgtgaatggtattatatcc

SEQ ID NO: 162138 - DNA, 25 bp, Saccharomyces pastorianus
gacgagggtgatctaaatttctatt

SEQ ID NO: 162139 - DNA, 25 bp, Saccharomyces pastorianus
aaagcacaatctaaactgtctcgat

SEQ ID NO: 162140 - DNA, 25 bp, Saccharomyces pastorianus
gaaggaatcaaaaccgccaaaatag

SEQ ID NO: 162141 - DNA, 25 bp, Saccharomyces pastorianus
aactgtctcgattgaaggacgcgaa

SEQ ID NO: 162142 - DNA, 25 bp, Saccharomyces pastorianus
gacgcgaagttccataaattgattc

SEQ ID NO: 162143 - DNA, 25 bp, Saccharomyces pastorianus
attatatccattgaagtcttccgag

SEQ ID NO: 162144 - DNA, 25 bp, Saccharomyces pastorianus
aagattgacagattcgggtgcggat

SEQ ID NO: 162145 - DNA, 25 bp, Saccharomyces pastorianus
aaatgtggtcacttcaatggcctcg

SEQ ID NO: 162146 - DNA, 25 bp, Saccharomyces pastorianus
aagcttgacattgatctacagacca

SEQ ID NO: 162147 - DNA, 25 bp, Saccharomyces pastorianus
gaaaatcttattcgagttcattcaa

SEQ ID NO: 162148 - DNA, 25 bp, Saccharomyces pastorianus
atgtggtcacttcaatggcctcgat

SEQ ID NO: 162149 - DNA, 25 bp, Saccharomyces pastorianus
acagaccaacagtacttacaaagaa

SEQ ID NO: 162150 - DNA, 25 bp, Saccharomyces pastorianus
caatggcctcgatgaaattctaact

SEQ ID NO: 162151 - DNA, 25 bp, Saccharomyces pastorianus
gacattgatctacagaccaacagta

SEQ ID NO: 162152 - DNA, 25 bp, Saccharomyces pastorianus
ggtcacttcaatggcctcgatgaaa

SEQ ID NO: 162153 - DNA, 25 bp, Saccharomyces pastorianus
ggcctcgatgaaattctaactacgt

SEQ ID NO: 162154 - DNA, 25 bp, Saccharomyces pastorianus
attcgagttcattcaagacaagctt

SEQ ID NO: 162155 - DNA, 25 bp, Saccharomyces pastorianus
gatctacagaccaacagtacttaca

SEQ ID NO: 162156 - DNA, 25 bp, Saccharomyces pastorianus
aaatgggctcaacgatcatcctcat

SEQ ID NO: 162157 - DNA, 25 bp, Saccharomyces pastorianus
gctcaatataaatccctctccttat

SEQ ID NO: 162158 - DNA, 25 bp, Saccharomyces pastorianus
tcttccttatagcaagatcctccct

SEQ ID NO: 162159 - DNA, 25 bp, Saccharomyces pastorianus
agatgtaacgaacctcatctgccgc

SEQ ID NO: 162160 - DNA, 25 bp, Saccharomyces pastorianus
taatgggcagtttttcactcaaatc

SEQ ID NO: 162161 - DNA, 25 bp, Saccharomyces pastorianus
atccgcaactgctgcgcaaatcaaa

SEQ ID NO: 162162 - DNA, 25 bp, Saccharomyces pastorianus
gacacatcaacaatacttacacaag

SEQ ID NO: 162163 - DNA, 25 bp, Saccharomyces pastorianus
ctctccttatcttccttatagcaag

SEQ ID NO: 162164 - DNA, 25 bp, Saccharomyces pastorianus
atgttccacagtttggtcggtacat

SEQ ID NO: 162165 - DNA, 25 bp, Saccharomyces pastorianus
acaacttacagaacccgtgacacat

SEQ ID NO: 162166 - DNA, 25 bp, Saccharomyces pastorianus
ggtcggtacatacgcattcgttgat

SEQ ID NO: 162167 - DNA, 25 bp, Saccharomyces pastorianus
atctttatagtgtgtatcagcattg

SEQ ID NO: 162168 - DNA, 25 bp, Saccharomyces pastorianus
tattccgcatagttgaccactttag

SEQ ID NO: 162169 - DNA, 25 bp, Saccharomyces pastorianus
agttgaccactttagcccttttatg

SEQ ID NO: 162170 - DNA, 25 bp, Saccharomyces pastorianus
gaattcatcaaagagatcgttgtca

SEQ ID NO: 162171 - DNA, 25 bp, Saccharomyces pastorianus
gatcgttgtcatattccgcatagtt

SEQ ID NO: 162172 - DNA, 25 bp, Saccharomyces pastorianus
gaaccgttcatattgaattcatcaa

SEQ ID NO: 162173 - DNA, 25 bp, Saccharomyces pastorianus
atgagacactgcattatctttatag

SEQ ID NO: 162174 - DNA, 25 bp, Saccharomyces pastorianus
agcattgttgaaattagaaccgttc

SEQ ID NO: 162175 - DNA, 25 bp, Saccharomyces pastorianus
ccatcatcttcgtttgtcaatctgt

SEQ ID NO: 162176 - DNA, 25 bp, Saccharomyces pastorianus
ccttgtttgttgagccattgtaaag

SEQ ID NO: 162177 - DNA, 25 bp, Saccharomyces pastorianus
gggataccatcatcttcgtttgtca

SEQ ID NO: 162178 - DNA, 25 bp, Saccharomyces pastorianus
ggtgggcatgttccttttaacgtat

SEQ ID NO: 162179 - DNA, 25 bp, Saccharomyces pastorianus
aaggcgagaacttcggcagatccct

SEQ ID NO: 162180 - DNA, 25 bp, Saccharomyces pastorianus
tggctacttttaccaccgagaagct

SEQ ID NO: 162181 - DNA, 25 bp, Saccharomyces pastorianus
gtgccattcaagtgcccaattcaaa

SEQ ID NO: 162182 - DNA, 25 bp, Saccharomyces pastorianus
tctacgtcacgggtttagaccttgg

SEQ ID NO: 162183 - DNA, 25 bp, Saccharomyces pastorianus
gattccaagcctatccgttttactt

SEQ ID NO: 162184 - DNA, 25 bp, Saccharomyces pastorianus
gtaatggcgtattatccgattccaa

SEQ ID NO: 162185 - DNA, 25 bp, Saccharomyces pastorianus
gtcaggctgcttgttttctacgtca

SEQ ID NO: 162186 - DNA, 25 bp, Saccharomyces pastorianus
gaccagggtatttttgctacagtgc

SEQ ID NO: 162187 - DNA, 25 bp, Saccharomyces pastorianus
taacgtatcactcaccatggtctaa

SEQ ID NO: 162188 - DNA, 25 bp, Saccharomyces pastorianus
atacgtgatgataacctggctactt

SEQ ID NO: 162189 - DNA, 25 bp, Saccharomyces pastorianus
gatacggttcagattcaaccacaga

SEQ ID NO: 162190 - DNA, 25 bp, Saccharomyces pastorianus
aaaagcatcctaagcatcatcatca

SEQ ID NO: 162191 - DNA, 25 bp, Saccharomyces pastorianus
ccaattattccatacgtcttagccg

SEQ ID NO: 162192 - DNA, 25 bp, Saccharomyces pastorianus
attcctctatagatgcaccttttaa

SEQ ID NO: 162193 - DNA, 25 bp, Saccharomyces pastorianus
gtcttagccgatgcaaattcctcta

SEQ ID NO: 162194 - DNA, 25 bp, Saccharomyces pastorianus
gatgatgacgcggattttagatcta

SEQ ID NO: 162195 - DNA, 25 bp, Saccharomyces pastorianus
atcaccatcatcacagtcgtaaaga

SEQ ID NO: 162196 - DNA, 25 bp, Saccharomyces pastorianus
acgaggaattgattcctccacccga

SEQ ID NO: 162197 - DNA, 25 bp, Saccharomyces pastorianus
actttccgcagaagtgtcttccgaa

SEQ ID NO: 162198 - DNA, 25 bp, Saccharomyces pastorianus
gaaccaagacgactttcaaccactt

SEQ ID NO: 162199 - DNA, 25 bp, Saccharomyces pastorianus
aaaccgccatctgcagacgaggaat

SEQ ID NO: 162200 - DNA, 25 bp, Saccharomyces pastorianus
agaaacctctgatggctcttctaac

SEQ ID NO: 162201 - DNA, 25 bp, Saccharomyces pastorianus
ggctcttctaaccatggtgttctta

SEQ ID NO: 162202 - DNA, 25 bp, Saccharomyces pastorianus
tggctggagcagcaactctgttaga

SEQ ID NO: 162203 - DNA, 25 bp, Saccharomyces pastorianus
ggcaacaacttttcgaagtctggca

SEQ ID NO: 162204 - DNA, 25 bp, Saccharomyces pastorianus
aattcctttctgacttcgtgcattt

SEQ ID NO: 162205 - DNA, 25 bp, Saccharomyces pastorianus
ttgacggctctaacccagatgtctt

SEQ ID NO: 162206 - DNA, 25 bp, Saccharomyces pastorianus
ggtgttcttacccatcaagacgaca

SEQ ID NO: 162207 - DNA, 25 bp, Saccharomyces pastorianus
agaagtcttacctggttccatacca

SEQ ID NO: 162208 - DNA, 25 bp, Saccharomyces pastorianus
ggtattccggttatgtatcttatgc

SEQ ID NO: 162209 - DNA, 25 bp, Saccharomyces pastorianus
agatgtcttctggagcaacggcacc

SEQ ID NO: 162210 - DNA, 25 bp, Saccharomyces pastorianus
tccataccagtgttgacggctctaa

SEQ ID NO: 162211 - DNA, 25 bp, Saccharomyces pastorianus
tagctatggtggtcagtatacccct

SEQ ID NO: 162212 - DNA, 25 bp, Saccharomyces pastorianus
actctaggtcctcgagaatgtctcc

SEQ ID NO: 162213 - DNA, 25 bp, Saccharomyces pastorianus
atctcccgtttcgatcgagcaaatc

SEQ ID NO: 162214 - DNA, 25 bp, Saccharomyces pastorianus
ttgaccaacagactcgggttccaaa

SEQ ID NO: 162215 - DNA, 25 bp, Saccharomyces pastorianus
aatgctattgctatggccttgccaa

SEQ ID NO: 162216 - DNA, 25 bp, Saccharomyces pastorianus
tcggattttagcagttacggccctc

SEQ ID NO: 162217 - DNA, 25 bp, Saccharomyces pastorianus
tgccaaatgaaccttatcccgcttg

SEQ ID NO: 162218 - DNA, 25 bp, Saccharomyces pastorianus
cattggtggcgatactgctaactat

SEQ ID NO: 162219 - DNA, 25 bp, Saccharomyces pastorianus
gaatgtctcctgatcaagctttact

SEQ ID NO: 162220 - DNA, 25 bp, Saccharomyces pastorianus
tactatctttacatgccgactacat

SEQ ID NO: 162221 - DNA, 25 bp, Saccharomyces pastorianus
ttatggttctcttggactctaggtc

SEQ ID NO: 162222 - DNA, 25 bp, Saccharomyces pastorianus
cacttcgtacgagaatttgggcttc

SEQ ID NO: 162223 - DNA, 25 bp, Saccharomyces pastorianus
aatctgctgctccagaatatacact

SEQ ID NO: 162224 - DNA, 25 bp, Saccharomyces pastorianus
gaagaaaccgctgcctatgaaggaa

SEQ ID NO: 162225 - DNA, 25 bp, Saccharomyces pastorianus
gaggtcgcagactctatatcgtacc

SEQ ID NO: 162226 - DNA, 25 bp, Saccharomyces pastorianus
tgggcttctttgaggtcgcagactc

SEQ ID NO: 162227 - DNA, 25 bp, Saccharomyces pastorianus
agagctatcaaattactgtatcgtg

SEQ ID NO: 162228 - DNA, 25 bp, Saccharomyces pastorianus
gaggagccaagaatctattccgctt

SEQ ID NO: 162229 - DNA, 25 bp, Saccharomyces pastorianus
gtttaaatttttggtctctatgcag

SEQ ID NO: 162230 - DNA, 25 bp, Saccharomyces pastorianus
gcttacccagacttacaaattgcct

SEQ ID NO: 162231 - DNA, 25 bp, Saccharomyces pastorianus
tgtttggtggtaatgctgaaggctt

SEQ ID NO: 162232 - DNA, 25 bp, Saccharomyces pastorianus
tctattccgctttgattgatggaca

SEQ ID NO: 162233 - DNA, 25 bp, Saccharomyces pastorianus
ggaccgtttcctaacattctattat

SEQ ID NO: 162234 - DNA, 25 bp, Saccharomyces pastorianus
atctgggtacccaattaccagtgga

SEQ ID NO: 162235 - DNA, 25 bp, Saccharomyces pastorianus
ttggtgaatttatcttccttggccc

SEQ ID NO: 162236 - DNA, 25 bp, Saccharomyces pastorianus
ttccttggcccatgaatctattatg

SEQ ID NO: 162237 - DNA, 25 bp, Saccharomyces pastorianus
taccagtggaccgtttcctaacatt

SEQ ID NO: 162238 - DNA, 25 bp, Saccharomyces pastorianus
ttggttccaattgggtgttacaact

SEQ ID NO: 162239 - DNA, 25 bp, Saccharomyces pastorianus
tcggtacaattctaaatttcactac

SEQ ID NO: 162240 - DNA, 25 bp, Saccharomyces pastorianus
gtgttacaacttccaacctgcggtt

SEQ ID NO: 162241 - DNA, 25 bp, Saccharomyces pastorianus
aaatgtttatgttgactttggtgaa

SEQ ID NO: 162242 - DNA, 25 bp, Saccharomyces pastorianus
gaatattattatctgggtacccaat

SEQ ID NO: 162243 - DNA, 25 bp, Saccharomyces pastorianus
gtgtatttacgataggaacaaacca

SEQ ID NO: 162244 - DNA, 25 bp, Saccharomyces pastorianus
cactcgattatgctattctggctaa

SEQ ID NO: 162245 - DNA, 25 bp, Saccharomyces pastorianus
ttttaatctgtcaactgccactcat

SEQ ID NO: 162246 - DNA, 25 bp, Saccharomyces pastorianus
gatcatgccaatacagccttctgga

SEQ ID NO: 162247 - DNA, 25 bp, Saccharomyces pastorianus
atgcattattggtcctgctgtagcc

SEQ ID NO: 162248 - DNA, 25 bp, Saccharomyces pastorianus
ttactctctgaagcaaactcgtttg

SEQ ID NO: 162249 - DNA, 25 bp, Saccharomyces pastorianus
gctaaagccctctcgtcaaattcgt

SEQ ID NO: 162250 - DNA, 25 bp, Saccharomyces pastorianus
aactgccactcattataatcccaaa

SEQ ID NO: 162251 - DNA, 25 bp, Saccharomyces pastorianus
aatcggagtcgttacttgtatccaa

SEQ ID NO: 162252 - DNA, 25 bp, Saccharomyces pastorianus
gattcattggatggcgttgttcaca

SEQ ID NO: 162253 - DNA, 25 bp, Saccharomyces pastorianus
aactcgtttgcgtaagcgtatggtc

SEQ ID NO: 162254 - DNA, 25 bp, Saccharomyces pastorianus
gtagcctctgctaagatccacaaac

SEQ ID NO: 162255 - DNA, 25 bp, Saccharomyces pastorianus
tgaaggccgcaatccgagatgccga

SEQ ID NO: 162256 - DNA, 25 bp, Saccharomyces pastorianus
tctgccgaaggaatgtacgtcctat

SEQ ID NO: 162257 - DNA, 25 bp, Saccharomyces pastorianus
gaaaatccatcttgggatgtacata

SEQ ID NO: 162258 - DNA, 25 bp, Saccharomyces pastorianus
ggaagctctatctgccgaaggaatg

SEQ ID NO: 162259 - DNA, 25 bp, Saccharomyces pastorianus
gtgtttatgcaatagatccgacaaa

SEQ ID NO: 162260 - DNA, 25 bp, Saccharomyces pastorianus
agatctttcagagcctgatatttca

SEQ ID NO: 162261 - DNA, 25 bp, Saccharomyces pastorianus
tttgcatcacccttcgtgaaggccg

SEQ ID NO: 162262 - DNA, 25 bp, Saccharomyces pastorianus
catacaaatacctttgcatcaccct

SEQ ID NO: 162263 - DNA, 25 bp, Saccharomyces pastorianus
gcaatgtcatcctttccaaatttgt

SEQ ID NO: 162264 - DNA, 25 bp, Saccharomyces pastorianus
gagtgaacacactgcgtgtttatgc

SEQ ID NO: 162265 - DNA, 25 bp, Saccharomyces pastorianus
gtacgtcctattagatctttcagag

SEQ ID NO: 162266 - DNA, 25 bp, Saccharomyces pastorianus
tcatcaagggcattgcttaccaatt

SEQ ID NO: 162267 - DNA, 25 bp, Saccharomyces pastorianus
cagtcttcatcaagggcattgctta

SEQ ID NO: 162268 - DNA, 25 bp, Saccharomyces pastorianus
ctgagagtggggaacagtcttcatc

SEQ ID NO: 162269 - DNA, 25 bp, Saccharomyces pastorianus
ggacacaaattctttgactctgaga

SEQ ID NO: 162270 - DNA, 25 bp, Saccharomyces pastorianus
aagaggagcttagcaatgcaaatgg

SEQ ID NO: 162271 - DNA, 25 bp, Saccharomyces pastorianus
tgcttaccaattgcagagaagtgaa

SEQ ID NO: 162272 - DNA, 25 bp, Saccharomyces pastorianus
agtgaagaggagcttagcaatgcaa

SEQ ID NO: 162273 - DNA, 25 bp, Saccharomyces pastorianus
acaaattctttgactctgagagtgg

SEQ ID NO: 162274 - DNA, 25 bp, Saccharomyces pastorianus
gtaggacacaaattctttgactctg

SEQ ID NO: 162275 - DNA, 25 bp, Saccharomyces pastorianus
ggcattgcttaccaattgcagagaa

SEQ ID NO: 162276 - DNA, 25 bp, Saccharomyces pastorianus
aagggcattgcttaccaattgcaga

SEQ ID NO: 162277 - DNA, 25 bp, Saccharomyces pastorianus
aattaaaactaacgcgctgaccgca

SEQ ID NO: 162278 - DNA, 25 bp, Saccharomyces pastorianus
gctgaccgcattggtctccatagaa

SEQ ID NO: 162279 - DNA, 25 bp, Saccharomyces pastorianus
gcagcaatttgcacaacgttggatt

SEQ ID NO: 162280 - DNA, 25 bp, Saccharomyces pastorianus
agaagggcgtattctagcggcgcta

SEQ ID NO: 162281 - DNA, 25 bp, Saccharomyces pastorianus
gaacgagctggtgtccaaggactca

SEQ ID NO: 162282 - DNA, 25 bp, Saccharomyces pastorianus
agaacagtatcttaagtcccgacca

SEQ ID NO: 162283 - DNA, 25 bp, Saccharomyces pastorianus
ggactcagtcaagacgcagcaattt

SEQ ID NO: 162284 - DNA, 25 bp, Saccharomyces pastorianus
gcagcagctcaattgattgcggcta

SEQ ID NO: 162285 - DNA, 25 bp, Saccharomyces pastorianus
gtctttcttcgcaagtgcttatcga

SEQ ID NO: 162286 - DNA, 25 bp, Saccharomyces pastorianus
atgtccaccgctgaatttgctcaac

SEQ ID NO: 162287 - DNA, 25 bp, Saccharomyces pastorianus
cttacaatttgcaggtctttcttcg

SEQ ID NO: 162288 - DNA, 25 bp, Saccharomyces pastorianus
accttgcagcccttttatacaaaca

SEQ ID NO: 162289 - DNA, 25 bp, Saccharomyces pastorianus
agaggatgtgtcaccatggtagcaa

SEQ ID NO: 162290 - DNA, 25 bp, Saccharomyces pastorianus
agcgtaatcgcttgccaaagaccac

SEQ ID NO: 162291 - DNA, 25 bp, Saccharomyces pastorianus
ggatacttgatattcttaccggcag

SEQ ID NO: 162292 - DNA, 25 bp, Saccharomyces pastorianus
atggtagcaaagatacccgctgcac

SEQ ID NO: 162293 - DNA, 25 bp, Saccharomyces pastorianus
tccagctgttgcgttatcttttcaa

SEQ ID NO: 162294 - DNA, 25 bp, Saccharomyces pastorianus
ttgcgttggttgacatgccgtccag

SEQ ID NO: 162295 - DNA, 25 bp, Saccharomyces pastorianus
tgcagtctgaccttggccaagtcaa

SEQ ID NO: 162296 - DNA, 25 bp, Saccharomyces pastorianus
ttgggcataggagccgcctgcagtc

SEQ ID NO: 162297 - DNA, 25 bp, Saccharomyces pastorianus
ttaccggcagactcttttgcgttgg

SEQ ID NO: 162298 - DNA, 25 bp, Saccharomyces pastorianus
ccaacatcctgaagagtgtgggctt

SEQ ID NO: 162299 - DNA, 25 bp, Saccharomyces pastorianus
tatgaaggacacaagacgccctctc

SEQ ID NO: 162300 - DNA, 25 bp, Saccharomyces pastorianus
gaagtgtgtccggacctagcaaatg

SEQ ID NO: 162301 - DNA, 25 bp, Saccharomyces pastorianus
aattcaaaatctatgcgcaagccct

SEQ ID NO: 162302 - DNA, 25 bp, Saccharomyces pastorianus
tggactaccttcaattcccgtatta

SEQ ID NO: 162303 - DNA, 25 bp, Saccharomyces pastorianus
ctcgtgctagctccaattaaatctc

SEQ ID NO: 162304 - DNA, 25 bp, Saccharomyces pastorianus
acaagtgatgattcgcattcgccag

SEQ ID NO: 162305 - DNA, 25 bp, Saccharomyces pastorianus
ccctccacatccctagaagaagaag

SEQ ID NO: 162306 - DNA, 25 bp, Saccharomyces pastorianus
actaagtctgatccattttcacgct

SEQ ID NO: 162307 - DNA, 25 bp, Saccharomyces pastorianus
gacacctttacgcttagaatctgga

SEQ ID NO: 162308 - DNA, 25 bp, Saccharomyces pastorianus
agaacatggacaacccctcgtgcta

SEQ ID NO: 162309 - DNA, 25 bp, Saccharomyces pastorianus
aagccacctcgaagcatacgacgaa

SEQ ID NO: 162310 - DNA, 25 bp, Saccharomyces pastorianus
gttggtactcgtcctgtagacacag

SEQ ID NO: 162311 - DNA, 25 bp, Saccharomyces pastorianus
aaataccgctacagcgaacctgctt

SEQ ID NO: 162312 - DNA, 25 bp, Saccharomyces pastorianus
agcgatattaacattctctttggtg

SEQ ID NO: 162313 - DNA, 25 bp, Saccharomyces pastorianus
gcgaacctgcttatttgacttacaa

SEQ ID NO: 162314 - DNA, 25 bp, Saccharomyces pastorianus
acaaattcgttggtactcgtcctgt

SEQ ID NO: 162315 - DNA, 25 bp, Saccharomyces pastorianus
gccgatagcaaattggactcttcaa

SEQ ID NO: 162316 - DNA, 25 bp, Saccharomyces pastorianus
cattctctttggtgttgattgcatc

SEQ ID NO: 162317 - DNA, 25 bp, Saccharomyces pastorianus
gtgttgattgcatccagccgatagc

SEQ ID NO: 162318 - DNA, 25 bp, Saccharomyces pastorianus
atccatcacattcgagcctattaac

SEQ ID NO: 162319 - DNA, 25 bp, Saccharomyces pastorianus
ggatgtatccatcacattcgagcct

SEQ ID NO: 162320 - DNA, 25 bp, Saccharomyces pastorianus
ctgtagacacaggagctcaacggct

SEQ ID NO: 162321 - DNA, 25 bp, Saccharomyces pastorianus
ggttatcatcaagtttttacaagtt

SEQ ID NO: 162322 - DNA, 25 bp, Saccharomyces pastorianus
aaacgtcaggttctattgagacctt

SEQ ID NO: 162323 - DNA, 25 bp, Saccharomyces pastorianus
agtttttacaagttatgcaaagcat

SEQ ID NO: 162324 - DNA, 25 bp, Saccharomyces pastorianus
ccggtaaacgtcaggttctattgag

SEQ ID NO: 162325 - DNA, 25 bp, Saccharomyces pastorianus
tccaaggttatcatcaagtttttac

SEQ ID NO: 162326 - DNA, 25 bp, Saccharomyces pastorianus
gaccggtaaacgtcaggttctattg

SEQ ID NO: 162327 - DNA, 25 bp, Saccharomyces pastorianus
tcaggttctattgagaccttcttcc

SEQ ID NO: 162328 - DNA, 25 bp, Saccharomyces pastorianus
acgtcaggttctattgagaccttct

SEQ ID NO: 162329 - DNA, 25 bp, Saccharomyces pastorianus
gtaaacgtcaggttctattgagacc

SEQ ID NO: 162330 - DNA, 25 bp, Saccharomyces pastorianus
aaggttatcatcaagtttttacaag

SEQ ID NO: 162331 - DNA, 25 bp, Saccharomyces pastorianus
gtcaggttctattgagaccttcttc

SEQ ID NO: 162332 - DNA, 25 bp, Saccharomyces pastorianus
aaagtactacagcttttgtgcctaa

SEQ ID NO: 162333 - DNA, 25 bp, Saccharomyces pastorianus
tccaagaaatgaagtctaccagaag

SEQ ID NO: 162334 - DNA, 25 bp, Saccharomyces pastorianus
ttttgtgcctaagaggaaaccttca

SEQ ID NO: 162335 - DNA, 25 bp, Saccharomyces pastorianus
aagtactacagcttttgtgcctaag

SEQ ID NO: 162336 - DNA, 25 bp, Saccharomyces pastorianus
ataatgaccaccctttgcctccaat

SEQ ID NO: 162337 - DNA, 25 bp, Saccharomyces pastorianus
gcttttgtgcctaagaggaaacctt

SEQ ID NO: 162338 - DNA, 25 bp, Saccharomyces pastorianus
gaaatgaagtctaccagaagaataa

SEQ ID NO: 162339 - DNA, 25 bp, Saccharomyces pastorianus
actacagcttttgtgcctaagagga

SEQ ID NO: 162340 - DNA, 25 bp, Saccharomyces pastorianus
gtactacagcttttgtgcctaagag

SEQ ID NO: 162341 - DNA, 25 bp, Saccharomyces pastorianus
tacagcttttgtgcctaagaggaaa

SEQ ID NO: 162342 - DNA, 25 bp, Saccharomyces pastorianus
taatgaccaccctttgcctccaatg

SEQ ID NO: 162343 - DNA, 25 bp, Saccharomyces pastorianus
tgggagtggttcgactacccctaca

SEQ ID NO: 162344 - DNA, 25 bp, Saccharomyces pastorianus
gaaagtcgcctttgcaaggctttag

SEQ ID NO: 162345 - DNA, 25 bp, Saccharomyces pastorianus
agcaaactagcttctcaaatgggag

SEQ ID NO: 162346 - DNA, 25 bp, Saccharomyces pastorianus
ctttgcctccaatgtctccaagaaa

SEQ ID NO: 162347 - DNA, 25 bp, Saccharomyces pastorianus
aataactacccacaacattcacatt

SEQ ID NO: 162348 - DNA, 25 bp, Saccharomyces pastorianus
aataacggtacccatcatcaagtgg

SEQ ID NO: 162349 - DNA, 25 bp, Saccharomyces pastorianus
ggccaagttccaaagacctgcacga

SEQ ID NO: 162350 - DNA, 25 bp, Saccharomyces pastorianus
aactagcccttgctggtcttaagaa

SEQ ID NO: 162351 - DNA, 25 bp, Saccharomyces pastorianus
gctttagtttcttttccaggccaag

SEQ ID NO: 162352 - DNA, 25 bp, Saccharomyces pastorianus
aatggtcacagttccatgaagtcct

SEQ ID NO: 162353 - DNA, 25 bp, Saccharomyces pastorianus
gtcattaaactcttctactctcaaa

SEQ ID NO: 162354 - DNA, 25 bp, Saccharomyces pastorianus
aaatacgcccgcatcaagaatagat

SEQ ID NO: 162355 - DNA, 25 bp, Saccharomyces pastorianus
aaaagcatctgttgtccaccttggg

SEQ ID NO: 162356 - DNA, 25 bp, Saccharomyces pastorianus
gatcctactggtggagacaagtctg

SEQ ID NO: 162357 - DNA, 25 bp, Saccharomyces pastorianus
actttacctatgttttgttcgccat

SEQ ID NO: 162358 - DNA, 25 bp, Saccharomyces pastorianus
aaccactcgaattcaaatacgcccg

SEQ ID NO: 162359 - DNA, 25 bp, Saccharomyces pastorianus
tagaagcggcaacaacagcgacaat

SEQ ID NO: 162360 - DNA, 25 bp, Saccharomyces pastorianus
gtcgacaaactttctacatcaattt

SEQ ID NO: 162361 - DNA, 25 bp, Saccharomyces pastorianus
actaccaccaccgaatagctataag

SEQ ID NO: 162362 - DNA, 25 bp, Saccharomyces pastorianus
agtctgtattaacggcactaccacc

SEQ ID NO: 162363 - DNA, 25 bp, Saccharomyces pastorianus
agcaatgttcttgtgtcctgcgatt

SEQ ID NO: 162364 - DNA, 25 bp, Saccharomyces pastorianus
tgggcagcctacaatttcaacggtt

SEQ ID NO: 162365 - DNA, 25 bp, Saccharomyces pastorianus
gagacttccaattgtcaccagacgg

SEQ ID NO: 162366 - DNA, 25 bp, Saccharomyces pastorianus
aaggcaacgcacctgacgccagagg

SEQ ID NO: 162367 - DNA, 25 bp, Saccharomyces pastorianus
aggatcggcctcacaagtgtcccat

SEQ ID NO: 162368 - DNA, 25 bp, Saccharomyces pastorianus
gggagtactttcgaaccataatgat

SEQ ID NO: 162369 - DNA, 25 bp, Saccharomyces pastorianus
tggtccttcatctgttggcggtgcc

SEQ ID NO: 162370 - DNA, 25 bp, Saccharomyces pastorianus
gctttgcattttgaatacccgccag

SEQ ID NO: 162371 - DNA, 25 bp, Saccharomyces pastorianus
gcgggttcgccaggaacaatgactt

SEQ ID NO: 162372 - DNA, 25 bp, Saccharomyces pastorianus
aatttttatgccaatctgaccacgc

SEQ ID NO: 162373 - DNA, 25 bp, Saccharomyces pastorianus
aggatccgtttctcccaatgatgat

SEQ ID NO: 162374 - DNA, 25 bp, Saccharomyces pastorianus
ggatgagatactgtcccaatcggga

SEQ ID NO: 162375 - DNA, 25 bp, Saccharomyces pastorianus
gaagcaatgtccaatttgtcgtaat

SEQ ID NO: 162376 - DNA, 25 bp, Saccharomyces pastorianus
gatcagtagagaaacgcctgtccag

SEQ ID NO: 162377 - DNA, 25 bp, Saccharomyces pastorianus
cacgtagccagtacagagggtcgga

SEQ ID NO: 162378 - DNA, 25 bp, Saccharomyces pastorianus
aaacgcctgtccagataagtttctg

SEQ ID NO: 162379 - DNA, 25 bp, Saccharomyces pastorianus
ggaaccttcctttctggagcaatca

SEQ ID NO: 162380 - DNA, 25 bp, Saccharomyces pastorianus
gaacacggttggaggacattttcaa

SEQ ID NO: 162381 - DNA, 25 bp, Saccharomyces pastorianus
ccggcaggaaagattcatatggctt

SEQ ID NO: 162382 - DNA, 25 bp, Saccharomyces pastorianus
tggagcaatcacttccggcaggaaa

SEQ ID NO: 162383 - DNA, 25 bp, Saccharomyces pastorianus
gtacagcggaatctggcccagaatc

SEQ ID NO: 162384 - DNA, 25 bp, Saccharomyces pastorianus
ggtcggaagtctcactggacacgat

SEQ ID NO: 162385 - DNA, 25 bp, Saccharomyces pastorianus
ggcttaaacaagtctagaacacggt

SEQ ID NO: 162386 - DNA, 25 bp, Saccharomyces pastorianus
gtttctggttgtatggaaccttcct

SEQ ID NO: 162387 - DNA, 25 bp, Saccharomyces pastorianus
tagagactcggtgctaatcgagaaa

SEQ ID NO: 162388 - DNA, 25 bp, Saccharomyces pastorianus
gatatcttcccgtttatcaccagaa

SEQ ID NO: 162389 - DNA, 25 bp, Saccharomyces pastorianus
gaaagctttaagtctcttacagagt

SEQ ID NO: 162390 - DNA, 25 bp, Saccharomyces pastorianus
catgagacagatatcttcccgttta

SEQ ID NO: 162391 - DNA, 25 bp, Saccharomyces pastorianus
attatttacgtcagtttcttcaaga

SEQ ID NO: 162392 - DNA, 25 bp, Saccharomyces pastorianus
tatgagttagcttacacagtgttac

SEQ ID NO: 162393 - DNA, 25 bp, Saccharomyces pastorianus
cgtgtccgtgatatccttatgtttt

SEQ ID NO: 162394 - DNA, 25 bp, Saccharomyces pastorianus
tagagcaaactttatcatgagacag

SEQ ID NO: 162395 - DNA, 25 bp, Saccharomyces pastorianus
tacagagtttatgttctgactcaaa

SEQ ID NO: 162396 - DNA, 25 bp, Saccharomyces pastorianus
gttacaaacttacgcgaactacgag

SEQ ID NO: 162397 - DNA, 25 bp, Saccharomyces pastorianus
aacttcaccggagatgtcgtcgtta

SEQ ID NO: 162398 - DNA, 25 bp, Saccharomyces pastorianus
ttctccaaatgtgtttatccccttc

SEQ ID NO: 162399 - DNA, 25 bp, Saccharomyces pastorianus
aggttatattatccatttctccaaa

SEQ ID NO: 162400 - DNA, 25 bp, Saccharomyces pastorianus
ggtgggttatccaaacctctgagta

SEQ ID NO: 162401 - DNA, 25 bp, Saccharomyces pastorianus
agaacagttacacacacccttatgg

SEQ ID NO: 162402 - DNA, 25 bp, Saccharomyces pastorianus
ttatggactcactactccacgaagt

SEQ ID NO: 162403 - DNA, 25 bp, Saccharomyces pastorianus
aaaggccgatggtgcacttattgct

SEQ ID NO: 162404 - DNA, 25 bp, Saccharomyces pastorianus
aagatatcaacctcaatttcccaga

SEQ ID NO: 162405 - DNA, 25 bp, Saccharomyces pastorianus
tccacgaagtcgaccgcatttcaaa

SEQ ID NO: 162406 - DNA, 25 bp, Saccharomyces pastorianus
acgttcttgggcgattctcataaag

SEQ ID NO: 162407 - DNA, 25 bp, Saccharomyces pastorianus
gattcggatccgcatattactgaaa

SEQ ID NO: 162408 - DNA, 25 bp, Saccharomyces pastorianus
gaggttattaccgttcttgtgaaca

SEQ ID NO: 162409 - DNA, 25 bp, Saccharomyces pastorianus
gcttatcacgctattacacaacaaa

SEQ ID NO: 162410 - DNA, 25 bp, Saccharomyces pastorianus
acctatcagtctcaatttcaccgta

SEQ ID NO: 162411 - DNA, 25 bp, Saccharomyces pastorianus
gcatttgtaactaaaccactcctca

SEQ ID NO: 162412 - DNA, 25 bp, Saccharomyces pastorianus
atttcaccgtaagacgcttcaagcc

SEQ ID NO: 162413 - DNA, 25 bp, Saccharomyces pastorianus
aattggttcacctctcacctatcag

SEQ ID NO: 162414 - DNA, 25 bp, Saccharomyces pastorianus
taagacgcttcaagccattcacgtg

SEQ ID NO: 162415 - DNA, 25 bp, Saccharomyces pastorianus
taaaccactcctcactcaattggtt

SEQ ID NO: 162416 - DNA, 25 bp, Saccharomyces pastorianus
aagccattcacgtgcttatcacgct

SEQ ID NO: 162417 - DNA, 25 bp, Saccharomyces pastorianus
gcttcttcttctgcatttgtaacta

SEQ ID NO: 162418 - DNA, 25 bp, Saccharomyces pastorianus
cgtatctcttttagcttcttcttct

SEQ ID NO: 162419 - DNA, 25 bp, Saccharomyces pastorianus
atgggcgtatctcttttagcttctt

SEQ ID NO: 162420 - DNA, 25 bp, Saccharomyces pastorianus
ggttgagatcctacttacttcctaa

SEQ ID NO: 162421 - DNA, 25 bp, Saccharomyces pastorianus
tctgcaggtttctaacaaccggttg

SEQ ID NO: 162422 - DNA, 25 bp, Saccharomyces pastorianus
attcagtcagaacataccacgccat

SEQ ID NO: 162423 - DNA, 25 bp, Saccharomyces pastorianus
atgtcacccagctagatgtctattc

SEQ ID NO: 162424 - DNA, 25 bp, Saccharomyces pastorianus
gcgcaattgattcacgagccatgtt

SEQ ID NO: 162425 - DNA, 25 bp, Saccharomyces pastorianus
gaacaatcacggcacagcgaacatt

SEQ ID NO: 162426 - DNA, 25 bp, Saccharomyces pastorianus
gaaactgctttgaaagactcccgga

SEQ ID NO: 162427 - DNA, 25 bp, Saccharomyces pastorianus
gactcccggaatgttaactcatgta

SEQ ID NO: 162428 - DNA, 25 bp, Saccharomyces pastorianus
aaaaggctaagctcgttgctaacat

SEQ ID NO: 162429 - DNA, 25 bp, Saccharomyces pastorianus
tgccctcagcggattatttgcgcaa

SEQ ID NO: 162430 - DNA, 25 bp, Saccharomyces pastorianus
tattcagaagacctatctgccctca

SEQ ID NO: 162431 - DNA, 25 bp, Saccharomyces pastorianus
tttgaatcaagtcacctgttactgt

SEQ ID NO: 162432 - DNA, 25 bp, Saccharomyces pastorianus
aaggaagtcttagcaacacctccag

SEQ ID NO: 162433 - DNA, 25 bp, Saccharomyces pastorianus
aagtcggcaaatcctcttccacatg

SEQ ID NO: 162434 - DNA, 25 bp, Saccharomyces pastorianus
cagtcgtttctttggcattgttgtc

SEQ ID NO: 162435 - DNA, 25 bp, Saccharomyces pastorianus
gtcacctgttactgtgaacacgaaa

SEQ ID NO: 162436 - DNA, 25 bp, Saccharomyces pastorianus
aacacctccagcttgtttattggcc

SEQ ID NO: 162437 - DNA, 25 bp, Saccharomyces pastorianus
cttccacatgtgactctttgaatca

SEQ ID NO: 162438 - DNA, 25 bp, Saccharomyces pastorianus
aactccgccgtcaagaaatgtctag

SEQ ID NO: 162439 - DNA, 25 bp, Saccharomyces pastorianus
tattatcttcagtcgtttctttggc

SEQ ID NO: 162440 - DNA, 25 bp, Saccharomyces pastorianus
tttattggcctgtgttgcgcaagtc

SEQ ID NO: 162441 - DNA, 25 bp, Saccharomyces pastorianus
aaatgtctagactccatctgcccaa

SEQ ID NO: 162442 - DNA, 25 bp, Saccharomyces pastorianus
gaacctagagtttctcaaacggagg

SEQ ID NO: 162443 - DNA, 25 bp, Saccharomyces pastorianus
tcggaagccacttttgcttacagtg

SEQ ID NO: 162444 - DNA, 25 bp, Saccharomyces pastorianus
gaagacgagcatgctgccgataaaa

SEQ ID NO: 162445 - DNA, 25 bp, Saccharomyces pastorianus
gttccataattattcctcgcagcag

SEQ ID NO: 162446 - DNA, 25 bp, Saccharomyces pastorianus
atatggagactcacatgcgatcgac

SEQ ID NO: 162447 - DNA, 25 bp, Saccharomyces pastorianus
gaacgatgacttctcggaagccact

SEQ ID NO: 162448 - DNA, 25 bp, Saccharomyces pastorianus
ctcgcagcagcctttatactgtcaa

SEQ ID NO: 162449 - DNA, 25 bp, Saccharomyces pastorianus
tactcgagttgcagtaccagtacga

SEQ ID NO: 162450 - DNA, 25 bp, Saccharomyces pastorianus
agaacctttatgatcgactcttggg

SEQ ID NO: 162451 - DNA, 25 bp, Saccharomyces pastorianus
gataggtctatcttgttccataatt

SEQ ID NO: 162452 - DNA, 25 bp, Saccharomyces pastorianus
agtggtgtagtacccttgacaatga

SEQ ID NO: 162453 - DNA, 25 bp, Saccharomyces pastorianus
ccacaactgcttgatgctgctcaaa

SEQ ID NO: 162454 - DNA, 25 bp, Saccharomyces pastorianus
ggttcaaccaagtgtattgccagta

SEQ ID NO: 162455 - DNA, 25 bp, Saccharomyces pastorianus
ttgcccttcccacagattgatgaaa

SEQ ID NO: 162456 - DNA, 25 bp, Saccharomyces pastorianus
atgttctattgactcattcccttta

SEQ ID NO: 162457 - DNA, 25 bp, Saccharomyces pastorianus
attatcccaacttacgttctttgca

SEQ ID NO: 162458 - DNA, 25 bp, Saccharomyces pastorianus
gttctttgcagagtgccacagagtc

SEQ ID NO: 162459 - DNA, 25 bp, Saccharomyces pastorianus
atactgtcgatggaaaccgtctttc

SEQ ID NO: 162460 - DNA, 25 bp, Saccharomyces pastorianus
gccgatggactatgtgctaccttaa

SEQ ID NO: 162461 - DNA, 25 bp, Saccharomyces pastorianus
gacgatttaccgagtgccttaggca

SEQ ID NO: 162462 - DNA, 25 bp, Saccharomyces pastorianus
gcagcgttccgcaaatggatcttat

SEQ ID NO: 162463 - DNA, 25 bp, Saccharomyces pastorianus
tgactcaatcaactcctgtaaggaa

SEQ ID NO: 162464 - DNA, 25 bp, Saccharomyces pastorianus
atgaactttccagacaccctagttt

SEQ ID NO: 162465 - DNA, 25 bp, Saccharomyces pastorianus
gacaccctagtttgcgaaaggcctt

SEQ ID NO: 162466 - DNA, 25 bp, Saccharomyces pastorianus
gaaaggccttttttcagaggcgact

SEQ ID NO: 162467 - DNA, 25 bp, Saccharomyces pastorianus
gagattcaaatcactgcgcgttttc

SEQ ID NO: 162468 - DNA, 25 bp, Saccharomyces pastorianus
aaatccacctgtatttacctgctat

SEQ ID NO: 162469 - DNA, 25 bp, Saccharomyces pastorianus
gctatgtgagccactcaggtacagt

SEQ ID NO: 162470 - DNA, 25 bp, Saccharomyces pastorianus
aaatcactgcgcgttttctaaatcc

SEQ ID NO: 162471 - DNA, 25 bp, Saccharomyces pastorianus
ttttcagaggcgacttgcgagattc

SEQ ID NO: 162472 - DNA, 25 bp, Saccharomyces pastorianus
gaggcgacttgcgagattcaaatca

SEQ ID NO: 162473 - DNA, 25 bp, Saccharomyces pastorianus
atttacctgctatgtgagccactca

SEQ ID NO: 162474 - DNA, 25 bp, Saccharomyces pastorianus
tgcgcgttttctaaatccacctgta

SEQ ID NO: 162475 - DNA, 25 bp, Saccharomyces pastorianus
gtttctctacatccgtgcattatta

SEQ ID NO: 162476 - DNA, 25 bp, Saccharomyces pastorianus
tattatcctcgtttctgtttctcta

SEQ ID NO: 162477 - DNA, 25 bp, Saccharomyces pastorianus
accgattttattatcctcgtttctg

SEQ ID NO: 162478 - DNA, 25 bp, Saccharomyces pastorianus
acatccgtgcattattacatagtat

SEQ ID NO: 162479 - DNA, 25 bp, Saccharomyces pastorianus
ttctgtttctctacatccgtgcatt

SEQ ID NO: 162480 - DNA, 25 bp, Saccharomyces pastorianus
ctcgtttctgtttctctacatccgt

SEQ ID NO: 162481 - DNA, 25 bp, Saccharomyces pastorianus
attacatagtatacatccgtacatc

SEQ ID NO: 162482 - DNA, 25 bp, Saccharomyces pastorianus
tttattatcctcgtttctgtttctc

SEQ ID NO: 162483 - DNA, 25 bp, Saccharomyces pastorianus
tatcctcgtttctgtttctctacat

SEQ ID NO: 162484 - DNA, 25 bp, Saccharomyces pastorianus
gattttattatcctcgtttctgttt

SEQ ID NO: 162485 - DNA, 25 bp, Saccharomyces pastorianus
ctctacatccgtgcattattacata

SEQ ID NO: 162486 - DNA, 25 bp, Saccharomyces pastorianus
gtaaaaatgccaaacaggtctgaag

SEQ ID NO: 162487 - DNA, 25 bp, Saccharomyces pastorianus
aaaaatgccaaacaggtctgaagaa

SEQ ID NO: 162488 - DNA, 25 bp, Saccharomyces pastorianus
aatcgtaaaaatgccaaacaggtct

SEQ ID NO: 162489 - DNA, 25 bp, Saccharomyces pastorianus
aactggataatcgtaaaaatgccaa

SEQ ID NO: 162490 - DNA, 25 bp, Saccharomyces pastorianus
ggataatcgtaaaaatgccaaacag

SEQ ID NO: 162491 - DNA, 25 bp, Saccharomyces pastorianus
cgtaaaaatgccaaacaggtctgaa

SEQ ID NO: 162492 - DNA, 25 bp, Saccharomyces pastorianus
gataatcgtaaaaatgccaaacagg

SEQ ID NO: 162493 - DNA, 25 bp, Saccharomyces pastorianus
ataatcgtaaaaatgccaaacaggt

SEQ ID NO: 162494 - DNA, 25 bp, Saccharomyces pastorianus
taaaaatgccaaacaggtctgaaga

SEQ ID NO: 162495 - DNA, 25 bp, Saccharomyces pastorianus
tcgtaaaaatgccaaacaggtctga

SEQ ID NO: 162496 - DNA, 25 bp, Saccharomyces pastorianus
taatcgtaaaaatgccaaacaggtc

SEQ ID NO: 162497 - DNA, 25 bp, Saccharomyces pastorianus
aattggccaacttgcgactttttga

SEQ ID NO: 162498 - DNA, 25 bp, Saccharomyces pastorianus
gttccaacacctcctagactggaaa

SEQ ID NO: 162499 - DNA, 25 bp, Saccharomyces pastorianus
cgtcaagttacgcaagcctttcatt

SEQ ID NO: 162500 - DNA, 25 bp, Saccharomyces pastorianus
gcatggcgtagaagttaaacccgtt

SEQ ID NO: 162501 - DNA, 25 bp, Saccharomyces pastorianus
gtattagaagcctacaacgttccaa

SEQ ID NO: 162502 - DNA, 25 bp, Saccharomyces pastorianus
aatcagtagagatggtggtccccgt

SEQ ID NO: 162503 - DNA, 25 bp, Saccharomyces pastorianus
tggtccccgtgccaacgaagaatta

SEQ ID NO: 162504 - DNA, 25 bp, Saccharomyces pastorianus
gggaaaaccatgactaagccctttg

SEQ ID NO: 162505 - DNA, 25 bp, Saccharomyces pastorianus
gccctttgttgaaaagcccgttgat

SEQ ID NO: 162506 - DNA, 25 bp, Saccharomyces pastorianus
tcttttcttcaggatttcccctaga

SEQ ID NO: 162507 - DNA, 25 bp, Saccharomyces pastorianus
gaggcggtcgtcgtctattccgtaa

SEQ ID NO: 162508 - DNA, 25 bp, Saccharomyces pastorianus
taaaaaaagcgcgtctggaaaacag

SEQ ID NO: 162509 - DNA, 25 bp, Saccharomyces pastorianus
ttgatcctaaaaaaagcgcgtctgg

SEQ ID NO: 162510 - DNA, 25 bp, Saccharomyces pastorianus
cgttgatcctaaaaaaagcgcgtct

SEQ ID NO: 162511 - DNA, 25 bp, Saccharomyces pastorianus
tgatcctaaaaaaagcgcgtctgga

SEQ ID NO: 162512 - DNA, 25 bp, Saccharomyces pastorianus
gttgatcctaaaaaaagcgcgtctg

SEQ ID NO: 162513 - DNA, 25 bp, Saccharomyces pastorianus
gatcctaaaaaaagcgcgtctggaa

SEQ ID NO: 162514 - DNA, 25 bp, Saccharomyces pastorianus
tcgttgatcctaaaaaaagcgcgtc

SEQ ID NO: 162515 - DNA, 25 bp, Saccharomyces pastorianus
ttcgttgatcctaaaaaaagcgcgt

SEQ ID NO: 162516 - DNA, 25 bp, Saccharomyces pastorianus
gatcagtccgtaggtctttaccatg

SEQ ID NO: 162517 - DNA, 25 bp, Saccharomyces pastorianus
gtccgtaggtctttaccatggcaaa

SEQ ID NO: 162518 - DNA, 25 bp, Saccharomyces pastorianus
ggaaactacttcatcgggccaacct

SEQ ID NO: 162519 - DNA, 25 bp, Saccharomyces pastorianus
tcgggccaacctcttcttcgaaaag

SEQ ID NO: 162520 - DNA, 25 bp, Saccharomyces pastorianus
atcgatcagtccgtaggtctttacc

SEQ ID NO: 162521 - DNA, 25 bp, Saccharomyces pastorianus
ggcattatgtggaaactacttcatc

SEQ ID NO: 162522 - DNA, 25 bp, Saccharomyces pastorianus
ctttatcgatcagtccgtaggtctt

SEQ ID NO: 162523 - DNA, 25 bp, Saccharomyces pastorianus
tgtggaaactacttcatcgggccaa

SEQ ID NO: 162524 - DNA, 25 bp, Saccharomyces pastorianus
aggtctttaccatggcaaatctaag

SEQ ID NO: 162525 - DNA, 25 bp, Saccharomyces pastorianus
gccaacctcttcttcgaaaaggtga

SEQ ID NO: 162526 - DNA, 25 bp, Saccharomyces pastorianus
gatatctttatcgatcagtccgtag

SEQ ID NO: 162527 - DNA, 25 bp, Saccharomyces pastorianus
gaaacaagagctcgcattcaggcat

SEQ ID NO: 162528 - DNA, 25 bp, Saccharomyces pastorianus
tatgagctcaccaagtcgtctataa

SEQ ID NO: 162529 - DNA, 25 bp, Saccharomyces pastorianus
gaattcgtgcaattgagtttccgca

SEQ ID NO: 162530 - DNA, 25 bp, Saccharomyces pastorianus
attgttctaatgcaatcgacccgaa

SEQ ID NO: 162531 - DNA, 25 bp, Saccharomyces pastorianus
attgcgagatttgcggccacagatt

SEQ ID NO: 162532 - DNA, 25 bp, Saccharomyces pastorianus
tgaactctgagaacatttgccccgc

SEQ ID NO: 162533 - DNA, 25 bp, Saccharomyces pastorianus
cctgtacttttgctaatcatcctca

SEQ ID NO: 162534 - DNA, 25 bp, Saccharomyces pastorianus
gccaacccacggaatcagttcggag

SEQ ID NO: 162535 - DNA, 25 bp, Saccharomyces pastorianus
tcaggcattatcagtcctcagtcct

SEQ ID NO: 162536 - DNA, 25 bp, Saccharomyces pastorianus
tatcaattgcggtgtgccagcggac

SEQ ID NO: 162537 - DNA, 25 bp, Saccharomyces pastorianus
taaagatactctacctacacccatt

SEQ ID NO: 162538 - DNA, 25 bp, Saccharomyces pastorianus
tattagcctgatgcctgtcatggat

SEQ ID NO: 162539 - DNA, 25 bp, Saccharomyces pastorianus
tttatccacacatagccagggtgca

SEQ ID NO: 162540 - DNA, 25 bp, Saccharomyces pastorianus
gtaggctttctaccaatggactata

SEQ ID NO: 162541 - DNA, 25 bp, Saccharomyces pastorianus
acaagttccggtgctgttgaaaaag

SEQ ID NO: 162542 - DNA, 25 bp, Saccharomyces pastorianus
aagtcactcacacagctaggtcaat

SEQ ID NO: 162543 - DNA, 25 bp, Saccharomyces pastorianus
ggctgtacggacatttctgttttac

SEQ ID NO: 162544 - DNA, 25 bp, Saccharomyces pastorianus
gccagggtgcaactaccagatgtaa

SEQ ID NO: 162545 - DNA, 25 bp, Saccharomyces pastorianus
taagggccattctcacgggtgcgtt

SEQ ID NO: 162546 - DNA, 25 bp, Saccharomyces pastorianus
acggcattctgtttggctgtacgga

SEQ ID NO: 162547 - DNA, 25 bp, Saccharomyces pastorianus
gttttacttgtctcgatactcggta

SEQ ID NO: 162548 - DNA, 25 bp, Saccharomyces pastorianus
gtattggagttttgcctttcatcgg

SEQ ID NO: 162549 - DNA, 25 bp, Saccharomyces pastorianus
aatctcggctattgggcttgctgaa

SEQ ID NO: 162550 - DNA, 25 bp, Saccharomyces pastorianus
gaacgtgtttctgatgaacgctgtg

SEQ ID NO: 162551 - DNA, 25 bp, Saccharomyces pastorianus
tccccatcactgattacttcttgga

SEQ ID NO: 162552 - DNA, 25 bp, Saccharomyces pastorianus
acacgtatcaagttcatgaccacag

SEQ ID NO: 162553 - DNA, 25 bp, Saccharomyces pastorianus
gaacgttctattgatactgacttga

SEQ ID NO: 162554 - DNA, 25 bp, Saccharomyces pastorianus
aaaaccaaagcttccacacgtatca

SEQ ID NO: 162555 - DNA, 25 bp, Saccharomyces pastorianus
atcgtatgtacgcaacccagaagaa

SEQ ID NO: 162556 - DNA, 25 bp, Saccharomyces pastorianus
gacattcttagtgaccttgacttca

SEQ ID NO: 162557 - DNA, 25 bp, Saccharomyces pastorianus
gacttgttcaaaacattctttccgg

SEQ ID NO: 162558 - DNA, 25 bp, Saccharomyces pastorianus
ctcttacatagagttcgcggcatga

SEQ ID NO: 162559 - DNA, 25 bp, Saccharomyces pastorianus
atagaaggacgcactttccccatca

SEQ ID NO: 162560 - DNA, 25 bp, Saccharomyces pastorianus
gcacgaactattttatctagccatg

SEQ ID NO: 162561 - DNA, 25 bp, Saccharomyces pastorianus
atctagccatggtggaattcttctt

SEQ ID NO: 162562 - DNA, 25 bp, Saccharomyces pastorianus
atacaacaccaacctgcacatgatg

SEQ ID NO: 162563 - DNA, 25 bp, Saccharomyces pastorianus
gaaaaacatggtatgccctcgacga

SEQ ID NO: 162564 - DNA, 25 bp, Saccharomyces pastorianus
gtatgccctcgacgattttcgaaaa

SEQ ID NO: 162565 - DNA, 25 bp, Saccharomyces pastorianus
aattgcctcatacagtcttacacga

SEQ ID NO: 162566 - DNA, 25 bp, Saccharomyces pastorianus
gcagttttgtcattcactgacccaa

SEQ ID NO: 162567 - DNA, 25 bp, Saccharomyces pastorianus
gaacgatccaacctatgacaaagct

SEQ ID NO: 162568 - DNA, 25 bp, Saccharomyces pastorianus
aactatttgatcttgatcccttcaa

SEQ ID NO: 162569 - DNA, 25 bp, Saccharomyces pastorianus
tgatgcttccgccaaaccatagaaa

SEQ ID NO: 162570 - DNA, 25 bp, Saccharomyces pastorianus
attgaagctagacacatggcctcca

SEQ ID NO: 162571 - DNA, 25 bp, Saccharomyces pastorianus
tttttaccatgctttttcccagaga

SEQ ID NO: 162572 - DNA, 25 bp, Saccharomyces pastorianus
aagcacgtttaatgaggcctcgaag

SEQ ID NO: 162573 - DNA, 25 bp, Saccharomyces pastorianus
ttccatgcaactacataccggttga

SEQ ID NO: 162574 - DNA, 25 bp, Saccharomyces pastorianus
gtgtaagtccttcgtccatttaaga

SEQ ID NO: 162575 - DNA, 25 bp, Saccharomyces pastorianus
ggcctcgaagagtttttaccatgct

SEQ ID NO: 162576 - DNA, 25 bp, Saccharomyces pastorianus
ggaagatcgtctctaatattgctta

SEQ ID NO: 162577 - DNA, 25 bp, Saccharomyces pastorianus
aagtggcttggcgtatcagcgttat

SEQ ID NO: 162578 - DNA, 25 bp, Saccharomyces pastorianus
aaataattcaccttctccatcaaag

SEQ ID NO: 162579 - DNA, 25 bp, Saccharomyces pastorianus
attgcatcaagcagatttccatcat

SEQ ID NO: 162580 - DNA, 25 bp, Saccharomyces pastorianus
tttccatcatatcaatctttcagcg

SEQ ID NO: 162581 - DNA, 25 bp, Saccharomyces pastorianus
gaagttcttctagagcttgccatca

SEQ ID NO: 162582 - DNA, 25 bp, Saccharomyces pastorianus
ggccaacgtgttacatttactctat

SEQ ID NO: 162583 - DNA, 25 bp, Saccharomyces pastorianus
gagtctatggagcagtcgacatcta

SEQ ID NO: 162584 - DNA, 25 bp, Saccharomyces pastorianus
atcacagtgtcgctttatgggaggt

SEQ ID NO: 162585 - DNA, 25 bp, Saccharomyces pastorianus
tccagaaccttacagcccttgagaa

SEQ ID NO: 162586 - DNA, 25 bp, Saccharomyces pastorianus
gtaggcctaacaacatccgaactgt

SEQ ID NO: 162587 - DNA, 25 bp, Saccharomyces pastorianus
gaacattgtacatgtcacgactgga

SEQ ID NO: 162588 - DNA, 25 bp, Saccharomyces pastorianus
actcataatctctttcgggttggcg

SEQ ID NO: 162589 - DNA, 25 bp, Saccharomyces pastorianus
tactctgctgatattacgacgggtt

SEQ ID NO: 162590 - DNA, 25 bp, Saccharomyces pastorianus
gaaagttctgcatacacgacctaca

SEQ ID NO: 162591 - DNA, 25 bp, Saccharomyces pastorianus
gtgcgattcaacatataccatggtg

SEQ ID NO: 162592 - DNA, 25 bp, Saccharomyces pastorianus
tgttcctcagtacatcacagtgtcg

SEQ ID NO: 162593 - DNA, 25 bp, Saccharomyces pastorianus
gaattcaaaactgtaatgctgacga

SEQ ID NO: 162594 - DNA, 25 bp, Saccharomyces pastorianus
actgtcgttgcttgaccggaatctt

SEQ ID NO: 162595 - DNA, 25 bp, Saccharomyces pastorianus
tttgcatactttcttcactgtcgtt

SEQ ID NO: 162596 - DNA, 25 bp, Saccharomyces pastorianus
ggcttgataaccctttgcatacttt

SEQ ID NO: 162597 - DNA, 25 bp, Saccharomyces pastorianus
gcaattcgaattcctctctagtagc

SEQ ID NO: 162598 - DNA, 25 bp, Saccharomyces pastorianus
ttcctctctagtagcaaatggttcg

SEQ ID NO: 162599 - DNA, 25 bp, Saccharomyces pastorianus
gataaccctttgcatactttcttca

SEQ ID NO: 162600 - DNA, 25 bp, Saccharomyces pastorianus
gaccggaatcttatgtcctgcaatt

SEQ ID NO: 162601 - DNA, 25 bp, Saccharomyces pastorianus
atactttcttcactgtcgttgcttg

SEQ ID NO: 162602 - DNA, 25 bp, Saccharomyces pastorianus
aatgctgacgaaggcttgataaccc

SEQ ID NO: 162603 - DNA, 25 bp, Saccharomyces pastorianus
tatgtcctgcaattcgaattcctct

SEQ ID NO: 162604 - DNA, 25 bp, Saccharomyces pastorianus
taaagttcgacttgcggcattctcg

SEQ ID NO: 162605 - DNA, 25 bp, Saccharomyces pastorianus
taagcttttctgctctttcaaactc

SEQ ID NO: 162606 - DNA, 25 bp, Saccharomyces pastorianus
gctgcttaccttactcttttttata

SEQ ID NO: 162607 - DNA, 25 bp, Saccharomyces pastorianus
tgaagaaacccgcttccttattaag

SEQ ID NO: 162608 - DNA, 25 bp, Saccharomyces pastorianus
atttacagtgttgaccataccaggt

SEQ ID NO: 162609 - DNA, 25 bp, Saccharomyces pastorianus
tgccttcccttgatgacgttattta

SEQ ID NO: 162610 - DNA, 25 bp, Saccharomyces pastorianus
ggtcattggactaccatttatcgta

SEQ ID NO: 162611 - DNA, 25 bp, Saccharomyces pastorianus
ttgtttatcatcctagctgcttacc

SEQ ID NO: 162612 - DNA, 25 bp, Saccharomyces pastorianus
gcggcattctcgctacaaaaattcc

SEQ ID NO: 162613 - DNA, 25 bp, Saccharomyces pastorianus
ggacaattcaacgactttgccttcc

SEQ ID NO: 162614 - DNA, 25 bp, Saccharomyces pastorianus
ggacctgcataatatttaccgaaat

SEQ ID NO: 162615 - DNA, 25 bp, Saccharomyces pastorianus
tctgtttgtaccgtacacagtgttg

SEQ ID NO: 162616 - DNA, 25 bp, Saccharomyces pastorianus
tgtcgtttctgtttgtaccgtacac

SEQ ID NO: 162617 - DNA, 25 bp, Saccharomyces pastorianus
aatatgtgtcgtttctgtttgtacc

SEQ ID NO: 162618 - DNA, 25 bp, Saccharomyces pastorianus
gtgtcgtttctgtttgtaccgtaca

SEQ ID NO: 162619 - DNA, 25 bp, Saccharomyces pastorianus
gtcgtttctgtttgtaccgtacaca

SEQ ID NO: 162620 - DNA, 25 bp, Saccharomyces pastorianus
atgtgtcgtttctgtttgtaccgta

SEQ ID NO: 162621 - DNA, 25 bp, Saccharomyces pastorianus
tcgtttctgtttgtaccgtacacag

SEQ ID NO: 162622 - DNA, 25 bp, Saccharomyces pastorianus
tgtgtcgtttctgtttgtaccgtac

SEQ ID NO: 162623 - DNA, 25 bp, Saccharomyces pastorianus
tatgtgtcgtttctgtttgtaccgt

SEQ ID NO: 162624 - DNA, 25 bp, Saccharomyces pastorianus
atatgtgtcgtttctgtttgtaccg

SEQ ID NO: 162625 - DNA, 25 bp, Saccharomyces pastorianus
gtttctgtttgtaccgtacacagtg

SEQ ID NO: 162626 - DNA, 25 bp, Saccharomyces pastorianus
ggattcttttcatgttggtacaagg

SEQ ID NO: 162627 - DNA, 25 bp, Saccharomyces pastorianus
tatctcgggtggattcttttcatgt

SEQ ID NO: 162628 - DNA, 25 bp, Saccharomyces pastorianus
attccttaattttttgtgctgcata

SEQ ID NO: 162629 - DNA, 25 bp, Saccharomyces pastorianus
gggaatgtgccttctattacgcacc

SEQ ID NO: 162630 - DNA, 25 bp, Saccharomyces pastorianus
aagaggatttccaatatttttatgt

SEQ ID NO: 162631 - DNA, 25 bp, Saccharomyces pastorianus
atttttatgttgataccattcctta

SEQ ID NO: 162632 - DNA, 25 bp, Saccharomyces pastorianus
gataccattccttaattttttgtgc

SEQ ID NO: 162633 - DNA, 25 bp, Saccharomyces pastorianus
cgggtggattcttttcatgttggta

SEQ ID NO: 162634 - DNA, 25 bp, Saccharomyces pastorianus
gaatgtgccttctattacgcacctt

SEQ ID NO: 162635 - DNA, 25 bp, Saccharomyces pastorianus
ttgtgctgcatatatgtgtcacggg

SEQ ID NO: 162636 - DNA, 25 bp, Saccharomyces pastorianus
gtggattcttttcatgttggtacaa

SEQ ID NO: 162637 - DNA, 25 bp, Saccharomyces pastorianus
gtgatcataatcaggacacgcgtca

SEQ ID NO: 162638 - DNA, 25 bp, Saccharomyces pastorianus
atgctcactagcgtatcggtattca

SEQ ID NO: 162639 - DNA, 25 bp, Saccharomyces pastorianus
aatgctaacggaagccacggcgaac

SEQ ID NO: 162640 - DNA, 25 bp, Saccharomyces pastorianus
gggactctcaaactgggccaataca

SEQ ID NO: 162641 - DNA, 25 bp, Saccharomyces pastorianus
tgggtgatttcaataccgaacctga

SEQ ID NO: 162642 - DNA, 25 bp, Saccharomyces pastorianus
ggcgaaggccattcagatcaaccac

SEQ ID NO: 162643 - DNA, 25 bp, Saccharomyces pastorianus
ttggctacggtaaagtgcatcctga

SEQ ID NO: 162644 - DNA, 25 bp, Saccharomyces pastorianus
gttgcgttgcataattcactacatg

SEQ ID NO: 162645 - DNA, 25 bp, Saccharomyces pastorianus
gaaagagcctctgaatgcctttgaa

SEQ ID NO: 162646 - DNA, 25 bp, Saccharomyces pastorianus
atatctgaggatgccgtgtgcacaa

SEQ ID NO: 162647 - DNA, 25 bp, Saccharomyces pastorianus
agaaccaccttacttggccataacg

SEQ ID NO: 162648 - DNA, 25 bp, Saccharomyces pastorianus
aaacgaagtgctactcatggacata

SEQ ID NO: 162649 - DNA, 25 bp, Saccharomyces pastorianus
gagactctatcacatcatcgtcgac

SEQ ID NO: 162650 - DNA, 25 bp, Saccharomyces pastorianus
atggactctcttgaagctagattac

SEQ ID NO: 162651 - DNA, 25 bp, Saccharomyces pastorianus
acttggtttttgagctttgtctgcc

SEQ ID NO: 162652 - DNA, 25 bp, Saccharomyces pastorianus
tgtctgccctgccaggactggaaat

SEQ ID NO: 162653 - DNA, 25 bp, Saccharomyces pastorianus
tagattacaattcattcaggtcctg

SEQ ID NO: 162654 - DNA, 25 bp, Saccharomyces pastorianus
attacgaggacttccaccagtgttt

SEQ ID NO: 162655 - DNA, 25 bp, Saccharomyces pastorianus
ctcacgaatcaagccacctgtaaag

SEQ ID NO: 162656 - DNA, 25 bp, Saccharomyces pastorianus
gacgctgcacaagaccagagactct

SEQ ID NO: 162657 - DNA, 25 bp, Saccharomyces pastorianus
agagctattccttgacttatccaaa

SEQ ID NO: 162658 - DNA, 25 bp, Saccharomyces pastorianus
ttatatccgcatagccattccaatg

SEQ ID NO: 162659 - DNA, 25 bp, Saccharomyces pastorianus
acagggaactgcacaagaggtcgaa

SEQ ID NO: 162660 - DNA, 25 bp, Saccharomyces pastorianus
aaactactgattccggatttgataa

SEQ ID NO: 162661 - DNA, 25 bp, Saccharomyces pastorianus
agttggtacatcgaaaggccctcca

SEQ ID NO: 162662 - DNA, 25 bp, Saccharomyces pastorianus
gaaaggccctccaacgatatactgg

SEQ ID NO: 162663 - DNA, 25 bp, Saccharomyces pastorianus
gtcgaaagagacaagttggtacatc

SEQ ID NO: 162664 - DNA, 25 bp, Saccharomyces pastorianus
ccaacgatatactggatgaatccga

SEQ ID NO: 162665 - DNA, 25 bp, Saccharomyces pastorianus
aaagcttgtggacgcattttgaaac

SEQ ID NO: 162666 - DNA, 25 bp, Saccharomyces pastorianus
tggacgcattttgaaactactgatt

SEQ ID NO: 162667 - DNA, 25 bp, Saccharomyces pastorianus
gatgaatccgaatttaaaagcttgt

SEQ ID NO: 162668 - DNA, 25 bp, Saccharomyces pastorianus
ttccggatttgataaggacgattac

SEQ ID NO: 162669 - DNA, 25 bp, Saccharomyces pastorianus
ggacgattacaaaaatatcaaggct

SEQ ID NO: 162670 - DNA, 25 bp, Saccharomyces pastorianus
gaatccgtatttaaatgccagctta

SEQ ID NO: 162671 - DNA, 25 bp, Saccharomyces pastorianus
gagattctcatgaagctgctggccg

SEQ ID NO: 162672 - DNA, 25 bp, Saccharomyces pastorianus
cacttgtggtcgtgtagttggtcta

SEQ ID NO: 162673 - DNA, 25 bp, Saccharomyces pastorianus
ggacggaacaactcgctttaaccag

SEQ ID NO: 162674 - DNA, 25 bp, Saccharomyces pastorianus
aagactcttcgcagacacttgtggt

SEQ ID NO: 162675 - DNA, 25 bp, Saccharomyces pastorianus
gaggagccacttcatgaacctattg

SEQ ID NO: 162676 - DNA, 25 bp, Saccharomyces pastorianus
tccatgccatgctacagaatccgta

SEQ ID NO: 162677 - DNA, 25 bp, Saccharomyces pastorianus
taccgttttacaacagcttcttggg

SEQ ID NO: 162678 - DNA, 25 bp, Saccharomyces pastorianus
caaagctctgaagacggcggtgaat

SEQ ID NO: 162679 - DNA, 25 bp, Saccharomyces pastorianus
acagcttcttgggagcactattgaa

SEQ ID NO: 162680 - DNA, 25 bp, Saccharomyces pastorianus
accgattctggctatcctttttatt

SEQ ID NO: 162681 - DNA, 25 bp, Saccharomyces pastorianus
gtgtcccgagttattgttctaaagc

SEQ ID NO: 162682 - DNA, 25 bp, Saccharomyces pastorianus
tcaaaaatcgcgttcagggtaaaag

SEQ ID NO: 162683 - DNA, 25 bp, Saccharomyces pastorianus
gttattgttctaaagcgggcaccat

SEQ ID NO: 162684 - DNA, 25 bp, Saccharomyces pastorianus
aaagcgggcaccattgtagtaactt

SEQ ID NO: 162685 - DNA, 25 bp, Saccharomyces pastorianus
attgcgaaatttctgctcttctcgt

SEQ ID NO: 162686 - DNA, 25 bp, Saccharomyces pastorianus
gcgggcaccattgtagtaacttatt

SEQ ID NO: 162687 - DNA, 25 bp, Saccharomyces pastorianus
tgctcttctcgtctcgctcaaaaat

SEQ ID NO: 162688 - DNA, 25 bp, Saccharomyces pastorianus
ttctcgtctcgctcaaaaatcgcgt

SEQ ID NO: 162689 - DNA, 25 bp, Saccharomyces pastorianus
gtaacttattgcgaaatttctgctc

SEQ ID NO: 162690 - DNA, 25 bp, Saccharomyces pastorianus
gtctcgctcaaaaatcgcgttcagg

SEQ ID NO: 162691 - DNA, 25 bp, Saccharomyces pastorianus
aaatgtgtcccgagttattgttcta

SEQ ID NO: 162692 - DNA, 25 bp, Saccharomyces pastorianus
ggctccggctattcatgaaaaatcc

SEQ ID NO: 162693 - DNA, 25 bp, Saccharomyces pastorianus
gtaaaggcgtttatatatttgtact

SEQ ID NO: 162694 - DNA, 25 bp, Saccharomyces pastorianus
tagtaagataaccttcaagcccaat

SEQ ID NO: 162695 - DNA, 25 bp, Saccharomyces pastorianus
aagacacagttcttccagctactgg

SEQ ID NO: 162696 - DNA, 25 bp, Saccharomyces pastorianus
gataaccttcaagcccaatattcta

SEQ ID NO: 162697 - DNA, 25 bp, Saccharomyces pastorianus
acacagttcttccagctactggctc

SEQ ID NO: 162698 - DNA, 25 bp, Saccharomyces pastorianus
atatttgtactttatggtatgtgca

SEQ ID NO: 162699 - DNA, 25 bp, Saccharomyces pastorianus
ttcaagcccaatattctaagtaaag

SEQ ID NO: 162700 - DNA, 25 bp, Saccharomyces pastorianus
tactggctccggctattcatgaaaa

SEQ ID NO: 162701 - DNA, 25 bp, Saccharomyces pastorianus
ttatttcaagacacagttcttccag

SEQ ID NO: 162702 - DNA, 25 bp, Saccharomyces pastorianus
ggtatgtgcatatgtattgtaaaga

SEQ ID NO: 162703 - DNA, 25 bp, Saccharomyces pastorianus
aatgtggttcctaaaactgctgaaa

SEQ ID NO: 162704 - DNA, 25 bp, Saccharomyces pastorianus
gcttattctccaattctgcttctag

SEQ ID NO: 162705 - DNA, 25 bp, Saccharomyces pastorianus
ccaattctgcttctagactaggtaa

SEQ ID NO: 162706 - DNA, 25 bp, Saccharomyces pastorianus
catcccagacttcatgatccaaggt

SEQ ID NO: 162707 - DNA, 25 bp, Saccharomyces pastorianus
atcattcaacagtcccgcttattct

SEQ ID NO: 162708 - DNA, 25 bp, Saccharomyces pastorianus
ggctataaaggtgtccctttccaca

SEQ ID NO: 162709 - DNA, 25 bp, Saccharomyces pastorianus
gatcctgcggtcaatggaaccaaaa

SEQ ID NO: 162710 - DNA, 25 bp, Saccharomyces pastorianus
atgtttaaacgttccatcattcaac

SEQ ID NO: 162711 - DNA, 25 bp, Saccharomyces pastorianus
tacggtcccaagttcgctgacgaaa

SEQ ID NO: 162712 - DNA, 25 bp, Saccharomyces pastorianus
atccatttacggtcccaagttcgct

SEQ ID NO: 162713 - DNA, 25 bp, Saccharomyces pastorianus
aaaagtgttctttgatcctgcggtc

SEQ ID NO: 162714 - DNA, 25 bp, Saccharomyces pastorianus
aactgacaacacttctagctcaagc

SEQ ID NO: 162715 - DNA, 25 bp, Saccharomyces pastorianus
aggtggtcaccttctaaaatctcta

SEQ ID NO: 162716 - DNA, 25 bp, Saccharomyces pastorianus
aactctagaggacattctcgtgcaa

SEQ ID NO: 162717 - DNA, 25 bp, Saccharomyces pastorianus
agttttgcgcgtactttagctcctc

SEQ ID NO: 162718 - DNA, 25 bp, Saccharomyces pastorianus
gagcttcactagactatgatccatc

SEQ ID NO: 162719 - DNA, 25 bp, Saccharomyces pastorianus
agctcctcatggcacttacaatggt

SEQ ID NO: 162720 - DNA, 25 bp, Saccharomyces pastorianus
atgatccatcagtacctaacacaag

SEQ ID NO: 162721 - DNA, 25 bp, Saccharomyces pastorianus
ctgttggcatagctggtactggtat

SEQ ID NO: 162722 - DNA, 25 bp, Saccharomyces pastorianus
aaagatacccctagtagcaactcta

SEQ ID NO: 162723 - DNA, 25 bp, Saccharomyces pastorianus
tggttgctgcggaaaacgttgccaa

SEQ ID NO: 162724 - DNA, 25 bp, Saccharomyces pastorianus
taacacaagttacgcgcccgttcaa

SEQ ID NO: 162725 - DNA, 25 bp, Saccharomyces pastorianus
gaggtacttctggtggtttatattc

SEQ ID NO: 162726 - DNA, 25 bp, Saccharomyces pastorianus
ggatgaacccgtcactaaggaaatt

SEQ ID NO: 162727 - DNA, 25 bp, Saccharomyces pastorianus
gaaggactcattatctcaggcggtt

SEQ ID NO: 162728 - DNA, 25 bp, Saccharomyces pastorianus
ggctaagtcactcggaattgcattg

SEQ ID NO: 162729 - DNA, 25 bp, Saccharomyces pastorianus
tgaacgcatttacgaacgcaccggg

SEQ ID NO: 162730 - DNA, 25 bp, Saccharomyces pastorianus
ttttgaaaagacttctgccccatct

SEQ ID NO: 162731 - DNA, 25 bp, Saccharomyces pastorianus
caggcggttgcccaaatttcagatt

SEQ ID NO: 162732 - DNA, 25 bp, Saccharomyces pastorianus
aggcatcaccgaaaaccttgacaag

SEQ ID NO: 162733 - DNA, 25 bp, Saccharomyces pastorianus
aaggccgtcggtacttatgactttg

SEQ ID NO: 162734 - DNA, 25 bp, Saccharomyces pastorianus
accgggctggccaattgcagatttt

SEQ ID NO: 162735 - DNA, 25 bp, Saccharomyces pastorianus
tgtcgggtttttcacacggattaat

SEQ ID NO: 162736 - DNA, 25 bp, Saccharomyces pastorianus
agtagtaactcggtattgtgctttc

SEQ ID NO: 162737 - DNA, 25 bp, Saccharomyces pastorianus
tattgtgctttcgtcgccataatca

SEQ ID NO: 162738 - DNA, 25 bp, Saccharomyces pastorianus
tttcgtacgtttctacatccgagta

SEQ ID NO: 162739 - DNA, 25 bp, Saccharomyces pastorianus
gcctttatgggcgtatatactcttt

SEQ ID NO: 162740 - DNA, 25 bp, Saccharomyces pastorianus
ttttttgcgttttgttgtcaccaca

SEQ ID NO: 162741 - DNA, 25 bp, Saccharomyces pastorianus
gaaatatgcctttatgggcgtatat

SEQ ID NO: 162742 - DNA, 25 bp, Saccharomyces pastorianus
gtttctacatccgagtagcagtagt

SEQ ID NO: 162743 - DNA, 25 bp, Saccharomyces pastorianus
tatactctttcgtacgtttctacat

SEQ ID NO: 162744 - DNA, 25 bp, Saccharomyces pastorianus
gtcgccataatcaggactatcataa

SEQ ID NO: 162745 - DNA, 25 bp, Saccharomyces pastorianus
gatttacttttaatgcatttttgca

SEQ ID NO: 162746 - DNA, 25 bp, Saccharomyces pastorianus
gcgttttgttgtcaccacatatggt

SEQ ID NO: 162747 - DNA, 25 bp, Saccharomyces pastorianus
caatgagacagtatcgcgttattta

SEQ ID NO: 162748 - DNA, 25 bp, Saccharomyces pastorianus
gagacatcaatcaccaactacatca

SEQ ID NO: 162749 - DNA, 25 bp, Saccharomyces pastorianus
gaattccttagatcaatcgccaaag

SEQ ID NO: 162750 - DNA, 25 bp, Saccharomyces pastorianus
aagactttctatttaactcattcaa

SEQ ID NO: 162751 - DNA, 25 bp, Saccharomyces pastorianus
atttgaccctatcttgtatcctgag

SEQ ID NO: 162752 - DNA, 25 bp, Saccharomyces pastorianus
tctgtaccgttctggttaacttact

SEQ ID NO: 162753 - DNA, 25 bp, Saccharomyces pastorianus
gatttggcccaacgacatattactt

SEQ ID NO: 162754 - DNA, 25 bp, Saccharomyces pastorianus
gacggagtacctttgtatgttgaaa

SEQ ID NO: 162755 - DNA, 25 bp, Saccharomyces pastorianus
tagaaatatacttgccgactacagt

SEQ ID NO: 162756 - DNA, 25 bp, Saccharomyces pastorianus
atcgtcacgtatgaatcctccatta

SEQ ID NO: 162757 - DNA, 25 bp, Saccharomyces pastorianus
gatgccaaggtgcatttacagacct

SEQ ID NO: 162758 - DNA, 25 bp, Saccharomyces pastorianus
agactgttgaggaaccatggttggc

SEQ ID NO: 162759 - DNA, 25 bp, Saccharomyces pastorianus
gccagcgaacttccgcaatgatttc

SEQ ID NO: 162760 - DNA, 25 bp, Saccharomyces pastorianus
aagacttgccagatgtggtgagact

SEQ ID NO: 162761 - DNA, 25 bp, Saccharomyces pastorianus
ggacctagaccgttgttatttacag

SEQ ID NO: 162762 - DNA, 25 bp, Saccharomyces pastorianus
caaacgtctacacccatggctgaga

SEQ ID NO: 162763 - DNA, 25 bp, Saccharomyces pastorianus
ggtccatgtttgaatcttttagtta

SEQ ID NO: 162764 - DNA, 25 bp, Saccharomyces pastorianus
aaccagcattgagccgatatttcga

SEQ ID NO: 162765 - DNA, 25 bp, Saccharomyces pastorianus
aaggcgaaccagaccagatgggaga

SEQ ID NO: 162766 - DNA, 25 bp, Saccharomyces pastorianus
atggctgagaccttggttcctcccg

SEQ ID NO: 162767 - DNA, 25 bp, Saccharomyces pastorianus
gggagagtccactcaaacgtctaca

SEQ ID NO: 162768 - DNA, 25 bp, Saccharomyces pastorianus
tttcacctttcgcacacagaagagg

SEQ ID NO: 162769 - DNA, 25 bp, Saccharomyces pastorianus
aaactaaacctcttcgtgcgtgatt

SEQ ID NO: 162770 - DNA, 25 bp, Saccharomyces pastorianus
tgatctctttggtggtggcagtgca

SEQ ID NO: 162771 - DNA, 25 bp, Saccharomyces pastorianus
gcagtgcagggattacatttcgaca

SEQ ID NO: 162772 - DNA, 25 bp, Saccharomyces pastorianus
aatcaggctcagtatcgtggccgtt

SEQ ID NO: 162773 - DNA, 25 bp, Saccharomyces pastorianus
gcatctacagatccagaacaggttt

SEQ ID NO: 162774 - DNA, 25 bp, Saccharomyces pastorianus
gttcgtgttgcgtttactgctccat

SEQ ID NO: 162775 - DNA, 25 bp, Saccharomyces pastorianus
gtatcgtggccgttctttaagcagg

SEQ ID NO: 162776 - DNA, 25 bp, Saccharomyces pastorianus
ggttgacaactttgatctctttggt

SEQ ID NO: 162777 - DNA, 25 bp, Saccharomyces pastorianus
gtggatattcactcagatggttctg

SEQ ID NO: 162778 - DNA, 25 bp, Saccharomyces pastorianus
aaagagggactttgcaggcgacgtt

SEQ ID NO: 162779 - DNA, 25 bp, Saccharomyces pastorianus
ccacggcattcgacgtttgttttga

SEQ ID NO: 162780 - DNA, 25 bp, Saccharomyces pastorianus
ggatttgcaactagagcccacaatt

SEQ ID NO: 162781 - DNA, 25 bp, Saccharomyces pastorianus
ggctgaccaaagttctgggaccatt

SEQ ID NO: 162782 - DNA, 25 bp, Saccharomyces pastorianus
ggtacaatgcacatgccagttactg

SEQ ID NO: 162783 - DNA, 25 bp, Saccharomyces pastorianus
agtctggaccatgatatgaccgtta

SEQ ID NO: 162784 - DNA, 25 bp, Saccharomyces pastorianus
aaatatgcggaatccagtctggacc

SEQ ID NO: 162785 - DNA, 25 bp, Saccharomyces pastorianus
gtggcagagacgtggatttcccgca

SEQ ID NO: 162786 - DNA, 25 bp, Saccharomyces pastorianus
atttcccgcaagtggccttaagaga

SEQ ID NO: 162787 - DNA, 25 bp, Saccharomyces pastorianus
ggcttttcatgacatacttggactt

SEQ ID NO: 162788 - DNA, 25 bp, Saccharomyces pastorianus
gctactgatggcaagaggcttttca

SEQ ID NO: 162789 - DNA, 25 bp, Saccharomyces pastorianus
gagaacccgaaagtacctatcgaag

SEQ ID NO: 162790 - DNA, 25 bp, Saccharomyces pastorianus
gatgatttatggtcgatgcttatta

SEQ ID NO: 162791 - DNA, 25 bp, Saccharomyces pastorianus
gatggttatctgtataagtccttca

SEQ ID NO: 162792 - DNA, 25 bp, Saccharomyces pastorianus
gggatgatcgccactttacttataa

SEQ ID NO: 162793 - DNA, 25 bp, Saccharomyces pastorianus
caagattcggttccaaagagggcgc

SEQ ID NO: 162794 - DNA, 25 bp, Saccharomyces pastorianus
tttccagccaggtgatcgtatcgaa

SEQ ID NO: 162795 - DNA, 25 bp, Saccharomyces pastorianus
gggcgcggtagatctaacatcagtt

SEQ ID NO: 162796 - DNA, 25 bp, Saccharomyces pastorianus
aagtccttcagaattcaacatgtgg

SEQ ID NO: 162797 - DNA, 25 bp, Saccharomyces pastorianus
gggtgacttagctatggtcgaccaa

SEQ ID NO: 162798 - DNA, 25 bp, Saccharomyces pastorianus
tcatagagcaccaccgcaattattt

SEQ ID NO: 162799 - DNA, 25 bp, Saccharomyces pastorianus
gctgaaaattgttcctcgtctggat

SEQ ID NO: 162800 - DNA, 25 bp, Saccharomyces pastorianus
tagaccaagctaacctgtacaaaag

SEQ ID NO: 162801 - DNA, 25 bp, Saccharomyces pastorianus
aagaccaacttttgctcatagagca

SEQ ID NO: 162802 - DNA, 25 bp, Saccharomyces pastorianus
gtggttccgcagtcaactgacacta

SEQ ID NO: 162803 - DNA, 25 bp, Saccharomyces pastorianus
catgttgctgatcccgtagtggttc

SEQ ID NO: 162804 - DNA, 25 bp, Saccharomyces pastorianus
gagcatgcaggaccatgatcaacat

SEQ ID NO: 162805 - DNA, 25 bp, Saccharomyces pastorianus
ttgctgatcccgtagtggttccgca

SEQ ID NO: 162806 - DNA, 25 bp, Saccharomyces pastorianus
gtagtggttccgcagtcaactgaca

SEQ ID NO: 162807 - DNA, 25 bp, Saccharomyces pastorianus
gatcccgtagtggttccgcagtcaa

SEQ ID NO: 162808 - DNA, 25 bp, Saccharomyces pastorianus
gcagtcaactgacactaaagatgaa

SEQ ID NO: 162809 - DNA, 25 bp, Saccharomyces pastorianus
atcaacatgttgctgatcccgtagt

SEQ ID NO: 162810 - DNA, 25 bp, Saccharomyces pastorianus
gcatgcaggaccatgatcaacatgt

SEQ ID NO: 162811 - DNA, 25 bp, Saccharomyces pastorianus
aacatgttgctgatcccgtagtggt

SEQ ID NO: 162812 - DNA, 25 bp, Saccharomyces pastorianus
ggttccgcagtcaactgacactaaa

SEQ ID NO: 162813 - DNA, 25 bp, Saccharomyces pastorianus
gtcattgtagaactcgacgctatta

SEQ ID NO: 162814 - DNA, 25 bp, Saccharomyces pastorianus
gaaaccgtggcatcaaacttcagtt

SEQ ID NO: 162815 - DNA, 25 bp, Saccharomyces pastorianus
aagagttttgactactttcccagat

SEQ ID NO: 162816 - DNA, 25 bp, Saccharomyces pastorianus
gaataggttacttcacttttagcta

SEQ ID NO: 162817 - DNA, 25 bp, Saccharomyces pastorianus
ttgcatttgaactaaacccttggag

SEQ ID NO: 162818 - DNA, 25 bp, Saccharomyces pastorianus
ttaatttaggtctcctgccttcaag

SEQ ID NO: 162819 - DNA, 25 bp, Saccharomyces pastorianus
gggaactgccacgttttccaagaat

SEQ ID NO: 162820 - DNA, 25 bp, Saccharomyces pastorianus
gcatgtatgcgttgatgtcgacgtt

SEQ ID NO: 162821 - DNA, 25 bp, Saccharomyces pastorianus
aagggcgctaggacactttttgcat

SEQ ID NO: 162822 - DNA, 25 bp, Saccharomyces pastorianus
gaattcttatctcagaatcccggat

SEQ ID NO: 162823 - DNA, 25 bp, Saccharomyces pastorianus
aaatgtgcgttcaaaggcttactga

SEQ ID NO: 162824 - DNA, 25 bp, Saccharomyces pastorianus
aaaaatgctctcatcgcttcaaaac

SEQ ID NO: 162825 - DNA, 25 bp, Saccharomyces pastorianus
taaaaaatgctctcatcgcttcaaa

SEQ ID NO: 162826 - DNA, 25 bp, Saccharomyces pastorianus
tgctctcatcgcttcaaaacatttt

SEQ ID NO: 162827 - DNA, 25 bp, Saccharomyces pastorianus
aaatgctctcatcgcttcaaaacat

SEQ ID NO: 162828 - DNA, 25 bp, Saccharomyces pastorianus
aaaatgctctcatcgcttcaaaaca

SEQ ID NO: 162829 - DNA, 25 bp, Saccharomyces pastorianus
atgctctcatcgcttcaaaacattt

SEQ ID NO: 162830 - DNA, 25 bp, Saccharomyces pastorianus
gctctcatcgcttcaaaacattttg

SEQ ID NO: 162831 - DNA, 25 bp, Saccharomyces pastorianus
tctcatcgcttcaaaacattttgat

SEQ ID NO: 162832 - DNA, 25 bp, Saccharomyces pastorianus
tttaaaaaatgctctcatcgcttca

SEQ ID NO: 162833 - DNA, 25 bp, Saccharomyces pastorianus
aaaaaatgctctcatcgcttcaaaa

SEQ ID NO: 162834 - DNA, 25 bp, Saccharomyces pastorianus
aaaacattttgattcacttgatcta

SEQ ID NO: 162835 - DNA, 25 bp, Saccharomyces pastorianus
gtcgtatcactctgcgataaatgcg

SEQ ID NO: 162836 - DNA, 25 bp, Saccharomyces pastorianus
ggaaaacttagcaattcaccatata

SEQ ID NO: 162837 - DNA, 25 bp, Saccharomyces pastorianus
aggcccatttggtgcatattctaga

SEQ ID NO: 162838 - DNA, 25 bp, Saccharomyces pastorianus
aatgcttagagtttttactactgga

SEQ ID NO: 162839 - DNA, 25 bp, Saccharomyces pastorianus
gagagcttgctttgcgaaattgctt

SEQ ID NO: 162840 - DNA, 25 bp, Saccharomyces pastorianus
aagcagccatttcacaagatccaag

SEQ ID NO: 162841 - DNA, 25 bp, Saccharomyces pastorianus
attctagaatccctgttgaatatgg

SEQ ID NO: 162842 - DNA, 25 bp, Saccharomyces pastorianus
attttggccaatactaagtcgtatc

SEQ ID NO: 162843 - DNA, 25 bp, Saccharomyces pastorianus
gatatggtgctattttggccaatac

SEQ ID NO: 162844 - DNA, 25 bp, Saccharomyces pastorianus
tttagcgatcgcctacatgaataag

SEQ ID NO: 162845 - DNA, 25 bp, Saccharomyces pastorianus
tcgaaggttttccaaccttctgcgg

SEQ ID NO: 162846 - DNA, 25 bp, Saccharomyces pastorianus
taagatagatttacgggccgcacta

SEQ ID NO: 162847 - DNA, 25 bp, Saccharomyces pastorianus
actaccggcagataaatctcaacat

SEQ ID NO: 162848 - DNA, 25 bp, Saccharomyces pastorianus
ctcaacatagtggtgtcagcgaaaa

SEQ ID NO: 162849 - DNA, 25 bp, Saccharomyces pastorianus
ccgcactaccggcagataaatctca

SEQ ID NO: 162850 - DNA, 25 bp, Saccharomyces pastorianus
gaattttcaagccttgaaaaccagg

SEQ ID NO: 162851 - DNA, 25 bp, Saccharomyces pastorianus
gtaagatagatttacgggccgcact

SEQ ID NO: 162852 - DNA, 25 bp, Saccharomyces pastorianus
atttacgggccgcactaccggcaga

SEQ ID NO: 162853 - DNA, 25 bp, Saccharomyces pastorianus
tacgggccgcactaccggcagataa

SEQ ID NO: 162854 - DNA, 25 bp, Saccharomyces pastorianus
atctcaacatagtggtgtcagcgaa

SEQ ID NO: 162855 - DNA, 25 bp, Saccharomyces pastorianus
agtggtgtcagcgaaaaagaatttt

SEQ ID NO: 162856 - DNA, 25 bp, Saccharomyces pastorianus
aaatctcaacatagtggtgtcagcg

SEQ ID NO: 162857 - DNA, 25 bp, Saccharomyces pastorianus
attgcaggatgctatagttgaccat

SEQ ID NO: 162858 - DNA, 25 bp, Saccharomyces pastorianus
aagatatcactgaagcgcgcaaaga

SEQ ID NO: 162859 - DNA, 25 bp, Saccharomyces pastorianus
gaaaccttaccatgacgatctggca

SEQ ID NO: 162860 - DNA, 25 bp, Saccharomyces pastorianus
gatggaacgttctatcatttctaat

SEQ ID NO: 162861 - DNA, 25 bp, Saccharomyces pastorianus
gaaagatctctggttacggaaatga

SEQ ID NO: 162862 - DNA, 25 bp, Saccharomyces pastorianus
gaaagcttggaatcccatttgaatg

SEQ ID NO: 162863 - DNA, 25 bp, Saccharomyces pastorianus
gaatggataccaaagtcgctgaaag

SEQ ID NO: 162864 - DNA, 25 bp, Saccharomyces pastorianus
gggaaactctgcttgaagataccaa

SEQ ID NO: 162865 - DNA, 25 bp, Saccharomyces pastorianus
acggaaatgatcttgacgcccagaa

SEQ ID NO: 162866 - DNA, 25 bp, Saccharomyces pastorianus
gactactacggctaataggcatcaa

SEQ ID NO: 162867 - DNA, 25 bp, Saccharomyces pastorianus
taaagccagctttgatgcacttgtg

SEQ ID NO: 162868 - DNA, 25 bp, Saccharomyces pastorianus
gtataccagacaacgggcgaaccat

SEQ ID NO: 162869 - DNA, 25 bp, Saccharomyces pastorianus
taacttcgtcgaaaaagtcgctgaa

SEQ ID NO: 162870 - DNA, 25 bp, Saccharomyces pastorianus
gtcacctgcccaaagttactcaatt

SEQ ID NO: 162871 - DNA, 25 bp, Saccharomyces pastorianus
gcagggaggctttatataaggcgaa

SEQ ID NO: 162872 - DNA, 25 bp, Saccharomyces pastorianus
gctgaaacacggctctaaatctttg

SEQ ID NO: 162873 - DNA, 25 bp, Saccharomyces pastorianus
agtcgctgaaacacggctctaaatc

SEQ ID NO: 162874 - DNA, 25 bp, Saccharomyces pastorianus
caacgggcgaaccattaagcaggga

SEQ ID NO: 162875 - DNA, 25 bp, Saccharomyces pastorianus
gagggagcaggacttcgtctataac

SEQ ID NO: 162876 - DNA, 25 bp, Saccharomyces pastorianus
caatataggaaagacttctggtgga

SEQ ID NO: 162877 - DNA, 25 bp, Saccharomyces pastorianus
gggtttaccagtcacctgcccaaag

SEQ ID NO: 162878 - DNA, 25 bp, Saccharomyces pastorianus
aagttactcaattggcgtcagcgac

SEQ ID NO: 162879 - DNA, 25 bp, Saccharomyces pastorianus
aatggtgtgaacatccttctgggtc

SEQ ID NO: 162880 - DNA, 25 bp, Saccharomyces pastorianus
gatacatttctttaagcagcgtagt

SEQ ID NO: 162881 - DNA, 25 bp, Saccharomyces pastorianus
ttacacggatactaaggcatttgcc

SEQ ID NO: 162882 - DNA, 25 bp, Saccharomyces pastorianus
ggcatttgccgctaacttgcaagca

SEQ ID NO: 162883 - DNA, 25 bp, Saccharomyces pastorianus
aaagctcgagcacaatcgcattcca

SEQ ID NO: 162884 - DNA, 25 bp, Saccharomyces pastorianus
cttctgggtcacatttctcagggaa

SEQ ID NO: 162885 - DNA, 25 bp, Saccharomyces pastorianus
ggcttggagccatcacgggaaaact

SEQ ID NO: 162886 - DNA, 25 bp, Saccharomyces pastorianus
ctcagggaataaaatcttgcgactc

SEQ ID NO: 162887 - DNA, 25 bp, Saccharomyces pastorianus
catttaatgtggtgctcagtgttga

SEQ ID NO: 162888 - DNA, 25 bp, Saccharomyces pastorianus
tgagaaggactatgccaggcggctt

SEQ ID NO: 162889 - DNA, 25 bp, Saccharomyces pastorianus
tatgaagcttgtttttgggacccaa

SEQ ID NO: 162890 - DNA, 25 bp, Saccharomyces pastorianus
gaaggacacctctccggatttgtaa

SEQ ID NO: 162891 - DNA, 25 bp, Saccharomyces pastorianus
aaagatatacgctgccgtgggagaa

SEQ ID NO: 162892 - DNA, 25 bp, Saccharomyces pastorianus
gctgccgtgggagaaggacacctct

SEQ ID NO: 162893 - DNA, 25 bp, Saccharomyces pastorianus
tgggagaaggacacctctccggatt

SEQ ID NO: 162894 - DNA, 25 bp, Saccharomyces pastorianus
atatacgctgccgtgggagaaggac

SEQ ID NO: 162895 - DNA, 25 bp, Saccharomyces pastorianus
atacgctgccgtgggagaaggacac

SEQ ID NO: 162896 - DNA, 25 bp, Saccharomyces pastorianus
aagtataatgtcagatttttgttaa

SEQ ID NO: 162897 - DNA, 25 bp, Saccharomyces pastorianus
aatagaaagatatacgctgccgtgg

SEQ ID NO: 162898 - DNA, 25 bp, Saccharomyces pastorianus
gagaaggacacctctccggatttgt

SEQ ID NO: 162899 - DNA, 25 bp, Saccharomyces pastorianus
tctccggatttgtaactaaaaatca

SEQ ID NO: 162900 - DNA, 25 bp, Saccharomyces pastorianus
gacacctctccggatttgtaactaa

SEQ ID NO: 162901 - DNA, 25 bp, Saccharomyces pastorianus
actattctggttctgagtttcctta

SEQ ID NO: 162902 - DNA, 25 bp, Saccharomyces pastorianus
ttttgttgcgcggtaaaggctgcta

SEQ ID NO: 162903 - DNA, 25 bp, Saccharomyces pastorianus
atagtattgggtacggctgcgtcgc

SEQ ID NO: 162904 - DNA, 25 bp, Saccharomyces pastorianus
gtccaacaaccgtggcttcaaacgt

SEQ ID NO: 162905 - DNA, 25 bp, Saccharomyces pastorianus
agaatttctgaaatcccagtggttt

SEQ ID NO: 162906 - DNA, 25 bp, Saccharomyces pastorianus
agtggtttttcatctgtttggctat

SEQ ID NO: 162907 - DNA, 25 bp, Saccharomyces pastorianus
tggagagctcatgccactattctgg

SEQ ID NO: 162908 - DNA, 25 bp, Saccharomyces pastorianus
attttgactgccacttgtccaacaa

SEQ ID NO: 162909 - DNA, 25 bp, Saccharomyces pastorianus
tttccttattacctcgtccatagta

SEQ ID NO: 162910 - DNA, 25 bp, Saccharomyces pastorianus
tgcgtcgcctggatttttctccaaa

SEQ ID NO: 162911 - DNA, 25 bp, Saccharomyces pastorianus
gatttttctccaaagtggcctggga

SEQ ID NO: 162912 - DNA, 25 bp, Saccharomyces pastorianus
gcatgagtttcgatgttggcacacg

SEQ ID NO: 162913 - DNA, 25 bp, Saccharomyces pastorianus
ggcccgttggccttgaagaaaatga

SEQ ID NO: 162914 - DNA, 25 bp, Saccharomyces pastorianus
ttattcagttttaccagctttgggc

SEQ ID NO: 162915 - DNA, 25 bp, Saccharomyces pastorianus
gacattcagggtacaagggcccgtt

SEQ ID NO: 162916 - DNA, 25 bp, Saccharomyces pastorianus
gaagagaggcctattgtcgcagata

SEQ ID NO: 162917 - DNA, 25 bp, Saccharomyces pastorianus
ggtacctaacaatgttgtgccgcct

SEQ ID NO: 162918 - DNA, 25 bp, Saccharomyces pastorianus
gagtcagcctttttagggacgagat

SEQ ID NO: 162919 - DNA, 25 bp, Saccharomyces pastorianus
aagaacatgtcacttccgcggaaga

SEQ ID NO: 162920 - DNA, 25 bp, Saccharomyces pastorianus
cacacgggagactgggcaagacctg

SEQ ID NO: 162921 - DNA, 25 bp, Saccharomyces pastorianus
atctatcacctttcttatcgcaaca

SEQ ID NO: 162922 - DNA, 25 bp, Saccharomyces pastorianus
gtcgcagatagttccgcgcaagaca

SEQ ID NO: 162923 - DNA, 25 bp, Saccharomyces pastorianus
ggaacaagccttctcaaaagcaact

SEQ ID NO: 162924 - DNA, 25 bp, Saccharomyces pastorianus
agctctgccgctgatgacggtacca

SEQ ID NO: 162925 - DNA, 25 bp, Saccharomyces pastorianus
tgcccgttggttatcgaaaatcgat

SEQ ID NO: 162926 - DNA, 25 bp, Saccharomyces pastorianus
gacggtaccatacatgttttccatg

SEQ ID NO: 162927 - DNA, 25 bp, Saccharomyces pastorianus
gattactttgtcactgttcaacctg

SEQ ID NO: 162928 - DNA, 25 bp, Saccharomyces pastorianus
aacacttctgttttgattcaccaag

SEQ ID NO: 162929 - DNA, 25 bp, Saccharomyces pastorianus
gagttttatggcacgacctggattt

SEQ ID NO: 162930 - DNA, 25 bp, Saccharomyces pastorianus
gattcaccaagtttccaagcattta

SEQ ID NO: 162931 - DNA, 25 bp, Saccharomyces pastorianus
acctggatttggctagcacacctta

SEQ ID NO: 162932 - DNA, 25 bp, Saccharomyces pastorianus
aaaagttacctctattcagctctgc

SEQ ID NO: 162933 - DNA, 25 bp, Saccharomyces pastorianus
aaatccgatgattgtgccactaaag

SEQ ID NO: 162934 - DNA, 25 bp, Saccharomyces pastorianus
taattctttacacaataatgccagt

SEQ ID NO: 162935 - DNA, 25 bp, Saccharomyces pastorianus
ttctttacacaataatgccagtgaa

SEQ ID NO: 162936 - DNA, 25 bp, Saccharomyces pastorianus
ttacacaataatgccagtgaagacg

SEQ ID NO: 162937 - DNA, 25 bp, Saccharomyces pastorianus
aattctttacacaataatgccagtg

SEQ ID NO: 162938 - DNA, 25 bp, Saccharomyces pastorianus
gtggttcaggtggttatttggtaat

SEQ ID NO: 162939 - DNA, 25 bp, Saccharomyces pastorianus
gccagtgaagacgatagaggaatac

SEQ ID NO: 162940 - DNA, 25 bp, Saccharomyces pastorianus
tctttacacaataatgccagtgaag

SEQ ID NO: 162941 - DNA, 25 bp, Saccharomyces pastorianus
ataattctttacacaataatgccag

SEQ ID NO: 162942 - DNA, 25 bp, Saccharomyces pastorianus
attctttacacaataatgccagtga

SEQ ID NO: 162943 - DNA, 25 bp, Saccharomyces pastorianus
tgaagacgatagaggaatacgagta

SEQ ID NO: 162944 - DNA, 25 bp, Saccharomyces pastorianus
tggttcaggtggttatttggtaata

SEQ ID NO: 162945 - DNA, 25 bp, Saccharomyces pastorianus
caaactctccagtggttagcttctg

SEQ ID NO: 162946 - DNA, 25 bp, Saccharomyces pastorianus
atctactggtgcttccattatgcca

SEQ ID NO: 162947 - DNA, 25 bp, Saccharomyces pastorianus
ttatgccacgtgatatcgccaaggt

SEQ ID NO: 162948 - DNA, 25 bp, Saccharomyces pastorianus
ttctggcctttctgactctacgaaa

SEQ ID NO: 162949 - DNA, 25 bp, Saccharomyces pastorianus
gagctcgtctcaaggtcctattgta

SEQ ID NO: 162950 - DNA, 25 bp, Saccharomyces pastorianus
gagtccacagactgctaacggtttt

SEQ ID NO: 162951 - DNA, 25 bp, Saccharomyces pastorianus
cattcacttcatttttcgctttcaa

SEQ ID NO: 162952 - DNA, 25 bp, Saccharomyces pastorianus
gtaagttacagacgccaggactatt

SEQ ID NO: 162953 - DNA, 25 bp, Saccharomyces pastorianus
tagacaccataccatccactttata

SEQ ID NO: 162954 - DNA, 25 bp, Saccharomyces pastorianus
gaatacctactaccgtttgaaccag

SEQ ID NO: 162955 - DNA, 25 bp, Saccharomyces pastorianus
taaatgcctgtgtcaccaacgatat

SEQ ID NO: 162956 - DNA, 25 bp, Saccharomyces pastorianus
gatttccataaagttcctaccacta

SEQ ID NO: 162957 - DNA, 25 bp, Saccharomyces pastorianus
gaagcgccaaagaagcatagacctt

SEQ ID NO: 162958 - DNA, 25 bp, Saccharomyces pastorianus
gaacttcagtttgctctattattta

SEQ ID NO: 162959 - DNA, 25 bp, Saccharomyces pastorianus
tattgccgcccaagagaacttcagt

SEQ ID NO: 162960 - DNA, 25 bp, Saccharomyces pastorianus
acaactttatcaaaccttcggacat

SEQ ID NO: 162961 - DNA, 25 bp, Saccharomyces pastorianus
gtatatcataggtgagctgtcgcaa

SEQ ID NO: 162962 - DNA, 25 bp, Saccharomyces pastorianus
ttatgtggctaatgaactgatttcc

SEQ ID NO: 162963 - DNA, 25 bp, Saccharomyces pastorianus
aagagctttgcctaggttgatacat

SEQ ID NO: 162964 - DNA, 25 bp, Saccharomyces pastorianus
gttttactttgactctattgccgcc

SEQ ID NO: 162965 - DNA, 25 bp, Saccharomyces pastorianus
atgcgattgcacatcaccctgatat

SEQ ID NO: 162966 - DNA, 25 bp, Saccharomyces pastorianus
gttgaagatgaatcgctgccagtaa

SEQ ID NO: 162967 - DNA, 25 bp, Saccharomyces pastorianus
aaccaagcctattttctagaaacat

SEQ ID NO: 162968 - DNA, 25 bp, Saccharomyces pastorianus
gtgtccaaccaagcctattttctag

SEQ ID NO: 162969 - DNA, 25 bp, Saccharomyces pastorianus
gagaacgtcaacattgttcaccagg

SEQ ID NO: 162970 - DNA, 25 bp, Saccharomyces pastorianus
gaaacattcttagattgcaatccac

SEQ ID NO: 162971 - DNA, 25 bp, Saccharomyces pastorianus
aatccacagctgcaatccctaagac

SEQ ID NO: 162972 - DNA, 25 bp, Saccharomyces pastorianus
ttcttagattgcaatccacagctgc

SEQ ID NO: 162973 - DNA, 25 bp, Saccharomyces pastorianus
tgttcaccaggcgtgtccaaccaag

SEQ ID NO: 162974 - DNA, 25 bp, Saccharomyces pastorianus
aacattgttcaccaggcgtgtccaa

SEQ ID NO: 162975 - DNA, 25 bp, Saccharomyces pastorianus
cagctgcaatccctaagactcaaaa

SEQ ID NO: 162976 - DNA, 25 bp, Saccharomyces pastorianus
aagactcaaaaaggtgtcatctttt

SEQ ID NO: 162977 - DNA, 25 bp, Saccharomyces pastorianus
gaagctgcattacaaagatatccct

SEQ ID NO: 162978 - DNA, 25 bp, Saccharomyces pastorianus
gttgggctatttgctactttcacat

SEQ ID NO: 162979 - DNA, 25 bp, Saccharomyces pastorianus
gatttatgtgtttgcatcagtcctt

SEQ ID NO: 162980 - DNA, 25 bp, Saccharomyces pastorianus
gtaagcatcgtattcaccgtcgaaa

SEQ ID NO: 162981 - DNA, 25 bp, Saccharomyces pastorianus
agcagtactactcccttatcaatga

SEQ ID NO: 162982 - DNA, 25 bp, Saccharomyces pastorianus
ttagtggccacgttagtaagcatcg

SEQ ID NO: 162983 - DNA, 25 bp, Saccharomyces pastorianus
atcagtccttgtgtcctttggttac

SEQ ID NO: 162984 - DNA, 25 bp, Saccharomyces pastorianus
ttgaatcctgactacaccatatatg

SEQ ID NO: 162985 - DNA, 25 bp, Saccharomyces pastorianus
tggtgcctctttaactttagtgtcc

SEQ ID NO: 162986 - DNA, 25 bp, Saccharomyces pastorianus
accatgactggtgttttctatttgt

SEQ ID NO: 162987 - DNA, 25 bp, Saccharomyces pastorianus
ctttaggtcgccaatctatttacaa

SEQ ID NO: 162988 - DNA, 25 bp, Saccharomyces pastorianus
gttacgcttgtctattagtggccac

SEQ ID NO: 162989 - DNA, 25 bp, Saccharomyces pastorianus
tgaggaagctgaagcccctcccttg

SEQ ID NO: 162990 - DNA, 25 bp, Saccharomyces pastorianus
tttgagttccttggatagcactatt

SEQ ID NO: 162991 - DNA, 25 bp, Saccharomyces pastorianus
tactccctccacctgaggaagctga

SEQ ID NO: 162992 - DNA, 25 bp, Saccharomyces pastorianus
tgttttcgctatggttgggtagttt

SEQ ID NO: 162993 - DNA, 25 bp, Saccharomyces pastorianus
tagttttttgagttccttggatagc

SEQ ID NO: 162994 - DNA, 25 bp, Saccharomyces pastorianus
tttcccattttgttttcgctatggt

SEQ ID NO: 162995 - DNA, 25 bp, Saccharomyces pastorianus
atgcaaacactagacgagacttcaa

SEQ ID NO: 162996 - DNA, 25 bp, Saccharomyces pastorianus
tgaatacaatttggctttacctaag

SEQ ID NO: 162997 - DNA, 25 bp, Saccharomyces pastorianus
atggattgcgacgagttttcttttg

SEQ ID NO: 162998 - DNA, 25 bp, Saccharomyces pastorianus
gacgagacttcaaatctactccctc

SEQ ID NO: 162999 - DNA, 25 bp, Saccharomyces pastorianus
cctcccttggaacaaaaatttcatg

SEQ ID NO: 163000 - DNA, 25 bp, Saccharomyces pastorianus
gggaagctatcacaccaacggaagg

SEQ ID NO: 163001 - DNA, 25 bp, Saccharomyces pastorianus
aaattccatggtcgcggatgaacgg

SEQ ID NO: 163002 - DNA, 25 bp, Saccharomyces pastorianus
aagcagacccacaattttattcaga

SEQ ID NO: 163003 - DNA, 25 bp, Saccharomyces pastorianus
ggacgatggctcagttgtttacgat

SEQ ID NO: 163004 - DNA, 25 bp, Saccharomyces pastorianus
attcagatcgtgttttcctcaagga

SEQ ID NO: 163005 - DNA, 25 bp, Saccharomyces pastorianus
aacgcagcattctagtcattcatac

SEQ ID NO: 163006 - DNA, 25 bp, Saccharomyces pastorianus
gttgacttcaggcatgattgtctca

SEQ ID NO: 163007 - DNA, 25 bp, Saccharomyces pastorianus
atagaccacattttccaaacatttg

SEQ ID NO: 163008 - DNA, 25 bp, Saccharomyces pastorianus
atatcccttcttttaaattccatgg

SEQ ID NO: 163009 - DNA, 25 bp, Saccharomyces pastorianus
tcaatcggctgcatattggccacta

SEQ ID NO: 163010 - DNA, 25 bp, Saccharomyces pastorianus
ggccactacgactagaatatgcgat

SEQ ID NO: 163011 - DNA, 25 bp, Saccharomyces pastorianus
gaaggtcatcttttccatacatggt

SEQ ID NO: 163012 - DNA, 25 bp, Saccharomyces pastorianus
agttggctagctcaggtcaacctga

SEQ ID NO: 163013 - DNA, 25 bp, Saccharomyces pastorianus
ataggctcggcgatagagtaccaaa

SEQ ID NO: 163014 - DNA, 25 bp, Saccharomyces pastorianus
tttacaggatgattgggtcgccatt

SEQ ID NO: 163015 - DNA, 25 bp, Saccharomyces pastorianus
ggtaacccacctaattctcaagtgc

SEQ ID NO: 163016 - DNA, 25 bp, Saccharomyces pastorianus
tttcctattaactccaactacattg

SEQ ID NO: 163017 - DNA, 25 bp, Saccharomyces pastorianus
gagtccaaatcgaagggcgcttata

SEQ ID NO: 163018 - DNA, 25 bp, Saccharomyces pastorianus
acattgttggtcagactttggtcca

SEQ ID NO: 163019 - DNA, 25 bp, Saccharomyces pastorianus
acctgaccccttaatcaacacatat

SEQ ID NO: 163020 - DNA, 25 bp, Saccharomyces pastorianus
gtacaatatcagttcgtcgtggtaa

SEQ ID NO: 163021 - DNA, 25 bp, Saccharomyces pastorianus
catacatggtgaggccttgcataca

SEQ ID NO: 163022 - DNA, 25 bp, Saccharomyces pastorianus
gcagtcaagcaaatccaaacaaagt

SEQ ID NO: 163023 - DNA, 25 bp, Saccharomyces pastorianus
aaagcgctatgatctatcttataat

SEQ ID NO: 163024 - DNA, 25 bp, Saccharomyces pastorianus
ttagactcttccattacccaggacg

SEQ ID NO: 163025 - DNA, 25 bp, Saccharomyces pastorianus
gcaaccagaatattttgagtctcct

SEQ ID NO: 163026 - DNA, 25 bp, Saccharomyces pastorianus
cattacccaggacggcaaatttgca

SEQ ID NO: 163027 - DNA, 25 bp, Saccharomyces pastorianus
tttgagtctcctttgcagtcaagca

SEQ ID NO: 163028 - DNA, 25 bp, Saccharomyces pastorianus
taactgatggtctgggaaatgtcgt

SEQ ID NO: 163029 - DNA, 25 bp, Saccharomyces pastorianus
atgtcgtggattttacatctctccc

SEQ ID NO: 163030 - DNA, 25 bp, Saccharomyces pastorianus
gattttacatctctccctgaagaat

SEQ ID NO: 163031 - DNA, 25 bp, Saccharomyces pastorianus
gtagactccagcttgcaaccagaat

SEQ ID NO: 163032 - DNA, 25 bp, Saccharomyces pastorianus
aaactttttcatatgtagactccag

SEQ ID NO: 163033 - DNA, 25 bp, Saccharomyces pastorianus
attcggtagagttacggtctttgag

SEQ ID NO: 163034 - DNA, 25 bp, Saccharomyces pastorianus
gatcagtcagttctaaagtcacatt

SEQ ID NO: 163035 - DNA, 25 bp, Saccharomyces pastorianus
aactcttcaagatattggcttttat

SEQ ID NO: 163036 - DNA, 25 bp, Saccharomyces pastorianus
aaggcagtacaattcgttatttggc

SEQ ID NO: 163037 - DNA, 25 bp, Saccharomyces pastorianus
ttaactcaattgacgtacccatcag

SEQ ID NO: 163038 - DNA, 25 bp, Saccharomyces pastorianus
tttgcccatggataccaatcttttt

SEQ ID NO: 163039 - DNA, 25 bp, Saccharomyces pastorianus
aatcatcgataaccccaaatccttt

SEQ ID NO: 163040 - DNA, 25 bp, Saccharomyces pastorianus
ttcatgaatcatattgtttgcccat

SEQ ID NO: 163041 - DNA, 25 bp, Saccharomyces pastorianus
gttatttggctgtaactcttcaaga

SEQ ID NO: 163042 - DNA, 25 bp, Saccharomyces pastorianus
gacgtacccatcagaataaactcaa

SEQ ID NO: 163043 - DNA, 25 bp, Saccharomyces pastorianus
gagatctttacacaaattcggtaga

SEQ ID NO: 163044 - DNA, 25 bp, Saccharomyces pastorianus
gaacattttcatatcaagcgatcac

SEQ ID NO: 163045 - DNA, 25 bp, Saccharomyces pastorianus
gaattaagtgtaacaggttcagcca

SEQ ID NO: 163046 - DNA, 25 bp, Saccharomyces pastorianus
ttttcatatcaagcgatcacgagtt

SEQ ID NO: 163047 - DNA, 25 bp, Saccharomyces pastorianus
ttcagccattaaccatcatcgtatt

SEQ ID NO: 163048 - DNA, 25 bp, Saccharomyces pastorianus
cacgagttcgttttgatttcattaa

SEQ ID NO: 163049 - DNA, 25 bp, Saccharomyces pastorianus
gatttcattaattatgaccacatgg

SEQ ID NO: 163050 - DNA, 25 bp, Saccharomyces pastorianus
aagcgatcacgagttcgttttgatt

SEQ ID NO: 163051 - DNA, 25 bp, Saccharomyces pastorianus
aagtgtaacaggttcagccattaac

SEQ ID NO: 163052 - DNA, 25 bp, Saccharomyces pastorianus
agccattaaccatcatcgtattttt

SEQ ID NO: 163053 - DNA, 25 bp, Saccharomyces pastorianus
tcattaattatgaccacatggagaa

SEQ ID NO: 163054 - DNA, 25 bp, Saccharomyces pastorianus
tatcaagcgatcacgagttcgtttt

SEQ ID NO: 163055 - DNA, 25 bp, Saccharomyces pastorianus
aaatccgacctttacgctcgaggag

SEQ ID NO: 163056 - DNA, 25 bp, Saccharomyces pastorianus
aggtagacatttattcactgcctct

SEQ ID NO: 163057 - DNA, 25 bp, Saccharomyces pastorianus
cactgcctctaatatcaaccgatgt

SEQ ID NO: 163058 - DNA, 25 bp, Saccharomyces pastorianus
tgtaaacacaacacgacgcttccaa

SEQ ID NO: 163059 - DNA, 25 bp, Saccharomyces pastorianus
tgatactccacgagggaaccattgg

SEQ ID NO: 163060 - DNA, 25 bp, Saccharomyces pastorianus
acgacgcttccaatatagtgacgat

SEQ ID NO: 163061 - DNA, 25 bp, Saccharomyces pastorianus
atcaccacgtccatcttatagcagt

SEQ ID NO: 163062 - DNA, 25 bp, Saccharomyces pastorianus
atagcagtcgtcctaatgtaaacac

SEQ ID NO: 163063 - DNA, 25 bp, Saccharomyces pastorianus
gagcccgctgagaaaatccgacctt

SEQ ID NO: 163064 - DNA, 25 bp, Saccharomyces pastorianus
ggcagttctgtgtcaggatcaccac

SEQ ID NO: 163065 - DNA, 25 bp, Saccharomyces pastorianus
tatagtgacgatgagcccgctgaga

SEQ ID NO: 163066 - DNA, 25 bp, Saccharomyces pastorianus
gctacctaacggcacacttaatgaa

SEQ ID NO: 163067 - DNA, 25 bp, Saccharomyces pastorianus
gtagtacactcttcacaagacctca

SEQ ID NO: 163068 - DNA, 25 bp, Saccharomyces pastorianus
caaagcgtcactggtttagatgcaa

SEQ ID NO: 163069 - DNA, 25 bp, Saccharomyces pastorianus
gattgctctgtgtaaaactggttta

SEQ ID NO: 163070 - DNA, 25 bp, Saccharomyces pastorianus
gcaaactgttttgggtcgtcctgag

SEQ ID NO: 163071 - DNA, 25 bp, Saccharomyces pastorianus
caacgattatatggagccccgggaa

SEQ ID NO: 163072 - DNA, 25 bp, Saccharomyces pastorianus
gtcgtcctgagtcgctaattgtaca

SEQ ID NO: 163073 - DNA, 25 bp, Saccharomyces pastorianus
aagacctcaacactccaatggctat

SEQ ID NO: 163074 - DNA, 25 bp, Saccharomyces pastorianus
ggaaatacacatacccctgatagaa

SEQ ID NO: 163075 - DNA, 25 bp, Saccharomyces pastorianus
gtcgacaccacttctgattttactt

SEQ ID NO: 163076 - DNA, 25 bp, Saccharomyces pastorianus
tggaggtttctcaatctctaccaaa

SEQ ID NO: 163077 - DNA, 25 bp, Saccharomyces pastorianus
cgtggtctcgttactaagagtagat

SEQ ID NO: 163078 - DNA, 25 bp, Saccharomyces pastorianus
atggcagaatacttggccacctgct

SEQ ID NO: 163079 - DNA, 25 bp, Saccharomyces pastorianus
agtcatttctatttgttaccacaca

SEQ ID NO: 163080 - DNA, 25 bp, Saccharomyces pastorianus
gtgaagcacttctttccatacgtaa

SEQ ID NO: 163081 - DNA, 25 bp, Saccharomyces pastorianus
taaagtctttcccaccattcttgcc

SEQ ID NO: 163082 - DNA, 25 bp, Saccharomyces pastorianus
ttccattcttccttcgtgaagcact

SEQ ID NO: 163083 - DNA, 25 bp, Saccharomyces pastorianus
catacgtaaagtctttcccaccatt

SEQ ID NO: 163084 - DNA, 25 bp, Saccharomyces pastorianus
gctcttcgtggtctcgttactaaga

SEQ ID NO: 163085 - DNA, 25 bp, Saccharomyces pastorianus
ctgcaagatccgctcttcgtggtct

SEQ ID NO: 163086 - DNA, 25 bp, Saccharomyces pastorianus
agaatacttggccacctgctccttc

SEQ ID NO: 163087 - DNA, 25 bp, Saccharomyces pastorianus
cattcttgccttggccgctgcaaga

SEQ ID NO: 163088 - DNA, 25 bp, Saccharomyces pastorianus
gtgcctcctacaaatcaacaattta

SEQ ID NO: 163089 - DNA, 25 bp, Saccharomyces pastorianus
aatgttttcagaccagcagcgcttc

SEQ ID NO: 163090 - DNA, 25 bp, Saccharomyces pastorianus
attcaaccggacttatgccttcagt

SEQ ID NO: 163091 - DNA, 25 bp, Saccharomyces pastorianus
aaccggacttatgccttcagtgcct

SEQ ID NO: 163092 - DNA, 25 bp, Saccharomyces pastorianus
ttatgccttcagtgcctcctacaaa

SEQ ID NO: 163093 - DNA, 25 bp, Saccharomyces pastorianus
tttaatgcacaaacccaatcttcaa

SEQ ID NO: 163094 - DNA, 25 bp, Saccharomyces pastorianus
aacccaatcttcaatgttttcagac

SEQ ID NO: 163095 - DNA, 25 bp, Saccharomyces pastorianus
gcagcgcttctttcaatatcaatta

SEQ ID NO: 163096 - DNA, 25 bp, Saccharomyces pastorianus
attacaccaccaaaatcaaggacag

SEQ ID NO: 163097 - DNA, 25 bp, Saccharomyces pastorianus
ttcagtgcctcctacaaatcaacaa

SEQ ID NO: 163098 - DNA, 25 bp, Saccharomyces pastorianus
agaccagcagcgcttctttcaatat

SEQ ID NO: 163099 - DNA, 25 bp, Saccharomyces pastorianus
tctaccgtcgtactcaaaaccaatg

SEQ ID NO: 163100 - DNA, 25 bp, Saccharomyces pastorianus
gtatggtaacaagtggaggctcaat

SEQ ID NO: 163101 - DNA, 25 bp, Saccharomyces pastorianus
ggctcccactgatgtaaagactata

SEQ ID NO: 163102 - DNA, 25 bp, Saccharomyces pastorianus
agcggaggaggagcttgcatcataa

SEQ ID NO: 163103 - DNA, 25 bp, Saccharomyces pastorianus
gaaacagagcttctactctaccgtc

SEQ ID NO: 163104 - DNA, 25 bp, Saccharomyces pastorianus
aagattgtacaagttcattctgaac

SEQ ID NO: 163105 - DNA, 25 bp, Saccharomyces pastorianus
atgtcgacgatgatggctatctaga

SEQ ID NO: 163106 - DNA, 25 bp, Saccharomyces pastorianus
aagaaagcttcacggcgagtcggct

SEQ ID NO: 163107 - DNA, 25 bp, Saccharomyces pastorianus
gatattgaaggctcccactgatgta

SEQ ID NO: 163108 - DNA, 25 bp, Saccharomyces pastorianus
gagtcggctactaagcccaacataa

SEQ ID NO: 163109 - DNA, 25 bp, Saccharomyces pastorianus
gaaagccatcgatcaagcatcttga

SEQ ID NO: 163110 - DNA, 25 bp, Saccharomyces pastorianus
tgtggttgttccatccgttgtggaa

SEQ ID NO: 163111 - DNA, 25 bp, Saccharomyces pastorianus
gacagtacacaattatccaaccgga

SEQ ID NO: 163112 - DNA, 25 bp, Saccharomyces pastorianus
caatggctgaacttacccaattgtt

SEQ ID NO: 163113 - DNA, 25 bp, Saccharomyces pastorianus
agatcttttcccaagcgttgctaaa

SEQ ID NO: 163114 - DNA, 25 bp, Saccharomyces pastorianus
acgtcgaagacgctcagcaagatgt

SEQ ID NO: 163115 - DNA, 25 bp, Saccharomyces pastorianus
tatccaaccggaagccactgacgaa

SEQ ID NO: 163116 - DNA, 25 bp, Saccharomyces pastorianus
gagacggattgcacgactctaataa

SEQ ID NO: 163117 - DNA, 25 bp, Saccharomyces pastorianus
aagtaatagagcacatgcgcctccc

SEQ ID NO: 163118 - DNA, 25 bp, Saccharomyces pastorianus
attgttgttgtcgttgtggttgttc

SEQ ID NO: 163119 - DNA, 25 bp, Saccharomyces pastorianus
gatgtcaatggccagcagatctttt

SEQ ID NO: 163120 - DNA, 25 bp, Saccharomyces pastorianus
gatcatctgctttattatctttgct

SEQ ID NO: 163121 - DNA, 25 bp, Saccharomyces pastorianus
aacgcctccgatgctttagacaaaa

SEQ ID NO: 163122 - DNA, 25 bp, Saccharomyces pastorianus
ataccaagctttgtctgatccaaag

SEQ ID NO: 163123 - DNA, 25 bp, Saccharomyces pastorianus
ccaagctttgtctgatccaaagcaa

SEQ ID NO: 163124 - DNA, 25 bp, Saccharomyces pastorianus
cgcctccgatgctttagacaaaatt

SEQ ID NO: 163125 - DNA, 25 bp, Saccharomyces pastorianus
acgcctccgatgctttagacaaaat

SEQ ID NO: 163126 - DNA, 25 bp, Saccharomyces pastorianus
agctttgtctgatccaaagcaattg

SEQ ID NO: 163127 - DNA, 25 bp, Saccharomyces pastorianus
tagacaaaattagataccaagcttt

SEQ ID NO: 163128 - DNA, 25 bp, Saccharomyces pastorianus
gcctccgatgctttagacaaaatta

SEQ ID NO: 163129 - DNA, 25 bp, Saccharomyces pastorianus
ctccgatgctttagacaaaattaga

SEQ ID NO: 163130 - DNA, 25 bp, Saccharomyces pastorianus
gttcattagaatcaccccaaaacca

SEQ ID NO: 163131 - DNA, 25 bp, Saccharomyces pastorianus
taacgcctccgatgctttagacaaa

SEQ ID NO: 163132 - DNA, 25 bp, Saccharomyces pastorianus
aagaagtcatcacgagaccattctg

SEQ ID NO: 163133 - DNA, 25 bp, Saccharomyces pastorianus
caattggcagtacttgcgaagaaaa

SEQ ID NO: 163134 - DNA, 25 bp, Saccharomyces pastorianus
agtcatcacgagaccattctgaatt

SEQ ID NO: 163135 - DNA, 25 bp, Saccharomyces pastorianus
tcaagaagtcatcacgagaccattc

SEQ ID NO: 163136 - DNA, 25 bp, Saccharomyces pastorianus
attcgttgcttaccctatccaactt

SEQ ID NO: 163137 - DNA, 25 bp, Saccharomyces pastorianus
gtcatcacgagaccattctgaattc

SEQ ID NO: 163138 - DNA, 25 bp, Saccharomyces pastorianus
aagtcatcacgagaccattctgaat

SEQ ID NO: 163139 - DNA, 25 bp, Saccharomyces pastorianus
tatccaacttctagtcaccaaggaa

SEQ ID NO: 163140 - DNA, 25 bp, Saccharomyces pastorianus
atcacgagaccattctgaattcgtt

SEQ ID NO: 163141 - DNA, 25 bp, Saccharomyces pastorianus
ttggcagtacttgcgaagaaaagag

SEQ ID NO: 163142 - DNA, 25 bp, Saccharomyces pastorianus
gaagtcatcacgagaccattctgaa

SEQ ID NO: 163143 - DNA, 25 bp, Saccharomyces pastorianus
tactgtgacaacgttactgactgca

SEQ ID NO: 163144 - DNA, 25 bp, Saccharomyces pastorianus
tgagatttgtttaccactttaccgt

SEQ ID NO: 163145 - DNA, 25 bp, Saccharomyces pastorianus
gggacattagaaccatgcagacaat

SEQ ID NO: 163146 - DNA, 25 bp, Saccharomyces pastorianus
gggatgttacagaacctgccaagaa

SEQ ID NO: 163147 - DNA, 25 bp, Saccharomyces pastorianus
gtctttaaaggttcgagaagctcca

SEQ ID NO: 163148 - DNA, 25 bp, Saccharomyces pastorianus
gttcaggctaaccatgacaccttag

SEQ ID NO: 163149 - DNA, 25 bp, Saccharomyces pastorianus
ggattttcttccatttgattacgat

SEQ ID NO: 163150 - DNA, 25 bp, Saccharomyces pastorianus
tattatcaagaaaccggccgtgctg

SEQ ID NO: 163151 - DNA, 25 bp, Saccharomyces pastorianus
gaggattttgactccaaacagtgtc

SEQ ID NO: 163152 - DNA, 25 bp, Saccharomyces pastorianus
gtattacctacttttcattcaggga

SEQ ID NO: 163153 - DNA, 25 bp, Saccharomyces pastorianus
gctactgttgctttcggaatgggta

SEQ ID NO: 163154 - DNA, 25 bp, Saccharomyces pastorianus
tataggttcctatctggtcagacta

SEQ ID NO: 163155 - DNA, 25 bp, Saccharomyces pastorianus
ataacaacttccagtcaggcctatt

SEQ ID NO: 163156 - DNA, 25 bp, Saccharomyces pastorianus
ggaatagcgcatttaacagccagta

SEQ ID NO: 163157 - DNA, 25 bp, Saccharomyces pastorianus
tgtggtatccaaattccgcgttcaa

SEQ ID NO: 163158 - DNA, 25 bp, Saccharomyces pastorianus
atggtcatcatatgtcccggcgaaa

SEQ ID NO: 163159 - DNA, 25 bp, Saccharomyces pastorianus
gattcttcagagttttccgttaaag

SEQ ID NO: 163160 - DNA, 25 bp, Saccharomyces pastorianus
gggatgtagacttcaaacctgccaa

SEQ ID NO: 163161 - DNA, 25 bp, Saccharomyces pastorianus
atactgacgggtgcatcggcgatta

SEQ ID NO: 163162 - DNA, 25 bp, Saccharomyces pastorianus
atcgaagaaataatccccgctgacc

SEQ ID NO: 163163 - DNA, 25 bp, Saccharomyces pastorianus
gaggtattcccgtaggtgttattgc

SEQ ID NO: 163164 - DNA, 25 bp, Saccharomyces pastorianus
tgagtcctccacttcttgaaactat

SEQ ID NO: 163165 - DNA, 25 bp, Saccharomyces pastorianus
gaagggctacctaattctgatttaa

SEQ ID NO: 163166 - DNA, 25 bp, Saccharomyces pastorianus
ctgatttaattgttcctttggtgca

SEQ ID NO: 163167 - DNA, 25 bp, Saccharomyces pastorianus
tcaagttttggaaacggcacgtcat

SEQ ID NO: 163168 - DNA, 25 bp, Saccharomyces pastorianus
gcaataccatgtacgacaagtctat

SEQ ID NO: 163169 - DNA, 25 bp, Saccharomyces pastorianus
ggcacgtcatcttcaagggcaggtt

SEQ ID NO: 163170 - DNA, 25 bp, Saccharomyces pastorianus
cagaacccttattatcgggagctca

SEQ ID NO: 163171 - DNA, 25 bp, Saccharomyces pastorianus
gtatacgcttggcttcttactggac

SEQ ID NO: 163172 - DNA, 25 bp, Saccharomyces pastorianus
gaaggtactcaaatgcggttgtata

SEQ ID NO: 163173 - DNA, 25 bp, Saccharomyces pastorianus
gtgcatattttgaaggagcgccaga

SEQ ID NO: 163174 - DNA, 25 bp, Saccharomyces pastorianus
tcctttggtgcagaggttcgttaaa

SEQ ID NO: 163175 - DNA, 25 bp, Saccharomyces pastorianus
actggacctgttgtacctgtaatag

SEQ ID NO: 163176 - DNA, 25 bp, Saccharomyces pastorianus
acggcgcttcaggtgggtttattat

SEQ ID NO: 163177 - DNA, 25 bp, Saccharomyces pastorianus
agccatcatatgcttgacccagagt

SEQ ID NO: 163178 - DNA, 25 bp, Saccharomyces pastorianus
ggtatcccacagaagccatcatatg

SEQ ID NO: 163179 - DNA, 25 bp, Saccharomyces pastorianus
aatgccgattggttccggtatccca

SEQ ID NO: 163180 - DNA, 25 bp, Saccharomyces pastorianus
tataatgtcttctgcgtgccaagtg

SEQ ID NO: 163181 - DNA, 25 bp, Saccharomyces pastorianus
gaaggttgcagatgtcttgtcccaa

SEQ ID NO: 163182 - DNA, 25 bp, Saccharomyces pastorianus
caatcatgttgggtggactcgccat

SEQ ID NO: 163183 - DNA, 25 bp, Saccharomyces pastorianus
gatattccaatccatgcggacggcg

SEQ ID NO: 163184 - DNA, 25 bp, Saccharomyces pastorianus
cataagtttggcttaaccactcccg

SEQ ID NO: 163185 - DNA, 25 bp, Saccharomyces pastorianus
tgtgccaccacaggctctagtgagg

SEQ ID NO: 163186 - DNA, 25 bp, Saccharomyces pastorianus
atggcacgccaatcccgatgaagaa

SEQ ID NO: 163187 - DNA, 25 bp, Saccharomyces pastorianus
aagaatgctgcccaacctattgccg

SEQ ID NO: 163188 - DNA, 25 bp, Saccharomyces pastorianus
gtaagtgctgctaacagttctaaca

SEQ ID NO: 163189 - DNA, 25 bp, Saccharomyces pastorianus
tcaaagaatgctgcccaacctattg

SEQ ID NO: 163190 - DNA, 25 bp, Saccharomyces pastorianus
aacggtaaggttgcaggcgccgtct

SEQ ID NO: 163191 - DNA, 25 bp, Saccharomyces pastorianus
gccgtctggtgttgctctaactggt

SEQ ID NO: 163192 - DNA, 25 bp, Saccharomyces pastorianus
cttcactggtttagtaagtgctgct

SEQ ID NO: 163193 - DNA, 25 bp, Saccharomyces pastorianus
taacagttctaacagctcaagctca

SEQ ID NO: 163194 - DNA, 25 bp, Saccharomyces pastorianus
tggtgttgctctaactggtgcttgg

SEQ ID NO: 163195 - DNA, 25 bp, Saccharomyces pastorianus
gctgcccaacctattgccggtttaa

SEQ ID NO: 163196 - DNA, 25 bp, Saccharomyces pastorianus
gtctggtgttgctctaactggtgct

SEQ ID NO: 163197 - DNA, 25 bp, Saccharomyces pastorianus
gctcaagctcaaagaatgctgccca

SEQ ID NO: 163198 - DNA, 25 bp, Saccharomyces pastorianus
aatgcagtccatacatgcgtttctg

SEQ ID NO: 163199 - DNA, 25 bp, Saccharomyces pastorianus
ccatacatgcgtttctgggtagttt

SEQ ID NO: 163200 - DNA, 25 bp, Saccharomyces pastorianus
atgcacgttttttatatgacgataa

SEQ ID NO: 163201 - DNA, 25 bp, Saccharomyces pastorianus
gcaaatgcagtccatacatgcgttt

SEQ ID NO: 163202 - DNA, 25 bp, Saccharomyces pastorianus
tgcagtccatacatgcgtttctggg

SEQ ID NO: 163203 - DNA, 25 bp, Saccharomyces pastorianus
atacatgcgtttctgggtagtttat

SEQ ID NO: 163204 - DNA, 25 bp, Saccharomyces pastorianus
tggtcaggaagcaaatgcagtccat

SEQ ID NO: 163205 - DNA, 25 bp, Saccharomyces pastorianus
cagtccatacatgcgtttctgggta

SEQ ID NO: 163206 - DNA, 25 bp, Saccharomyces pastorianus
gacgataatacttattttggtcagg

SEQ ID NO: 163207 - DNA, 25 bp, Saccharomyces pastorianus
aatacttattttggtcaggaagcaa

SEQ ID NO: 163208 - DNA, 25 bp, Saccharomyces pastorianus
gtccatacatgcgtttctgggtagt

SEQ ID NO: 163209 - DNA, 25 bp, Saccharomyces pastorianus
gccccagcagcttagatattcttaa

SEQ ID NO: 163210 - DNA, 25 bp, Saccharomyces pastorianus
gatgacaataattagcctttccact

SEQ ID NO: 163211 - DNA, 25 bp, Saccharomyces pastorianus
ataagcggtgtgtatgagtctcgga

SEQ ID NO: 163212 - DNA, 25 bp, Saccharomyces pastorianus
aaagggactacgatattggacaaat

SEQ ID NO: 163213 - DNA, 25 bp, Saccharomyces pastorianus
tgatgtctgtgaaaccttatttgca

SEQ ID NO: 163214 - DNA, 25 bp, Saccharomyces pastorianus
aggcacatatggtcagttcatcgaa

SEQ ID NO: 163215 - DNA, 25 bp, Saccharomyces pastorianus
gatggactccattaccaaaagcccc

SEQ ID NO: 163216 - DNA, 25 bp, Saccharomyces pastorianus
gaataaactcgattggatggactcc

SEQ ID NO: 163217 - DNA, 25 bp, Saccharomyces pastorianus
gtaataacactcaactagccgtgga

SEQ ID NO: 163218 - DNA, 25 bp, Saccharomyces pastorianus
catatgagcaattcacgcccttatt

SEQ ID NO: 163219 - DNA, 25 bp, Saccharomyces pastorianus
gcccttattagcaagccacactgat

SEQ ID NO: 163220 - DNA, 25 bp, Saccharomyces pastorianus
ggacgtaccggacaacctgacgctg

SEQ ID NO: 163221 - DNA, 25 bp, Saccharomyces pastorianus
acgcaagtaacaacaatggcagctg

SEQ ID NO: 163222 - DNA, 25 bp, Saccharomyces pastorianus
tagagacacatatcaccgacaacca

SEQ ID NO: 163223 - DNA, 25 bp, Saccharomyces pastorianus
gccccaagagtcacccaatggattt

SEQ ID NO: 163224 - DNA, 25 bp, Saccharomyces pastorianus
gacgctgcagggatacttattgggt

SEQ ID NO: 163225 - DNA, 25 bp, Saccharomyces pastorianus
ttgggcgcgaagacttattcataca

SEQ ID NO: 163226 - DNA, 25 bp, Saccharomyces pastorianus
gcaaagactcacagctgcacaacag

SEQ ID NO: 163227 - DNA, 25 bp, Saccharomyces pastorianus
cttattgggtccaaattgggcgcga

SEQ ID NO: 163228 - DNA, 25 bp, Saccharomyces pastorianus
gaccactttcaattggacgtaccgg

SEQ ID NO: 163229 - DNA, 25 bp, Saccharomyces pastorianus
gcaataacaataacgggcctacctc

SEQ ID NO: 163230 - DNA, 25 bp, Saccharomyces pastorianus
cctccagcgggagaaccaatgggaa

SEQ ID NO: 163231 - DNA, 25 bp, Saccharomyces pastorianus
gcttgttcatgcacatctgagtctt

SEQ ID NO: 163232 - DNA, 25 bp, Saccharomyces pastorianus
gagtcgcttgttcatgcacatctga

SEQ ID NO: 163233 - DNA, 25 bp, Saccharomyces pastorianus
acgcggagtcgcttgttcatgcaca

SEQ ID NO: 163234 - DNA, 25 bp, Saccharomyces pastorianus
aaggatttcatacgcggagtcgctt

SEQ ID NO: 163235 - DNA, 25 bp, Saccharomyces pastorianus
atcaaatattcgtcctcaaggattt

SEQ ID NO: 163236 - DNA, 25 bp, Saccharomyces pastorianus
tcatacgcggagtcgcttgttcatg

SEQ ID NO: 163237 - DNA, 25 bp, Saccharomyces pastorianus
gtcgcttgttcatgcacatctgagt

SEQ ID NO: 163238 - DNA, 25 bp, Saccharomyces pastorianus
ttgttcatgcacatctgagtctttc

SEQ ID NO: 163239 - DNA, 25 bp, Saccharomyces pastorianus
tcaaggatttcatacgcggagtcgc

SEQ ID NO: 163240 - DNA, 25 bp, Saccharomyces pastorianus
tcgtcctcaaggatttcatacgcgg

SEQ ID NO: 163241 - DNA, 25 bp, Saccharomyces pastorianus
atttcatacgcggagtcgcttgttc

SEQ ID NO: 163242 - DNA, 25 bp, Saccharomyces pastorianus
gttatccaatagctatgtactcaag

SEQ ID NO: 163243 - DNA, 25 bp, Saccharomyces pastorianus
gtagccatacttctcctgttaatat

SEQ ID NO: 163244 - DNA, 25 bp, Saccharomyces pastorianus
ccctcaggtgcggtattgttttgtt

SEQ ID NO: 163245 - DNA, 25 bp, Saccharomyces pastorianus
tggcctttaaagttggctgtgataa

SEQ ID NO: 163246 - DNA, 25 bp, Saccharomyces pastorianus
gaagtgctcttttcatctactacag

SEQ ID NO: 163247 - DNA, 25 bp, Saccharomyces pastorianus
tgtactcaagtaccgtgtatacact

SEQ ID NO: 163248 - DNA, 25 bp, Saccharomyces pastorianus
ggctgtgataactttagttcttcga

SEQ ID NO: 163249 - DNA, 25 bp, Saccharomyces pastorianus
agttcttcgaacttttccacacaag

SEQ ID NO: 163250 - DNA, 25 bp, Saccharomyces pastorianus
acaagtagtttgttctccctcaggt

SEQ ID NO: 163251 - DNA, 25 bp, Saccharomyces pastorianus
atctctagaacgtttattcgacggg

SEQ ID NO: 163252 - DNA, 25 bp, Saccharomyces pastorianus
ctcctgttaatattgctcagcttaa

SEQ ID NO: 163253 - DNA, 25 bp, Saccharomyces pastorianus
aagaggtttctgatcctttggaagc

SEQ ID NO: 163254 - DNA, 25 bp, Saccharomyces pastorianus
aagaaggcaaccgactacgttctag

SEQ ID NO: 163255 - DNA, 25 bp, Saccharomyces pastorianus
cactacggtatgaagccagaagact

SEQ ID NO: 163256 - DNA, 25 bp, Saccharomyces pastorianus
gactatgtctcgaactacactaatg

SEQ ID NO: 163257 - DNA, 25 bp, Saccharomyces pastorianus
ccggttacggtaagagattagccat

SEQ ID NO: 163258 - DNA, 25 bp, Saccharomyces pastorianus
tacgttctagccgaccctgtgaagg

SEQ ID NO: 163259 - DNA, 25 bp, Saccharomyces pastorianus
ccgaccctgtgaaggcttggaaaga

SEQ ID NO: 163260 - DNA, 25 bp, Saccharomyces pastorianus
aagcctcaattgaacaacgatctat

SEQ ID NO: 163261 - DNA, 25 bp, Saccharomyces pastorianus
tgccaccagactatgtctcgaacta

SEQ ID NO: 163262 - DNA, 25 bp, Saccharomyces pastorianus
gaatacatcgacttcaagcctcaat

SEQ ID NO: 163263 - DNA, 25 bp, Saccharomyces pastorianus
acaagttggcttgcttgggttgctg

SEQ ID NO: 163264 - DNA, 25 bp, Saccharomyces pastorianus
gggccctggttacggagaccacaat

SEQ ID NO: 163265 - DNA, 25 bp, Saccharomyces pastorianus
taacgatgtcggaaccaccgtcact

SEQ ID NO: 163266 - DNA, 25 bp, Saccharomyces pastorianus
gtattcactaccactaacgatgtcg

SEQ ID NO: 163267 - DNA, 25 bp, Saccharomyces pastorianus
ggtttcttcactacggtattcacta

SEQ ID NO: 163268 - DNA, 25 bp, Saccharomyces pastorianus
tacgctgctactttctttgtcgttg

SEQ ID NO: 163269 - DNA, 25 bp, Saccharomyces pastorianus
gtcactcttactcagacagtcaaca

SEQ ID NO: 163270 - DNA, 25 bp, Saccharomyces pastorianus
ttgtcgttgtggtcagctgcggtca

SEQ ID NO: 163271 - DNA, 25 bp, Saccharomyces pastorianus
actaccgctcaaacaggtttcttca

SEQ ID NO: 163272 - DNA, 25 bp, Saccharomyces pastorianus
tgcgtcgcacgctattacattcatt

SEQ ID NO: 163273 - DNA, 25 bp, Saccharomyces pastorianus
ggcagctgtgacaactcaggttaca

SEQ ID NO: 163274 - DNA, 25 bp, Saccharomyces pastorianus
attacattcattcgctacgctgcta

SEQ ID NO: 163275 - DNA, 25 bp, Saccharomyces pastorianus
accccttcgggacaagatgagaaat

SEQ ID NO: 163276 - DNA, 25 bp, Saccharomyces pastorianus
aagacagtagatgctcaaacgagaa

SEQ ID NO: 163277 - DNA, 25 bp, Saccharomyces pastorianus
gatcaagaatccgatcaagatcaaa

SEQ ID NO: 163278 - DNA, 25 bp, Saccharomyces pastorianus
agtagatgctcaaacgagaagggac

SEQ ID NO: 163279 - DNA, 25 bp, Saccharomyces pastorianus
gacaagatgagaaatcaccactgga

SEQ ID NO: 163280 - DNA, 25 bp, Saccharomyces pastorianus
ataccccttcgggacaagatgagaa

SEQ ID NO: 163281 - DNA, 25 bp, Saccharomyces pastorianus
aatcaccactggaaactaagacagt

SEQ ID NO: 163282 - DNA, 25 bp, Saccharomyces pastorianus
gatgagaaatcaccactggaaacta

SEQ ID NO: 163283 - DNA, 25 bp, Saccharomyces pastorianus
gaagagataccccttcgggacaaga

SEQ ID NO: 163284 - DNA, 25 bp, Saccharomyces pastorianus
agagataccccttcgggacaagatg

SEQ ID NO: 163285 - DNA, 25 bp, Saccharomyces pastorianus
ttctgagaatgatcaagaatccgat

SEQ ID NO: 163286 - DNA, 25 bp, Saccharomyces pastorianus
gcttaagagagatttcaacgacgaa

SEQ ID NO: 163287 - DNA, 25 bp, Saccharomyces pastorianus
gatcatataccgtgggcttaagaga

SEQ ID NO: 163288 - DNA, 25 bp, Saccharomyces pastorianus
ttcaacgacgaaagagatttagtgc

SEQ ID NO: 163289 - DNA, 25 bp, Saccharomyces pastorianus
cgtgatcatataccgtgggcttaag

SEQ ID NO: 163290 - DNA, 25 bp, Saccharomyces pastorianus
gcagaataaagccatcattgaaacg

SEQ ID NO: 163291 - DNA, 25 bp, Saccharomyces pastorianus
cgacgaaagagatttagtgcagaat

SEQ ID NO: 163292 - DNA, 25 bp, Saccharomyces pastorianus
ccgtgggcttaagagagatttcaac

SEQ ID NO: 163293 - DNA, 25 bp, Saccharomyces pastorianus
tataccgtgggcttaagagagattt

SEQ ID NO: 163294 - DNA, 25 bp, Saccharomyces pastorianus
ttagtgcagaataaagccatcattg

SEQ ID NO: 163295 - DNA, 25 bp, Saccharomyces pastorianus
aacgtgatcatataccgtgggctta

SEQ ID NO: 163296 - DNA, 25 bp, Saccharomyces pastorianus
gaaacgtgatcatataccgtgggct

SEQ ID NO: 163297 - DNA, 25 bp, Saccharomyces pastorianus
aaacgcgagtgcctattatcaaatt

SEQ ID NO: 163298 - DNA, 25 bp, Saccharomyces pastorianus
ggagtaaattctcgctagctattca

SEQ ID NO: 163299 - DNA, 25 bp, Saccharomyces pastorianus
agagccccaatcacagttacatatt

SEQ ID NO: 163300 - DNA, 25 bp, Saccharomyces pastorianus
aacctgggtgttctactgattgact

SEQ ID NO: 163301 - DNA, 25 bp, Saccharomyces pastorianus
ggtgccttcgaactgttggtcaata

SEQ ID NO: 163302 - DNA, 25 bp, Saccharomyces pastorianus
agcatatctgatggttacgcctctt

SEQ ID NO: 163303 - DNA, 25 bp, Saccharomyces pastorianus
gctagctattcaagatcctggtgat

SEQ ID NO: 163304 - DNA, 25 bp, Saccharomyces pastorianus
atcgacgttctagataacctgggtg

SEQ ID NO: 163305 - DNA, 25 bp, Saccharomyces pastorianus
taagagactctccagggttacgtga

SEQ ID NO: 163306 - DNA, 25 bp, Saccharomyces pastorianus
ggttacgcctcttatattcctaaat

SEQ ID NO: 163307 - DNA, 25 bp, Saccharomyces pastorianus
aaaaaggcctttgctggtgccttcg

SEQ ID NO: 163308 - DNA, 25 bp, Saccharomyces pastorianus
aaagaggttcacacggagggcctgt

SEQ ID NO: 163309 - DNA, 25 bp, Saccharomyces pastorianus
gcgtctacagactatattccgaata

SEQ ID NO: 163310 - DNA, 25 bp, Saccharomyces pastorianus
tacaggtagtggacgcttccgagaa

SEQ ID NO: 163311 - DNA, 25 bp, Saccharomyces pastorianus
taaatcccgtttgcacgagtcactt

SEQ ID NO: 163312 - DNA, 25 bp, Saccharomyces pastorianus
gttagacgacgttcttcccaatata

SEQ ID NO: 163313 - DNA, 25 bp, Saccharomyces pastorianus
actggttcctagagttgcgtctaca

SEQ ID NO: 163314 - DNA, 25 bp, Saccharomyces pastorianus
gtatggaacagctaccatcttcgca

SEQ ID NO: 163315 - DNA, 25 bp, Saccharomyces pastorianus
gaactcaggttttccgtctgatgca

SEQ ID NO: 163316 - DNA, 25 bp, Saccharomyces pastorianus
gaatcaatgacaccccagagttagt

SEQ ID NO: 163317 - DNA, 25 bp, Saccharomyces pastorianus
catcttcgcacaaacgtaaacccgt

SEQ ID NO: 163318 - DNA, 25 bp, Saccharomyces pastorianus
ccgtaataccgtgggacgcatctat

SEQ ID NO: 163319 - DNA, 25 bp, Saccharomyces pastorianus
ttggccttttattccatcttgggac

SEQ ID NO: 163320 - DNA, 25 bp, Saccharomyces pastorianus
gaaatcaagctctggaggcgccttt

SEQ ID NO: 163321 - DNA, 25 bp, Saccharomyces pastorianus
gatctcggttcccttcaatgaagtt

SEQ ID NO: 163322 - DNA, 25 bp, Saccharomyces pastorianus
tcgtatacgtccttttccagtgtaa

SEQ ID NO: 163323 - DNA, 25 bp, Saccharomyces pastorianus
gacatgtcctgaaaatagccaccgt

SEQ ID NO: 163324 - DNA, 25 bp, Saccharomyces pastorianus
atacattccttcctcaatcaacgat

SEQ ID NO: 163325 - DNA, 25 bp, Saccharomyces pastorianus
gccaccgtagtgtgcattaccgtat

SEQ ID NO: 163326 - DNA, 25 bp, Saccharomyces pastorianus
taccgtattgatatgcttcgctgtt

SEQ ID NO: 163327 - DNA, 25 bp, Saccharomyces pastorianus
gatggcgcccgttgcatggaatgaa

SEQ ID NO: 163328 - DNA, 25 bp, Saccharomyces pastorianus
ttaaccatatctgcgcttcacaatt

SEQ ID NO: 163329 - DNA, 25 bp, Saccharomyces pastorianus
gggatttgctcatccaatcaatcag

SEQ ID NO: 163330 - DNA, 25 bp, Saccharomyces pastorianus
attgggcataactcccgatgacgat

SEQ ID NO: 163331 - DNA, 25 bp, Saccharomyces pastorianus
agaacacccttagctaaggtccctg

SEQ ID NO: 163332 - DNA, 25 bp, Saccharomyces pastorianus
atgaagtgccaaagcggtctcccga

SEQ ID NO: 163333 - DNA, 25 bp, Saccharomyces pastorianus
aaaactgatcgtagcattacccctc

SEQ ID NO: 163334 - DNA, 25 bp, Saccharomyces pastorianus
ggtgcaaacaactcggcaatgggtt

SEQ ID NO: 163335 - DNA, 25 bp, Saccharomyces pastorianus
ctgcggcctttcaatcaactggatt

SEQ ID NO: 163336 - DNA, 25 bp, Saccharomyces pastorianus
atccaaagacgagagcgccaccagg

SEQ ID NO: 163337 - DNA, 25 bp, Saccharomyces pastorianus
atgggttcgcccaggaatccaaaga

SEQ ID NO: 163338 - DNA, 25 bp, Saccharomyces pastorianus
cctcgccttcaaatatttaccaacg

SEQ ID NO: 163339 - DNA, 25 bp, Saccharomyces pastorianus
gccaccaggtccatacaatcaggga

SEQ ID NO: 163340 - DNA, 25 bp, Saccharomyces pastorianus
cccgtaccaaccttatgcgatgaat

SEQ ID NO: 163341 - DNA, 25 bp, Saccharomyces pastorianus
ggaaactaacccattgctcaaacta

SEQ ID NO: 163342 - DNA, 25 bp, Saccharomyces pastorianus
aactagtgcttgagtctggcgtggt

SEQ ID NO: 163343 - DNA, 25 bp, Saccharomyces pastorianus
atatggttgctctgaccacatcagc

SEQ ID NO: 163344 - DNA, 25 bp, Saccharomyces pastorianus
aatttgtcatgccttgactgggtcc

SEQ ID NO: 163345 - DNA, 25 bp, Saccharomyces pastorianus
ggtgcatatcgtgttctgaggccca

SEQ ID NO: 163346 - DNA, 25 bp, Saccharomyces pastorianus
attcccattatgtactgtgcgcgat

SEQ ID NO: 163347 - DNA, 25 bp, Saccharomyces pastorianus
aattgttctggattctctgggagta

SEQ ID NO: 163348 - DNA, 25 bp, Saccharomyces pastorianus
ggtaacgacttagcattcgacccat

SEQ ID NO: 163349 - DNA, 25 bp, Saccharomyces pastorianus
tgcgcgatgacgttagagctcacag

SEQ ID NO: 163350 - DNA, 25 bp, Saccharomyces pastorianus
gactgggtccgcagatgttgctgac

SEQ ID NO: 163351 - DNA, 25 bp, Saccharomyces pastorianus
tatgggctctccatatgggtctttt

SEQ ID NO: 163352 - DNA, 25 bp, Saccharomyces pastorianus
aaacgtcaaagcgtggtgtccaccg

SEQ ID NO: 163353 - DNA, 25 bp, Saccharomyces pastorianus
gttcatcaataggttcgacgccaat

SEQ ID NO: 163354 - DNA, 25 bp, Saccharomyces pastorianus
aaagcctgcgcagacgtatttttct

SEQ ID NO: 163355 - DNA, 25 bp, Saccharomyces pastorianus
actgccattgctggtatttctgggc

SEQ ID NO: 163356 - DNA, 25 bp, Saccharomyces pastorianus
agttacttgaggtaccagggcacaa

SEQ ID NO: 163357 - DNA, 25 bp, Saccharomyces pastorianus
ccgcatcttcttcggattcattgaa

SEQ ID NO: 163358 - DNA, 25 bp, Saccharomyces pastorianus
aggagacacgcaaaccatctactgt

SEQ ID NO: 163359 - DNA, 25 bp, Saccharomyces pastorianus
atgacatcactgaggtcctttctac

SEQ ID NO: 163360 - DNA, 25 bp, Saccharomyces pastorianus
gaagatctccttcaatagcacaaca

SEQ ID NO: 163361 - DNA, 25 bp, Saccharomyces pastorianus
aacaaccatccctgatcatcggtat

SEQ ID NO: 163362 - DNA, 25 bp, Saccharomyces pastorianus
aattcttcaacatcgatgacttcgg

SEQ ID NO: 163363 - DNA, 25 bp, Saccharomyces pastorianus
ggactgcctcatatgggcacacata

SEQ ID NO: 163364 - DNA, 25 bp, Saccharomyces pastorianus
ggtgccctaagaaacttcggtattg

SEQ ID NO: 163365 - DNA, 25 bp, Saccharomyces pastorianus
taacacagcgcgtggtgccgtgata

SEQ ID NO: 163366 - DNA, 25 bp, Saccharomyces pastorianus
agccgtttgggttcgagaatttcat

SEQ ID NO: 163367 - DNA, 25 bp, Saccharomyces pastorianus
tgtaaacgtcccactgaaccacaat

SEQ ID NO: 163368 - DNA, 25 bp, Saccharomyces pastorianus
tatttttgctattgggtgccctaag

SEQ ID NO: 163369 - DNA, 25 bp, Saccharomyces pastorianus
atatcataacagacaccagcttcct

SEQ ID NO: 163370 - DNA, 25 bp, Saccharomyces pastorianus
atgtggttctccctttggatacgac

SEQ ID NO: 163371 - DNA, 25 bp, Saccharomyces pastorianus
gatgtcccaagtcttaggactgcct

SEQ ID NO: 163372 - DNA, 25 bp, Saccharomyces pastorianus
tgactgatgctttgcgttctggaaa

SEQ ID NO: 163373 - DNA, 25 bp, Saccharomyces pastorianus
tgaaccacaatactcaccatctaat

SEQ ID NO: 163374 - DNA, 25 bp, Saccharomyces pastorianus
ggcagtttttgacgctatgacaccc

SEQ ID NO: 163375 - DNA, 25 bp, Saccharomyces pastorianus
aaaacatacatactgtgccgcacgg

SEQ ID NO: 163376 - DNA, 25 bp, Saccharomyces pastorianus
aaaagacgacattcgcccaacttat

SEQ ID NO: 163377 - DNA, 25 bp, Saccharomyces pastorianus
aaacgccgcgactcaaaaacataca

SEQ ID NO: 163378 - DNA, 25 bp, Saccharomyces pastorianus
tgccgcacggcagtttttgacgcta

SEQ ID NO: 163379 - DNA, 25 bp, Saccharomyces pastorianus
tcgcccaacttatcactcgcttgaa

SEQ ID NO: 163380 - DNA, 25 bp, Saccharomyces pastorianus
gctatgacacccttttccccaagaa

SEQ ID NO: 163381 - DNA, 25 bp, Saccharomyces pastorianus
tttttgacgctatgacacccttttc

SEQ ID NO: 163382 - DNA, 25 bp, Saccharomyces pastorianus
ttatgccaagcccttaaacgccgcg

SEQ ID NO: 163383 - DNA, 25 bp, Saccharomyces pastorianus
tttccccaagaaaatcgcatattaa

SEQ ID NO: 163384 - DNA, 25 bp, Saccharomyces pastorianus
tcactcgcttgaaccactttttatg

SEQ ID NO: 163385 - DNA, 25 bp, Saccharomyces pastorianus
gttacgcagaccaagttatccacat

SEQ ID NO: 163386 - DNA, 25 bp, Saccharomyces pastorianus
gtatcttaccaaaatctttccctga

SEQ ID NO: 163387 - DNA, 25 bp, Saccharomyces pastorianus
gaaaatccattctacgtcgataccg

SEQ ID NO: 163388 - DNA, 25 bp, Saccharomyces pastorianus
gaaaggctctcgttggtattccatg

SEQ ID NO: 163389 - DNA, 25 bp, Saccharomyces pastorianus
ttgacccatctgataagcatgcgag

SEQ ID NO: 163390 - DNA, 25 bp, Saccharomyces pastorianus
cgtcgataccgtgaaatcctttcgt

SEQ ID NO: 163391 - DNA, 25 bp, Saccharomyces pastorianus
gaacgagaagccattgtctgccaaa

SEQ ID NO: 163392 - DNA, 25 bp, Saccharomyces pastorianus
aaatcctttcgtgataggcgttacg

SEQ ID NO: 163393 - DNA, 25 bp, Saccharomyces pastorianus
ggaaatctgtccaaaattgacccat

SEQ ID NO: 163394 - DNA, 25 bp, Saccharomyces pastorianus
taaaaagctttatctctcctaccca

SEQ ID NO: 163395 - DNA, 25 bp, Saccharomyces pastorianus
tacgtgtttaacaggtgccacaatc

SEQ ID NO: 163396 - DNA, 25 bp, Saccharomyces pastorianus
agataattactattccagcagcatt

SEQ ID NO: 163397 - DNA, 25 bp, Saccharomyces pastorianus
tcggagattccttccatggacgagg

SEQ ID NO: 163398 - DNA, 25 bp, Saccharomyces pastorianus
gaatcatatgcgaactccacttggg

SEQ ID NO: 163399 - DNA, 25 bp, Saccharomyces pastorianus
ttggtaatacaaacagctcccgtga

SEQ ID NO: 163400 - DNA, 25 bp, Saccharomyces pastorianus
agaagatccactagtattgccctcg

SEQ ID NO: 163401 - DNA, 25 bp, Saccharomyces pastorianus
gcagacttcactaaccaaatttttt

SEQ ID NO: 163402 - DNA, 25 bp, Saccharomyces pastorianus
tccacttgggaggtcttacaataca

SEQ ID NO: 163403 - DNA, 25 bp, Saccharomyces pastorianus
cgaggactatgttgggtggctaaat

SEQ ID NO: 163404 - DNA, 25 bp, Saccharomyces pastorianus
gtttccaatcctgttccaagggttg

SEQ ID NO: 163405 - DNA, 25 bp, Saccharomyces pastorianus
aatacaaggattccggtgagccagg

SEQ ID NO: 163406 - DNA, 25 bp, Saccharomyces pastorianus
aagggttgaacatccagattggcta

SEQ ID NO: 163407 - DNA, 25 bp, Saccharomyces pastorianus
atgcgtcagatgtcacaaagccttt

SEQ ID NO: 163408 - DNA, 25 bp, Saccharomyces pastorianus
ctcgttgaacggattttctcacctt

SEQ ID NO: 163409 - DNA, 25 bp, Saccharomyces pastorianus
caagtttgagtctcgtggtgccgga

SEQ ID NO: 163410 - DNA, 25 bp, Saccharomyces pastorianus
tgccatgtcatgttactttcaaaga

SEQ ID NO: 163411 - DNA, 25 bp, Saccharomyces pastorianus
gagttcattttagatcctcagtatg

SEQ ID NO: 163412 - DNA, 25 bp, Saccharomyces pastorianus
tcctggttcccatctgaatgtgaaa

SEQ ID NO: 163413 - DNA, 25 bp, Saccharomyces pastorianus
aactacgttctgatatcgaatccta

SEQ ID NO: 163414 - DNA, 25 bp, Saccharomyces pastorianus
aggcagctcctgaatctattttttc

SEQ ID NO: 163415 - DNA, 25 bp, Saccharomyces pastorianus
gactatgttattcctgttcttcctg

SEQ ID NO: 163416 - DNA, 25 bp, Saccharomyces pastorianus
gtgaaaaatccccttctagaacttg

SEQ ID NO: 163417 - DNA, 25 bp, Saccharomyces pastorianus
cgtggtgccggattttttatgtgaa

SEQ ID NO: 163418 - DNA, 25 bp, Saccharomyces pastorianus
cccgaatttgtgtctgtgaacccta

SEQ ID NO: 163419 - DNA, 25 bp, Saccharomyces pastorianus
ttccaaacgtcagggcatgcgccaa

SEQ ID NO: 163420 - DNA, 25 bp, Saccharomyces pastorianus
ggacaacttgtctatttgggaatca

SEQ ID NO: 163421 - DNA, 25 bp, Saccharomyces pastorianus
acaggtctgcgcctaatggattcaa

SEQ ID NO: 163422 - DNA, 25 bp, Saccharomyces pastorianus
gacaacaacaacaggcattttcgga

SEQ ID NO: 163423 - DNA, 25 bp, Saccharomyces pastorianus
gtaatccattactctggtccgatga

SEQ ID NO: 163424 - DNA, 25 bp, Saccharomyces pastorianus
aacgcatggttgttcttccaaacgt

SEQ ID NO: 163425 - DNA, 25 bp, Saccharomyces pastorianus
agagttccagctttaatcgatcatg

SEQ ID NO: 163426 - DNA, 25 bp, Saccharomyces pastorianus
tactctggtccgatgatttagctga

SEQ ID NO: 163427 - DNA, 25 bp, Saccharomyces pastorianus
gatggccttggctgaacgtagagaa

SEQ ID NO: 163428 - DNA, 25 bp, Saccharomyces pastorianus
tcaatcttggcgaacatagggcccc

SEQ ID NO: 163429 - DNA, 25 bp, Saccharomyces pastorianus
agtatatattcagccgacattctcg

SEQ ID NO: 163430 - DNA, 25 bp, Saccharomyces pastorianus
gccgacattctcgttaatttcagat

SEQ ID NO: 163431 - DNA, 25 bp, Saccharomyces pastorianus
accattagtttattactgttgttat

SEQ ID NO: 163432 - DNA, 25 bp, Saccharomyces pastorianus
tctcgttaatttcagattgcgatga

SEQ ID NO: 163433 - DNA, 25 bp, Saccharomyces pastorianus
atgaattgcaaggcggtaaccatta

SEQ ID NO: 163434 - DNA, 25 bp, Saccharomyces pastorianus
tattcagccgacattctcgttaatt

SEQ ID NO: 163435 - DNA, 25 bp, Saccharomyces pastorianus
tcagccgacattctcgttaatttca

SEQ ID NO: 163436 - DNA, 25 bp, Saccharomyces pastorianus
gcggtaaccattagtttattactgt

SEQ ID NO: 163437 - DNA, 25 bp, Saccharomyces pastorianus
aagagtatatattcagccgacattc

SEQ ID NO: 163438 - DNA, 25 bp, Saccharomyces pastorianus
gacattctcgttaatttcagattgc

SEQ ID NO: 163439 - DNA, 25 bp, Saccharomyces pastorianus
atatattcagccgacattctcgtta

SEQ ID NO: 163440 - DNA, 25 bp, Saccharomyces pastorianus
ctggcggtcaaggtttcggaagaca

SEQ ID NO: 163441 - DNA, 25 bp, Saccharomyces pastorianus
aaggatttggaggtcctggtccaca

SEQ ID NO: 163442 - DNA, 25 bp, Saccharomyces pastorianus
tccacaagagtttggtggtccaggt

SEQ ID NO: 163443 - DNA, 25 bp, Saccharomyces pastorianus
ttggaggtcctggtccacaagagtt

SEQ ID NO: 163444 - DNA, 25 bp, Saccharomyces pastorianus
ggtttcggaagacaaggcccacaag

SEQ ID NO: 163445 - DNA, 25 bp, Saccharomyces pastorianus
gtggccaaggattcggtggtccaaa

SEQ ID NO: 163446 - DNA, 25 bp, Saccharomyces pastorianus
ccaaatcctcaagaattcggcgggc

SEQ ID NO: 163447 - DNA, 25 bp, Saccharomyces pastorianus
ggtggtccaaatcctcaagaattcg

SEQ ID NO: 163448 - DNA, 25 bp, Saccharomyces pastorianus
aggcccacaaggatttggaggtcct

SEQ ID NO: 163449 - DNA, 25 bp, Saccharomyces pastorianus
aggtcctggtccacaagagtttggt

SEQ ID NO: 163450 - DNA, 25 bp, Saccharomyces pastorianus
gattcggtggtccaaatcctcaaga

SEQ ID NO: 163451 - DNA, 25 bp, Saccharomyces pastorianus
agactttaaaggctcggttgttcag

SEQ ID NO: 163452 - DNA, 25 bp, Saccharomyces pastorianus
gctcggttgttcagccaacgattga

SEQ ID NO: 163453 - DNA, 25 bp, Saccharomyces pastorianus
aaaggctcggttgttcagccaacga

SEQ ID NO: 163454 - DNA, 25 bp, Saccharomyces pastorianus
tcgccagttttttcttgttttactg

SEQ ID NO: 163455 - DNA, 25 bp, Saccharomyces pastorianus
agttgcatgaaacgccccatttacc

SEQ ID NO: 163456 - DNA, 25 bp, Saccharomyces pastorianus
ttcgtgcactttaatgagaagttgc

SEQ ID NO: 163457 - DNA, 25 bp, Saccharomyces pastorianus
gaatttgccgaatgatatcaagaga

SEQ ID NO: 163458 - DNA, 25 bp, Saccharomyces pastorianus
gagaagttgcatgaaacgccccatt

SEQ ID NO: 163459 - DNA, 25 bp, Saccharomyces pastorianus
atcaagagatcattcgtgcacttta

SEQ ID NO: 163460 - DNA, 25 bp, Saccharomyces pastorianus
gagatattctccctccagaattcaa

SEQ ID NO: 163461 - DNA, 25 bp, Saccharomyces pastorianus
gttcagccaacgattgaaaacattc

SEQ ID NO: 163462 - DNA, 25 bp, Saccharomyces pastorianus
attgcctccatacggtttaatgtct

SEQ ID NO: 163463 - DNA, 25 bp, Saccharomyces pastorianus
tgccagctcgcaacaaccaatgatg

SEQ ID NO: 163464 - DNA, 25 bp, Saccharomyces pastorianus
atattactggatctgcctcgatttc

SEQ ID NO: 163465 - DNA, 25 bp, Saccharomyces pastorianus
atcccaacatggttcttcgttcttt

SEQ ID NO: 163466 - DNA, 25 bp, Saccharomyces pastorianus
ttccctaacctcttcaaattcattg

SEQ ID NO: 163467 - DNA, 25 bp, Saccharomyces pastorianus
tttaatgtcttctcaatcgcagcac

SEQ ID NO: 163468 - DNA, 25 bp, Saccharomyces pastorianus
gtaccgcccgcaagattaagttcaa

SEQ ID NO: 163469 - DNA, 25 bp, Saccharomyces pastorianus
tataccttccagcatcaacggttac

SEQ ID NO: 163470 - DNA, 25 bp, Saccharomyces pastorianus
ggaaatacttctgcatcccaacatg

SEQ ID NO: 163471 - DNA, 25 bp, Saccharomyces pastorianus
gacagccattgcacctacgaatagc

SEQ ID NO: 163472 - DNA, 25 bp, Saccharomyces pastorianus
tctactacctcattatcctcaaata

SEQ ID NO: 163473 - DNA, 25 bp, Saccharomyces pastorianus
gaaaatagcggcgtctctgcttctt

SEQ ID NO: 163474 - DNA, 25 bp, Saccharomyces pastorianus
gaacgtgccgattggttgtcaagac

SEQ ID NO: 163475 - DNA, 25 bp, Saccharomyces pastorianus
gtgtggcagggcaagcgacctcaaa

SEQ ID NO: 163476 - DNA, 25 bp, Saccharomyces pastorianus
agggatatcccgcaagtattccatc

SEQ ID NO: 163477 - DNA, 25 bp, Saccharomyces pastorianus
gacctcaaatatcctcatcgtgacg

SEQ ID NO: 163478 - DNA, 25 bp, Saccharomyces pastorianus
aaacggcttcctcagacaggtacaa

SEQ ID NO: 163479 - DNA, 25 bp, Saccharomyces pastorianus
atctcacgaacagcgctctggaatt

SEQ ID NO: 163480 - DNA, 25 bp, Saccharomyces pastorianus
aacgtacagcgttccagggtgtggc

SEQ ID NO: 163481 - DNA, 25 bp, Saccharomyces pastorianus
aatgggcctatcgaccaacatgttc

SEQ ID NO: 163482 - DNA, 25 bp, Saccharomyces pastorianus
aggtctacgctagccaattttgata

SEQ ID NO: 163483 - DNA, 25 bp, Saccharomyces pastorianus
attttaccaactgaatgcccaggcc

SEQ ID NO: 163484 - DNA, 25 bp, Saccharomyces pastorianus
gaccagtaaggcctcaatttatttt

SEQ ID NO: 163485 - DNA, 25 bp, Saccharomyces pastorianus
ggctccacttactgtttgtacctaa

SEQ ID NO: 163486 - DNA, 25 bp, Saccharomyces pastorianus
ggcggaaattcccttaatgaccagt

SEQ ID NO: 163487 - DNA, 25 bp, Saccharomyces pastorianus
ttcatcatcgttgctgttgtcttag

SEQ ID NO: 163488 - DNA, 25 bp, Saccharomyces pastorianus
tcggcctactgagccatcttatgat

SEQ ID NO: 163489 - DNA, 25 bp, Saccharomyces pastorianus
tgagtccttcttacatcaatgtttt

SEQ ID NO: 163490 - DNA, 25 bp, Saccharomyces pastorianus
gatctctcgtgattatcttttgggt

SEQ ID NO: 163491 - DNA, 25 bp, Saccharomyces pastorianus
tgggtcatcacaaatttcatcatcg

SEQ ID NO: 163492 - DNA, 25 bp, Saccharomyces pastorianus
gtgcaatggcaaatccgctgggtaa

SEQ ID NO: 163493 - DNA, 25 bp, Saccharomyces pastorianus
aatggaagttctggtctctagttca

SEQ ID NO: 163494 - DNA, 25 bp, Saccharomyces pastorianus
gatattgttatctctctgggctcca

SEQ ID NO: 163495 - DNA, 25 bp, Saccharomyces pastorianus
cacgatccttgacccatcattgtat

SEQ ID NO: 163496 - DNA, 25 bp, Saccharomyces pastorianus
ttcctattttgctgtttaaagtaag

SEQ ID NO: 163497 - DNA, 25 bp, Saccharomyces pastorianus
atggaccaaagcacgatccttgacc

SEQ ID NO: 163498 - DNA, 25 bp, Saccharomyces pastorianus
ttcagtttctcggtagcttttccta

SEQ ID NO: 163499 - DNA, 25 bp, Saccharomyces pastorianus
tttacttttcagtttctcggtagct

SEQ ID NO: 163500 - DNA, 25 bp, Saccharomyces pastorianus
aaagcacgatccttgacccatcatt

SEQ ID NO: 163501 - DNA, 25 bp, Saccharomyces pastorianus
atccacccatggaccaaagcacgat

SEQ ID NO: 163502 - DNA, 25 bp, Saccharomyces pastorianus
tttctcggtagcttttcctattttg

SEQ ID NO: 163503 - DNA, 25 bp, Saccharomyces pastorianus
ggtagcttttcctattttgctgttt

SEQ ID NO: 163504 - DNA, 25 bp, Saccharomyces pastorianus
taaatagtaccctcactaaacacgt

SEQ ID NO: 163505 - DNA, 25 bp, Saccharomyces pastorianus
tagtaccctcactaaacacgtacgg

SEQ ID NO: 163506 - DNA, 25 bp, Saccharomyces pastorianus
tgaagtactagaaccttccgtatat

SEQ ID NO: 163507 - DNA, 25 bp, Saccharomyces pastorianus
atatcatatctttacagcaaccgga

SEQ ID NO: 163508 - DNA, 25 bp, Saccharomyces pastorianus
atcgtcgatgaaaaaggctacactt

SEQ ID NO: 163509 - DNA, 25 bp, Saccharomyces pastorianus
tctgattcttctggagaggctcctg

SEQ ID NO: 163510 - DNA, 25 bp, Saccharomyces pastorianus
ttagcgattgcttctgattcttctg

SEQ ID NO: 163511 - DNA, 25 bp, Saccharomyces pastorianus
ggaggtctcgacgttatgaaagcta

SEQ ID NO: 163512 - DNA, 25 bp, Saccharomyces pastorianus
gcaaccggaacaattagcatcacag

SEQ ID NO: 163513 - DNA, 25 bp, Saccharomyces pastorianus
atgcaggcagcttctctaataggtt

SEQ ID NO: 163514 - DNA, 25 bp, Saccharomyces pastorianus
caggaggatcactattcggaagcat

SEQ ID NO: 163515 - DNA, 25 bp, Saccharomyces pastorianus
gcatcacagagcttattatctcctt

SEQ ID NO: 163516 - DNA, 25 bp, Saccharomyces pastorianus
aagctatatctcagtgtcacttttc

SEQ ID NO: 163517 - DNA, 25 bp, Saccharomyces pastorianus
gtcatcatcatggtcgtcgttatca

SEQ ID NO: 163518 - DNA, 25 bp, Saccharomyces pastorianus
gtatagttcccaatatgacccagct

SEQ ID NO: 163519 - DNA, 25 bp, Saccharomyces pastorianus
acacatacttgtcttccatatctac

SEQ ID NO: 163520 - DNA, 25 bp, Saccharomyces pastorianus
attttctcatcgacgtcaccaatgt

SEQ ID NO: 163521 - DNA, 25 bp, Saccharomyces pastorianus
gttttacagttcatcgctttcatcg

SEQ ID NO: 163522 - DNA, 25 bp, Saccharomyces pastorianus
gttttcgttcgacagcagatcttct

SEQ ID NO: 163523 - DNA, 25 bp, Saccharomyces pastorianus
gcttcatcttcgacagtttccataa

SEQ ID NO: 163524 - DNA, 25 bp, Saccharomyces pastorianus
agatcttctattttctcaccatcaa

SEQ ID NO: 163525 - DNA, 25 bp, Saccharomyces pastorianus
tggttctcaacaatttctccttcta

SEQ ID NO: 163526 - DNA, 25 bp, Saccharomyces pastorianus
gttatcatcaccatcttcgttactg

SEQ ID NO: 163527 - DNA, 25 bp, Saccharomyces pastorianus
gctacctcctcatactcaataatta

SEQ ID NO: 163528 - DNA, 25 bp, Saccharomyces pastorianus
ctgccagtaacgtttgatagcccta

SEQ ID NO: 163529 - DNA, 25 bp, Saccharomyces pastorianus
gcaacgcgcaaatggctatagcaca

SEQ ID NO: 163530 - DNA, 25 bp, Saccharomyces pastorianus
tattctgacaggcacgttcgacgac

SEQ ID NO: 163531 - DNA, 25 bp, Saccharomyces pastorianus
atggcccaaaggacccgaagcagtt

SEQ ID NO: 163532 - DNA, 25 bp, Saccharomyces pastorianus
tttgccgatggtgaaggaccccagt

SEQ ID NO: 163533 - DNA, 25 bp, Saccharomyces pastorianus
acgactggaaaggtactttgccgat

SEQ ID NO: 163534 - DNA, 25 bp, Saccharomyces pastorianus
ggctatagcacactggtacctgaaa

SEQ ID NO: 163535 - DNA, 25 bp, Saccharomyces pastorianus
cgccttcgaaataacgctgccagta

SEQ ID NO: 163536 - DNA, 25 bp, Saccharomyces pastorianus
gatagccctagcagcaagttttatt

SEQ ID NO: 163537 - DNA, 25 bp, Saccharomyces pastorianus
gagcctacctcaatttacgttcaaa

SEQ ID NO: 163538 - DNA, 25 bp, Saccharomyces pastorianus
gttgatggccaatggctgccaagca

SEQ ID NO: 163539 - DNA, 25 bp, Saccharomyces pastorianus
attagacagagtgtcttccggtaat

SEQ ID NO: 163540 - DNA, 25 bp, Saccharomyces pastorianus
agtgtcttccggtaataaggatcta

SEQ ID NO: 163541 - DNA, 25 bp, Saccharomyces pastorianus
gtgtcttccggtaataaggatctag

SEQ ID NO: 163542 - DNA, 25 bp, Saccharomyces pastorianus
gtattagacagagtgtcttccggta

SEQ ID NO: 163543 - DNA, 25 bp, Saccharomyces pastorianus
tggtccttttaactggaaaaatgtg

SEQ ID NO: 163544 - DNA, 25 bp, Saccharomyces pastorianus
acttgtattagacagagtgtcttcc

SEQ ID NO: 163545 - DNA, 25 bp, Saccharomyces pastorianus
agacagagtgtcttccggtaataag

SEQ ID NO: 163546 - DNA, 25 bp, Saccharomyces pastorianus
acagagtgtcttccggtaataagga

SEQ ID NO: 163547 - DNA, 25 bp, Saccharomyces pastorianus
gacagagtgtcttccggtaataagg

SEQ ID NO: 163548 - DNA, 25 bp, Saccharomyces pastorianus
gagtgtcttccggtaataaggatct

SEQ ID NO: 163549 - DNA, 25 bp, Saccharomyces pastorianus
gaagatggtaccaaacttggtcctt

SEQ ID NO: 163550 - DNA, 25 bp, Saccharomyces pastorianus
aaccatagttgtaggaggtgacaat

SEQ ID NO: 163551 - DNA, 25 bp, Saccharomyces pastorianus
tgaatacaaccatgagagcagccgt

SEQ ID NO: 163552 - DNA, 25 bp, Saccharomyces pastorianus
tcccaatcgctctggaggaagcact

SEQ ID NO: 163553 - DNA, 25 bp, Saccharomyces pastorianus
aaaattgtcccaatcgctctggagg

SEQ ID NO: 163554 - DNA, 25 bp, Saccharomyces pastorianus
aaccgcaaaccatagttgtaggagg

SEQ ID NO: 163555 - DNA, 25 bp, Saccharomyces pastorianus
aaacaccccatgacgataattcaga

SEQ ID NO: 163556 - DNA, 25 bp, Saccharomyces pastorianus
gagagcagccgtttagctgatcaaa

SEQ ID NO: 163557 - DNA, 25 bp, Saccharomyces pastorianus
agcactcccttagattctcaaacta

SEQ ID NO: 163558 - DNA, 25 bp, Saccharomyces pastorianus
gatctagatatacaaccgcaaacca

SEQ ID NO: 163559 - DNA, 25 bp, Saccharomyces pastorianus
aggaagcactcccttagattctcaa

SEQ ID NO: 163560 - DNA, 25 bp, Saccharomyces pastorianus
tttagctgatcaaacaccccatgac

SEQ ID NO: 163561 - DNA, 25 bp, Saccharomyces pastorianus
gaatttcggttcctcgtcgaataag

SEQ ID NO: 163562 - DNA, 25 bp, Saccharomyces pastorianus
gtgaccccaagattcctatgcaaaa

SEQ ID NO: 163563 - DNA, 25 bp, Saccharomyces pastorianus
gggtagggccatggactatttgtct

SEQ ID NO: 163564 - DNA, 25 bp, Saccharomyces pastorianus
gcctttgagaggttctaacactgcc

SEQ ID NO: 163565 - DNA, 25 bp, Saccharomyces pastorianus
aacactgccaaagtgagctctactt

SEQ ID NO: 163566 - DNA, 25 bp, Saccharomyces pastorianus
gggccagtgttagaatccagagagt

SEQ ID NO: 163567 - DNA, 25 bp, Saccharomyces pastorianus
gccgggatggctcaagttctaacga

SEQ ID NO: 163568 - DNA, 25 bp, Saccharomyces pastorianus
attggcgcttccttaagagtcacta

SEQ ID NO: 163569 - DNA, 25 bp, Saccharomyces pastorianus
ggactatttgtctatccagctaaac

SEQ ID NO: 163570 - DNA, 25 bp, Saccharomyces pastorianus
gagtctgttacctgagagggccagt

SEQ ID NO: 163571 - DNA, 25 bp, Saccharomyces pastorianus
gaaaattgctaaaggtgaccccaag

SEQ ID NO: 163572 - DNA, 25 bp, Saccharomyces pastorianus
aaaagacgcagaacgtctcgacaac

SEQ ID NO: 163573 - DNA, 25 bp, Saccharomyces pastorianus
aagacgcagaacgtctcgacaacaa

SEQ ID NO: 163574 - DNA, 25 bp, Saccharomyces pastorianus
aatagagactttagaggacaagcaa

SEQ ID NO: 163575 - DNA, 25 bp, Saccharomyces pastorianus
tcgacaacaaaatagagactttaga

SEQ ID NO: 163576 - DNA, 25 bp, Saccharomyces pastorianus
gaaaaagacgcagaacgtctcgaca

SEQ ID NO: 163577 - DNA, 25 bp, Saccharomyces pastorianus
gcagaacgtctcgacaacaaaatag

SEQ ID NO: 163578 - DNA, 25 bp, Saccharomyces pastorianus
gaacgtctcgacaacaaaatagaga

SEQ ID NO: 163579 - DNA, 25 bp, Saccharomyces pastorianus
gcacagctcgaaaaagacgcagaac

SEQ ID NO: 163580 - DNA, 25 bp, Saccharomyces pastorianus
acgcagaacgtctcgacaacaaaat

SEQ ID NO: 163581 - DNA, 25 bp, Saccharomyces pastorianus
gacgcagaacgtctcgacaacaaaa

SEQ ID NO: 163582 - DNA, 25 bp, Saccharomyces pastorianus
acagctcgaaaaagacgcagaacgt

SEQ ID NO: 163583 - DNA, 25 bp, Saccharomyces pastorianus
gcaaaagatcaacgagttttcgaag

SEQ ID NO: 163584 - DNA, 25 bp, Saccharomyces pastorianus
gatgtgtctctagaaattgaattga

SEQ ID NO: 163585 - DNA, 25 bp, Saccharomyces pastorianus
ggtaacgttcgaagatcagcaaaag

SEQ ID NO: 163586 - DNA, 25 bp, Saccharomyces pastorianus
gtaaggacgccattgcgcaggaatt

SEQ ID NO: 163587 - DNA, 25 bp, Saccharomyces pastorianus
cctcgatgatgtgtctctagaaatt

SEQ ID NO: 163588 - DNA, 25 bp, Saccharomyces pastorianus
ttatgcgtaaggacgccattgcgca

SEQ ID NO: 163589 - DNA, 25 bp, Saccharomyces pastorianus
gtacctcgatgatgtgtctctagaa

SEQ ID NO: 163590 - DNA, 25 bp, Saccharomyces pastorianus
gttttcgaagttgattatgcgtaag

SEQ ID NO: 163591 - DNA, 25 bp, Saccharomyces pastorianus
gacgccattgcgcaggaattgagtt

SEQ ID NO: 163592 - DNA, 25 bp, Saccharomyces pastorianus
attgcgcaggaattgagtttacaga

SEQ ID NO: 163593 - DNA, 25 bp, Saccharomyces pastorianus
aacaacactcaggtaacgttcgaag

SEQ ID NO: 163594 - DNA, 25 bp, Saccharomyces pastorianus
gacgatgcagatttacacggctttg

SEQ ID NO: 163595 - DNA, 25 bp, Saccharomyces pastorianus
gtcgccttcgttcaatgagcacggt

SEQ ID NO: 163596 - DNA, 25 bp, Saccharomyces pastorianus
gctccattttggaactgggcataaa

SEQ ID NO: 163597 - DNA, 25 bp, Saccharomyces pastorianus
aatgcaagttcttctgatcacaagg

SEQ ID NO: 163598 - DNA, 25 bp, Saccharomyces pastorianus
tgcgccaactaccatatcaacgtcg

SEQ ID NO: 163599 - DNA, 25 bp, Saccharomyces pastorianus
gatacgatccgagccaactttaaat

SEQ ID NO: 163600 - DNA, 25 bp, Saccharomyces pastorianus
atgacagtcaagaggcacccattct

SEQ ID NO: 163601 - DNA, 25 bp, Saccharomyces pastorianus
ttaagtgtcttaataccaccctctc

SEQ ID NO: 163602 - DNA, 25 bp, Saccharomyces pastorianus
ccgtcgaccgcaagtattctgataa

SEQ ID NO: 163603 - DNA, 25 bp, Saccharomyces pastorianus
agaggcttcttttctaagctccatt

SEQ ID NO: 163604 - DNA, 25 bp, Saccharomyces pastorianus
gtttaaaaagatcacactccggaga

SEQ ID NO: 163605 - DNA, 25 bp, Saccharomyces pastorianus
aacccaatattttactgccatccaa

SEQ ID NO: 163606 - DNA, 25 bp, Saccharomyces pastorianus
aatcaacactgctagcacatgcaaa

SEQ ID NO: 163607 - DNA, 25 bp, Saccharomyces pastorianus
gaaatcgaatcatcaccgttaaaat

SEQ ID NO: 163608 - DNA, 25 bp, Saccharomyces pastorianus
ctgcgctacgcaaatgatgtacagg

SEQ ID NO: 163609 - DNA, 25 bp, Saccharomyces pastorianus
actcttcgccgactagtgaatttag

SEQ ID NO: 163610 - DNA, 25 bp, Saccharomyces pastorianus
aggctacgtcgatcgtggtgtcgaa

SEQ ID NO: 163611 - DNA, 25 bp, Saccharomyces pastorianus
gtcaagtcatgatgccggtatttct

SEQ ID NO: 163612 - DNA, 25 bp, Saccharomyces pastorianus
ggagaaagaccaccagattacagat

SEQ ID NO: 163613 - DNA, 25 bp, Saccharomyces pastorianus
aagtatccccatcgataattttgat

SEQ ID NO: 163614 - DNA, 25 bp, Saccharomyces pastorianus
gatatgctgcgaactcaacattcca

SEQ ID NO: 163615 - DNA, 25 bp, Saccharomyces pastorianus
aagacactggaaaccttgctagcaa

SEQ ID NO: 163616 - DNA, 25 bp, Saccharomyces pastorianus
atcatcgccctaactgttgcattta

SEQ ID NO: 163617 - DNA, 25 bp, Saccharomyces pastorianus
tttggaaagccgctgtgacactcgt

SEQ ID NO: 163618 - DNA, 25 bp, Saccharomyces pastorianus
ccttatatattttcccgccagtatt

SEQ ID NO: 163619 - DNA, 25 bp, Saccharomyces pastorianus
ttgccaacgatgactacccttatat

SEQ ID NO: 163620 - DNA, 25 bp, Saccharomyces pastorianus
tttacaggttatgtcggtgccgcat

SEQ ID NO: 163621 - DNA, 25 bp, Saccharomyces pastorianus
gattggcaacctttatcctggattt

SEQ ID NO: 163622 - DNA, 25 bp, Saccharomyces pastorianus
atccggcgaatcattaccacagtgg

SEQ ID NO: 163623 - DNA, 25 bp, Saccharomyces pastorianus
ataagccaagctcctgacaatgcac

SEQ ID NO: 163624 - DNA, 25 bp, Saccharomyces pastorianus
aaggctttgttcgtgactaccgcta

SEQ ID NO: 163625 - DNA, 25 bp, Saccharomyces pastorianus
ttgagaccgtgctctatggccgtga

SEQ ID NO: 163626 - DNA, 25 bp, Saccharomyces pastorianus
ttatcccatgggtcaaggctttgtt

SEQ ID NO: 163627 - DNA, 25 bp, Saccharomyces pastorianus
ggtaatttcttttccactatcatga

SEQ ID NO: 163628 - DNA, 25 bp, Saccharomyces pastorianus
gatgtcgcagacgttgatttctttt

SEQ ID NO: 163629 - DNA, 25 bp, Saccharomyces pastorianus
tatgtttctaattcacccatccaaa

SEQ ID NO: 163630 - DNA, 25 bp, Saccharomyces pastorianus
atatatttgcgccaattttcctccg

SEQ ID NO: 163631 - DNA, 25 bp, Saccharomyces pastorianus
tcatcgaattacaacaacgggccat

SEQ ID NO: 163632 - DNA, 25 bp, Saccharomyces pastorianus
ggctttacaatttccgaaccagatt

SEQ ID NO: 163633 - DNA, 25 bp, Saccharomyces pastorianus
attttggtcggtgattctggtgaac

SEQ ID NO: 163634 - DNA, 25 bp, Saccharomyces pastorianus
catcaagcatactggcgttacgggt

SEQ ID NO: 163635 - DNA, 25 bp, Saccharomyces pastorianus
aattccatgagtgatgtcccatcgc

SEQ ID NO: 163636 - DNA, 25 bp, Saccharomyces pastorianus
gaagcgtataccactacggctttac

SEQ ID NO: 163637 - DNA, 25 bp, Saccharomyces pastorianus
tgaccaagtctaccgtacataccag

SEQ ID NO: 163638 - DNA, 25 bp, Saccharomyces pastorianus
gaatttgagtttgaaccccgctata

SEQ ID NO: 163639 - DNA, 25 bp, Saccharomyces pastorianus
atggcggtgtgctacatcttgaatt

SEQ ID NO: 163640 - DNA, 25 bp, Saccharomyces pastorianus
gccgggcttggaaattttgccacga

SEQ ID NO: 163641 - DNA, 25 bp, Saccharomyces pastorianus
ttgatccagagagcgataccacctt

SEQ ID NO: 163642 - DNA, 25 bp, Saccharomyces pastorianus
aaagccgttgttccattatctacta

SEQ ID NO: 163643 - DNA, 25 bp, Saccharomyces pastorianus
gtaactgccacggaattgcctcaat

SEQ ID NO: 163644 - DNA, 25 bp, Saccharomyces pastorianus
gataccacctttaatataccgttag

SEQ ID NO: 163645 - DNA, 25 bp, Saccharomyces pastorianus
tgtagtcaaacgtgaagccgggctt

SEQ ID NO: 163646 - DNA, 25 bp, Saccharomyces pastorianus
agactacgaatccactaactccaat

SEQ ID NO: 163647 - DNA, 25 bp, Saccharomyces pastorianus
aagagcacatcacccttctttaaaa

SEQ ID NO: 163648 - DNA, 25 bp, Saccharomyces pastorianus
ttagttcaagtgtcatggttccccg

SEQ ID NO: 163649 - DNA, 25 bp, Saccharomyces pastorianus
aaaaattctgctaatcctgtttgga

SEQ ID NO: 163650 - DNA, 25 bp, Saccharomyces pastorianus
ctggctattccaggcttaatgagat

SEQ ID NO: 163651 - DNA, 25 bp, Saccharomyces pastorianus
caacttctttccaagactggcttac

SEQ ID NO: 163652 - DNA, 25 bp, Saccharomyces pastorianus
acattctgttgcaatcttttactga

SEQ ID NO: 163653 - DNA, 25 bp, Saccharomyces pastorianus
ttactgatccacttacaatagccgt

SEQ ID NO: 163654 - DNA, 25 bp, Saccharomyces pastorianus
atacttgacatttgagctctctggt

SEQ ID NO: 163655 - DNA, 25 bp, Saccharomyces pastorianus
atacttgagccctgttttactccca

SEQ ID NO: 163656 - DNA, 25 bp, Saccharomyces pastorianus
tattgggtaactccgtctttaattg

SEQ ID NO: 163657 - DNA, 25 bp, Saccharomyces pastorianus
gaaaacagttgacccatacttgaca

SEQ ID NO: 163658 - DNA, 25 bp, Saccharomyces pastorianus
ccacctttctctttgcaacttaata

SEQ ID NO: 163659 - DNA, 25 bp, Saccharomyces pastorianus
tgacatttgatttgcgattttcccc

SEQ ID NO: 163660 - DNA, 25 bp, Saccharomyces pastorianus
gatatggtcggtcacattacttcaa

SEQ ID NO: 163661 - DNA, 25 bp, Saccharomyces pastorianus
aatatatcctcagtattcggtgcag

SEQ ID NO: 163662 - DNA, 25 bp, Saccharomyces pastorianus
aacaacttcaccaccaaaagcggat

SEQ ID NO: 163663 - DNA, 25 bp, Saccharomyces pastorianus
atttcataacttgcctgttagacag

SEQ ID NO: 163664 - DNA, 25 bp, Saccharomyces pastorianus
atagtgcttgatttgaaccccttca

SEQ ID NO: 163665 - DNA, 25 bp, Saccharomyces pastorianus
tagaatgcttgggatatacaccgat

SEQ ID NO: 163666 - DNA, 25 bp, Saccharomyces pastorianus
agcgccagtttaccaaatgtctcac

SEQ ID NO: 163667 - DNA, 25 bp, Saccharomyces pastorianus
tatacaccgatgatcctgatttctt

SEQ ID NO: 163668 - DNA, 25 bp, Saccharomyces pastorianus
ggacgaccgtgttagtttcgcagtt

SEQ ID NO: 163669 - DNA, 25 bp, Saccharomyces pastorianus
tgatttcttagacctcgattataaa

SEQ ID NO: 163670 - DNA, 25 bp, Saccharomyces pastorianus
ggccctatcttctttatgtggcata

SEQ ID NO: 163671 - DNA, 25 bp, Saccharomyces pastorianus
atcagatcaagtctttaaccgtcaa

SEQ ID NO: 163672 - DNA, 25 bp, Saccharomyces pastorianus
gatcaagtccttgacggtgaagaac

SEQ ID NO: 163673 - DNA, 25 bp, Saccharomyces pastorianus
agctggaagcgggactttctgactc

SEQ ID NO: 163674 - DNA, 25 bp, Saccharomyces pastorianus
gacaccaagctaaaggaaaccactg

SEQ ID NO: 163675 - DNA, 25 bp, Saccharomyces pastorianus
ttgctgcatctctggaaaactgtga

SEQ ID NO: 163676 - DNA, 25 bp, Saccharomyces pastorianus
actggacgaaattgctgcatctctg

SEQ ID NO: 163677 - DNA, 25 bp, Saccharomyces pastorianus
gagagtccgacttgaaggcagatca

SEQ ID NO: 163678 - DNA, 25 bp, Saccharomyces pastorianus
aagagtagctgccttggaagaacaa

SEQ ID NO: 163679 - DNA, 25 bp, Saccharomyces pastorianus
caacaacgacaatttctccaagaag

SEQ ID NO: 163680 - DNA, 25 bp, Saccharomyces pastorianus
gggactttctgactctaagcaaaca

SEQ ID NO: 163681 - DNA, 25 bp, Saccharomyces pastorianus
aactgtgatctactttgtttttgtt

SEQ ID NO: 163682 - DNA, 25 bp, Saccharomyces pastorianus
tgcggaatcattggcattttttttc

SEQ ID NO: 163683 - DNA, 25 bp, Saccharomyces pastorianus
ggaatcattggcattttttttcttt

SEQ ID NO: 163684 - DNA, 25 bp, Saccharomyces pastorianus
atgcggaatcattggcatttttttt

SEQ ID NO: 163685 - DNA, 25 bp, Saccharomyces pastorianus
cggaatcattggcattttttttctt

SEQ ID NO: 163686 - DNA, 25 bp, Saccharomyces pastorianus
tcattggcattttttttctttattt

SEQ ID NO: 163687 - DNA, 25 bp, Saccharomyces pastorianus
gcggaatcattggcattttttttct

SEQ ID NO: 163688 - DNA, 25 bp, Saccharomyces pastorianus
atcattggcattttttttctttatt

SEQ ID NO: 163689 - DNA, 25 bp, Saccharomyces pastorianus
aatcattggcattttttttctttat

SEQ ID NO: 163690 - DNA, 25 bp, Saccharomyces pastorianus
gaatcattggcattttttttcttta

SEQ ID NO: 163691 - DNA, 25 bp, Saccharomyces pastorianus
actcatgtggtgcactggtgttgtt

SEQ ID NO: 163692 - DNA, 25 bp, Saccharomyces pastorianus
taaactcatgtggtgcactggtgtt

SEQ ID NO: 163693 - DNA, 25 bp, Saccharomyces pastorianus
gtgtaaactcatgtggtgcactggt

SEQ ID NO: 163694 - DNA, 25 bp, Saccharomyces pastorianus
tgtggtgcactggtgttgtttccaa

SEQ ID NO: 163695 - DNA, 25 bp, Saccharomyces pastorianus
atgtgtaaactcatgtggtgcactg

SEQ ID NO: 163696 - DNA, 25 bp, Saccharomyces pastorianus
caagactgcactattaactgggaat

SEQ ID NO: 163697 - DNA, 25 bp, Saccharomyces pastorianus
gtgcactggtgttgtttccaagact

SEQ ID NO: 163698 - DNA, 25 bp, Saccharomyces pastorianus
gcactggtgttgtttccaagactgc

SEQ ID NO: 163699 - DNA, 25 bp, Saccharomyces pastorianus
actggtgttgtttccaagactgcac

SEQ ID NO: 163700 - DNA, 25 bp, Saccharomyces pastorianus
catgtggtgcactggtgttgtttcc

SEQ ID NO: 163701 - DNA, 25 bp, Saccharomyces pastorianus
tggtgcactggtgttgtttccaaga

SEQ ID NO: 163702 - DNA, 25 bp, Saccharomyces pastorianus
tattggtcgatttgtacccaacgaa

SEQ ID NO: 163703 - DNA, 25 bp, Saccharomyces pastorianus
aatgggttccttcttcacaggtaga

SEQ ID NO: 163704 - DNA, 25 bp, Saccharomyces pastorianus
tatctacccggtggtattggcggtt

SEQ ID NO: 163705 - DNA, 25 bp, Saccharomyces pastorianus
caaagtccgtttagtttgtcttctg

SEQ ID NO: 163706 - DNA, 25 bp, Saccharomyces pastorianus
gccgtcgtagcctatcttttatttg

SEQ ID NO: 163707 - DNA, 25 bp, Saccharomyces pastorianus
ttctgccccaaaatttcttggccgt

SEQ ID NO: 163708 - DNA, 25 bp, Saccharomyces pastorianus
aacgggttgattccacaagacgcag

SEQ ID NO: 163709 - DNA, 25 bp, Saccharomyces pastorianus
gacgttaatgctttcctctatttca

SEQ ID NO: 163710 - DNA, 25 bp, Saccharomyces pastorianus
agtggcgccatacaactatcatttg

SEQ ID NO: 163711 - DNA, 25 bp, Saccharomyces pastorianus
atttcatccggtttatcagtggcgc

SEQ ID NO: 163712 - DNA, 25 bp, Saccharomyces pastorianus
catcttcatgggttgctttgccaaa

SEQ ID NO: 163713 - DNA, 25 bp, Saccharomyces pastorianus
atacggtgttattatcttcttgagg

SEQ ID NO: 163714 - DNA, 25 bp, Saccharomyces pastorianus
atacgttattgcatccatcgggcta

SEQ ID NO: 163715 - DNA, 25 bp, Saccharomyces pastorianus
actgtggttgtgtatctgttgtttc

SEQ ID NO: 163716 - DNA, 25 bp, Saccharomyces pastorianus
acaatgtgtggcttttggtcttcat

SEQ ID NO: 163717 - DNA, 25 bp, Saccharomyces pastorianus
gcaggtaacctttccattaagccta

SEQ ID NO: 163718 - DNA, 25 bp, Saccharomyces pastorianus
agaggtacatttgttggcgccacct

SEQ ID NO: 163719 - DNA, 25 bp, Saccharomyces pastorianus
gttgttttctaattgcctttcttat

SEQ ID NO: 163720 - DNA, 25 bp, Saccharomyces pastorianus
gcggattgctttggacggagaccta

SEQ ID NO: 163721 - DNA, 25 bp, Saccharomyces pastorianus
tctattatcccgctttgaggcagtt

SEQ ID NO: 163722 - DNA, 25 bp, Saccharomyces pastorianus
gccacctcagggtttgttttactgg

SEQ ID NO: 163723 - DNA, 25 bp, Saccharomyces pastorianus
aggtatatctcccacagttagcggt

SEQ ID NO: 163724 - DNA, 25 bp, Saccharomyces pastorianus
gaagagctgcctccggataaatcaa

SEQ ID NO: 163725 - DNA, 25 bp, Saccharomyces pastorianus
agcaaattgcacgttcactgccatt

SEQ ID NO: 163726 - DNA, 25 bp, Saccharomyces pastorianus
tacatcttaagatcgcaaccgtttg

SEQ ID NO: 163727 - DNA, 25 bp, Saccharomyces pastorianus
gtggtggtaagctcgtgcaacataa

SEQ ID NO: 163728 - DNA, 25 bp, Saccharomyces pastorianus
gtttgcaagcctggtgttcttatac

SEQ ID NO: 163729 - DNA, 25 bp, Saccharomyces pastorianus
aaggcatactataccactgcatatt

SEQ ID NO: 163730 - DNA, 25 bp, Saccharomyces pastorianus
gcatcttttgcttccagaatgtagg

SEQ ID NO: 163731 - DNA, 25 bp, Saccharomyces pastorianus
taaatcaatccgctgggcttgctta

SEQ ID NO: 163732 - DNA, 25 bp, Saccharomyces pastorianus
atacgacctggtttgcatcttttgc

SEQ ID NO: 163733 - DNA, 25 bp, Saccharomyces pastorianus
gtaggactctcgagcaagcgaaact

SEQ ID NO: 163734 - DNA, 25 bp, Saccharomyces pastorianus
gttcactgccattgacgtgtcaaca

SEQ ID NO: 163735 - DNA, 25 bp, Saccharomyces pastorianus
tgaggcacctgtggcaaataatctt

SEQ ID NO: 163736 - DNA, 25 bp, Saccharomyces pastorianus
gatagaaagctcactgtagagacag

SEQ ID NO: 163737 - DNA, 25 bp, Saccharomyces pastorianus
agagacagaaacagttgaggcacct

SEQ ID NO: 163738 - DNA, 25 bp, Saccharomyces pastorianus
gcacctgtggcaaataatcttttat

SEQ ID NO: 163739 - DNA, 25 bp, Saccharomyces pastorianus
gaaagctcactgtagagacagaaac

SEQ ID NO: 163740 - DNA, 25 bp, Saccharomyces pastorianus
aacagttgaggcacctgtggcaaat

SEQ ID NO: 163741 - DNA, 25 bp, Saccharomyces pastorianus
aatcttttattgtcgaataacagta

SEQ ID NO: 163742 - DNA, 25 bp, Saccharomyces pastorianus
agaaacagttgaggcacctgtggca

SEQ ID NO: 163743 - DNA, 25 bp, Saccharomyces pastorianus
cagttgaggcacctgtggcaaataa

SEQ ID NO: 163744 - DNA, 25 bp, Saccharomyces pastorianus
gaagaagatagaaagctcactgtag

SEQ ID NO: 163745 - DNA, 25 bp, Saccharomyces pastorianus
tgtggcaaataatcttttattgtcg

SEQ ID NO: 163746 - DNA, 25 bp, Saccharomyces pastorianus
tatttacctgcccacacttcgattt

SEQ ID NO: 163747 - DNA, 25 bp, Saccharomyces pastorianus
aatgttgcctctttcaattgagcag

SEQ ID NO: 163748 - DNA, 25 bp, Saccharomyces pastorianus
cttcgatttcgaggtttacttactg

SEQ ID NO: 163749 - DNA, 25 bp, Saccharomyces pastorianus
atttccacccctcataaaatgttgc

SEQ ID NO: 163750 - DNA, 25 bp, Saccharomyces pastorianus
attgagcagagaagaccttcccgct

SEQ ID NO: 163751 - DNA, 25 bp, Saccharomyces pastorianus
ttcacaccgatttaaacctgtctgt

SEQ ID NO: 163752 - DNA, 25 bp, Saccharomyces pastorianus
aagaaacatacacatttccacccct

SEQ ID NO: 163753 - DNA, 25 bp, Saccharomyces pastorianus
gaatacgatcagtctactttgtcaa

SEQ ID NO: 163754 - DNA, 25 bp, Saccharomyces pastorianus
tcattcgtcattccagctctattta

SEQ ID NO: 163755 - DNA, 25 bp, Saccharomyces pastorianus
ataaggacttcgcagttcttcacac

SEQ ID NO: 163756 - DNA, 25 bp, Saccharomyces pastorianus
tcttgcttccatttgtcattcgtca

SEQ ID NO: 163757 - DNA, 25 bp, Saccharomyces pastorianus
gtcaagcggttcttattctgcagat

SEQ ID NO: 163758 - DNA, 25 bp, Saccharomyces pastorianus
atgaggatggattccgccaattcat

SEQ ID NO: 163759 - DNA, 25 bp, Saccharomyces pastorianus
gcatcccggactcatttgattctaa

SEQ ID NO: 163760 - DNA, 25 bp, Saccharomyces pastorianus
gggacgatatcttaacacctgctga

SEQ ID NO: 163761 - DNA, 25 bp, Saccharomyces pastorianus
ggatcacatacgttccaattatcgg

SEQ ID NO: 163762 - DNA, 25 bp, Saccharomyces pastorianus
atcaaagaacctttcctctggcatc

SEQ ID NO: 163763 - DNA, 25 bp, Saccharomyces pastorianus
gattctaacgtgaacagcttgctgt

SEQ ID NO: 163764 - DNA, 25 bp, Saccharomyces pastorianus
tagacgataacagcgcttacagacg

SEQ ID NO: 163765 - DNA, 25 bp, Saccharomyces pastorianus
gatggtaccactaggagctcgggca

SEQ ID NO: 163766 - DNA, 25 bp, Saccharomyces pastorianus
atacaaaccagatcttccacagcaa

SEQ ID NO: 163767 - DNA, 25 bp, Saccharomyces pastorianus
gagctcgggcattgactccaattat

SEQ ID NO: 163768 - DNA, 25 bp, Saccharomyces pastorianus
ggacagatcatatcgaccctagcgt

SEQ ID NO: 163769 - DNA, 25 bp, Saccharomyces pastorianus
taatgagatttccttagacagcccg

SEQ ID NO: 163770 - DNA, 25 bp, Saccharomyces pastorianus
cccgatgccaattttcaatgagagt

SEQ ID NO: 163771 - DNA, 25 bp, Saccharomyces pastorianus
agatcatatcgaccctagcgtacta

SEQ ID NO: 163772 - DNA, 25 bp, Saccharomyces pastorianus
gagatttccttagacagcccgatgc

SEQ ID NO: 163773 - DNA, 25 bp, Saccharomyces pastorianus
gaccctagcgtactacaggcatact

SEQ ID NO: 163774 - DNA, 25 bp, Saccharomyces pastorianus
tagggttgcgggtgtagtaacaaca

SEQ ID NO: 163775 - DNA, 25 bp, Saccharomyces pastorianus
caggcatacttagatgatactatta

SEQ ID NO: 163776 - DNA, 25 bp, Saccharomyces pastorianus
gtaacaacagggacagatcatatcg

SEQ ID NO: 163777 - DNA, 25 bp, Saccharomyces pastorianus
acagcccgatgccaattttcaatga

SEQ ID NO: 163778 - DNA, 25 bp, Saccharomyces pastorianus
gcgtactacaggcatacttagatga

SEQ ID NO: 163779 - DNA, 25 bp, Saccharomyces pastorianus
aaggatttccggctctatgcagacg

SEQ ID NO: 163780 - DNA, 25 bp, Saccharomyces pastorianus
agagagctatctgagttggtattaa

SEQ ID NO: 163781 - DNA, 25 bp, Saccharomyces pastorianus
atatttatgcagttctcgattcgtg

SEQ ID NO: 163782 - DNA, 25 bp, Saccharomyces pastorianus
ggcaaacaccccatcaaagattatg

SEQ ID NO: 163783 - DNA, 25 bp, Saccharomyces pastorianus
accactcttttcaaggctaactttg

SEQ ID NO: 163784 - DNA, 25 bp, Saccharomyces pastorianus
tttgaagtttaagagcccattgcat

SEQ ID NO: 163785 - DNA, 25 bp, Saccharomyces pastorianus
ccaatgaccttcctcctgttagatg

SEQ ID NO: 163786 - DNA, 25 bp, Saccharomyces pastorianus
agcgaggatatttccaatgaccttc

SEQ ID NO: 163787 - DNA, 25 bp, Saccharomyces pastorianus
gcagttctcgattcgtgttggaaat

SEQ ID NO: 163788 - DNA, 25 bp, Saccharomyces pastorianus
gctttgccatgatttgctgttgtct

SEQ ID NO: 163789 - DNA, 25 bp, Saccharomyces pastorianus
ggctctatgcagacgctggtactga

SEQ ID NO: 163790 - DNA, 25 bp, Saccharomyces pastorianus
tgctaacaagcctcttcgttcacct

SEQ ID NO: 163791 - DNA, 25 bp, Saccharomyces pastorianus
gttcacctcccttgtaacggcagtg

SEQ ID NO: 163792 - DNA, 25 bp, Saccharomyces pastorianus
cacctcccttgtaacggcagtggga

SEQ ID NO: 163793 - DNA, 25 bp, Saccharomyces pastorianus
taacggcagtgggaagggtaagcaa

SEQ ID NO: 163794 - DNA, 25 bp, Saccharomyces pastorianus
ttcacctcccttgtaacggcagtgg

SEQ ID NO: 163795 - DNA, 25 bp, Saccharomyces pastorianus
cgttcacctcccttgtaacggcagt

SEQ ID NO: 163796 - DNA, 25 bp, Saccharomyces pastorianus
tcttcgttcacctcccttgtaacgg

SEQ ID NO: 163797 - DNA, 25 bp, Saccharomyces pastorianus
atgctaacaagcctcttcgttcacc

SEQ ID NO: 163798 - DNA, 25 bp, Saccharomyces pastorianus
tcacctcccttgtaacggcagtggg

SEQ ID NO: 163799 - DNA, 25 bp, Saccharomyces pastorianus
cctcccttgtaacggcagtgggaag

SEQ ID NO: 163800 - DNA, 25 bp, Saccharomyces pastorianus
tcgttcacctcccttgtaacggcag

SEQ ID NO: 163801 - DNA, 25 bp, Saccharomyces pastorianus
gtatttcttcggagctttcctcatt

SEQ ID NO: 163802 - DNA, 25 bp, Saccharomyces pastorianus
gagagggtatttcttcggagctttc

SEQ ID NO: 163803 - DNA, 25 bp, Saccharomyces pastorianus
tgctacttcggaaacaagagagggt

SEQ ID NO: 163804 - DNA, 25 bp, Saccharomyces pastorianus
tccgaaagttggaaactgctacttc

SEQ ID NO: 163805 - DNA, 25 bp, Saccharomyces pastorianus
gttggaaactgctacttcggaaaca

SEQ ID NO: 163806 - DNA, 25 bp, Saccharomyces pastorianus
tttaaacgggaatatcatcgagcat

SEQ ID NO: 163807 - DNA, 25 bp, Saccharomyces pastorianus
atcaatcaccgttctagaagagctt

SEQ ID NO: 163808 - DNA, 25 bp, Saccharomyces pastorianus
tcgagcatgacgttcccgaagtttt

SEQ ID NO: 163809 - DNA, 25 bp, Saccharomyces pastorianus
tcttcggagctttcctcatttttaa

SEQ ID NO: 163810 - DNA, 25 bp, Saccharomyces pastorianus
atatcatcgagcatgacgttcccga

SEQ ID NO: 163811 - DNA, 25 bp, Saccharomyces pastorianus
gattcacaacaatcaatcaccgttc

SEQ ID NO: 163812 - DNA, 25 bp, Saccharomyces pastorianus
aaaactcctctttgtcttttctgtg

SEQ ID NO: 163813 - DNA, 25 bp, Saccharomyces pastorianus
gtcttttctgtgttattgacagtag

SEQ ID NO: 163814 - DNA, 25 bp, Saccharomyces pastorianus
atgcaaaaactcctctttgtctttt

SEQ ID NO: 163815 - DNA, 25 bp, Saccharomyces pastorianus
tcctctttgtcttttctgtgttatt

SEQ ID NO: 163816 - DNA, 25 bp, Saccharomyces pastorianus
gtagtactagcaacagcaccatttc

SEQ ID NO: 163817 - DNA, 25 bp, Saccharomyces pastorianus
gacagtagtactagcaacagcacca

SEQ ID NO: 163818 - DNA, 25 bp, Saccharomyces pastorianus
actcctctttgtcttttctgtgtta

SEQ ID NO: 163819 - DNA, 25 bp, Saccharomyces pastorianus
aaactcctctttgtcttttctgtgt

SEQ ID NO: 163820 - DNA, 25 bp, Saccharomyces pastorianus
tactagcaacagcaccatttcaggt

SEQ ID NO: 163821 - DNA, 25 bp, Saccharomyces pastorianus
caaaaactcctctttgtcttttctg

SEQ ID NO: 163822 - DNA, 25 bp, Saccharomyces pastorianus
ctctttgtcttttctgtgttattga

SEQ ID NO: 163823 - DNA, 25 bp, Saccharomyces pastorianus
gtacggtgtccttttatgatattaa

SEQ ID NO: 163824 - DNA, 25 bp, Saccharomyces pastorianus
atggatgattctcccgttaacgaag

SEQ ID NO: 163825 - DNA, 25 bp, Saccharomyces pastorianus
gtatccactggatctggtacggtgt

SEQ ID NO: 163826 - DNA, 25 bp, Saccharomyces pastorianus
tccaccaccgtcaaacaatatcaag

SEQ ID NO: 163827 - DNA, 25 bp, Saccharomyces pastorianus
gatcgtaaaatcttcgtcaggcaag

SEQ ID NO: 163828 - DNA, 25 bp, Saccharomyces pastorianus
ggccttcttcatggatcgtaaaatc

SEQ ID NO: 163829 - DNA, 25 bp, Saccharomyces pastorianus
gtcaggcaagataatccaccaccgt

SEQ ID NO: 163830 - DNA, 25 bp, Saccharomyces pastorianus
attcggatgatgttgacagggccat

SEQ ID NO: 163831 - DNA, 25 bp, Saccharomyces pastorianus
atttacctgcttccgttaattggca

SEQ ID NO: 163832 - DNA, 25 bp, Saccharomyces pastorianus
ggaatgtcgcacacgctgatgtgga

SEQ ID NO: 163833 - DNA, 25 bp, Saccharomyces pastorianus
ggaaagcgtacataaccacagtgat

SEQ ID NO: 163834 - DNA, 25 bp, Saccharomyces pastorianus
atggtgatggatgaatttttgttgc

SEQ ID NO: 163835 - DNA, 25 bp, Saccharomyces pastorianus
gttttgaaaaatccactatatgctt

SEQ ID NO: 163836 - DNA, 25 bp, Saccharomyces pastorianus
ctgagtatggcgcaattagttattt

SEQ ID NO: 163837 - DNA, 25 bp, Saccharomyces pastorianus
aaatccactatatgcttcaaagctg

SEQ ID NO: 163838 - DNA, 25 bp, Saccharomyces pastorianus
ggatgaatttttgttgcatttaaac

SEQ ID NO: 163839 - DNA, 25 bp, Saccharomyces pastorianus
agctgcaagatactaaatactccaa

SEQ ID NO: 163840 - DNA, 25 bp, Saccharomyces pastorianus
aatactccaaagaaatcatggtgat

SEQ ID NO: 163841 - DNA, 25 bp, Saccharomyces pastorianus
tgataaagcttggtatggtgaaaaa

SEQ ID NO: 163842 - DNA, 25 bp, Saccharomyces pastorianus
cttacagggcattaatgaagttttg

SEQ ID NO: 163843 - DNA, 25 bp, Saccharomyces pastorianus
aaagcggctgagtatggcgcaatta

SEQ ID NO: 163844 - DNA, 25 bp, Saccharomyces pastorianus
aaagaggtagttaaagcggctgagt

SEQ ID NO: 163845 - DNA, 25 bp, Saccharomyces pastorianus
ttattctttgctctccaggtttcta

SEQ ID NO: 163846 - DNA, 25 bp, Saccharomyces pastorianus
aagggatcgcccatgtttgtttagt

SEQ ID NO: 163847 - DNA, 25 bp, Saccharomyces pastorianus
tatttgagctttacccttgactacg

SEQ ID NO: 163848 - DNA, 25 bp, Saccharomyces pastorianus
aaaattttccagtatgccgaagagg

SEQ ID NO: 163849 - DNA, 25 bp, Saccharomyces pastorianus
tgacatacctgtcggcaaatatttg

SEQ ID NO: 163850 - DNA, 25 bp, Saccharomyces pastorianus
gtttgtttagtgacatcctcctcta

SEQ ID NO: 163851 - DNA, 25 bp, Saccharomyces pastorianus
aacaaggaatgttctttatagccca

SEQ ID NO: 163852 - DNA, 25 bp, Saccharomyces pastorianus
gctctccaggtttctacgctaagat

SEQ ID NO: 163853 - DNA, 25 bp, Saccharomyces pastorianus
gactacgtgtatccctttactatca

SEQ ID NO: 163854 - DNA, 25 bp, Saccharomyces pastorianus
gacatcctcctctactattttaaaa

SEQ ID NO: 163855 - DNA, 25 bp, Saccharomyces pastorianus
agtataaatcagacaccgcggcggt

SEQ ID NO: 163856 - DNA, 25 bp, Saccharomyces pastorianus
cgaagataccaaggatttattaagt

SEQ ID NO: 163857 - DNA, 25 bp, Saccharomyces pastorianus
gacgtcttggatgatctttatcgca

SEQ ID NO: 163858 - DNA, 25 bp, Saccharomyces pastorianus
gaatggcaggatatcatccatcaac

SEQ ID NO: 163859 - DNA, 25 bp, Saccharomyces pastorianus
taaaagtccatcagaatggcaggat

SEQ ID NO: 163860 - DNA, 25 bp, Saccharomyces pastorianus
tcggaaaacgaagataccaaggatt

SEQ ID NO: 163861 - DNA, 25 bp, Saccharomyces pastorianus
taaatctttgatatcggaaaacgaa

SEQ ID NO: 163862 - DNA, 25 bp, Saccharomyces pastorianus
tcttggatgatctttatcgcaagtt

SEQ ID NO: 163863 - DNA, 25 bp, Saccharomyces pastorianus
gagagacgtcttggatgatctttat

SEQ ID NO: 163864 - DNA, 25 bp, Saccharomyces pastorianus
ggatatcatccatcaacgtgaacaa

SEQ ID NO: 163865 - DNA, 25 bp, Saccharomyces pastorianus
gaactgcaaattaagagagacgtct

SEQ ID NO: 163866 - DNA, 25 bp, Saccharomyces pastorianus
atcaacgtgaacaagaactgcaaat

SEQ ID NO: 163867 - DNA, 25 bp, Saccharomyces pastorianus
aaagactatcttaccaaccagcagc

SEQ ID NO: 163868 - DNA, 25 bp, Saccharomyces pastorianus
aaaggaagaattttcgtctgcagaa

SEQ ID NO: 163869 - DNA, 25 bp, Saccharomyces pastorianus
tataccgcatattttttactcgctg

SEQ ID NO: 163870 - DNA, 25 bp, Saccharomyces pastorianus
catattttttactcgctgcaccaaa

SEQ ID NO: 163871 - DNA, 25 bp, Saccharomyces pastorianus
tttttactcgctgcaccaaataagg

SEQ ID NO: 163872 - DNA, 25 bp, Saccharomyces pastorianus
accttaacaggttcgattagacatc

SEQ ID NO: 163873 - DNA, 25 bp, Saccharomyces pastorianus
ggaaggatccaaacaatctctcaaa

SEQ ID NO: 163874 - DNA, 25 bp, Saccharomyces pastorianus
agcagccgaaaaatctgagtactcc

SEQ ID NO: 163875 - DNA, 25 bp, Saccharomyces pastorianus
gattagacatcgtttgaaactttgt

SEQ ID NO: 163876 - DNA, 25 bp, Saccharomyces pastorianus
ctccaccagttccaacggtgaattt

SEQ ID NO: 163877 - DNA, 25 bp, Saccharomyces pastorianus
tatcttaccaaccagcagccgaaaa

SEQ ID NO: 163878 - DNA, 25 bp, Saccharomyces pastorianus
gagacacattgaaagctaatgcagt

SEQ ID NO: 163879 - DNA, 25 bp, Saccharomyces pastorianus
gaaagctaatgcagtcatggatggt

SEQ ID NO: 163880 - DNA, 25 bp, Saccharomyces pastorianus
agctaatgcagtcatggatggtgaa

SEQ ID NO: 163881 - DNA, 25 bp, Saccharomyces pastorianus
tatcccaacatggacaattccatat

SEQ ID NO: 163882 - DNA, 25 bp, Saccharomyces pastorianus
cggtatatcccaacatggacaattc

SEQ ID NO: 163883 - DNA, 25 bp, Saccharomyces pastorianus
tcatggatggtgaagtagatgtcaa

SEQ ID NO: 163884 - DNA, 25 bp, Saccharomyces pastorianus
gaacgatcttcatcatttatttcaa

SEQ ID NO: 163885 - DNA, 25 bp, Saccharomyces pastorianus
aagaacgatcttcatcatttatttc

SEQ ID NO: 163886 - DNA, 25 bp, Saccharomyces pastorianus
acaattccatatatactaggtatac

SEQ ID NO: 163887 - DNA, 25 bp, Saccharomyces pastorianus
catttatttcaattttagacgatga

SEQ ID NO: 163888 - DNA, 25 bp, Saccharomyces pastorianus
caaaggaaaaagctctcggtatatc

SEQ ID NO: 163889 - DNA, 25 bp, Saccharomyces pastorianus
gctgatttgcacgataggtcttcac

SEQ ID NO: 163890 - DNA, 25 bp, Saccharomyces pastorianus
gatcgtgagagagaactattgccaa

SEQ ID NO: 163891 - DNA, 25 bp, Saccharomyces pastorianus
aagaattagatcgtggtaccctgct

SEQ ID NO: 163892 - DNA, 25 bp, Saccharomyces pastorianus
ctggaatggaccgaggcacgtcgtt

SEQ ID NO: 163893 - DNA, 25 bp, Saccharomyces pastorianus
tgataggcaagtcgcaacatggatt

SEQ ID NO: 163894 - DNA, 25 bp, Saccharomyces pastorianus
gagtcattcgctcaagacttagcta

SEQ ID NO: 163895 - DNA, 25 bp, Saccharomyces pastorianus
gtaccctgcttcagtggaccatgaa

SEQ ID NO: 163896 - DNA, 25 bp, Saccharomyces pastorianus
gtttggctccagaagtacatcagca

SEQ ID NO: 163897 - DNA, 25 bp, Saccharomyces pastorianus
gaagcgaccatgacaagctattgat

SEQ ID NO: 163898 - DNA, 25 bp, Saccharomyces pastorianus
ttgagccatcaggtaggcgaagcat

SEQ ID NO: 163899 - DNA, 25 bp, Saccharomyces pastorianus
cgataggtcttcacgtatggtggcc

SEQ ID NO: 163900 - DNA, 25 bp, Saccharomyces pastorianus
gttaacgagcccttcaagaccaaat

SEQ ID NO: 163901 - DNA, 25 bp, Saccharomyces pastorianus
tatatgggttagacacctccggcaa

SEQ ID NO: 163902 - DNA, 25 bp, Saccharomyces pastorianus
gcacggtataggcaagggtcctcta

SEQ ID NO: 163903 - DNA, 25 bp, Saccharomyces pastorianus
agaatcacagcgtggtggcctcaaa

SEQ ID NO: 163904 - DNA, 25 bp, Saccharomyces pastorianus
ggagacgtcgcattcatcccaggaa

SEQ ID NO: 163905 - DNA, 25 bp, Saccharomyces pastorianus
gaaagagctaatggccatgcgcaaa

SEQ ID NO: 163906 - DNA, 25 bp, Saccharomyces pastorianus
gggtcctctaactttatatcgtatt

SEQ ID NO: 163907 - DNA, 25 bp, Saccharomyces pastorianus
aaaccaccatactttcatccaattt

SEQ ID NO: 163908 - DNA, 25 bp, Saccharomyces pastorianus
aaaagctcaacgctgccgatgcggg

SEQ ID NO: 163909 - DNA, 25 bp, Saccharomyces pastorianus
tgaacacacagctaccacaattaca

SEQ ID NO: 163910 - DNA, 25 bp, Saccharomyces pastorianus
gtcatttgaacacaggcccagtata

SEQ ID NO: 163911 - DNA, 25 bp, Saccharomyces pastorianus
aattggagttcctcactagtgtaga

SEQ ID NO: 163912 - DNA, 25 bp, Saccharomyces pastorianus
ttggaagacaacgacgactctccta

SEQ ID NO: 163913 - DNA, 25 bp, Saccharomyces pastorianus
gcggatgactacacgaagctggttt

SEQ ID NO: 163914 - DNA, 25 bp, Saccharomyces pastorianus
attgacccgagcgacttgacagaga

SEQ ID NO: 163915 - DNA, 25 bp, Saccharomyces pastorianus
caaacaagctgacggtcttgcgcgt

SEQ ID NO: 163916 - DNA, 25 bp, Saccharomyces pastorianus
accggttctagcttggaagtgattt

SEQ ID NO: 163917 - DNA, 25 bp, Saccharomyces pastorianus
agggtatcattttggttggctgcaa

SEQ ID NO: 163918 - DNA, 25 bp, Saccharomyces pastorianus
gatttacacttttccactgatggta

SEQ ID NO: 163919 - DNA, 25 bp, Saccharomyces pastorianus
ctactgcaattgacgcttccaaggg

SEQ ID NO: 163920 - DNA, 25 bp, Saccharomyces pastorianus
cttgcgcgtggatcctaccaaagat

SEQ ID NO: 163921 - DNA, 25 bp, Saccharomyces pastorianus
gaaggtaccgttgcagctatcgcat

SEQ ID NO: 163922 - DNA, 25 bp, Saccharomyces pastorianus
caggatttgattgctcggccagtga

SEQ ID NO: 163923 - DNA, 25 bp, Saccharomyces pastorianus
aagtaccctcgagtaagccgaatag

SEQ ID NO: 163924 - DNA, 25 bp, Saccharomyces pastorianus
gctcgtcaccagtatcctacaaaaa

SEQ ID NO: 163925 - DNA, 25 bp, Saccharomyces pastorianus
atgctcactgactcgttactaggcg

SEQ ID NO: 163926 - DNA, 25 bp, Saccharomyces pastorianus
attaagcgcatccttgggccaagtg

SEQ ID NO: 163927 - DNA, 25 bp, Saccharomyces pastorianus
ggtgatttaatcagcgccatgctca

SEQ ID NO: 163928 - DNA, 25 bp, Saccharomyces pastorianus
gattttagatcctgtactgggcgat

SEQ ID NO: 163929 - DNA, 25 bp, Saccharomyces pastorianus
gaattcctgagcaacgacacttacg

SEQ ID NO: 163930 - DNA, 25 bp, Saccharomyces pastorianus
gctgcacacagctgtcattaagcgc

SEQ ID NO: 163931 - DNA, 25 bp, Saccharomyces pastorianus
gggatgtcaattcgtaccttagacg

SEQ ID NO: 163932 - DNA, 25 bp, Saccharomyces pastorianus
gatattcttctatgaaatccccaag

SEQ ID NO: 163933 - DNA, 25 bp, Saccharomyces pastorianus
aggtgtcacctcgtggagcaggtta

SEQ ID NO: 163934 - DNA, 25 bp, Saccharomyces pastorianus
caacgttttcgaagaggcacctgaa

SEQ ID NO: 163935 - DNA, 25 bp, Saccharomyces pastorianus
gatagcatatctaatccggtagcca

SEQ ID NO: 163936 - DNA, 25 bp, Saccharomyces pastorianus
ggttactactgtatggtcggcgcca

SEQ ID NO: 163937 - DNA, 25 bp, Saccharomyces pastorianus
taaccccacgttagatcatccagat

SEQ ID NO: 163938 - DNA, 25 bp, Saccharomyces pastorianus
ggagcaggttacactttcggaagaa

SEQ ID NO: 163939 - DNA, 25 bp, Saccharomyces pastorianus
acagagcccatcagttatgtaacga

SEQ ID NO: 163940 - DNA, 25 bp, Saccharomyces pastorianus
gttatgctgtattatcgacgacgaa

SEQ ID NO: 163941 - DNA, 25 bp, Saccharomyces pastorianus
gatcaattctacttcaacgttttcg

SEQ ID NO: 163942 - DNA, 25 bp, Saccharomyces pastorianus
ggtcggcgccaaactattgttatcg

SEQ ID NO: 163943 - DNA, 25 bp, Saccharomyces pastorianus
gagaaattccacacgatggcgccat

SEQ ID NO: 163944 - DNA, 25 bp, Saccharomyces pastorianus
gggaaaaagtttccctgtgattctg

SEQ ID NO: 163945 - DNA, 25 bp, Saccharomyces pastorianus
aatgttctctacatttgcatggtta

SEQ ID NO: 163946 - DNA, 25 bp, Saccharomyces pastorianus
gataaatgttctctacatttgcatg

SEQ ID NO: 163947 - DNA, 25 bp, Saccharomyces pastorianus
ttgaagcctccaaagaaggattcgg

SEQ ID NO: 163948 - DNA, 25 bp, Saccharomyces pastorianus
gcatggttacactgaacgtaaggat

SEQ ID NO: 163949 - DNA, 25 bp, Saccharomyces pastorianus
catttgcatggttacactgaacgta

SEQ ID NO: 163950 - DNA, 25 bp, Saccharomyces pastorianus
gttcaaggtcttgaaggtattatta

SEQ ID NO: 163951 - DNA, 25 bp, Saccharomyces pastorianus
tttgaagcctccaaagaaggattcg

SEQ ID NO: 163952 - DNA, 25 bp, Saccharomyces pastorianus
tacatttgcatggttacactgaacg

SEQ ID NO: 163953 - DNA, 25 bp, Saccharomyces pastorianus
tttgcatggttacactgaacgtaag

SEQ ID NO: 163954 - DNA, 25 bp, Saccharomyces pastorianus
aggatatcagggatacatattcctc

SEQ ID NO: 163955 - DNA, 25 bp, Saccharomyces pastorianus
gacctttgtggattttttgactcca

SEQ ID NO: 163956 - DNA, 25 bp, Saccharomyces pastorianus
ggatagttccatttggctttcaaaa

SEQ ID NO: 163957 - DNA, 25 bp, Saccharomyces pastorianus
gagctttctactctaaaattttcgg

SEQ ID NO: 163958 - DNA, 25 bp, Saccharomyces pastorianus
acgacagttctagtggcagcttaat

SEQ ID NO: 163959 - DNA, 25 bp, Saccharomyces pastorianus
gaggttcctcactatggttaaacga

SEQ ID NO: 163960 - DNA, 25 bp, Saccharomyces pastorianus
gtttaggttatggtcgtttgtcaga

SEQ ID NO: 163961 - DNA, 25 bp, Saccharomyces pastorianus
aatagagcgagcgattcccattcat

SEQ ID NO: 163962 - DNA, 25 bp, Saccharomyces pastorianus
agacgtaacctgtaagcacggccac

SEQ ID NO: 163963 - DNA, 25 bp, Saccharomyces pastorianus
gggtttgatagaccatcgagttctc

SEQ ID NO: 163964 - DNA, 25 bp, Saccharomyces pastorianus
tcgagttctcatccagagctttcta

SEQ ID NO: 163965 - DNA, 25 bp, Saccharomyces pastorianus
tagcttctgggcgtgtttgtttaat

SEQ ID NO: 163966 - DNA, 25 bp, Saccharomyces pastorianus
gatggtcctgatgctgatattcacg

SEQ ID NO: 163967 - DNA, 25 bp, Saccharomyces pastorianus
tgatagagatattcaggatggtcct

SEQ ID NO: 163968 - DNA, 25 bp, Saccharomyces pastorianus
aggatggtcctgatgctgatattca

SEQ ID NO: 163969 - DNA, 25 bp, Saccharomyces pastorianus
gcaatcatccactgaaagtgataga

SEQ ID NO: 163970 - DNA, 25 bp, Saccharomyces pastorianus
cctgatgctgatattcacgtcgcac

SEQ ID NO: 163971 - DNA, 25 bp, Saccharomyces pastorianus
cccgtggaaaaagagtggtcagatg

SEQ ID NO: 163972 - DNA, 25 bp, Saccharomyces pastorianus
gtcgcaccacccgtggaaaaagagt

SEQ ID NO: 163973 - DNA, 25 bp, Saccharomyces pastorianus
gtcctgatgctgatattcacgtcgc

SEQ ID NO: 163974 - DNA, 25 bp, Saccharomyces pastorianus
tattcacgtcgcaccacccgtggaa

SEQ ID NO: 163975 - DNA, 25 bp, Saccharomyces pastorianus
ggtcctgatgctgatattcacgtcg

SEQ ID NO: 163976 - DNA, 25 bp, Saccharomyces pastorianus
atgcaatcatccactgaaagtgata

SEQ ID NO: 163977 - DNA, 25 bp, Saccharomyces pastorianus
gagtggtcagatggatttgatgaca

SEQ ID NO: 163978 - DNA, 25 bp, Saccharomyces pastorianus
cttcggttcttacaagcatagcact

SEQ ID NO: 163979 - DNA, 25 bp, Saccharomyces pastorianus
gaacttcggttcttacaagcatagc

SEQ ID NO: 163980 - DNA, 25 bp, Saccharomyces pastorianus
gagggctcataggttatcttgtcat

SEQ ID NO: 163981 - DNA, 25 bp, Saccharomyces pastorianus
gctcataggttatcttgtcatttac

SEQ ID NO: 163982 - DNA, 25 bp, Saccharomyces pastorianus
gtcagatggatttgatgacaacgaa

SEQ ID NO: 163983 - DNA, 25 bp, Saccharomyces pastorianus
taacgttgagccaccaaaaagaggg

SEQ ID NO: 163984 - DNA, 25 bp, Saccharomyces pastorianus
gggctcataggttatcttgtcattt

SEQ ID NO: 163985 - DNA, 25 bp, Saccharomyces pastorianus
acgttgagccaccaaaaagagggct

SEQ ID NO: 163986 - DNA, 25 bp, Saccharomyces pastorianus
cataggttatcttgtcatttactta

SEQ ID NO: 163987 - DNA, 25 bp, Saccharomyces pastorianus
gggataacgttgagccaccaaaaag

SEQ ID NO: 163988 - DNA, 25 bp, Saccharomyces pastorianus
gatatcttggttcttgcaactggct

SEQ ID NO: 163989 - DNA, 25 bp, Saccharomyces pastorianus
acatactttttcttggcggtggctt

SEQ ID NO: 163990 - DNA, 25 bp, Saccharomyces pastorianus
tacggctgccagctttgatgataag

SEQ ID NO: 163991 - DNA, 25 bp, Saccharomyces pastorianus
gaactgggtgggacatacgcaataa

SEQ ID NO: 163992 - DNA, 25 bp, Saccharomyces pastorianus
gcaactggctcaaagtgggctgatc

SEQ ID NO: 163993 - DNA, 25 bp, Saccharomyces pastorianus
attccgataagctattgccagcctt

SEQ ID NO: 163994 - DNA, 25 bp, Saccharomyces pastorianus
tatgtgtattttctaccctcagctg

SEQ ID NO: 163995 - DNA, 25 bp, Saccharomyces pastorianus
gattataccaagtcgatcctgccgt

SEQ ID NO: 163996 - DNA, 25 bp, Saccharomyces pastorianus
gatcctgccgttaaaaaatgttctt

SEQ ID NO: 163997 - DNA, 25 bp, Saccharomyces pastorianus
cagctgtccgtttgacggtttcaaa

SEQ ID NO: 163998 - DNA, 25 bp, Saccharomyces pastorianus
tgggctgatccaattggttcaactt

SEQ ID NO: 163999 - DNA, 25 bp, Saccharomyces pastorianus
aactggtctaaagctgtgtctaatc

SEQ ID NO: 164000 - DNA, 25 bp, Saccharomyces pastorianus
agaccaccttatttaatcactgtat

SEQ ID NO: 164001 - DNA, 25 bp, Saccharomyces pastorianus
caagaggtatatacggctgccaatt

SEQ ID NO: 164002 - DNA, 25 bp, Saccharomyces pastorianus
aatatttctattgcagaccacctta

SEQ ID NO: 164003 - DNA, 25 bp, Saccharomyces pastorianus
gtcttcagagctgcacaagaggtat

SEQ ID NO: 164004 - DNA, 25 bp, Saccharomyces pastorianus
tagcgctacattggaaaattatcat

SEQ ID NO: 164005 - DNA, 25 bp, Saccharomyces pastorianus
tatagcattcatttgtcttcagagc

SEQ ID NO: 164006 - DNA, 25 bp, Saccharomyces pastorianus
gctgccaattttatagcgctacatt

SEQ ID NO: 164007 - DNA, 25 bp, Saccharomyces pastorianus
cactgtatctctttaaactggtcta

SEQ ID NO: 164008 - DNA, 25 bp, Saccharomyces pastorianus
gcactgttacaattaccaggtgagt

SEQ ID NO: 164009 - DNA, 25 bp, Saccharomyces pastorianus
gtgtctaatcgtattaagaggcgaa

SEQ ID NO: 164010 - DNA, 25 bp, Saccharomyces pastorianus
aataaacttcaagccgctttggctt

SEQ ID NO: 164011 - DNA, 25 bp, Saccharomyces pastorianus
atcgctttaataaacttcaagccgc

SEQ ID NO: 164012 - DNA, 25 bp, Saccharomyces pastorianus
ttcaatcgctttaataaacttcaag

SEQ ID NO: 164013 - DNA, 25 bp, Saccharomyces pastorianus
ttcaagccgctttggctttggtcct

SEQ ID NO: 164014 - DNA, 25 bp, Saccharomyces pastorianus
ttaataaacttcaagccgctttggc

SEQ ID NO: 164015 - DNA, 25 bp, Saccharomyces pastorianus
taataaacttcaagccgctttggct

SEQ ID NO: 164016 - DNA, 25 bp, Saccharomyces pastorianus
tcaagccgctttggctttggtcctt

SEQ ID NO: 164017 - DNA, 25 bp, Saccharomyces pastorianus
acttcaagccgctttggctttggtc

SEQ ID NO: 164018 - DNA, 25 bp, Saccharomyces pastorianus
gccgctttggctttggtcctttact

SEQ ID NO: 164019 - DNA, 25 bp, Saccharomyces pastorianus
tttaataaacttcaagccgctttgg

SEQ ID NO: 164020 - DNA, 25 bp, Saccharomyces pastorianus
aacttcaagccgctttggctttggt

SEQ ID NO: 164021 - DNA, 25 bp, Saccharomyces pastorianus
gggagcttattaccgttacctattg

SEQ ID NO: 164022 - DNA, 25 bp, Saccharomyces pastorianus
cagcttaagatgtgccgtgggaaat

SEQ ID NO: 164023 - DNA, 25 bp, Saccharomyces pastorianus
atatctgatctgttccggttcaggt

SEQ ID NO: 164024 - DNA, 25 bp, Saccharomyces pastorianus
gacactgagtctgtttcaactttaa

SEQ ID NO: 164025 - DNA, 25 bp, Saccharomyces pastorianus
gacgaaattcgtactcttttggtcg

SEQ ID NO: 164026 - DNA, 25 bp, Saccharomyces pastorianus
ggttacaagccaaagtcttctctag

SEQ ID NO: 164027 - DNA, 25 bp, Saccharomyces pastorianus
atgcttgccattcctgcaacgatac

SEQ ID NO: 164028 - DNA, 25 bp, Saccharomyces pastorianus
gatacggccccttgttgcataagac

SEQ ID NO: 164029 - DNA, 25 bp, Saccharomyces pastorianus
ccgttacctattgcaagcctgaatt

SEQ ID NO: 164030 - DNA, 25 bp, Saccharomyces pastorianus
aatttacgtgtgttccagctcagac

SEQ ID NO: 164031 - DNA, 25 bp, Saccharomyces pastorianus
gtcgatttacgcacgttgttcttga

SEQ ID NO: 164032 - DNA, 25 bp, Saccharomyces pastorianus
atggccccatactccataagacaaa

SEQ ID NO: 164033 - DNA, 25 bp, Saccharomyces pastorianus
tggcctcgaccattgcaaatgtcag

SEQ ID NO: 164034 - DNA, 25 bp, Saccharomyces pastorianus
gtggtagaagtttcatggcctcgac

SEQ ID NO: 164035 - DNA, 25 bp, Saccharomyces pastorianus
ttccccaggtcaacacatattcgtg

SEQ ID NO: 164036 - DNA, 25 bp, Saccharomyces pastorianus
gtggtttggtttgcacaactgtttt

SEQ ID NO: 164037 - DNA, 25 bp, Saccharomyces pastorianus
ataagggcatcatttccaaccatcc

SEQ ID NO: 164038 - DNA, 25 bp, Saccharomyces pastorianus
tctttccgagtgcaaagtatcccgg

SEQ ID NO: 164039 - DNA, 25 bp, Saccharomyces pastorianus
tgtggaaatggcctattccccaggt

SEQ ID NO: 164040 - DNA, 25 bp, Saccharomyces pastorianus
gatgaaatgtgtaccctctcaaata

SEQ ID NO: 164041 - DNA, 25 bp, Saccharomyces pastorianus
tacatgcttacctttcctgcaaaaa

SEQ ID NO: 164042 - DNA, 25 bp, Saccharomyces pastorianus
atgtctacttgatttgctctggttc

SEQ ID NO: 164043 - DNA, 25 bp, Saccharomyces pastorianus
ctctccattctgctttgatatcact

SEQ ID NO: 164044 - DNA, 25 bp, Saccharomyces pastorianus
ggctcatttagttgccttccaaaag

SEQ ID NO: 164045 - DNA, 25 bp, Saccharomyces pastorianus
gttaagggaattctccactcaatta

SEQ ID NO: 164046 - DNA, 25 bp, Saccharomyces pastorianus
gagttgccaaagtgacccggttagc

SEQ ID NO: 164047 - DNA, 25 bp, Saccharomyces pastorianus
aacgtgtagttctgacctcttctta

SEQ ID NO: 164048 - DNA, 25 bp, Saccharomyces pastorianus
tgaacacatcttgcgaactcgtcaa

SEQ ID NO: 164049 - DNA, 25 bp, Saccharomyces pastorianus
aatacgccgctgattctgtagaacg

SEQ ID NO: 164050 - DNA, 25 bp, Saccharomyces pastorianus
tattaattcctgctgtgaacggtgt

SEQ ID NO: 164051 - DNA, 25 bp, Saccharomyces pastorianus
ggttagcgcctactgtggttctaag

SEQ ID NO: 164052 - DNA, 25 bp, Saccharomyces pastorianus
aagatagttctacatacggcctctc

SEQ ID NO: 164053 - DNA, 25 bp, Saccharomyces pastorianus
tcttcttatgcagctgtgttcgaca

SEQ ID NO: 164054 - DNA, 25 bp, Saccharomyces pastorianus
taagaatttgtgaagcggtatcgtc

SEQ ID NO: 164055 - DNA, 25 bp, Saccharomyces pastorianus
tagtttccttcaaatttctgaactt

SEQ ID NO: 164056 - DNA, 25 bp, Saccharomyces pastorianus
tagttatagtttgccttcagattta

SEQ ID NO: 164057 - DNA, 25 bp, Saccharomyces pastorianus
gtctatagtttccttcaaatttctg

SEQ ID NO: 164058 - DNA, 25 bp, Saccharomyces pastorianus
cggtatcgtctatagtttccttcaa

SEQ ID NO: 164059 - DNA, 25 bp, Saccharomyces pastorianus
gtttgccttcagatttaagaatttg

SEQ ID NO: 164060 - DNA, 25 bp, Saccharomyces pastorianus
gtatttagttatagtttgccttcag

SEQ ID NO: 164061 - DNA, 25 bp, Saccharomyces pastorianus
agcggtatcgtctatagtttccttc

SEQ ID NO: 164062 - DNA, 25 bp, Saccharomyces pastorianus
tttgtgaagcggtatcgtctatagt

SEQ ID NO: 164063 - DNA, 25 bp, Saccharomyces pastorianus
gtatcgtctatagtttccttcaaat

SEQ ID NO: 164064 - DNA, 25 bp, Saccharomyces pastorianus
gaagcggtatcgtctatagtttcct

SEQ ID NO: 164065 - DNA, 25 bp, Saccharomyces pastorianus
agcgcaagtagcacgccctcttcta

SEQ ID NO: 164066 - DNA, 25 bp, Saccharomyces pastorianus
acagagcgcaagtagcacgccctct

SEQ ID NO: 164067 - DNA, 25 bp, Saccharomyces pastorianus
aaagcgagagcggtacaccagctcc

SEQ ID NO: 164068 - DNA, 25 bp, Saccharomyces pastorianus
aaaaaagcgagagcggtacaccagc

SEQ ID NO: 164069 - DNA, 25 bp, Saccharomyces pastorianus
cagagcgcaagtagcacgccctctt

SEQ ID NO: 164070 - DNA, 25 bp, Saccharomyces pastorianus
gagcgcaagtagcacgccctcttct

SEQ ID NO: 164071 - DNA, 25 bp, Saccharomyces pastorianus
gcgagagcggtacaccagctcctaa

SEQ ID NO: 164072 - DNA, 25 bp, Saccharomyces pastorianus
tagcacgccctcttctactacaatg

SEQ ID NO: 164073 - DNA, 25 bp, Saccharomyces pastorianus
agcgagagcggtacaccagctccta

SEQ ID NO: 164074 - DNA, 25 bp, Saccharomyces pastorianus
aagtagcacgccctcttctactaca

SEQ ID NO: 164075 - DNA, 25 bp, Saccharomyces pastorianus
cgagagcggtacaccagctcctaaa

SEQ ID NO: 164076 - DNA, 25 bp, Saccharomyces pastorianus
agattgctagctccagttccaacgg

SEQ ID NO: 164077 - DNA, 25 bp, Saccharomyces pastorianus
ctcaacttcgaattccgcatcaaat

SEQ ID NO: 164078 - DNA, 25 bp, Saccharomyces pastorianus
gggtacgtggagcttcgtcctcaac

SEQ ID NO: 164079 - DNA, 25 bp, Saccharomyces pastorianus
atcaagtagctttggcagcagctgc

SEQ ID NO: 164080 - DNA, 25 bp, Saccharomyces pastorianus
gataaccaactccacgtttgctgtt

SEQ ID NO: 164081 - DNA, 25 bp, Saccharomyces pastorianus
cacgaagggcgttgtagggcatatc

SEQ ID NO: 164082 - DNA, 25 bp, Saccharomyces pastorianus
aacgcgatgaatttccgcaacatag

SEQ ID NO: 164083 - DNA, 25 bp, Saccharomyces pastorianus
tgcggctgcagtgggatctaccatg

SEQ ID NO: 164084 - DNA, 25 bp, Saccharomyces pastorianus
aaaatccttcattcacgaacatcgt

SEQ ID NO: 164085 - DNA, 25 bp, Saccharomyces pastorianus
cgaacatcgtgctgagtctacgaga

SEQ ID NO: 164086 - DNA, 25 bp, Saccharomyces pastorianus
cacgtttgctgtttcgttaaccaag

SEQ ID NO: 164087 - DNA, 25 bp, Saccharomyces pastorianus
tcgtgggcgacgatggcactagctt

SEQ ID NO: 164088 - DNA, 25 bp, Saccharomyces pastorianus
ttcattctacgaagacctcggttcc

SEQ ID NO: 164089 - DNA, 25 bp, Saccharomyces pastorianus
ccatgagttttcgtattcattctac

SEQ ID NO: 164090 - DNA, 25 bp, Saccharomyces pastorianus
agtgccccggcggttcgatgagtct

SEQ ID NO: 164091 - DNA, 25 bp, Saccharomyces pastorianus
catttcccgaatgtgtatgctgctc

SEQ ID NO: 164092 - DNA, 25 bp, Saccharomyces pastorianus
agcagccttgaaacgccacaattta

SEQ ID NO: 164093 - DNA, 25 bp, Saccharomyces pastorianus
gggctctgccgagttccaggtgacc

SEQ ID NO: 164094 - DNA, 25 bp, Saccharomyces pastorianus
ttccgaagacgctaaacccacagag

SEQ ID NO: 164095 - DNA, 25 bp, Saccharomyces pastorianus
cactagctttgtacggtgcgggcgt

SEQ ID NO: 164096 - DNA, 25 bp, Saccharomyces pastorianus
aatttagtacacagcttcccggtag

SEQ ID NO: 164097 - DNA, 25 bp, Saccharomyces pastorianus
cgatgagtctcgtagcagccttgaa

SEQ ID NO: 164098 - DNA, 25 bp, Saccharomyces pastorianus
gcccgccgatgcttagaggtcataa

SEQ ID NO: 164099 - DNA, 25 bp, Saccharomyces pastorianus
tacaaaacgttactacccactgcaa

SEQ ID NO: 164100 - DNA, 25 bp, Saccharomyces pastorianus
gtgataccaccttggttaacgtcgt

SEQ ID NO: 164101 - DNA, 25 bp, Saccharomyces pastorianus
gaatcaagtcgatctcgttacgaat

SEQ ID NO: 164102 - DNA, 25 bp, Saccharomyces pastorianus
tttttcacactatttccaactcagc

SEQ ID NO: 164103 - DNA, 25 bp, Saccharomyces pastorianus
aggagttgcgtcgaatgtttgcccg

SEQ ID NO: 164104 - DNA, 25 bp, Saccharomyces pastorianus
agcctgtagcatcatcctctggaaa

SEQ ID NO: 164105 - DNA, 25 bp, Saccharomyces pastorianus
caagtattttactgcagcctgtagc

SEQ ID NO: 164106 - DNA, 25 bp, Saccharomyces pastorianus
gaattccatgactcaaagctgcata

SEQ ID NO: 164107 - DNA, 25 bp, Saccharomyces pastorianus
gaggaacttaatttcttgccactag

SEQ ID NO: 164108 - DNA, 25 bp, Saccharomyces pastorianus
gatcggaacgatagtgataccacct

SEQ ID NO: 164109 - DNA, 25 bp, Saccharomyces pastorianus
aacctgcaagtactggcctgttagc

SEQ ID NO: 164110 - DNA, 25 bp, Saccharomyces pastorianus
gctcatctgagcacgaaaacctaac

SEQ ID NO: 164111 - DNA, 25 bp, Saccharomyces pastorianus
agcttcctcgcttcttggtgtgaga

SEQ ID NO: 164112 - DNA, 25 bp, Saccharomyces pastorianus
agtccatgatcagctcatctgagca

SEQ ID NO: 164113 - DNA, 25 bp, Saccharomyces pastorianus
atgcagtccatgatcagctcatctg

SEQ ID NO: 164114 - DNA, 25 bp, Saccharomyces pastorianus
tgggtctggcacactgatgcaaaaa

SEQ ID NO: 164115 - DNA, 25 bp, Saccharomyces pastorianus
aaacctaacctgcaagtactggcct

SEQ ID NO: 164116 - DNA, 25 bp, Saccharomyces pastorianus
aagtactggcctgttagcttcctcg

SEQ ID NO: 164117 - DNA, 25 bp, Saccharomyces pastorianus
tcctcgcttcttggtgtgagaatgg

SEQ ID NO: 164118 - DNA, 25 bp, Saccharomyces pastorianus
gagaatgggtctggcacactgatgc

SEQ ID NO: 164119 - DNA, 25 bp, Saccharomyces pastorianus
aagatggtagtcttttatatgccgt

SEQ ID NO: 164120 - DNA, 25 bp, Saccharomyces pastorianus
caacaaccgcttttgaattcccaag

SEQ ID NO: 164121 - DNA, 25 bp, Saccharomyces pastorianus
aagaaatggctgctccttcatccga

SEQ ID NO: 164122 - DNA, 25 bp, Saccharomyces pastorianus
aagtgggatatctgggtccatctcc

SEQ ID NO: 164123 - DNA, 25 bp, Saccharomyces pastorianus
attcttgctgcttactatacggtgg

SEQ ID NO: 164124 - DNA, 25 bp, Saccharomyces pastorianus
attcccaaggtcagccaaatcgtat

SEQ ID NO: 164125 - DNA, 25 bp, Saccharomyces pastorianus
gtgatgatactctccgtgaagtcaa

SEQ ID NO: 164126 - DNA, 25 bp, Saccharomyces pastorianus
gccggcgatgtctttaaccttatgg

SEQ ID NO: 164127 - DNA, 25 bp, Saccharomyces pastorianus
ggctgtctttattgttcgtggtact

SEQ ID NO: 164128 - DNA, 25 bp, Saccharomyces pastorianus
tctcctgctggatcattgtgtttgt

SEQ ID NO: 164129 - DNA, 25 bp, Saccharomyces pastorianus
ggtgccgttatgcaacatcttttgt

SEQ ID NO: 164130 - DNA, 25 bp, Saccharomyces pastorianus
taccggaagtcgtctgatgggctgt

SEQ ID NO: 164131 - DNA, 25 bp, Saccharomyces pastorianus
tactcgtcgactcattccaatggca

SEQ ID NO: 164132 - DNA, 25 bp, Saccharomyces pastorianus
gaatcgcttcttcaagggcacgaaa

SEQ ID NO: 164133 - DNA, 25 bp, Saccharomyces pastorianus
tttcccgagatgcaaacgctatggt

SEQ ID NO: 164134 - DNA, 25 bp, Saccharomyces pastorianus
ttgaaagaattctcccgatccttcc

SEQ ID NO: 164135 - DNA, 25 bp, Saccharomyces pastorianus
gatccttccggtggagtctaatcta

SEQ ID NO: 164136 - DNA, 25 bp, Saccharomyces pastorianus
caaacactttttccaccagagcaaa

SEQ ID NO: 164137 - DNA, 25 bp, Saccharomyces pastorianus
ttctaacgactttgagttcctcgat

SEQ ID NO: 164138 - DNA, 25 bp, Saccharomyces pastorianus
aaagcttcacaatattctgcccgac

SEQ ID NO: 164139 - DNA, 25 bp, Saccharomyces pastorianus
gatctgtgctcattaacgttaccgt

SEQ ID NO: 164140 - DNA, 25 bp, Saccharomyces pastorianus
agccttcattacaacgacatttcga

SEQ ID NO: 164141 - DNA, 25 bp, Saccharomyces pastorianus
aaggcactgataccggaactggcat

SEQ ID NO: 164142 - DNA, 25 bp, Saccharomyces pastorianus
gttctattacgcacagatccggtta

SEQ ID NO: 164143 - DNA, 25 bp, Saccharomyces pastorianus
gtctctctgcatgatatcacgcttt

SEQ ID NO: 164144 - DNA, 25 bp, Saccharomyces pastorianus
aagtcttgcatgaaactcctaggca

SEQ ID NO: 164145 - DNA, 25 bp, Saccharomyces pastorianus
ataggcgatatttactttcaagtct

SEQ ID NO: 164146 - DNA, 25 bp, Saccharomyces pastorianus
gacaacgtatatgtttcctcgaaaa

SEQ ID NO: 164147 - DNA, 25 bp, Saccharomyces pastorianus
gcaagatattcgtgtctctctgcat

SEQ ID NO: 164148 - DNA, 25 bp, Saccharomyces pastorianus
gactattaccagaagttgcacccaa

SEQ ID NO: 164149 - DNA, 25 bp, Saccharomyces pastorianus
gagacatgggtactttattcgacgt

SEQ ID NO: 164150 - DNA, 25 bp, Saccharomyces pastorianus
gatttacgccggtatcgttgaaaat

SEQ ID NO: 164151 - DNA, 25 bp, Saccharomyces pastorianus
tttacagtaacttttcaggacgaga

SEQ ID NO: 164152 - DNA, 25 bp, Saccharomyces pastorianus
gataataattcgagtacctcctccc

SEQ ID NO: 164153 - DNA, 25 bp, Saccharomyces pastorianus
atatcgttactaactgtcctaccca

SEQ ID NO: 164154 - DNA, 25 bp, Saccharomyces pastorianus
attttcatcgctcttccgaggtgta

SEQ ID NO: 164155 - DNA, 25 bp, Saccharomyces pastorianus
aaggccccgaaaacatatctcacat

SEQ ID NO: 164156 - DNA, 25 bp, Saccharomyces pastorianus
tttccgaattcttatcaggctctct

SEQ ID NO: 164157 - DNA, 25 bp, Saccharomyces pastorianus
aatagctgccactgaggcgtcattt

SEQ ID NO: 164158 - DNA, 25 bp, Saccharomyces pastorianus
gatgatggccgcttaactgacatta

SEQ ID NO: 164159 - DNA, 25 bp, Saccharomyces pastorianus
gcggtttgtcttattggatccctaa

SEQ ID NO: 164160 - DNA, 25 bp, Saccharomyces pastorianus
ttggtttgaactttggctcccattt

SEQ ID NO: 164161 - DNA, 25 bp, Saccharomyces pastorianus
gtacgtccccgaagatactacaaca

SEQ ID NO: 164162 - DNA, 25 bp, Saccharomyces pastorianus
gtctaatccagaactcacagcctat

SEQ ID NO: 164163 - DNA, 25 bp, Saccharomyces pastorianus
atgtttacatccctcataccatttg

SEQ ID NO: 164164 - DNA, 25 bp, Saccharomyces pastorianus
atcacgtcacccgataatttttgag

SEQ ID NO: 164165 - DNA, 25 bp, Saccharomyces pastorianus
gtttatgtttgggttcagcgaggac

SEQ ID NO: 164166 - DNA, 25 bp, Saccharomyces pastorianus
aaggcgcctatacatggcccagttt

SEQ ID NO: 164167 - DNA, 25 bp, Saccharomyces pastorianus
aatatcctggatttcttcatcaata

SEQ ID NO: 164168 - DNA, 25 bp, Saccharomyces pastorianus
gttatcgccgaaccaaagattactg

SEQ ID NO: 164169 - DNA, 25 bp, Saccharomyces pastorianus
agggtgcccttctctttgtgtcaaa

SEQ ID NO: 164170 - DNA, 25 bp, Saccharomyces pastorianus
gtgtcaaactgtataaggcgcctat

SEQ ID NO: 164171 - DNA, 25 bp, Saccharomyces pastorianus
taattcttttctttcggcacgttca

SEQ ID NO: 164172 - DNA, 25 bp, Saccharomyces pastorianus
tagcgcttcttcttttgcaagcaag

SEQ ID NO: 164173 - DNA, 25 bp, Saccharomyces pastorianus
ggttttcaacactcttccttgaatc

SEQ ID NO: 164174 - DNA, 25 bp, Saccharomyces pastorianus
gacgagcatcttttcttagccatat

SEQ ID NO: 164175 - DNA, 25 bp, Saccharomyces pastorianus
gagcttgtctttctcatgcttacta

SEQ ID NO: 164176 - DNA, 25 bp, Saccharomyces pastorianus
gaaatacccacttttactggctctt

SEQ ID NO: 164177 - DNA, 25 bp, Saccharomyces pastorianus
tatttcccaatttctttactcttat

SEQ ID NO: 164178 - DNA, 25 bp, Saccharomyces pastorianus
aaacacttttccctcgagcttgtct

SEQ ID NO: 164179 - DNA, 25 bp, Saccharomyces pastorianus
ctagtatttgctttatttgggttga

SEQ ID NO: 164180 - DNA, 25 bp, Saccharomyces pastorianus
gcttactaatctccttgttcatgtt

SEQ ID NO: 164181 - DNA, 25 bp, Saccharomyces pastorianus
cgagtatcttccgaaatacccactt

SEQ ID NO: 164182 - DNA, 25 bp, Saccharomyces pastorianus
actggctctttaatagtagtactag

SEQ ID NO: 164183 - DNA, 25 bp, Saccharomyces pastorianus
tttctcatgcttactaatctccttg

SEQ ID NO: 164184 - DNA, 25 bp, Saccharomyces pastorianus
atataccatgtccataattttactg

SEQ ID NO: 164185 - DNA, 25 bp, Saccharomyces pastorianus
atctccttgttcatgttatatacca

SEQ ID NO: 164186 - DNA, 25 bp, Saccharomyces pastorianus
tacgaacgtggcagatttctttctt

SEQ ID NO: 164187 - DNA, 25 bp, Saccharomyces pastorianus
ttggcacaagaatctacagcactat

SEQ ID NO: 164188 - DNA, 25 bp, Saccharomyces pastorianus
tactctcaggagtcatttttcacag

SEQ ID NO: 164189 - DNA, 25 bp, Saccharomyces pastorianus
ggcgcgtattgcacaaattccagga

SEQ ID NO: 164190 - DNA, 25 bp, Saccharomyces pastorianus
gaactgctttcaatggatcaccaga

SEQ ID NO: 164191 - DNA, 25 bp, Saccharomyces pastorianus
acagcactatattttgtgggcatgc

SEQ ID NO: 164192 - DNA, 25 bp, Saccharomyces pastorianus
attctttgccccagtcaagcataat

SEQ ID NO: 164193 - DNA, 25 bp, Saccharomyces pastorianus
cagctaatttggttttggcgtacat

SEQ ID NO: 164194 - DNA, 25 bp, Saccharomyces pastorianus
ttttgactctttgatggcgcgtatt

SEQ ID NO: 164195 - DNA, 25 bp, Saccharomyces pastorianus
gggatataactgtccttcgtttacg

SEQ ID NO: 164196 - DNA, 25 bp, Saccharomyces pastorianus
attttcgcattattctttgccccag

SEQ ID NO: 164197 - DNA, 25 bp, Saccharomyces pastorianus
ttaacagcatcaaacctccacgagg

SEQ ID NO: 164198 - DNA, 25 bp, Saccharomyces pastorianus
atattcaaggcgtgagtctctggct

SEQ ID NO: 164199 - DNA, 25 bp, Saccharomyces pastorianus
gaaggtactacttgttgaactctca

SEQ ID NO: 164200 - DNA, 25 bp, Saccharomyces pastorianus
tccacgaggtaacgcatcttctaca

SEQ ID NO: 164201 - DNA, 25 bp, Saccharomyces pastorianus
cagtccttattgaacttgccgttaa

SEQ ID NO: 164202 - DNA, 25 bp, Saccharomyces pastorianus
cgagtcaccgcaattatgttccaat

SEQ ID NO: 164203 - DNA, 25 bp, Saccharomyces pastorianus
aacaacgaatactgctctacctggt

SEQ ID NO: 164204 - DNA, 25 bp, Saccharomyces pastorianus
gtacataatgccttcgttcaattca

SEQ ID NO: 164205 - DNA, 25 bp, Saccharomyces pastorianus
tctatcacatatatcgtccatccta

SEQ ID NO: 164206 - DNA, 25 bp, Saccharomyces pastorianus
agcatgcttgcacatttcaacgaat

SEQ ID NO: 164207 - DNA, 25 bp, Saccharomyces pastorianus
atctacttcaggatcgagtcaccgc

SEQ ID NO: 164208 - DNA, 25 bp, Saccharomyces pastorianus
gtgagctctatgatgtgctgagaat

SEQ ID NO: 164209 - DNA, 25 bp, Saccharomyces pastorianus
ttccagcgaggtgcaagagtctaat

SEQ ID NO: 164210 - DNA, 25 bp, Saccharomyces pastorianus
cgaactgaaacggaacttgtgggat

SEQ ID NO: 164211 - DNA, 25 bp, Saccharomyces pastorianus
ttatccgagggaatcaaagagctaa

SEQ ID NO: 164212 - DNA, 25 bp, Saccharomyces pastorianus
gcaagatacagtgacgacgttcgaa

SEQ ID NO: 164213 - DNA, 25 bp, Saccharomyces pastorianus
ttagacgacttaaccgcacaacaga

SEQ ID NO: 164214 - DNA, 25 bp, Saccharomyces pastorianus
gaagctctgagtttccaaatagtgg

SEQ ID NO: 164215 - DNA, 25 bp, Saccharomyces pastorianus
gttcgaaaccataattagtgagctc

SEQ ID NO: 164216 - DNA, 25 bp, Saccharomyces pastorianus
taatatacctgatgagcaagagctc

SEQ ID NO: 164217 - DNA, 25 bp, Saccharomyces pastorianus
taatgactataagatctccaagcag

SEQ ID NO: 164218 - DNA, 25 bp, Saccharomyces pastorianus
gatctccaagcagtcaatctttaaa

SEQ ID NO: 164219 - DNA, 25 bp, Saccharomyces pastorianus
actgcttttagtgttggtgccgttc

SEQ ID NO: 164220 - DNA, 25 bp, Saccharomyces pastorianus
gagccttgctgcgatagaatcctgg

SEQ ID NO: 164221 - DNA, 25 bp, Saccharomyces pastorianus
actcggatacgcaaaaacctctctg

SEQ ID NO: 164222 - DNA, 25 bp, Saccharomyces pastorianus
gtgccgttcttgttcatggaactca

SEQ ID NO: 164223 - DNA, 25 bp, Saccharomyces pastorianus
gtgctctatacaaccatggaaccct

SEQ ID NO: 164224 - DNA, 25 bp, Saccharomyces pastorianus
gaaccctgttccttcaggctaagtg

SEQ ID NO: 164225 - DNA, 25 bp, Saccharomyces pastorianus
aaggtgccattggtactgtcttcgt

SEQ ID NO: 164226 - DNA, 25 bp, Saccharomyces pastorianus
aagtgtggcccgacaaagactgctt

SEQ ID NO: 164227 - DNA, 25 bp, Saccharomyces pastorianus
atgccttccggtacgagtcattgga

SEQ ID NO: 164228 - DNA, 25 bp, Saccharomyces pastorianus
gtccctatgggaacagtgctctata

SEQ ID NO: 164229 - DNA, 25 bp, Saccharomyces pastorianus
taaagtactcgcagttacacccgaa

SEQ ID NO: 164230 - DNA, 25 bp, Saccharomyces pastorianus
ccgccagtcacatctaaaccaatag

SEQ ID NO: 164231 - DNA, 25 bp, Saccharomyces pastorianus
tgataagcccagcagtattccagtg

SEQ ID NO: 164232 - DNA, 25 bp, Saccharomyces pastorianus
gattgagccttattttttcacttat

SEQ ID NO: 164233 - DNA, 25 bp, Saccharomyces pastorianus
gataccatcattcgtgacggtgatc

SEQ ID NO: 164234 - DNA, 25 bp, Saccharomyces pastorianus
tattagccaagactccattaggtgc

SEQ ID NO: 164235 - DNA, 25 bp, Saccharomyces pastorianus
gagttattcaaaccgatgggcacaa

SEQ ID NO: 164236 - DNA, 25 bp, Saccharomyces pastorianus
aagtacatcgacatgaaccgccagt

SEQ ID NO: 164237 - DNA, 25 bp, Saccharomyces pastorianus
gctaggttattcagtacatccatgt

SEQ ID NO: 164238 - DNA, 25 bp, Saccharomyces pastorianus
tattccagtgcacccaacgggcaga

SEQ ID NO: 164239 - DNA, 25 bp, Saccharomyces pastorianus
gaacctgcaaaccttgataccatca

SEQ ID NO: 164240 - DNA, 25 bp, Saccharomyces pastorianus
gagagcccagctattattccaaaac

SEQ ID NO: 164241 - DNA, 25 bp, Saccharomyces pastorianus
ggccctgagaaaaatccaagctttg

SEQ ID NO: 164242 - DNA, 25 bp, Saccharomyces pastorianus
caagaagccatcgaaacctgcaaga

SEQ ID NO: 164243 - DNA, 25 bp, Saccharomyces pastorianus
aagtctacaagattcaccagcagtt

SEQ ID NO: 164244 - DNA, 25 bp, Saccharomyces pastorianus
gacggaacctgtcaagcaaagtttt

SEQ ID NO: 164245 - DNA, 25 bp, Saccharomyces pastorianus
aagaattcctaacattccacccaat

SEQ ID NO: 164246 - DNA, 25 bp, Saccharomyces pastorianus
gaaagtggcacctattcccaaacaa

SEQ ID NO: 164247 - DNA, 25 bp, Saccharomyces pastorianus
tgcgaacaacaaccctttgcaacag

SEQ ID NO: 164248 - DNA, 25 bp, Saccharomyces pastorianus
tgcaacctcccaattcaagtgcgaa

SEQ ID NO: 164249 - DNA, 25 bp, Saccharomyces pastorianus
taaccaaatcttttctccagaggag

SEQ ID NO: 164250 - DNA, 25 bp, Saccharomyces pastorianus
aggtcactgctttggctcaacaaaa

SEQ ID NO: 164251 - DNA, 25 bp, Saccharomyces pastorianus
tctccagaggagcaacgcagcttat

SEQ ID NO: 164252 - DNA, 25 bp, Saccharomyces pastorianus
gaccttttggatctgtactacgacg

SEQ ID NO: 164253 - DNA, 25 bp, Saccharomyces pastorianus
aagtgctaagttccattccagatcc

SEQ ID NO: 164254 - DNA, 25 bp, Saccharomyces pastorianus
gaaagcgtacggtgtatccaaggag

SEQ ID NO: 164255 - DNA, 25 bp, Saccharomyces pastorianus
gaatcgaaatcatccgctgctgaaa

SEQ ID NO: 164256 - DNA, 25 bp, Saccharomyces pastorianus
cagatcccgtttacaacgtcgcaaa

SEQ ID NO: 164257 - DNA, 25 bp, Saccharomyces pastorianus
gatagcgttttggataacttgtcaa

SEQ ID NO: 164258 - DNA, 25 bp, Saccharomyces pastorianus
gaccacaattggcagcaatgtcgaa

SEQ ID NO: 164259 - DNA, 25 bp, Saccharomyces pastorianus
gtttatgtcactaaggccatttggt

SEQ ID NO: 164260 - DNA, 25 bp, Saccharomyces pastorianus
atcaagcttgtgtgtctcgtggtat

SEQ ID NO: 164261 - DNA, 25 bp, Saccharomyces pastorianus
ggcattctcgccactagctgaaaaa

SEQ ID NO: 164262 - DNA, 25 bp, Saccharomyces pastorianus
ttgagttccacgttcacgtttggag

SEQ ID NO: 164263 - DNA, 25 bp, Saccharomyces pastorianus
aagtgttacgaagcccgtagctcca

SEQ ID NO: 164264 - DNA, 25 bp, Saccharomyces pastorianus
gtgtcattggcctttgagagcgcaa

SEQ ID NO: 164265 - DNA, 25 bp, Saccharomyces pastorianus
aatccaagtttctactaagcttttg

SEQ ID NO: 164266 - DNA, 25 bp, Saccharomyces pastorianus
ttccactattccctcgtgtcattgg

SEQ ID NO: 164267 - DNA, 25 bp, Saccharomyces pastorianus
tatgctaatgggacgaaacttttgg

SEQ ID NO: 164268 - DNA, 25 bp, Saccharomyces pastorianus
gcacgccttgaaacattatgctaat

SEQ ID NO: 164269 - DNA, 25 bp, Saccharomyces pastorianus
gagcgcaaggagtacagcccaacta

SEQ ID NO: 164270 - DNA, 25 bp, Saccharomyces pastorianus
agcccaactatcctttatctttgag

SEQ ID NO: 164271 - DNA, 25 bp, Saccharomyces pastorianus
atggtcaaagtgaagcacgccttga

SEQ ID NO: 164272 - DNA, 25 bp, Saccharomyces pastorianus
ggccctagattaatagcttccacta

SEQ ID NO: 164273 - DNA, 25 bp, Saccharomyces pastorianus
ctgccaagcccaaggagacgcttat

SEQ ID NO: 164274 - DNA, 25 bp, Saccharomyces pastorianus
gatgatctttgtgccgtccctaatt

SEQ ID NO: 164275 - DNA, 25 bp, Saccharomyces pastorianus
aactctcgaagatcgacgcattatt

SEQ ID NO: 164276 - DNA, 25 bp, Saccharomyces pastorianus
gtgccgtccctaatttactcaaaag

SEQ ID NO: 164277 - DNA, 25 bp, Saccharomyces pastorianus
gcttcctgttgtgttgtctaaaatg

SEQ ID NO: 164278 - DNA, 25 bp, Saccharomyces pastorianus
gttgaggcacaatatgtcaacattt

SEQ ID NO: 164279 - DNA, 25 bp, Saccharomyces pastorianus
gacactgcaagagttgaggcacaat

SEQ ID NO: 164280 - DNA, 25 bp, Saccharomyces pastorianus
cgacgcattattgtgaggctttaaa

SEQ ID NO: 164281 - DNA, 25 bp, Saccharomyces pastorianus
ggaagaaccgccaaaatctaaagag

SEQ ID NO: 164282 - DNA, 25 bp, Saccharomyces pastorianus
gagtttttcgatgatctttgtgccg

SEQ ID NO: 164283 - DNA, 25 bp, Saccharomyces pastorianus
ataaatatttatgacacctgtaagg

SEQ ID NO: 164284 - DNA, 25 bp, Saccharomyces pastorianus
agacgttttccaaactctcgaagat

SEQ ID NO: 164285 - DNA, 25 bp, Saccharomyces pastorianus
aagatcggacatcccatgtctttcg

SEQ ID NO: 164286 - DNA, 25 bp, Saccharomyces pastorianus
gagttgccgaagttcatcttgtcag

SEQ ID NO: 164287 - DNA, 25 bp, Saccharomyces pastorianus
tagaattaagcgcacccattggtaa

SEQ ID NO: 164288 - DNA, 25 bp, Saccharomyces pastorianus
ataccaacgtggtgttacaggcaat

SEQ ID NO: 164289 - DNA, 25 bp, Saccharomyces pastorianus
gaattgttttttcgacgtcattgtc

SEQ ID NO: 164290 - DNA, 25 bp, Saccharomyces pastorianus
catcttgtcagattctcccttagaa

SEQ ID NO: 164291 - DNA, 25 bp, Saccharomyces pastorianus
gcattacgtcgtcttggataccaac

SEQ ID NO: 164292 - DNA, 25 bp, Saccharomyces pastorianus
accaagtgtccgcaaattgtcgtcc

SEQ ID NO: 164293 - DNA, 25 bp, Saccharomyces pastorianus
gcagatggtttaagcgtcactcaga

SEQ ID NO: 164294 - DNA, 25 bp, Saccharomyces pastorianus
ggaggcgctaccaagatcgtaacag

SEQ ID NO: 164295 - DNA, 25 bp, Saccharomyces pastorianus
gtcgtccccgatgctcaaaatgagt

SEQ ID NO: 164296 - DNA, 25 bp, Saccharomyces pastorianus
attgtgatgatatagagatcttctc

SEQ ID NO: 164297 - DNA, 25 bp, Saccharomyces pastorianus
ttctcagaacccgttaggcaactac

SEQ ID NO: 164298 - DNA, 25 bp, Saccharomyces pastorianus
gatcttctcagaacccgttaggcaa

SEQ ID NO: 164299 - DNA, 25 bp, Saccharomyces pastorianus
tagagatcttctcagaacccgttag

SEQ ID NO: 164300 - DNA, 25 bp, Saccharomyces pastorianus
gaacccgttaggcaactacaagata

SEQ ID NO: 164301 - DNA, 25 bp, Saccharomyces pastorianus
acccgttaggcaactacaagataat

SEQ ID NO: 164302 - DNA, 25 bp, Saccharomyces pastorianus
atcttctcagaacccgttaggcaac

SEQ ID NO: 164303 - DNA, 25 bp, Saccharomyces pastorianus
tcagaacccgttaggcaactacaag

SEQ ID NO: 164304 - DNA, 25 bp, Saccharomyces pastorianus
ggcaactacaagataattctcggga

SEQ ID NO: 164305 - DNA, 25 bp, Saccharomyces pastorianus
gagatcttctcagaacccgttaggc

SEQ ID NO: 164306 - DNA, 25 bp, Saccharomyces pastorianus
actacaagataattctcgggaaaga

SEQ ID NO: 164307 - DNA, 25 bp, Saccharomyces pastorianus
aatactgcctgcaaaaaccgcacaa

SEQ ID NO: 164308 - DNA, 25 bp, Saccharomyces pastorianus
tgctgcccctacagacagtactgaa

SEQ ID NO: 164309 - DNA, 25 bp, Saccharomyces pastorianus
gacgtcatttgcgaacaagctctca

SEQ ID NO: 164310 - DNA, 25 bp, Saccharomyces pastorianus
gttgcaggagactcgaattctttga

SEQ ID NO: 164311 - DNA, 25 bp, Saccharomyces pastorianus
aagctctcagagaagaaccacggta

SEQ ID NO: 164312 - DNA, 25 bp, Saccharomyces pastorianus
atgatgttcactttgccgaggtgcc

SEQ ID NO: 164313 - DNA, 25 bp, Saccharomyces pastorianus
aacactcctgcatgtatccgtaatt

SEQ ID NO: 164314 - DNA, 25 bp, Saccharomyces pastorianus
cgaggtgccgcattggtttgaagtt

SEQ ID NO: 164315 - DNA, 25 bp, Saccharomyces pastorianus
tgagactattcagcgcataactgct

SEQ ID NO: 164316 - DNA, 25 bp, Saccharomyces pastorianus
gaaccacggtacattactcgagtga

SEQ ID NO: 164317 - DNA, 25 bp, Saccharomyces pastorianus
gttgacattgacgttagcgatgact

SEQ ID NO: 164318 - DNA, 25 bp, Saccharomyces pastorianus
tagaagtattcggtcagacgtagct

SEQ ID NO: 164319 - DNA, 25 bp, Saccharomyces pastorianus
tgcgagaggccctgggttcaattcc

SEQ ID NO: 164320 - DNA, 25 bp, Saccharomyces pastorianus
gcgagaggccctgggttcaattccc

SEQ ID NO: 164321 - DNA, 25 bp, Saccharomyces pastorianus
aagcatgcgagaggccctgggttca

SEQ ID NO: 164322 - DNA, 25 bp, Saccharomyces pastorianus
gagaggccctgggttcaattcccag

SEQ ID NO: 164323 - DNA, 25 bp, Saccharomyces pastorianus
gaggccctgggttcaattcccagct

SEQ ID NO: 164324 - DNA, 25 bp, Saccharomyces pastorianus
atgcgagaggccctgggttcaattc

SEQ ID NO: 164325 - DNA, 25 bp, Saccharomyces pastorianus
aatagaagtattcggtcagacgtag

SEQ ID NO: 164326 - DNA, 25 bp, Saccharomyces pastorianus
cagctcgcccccttttttactattg

SEQ ID NO: 164327 - DNA, 25 bp, Saccharomyces pastorianus
ggccctgggttcaattcccagctcg

SEQ ID NO: 164328 - DNA, 25 bp, Saccharomyces pastorianus
atagaagtattcggtcagacgtagc

SEQ ID NO: 164329 - DNA, 25 bp, Saccharomyces pastorianus
gagccagttagattttgatttccct

SEQ ID NO: 164330 - DNA, 25 bp, Saccharomyces pastorianus
ggctgacacttttataacccatacc

SEQ ID NO: 164331 - DNA, 25 bp, Saccharomyces pastorianus
agccaattttaaactgcctccaggt

SEQ ID NO: 164332 - DNA, 25 bp, Saccharomyces pastorianus
tcgtttctttctactctcttgggaa

SEQ ID NO: 164333 - DNA, 25 bp, Saccharomyces pastorianus
gcctccaggtcttggtcatacttca

SEQ ID NO: 164334 - DNA, 25 bp, Saccharomyces pastorianus
ctatgatatcttgtgtttggctgac

SEQ ID NO: 164335 - DNA, 25 bp, Saccharomyces pastorianus
cacagcctattctaatcccgataaa

SEQ ID NO: 164336 - DNA, 25 bp, Saccharomyces pastorianus
gacagccccagtcgttctgaaaaga

SEQ ID NO: 164337 - DNA, 25 bp, Saccharomyces pastorianus
tgatgctttgcatgagcaccctgca

SEQ ID NO: 164338 - DNA, 25 bp, Saccharomyces pastorianus
aaatacttcatctcttcgtttcttt

SEQ ID NO: 164339 - DNA, 25 bp, Saccharomyces pastorianus
aacatcgaagaactcgtcgctactc

SEQ ID NO: 164340 - DNA, 25 bp, Saccharomyces pastorianus
tacgcacaagtgacgcatcttttcc

SEQ ID NO: 164341 - DNA, 25 bp, Saccharomyces pastorianus
ttagctacttcttctggtttacctt

SEQ ID NO: 164342 - DNA, 25 bp, Saccharomyces pastorianus
acggatgcacaggaacttggttctt

SEQ ID NO: 164343 - DNA, 25 bp, Saccharomyces pastorianus
tcaagaaattcttgcccggactctt

SEQ ID NO: 164344 - DNA, 25 bp, Saccharomyces pastorianus
tgaaatgcctgcacatcgccaaatc

SEQ ID NO: 164345 - DNA, 25 bp, Saccharomyces pastorianus
atagaatccaatgctcctctaatcc

SEQ ID NO: 164346 - DNA, 25 bp, Saccharomyces pastorianus
tttgccgaccaacctgatatttaca

SEQ ID NO: 164347 - DNA, 25 bp, Saccharomyces pastorianus
tcaatacttttctaccccaaggcta

SEQ ID NO: 164348 - DNA, 25 bp, Saccharomyces pastorianus
acaatctttgcctcttttagctact

SEQ ID NO: 164349 - DNA, 25 bp, Saccharomyces pastorianus
aatggtgccttcgagtgtgtatcaa

SEQ ID NO: 164350 - DNA, 25 bp, Saccharomyces pastorianus
aacagccctccaatgtgccaatggt

SEQ ID NO: 164351 - DNA, 25 bp, Saccharomyces pastorianus
ttcaaggtattgtcgtttcgccaaa

SEQ ID NO: 164352 - DNA, 25 bp, Saccharomyces pastorianus
gttccaggcaaaaccataggcgcat

SEQ ID NO: 164353 - DNA, 25 bp, Saccharomyces pastorianus
gccctgatgatctagaaattgtcga

SEQ ID NO: 164354 - DNA, 25 bp, Saccharomyces pastorianus
acaacacggcgcttcggtggtcgag

SEQ ID NO: 164355 - DNA, 25 bp, Saccharomyces pastorianus
ataagatgcacgaacccaaaaatgg

SEQ ID NO: 164356 - DNA, 25 bp, Saccharomyces pastorianus
aaaggtgttgtttgccctgatgatc

SEQ ID NO: 164357 - DNA, 25 bp, Saccharomyces pastorianus
gtttcctgttaaactggctatgtgg

SEQ ID NO: 164358 - DNA, 25 bp, Saccharomyces pastorianus
gaaattgtcgaacaacacggcgctt

SEQ ID NO: 164359 - DNA, 25 bp, Saccharomyces pastorianus
gtgggattttgatcattgcgatcca

SEQ ID NO: 164360 - DNA, 25 bp, Saccharomyces pastorianus
ggtcgagtgttcttgggcacgttta

SEQ ID NO: 164361 - DNA, 25 bp, Saccharomyces pastorianus
gagaggcgctaatggacacagttcc

SEQ ID NO: 164362 - DNA, 25 bp, Saccharomyces pastorianus
gaaatctatcagcagtgcactgact

SEQ ID NO: 164363 - DNA, 25 bp, Saccharomyces pastorianus
tgcactgactgcgactctgtaaaga

SEQ ID NO: 164364 - DNA, 25 bp, Saccharomyces pastorianus
tatcagcagtgcactgactgcgact

SEQ ID NO: 164365 - DNA, 25 bp, Saccharomyces pastorianus
gctgaagaggaatggttgcaaaaat

SEQ ID NO: 164366 - DNA, 25 bp, Saccharomyces pastorianus
gcactgactgcgactctgtaaagag

SEQ ID NO: 164367 - DNA, 25 bp, Saccharomyces pastorianus
ggattgggccagtgaattgttatca

SEQ ID NO: 164368 - DNA, 25 bp, Saccharomyces pastorianus
gaattgttatcacacttctcgtggg

SEQ ID NO: 164369 - DNA, 25 bp, Saccharomyces pastorianus
ctgcgactctgtaaagagggctgaa

SEQ ID NO: 164370 - DNA, 25 bp, Saccharomyces pastorianus
tgactgcgactctgtaaagagggct

SEQ ID NO: 164371 - DNA, 25 bp, Saccharomyces pastorianus
gggccagtgaattgttatcacactt

SEQ ID NO: 164372 - DNA, 25 bp, Saccharomyces pastorianus
agtgcactgactgcgactctgtaaa

SEQ ID NO: 164373 - DNA, 25 bp, Saccharomyces pastorianus
ttccttggaccaaattccagctggt

SEQ ID NO: 164374 - DNA, 25 bp, Saccharomyces pastorianus
ctgctgttgagcatatgttgactat

SEQ ID NO: 164375 - DNA, 25 bp, Saccharomyces pastorianus
cttctagactgcttccagaattaga

SEQ ID NO: 164376 - DNA, 25 bp, Saccharomyces pastorianus
attcaggtctttccttggaccaaat

SEQ ID NO: 164377 - DNA, 25 bp, Saccharomyces pastorianus
ctttgtactctgaagtggacttttc

SEQ ID NO: 164378 - DNA, 25 bp, Saccharomyces pastorianus
tactcttctagactgcttccagaat

SEQ ID NO: 164379 - DNA, 25 bp, Saccharomyces pastorianus
ggaccaaattccagctggtattatg

SEQ ID NO: 164380 - DNA, 25 bp, Saccharomyces pastorianus
ggtattatggacattgctgggcaat

SEQ ID NO: 164381 - DNA, 25 bp, Saccharomyces pastorianus
aagtggacttttctgctgttgagca

SEQ ID NO: 164382 - DNA, 25 bp, Saccharomyces pastorianus
tgctattgcttacgctcaaacccaa

SEQ ID NO: 164383 - DNA, 25 bp, Saccharomyces pastorianus
cttacgctcaaacccaagcacaaat

SEQ ID NO: 164384 - DNA, 25 bp, Saccharomyces pastorianus
ctacgtcccagatcaagtttgcaac

SEQ ID NO: 164385 - DNA, 25 bp, Saccharomyces pastorianus
aataccatattcttcctcagaggaa

SEQ ID NO: 164386 - DNA, 25 bp, Saccharomyces pastorianus
aaggcacagtatgtccttcgacaaa

SEQ ID NO: 164387 - DNA, 25 bp, Saccharomyces pastorianus
gatatttcttcacatatttccgtag

SEQ ID NO: 164388 - DNA, 25 bp, Saccharomyces pastorianus
aaatgtatcgcagtccagtcacggt

SEQ ID NO: 164389 - DNA, 25 bp, Saccharomyces pastorianus
atttccgtagattcgtacgccgaag

SEQ ID NO: 164390 - DNA, 25 bp, Saccharomyces pastorianus
tagagatggaagagccgcccttggc

SEQ ID NO: 164391 - DNA, 25 bp, Saccharomyces pastorianus
ggtctcgcccagcattcaagaagga

SEQ ID NO: 164392 - DNA, 25 bp, Saccharomyces pastorianus
gaaaattcctttgatccatctgata

SEQ ID NO: 164393 - DNA, 25 bp, Saccharomyces pastorianus
gtcacggtgaccaaatttccagctt

SEQ ID NO: 164394 - DNA, 25 bp, Saccharomyces pastorianus
gattaaactcagtagctcgcctacg

SEQ ID NO: 164395 - DNA, 25 bp, Saccharomyces pastorianus
gtttccaaccatctgttgcctttga

SEQ ID NO: 164396 - DNA, 25 bp, Saccharomyces pastorianus
tttccaaccatctgttgcctttgac

SEQ ID NO: 164397 - DNA, 25 bp, Saccharomyces pastorianus
ttccaaccatctgttgcctttgaca

SEQ ID NO: 164398 - DNA, 25 bp, Saccharomyces pastorianus
ggcagtttccaaccatctgttgcct

SEQ ID NO: 164399 - DNA, 25 bp, Saccharomyces pastorianus
gcagtttccaaccatctgttgcctt

SEQ ID NO: 164400 - DNA, 25 bp, Saccharomyces pastorianus
aaaggcagtttccaaccatctgttg

SEQ ID NO: 164401 - DNA, 25 bp, Saccharomyces pastorianus
aaggcagtttccaaccatctgttgc

SEQ ID NO: 164402 - DNA, 25 bp, Saccharomyces pastorianus
agtttccaaccatctgttgcctttg

SEQ ID NO: 164403 - DNA, 25 bp, Saccharomyces pastorianus
caaccatctgttgcctttgacacag

SEQ ID NO: 164404 - DNA, 25 bp, Saccharomyces pastorianus
gaaaggcagtttccaaccatctgtt

SEQ ID NO: 164405 - DNA, 25 bp, Saccharomyces pastorianus
aggcagtttccaaccatctgttgcc

SEQ ID NO: 164406 - DNA, 25 bp, Saccharomyces pastorianus
tttctgtggcgggtatccctcaatt

SEQ ID NO: 164407 - DNA, 25 bp, Saccharomyces pastorianus
tacgctatagcaccagtgccaaagc

SEQ ID NO: 164408 - DNA, 25 bp, Saccharomyces pastorianus
gtcagtggccctagttcatcacggt

SEQ ID NO: 164409 - DNA, 25 bp, Saccharomyces pastorianus
tgcgggtaacaataagtaactcaac

SEQ ID NO: 164410 - DNA, 25 bp, Saccharomyces pastorianus
aatggcgctgtcagtggccctagtt

SEQ ID NO: 164411 - DNA, 25 bp, Saccharomyces pastorianus
agttcatcacggtccgtagcacggg

SEQ ID NO: 164412 - DNA, 25 bp, Saccharomyces pastorianus
gtttccctgcggtcctacgctatag

SEQ ID NO: 164413 - DNA, 25 bp, Saccharomyces pastorianus
gtagcacgggtcttactgtctgctc

SEQ ID NO: 164414 - DNA, 25 bp, Saccharomyces pastorianus
ttactgtctgctcttcccgcgtctt

SEQ ID NO: 164415 - DNA, 25 bp, Saccharomyces pastorianus
gtatccctcaattgcgggtaacaat

SEQ ID NO: 164416 - DNA, 25 bp, Saccharomyces pastorianus
ttcagagttaatggcgctgtcagtg

SEQ ID NO: 164417 - DNA, 25 bp, Saccharomyces pastorianus
gtccggattgcgaggcacttatcaa

SEQ ID NO: 164418 - DNA, 25 bp, Saccharomyces pastorianus
ttcgtgtacaaagtgcttccagact

SEQ ID NO: 164419 - DNA, 25 bp, Saccharomyces pastorianus
ccagacttttccttggagcaggtac

SEQ ID NO: 164420 - DNA, 25 bp, Saccharomyces pastorianus
gacctaatatcgtcctgtatggtga

SEQ ID NO: 164421 - DNA, 25 bp, Saccharomyces pastorianus
gagttaccattgtgtccggattgcg

SEQ ID NO: 164422 - DNA, 25 bp, Saccharomyces pastorianus
ggtcacctttcttgaatcccaaata

SEQ ID NO: 164423 - DNA, 25 bp, Saccharomyces pastorianus
aaattcacgatcgtggcggcctgat

SEQ ID NO: 164424 - DNA, 25 bp, Saccharomyces pastorianus
ggtgaaaaccatccatcctgtgaaa

SEQ ID NO: 164425 - DNA, 25 bp, Saccharomyces pastorianus
aagacatccattggcgaatcctcct

SEQ ID NO: 164426 - DNA, 25 bp, Saccharomyces pastorianus
aatcctcctggcacggcattataga

SEQ ID NO: 164427 - DNA, 25 bp, Saccharomyces pastorianus
agcaggtactggtctcgttgtctaa

SEQ ID NO: 164428 - DNA, 25 bp, Saccharomyces pastorianus
gcaaggccggtgacaataaacaatt

SEQ ID NO: 164429 - DNA, 25 bp, Saccharomyces pastorianus
tactgcgggcccacatattgcaagg

SEQ ID NO: 164430 - DNA, 25 bp, Saccharomyces pastorianus
ggctgatttgcatacaatttcggta

SEQ ID NO: 164431 - DNA, 25 bp, Saccharomyces pastorianus
ggatgttccaaatactgcgggccca

SEQ ID NO: 164432 - DNA, 25 bp, Saccharomyces pastorianus
actggctcacttacagatctttctg

SEQ ID NO: 164433 - DNA, 25 bp, Saccharomyces pastorianus
gtgccaagccctcctgtagggttta

SEQ ID NO: 164434 - DNA, 25 bp, Saccharomyces pastorianus
aacctattttagcttcccattcaat

SEQ ID NO: 164435 - DNA, 25 bp, Saccharomyces pastorianus
gactgaacacataccagcttagacc

SEQ ID NO: 164436 - DNA, 25 bp, Saccharomyces pastorianus
aatgacggacaacgctttcgtgcca

SEQ ID NO: 164437 - DNA, 25 bp, Saccharomyces pastorianus
attgcaacacttgaagagcctggtt

SEQ ID NO: 164438 - DNA, 25 bp, Saccharomyces pastorianus
gcttcgaatgtgactctaccgcaaa

SEQ ID NO: 164439 - DNA, 25 bp, Saccharomyces pastorianus
attttcgtagccagagaatatcctc

SEQ ID NO: 164440 - DNA, 25 bp, Saccharomyces pastorianus
gaatatcctctggtagtggtgctct

SEQ ID NO: 164441 - DNA, 25 bp, Saccharomyces pastorianus
aattatgtctggtaccctacgtgtt

SEQ ID NO: 164442 - DNA, 25 bp, Saccharomyces pastorianus
tattttgttctatttttacaccaga

SEQ ID NO: 164443 - DNA, 25 bp, Saccharomyces pastorianus
ctacgtgttctaaaagaatctgggt

SEQ ID NO: 164444 - DNA, 25 bp, Saccharomyces pastorianus
cctctggtagtggtgctctttatat

SEQ ID NO: 164445 - DNA, 25 bp, Saccharomyces pastorianus
ttacaccagaagtatcacactactc

SEQ ID NO: 164446 - DNA, 25 bp, Saccharomyces pastorianus
tctggtaccctacgtgttctaaaag

SEQ ID NO: 164447 - DNA, 25 bp, Saccharomyces pastorianus
cacactactctaaattatgtctggt

SEQ ID NO: 164448 - DNA, 25 bp, Saccharomyces pastorianus
gaactatgtaagattttcgtagcca

SEQ ID NO: 164449 - DNA, 25 bp, Saccharomyces pastorianus
gtggtgctctttatatattttgttc

SEQ ID NO: 164450 - DNA, 25 bp, Saccharomyces pastorianus
taccaggcagccaaatagtcattga

SEQ ID NO: 164451 - DNA, 25 bp, Saccharomyces pastorianus
agggatgtccgttactcttttcaag

SEQ ID NO: 164452 - DNA, 25 bp, Saccharomyces pastorianus
gaaggccatgcggtaccaaaaacgt

SEQ ID NO: 164453 - DNA, 25 bp, Saccharomyces pastorianus
aaagtactcgaataccaggcagcca

SEQ ID NO: 164454 - DNA, 25 bp, Saccharomyces pastorianus
gataacactcaattggcttcagacg

SEQ ID NO: 164455 - DNA, 25 bp, Saccharomyces pastorianus
gtgttgttcaacagcagggtgtgct

SEQ ID NO: 164456 - DNA, 25 bp, Saccharomyces pastorianus
tgcgattgaggaagctagcctggat

SEQ ID NO: 164457 - DNA, 25 bp, Saccharomyces pastorianus
aggcgggctcattaaaaaggtcaat

SEQ ID NO: 164458 - DNA, 25 bp, Saccharomyces pastorianus
gtattcagcggcagtttacccaagt

SEQ ID NO: 164459 - DNA, 25 bp, Saccharomyces pastorianus
ttcagacgagctaaggaaggccatg

SEQ ID NO: 164460 - DNA, 25 bp, Saccharomyces pastorianus
gatggcaaatgatgctgctttatta

SEQ ID NO: 164461 - DNA, 25 bp, Saccharomyces pastorianus
tattgagttggaaccagaacaccct

SEQ ID NO: 164462 - DNA, 25 bp, Saccharomyces pastorianus
gctctggctttatctgaattgacta

SEQ ID NO: 164463 - DNA, 25 bp, Saccharomyces pastorianus
catttccctgaatcccaatttctaa

SEQ ID NO: 164464 - DNA, 25 bp, Saccharomyces pastorianus
tgactattttcaaggcaggcgatga

SEQ ID NO: 164465 - DNA, 25 bp, Saccharomyces pastorianus
tttggtcgcgaacaatctattcaag

SEQ ID NO: 164466 - DNA, 25 bp, Saccharomyces pastorianus
tgcatcaatagctaacaccctaggg

SEQ ID NO: 164467 - DNA, 25 bp, Saccharomyces pastorianus
gacatcgtcgagaattttggtcgcg

SEQ ID NO: 164468 - DNA, 25 bp, Saccharomyces pastorianus
aacttgatcttgtaggacagcttga

SEQ ID NO: 164469 - DNA, 25 bp, Saccharomyces pastorianus
tatatcccctacaacaatcgctaga

SEQ ID NO: 164470 - DNA, 25 bp, Saccharomyces pastorianus
ttccatggtatatatgctctggctt

SEQ ID NO: 164471 - DNA, 25 bp, Saccharomyces pastorianus
gaattaggtctttcgcatttccctg

SEQ ID NO: 164472 - DNA, 25 bp, Saccharomyces pastorianus
aatggcctgggaaccgcttatagtt

SEQ ID NO: 164473 - DNA, 25 bp, Saccharomyces pastorianus
gggacgcactattcttattatacta

SEQ ID NO: 164474 - DNA, 25 bp, Saccharomyces pastorianus
tacggtagccttctatacggcgttt

SEQ ID NO: 164475 - DNA, 25 bp, Saccharomyces pastorianus
gctctctaatggcattcttcacaat

SEQ ID NO: 164476 - DNA, 25 bp, Saccharomyces pastorianus
aattctcccaatagccctggttatg

SEQ ID NO: 164477 - DNA, 25 bp, Saccharomyces pastorianus
aaaagattccgggatctggctataa

SEQ ID NO: 164478 - DNA, 25 bp, Saccharomyces pastorianus
gcgtttattacggattgcgacccat

SEQ ID NO: 164479 - DNA, 25 bp, Saccharomyces pastorianus
gaatattgcctaagattgtcgacct

SEQ ID NO: 164480 - DNA, 25 bp, Saccharomyces pastorianus
acgggtccatcataaattcggcttt

SEQ ID NO: 164481 - DNA, 25 bp, Saccharomyces pastorianus
agttgcaacattcttaattctccca

SEQ ID NO: 164482 - DNA, 25 bp, Saccharomyces pastorianus
atgttacagatgcatacgggtccat

SEQ ID NO: 164483 - DNA, 25 bp, Saccharomyces pastorianus
atctcagcgttgaacaggaagtcgt

SEQ ID NO: 164484 - DNA, 25 bp, Saccharomyces pastorianus
gactccgatcggatacatagtgtta

SEQ ID NO: 164485 - DNA, 25 bp, Saccharomyces pastorianus
agtttactatatgcgtctttcacag

SEQ ID NO: 164486 - DNA, 25 bp, Saccharomyces pastorianus
aatcttctgcttatgagtggtggca

SEQ ID NO: 164487 - DNA, 25 bp, Saccharomyces pastorianus
gattcactgctcatagtggtgttaa

SEQ ID NO: 164488 - DNA, 25 bp, Saccharomyces pastorianus
tattcataaaattcctgccgttctt

SEQ ID NO: 164489 - DNA, 25 bp, Saccharomyces pastorianus
aacgttttcttgtttgcgtcatcga

SEQ ID NO: 164490 - DNA, 25 bp, Saccharomyces pastorianus
gttctttccctcactagtttgatgg

SEQ ID NO: 164491 - DNA, 25 bp, Saccharomyces pastorianus
gaatttgagtcattcgccaacgatg

SEQ ID NO: 164492 - DNA, 25 bp, Saccharomyces pastorianus
ttgcgtcatcgactccgatcggata

SEQ ID NO: 164493 - DNA, 25 bp, Saccharomyces pastorianus
gatctcatgatcacgatctcagcgt

SEQ ID NO: 164494 - DNA, 25 bp, Saccharomyces pastorianus
agcgtgtgtcgaacatgatgggaac

SEQ ID NO: 164495 - DNA, 25 bp, Saccharomyces pastorianus
gattgccgttctatcacaattcggt

SEQ ID NO: 164496 - DNA, 25 bp, Saccharomyces pastorianus
agggcttatcccattgtattatatt

SEQ ID NO: 164497 - DNA, 25 bp, Saccharomyces pastorianus
gttaccgtgtgaagattgccgttct

SEQ ID NO: 164498 - DNA, 25 bp, Saccharomyces pastorianus
aaagttccattgtcacaaaccaaga

SEQ ID NO: 164499 - DNA, 25 bp, Saccharomyces pastorianus
accggaaggtatcaaagcgtgtgtc

SEQ ID NO: 164500 - DNA, 25 bp, Saccharomyces pastorianus
ttgctaccttcctcatagggcttat

SEQ ID NO: 164501 - DNA, 25 bp, Saccharomyces pastorianus
gaacgcagatactcaaacgatcaat

SEQ ID NO: 164502 - DNA, 25 bp, Saccharomyces pastorianus
atttctgattttactacgaacgcag

SEQ ID NO: 164503 - DNA, 25 bp, Saccharomyces pastorianus
caagttttcttttgattgctacctt

SEQ ID NO: 164504 - DNA, 25 bp, Saccharomyces pastorianus
gaaggtgctgactcaatttctgatt

SEQ ID NO: 164505 - DNA, 25 bp, Saccharomyces pastorianus
gataccattggtacagcagaaatcc

SEQ ID NO: 164506 - DNA, 25 bp, Saccharomyces pastorianus
ttaagccaagatacaccattagcgt

SEQ ID NO: 164507 - DNA, 25 bp, Saccharomyces pastorianus
ggacaagatgccctgtgttaaatat

SEQ ID NO: 164508 - DNA, 25 bp, Saccharomyces pastorianus
gatgccacatctgcggatgatacca

SEQ ID NO: 164509 - DNA, 25 bp, Saccharomyces pastorianus
aggaagactgcgcttacaagacgaa

SEQ ID NO: 164510 - DNA, 25 bp, Saccharomyces pastorianus
gtattcggtggactaggcagcctca

SEQ ID NO: 164511 - DNA, 25 bp, Saccharomyces pastorianus
tagcatccaagggactaggcactgg

SEQ ID NO: 164512 - DNA, 25 bp, Saccharomyces pastorianus
aaagctggtacgaccgtgataggcg

SEQ ID NO: 164513 - DNA, 25 bp, Saccharomyces pastorianus
taggcactggtttgaaagctggtac

SEQ ID NO: 164514 - DNA, 25 bp, Saccharomyces pastorianus
gcatttagctttcagctttaagcca

SEQ ID NO: 164515 - DNA, 25 bp, Saccharomyces pastorianus
ggcagcctcaccaaccataagaaga

SEQ ID NO: 164516 - DNA, 25 bp, Saccharomyces pastorianus
gattggttccaactctgtagcttac

SEQ ID NO: 164517 - DNA, 25 bp, Saccharomyces pastorianus
gagccaaactttgaatcctgtctgg

SEQ ID NO: 164518 - DNA, 25 bp, Saccharomyces pastorianus
ttatgttgcagttacttcaccaaac

SEQ ID NO: 164519 - DNA, 25 bp, Saccharomyces pastorianus
gtggaattcagactacgaagcagtt

SEQ ID NO: 164520 - DNA, 25 bp, Saccharomyces pastorianus
ctgtagcttacacgccaccaattgg

SEQ ID NO: 164521 - DNA, 25 bp, Saccharomyces pastorianus
gattaccacatattggagacctgtt

SEQ ID NO: 164522 - DNA, 25 bp, Saccharomyces pastorianus
ataagtttgtcgtcaaggatggcaa

SEQ ID NO: 164523 - DNA, 25 bp, Saccharomyces pastorianus
tggagacctgttagactggagattg

SEQ ID NO: 164524 - DNA, 25 bp, Saccharomyces pastorianus
ttggatctaccattcaaaccctgaa

SEQ ID NO: 164525 - DNA, 25 bp, Saccharomyces pastorianus
gtaccattgatccatactgtaaggt

SEQ ID NO: 164526 - DNA, 25 bp, Saccharomyces pastorianus
caattggcgccatcagagtattcat

SEQ ID NO: 164527 - DNA, 25 bp, Saccharomyces pastorianus
ttggtaaatcgtcaatagtcctaag

SEQ ID NO: 164528 - DNA, 25 bp, Saccharomyces pastorianus
gttggtaaatcgtcaatagtcctaa

SEQ ID NO: 164529 - DNA, 25 bp, Saccharomyces pastorianus
ggtaaatcgtcaatagtcctaaggt

SEQ ID NO: 164530 - DNA, 25 bp, Saccharomyces pastorianus
tggtaaatcgtcaatagtcctaagg

SEQ ID NO: 164531 - DNA, 25 bp, Saccharomyces pastorianus
gtgaggcagcagttggtaaatcgtc

SEQ ID NO: 164532 - DNA, 25 bp, Saccharomyces pastorianus
ggtttgtatctaatgatttgacctg

SEQ ID NO: 164533 - DNA, 25 bp, Saccharomyces pastorianus
gtaaatcgtcaatagtcctaaggtt

SEQ ID NO: 164534 - DNA, 25 bp, Saccharomyces pastorianus
taaatcgtcaatagtcctaaggttt

SEQ ID NO: 164535 - DNA, 25 bp, Saccharomyces pastorianus
aatcgtcaatagtcctaaggtttgt

SEQ ID NO: 164536 - DNA, 25 bp, Saccharomyces pastorianus
atcgtcaatagtcctaaggtttgta

SEQ ID NO: 164537 - DNA, 25 bp, Saccharomyces pastorianus
gtttgtatctaatgatttgacctgc

SEQ ID NO: 164538 - DNA, 25 bp, Saccharomyces pastorianus
atcagttcctccagcttaagcaaaa

SEQ ID NO: 164539 - DNA, 25 bp, Saccharomyces pastorianus
atgcgttctccttacacaatacaaa

SEQ ID NO: 164540 - DNA, 25 bp, Saccharomyces pastorianus
gccattagccatgtgatgggcctgt

SEQ ID NO: 164541 - DNA, 25 bp, Saccharomyces pastorianus
agaaaaagtactccgccacatatgc

SEQ ID NO: 164542 - DNA, 25 bp, Saccharomyces pastorianus
tggactcgcccaaagaatgcaactt

SEQ ID NO: 164543 - DNA, 25 bp, Saccharomyces pastorianus
gagtctacaacttctttttcgtcat

SEQ ID NO: 164544 - DNA, 25 bp, Saccharomyces pastorianus
aacgaagtacctgccgacgtagacg

SEQ ID NO: 164545 - DNA, 25 bp, Saccharomyces pastorianus
atatgcccacaatgactctgctatg

SEQ ID NO: 164546 - DNA, 25 bp, Saccharomyces pastorianus
aaaaacattgccgtggactcgccca

SEQ ID NO: 164547 - DNA, 25 bp, Saccharomyces pastorianus
acgtagacgtcctgtgtgccattag

SEQ ID NO: 164548 - DNA, 25 bp, Saccharomyces pastorianus
gggcctgttaatggacgggtatcac

SEQ ID NO: 164549 - DNA, 25 bp, Saccharomyces pastorianus
tactcgaaaagctctttctgggaaa

SEQ ID NO: 164550 - DNA, 25 bp, Saccharomyces pastorianus
ctataagatttgagtacggtgccac

SEQ ID NO: 164551 - DNA, 25 bp, Saccharomyces pastorianus
tcatctcgcagcaggagctacgaat

SEQ ID NO: 164552 - DNA, 25 bp, Saccharomyces pastorianus
ctggcagtgtattcgaaggttcaaa

SEQ ID NO: 164553 - DNA, 25 bp, Saccharomyces pastorianus
tgttttgtcaattctcatctcgcag

SEQ ID NO: 164554 - DNA, 25 bp, Saccharomyces pastorianus
aactatctgcgggttcgattttgaa

SEQ ID NO: 164555 - DNA, 25 bp, Saccharomyces pastorianus
gcattttgatcaactttacctaggt

SEQ ID NO: 164556 - DNA, 25 bp, Saccharomyces pastorianus
ttccattttctggttaggtgacatg

SEQ ID NO: 164557 - DNA, 25 bp, Saccharomyces pastorianus
ccgatattgttgttttaggtcttca

SEQ ID NO: 164558 - DNA, 25 bp, Saccharomyces pastorianus
gattttgaacgctgattactcgaaa

SEQ ID NO: 164559 - DNA, 25 bp, Saccharomyces pastorianus
gattcctcatcacgattccattttc

SEQ ID NO: 164560 - DNA, 25 bp, Saccharomyces pastorianus
aaaattcacccactacctatggagc

SEQ ID NO: 164561 - DNA, 25 bp, Saccharomyces pastorianus
gtggtcagacggtacatattcgcta

SEQ ID NO: 164562 - DNA, 25 bp, Saccharomyces pastorianus
tcgaccctccaagttttgaggccaa

SEQ ID NO: 164563 - DNA, 25 bp, Saccharomyces pastorianus
ggtcaacgatacgagcaacactttt

SEQ ID NO: 164564 - DNA, 25 bp, Saccharomyces pastorianus
aagggtcctggaacatacattgtaa

SEQ ID NO: 164565 - DNA, 25 bp, Saccharomyces pastorianus
gaatccccagatgccgcttttgaga

SEQ ID NO: 164566 - DNA, 25 bp, Saccharomyces pastorianus
gaggatcaactagacgaccgcctga

SEQ ID NO: 164567 - DNA, 25 bp, Saccharomyces pastorianus
gacgaccgcctgattgatgaaaaca

SEQ ID NO: 164568 - DNA, 25 bp, Saccharomyces pastorianus
agcaattcagcttctagggaggatc

SEQ ID NO: 164569 - DNA, 25 bp, Saccharomyces pastorianus
gacagtatcgcatgaccaacaagag

SEQ ID NO: 164570 - DNA, 25 bp, Saccharomyces pastorianus
tgatgtttattccaacttcgacgaa

SEQ ID NO: 164571 - DNA, 25 bp, Saccharomyces pastorianus
ctattcactgaagacgatgggtaca

SEQ ID NO: 164572 - DNA, 25 bp, Saccharomyces pastorianus
gcactacgtcagttgaaagctgcaa

SEQ ID NO: 164573 - DNA, 25 bp, Saccharomyces pastorianus
gaggtttgtcacgtctaggacgcca

SEQ ID NO: 164574 - DNA, 25 bp, Saccharomyces pastorianus
taggacgccatgctgtctcaaacaa

SEQ ID NO: 164575 - DNA, 25 bp, Saccharomyces pastorianus
aagcacgcaggttccggtcaagaag

SEQ ID NO: 164576 - DNA, 25 bp, Saccharomyces pastorianus
gtctcaaacaacaactccgatactt

SEQ ID NO: 164577 - DNA, 25 bp, Saccharomyces pastorianus
gacccttaagcttcaacgaatcacg

SEQ ID NO: 164578 - DNA, 25 bp, Saccharomyces pastorianus
gcgaaatctagttcaggcacagcag

SEQ ID NO: 164579 - DNA, 25 bp, Saccharomyces pastorianus
aagatcgctcatactgaatttgatg

SEQ ID NO: 164580 - DNA, 25 bp, Saccharomyces pastorianus
gcaaaagtcaaatccccatcacaag

SEQ ID NO: 164581 - DNA, 25 bp, Saccharomyces pastorianus
tccgatacttctcaaacccttaaag

SEQ ID NO: 164582 - DNA, 25 bp, Saccharomyces pastorianus
gaatcttttgttcctactcttccct

SEQ ID NO: 164583 - DNA, 25 bp, Saccharomyces pastorianus
aagtccaaatcactcgcatctgggt

SEQ ID NO: 164584 - DNA, 25 bp, Saccharomyces pastorianus
gactttaatacgtacacacccatca

SEQ ID NO: 164585 - DNA, 25 bp, Saccharomyces pastorianus
ccctctgcgtatactacattcggaa

SEQ ID NO: 164586 - DNA, 25 bp, Saccharomyces pastorianus
gaaacaattagcacctccatatgat

SEQ ID NO: 164587 - DNA, 25 bp, Saccharomyces pastorianus
gtttaacaggctatcgcaagacccc

SEQ ID NO: 164588 - DNA, 25 bp, Saccharomyces pastorianus
gaacgatttggatctgcaaccggta

SEQ ID NO: 164589 - DNA, 25 bp, Saccharomyces pastorianus
gattgctccacaaatttgccaacat

SEQ ID NO: 164590 - DNA, 25 bp, Saccharomyces pastorianus
atatgttgtttctcagagcttgcaa

SEQ ID NO: 164591 - DNA, 25 bp, Saccharomyces pastorianus
agaagtggcctttttcattgaaagt

SEQ ID NO: 164592 - DNA, 25 bp, Saccharomyces pastorianus
gcaagaccccttaattattcggaat

SEQ ID NO: 164593 - DNA, 25 bp, Saccharomyces pastorianus
tcactgttgaccaaatgcgttctat

SEQ ID NO: 164594 - DNA, 25 bp, Saccharomyces pastorianus
aaatgcgttctataatggacaaagt

SEQ ID NO: 164595 - DNA, 25 bp, Saccharomyces pastorianus
cactgttgaccaaatgcgttctata

SEQ ID NO: 164596 - DNA, 25 bp, Saccharomyces pastorianus
actgttgaccaaatgcgttctataa

SEQ ID NO: 164597 - DNA, 25 bp, Saccharomyces pastorianus
gcgttctataatggacaaagttacc

SEQ ID NO: 164598 - DNA, 25 bp, Saccharomyces pastorianus
aatggacaaagttaccaatgtgagt

SEQ ID NO: 164599 - DNA, 25 bp, Saccharomyces pastorianus
tgttgaccaaatgcgttctataatg

SEQ ID NO: 164600 - DNA, 25 bp, Saccharomyces pastorianus
tggacaaagttaccaatgtgagtaa

SEQ ID NO: 164601 - DNA, 25 bp, Saccharomyces pastorianus
ttcactgttgaccaaatgcgttcta

SEQ ID NO: 164602 - DNA, 25 bp, Saccharomyces pastorianus
atggttgctttcactgttgaccaaa

SEQ ID NO: 164603 - DNA, 25 bp, Saccharomyces pastorianus
gaccaaatgcgttctataatggaca

SEQ ID NO: 164604 - DNA, 25 bp, Saccharomyces pastorianus
aattttattgatagggtactcgcat

SEQ ID NO: 164605 - DNA, 25 bp, Saccharomyces pastorianus
acgtgcattatgaaagttgtccaac

SEQ ID NO: 164606 - DNA, 25 bp, Saccharomyces pastorianus
aaataccctacgcaatttcattggg

SEQ ID NO: 164607 - DNA, 25 bp, Saccharomyces pastorianus
aaccctgatttagttgtgatcacag

SEQ ID NO: 164608 - DNA, 25 bp, Saccharomyces pastorianus
gatcacaggtgatttgttagactca

SEQ ID NO: 164609 - DNA, 25 bp, Saccharomyces pastorianus
aagttgtccaaccaatgatttctaa

SEQ ID NO: 164610 - DNA, 25 bp, Saccharomyces pastorianus
ggtactcgcatcagaaaaccctgat

SEQ ID NO: 164611 - DNA, 25 bp, Saccharomyces pastorianus
gggtgtttctgacgaatccaatttg

SEQ ID NO: 164612 - DNA, 25 bp, Saccharomyces pastorianus
tactattgactatcaaacgtgcatt

SEQ ID NO: 164613 - DNA, 25 bp, Saccharomyces pastorianus
gttagactcacataatactattgac

SEQ ID NO: 164614 - DNA, 25 bp, Saccharomyces pastorianus
agaagagggtcatatggccatagaa

SEQ ID NO: 164615 - DNA, 25 bp, Saccharomyces pastorianus
gttacatgactccaacagacttaat

SEQ ID NO: 164616 - DNA, 25 bp, Saccharomyces pastorianus
tattggcgatctggattcactatca

SEQ ID NO: 164617 - DNA, 25 bp, Saccharomyces pastorianus
aatactatgaccgagtccctggttt

SEQ ID NO: 164618 - DNA, 25 bp, Saccharomyces pastorianus
aagtgcgttaatttgatctctctac

SEQ ID NO: 164619 - DNA, 25 bp, Saccharomyces pastorianus
aggtctgtgcagatggtgcagccaa

SEQ ID NO: 164620 - DNA, 25 bp, Saccharomyces pastorianus
gagtccctggttttctcgaaagtga

SEQ ID NO: 164621 - DNA, 25 bp, Saccharomyces pastorianus
aacgcaattgtataccttatccgag

SEQ ID NO: 164622 - DNA, 25 bp, Saccharomyces pastorianus
agatgatgacgaaaccctaaggata

SEQ ID NO: 164623 - DNA, 25 bp, Saccharomyces pastorianus
gatccccaatttaggaacacttgta

SEQ ID NO: 164624 - DNA, 25 bp, Saccharomyces pastorianus
gaactttgattgagtatgatcccca

SEQ ID NO: 164625 - DNA, 25 bp, Saccharomyces pastorianus
aattcaccagaatttcgctctttaa

SEQ ID NO: 164626 - DNA, 25 bp, Saccharomyces pastorianus
aagtccctctgagagaaccctgaac

SEQ ID NO: 164627 - DNA, 25 bp, Saccharomyces pastorianus
tccgctaccgctttggaatttgttc

SEQ ID NO: 164628 - DNA, 25 bp, Saccharomyces pastorianus
tatttccaatacatctgccacagtg

SEQ ID NO: 164629 - DNA, 25 bp, Saccharomyces pastorianus
cgacatcgtcagaggtgtttccggt

SEQ ID NO: 164630 - DNA, 25 bp, Saccharomyces pastorianus
gaatttgttcgtgccttaaagactc

SEQ ID NO: 164631 - DNA, 25 bp, Saccharomyces pastorianus
cattgctgaagtctccatctgtgga

SEQ ID NO: 164632 - DNA, 25 bp, Saccharomyces pastorianus
aaggaagcgtgtctccattgctgaa

SEQ ID NO: 164633 - DNA, 25 bp, Saccharomyces pastorianus
aagcagacaaaccaccgcagatttt

SEQ ID NO: 164634 - DNA, 25 bp, Saccharomyces pastorianus
caccgcagattttttgacctcagtt

SEQ ID NO: 164635 - DNA, 25 bp, Saccharomyces pastorianus
agatgcgtacgacttgttcaataaa

SEQ ID NO: 164636 - DNA, 25 bp, Saccharomyces pastorianus
ggttatcagatctactatggccccg

SEQ ID NO: 164637 - DNA, 25 bp, Saccharomyces pastorianus
gaacttaagtgcttctggtgcttcc

SEQ ID NO: 164638 - DNA, 25 bp, Saccharomyces pastorianus
atatggctcacctaagtgcggcaga

SEQ ID NO: 164639 - DNA, 25 bp, Saccharomyces pastorianus
aaaactggcaaggactctgaccgca

SEQ ID NO: 164640 - DNA, 25 bp, Saccharomyces pastorianus
tgttcgctatcagtccattgtggta

SEQ ID NO: 164641 - DNA, 25 bp, Saccharomyces pastorianus
gtatgcaaaactccactcaatcggc

SEQ ID NO: 164642 - DNA, 25 bp, Saccharomyces pastorianus
aaagccttattccttaggttgcgct

SEQ ID NO: 164643 - DNA, 25 bp, Saccharomyces pastorianus
gaagctccaggctatgacccaaaat

SEQ ID NO: 164644 - DNA, 25 bp, Saccharomyces pastorianus
gaaaatttttctagtgccgtctggg

SEQ ID NO: 164645 - DNA, 25 bp, Saccharomyces pastorianus
tggtgcttccgcagatgttcgctat

SEQ ID NO: 164646 - DNA, 25 bp, Saccharomyces pastorianus
taaacccgatattctctgatcctga

SEQ ID NO: 164647 - DNA, 25 bp, Saccharomyces pastorianus
gaaaacgctgctgatctacacaatt

SEQ ID NO: 164648 - DNA, 25 bp, Saccharomyces pastorianus
tggttcatcgtcatattcttcatca

SEQ ID NO: 164649 - DNA, 25 bp, Saccharomyces pastorianus
ttcatctcagaaccgggccagtaca

SEQ ID NO: 164650 - DNA, 25 bp, Saccharomyces pastorianus
aaattccctaatgccggagatttct

SEQ ID NO: 164651 - DNA, 25 bp, Saccharomyces pastorianus
cttcttcaaacaattcctccacaaa

SEQ ID NO: 164652 - DNA, 25 bp, Saccharomyces pastorianus
caatcactatattctggttcatcgt

SEQ ID NO: 164653 - DNA, 25 bp, Saccharomyces pastorianus
atgataccttcacaacggccaattt

SEQ ID NO: 164654 - DNA, 25 bp, Saccharomyces pastorianus
tcttcattatcctttgcttcttcaa

SEQ ID NO: 164655 - DNA, 25 bp, Saccharomyces pastorianus
aatcatctgcaaacagcaccagtgc

SEQ ID NO: 164656 - DNA, 25 bp, Saccharomyces pastorianus
agatttctactccatcattcttcgg

SEQ ID NO: 164657 - DNA, 25 bp, Saccharomyces pastorianus
tttcccacttactgagctcgataat

SEQ ID NO: 164658 - DNA, 25 bp, Saccharomyces pastorianus
gattatgcgaacctatatgaaccta

SEQ ID NO: 164659 - DNA, 25 bp, Saccharomyces pastorianus
aattgcgctatctggactggtacta

SEQ ID NO: 164660 - DNA, 25 bp, Saccharomyces pastorianus
gatcggcttcattatcttccatatc

SEQ ID NO: 164661 - DNA, 25 bp, Saccharomyces pastorianus
cagatttggttcctctaattgcgct

SEQ ID NO: 164662 - DNA, 25 bp, Saccharomyces pastorianus
tactttcttcgccatgttgggtatg

SEQ ID NO: 164663 - DNA, 25 bp, Saccharomyces pastorianus
agcaaccttgatcccagtattcggt

SEQ ID NO: 164664 - DNA, 25 bp, Saccharomyces pastorianus
gtgacttgttcacttctactcattc

SEQ ID NO: 164665 - DNA, 25 bp, Saccharomyces pastorianus
aacgcttggttaggtggcctttgtg

SEQ ID NO: 164666 - DNA, 25 bp, Saccharomyces pastorianus
tttggtcgtgtgttggtactttctt

SEQ ID NO: 164667 - DNA, 25 bp, Saccharomyces pastorianus
gtttctccaggctgtaccaatcaaa

SEQ ID NO: 164668 - DNA, 25 bp, Saccharomyces pastorianus
tccttaccgcgttctgttactttat

SEQ ID NO: 164669 - DNA, 25 bp, Saccharomyces pastorianus
agtattcggtatcattggtgcttct

SEQ ID NO: 164670 - DNA, 25 bp, Saccharomyces pastorianus
gaaaccctgatttgcaacctatcaa

SEQ ID NO: 164671 - DNA, 25 bp, Saccharomyces pastorianus
gtcaaaaatagggcctccgtgaatt

SEQ ID NO: 164672 - DNA, 25 bp, Saccharomyces pastorianus
taagaaaccctgatttgcaacctat

SEQ ID NO: 164673 - DNA, 25 bp, Saccharomyces pastorianus
gcaacctatcaagtctgttaatcaa

SEQ ID NO: 164674 - DNA, 25 bp, Saccharomyces pastorianus
cctgtcaaaaatagggcctccgtga

SEQ ID NO: 164675 - DNA, 25 bp, Saccharomyces pastorianus
acctatcaagtctgttaatcaaacg

SEQ ID NO: 164676 - DNA, 25 bp, Saccharomyces pastorianus
attcctgtcaaaaatagggcctccg

SEQ ID NO: 164677 - DNA, 25 bp, Saccharomyces pastorianus
tgatttgcaacctatcaagtctgtt

SEQ ID NO: 164678 - DNA, 25 bp, Saccharomyces pastorianus
gaaattcctgtcaaaaatagggcct

SEQ ID NO: 164679 - DNA, 25 bp, Saccharomyces pastorianus
ctgtcaaaaatagggcctccgtgaa

SEQ ID NO: 164680 - DNA, 25 bp, Saccharomyces pastorianus
ttcctgtcaaaaatagggcctccgt

SEQ ID NO: 164681 - DNA, 25 bp, Saccharomyces pastorianus
gagtctcaaggctccttttaccaaa

SEQ ID NO: 164682 - DNA, 25 bp, Saccharomyces pastorianus
actgctgtcattatggctccaacta

SEQ ID NO: 164683 - DNA, 25 bp, Saccharomyces pastorianus
actctgatgttctcagctactttcc

SEQ ID NO: 164684 - DNA, 25 bp, Saccharomyces pastorianus
actccaggtcgtttgaatgacttgt

SEQ ID NO: 164685 - DNA, 25 bp, Saccharomyces pastorianus
gccaacgtcaagtacttggttctag

SEQ ID NO: 164686 - DNA, 25 bp, Saccharomyces pastorianus
aaaggcctacccaactgctgtcatt

SEQ ID NO: 164687 - DNA, 25 bp, Saccharomyces pastorianus
gatctaatatgtctgcatccactga

SEQ ID NO: 164688 - DNA, 25 bp, Saccharomyces pastorianus
gaagtcagccttatatggatctaat

SEQ ID NO: 164689 - DNA, 25 bp, Saccharomyces pastorianus
gttggccacccaaattttcgatgaa

SEQ ID NO: 164690 - DNA, 25 bp, Saccharomyces pastorianus
aaggcctgcgtcgtctacggtggtt

SEQ ID NO: 164691 - DNA, 25 bp, Saccharomyces pastorianus
aatttacttatagatcctgggtcaa

SEQ ID NO: 164692 - DNA, 25 bp, Saccharomyces pastorianus
aaaggaagtggagcctaccatcctc

SEQ ID NO: 164693 - DNA, 25 bp, Saccharomyces pastorianus
aaaagacgactgaactcgctgccat

SEQ ID NO: 164694 - DNA, 25 bp, Saccharomyces pastorianus
aactcgctgccattttttatcaagg

SEQ ID NO: 164695 - DNA, 25 bp, Saccharomyces pastorianus
gaactcatcatgttagatgcaacag

SEQ ID NO: 164696 - DNA, 25 bp, Saccharomyces pastorianus
gcactctagcttcaaacagcccaaa

SEQ ID NO: 164697 - DNA, 25 bp, Saccharomyces pastorianus
ggtggcaaatggaactcatcatgtt

SEQ ID NO: 164698 - DNA, 25 bp, Saccharomyces pastorianus
ggaaatgaacttcccttgcgtcggt

SEQ ID NO: 164699 - DNA, 25 bp, Saccharomyces pastorianus
aatgcttttttataggtaacgctgg

SEQ ID NO: 164700 - DNA, 25 bp, Saccharomyces pastorianus
catataccatttgcactctagcttc

SEQ ID NO: 164701 - DNA, 25 bp, Saccharomyces pastorianus
cctaccatcctctctaaatgcatat

SEQ ID NO: 164702 - DNA, 25 bp, Saccharomyces pastorianus
tcccttgcgtcggtggcaaatggaa

SEQ ID NO: 164703 - DNA, 25 bp, Saccharomyces pastorianus
tcatctgcatcaacgacatcttcga

SEQ ID NO: 164704 - DNA, 25 bp, Saccharomyces pastorianus
catactgttgtatttccgcgtgaat

SEQ ID NO: 164705 - DNA, 25 bp, Saccharomyces pastorianus
gtgtttcttcatcatctgcgggaac

SEQ ID NO: 164706 - DNA, 25 bp, Saccharomyces pastorianus
tttttgctaccaccaggtttactgg

SEQ ID NO: 164707 - DNA, 25 bp, Saccharomyces pastorianus
gcagtcttcctcttcgtaggtttgg

SEQ ID NO: 164708 - DNA, 25 bp, Saccharomyces pastorianus
gtaggtttggctttctgcttgataa

SEQ ID NO: 164709 - DNA, 25 bp, Saccharomyces pastorianus
gcgggaactggattgtcatctgcat

SEQ ID NO: 164710 - DNA, 25 bp, Saccharomyces pastorianus
taaatcatgctttcgttttcctttt

SEQ ID NO: 164711 - DNA, 25 bp, Saccharomyces pastorianus
gtctgtgctactatcttgtgtttct

SEQ ID NO: 164712 - DNA, 25 bp, Saccharomyces pastorianus
gtgaatccacttttaaccgtagctg

SEQ ID NO: 164713 - DNA, 25 bp, Saccharomyces pastorianus
ttatccttcttcaagtctgtgctac

SEQ ID NO: 164714 - DNA, 25 bp, Saccharomyces pastorianus
ccaagaaacgttgggtccatggata

SEQ ID NO: 164715 - DNA, 25 bp, Saccharomyces pastorianus
gattttaccatcctaaggtaattga

SEQ ID NO: 164716 - DNA, 25 bp, Saccharomyces pastorianus
aagtccttagctaatgtcggcacag

SEQ ID NO: 164717 - DNA, 25 bp, Saccharomyces pastorianus
gccctgcatgtggtatgtgataaaa

SEQ ID NO: 164718 - DNA, 25 bp, Saccharomyces pastorianus
gctgccaaaagattttaccatccta

SEQ ID NO: 164719 - DNA, 25 bp, Saccharomyces pastorianus
gcacaggaatcgtgggcgccctgca

SEQ ID NO: 164720 - DNA, 25 bp, Saccharomyces pastorianus
gggtccatggataagtccttagcta

SEQ ID NO: 164721 - DNA, 25 bp, Saccharomyces pastorianus
acgttgggtccatggataagtcctt

SEQ ID NO: 164722 - DNA, 25 bp, Saccharomyces pastorianus
taatgtcggcacaggaatcgtgggc

SEQ ID NO: 164723 - DNA, 25 bp, Saccharomyces pastorianus
gataagtccttagctaatgtcggca

SEQ ID NO: 164724 - DNA, 25 bp, Saccharomyces pastorianus
ggcgccctgcatgtggtatgtgata

SEQ ID NO: 164725 - DNA, 25 bp, Saccharomyces pastorianus
ggatcagagatcaggttaccggaat

SEQ ID NO: 164726 - DNA, 25 bp, Saccharomyces pastorianus
gaaccaattttcatagaccatttaa

SEQ ID NO: 164727 - DNA, 25 bp, Saccharomyces pastorianus
ctgagtcattaccaggcatcactga

SEQ ID NO: 164728 - DNA, 25 bp, Saccharomyces pastorianus
aggacgaggcggaaatcttcagaat

SEQ ID NO: 164729 - DNA, 25 bp, Saccharomyces pastorianus
gaatcttcaactactaacacagcat

SEQ ID NO: 164730 - DNA, 25 bp, Saccharomyces pastorianus
gtgcaggtacaactcgacaacattg

SEQ ID NO: 164731 - DNA, 25 bp, Saccharomyces pastorianus
ggaacagtcgactttgaaccaattt

SEQ ID NO: 164732 - DNA, 25 bp, Saccharomyces pastorianus
gaatctaatgatcctctaacgaata

SEQ ID NO: 164733 - DNA, 25 bp, Saccharomyces pastorianus
ggcatcactgaataatcttctcatt

SEQ ID NO: 164734 - DNA, 25 bp, Saccharomyces pastorianus
aaattggactttacctgaatcttca

SEQ ID NO: 164735 - DNA, 25 bp, Saccharomyces pastorianus
actgacaatcagctccgactaaaac

SEQ ID NO: 164736 - DNA, 25 bp, Saccharomyces pastorianus
aatgggcttgattatgtccgcacgc

SEQ ID NO: 164737 - DNA, 25 bp, Saccharomyces pastorianus
gctgcggcaacgagtcctattgata

SEQ ID NO: 164738 - DNA, 25 bp, Saccharomyces pastorianus
gacactgataatgacggtcctagaa

SEQ ID NO: 164739 - DNA, 25 bp, Saccharomyces pastorianus
gctctagacttataccactttgctc

SEQ ID NO: 164740 - DNA, 25 bp, Saccharomyces pastorianus
gatcgggcagatacggatttggcaa

SEQ ID NO: 164741 - DNA, 25 bp, Saccharomyces pastorianus
aaccttccaaagcactatatcccga

SEQ ID NO: 164742 - DNA, 25 bp, Saccharomyces pastorianus
aaactttctgacattttcctctcca

SEQ ID NO: 164743 - DNA, 25 bp, Saccharomyces pastorianus
gcttgaatcaagtccagttactggc

SEQ ID NO: 164744 - DNA, 25 bp, Saccharomyces pastorianus
gaaaattctgaaccaccagcgcttg

SEQ ID NO: 164745 - DNA, 25 bp, Saccharomyces pastorianus
tggcgataactctcccagtgaggat

SEQ ID NO: 164746 - DNA, 25 bp, Saccharomyces pastorianus
ggacattccaaaaccacgtacagcg

SEQ ID NO: 164747 - DNA, 25 bp, Saccharomyces pastorianus
gcgtgctgcgttagttacatctttt

SEQ ID NO: 164748 - DNA, 25 bp, Saccharomyces pastorianus
gaggctgaagcttcagttgctgctc

SEQ ID NO: 164749 - DNA, 25 bp, Saccharomyces pastorianus
tctacgcaagaatgtcgcctgatga

SEQ ID NO: 164750 - DNA, 25 bp, Saccharomyces pastorianus
gatcgttccaatcgcaatttgcatg

SEQ ID NO: 164751 - DNA, 25 bp, Saccharomyces pastorianus
attagctgcgtacttgatgtcatta

SEQ ID NO: 164752 - DNA, 25 bp, Saccharomyces pastorianus
acatcttttgcatgtttccagtaca

SEQ ID NO: 164753 - DNA, 25 bp, Saccharomyces pastorianus
gggagatttccaattcctgtacatt

SEQ ID NO: 164754 - DNA, 25 bp, Saccharomyces pastorianus
actatactcttgcagttagcggcga

SEQ ID NO: 164755 - DNA, 25 bp, Saccharomyces pastorianus
ggtatttccctttcggaggctgaag

SEQ ID NO: 164756 - DNA, 25 bp, Saccharomyces pastorianus
tgagtttgtactctgccatccaatt

SEQ ID NO: 164757 - DNA, 25 bp, Saccharomyces pastorianus
gctgctccgttcacttcaaagatat

SEQ ID NO: 164758 - DNA, 25 bp, Saccharomyces pastorianus
gagctggtacatcaagccaatcgtt

SEQ ID NO: 164759 - DNA, 25 bp, Saccharomyces pastorianus
aataccgtattgttcttcgtctcaa

SEQ ID NO: 164760 - DNA, 25 bp, Saccharomyces pastorianus
acgacgccgtgcaatcttcagataa

SEQ ID NO: 164761 - DNA, 25 bp, Saccharomyces pastorianus
acagctgacccctatatcaaacagt

SEQ ID NO: 164762 - DNA, 25 bp, Saccharomyces pastorianus
gtaagatgttacagctgacccctat

SEQ ID NO: 164763 - DNA, 25 bp, Saccharomyces pastorianus
gatatcactgtctctatcggtgcaa

SEQ ID NO: 164764 - DNA, 25 bp, Saccharomyces pastorianus
atgctcaactgtatataccgccatc

SEQ ID NO: 164765 - DNA, 25 bp, Saccharomyces pastorianus
atagttttgtctgtgggtccaccat

SEQ ID NO: 164766 - DNA, 25 bp, Saccharomyces pastorianus
atcggtgcaagtctactgctaatga

SEQ ID NO: 164767 - DNA, 25 bp, Saccharomyces pastorianus
ggatacagaatcataccttggtaag

SEQ ID NO: 164768 - DNA, 25 bp, Saccharomyces pastorianus
tgggtccaccatatagagagccgat

SEQ ID NO: 164769 - DNA, 25 bp, Saccharomyces pastorianus
gaatattatagtcgtgcgccgccat

SEQ ID NO: 164770 - DNA, 25 bp, Saccharomyces pastorianus
gcgccgccatttgcattgtaaaagc

SEQ ID NO: 164771 - DNA, 25 bp, Saccharomyces pastorianus
ttctgaatattatagtcgtgcgccg

SEQ ID NO: 164772 - DNA, 25 bp, Saccharomyces pastorianus
gtgcgccgccatttgcattgtaaaa

SEQ ID NO: 164773 - DNA, 25 bp, Saccharomyces pastorianus
aatattatagtcgtgcgccgccatt

SEQ ID NO: 164774 - DNA, 25 bp, Saccharomyces pastorianus
tattatagtcgtgcgccgccatttg

SEQ ID NO: 164775 - DNA, 25 bp, Saccharomyces pastorianus
gccgccatttgcattgtaaaagcta

SEQ ID NO: 164776 - DNA, 25 bp, Saccharomyces pastorianus
ctgaatattatagtcgtgcgccgcc

SEQ ID NO: 164777 - DNA, 25 bp, Saccharomyces pastorianus
atattatagtcgtgcgccgccattt

SEQ ID NO: 164778 - DNA, 25 bp, Saccharomyces pastorianus
tcgtgcgccgccatttgcattgtaa

SEQ ID NO: 164779 - DNA, 25 bp, Saccharomyces pastorianus
gccatttgcattgtaaaagctacag

SEQ ID NO: 164780 - DNA, 25 bp, Saccharomyces pastorianus
ggattgagataactaccgggtactt

SEQ ID NO: 164781 - DNA, 25 bp, Saccharomyces pastorianus
tgggccgtaaatgttgccaaaaaca

SEQ ID NO: 164782 - DNA, 25 bp, Saccharomyces pastorianus
atgaaactcggaagcaaacaggtaa

SEQ ID NO: 164783 - DNA, 25 bp, Saccharomyces pastorianus
aattatatccttgttgctgctagac

SEQ ID NO: 164784 - DNA, 25 bp, Saccharomyces pastorianus
tgttgctgctagacacagtgttctt

SEQ ID NO: 164785 - DNA, 25 bp, Saccharomyces pastorianus
tacttgtctcactctttggctctaa

SEQ ID NO: 164786 - DNA, 25 bp, Saccharomyces pastorianus
tttggctctaatcgcggactcattc

SEQ ID NO: 164787 - DNA, 25 bp, Saccharomyces pastorianus
ggactcattccatatgctaaacgat

SEQ ID NO: 164788 - DNA, 25 bp, Saccharomyces pastorianus
taactaccgggtacttgtctcactc

SEQ ID NO: 164789 - DNA, 25 bp, Saccharomyces pastorianus
gacacagtgttcttcgggattgaga

SEQ ID NO: 164790 - DNA, 25 bp, Saccharomyces pastorianus
aatcgcggactcattccatatgcta

SEQ ID NO: 164791 - DNA, 25 bp, Saccharomyces pastorianus
tggtatagcttcatctgcctggcaa

SEQ ID NO: 164792 - DNA, 25 bp, Saccharomyces pastorianus
gttgtctgtttaaaacacgcctcca

SEQ ID NO: 164793 - DNA, 25 bp, Saccharomyces pastorianus
actgggttgctatttagctcagtca

SEQ ID NO: 164794 - DNA, 25 bp, Saccharomyces pastorianus
gagaacctggtggaatatcgaaaca

SEQ ID NO: 164795 - DNA, 25 bp, Saccharomyces pastorianus
agtcccagcgcctatatcgaaaagt

SEQ ID NO: 164796 - DNA, 25 bp, Saccharomyces pastorianus
ggcaagaatctacacacccatgaag

SEQ ID NO: 164797 - DNA, 25 bp, Saccharomyces pastorianus
tagattaatgcatcgcctaacaggc

SEQ ID NO: 164798 - DNA, 25 bp, Saccharomyces pastorianus
agaagatccaacactactacacccg

SEQ ID NO: 164799 - DNA, 25 bp, Saccharomyces pastorianus
gctatccacatctttccgtattaaa

SEQ ID NO: 164800 - DNA, 25 bp, Saccharomyces pastorianus
atgaagtttctgcttacggagatgt

SEQ ID NO: 164801 - DNA, 25 bp, Saccharomyces pastorianus
gattgccacagggagaagatttcgt

SEQ ID NO: 164802 - DNA, 25 bp, Saccharomyces pastorianus
caacgttgtcaacatctgatgctga

SEQ ID NO: 164803 - DNA, 25 bp, Saccharomyces pastorianus
ctggtacactaactgccttgattgg

SEQ ID NO: 164804 - DNA, 25 bp, Saccharomyces pastorianus
caaatggcggtctgttggtattggt

SEQ ID NO: 164805 - DNA, 25 bp, Saccharomyces pastorianus
taaaactgtcgccaaggagcattat

SEQ ID NO: 164806 - DNA, 25 bp, Saccharomyces pastorianus
ttgattggcgcatctggtgcaggaa

SEQ ID NO: 164807 - DNA, 25 bp, Saccharomyces pastorianus
gagcattattcatctccttcatctt

SEQ ID NO: 164808 - DNA, 25 bp, Saccharomyces pastorianus
atcttctgcgtctcaaagccatagt

SEQ ID NO: 164809 - DNA, 25 bp, Saccharomyces pastorianus
gattgtcttgccgagagaactacga

SEQ ID NO: 164810 - DNA, 25 bp, Saccharomyces pastorianus
atggttgggtcaagcctggtacact

SEQ ID NO: 164811 - DNA, 25 bp, Saccharomyces pastorianus
aaacttatgctacgatatcccgatt

SEQ ID NO: 164812 - DNA, 25 bp, Saccharomyces pastorianus
gatttttacgcgattctgatgcagc

SEQ ID NO: 164813 - DNA, 25 bp, Saccharomyces pastorianus
ttcgttatagatttcgcccgtttag

SEQ ID NO: 164814 - DNA, 25 bp, Saccharomyces pastorianus
cttttgcaagaactcgagccatcaa

SEQ ID NO: 164815 - DNA, 25 bp, Saccharomyces pastorianus
atcgaaattcggagagttgcctgaa

SEQ ID NO: 164816 - DNA, 25 bp, Saccharomyces pastorianus
aaagcgacccgcaatatgacgaatt

SEQ ID NO: 164817 - DNA, 25 bp, Saccharomyces pastorianus
gactccgtacaatttgcttactgct

SEQ ID NO: 164818 - DNA, 25 bp, Saccharomyces pastorianus
ccacacaattccagggttctcagaa

SEQ ID NO: 164819 - DNA, 25 bp, Saccharomyces pastorianus
gagctgaagaactcaactgacaatt

SEQ ID NO: 164820 - DNA, 25 bp, Saccharomyces pastorianus
ttcgtgccgttaatgttgtctccca

SEQ ID NO: 164821 - DNA, 25 bp, Saccharomyces pastorianus
ggaaaattacctcactgactccgta

SEQ ID NO: 164822 - DNA, 25 bp, Saccharomyces pastorianus
tgtctcccagggatatccgcaaaga

SEQ ID NO: 164823 - DNA, 25 bp, Saccharomyces pastorianus
gagtcggactattgccatttagttc

SEQ ID NO: 164824 - DNA, 25 bp, Saccharomyces pastorianus
gtatgctagtctttaccctatgggt

SEQ ID NO: 164825 - DNA, 25 bp, Saccharomyces pastorianus
ggttctagaatgagctccatacctc

SEQ ID NO: 164826 - DNA, 25 bp, Saccharomyces pastorianus
attgatcttgtacggttgtcctacc

SEQ ID NO: 164827 - DNA, 25 bp, Saccharomyces pastorianus
aaccttacgatgttgtcattggtac

SEQ ID NO: 164828 - DNA, 25 bp, Saccharomyces pastorianus
aatcttgtggcgctaacttccaatg

SEQ ID NO: 164829 - DNA, 25 bp, Saccharomyces pastorianus
gttgtcctaccgttattgactccga

SEQ ID NO: 164830 - DNA, 25 bp, Saccharomyces pastorianus
agatccacatgttcccttgatggga

SEQ ID NO: 164831 - DNA, 25 bp, Saccharomyces pastorianus
aagcgtggagtatcccttaactcat

SEQ ID NO: 164832 - DNA, 25 bp, Saccharomyces pastorianus
ggtactaactcagaagcgccgatat

SEQ ID NO: 164833 - DNA, 25 bp, Saccharomyces pastorianus
tacgaaaagcccgacgacgtgttct

SEQ ID NO: 164834 - DNA, 25 bp, Saccharomyces pastorianus
atacagcacgatatcagttccaatg

SEQ ID NO: 164835 - DNA, 25 bp, Saccharomyces pastorianus
gatccaagcctcagtacctgctgga

SEQ ID NO: 164836 - DNA, 25 bp, Saccharomyces pastorianus
agtacctgctggacttcagggcagt

SEQ ID NO: 164837 - DNA, 25 bp, Saccharomyces pastorianus
ggcagtgggtatttcgcgccttccg

SEQ ID NO: 164838 - DNA, 25 bp, Saccharomyces pastorianus
aagcctcagtacctgctggacttca

SEQ ID NO: 164839 - DNA, 25 bp, Saccharomyces pastorianus
agggcagtgggtatttcgcgccttc

SEQ ID NO: 164840 - DNA, 25 bp, Saccharomyces pastorianus
tttgagatccaagcctcagtacctg

SEQ ID NO: 164841 - DNA, 25 bp, Saccharomyces pastorianus
gcaccccacgcttttgagatccaag

SEQ ID NO: 164842 - DNA, 25 bp, Saccharomyces pastorianus
tcagtacctgctggacttcagggca

SEQ ID NO: 164843 - DNA, 25 bp, Saccharomyces pastorianus
gagatccaagcctcagtacctgctg

SEQ ID NO: 164844 - DNA, 25 bp, Saccharomyces pastorianus
tacctgctggacttcagggcagtgg

SEQ ID NO: 164845 - DNA, 25 bp, Saccharomyces pastorianus
acgcttttgagatccaagcctcagt

SEQ ID NO: 164846 - DNA, 25 bp, Saccharomyces pastorianus
gagtatgccgtcaaagcagtcgaaa

SEQ ID NO: 164847 - DNA, 25 bp, Saccharomyces pastorianus
attacgtctaaactgctggtcccac

SEQ ID NO: 164848 - DNA, 25 bp, Saccharomyces pastorianus
ggcacctggttaatcgtggtcgtga

SEQ ID NO: 164849 - DNA, 25 bp, Saccharomyces pastorianus
gacggtgtagtctttgcagtggaaa

SEQ ID NO: 164850 - DNA, 25 bp, Saccharomyces pastorianus
gtcacatcggttgcgtttattcagg

SEQ ID NO: 164851 - DNA, 25 bp, Saccharomyces pastorianus
gcagtggaaaagctcattacgtcta

SEQ ID NO: 164852 - DNA, 25 bp, Saccharomyces pastorianus
ttcaagtcgtagaccgtcacatcgg

SEQ ID NO: 164853 - DNA, 25 bp, Saccharomyces pastorianus
tgattcctgatggtaggcacctggt

SEQ ID NO: 164854 - DNA, 25 bp, Saccharomyces pastorianus
gaaaacggtaccacatcaatcggta

SEQ ID NO: 164855 - DNA, 25 bp, Saccharomyces pastorianus
aaatttccaagtagagtatgccgtc

SEQ ID NO: 164856 - DNA, 25 bp, Saccharomyces pastorianus
gtggtcgtgaagaagccgccagctt

SEQ ID NO: 164857 - DNA, 25 bp, Saccharomyces pastorianus
gaaggtctcatcgtcgttttctgat

SEQ ID NO: 164858 - DNA, 25 bp, Saccharomyces pastorianus
aggcagaactatcgagccagctgga

SEQ ID NO: 164859 - DNA, 25 bp, Saccharomyces pastorianus
gattcaaatttcacttcccaagttg

SEQ ID NO: 164860 - DNA, 25 bp, Saccharomyces pastorianus
tggtggcgctgttggtactgcaaac

SEQ ID NO: 164861 - DNA, 25 bp, Saccharomyces pastorianus
aattcaccacgaaagctacgctcga

SEQ ID NO: 164862 - DNA, 25 bp, Saccharomyces pastorianus
ggaacctgcaatatccgattctgtc

SEQ ID NO: 164863 - DNA, 25 bp, Saccharomyces pastorianus
aaactactactatgcagacccatga

SEQ ID NO: 164864 - DNA, 25 bp, Saccharomyces pastorianus
gaaagtgccgtcaggtttttcaggc

SEQ ID NO: 164865 - DNA, 25 bp, Saccharomyces pastorianus
gcacaactgctacatctcatcaaga

SEQ ID NO: 164866 - DNA, 25 bp, Saccharomyces pastorianus
gaagcagtacttccctggtattggt

SEQ ID NO: 164867 - DNA, 25 bp, Saccharomyces pastorianus
gttcctgaatcggatctcattgtga

SEQ ID NO: 164868 - DNA, 25 bp, Saccharomyces pastorianus
tcgatagtgctccttctgtttttta

SEQ ID NO: 164869 - DNA, 25 bp, Saccharomyces pastorianus
agatgacctgacatgcaccaacaag

SEQ ID NO: 164870 - DNA, 25 bp, Saccharomyces pastorianus
atcgctgatttggtcgttggtttaa

SEQ ID NO: 164871 - DNA, 25 bp, Saccharomyces pastorianus
atgtgcgaatactctgttgctgaaa

SEQ ID NO: 164872 - DNA, 25 bp, Saccharomyces pastorianus
aaatacccaatcatttccctggaag

SEQ ID NO: 164873 - DNA, 25 bp, Saccharomyces pastorianus
caggatcgcccgtgctatagaggag

SEQ ID NO: 164874 - DNA, 25 bp, Saccharomyces pastorianus
gccaatcaggctttcgatgctggat

SEQ ID NO: 164875 - DNA, 25 bp, Saccharomyces pastorianus
aatcgggcgctttgtcgagatcaga

SEQ ID NO: 164876 - DNA, 25 bp, Saccharomyces pastorianus
ctgactgagtctattgaagccgcca

SEQ ID NO: 164877 - DNA, 25 bp, Saccharomyces pastorianus
cgaagatgattggtcctcgtggtct

SEQ ID NO: 164878 - DNA, 25 bp, Saccharomyces pastorianus
accgaagatccgtttatcgctgatt

SEQ ID NO: 164879 - DNA, 25 bp, Saccharomyces pastorianus
gagacagaatctactacgataccaa

SEQ ID NO: 164880 - DNA, 25 bp, Saccharomyces pastorianus
agtaacctgcatgtcattccagaag

SEQ ID NO: 164881 - DNA, 25 bp, Saccharomyces pastorianus
gactcggatagatctggttcactga

SEQ ID NO: 164882 - DNA, 25 bp, Saccharomyces pastorianus
cagccgctttgctaatcggtttttt

SEQ ID NO: 164883 - DNA, 25 bp, Saccharomyces pastorianus
aatggaaactagcttctcagcccta

SEQ ID NO: 164884 - DNA, 25 bp, Saccharomyces pastorianus
gggactgttcattggtttaggttat

SEQ ID NO: 164885 - DNA, 25 bp, Saccharomyces pastorianus
tctgtgtcgttcagagtgccgcaga

SEQ ID NO: 164886 - DNA, 25 bp, Saccharomyces pastorianus
taggttattctttggcatctgggcc

SEQ ID NO: 164887 - DNA, 25 bp, Saccharomyces pastorianus
ggtacttcaatgttctgtgtcgttc

SEQ ID NO: 164888 - DNA, 25 bp, Saccharomyces pastorianus
ccatgattgccataggtggtacttt

SEQ ID NO: 164889 - DNA, 25 bp, Saccharomyces pastorianus
gagccaaaggcacttgaccatgatt

SEQ ID NO: 164890 - DNA, 25 bp, Saccharomyces pastorianus
agatgtgctgcgatgttcgatattc

SEQ ID NO: 164891 - DNA, 25 bp, Saccharomyces pastorianus
tggtttcgccctcacagacttcgta

SEQ ID NO: 164892 - DNA, 25 bp, Saccharomyces pastorianus
ttcgatattctagctgtgtgtccag

SEQ ID NO: 164893 - DNA, 25 bp, Saccharomyces pastorianus
gagtaacaattattcacgcatatgg

SEQ ID NO: 164894 - DNA, 25 bp, Saccharomyces pastorianus
gtttcggttttttcaaatggccatg

SEQ ID NO: 164895 - DNA, 25 bp, Saccharomyces pastorianus
aaagttatcttcagttcttcgcctg

SEQ ID NO: 164896 - DNA, 25 bp, Saccharomyces pastorianus
tgggagccatccttcagaataaaag

SEQ ID NO: 164897 - DNA, 25 bp, Saccharomyces pastorianus
tgtgtccagcccgagtaacaattat

SEQ ID NO: 164898 - DNA, 25 bp, Saccharomyces pastorianus
atgtccaggatggtttcgccctcac

SEQ ID NO: 164899 - DNA, 25 bp, Saccharomyces pastorianus
acttcgtacgtcttctgggagccat

SEQ ID NO: 164900 - DNA, 25 bp, Saccharomyces pastorianus
tcagttcttcgcctggtttcggttt

SEQ ID NO: 164901 - DNA, 25 bp, Saccharomyces pastorianus
gcaaggctcttacaagttttcacaa

SEQ ID NO: 164902 - DNA, 25 bp, Saccharomyces pastorianus
tcattgggcttgaatagggacctcc

SEQ ID NO: 164903 - DNA, 25 bp, Saccharomyces pastorianus
aattgtccctgctttatggtcgatc

SEQ ID NO: 164904 - DNA, 25 bp, Saccharomyces pastorianus
gtcgatccattcagctttctcagaa

SEQ ID NO: 164905 - DNA, 25 bp, Saccharomyces pastorianus
aagacgccgaatttggtggtctgtc

SEQ ID NO: 164906 - DNA, 25 bp, Saccharomyces pastorianus
tttctcagaatacaatctccttccc

SEQ ID NO: 164907 - DNA, 25 bp, Saccharomyces pastorianus
aggaggtttcgagacaggcaccaaa

SEQ ID NO: 164908 - DNA, 25 bp, Saccharomyces pastorianus
gtctgtctactcttgggagatccaa

SEQ ID NO: 164909 - DNA, 25 bp, Saccharomyces pastorianus
tcttctgtcgacgatgtgcagcgta

SEQ ID NO: 164910 - DNA, 25 bp, Saccharomyces pastorianus
atgtgcagcgtaccacaacaggtcc

SEQ ID NO: 164911 - DNA, 25 bp, Saccharomyces pastorianus
gttgaaggaacacccttggctatcc

SEQ ID NO: 164912 - DNA, 25 bp, Saccharomyces pastorianus
tcctgtggttatgagtggtatctta

SEQ ID NO: 164913 - DNA, 25 bp, Saccharomyces pastorianus
ctctgtgtgggatttgcctgtttga

SEQ ID NO: 164914 - DNA, 25 bp, Saccharomyces pastorianus
tgccattggtacagctaagtcaggt

SEQ ID NO: 164915 - DNA, 25 bp, Saccharomyces pastorianus
atctcctaccgaagactatactctc

SEQ ID NO: 164916 - DNA, 25 bp, Saccharomyces pastorianus
gtatcgccggtataggtactttcaa

SEQ ID NO: 164917 - DNA, 25 bp, Saccharomyces pastorianus
catgaagtcattgattcctgtggtt

SEQ ID NO: 164918 - DNA, 25 bp, Saccharomyces pastorianus
tgcacttgagttgtgggctctgtgt

SEQ ID NO: 164919 - DNA, 25 bp, Saccharomyces pastorianus
gtcaggtattggtatcgccggtata

SEQ ID NO: 164920 - DNA, 25 bp, Saccharomyces pastorianus
tcctgtttgggagctgccattggta

SEQ ID NO: 164921 - DNA, 25 bp, Saccharomyces pastorianus
gccattgtatggtcggtgacgttga

SEQ ID NO: 164922 - DNA, 25 bp, Saccharomyces pastorianus
caatgggttcatgcacttgagttgt

SEQ ID NO: 164923 - DNA, 25 bp, Saccharomyces pastorianus
ttaaggcactccctggacaacttcg

SEQ ID NO: 164924 - DNA, 25 bp, Saccharomyces pastorianus
atttttgaagcttatccaggactac

SEQ ID NO: 164925 - DNA, 25 bp, Saccharomyces pastorianus
gaagtccaggcaaggcaccaagagt

SEQ ID NO: 164926 - DNA, 25 bp, Saccharomyces pastorianus
gaagacgctcaactcgacgtagaac

SEQ ID NO: 164927 - DNA, 25 bp, Saccharomyces pastorianus
agtacgaccataccatcgaccaggt

SEQ ID NO: 164928 - DNA, 25 bp, Saccharomyces pastorianus
gcataagaggctactgaccgaagtt

SEQ ID NO: 164929 - DNA, 25 bp, Saccharomyces pastorianus
atccatggcagaacttactcaattg

SEQ ID NO: 164930 - DNA, 25 bp, Saccharomyces pastorianus
gagcaggcaagccacttaaggcact

SEQ ID NO: 164931 - DNA, 25 bp, Saccharomyces pastorianus
gcagatcttctcacaagcattgttg

SEQ ID NO: 164932 - DNA, 25 bp, Saccharomyces pastorianus
cgaccaggtcgattctttgcataag

SEQ ID NO: 164933 - DNA, 25 bp, Saccharomyces pastorianus
aagccacagacttgcagttcaaact

SEQ ID NO: 164934 - DNA, 25 bp, Saccharomyces pastorianus
taaatccaccagtttcttcacaatg

SEQ ID NO: 164935 - DNA, 25 bp, Saccharomyces pastorianus
gtgttttcactgagcttgatgccca

SEQ ID NO: 164936 - DNA, 25 bp, Saccharomyces pastorianus
aacgcctaatattgatgcatctttg

SEQ ID NO: 164937 - DNA, 25 bp, Saccharomyces pastorianus
gtgttattattgatgcgaaaggccc

SEQ ID NO: 164938 - DNA, 25 bp, Saccharomyces pastorianus
tacaggactgggtttatgctacaat

SEQ ID NO: 164939 - DNA, 25 bp, Saccharomyces pastorianus
caattgctcctgaactaagatcctt

SEQ ID NO: 164940 - DNA, 25 bp, Saccharomyces pastorianus
gagaaaagacatgtagcccagctac

SEQ ID NO: 164941 - DNA, 25 bp, Saccharomyces pastorianus
ttgatgcccatctaacgcctaatat

SEQ ID NO: 164942 - DNA, 25 bp, Saccharomyces pastorianus
tgaatgaaatatctgcgtcttccaa

SEQ ID NO: 164943 - DNA, 25 bp, Saccharomyces pastorianus
ctatagagtcggactatccacgcaa

SEQ ID NO: 164944 - DNA, 25 bp, Saccharomyces pastorianus
gtcttccaagcccagtaagtacaag

SEQ ID NO: 164945 - DNA, 25 bp, Saccharomyces pastorianus
aactgcttgatgtacggtttccata

SEQ ID NO: 164946 - DNA, 25 bp, Saccharomyces pastorianus
tcatcttcggcatcaggtctatcaa

SEQ ID NO: 164947 - DNA, 25 bp, Saccharomyces pastorianus
atggtaaataccgaagccgtcataa

SEQ ID NO: 164948 - DNA, 25 bp, Saccharomyces pastorianus
ttgccgatgctgatggtgctagtaa

SEQ ID NO: 164949 - DNA, 25 bp, Saccharomyces pastorianus
gtggcgcagtgagacaaggtttttt

SEQ ID NO: 164950 - DNA, 25 bp, Saccharomyces pastorianus
gatggctctaagatggctttagcta

SEQ ID NO: 164951 - DNA, 25 bp, Saccharomyces pastorianus
gtaagtatggtctttttgccgatgc

SEQ ID NO: 164952 - DNA, 25 bp, Saccharomyces pastorianus
aattgttcaacagagccgctatatt

SEQ ID NO: 164953 - DNA, 25 bp, Saccharomyces pastorianus
ggtttccataccttagttttcatct

SEQ ID NO: 164954 - DNA, 25 bp, Saccharomyces pastorianus
gacgttgaaattttgatcttagcca

SEQ ID NO: 164955 - DNA, 25 bp, Saccharomyces pastorianus
cagcagtagcaattggttccagagc

SEQ ID NO: 164956 - DNA, 25 bp, Saccharomyces pastorianus
ttgaccaatctataccacctactga

SEQ ID NO: 164957 - DNA, 25 bp, Saccharomyces pastorianus
gttgatgtaacctctgactctaaag

SEQ ID NO: 164958 - DNA, 25 bp, Saccharomyces pastorianus
gatttggagcactctcatgacacta

SEQ ID NO: 164959 - DNA, 25 bp, Saccharomyces pastorianus
ttcgtgccaccacaactttggaagt

SEQ ID NO: 164960 - DNA, 25 bp, Saccharomyces pastorianus
cgttggtcgctatcacatctagtta

SEQ ID NO: 164961 - DNA, 25 bp, Saccharomyces pastorianus
ctactgatccgcgttatctagaaat

SEQ ID NO: 164962 - DNA, 25 bp, Saccharomyces pastorianus
ggacaaggtatcttatcctcactga

SEQ ID NO: 164963 - DNA, 25 bp, Saccharomyces pastorianus
tgccagtattacattcaggtcagga

SEQ ID NO: 164964 - DNA, 25 bp, Saccharomyces pastorianus
gactccttgacatcgttggtagcgt

SEQ ID NO: 164965 - DNA, 25 bp, Saccharomyces pastorianus
gcatcatcgtgttgactccttgaca

SEQ ID NO: 164966 - DNA, 25 bp, Saccharomyces pastorianus
gagaccttactatattagcttccgg

SEQ ID NO: 164967 - DNA, 25 bp, Saccharomyces pastorianus
aagtactagtgacgctctggtgtct

SEQ ID NO: 164968 - DNA, 25 bp, Saccharomyces pastorianus
gacgctctggtgtctaatatgcaca

SEQ ID NO: 164969 - DNA, 25 bp, Saccharomyces pastorianus
agtgacgctctggtgtctaatatgc

SEQ ID NO: 164970 - DNA, 25 bp, Saccharomyces pastorianus
gctctggtgtctaatatgcacatgc

SEQ ID NO: 164971 - DNA, 25 bp, Saccharomyces pastorianus
ctagtgacgctctggtgtctaatat

SEQ ID NO: 164972 - DNA, 25 bp, Saccharomyces pastorianus
gtgacgctctggtgtctaatatgca

SEQ ID NO: 164973 - DNA, 25 bp, Saccharomyces pastorianus
gtactagtgacgctctggtgtctaa

SEQ ID NO: 164974 - DNA, 25 bp, Saccharomyces pastorianus
atgcaagtactagtgacgctctggt

SEQ ID NO: 164975 - DNA, 25 bp, Saccharomyces pastorianus
actagtgacgctctggtgtctaata

SEQ ID NO: 164976 - DNA, 25 bp, Saccharomyces pastorianus
gcaagtactagtgacgctctggtgt

SEQ ID NO: 164977 - DNA, 25 bp, Saccharomyces pastorianus
acgctctggtgtctaatatgcacat

SEQ ID NO: 164978 - DNA, 25 bp, Saccharomyces pastorianus
ggacctggaatatcggtaagctgat

SEQ ID NO: 164979 - DNA, 25 bp, Saccharomyces pastorianus
gtttgttccatatttcgacaccttc

SEQ ID NO: 164980 - DNA, 25 bp, Saccharomyces pastorianus
gttttcctgggaaagaacagcggca

SEQ ID NO: 164981 - DNA, 25 bp, Saccharomyces pastorianus
gcagggtgccgaaaaattagctttg

SEQ ID NO: 164982 - DNA, 25 bp, Saccharomyces pastorianus
ggcaataaagaccatgcagttgatt

SEQ ID NO: 164983 - DNA, 25 bp, Saccharomyces pastorianus
aatcaaagagcgattcctcggcgca

SEQ ID NO: 164984 - DNA, 25 bp, Saccharomyces pastorianus
taagctgatatacatggacaacatt

SEQ ID NO: 164985 - DNA, 25 bp, Saccharomyces pastorianus
cctcggcgcaggcattttaggtaat

SEQ ID NO: 164986 - DNA, 25 bp, Saccharomyces pastorianus
gaactatacggcgattttgaagatc

SEQ ID NO: 164987 - DNA, 25 bp, Saccharomyces pastorianus
ataataccggtgagcagggtgccga

SEQ ID NO: 164988 - DNA, 25 bp, Saccharomyces pastorianus
gatggaaacccttctgaacaagcag

SEQ ID NO: 164989 - DNA, 25 bp, Saccharomyces pastorianus
gaggcaaggctaacggagaaattac

SEQ ID NO: 164990 - DNA, 25 bp, Saccharomyces pastorianus
aacggagaaattacaactgcctcta

SEQ ID NO: 164991 - DNA, 25 bp, Saccharomyces pastorianus
acaactgcctctacgacgagaagac

SEQ ID NO: 164992 - DNA, 25 bp, Saccharomyces pastorianus
aattacaactgcctctacgacgaga

SEQ ID NO: 164993 - DNA, 25 bp, Saccharomyces pastorianus
gaaattacaactgcctctacgacga

SEQ ID NO: 164994 - DNA, 25 bp, Saccharomyces pastorianus
gagaaattacaactgcctctacgac

SEQ ID NO: 164995 - DNA, 25 bp, Saccharomyces pastorianus
ggagaaattacaactgcctctacga

SEQ ID NO: 164996 - DNA, 25 bp, Saccharomyces pastorianus
ttacaactgcctctacgacgagaag

SEQ ID NO: 164997 - DNA, 25 bp, Saccharomyces pastorianus
acgagaagacgtaaaaggttagatg

SEQ ID NO: 164998 - DNA, 25 bp, Saccharomyces pastorianus
gctaacggagaaattacaactgcct

SEQ ID NO: 164999 - DNA, 25 bp, Saccharomyces pastorianus
aagaggcaaggctaacggagaaatt

SEQ ID NO: 165000 - DNA, 25 bp, Saccharomyces pastorianus
gttggtgatttctcagtagcacaaa

SEQ ID NO: 165001 - DNA, 25 bp, Saccharomyces pastorianus
tgctccgggcactagggtgcatatt

SEQ ID NO: 165002 - DNA, 25 bp, Saccharomyces pastorianus
gattgccgacttggttcttttacta

SEQ ID NO: 165003 - DNA, 25 bp, Saccharomyces pastorianus
ccgcaaagtcgctatctatggttat

SEQ ID NO: 165004 - DNA, 25 bp, Saccharomyces pastorianus
gccctgcggacgatctgaatgcgat

SEQ ID NO: 165005 - DNA, 25 bp, Saccharomyces pastorianus
gaacatccctatatgttggctgaca

SEQ ID NO: 165006 - DNA, 25 bp, Saccharomyces pastorianus
gattcacagatttaactcatccgga

SEQ ID NO: 165007 - DNA, 25 bp, Saccharomyces pastorianus
acttttttggagtgccctgcggacg

SEQ ID NO: 165008 - DNA, 25 bp, Saccharomyces pastorianus
atctatggttatttgcacggtactc

SEQ ID NO: 165009 - DNA, 25 bp, Saccharomyces pastorianus
gagagattttaaacctttcacgatt

SEQ ID NO: 165010 - DNA, 25 bp, Saccharomyces pastorianus
tgctcaacatcacggtatgccaaga

SEQ ID NO: 165011 - DNA, 25 bp, Saccharomyces pastorianus
agacaacttgtacatccaacggcca

SEQ ID NO: 165012 - DNA, 25 bp, Saccharomyces pastorianus
caacggccaacatttttccaacatg

SEQ ID NO: 165013 - DNA, 25 bp, Saccharomyces pastorianus
aaagacgtagctcaccttggagaat

SEQ ID NO: 165014 - DNA, 25 bp, Saccharomyces pastorianus
ctactctctcatcatcaatgggctt

SEQ ID NO: 165015 - DNA, 25 bp, Saccharomyces pastorianus
gaaactccagaaaagctcctactct

SEQ ID NO: 165016 - DNA, 25 bp, Saccharomyces pastorianus
atatttaggtcgacagacgggtctt

SEQ ID NO: 165017 - DNA, 25 bp, Saccharomyces pastorianus
aacggtatcttaatgaggccaacta

SEQ ID NO: 165018 - DNA, 25 bp, Saccharomyces pastorianus
aggccaactattccggcattcatag

SEQ ID NO: 165019 - DNA, 25 bp, Saccharomyces pastorianus
acgggtcttactatcaaactgctca

SEQ ID NO: 165020 - DNA, 25 bp, Saccharomyces pastorianus
aacgagttcacgtttcctgaactga

SEQ ID NO: 165021 - DNA, 25 bp, Saccharomyces pastorianus
catcaatgggctttcttcaacgata

SEQ ID NO: 165022 - DNA, 25 bp, Saccharomyces pastorianus
gatgtgccattagggttcggtgtca

SEQ ID NO: 165023 - DNA, 25 bp, Saccharomyces pastorianus
tgttttcgaaaaactcgccggctat

SEQ ID NO: 165024 - DNA, 25 bp, Saccharomyces pastorianus
attacgtacccgatcatgttgcaaa

SEQ ID NO: 165025 - DNA, 25 bp, Saccharomyces pastorianus
aggttacatattacttctttgacag

SEQ ID NO: 165026 - DNA, 25 bp, Saccharomyces pastorianus
cacgccggtgttattgtgtttgcaa

SEQ ID NO: 165027 - DNA, 25 bp, Saccharomyces pastorianus
aactcgccggctatattggtagaaa

SEQ ID NO: 165028 - DNA, 25 bp, Saccharomyces pastorianus
taaagaacttcctcatgtcttcaga

SEQ ID NO: 165029 - DNA, 25 bp, Saccharomyces pastorianus
cggtgtcagtgcgaaaagtacttct

SEQ ID NO: 165030 - DNA, 25 bp, Saccharomyces pastorianus
gggagatgccattcttatacggtaa

SEQ ID NO: 165031 - DNA, 25 bp, Saccharomyces pastorianus
cctaacttgatgtctctgggtattt

SEQ ID NO: 165032 - DNA, 25 bp, Saccharomyces pastorianus
agaaacatgcaacccactggtatag

SEQ ID NO: 165033 - DNA, 25 bp, Saccharomyces pastorianus
agagaagctcgatttgaacaaacaa

SEQ ID NO: 165034 - DNA, 25 bp, Saccharomyces pastorianus
ggatgctgttcctcaaaggtggaaa

SEQ ID NO: 165035 - DNA, 25 bp, Saccharomyces pastorianus
gaggttttcgatagcgctggtcatt

SEQ ID NO: 165036 - DNA, 25 bp, Saccharomyces pastorianus
agcgctggtcattatagtaggttat

SEQ ID NO: 165037 - DNA, 25 bp, Saccharomyces pastorianus
gtgcgttaaccgctgcatatttata

SEQ ID NO: 165038 - DNA, 25 bp, Saccharomyces pastorianus
aaactggcggatgttgttctgataa

SEQ ID NO: 165039 - DNA, 25 bp, Saccharomyces pastorianus
ttttcgtgtagctggtgcgttagta

SEQ ID NO: 165040 - DNA, 25 bp, Saccharomyces pastorianus
gttagtagttggtgcgttaaccgct

SEQ ID NO: 165041 - DNA, 25 bp, Saccharomyces pastorianus
ccagcggtggtagtcaagatagtca

SEQ ID NO: 165042 - DNA, 25 bp, Saccharomyces pastorianus
aaaaagccatgttgcagtgataaga

SEQ ID NO: 165043 - DNA, 25 bp, Saccharomyces pastorianus
tttattgcaatgaagccagcggtgg

SEQ ID NO: 165044 - DNA, 25 bp, Saccharomyces pastorianus
gctcttcaatatcgcgtccagtaga

SEQ ID NO: 165045 - DNA, 25 bp, Saccharomyces pastorianus
ggtggcaggagaattttccccttag

SEQ ID NO: 165046 - DNA, 25 bp, Saccharomyces pastorianus
tgccctctagattatttcttacaaa

SEQ ID NO: 165047 - DNA, 25 bp, Saccharomyces pastorianus
aagggccgatcactggatttctcgt

SEQ ID NO: 165048 - DNA, 25 bp, Saccharomyces pastorianus
ggacatcattgttagcagagacttt

SEQ ID NO: 165049 - DNA, 25 bp, Saccharomyces pastorianus
gacagtccaacgtacaagaacttga

SEQ ID NO: 165050 - DNA, 25 bp, Saccharomyces pastorianus
agagtagatagtttcccattacgaa

SEQ ID NO: 165051 - DNA, 25 bp, Saccharomyces pastorianus
tattggttcccattcaggcgttaag

SEQ ID NO: 165052 - DNA, 25 bp, Saccharomyces pastorianus
aattggttggctacacagttttggg

SEQ ID NO: 165053 - DNA, 25 bp, Saccharomyces pastorianus
gcgttaagatctgccgatggactaa

SEQ ID NO: 165054 - DNA, 25 bp, Saccharomyces pastorianus
tttccccttaggcaaagtttgtatg

SEQ ID NO: 165055 - DNA, 25 bp, Saccharomyces pastorianus
cacgtttagtggctcatctgatggg

SEQ ID NO: 165056 - DNA, 25 bp, Saccharomyces pastorianus
gaatggtaatcctttgacaatgcag

SEQ ID NO: 165057 - DNA, 25 bp, Saccharomyces pastorianus
cattgaagttaaaggcgccacgttt

SEQ ID NO: 165058 - DNA, 25 bp, Saccharomyces pastorianus
agatctggtccaacgtggtttacca

SEQ ID NO: 165059 - DNA, 25 bp, Saccharomyces pastorianus
ttacattacgacttggctgccgaac

SEQ ID NO: 165060 - DNA, 25 bp, Saccharomyces pastorianus
tttttcgtattgctaaactcgggca

SEQ ID NO: 165061 - DNA, 25 bp, Saccharomyces pastorianus
gaacatgcgcattccaactgtttat

SEQ ID NO: 165062 - DNA, 25 bp, Saccharomyces pastorianus
aaagacacccgaatgggcattgttt

SEQ ID NO: 165063 - DNA, 25 bp, Saccharomyces pastorianus
cagtgcatatgcagatctggtccaa

SEQ ID NO: 165064 - DNA, 25 bp, Saccharomyces pastorianus
ttgtgaaggcgtttaccacggaatt

SEQ ID NO: 165065 - DNA, 25 bp, Saccharomyces pastorianus
ggcaaagacttcacgtacatggact

SEQ ID NO: 165066 - DNA, 25 bp, Saccharomyces pastorianus
gtttttctgcaatatccagaggctt

SEQ ID NO: 165067 - DNA, 25 bp, Saccharomyces pastorianus
gctgatgatttgttcactatgctaa

SEQ ID NO: 165068 - DNA, 25 bp, Saccharomyces pastorianus
gatattcggcaaaggttacgtcctt

SEQ ID NO: 165069 - DNA, 25 bp, Saccharomyces pastorianus
gggtatttggctgcatcacaatctt

SEQ ID NO: 165070 - DNA, 25 bp, Saccharomyces pastorianus
tacggttttgacatggcttggtgca

SEQ ID NO: 165071 - DNA, 25 bp, Saccharomyces pastorianus
ggcattgctttaagtggtctttcca

SEQ ID NO: 165072 - DNA, 25 bp, Saccharomyces pastorianus
gattctgacattttgatgcttgcaa

SEQ ID NO: 165073 - DNA, 25 bp, Saccharomyces pastorianus
gtctttccactataattacaccctc

SEQ ID NO: 165074 - DNA, 25 bp, Saccharomyces pastorianus
agaaggccattaccgcactatttaa

SEQ ID NO: 165075 - DNA, 25 bp, Saccharomyces pastorianus
gaccaatgccgttcttaaattgacc

SEQ ID NO: 165076 - DNA, 25 bp, Saccharomyces pastorianus
gctaaacagcacaagaccgtacata

SEQ ID NO: 165077 - DNA, 25 bp, Saccharomyces pastorianus
caaactggaagcatcgtatacgaaa

SEQ ID NO: 165078 - DNA, 25 bp, Saccharomyces pastorianus
tattagctgcatattgttttacaag

SEQ ID NO: 165079 - DNA, 25 bp, Saccharomyces pastorianus
tatatcgatttgttcagctgacaac

SEQ ID NO: 165080 - DNA, 25 bp, Saccharomyces pastorianus
ttactctccgatgtcgacgtttcta

SEQ ID NO: 165081 - DNA, 25 bp, Saccharomyces pastorianus
aaggcaattgtccaaacattgatga

SEQ ID NO: 165082 - DNA, 25 bp, Saccharomyces pastorianus
ttgaaacagcaatggcatgcctgga

SEQ ID NO: 165083 - DNA, 25 bp, Saccharomyces pastorianus
gatgtcgacgtttctattagatcaa

SEQ ID NO: 165084 - DNA, 25 bp, Saccharomyces pastorianus
gatgtggttatcctacaaactggaa

SEQ ID NO: 165085 - DNA, 25 bp, Saccharomyces pastorianus
actgattatacgcttactctccgat

SEQ ID NO: 165086 - DNA, 25 bp, Saccharomyces pastorianus
atggtgaacgtcattatatcgattt

SEQ ID NO: 165087 - DNA, 25 bp, Saccharomyces pastorianus
aatggcatgcctggaaagattgcac

SEQ ID NO: 165088 - DNA, 25 bp, Saccharomyces pastorianus
aagtgaggccctcagtgatttactg

SEQ ID NO: 165089 - DNA, 25 bp, Saccharomyces pastorianus
tgcgcgtgggactcaattgaagcta

SEQ ID NO: 165090 - DNA, 25 bp, Saccharomyces pastorianus
gtctcggagaattttctaccctagt

SEQ ID NO: 165091 - DNA, 25 bp, Saccharomyces pastorianus
gaatgcatttggtgtctcggagaat

SEQ ID NO: 165092 - DNA, 25 bp, Saccharomyces pastorianus
gaactcgcaccaattgcgcgtggga

SEQ ID NO: 165093 - DNA, 25 bp, Saccharomyces pastorianus
tactgagcgaagtcctgcctagttt

SEQ ID NO: 165094 - DNA, 25 bp, Saccharomyces pastorianus
aacagttgcctaccgtattgagaga

SEQ ID NO: 165095 - DNA, 25 bp, Saccharomyces pastorianus
aggcagctgatgaactcttagatga

SEQ ID NO: 165096 - DNA, 25 bp, Saccharomyces pastorianus
gaaggtctaccaatgctactgagcg

SEQ ID NO: 165097 - DNA, 25 bp, Saccharomyces pastorianus
ttttaacgcctatgaactcgcacca

SEQ ID NO: 165098 - DNA, 25 bp, Saccharomyces pastorianus
gatctagaaactccatttttgacaa

SEQ ID NO: 165099 - DNA, 25 bp, Saccharomyces pastorianus
actcaagcgcagacgatggaatcga

SEQ ID NO: 165100 - DNA, 25 bp, Saccharomyces pastorianus
gtccgtcgatagtaactctaacgag

SEQ ID NO: 165101 - DNA, 25 bp, Saccharomyces pastorianus
tcacctgaactgtccgtcgatagta

SEQ ID NO: 165102 - DNA, 25 bp, Saccharomyces pastorianus
gatgaataactcaagcgcagacgat

SEQ ID NO: 165103 - DNA, 25 bp, Saccharomyces pastorianus
acaacagttcggtaggctcagatag

SEQ ID NO: 165104 - DNA, 25 bp, Saccharomyces pastorianus
ggaatcgaatttgacgccccagagg

SEQ ID NO: 165105 - DNA, 25 bp, Saccharomyces pastorianus
ggtaggctcagatagttccgctgaa

SEQ ID NO: 165106 - DNA, 25 bp, Saccharomyces pastorianus
gatgttcaagatattccttcacctg

SEQ ID NO: 165107 - DNA, 25 bp, Saccharomyces pastorianus
agatattccttcacctgaactgtcc

SEQ ID NO: 165108 - DNA, 25 bp, Saccharomyces pastorianus
gatgaaaaccataacagtgatgttc

SEQ ID NO: 165109 - DNA, 25 bp, Saccharomyces pastorianus
acgaactggaagatgtgaacgatga

SEQ ID NO: 165110 - DNA, 25 bp, Saccharomyces pastorianus
tatgcagcctatttgcacggtgaaa

SEQ ID NO: 165111 - DNA, 25 bp, Saccharomyces pastorianus
aaattctgacacagctctttccgta

SEQ ID NO: 165112 - DNA, 25 bp, Saccharomyces pastorianus
gacgtatgagatttcctagggcgga

SEQ ID NO: 165113 - DNA, 25 bp, Saccharomyces pastorianus
acatgctaaatttgcctcagtttca

SEQ ID NO: 165114 - DNA, 25 bp, Saccharomyces pastorianus
tttccgtacctcctcatgatagtac

SEQ ID NO: 165115 - DNA, 25 bp, Saccharomyces pastorianus
agaaaacctccattgtcagatgccc

SEQ ID NO: 165116 - DNA, 25 bp, Saccharomyces pastorianus
ggatttatctaagccgattaccgaa

SEQ ID NO: 165117 - DNA, 25 bp, Saccharomyces pastorianus
gatgcacaatattcctccgaagtca

SEQ ID NO: 165118 - DNA, 25 bp, Saccharomyces pastorianus
agaacacgaccgttatgcagcctat

SEQ ID NO: 165119 - DNA, 25 bp, Saccharomyces pastorianus
gcctcagtttcaacatttacctcaa

SEQ ID NO: 165120 - DNA, 25 bp, Saccharomyces pastorianus
tactatctcaacaacagctagcgcc

SEQ ID NO: 165121 - DNA, 25 bp, Saccharomyces pastorianus
gtcttccgccggatgatcaaataca

SEQ ID NO: 165122 - DNA, 25 bp, Saccharomyces pastorianus
atcactgccaaatttttatcccatt

SEQ ID NO: 165123 - DNA, 25 bp, Saccharomyces pastorianus
aattggtaaactccccagcgatctt

SEQ ID NO: 165124 - DNA, 25 bp, Saccharomyces pastorianus
tttatcccattttcacatagttccc

SEQ ID NO: 165125 - DNA, 25 bp, Saccharomyces pastorianus
ggtgaccattatttagttgctttgc

SEQ ID NO: 165126 - DNA, 25 bp, Saccharomyces pastorianus
gttgctttgcctatcttaatgttac

SEQ ID NO: 165127 - DNA, 25 bp, Saccharomyces pastorianus
agcgatcttcaactctggaaagtct

SEQ ID NO: 165128 - DNA, 25 bp, Saccharomyces pastorianus
aactctggaaagtcttccgccggat

SEQ ID NO: 165129 - DNA, 25 bp, Saccharomyces pastorianus
ttatctgtatgtacaccgtattggt

SEQ ID NO: 165130 - DNA, 25 bp, Saccharomyces pastorianus
ccgtattggtggaacatcactgcca

SEQ ID NO: 165131 - DNA, 25 bp, Saccharomyces pastorianus
gtatctttaaccctttacactgtgg

SEQ ID NO: 165132 - DNA, 25 bp, Saccharomyces pastorianus
tgtatcaacagtccagttcttctgg

SEQ ID NO: 165133 - DNA, 25 bp, Saccharomyces pastorianus
gagcctaatgattcgttcttttacg

SEQ ID NO: 165134 - DNA, 25 bp, Saccharomyces pastorianus
tgatggcatgtcacccactattatg

SEQ ID NO: 165135 - DNA, 25 bp, Saccharomyces pastorianus
atccgactttacacgagagcctaat

SEQ ID NO: 165136 - DNA, 25 bp, Saccharomyces pastorianus
tttccttcttccgatgactttgcaa

SEQ ID NO: 165137 - DNA, 25 bp, Saccharomyces pastorianus
gaaacttatgcgagtggccctcaaa

SEQ ID NO: 165138 - DNA, 25 bp, Saccharomyces pastorianus
ggtcatctaatgaagtctctccttt

SEQ ID NO: 165139 - DNA, 25 bp, Saccharomyces pastorianus
cagcgtattcaacagcaaccaactc

SEQ ID NO: 165140 - DNA, 25 bp, Saccharomyces pastorianus
tcttctggcccttaccaagaaactt

SEQ ID NO: 165141 - DNA, 25 bp, Saccharomyces pastorianus
aactttggcgatgctgtgtatccta

SEQ ID NO: 165142 - DNA, 25 bp, Saccharomyces pastorianus
gagtggccctcaaaactttggcgat

SEQ ID NO: 165143 - DNA, 25 bp, Saccharomyces pastorianus
aatgatagctgtaacctccgggaat

SEQ ID NO: 165144 - DNA, 25 bp, Saccharomyces pastorianus
cttcaactgaagagacacggcgatg

SEQ ID NO: 165145 - DNA, 25 bp, Saccharomyces pastorianus
ttacaatccccaaatcctcgagaga

SEQ ID NO: 165146 - DNA, 25 bp, Saccharomyces pastorianus
gtaattgctatcacttcattgggta

SEQ ID NO: 165147 - DNA, 25 bp, Saccharomyces pastorianus
gtgacatccttcttatcaaatttag

SEQ ID NO: 165148 - DNA, 25 bp, Saccharomyces pastorianus
gatagcgctgacataattgagaccg

SEQ ID NO: 165149 - DNA, 25 bp, Saccharomyces pastorianus
aaatatcgctgtcttttccaataat

SEQ ID NO: 165150 - DNA, 25 bp, Saccharomyces pastorianus
aatggttttcattcggtgtaattgc

SEQ ID NO: 165151 - DNA, 25 bp, Saccharomyces pastorianus
tgactccttcctattgactttacaa

SEQ ID NO: 165152 - DNA, 25 bp, Saccharomyces pastorianus
aagctgattgatcttcttcaactga

SEQ ID NO: 165153 - DNA, 25 bp, Saccharomyces pastorianus
gaatacgatgatgactccttcctat

SEQ ID NO: 165154 - DNA, 25 bp, Saccharomyces pastorianus
gcgtcaacagtatcacaccagtcaa

SEQ ID NO: 165155 - DNA, 25 bp, Saccharomyces pastorianus
aaagccatttagacagttttcgact

SEQ ID NO: 165156 - DNA, 25 bp, Saccharomyces pastorianus
aatagccgagcatgttatgcctgaa

SEQ ID NO: 165157 - DNA, 25 bp, Saccharomyces pastorianus
aagatcagcatcctttcatagtccg

SEQ ID NO: 165158 - DNA, 25 bp, Saccharomyces pastorianus
gttctgagtcttcgagatgcgcaag

SEQ ID NO: 165159 - DNA, 25 bp, Saccharomyces pastorianus
aaagtacccaatctgttctgagtct

SEQ ID NO: 165160 - DNA, 25 bp, Saccharomyces pastorianus
ataagcacaacgtttctcagaaatg

SEQ ID NO: 165161 - DNA, 25 bp, Saccharomyces pastorianus
gtgcataatacgctgctcagtccaa

SEQ ID NO: 165162 - DNA, 25 bp, Saccharomyces pastorianus
aacacatgatggcacgctggataat

SEQ ID NO: 165163 - DNA, 25 bp, Saccharomyces pastorianus
gaactgctggtttcggcctgaaacc

SEQ ID NO: 165164 - DNA, 25 bp, Saccharomyces pastorianus
gtaacatctcttaatgcgtcaacag

SEQ ID NO: 165165 - DNA, 25 bp, Saccharomyces pastorianus
tcgcatgggaaccttcggtctagta

SEQ ID NO: 165166 - DNA, 25 bp, Saccharomyces pastorianus
ctccatagaaaaacggagtatgtcc

SEQ ID NO: 165167 - DNA, 25 bp, Saccharomyces pastorianus
ggaacagtaagaatgttgacaatca

SEQ ID NO: 165168 - DNA, 25 bp, Saccharomyces pastorianus
tgggaaccttcggtctagtaccgag

SEQ ID NO: 165169 - DNA, 25 bp, Saccharomyces pastorianus
gtccgagttggcattttcgaacata

SEQ ID NO: 165170 - DNA, 25 bp, Saccharomyces pastorianus
cggagtatgtccgagttggcatttt

SEQ ID NO: 165171 - DNA, 25 bp, Saccharomyces pastorianus
gaatactcgcatgggaaccttcggt

SEQ ID NO: 165172 - DNA, 25 bp, Saccharomyces pastorianus
gttgacaatcaagtcagtctacccc

SEQ ID NO: 165173 - DNA, 25 bp, Saccharomyces pastorianus
tctaccccctatccaagttctattt

SEQ ID NO: 165174 - DNA, 25 bp, Saccharomyces pastorianus
tagtaccgaggaacaaaactatcct

SEQ ID NO: 165175 - DNA, 25 bp, Saccharomyces pastorianus
ttcgaacatagaatactcgcatggg

SEQ ID NO: 165176 - DNA, 25 bp, Saccharomyces pastorianus
aagggattccagttgcgatcgtttc

SEQ ID NO: 165177 - DNA, 25 bp, Saccharomyces pastorianus
ttatcttcgggccaaaactctgggt

SEQ ID NO: 165178 - DNA, 25 bp, Saccharomyces pastorianus
gttggtcatggaactacctactttc

SEQ ID NO: 165179 - DNA, 25 bp, Saccharomyces pastorianus
gagctcattgacgatccattcatcc

SEQ ID NO: 165180 - DNA, 25 bp, Saccharomyces pastorianus
cgatcgtttcatctccaggagtcat

SEQ ID NO: 165181 - DNA, 25 bp, Saccharomyces pastorianus
gaacccactatcattgccattaatc

SEQ ID NO: 165182 - DNA, 25 bp, Saccharomyces pastorianus
gactggacgccatatctagcgcaag

SEQ ID NO: 165183 - DNA, 25 bp, Saccharomyces pastorianus
tccctaataggcgttacccaatgtt

SEQ ID NO: 165184 - DNA, 25 bp, Saccharomyces pastorianus
gagaacatccgatctacacagtaga

SEQ ID NO: 165185 - DNA, 25 bp, Saccharomyces pastorianus
tgacgaagtctttttgggcacaaca

SEQ ID NO: 165186 - DNA, 25 bp, Saccharomyces pastorianus
gataatgttcaccagttcggcgact

SEQ ID NO: 165187 - DNA, 25 bp, Saccharomyces pastorianus
atgcaggtgttcaagttgacacaaa

SEQ ID NO: 165188 - DNA, 25 bp, Saccharomyces pastorianus
gttcaagttgacacaaatatgcaga

SEQ ID NO: 165189 - DNA, 25 bp, Saccharomyces pastorianus
taagcttacaggacacagttctagt

SEQ ID NO: 165190 - DNA, 25 bp, Saccharomyces pastorianus
acagttctagtcaacgagatgaagg

SEQ ID NO: 165191 - DNA, 25 bp, Saccharomyces pastorianus
cgcaatgcaggtgttcaagttgaca

SEQ ID NO: 165192 - DNA, 25 bp, Saccharomyces pastorianus
atgcgcaatgcaggtgttcaagttg

SEQ ID NO: 165193 - DNA, 25 bp, Saccharomyces pastorianus
acaggacacagttctagtcaacgag

SEQ ID NO: 165194 - DNA, 25 bp, Saccharomyces pastorianus
gcttacaggacacagttctagtcaa

SEQ ID NO: 165195 - DNA, 25 bp, Saccharomyces pastorianus
gacacagttctagtcaacgagatga

SEQ ID NO: 165196 - DNA, 25 bp, Saccharomyces pastorianus
gggaaactcaatttgcaaaaggcat

SEQ ID NO: 165197 - DNA, 25 bp, Saccharomyces pastorianus
tatgcagaatataagcttacaggac

SEQ ID NO: 165198 - DNA, 25 bp, Saccharomyces pastorianus
ataactatatttcctgagcaaccca

SEQ ID NO: 165199 - DNA, 25 bp, Saccharomyces pastorianus
aaaccgtttgaagaatatggagctc

SEQ ID NO: 165200 - DNA, 25 bp, Saccharomyces pastorianus
ttcgactcaaagaagtactggtcca

SEQ ID NO: 165201 - DNA, 25 bp, Saccharomyces pastorianus
gagggcaatttttcaaactcgttat

SEQ ID NO: 165202 - DNA, 25 bp, Saccharomyces pastorianus
gtcctctatcttaacgacacttttt

SEQ ID NO: 165203 - DNA, 25 bp, Saccharomyces pastorianus
gagcaacccagtcaacaaacaagtg

SEQ ID NO: 165204 - DNA, 25 bp, Saccharomyces pastorianus
tgcactgtttttgcgacaagattac

SEQ ID NO: 165205 - DNA, 25 bp, Saccharomyces pastorianus
aaactcgttattaagcgatcgcttg

SEQ ID NO: 165206 - DNA, 25 bp, Saccharomyces pastorianus
gattacaaacgtatttcttctttga

SEQ ID NO: 165207 - DNA, 25 bp, Saccharomyces pastorianus
ataaccctgtcctctatcttaacga

SEQ ID NO: 165208 - DNA, 25 bp, Saccharomyces pastorianus
gacacttttttcagatgcactgttt

SEQ ID NO: 165209 - DNA, 25 bp, Saccharomyces pastorianus
gaaggcagcacaagctttgaaaatt

SEQ ID NO: 165210 - DNA, 25 bp, Saccharomyces pastorianus
aagagagttacaattcagcgaaatc

SEQ ID NO: 165211 - DNA, 25 bp, Saccharomyces pastorianus
atgttaagaaggcagcacaagcttt

SEQ ID NO: 165212 - DNA, 25 bp, Saccharomyces pastorianus
aaggctgctgcaaggaatgttaaga

SEQ ID NO: 165213 - DNA, 25 bp, Saccharomyces pastorianus
atactgtcaaggctgctgcaaggaa

SEQ ID NO: 165214 - DNA, 25 bp, Saccharomyces pastorianus
gagttacaattcagcgaaatcgata

SEQ ID NO: 165215 - DNA, 25 bp, Saccharomyces pastorianus
ccatatggcgccaaaccggtaagga

SEQ ID NO: 165216 - DNA, 25 bp, Saccharomyces pastorianus
gaaaagccagaggatgtgtttgaaa

SEQ ID NO: 165217 - DNA, 25 bp, Saccharomyces pastorianus
gcgccaaaccggtaaggatatcttt

SEQ ID NO: 165218 - DNA, 25 bp, Saccharomyces pastorianus
gaaatcgatactgtcaaggctgctg

SEQ ID NO: 165219 - DNA, 25 bp, Saccharomyces pastorianus
atcgatactgtcaaggctgctgcaa

SEQ ID NO: 165220 - DNA, 25 bp, Saccharomyces pastorianus
gaaggcagcacaagctttgaaaatt

SEQ ID NO: 165221 - DNA, 25 bp, Saccharomyces pastorianus
gagagttacaattcagcgaaatcga

SEQ ID NO: 165222 - DNA, 25 bp, Saccharomyces pastorianus
atgttaagaaggcagcacaagcttt

SEQ ID NO: 165223 - DNA, 25 bp, Saccharomyces pastorianus
aaggctgctgcaaggaatgttaaga

SEQ ID NO: 165224 - DNA, 25 bp, Saccharomyces pastorianus
atactgtcaaggctgctgcaaggaa

SEQ ID NO: 165225 - DNA, 25 bp, Saccharomyces pastorianus
ttagcgcaatttctttcccatatgg

SEQ ID NO: 165226 - DNA, 25 bp, Saccharomyces pastorianus
gcgaaatcgatactgtcaaggctgc

SEQ ID NO: 165227 - DNA, 25 bp, Saccharomyces pastorianus
gaaaagccagaggatgtgtttgaaa

SEQ ID NO: 165228 - DNA, 25 bp, Saccharomyces pastorianus
ccatatggcgccaaaccggtaagga

SEQ ID NO: 165229 - DNA, 25 bp, Saccharomyces pastorianus
gcgccaaaccggtaaggatatcttt

SEQ ID NO: 165230 - DNA, 25 bp, Saccharomyces pastorianus
atcgatactgtcaaggctgctgcaa

SEQ ID NO: 165231 - DNA, 25 bp, Saccharomyces pastorianus
tgctgatgcagctcgtattgcgttt

SEQ ID NO: 165232 - DNA, 25 bp, Saccharomyces pastorianus
atttctttgatatcgcgtttgaaca

SEQ ID NO: 165233 - DNA, 25 bp, Saccharomyces pastorianus
ttgaaaagttcggtgctgatgcagc

SEQ ID NO: 165234 - DNA, 25 bp, Saccharomyces pastorianus
ttgccgatgcgggagatactgttga

SEQ ID NO: 165235 - DNA, 25 bp, Saccharomyces pastorianus
aattgcgcctcatttcgctgagtat

SEQ ID NO: 165236 - DNA, 25 bp, Saccharomyces pastorianus
ttgacgaatctaacgctaatgctgc

SEQ ID NO: 165237 - DNA, 25 bp, Saccharomyces pastorianus
aagctgctagggattactatcgtga

SEQ ID NO: 165238 - DNA, 25 bp, Saccharomyces pastorianus
acgctaatgctgctattctgagatt

SEQ ID NO: 165239 - DNA, 25 bp, Saccharomyces pastorianus
ctggctgctttggattacttgagaa

SEQ ID NO: 165240 - DNA, 25 bp, Saccharomyces pastorianus
tagataagggtgttctggctgcttt

SEQ ID NO: 165241 - DNA, 25 bp, Saccharomyces pastorianus
ttccacgtgcatccaaaccagtaga

SEQ ID NO: 165242 - DNA, 25 bp, Saccharomyces pastorianus
aatccacgcaggctactcaaaggtt

SEQ ID NO: 165243 - DNA, 25 bp, Saccharomyces pastorianus
agcaatccacgcaggctactcaaag

SEQ ID NO: 165244 - DNA, 25 bp, Saccharomyces pastorianus
gcaggctactcaaaggtttttgatt

SEQ ID NO: 165245 - DNA, 25 bp, Saccharomyces pastorianus
acagatcggcgaaaacattgtgtgc

SEQ ID NO: 165246 - DNA, 25 bp, Saccharomyces pastorianus
cacgggtcaaattcccatccgagat

SEQ ID NO: 165247 - DNA, 25 bp, Saccharomyces pastorianus
tccacgcaggctactcaaaggtttt

SEQ ID NO: 165248 - DNA, 25 bp, Saccharomyces pastorianus
tgtaccacgggtcaaattcccatcc

SEQ ID NO: 165249 - DNA, 25 bp, Saccharomyces pastorianus
aaacattgtgtgcagggtcatttgt

SEQ ID NO: 165250 - DNA, 25 bp, Saccharomyces pastorianus
ttttctcaagaacagatcggcgaaa

SEQ ID NO: 165251 - DNA, 25 bp, Saccharomyces pastorianus
cacgcaggctactcaaaggtttttg

SEQ ID NO: 165252 - DNA, 25 bp, Saccharomyces pastorianus
gcgaaaacattgtgtgcagggtcat

SEQ ID NO: 165253 - DNA, 25 bp, Saccharomyces pastorianus
agcaatccacgcaggctactcaaag

SEQ ID NO: 165254 - DNA, 25 bp, Saccharomyces pastorianus
aaaatattacacaacccacacagca

SEQ ID NO: 165255 - DNA, 25 bp, Saccharomyces pastorianus
gcaggctactcaaaggtttttgatt

SEQ ID NO: 165256 - DNA, 25 bp, Saccharomyces pastorianus
acagatcggcgaaaacattgtgtgc

SEQ ID NO: 165257 - DNA, 25 bp, Saccharomyces pastorianus
cacgggtcaaattcccatccgagat

SEQ ID NO: 165258 - DNA, 25 bp, Saccharomyces pastorianus
tccacgcaggctactcaaaggtttt

SEQ ID NO: 165259 - DNA, 25 bp, Saccharomyces pastorianus
tgtaccacgggtcaaattcccatcc

SEQ ID NO: 165260 - DNA, 25 bp, Saccharomyces pastorianus
aaaacattgtgtgcagggtcatttg

SEQ ID NO: 165261 - DNA, 25 bp, Saccharomyces pastorianus
cagggtcatttgtaccacgggtcaa

SEQ ID NO: 165262 - DNA, 25 bp, Saccharomyces pastorianus
ttttctcaagaacagatcggcgaaa

SEQ ID NO: 165263 - DNA, 25 bp, Saccharomyces pastorianus
cacgcaggctactcaaaggtttttg

SEQ ID NO: 165264 - DNA, 25 bp, Saccharomyces pastorianus
gatatctagatcaaacgctgctcat

SEQ ID NO: 165265 - DNA, 25 bp, Saccharomyces pastorianus
agtggaatcagtcgaccgccagagt

SEQ ID NO: 165266 - DNA, 25 bp, Saccharomyces pastorianus
gaagggcccagattttattggtatc

SEQ ID NO: 165267 - DNA, 25 bp, Saccharomyces pastorianus
tacacgttaacgatgtcacacctaa

SEQ ID NO: 165268 - DNA, 25 bp, Saccharomyces pastorianus
aaacgctgctcatcctaagctaaga

SEQ ID NO: 165269 - DNA, 25 bp, Saccharomyces pastorianus
gccagagtcccgatgacaacaaatt

SEQ ID NO: 165270 - DNA, 25 bp, Saccharomyces pastorianus
ttattggtatcgcttttcctatctg

SEQ ID NO: 165271 - DNA, 25 bp, Saccharomyces pastorianus
gccaagattcgcagtattctactca

SEQ ID NO: 165272 - DNA, 25 bp, Saccharomyces pastorianus
atactcactgtattgggctacacgt

SEQ ID NO: 165273 - DNA, 25 bp, Saccharomyces pastorianus
ttttcctatctggtgtcacactttt

SEQ ID NO: 165274 - DNA, 25 bp, Saccharomyces pastorianus
tattgatacggcatcttctacagat

SEQ ID NO: 165275 - DNA, 25 bp, Saccharomyces pastorianus
ttaccttccggtatcaaacttgatg

SEQ ID NO: 165276 - DNA, 25 bp, Saccharomyces pastorianus
gaaagaatcgccttggaaaagtaca

SEQ ID NO: 165277 - DNA, 25 bp, Saccharomyces pastorianus
gaggaagagtcttcatcaaacgaag

SEQ ID NO: 165278 - DNA, 25 bp, Saccharomyces pastorianus
gtctattgcttcagtcagaccaagt

SEQ ID NO: 165279 - DNA, 25 bp, Saccharomyces pastorianus
tagaattgccaaagacggtctagtt

SEQ ID NO: 165280 - DNA, 25 bp, Saccharomyces pastorianus
ctggcagagtacacggcgaatcgaa

SEQ ID NO: 165281 - DNA, 25 bp, Saccharomyces pastorianus
gtactttagatatagagccaattgc

SEQ ID NO: 165282 - DNA, 25 bp, Saccharomyces pastorianus
atccacgacaagttggtctattgct

SEQ ID NO: 165283 - DNA, 25 bp, Saccharomyces pastorianus
aattcacagaaattccacatgctgg

SEQ ID NO: 165284 - DNA, 25 bp, Saccharomyces pastorianus
gtacgcaatgtagtggatctgataa

SEQ ID NO: 165285 - DNA, 25 bp, Saccharomyces pastorianus
ggtaaatcctacaatcccaacaata

SEQ ID NO: 165286 - DNA, 25 bp, Saccharomyces pastorianus
caggtagaggctacttttctggtaa

SEQ ID NO: 165287 - DNA, 25 bp, Saccharomyces pastorianus
tcgcttctccctttgttgaattgga

SEQ ID NO: 165288 - DNA, 25 bp, Saccharomyces pastorianus
gacaggtctactttgtgttattgaa

SEQ ID NO: 165289 - DNA, 25 bp, Saccharomyces pastorianus
cccatttctaggtgagttgttcgtt

SEQ ID NO: 165290 - DNA, 25 bp, Saccharomyces pastorianus
tatgctggccgttactaaatggttc

SEQ ID NO: 165291 - DNA, 25 bp, Saccharomyces pastorianus
attgaccctgaagtcgagtcacccg

SEQ ID NO: 165292 - DNA, 25 bp, Saccharomyces pastorianus
gatgagagttatttggttaccccac

SEQ ID NO: 165293 - DNA, 25 bp, Saccharomyces pastorianus
ttgaaggtattcttgtcgcttctcc

SEQ ID NO: 165294 - DNA, 25 bp, Saccharomyces pastorianus
atatccaatcttcgacaggtctact

SEQ ID NO: 165295 - DNA, 25 bp, Saccharomyces pastorianus
taccccacctccattgcatattgaa

SEQ ID NO: 165296 - DNA, 25 bp, Saccharomyces pastorianus
gagtcacccgaattggcccgtatgc

SEQ ID NO: 165297 - DNA, 25 bp, Saccharomyces pastorianus
aaacaacttgttttgctgcatcacc

SEQ ID NO: 165298 - DNA, 25 bp, Saccharomyces pastorianus
aatattcgccacttgttctgatgac

SEQ ID NO: 165299 - DNA, 25 bp, Saccharomyces pastorianus
tcgcccgtttacacaatgatggagc

SEQ ID NO: 165300 - DNA, 25 bp, Saccharomyces pastorianus
atgatggagccatccacttctctaa

SEQ ID NO: 165301 - DNA, 25 bp, Saccharomyces pastorianus
ttctctaagttcagcatcgtccgga

SEQ ID NO: 165302 - DNA, 25 bp, Saccharomyces pastorianus
gctgcatcaccgtttgttgatacat

SEQ ID NO: 165303 - DNA, 25 bp, Saccharomyces pastorianus
atatacgtgcagttatcgctttagg

SEQ ID NO: 165304 - DNA, 25 bp, Saccharomyces pastorianus
gcccctttggattctaaacgattct

SEQ ID NO: 165305 - DNA, 25 bp, Saccharomyces pastorianus
gagaaggtgtcaaatcgcccgttta

SEQ ID NO: 165306 - DNA, 25 bp, Saccharomyces pastorianus
agttcatcacttttatagcgagcaa

SEQ ID NO: 165307 - DNA, 25 bp, Saccharomyces pastorianus
gtacaatacctgttcctggcataaa

SEQ ID NO: 165308 - DNA, 25 bp, Saccharomyces pastorianus
gaagatgtcaaattcaagactttag

SEQ ID NO: 165309 - DNA, 25 bp, Saccharomyces pastorianus
gcctcctcttcatatatgactgaat

SEQ ID NO: 165310 - DNA, 25 bp, Saccharomyces pastorianus
gactctactggcgttattgaagatg

SEQ ID NO: 165311 - DNA, 25 bp, Saccharomyces pastorianus
ttaggatgtggctccgccattgcct

SEQ ID NO: 165312 - DNA, 25 bp, Saccharomyces pastorianus
catatatgactgaattggtacaggg

SEQ ID NO: 165313 - DNA, 25 bp, Saccharomyces pastorianus
gactttaggatgtggctccgccatt

SEQ ID NO: 165314 - DNA, 25 bp, Saccharomyces pastorianus
gtcaacgactctactggcgttattg

SEQ ID NO: 165315 - DNA, 25 bp, Saccharomyces pastorianus
aagactttaggatgtggctccgcca

SEQ ID NO: 165316 - DNA, 25 bp, Saccharomyces pastorianus
tcaaagtcaacgactctactggcgt

SEQ ID NO: 165317 - DNA, 25 bp, Saccharomyces pastorianus
attgcctcctcttcatatatgactg

SEQ ID NO: 165318 - DNA, 25 bp, Saccharomyces pastorianus
tctactggcgttattgaagatgtca

SEQ ID NO: 165319 - DNA, 25 bp, Saccharomyces pastorianus
taacgagatttgcaaggcctgctct

SEQ ID NO: 165320 - DNA, 25 bp, Saccharomyces pastorianus
atttgcaaggcctgctctgatggcc

SEQ ID NO: 165321 - DNA, 25 bp, Saccharomyces pastorianus
aaggcctgctctgatggccatcaga

SEQ ID NO: 165322 - DNA, 25 bp, Saccharomyces pastorianus
tgctctgatggccatcagacctgtg

SEQ ID NO: 165323 - DNA, 25 bp, Saccharomyces pastorianus
acgagatttgcaaggcctgctctga

SEQ ID NO: 165324 - DNA, 25 bp, Saccharomyces pastorianus
ctgttataacgagatttgcaaggcc

SEQ ID NO: 165325 - DNA, 25 bp, Saccharomyces pastorianus
ggccatcagacctgtgaatgccatg

SEQ ID NO: 165326 - DNA, 25 bp, Saccharomyces pastorianus
gatggccatcagacctgtgaatgcc

SEQ ID NO: 165327 - DNA, 25 bp, Saccharomyces pastorianus
ttgcaaggcctgctctgatggccat

SEQ ID NO: 165328 - DNA, 25 bp, Saccharomyces pastorianus
ttataacgagatttgcaaggcctgc

SEQ ID NO: 165329 - DNA, 25 bp, Saccharomyces pastorianus
ccatcagacctgtgaatgccatggg

SEQ ID NO: 165330 - DNA, 25 bp, Saccharomyces pastorianus
tggtgatgtcgtcttagctgctgct

SEQ ID NO: 165331 - DNA, 25 bp, Saccharomyces pastorianus
agctgatgacattgatgctgactct

SEQ ID NO: 165332 - DNA, 25 bp, Saccharomyces pastorianus
cagagttttcggtgctctaaagggt

SEQ ID NO: 165333 - DNA, 25 bp, Saccharomyces pastorianus
gtattacccacggtttgaccaactg

SEQ ID NO: 165334 - DNA, 25 bp, Saccharomyces pastorianus
gtgccagagttttcggtgctctaaa

SEQ ID NO: 165335 - DNA, 25 bp, Saccharomyces pastorianus
atctcttctaccatcactggtgatg

SEQ ID NO: 165336 - DNA, 25 bp, Saccharomyces pastorianus
atcactggtgatgtcgtcttagctg

SEQ ID NO: 165337 - DNA, 25 bp, Saccharomyces pastorianus
tgtcaaatcatctcttctaccatca

SEQ ID NO: 165338 - DNA, 25 bp, Saccharomyces pastorianus
acccacggtttgaccaactgggctg

SEQ ID NO: 165339 - DNA, 25 bp, Saccharomyces pastorianus
caagggttacctagctgatgacatt

SEQ ID NO: 165340 - DNA, 25 bp, Saccharomyces pastorianus
aaagaaccaccactggtgccagagt

SEQ ID NO: 165341 - DNA, 25 bp, Saccharomyces pastorianus
gaacgtaagggatccagtcgtccgg

SEQ ID NO: 165342 - DNA, 25 bp, Saccharomyces pastorianus
agtcgtccggcactcaagaagttta

SEQ ID NO: 165343 - DNA, 25 bp, Saccharomyces pastorianus
aggccggcgattttgaacagccaaa

SEQ ID NO: 165344 - DNA, 25 bp, Saccharomyces pastorianus
agaaatcaacttccaaggccgctat

SEQ ID NO: 165345 - DNA, 25 bp, Saccharomyces pastorianus
ttgatcattgaagggctcacggctt

SEQ ID NO: 165346 - DNA, 25 bp, Saccharomyces pastorianus
agggcaagaagcctgcagccagcaa

SEQ ID NO: 165347 - DNA, 25 bp, Saccharomyces pastorianus
acttctgtgagtgcaaccgcatcaa

SEQ ID NO: 165348 - DNA, 25 bp, Saccharomyces pastorianus
ggaagcttcctccaagagttacagg

SEQ ID NO: 165349 - DNA, 25 bp, Saccharomyces pastorianus
aaagggacccgctggtgctgtgaaa

SEQ ID NO: 165350 - DNA, 25 bp, Saccharomyces pastorianus
gcatccacgaagctagcgccaaaga

SEQ ID NO: 165351 - DNA, 25 bp, Saccharomyces pastorianus
gtcggatccgcaagcaactttgatt

SEQ ID NO: 165352 - DNA, 25 bp, Saccharomyces pastorianus
aatgggagactcaagcgggatttca

SEQ ID NO: 165353 - DNA, 25 bp, Saccharomyces pastorianus
ggagatccactagaattaacgctat

SEQ ID NO: 165354 - DNA, 25 bp, Saccharomyces pastorianus
aagcctcgataagaggtcgtctttt

SEQ ID NO: 165355 - DNA, 25 bp, Saccharomyces pastorianus
gtaacccacaacatattaggtcaga

SEQ ID NO: 165356 - DNA, 25 bp, Saccharomyces pastorianus
agcgggatttcattacttattacag

SEQ ID NO: 165357 - DNA, 25 bp, Saccharomyces pastorianus
gcaaggctagattttcccgtagagt

SEQ ID NO: 165358 - DNA, 25 bp, Saccharomyces pastorianus
gtggccaaccttatttgaggatcta

SEQ ID NO: 165359 - DNA, 25 bp, Saccharomyces pastorianus
atggcctcgtctcttaacgagttaa

SEQ ID NO: 165360 - DNA, 25 bp, Saccharomyces pastorianus
tgtattcagaatgcccaagcttccg

SEQ ID NO: 165361 - DNA, 25 bp, Saccharomyces pastorianus
aagcttccgcaaggattgcaaggct

SEQ ID NO: 165362 - DNA, 25 bp, Saccharomyces pastorianus
gattttcccgtagagtggccaacct

SEQ ID NO: 165363 - DNA, 25 bp, Saccharomyces pastorianus
gttacttgacccacggtacttcagt

SEQ ID NO: 165364 - DNA, 25 bp, Saccharomyces pastorianus
tatcaagttccctttattctgttgc

SEQ ID NO: 165365 - DNA, 25 bp, Saccharomyces pastorianus
attgactctttcacgttacttgacc

SEQ ID NO: 165366 - DNA, 25 bp, Saccharomyces pastorianus
gaattgactctttcacgttacttga

SEQ ID NO: 165367 - DNA, 25 bp, Saccharomyces pastorianus
gtcgatgaattgactctttcacgtt

SEQ ID NO: 165368 - DNA, 25 bp, Saccharomyces pastorianus
gtacttcagtattatcaagttccct

SEQ ID NO: 165369 - DNA, 25 bp, Saccharomyces pastorianus
tctttcacgttacttgacccacggt

SEQ ID NO: 165370 - DNA, 25 bp, Saccharomyces pastorianus
atgcatccattagtcgatgaattga

SEQ ID NO: 165371 - DNA, 25 bp, Saccharomyces pastorianus
caagttccctttattctgttgcttt

SEQ ID NO: 165372 - DNA, 25 bp, Saccharomyces pastorianus
gacccacggtacttcagtattatca

SEQ ID NO: 165373 - DNA, 25 bp, Saccharomyces pastorianus
cttgacccacggtacttcagtatta

SEQ ID NO: 165374 - DNA, 25 bp, Saccharomyces pastorianus
ggaagccctttgtttttatagagag

SEQ ID NO: 165375 - DNA, 25 bp, Saccharomyces pastorianus
atagagagggaaaaatacggaatat

SEQ ID NO: 165376 - DNA, 25 bp, Saccharomyces pastorianus
tggatattttggaagccctttgttt

SEQ ID NO: 165377 - DNA, 25 bp, Saccharomyces pastorianus
tagagagggaaaaatacggaatatt

SEQ ID NO: 165378 - DNA, 25 bp, Saccharomyces pastorianus
gaagccctttgtttttatagagagg

SEQ ID NO: 165379 - DNA, 25 bp, Saccharomyces pastorianus
tatagagagggaaaaatacggaata

SEQ ID NO: 165380 - DNA, 25 bp, Saccharomyces pastorianus
ttggaagccctttgtttttatagag

SEQ ID NO: 165381 - DNA, 25 bp, Saccharomyces pastorianus
ttatagagagggaaaaatacggaat

SEQ ID NO: 165382 - DNA, 25 bp, Saccharomyces pastorianus
atggatattttggaagccctttgtt

SEQ ID NO: 165383 - DNA, 25 bp, Saccharomyces pastorianus
tggaagccctttgtttttatagaga

SEQ ID NO: 165384 - DNA, 25 bp, Saccharomyces pastorianus
gagcagctgaaacccaaattccgtt

SEQ ID NO: 165385 - DNA, 25 bp, Saccharomyces pastorianus
gcaccaacgccgtctacaaggtaat

SEQ ID NO: 165386 - DNA, 25 bp, Saccharomyces pastorianus
tgcaaaccggcttggaaaccctata

SEQ ID NO: 165387 - DNA, 25 bp, Saccharomyces pastorianus
catccacgtcgacaattgctcaaag

SEQ ID NO: 165388 - DNA, 25 bp, Saccharomyces pastorianus
acaaaactttcaatcgcacggtgga

SEQ ID NO: 165389 - DNA, 25 bp, Saccharomyces pastorianus
agacgcagttaacagcgcaccttct

SEQ ID NO: 165390 - DNA, 25 bp, Saccharomyces pastorianus
cgcaccttctaattctctactaaag

SEQ ID NO: 165391 - DNA, 25 bp, Saccharomyces pastorianus
gataccaaggtcaagcagctctcgt

SEQ ID NO: 165392 - DNA, 25 bp, Saccharomyces pastorianus
gaagcaacgcttccccagaaaaaga

SEQ ID NO: 165393 - DNA, 25 bp, Saccharomyces pastorianus
ggtcaagcagctctcgtcaaataat

SEQ ID NO: 165394 - DNA, 25 bp, Saccharomyces pastorianus
taaaggctactgtcgaaccagcatc

SEQ ID NO: 165395 - DNA, 25 bp, Saccharomyces pastorianus
acttatccaaatggacaaccgaaga

SEQ ID NO: 165396 - DNA, 25 bp, Saccharomyces pastorianus
ggacaaccgaagaagaattcaatgt

SEQ ID NO: 165397 - DNA, 25 bp, Saccharomyces pastorianus
gaatattcacttatccaaatggaca

SEQ ID NO: 165398 - DNA, 25 bp, Saccharomyces pastorianus
ccaaatggacaaccgaagaagaatt

SEQ ID NO: 165399 - DNA, 25 bp, Saccharomyces pastorianus
gaattcaatgtattatacaggacaa

SEQ ID NO: 165400 - DNA, 25 bp, Saccharomyces pastorianus
atacaggacaaaatatagactttat

SEQ ID NO: 165401 - DNA, 25 bp, Saccharomyces pastorianus
caaccgaagaagaattcaatgtatt

SEQ ID NO: 165402 - DNA, 25 bp, Saccharomyces pastorianus
tatccaaatggacaaccgaagaaga

SEQ ID NO: 165403 - DNA, 25 bp, Saccharomyces pastorianus
ggaatattcacttatccaaatggac

SEQ ID NO: 165404 - DNA, 25 bp, Saccharomyces pastorianus
attcacttatccaaatggacaaccg

SEQ ID NO: 165405 - DNA, 25 bp, Saccharomyces pastorianus
tcacttatccaaatggacaaccgaa

SEQ ID NO: 165406 - DNA, 25 bp, Saccharomyces pastorianus
ttcaccttgaaatcctcgcatcaaa

SEQ ID NO: 165407 - DNA, 25 bp, Saccharomyces pastorianus
ttttgttgctatacggcctcctggt

SEQ ID NO: 165408 - DNA, 25 bp, Saccharomyces pastorianus
ctggtcatcattgccactatggtac

SEQ ID NO: 165409 - DNA, 25 bp, Saccharomyces pastorianus
caccatccggcttttgtctgttaaa

SEQ ID NO: 165410 - DNA, 25 bp, Saccharomyces pastorianus
tgatttcgatctacaccacggtgat

SEQ ID NO: 165411 - DNA, 25 bp, Saccharomyces pastorianus
gattacaatgtatccatcccttttc

SEQ ID NO: 165412 - DNA, 25 bp, Saccharomyces pastorianus
gaagtcccagatacttggaactcag

SEQ ID NO: 165413 - DNA, 25 bp, Saccharomyces pastorianus
acgcatgttgtcgtgcttgatttcg

SEQ ID NO: 165414 - DNA, 25 bp, Saccharomyces pastorianus
atgatacttacaacgtcacgcatgt

SEQ ID NO: 165415 - DNA, 25 bp, Saccharomyces pastorianus
ggcacctcatgtgcttaaggttcat

SEQ ID NO: 165416 - DNA, 25 bp, Saccharomyces pastorianus
agctggccggctgagttaattgaac

SEQ ID NO: 165417 - DNA, 25 bp, Saccharomyces pastorianus
tcggctgtgactttattgacggtaa

SEQ ID NO: 165418 - DNA, 25 bp, Saccharomyces pastorianus
gttacagatagttaccacggtcagg

SEQ ID NO: 165419 - DNA, 25 bp, Saccharomyces pastorianus
atcttcctgaatatcgcaaactggc

SEQ ID NO: 165420 - DNA, 25 bp, Saccharomyces pastorianus
aataaacggcttttggctcactgag

SEQ ID NO: 165421 - DNA, 25 bp, Saccharomyces pastorianus
ggctcactgaggagtttttcactgt

SEQ ID NO: 165422 - DNA, 25 bp, Saccharomyces pastorianus
cacaatgggaagtcgccagtcatct

SEQ ID NO: 165423 - DNA, 25 bp, Saccharomyces pastorianus
cactgtgttaggaaacccttcgagt

SEQ ID NO: 165424 - DNA, 25 bp, Saccharomyces pastorianus
aagttatccttgtaccatgggtcgg

SEQ ID NO: 165425 - DNA, 25 bp, Saccharomyces pastorianus
gatgtaacttattctgccaaaccaa

SEQ ID NO: 165426 - DNA, 25 bp, Saccharomyces pastorianus
gttatattgaattcttccccgcatc

SEQ ID NO: 165427 - DNA, 25 bp, Saccharomyces pastorianus
catgctgctgaccatgtcacagaat

SEQ ID NO: 165428 - DNA, 25 bp, Saccharomyces pastorianus
gttccacttgttgcaccaactttat

SEQ ID NO: 165429 - DNA, 25 bp, Saccharomyces pastorianus
gatctaataaaaccacttcttccca

SEQ ID NO: 165430 - DNA, 25 bp, Saccharomyces pastorianus
gaggttattttactccaactttgca

SEQ ID NO: 165431 - DNA, 25 bp, Saccharomyces pastorianus
aaagatatctgcatataccgcccct

SEQ ID NO: 165432 - DNA, 25 bp, Saccharomyces pastorianus
atttgatacctgttgctgatgtgca

SEQ ID NO: 165433 - DNA, 25 bp, Saccharomyces pastorianus
gaagaaatccttggccttaaatttg

SEQ ID NO: 165434 - DNA, 25 bp, Saccharomyces pastorianus
aacatctcctgagccatttggtgta

SEQ ID NO: 165435 - DNA, 25 bp, Saccharomyces pastorianus
gagctttgaatgctgttccacttgt

SEQ ID NO: 165436 - DNA, 25 bp, Saccharomyces pastorianus
ttgacggccgtcatatcacaaaggt

SEQ ID NO: 165437 - DNA, 25 bp, Saccharomyces pastorianus
attatcaagacccttttgtcgcctt

SEQ ID NO: 165438 - DNA, 25 bp, Saccharomyces pastorianus
gagaaggttccttcccacgaggaag

SEQ ID NO: 165439 - DNA, 25 bp, Saccharomyces pastorianus
ggtaatcccatactttttcatgctg

SEQ ID NO: 165440 - DNA, 25 bp, Saccharomyces pastorianus
agcggagagtatttcttagagccaa

SEQ ID NO: 165441 - DNA, 25 bp, Saccharomyces pastorianus
atgcactggtctgggagatcgctct

SEQ ID NO: 165442 - DNA, 25 bp, Saccharomyces pastorianus
gaacaagtctctatggtgctccttt

SEQ ID NO: 165443 - DNA, 25 bp, Saccharomyces pastorianus
tcattcttgtatcccataatcaccc

SEQ ID NO: 165444 - DNA, 25 bp, Saccharomyces pastorianus
tcagtattgccctgagtggcaccaa

SEQ ID NO: 165445 - DNA, 25 bp, Saccharomyces pastorianus
caccccgatcacctggatttagaaa

SEQ ID NO: 165446 - DNA, 25 bp, Saccharomyces pastorianus
gctcctttttattaacacaccatgg

SEQ ID NO: 165447 - DNA, 25 bp, Saccharomyces pastorianus
agtggcaaagactctcccttatgga

SEQ ID NO: 165448 - DNA, 25 bp, Saccharomyces pastorianus
atataccacatatcggctactcctg

SEQ ID NO: 165449 - DNA, 25 bp, Saccharomyces pastorianus
gtttaaagaccgctgctactgtcca

SEQ ID NO: 165450 - DNA, 25 bp, Saccharomyces pastorianus
gaaatacctctctcgaaaccaagaa

SEQ ID NO: 165451 - DNA, 25 bp, Saccharomyces pastorianus
actgcttgctactgcctcagataag

SEQ ID NO: 165452 - DNA, 25 bp, Saccharomyces pastorianus
tatgtcttcaaggtcactgtttaaa

SEQ ID NO: 165453 - DNA, 25 bp, Saccharomyces pastorianus
aagtcacgatggtaaactgcttgct

SEQ ID NO: 165454 - DNA, 25 bp, Saccharomyces pastorianus
atgtgacgccagttaattacttgaa

SEQ ID NO: 165455 - DNA, 25 bp, Saccharomyces pastorianus
acttgatgacgcctctaatagcctc

SEQ ID NO: 165456 - DNA, 25 bp, Saccharomyces pastorianus
gcctccctggagataattctagcaa

SEQ ID NO: 165457 - DNA, 25 bp, Saccharomyces pastorianus
ggtagattcggactatatgtcttca

SEQ ID NO: 165458 - DNA, 25 bp, Saccharomyces pastorianus
gttttactgcgtatagctcgcccaa

SEQ ID NO: 165459 - DNA, 25 bp, Saccharomyces pastorianus
gataattctagcaatggccactgga

SEQ ID NO: 165460 - DNA, 25 bp, Saccharomyces pastorianus
acctgagccgtaactttgcctatat

SEQ ID NO: 165461 - DNA, 25 bp, Saccharomyces pastorianus
tgtgacatccatctcgcagcaatta

SEQ ID NO: 165462 - DNA, 25 bp, Saccharomyces pastorianus
gctctcactgaagatgtaccttccg

SEQ ID NO: 165463 - DNA, 25 bp, Saccharomyces pastorianus
tttgccatttggtatcactgtgccc

SEQ ID NO: 165464 - DNA, 25 bp, Saccharomyces pastorianus
gggattcaatttcttcgaggcttca

SEQ ID NO: 165465 - DNA, 25 bp, Saccharomyces pastorianus
tagctgattttggtaggcacattcg

SEQ ID NO: 165466 - DNA, 25 bp, Saccharomyces pastorianus
ataacagcgggtatcgatctcatca

SEQ ID NO: 165467 - DNA, 25 bp, Saccharomyces pastorianus
tgctgtttttattgacccctcaatc

SEQ ID NO: 165468 - DNA, 25 bp, Saccharomyces pastorianus
gacccctcaatcaatacggcgtatg

SEQ ID NO: 165469 - DNA, 25 bp, Saccharomyces pastorianus
gcccttgttgacgacggctacagga

SEQ ID NO: 165470 - DNA, 25 bp, Saccharomyces pastorianus
ggcacattcgggtacaatctatgtt

SEQ ID NO: 165471 - DNA, 25 bp, Saccharomyces pastorianus
tacagaaaccgatgtgctctcactg

SEQ ID NO: 165472 - DNA, 25 bp, Saccharomyces pastorianus
agatgaagttgttatccccgaccgc

SEQ ID NO: 165473 - DNA, 25 bp, Saccharomyces pastorianus
tacctagctttcaaaactcttcctt

SEQ ID NO: 165474 - DNA, 25 bp, Saccharomyces pastorianus
taaacgtcatcctgagaacgcgctg

SEQ ID NO: 165475 - DNA, 25 bp, Saccharomyces pastorianus
aaactcttccttgaatggtcgtcct

SEQ ID NO: 165476 - DNA, 25 bp, Saccharomyces pastorianus
gtgaaagatccttccgattatggag

SEQ ID NO: 165477 - DNA, 25 bp, Saccharomyces pastorianus
acctactcaggtcgtctatgtcaaa

SEQ ID NO: 165478 - DNA, 25 bp, Saccharomyces pastorianus
gaggacgacgatgatcatggcaatt

SEQ ID NO: 165479 - DNA, 25 bp, Saccharomyces pastorianus
gcatgtacaatcttaaccagccttc

SEQ ID NO: 165480 - DNA, 25 bp, Saccharomyces pastorianus
gctgccgcctttacaacatttgaaa

SEQ ID NO: 165481 - DNA, 25 bp, Saccharomyces pastorianus
gaaaccggatcctttgcaaataagt

SEQ ID NO: 165482 - DNA, 25 bp, Saccharomyces pastorianus
ccgaccgcactcatttcaaagatgg

SEQ ID NO: 165483 - DNA, 25 bp, Saccharomyces pastorianus
gtaattctccaaatgtttcttctat

SEQ ID NO: 165484 - DNA, 25 bp, Saccharomyces pastorianus
tttttccggccctgaaaccagcaat

SEQ ID NO: 165485 - DNA, 25 bp, Saccharomyces pastorianus
cacaaacaatcctggtactttccct

SEQ ID NO: 165486 - DNA, 25 bp, Saccharomyces pastorianus
gggtcttcacctcttttttctgcaa

SEQ ID NO: 165487 - DNA, 25 bp, Saccharomyces pastorianus
tatcctttcggaagtgggtcttcac

SEQ ID NO: 165488 - DNA, 25 bp, Saccharomyces pastorianus
atcgaatattcctggcggacctttc

SEQ ID NO: 165489 - DNA, 25 bp, Saccharomyces pastorianus
gcaaatgcgcctaacggttctaaca

SEQ ID NO: 165490 - DNA, 25 bp, Saccharomyces pastorianus
ctatatcgatatttccagactggtc

SEQ ID NO: 165491 - DNA, 25 bp, Saccharomyces pastorianus
ttttctgcaacacagccatacattg

SEQ ID NO: 165492 - DNA, 25 bp, Saccharomyces pastorianus
actcccttgcaaccatcgaatattc

SEQ ID NO: 165493 - DNA, 25 bp, Saccharomyces pastorianus
aatgggacccaacagtgccaagccg

SEQ ID NO: 165494 - DNA, 25 bp, Saccharomyces pastorianus
gaaactgcttcattcgaattatctg

SEQ ID NO: 165495 - DNA, 25 bp, Saccharomyces pastorianus
ggaaggcttcaactaaccaatacag

SEQ ID NO: 165496 - DNA, 25 bp, Saccharomyces pastorianus
gtgtataaggccaagctaggtcata

SEQ ID NO: 165497 - DNA, 25 bp, Saccharomyces pastorianus
tgcatccaatccatcacaatacttt

SEQ ID NO: 165498 - DNA, 25 bp, Saccharomyces pastorianus
attatcgaaagttcggcaccaccac

SEQ ID NO: 165499 - DNA, 25 bp, Saccharomyces pastorianus
aagacacttttcaacctactattag

SEQ ID NO: 165500 - DNA, 25 bp, Saccharomyces pastorianus
gaatcaacatcccaggcacaaagta

SEQ ID NO: 165501 - DNA, 25 bp, Saccharomyces pastorianus
cacctcctccaatcgtgaaacgtaa

SEQ ID NO: 165502 - DNA, 25 bp, Saccharomyces pastorianus
gacaatatgtctactgatgaggcaa

SEQ ID NO: 165503 - DNA, 25 bp, Saccharomyces pastorianus
tgaaacgtaaagatggcggcccaaa

SEQ ID NO: 165504 - DNA, 25 bp, Saccharomyces pastorianus
atcacaatactttcctttggtcaac

SEQ ID NO: 165505 - DNA, 25 bp, Saccharomyces pastorianus
aacgtaccactttctaatgagccag

SEQ ID NO: 165506 - DNA, 25 bp, Saccharomyces pastorianus
gagtatatattctcgtatgacccta

SEQ ID NO: 165507 - DNA, 25 bp, Saccharomyces pastorianus
gagttcggtatattcctcaccaaaa

SEQ ID NO: 165508 - DNA, 25 bp, Saccharomyces pastorianus
ttacctcagttcctcagttcgaaaa

SEQ ID NO: 165509 - DNA, 25 bp, Saccharomyces pastorianus
aggattttcatctattttgccccag

SEQ ID NO: 165510 - DNA, 25 bp, Saccharomyces pastorianus
aagagtatcgttgcagctgttctga

SEQ ID NO: 165511 - DNA, 25 bp, Saccharomyces pastorianus
tggctagtaggctttccgagtctaa

SEQ ID NO: 165512 - DNA, 25 bp, Saccharomyces pastorianus
gaagatccactacttataccacctg

SEQ ID NO: 165513 - DNA, 25 bp, Saccharomyces pastorianus
cagccgcagctagtacattatttat

SEQ ID NO: 165514 - DNA, 25 bp, Saccharomyces pastorianus
cacctgttgtcctcgaatttttgat

SEQ ID NO: 165515 - DNA, 25 bp, Saccharomyces pastorianus
atataccatgcatctcttttacaag

SEQ ID NO: 165516 - DNA, 25 bp, Saccharomyces pastorianus
caagccgaggatttgtttacgcaga

SEQ ID NO: 165517 - DNA, 25 bp, Saccharomyces pastorianus
gaggtcgtactctgaagaaacttca

SEQ ID NO: 165518 - DNA, 25 bp, Saccharomyces pastorianus
tgatactcaagaatcggcaccgaac

SEQ ID NO: 165519 - DNA, 25 bp, Saccharomyces pastorianus
gaaagttgtacagccgcggacgaga

SEQ ID NO: 165520 - DNA, 25 bp, Saccharomyces pastorianus
ataagttaccgttgtctgccgaagc

SEQ ID NO: 165521 - DNA, 25 bp, Saccharomyces pastorianus
atttatttgctgcttctggaaacga

SEQ ID NO: 165522 - DNA, 25 bp, Saccharomyces pastorianus
gaagatatctttcacggacacgaca

SEQ ID NO: 165523 - DNA, 25 bp, Saccharomyces pastorianus
gttttgccatgggaatctgctgata

SEQ ID NO: 165524 - DNA, 25 bp, Saccharomyces pastorianus
gaagctgacattatagaacctggta

SEQ ID NO: 165525 - DNA, 25 bp, Saccharomyces pastorianus
gtttctgacggtgaagtctcatcgg

SEQ ID NO: 165526 - DNA, 25 bp, Saccharomyces pastorianus
ggaaaacagcatgcaggccagtact

SEQ ID NO: 165527 - DNA, 25 bp, Saccharomyces pastorianus
agtgctcctggcgtcgagtatgaat

SEQ ID NO: 165528 - DNA, 25 bp, Saccharomyces pastorianus
gctaagaatactcccaaacatcctg

SEQ ID NO: 165529 - DNA, 25 bp, Saccharomyces pastorianus
atcacctcagttctctatctgattg

SEQ ID NO: 165530 - DNA, 25 bp, Saccharomyces pastorianus
ggagatcactgaacaagccgatgaa

SEQ ID NO: 165531 - DNA, 25 bp, Saccharomyces pastorianus
acaatgttcttggtaaggctgacga

SEQ ID NO: 165532 - DNA, 25 bp, Saccharomyces pastorianus
cacgaaattgttgctggcctagttt

SEQ ID NO: 165533 - DNA, 25 bp, Saccharomyces pastorianus
acatctatgctaaatgcgtctgata

SEQ ID NO: 165534 - DNA, 25 bp, Saccharomyces pastorianus
atatgaccaattctgctgcatcgct

SEQ ID NO: 165535 - DNA, 25 bp, Saccharomyces pastorianus
ttctcccaccagtaaccagctaaat

SEQ ID NO: 165536 - DNA, 25 bp, Saccharomyces pastorianus
atctcttacaggaggaccatcacct

SEQ ID NO: 165537 - DNA, 25 bp, Saccharomyces pastorianus
gaatccacagtaaggccattgctag

SEQ ID NO: 165538 - DNA, 25 bp, Saccharomyces pastorianus
acagttttgctcctcgtggttacaa

SEQ ID NO: 165539 - DNA, 25 bp, Saccharomyces pastorianus
ggttcgttgtttagagctgccattc

SEQ ID NO: 165540 - DNA, 25 bp, Saccharomyces pastorianus
ctacccaacgtagcaattgtggttc

SEQ ID NO: 165541 - DNA, 25 bp, Saccharomyces pastorianus
aactccacgtatgttggcaggcatt

SEQ ID NO: 165542 - DNA, 25 bp, Saccharomyces pastorianus
acagattctgacattccgataccaa

SEQ ID NO: 165543 - DNA, 25 bp, Saccharomyces pastorianus
aatgtttcaagattccacgcttcaa

SEQ ID NO: 165544 - DNA, 25 bp, Saccharomyces pastorianus
cggtccacatgcgtttggtgttgaa

SEQ ID NO: 165545 - DNA, 25 bp, Saccharomyces pastorianus
ggcaggcattattgtttcacagttt

SEQ ID NO: 165546 - DNA, 25 bp, Saccharomyces pastorianus
aagcctactggctacctttgtggat

SEQ ID NO: 165547 - DNA, 25 bp, Saccharomyces pastorianus
aaggcatttgctttgacattgtcaa

SEQ ID NO: 165548 - DNA, 25 bp, Saccharomyces pastorianus
ttacctcagtacaaactacccaacg

SEQ ID NO: 165549 - DNA, 25 bp, Saccharomyces pastorianus
tacacgatattatcaacgctccaaa

SEQ ID NO: 165550 - DNA, 25 bp, Saccharomyces pastorianus
tgtttaaaaagtatatgccctccgt

SEQ ID NO: 165551 - DNA, 25 bp, Saccharomyces pastorianus
gctgatggcaagcaacatattttcc

SEQ ID NO: 165552 - DNA, 25 bp, Saccharomyces pastorianus
aaatcacccgcaattagcgcaagta

SEQ ID NO: 165553 - DNA, 25 bp, Saccharomyces pastorianus
gcaagccaagatcagaattttccta

SEQ ID NO: 165554 - DNA, 25 bp, Saccharomyces pastorianus
aactgagcgcattgagaacattact

SEQ ID NO: 165555 - DNA, 25 bp, Saccharomyces pastorianus
tgtcatatcacaacacagagccctg

SEQ ID NO: 165556 - DNA, 25 bp, Saccharomyces pastorianus
agagccctgattttctgccaactaa

SEQ ID NO: 165557 - DNA, 25 bp, Saccharomyces pastorianus
ggtgtactggctttggaggcactac

SEQ ID NO: 165558 - DNA, 25 bp, Saccharomyces pastorianus
atatgccctccgtaacctatatgag

SEQ ID NO: 165559 - DNA, 25 bp, Saccharomyces pastorianus
ggcactacataagcaagttctacct

SEQ ID NO: 165560 - DNA, 25 bp, Saccharomyces pastorianus
tattctagaaatccctgcaatgtca

SEQ ID NO: 165561 - DNA, 25 bp, Saccharomyces pastorianus
ttatgccactaaagccccaattaac

SEQ ID NO: 165562 - DNA, 25 bp, Saccharomyces pastorianus
atttcaaggactgtaccccggatga

SEQ ID NO: 165563 - DNA, 25 bp, Saccharomyces pastorianus
gtcaagcgttactcaaagggcaatt

SEQ ID NO: 165564 - DNA, 25 bp, Saccharomyces pastorianus
gtttccatttgagggcgagacttcc

SEQ ID NO: 165565 - DNA, 25 bp, Saccharomyces pastorianus
tgtagtagtacaactgccagacata

SEQ ID NO: 165566 - DNA, 25 bp, Saccharomyces pastorianus
acttccaagtttctagtatgcctta

SEQ ID NO: 165567 - DNA, 25 bp, Saccharomyces pastorianus
agacgactattcatgcctgatctgc

SEQ ID NO: 165568 - DNA, 25 bp, Saccharomyces pastorianus
ataccaacagactttcatccgcgaa

SEQ ID NO: 165569 - DNA, 25 bp, Saccharomyces pastorianus
taattgttcacttatcgagatccac

SEQ ID NO: 165570 - DNA, 25 bp, Saccharomyces pastorianus
gggtctatcagaaccatcataccaa

SEQ ID NO: 165571 - DNA, 25 bp, Saccharomyces pastorianus
gaagttcgtctcaattatccatgga

SEQ ID NO: 165572 - DNA, 25 bp, Saccharomyces pastorianus
gatcgaattcgtatgatggcttcag

SEQ ID NO: 165573 - DNA, 25 bp, Saccharomyces pastorianus
agggatggctcacgatcaacttcat

SEQ ID NO: 165574 - DNA, 25 bp, Saccharomyces pastorianus
gtgactcctactatccaaaggccag

SEQ ID NO: 165575 - DNA, 25 bp, Saccharomyces pastorianus
gtaacctaggtgacatcgtgactcc

SEQ ID NO: 165576 - DNA, 25 bp, Saccharomyces pastorianus
ggtcgaaacagaatcctttgcatta

SEQ ID NO: 165577 - DNA, 25 bp, Saccharomyces pastorianus
cagtagagtctcattgccatcaaaa

SEQ ID NO: 165578 - DNA, 25 bp, Saccharomyces pastorianus
atctttagagcacggaaatcgcgaa

SEQ ID NO: 165579 - DNA, 25 bp, Saccharomyces pastorianus
tcaacttcatcatcttcacgatctt

SEQ ID NO: 165580 - DNA, 25 bp, Saccharomyces pastorianus
gatttgacagtaaccgctagcatta

SEQ ID NO: 165581 - DNA, 25 bp, Saccharomyces pastorianus
atggcttcaggaccgtttttgattc

SEQ ID NO: 165582 - DNA, 25 bp, Saccharomyces pastorianus
aatttcgaaatgttaaggctgccca

SEQ ID NO: 165583 - DNA, 25 bp, Saccharomyces pastorianus
gactctcgccggcttgaaaaatttc

SEQ ID NO: 165584 - DNA, 25 bp, Saccharomyces pastorianus
gtaccatccattattgtccctaaga

SEQ ID NO: 165585 - DNA, 25 bp, Saccharomyces pastorianus
aataatacctaagcctctgcagcgc

SEQ ID NO: 165586 - DNA, 25 bp, Saccharomyces pastorianus
agatatacataagccgactctcgcc

SEQ ID NO: 165587 - DNA, 25 bp, Saccharomyces pastorianus
ggttaatccagctattcgagccaca

SEQ ID NO: 165588 - DNA, 25 bp, Saccharomyces pastorianus
gagaaatcagacgtccgatcctcct

SEQ ID NO: 165589 - DNA, 25 bp, Saccharomyces pastorianus
acaacactgggcacctcaaatataa

SEQ ID NO: 165590 - DNA, 25 bp, Saccharomyces pastorianus
atcttcacctgatgatgatcccgaa

SEQ ID NO: 165591 - DNA, 25 bp, Saccharomyces pastorianus
aaggctgcccaatgatctaaaactc

SEQ ID NO: 165592 - DNA, 25 bp, Saccharomyces pastorianus
taaattccacaatagcgccagccta

SEQ ID NO: 165593 - DNA, 25 bp, Saccharomyces pastorianus
caagttgatcaagtcatctccatga

SEQ ID NO: 165594 - DNA, 25 bp, Saccharomyces pastorianus
gagaatccctgtgtttctatgaata

SEQ ID NO: 165595 - DNA, 25 bp, Saccharomyces pastorianus
agatcttctgagtcgagttgtcccg

SEQ ID NO: 165596 - DNA, 25 bp, Saccharomyces pastorianus
aactccctcttcgaatgactttgat

SEQ ID NO: 165597 - DNA, 25 bp, Saccharomyces pastorianus
cttcaccgtcatatttcaggccaat

SEQ ID NO: 165598 - DNA, 25 bp, Saccharomyces pastorianus
gaaactctccatatcaatcaggctg

SEQ ID NO: 165599 - DNA, 25 bp, Saccharomyces pastorianus
aatcaggctgaacccatttcggaac

SEQ ID NO: 165600 - DNA, 25 bp, Saccharomyces pastorianus
aggtatacatacctaccttcaccgt

SEQ ID NO: 165601 - DNA, 25 bp, Saccharomyces pastorianus
aaaatcgacgacattcctctgcaat

SEQ ID NO: 165602 - DNA, 25 bp, Saccharomyces pastorianus
atgactttgatgtgtccacgccgac

SEQ ID NO: 165603 - DNA, 25 bp, Saccharomyces pastorianus
atcacttctcccgatcaaaagttct

SEQ ID NO: 165604 - DNA, 25 bp, Saccharomyces pastorianus
agttcccgctcgatttgattcatga

SEQ ID NO: 165605 - DNA, 25 bp, Saccharomyces pastorianus
gttagaccaatcttgaacagctttg

SEQ ID NO: 165606 - DNA, 25 bp, Saccharomyces pastorianus
tcataaatctggtggcaactgggca

SEQ ID NO: 165607 - DNA, 25 bp, Saccharomyces pastorianus
aatgggcgggcaaacatttacgctg

SEQ ID NO: 165608 - DNA, 25 bp, Saccharomyces pastorianus
aaggtaacttgccttcgccagaaga

SEQ ID NO: 165609 - DNA, 25 bp, Saccharomyces pastorianus
ggcaatgacggcactaggtctcgga

SEQ ID NO: 165610 - DNA, 25 bp, Saccharomyces pastorianus
tgtaaaccctcttctcatgtatcta

SEQ ID NO: 165611 - DNA, 25 bp, Saccharomyces pastorianus
aatgctattccaatggagccatgga

SEQ ID NO: 165612 - DNA, 25 bp, Saccharomyces pastorianus
taggtctcggaaattccctgggcgg

SEQ ID NO: 165613 - DNA, 25 bp, Saccharomyces pastorianus
atttttggagtaccttgccactcaa

SEQ ID NO: 165614 - DNA, 25 bp, Saccharomyces pastorianus
ttgccactcaacaaaccaaggatgt

SEQ ID NO: 165615 - DNA, 25 bp, Saccharomyces pastorianus
cgtcgccgtggctgatgaggtctcc

SEQ ID NO: 165616 - DNA, 25 bp, Saccharomyces pastorianus
atagtagaagcaaccagcacgtcgc

SEQ ID NO: 165617 - DNA, 25 bp, Saccharomyces pastorianus
cgccgtggctgatgaggtctcctct

SEQ ID NO: 165618 - DNA, 25 bp, Saccharomyces pastorianus
agataccatagtagaagcaaccagc

SEQ ID NO: 165619 - DNA, 25 bp, Saccharomyces pastorianus
cctcttgcccgggccgcagaaaaga

SEQ ID NO: 165620 - DNA, 25 bp, Saccharomyces pastorianus
tcgccgtggctgatgaggtctcctc

SEQ ID NO: 165621 - DNA, 25 bp, Saccharomyces pastorianus
gaagataccatagtagaagcaacca

SEQ ID NO: 165622 - DNA, 25 bp, Saccharomyces pastorianus
gtagaagcaaccagcacgtcgccgt

SEQ ID NO: 165623 - DNA, 25 bp, Saccharomyces pastorianus
agtagaagcaaccagcacgtcgccg

SEQ ID NO: 165624 - DNA, 25 bp, Saccharomyces pastorianus
tagtagaagcaaccagcacgtcgcc

SEQ ID NO: 165625 - DNA, 25 bp, Saccharomyces pastorianus
gtcgccgtggctgatgaggtctcct

SEQ ID NO: 165626 - DNA, 25 bp, Saccharomyces pastorianus
cctacgtggttcaagcattggttac

SEQ ID NO: 165627 - DNA, 25 bp, Saccharomyces pastorianus
agctcaattcagtggacgcgcatct

SEQ ID NO: 165628 - DNA, 25 bp, Saccharomyces pastorianus
aaaggtcgtttgtaatcctcatgaa

SEQ ID NO: 165629 - DNA, 25 bp, Saccharomyces pastorianus
catcatggacccaccaagcggaaaa

SEQ ID NO: 165630 - DNA, 25 bp, Saccharomyces pastorianus
ttgtcacgtatggtctatggatcct

SEQ ID NO: 165631 - DNA, 25 bp, Saccharomyces pastorianus
ttggtaaatccaactgccaccgaaa

SEQ ID NO: 165632 - DNA, 25 bp, Saccharomyces pastorianus
tttggtccacactttgtcagtttat

SEQ ID NO: 165633 - DNA, 25 bp, Saccharomyces pastorianus
ctatggatcctgtacatgtctcctg

SEQ ID NO: 165634 - DNA, 25 bp, Saccharomyces pastorianus
aatgtatcaccatttacctacgtgg

SEQ ID NO: 165635 - DNA, 25 bp, Saccharomyces pastorianus
gtcaatattgcccatacactgttca

SEQ ID NO: 165636 - DNA, 25 bp, Saccharomyces pastorianus
tgttccctcagcttctatgattaat

SEQ ID NO: 165637 - DNA, 25 bp, Saccharomyces pastorianus
gttaactctgattggcacgacttat

SEQ ID NO: 165638 - DNA, 25 bp, Saccharomyces pastorianus
aaccctctgctaccttgtttgaaca

SEQ ID NO: 165639 - DNA, 25 bp, Saccharomyces pastorianus
gacttatggcttgcttccacagaat

SEQ ID NO: 165640 - DNA, 25 bp, Saccharomyces pastorianus
ttgtgtacgattcatcaaccctctg

SEQ ID NO: 165641 - DNA, 25 bp, Saccharomyces pastorianus
attgtttttggatgagcctacctct

SEQ ID NO: 165642 - DNA, 25 bp, Saccharomyces pastorianus
actctcagtctgcttggtcaattgt

SEQ ID NO: 165643 - DNA, 25 bp, Saccharomyces pastorianus
agacagcaaagttccgttccgttag

SEQ ID NO: 165644 - DNA, 25 bp, Saccharomyces pastorianus
agagcattagctgattctggtcaat

SEQ ID NO: 165645 - DNA, 25 bp, Saccharomyces pastorianus
ttccacagaatgtgccgctgcaggg

SEQ ID NO: 165646 - DNA, 25 bp, Saccharomyces pastorianus
gtggtgtttctgaaaatccagctga

SEQ ID NO: 165647 - DNA, 25 bp, Saccharomyces pastorianus
gaatccctgagatttgcagccgagt

SEQ ID NO: 165648 - DNA, 25 bp, Saccharomyces pastorianus
ggtttatcccttacatgactattat

SEQ ID NO: 165649 - DNA, 25 bp, Saccharomyces pastorianus
atcgatttagatgacggctgcgaaa

SEQ ID NO: 165650 - DNA, 25 bp, Saccharomyces pastorianus
ggccttcttaagaaagacttcacct

SEQ ID NO: 165651 - DNA, 25 bp, Saccharomyces pastorianus
tctactggtccgttgtttttaagtg

SEQ ID NO: 165652 - DNA, 25 bp, Saccharomyces pastorianus
gggcatacctaagaacgggacagta

SEQ ID NO: 165653 - DNA, 25 bp, Saccharomyces pastorianus
aaacgatgtcatgggttctgtgcct

SEQ ID NO: 165654 - DNA, 25 bp, Saccharomyces pastorianus
gggacagtaagaatcctacaacctg

SEQ ID NO: 165655 - DNA, 25 bp, Saccharomyces pastorianus
gcctagacatcccttctttttaaag

SEQ ID NO: 165656 - DNA, 25 bp, Saccharomyces pastorianus
tcacctttaggtgtctcaaacgatg

SEQ ID NO: 165657 - DNA, 25 bp, Saccharomyces pastorianus
actagatcctttgttagctttcccg

SEQ ID NO: 165658 - DNA, 25 bp, Saccharomyces pastorianus
ctatgacaagtactggtttatccct

SEQ ID NO: 165659 - DNA, 25 bp, Saccharomyces pastorianus
ggtgcttttttgttctcacgtccac

SEQ ID NO: 165660 - DNA, 25 bp, Saccharomyces pastorianus
ttacctcgctattatcgcctttcta

SEQ ID NO: 165661 - DNA, 25 bp, Saccharomyces pastorianus
tttgctaagccatctttttcttttt

SEQ ID NO: 165662 - DNA, 25 bp, Saccharomyces pastorianus
tttcagcggtgcttttttgttctca

SEQ ID NO: 165663 - DNA, 25 bp, Saccharomyces pastorianus
ttgttctcacgtccactgccaattt

SEQ ID NO: 165664 - DNA, 25 bp, Saccharomyces pastorianus
tttttctttcttcttacctcgctat

SEQ ID NO: 165665 - DNA, 25 bp, Saccharomyces pastorianus
attatcgcctttctaaacttccttg

SEQ ID NO: 165666 - DNA, 25 bp, Saccharomyces pastorianus
ttggccaagcctttcagcggtgctt

SEQ ID NO: 165667 - DNA, 25 bp, Saccharomyces pastorianus
tttctaaacttccttggccaagcct

SEQ ID NO: 165668 - DNA, 25 bp, Saccharomyces pastorianus
ttctttcttcttacctcgctattat

SEQ ID NO: 165669 - DNA, 25 bp, Saccharomyces pastorianus
caatcttttgctaagccatcttttt

SEQ ID NO: 165670 - DNA, 25 bp, Saccharomyces pastorianus
aaatcgtactgtcggcaatcaactg

SEQ ID NO: 165671 - DNA, 25 bp, Saccharomyces pastorianus
tgtctgtatcaaatcatccgggcgg

SEQ ID NO: 165672 - DNA, 25 bp, Saccharomyces pastorianus
gtcaaaaaatcgtactgtcggcaat

SEQ ID NO: 165673 - DNA, 25 bp, Saccharomyces pastorianus
aaaaatcgtactgtcggcaatcaac

SEQ ID NO: 165674 - DNA, 25 bp, Saccharomyces pastorianus
atgcttttgagaatatgtctgtatc

SEQ ID NO: 165675 - DNA, 25 bp, Saccharomyces pastorianus
atggatgcttttgagaatatgtctg

SEQ ID NO: 165676 - DNA, 25 bp, Saccharomyces pastorianus
tcgtactgtcggcaatcaactgcct

SEQ ID NO: 165677 - DNA, 25 bp, Saccharomyces pastorianus
atttgtcaaaaaatcgtactgtcgg

SEQ ID NO: 165678 - DNA, 25 bp, Saccharomyces pastorianus
tactgtcggcaatcaactgcctttc

SEQ ID NO: 165679 - DNA, 25 bp, Saccharomyces pastorianus
gtctgtatcaaatcatccgggcggt

SEQ ID NO: 165680 - DNA, 25 bp, Saccharomyces pastorianus
gtactgtcggcaatcaactgccttt

SEQ ID NO: 165681 - DNA, 25 bp, Saccharomyces pastorianus
gatattgatcatgacctttttaggt

SEQ ID NO: 165682 - DNA, 25 bp, Saccharomyces pastorianus
gattcgtcaagccataactgattct

SEQ ID NO: 165683 - DNA, 25 bp, Saccharomyces pastorianus
gcagaatcgctaatttcattggcaa

SEQ ID NO: 165684 - DNA, 25 bp, Saccharomyces pastorianus
aatttgctgaaattcctgcagacga

SEQ ID NO: 165685 - DNA, 25 bp, Saccharomyces pastorianus
gaagaaggcggtattttctactgga

SEQ ID NO: 165686 - DNA, 25 bp, Saccharomyces pastorianus
gaacttttatagatcgccagcttac

SEQ ID NO: 165687 - DNA, 25 bp, Saccharomyces pastorianus
gatcgccagcttacaggaaattttt

SEQ ID NO: 165688 - DNA, 25 bp, Saccharomyces pastorianus
gtactggagagtagaccctggtatt

SEQ ID NO: 165689 - DNA, 25 bp, Saccharomyces pastorianus
tcctgcagacgaatgggtataccct

SEQ ID NO: 165690 - DNA, 25 bp, Saccharomyces pastorianus
taccggatggtgattctagagctgt

SEQ ID NO: 165691 - DNA, 25 bp, Saccharomyces pastorianus
tttttggaggcatccagttctggat

SEQ ID NO: 165692 - DNA, 25 bp, Saccharomyces pastorianus
tcatatcgggaaatttagatccagt

SEQ ID NO: 165693 - DNA, 25 bp, Saccharomyces pastorianus
gtcatgaatcttttcttcaggccct

SEQ ID NO: 165694 - DNA, 25 bp, Saccharomyces pastorianus
tcaacccaaattagattcatatcgg

SEQ ID NO: 165695 - DNA, 25 bp, Saccharomyces pastorianus
gtttatgaacaccaggcccggcgga

SEQ ID NO: 165696 - DNA, 25 bp, Saccharomyces pastorianus
ttcaggccctgtcaactgcagatgg

SEQ ID NO: 165697 - DNA, 25 bp, Saccharomyces pastorianus
tcaactgcagatgggctctggaccg

SEQ ID NO: 165698 - DNA, 25 bp, Saccharomyces pastorianus
tctggaccgttggagctcatgctta

SEQ ID NO: 165699 - DNA, 25 bp, Saccharomyces pastorianus
ggagctcatgcttaaaaggccaacg

SEQ ID NO: 165700 - DNA, 25 bp, Saccharomyces pastorianus
attgaccacgtttatgaacaccagg

SEQ ID NO: 165701 - DNA, 25 bp, Saccharomyces pastorianus
gcccggcggatcaacccaaattaga

SEQ ID NO: 165702 - DNA, 25 bp, Saccharomyces pastorianus
aaggccaacgcaattgaccacgttt

SEQ ID NO: 165703 - DNA, 25 bp, Saccharomyces pastorianus
ggactgggaaacaccatacctaaca

SEQ ID NO: 165704 - DNA, 25 bp, Saccharomyces pastorianus
ataccaaaatcttcgcagttagttt

SEQ ID NO: 165705 - DNA, 25 bp, Saccharomyces pastorianus
taagcgcacaacagatcgagtcaat

SEQ ID NO: 165706 - DNA, 25 bp, Saccharomyces pastorianus
atcttacatgatggaccgccctatg

SEQ ID NO: 165707 - DNA, 25 bp, Saccharomyces pastorianus
gtacattttttataagcctggctgg

SEQ ID NO: 165708 - DNA, 25 bp, Saccharomyces pastorianus
aggagcagctatgtgatttcttcga

SEQ ID NO: 165709 - DNA, 25 bp, Saccharomyces pastorianus
ttgcccaagaccaaattccctaata

SEQ ID NO: 165710 - DNA, 25 bp, Saccharomyces pastorianus
tccatctcggtcatgctctaaataa

SEQ ID NO: 165711 - DNA, 25 bp, Saccharomyces pastorianus
gggaaactttccaacattttgccat

SEQ ID NO: 165712 - DNA, 25 bp, Saccharomyces pastorianus
ggactacccatcgagattaaagctt

SEQ ID NO: 165713 - DNA, 25 bp, Saccharomyces pastorianus
gcctggctgggattgtcatggacta

SEQ ID NO: 165714 - DNA, 25 bp, Saccharomyces pastorianus
tgttcatcattcaagggtcattttt

SEQ ID NO: 165715 - DNA, 25 bp, Saccharomyces pastorianus
ttgtcgttttgttcatcattcaagg

SEQ ID NO: 165716 - DNA, 25 bp, Saccharomyces pastorianus
tggtttgtcgttttgttcatcattc

SEQ ID NO: 165717 - DNA, 25 bp, Saccharomyces pastorianus
gtcgttttgttcatcattcaagggt

SEQ ID NO: 165718 - DNA, 25 bp, Saccharomyces pastorianus
ggtttgtcgttttgttcatcattca

SEQ ID NO: 165719 - DNA, 25 bp, Saccharomyces pastorianus
ttcatcattcaagggtcatttttat

SEQ ID NO: 165720 - DNA, 25 bp, Saccharomyces pastorianus
cgttttgttcatcattcaagggtca

SEQ ID NO: 165721 - DNA, 25 bp, Saccharomyces pastorianus
tttgttcatcattcaagggtcattt

SEQ ID NO: 165722 - DNA, 25 bp, Saccharomyces pastorianus
gtttgtcgttttgttcatcattcaa

SEQ ID NO: 165723 - DNA, 25 bp, Saccharomyces pastorianus
gttcatcattcaagggtcattttta

SEQ ID NO: 165724 - DNA, 25 bp, Saccharomyces pastorianus
gttttgttcatcattcaagggtcat

SEQ ID NO: 165725 - DNA, 25 bp, Saccharomyces pastorianus
ataatgtgtatttacaggattcatc

SEQ ID NO: 165726 - DNA, 25 bp, Saccharomyces pastorianus
attgcgactgtttgtgtccatcaag

SEQ ID NO: 165727 - DNA, 25 bp, Saccharomyces pastorianus
gattgtgaaaagacctaaattccta

SEQ ID NO: 165728 - DNA, 25 bp, Saccharomyces pastorianus
cgagccgcatagcatcgatctattt

SEQ ID NO: 165729 - DNA, 25 bp, Saccharomyces pastorianus
taattttaacaagtccgaaagcaat

SEQ ID NO: 165730 - DNA, 25 bp, Saccharomyces pastorianus
gcatattaccacagcgagccgcata

SEQ ID NO: 165731 - DNA, 25 bp, Saccharomyces pastorianus
gaaagcatattaccacagcgagccg

SEQ ID NO: 165732 - DNA, 25 bp, Saccharomyces pastorianus
gcatcgatctatttcatgataagga

SEQ ID NO: 165733 - DNA, 25 bp, Saccharomyces pastorianus
caagtccgaaagcaataatgtgtat

SEQ ID NO: 165734 - DNA, 25 bp, Saccharomyces pastorianus
actccgaccattgcgactgtttgtg

SEQ ID NO: 165735 - DNA, 25 bp, Saccharomyces pastorianus
gtttgtgtccatcaagaaagcatat

SEQ ID NO: 165736 - DNA, 25 bp, Saccharomyces pastorianus
tacccctaatacagtggcgtttaat

SEQ ID NO: 165737 - DNA, 25 bp, Saccharomyces pastorianus
aaatctacccctaatacagtggcgt

SEQ ID NO: 165738 - DNA, 25 bp, Saccharomyces pastorianus
tcgtttttctataccaatttatcag

SEQ ID NO: 165739 - DNA, 25 bp, Saccharomyces pastorianus
gacactggcttaaaaaagtctataa

SEQ ID NO: 165740 - DNA, 25 bp, Saccharomyces pastorianus
agtacaaaaagctttggcatctaga

SEQ ID NO: 165741 - DNA, 25 bp, Saccharomyces pastorianus
gaacaacaagaacagactacagaca

SEQ ID NO: 165742 - DNA, 25 bp, Saccharomyces pastorianus
ggccaagaagaaacttgttcctgaa

SEQ ID NO: 165743 - DNA, 25 bp, Saccharomyces pastorianus
taacagtacgtgattttaagacctt

SEQ ID NO: 165744 - DNA, 25 bp, Saccharomyces pastorianus
gattttaagaccttggcaccacgaa

SEQ ID NO: 165745 - DNA, 25 bp, Saccharomyces pastorianus
gaccttggcaccacgaagatggcta

SEQ ID NO: 165746 - DNA, 25 bp, Saccharomyces pastorianus
gaagatggctaaatgacactatcat

SEQ ID NO: 165747 - DNA, 25 bp, Saccharomyces pastorianus
tctgaaatgcttagagttccctccc

SEQ ID NO: 165748 - DNA, 25 bp, Saccharomyces pastorianus
aaaacacgtgcagcgatcctacgat

SEQ ID NO: 165749 - DNA, 25 bp, Saccharomyces pastorianus
acacgttgaactggtattccttaca

SEQ ID NO: 165750 - DNA, 25 bp, Saccharomyces pastorianus
aagacggctatctttctcgtaacac

SEQ ID NO: 165751 - DNA, 25 bp, Saccharomyces pastorianus
gcgatcctacgataactccgtttga

SEQ ID NO: 165752 - DNA, 25 bp, Saccharomyces pastorianus
ttccgtttccgatttcgctcagaat

SEQ ID NO: 165753 - DNA, 25 bp, Saccharomyces pastorianus
acaaaccctccctcaggaatattga

SEQ ID NO: 165754 - DNA, 25 bp, Saccharomyces pastorianus
gaatgtaagctctactaccagcctg

SEQ ID NO: 165755 - DNA, 25 bp, Saccharomyces pastorianus
cagtttgtcggccttctattagaag

SEQ ID NO: 165756 - DNA, 25 bp, Saccharomyces pastorianus
ggctcgtcccagtatatttcagaat

SEQ ID NO: 165757 - DNA, 25 bp, Saccharomyces pastorianus
agatattaccgatccaatcccctta

SEQ ID NO: 165758 - DNA, 25 bp, Saccharomyces pastorianus
ggtggatgtcatgaccgatctctat

SEQ ID NO: 165759 - DNA, 25 bp, Saccharomyces pastorianus
gatcaggacgatacaattgctttac

SEQ ID NO: 165760 - DNA, 25 bp, Saccharomyces pastorianus
tctactacgcatatctattctccaa

SEQ ID NO: 165761 - DNA, 25 bp, Saccharomyces pastorianus
aggtcagttctatcgctcaggcaag

SEQ ID NO: 165762 - DNA, 25 bp, Saccharomyces pastorianus
gaccgatctctatgcaaaattcttg

SEQ ID NO: 165763 - DNA, 25 bp, Saccharomyces pastorianus
ctggctctggaaaatctaggtattg

SEQ ID NO: 165764 - DNA, 25 bp, Saccharomyces pastorianus
atgacttctattttgctctactacg

SEQ ID NO: 165765 - DNA, 25 bp, Saccharomyces pastorianus
gatgtctatgatgaaaactccgaat

SEQ ID NO: 165766 - DNA, 25 bp, Saccharomyces pastorianus
gtattgttaagcctacgaacgttct

SEQ ID NO: 165767 - DNA, 25 bp, Saccharomyces pastorianus
gtttgttagcatcagaggtcagttc

SEQ ID NO: 165768 - DNA, 25 bp, Saccharomyces pastorianus
gcctacgaacgttctggatgtctat

SEQ ID NO: 165769 - DNA, 25 bp, Saccharomyces pastorianus
tcttctgctctgtgtcgacaagtta

SEQ ID NO: 165770 - DNA, 25 bp, Saccharomyces pastorianus
accactagacggttcttcaactgac

SEQ ID NO: 165771 - DNA, 25 bp, Saccharomyces pastorianus
aggatgaaactgaacgtctcttgcg

SEQ ID NO: 165772 - DNA, 25 bp, Saccharomyces pastorianus
gactacaggctttaaaattcaccaa

SEQ ID NO: 165773 - DNA, 25 bp, Saccharomyces pastorianus
ggaacaggacttggttcttctgctc

SEQ ID NO: 165774 - DNA, 25 bp, Saccharomyces pastorianus
tttggaggccttgggtactttgaag

SEQ ID NO: 165775 - DNA, 25 bp, Saccharomyces pastorianus
cctggcctgcgcttttgaaatataa

SEQ ID NO: 165776 - DNA, 25 bp, Saccharomyces pastorianus
tgaacgtctcttgcgtttggaggcc

SEQ ID NO: 165777 - DNA, 25 bp, Saccharomyces pastorianus
aatcgctgggcagaaatccaccaag

SEQ ID NO: 165778 - DNA, 25 bp, Saccharomyces pastorianus
gaaatacgccgaccaggatgaaact

SEQ ID NO: 165779 - DNA, 25 bp, Saccharomyces pastorianus
gaacggtggtaactcttcgaagaag

SEQ ID NO: 165780 - DNA, 25 bp, Saccharomyces pastorianus
gaaggctaccgattgagtaatatat

SEQ ID NO: 165781 - DNA, 25 bp, Saccharomyces pastorianus
tagtgccctagatttactgctgttg

SEQ ID NO: 165782 - DNA, 25 bp, Saccharomyces pastorianus
gatttggaaggctaccgattgagta

SEQ ID NO: 165783 - DNA, 25 bp, Saccharomyces pastorianus
aacgttgttgtcgattgtggcttaa

SEQ ID NO: 165784 - DNA, 25 bp, Saccharomyces pastorianus
accagattctaaactcaacgttgtt

SEQ ID NO: 165785 - DNA, 25 bp, Saccharomyces pastorianus
actgctgttggctagagagctgaaa

SEQ ID NO: 165786 - DNA, 25 bp, Saccharomyces pastorianus
tatatataacattgccgattcctca

SEQ ID NO: 165787 - DNA, 25 bp, Saccharomyces pastorianus
ttgccgattcctcaaaacaattttt

SEQ ID NO: 165788 - DNA, 25 bp, Saccharomyces pastorianus
gccctagatttactgctgttggcta

SEQ ID NO: 165789 - DNA, 25 bp, Saccharomyces pastorianus
gaattagtgccctagatttactgct

SEQ ID NO: 165790 - DNA, 25 bp, Saccharomyces pastorianus
ctgaaacaggatttggaaggctacc

SEQ ID NO: 165791 - DNA, 25 bp, Saccharomyces pastorianus
aaatttacaaccaatcgctgcccaa

SEQ ID NO: 165792 - DNA, 25 bp, Saccharomyces pastorianus
ggaagccttatatgaatacgctata

SEQ ID NO: 165793 - DNA, 25 bp, Saccharomyces pastorianus
atcgctgcccaaacttccagaaaat

SEQ ID NO: 165794 - DNA, 25 bp, Saccharomyces pastorianus
atcgataaaccgtcaattttgtcat

SEQ ID NO: 165795 - DNA, 25 bp, Saccharomyces pastorianus
ggatttccaatcatacctcaatgca

SEQ ID NO: 165796 - DNA, 25 bp, Saccharomyces pastorianus
atacttggacaatttctgaacgtgc

SEQ ID NO: 165797 - DNA, 25 bp, Saccharomyces pastorianus
gaatagttttgatttagcttgcgta

SEQ ID NO: 165798 - DNA, 25 bp, Saccharomyces pastorianus
aacgtgctgttggattagcgtggta

SEQ ID NO: 165799 - DNA, 25 bp, Saccharomyces pastorianus
atggtaatttccctattagtctgga

SEQ ID NO: 165800 - DNA, 25 bp, Saccharomyces pastorianus
agcttgcgtattatctatagcggca

SEQ ID NO: 165801 - DNA, 25 bp, Saccharomyces pastorianus
gaagcgccaatttacaacggcacgt

SEQ ID NO: 165802 - DNA, 25 bp, Saccharomyces pastorianus
ttttcaatgacactttctgcttcct

SEQ ID NO: 165803 - DNA, 25 bp, Saccharomyces pastorianus
atattatcgcgccttacttagagaa

SEQ ID NO: 165804 - DNA, 25 bp, Saccharomyces pastorianus
gacggtgagcttcaattctttagca

SEQ ID NO: 165805 - DNA, 25 bp, Saccharomyces pastorianus
gtggttttaacttgtcccggatatg

SEQ ID NO: 165806 - DNA, 25 bp, Saccharomyces pastorianus
atacacggaatatctctctctccag

SEQ ID NO: 165807 - DNA, 25 bp, Saccharomyces pastorianus
ggctcaaaagactgggtcactcata

SEQ ID NO: 165808 - DNA, 25 bp, Saccharomyces pastorianus
gacgaacttcatgtgacggctgata

SEQ ID NO: 165809 - DNA, 25 bp, Saccharomyces pastorianus
aagacgttcttgtagcggcgctttc

SEQ ID NO: 165810 - DNA, 25 bp, Saccharomyces pastorianus
gaaacaactcttgtcatacacggaa

SEQ ID NO: 165811 - DNA, 25 bp, Saccharomyces pastorianus
tctcatcaacccgtttctagaatga

SEQ ID NO: 165812 - DNA, 25 bp, Saccharomyces pastorianus
tagcttgaaaacaggatctctcgaa

SEQ ID NO: 165813 - DNA, 25 bp, Saccharomyces pastorianus
gcaatctgtcgaactaagggaccaa

SEQ ID NO: 165814 - DNA, 25 bp, Saccharomyces pastorianus
atagcgagcttcaagcttcacctga

SEQ ID NO: 165815 - DNA, 25 bp, Saccharomyces pastorianus
gaaacagtttggactggcagccttt

SEQ ID NO: 165816 - DNA, 25 bp, Saccharomyces pastorianus
gactggcagcctttgacgagttgaa

SEQ ID NO: 165817 - DNA, 25 bp, Saccharomyces pastorianus
ttgccaagaaacacaatagcgagct

SEQ ID NO: 165818 - DNA, 25 bp, Saccharomyces pastorianus
aatggtattccaagaacgactggta

SEQ ID NO: 165819 - DNA, 25 bp, Saccharomyces pastorianus
tccgctcaaaattcatgcatatgtg

SEQ ID NO: 165820 - DNA, 25 bp, Saccharomyces pastorianus
ggattgatcccctatctttatttga

SEQ ID NO: 165821 - DNA, 25 bp, Saccharomyces pastorianus
gaacgactggtagaatttgccaaga

SEQ ID NO: 165822 - DNA, 25 bp, Saccharomyces pastorianus
gtgctcatctattgggattgatccc

SEQ ID NO: 165823 - DNA, 25 bp, Saccharomyces pastorianus
cttcacctgaattccgctcaaaatt

SEQ ID NO: 165824 - DNA, 25 bp, Saccharomyces pastorianus
gcatattatattatcatccatcttc

SEQ ID NO: 165825 - DNA, 25 bp, Saccharomyces pastorianus
ctcaactacgcattttcctttgcat

SEQ ID NO: 165826 - DNA, 25 bp, Saccharomyces pastorianus
agtacctcaactacgcattttcctt

SEQ ID NO: 165827 - DNA, 25 bp, Saccharomyces pastorianus
gtacctcaactacgcattttccttt

SEQ ID NO: 165828 - DNA, 25 bp, Saccharomyces pastorianus
ttatattatcatccatcttctttgc

SEQ ID NO: 165829 - DNA, 25 bp, Saccharomyces pastorianus
caactacgcattttcctttgcatat

SEQ ID NO: 165830 - DNA, 25 bp, Saccharomyces pastorianus
atggaactttcccagtacctcaact

SEQ ID NO: 165831 - DNA, 25 bp, Saccharomyces pastorianus
gaactttcccagtacctcaactacg

SEQ ID NO: 165832 - DNA, 25 bp, Saccharomyces pastorianus
ttcccagtacctcaactacgcattt

SEQ ID NO: 165833 - DNA, 25 bp, Saccharomyces pastorianus
acgcattttcctttgcatattatat

SEQ ID NO: 165834 - DNA, 25 bp, Saccharomyces pastorianus
actacgcattttcctttgcatatta

SEQ ID NO: 165835 - DNA, 25 bp, Saccharomyces pastorianus
ttggttacagtctagaagattacct

SEQ ID NO: 165836 - DNA, 25 bp, Saccharomyces pastorianus
tacctagaggacataaaattaaacg

SEQ ID NO: 165837 - DNA, 25 bp, Saccharomyces pastorianus
gttgacgttttacagcaaatgactt

SEQ ID NO: 165838 - DNA, 25 bp, Saccharomyces pastorianus
agtagtgacgacttattgaattggt

SEQ ID NO: 165839 - DNA, 25 bp, Saccharomyces pastorianus
acgtaaagctgttgacgttttacag

SEQ ID NO: 165840 - DNA, 25 bp, Saccharomyces pastorianus
atagatgatgaattactgaacagta

SEQ ID NO: 165841 - DNA, 25 bp, Saccharomyces pastorianus
aaagtggagctggaaggtagcaaaa

SEQ ID NO: 165842 - DNA, 25 bp, Saccharomyces pastorianus
gtctagaagattacctagaggacat

SEQ ID NO: 165843 - DNA, 25 bp, Saccharomyces pastorianus
gaaactaacaaaagtggagctggaa

SEQ ID NO: 165844 - DNA, 25 bp, Saccharomyces pastorianus
cttattgaattggttacagtctaga

SEQ ID NO: 165845 - DNA, 25 bp, Saccharomyces pastorianus
gacgttttacagcaaatgactttga

SEQ ID NO: 165846 - DNA, 25 bp, Saccharomyces pastorianus
atttgtaggcccattgataccaaca

SEQ ID NO: 165847 - DNA, 25 bp, Saccharomyces pastorianus
gcacaagttccgcacaaatatataa

SEQ ID NO: 165848 - DNA, 25 bp, Saccharomyces pastorianus
cggaacctattctatggactttact

SEQ ID NO: 165849 - DNA, 25 bp, Saccharomyces pastorianus
aacagtgatttggatggcctaccct

SEQ ID NO: 165850 - DNA, 25 bp, Saccharomyces pastorianus
atggcctaccctgcgccaagagaaa

SEQ ID NO: 165851 - DNA, 25 bp, Saccharomyces pastorianus
gaaaacagacgatgagctccaatct

SEQ ID NO: 165852 - DNA, 25 bp, Saccharomyces pastorianus
tttgccaccaaacgatcccttttct

SEQ ID NO: 165853 - DNA, 25 bp, Saccharomyces pastorianus
ctatggactttactttgccaccaaa

SEQ ID NO: 165854 - DNA, 25 bp, Saccharomyces pastorianus
acgattctgacgttgaatgggttaa

SEQ ID NO: 165855 - DNA, 25 bp, Saccharomyces pastorianus
tagacctccgtttatcggaacctat

SEQ ID NO: 165856 - DNA, 25 bp, Saccharomyces pastorianus
gagctccaatctttacttgcacaag

SEQ ID NO: 165857 - DNA, 25 bp, Saccharomyces pastorianus
cacctgccgctacaaaatctgttag

SEQ ID NO: 165858 - DNA, 25 bp, Saccharomyces pastorianus
ttggcgagaagacagctctgccttt

SEQ ID NO: 165859 - DNA, 25 bp, Saccharomyces pastorianus
aacggtgacatcaacttctactgca

SEQ ID NO: 165860 - DNA, 25 bp, Saccharomyces pastorianus
aggcttggcccagcagatttgttat

SEQ ID NO: 165861 - DNA, 25 bp, Saccharomyces pastorianus
gttttcattaatcatcgagcttatc

SEQ ID NO: 165862 - DNA, 25 bp, Saccharomyces pastorianus
acaacatttgaacctctagacctat

SEQ ID NO: 165863 - DNA, 25 bp, Saccharomyces pastorianus
ggccaatatgatatcctgtgggcta

SEQ ID NO: 165864 - DNA, 25 bp, Saccharomyces pastorianus
ctgtaggtgaaaatccggccaatat

SEQ ID NO: 165865 - DNA, 25 bp, Saccharomyces pastorianus
aaatacgtcgagctaccttcgaatt

SEQ ID NO: 165866 - DNA, 25 bp, Saccharomyces pastorianus
atggtttcatgtttttctgtaggtg

SEQ ID NO: 165867 - DNA, 25 bp, Saccharomyces pastorianus
aaaggcgcttcaaatgagttcacaa

SEQ ID NO: 165868 - DNA, 25 bp, Saccharomyces pastorianus
gtcattcaatatgtactcacggtgt

SEQ ID NO: 165869 - DNA, 25 bp, Saccharomyces pastorianus
tactcacggtgtacttttaggtgtt

SEQ ID NO: 165870 - DNA, 25 bp, Saccharomyces pastorianus
attaggctttttgagctcccctgaa

SEQ ID NO: 165871 - DNA, 25 bp, Saccharomyces pastorianus
gtctccattatctttacttttgcgt

SEQ ID NO: 165872 - DNA, 25 bp, Saccharomyces pastorianus
gagctcccctgaattagccagagat

SEQ ID NO: 165873 - DNA, 25 bp, Saccharomyces pastorianus
ggccgcaactttattgttggacgaa

SEQ ID NO: 165874 - DNA, 25 bp, Saccharomyces pastorianus
gacatcttgtctccattatctttac

SEQ ID NO: 165875 - DNA, 25 bp, Saccharomyces pastorianus
caacgatttgcatcatcccaacaaa

SEQ ID NO: 165876 - DNA, 25 bp, Saccharomyces pastorianus
gtgtcacttgcactaacctcattag

SEQ ID NO: 165877 - DNA, 25 bp, Saccharomyces pastorianus
atactttcaagttggtgagctctta

SEQ ID NO: 165878 - DNA, 25 bp, Saccharomyces pastorianus
gatttattgacactcttaacgaaca

SEQ ID NO: 165879 - DNA, 25 bp, Saccharomyces pastorianus
cgacagacgactattctcacttgtt

SEQ ID NO: 165880 - DNA, 25 bp, Saccharomyces pastorianus
gcagacaacagccactatcataaat

SEQ ID NO: 165881 - DNA, 25 bp, Saccharomyces pastorianus
gagctgcttattaataggtctttta

SEQ ID NO: 165882 - DNA, 25 bp, Saccharomyces pastorianus
tgaatatagcactgcacctacccag

SEQ ID NO: 165883 - DNA, 25 bp, Saccharomyces pastorianus
gctgttgattctactaccttatggt

SEQ ID NO: 165884 - DNA, 25 bp, Saccharomyces pastorianus
aatggaagattcctcccgatcagct

SEQ ID NO: 165885 - DNA, 25 bp, Saccharomyces pastorianus
ttccaacgacttgacagagactctg

SEQ ID NO: 165886 - DNA, 25 bp, Saccharomyces pastorianus
gaatgttgattttttcgtttccctg

SEQ ID NO: 165887 - DNA, 25 bp, Saccharomyces pastorianus
tagtaaaccgacaccaacaaatctt

SEQ ID NO: 165888 - DNA, 25 bp, Saccharomyces pastorianus
ggattctaatcccatgaactcccct

SEQ ID NO: 165889 - DNA, 25 bp, Saccharomyces pastorianus
gtcatatatctcaataccaaggtag

SEQ ID NO: 165890 - DNA, 25 bp, Saccharomyces pastorianus
caaacattttgcagccaacgtcttc

SEQ ID NO: 165891 - DNA, 25 bp, Saccharomyces pastorianus
gctattcagtgccatagggctattt

SEQ ID NO: 165892 - DNA, 25 bp, Saccharomyces pastorianus
gaatgacaaccattttggcctaccc

SEQ ID NO: 165893 - DNA, 25 bp, Saccharomyces pastorianus
ggattttctgtctcctcaaacatgg

SEQ ID NO: 165894 - DNA, 25 bp, Saccharomyces pastorianus
gcaaagccagctttcaagttcaata

SEQ ID NO: 165895 - DNA, 25 bp, Saccharomyces pastorianus
ttggcctacccgtacaggatatact

SEQ ID NO: 165896 - DNA, 25 bp, Saccharomyces pastorianus
atgaccctgaattgatatccagcaa

SEQ ID NO: 165897 - DNA, 25 bp, Saccharomyces pastorianus
ggacaattcttctgtaaagggtcaa

SEQ ID NO: 165898 - DNA, 25 bp, Saccharomyces pastorianus
gaagcacccttctctgcttaaaatg

SEQ ID NO: 165899 - DNA, 25 bp, Saccharomyces pastorianus
gaatcaatacgttcgaagcaccctt

SEQ ID NO: 165900 - DNA, 25 bp, Saccharomyces pastorianus
atattgcctggattttctgtctcct

SEQ ID NO: 165901 - DNA, 25 bp, Saccharomyces pastorianus
aaacagtctttcggagactcagcaa

SEQ ID NO: 165902 - DNA, 25 bp, Saccharomyces pastorianus
actaatcccttagaactagcgctcg

SEQ ID NO: 165903 - DNA, 25 bp, Saccharomyces pastorianus
aatcccttagaactagcgctcgcat

SEQ ID NO: 165904 - DNA, 25 bp, Saccharomyces pastorianus
agcgctcgcatttttggatgataca

SEQ ID NO: 165905 - DNA, 25 bp, Saccharomyces pastorianus
ggaccatcttcagaatgacttaaac

SEQ ID NO: 165906 - DNA, 25 bp, Saccharomyces pastorianus
gttccctggaccatcttcagaatga

SEQ ID NO: 165907 - DNA, 25 bp, Saccharomyces pastorianus
gaatagttccctggaccatcttcag

SEQ ID NO: 165908 - DNA, 25 bp, Saccharomyces pastorianus
tactgtcggataacactaatccctt

SEQ ID NO: 165909 - DNA, 25 bp, Saccharomyces pastorianus
aaacaggataaatcttcaatggaat

SEQ ID NO: 165910 - DNA, 25 bp, Saccharomyces pastorianus
tcaatggaatagaatactgtcggat

SEQ ID NO: 165911 - DNA, 25 bp, Saccharomyces pastorianus
actagcgctcgcatttttggatgat

SEQ ID NO: 165912 - DNA, 25 bp, Saccharomyces pastorianus
ggtctttccataaacagtctttcgg

SEQ ID NO: 165913 - DNA, 25 bp, Saccharomyces pastorianus
agcgctcgcatttttggatgataca

SEQ ID NO: 165914 - DNA, 25 bp, Saccharomyces pastorianus
ggaccatcttcagaatgacttaaac

SEQ ID NO: 165915 - DNA, 25 bp, Saccharomyces pastorianus
gaagacgtggtctttccataaacag

SEQ ID NO: 165916 - DNA, 25 bp, Saccharomyces pastorianus
gttccctggaccatcttcagaatga

SEQ ID NO: 165917 - DNA, 25 bp, Saccharomyces pastorianus
taatcccttagaactagcgctcgca

SEQ ID NO: 165918 - DNA, 25 bp, Saccharomyces pastorianus
gaatagttccctggaccatcttcag

SEQ ID NO: 165919 - DNA, 25 bp, Saccharomyces pastorianus
actgtcggataacactaatccctta

SEQ ID NO: 165920 - DNA, 25 bp, Saccharomyces pastorianus
tcaatggaatagaatactgtcggat

SEQ ID NO: 165921 - DNA, 25 bp, Saccharomyces pastorianus
tttcggagactcagcaatctgctat

SEQ ID NO: 165922 - DNA, 25 bp, Saccharomyces pastorianus
actagcgctcgcatttttggatgat

SEQ ID NO: 165923 - DNA, 25 bp, Saccharomyces pastorianus
taattctacccttggtacaccaact

SEQ ID NO: 165924 - DNA, 25 bp, Saccharomyces pastorianus
aaaccattatctttgcctcaaccaa

SEQ ID NO: 165925 - DNA, 25 bp, Saccharomyces pastorianus
gagcaacaactaaatttcccaccgg

SEQ ID NO: 165926 - DNA, 25 bp, Saccharomyces pastorianus
agattctctagatgccgattcgcca

SEQ ID NO: 165927 - DNA, 25 bp, Saccharomyces pastorianus
aacttctttatctagcattcgctca

SEQ ID NO: 165928 - DNA, 25 bp, Saccharomyces pastorianus
gattcgccatgtctatacaccaaac

SEQ ID NO: 165929 - DNA, 25 bp, Saccharomyces pastorianus
gaatgcagcttttcaaaatccctta

SEQ ID NO: 165930 - DNA, 25 bp, Saccharomyces pastorianus
tcgcaatctatatcttctacgccaa

SEQ ID NO: 165931 - DNA, 25 bp, Saccharomyces pastorianus
ttctatatcagacagggcgacgact

SEQ ID NO: 165932 - DNA, 25 bp, Saccharomyces pastorianus
aggtgtagaatcagcctcgcaatct

SEQ ID NO: 165933 - DNA, 25 bp, Saccharomyces pastorianus
acctgtgtcaactgatacgccattg

SEQ ID NO: 165934 - DNA, 25 bp, Saccharomyces pastorianus
aaaacggctctatgtgcccgaacgg

SEQ ID NO: 165935 - DNA, 25 bp, Saccharomyces pastorianus
ggcataagactacggtcatccccat

SEQ ID NO: 165936 - DNA, 25 bp, Saccharomyces pastorianus
agtcggcggctctactgccaagaaa

SEQ ID NO: 165937 - DNA, 25 bp, Saccharomyces pastorianus
cggtatcttcgctatattcttttta

SEQ ID NO: 165938 - DNA, 25 bp, Saccharomyces pastorianus
gagttacacgacatatcgccatctt

SEQ ID NO: 165939 - DNA, 25 bp, Saccharomyces pastorianus
ggaaacctacacaattgctcgtatt

SEQ ID NO: 165940 - DNA, 25 bp, Saccharomyces pastorianus
gagacttcagtacaaggcctgcgtt

SEQ ID NO: 165941 - DNA, 25 bp, Saccharomyces pastorianus
tttgggtatcttcatcggtatcttc

SEQ ID NO: 165942 - DNA, 25 bp, Saccharomyces pastorianus
gtccagccttgccaacagggagttc

SEQ ID NO: 165943 - DNA, 25 bp, Saccharomyces pastorianus
tgctcgtatttcttcgaagtccgca

SEQ ID NO: 165944 - DNA, 25 bp, Saccharomyces pastorianus
gacgggtctcgctggagtaaatttt

SEQ ID NO: 165945 - DNA, 25 bp, Saccharomyces pastorianus
catgccaaacatgccgggtatgcca

SEQ ID NO: 165946 - DNA, 25 bp, Saccharomyces pastorianus
gtagctaaaggttcaggtacttctg

SEQ ID NO: 165947 - DNA, 25 bp, Saccharomyces pastorianus
caggtacttctgtgttcgaggtaga

SEQ ID NO: 165948 - DNA, 25 bp, Saccharomyces pastorianus
cgggtatgccaaacatgcctggtat

SEQ ID NO: 165949 - DNA, 25 bp, Saccharomyces pastorianus
agctgaagcaaaatccaggtctaat

SEQ ID NO: 165950 - DNA, 25 bp, Saccharomyces pastorianus
gaatgttcattgaagagcctacaag

SEQ ID NO: 165951 - DNA, 25 bp, Saccharomyces pastorianus
aaacatgcctggtatgcccaatatg

SEQ ID NO: 165952 - DNA, 25 bp, Saccharomyces pastorianus
ggtatgccaaaagtgactccacaaa

SEQ ID NO: 165953 - DNA, 25 bp, Saccharomyces pastorianus
tgctaggatgcctggcatgccaaac

SEQ ID NO: 165954 - DNA, 25 bp, Saccharomyces pastorianus
caagaatggttcgtgtagctaaagg

SEQ ID NO: 165955 - DNA, 25 bp, Saccharomyces pastorianus
aagaatggcacaaaccgcaacccag

SEQ ID NO: 165956 - DNA, 25 bp, Saccharomyces pastorianus
gtcattcatatctaaactgttgggt

SEQ ID NO: 165957 - DNA, 25 bp, Saccharomyces pastorianus
aaccaagatggacggccacgctaga

SEQ ID NO: 165958 - DNA, 25 bp, Saccharomyces pastorianus
tggttttagatgcttccattggtca

SEQ ID NO: 165959 - DNA, 25 bp, Saccharomyces pastorianus
aatttcggccgttgcagccacaaac

SEQ ID NO: 165960 - DNA, 25 bp, Saccharomyces pastorianus
aaggctttcaaagaatcgtccgatt

SEQ ID NO: 165961 - DNA, 25 bp, Saccharomyces pastorianus
aggtgagcacattcatgatttggaa

SEQ ID NO: 165962 - DNA, 25 bp, Saccharomyces pastorianus
gtattggtgatatagagagtctctt

SEQ ID NO: 165963 - DNA, 25 bp, Saccharomyces pastorianus
ttccattggtcaagctgcagagcaa

SEQ ID NO: 165964 - DNA, 25 bp, Saccharomyces pastorianus
gttctcgcctaagtcattcatatct

SEQ ID NO: 165965 - DNA, 25 bp, Saccharomyces pastorianus
tatctttattggtacaggtgagcac

SEQ ID NO: 165966 - DNA, 25 bp, Saccharomyces pastorianus
ttggaaaagttctcgcctaagtcat

SEQ ID NO: 165967 - DNA, 25 bp, Saccharomyces pastorianus
tcacgctcaggagaaactcgcgctg

SEQ ID NO: 165968 - DNA, 25 bp, Saccharomyces pastorianus
aaattgatctgcgacgaggaccgtg

SEQ ID NO: 165969 - DNA, 25 bp, Saccharomyces pastorianus
gataaatccgtcacaggcgttgcct

SEQ ID NO: 165970 - DNA, 25 bp, Saccharomyces pastorianus
actcgcgctggtaaaatcaactttg

SEQ ID NO: 165971 - DNA, 25 bp, Saccharomyces pastorianus
gcgattcctgggtacaactagtcaa

SEQ ID NO: 165972 - DNA, 25 bp, Saccharomyces pastorianus
tttgatcgtgcagactacattgagt

SEQ ID NO: 165973 - DNA, 25 bp, Saccharomyces pastorianus
ctacatgataatccttctggtgcaa

SEQ ID NO: 165974 - DNA, 25 bp, Saccharomyces pastorianus
tagatttgaatcttgtcgacgacat

SEQ ID NO: 165975 - DNA, 25 bp, Saccharomyces pastorianus
ggtggacaaaccagtaggctcctct

SEQ ID NO: 165976 - DNA, 25 bp, Saccharomyces pastorianus
gtaggttacacacctttgatgtgga

SEQ ID NO: 165977 - DNA, 25 bp, Saccharomyces pastorianus
aggcgttgccttgattcattatatc

SEQ ID NO: 165978 - DNA, 25 bp, Saccharomyces pastorianus
aactcgggtacctcagattttactg

SEQ ID NO: 165979 - DNA, 25 bp, Saccharomyces pastorianus
gaaattcacgatgtcaacttcaaac

SEQ ID NO: 165980 - DNA, 25 bp, Saccharomyces pastorianus
ggactaactcgggtacctcagattt

SEQ ID NO: 165981 - DNA, 25 bp, Saccharomyces pastorianus
gatatctcggactaactcgggtacc

SEQ ID NO: 165982 - DNA, 25 bp, Saccharomyces pastorianus
aagacgatgtttatgaaattcacga

SEQ ID NO: 165983 - DNA, 25 bp, Saccharomyces pastorianus
caggcagtatccaagacgatgttta

SEQ ID NO: 165984 - DNA, 25 bp, Saccharomyces pastorianus
ccgtttttaccaggcagtatccaag

SEQ ID NO: 165985 - DNA, 25 bp, Saccharomyces pastorianus
tttaccaggcagtatccaagacgat

SEQ ID NO: 165986 - DNA, 25 bp, Saccharomyces pastorianus
tcacgatgtcaacttcaaacaaaga

SEQ ID NO: 165987 - DNA, 25 bp, Saccharomyces pastorianus
cgggtacctcagattttactggaga

SEQ ID NO: 165988 - DNA, 25 bp, Saccharomyces pastorianus
aatgaaccacagatatctcggacta

SEQ ID NO: 165989 - DNA, 25 bp, Saccharomyces pastorianus
gattttccaacaacaatgtctctct

SEQ ID NO: 165990 - DNA, 25 bp, Saccharomyces pastorianus
tggtttgccacgaccttattcaata

SEQ ID NO: 165991 - DNA, 25 bp, Saccharomyces pastorianus
gcaggccaagcttttattgaaggaa

SEQ ID NO: 165992 - DNA, 25 bp, Saccharomyces pastorianus
aaaccgatgcttattgatgacttca

SEQ ID NO: 165993 - DNA, 25 bp, Saccharomyces pastorianus
atcaggttcaatctttcaactctag

SEQ ID NO: 165994 - DNA, 25 bp, Saccharomyces pastorianus
atgtctctctatttcagttaactgg

SEQ ID NO: 165995 - DNA, 25 bp, Saccharomyces pastorianus
acatcaaacgcatccgattttccaa

SEQ ID NO: 165996 - DNA, 25 bp, Saccharomyces pastorianus
atatttggtgccttgtcttacgttc

SEQ ID NO: 165997 - DNA, 25 bp, Saccharomyces pastorianus
agatgaaaccctctccactaaagat

SEQ ID NO: 165998 - DNA, 25 bp, Saccharomyces pastorianus
agacatttatatcctccatcattcg

SEQ ID NO: 165999 - DNA, 25 bp, Saccharomyces pastorianus
gagcccatgctattcaaatcaggtt

SEQ ID NO: 166000 - DNA, 25 bp, Saccharomyces pastorianus
ggtcttttaatgctacttttctctt

SEQ ID NO: 166001 - DNA, 25 bp, Saccharomyces pastorianus
aataccttcaagctagccattatgg

SEQ ID NO: 166002 - DNA, 25 bp, Saccharomyces pastorianus
tgttctgctcttcgatgtgttcaaa

SEQ ID NO: 166003 - DNA, 25 bp, Saccharomyces pastorianus
gtgataccgccaagcaagtaaactg

SEQ ID NO: 166004 - DNA, 25 bp, Saccharomyces pastorianus
gcaaaaatgtgataccgccaagcaa

SEQ ID NO: 166005 - DNA, 25 bp, Saccharomyces pastorianus
aatgctacttttctcttgctgttct

SEQ ID NO: 166006 - DNA, 25 bp, Saccharomyces pastorianus
gtaaactgcgagaaataccttcaag

SEQ ID NO: 166007 - DNA, 25 bp, Saccharomyces pastorianus
ccctttctcctggttattatacaag

SEQ ID NO: 166008 - DNA, 25 bp, Saccharomyces pastorianus
atgtgttcaaaaccctttctcctgg

SEQ ID NO: 166009 - DNA, 25 bp, Saccharomyces pastorianus
aaatgtgccataccaattaggtgca

SEQ ID NO: 166010 - DNA, 25 bp, Saccharomyces pastorianus
caagctagccattatggtcttttaa

SEQ ID NO: 166011 - DNA, 25 bp, Saccharomyces pastorianus
gcatctgtcagtgggctaaccaatt

SEQ ID NO: 166012 - DNA, 25 bp, Saccharomyces pastorianus
actatcttctttggtggttgcatct

SEQ ID NO: 166013 - DNA, 25 bp, Saccharomyces pastorianus
ttctttggtggttgcatctgtcagt

SEQ ID NO: 166014 - DNA, 25 bp, Saccharomyces pastorianus
gtggttgcatctgtcagtgggctaa

SEQ ID NO: 166015 - DNA, 25 bp, Saccharomyces pastorianus
ttaccgctccaattgccttgacaac

SEQ ID NO: 166016 - DNA, 25 bp, Saccharomyces pastorianus
gacaacaggaccactatcttctttg

SEQ ID NO: 166017 - DNA, 25 bp, Saccharomyces pastorianus
aattgccttgacaacaggaccacta

SEQ ID NO: 166018 - DNA, 25 bp, Saccharomyces pastorianus
gtcagtgggctaaccaatttgtttt

SEQ ID NO: 166019 - DNA, 25 bp, Saccharomyces pastorianus
aatttgttttggctgttgccctgga

SEQ ID NO: 166020 - DNA, 25 bp, Saccharomyces pastorianus
tgttgccctggacccataaagttaa

SEQ ID NO: 166021 - DNA, 25 bp, Saccharomyces pastorianus
ttggctgttgccctggacccataaa

SEQ ID NO: 166022 - DNA, 25 bp, Saccharomyces pastorianus
gtgccgttctggacatggttaccga

SEQ ID NO: 166023 - DNA, 25 bp, Saccharomyces pastorianus
gtgcagtatccccaatggtgcgttt

SEQ ID NO: 166024 - DNA, 25 bp, Saccharomyces pastorianus
gtgagtccagattgtacacctgtac

SEQ ID NO: 166025 - DNA, 25 bp, Saccharomyces pastorianus
gagacgtactgttcactatctgtgc

SEQ ID NO: 166026 - DNA, 25 bp, Saccharomyces pastorianus
atgtgtttcctttgtgtgcagtatc

SEQ ID NO: 166027 - DNA, 25 bp, Saccharomyces pastorianus
ggattgtacttgcagttgttctcaa

SEQ ID NO: 166028 - DNA, 25 bp, Saccharomyces pastorianus
gctgggcttggatattactagtcac

SEQ ID NO: 166029 - DNA, 25 bp, Saccharomyces pastorianus
atggttaccgacagatccagcaccg

SEQ ID NO: 166030 - DNA, 25 bp, Saccharomyces pastorianus
tactggatgcgctagacggaaccat

SEQ ID NO: 166031 - DNA, 25 bp, Saccharomyces pastorianus
agcaccgctggcttgatgtgtttcc

SEQ ID NO: 166032 - DNA, 25 bp, Saccharomyces pastorianus
acaatcaggtttccagtctgggtgc

SEQ ID NO: 166033 - DNA, 25 bp, Saccharomyces pastorianus
aatcgtgttttactcatttgtgaca

SEQ ID NO: 166034 - DNA, 25 bp, Saccharomyces pastorianus
gttggaccttcttcgataaatcgtg

SEQ ID NO: 166035 - DNA, 25 bp, Saccharomyces pastorianus
gaagttgattcctctacatttataa

SEQ ID NO: 166036 - DNA, 25 bp, Saccharomyces pastorianus
gaattcagcctccattgtacaagac

SEQ ID NO: 166037 - DNA, 25 bp, Saccharomyces pastorianus
gtgataccgaatgttggaccttctt

SEQ ID NO: 166038 - DNA, 25 bp, Saccharomyces pastorianus
cagtctgtctttaaccttggtatct

SEQ ID NO: 166039 - DNA, 25 bp, Saccharomyces pastorianus
gggctaccaattacacagtctgtct

SEQ ID NO: 166040 - DNA, 25 bp, Saccharomyces pastorianus
gaaagtggtaccatcaactggcaaa

SEQ ID NO: 166041 - DNA, 25 bp, Saccharomyces pastorianus
atggttcccaatctcggtattgcaa

SEQ ID NO: 166042 - DNA, 25 bp, Saccharomyces pastorianus
acaagacaacttggcggctgcgacg

SEQ ID NO: 166043 - DNA, 25 bp, Saccharomyces pastorianus
taggcttttagcttctccaatgaga

SEQ ID NO: 166044 - DNA, 25 bp, Saccharomyces pastorianus
gagccagagactttagattcttcca

SEQ ID NO: 166045 - DNA, 25 bp, Saccharomyces pastorianus
tggtaaggtccaaattttttctctg

SEQ ID NO: 166046 - DNA, 25 bp, Saccharomyces pastorianus
ttggcatccgaagggtctgcatttt

SEQ ID NO: 166047 - DNA, 25 bp, Saccharomyces pastorianus
cttccaaattggtctcgtctataaa

SEQ ID NO: 166048 - DNA, 25 bp, Saccharomyces pastorianus
aaactcgtactttctgatgactaca

SEQ ID NO: 166049 - DNA, 25 bp, Saccharomyces pastorianus
atgtggctgacccagaattctgtgc

SEQ ID NO: 166050 - DNA, 25 bp, Saccharomyces pastorianus
ttttctctgacatctactattccaa

SEQ ID NO: 166051 - DNA, 25 bp, Saccharomyces pastorianus
gcaaggtgatgctcttaggtataac

SEQ ID NO: 166052 - DNA, 25 bp, Saccharomyces pastorianus
tagatttgctttacccctacgtgac

SEQ ID NO: 166053 - DNA, 25 bp, Saccharomyces pastorianus
tttgcacgagagtggcttggcatcc

SEQ ID NO: 166054 - DNA, 25 bp, Saccharomyces pastorianus
acgtgactgctgtgttattcattca

SEQ ID NO: 166055 - DNA, 25 bp, Saccharomyces pastorianus
tggttactcctggatcgacggatta

SEQ ID NO: 166056 - DNA, 25 bp, Saccharomyces pastorianus
acaggagaaccagatgctaagccat

SEQ ID NO: 166057 - DNA, 25 bp, Saccharomyces pastorianus
gggtagtgacattccaaccaccaaa

SEQ ID NO: 166058 - DNA, 25 bp, Saccharomyces pastorianus
gatgctaagccatatttaccagaag

SEQ ID NO: 166059 - DNA, 25 bp, Saccharomyces pastorianus
aaagaagctttctggtacagactaa

SEQ ID NO: 166060 - DNA, 25 bp, Saccharomyces pastorianus
gaccgtggctgacaccgttatgaga

SEQ ID NO: 166061 - DNA, 25 bp, Saccharomyces pastorianus
ggattaaaagatactgccgaagcag

SEQ ID NO: 166062 - DNA, 25 bp, Saccharomyces pastorianus
aaaattcgatgctttgttccctcaa

SEQ ID NO: 166063 - DNA, 25 bp, Saccharomyces pastorianus
gaaggcattcgacaccacaggagaa

SEQ ID NO: 166064 - DNA, 25 bp, Saccharomyces pastorianus
ttgttccctcaaaagaccgtggctg

SEQ ID NO: 166065 - DNA, 25 bp, Saccharomyces pastorianus
aatgtttgccagtccaaaggccgaa

SEQ ID NO: 166066 - DNA, 25 bp, Saccharomyces pastorianus
tgcaaaggccactaacgatgtcgaa

SEQ ID NO: 166067 - DNA, 25 bp, Saccharomyces pastorianus
attgctgcccgtgaaactgcaaagg

SEQ ID NO: 166068 - DNA, 25 bp, Saccharomyces pastorianus
tacggtgttctattgtcgggtggtt

SEQ ID NO: 166069 - DNA, 25 bp, Saccharomyces pastorianus
gcaagacatctagcaggtatcgacg

SEQ ID NO: 166070 - DNA, 25 bp, Saccharomyces pastorianus
accgggccacgtatacgattctaag

SEQ ID NO: 166071 - DNA, 25 bp, Saccharomyces pastorianus
ttaatggccgaagtcccatacggtg

SEQ ID NO: 166072 - DNA, 25 bp, Saccharomyces pastorianus
ttgccaaattcatcggctctattca

SEQ ID NO: 166073 - DNA, 25 bp, Saccharomyces pastorianus
gacggtaagctacacactgctggtt

SEQ ID NO: 166074 - DNA, 25 bp, Saccharomyces pastorianus
acatggcaattagacactccttaga

SEQ ID NO: 166075 - DNA, 25 bp, Saccharomyces pastorianus
gtttgactgacgactgtgacactat

SEQ ID NO: 166076 - DNA, 25 bp, Saccharomyces pastorianus
ggtttggactcctctttaatcgctt

SEQ ID NO: 166077 - DNA, 25 bp, Saccharomyces pastorianus
tagtgtttttataccaactctcaat

SEQ ID NO: 166078 - DNA, 25 bp, Saccharomyces pastorianus
aactctcaattctgggtgactgctc

SEQ ID NO: 166079 - DNA, 25 bp, Saccharomyces pastorianus
atgcaatggcttcgatgagggtaat

SEQ ID NO: 166080 - DNA, 25 bp, Saccharomyces pastorianus
tatctacaaacggaagtgaggcatc

SEQ ID NO: 166081 - DNA, 25 bp, Saccharomyces pastorianus
gcaagtttgaatgcaatggcttcga

SEQ ID NO: 166082 - DNA, 25 bp, Saccharomyces pastorianus
aattgttctcgcatataattgcatt

SEQ ID NO: 166083 - DNA, 25 bp, Saccharomyces pastorianus
gaccttataatctcacaaattgttc

SEQ ID NO: 166084 - DNA, 25 bp, Saccharomyces pastorianus
tgagtacactggaaagctgcctttt

SEQ ID NO: 166085 - DNA, 25 bp, Saccharomyces pastorianus
gaggcatcgattgcttctcgtatga

SEQ ID NO: 166086 - DNA, 25 bp, Saccharomyces pastorianus
caattgacagtttacgagaccttat

SEQ ID NO: 166087 - DNA, 25 bp, Saccharomyces pastorianus
ctgggtgactgctcaacaattgaca

SEQ ID NO: 166088 - DNA, 25 bp, Saccharomyces pastorianus
gatacaggccagtaatgtacccagt

SEQ ID NO: 166089 - DNA, 25 bp, Saccharomyces pastorianus
ggcactgcaaatgcggttgacacac

SEQ ID NO: 166090 - DNA, 25 bp, Saccharomyces pastorianus
agctcacccgcgatattctgtatag

SEQ ID NO: 166091 - DNA, 25 bp, Saccharomyces pastorianus
aaagaaggactcacagcagactggt

SEQ ID NO: 166092 - DNA, 25 bp, Saccharomyces pastorianus
ggaaaacccgctattcagagataag

SEQ ID NO: 166093 - DNA, 25 bp, Saccharomyces pastorianus
gccattcaattggtggtctacgtcc

SEQ ID NO: 166094 - DNA, 25 bp, Saccharomyces pastorianus
gtacccaatgagctgttgccattca

SEQ ID NO: 166095 - DNA, 25 bp, Saccharomyces pastorianus
ggtgaaccccataaggcagcaacat

SEQ ID NO: 166096 - DNA, 25 bp, Saccharomyces pastorianus
aagccgtttgacaaggcactgcaaa

SEQ ID NO: 166097 - DNA, 25 bp, Saccharomyces pastorianus
ctatgactttagatcgctgcccaaa

SEQ ID NO: 166098 - DNA, 25 bp, Saccharomyces pastorianus
gagaaagtccttgcaaacgttatta

SEQ ID NO: 166099 - DNA, 25 bp, Saccharomyces pastorianus
gccagtccagcttccttggaatatg

SEQ ID NO: 166100 - DNA, 25 bp, Saccharomyces pastorianus
tcatcttatcaacagcagccatttc

SEQ ID NO: 166101 - DNA, 25 bp, Saccharomyces pastorianus
tgaagccagctttctctgggtctaa

SEQ ID NO: 166102 - DNA, 25 bp, Saccharomyces pastorianus
agcttgccggcaaaatgggatcctg

SEQ ID NO: 166103 - DNA, 25 bp, Saccharomyces pastorianus
aatagtgccgcatcatcttatcaac

SEQ ID NO: 166104 - DNA, 25 bp, Saccharomyces pastorianus
ctccaccttccacaaattattatca

SEQ ID NO: 166105 - DNA, 25 bp, Saccharomyces pastorianus
acaagggtagctgtaatggccgtac

SEQ ID NO: 166106 - DNA, 25 bp, Saccharomyces pastorianus
attacaacaaatccccacgcaaaat

SEQ ID NO: 166107 - DNA, 25 bp, Saccharomyces pastorianus
tgggtctaacggtccatccaatctt

SEQ ID NO: 166108 - DNA, 25 bp, Saccharomyces pastorianus
gtcgaagctctttatcaatttgatc

SEQ ID NO: 166109 - DNA, 25 bp, Saccharomyces pastorianus
taccggtattttcccagcaaactat

SEQ ID NO: 166110 - DNA, 25 bp, Saccharomyces pastorianus
gtagaacttctactgcgatttcccg

SEQ ID NO: 166111 - DNA, 25 bp, Saccharomyces pastorianus
actggcctgcatggatccgttggag

SEQ ID NO: 166112 - DNA, 25 bp, Saccharomyces pastorianus
gttacctttgtgactggcgatccag

SEQ ID NO: 166113 - DNA, 25 bp, Saccharomyces pastorianus
agaaggcgactctagtggtgcgaat

SEQ ID NO: 166114 - DNA, 25 bp, Saccharomyces pastorianus
gtgcgaatgacgaagctccagatct

SEQ ID NO: 166115 - DNA, 25 bp, Saccharomyces pastorianus
gtcgccactctacattccataggta

SEQ ID NO: 166116 - DNA, 25 bp, Saccharomyces pastorianus
aatcttagttatttgtgtcgcctac

SEQ ID NO: 166117 - DNA, 25 bp, Saccharomyces pastorianus
tagacagatcgatggcgcttcttcg

SEQ ID NO: 166118 - DNA, 25 bp, Saccharomyces pastorianus
gagttacactgtcctactgtcaatc

SEQ ID NO: 166119 - DNA, 25 bp, Saccharomyces pastorianus
tgcgatttcccgtacgagaactaga

SEQ ID NO: 166120 - DNA, 25 bp, Saccharomyces pastorianus
gcttcttcgccttcttctaatgaag

SEQ ID NO: 166121 - DNA, 25 bp, Saccharomyces pastorianus
actttagccatcgttgaattacaga

SEQ ID NO: 166122 - DNA, 25 bp, Saccharomyces pastorianus
acactgttatgcaagaggccctgga

SEQ ID NO: 166123 - DNA, 25 bp, Saccharomyces pastorianus
gaggccatggactgaatttcctgac

SEQ ID NO: 166124 - DNA, 25 bp, Saccharomyces pastorianus
agattggcacgaggcttgggacatc

SEQ ID NO: 166125 - DNA, 25 bp, Saccharomyces pastorianus
tttggccatttgctacccagacatt

SEQ ID NO: 166126 - DNA, 25 bp, Saccharomyces pastorianus
gaatttcctgaccaagtggctattc

SEQ ID NO: 166127 - DNA, 25 bp, Saccharomyces pastorianus
gggacatcgtgaccaagacttttgc

SEQ ID NO: 166128 - DNA, 25 bp, Saccharomyces pastorianus
cagagagttttggtcgatctagaaa

SEQ ID NO: 166129 - DNA, 25 bp, Saccharomyces pastorianus
gaaaaatggcccgtcggcctctttg

SEQ ID NO: 166130 - DNA, 25 bp, Saccharomyces pastorianus
gatgtggccaaaaaattccccaagg

SEQ ID NO: 166131 - DNA, 25 bp, Saccharomyces pastorianus
atgatatcaactggttcttcttgca

SEQ ID NO: 166132 - DNA, 25 bp, Saccharomyces pastorianus
gttgccaaccatgacgttgcactga

SEQ ID NO: 166133 - DNA, 25 bp, Saccharomyces pastorianus
tcgctttccctatgtttggctagaa

SEQ ID NO: 166134 - DNA, 25 bp, Saccharomyces pastorianus
gctagcgctatgactcctggtaagg

SEQ ID NO: 166135 - DNA, 25 bp, Saccharomyces pastorianus
gccttgtgtttgaccgttttgatga

SEQ ID NO: 166136 - DNA, 25 bp, Saccharomyces pastorianus
ggttctcgcaaatcattgccgggat

SEQ ID NO: 166137 - DNA, 25 bp, Saccharomyces pastorianus
ctattcattgtccatgttgccttga

SEQ ID NO: 166138 - DNA, 25 bp, Saccharomyces pastorianus
ttttcgccaattctttaggcctggg

SEQ ID NO: 166139 - DNA, 25 bp, Saccharomyces pastorianus
ggctgctccagatctagaggcttgt

SEQ ID NO: 166140 - DNA, 25 bp, Saccharomyces pastorianus
ggttctccgttatgttttccatctg

SEQ ID NO: 166141 - DNA, 25 bp, Saccharomyces pastorianus
ttcccatcggtatttctctattcat

SEQ ID NO: 166142 - DNA, 25 bp, Saccharomyces pastorianus
gattgccattggtttcgggttctcc

SEQ ID NO: 166143 - DNA, 25 bp, Saccharomyces pastorianus
tgattgccatcggtttcggattttc

SEQ ID NO: 166144 - DNA, 25 bp, Saccharomyces pastorianus
tcggattttccgtcatgttttctat

SEQ ID NO: 166145 - DNA, 25 bp, Saccharomyces pastorianus
caagcgccatgacacctggtgaagt

SEQ ID NO: 166146 - DNA, 25 bp, Saccharomyces pastorianus
tgtttatcgcacacgtcgctttgac

SEQ ID NO: 166147 - DNA, 25 bp, Saccharomyces pastorianus
gcttacgttatctgcaatgtcgcta

SEQ ID NO: 166148 - DNA, 25 bp, Saccharomyces pastorianus
gaaaccaactttatggccgcgctgc

SEQ ID NO: 166149 - DNA, 25 bp, Saccharomyces pastorianus
gaagtcctctttgccaattctttgg

SEQ ID NO: 166150 - DNA, 25 bp, Saccharomyces pastorianus
gcaccgctatcctatgtttaacagt

SEQ ID NO: 166151 - DNA, 25 bp, Saccharomyces pastorianus
taaccatgatgtcgcactcgttgca

SEQ ID NO: 166152 - DNA, 25 bp, Saccharomyces pastorianus
gtctctcctacaagatgtgtcgtta

SEQ ID NO: 166153 - DNA, 25 bp, Saccharomyces pastorianus
ttcctggagatgttcggcaccgcta

SEQ ID NO: 166154 - DNA, 473 bp, Saccharomyces pastorianus
attatgtattatcaatgggtgctattttctcattatttgcaggatactattattgaagtcctcaaattttaggtttaaattataacgaaaaattagctcaaattcaattctgattaatcttcatcggggctaatgttatcttcttccctatgcatttcttaggtattaatggtatgcccagaagaattccagattaccctgatgctttcgctggttgaaattatgtagcttctattggttcatttattgcacttatctcattattcttattcatctatattttatatgatcaattagttaatggtttaaataataaagttactaataaatcagttgtttactctaaagcacccgattttgttgaatctaatatgatcttcaatttaaatacagttaaatcttcatctattgaattcttattaacttctccaccagctgtacattcattcaatacaccagctgtacaatcttaa

SEQ ID NO: 166155 - DNA, 2565 bp, Saccharomyces pastorianus
atggtacaaagatgattatattcaacaaatgcaaaagatattgcagtattatattttatgttagctatttttagtggtatggcaggaacagcaatgtctttaatcattagattagaattagctgcacctggttcacaatatttacaaggaaatgctcagttatttaatgttttagtagttggtcatgctgtattaatgattttctgtgcgccattttgcttaatttatcactgtattgaagtgttaattgataaacatatctctgtttattcaataaatgaaaactttaccgtatcattttggttctgattcttagtagtaacatacatagaatttagatacgtaaaccatatggcttactcagttggggccaactcaacggggacaatagcatgccataaaagcgctggagtaaaacagccagtgcaaggtaagaactgttcgatggctaggttaacgaactccttacaagaatgtttagggttctcattaactccttcccactcggggattgtggttcatgcttgtgtattggaagaagaggtacacgagttaaccaaatatgaatcattaactttaagtaaaagttgacattcggagagctgtacgagttcaaatggtaaattaagaaatatgggattgtccgaaaggggaaactctggggataacggagtcttcatagtacccaaatttaatttaaataaagtgagatattttagtactttatctagattaaatgtaaggaaggaagacagtttaacgtatttaacaaagataaatactacggatttttccgagttaaataaattaatagaaaataattataataatcctgaaaacattaatactagaattttaaaattaatgtcagatattagattgttattaattgcttataataaaattaaaagtaagaaaggtaacatatctaaaggttctaataatattaccttagatggaattaatatttcatatttaaataaattatctaaagatattaatactaatatgtttaaattttctcctgttagaagagttgaaattcctaaaacatctggaggatttagacctttaagtgttggtaatcctagagaaaaaattgtacaagaaagtatgagaataattttagaaattatttataataatagtttttctaattattcacatgggtttagaccaaacttatcttgtttaacagctattattcattgtaaaaattatatgcaacactgtaattgatttattaaggtagacttaaataaatgttttgatacaattccacataatatgttaattaatgtattaaatgagagaatcaaagataaaggtttcattgatttattatataaattattaagagctggatatgttgataaacataataattatcatcatacaactttaggaattcttcaaggtagtgttgtcagtcctattttatgtaatattttcttagataaattagataaatatttagaaaataagtttgagaatgaattcaatattggatctatgtctaatagaagtagaaatccaatttataatgatttatcatctaaaattagaagatgtaaattattatctgataaattaaaattgattagattaagagaccattaccaaagaaatttgggatctgataaaagctttaaaagagcttattttgttagatatgctgatgatattatcattggtgtaatgggttctcatgatgattgtaaaaatattttaaacgatataaataatttcttaacagaaaatttaggtatgtctattaatatagataaatccattattaaacattctaaagaaggagttagttttttagggtatgatgtaaaagttacaccttgagaaataagaccttatagaatgattaaaaaaggtgataaatttattagggttagacatcatactagtttagttgttaatgcccctatcagaagtattgtaataaaattaaataaaaatggttattgttctcatggaatagttggaaaacccataggggttggaagattaattcatgaagaaatgaaaaccattttaatgcattatttagctgttggtagaggtattataaattattatagattagctaccaattttactacattaagaggtagaattacatacattttattttattcatgttgtttaacgttagcaagaaaatttaaattaaatactgttaagaaagttattttaaaattcggtaaagtattgaccgatcctaattcaaaagtaagttttggtattgatgattttaaaattagacataaaataaataaaactgattctaattatactcctgatgaaattttagatagatttaaatatatgttacctagatctttatcattatttagtggtatttgtcaagtttgtggttctaaacaaaatttagaagtacatcatgtgaaaatattaaataatgctgccaataaaatcaaaaatgattatttattaggtagaatgattaagataaatagaaaacaaattactatctgtaaaacatgtcattataaaattcatcaaggtaaatataatggtccaggtttataa

SEQ ID NO: 166156 - DNA, 652 bp, Saccharomyces pastorianus
ctctgtatcaaatcctctaatccaaagattctttgcattacattacttagtaccttttgttattgcagcaatggttattatgcatatgatggcattacatattcatggttcatctaatccattaggtattacaggtaatttagatagaattccaatgcattcatatttcgtatttaaagatttagtaactgtatttttatttatgttagtattagcattatttgtattttattcaccaaatactttaggtcatcctgataattatattccaggtaatcctttagtaacaccagcgtctatcgtacctgaatgatacttattaccattctatgctattttaagatctattcctgataaattattaggtgttattcttatgtttgcagctattttagtgttattagttttaccatttactgatagaagtgttgttagaggtaatactttcaaagtattctctaaattcttcttctttatctttgtattcaatttcgtattattaggacaaattggagcatgtcatgtagaagtaccttatgtcttaatgggacaaattgctacatttatctacttcgcatatttcttaattattgtacctgttatctctactattgaaaatgttttattctatatcggtagagttaataaataa

SEQ ID NO: 166157 - DNA, 147 bp, Saccharomyces pastorianus
atgccacaattagttccattttattttatgaatcaattaacttatggtttcttattaataattctattattaattttattctcacaattatttttacctatgatcttaagattatacgtatctagattatttatttctaaattataa

SEQ ID NO: 166158 - DNA, 780 bp, Saccharomyces pastorianus
atgtttaatttattaaatacatatattacatcaccattagatcaatttgagattagactattattaggtttacaatcatcatttattgatttaagttgtttaaatttaacaacattttcattatatactattattgtattattagttattttatgtttatatctattaactaataataataataaaattattggttctagatgattaatttcacaagaagctatttatgatactattataaatatggttaaaggacaaatcggaggtaaaaattgaggtttatatttccctatgatctttactttctttatgtttatttttattgctaatttaattagtatgattccttattcattcgctttatcagctcatttagtatttattatttctttaagtattattatttgattaggtaatactattttaggtttatataaacatggatgactattcttctcattatttgttcctactggtacacctttaccattagttcctttattagttattattgaaactttatcttatattgctagatctatttctttaggtttaagattaggttctaatattttagctggtcatttattaatgattattttagctggtttactatttaactttatgttaattaacttatttactttagtattcggttttgtacctttagctataatcttagctattatgatcttagaattcgctatcggtattatccaaagttatgtttgatgtatcttaactgcttcttatttaaaagatgccgtatatttacactaa

SEQ ID NO: 166159 - DNA, 231 bp, Saccharomyces pastorianus
atgcaattagtattagcagctaaatatattggagcaggtatctcaacaattggtttattaggagcaggtattggtattgctatcgtattcgcagctttaattaatggtgtttcaagaaacccttctattaaagatctagtattccctatggctattttaggtttcgcattatcagaagctacaggtttattctgtttaatggtttcattcttattattattcggtgtttaa

SEQ ID NO: 166160 - DNA, 1134 bp, Saccharomyces pastorianus
atgaaattaaaattattaaaaataattactcctagtggggtcccgggtccgtccggccccggggctaaagataatttaaataataaaaaattaatattaaagaatattttattagaaataaatattaaaagaataaataatataaaaacaatatataataataataatatagtctgttccgcccaccagggagggacgggcaccgtaggagatattaataataaaaataataaattacaacatttaaataatataaatacttgaaatctacaaatttataattataataagaatatagagattaataatactataaatgataaattaattactaaattattatataagataataacattaagattaaataataataaaacaaataagattattattagtaaacctattaatcaacatagtttaaataaattaaatattaaattctattattatataaataataataataataataatgatataaataataataataattattatataactataattaataaattaataaatattataaataataatataaataatagtttaagtaatattttaagttattattataataaaagagtaacaattgaacctattaaattatcatatatttatataaatagtgatatttttagtaaatatattagtttaaatgatatagataaatataataatggaattataacaaattatcaacgtatattaaataatattatacctaaattaaatgatcataatatttctataaattatattaataatataaataatattaataatattaaatataataatattattacaccttatggaattaataataatataaataaattatataataatataaatattgataatattcctatagatattttaatatttaaatatttagtaggttgatctattaaattaaaaggtagattaagtaataatattggtagaactagtactcttattttattaaatggtacttttaataataaaaaatatttatgaagtaatattaataataattataaattaaattatatctcttctaatcataatttatataataattctaatattaataaaaatggaaaatataatattaaagttaaattaaactttatctaa

SEQ ID NO: 166161 - DNA, 810 bp, Saccharomyces pastorianus
atgacacatttagaaagaagtagacatcaacaacatccatttcatatggtaatgccatcaccatgacctattgtagtatcatttgcattattatcattagcattatcactagctttaacaatgcatggttatattggtaatataaatatggtatatttagcattatttgtattattaacaagttcaattttatgatttagagatattgtatcagaagcaacatatttaggtgaacatactattgcagtaagaaaaggtattaatttaggttttttaatgtttgtattatctgaagtattaatcttcgctggtttattttgagcatatttccattcagctatgagtcctgatgttctattaggttcatgttgaccacctgtaggtattgaagctgtacaaccaacagaattacctttattaaatactattattttattatcatctggtgctactgtaacttatagtcatcatgctttaattgctggtaatagaaataaagctttatcaggtttattaattacattctgattaattgttatttttgtatcttgtcaatatatcgaatatactaatgctgcatttactatctctgatggtatctatggttcagtattctatgccggaactggtttacatttcttacatatggttatgttagctgctatgttaggtgttaactattgaagattaagaaattatcatttaactgctggacatcacgtaggatatgaaactactattatttatctacatgttttagacgttatctgattattcttatacgtagtatattattgatgaggtgtttaa

SEQ ID NO: 166162 - DNA, 676 bp, Saccharomyces pastorianus
taaataaaaaggatatgcagttttaaaatatcatttaatgcataaaataccttatatataataaatattatatataattattaaacatacttaatatatatatatatattaataataatatattaagttataatgtttaataatataggttaatatgcaaatatttataatattaataaatatttcagagactaaatatgatataatatattaatatattaattatctttttataaaaaaaaactattctcattgtaccgaccgttagatacgacgatcgacactattaaatatgatatttataattaataattattttctttataaaatcaatttgatgaataatataattagatttaattacatttatgaaatatttataaatataatttaattaatatataattttttcccgtggatcaaccctattaacaactgggttgtaatttgggggtaataaatattattatattatttttttattataaaaataaagtatataaatactttatattactataataatttttttatatatttataatataattaatttatattaatatattaaagacatagtccgaacaatatagtaatatattgagatatagatattatatatatatttatataaacaattataataattaaatattatttaattattaatttatga

SEQ ID NO: 166163 - DNA, 1392 bp, Saccharomyces pastorianus
tatgaaagctcaagtgtcgttatatatggtaacgtatatattattatttaactgtatgccggaaactttatactattttaataataataataatattattaaaataactaaaataatagtccgcttattattaatatatttggaaaaatctattattttatttagatattttataactaataataaacaatcggcaagtaacttttatttttcttctataaaaattaataagaataaaaaaacaattcttaaaaatcatttaaatgatataaatgaaataaaaatctcagaacataaacctttatataaaaaattaaaagatgatgaaatattaggttattatttagcaggtttaattgaaggagatggtcatatcggtgctaaatatattactattgctattaattataaagatattaaaaatgcttattatttaaaaaaattaattggttatggtaatattagaaaatactctaatacttataaagctgtaagtttaaatttggattctaaagcagctatattaagagtatttaatttaattaatggtaaattattaggcccttataagcataaacaattaattgatcaaaaatacgatattaaatttaatactttaattaaacctatcgctaattttaatttatgagataacccctgattaactggttttactgacgctgatggtagttttggagtatatgtttataaatcaaaaactataaaaataggatataatgtaaaaattatatttagaattatacaaagacatgttgatttattaaaacatgttcaaaaagctttagatggtagtatttctttatttaaaagaaaatcagtagttggaggttataattattcagctcttaattttaattctattaaaaattgaattaaatattttagtttatatccaccattacataatagtaaatatattcattttattaaatgatataaagtttgttatttatttgataataaattacatttaactaaagaaggattagataaaattatatctattaaaaggaacttcagagactagtgcgttaaatatcctatatataaaaattaagcatttaatcctttattatatatagtatatatatataatataaaataattatcttatttatttttaattataaataagttttataggataaagatacagtccacagttaataaggtttgtttatataatataatatataaaaatatatatatataaaataaaatagaatataatacttgttattggtcgaaaataatatctcactttaattagaattataattaaaattttaaggtatatatattataaaaaaattataaaacttattcatccttatttaatattattatatatttataataatatttaagtga

SEQ ID NO: 166164 - DNA, 820 bp, Saccharomyces pastorianus
cagataggtattcctaaaggagaatgtattaattatatttttatcaatataagtctatctacatatgtattaaaatggttacataaatatgttaaactgtagtgacaaaagtagccatattcttgacagtttatatattatttattaatatattaaagatgaaggagctttgactgatttaatatgctcaacgaaagtaaatcaaatgttttaaaattacttaaccacttattgaaaatctgtctgataattcaataattattttaattatatatatttatattaaaataataatgattgatgttatgtgttggaaattagcatacgataaatcatataatcattagtaatatagtttgagagctaagttaaatatttacgtattattagttaaacaaggtaagccctataaattgttattatattaaataataataccattattataaaatatatattatatattatatatatataaaatcttggattaagaaatataatattatttatagaaattttcttatatatttatagggtaaaagattatataaaaagctaatgacatattgtaatgatatgtataagaattattattctaagatgaaaatctgctaacttatattaaaggtgatatgcctatttttattatatattataatattaataggaggtttatattaataaactgataaatatttaaatatattttttatatatatatattaaatattgaatagatattgcgtgagccgtatgctatgaaagtcgcatgtacggttcttaccgggggaaaacttgtaaaggtctacctatcggaata

SEQ ID NO: 166165 - DNA, 1564 bp, Saccharomyces pastorianus
ttaacaacaacaatagcctaaaatcatataattattaatattatatggtagtctataaaaatatatctataatagataactgttattaggaatattatattaaaatataggcaatattagtgaaaacgatcaaagattaatacagttgagatcgtcggttaaataaagagtcgcgacagactggttcactgatagatatctgaaatgatgtttaatgcacagtcgattaatgtatttaaataaaaataataataaaataaataaattcaataagaataataataatctgtataataaaaataataataaaatgatttcttatgtgtaattatattataaaaaattccatataataaaaaaattaaatagttttaaaatattagttagaaattataatacttcttctaaattagaatataatataaataaaaaaaaatactaagtgtagaagaattataaaaaaaaatcataaaattaaatctataaaatattgagtaaatttagaatgtccaaataaaaaagaagaaattataaattatttaataaaaaaacaaggtatttattatattggtaatataatgacaaataaattttatattggttcagcaggatataataatatatatgatagatttaataatcatttatatagattacgtggtagttctaatattgcattagatgtaaaaaaatatggtttaaatacttttgtatatgatataaaaaaaatatatgataatgaaagtattgatagatatattttatatagtattgaacaaatttatttatacctaaaattacctacatataatagtggtaatttaaagaatttttctttatctaaatttgatactttagatcttattactaataaattaaaatatgctattactaataatatttatggtatttatttagataaatatatagctatagataaatctaatataataaaatatataaataaacataataatatttattataataatttaaataatgattataaactattataaaaaataggtaaagagaaaattattaaaggagctagtttatctgtcgctttatataatataaatgatgaattagtttgtgtttttcaatctagattcttaacttctcatttattatgttgtaatgaaaaaaactattagaagagctattaaagaaagaggctatatttatattcctaatatttttataccttatttaaaaggtttttttaatgtttatagtaaaccatttattgaaaattttaaaccttttgaattagaatatgtctctactaaaaaaaaatgttctattagttaaagcttccgattataaattaaataatactactaaattcttaattaaaaactatctacataaattttaatatattctttattattaaattttattagatctcctattttttttatttatatttaccctttaataattacttaatatttaatatttagtatttaaatgagtaattattattcttaaatgaatcttattatttttatttttattttgtattgttgtgtttatgggcagatatcacattgaggtg

SEQ ID NO: 166166 - DNA, 1086 bp, Saccharomyces pastorianus
aatctagaatatggttttaaattaatatatggtttccatttacataaagatgatttacaatgtttagaaaatattaaaaataatttaaacatacttaataatattagtattagagaactatcagttcaattaacagtatctaataaacaatgaatatatgataatttattaccaatttttgataaatatccttgtataactattaaatattatagttatataaaatgaagagaagtattaatcaaaagtataaataatgtatcaagtaaagaattaattaaaaataaactattaattaataattatgaaattattgataatatagaaattccatataataatataaatgatcattgaattttaggttttttagaagctaagggttcatttatgattaataatataagaaattcttgtagattatttatttcacaacatgaacaaagtaataaaacattagaagtaattaaagattatattttaactaattgaaaacctattgatagtacacctatatttattaaataagatttattaaataattgagataatataattcagttatctaaacttaataaatgtaatgttattaatttagcaataagtaatctatattttttatattatgttattattcctaaatttaataatataaattgatatactattaaatataatagttttataaattgacagtctattattaatatttatattaaaggtttacataaaattaataataataatgttattcaagaatatattgaacatcttataaatttaaataaaaaaggtgctaataaaattaattataatattgaattatataataaaattattaataataataaaccattatataatatgaatttatcatataaacttaatagtttaaattataaaactaataagtttattggtgtaggagtatatgtatatgatttaaataatctatttattataagattctctggacttattaatgtcggtttacattttaattgctcaaaacacatgattgctaaatatgttaaaaacggtaatgtatttataaataaatatattttactaaatatttataaagat

SEQ ID NO: 166167 - DNA, 600 bp, Saccharomyces pastorianus
taaggtaaataatctaaagggaaacagcccagattaagatataaagttcctaataaataataagtgaaataaatattaaaatattataatataatcagttaatgggtttgacaataaccactttttaatgaacatgtaacaatgcactgatttataataaaaaaaataatatttaaaatcaaatatatgtatataatatatttatatttgttaatagataatatacggatcttaataataagaattatttaactgaatatctaaatattattattaatctaaataataataataatatggtaatagaacatttaatgaaaaaatatattagttattaattaatatatataataattagatagagaatgctgacatgagtaacgaaaaaaaggtataaaccttttcacctaaaacataaggtttaactataaaagtacggcccctaataaaaatatgaataaaaatatattaaagatgggttaatctatattaataaaataatatcttaaaatataaatattaaaacatttataattataaaaatatatatattaatatatatataattatataaactaataaagatcaggaaaagtgtta

SEQ ID NO: 166168 - DNA, 2476 bp, Saccharomyces pastorianus
actacgtaataagtcataataataaatattatttattattatttttttatatttgatatttattgataataactttaactttatcatttaatttattttttataattaaagacatatttttaacactttgtaataatattaattcttttaatattataagataattaataaatctatgtaattttatagattttaataagtaagcaatatttaataataaatattgtttatatcttctaagacttaaaggttgatatttattaaaatattcaataaaaggttttatagctttataagattgagttttataaatataagctgtagctcctgattaaaaatcttttttaataatactaccaagtttaaaatattttaagacaatatcttaaatatatttatctttttgtgataattctaaatgaaattttaatcattgactaagtttataatattgaaaacgaagataaaaataaccatctgcatcattaaaacctgttaaccaaggatttaatagtacatcaaattctttaggatgttttaataaaatatttaatagattattaaaattatatttataatattgattatatcttttataaataatttaccattaatataatttataaaaacttcttgatcttttctttttataatatttcattcaacagctgttaattcttttttattattatatctagctgtaatatgtccaattttaaaataaagacataaataatcagctaaaataacatcttctaaagaaaaaataatagtaaaacatcttgtataaatattaccatctccttcaaataatcctgataaataataacctttttcatactcagtataattatctaaaaattttaatttattaattttattttctttatcaatattaataaaatatctatctattacattagtatatttatttataattgattcatatgtttttttttttttataaatattatctattaataataaatataatataatatgataatttaaagtgagggactcgcccacccagataggtgggcggaccgaacccctcgttatatataaaaatatataataagtcaaaataatattattatttttattaacttatattcacatataagattggactatctcttaattttaatataatatattaaaatcattcacgtttagtctctacaatactttaatatatcattatataaaaaaattataattatgaatatataaaaattatcacgggattgtcttacttttttatataatatatatatatatatataagagtttccccgttagctattatataaatattattattataaatataataaccaataatatttaataatataattattatttattatttttgtgaattttatacacgacacttatttttaataaataaatatatttatatcgtggaatgctacatctaatgaggcgttagctaaggcaacaccagttaaaccacccatagtgaataagaataagaatgcaattgcatataacataggtagtgctaatctaattgaaccaccatagaccgttgctaatcatgaaaagattttaattcctgtaggaatagcaatgatcatagttgcggaaagaaaataggctctagtcacttaaatattattataaatatataataatattaaataaggatgaataagttttataatttttttataatatatataccttaaaattttaattataattctaattaaagtgagatattattttcgaccaataacaagtattatattctattttattttatatatatatatttttatatattatattatataaacaaaccttattaactgtggactgtatctttatcctataaaacttatttataattaaaaataaataagataattattttatattatatatatatactatatataataaaggattaaatgcttaatttttatatataggatatttaacgcactagtctctgaagttccttttaatagatataattttatctaatccttctttagttaaatgtaatttattatcaaataaataacaaactttatatcatttaataaaatgaatatatttactattatgtaatggtggatataaactaaaatatttaattcaatttttaatagaattaaaattaagagctgaataattataacctccaactactgattttcttttaaataaagaaatactaccatctaaagctttttgaacatgttttaataaatcaacatgtctttgtataattctaaatataatttttacattatatcctatttttatagtttttgatttataaacatatactccaaaactaccatcagcgtcagtaaaaccagttaatcaggggttatctcataaattaaaattagcgataggtttaattaaagtattaaatttaatatcgtatttttgatcaattaattgtttatgcttataagggcctaataattta

SEQ ID NO: 166169 - DNA, 1505 bp, Saccharomyces pastorianus
tattactaattcatatatatatatttatttagtatataatccttaaaatatattatatatttctattaatacttttttggtaagttatactttattaatatattccccgcgggcacgaacccagctactattagctgggttcgtccctattgcgggtttattattttataatcaaaattaatgtttttatatattatttattatattcatttataacatataaatatataatacctaatacctaatacctaattatatttatttaagccccaattaaattaaattaaattgggccccccggacccaattgggaccccgcaaggtgtttattaatattttatttaatcttattaatattttattttatcttattaatatttttattaatattattaatgattatattaattattatatcataataaaagtatttatattatcttaatatattatatattattattatatatattagtttttattatatatttttatgattattattatattattagcaaggataaagagactcgaactcctaatgattgatttgaaatcaactgttttaccattaaactatatccttattatttatatttatttatattatatcaataaatattattaatttataaagttattactcctccggcgtccggtccgacgggccggaccagacttatttatatttatatatatatttattacttatttatatttatatatatatttattatattattccttataagatttattatattattataaagtgagggacccgccctccccacttcggggagggcgggaccgaacccctagtatataagttgggtttattatatattataaaaatagtgagggacccgccctcccatatccatatggagggcgggaccgaacccctagtatatttattatataattattataagagctatgaagtacatccctaggatggttattatttattatgtattatattatattatattataaaatatcattataaaatatattattatatatatttatataaaacatatcttatttattataaaagtatacatatattatattaacactgataagagtattttattattattacaattttatatatatttagatatatatttaataaataccttattaatataaaatagattattatcataataaagtatataaagatatatagtaataaataagtattaaatatcatattaatcttattattatattattataacgaggggttcggtcccgccctatatataaatatataaatatataaatatataaatatataaatatataaataggggcggtgaaccagacttattattaaattaataaaatattatatacataagtattattataaattattatattagtattgtttttattattatttacataagtatttatattaattattatattagtattatttttattattatattaatgtatatatattatacatattatatatatat

SEQ ID NO: 166170 - DNA, 600 bp, Saccharomyces pastorianus
gttaaagaagtgagggacccgcccctccccctgatggagggagggggggggaccgaacccctagtatatatataataataatattttaaaggtatattattataagtaataaataataataattttatataataataataataatatgtatatataatatatatatatatatatttaatattatataataaggataaataaaataaataagaatatgatgttggttcagattaagcgctaaataaggacatgacacatgcgaatcatacgtttattattaataagataataaaaatgtggtgtaaacgtgagtaatttattaggaattaatgaactatagattaagctaaatacttaataaaaaatataaaaaagtatatataataatataaagaatattaataatattaatatttatctatagtcaagccaataatggtttaggtagtaggtttaataaaagtgaacctagccaacgatccataatcgataatgaaagttagaacgatcacgttgactctgaaatatagtcaatatctatatgatacagcagtgaggaatattggacaatgatcgaaagattgatccagttacttatta

SEQ ID NO: 166171 - DNA, 600 bp, Saccharomyces pastorianus
tataataatatatactacttataaaatattcttagtccgaataagaaatatataatatataataataatcatattataataaataataataaaataatcaggagtattggaatcttaatagaccctatatatatatcctatgagtagtaataaattaattgaatgataatatttaatatataataatataaatgttaaataatataatatttctatttaggctactatataaatattataataatataaatgtatataatatattataataattaaataattaattttattaattaaggagattagcttaattggtatagcattcgttttacacacgaaagattataggttcgaaccctatatttcctaaacctagatatatatatatatatataaaataaatattattaataatatatcaggtaattataaatggtttatattaaataatactcttataaggaaacttaatataaataataaataatatatataatataataaatatcctttaaatatttttaattacataattataataatataatcttaatattataaattatttataaactcctagtgggatcccaatcgggtccg

SEQ ID NO: 166172 - DNA, 600 bp, Saccharomyces pastorianus
agaagagctattaaagaaagaggctatatttatattcctaatatttttataccttatttaaaaggtttttttaatgtttatagtaaaccatttattgaaaattttaaaccttttgaattagaatatgtctctactaaaaaaaaatgttctattagttaaagcttccgattataaattaaataatactactaaattcttaattaaaaactatctacataaattttaatatattctttattattaaattttattagatctcctattttttttatttatatttaccctttaataattacttaatatttaatatttagtatttaaatgagtaattattattcttaaatgaatcttattatttttatttttattttgtattgttgtgtttatgggcagatatcacattgaggtgcactagttattactaatttattttcagcaattccatttgtaggtaatgacattgtagcttgattatgaggaggattaaatagagaggatccacattatagtaatataatgttaaataaatctgttttatgctggaacgtcttcatttgaataatgaactactatattattaaatgatccgcaaacattata

SEQ ID NO: 166173 - DNA, 600 bp, Saccharomyces pastorianus
tatagattaagctaaatacttaataaaaaatataaaaaagtatatataataatataaagaatattaataatattaatatttatctatagtcaagccaataatggtttaggtagtaggtttaataaaagtgaacctagccaacgatccataatcgataatgaaagttagaacgatcacgttgactctgaaatatagtcaatatctatatgatacagcagtgaggaatattggacaatgatcgaaagattgatccagttacttattaggatgatatataaataattataaaatttattataaatattataaaaaataatatatataaattgattaaaaataaaatccataaataattaaaataatgatattaattactatatataatatatatagatatataccccgcggcacaaacccagcttagctgggtttgtgaccgcgggtacgatataataaatataataatatgtaaaaataatattatataattatgttgtagtatattttaatagtcctgacaaatatttgtgccagcagtcgcggtaacacaaagagggcgagcgttaatcacaatggtttaaaggatccgtagaatgaatt

SEQ ID NO: 166174 - DNA, 1035 bp, Saccharomyces pastorianus
gagcatagcgggcggacaccgtaggaaaatatataagattaaatatataaaatataatatatttaatacaatagatagatcttatataatatataataggaatcttatatgagattatataataataataaataataataataatatataataaataataataataatatataataaataattatagtccggcccgcccccgcggggggggggcggacgccgaaggagaaatataaagatatgtccttattttatattttaataaatttaataagttatgacaatatataatatatttaatatagataatatatctaataatattaattaattataaagtttcataaaatattttataataataataatttaactcctagcggggtaccaattgggcccccccggggggcccgggactcctagcggggctaaagaatatatatataaaatctcactccatgtataccattaggagaatataatatatatgaataaagaatatttatatttgatttaattttattttttttttattatcagataggatagactcgaactaactaggtctttctcccaaagaaagcgcctgaccttttggcttctatctgtattaatatataatatatactatatataataataataatacatatatatatatttatataaagtctatttattaattaattaattaattatatggatattatattataattaagcatatttctgtataataatataacttttatatatcttttatatataacgaggggttcggtcccgcccttgggagggcgggtccctcactccttcggcgtccggcccgcggggcggacccgactataaataagattaatatattataaaatatatcttaatttttataaagatataaagtataatatttctaataatctattaataataattataaagtgattaaaaatatataataatatatttattaagttttattttcattttatttatttatactaattactttattaatattgtatataataataataa

SEQ ID NO: 166175 - DNA, 3303 bp, Saccharomyces pastorianus
gagcatagcgggcggacaccgtaggaaaatatataagattaaatatataaaatataatatatttaatacaatagatagatcttatataatatataataggaatcttatatgagattatataataataataaataataataataatatataataaataataataataatatataataaataattatagtccggcccgcccccgcggggggggggcggacgccgaaggagaaatataaagatatgtccttattttatattttaataaatttaataagttatgacaatatataatatatttaatatagataatatatctaataatattaattaattataaagtttcataaaatattttataataataataatttaactcctagcggggtaccaattgggcccccccggggggcccgggactcctagcggggctaaagaatatatatataaaatctcactccatgtataccattaggagaatataatatatatgaataaagaatatttatatttgatttaattttattttttttttattatcagataggatagactcgaactaactaggtctttctcccaaagaaagcgcctgaccttttggcttctatctgtattaatatataatatatactatatataataataataatacatatatatatatttatataaagtctatttattaattaattaattaattatatggatattatattataattaagcatatttctgtataataatataacttttatatatcttttatatataacgaggggttcggtcccgcccttgggagggcgggtccctcactccttcggcgtccggcccgcggggcggacccgactataaataagattaatatattataaaatatatcttaatttttataaagatataaagtataatatttctaataatctattaataataattataaagtgattaaaaatatataataatatatttattaagttttattttcattttatttatttatactaattactttattaatattgtatataataataataattatcctgttatattttttatattattaaacaattaataatatatataatgaataatatatataattatacaatataatttatatatttatgactttcctattaataatataatattttatataaaaactaggggttcggtcccgccatccatatggatatgggagggcggatacctcacttttatatataaatatgattataatatatattaatatagttccaatagatataccattagaataatattatatattaattattagcaataatacgatttgaacgtatataattaggtcatgaccctaaaatgttaaccaattacatcatattgcatttatatatttattatatcctttgagactttatattatattacttataaaatatatataataagaatatatgaatattctaaattatttaatactataaagaaattataacattaatattaatgaattattgatattctcctacaattggtgtccgtccgcggagcggagcgtagcggagcgtagcggagcgtagcggagcgtagcggagcgtagcgggcgggacttaataaatatataaaaaaaaagatcctatagttcgtatttaattattattttaaataattaataatttatattaatacctaataaataaaaaaaaataaaatgaataataaaaaaaaaaatagtcatgtggagtataaagtttataattaataaagggtaaataaaagaatattattaaattatattattaataaagatattaataataattatgatttttattttttttatttatcaatagtaaacaataataattatttattaactctaccgatatagaataaaacattttcaatagtagagataacaggtacaataattaagaaatatgcgaagtagataaatgtagcaatttgtcccattaagacataaggtacttctacatgacatgctccaatttgtcctaataatacgaaattgaatacaaagataaagaagaagaatttagagaatactttgaaagtattacctctaacaacacttctatcagtaaatggtaaaactaataacactaaaatagctgcaaacataagaataacacctaataatttatcaggaatagatcttaaaatagcatagaatggtaataagtatcattcaggtacgatagacgctggtgttactaaaggattacctggaatataattatcaggatgacctaaagtatttggtgaataaaatacaaataatgctaatactaacataaataaaaatacagttactaaatctttaaatacgaaatatgaatgcattggaattctatctaaattacctgtaatacctaatggattagatgaaccatgaatatgtaatgccatcatatgcataataaccattgctgcaataacaaaaggtactaagtaatgtaatgcaaagaatctttggattagaggatttgatacagagcaaaaaaaaaagaatgttgatagttacatataatattaaatatattatcctccttcatgatacaacattgcaatgttatattggtggggattgataaataacgtaatagttaataagtaatattatattcttactatactcaatatatcattatattgttcggactatatcttaatcctttatgcttataattatttattataatacccttcgagaatatagcttagcaatattaatcggcgggtcatatatttattgattgattgattgattgattgataaaataaatttatcgataaatattataatatattaataattttgaggaatatttaaattattattatatttagaaattagacgtaattcttttaaaaataataaatattgtaatcttttatatcctaataattttataggatttttatttataaattttacaatattttcaatacctctaatactttttagagtaattcttgaattattatctttattagtatatacattttgactaatttttaaataaattttaatagcttcaataatttttaaattattagtttgagatacttcaaaactagctagtttaatattatttttaagagtataaatattaaaataaccttcagcttcaataaaaccaattaatcaataagaaaaataatttttatttaaaatattttctaggttgtataatgattttataggacgtttatatttaggtaaatcattataatatttaatatcttttaataaattatctttaaaaaataaataatcataatatttatttgtta

SEQ ID NO: 166176 - DNA, 600 bp, Saccharomyces pastorianus
tggagtacagaatatattttaattatttaattaattaagatattaaactattaatagaattaggttactaataaattaataacaattaattttaaaacctaaaggtaaaccttatattaataatatatattatattatatgttattaataaataagaactaagtgaactgaaacatctaagtaacttaaggaaaataaatcaacagagatattataagtattggtgagagaaagtaatatagtctaaataagtattatgtaataaatatgtaagaaaataggataacaaattctaagactaaatactattaataagtataaaaagtaccgtaagggaaagtataaaaatgattattttataagcaatcataaatatattaattatattaatgatgtaccttttgtataatgggtcagcaagtaattaatattagtaaaactaataagttataaataaatagataaaaataatatatatataaaaatatataaataatacatataaaaaaaaataatatgtaatatttaattaatattaattgacccgaaagcaaacgatctaactatgataagatgggtaaacgatcgaacaggttgatg

SEQ ID NO: 166177 - DNA, 600 bp, Saccharomyces pastorianus
tatattaaagatgggttaatctatattaataaaataatatcttaaaatataaatattaaaacatttataattataaaaatatatatattaatatatatataattatataaactaataaagatcaggaaaagtgttagtgtataccgtaatgtagaccgactcaggtatgtaagtagagaatatgaaggtgaattagataattaaagggaaggaactcggcaaaaacagctctaaagttagtcaataaagagtaataagaacaaagttgtacaactgtttactaaaaacaccgcactttgcagaaacgataagtttaagtataaggtgtgaactctgctccatgcttaatatataaattatatggtttaacgattatataattaaatttaggtaaatagcagccttattatgagggttataatgtagcgaaattccttggcctataattgaggtcccgcatgaatgacgtaatgatacaacaactgtctcccctttaagctaagtgaaattgaaatcgtagtgaagatgctatgtaccttcagcaagacggaaagaccctatgcagctttactgtaattagatagatcgaattattgttta

SEQ ID NO: 166178 - DNA, 600 bp, Saccharomyces pastorianus
attaattaattattgttattatataaattatataataaatatatggcatttagaaaatcaaatgtatatttaagtttagtgaacagttatgttattgattcaccacaaccatcatcaattagttattgatgaaatataggttcattattaggtttatgtttagttattcaaattttaacaggtatttttatggctatgcattattcatctaatattgagttagcattttcatcagtagaacatattatgagagatactcataatggttatattttaagatatttacatgctaatggtgcatcattcttctttttagttatgtatatgcatatggctaaaggtatgtattatggttcatatagatctccaagagtactattatgaaatgtaggtgttatcattttcgtattaacaattgctacagctttcttaggttaacaacaacaatagcctaaaatcatataattattaatattatatggtagtctataaaaatatatctataatagataactgttattaggaatattatattaaaatataggcaatattagtgaaaacgatcaaagattaatacagttgagatcgtcggttaaataa

SEQ ID NO: 166179 - DNA, 8391 bp, Saccharomyces pastorianus
atttatatgcaataggattattagaatatgttctaacaattgtatataacattcaagatactaaacctaaaataacaaataaataaaacataatattatcatgtaattctaaaataccttcttgatttggtgttgctgaatcctgaaaataacatgcatatggtgttggtacgtcatttataatgactgttgttaattgtaatcttaataaatctaacataaatcttttttaacctttagactttattgtctatttttaatatgttaattctacttataaaaataaaaaaaaaatattaatacttaaacctaaaatattaatatcatattaagatttatctcttaatatattacataaatatcatattaataatttaatctaacttaatatatttataatacctaatattattataattattatattattattatattataactatattattatatcttattttttatatactctttttttatatatctttaaaaatatattattagtatatttataagcctatttattagtatatttataaatatattattagtatatttattagtttattttataagtatatttattagtatatttattagtctatttataagtatatttattagttatagaagaagattattctattttattaaatatttatttatatattttattatatattctattaactatttattatttaattattaaatatttattatatattctattatatatttagaagaatattattagtatcgggtcctaaggacccgaatacaaaaagtagattattaatatatcttatatattatctattaataacaatattatttatatataacaatattatttatttataacaatattatttattattttatttatattatatttattatatttatttatattacttgtagaaggaattgaaccttacattatttatttatgagacaaatgttttaaccaattaaactatacaagctattatatctatatattattaataatttatatcttcttaaaatattttaatatattattatatttaaatagccccacaaggagtcccgggccccccgggggggcccaattggtaccccgctaggagttaattattattatatattgtattatatattgtattatattatatatagatattatcgtccccaataggaattgaacccatctattctcattaacagtgagatgctttaaccgataagctataaggacatatattattaaataaagttatattaatataaaatctaagaattattatatatatattattttattatattattttagcctcggtcccccacccctggggatcgggaccccgtaagagtaattattatttattatattttattaatttatgaagggaataggaattgaacctatgaagatctaaatcattgagtttacagctcaactccaactaccaacattgaaaatccctcctatataaatatattatatattatatattatatatattatatattatttattaaatatatatataacttcttaattattattatgatatatttatcatttaaatatattgttattattagaatatactttaagatatattaaaatataaaataaggacatatcatatatatttatattttaatatattatatattactattattattataaattattaaatatacattatattatatataaattatatatattatctctctctattaataaatattaaatattgtattatattatattaaattatataactattaataaatattgtattagatatctattaataatattgtattagatatctattaataatattgtataaaattatattatattagattatattattataatattgtaattattgaatatatattattataatattgtaattattgaatatatattattatatttaatgaaactaacagggattgaacctatatttgtaccttatcaaaatactattctaaccaattgaattatagtttctattatatctacatatgtatatattatattaatattaatatattatattatattaatatttatattatctttataattatatttatatatattattggagttaatgagacttgaactcatattaaatgcatgcaacgcagtcgttctaccaaattgaactataacccctaatacttaaattatataatcttatttattattattaaatatattattaattaataaatttaattaaataaagaagaatgtatattatatattattagatattatttagaataatattaacactatacattattacttataataactctctttaatagattattataacattattaaaatattaatagtataatatctcctacaattggcgtccgccccccccctatttatatataataaattagtccgtaggagaaataatcagaaataataatttacttaatggggggcgggccggactatatatttatatataatattattaaaacattaatagtataatatctatatattttttataaaacattaatatttctttatttctttattattatatataataatttattatattttattgtatatatatgaataaattattatatattatattgtattattatatatgaataattattaagtatagtatatatgattatatatataatatcctataggatttgaacctatataattagattcgtattctaatattttaccattaaattaaggatataaacggaaaatatgagattcgaactcataagaatttacaattcaattacttagcaaataatctactttacctatagttaattttcctaattaatatatatattaatatataaaaaatatatatttataaattattatataaatatatgatcttatcttatcttatcttatcttatttatcttatcttatttatcttattttatcttagccccgggcccggacgggcccgggaccccgcaaggagtttattctattaatataaaaaggtataatagatttcattaattattattattattaatatgatatatattatcatattatatatatgaattaaataatattataaaagatattaaatatagaattaaataattaaaaatattgattatattagtttattataaaatatttatatatgtttattataattagagtattaaagagaatattatactatattataattatattaaaaatattaattcgttaatattattaaagtatttataaggatatatatatatatacaatatattaaatatataacatatagaataaatgtattaatgattaatattatttaaatcaatgtattaattattaacgaatctaatcagatttgcactgacatcctccattatgacaaaatggtactttactattaagctacagatcctttataataatatttatattaaataaatatatattattttatagatagcgagaatcgaactcgcattcaatgtttggaagacatccagtttaccaattaacttatatctattatttattattatatatttattactctctccatgatttgaacatggaatattaatattagaagtattatgctttaaccattaagctaagagagcttatttaattaatattatattatattatttatgaattatgagaatagctggagttgaaccaagcatgggttacttaaaagataactgttttaccattaaacaatattctctatatatacctttatatataaatatctatttaatatataaatatactttatagccccattaaaaggtattatattatttattatacatattgttatatctttatatatatatattcattattaattaattaattaatattcattaataaagtcttatattgttaattatttatttttaagtataagtattattattattatatataattttttataaaatatttattattatgataaacttatattatatatatatatatgtaatttaatatattttatgatattatattatattatagccccgtaaggagccccggacccccctaagtaaattattattttatgattatttatcatttattatatataaatagttaattattattttatgattatttatcatttattatatataaataggggggcccaattgaattgggaccccgcaaggagtattcattatatatattatatgactctatattatttatattagtctataacttaataagtatattaataaagataaattatttattagccccggggccgaatggccccaatttaattgggaccccgaaggagtattaataaattatattaatcatttattatgattaaatatatattaattaatcaatcatatatttaattattaattattaattattattatcatttatattgaatcggtttgattcgaacaaacaaactccaaactcaaattttggtaacttacctattagtctacgactcattaatatatatatattatttattattatatatattattgctatttaaaggacttgaaccttcatactgtaaagtaatacatcttaagagtatcgtgtctaccaattccaccaaaatagcttattatttagtattacatatctttaataaattaaattaactccttgcggtgtcccgggcctcccggggcccggggctataattaaatatttattaaatatattatatatatatttttattatatttttatacttataagattatatatattattacttataatacatttttatataaatctatatacaaacttaattaaaattatctaaatttattaaaaagaagattattaatttataatatatagaataaatgaatgaatgaatgaataaatgaatgaatgaatgatattattaatattattttttatataaaaactaggagtatattatattattttatatatattttttataatcccactaggagatattcatatttatattatttatagggtgaatactgagaatcgaactcagatttaacgcaccacaagcgtattttctaccattgaaatatattcacctttatttattaattaattaattaattaatatacatattattatatttttatattatttatatatttataaagagatgaagagaatcgaactcttaataagtagatttgcaatctaatagtttaaccttaaaacaacacctccttcttatgtattcaataaaatataacctaactttatttatatattatttataatctcttataatatattaattaatatgatcttattatattcttttattaaatatattatattgttaattatttatttatattatattatattatattgttaattatttatttatattatattatttaattctttatattttattaagaatatataaagatgttttatataaatattatatatattttagatatagttttaattgaatatatatatttaaaggaggaatatattattaagatttaatattttatattattatatatataatgatatagattattaattaataaatcatattatacatttattatcattatttattattatttgttgttatattagggatttgaaccccaaacctttcgattacaaaacgaatgctctaccaattgagctaatataactatataattaatcctcctctcgggatcccggtcccgtcaataaattattatttatgataatttattatttattattaataaataggaattagggctaaataaaaattctattaatattattacatattaattaatatatataaatatatctttaaattatttaatctcatatataaattattatatatttattatatagaatgtatattatattataaataatattataattattaaattaaaagataaaatactcatgaaggatatatatttattattttataagattttatatattataataatatattaaaatactcattatattatattatataattaaagtaaagaattaatattaaaaagacatataaattatttattataactccttgtggggtcccaattcaattgggcccccctaagtaaattattattttatgattatttatcatttattatatataaatagttaattattattttatgattatttatcatttattatatataaatagggggcccaatttaatttaatttaatttaatttaattggggctaaatattaaaaatatatatagattatatactataaatcatattatatgattatataaataagaatttatgaatatattaatataattatattattaaataattagtagtaaaaagggtggggggggtatagaataatagattagatattatatagataactgataaattagtattttattaatattatatattaaatatataaataatatataaaacctattaattaaacaaatatatagaatatctctgactaatctacacatgctagtattaaattatcagataattatcttattaaaacaacttcatatttaatatgtattcaatatttatttattatcaacctagcttatctactatgacaattaattataatataaactaatatagataatatatatagaaattaattaattaattaagatatatattatagaattatcaatagatacaccatgggttgattcattatggtccttgcgtactaataatgagatttaatttgataatatttccttcagcagataggaaccatactgattcacatcgtatttaacccaactcacgtaacattttaattgacgaacagtcaaacccttcttagcttttacaaccaagaggaaatgttgagtcgacatcgaggtggcaaacataacttacaatatctactctttcgttatattaccctgttatccctagcgtaacttttattcgttatcaataacctttacaattagtgttatttgttcattatgccatacttacgtacttgtttcacttgtttgtgttacaattatcgcacagttataccattatattatttaattgattttctatattataatagaatttattattgttttccttacaattttactgtacatatttttatctattacttaaatatattcaatttataattaaattattaatataaatatatttaaatttataattaatatatataatatatatcattcttttattcaataattttatatattcatttatggacttattcagatacttttgctgataatgacgccccatcaaaactaccaattagagattgtctcttatttatattataatatataaattaatatatatatataatatattacttaagaattatatatctattaagtttaatataataattatattatattatttttattttttataagattagaattatcattaaattataataagtatctcattaatatctaaacgattacttataaatatattttttattatatatttataggattacttaatatgctgaatataataaacaataattcgatctatctaattacagtaaagctgcatagggtctttccgtcttgctgaaggtacatagcatcttcactacgatttcaatttcacttagcttaaaggggagacagttgttgtatcattacgtcattcatgcgggacctcaattataggccaaggaatttcgctacattataaccctcataataaggctgctatttacctaaatttaattatataatcgttaaaccatataatttatatattaagcatggagcagagttcacaccttatacttaaacttatcgtttctgcaaagtgcggtgtttttagtaaacagttgtacaactttgttcttattactctttattgactaactttagagctgtttttgccgagttccttccctttaattatctaattcaccttcatattctctacttacatacctgagtcggtctacattacggtatacactaacacttttcctgatctttattagtttatataattatatatatattaatatatatatttttataattataaatgttttaatatttatattttaagatattattttattaatatagattaacccatctttaatatatttttattcatatttttattaggggccgtacttttatagttaaaccttatgttttaggtgaaaaggtttatacctttttttcgttactcatgtcagcattctctatctaattattatatatattaattaataactaatatattttttcattaaatgttctattaccatattattattattatttagattaataataatatttagatattcagttaaata

SEQ ID NO: 166180 - DNA, 5026 bp, Saccharomyces pastorianus
gagcatagcgggcggacaccgtaggaaaatatataagattaaatatataaaatataatatatttaatacaatagatagatcttatataatatataataggaatcttatatgagattatataataataataaataataataataatatataataaataataataataatatataataaataattatagtccggcccgcccccgcggggggggggcggacgccgaaggagaaatataaagatatgtccttattttatattttaataaatttaataagttatgacaatatataatatatttaatatagataatatatctaataatattaattaattataaagtttcataaaatattttataataataataatttaactcctagcggggtaccaattgggcccccccggggggcccgggactcctagcggggctaaagaatatatatataaaatctcactccatgtataccattaggagaatataatatatatgaataaagaatatttatatttgatttaattttattttttttttattatcagataggatagactcgaactaactaggtctttctcccaaagaaagcgcctgaccttttggcttctatctgtattaatatataatatatactatatataataataataatacatatatatatatttatataaagtctatttattaattaattaattaattatatggatattatattataattaagcatatttctgtataataatataacttttatatatcttttatatataacgaggggttcggtcccgcccttgggagggcgggtccctcactccttcggcgtccggcccgcggggcggacccgactataaataagattaatatattataaaatatatcttaatttttataaagatataaagtataatatttctaataatctattaataataattataaagtgattaaaaatatataataatatatttattaagttttattttcattttatttatttatactaattactttattaatattgtatataataataataattatcctgttatattttttatattattaaacaattaataatatatataatgaataatatatataattatacaatataatttatatatttatgactttcctattaataatataatattttatataaaaactaggggttcggtcccgccatccatatggatatgggagggcggatacctcacttttatatataaatatgattataatatatattaatatagttccaatagatataccattagaataatattatatattaattattagcaataatacgatttgaacgtatataattaggtcatgaccctaaaatgttaaccaattacatcatattgcatttatatatttattatatcctttgagactttatattatattacttataaaatatatataataagaatatatgaatattctaaattatttaatactataaagaaattataacattaatattaatgaattattgatattctcctacaattggtgtccgtccgcggagcggagcgtagcggagcgtagcggagcgtagcggagcgtagcggagcgtagcgggcgggacttaataaatatataaaaaaaaagatcctatagttcgtatttaattattattttaaataattaataatttatattaatacctaataaataaaaaaaaataaaatgaataataaaaaaaaaaatagtcatgtggagtataaagtttataattaataaagggtaaataaaagaatattattaaattatattattaataaagatattaataataattatgatttttattttttttatttatcaatagtaaacaataataattatttattaactctaccgatatagaataaaacattttcaatagtagagataacaggtacaataattaagaaatatgcgaagtagataaatgtagcaatttgtcccattaagacataaggtacttctacatgacatgctccaatttgtcctaataatacgaaattgaatacaaagataaagaagaagaatttagagaatactttgaaagtattacctctaacaacacttctatcagtaaatggtaaaactaataacactaaaatagctgcaaacataagaataacacctaataatttatcaggaatagatcttaaaatagcatagaatggtaataagtatcattcaggtacgatagacgctggtgttactaaaggattacctggaatataattatcaggatgacctaaagtatttggtgaataaaatacaaataatgctaatactaacataaataaaaatacagttactaaatctttaaatacgaaatatgaatgcattggaattctatctaaattacctgtaatacctaatggattagatgaaccatgaatatgtaatgccatcatatgcataataaccattgctgcaataacaaaaggtactaagtaatgtaatgcaaagaatctttggattagaggatttgatacagagcaaaaaaaaaagaatgttgatagttacatataatattaaatatattatcctccttcatgatacaacattgcaatgttatattggtggggattgataaataacgtaatagttaataagtaatattatattcttactatactcaatatatcattatattgttcggactatatcttaatcctttatgcttataattatttattataatacccttcgagaatatagcttagcaatattaatcggcgggtcatatatttattgattgattgattgattgattgataaaataaatttatcgataaatattataatatattaataattttgaggaatatttaaattattattatatttagaaattagacgtaattcttttaaaaataataaatattgtaatcttttatatcctaataattttataggatttttatttataaattttacaatattttcaatacctctaatactttttagagtaattcttgaattattatctttattagtatatacattttgactaatttttaaataaattttaatagcttcaataatttttaaattattagtttgagatacttcaaaactagctagtttaatattatttttaagagtataaatattaaaataaccttcagcttcaataaaaccaattaatcaataagaaaaataatttttatttaaaatattttctaggttgtataatgattttataggacgtttatatttaggtaaatcattataatatttaatatcttttaataaattatctttaaaaaataaataatcataatatttatttgttaatataggatatttatcaaaaatagggataataatatttattaaatgatttttatttcttacattatatttacatatttctttaatagtaccatctttattttttatttttttaatagaaattttaccaactccaataatatttttaattttatataataatttaatatctctaatatttatttctattcctaattcatataataaatatttaccttttttagaaatagtaattcaaccatctccttcaaataaaccaacaatataagcataaataggattatctgtatttaattcatgattcttatcatgaataattatagtatttaaataactactatttagtctctgagtaattaatatttttattctaataaaatacaaatttaaaatatttattactgctgattttcttcttataataaacatttttactttattatttttatttcaaataccccctcaaaacattataattataattataatgtttgcggatcatttaataatatagtagttcattattcaaatgaagacgttccagcataaaacagatttatttaacattatattactataatgtggatcctctctatttaatcctcctcataatcaagctacaatgtcattacctacaaatggaattgctgaaaataaattagtaataactagtgcacctcaatgtgatatctgcccataaacacaacaatacaaaataaaaataaaaataataagattcatttaagaataataattactcatttaaatactaaatattaaatattaagtaattattaaagggtaaatataaataaaaaaaataggagatctaataaaatttaataataaagaatatattaaaatttatgtagatagtttttaattaagaatttagtagtattatttaatttataatcggaagctttaactaatagaacatttttttttagtagagacatattctaattcaaaaggtttaaaattttcaataaatggtttactataaacattaaaaaaaccttttaaataaggtataaaaatattaggaatataaatatagcctctttctttaatagctcttctaatagtttttttcattacaacataataaatgagaagttaagaatctagattgaaaaacacaaactaattcatcatttatattatataaagcgacagataaactagctcctttaataattttctctttacctattttttataatagtttataatcattatttaaattattataataaatattattatgtttatttatatattttattatattagatttatctatagctatatatttatctaaataaataccataaatattattagtaatagcatattttaatttattagtaataagatctaaagtatcaaatttagataaagaaaaattctttaaattaccactattatatgtaggtaattttaggtataaataaatttgttcaatactatataaaatatatctatcaatactttcattatcatatattttttttatatcatatacaaaagtatttaaaccatatttttttacatctaatgcaatattagaactaccacgtaatctatataaatgattattaaatctatcatatatattattatatcctgctgaaccaatataaaatttatttgtcattatattaccaatataataaataccttgtttttttattaaataatttataatttcttcttttttat

SEQ ID NO: 166181 - DNA, 600 bp, Saccharomyces pastorianus
cgccgattaatattgctaagctatattctcgaagggtattataataaataattataagcataaaggattaagatatagtccgaacaatataatgatatattgagtatagtaagaatataatattacttattaactattacgttatttatcaatccccaccaatataacattgcaatgttgtatcatgaaggaggataatatatttaatattatatgtaactatcaacattcttttttttttgctctgtatcaaatcctctaatccaaagattctttgcattacattacttagtaccttttgttattgcagcaatggttattatgcatatgatggcattacatattcatggttcatctaatccattaggtattacaggtaatttagatagaattccaatgcattcatatttcgtatttaaagatttagtaactgtatttttatttatgttagtattagcattatttgtattttattcaccaaatactttaggtcatcctgataattatattccaggtaatcctttagtaacaccagcgtctatcgtacctgaatgatacttattaccattctatgctattttaagatctattcctgataaa

SEQ ID NO: 166182 - DNA, 25 bp, Saccharomyces pastorianus
ggctaatgttatcttcttccctatg

SEQ ID NO: 166183 - DNA, 25 bp, Saccharomyces pastorianus
ggtatgcccagaagaattccagatt

SEQ ID NO: 166184 - DNA, 25 bp, Saccharomyces pastorianus
aattatgtagcttctattggttcat

SEQ ID NO: 166185 - DNA, 25 bp, Saccharomyces pastorianus
gaattccagattaccctgatgcttt

SEQ ID NO: 166186 - DNA, 25 bp, Saccharomyces pastorianus
ggttcatttattgcacttatctcat

SEQ ID NO: 166187 - DNA, 25 bp, Saccharomyces pastorianus
gtttactctaaagcacccgattttg

SEQ ID NO: 166188 - DNA, 25 bp, Saccharomyces pastorianus
aattcttattaacttctccaccagc

SEQ ID NO: 166189 - DNA, 25 bp, Saccharomyces pastorianus
accctgatgctttcgctggttgaaa

SEQ ID NO: 166190 - DNA, 25 bp, Saccharomyces pastorianus
attatcaatgggtgctattttctca

SEQ ID NO: 166191 - DNA, 25 bp, Saccharomyces pastorianus
tatcttcttccctatgcatttctta

SEQ ID NO: 166192 - DNA, 25 bp, Saccharomyces pastorianus
tcaattctgattaatcttcatcggg

SEQ ID NO: 166193 - DNA, 25 bp, Saccharomyces pastorianus
ttctcatggaatagttggaaaaccc

SEQ ID NO: 166194 - DNA, 25 bp, Saccharomyces pastorianus
gtaaagtattgaccgatcctaattc

SEQ ID NO: 166195 - DNA, 25 bp, Saccharomyces pastorianus
aaaatggttattgttctcatggaat

SEQ ID NO: 166196 - DNA, 25 bp, Saccharomyces pastorianus
gattagctaccaattttactacatt

SEQ ID NO: 166197 - DNA, 25 bp, Saccharomyces pastorianus
ctgattctaattatactcctgatga

SEQ ID NO: 166198 - DNA, 25 bp, Saccharomyces pastorianus
atcattatttagtggtatttgtcaa

SEQ ID NO: 166199 - DNA, 25 bp, Saccharomyces pastorianus
attcatgttgtttaacgttagcaag

SEQ ID NO: 166200 - DNA, 25 bp, Saccharomyces pastorianus
gtatttgtcaagtttgtggttctaa

SEQ ID NO: 166201 - DNA, 25 bp, Saccharomyces pastorianus
aatgcattatttagctgttggtaga

SEQ ID NO: 166202 - DNA, 25 bp, Saccharomyces pastorianus
gaccgatcctaattcaaaagtaagt

SEQ ID NO: 166203 - DNA, 25 bp, Saccharomyces pastorianus
atatatgttacctagatctttatca

SEQ ID NO: 166204 - DNA, 25 bp, Saccharomyces pastorianus
ggtgttattcttatgtttgcagcta

SEQ ID NO: 166205 - DNA, 25 bp, Saccharomyces pastorianus
gagcatgtcatgtagaagtacctta

SEQ ID NO: 166206 - DNA, 25 bp, Saccharomyces pastorianus
gtacctgttatctctactattgaaa

SEQ ID NO: 166207 - DNA, 25 bp, Saccharomyces pastorianus
gtgttattagttttaccatttactg

SEQ ID NO: 166208 - DNA, 25 bp, Saccharomyces pastorianus
attcttcttctttatctttgtattc

SEQ ID NO: 166209 - DNA, 25 bp, Saccharomyces pastorianus
gggacaaattgctacatttatctac

SEQ ID NO: 166210 - DNA, 25 bp, Saccharomyces pastorianus
gtttgcagctattttagtgttatta

SEQ ID NO: 166211 - DNA, 25 bp, Saccharomyces pastorianus
gaagtaccttatgtcttaatgggac

SEQ ID NO: 166212 - DNA, 25 bp, Saccharomyces pastorianus
gtattcaatttcgtattattaggac

SEQ ID NO: 166213 - DNA, 25 bp, Saccharomyces pastorianus
gcatatttcttaattattgtacctg

SEQ ID NO: 166214 - DNA, 25 bp, Saccharomyces pastorianus
atttatctacttcgcatatttctta

SEQ ID NO: 166215 - DNA, 25 bp, Saccharomyces pastorianus
agttccattttattttatgaatcaa

SEQ ID NO: 166216 - DNA, 25 bp, Saccharomyces pastorianus
tcaattaacttatggtttcttatta

SEQ ID NO: 166217 - DNA, 25 bp, Saccharomyces pastorianus
ttctcacaattatttttacctatga

SEQ ID NO: 166218 - DNA, 25 bp, Saccharomyces pastorianus
cttatggtttcttattaataattct

SEQ ID NO: 166219 - DNA, 25 bp, Saccharomyces pastorianus
attatttttacctatgatcttaaga

SEQ ID NO: 166220 - DNA, 25 bp, Saccharomyces pastorianus
ttattctcacaattatttttaccta

SEQ ID NO: 166221 - DNA, 25 bp, Saccharomyces pastorianus
atttttacctatgatcttaagatta

SEQ ID NO: 166222 - DNA, 25 bp, Saccharomyces pastorianus
tttacctatgatcttaagattatac

SEQ ID NO: 166223 - DNA, 25 bp, Saccharomyces pastorianus
gaatcaattaacttatggtttctta

SEQ ID NO: 166224 - DNA, 25 bp, Saccharomyces pastorianus
acaattatttttacctatgatctta

SEQ ID NO: 166225 - DNA, 25 bp, Saccharomyces pastorianus
cacaattatttttacctatgatctt

SEQ ID NO: 166226 - DNA, 25 bp, Saccharomyces pastorianus
ggttttgtacctttagctataatct

SEQ ID NO: 166227 - DNA, 25 bp, Saccharomyces pastorianus
attccttattcattcgctttatcag

SEQ ID NO: 166228 - DNA, 25 bp, Saccharomyces pastorianus
tggtacacctttaccattagttcct

SEQ ID NO: 166229 - DNA, 25 bp, Saccharomyces pastorianus
ccctatgatctttactttctttatg

SEQ ID NO: 166230 - DNA, 25 bp, Saccharomyces pastorianus
aacatggatgactattcttctcatt

SEQ ID NO: 166231 - DNA, 25 bp, Saccharomyces pastorianus
aggtttatatttccctatgatcttt

SEQ ID NO: 166232 - DNA, 25 bp, Saccharomyces pastorianus
tatttgttcctactggtacaccttt

SEQ ID NO: 166233 - DNA, 25 bp, Saccharomyces pastorianus
tcttctcattatttgttcctactgg

SEQ ID NO: 166234 - DNA, 25 bp, Saccharomyces pastorianus
agaattcgctatcggtattatccaa

SEQ ID NO: 166235 - DNA, 25 bp, Saccharomyces pastorianus
tgtttgatgtatcttaactgcttct

SEQ ID NO: 166236 - DNA, 25 bp, Saccharomyces pastorianus
gctagatctatttctttaggtttaa

SEQ ID NO: 166237 - DNA, 25 bp, Saccharomyces pastorianus
ggagcaggtatctcaacaattggtt

SEQ ID NO: 166238 - DNA, 25 bp, Saccharomyces pastorianus
tggtgtttcaagaaacccttctatt

SEQ ID NO: 166239 - DNA, 25 bp, Saccharomyces pastorianus
attgctatcgtattcgcagctttaa

SEQ ID NO: 166240 - DNA, 25 bp, Saccharomyces pastorianus
cgcagctttaattaatggtgtttca

SEQ ID NO: 166241 - DNA, 25 bp, Saccharomyces pastorianus
ggctattttaggtttcgcattatca

SEQ ID NO: 166242 - DNA, 25 bp, Saccharomyces pastorianus
acaattggtttattaggagcaggta

SEQ ID NO: 166243 - DNA, 25 bp, Saccharomyces pastorianus
aaagatctagtattccctatggcta

SEQ ID NO: 166244 - DNA, 25 bp, Saccharomyces pastorianus
tcgcattatcagaagctacaggttt

SEQ ID NO: 166245 - DNA, 25 bp, Saccharomyces pastorianus
ctagtattccctatggctattttag

SEQ ID NO: 166246 - DNA, 25 bp, Saccharomyces pastorianus
gaaacccttctattaaagatctagt

SEQ ID NO: 166247 - DNA, 25 bp, Saccharomyces pastorianus
ggtattggtattgctatcgtattcg

SEQ ID NO: 166248 - DNA, 25 bp, Saccharomyces pastorianus
ggtagaactagtactcttattttat

SEQ ID NO: 166249 - DNA, 25 bp, Saccharomyces pastorianus
attggtagaactagtactcttattt

SEQ ID NO: 166250 - DNA, 25 bp, Saccharomyces pastorianus
aatatttagtaggttgatctattaa

SEQ ID NO: 166251 - DNA, 25 bp, Saccharomyces pastorianus
agagtaacaattgaacctattaaat

SEQ ID NO: 166252 - DNA, 25 bp, Saccharomyces pastorianus
gtagaactagtactcttattttatt

SEQ ID NO: 166253 - DNA, 25 bp, Saccharomyces pastorianus
taaattatatctcttctaatcataa

SEQ ID NO: 166254 - DNA, 25 bp, Saccharomyces pastorianus
ctagtactcttattttattaaatgg

SEQ ID NO: 166255 - DNA, 25 bp, Saccharomyces pastorianus
attacaccttatggaattaataata

SEQ ID NO: 166256 - DNA, 25 bp, Saccharomyces pastorianus
atatctcttctaatcataatttata

SEQ ID NO: 166257 - DNA, 25 bp, Saccharomyces pastorianus
ggaattataacaaattatcaacgta

SEQ ID NO: 166258 - DNA, 25 bp, Saccharomyces pastorianus
aatattggtagaactagtactctta

SEQ ID NO: 166259 - DNA, 25 bp, Saccharomyces pastorianus
ttaactgctggacatcacgtaggat

SEQ ID NO: 166260 - DNA, 25 bp, Saccharomyces pastorianus
atgccggaactggtttacatttctt

SEQ ID NO: 166261 - DNA, 25 bp, Saccharomyces pastorianus
tatcatctggtgctactgtaactta

SEQ ID NO: 166262 - DNA, 25 bp, Saccharomyces pastorianus
ctatggttcagtattctatgccgga

SEQ ID NO: 166263 - DNA, 25 bp, Saccharomyces pastorianus
ggttcatgttgaccacctgtaggta

SEQ ID NO: 166264 - DNA, 25 bp, Saccharomyces pastorianus
gagcatatttccattcagctatgag

SEQ ID NO: 166265 - DNA, 25 bp, Saccharomyces pastorianus
ctatctctgatggtatctatggttc

SEQ ID NO: 166266 - DNA, 25 bp, Saccharomyces pastorianus
agctatgagtcctgatgttctatta

SEQ ID NO: 166267 - DNA, 25 bp, Saccharomyces pastorianus
gtcatcatgctttaattgctggtaa

SEQ ID NO: 166268 - DNA, 25 bp, Saccharomyces pastorianus
ctaatgctgcatttactatctctga

SEQ ID NO: 166269 - DNA, 25 bp, Saccharomyces pastorianus
aatcttcgctggtttattttgagca

SEQ ID NO: 166270 - DNA, 25 bp, Saccharomyces pastorianus
tcattgtaccgaccgttagatacga

SEQ ID NO: 166271 - DNA, 25 bp, Saccharomyces pastorianus
gttagatacgacgatcgacactatt

SEQ ID NO: 166272 - DNA, 25 bp, Saccharomyces pastorianus
ttcccgtggatcaaccctattaaca

SEQ ID NO: 166273 - DNA, 25 bp, Saccharomyces pastorianus
gtaccgaccgttagatacgacgatc

SEQ ID NO: 166274 - DNA, 25 bp, Saccharomyces pastorianus
attctcattgtaccgaccgttagat

SEQ ID NO: 166275 - DNA, 25 bp, Saccharomyces pastorianus
tacgacgatcgacactattaaatat

SEQ ID NO: 166276 - DNA, 25 bp, Saccharomyces pastorianus
tatataattttttcccgtggatcaa

SEQ ID NO: 166277 - DNA, 25 bp, Saccharomyces pastorianus
aaaactattctcattgtaccgaccg

SEQ ID NO: 166278 - DNA, 25 bp, Saccharomyces pastorianus
actattctcattgtaccgaccgtta

SEQ ID NO: 166279 - DNA, 25 bp, Saccharomyces pastorianus
gtggatcaaccctattaacaactgg

SEQ ID NO: 166280 - DNA, 25 bp, Saccharomyces pastorianus
tattaaagacatagtccgaacaata

SEQ ID NO: 166281 - DNA, 25 bp, Saccharomyces pastorianus
gtttatatccaccattacataatag

SEQ ID NO: 166282 - DNA, 25 bp, Saccharomyces pastorianus
attttagtttatatccaccattaca

SEQ ID NO: 166283 - DNA, 25 bp, Saccharomyces pastorianus
gagactagtgcgttaaatatcctat

SEQ ID NO: 166284 - DNA, 25 bp, Saccharomyces pastorianus
aggaacttcagagactagtgcgtta

SEQ ID NO: 166285 - DNA, 25 bp, Saccharomyces pastorianus
gaggttataattattcagctcttaa

SEQ ID NO: 166286 - DNA, 25 bp, Saccharomyces pastorianus
gaaaatcagtagttggaggttataa

SEQ ID NO: 166287 - DNA, 25 bp, Saccharomyces pastorianus
atataatacttgttattggtcgaaa

SEQ ID NO: 166288 - DNA, 25 bp, Saccharomyces pastorianus
gtcgaaaataatatctcactttaat

SEQ ID NO: 166289 - DNA, 25 bp, Saccharomyces pastorianus
aaagctttagatggtagtatttctt

SEQ ID NO: 166290 - DNA, 25 bp, Saccharomyces pastorianus
tacagtccacagttaataaggtttg

SEQ ID NO: 166291 - DNA, 25 bp, Saccharomyces pastorianus
aggataaagatacagtccacagtta

SEQ ID NO: 166292 - DNA, 25 bp, Saccharomyces pastorianus
caaggtaagccctataaattgttat

SEQ ID NO: 166293 - DNA, 25 bp, Saccharomyces pastorianus
aaccacttattgaaaatctgtctga

SEQ ID NO: 166294 - DNA, 25 bp, Saccharomyces pastorianus
gatgaaaatctgctaacttatatta

SEQ ID NO: 166295 - DNA, 25 bp, Saccharomyces pastorianus
gagccgtatgctatgaaagtcgcat

SEQ ID NO: 166296 - DNA, 25 bp, Saccharomyces pastorianus
atagatattgcgtgagccgtatgct

SEQ ID NO: 166297 - DNA, 25 bp, Saccharomyces pastorianus
aaggtgatatgcctatttttattat

SEQ ID NO: 166298 - DNA, 25 bp, Saccharomyces pastorianus
gtgttggaaattagcatacgataaa

SEQ ID NO: 166299 - DNA, 25 bp, Saccharomyces pastorianus
gaaaatctgtctgataattcaataa

SEQ ID NO: 166300 - DNA, 25 bp, Saccharomyces pastorianus
aatgattgatgttatgtgttggaaa

SEQ ID NO: 166301 - DNA, 25 bp, Saccharomyces pastorianus
aaagtcgcatgtacggttcttaccg

SEQ ID NO: 166302 - DNA, 25 bp, Saccharomyces pastorianus
attgcgtgagccgtatgctatgaaa

SEQ ID NO: 166303 - DNA, 25 bp, Saccharomyces pastorianus
ggagctagtttatctgtcgctttat

SEQ ID NO: 166304 - DNA, 25 bp, Saccharomyces pastorianus
gtttatctgtcgctttatataatat

SEQ ID NO: 166305 - DNA, 25 bp, Saccharomyces pastorianus
taacttctcatttattatgttgtaa

SEQ ID NO: 166306 - DNA, 25 bp, Saccharomyces pastorianus
taaaggagctagtttatctgtcgct

SEQ ID NO: 166307 - DNA, 25 bp, Saccharomyces pastorianus
gattcttaacttctcatttattatg

SEQ ID NO: 166308 - DNA, 25 bp, Saccharomyces pastorianus
gtttgtgtttttcaatctagattct

SEQ ID NO: 166309 - DNA, 25 bp, Saccharomyces pastorianus
gtgtttttcaatctagattcttaac

SEQ ID NO: 166310 - DNA, 25 bp, Saccharomyces pastorianus
gctagtttatctgtcgctttatata

SEQ ID NO: 166311 - DNA, 25 bp, Saccharomyces pastorianus
caatctagattcttaacttctcatt

SEQ ID NO: 166312 - DNA, 25 bp, Saccharomyces pastorianus
gaattagtttgtgtttttcaatcta

SEQ ID NO: 166313 - DNA, 25 bp, Saccharomyces pastorianus
aaggagctagtttatctgtcgcttt

SEQ ID NO: 166314 - DNA, 25 bp, Saccharomyces pastorianus
gtcggtttacattttaattgctcaa

SEQ ID NO: 166315 - DNA, 25 bp, Saccharomyces pastorianus
ctatttattataagattctctggac

SEQ ID NO: 166316 - DNA, 25 bp, Saccharomyces pastorianus
ctggacttattaatgtcggtttaca

SEQ ID NO: 166317 - DNA, 25 bp, Saccharomyces pastorianus
tttacattttaattgctcaaaacac

SEQ ID NO: 166318 - DNA, 25 bp, Saccharomyces pastorianus
gattctctggacttattaatgtcgg

SEQ ID NO: 166319 - DNA, 25 bp, Saccharomyces pastorianus
taatagttttataaattgacagtct

SEQ ID NO: 166320 - DNA, 25 bp, Saccharomyces pastorianus
gaaaacctattgatagtacacctat

SEQ ID NO: 166321 - DNA, 25 bp, Saccharomyces pastorianus
tctctggacttattaatgtcggttt

SEQ ID NO: 166322 - DNA, 25 bp, Saccharomyces pastorianus
taactaattgaaaacctattgatag

SEQ ID NO: 166323 - DNA, 25 bp, Saccharomyces pastorianus
acctattgatagtacacctatattt

SEQ ID NO: 166324 - DNA, 25 bp, Saccharomyces pastorianus
taagtttattggtgtaggagtatat

SEQ ID NO: 166325 - DNA, 25 bp, Saccharomyces pastorianus
gatagagaatgctgacatgagtaac

SEQ ID NO: 166326 - DNA, 25 bp, Saccharomyces pastorianus
gaatgctgacatgagtaacgaaaaa

SEQ ID NO: 166327 - DNA, 25 bp, Saccharomyces pastorianus
gaacatgtaacaatgcactgattta

SEQ ID NO: 166328 - DNA, 25 bp, Saccharomyces pastorianus
gcccagattaagatataaagttcct

SEQ ID NO: 166329 - DNA, 25 bp, Saccharomyces pastorianus
gtaacaatgcactgatttataataa

SEQ ID NO: 166330 - DNA, 25 bp, Saccharomyces pastorianus
gataatatacggatcttaataataa

SEQ ID NO: 166331 - DNA, 25 bp, Saccharomyces pastorianus
tataatcagttaatgggtttgacaa

SEQ ID NO: 166332 - DNA, 25 bp, Saccharomyces pastorianus
gggaaacagcccagattaagatata

SEQ ID NO: 166333 - DNA, 25 bp, Saccharomyces pastorianus
ataaccactttttaatgaacatgta

SEQ ID NO: 166334 - DNA, 25 bp, Saccharomyces pastorianus
tacggcccctaataaaaatatgaat

SEQ ID NO: 166335 - DNA, 25 bp, Saccharomyces pastorianus
gaaacagcccagattaagatataaa

SEQ ID NO: 166336 - DNA, 25 bp, Saccharomyces pastorianus
gaaatactaccatctaaagcttttt

SEQ ID NO: 166337 - DNA, 25 bp, Saccharomyces pastorianus
tatactccaaaactaccatcagcgt

SEQ ID NO: 166338 - DNA, 25 bp, Saccharomyces pastorianus
aacgcactagtctctgaagttcctt

SEQ ID NO: 166339 - DNA, 25 bp, Saccharomyces pastorianus
taattttatctaatccttctttagt

SEQ ID NO: 166340 - DNA, 25 bp, Saccharomyces pastorianus
taacctccaactactgattttcttt

SEQ ID NO: 166341 - DNA, 25 bp, Saccharomyces pastorianus
gtctctgaagttccttttaatagat

SEQ ID NO: 166342 - DNA, 25 bp, Saccharomyces pastorianus
ccatcagcgtcagtaaaaccagtta

SEQ ID NO: 166343 - DNA, 25 bp, Saccharomyces pastorianus
atcaacatgtctttgtataattcta

SEQ ID NO: 166344 - DNA, 25 bp, Saccharomyces pastorianus
gaataattataacctccaactactg

SEQ ID NO: 166345 - DNA, 25 bp, Saccharomyces pastorianus
actaccatctaaagctttttgaaca

SEQ ID NO: 166346 - DNA, 25 bp, Saccharomyces pastorianus
ggatatttaacgcactagtctctga

SEQ ID NO: 166347 - DNA, 25 bp, Saccharomyces pastorianus
tcggtcccgccctatatataaatat

SEQ ID NO: 166348 - DNA, 25 bp, Saccharomyces pastorianus
cggtcccgccctatatataaatata

SEQ ID NO: 166349 - DNA, 25 bp, Saccharomyces pastorianus
atccctaggatggttattatttatt

SEQ ID NO: 166350 - DNA, 25 bp, Saccharomyces pastorianus
ccctaggatggttattatttattat

SEQ ID NO: 166351 - DNA, 25 bp, Saccharomyces pastorianus
gaagtacatccctaggatggttatt

SEQ ID NO: 166352 - DNA, 25 bp, Saccharomyces pastorianus
aagagctatgaagtacatccctagg

SEQ ID NO: 166353 - DNA, 25 bp, Saccharomyces pastorianus
ataagagctatgaagtacatcccta

SEQ ID NO: 166354 - DNA, 25 bp, Saccharomyces pastorianus
gctatgaagtacatccctaggatgg

SEQ ID NO: 166355 - DNA, 25 bp, Saccharomyces pastorianus
gagctatgaagtacatccctaggat

SEQ ID NO: 166356 - DNA, 25 bp, Saccharomyces pastorianus
ttcggtcccgccctatatataaata

SEQ ID NO: 166357 - DNA, 25 bp, Saccharomyces pastorianus
aggggcggtgaaccagacttattat

SEQ ID NO: 166358 - DNA, 25 bp, Saccharomyces pastorianus
aggacatgacacatgcgaatcatac

SEQ ID NO: 166359 - DNA, 25 bp, Saccharomyces pastorianus
gacacatgcgaatcatacgtttatt

SEQ ID NO: 166360 - DNA, 25 bp, Saccharomyces pastorianus
catgcgaatcatacgtttattatta

SEQ ID NO: 166361 - DNA, 25 bp, Saccharomyces pastorianus
gacatgacacatgcgaatcatacgt

SEQ ID NO: 166362 - DNA, 25 bp, Saccharomyces pastorianus
gcgctaaataaggacatgacacatg

SEQ ID NO: 166363 - DNA, 25 bp, Saccharomyces pastorianus
gttggttcagattaagcgctaaata

SEQ ID NO: 166364 - DNA, 25 bp, Saccharomyces pastorianus
gatgttggttcagattaagcgctaa

SEQ ID NO: 166365 - DNA, 25 bp, Saccharomyces pastorianus
ggttcagattaagcgctaaataagg

SEQ ID NO: 166366 - DNA, 25 bp, Saccharomyces pastorianus
gcgaatcatacgtttattattaata

SEQ ID NO: 166367 - DNA, 25 bp, Saccharomyces pastorianus
tatgatgttggttcagattaagcgc

SEQ ID NO: 166368 - DNA, 25 bp, Saccharomyces pastorianus
aaatgtggtgtaaacgtgagtaatt

SEQ ID NO: 166369 - DNA, 25 bp, Saccharomyces pastorianus
aatatttctatttaggctactatat

SEQ ID NO: 166370 - DNA, 25 bp, Saccharomyces pastorianus
taatcaggagtattggaatcttaat

SEQ ID NO: 166371 - DNA, 25 bp, Saccharomyces pastorianus
ccctatatttcctaaacctagatat

SEQ ID NO: 166372 - DNA, 25 bp, Saccharomyces pastorianus
aggagattagcttaattggtatagc

SEQ ID NO: 166373 - DNA, 25 bp, Saccharomyces pastorianus
ggtatagcattcgttttacacacga

SEQ ID NO: 166374 - DNA, 25 bp, Saccharomyces pastorianus
agaccctatatatatatcctatgag

SEQ ID NO: 166375 - DNA, 25 bp, Saccharomyces pastorianus
cgttttacacacgaaagattatagg

SEQ ID NO: 166376 - DNA, 25 bp, Saccharomyces pastorianus
gcttaattggtatagcattcgtttt

SEQ ID NO: 166377 - DNA, 25 bp, Saccharomyces pastorianus
tataggttcgaaccctatatttcct

SEQ ID NO: 166378 - DNA, 25 bp, Saccharomyces pastorianus
gtattggaatcttaatagaccctat

SEQ ID NO: 166379 - DNA, 25 bp, Saccharomyces pastorianus
gaaagattataggttcgaaccctat

SEQ ID NO: 166380 - DNA, 25 bp, Saccharomyces pastorianus
gattaaatagagaggatccacatta

SEQ ID NO: 166381 - DNA, 25 bp, Saccharomyces pastorianus
gcaattccatttgtaggtaatgaca

SEQ ID NO: 166382 - DNA, 25 bp, Saccharomyces pastorianus
gagaggatccacattatagtaatat

SEQ ID NO: 166383 - DNA, 25 bp, Saccharomyces pastorianus
cacattgaggtgcactagttattac

SEQ ID NO: 166384 - DNA, 25 bp, Saccharomyces pastorianus
ggtaatgacattgtagcttgattat

SEQ ID NO: 166385 - DNA, 25 bp, Saccharomyces pastorianus
ttgtagcttgattatgaggaggatt

SEQ ID NO: 166386 - DNA, 25 bp, Saccharomyces pastorianus
gaggtgcactagttattactaattt

SEQ ID NO: 166387 - DNA, 25 bp, Saccharomyces pastorianus
gttttatgctggaacgtcttcattt

SEQ ID NO: 166388 - DNA, 25 bp, Saccharomyces pastorianus
tgctggaacgtcttcatttgaataa

SEQ ID NO: 166389 - DNA, 25 bp, Saccharomyces pastorianus
tattttcagcaattccatttgtagg

SEQ ID NO: 166390 - DNA, 25 bp, Saccharomyces pastorianus
aaatctgttttatgctggaacgtct

SEQ ID NO: 166391 - DNA, 25 bp, Saccharomyces pastorianus
ccgcggcacaaacccagcttagctg

SEQ ID NO: 166392 - DNA, 25 bp, Saccharomyces pastorianus
ccagcagtcgcggtaacacaaagag

SEQ ID NO: 166393 - DNA, 25 bp, Saccharomyces pastorianus
ttgtgaccgcgggtacgatataata

SEQ ID NO: 166394 - DNA, 25 bp, Saccharomyces pastorianus
tagtcctgacaaatatttgtgccag

SEQ ID NO: 166395 - DNA, 25 bp, Saccharomyces pastorianus
ccagttacttattaggatgatatat

SEQ ID NO: 166396 - DNA, 25 bp, Saccharomyces pastorianus
accgcgggtacgatataataaatat

SEQ ID NO: 166397 - DNA, 25 bp, Saccharomyces pastorianus
atttgtgccagcagtcgcggtaaca

SEQ ID NO: 166398 - DNA, 25 bp, Saccharomyces pastorianus
aatatttgtgccagcagtcgcggta

SEQ ID NO: 166399 - DNA, 25 bp, Saccharomyces pastorianus
tatagatatataccccgcggcacaa

SEQ ID NO: 166400 - DNA, 25 bp, Saccharomyces pastorianus
gtagtatattttaatagtcctgaca

SEQ ID NO: 166401 - DNA, 25 bp, Saccharomyces pastorianus
cggtaacacaaagagggcgagcgtt

SEQ ID NO: 166402 - DNA, 25 bp, Saccharomyces pastorianus
tgaccttttggcttctatctgtatt

SEQ ID NO: 166403 - DNA, 25 bp, Saccharomyces pastorianus
ccttttggcttctatctgtattaat

SEQ ID NO: 166404 - DNA, 25 bp, Saccharomyces pastorianus
tttctcccaaagaaagcgcctgacc

SEQ ID NO: 166405 - DNA, 25 bp, Saccharomyces pastorianus
atctcactccatgtataccattagg

SEQ ID NO: 166406 - DNA, 25 bp, Saccharomyces pastorianus
tcgaactaactaggtctttctccca

SEQ ID NO: 166407 - DNA, 25 bp, Saccharomyces pastorianus
gggcggacccgactataaataagat

SEQ ID NO: 166408 - DNA, 25 bp, Saccharomyces pastorianus
tcagataggatagactcgaactaac

SEQ ID NO: 166409 - DNA, 25 bp, Saccharomyces pastorianus
atatatataaaatctcactccatgt

SEQ ID NO: 166410 - DNA, 25 bp, Saccharomyces pastorianus
aaagaaagcgcctgaccttttggct

SEQ ID NO: 166411 - DNA, 25 bp, Saccharomyces pastorianus
aaagcgcctgaccttttggcttcta

SEQ ID NO: 166412 - DNA, 25 bp, Saccharomyces pastorianus
tggcttctatctgtattaatatata

SEQ ID NO: 166413 - DNA, 25 bp, Saccharomyces pastorianus
aatattgtaatcttttatatcctaa

SEQ ID NO: 166414 - DNA, 25 bp, Saccharomyces pastorianus
aatcggcgggtcatatatttattga

SEQ ID NO: 166415 - DNA, 25 bp, Saccharomyces pastorianus
agcttagcaatattaatcggcgggt

SEQ ID NO: 166416 - DNA, 25 bp, Saccharomyces pastorianus
tattttcaatacctctaatactttt

SEQ ID NO: 166417 - DNA, 25 bp, Saccharomyces pastorianus
atttattataatacccttcgagaat

SEQ ID NO: 166418 - DNA, 25 bp, Saccharomyces pastorianus
taaccttcagcttcaataaaaccaa

SEQ ID NO: 166419 - DNA, 25 bp, Saccharomyces pastorianus
cttaatcctttatgcttataattat

SEQ ID NO: 166420 - DNA, 25 bp, Saccharomyces pastorianus
tagcaatattaatcggcgggtcata

SEQ ID NO: 166421 - DNA, 25 bp, Saccharomyces pastorianus
tgagatacttcaaaactagctagtt

SEQ ID NO: 166422 - DNA, 25 bp, Saccharomyces pastorianus
aatattaaaataaccttcagcttca

SEQ ID NO: 166423 - DNA, 25 bp, Saccharomyces pastorianus
acccttcgagaatatagcttagcaa

SEQ ID NO: 166424 - DNA, 25 bp, Saccharomyces pastorianus
aattgacccgaaagcaaacgatcta

SEQ ID NO: 166425 - DNA, 25 bp, Saccharomyces pastorianus
ccttttgtataatgggtcagcaagt

SEQ ID NO: 166426 - DNA, 25 bp, Saccharomyces pastorianus
gtgaactgaaacatctaagtaactt

SEQ ID NO: 166427 - DNA, 25 bp, Saccharomyces pastorianus
gaactaagtgaactgaaacatctaa

SEQ ID NO: 166428 - DNA, 25 bp, Saccharomyces pastorianus
gacccgaaagcaaacgatctaacta

SEQ ID NO: 166429 - DNA, 25 bp, Saccharomyces pastorianus
aggataacaaattctaagactaaat

SEQ ID NO: 166430 - DNA, 25 bp, Saccharomyces pastorianus
atgggtcagcaagtaattaatatta

SEQ ID NO: 166431 - DNA, 25 bp, Saccharomyces pastorianus
attaatattaattgacccgaaagca

SEQ ID NO: 166432 - DNA, 25 bp, Saccharomyces pastorianus
ttatattaatgatgtaccttttgta

SEQ ID NO: 166433 - DNA, 25 bp, Saccharomyces pastorianus
gtaccttttgtataatgggtcagca

SEQ ID NO: 166434 - DNA, 25 bp, Saccharomyces pastorianus
cgaaagcaaacgatctaactatgat

SEQ ID NO: 166435 - DNA, 25 bp, Saccharomyces pastorianus
tgaggtcccgcatgaatgacgtaat

SEQ ID NO: 166436 - DNA, 25 bp, Saccharomyces pastorianus
gacggaaagaccctatgcagcttta

SEQ ID NO: 166437 - DNA, 25 bp, Saccharomyces pastorianus
aaacaccgcactttgcagaaacgat

SEQ ID NO: 166438 - DNA, 25 bp, Saccharomyces pastorianus
actgtctcccctttaagctaagtga

SEQ ID NO: 166439 - DNA, 25 bp, Saccharomyces pastorianus
ttggcctataattgaggtcccgcat

SEQ ID NO: 166440 - DNA, 25 bp, Saccharomyces pastorianus
gaagatgctatgtaccttcagcaag

SEQ ID NO: 166441 - DNA, 25 bp, Saccharomyces pastorianus
ataaggtgtgaactctgctccatgc

SEQ ID NO: 166442 - DNA, 25 bp, Saccharomyces pastorianus
ggaactcggcaaaaacagctctaaa

SEQ ID NO: 166443 - DNA, 25 bp, Saccharomyces pastorianus
gtataccgtaatgtagaccgactca

SEQ ID NO: 166444 - DNA, 25 bp, Saccharomyces pastorianus
atgtagcgaaattccttggcctata

SEQ ID NO: 166445 - DNA, 25 bp, Saccharomyces pastorianus
aatgatacaacaactgtctcccctt

SEQ ID NO: 166446 - DNA, 25 bp, Saccharomyces pastorianus
atggctatgcattattcatctaata

SEQ ID NO: 166447 - DNA, 25 bp, Saccharomyces pastorianus
aacaggtatttttatggctatgcat

SEQ ID NO: 166448 - DNA, 25 bp, Saccharomyces pastorianus
atgctaatggtgcatcattcttctt

SEQ ID NO: 166449 - DNA, 25 bp, Saccharomyces pastorianus
aacagttatgttattgattcaccac

SEQ ID NO: 166450 - DNA, 25 bp, Saccharomyces pastorianus
aatgtaggtgttatcattttcgtat

SEQ ID NO: 166451 - DNA, 25 bp, Saccharomyces pastorianus
ggttcatatagatctccaagagtac

SEQ ID NO: 166452 - DNA, 25 bp, Saccharomyces pastorianus
gctacagctttcttaggttaacaac

SEQ ID NO: 166453 - DNA, 25 bp, Saccharomyces pastorianus
ggtgcatcattcttctttttagtta

SEQ ID NO: 166454 - DNA, 25 bp, Saccharomyces pastorianus
gagttagcattttcatcagtagaac

SEQ ID NO: 166455 - DNA, 25 bp, Saccharomyces pastorianus
attcaccacaaccatcatcaattag

SEQ ID NO: 166456 - DNA, 25 bp, Saccharomyces pastorianus
ttcgtattaacaattgctacagctt

SEQ ID NO: 166457 - DNA, 25 bp, Saccharomyces pastorianus
ggtatacactaacacttttcctgat

SEQ ID NO: 166458 - DNA, 25 bp, Saccharomyces pastorianus
tttagagctgtttttgccgagttcc

SEQ ID NO: 166459 - DNA, 25 bp, Saccharomyces pastorianus
gagtcggtctacattacggtataca

SEQ ID NO: 166460 - DNA, 25 bp, Saccharomyces pastorianus
agcatggagcagagttcacacctta

SEQ ID NO: 166461 - DNA, 25 bp, Saccharomyces pastorianus
ttcaccttcatattctctacttaca

SEQ ID NO: 166462 - DNA, 25 bp, Saccharomyces pastorianus
atcgtttctgcaaagtgcggtgttt

SEQ ID NO: 166463 - DNA, 25 bp, Saccharomyces pastorianus
ttttttcgttactcatgtcagcatt

SEQ ID NO: 166464 - DNA, 25 bp, Saccharomyces pastorianus
atgtcagcattctctatctaattat

SEQ ID NO: 166465 - DNA, 25 bp, Saccharomyces pastorianus
ataaggctgctatttacctaaattt

SEQ ID NO: 166466 - DNA, 25 bp, Saccharomyces pastorianus
gttcttattactctttattgactaa

SEQ ID NO: 166467 - DNA, 25 bp, Saccharomyces pastorianus
tctacttacatacctgagtcggtct

SEQ ID NO: 166468 - DNA, 25 bp, Saccharomyces pastorianus
atatctatcaatactttcattatca

SEQ ID NO: 166469 - DNA, 25 bp, Saccharomyces pastorianus
aaccatatttttttacatctaatgc

SEQ ID NO: 166470 - DNA, 25 bp, Saccharomyces pastorianus
tatattattatatcctgctgaacca

SEQ ID NO: 166471 - DNA, 25 bp, Saccharomyces pastorianus
ttattatatcctgctgaaccaatat

SEQ ID NO: 166472 - DNA, 25 bp, Saccharomyces pastorianus
gcaatattagaactaccacgtaatc

SEQ ID NO: 166473 - DNA, 25 bp, Saccharomyces pastorianus
aatgcaatattagaactaccacgta

SEQ ID NO: 166474 - DNA, 25 bp, Saccharomyces pastorianus
tattattatatcctgctgaaccaat

SEQ ID NO: 166475 - DNA, 25 bp, Saccharomyces pastorianus
agaactaccacgtaatctatataaa

SEQ ID NO: 166476 - DNA, 25 bp, Saccharomyces pastorianus
aaatttatttgtcattatattacca

SEQ ID NO: 166477 - DNA, 25 bp, Saccharomyces pastorianus
actaccacgtaatctatataaatga

SEQ ID NO: 166478 - DNA, 25 bp, Saccharomyces pastorianus
tatcctgctgaaccaatataaaatt

SEQ ID NO: 166479 - DNA, 25 bp, Saccharomyces pastorianus
gcaatgttgtatcatgaaggaggat

SEQ ID NO: 166480 - DNA, 25 bp, Saccharomyces pastorianus
gctaagctatattctcgaagggtat

SEQ ID NO: 166481 - DNA, 25 bp, Saccharomyces pastorianus
acattgcaatgttgtatcatgaagg

SEQ ID NO: 166482 - DNA, 25 bp, Saccharomyces pastorianus
tatgtaactatcaacattctttttt

SEQ ID NO: 166483 - DNA, 25 bp, Saccharomyces pastorianus
cgttatttatcaatccccaccaata

SEQ ID NO: 166484 - DNA, 25 bp, Saccharomyces pastorianus
gctatattctcgaagggtattataa

SEQ ID NO: 166485 - DNA, 25 bp, Saccharomyces pastorianus
cgccgattaatattgctaagctata

SEQ ID NO: 166486 - DNA, 25 bp, Saccharomyces pastorianus
aatccccaccaatataacattgcaa

SEQ ID NO: 166487 - DNA, 25 bp, Saccharomyces pastorianus
tatcaatccccaccaatataacatt

SEQ ID NO: 166488 - DNA, 25 bp, Saccharomyces pastorianus
aggattaagatatagtccgaacaat

SEQ ID NO: 166489 - DNA, 25 bp, Saccharomyces pastorianus
tattgctaagctatattctcgaagg

SEQ ID NO: 166490 - DNA, 258 bp, Saccharomyces pastorianus
gtgccactgatattgcttatcttacttttttctaaattttcaacatttctgcgccctgtaaatcacgtgctcgttacaaaatacactgccatagtaaatacaaaatggcaaacaacgcccagcatcattgatgttacatatactatgcacgttttttatatgacgataatacttattttggtcaggaagcaaatgcagtccatacatgcgtttctgggtagtttatgcttaccctcccacgtgctagattttcgattg

SEQ ID NO: 166491 - DNA, 510 bp, Saccharomyces pastorianus
acatcttcaagttcagcatctacatccctaagttctacatctacctcatcaagttcgacatccacatctccaagctctacatctacctcatcaagttcaacatctacatctccaagttctaaatctacctcatcaagttcgacatctacatccccaagttcgacatccacatcttcaagttctacatctacctccctaagttctacatctatctcatcaagttcaacatctacctcatcaagttctaaatctacctcatcaagttcgacatctacatctccaatttcgacatccacatccccaagtttgacttcttcatctccaactttggcttccacttctccaagttcaacatctattagctctacttttactgattcaacttcatcccttggctcctctatggcatcttcatcaacgtctgtgtcattatacagcccatccacacctgtttactccgtcccttcgacttcgtccaatgttgcaactccttctacgacttcttcaact

SEQ ID NO: 166492 - DNA, 663 bp, Saccharomyces pastorianus
accagtactggcaaaaatggtacctatagttctaccgcatatactaaatccgctcaagccactgaacatagtagtttgatctcggtcattagaactaaagggcttaaagtgtctacttccacagataaaagtgtggtagttggctatagtacatctgtcggtgatgctcaatatgccgaacatactagcttagttccagtttccactataaagggatccgaaacctctacttccacagataaaagcgtggtagttggctacagcacgtctgtcggtgatgctcaatatgctgaacacactagcttagttccagtttccactataaagggatccgaaacctctacttccacaggtaaaagtgtagtgtctggctatagtacatctattgctaatgctcaatatgccgaacatactagcttagtaccagttggaactttgaagagtgttaccacattccaacaaactgcagctactgaagtttgtaccacatgtactgccacttcttccacttattccacagctgttgatgctgccgtcactgcttcaagcccaacaagttcccaagcaaccctatctacagttactacgtggtattcatcctcaacagccaagccacctacgatttcaatttactcagctgctgccaaccaattaacctttagt

SEQ ID NO: 166493 - DNA, 375 bp, Saccharomyces pastorianus
aacagccgttgggccgaaaacaactataagaagagattattgggtactgccttcaagtcttctccattcggtggttcttctcacgccaagggtattgtcttggaaaagttgggtatcgaatccaagcaacctaactccgctatcagaaagtgtgttagagttcaattaatcaagaacggtaagaaggttactgctttcgttccaaacgatggttgtttgaactttgtcgatgaaaatgacgaagtcttgctagccggtttcggtagaaagggtaaggctaagggtgatattccaggtgttagattcaaggtcgttaaggtctctggtgtctccttgttggctttgtggaaggaaaagaaggaaaagccaagatct

SEQ ID NO: 166494 - DNA, 876 bp, Saccharomyces pastorianus
aggtctattcagaagtctcttaagaagaatgcagttacatatttgaaggaatcggatattgaatggtctaacgctagcacatatcaatgtcctgactgtctaatcggcaaaagcacgaaacatagacatgtcaaaggatcacgactaaagtaccaagaatcatatgagccttttcagtacttgcacaccgatatatttggtcctgtacatcacttaccgaaaagtgcaccttcttactttatatcgtttacagatgagaaaaccagattccaatgggtgtacccattacacgaccgtcgtgaagaatctatcctcaatgtttttacatcgatattagcatttattaagaaccaattcaatgctcgcgttctagttatccagatggatcgtggctccgagtacactaacaaaactcttcataagttctttacgaacagaggtattactgcatgctatacaaccacggcagattctagagcacacggtgtcgctgaacgattaaatcgtactttattaaacgattgtcgcacactgcttcattgcagtggtctaccaaatcatctatggttctcagcagtcgaattttctactataatcagaaattcattagtctcaccaaaaaacgataaatctgcaagacaacatgcaggtttagctggactggacattactactatactacctttcggtcaaccggttatagttaacaaccataatcctgactcgaaaatacatcctcgtggcattccaggttacgccttcatccgtcacgaaatcttatggatatattactaatctccatcattaaaaagacggaaaataacatacgttattccagacagcatccaatggccaatccatagaaactcctttgat

SEQ ID NO: 166495 - DNA, 318 bp, Saccharomyces pastorianus
ttagttaacgttccaaagaccagaaagacctactgtaagggtaagacctgtcgtaagcacactcaacacaaggttactcaatacaaagctggtaaggcttccttgtttgcccaaggtaagagacgttatgaccgtaaacaatctggtttcggtggtcaaaccaagcctgttttccacaagaaagctaagactaccaagaaggttgttttgagattggaatgtgtcaaatgtaagaccagagcccaattgaccttgaagagatgcaagcacttcgaattgggtggtgaaaagaagcaaaagggtcaagctttgcaattc

SEQ ID NO: 166496 - DNA, 195 bp, Saccharomyces pastorianus
cagaggtaccaacaagaacaggaagacgtccaagtgcagcaacaactgtcccaagcacagcaaccaaattcccggcaacaacagcaacaacttcaataccagcagcagcaactacaacatccacaacaacatatgcaaatacaacaacaacaacagcagcaacaacagcagcagcaatcacaatctcccgttcag

SEQ ID NO: 166497 - DNA, 84 bp, Saccharomyces pastorianus
ctcgaagactaaaagatgtctacggcatcgaaaagacgtataaatgcatctgagagggaacaacttgcgtcgatagaggaggct

SEQ ID NO: 166498 - DNA, 123 bp, Saccharomyces pastorianus
ttaggttgtatctctaacaaaaagattcctttcccaaaggtgcgtttttgtagcgggaagggtgcttctaaaaagacaaagcacccctactgcaacagttctggatgtgtaacaaggaaaaag

SEQ ID NO: 166499 - DNA, 126 bp, Saccharomyces pastorianus
acggcagtgccagcttgcatgcctgcaggtctttgagattctgtatataaatattgcaaacaaaaggatagagcacaaatgacagaccttatagtaaaaattgttcgttttaatcatgcgtcagtg

SEQ ID NO: 166500 - DNA, 627 bp, Saccharomyces pastorianus
gctaacaaggaaaagagagccattattttggaaagaaacgccgcttaccaaaaggaatacgaaactgctgaaagaaacatcattcaagctaagcgtgatgccaaggctgctggttcctactacgtcgaagctcaacacaagttggtcttcgttgtcagaatcaagggtattaacaagatcccacctaagccaagaaaggttctacaattgctaagattgacaagaatcaactctggtacattcgtcaaagttaccaaggctactttggaactattgaagttgattgaaccatacgttgcttacggttacccatcctactctactattagacaattggtctacaagagaggtttcggtaagatcaacaagcaaagagttccattgtccgacaatgctatcatcgaagccaacttgggtaagtatggtatcttgtccattgacgatttgattcacgaaatcatcactgttggtccacacttcaagcaagctaacaactttttgtggccattcaagttgtccaacccatctggtggttggggtgtcccaagaaagttcaagcactttatccaaggtggttctttcggtaaccgtgaagaattcatcaacaaattggttaagtccatgaac

SEQ ID NO: 166501 - DNA, 81 bp, Saccharomyces pastorianus
atggccgcgcaaaatccattggcagatattcaggtatataaacgttacaaagccaagaggagaatggaaggccaacaaaaa

SEQ ID NO: 166502 - DNA, 384 bp, Saccharomyces pastorianus
ctgatcactttccttgctgcttctgtgtatttcttcaagagcttcagtccaattatttacggtacaccatggactcaagaattgtgtcaaaaatcgcagtggttgtctggttgggactacaattgtaacacatacttttcttcattagaagagtacaaaaaccaaaccttgactaaacgtgaatctcaacctgccgccactagtacagttgaagaaatcactatagaaggggacggtccatcgtatgaagatctcatgaacgaggatggcaagaaaatctttaaagacacagaaggtaatgaactagatccagaagttgtcaaaaaaatgttggaagaggagggagctaacattttaaaagtagaaaaaagggctgttttggaa

SEQ ID NO: 166503 - DNA, 717 bp, Saccharomyces pastorianus
tttaattttggggtcccaaactcttccaaaaacgaaacttcaaaaccggtattttcgtttggtgcagcaacaccatcggccaaagaagctagtcaggaagatgacaacaacaacgttgaaaaaccttcctctaagcctgccttcaatttaatatctaacgctggtaccgagaaagagaaggaaagtaaaaaggactcaaagccagctttttcatttggcatatcaaacggaagtgaaagcaaagactctgacaaaccctctttaccctctgcggttgatggtgaaaatgacaagaaagaagcaacaaaacctgttttttcgtttggaataaatacaaatactactaaaaccgcggatactaaagctccaacttttacatttggctcctctgcactcgctgacaataaagaggatgttaagaaacctttttcattcggtacctcccagcctaataatactccatccttctcattcggaaaaacaacagcaaacttgcctgctaattcttcaacatctcctgctccctctataccatcgacggggttcaaattttctttgccatttgaacaaaaaggtagtcaaacaactacaaatgatagcaaggaagaatcaacaacagaagcaactggaaatgagtcgcaagatgcaaccaaagtagatgctaccccagaagaatcaaagccaataaacttgcaaaacggtgaggaagacgaagtg

SEQ ID NO: 166504 - DNA, 552 bp, Saccharomyces pastorianus
atcgccatcaggtataagaaccagttgttctttgaggcaacggactatgtaaagacaacgaaaccggaatattattcttctgataagagggaaaggcaagactattaccagttagaggattcatatcttgctatctttcaaaatggtaagtacctaggcaaagcatttgaaaatttaaagccgtttttaccaccgttcagtgagttacaatacaatgaaaagttctatcttggatattggcaacatggtgaagctcgtgatgagtccaatgataaaaacacaaccagtgccaaaaagaaaaagcagcaacaaaagaaaaagaagggattgatactcagaaacaaatacgtaaataataacaaactgggttactatccaacaatcagctgttttaacggtggaacagcgaggataattagtgaagaagataaattggagtacctcgatgaaatccgatcagcttactgtgttgacgggaattcaaaagttaacacactggatacattgtacaaagaacagatagctgaagacatagtatgggatataatcgac

SEQ ID NO: 166505 - DNA, 177 bp, Saccharomyces pastorianus
ttgcctttggagacattaaagttactggagttgacaatcagtgagccatactgtgagcacatagattataggagctcaggacagcttgtaaaccccagtttgtcgagtttgtttgaagacgatattgagaagggttactatggtgggatattcaaagcaagatacgataagaggcag

SEQ ID NO: 166506 - DNA, 864 bp, Saccharomyces pastorianus
gtgaacactaaatcgcttcacgtttatgaaccgtacgaaattgatggtcagaaatacattaatatggcaaaaaaagaagatcttggagtgtgagaacctggtttaacgcaggatacattcacagccgcagatgaaactaactacaatgacatcatagaaaagctggggaaatatggagtttgcgtaatcaaaaacttcatagaaccatccaagtgcgataaaatattgaattaaattgatccgcattactataggcacaagtcgtggcaggggccactatttccgaaggaaacaacggttgtaacaagatcattattataccctccttccatcttgaagaacattgtgagcgaccgtatgttctgtgacatgggagaaaactttctgaatgaacagaattatttattggctggaaacgtgatcaaaaaatgctctagcgattttcaactgaactccagcattatctagagggctggtcctggtgccggtgaccagggatacttgcgggaagatcatacccatcacacaattcatccagcatgtgagataaactaaaatgtcaaagaaacattaataaaggttagggcggctttcacggtgatgaataaagaaaacgagtctactcgaatgattattaattcacacttgtggggtcctcaagattcttgtgggactttcgaaaagaagatggaatatcatgcgaatgctgctaaaagtgatgcggttatattcttggacagcctctatcatgcagccagtgcaaatcatgatatagaagatagaatcaatgggtaattctttatgtcaaagggctattttaaaccagaggagcatctttacttgagaacagatttgaatctgttc

SEQ ID NO: 166507 - DNA, 315 bp, Saccharomyces pastorianus
atcacgatccacgggattagccgcccacggcaacccggtgcaacgggtagcacgcacccccgtgtttcgcgatatgcaacggccaatcaacggcgagctccgggcgcgtgccgggtgggcccctcgccggccaagcagcgcagggatattccactcttcgagccgtaagctataacacttataaagaacgccttttttttgcaatatgctctcttatattacgaaatatacattttttggtttgtagttttaaacttttcttaactccccaggacaggccaattggataaactttgcaaagatcaaacagtaaca

SEQ ID NO: 166508 - DNA, 264 bp, Saccharomyces pastorianus
gcatcatagctcaattctactgacctcgacacatatatccattgctcaacatgctggggcacaagcgactatacacttaacatctctgttatagatgctactaccgagagattggttgacactaaattgttaacaacgctcgagaatgcaactgcctggattaattcaaattctatcgatgaggacgaggatggtatgcctcacgctactgatgtatcagaccgactctatgaggtatcgcttagctagcgcacgtttgccatc

SEQ ID NO: 166509 - DNA, 246 bp, Saccharomyces pastorianus
accaccaattgtcgtttctgctcttggagcccatcttctttcctaacaaagcatccgaccacgtccagcggaccgtccacctcactaactataatgtcaccagccattgctatacgaggcctcctaccaccctgcgaagccacacacacaattccttcattgctctttctttgcactgtttctcttagcttatcctgctactgcccaattaccctgactctcgttcctgagccatatcagagcatc

SEQ ID NO: 166510 - DNA, 294 bp, Saccharomyces pastorianus
aatgctcttctatatgtcttaagcctggctttgctaatatggacaggatcggtagttactcttctcttggtacttttcttttgcctcttcctcttggtcttctcactccactttttttgttttacccgtgaacacgtacactatacgctcccacccaaatgccactcacttaaattccaattcgattcgattccgagttcgtcgttgtctttgtctccttttcctttcctttttttcccacgacttcgtgcagttgcatttgcctctcccactctgtcttttttttttcccatt

SEQ ID NO: 166511 - DNA, 177 bp, Saccharomyces pastorianus
ttgttaaacgcgcagaatattgcatttgcttcaaattatgggatagtgaagttagaccccgaatgccaattacaaaactctgataactctgaagaagaggaagtggacattgatatggataaattgaacagtgtgctaatagcagacctagatacaaaagcggaagaaacaagtata

SEQ ID NO: 166512 - DNA, 135 bp, Saccharomyces pastorianus
tatctttttttcccttcacctctgtgctcttttttagccacagctgtgcattacgcttgctttgcttgttttgttctctttcgccatgccatattactacttttctacttactggcacgaggccgcgcgagccag

SEQ ID NO: 166513 - DNA, 396 bp, Saccharomyces pastorianus
ccgttgttgtcatcaaatatatctaaatcccttgccgtacaaccacaacacgacatcgtggagtcttagtactgcgcaacttacatgctttcaagccatgctcgtccgctctgtgtgtcgaccttcttttcgccacgtaaacttgcttggatagctcatctacgtgtagtaaccatatttccttatggtgctttcccttacaataggtgccggcgaaagtaccaatcctagagctctcgttcggcctgcccctcgcatttcgtaacaacccattatagtatcctaatcctttctattgaatttcaaactatgcacttgaaacaacgtgtacaccatcacgtggtttgtttgaaggcatcggtccgccctggaaatctggttcgtcttcaacaaacc

SEQ ID NO: 166514 - DNA, 99 bp, Saccharomyces pastorianus
cgtgggcatagatcacgcttcacccgctctgtgtcgactttcttttcgccagttaacttgcttggtatgcagaaaaaatcgatagctcatctacgtgta

SEQ ID NO: 166515 - DNA, 318 bp, Saccharomyces pastorianus
gacgttacccgtttaatggttccatttttcgccggtttttttctatttctgagctatataaagcagctcaaagctgttttgattaatcttctctatactttcttctctttaaattttaattatagtttgttttaaaatagcaacgcaaatttaacagccattcgcagcacgtacagtatctcatcgaggttgaacccctccggggcgttcttgacccatgaagaatgtggatttgtgttgcagtatgtttactactggcttggactggagaacaaagatatcgatcttgggtgcaacaatctttctgtcgtctgtttt

SEQ ID NO: 166516 - DNA, 627 bp, Saccharomyces pastorianus
gccaacaaggaaaagagagccatcattttggaaagaaacgccgcttaccaaaaggaatacgaaactgctgaaagagacattattcaagccaagcgtgatgctaaggctgctggttcttactacgttgaagctcaacgtaagttagtcttcgttgttagaatcaagggtatcaacaagatcccacctaagccaagaaaggttctacaattgctaagattgactagaatcaactccggtaccttcgtcaaggtcaccaaggccactttggaattgttgaagttgattgaaccatacgttgcttacggttacccatcctactccaccatcagacaattagtctacaagagaggtttcggtaagatcaacaagcaaagagtcccattgtccgacaacgctatcattgaagctaacttgggtaagtacggaatcttgtctattgacgatttgattcacgaaatcatcactgttggcccacacttcaagcaagccaacaactttttgtggccattcaagttgtccaacccatctggtggttggggtgtcccaagaaagttcaagcactttgtccaaggtggttctttcggtaaccgtgaagaattcatcaacaagttgatcaagtccatgaac

SEQ ID NO: 166517 - DNA, 105 bp, Saccharomyces pastorianus
gatgggggtcgaacccataatcttctgattagaagtcagacgcgttgccattacgccacgcaagcttaatgttgttggaagttttcctcacgcagtagagttata

SEQ ID NO: 166518 - DNA, 348 bp, Saccharomyces pastorianus
aacggttactaccacagttaggtcacaaatcttttagtggcagatgctccttgaactactaatgacccaggtcacccagagaggtcagagactttgtacgggtacctatatgaggtctttttactgtattacaaaaaaaatcttactccattcgctattatgttgtgtggaaacatgcctcaaaatgttttcaccgcaaaaagtatgcttgttgtatttgccaagttaacgaagcatgagaaagtttgctcccccccgagttgaaacaaagttatctcttctaatatgatggttgtttgtgcggccacgctaataacgagctcaaatattccctttatagtaacaact

SEQ ID NO: 166519 - DNA, 1161 bp, Saccharomyces pastorianus
tgttttgctttaattcaatccaggaatcctacgttgtggaagagggcactttcaagaaagaaaggagatgtcgaagatgtaggtgctctcaagagtgaaaaaaatttaaaaataaatcctcgggaaaactcaaaacatatatacaaatgggttgcgcctttcgaaaatggatttttgaataataaatcactgtttgctcatctggaacctatatacaatttcctttgccagaataagtacaaaagcttcgaagatgcagttggtttaaaggagctgcaatcatttagcaaagatgtatcaactgctgatataaacaactggtttttaccgagatataaaattctgctaaaaatcctgagcttaaaaacaaaagaaattgactttagagggttatcgcaagtgtttcaaacactccaagtcttgttagtttctcattattcgcatcgcatagattctgattcttcttttaagaggacactgatagacgttcatgttttcaatttcatcgccaagtttctgtttaatagaattttattgaagaagaaccaaaacgatccaaaatggcttcaaaacttttacgaccagggagatggcaaacatttatgtgataaagttgactacaagcgcttgtgttcgttgcattttacccttatttactctattattaacattcaactcatcaaaatcaagacaaaccaaacatttgtaccgcagatattaaaatacgtatctgttctgaaattaattgaacacatacttatcatcatcgaaagtctgatacatgtacttattagatttgtatcgaagcataaactaatatgcatcaaccggaaaaaggcgtactgtcgagtatacctcgaaagagaattgagtttgaagaaaacctacttaaagaacttttacagtgtaataagcggtgtcccagaaaaagagttagggggtctattgaaaatactcaagatagttattctatcattgctcgagacatttgaaagcattgaatggcagcacttaaaacctttcctggaaaaatttccggctcatgaaatatcgcttcagaagaaaaggaaatatatacaggcggccttattaattactgccgaaagaaatttgatagcgcgctttcgattgtcaagatggttcaatgagacagaaaacatt

SEQ ID NO: 166520 - DNA, 174 bp, Saccharomyces pastorianus
gaatctgcaattctacacaattctataaatattattatcatcattttatatgttaatattcattgatcctattacattatcaatccttgcgtttcagcttccactaatttagatgactatttctcatcatttacgtcatcttctaacaccgtatatgataatatactagtaacg

SEQ ID NO: 166521 - DNA, 453 bp, Saccharomyces pastorianus
tttttttttttccatttttgtcgttattgttatttcccatttttttttttgtttttttcggagcgacaaacctttcgaaacacgtgtcctgaaaattatcctgggctgcacgtgatactatgttaccctgtcgggcggcgcctctttttcccttttctctcactagtctctttttccaatttgccaccgtgtagcattttgttgtgctgttacaaccacaacaaaacgaaaaacccgtatggacatacatatatatatatatatatattttgttacgcgtgcattttcttgttgcaagcagcatgtctaattggtaattctaaagctgccaagctctacataaagaaaaacatacatctatcccgttatgaagttttctgctggtgccgtcctgtcatggtcctccctgctgctcgcctcctctgttttcgcccaacaagaggctgtggcccc

SEQ ID NO: 166522 - DNA, 156 bp, Saccharomyces pastorianus
tttttcgcgccgggcggggttagcagcacgcaggatggaagagaagagaaaggatgctacaaacttgtggttcattctatacaaagtacttatatgtatatatacatactcgatcagcatttcactccacacaccctgcgtgtgatagtaaaaagc

SEQ ID NO: 166523 - DNA, 171 bp, Saccharomyces pastorianus
ttaccacgtattttttcctttcaatttattataagcttagagatacgatttcaaggcgcagctcttctgttagcagttttctctacgactttgtatgaggttcatctcattttgttagcttctattcacatacctactataacactaatcctgctatggttcagacccaaa

SEQ ID NO: 166524 - DNA, 159 bp, Saccharomyces pastorianus
tcatctggatttttcatttccgcttttgcctcaggcgcaacaataactatctttgagcatcgtaccaccaatacaaaaggatatgatcgttatcatacaggatttttcatggattttgcatgtttcggtataactttacgtaggtgaattattgaaggg

SEQ ID NO: 166525 - DNA, 171 bp, Saccharomyces pastorianus
gatatcctcctcaaagtcgcaacgttcagggaattcggatcgggcgcgtcctctggatactccaagtcactattcatcgcggcactaactgagtactggtaccgttctactgtttgttgttctggcctctacgttcactccgtatggtctcagtctactattaataatgac

SEQ ID NO: 166526 - DNA, 240 bp, Saccharomyces pastorianus
tacaacaagaacggttcatcggagcctcgactaaagacgcttgacggactcacttccgagcgctggattcagtggttaggccttgaaagcgactaccattgttcattctccagtactcggaatgcggaagacgtagtggcaggtgaggcggcgagttcaaatcatcatcaaaaaatttcaagagtaacgcgaaaaaggccccgagagcccaagagtacaaacgatatcctcgtcgcaggc

SEQ ID NO: 166527 - DNA, 84 bp, Saccharomyces pastorianus
cgctttttttcctcaaaaacgcctgtatcgcatttatcttttaatgttggactatggccatgtattaaagaagtgcatcaggcc

SEQ ID NO: 166528 - DNA, 120 bp, Saccharomyces pastorianus
ataaatttcaaagattacacgtgtgaaaacaagctttaaaacaataggtatttcttttttggcggttcgtgttgctatgagtcgttttcgatatctattctagaaccattttcctgaaaa

SEQ ID NO: 166529 - DNA, 135 bp, Saccharomyces pastorianus
atgatgccatgcggtgtgctggtaaagccctggagttttgatgaggtcgaaacctagcagcacctagacaagagtagcgcggagcaagtagatatcctcaatgactacgcgcacttcgcaatggctcacgggggg

SEQ ID NO: 166530 - DNA, 198 bp, Saccharomyces pastorianus
ctgttcagtttcgtttagaggtacgagaacaagactttgtttgcggccttgaacttcggctccattaaatttggactttacgatttcaaatgagatagctcctcgattaagttgaagtttgaaaacttcccaaaaaaggaagcagatgcctcttccagaattttgaagccatgggagggtagaatatacatctctgag

SEQ ID NO: 166531 - DNA, 381 bp, Saccharomyces pastorianus
agcctgagctggtcctccttcttgaaagtcatcgccttatctgctacgatgcccaagcaactatgcatggacatctgtcgtgaaagggggttcagtgacgtcttgattgaaacaagccggtatgtgaacgcggtgacgaaaatgccgaatgtgtccattgcagtcgatatagtgcatgtgaagaagtgtgctttgctagacaaggtttatgatcttgtcatgcaatttctggaaaacgtaccggaaaagaaggcggtcttctttttcagcaacaaaacccttcttagagagtccctgcataggctcaaagataacgcctctgtcgttggtgtagacgctgacatggaggatgaggctaagttggctgtgtttagagatttt

SEQ ID NO: 166532 - DNA, 123 bp, Saccharomyces pastorianus
atagcacggtgccttaaccaactgggccaagagaccattgtaatctgttttccaccctccctccacactaccaaaccaacgtcacaaatgcgtgccagcaccaccgctcattatctctgtgcc

SEQ ID NO: 166533 - DNA, 327 bp, Saccharomyces pastorianus
tttgcaagatacgcaactgccgatgccgttcaaactgcccatattccaccaaacgtcaatcttgctgaagttgccccaatcttgtgtgcaggtatcacagtttataaggcgttgaaaagagccaatgtgataccaggccaatgggtcactatatccggtgcatgcggtggcttgggttctctggcaatccaatacgcccttgctatgggttacagggtcattggtatcgatggtggtaatgccaagcgaaagttatttgaacaattaggcggagaaatattcatcgatttcacggaagaaaaagacattgttggtgctataataaag

SEQ ID NO: 166534 - DNA, 78 bp, Saccharomyces pastorianus
atgattccctttcctgcacaacacgagatctttcacgcatacatcggaaggatcaccccccactcaagtcgtgcattg

SEQ ID NO: 166535 - DNA, 168 bp, Saccharomyces pastorianus
aaagacattctcctcaagaaatccacaaaaaggaatcaacagttacgcataataatatttcttttccttccttcttcttcatattttgccattctccatccagttgcatctttaagatgctcctgcctctttttatgcctacatagtttaatcctttacatagaacac

SEQ ID NO: 166536 - DNA, 465 bp, Saccharomyces pastorianus
atgatcaggttcattattcctttgatggattgtgcaagactttatgggcgtccagttcaattcaagacagaaagaaccgatataaattcgttaatgtttggattacctaaattgccctcagtggattattttgctgaagaggagattgcccatttgatgacccaggaatttaatcctttgaaagaaaaagatactgacgatactatggctttaactatgtcaagattttctagctacctgcaagaaagaatgacaaaagtctccaagagaaacacagaactcaacttcaggacctttagtgatgtaatgggcatgtataatactacgagggatcactctaaacttaattgcatgagtgacaaggataattctgtgaaggaattttcattgagtgataaaagcaatgttagttctgaaacgactaatatgatgaatcaattgcaagtaaacgcccatgaatacaaa

SEQ ID NO: 166537 - DNA, 213 bp, Saccharomyces pastorianus
gtgccgaggtgccttatgaaacccttttccgtgcctgttaagtttccgttttcggtcaaaaagaatatccgaattttagattaagaccctcgttcagaagcttattgtctaagcccatattcagtctgctctaaacggcttccatggaagtaatatttctatctcttgaaatccgtacaagatattagacgtgtgttgggagtcgtatactgt

SEQ ID NO: 166538 - DNA, 99 bp, Saccharomyces pastorianus
attattctgttcctctttttatatgttgtcattcattgatccttttaaaatatcaatccttgcgcttcagcgctcattaatttcgacgacactttaaat

SEQ ID NO: 166539 - DNA, 192 bp, Saccharomyces pastorianus
ccaatcctgaaaaatgaaatcaaagactacccttattatttgattaatgaacattcaaattgtatgatgatctttgggattccattgtttcttaatgttataatattacgtatatagatcatactagagattctccactcggatttaggaatccacagaaaggaatcaataattttgcattatattataaat

SEQ ID NO: 166540 - DNA, 285 bp, Saccharomyces pastorianus
atgactaccaaagcaatggtccaaaaaagttttaaactggatttaggcgagcactgtaaagaaattattgaaaggctcacagattgctcgcaaaagttatcggaattgtgtacttatggatgcgattccacaaagcttgggaagaaacgattctatcaaaaattagcagatatcctgatggaagtaaccaagcgcaccagggaattggttgaatgtgtgaagatggcgaacaggcagactctttcataggacctctcgtcatttttcaattatagatctgtacag

SEQ ID NO: 166541 - DNA, 228 bp, Saccharomyces pastorianus
tttttttttttttttttttttttttttttcagttttcgaagaaactgcctttttagaattgtaaaagacgaagtgaagtattcaggagtatattattacatacatacaaagcaagacaaagaaacatttttagatctaacattttacttcaattgtttttgtattccttataattagaaagacctgctgtttaatgtgggagtaatccgtcccctactcgatcttcaa

SEQ ID NO: 166542 - DNA, 276 bp, Saccharomyces pastorianus
ttgataattgttggagttttatagttgttaaaggctataataccacgtatttagattatactagaatttctctatgagaagaatccacgaagagattgatattctcgatacaatagcattattgttttccttttcatcttgtgtgactgtcattcatcatcctactaaattatcattcattgcatttcagcttcgattggatttgatgactgtccctcaatctttatgtgatctttttacaccccatgtgataatgtactagtaacatgaatacta

SEQ ID NO: 166543 - DNA, 339 bp, Saccharomyces pastorianus
aaaacaggggaagcttcctcacatggaaaaggcttcttaatatgtcgctacgcctcattcccattgcatacagaaagcaaagtagtgcgttttgcgaacgtcacagatcaaaagtttggccatgcattgtcattctttttttcttacatacactgcaccagacatgtcggttccgccccgctaacggttagtcagccacacattgacgtacactgtgaacagcgtatttctttccatgtatctcagtgcccagcttatgagaactgtcacagcctcccacttgaccctcagagccctctccactccccccctctttcaacatcgccagatagccgccgt

SEQ ID NO: 166544 - DNA, 249 bp, Saccharomyces pastorianus
attgccagagcagggggttcgttaacattcgatgaaaattacaatttactggatacatcaggtgtcgcaaaagtcatcgaaaagtcaccaatcgcagaaataatcaggaaatcaaatgccgagttaggtaggctgggctactccgtctacgaagatgctcaatatataggtcatgccttcaagaaagctggccattttatggtgtacttcactccaaagaacaagaacagagagggcgtagtccctccg

SEQ ID NO: 166545 - DNA, 381 bp, Saccharomyces pastorianus
ctctgcgtatatatatatatatataaatacatagcacacacacacacacacacacacacaactgtactctttctctctctctctctctctctccctctctcactacatgcacacaccttagcacgctatctcgaaggatcgaccgtatgggtgcatccatttgctgtcgtcgcttgaacaagagcacctgcaaacgggtgcacttttgcaaggcttccttgcctattgggcctgcttgggtcagccttgcttggctctgggcggagggagggtctttatcggcgactcagtgcagcgtagggactcactcaccccaggccggacggggtgactcgcacccggaaagggaagtttattttgtcgggcggaaaagactttttt

SEQ ID NO: 166546 - DNA, 795 bp, Saccharomyces pastorianus
gctaccagctcttctgttgcgccatcctcaagtgaagttgccagctcttctgtttcatccacatgcgaagctaccagctcttctgttgcaccatcttcgagtgaaatttccagctcctctgttgcttcttctacaagcgaagctactagttcttctgctgtcacatcttcctccgctgtttcctcttcgaccgagtctgttagctcttcctctgtcagttcttcctcagccgtttcctcttctgaagctgtcagttcctctccagtttcctcagttgtttcatcttcggccggacctgctagctcaagcgttgctccttacaactcaaccattgctagctcttcttccactgcccagacttctatctcgaccattgctccttacaactccacaaccaccaccaccccagctagttctgcttccagcgttattatctcaaccagaaacggtaccactgttactgaaactgacaacactcttgtcaccaaagaaaccactgtctgtgactactcttcaacatctgccgttccagtttccaccaccggttacaacaattctactaaggtttcaaccgctactatctgcagtacatgcaaagaaggtacctctactgcaactgacttctctacactaaagactacagttaccgtatgtgactccgcctgtcaagctaagaagtctgctaccgttgttagcgttcaatctaaaactaccggtatcgttgaacaaaccgaaaacggtgctgccaaggctgttatcggtatgggtgccggtgctttagctgctgttgccgcc

SEQ ID NO: 166547 - DNA, 501 bp, Saccharomyces pastorianus
tccaaaaaatcattcttagcacctgcagtggaccattttgacgattatgcagaaaataattcatcggacgataacgaaggtttcaccgaaacttccacatacgtgccgcctccaactcaagtgaggagtggtgtgttggggtccttattgaagctttaccaaaacgacgaattaaatgcaagctctatttactcagagtcgcaagctccaacagatgatgaaaaaactttgtctgccgctattgagggccagagtcttccggcaattaagcgtactaggttacaagacttaaaaggtaaggctaaaaagggtaagataccaaaattgaaaaagaggttgaagactgaagcaaagataactgtccatatcgcagacattttgcaaagacaccgttttattctgcgcatgtgcagggccctcatgatgtatggtgcccccacacacagactcgaggaatatatgattatgacctcaagagtccttgaaatagacggccagttt

SEQ ID NO: 166548 - DNA, 153 bp, Saccharomyces pastorianus
  modified_base (22)..(22): a, c, g, t, unknown, or other
gaagcagaaactgtcagtaagncggccggcgctattgatcaactctatggctggaagggatttcggagaggttggaacccaaggatcctggcaaacatgcccgctaccgctatatcatggacagcttatgaatgcgcaaagcattttctaatg

SEQ ID NO: 166549 - DNA, 129 bp, Saccharomyces pastorianus
agattctctgatccattttttgcagctgtagtgggatctttgagttactatgtgtacgaaagaaacttaggacgcccacaaggtcaccatctacacgagcttatcacgaagcgttgggacactcgcaaa

SEQ ID NO: 166550 - DNA, 105 bp, Saccharomyces pastorianus
gatgctctaggctgctttctctggaacttctctccttccccacatacctcgttgttgaatccccgcggaggtgatataataaagttgcgtgaaagcgtaaatgcc

SEQ ID NO: 166551 - DNA, 234 bp, Saccharomyces pastorianus
gtgagttttgagataattgttgggattccgttgttgatagaggctacaatattatgtatacagaatatactggaagttcccctcgaggatataggaatcctcaaaatggaatctatatttctacatactaatattgagatttattattcctcattccgttttcatatgtttcgtttctattacactatcaatccttgcatttcagcttccattacatttgatgactgattctca

SEQ ID NO: 166552 - DNA, 306 bp, Saccharomyces pastorianus
attacaaaagactttaaacatagaaatgttcttcgcttagatgttcatcttagttcttctccagtttcttctcttagcgttgtaacggatagtgttgttggttctcaatctgatccattgtggcaatggtctgttttgcttcttagccttagccattttttgcttgattctgaaagacttttgagcctaattaaaagagaaacatatcgtgcacatacgaagtgtacaattgtaaaaaatgttagtaacaatgttcaaactcatcaatgtgatgcattcacggatccaaggcaataccacctgaca

SEQ ID NO: 166553 - DNA, 141 bp, Saccharomyces pastorianus
gttatttgtctgacttttcttaactacccatttcattttattacggcttggtgccatcatgatatactaaataaatatgaattttgccttttcttaattttccttatacgtatagtcattacaattaataaagtaacatta

SEQ ID NO: 166554 - DNA, 114 bp, Saccharomyces pastorianus
ctaggtttgccattttatttcacctgtatgtccatcatggaaggtagatcatttgacgtagctaagttgaaaattaaagagcttggtggcccacttttgactaattgggcagtt

SEQ ID NO: 166555 - DNA, 309 bp, Saccharomyces pastorianus
ttaacaagaaatagtgaaatgaaagcgcatacctcaaaggcatatagttgaagcagctctatttatacccgttcctccatctgtcatcactacttaaacgattcgttaacagacgctcatttagcacctcacatattctccatatctcatctttcacacaatctcattatctctatggagatgctcttgtttctgaacgaatcatacatttttgatagacttcgtatgtggagtactgttttatggcgcttatgtgtattcgtatgcgcagaatgtgggaattcctattataggggtgccgaggtgcct

SEQ ID NO: 166556 - DNA, 441 bp, Saccharomyces pastorianus
aagttttccctgattatcaaacggatttccaattcttattccccactatcgcacctttcttatctgaattgtattcttgagtggcctaattgtaatcttttattttgttttctaattattgaaggcggtttctcgaaacatttcacgatttccaaaattcaagaattgaaattatgaacatagaagacaaaatgccttttttatcaactattatgaattctctagaaagtggttgcaaaggaaataaatatgtatttgctgagaggaaaagtttggaagaacaaaaagtatttctttaatggagctgattatcaagcattctttacggggagctttcgaaattttttatattcaaggacatttatgttgtgtgggttattaaacgtgggactttggaaatacatccaagaagcacaattgagctctaacgatgaaccgtta

SEQ ID NO: 166557 - DNA, 486 bp, Saccharomyces pastorianus
gatttctaccagaatttcaagtttctgttggacgactttaacaaaaatgaaaagtcggacttgctagatttagaactattagtaacccccattagctgaaagcttgagatgaaatcatactttccaaataccttgatatcaggctacttggggttgaacaagtagcattaagagatgcttctgccataaattgggttgtaaaatttaccaacaacttgagaagctagcttattacttttagaaaataactttgttgaatttaatctgtgccgtgttgcgactctcaagacgctcttctttgcatacttaaacagtgcagaaattttctatatcaaaaaaaaaaagaagaaaaaaatatggttaagatatagtaatcaactaatggtcgagacgccgtgattaaacggtgctcgtattatcggtgattgttgttcaaaaggtccaagagacatgcgagtaatttctcctgctgacaaaaagcacagt

SEQ ID NO: 166558 - DNA, 1485 bp, Saccharomyces pastorianus
atgcaagaatcaagagaaaatcagaatacctttgcggcccctcgaagagaatcttcctcatccacacttttagggatagtttcatatgaagggctaaaaaatgggttctctcgggaaaaaagcgatggtatttgtattgaccacgcctgtaatattgaaggccatcttgggtcgagcaaagaaaatcttcaggatgataacgctgctccaccagatctcctgccatcctttgaaatgtatgaaaacttgcacagtaccatacctcaatccagttttgatacttactttcatgaagagccaccttattacaaggacgctgctggcagccgagacccttctttggacgtacaagttcggcctaatcttgaggacattagtgaaaatactgctggctcacaaaattctgagacgggcatcaatacccaacagcttccttctgtttccgtatactctcgatcacctattacttcggcttctaatcatgatggtacaaaaagtataccagttgaaagaatatacgctctgcctagagttaatacttctgtagctatcggactgtacgttacaaagactgctccgaagtttgggcaaactcctaaatacgaaagcatgctaaaagaatttacgtgcggtgacataatttatggatattttacggtagagaataaatcgtcgaaagatgtaaaattcgacatgttttatttaactttagaagatacgataagttcgacgacaaaagcctgtgttggatctcgaaaagcaacgaaaaggtttttaagaatggtagatttggcagcgagttggtcatataatcaggaggatatgaatactgatgaggatctctgcggatactttgatcccactgatcatacaaaatttgggctaactaatgctaggacactaaatccgggcgataaacgtaagaaatttttcacattcaagattccaaaccaattgctagacacaacgtgcaaacacgggcatttctctcattctcttttgcctcccagtttgggctttcaaagaccacccagttctaatggaaatgtcgctgatataaaactttcacgcaatttaggttatggccgttcgtcagaaaagggttcacaacttttactgatggacaattgcggtggtaaccttgtcgattactctatatatggtatgcttgtgggaaaagatgtaggatccggaggaatgtgtttggttggtgagagcaaatatagtatcagaataattccatttggctttgactccaaacccgtcagtgagaagaagtgtgtcaaagatttggaaaatttcgatgccgcagttacaaagagactagaaaaaataaaaaatattctctctaaatcaaaacgaacaattgcgattcatgaggaggatattcggggagcagatgatccggcaacgtctccgagaaggaattatttgtggaatcctgagcctgaaaatgttgagaatgacgcagttgaaaagaaatat

SEQ ID NO: 166559 - DNA, 282 bp, Saccharomyces pastorianus
ttagatgttggatgggtacaagaagattctaacagaagcaccgaaggtcttggctggcaaattgtttctgaaggtggctctaacgacaccagagttaccgtgagttctggtaaccttaccccacataactctaatcttagaacccctgacttccttggaggctctgtagacgtaggcaatacgcttacccaagtaaaattgagcatcttgtggagtagcgacaccttcgatcttgatcaaagagacatttgggttgttgactctcttggatctttggtagga

SEQ ID NO: 166560 - DNA, 1407 bp, Saccharomyces pastorianus
tccagctctactactgaaagctcttctgctccagtaccaactccatcaagctctactactgaaagctcttctgctccagtatccagctctactactgaaagctctgtagcaccagtaccaaccccatcttcctctagcaacatcacttcctccgctccatcttcaactccattcagctctactactgaaagcttttctactggcactactgtcactccatcatcatccaaataccctggcagtcaaacagaaacctctgtttcttctacaaccgaaactaccattgttccaactacaactacgacttctgtcactacatcatcaccaaccactattactactacagtttgctctacaggaacaaactctgccggtgaaactacttctggatgctctccaaagaccattacaactactgttccatgttcaaccagtccaagcgaaaccgcctcggaatcaacaaccacttcacctaccacacctgtaactacagttgtctcaaccaccgtcgttactactgagtattctactagtacaaaaccaggtggtgaaattacaactacatttgtcaccaaaaacattccaaccacttacctaaccacaattgctccaactccatcagtcactacggttaccaatttcaccccaaccactattactactacggtttgctctacaggtacaaactctgccggtgaaactacctctggatgctctccaaagactgtcacaaccactgttccttgttcaactggtactggcgaatacactactgaagctaccacccctgttacaacagctgtcacaaccaccgttgttaccactgaatcctctacgggtactaactccgctggtgagacgacaactggttacacaacaaagtctgtaccaactacctatgtaaccactttggctccaagtgcaccagtaactcctgccactagtgccgtaccaactacaataaccactactgaatgttctgctgctacaaacgctgccggtgaaactacatctgtatgctctgctaagactatcgtaagttctgcaagcgcaggcgaaaacaccacccctgtcacgacagctattccaaccacagttgttaccactgagtcatctgttggtactaactccgctggcgaaacaacaactggttacacaaccaagtccatcccaaccacttacataaccactttgattccaggttcaaatggtgccaagaattacgaaactgtggccacagcaaccaaccctatttcaatcaagactacatcccaactagctacaacagcttctgcttctagcatggctcccgttgtcacatctccatctctaactggtccactacaatctgcttctggttctgcagtcgctacatactctgttccttctatctcgagtacttaccaa

SEQ ID NO: 166561 - DNA, 477 bp, Saccharomyces pastorianus
tccagctctactactgaaagctctgtagcaccagtaccaaccccatcttcctctagcaacatcacttcctctgctccatcttcaactccattcagctctagcactgaaagctcttctgttccagtaccaaccccatcaagctctactactgaaagctcttctgctccagtatccagctccaccactgaaagctctgtagcaccagtaccaaccccatcttcctctagcaacatcacttcctccgctccatcttcaactccattcagctctactactgaaagcttttctactggcactactgtcactccatcatcatccaaataccctggcagtcaaacagaaacctctgtttcttctacaaccgaaactaccattgttccaactacaactacgacttctgtcactacaccatcaacaaccactattactactacggtttgctctacaggaacaaactctgccggtgaaacaacgacc

SEQ ID NO: 166562 - DNA, 225 bp, Saccharomyces pastorianus
tccaaagcgaggaatgtttttccattgatcggaggacgtaaaatcgagcaccttaagcagaacattgaagctttgagtattaagttgacaccagatcagatagaacgtctagaaagcgtcgttccttttgacattggatttccgaccaattttattggacaggacccagctattagtaaacaggttccttcctttacatcaatgtcagccagggttgttttagat

SEQ ID NO: 166563 - DNA, 1137 bp, Saccharomyces pastorianus
atggaagacaccaaactcgaagatgaaaaaagcgtagtctcatatcgtctagatgtgttgagtcccagaaaatcgtattactaaagcacgtctttagaaatttctttacttggttctgatatatgatttacaagtccctcgcgtttcatatccggctgatattgtggttaccgctcggtgcttagtgaagattatacagtgttgacttttacccttttatggatccatgtttatgcttttagggttattttttttactcacactattctaatgataagtcgtgaacgtactttttcaaaacaatatactcggttttgcaaagaaatgattgaaagtgctccaggtactgacaccgaagactgggagtttattgtagcaaacctcaactcatacatgtatgaaaacagactttggaataataagcactttttttttgatggtcagcgttgcaaacaatcatttagactatgcattctaattccgtcctctctaaaaaaagacaatgatgcaaagtacaagtcatttaaggagtcagtgccatacatcgaagaggctttggaggtttactttgcaaaattagatgaacgattgaaccagagctgatcagaaaagacattgagtgctattaacttagaagacattctacttcctaagcaatcctatcgttttgaggctttctggacttttaaaacagctatgaatcgccgttactttttaacggtgatcttactttgcttattctttatttatcgttcgcggatatcaaatattttcggtcatatcctttatcctggttgtattttcctcgtactggcaaaaagtttccaaaactcaagaactgtaccagtgaaaattgaagacaagatgcaatatcttttagttattattagtgagcaagaaataggtgctagcggaggggatgtaatcgcaaaaaaaaacgaatgtgtatttgtttgagcggaaagtgtacagtaacaaagagtttctctttgacaaaattgcttataagaggttctttggctgtaattttgcagtattttatcttcaaagaaatctgtgctacatttgttattaaacgttgaactatggccatatattaggggggcgcaattggcctgtggcgatgagtcttcagcg

SEQ ID NO: 166564 - DNA, 1155 bp, Saccharomyces pastorianus
actaatagtaatgcttcggatcatattcaagaattaacaacggagttaaaaaacttgcggaaaagtaaagaggagctcttttatgaaaattcgcaattgacagaggagatttctgctttgaaggaatattatacaaatataattcgcaagtatgatagagatgaatcctttactataaaacgtgtttttaaggaagataagactgatgctgtaaaggaattacgggaagatgaaaaagaatctaatgaaaacaatataaaatctggaaataaagactcctctgcaattaatggtgataatacatccaaaaaatccgagaaaggtgatgaacttgtgcaggcggaggatgaacgaaaagaagatgctgagaatgaaaaattagaattggatctgaaattttctgatttacgggcagagataaactccttgaggtccactataaaagaccttgaaaatatcagaagggaaaacgaggaagagctcatcaaaacacgttctgaggtatccaatttaaaaaagcaacagatagcagcagcagaccaagacccagatttcaagtcatatgaccatgagtccctgttagcaaaaattcaacatttgactgaacaaaacgcagaattatctgagatcaatagttcctttttatcaaaatttcaagttttagccaaagagaaagaaatatatacgaataaggtccgagaagaattccagaaaagtctcgactccctagtagaaatgaacagttcattggaaaaggacgttgtaagaataagaacggctcgtgatgatttactaagcaaaatcgcaattttggaagctgaaaaatccaagactgaagtgttaagcgatttacaacatgcaattgatattttgaaggagcaatggacaaaaattgatcaaagatcaaatgatacaaaatcctcgtcgactcaagatgtattaataaaggaaattcaagacttagagaagggttttagagagttatccgacttaactcattataagtactctgagattgaatatatcagcgaatctggtgattatccaagcttatccgtatgattaaatctaaggctgtatcagattatagttttgtccgcgtatgtcggtccattagattcaattttaattgaaatcaaactctttctaaaagcc

SEQ ID NO: 166565 - DNA, 288 bp, Saccharomyces pastorianus
gaaatgataacagcagctactactacaccaggtaaggaagatgaaggggagctcagggatgacatcgcatctttgcaaggattgcttgatcgacacgttcaatttggcagaaagctacctctgcaggacgccatacgccacatccactggaattttatcacacattaaccctgcaatccctctccatctgtctctacgaaattattggggttgccagaaggtttctacgggtggaaactcagactgcagctgagattttcgagattagaaaccgcacatgcacagaaa

SEQ ID NO: 166566 - DNA, 1101 bp, Saccharomyces pastorianus
ccttctttccaccctttgttcgaagagtttgaaaaattttatgaacaaaaattatggtttcagttgtctgaatccttagacaaattttttgacgacgccaaatctacaccattgagacttagactgtacgataattttgtctctagattttatgataagataaaccaattatcagtagtaaagttcctgcttgcatctttaaaagattctaaaaattttgatgagtctttaaagtatttgagtgatttgaagactcaattccaagagcttgacactaaaaagcaaagaaatgatggatcaaaagatcacaaagatggaatattgttaatagacatagaaattgcaagaacttacctgttaaagaataacttagttaaagcaagagatttattagatgatttagaaaaaacattggataaaaaggattctttaccactaagaataaccaacagcttttattctacaaattctcaatatttcaagttcaaaaatgatttcaattccttttattatacaagtctattatacctttccacattagaaccatctacaagcatcactttagcggaacgccaacaattagcctatgatttaagtatttcagcattgttgggtgacaagatctacaatttcggtgaactgttacatcatcaagtaatggacaccatagtcgatgattccaattatgactggctattccaattattgaatgcgttgactgttggtgattttgacaaatttgattcattgataaaagttcaaatttccaagattccagtattagcagaacatgaatcctttttacgacaaaagatttgcttaatgacactaattgaaacagtttttgtcaagaatattagaatgttgtcttttgatgatatctccgaggcaacccatttaccaaaggataatgttgaacatttagtcatgagagccataagtttacgcctattaaggggctgtattgatcaggtaaacgagttagtaaccatctcatgggtccaaccaagaattataagtggtgatcaaatcacaaagatgaaaggaagactggtagaatggaatgatcaagtcgagaaacgacctgcaggcatgcaagct

SEQ ID NO: 166567 - DNA, 135 bp, Saccharomyces pastorianus
atggagacttttactggttatctaaaaaatacctaattccttcgcacatttcaaagctaacaataaacaacgtcaacaaaagcaaaagcgtaaataaatatccatatccgttaatacatcgaatgcttggacatg

SEQ ID NO: 166568 - DNA, 573 bp, Saccharomyces pastorianus
attgttagattatttgcaataatttttgcactgcttttgatagcgtactcgttattcccaagcactcttaaaactggctctatacctgaccgcgctaacactgcaccgcgctaacactgctactctagaacgccgggctaggtggtcatttgcgactggattgggactaggaggatttgttattgctgcagccgcttatgctactccttactgggtcgcagcaatatgtgtcgcagccactggcggtatatgtgcacctgtagctcgtgctgctttagtgggtgtgagtacaggcagttaacaaagcgaggattaattaagactattagcgcactgaatcatactataatattcactgaccatatactcaatgaccagacattgtccaatggtactgctagaaattttgttacaatagggttcagcgaatatgcagtacatgacagtatcaagcgtgacggcgctgctgatatcaactttggggggtatactgcggagtatggaacccacgtcagcactagcagcgtgcattatgtaagcaggatcatcaatcaaatcgtagcagcggtacca

SEQ ID NO: 166569 - DNA, 96 bp, Saccharomyces pastorianus
ataaatagggcagtcttggtcagctatatttgagattatgccttcactcttttctttcctactaagctaataccgccactaaaacaacaactcaac

SEQ ID NO: 166570 - DNA, 312 bp, Saccharomyces pastorianus
atgagtttccttgggtcagacgccagtacgactacaagaataaaggatagcggcggccacgaagtgccgtgcttacagcccatcgatgtggtggaatgcacttatgagcacttcagcgactcgcgggacaagctgtctctgagattgggcgatttagtctacgtactcaataaaggcactaatggctggtgggatggtgttctcatacggcattgcgccgacgatagcagccccttgatgttggatagaggctggttcccttgttctttcacacgcactattctacatgacccacgcaagaccttgtctgcc

SEQ ID NO: 166571 - DNA, 756 bp, Saccharomyces pastorianus
atggaacgtgaacaaattgtagaatatattcaggagacgcctattattcccagaagggtcattcaatattcggttccgaggcaaaccatcgcgaagcctagccctcacgtcgaaactttggtggcatctaatactttacaggacttgaatttgtcccatcatccggtcatccatgatcctttgcaaggtaaagagtattcaactcaaaaatactcaggaaagacgaacaaccaaagattaagtttcgaggagcatcaaaatgagcaatgccaaaactctattgggttgattaaaagagtgaacacttttttcaagaagaagtcgtcatcgagaaaaaatagtatcaaatcaactggcggtgtcaagccagatgatgaaattcagattccaaaacaacatgaaaaaaaagctgatccaccaccagcacagcccgctttaaggaacttgcctaaaaaacatgaggaaaatagtaaaagacatggcctgttttcttttgaagagacacctcccgtggaagtgccgaggcaggagtatccaaatgccaagaatttagcgccggatacaacatctcttagaagaaccaaatcgtcatctggcagttttgtctcgttagaactaagtaaagcgaagtttgctactttggagcctgcgccgttcaagaatcccactgaaagacaaaccccgcaacctcgtgaacaaaggaatgattctgcaacgcaaaacccaaatataacctcaataaaggaccaaaaaaaa

SEQ ID NO: 166572 - DNA, 351 bp, Saccharomyces pastorianus
acttccagaaagcaaaagatcaccaagacctttaccgtcgacgtctcttctccaactgaaaacggtgtctttgacccagcttcctacgctaagtacttgatcgaccacatcaaggttgaaggtgctgtcggtaacttgggtaacgctgtcactgtcactgaagatggtaccgttgttactgttgtttccactgctaagttctccggtaagtacttgaaatacttaaccaagaagtacttgaagaagaaccaattgagagactggatcagattcgtctccaccaagaccaacgaatacagattggccttctaccaagtcactccagaagaagaagaagaagaagacgaagaa

SEQ ID NO: 166573 - DNA, 120 bp, Saccharomyces pastorianus
tatatgtttcattcctattacattatcgatctttgcatttcagcttccattatatttgatgtctgttttatgtccccacgttacaccgcatgtgacagtatactagtaacatgagtgcta

SEQ ID NO: 166574 - DNA, 507 bp, Saccharomyces pastorianus
gtggtcaaaatcgtcatcttcggtttcgttggcaatgaaattctcgaagccttgcaagtcttcaaatagcttcacagattcaccgtcctcagtagtaacggtctgtacctttactgtctttttatcctttttcgtcatctagaaattttaaaaactgtcaaatataagtaaatgtcctgttatagatcgatgtaacctaatggggaacttgcccttttgcaaaacaactggaacgaaaaaacttaaaacgtaagaacagttgaagaaaatggtagggtgcttcgtcttttatatgcgtacaaaaacccaattgagcaggaatgaaagagaaagagacttatacatttctattcaacaataccccttgaggaacgctgcccctttcattttctatatttgactatactatacagttccacaagcttttgatacccctgagcgcaagctacttctaatttatggaagccaattgccatgagccgtctccattgtgctggttgcctcgac

SEQ ID NO: 166575 - DNA, 300 bp, Saccharomyces pastorianus
aacacccgttctaacaaaatcaaggttgttaagaccccaggtggtatcttgcgtgcccaacatgttaagaagctagctaccagaccaaagtgtggtgactgtggtagtgctttgcaaggtatctctactttgagaccaagacaatacgctactgtttccaagacccataagactgtttccagagcttacggtggttccagatgtgccaactgtgtcaaggaaagaattgtcagagctttcttgatcgaagaaccaaagattgttaagaaggtcgtcaaggaacaactgaagctgtcaaga

SEQ ID NO: 166576 - DNA, 1305 bp, Saccharomyces pastorianus
aaaatagaacacatggaacaaaaggaaatatcagaagtagactggattatcgtatgcagaaatgttattcctttgatctgtttttttttttctttctttactaacaccaagtgagaggggcaaattaagccaaccctcctataaatatgatagtgctttgcgttcattcagtttaagaatcctgctttatggaagaaaactttccaaagaaaaggagagaaggttaacgtagataacgcctgtacaaatggaaagggattgaagataaatccaagggaaaactccaagcatatatacgaatgggttgctccctttaaagatgggtttttgaataacagatcgttgtttgctcatttggaacctgtatacaattttatctgtgaaagcaaacataagaattttgaagatgcagtcgttttaaaagagctacaatcattcagccaagacatatcaattcctgacttgaacaattggttcttacccaggtacaaaattctcctaaaggtcatgagttcaaagacacagggagccaatcctaagggaatttcgcaagtattccaaacccttcaagcgctgttggtttctcattattcacatcgattagattctgacacttctgtcaaaaagacgctagttgacgtacatgtttataacttcatcgccaaattcttatttaataaaattctattaaagaaaaaccataatgatcccaaatgggttcgaaatttctaccaccaggaaaacaataaccctccaaatgacgatgtggactgcgagattttgtgttcgttgcacttcaccacagtttattctattattaacattcaactgatcaaaatcaagacaaatcaaacacttgaaccccagctttcagaatacatctcgatcttgaaacttattgaacacatgtttgccattatcgaaagcctaattcatgtgcttattagacttatatccaggcatgaacaagtaagcatcaacaggaagagagcttattgtcaagtgtatcttgagagagaattgagtttgaagagaacctatctaaggggcttttacaatacagtaagtgctattccaaaagaagaactgcaaggtctcttaaaaatggtcaagatagttattctatctttactcgaagccttagaaaggattgagtggaaatatttcgcggcttttttggaaaagttccctgcatatgagatatcattacaaaaaaaaagagcgtacatacaggctgctctattggttacggccgaaagaaatttgattgctcgttttcgattgtcatgctgttttaataaaaca

SEQ ID NO: 166577 - DNA, 216 bp, Saccharomyces pastorianus
atgagtaagagcaagcatgaatgggctgactcggtggccaactctgggccggcctcgatcctgtcgtactgcgcgtcgtcgatcctgatgacagtgacgaacaagttcgttgtcaacctggccaacttcaacatgaacttcgtgatgctttttgtgcagtcgctggtatgtacactagcgttgtgcgtgctgcggactgtgggagttgccaagttt

SEQ ID NO: 166578 - DNA, 666 bp, Saccharomyces pastorianus
  modified_base (637)..(637): a, c, g, t, unknown, or other
tttatagacataccagtgacaagagagcaggttgaacactgttcttactcgttttggtcctcactgtatcccaaatatgtgccgaaatccatagtgttaaaatccttaccgaaaaaatttattcaatatttggaacaagacggtatcaagctaccccaagaggaaaactccaggtctgtgtacaccgaggaaataataagaaatgaagataatgactatagtgattgggaggacgatgaggataccgccaccgaatttgtccaagaagttgagccattgatagattttccagaattacaccagaaattaaaggatgctttgaacgaattaggtgcagtggctcccaagttaaactggtctgcaccaagagacgctacctggattttgccgaataacactatgaagtgtaacgaggtaaatgaactttacctattgttgaacgcatccaattacataatgcatgaccttcaaagagcatttaaaggctgcgtggacggggatgatataaaaggattgaaatttgacttggtacttagacaatggtgtgatatgaatccggcactcgaatttagggtcttcgttaagaatgcgcatatcgttggggccacccagcgtgatttaaattattatgactatntagatgagttgtcagataccttcaaggac

SEQ ID NO: 166579 - DNA, 228 bp, Saccharomyces pastorianus
ctatcaagagaatccgaggtgccttaggcatggatcaaaattcggaagaaagtggaatcacagcccggagaagcactgaagcttcttttagccctctttgaaagtgaaccagagtcgaaggccattgtagttgcaagcacaaccaacgaagtggaagaattggcctgctcttggagaaagtattttagggtggtatggatacacgggaagctgggtgctgcagaaaag

SEQ ID NO: 166580 - DNA, 498 bp, Saccharomyces pastorianus
ggttacctcattgtagatgacttgcacgattgggaaacggagttctaccgtcagtcgctatttggggggcatgactaacctcgattttgacgctttcgagtaagcaatctctgtgagcgacacagcacctgaggctgtatctgatgctgcgttgcagcgcattgggcttacgagactgaccaagaaatcgatggacatcaacgagctcaatcggtcggaagatctcagcagaggtttatccagctatccacacagatgttcaatctgataaaggagaaatctgaggtgcctttggggcacgttcataaaatttggaggaaagtcgaatcacctcccgaagaagcactgaagcttcttctagccctgtttgaaattgaaccagagtcgaaggccattgtagttgcaagcacaaccaaccaagtggaagaattggcctgctcttggagggagtatttcagggtggtatggatacacgggaagctgggtgctgcagaaaag

SEQ ID NO: 166581 - DNA, 129 bp, Saccharomyces pastorianus
agttggtcggcaaggaatcgtaagggtgattaccaccgattaaggaaggctgtataaccgatacaggtacgcgagttctatggacttgaatcaaagaaagggataaagggccagcatgttggatgctgt

SEQ ID NO: 166582 - DNA, 234 bp, Saccharomyces pastorianus
gactagacggatgaattgaaagaggatatactggccatcagtaaagatgccctggacaactttcagctagaaagagacattgccggaacggtcaagaagcaattggacgtcaagtacggtaacacatggcatgtgatcgttggtaaaaacttcggcagctacgtgacccacgagaagggccatttcgtatatttttacatcgggccactggcgtttttggtcttcaaaacagca

SEQ ID NO: 166583 - DNA, 594 bp, Saccharomyces pastorianus
gccatttccaagaatttaccaatcttaaagaatcatttcagaaagcactggcaagaacgtgttaaagtgcacttcgaccaagctggtaagaaggtttctagacgtaatgctagagctaccagagccgctaagattgctccaagacctctagatctcttgagacctgttgttagagccccaactgttaagtataacagaaaggtcagagctggcagaggtttcaccttggctgaagttaaggccgctggtttgactgctgcttatgccagaactatcggtatcgccgttgaccacagacgtcaaaacagaaaccaagaaatctttgatgctaacgttcaaagattaaaggaataccaatctaagattattgttttcccaagagacggtaaggccccagaagctgaacaagttttgtctgctgctgctactttcccaattgctcaaccagctaccgatgttgaagctagagctgtccaagacaatggtgaatctgctttcagaaccttgagattagccagatctgagaagaaattcagaggtatcagagaaaagagagttagagaaaagtctgaagctgaagctgaaaagaagaaa

SEQ ID NO: 166584 - DNA, 600 bp, Saccharomyces pastorianus
gctgaacaattaatagaagattacttggtgtcacaatataaaccattttctgtaaatgatatagttcagaatttgcacaataaagtgacaaaaacaacagcaaccaaagcattagaaaatctcgttaacgagaaacgcatagtgtctaaaaccttcggaaagattataatttactcttgtaacgaacaagatacagcattaccaagcaatattgatccttctcagtttgattttgaaactgtattgcaactgagaaatgatttaatagaactagagagagataaatcaatggccaaagacgctcttgactctgtaactaaagaacctgaaaatgaagatctcctaacaatcattgaaaacgaagaaaacgagttgaaaaagattgaatcaaaattacaaagtctacaggatgattgggatccagcaaatgatgagattgtcaagcggataatgtctgaagatacgctgctacaaaaagaaatcacgaagagatcaaagatttgcaaaaacctaattgctacaataaaggactcagtgtgcccgaaaaatatgaatgaatttttggtatgtattttgaacattttcgaaaccttttctttt

SEQ ID NO: 166585 - DNA, 171 bp, Saccharomyces pastorianus
aattccaatttaaattccctcatagcgtgtctcagatctctgtccattaagatcttaatcatttgccatggtttcatcgtattttcttcattggcagaagtcccatctagattaaccaattttttttcgatcatgatattgctaaccttttctaacttttccagaacatta

SEQ ID NO: 166586 - DNA, 762 bp, Saccharomyces pastorianus
aaagaaatcattgagaatgctccaggtacccatatcaaagactgggagtctgttgtattagatttcaactcatatatgtatgaaaacaagttttagaacaataagtattttttttgacggttccagttgctatgagtcatttagaacattcattctagagccattttccctaacaaaagacaacggcgcaaagttcaagtcattcaaggagtcagttctttacattgaagaggccttgcaagtctactttgcaagagtagacgaacaatggaatcagttcagttctgaaaaactattgaatgtaattgacttgcaaggcgttccactcccaagaaactatactattttttttccaaccttatttggcttttcgagatagctattaaaagtttgtcggtgggagctattttgcgtttgtctcttagttgcacttcatctaattgcaacattttccttggcggtgtgtgtctcaatttatgtttactcaagtctattcaacgttttcaacctataatacataaaccaatgaaaatggatgataagatgcaatttttgtagattgttattagtgaacgagaaaacggtgttattcgatgggatgaaatcgcaagaaaaatgaatatttatttgtatgagaggagagtttacgggaatttggcgtatttctttgaagatgacatatgtggtccctcatcttcagagaaacctgtgtctcagttaccattgcattttgaactatggccatatattgaagaagcgcaa

SEQ ID NO: 166587 - DNA, 762 bp, Saccharomyces pastorianus
atggcaaggggacctaataaggttatattggttccatacctggtggattacgtgctaccatttctaatcggattagtgaagcacaaggacgtttgcgctcttgccggtctggaccctatccgattatacgctggcttgggctacatgccaatcagaaaaaatcatgttgccagaatcgtcgaatatgtctgttcttcggatgtagttctatcgtcgaaccaaaccaaactgcaactagcttttatccaacacttcctgtcagcagaattacttcaactaactgaagaagaaaaaaataaaatcttggaatttgttgtgagcaacctgtataacgaacaatttgtggaagtaagagtgcgtgctgcagccatactgtctgatatcgttcacaactggaaggaagaccaagcattgttggacctgatcgacaggtttgcaaaggggcttgacgccaacaaatacacttcgaaggaaaagcaaaagttatcaaagacagatatcaaaatccatggtaacgttttaggtctgggggccattatatcagccttcccatatgttttccctctaccgccatggattcctaagcagctaagcaacttatcctcgtgggccagaaccagtggtatgactgggcaagctgccaagaacaccatcagtgaattcaagaaggtgagggccgacacgtggaagttcgatagagtctctttcaacacggaagagctggaagacctggagggtgtcttatggagaagttactacgct

SEQ ID NO: 166588 - DNA, 114 bp, Saccharomyces pastorianus
atggaaaacatcgaaaacatagagctcaatgctgccataggtcaagatgggatctccgagtctagattttttgtaatttttgaaaaactatcgaaagtcactcgtttcgttttt

SEQ ID NO: 166589 - DNA, 228 bp, Saccharomyces pastorianus
tttgctactccattattgttttatttaaaagagcagcatccaaaagtcaccatcttcggattggcgcgatttggcttgactttagtagcgattccacttatcccaatctgtaaatttttgctatggaaatataggccatccaaaaggcatgatagaggggagccaaaaaaatgttcaaagatagcatgctccatctgtgctgcacgagggcaacatcctaaatggttc

SEQ ID NO: 166590 - DNA, 354 bp, Saccharomyces pastorianus
acttctagaaagcaaaagatcgtcagatcattgaccgttgacgttacatcaccaaccgaaaacggtgtcttcgacccagcttcatactccaagtacttgatcgatcatatcaaggtagacggtgccgtaggaaacttaggcaaagccatcgaggtcaccgaagatggctctatagtcaccgtcgtggccaccgccaaattctccggcaaatacttgaaatacttgaccaagaagtacttgaagaagaaccaattgagagactggatcagattcatctctataaggcagaaccagtacaaattagtcttttaccaagtcactccagaagaagctgacgaagacgaagacgaagaa

SEQ ID NO: 166591 - DNA, 393 bp, Saccharomyces pastorianus
gaacacaacactaaaagggcgttgcacaaggataccggttctttgacatggtctgacacactagcaacatatgcacaaaactacgctgactcctacgattgttcaggcaacctagtccactccggcggtccatacggtgaaaacttggcacttggttacggtacaaccggctctgttgatgcctggtataacgaaattaccagctacgactattccaaccctggttttagtgaaagcgcaggtcacttcacccaagtcgtatggaagggaacttctgaagttggttgtggtttgaaatcttgcggtggcgcatggggcgattacatcatttgttcctacaaagccgctggtaatgtcattggtgagtttgctgacaacgttatgccattagct

SEQ ID NO: 166592 - DNA, 471 bp, Saccharomyces pastorianus
atattcatacgcgtatgcaaccgtcttatttacactccgactaatgtccttctaattactgtggaagacggccgtataagcgtccttctgtggtttagatatgctataccggcggaactttgttacacacggctcgggcgaatccttaggggaaaacattgcgctgactttccccagagttgttgccacaacataagccgctttggagtgttgaacaaatccgtcgttgggtcattcaatcaatggcttggcggtatctcaaaagagcgcaaactaatagcgcgcacattcgacgcatttatccggtggtcatcgactaggggcgaagaggtcacgacctattttttcttgcagaaaaaaagtgtgaccttttccgtagctagacgtctatcagggcgtcagcaatgggaggcacagcggaaaaacaataacaatggtaaccgcaattaccttttgagcgttacattcgta

SEQ ID NO: 166593 - DNA, 258 bp, Saccharomyces pastorianus
ggagttacattgttgttaaaggccgcaatattacgtggaacgaatatgctgcaattctcctcgagaaaaaataggaatctacaaaaagcgaattgatagctctacataataatgttactctatcttcttccttttataccttgtcattctttattttattacattatcaacccttgaatttcagcttccattagatttgatgactatttttcaatgtttatgacatcttcttatattgtatatgataatatattagta

SEQ ID NO: 166594 - DNA, 96 bp, Saccharomyces pastorianus
agaaagactttgttgtgtcggaatgttggaataaaaatccactattttctatcaactaatagttatactatcaatatattatcatatacgttgtta

SEQ ID NO: 166595 - DNA, 294 bp, Saccharomyces pastorianus
  modified_base (5)..(5): a, c, g, t, unknown, or other
ggttnccgttccaaatcaacggccagtacttcacagaccaggcattgttcagttcctttgtgctgggcgcaaactcaggcacttcgatatcatcactcagttcatactttttcgttccaacccaaatactcttcaatttattgtttatttcaccttcgtcgcaaatatactctttcgaacacaacaccacttccaaggtggaggtctcgatgtccttgcggatccttttcaaatgtctcaatgaaatagggtcatttttctgaaaatcgtttcgaattagcctactttactagt

SEQ ID NO: 166596 - DNA, 153 bp, Saccharomyces pastorianus
atttggaattttgagaaaatacaatatccataataagtacgagagattaatttttgttttcagatcaacattcaaacacggttgttaggtggttgttttctgatgtactcacatgagaatcacgtgaattttcagatagttgttgggattcca

SEQ ID NO: 166597 - DNA, 327 bp, Saccharomyces pastorianus
gatttcaacagtaagaatttactatacatttctgcagccgggattgcgtctatttatgtggtcaagaccatagtgaaagctagaagagatgctaaatttataccaaaggcgcggggaaacaatggtgaagtgaatgaaaaaaactattatgataaccttgctcaagtcaaaccagggttccccatacctaaagatggaggagacaacattgattgctctgaggaccatcaattagtaagaaagagtaaatatgaaggtagcgggcttagtgctgtaacaagaaaaagaggtgacaaattaggttttttagataggaggagaaacgag

SEQ ID NO: 166598 - DNA, 255 bp, Saccharomyces pastorianus
ataattgttgaaatttcattgttatcaagagctataatattaggtgtacgaatataccaagtttccctcgagaatagagaaatcctccaagtggagtcggtaaatctacataataatatcacagttatttctccttccgttttatatattttattatcccattacattatcagtccttgcatttcagctttcattagtctgatgactggttctcaatatttatgccatcttcttacactgtatatgataatatac

SEQ ID NO: 166599 - DNA, 162 bp, Saccharomyces pastorianus
aaatcataaaatatcacatctttccttcatattttcaaaaaaaaaaaaattttctttaccatttttgacacaataatcacgataattgttaggtcaggcattccctttccacttttatgttcatttggacgcaataagatatacatattatttaatgtgctc

SEQ ID NO: 166600 - DNA, 300 bp, Saccharomyces pastorianus
cggttcctgtatttcgttctagaaatcttaaaaattagtaacatcttagatttgcacgctgcgtacacagaaaaagtcgagaagtttagaaatggcgatgtgtctgttggctccactttggaaaacatcttccgtaacgataaagcctacacacctttaaccacctccactggaaccaccgcctatgatttaaaccacccaatttccagagccttgatgtgtttaactgttcttggcctttgtttcattgcctacaagggcatgcacgaaaagcctcatacggtttcattaagacacaag

SEQ ID NO: 166601 - DNA, 162 bp, Saccharomyces pastorianus
atcagtattattatatctgaaaatgaagagaaatttagaaacagattcttcggtactaacctgaacatataccacatcgacataaagagaaatgttgctgacataatgacaaaacctcttccattaaaatcatttaagttattaaccaacaaatggattcat

SEQ ID NO: 166602 - DNA, 105 bp, Saccharomyces pastorianus
tctaaacgagtattagatatgacgtatgagttaatccaatacctatgggatactagagataaacaacttatatggcacaaaagcaagcctaagaagcgagaaaac

SEQ ID NO: 166603 - DNA, 189 bp, Saccharomyces pastorianus
ctacaatcacctctagtaggtttaaagcaaagtggtgcaacccggtatgaaactattaagtcatatctaataattcagtgttatatgaaagaagtacgtggatggtcatgtgtgttcaaaaatagtcaagtcacaatctgtttattcgtaaatgacatgatattgttcagcgaagacttaaacgacaat

SEQ ID NO: 166604 - DNA, 576 bp, Saccharomyces pastorianus
gagaatattttcggaaacactaaatttgaaaggtcagaaaatttggtagaaagtgcctcaaggttggaaagtttactgaaatcattaaacgcaataaaaagtaaagacgacagagtgaaggggtcttctgcaagcattcacaacggtaaggagagtgctgttcctatcgagtcaatcaccgaagatgatgaggatgaagatgatgaaaatgacgatggtgtcgatttactaggagaagatgaagacgcggagataagtacaccgaacatagagtcagcaccaggaaaacatcaggcaaagcaagacgaaagtgaagatgaagacgatgacgacgatgacgacgatgacgacgatgacgacgatgacgatgatgatgatgatggagaagaaggcgatgacgatgatgatgaagatgatgatgatgatgaggatgatgatgatgaagaagaagaagacagcgactctgatttggagtatggtggtgatcttgacgcagacagagatattgaaatgaaacgaatgtatgaagagtacgagagaaaactaaaggatgaggaagaaaggaaagcggaagaa

SEQ ID NO: 166605 - DNA, 144 bp, Saccharomyces pastorianus
atgtaacttgtttgtttacctttagaagtgcggaaacataagtattttttttctttatttaccaatttaccaaggaaaatccaaatgggcacagggcgagcgaatttttttccctcttttattggcgaaacggaagattttcgg

SEQ ID NO: 166606 - DNA, 210 bp, Saccharomyces pastorianus
cacactccagcaacaaagattgtcgctggccaagtcgacactgatgaagcgggctacattaaaactgtcccaggcagctcattaacctccgttccaggatttttcgctgctggtgatgtccaggattctaaatacagacaagctattacttctgctggctctggttgtatggccgctttggatgctgagaaatacttaacttccctagaa

SEQ ID NO: 166607 - DNA, 189 bp, Saccharomyces pastorianus
ctttcggcaatcattctagcatgttccgcatgttccttgacgccatggtcatccttgccgtcgcctccggcgtttcccttccccctcagctgccagggcgccgttcacacaacgcaagcacacccggcgccaaaaaaccggggaaagaccacggcgctatggtttcggagtttcccgccaatggcgtta

SEQ ID NO: 166608 - DNA, 81 bp, Saccharomyces pastorianus
gacaagatcaaccagttttggcatgtaggcggtgccacgcaaattaggaatattcagtcgatcaaattgactcaggaccgt

SEQ ID NO: 166609 - DNA, 255 bp, Saccharomyces pastorianus
tgtgaaaaatgtgatggcaaatgtcctatctgcgactcttatgtaaggcccaaaaggaaagttagagtatgtgaaaactgttcgtttggtaaacaagctaaaaattgtataatttgtaatctaaatgttggtgtcaatgacgcattctattgttgggagtgctgccgcttaggtaaagataaagatggctgtcctaggatcttaaaccttggcagcaatagactggatagacatttcgagaaaaagaaaaaggta

SEQ ID NO: 166610 - DNA, 258 bp, Saccharomyces pastorianus
acggaggtctaccggcagtcgcaattgggggcataactaaccttgatttgacgcttttgagaaacaatctttttgagcggcacagcccctgaggctgtagctgatgctgcgttgcagcgtattgggcttacgggactggccaagaaatcgatggacatcaacgagctcaaacggtcggaagatctcagcagaggtctatccagctatccaacacggatgtttaatctaatcaaggagaaatccgaggtgcctttaggg

SEQ ID NO: 166611 - DNA, 450 bp, Saccharomyces pastorianus
cgaaataatattaccattgaagattgtttcagagagttcaccaaatgtgagaacttggaggtggatgagcaatggttgtgcccacattgtgaaaaaaggcagccctccacgaaacaattgacaataacgagattaccgaggaatctgatagtccatttaaagagatttgataatttattaaacaaaaataatgacttcgtcatatacccttttttgttggacttgactccattttgggccaatgattttgacggtgtttttcctccaggtgttaatgacgatgaactaccaataaggggacaaataccaccttttaagtatgaattatatggtgtagcatgccactttggtactttgtatggtggtcattatacagcctatgtgaaaaagggattaaagaagggatggctatattttgatgataccaaatataaacctgtcaaaaacaaa

SEQ ID NO: 166612 - DNA, 1185 bp, Saccharomyces pastorianus
atgaatttaacaaatctgttcagatcagtcctcaagtaccgaaaaacaaatctgagcttacttttgttgatcacctatgttgttattgcagtactctacgttttcgaccatgagtattataaatttaacttgccaaaaaaagatgaacaacccgaatttaatgaactgttagaaacggcatggacagatttacaaactattacagcttctttccatccgtatacgtctagagataatgacaaagttcatgattacttactaagcagagttcaggagattacaaaaaatgtttccttcgcaagcatttccgatgataatgatagtaaaagatcgatactatttcaacagcgggacgttttcaatgcgtcctctgatatctcaagagtgatttattttgaatcttccaacattttagtcaagttagagggacaaaatcccgaccaagaaggattacttctatcagctcatttcgattctgtgcccacaggccacggggctacggatgacggcatgggtgtggcttctttattggcgaacctcgaatatcatatcaggcatagaccggacagaaccttaatcttcaactttaataataatgaagagtttggcctgttgggagcatcggcgtactttaatcatccatggtccgttctaactaaatacgtcataaacttagaaggaactggtgctggtggtaaagcagtgttgttcagaacatccgatacttcaactgcaaagatatatcagcaatcggttagagctaacccatttggtaactctatttatcaacaaggtttttatagtggatatgtcagaagtgaaacggactacaaggtttatgaacaaaatggcatgagaggttgggacattgcattttataagcccagaaatctttatcataccatgagggactccatacagtacacttccaaggcatctttatggcatatgctacatacctctttgcaattaagttcgtacgtggtgtctaattcactagacacggaggatcaaacacctgcttgttatttcgattttatcggacagagtttctttgttatgagttccaagacattattttactggaattgtgtatttttgttaatttcacccattgtcgtaatcggcctgtatctaatttcccgggataggatgacttggaaatcctattcttggctttcgtgg

SEQ ID NO: 166613 - DNA, 150 bp, Saccharomyces pastorianus
gagtccattatgggtaaacgatctgatgcctcagggctgtaggctttgaccggaaggactgcaaaggagagtggtttatatgacgaacatacggcatctactccgtgtcgaaacacagggcctatataatatgctaaatctgtccagtcc

SEQ ID NO: 166614 - DNA, 165 bp, Saccharomyces pastorianus
ccatctttcaaaagtatcgtgacttcagataattacactcttcaaagacacgcaatggttccgacattaaggtgcacacagaacatatgcctagatgatctaactagatcaggcaacctcaatgagatagaaaacatagatactgttttaaagtcatatgatgcg

SEQ ID NO: 166615 - DNA, 156 bp, Saccharomyces pastorianus
gaaggttatgaaaatgattatcgacaaaacactgaaattccagacatgtttactacagaaaaactagctgaaataaaaggcaatgctaactattcatctcctagcgacaatctataagataattagaaatacggcttttttgacgcagaagaatct

SEQ ID NO: 166616 - DNA, 141 bp, Saccharomyces pastorianus
gtgcctccaatcattcaaaacactaatgatactagcgtcgcacgtccaaataaccttaaatcaataccagcagcgtcatcaacagtgacagcaacaacaagaacacctggcgtcagttcaacgtcagttctcaaaccacgc

SEQ ID NO: 166617 - DNA, 513 bp, Saccharomyces pastorianus
ggtcatgaatcaagcggacgggtcaccgaagttgatgacgctgacagaaagacgaaactggtgaccgtgttgctattgaacctgtgttcccagccgctatcctgacgaatccaaggaaagaaaatatataacctttgccaatatatggcgtttccgctacttctccaattgatggtgccttgtgaagttatatttgtccccagaagattttcttgaaattccaagtaaaatacaaagaaagcttgtgtagcaccttcatctgctcagttgcgttctgataggttggctgaggtccactttggaactatggattttactgttattgcggttaggacaggaccgtggggctattaaatgtcgaaatcgcgcgcgtttggtggcggtgacgtcattttagttgatgtatttagcaacaagctacgaaagcaaaaaaaaaaattagtctctactaatacttgcaatcctttcaatttttctgttgatgaggctcgggaattaactgatgaagttgaa

SEQ ID NO: 166618 - DNA, 1167 bp, Saccharomyces pastorianus
gtgctattccaaacatcttccccgcaaaccagttcatcaaatgaaggtggttcctcttcggagccattgggaaagtcctctgtccttgaaactactgcttcatcttctgatacaactgcagtcacatcctccacatttaccacgcttactgacgtttcatcttcaccaaaggtaagttcctcaggatcggctgtcacttcagttggtagtacttccgatgcctcaaaggaagtttttagttcaagcacgtccgatgtttcctccctactatcaagtatttccagccccgcaagctctactatttctgaaaccctaccactttcctctacaattttatccatcatttccagctcagtaagttcagaagctccatcggcaacgtctagctcagtgagttcggaagctccatcggtaatttccagcttagcaagttctagactgtttagctctaaaaatacatcagttacttctactttggttgctacagaagcttcgtcagtaacttctagcctaagaccttctagtgagacattagcaagcaatttaatcattgaaagctctttgtcgacgggttacaattcgaccgtttctaccacaacatccgccgcatctagttcacttgaatctaaggtttcgtcaagtaattccagaatggccacttccaaaacctcatctacttcctccgacttgagtaggtctagtgtaatattcggcaatagttctaccgttacaacctctccatcagcgtctatcagtttaaccgcatctccacttccatcggtctggtctgatatcacctcttcggaagcttcatcaatttcctctaacctggctagctccagtgcgccatctgacaataattccaccattgcaagtgcctcgctaattgtcaccaaaacaaaaaactcagtcgtttcatcaattgtctctagtataacttcttctgaaactacaaacgaatccaatttggccacatctagtacatcgcttttgagtaataaagctactgcccgttctttatcaacatccaacgctacaagtgcttctaacgttccaacaggcacatttagctccatgagctctcatacttcggtgataactcccggcttttccaccagtagtacgccactcgcaattaattcaactgtcgttagctcatcattggca

SEQ ID NO: 166619 - DNA, 105 bp, Saccharomyces pastorianus
atgaccgaaagaaagctattgcagctgctacggcgtcctttcatctccctttctttattcacggccttaagagcttgtccgctttgccccaaaagcctaattgct

SEQ ID NO: 166620 - DNA, 216 bp, Saccharomyces pastorianus
gaaccaagaatttattctgctttaattgatggccattgtgaaattttagacaatggtcgtagacgccccaaatttagaattcaattgtctggtaatccaattcttggtgatggtaaatctgacaaccaaaatcacccgttgattttttacagaggtgaatacattcaactgattgatgctaatcaggacaactacttagaggaatgtttgaagatc

SEQ ID NO: 166621 - DNA, 837 bp, Saccharomyces pastorianus
tggaaattggtggctatgagttttaatttataattatataaagacaaagcttggaatgctgagtactttttcttcaatgctgctcactgcccagaagcgttcagaacaactctactggagccattctgcttgaaggaggataaaaatgccaagatcaagtcttttaaagactctatcccttttcatcggaaaagcactacaagtttattctacagaagtggacaaactgtggaacttgatccatactgagtaagtatggaagactgttaacttggaggatttttctctgctttctaaagaaggttcactgctttacactcacctaggttctcatgagtattgctagctagtgcgagtttgatctatacttcacagacttttaacaccccgttctttaagttttccctgattatcaagcggatttccaattcttattccccactatcgcacctttcttatctgaattgtattcttgagtggcctaattgtaatcttttattttgttttctaattattgaaggcggtttctcgaaacatttcacgatttccaaaattcaagaattgaaattatgaacatagaagacaaaatgccttttttatcaactattatgaattctctagaaagtggttgcaaaggaaataaatatgtatttgctgagaggaaaagtttggaagaacaaaaagtatttctttaatggagctgattatcaagcattctttacggggagctttcgaaattttttatattcaaggacatttatgttgtgtgggttattaaacgtgggactttggaaatacatccaagaagcacaattgagctctaacgatgaaccgtta

SEQ ID NO: 166622 - DNA, 384 bp, Saccharomyces pastorianus
  modified_base (381)..(381): a, c, g, t, unknown, or other
aaggaacatttttttggttcgtttcatcccttcattgaatattctgatagaaaaaggaaatacagccgacagaaagtaagagaggaaactaaagtatctgttgataacggtctgacgtggtcaaacttgaaagttgttgaccgggaaaatgtagattcatttcgttgtgatgtcactaaacccgagagatgttcgcttcacacttatttctatgatctaagaaatttaaggccatctgccggaatcatgatgatatcgggtattgttggcgacggcagtgaatacgattggaatgaagaaaaaacttttatctccagggatagtggtttaacatggaggttagtccataattccactggtttatatactactggtgatctnggg

SEQ ID NO: 166623 - DNA, 234 bp, Saccharomyces pastorianus
aactggtctatattggggtggctttacgcactcactctggcttgggtcattattgatttgcccgagacaactggcagaaccttgagcgaaatcaatgaacttttcagtcaaggtgtccctgctagaaaatttgcatctacagtagttgatccctttggaaagagagggctacaaaatcgtccgcaagttgataacattattgaccggttctcaagcgcgagtcaacaggcgtta

SEQ ID NO: 166624 - DNA, 78 bp, Saccharomyces pastorianus
tttccgagatatacggttttgattatgaccatggaccacaagaggcagttctcgtcgactattataaagaccaagaaa

SEQ ID NO: 166625 - DNA, 285 bp, Saccharomyces pastorianus
atggcggcaacaccagcagcgattgaagttaatttgaccattgtatttgttttgtttgttagtgctgatataagcttactaggaaagaaattaaaaaaggcatatctttaagacatgggacagaagcagctctatttatacccattccctcatgggttgttgctatttaaacgatcgctgactggcaccagttcctcatcagatattctccatatctcatctttcacacaatctcattatctctatggagatgctcttgtttctgaacgaatcatacatatttca

SEQ ID NO: 166626 - DNA, 324 bp, Saccharomyces pastorianus
agaggcggttacgacggccccagaggtggctttggcgccccaagaggtggctacggtggctattctagaggtggctatggtggctactccagaggcggttacggtggctctagaggcggttacgacagtccaagaggtggttacgatagtccaagaggtggctattccagaggtggctacggtggtccaagaaatgattacggtcctccaaggggtagctacggtggttcaagaggtggttatgatggtccaagaggcgattatggccccccaagagatgcgtacagaaccagagatgctccacgtgaaagatctccaaccagg

SEQ ID NO: 166627 - DNA, 438 bp, Saccharomyces pastorianus
atcacttttttaccttgaatgaggaagatttcaaattaagtggccttgttggcgcaatcggtagcgcgtatgactcttaatcataaggttaggggttcgagccccctacagggctaataatatttttatatacatttttttatacttgctctatgcgaaagttacagtagccattacaaataaactagagaaatatatagctttctctgctatcattctcattttttttactcattatatattcaagatcaaaattcgataagatattttttagttccttgtcaatacttttccgatttgctaggcttgttgcgcccatttgactggtccgactgtcgaggctggtctggttcatcttttggttcgtttggatcatcaacaagctcgctacaaactttggtaccgaaatggtgctcaaccatgtgttcgacggcaacg

SEQ ID NO: 166628 - DNA, 264 bp, Saccharomyces pastorianus
gatgatactgatacagctttacaggaacatccatcttcaacagaaagaagactacaagcacatacataggtacatatatatatataaatgtatattagtacgcatcgctgagtgacgggctacgcaagctttgcattgattgctgcatggatcggtcgtgtgcatttccaattaccgatgctctgcggataaaaatcgttgaaaattcgttgaataaacgggcttttccgactgtcggttttaagggcttggaccctaagggtg

SEQ ID NO: 166629 - DNA, 192 bp, Saccharomyces pastorianus
atggaagtcgttgttgtcttgcaacagacggtctcttgatttctccttctagtagcagtaatactcataacttttcactttgactcgattgtgggcagctaataaaaaaacgaatgaacaaaaggggcagataatggaaaacggaatctgaatcactttaatgaaatatcacttgtgcgtgcggatacactt

SEQ ID NO: 166630 - DNA, 270 bp, Saccharomyces pastorianus
aaagaaaaactcgagattttctcgagttctttatatatgggggaaaggagaagaaatccaccgcgatgacacacacagcaccaaatcgcctgtaaataataacgtgaaaaaaaaagcgatgatttttttttcttccctgagctctatttctttttcccacacggatattccgcttgcaaaagaaaagacgtggctcgggacctttgccgtttcggaaatagactttggcgttccacgcccagaagcggccaatcaggccaatcaggaccc

SEQ ID NO: 166631 - DNA, 303 bp, Saccharomyces pastorianus
ttgtatttaattttgtgaaatttcatgattttggctttattgtttgtaatctttcataaaagaggcatttctttttccattttataaattaggttttcttttgggggcatatttagtgctctaggcaacttcaatgagccaatctctgagagacatttcccaataaacttactggaggtaataacacgtaaaccagcggcggggggaagagaatagagagttatcacatataaaatgaatcagtacttgttcggtttatgaaatacttcgtactattcctattgtggttagaactagcatcgt

SEQ ID NO: 166632 - DNA, 180 bp, Saccharomyces pastorianus
ttctataactatccttaggaagatatgcattacaatatagtgatatagaggaaggtttgacttcgccatgataagagcgagagctgctttcagatgatcgaagaccttcttagaaggagtattagggcaatagttagcttgtcgtttgaccataattctagaagctatgaatactaccgg

SEQ ID NO: 166633 - DNA, 291 bp, Saccharomyces pastorianus
cccaggtatatcaacgataaaaatatcagggcaaccattctgaaaatcgttaaccctatcacaaagatccttatggttgccgtttggatctgtcctggtttaccgctaaggtttcctgagttgagtattttgtgtttttctggttccaacagaaacttatattttgacgccgaagagcgtgtattccttatcaaatctaggtacaacaagtcacacaagttcgattcacgaatcttattcttggatgtaccggtttccacagtcttgttctggtacatatacatactgcga

SEQ ID NO: 166634 - DNA, 114 bp, Saccharomyces pastorianus
ataaaaatcaactattctctctcaactagtagtcttactacgagtatattataatatacaatgttagatgatgacataaggtatgagaaactgtcatagaagttagaggaagct

SEQ ID NO: 166635 - DNA, 282 bp, Saccharomyces pastorianus
aataatacatccgcaaatgatttatccactaccgagtctaactctaactcagcagtaggcgctccctctgttaagactgaacacggtgactctaaaaattcccttaacctagatgccaatgagccacctattgacttacctcaaaaacctctctctgcgtataccaccgtcgcaatcctgtgtttgatgattgcatttggcggcttcatctttggttgggataccggtaccatttctggttttgttaacctttctgactttatcagaaggttcggtcaaaaa

SEQ ID NO: 166636 - DNA, 117 bp, Saccharomyces pastorianus
ttcttcactagtaaacaccaaggacagaacccagagacaaagatatcccgttctaccgatgacgtcagtgaaaaaaaagtagtgagaaaactgtccttccacgtctatgaagatgag

SEQ ID NO: 166637 - DNA, 780 bp, Saccharomyces pastorianus
gagctcgaacgagaactctcagagacgagtgactataagaccttgcagaagaagaccataagtcttcgaagtgagctgaatactctgtcacattctttgacatcttatgaaaaagaacacttctccaatgatatagaaaatgtattaaaatctattaatgcaaaattatctgagtcaaagggcaaaaaacgactattctccttcaaacagaaaaattcatcatcagccgttcataagaatgttgaacgtacggagcttgcgaatgcgccggcgtataccactactttgaaaaagcattatgtcttggagaagggtgattcagcttttgaaaatttagagttttgtactgttacatcaacaacagattatagtggcaatagtgccctttctggttctttgtgcttccgcaatattactaaatgtgtcataaacttacaaaggattttcttccaaacagggagtatcttcataactgattgtacggattctataatttttctacggtctccttccgacaaggatttccaaatccgtttacgtgacttgaaaaattgcaaaattttgatagagaaactctcaccaagtatcgattgcaaacaagtggtaatcatagaaaattgtcacaaatgcattttcaacgcaagcactcgggaccacctaattatacaagatttctctaaccccttccaaagcgaagaaactgaggacaattctgcctttgcatttgaagattttgatatttgtaacaaggatacaatgcagttgtttcgcgcttactta

SEQ ID NO: 166638 - DNA, 93 bp, Saccharomyces pastorianus
aaaatcttgactcctgaatctcaattgaaaaaggctaaggcccaacaaaagaccgctgagcaaactgccgccgaaagaactgctcgtaaagct

SEQ ID NO: 166639 - DNA, 147 bp, Saccharomyces pastorianus
ttgccaaccccggacttggtggaccgtttggaaaagggtctgccattgaacaagtacgatagagctactttctacaccatgtccgcagaaggttacattgattacccaacttacggtgaggcagtggagttaggctgggacaaaaac

SEQ ID NO: 166640 - DNA, 423 bp, Saccharomyces pastorianus
atcgtaaagttagaagaagtgctgcaaaattccaggtacataggtatcgttctagaatatgcatgtggaggggaattttataaatacatccaaaaaaaaagaagactaaaagaacccaatgcatgcagattgttttcccaattgataagtggggtacattacatccattcgaagggtcttgttcacagagatctcaaattggaaaacttactattggataaaaatgaaaacttagtcataacagactttggatttgtcaacgaattttgctcacgtaacgaattaatgaaaacgtcatgcggctctccctgctatgcagcaccagagctagtggtaagcacaaaaccgtatgaagctaggaaagcagatatatggtcatgcggtgttatactttatgctatgctagccgggtatttgccgtgg

SEQ ID NO: 166641 - DNA, 228 bp, Saccharomyces pastorianus
accgacaagctgaaagaggatattttaaccatcagtaaagatgctctggacaagtaccagttggaaagagacattgctgggacggtaaagaagcaattggatgtcaaatacggcaatacctggcatgtgattgtcggaaagaactttgggagctacgtgacacacgaaaagggccattttgtttatttctatatcggtccactggcgtttttagttttcaaaacagca

SEQ ID NO: 166642 - DNA, 75 bp, Saccharomyces pastorianus
gtggagagccagcaattgcggaagtacatagcattgtacaacagagaggtcgaggagttccacggtggggcggcg

SEQ ID NO: 166643 - DNA, 2184 bp, Saccharomyces pastorianus
atgttcaatcgctttaataaacttcaagccgctttggctttggtcctttactcccaaagtgcattgggccaatattataccaacagttcctgaatcgctagtaacagctccactgccgtttcgtcaacttcatcaggttctgtttccatcagtagttctattgttgagtcgacctcatctgcttctgatgtctcgagctctctcactgagttaacatcatcctccaccgaagtctcgagcaccattgctccatcaacctcgtcctctgaagtctcgagctctattacttcatcaggctcatcagtctccagcttatcttctattacttcatcaggctcatcagtctccagcttatcttctgccacagaatcaggctcatccgcctccggttcatctacttccattacatcaggctcatcctccgccacagaatcaggctcatccgcctctggttcaacttccgccacaggctcatccgcctctggttcaacttccgccactgaatcaggctcatcagtctccggttcaacttctgccactgaatcaggctcatccgcctctggttcatctacttccattacatcaggctcatcctccgccactgaatcaggctcatccgcctctggttcaacttccgccacaggctcatccgcctctggttcaacttccgccacaggctcatccgcctctggttcaacttccgtcacagaatcaggctcatcagtctccggttcaacttctgccactgaatcaggctcatcagtctccggttcaacttctgccactgaatcaggctcatccgcctccggttcatctacttccattacatcaggctcatcctccgccacagaatcaggctcatccgcctccggttcatcttctgccactgaatcaggctcatcctcatcagcatctgaatcatctatcacacaatctggtaccgcttccggttcatcagcctccagcacgtccggttctgttacacaatctggttcctccgtttccggttcatcagcttcttctgctccaggtatctcgagttcaattcctcaatcaacctcatcggcttccactgcctccggttctatcacctccggtaccttaagttctattacctcttcggcttctagtccaactgcaactgcttccaactctctttcttccagcgatggtactatttatttgccttctacaaccatcagtggtgacattacactcaccggttcagtcattgcaactgaagctgtcgaagtcgctgcaggtggtaagttgaccctacttgatggtgacaaatacgttttttctgctgatttcataatccatggtggcgttttcgtagaaaagtctaagccaacttacccaggtaccgaattcgacatttctggtgaaaactttgatgtatctggtacctttaacgctgaagagcctgctgcttcttccgcatctgcatactccttcactccaggctctttcgataagagtggtgatatttctttgagtctatcagagtccacaaagggccaagtcacattctctccttactctaactctggtgctttctctttctcaaatgctattctcaatggtggttccgtctctggtttgcaacgtagagctgaatcaggttctgtcaacaacggtgagataaatcttgagaatggcagtacctacgtcgttgtcgaaccagtttctggaagtggtacaatcaacatcatctctggcaacctttacttgcactatccagacacctttactggccaaactgttgtattcaagggtgaaggtgttcttgccgttgaccctaccgaaagcaacactactcctatccctgtggttggatacactggtgaaaaccaaatcgccattacagcagatgtcactgctctttcttacgacagtgctactggtgttttaactgcaacacaaggcaactcacaattctccttctctattggtactgggttctccagttctggcttcaacgtctccgaaggaacatttgctggtgcctatgcttattatctaaattacggaggtgttgttgcttccagcgctacaccctcatccacatctaccacatcaggggctaccaactctacttccggttccacttcatttggtgcttccgtaactggttcaaccgcttccacttcattcggtgcttccgtgactggttcaacggct

SEQ ID NO: 166644 - DNA, 306 bp, Saccharomyces pastorianus
cctggtattattaaaactttccctcaaacaatagacaccgccagtgaccaatctgatttagctaaaagagaaaaagataccgaattcggccaggatgatactgagtcaaattcaactttcgacaaatccaataacgaatataaaggtctcatcaccattattccttccaaacctgatttgaatcaggtcattaatgattaccaaattgggttcaggaactgcttcatttgttcaggttctgacagcctaaggtataccgtcggaaattccgtggcaggtttacaggccaaggttttttctaacaaa

SEQ ID NO: 166645 - DNA, 306 bp, Saccharomyces pastorianus
cctctaattggcgtaaagccatataatgccactgaattcaaagccgcaagagagaatgtcgacaccattgtttcgctttacgagaaaaggttaaagaaacagcaataccttgtctgtgatgaccacgaaactcttgctgatttaatctcagcggctgctttttcgctagggtttataagttttttcgatgaaacatggaggtctaagcatccagaggttacgcgctggtttaatcgagtaattaagtcccgcttttttgaaggtgaatttgagagtttcaaaatgtgtgagactgagatgcaaccc

SEQ ID NO: 166646 - DNA, 213 bp, Saccharomyces pastorianus
gacggcaccctttgtcaagagttcgtggttaacgtcgactgcgtttactgattaccgttacagtgaatttctagcaagagtcctctgtagatgccactatttgtcgctctccatgtagtaaggccgtcctagctgaagtgtggggagtaagctgtagttataggtgctggaacaattgatctgctggcgggtgcggtactcagagggtttggt

SEQ ID NO: 166647 - DNA, 264 bp, Saccharomyces pastorianus
gtcaaagtttaagtgaaggctattggaatctgcggattagacattcactactacacggatggccaggtcagcgtaaagtaacctgggaagcccatgactttgggccacgaatccaacggtgctgttcttgaaattgaagtatctcaaactactgtaaagcgggtgatgcagtaagcatatagccctcatacccaaataggtttaccaaagaatttctgtgaggccattatagtttgcagctcaacataccatttgctgcatcac

SEQ ID NO: 166648 - DNA, 1269 bp, Saccharomyces pastorianus
atgttcaatcgttttaacaaattccaagctgctgtagctttggccctactctctcgcggcgctctcggtgactcttacaccaatagcacctcctccgcagacttgagttctatcacttccgtctcgtcagctagtgcaagtgccaccgcctccgactcactttcttccagtgacggtaccgtttatttgccatccacaacaattagcggtgatctcacagttactggtaaagtaattgcaaccgaggccgtggaagtcgctgccggtggtaagttgactttacttgacggtgaaaaatacgtcttctcatctgatctaaaagttcacggtgatttggttgtcgaaaagtctgaagcaagctacgaaggtaccgcgttcgacgtttctggcgagacttttgaagtttccggtaacttcagtgctgaagaaactggcgctgtctccgcatctatctattcattcacacctagctcgttcaagagcagcggtgacatttctttgagtttgtcaaaggccaagaagggtgaagtcaccttttctttgtcaaatgctattctcaacggtggttctgtttccggtttgtaacgtagagacgacgatgaaggctctgtaaataacggtgaaatcaacctagacaatggaagtacctatgttatcgttgaaccagtttctggaaacggtacaatcaacatcgtctctggtaacctatacttgcactaccctgacacctttactggccaaactgttgtattcaagggtgaaggtgttcttgccgttgacccaaccgaaaccaacgccactcctattcctgttgttggctacaccggtaagaaccaaattgccattaccgctgacatcactgctctttcttacgacggtactactggtgtcttaactgcaacccaaggtaacagacaattctcttttgaaattggtactggattctctagttctggcttcagtgtctccgaaggaatcttcgcaggcgcctactcatattacctaaactatgacggtgtcatcgctacaagcgccgcatccacatccgcatccactacctctggtgttgtctctactgccactggttcagtcactttatcctctaacgcttctaccaccgtctcttctacgatctcttctagcgccccagactcaataattccttcatctagcgcctctatctctggtgtctcaaactccactacagcatctggttcaatcgcttctactgcttccatcgcttccactacttctactgcatccgctgca

SEQ ID NO: 166649 - DNA, 147 bp, Saccharomyces pastorianus
aaggagatattatccgaccgactgttttgtgatatggcaaactatttttttaaatgagcaaaattacttcttttggctggaaatgtcattagaaagtgcccaagtgacatttagctaaactcgggtattgtctacaagaccggtgct

SEQ ID NO: 166650 - DNA, 726 bp, Saccharomyces pastorianus
cgagttaaaggtatcgatttccatcctactgagccatgggttttgactaccttgtactctggtcgtgttgagatttggaattacgaaacacaagttgaagttagatccatccaagttacggaaactcctgttagagcaggtaaattcattgcaagaaagaattggataattgttgggagtgatgatttcaggatcagagtcttcaactacaatacaggtgaaaaagttgttgatttcgaagctcatccagactatatccgttccattgctgtacatccaacaaagccttatgttttatccggcagtgatgatttgacagtcaaactatggaattgggaaaataactgggccttagaacaaacttttgaaggccacgaacactttgtcatgtgcgtcgcattcaatccaaaggatcctagtacgtttgcatctgggtgtttggaccgaaccgttaaagtttggtcattgggacaatcgacaccaaatttcacgttaaccacaggacaagaaagaggtgtgaattatgttgattattacccgctacctgacaagccttatatgattactgcatcggacgacttaaccatcaaaatttgggattaccaaacgaagtcatgtgtagccactctagaaggtcacatgtccaatgtttcttttgctgttttccatccaactttacccattataatttctggttccgaagatggcactttaaagatatggaat

SEQ ID NO: 166651 - DNA, 159 bp, Saccharomyces pastorianus
  modified_base (124)..(124): a, c, g, t, unknown, or other
aagggtgaggaagaggatgagtatccagaagataatggtacccgtaagaaaaagacaaaggaacgtagtagctccttatcagcaacgttcaattcctggctatccaaattctctatagcttcangaagaatcacagcaagaaaacaggagcgagacaag

SEQ ID NO: 166652 - DNA, 276 bp, Saccharomyces pastorianus
  modified_base (94)..(94): a, c, g, t, unknown, or other
ccccaaaaccacaccgtttttcggggagcaatttttgggagcaaaaatctttttttttttttttttttttttgcttcccacgaaatcggaactnatctatcagccgaagaaagcgcgttggacagatacttgagcagattttgtggggagagagaatcttgggacaaatgcaaaaaagaaatggtcggaacaaaagggcagtatacagggccggcagtaccttctgttcctaccacaaaccttaacgatatcggtgaccctactaaaactgtgcaa

SEQ ID NO: 166653 - DNA, 348 bp, Saccharomyces pastorianus
ttggaacccaagctagaccattacgggcttcggaaattcagttattacgcggtcgattcatctggttcatttgaaacgaacctagacccgcacagctctagcgttgtaacatggggtgtttttcccaacagtccggtcaaacagactacaatcattgaagaagagtcattcaaggcatggagagatgaagcgtttagtatctggtccgagtgggccaagttatttccaaggaacaccccagccaatattcttctaagactagtgcataaagactactgtcttgtctcaattgttcatcacgacttcaaagaaaccgacgagctatgggaaatgttactcgaccaagcc

SEQ ID NO: 166654 - DNA, 825 bp, Saccharomyces pastorianus
aagtatgacacagagcatagccgaccaacaaaaagctattttccacatagcatatcaagaacaccaaggagaaaatatacttacattctagtcctcacatcactaaatggaacttttgagagcaaacatgtggtgataccatttaaaccagatggtttgaaattgggaaggcctgttgctaatagtaatagcagctccagttcatcgctcaggggcggtaaaagagtggattcacacactttttcccaagtaaggtccgataatggtaatttcgattcaagagtactctccaggaatcatgcattgttaagttgcgacccgctcacgggtaaggtatatatacgagacttaaaatccagtaatggtacgttcattaacggtcaaagaattggctcaaatgacgtagaaatcaaagttggcgatgtgatagacttgggaacagatatagatacgaaaattgagcatcgaaaaataagtgccacagttgaagaactatttgtacaacctttattagaatcaccgatttttgaaaatgaagatagtgatgattgccatacaattacagaaaaagaggaggctgctgccataacaagtcacatatatggtgattccaacaacctagaattggaagaagttatcctgggctctgatacagaaatactgagtggaatttttattaataattgtattggtacgagcccgactttatctaatatcatcaaaaccctggcaatggaaattccattttccaaatgcgataattttaaattacagtcgatggagaatttcttaattaattatacgacacatctagaatacacgaac

SEQ ID NO: 166655 - DNA, 750 bp, Saccharomyces pastorianus
aagggtacaggtctcggaagtgaatcagtatattttgaatatgaaaagaaagtcctaagctttcttttaagtaagtaccccaacagaaaggtcaatggccaaataattaagagggaagaattggaccctgaggtttacctagagccagcatcctacctacagctttcagacgaacatgccaatgaaaagttcactagcaccaaggttatattcgaaggtgatgaatcgttaaaggttggcagagttaatataaacaaaaggattacatctgaaggtcatttccaagacgtgaggcagttcaagtttagtaatgtggacaagattcaagaaaactatgaacccggtgatacagtaaccatatatccttgcaatacagatgaggatgtttcaagattcctagcaaatcaaagccattggttagaaattgcggacaaaccattgaatttcaccagtggagttcctaatgatcttaaggatggtggattagttcgcccgatgactttaaggaacttgttgaaatatcactgtgatttcatgagcattcctagaacaagttttttcttgaagatttggacctttgcaactgatgtaactaagatggaacgtggccaagaacaactgaatgatcaaagagaaaaattgcgccaatttgctactgatcaagatatgcaggacttatatgactactgtaatagacccagaaggtcaattcttgaagtactggaagattttatctccgtaaagttgccc

SEQ ID NO: 166656 - DNA, 1308 bp, Saccharomyces pastorianus
atgatattacttcatgccatatatactctttgggtaattatactacttccgttactcaatgcagagaaatttgtcccaaaagtaacggaggctcctatagaaacatcatttaatctagtgagttttgatgattccaacacttctatcagattagatggttggggggttgtatggataagtttcgacgctggagaaaattgggaaacggtcaaagaaattgaagagcgcattttcagatttactgttgatcctttccatggacaggaaagaggtttcgcttttatatgtgaatcacccaaattctacattaccgacgaccgtggggagtcatggagggctttaactataccctcatcagaagaatatttagatggcgactgttttataactactcatcctagaaacaaagaacttcttattgcgaattgctatagctatatgatagacgcagacgttttatatgacccaagtgaaatttacttgagcaatgatggggaatccttttttaaaattaaaccttccttggaaaagaaaaaagacgacgatataacaacttcaagctgtcatttcattcagtctagcaaggattctgactttactggtaatgatacttcgatactctgtttgttctctaaccgtgaatacgatgaagaatatcgcttaactgctacctacacacagttggctttcagtagtgatggaggcaaaacgtttagagattttgatgaatttaaagataagattgttactcaatacaagatattgaagtcatatgtggtcgttttaacgcaagatgacgggcataacgagatgtcatctacggacatctggatatccaatgatgcatctacttttcaaaaggcacagctgcctactcaattacggcacgtcaaagtgattaaaattcgtgaagattctatcggaaggatcatccttcttatatcgacagaaatcacaaatgaggaaaatgctgatccagatctctcagagattttcatatcagattcgcaagggttgaaattctcacctgttgaatggacaccaaaccatcagtttggaaattttaggctcacttttcctgatttcttgaaagggacaatatttggatcgtttcatccttccattgactattctaatcaccaagtaaactatactgaaaatatagccagaggagaaaccaaaatatccgttgataacggcctcacatggtcaaatttgaaagttgttgatgaagaaaatgccgattcgttcggctgtgatatcactaggcctgagagatgttcgcttcagggttatttttacaatcta

SEQ ID NO: 166657 - DNA, 99 bp, Saccharomyces pastorianus
tcagacgacttacatgaaaacgccaacgaattatccagtttcacgagtcaaggcggtaattttgaaatcgaacaagaagatgctcacacgcctgaacga

SEQ ID NO: 166658 - DNA, 267 bp, Saccharomyces pastorianus
cgagtgccgcccctaaaaacgcttgcgcacccacgcctccgcgtcgttaaattaccgcacccacgcaccctgccgcggccatttctggggctgtccgcgcattgggcagaaattcctgtttggggattgccggaatcggtcgcaatcgggtaaaatgaaaacaattttcgcttttccaacagagtaaaatcaaaacagttttgctgaaggaaaaaagaaaaacaaacaaacagaaaacagaaagcagaaagatgtcaatatagactt

SEQ ID NO: 166659 - DNA, 519 bp, Saccharomyces pastorianus
agtgcgcctttgataacggagaatattattcttccagaagacgtcttcaagtgccgtttttcttatatattatacgaaatggctcactataccctgacggtgatttgtttaatgatacctgtggtccattttattggctctaacctctcactacgatatcgtttgcactagcttttcttttgtgtcatagatattacctgtttaatttgtgcaatggttcccttcactgaaccaatctctaatgaaagtctcaaaataaaacttttactgaaggtaataacacgcaaaccagcagtgaagagaagataatggaggactatcacatatagcatgaatcaatacttgtttggtaatgatgtatggaatactccgtactatttttactgtgataaggattgtaacgatttcttcagaaccattattaaaggaaagaattccgttatgcaggtggatcctactgaaaatttatagtcgaactcactatcagctcaagcttcgaacaacgcagtcagatcctct

SEQ ID NO: 166660 - DNA, 225 bp, Saccharomyces pastorianus
ggcggtattctaaaagagcgcaaacctaataccgcgcatgtttggtcgcatttatccggcggtcatcgccaaagggcggacaggtcacgtcccggtctctgcttcagcaaaaaaagtgtgacctttttcgtagctgggcgtctatcagggcgtcagcaattagaggcacagcggaaaaacaataacaatggtaatagcacttaccgtatgaacgctgcattcgta

SEQ ID NO: 166661 - DNA, 114 bp, Saccharomyces pastorianus
atggagctgggatagaaacgtaatggcccacatcaaaaacatcatggccaacgttaggatgactgtgctcctccaaacactataccgtaaaaacacttcttgttagtaaaaaaa

SEQ ID NO: 166662 - DNA, 216 bp, Saccharomyces pastorianus
tggcacgggactcttgcaaaactgtacatacgtttggttgttctttggggccattatccagaatagcacggacagtgcactaaccactatgaatacaccggcaacagtatagctaaattggtcacgcaaacagacagattagttagtagaaggaaggagggggggaaggaggggggattggcgcacatacaaactactcattgctctttgttcttt

SEQ ID NO: 166663 - DNA, 153 bp, Saccharomyces pastorianus
atattattttgtagaattatcgattcccttttgtggatccctatatcctcgaggagatcttctagtatattctgtatacctgtatcatagcctttagcaacaatagaatcccaacaattatctcaatattcaccaaattctcatattccaaca

SEQ ID NO: 166664 - DNA, 342 bp, Saccharomyces pastorianus
atttcaggcgcggcgcacacaccccgcatttttcattcaccgggtggtgtgccggtgggccccccccccttgaaggggggggggaggggccaccaggccagcaagtcacaccaccctgcgctggcgcccagcgaaaatgcgcgcccatataaatacccgccggtcacgaccccccagggccactcgctacacaggacctagaagtaacaacaccacaacacaacacaactcaccacaacatgtcttttgacgacctacacaaagccaccgagagagcggtcattcaggccgtggacaagatctgcgacgagttcgaagtcacccccgaaaaactggacgagc

SEQ ID NO: 166665 - DNA, 345 bp, Saccharomyces pastorianus
gagggacaaacttttagggacacgtggcacgattcttttctcgtcacgtgctcatcccttacccagtcgggcggcgcctctttttcccttctctctctctttctttaatatccagtttccaatttgccaccgtgtaagtttctgttgtggtgttgcaacacaacatatcctatctcaccgttgtattacacacacacatatatatatatatatatatttgtatttgtatttgaaatttgtatagttttttctctctcgtgcaaggtcgtccccactcaagtcaccaagctaaaagttcaagaacataatgaagttttccgctggcgccatcctgtcatggtcctc

SEQ ID NO: 166666 - DNA, 132 bp, Saccharomyces pastorianus
acatcggaggccactgccatggttgtggccaatcatggtgtagtgtgtatcgatgagtttgacaagatgaccggtgtcgacagattcaccatggatgaagttatgggacaagagaccgtgaccttgttaaag

SEQ ID NO: 166667 - DNA, 120 bp, Saccharomyces pastorianus
attgtgggtgatccctcaatcgccaaatctcaattgttgagatttttgttaaatacggcatctttggttatttccacaaccggtagaggtttttcctgtgcaaatttatccgctgcagtg

SEQ ID NO: 166668 - DNA, 165 bp, Saccharomyces pastorianus
caacaaactgtcaaaaaagttaacgtttttgttgttttggcccagtccctgacacctttcatttattggcatgaccatatttagaagatcatcgcattgatgctcatgggtggtatggagaaatttttagacaccggttcctatttaagaggtgtcatcaatatt

SEQ ID NO: 166669 - DNA, 699 bp, Saccharomyces pastorianus
aaggctattgcatattcaccatataatgatgatggctcttgtaagtctgcagacgcggtctcttctgacttaacgttgatcaaatctaaaggtatttccaaaatccgtgtttatggcaccgactgtaattcctttgaaaccgtccaaccagcagccgtaaaactaggtattaagattaaccaaggtttgtatatcactagtagcggcgttgattccatagatgattctgttaccacattgattcaatatggtcaaactaacggttgggatgtctttgatttcattactgttggaaatgaagctatcaataatggttggtgttcagtttctgatttgattagtaaaatttcctctgtcaaatccaaattaagcgaagctggctattctggccaaattactaccagtgagccccctgtctcatttgaaaataaccctgatttgtgcaaaaaatctgatattgactttgttggtatcaacccacatgcctactttgatactagcgccagtgctgaaactgccggtacatttgttaagggtcaagttgaattaattcaaggtgtttgtggtacttctaatgttttcgtcacggaaacaggttacccatcgtctggtattcaaaatggaggcaacattccatccactgctaaccaaattactgcagtccaaaacatcttgaatgaaatggacttggatgttaca

SEQ ID NO: 166670 - DNA, 195 bp, Saccharomyces pastorianus
cttttttacctcaacagaggatactataatgagttgagtttccgtgtcctggaacgttgtcacgaaatagcgagtgccaggccgaacgacagctctccgatgcgtactttcactgactttgtttctggcgcacctattgtaagaagtcttcagaaaagcaccataaggaaatatgggtacaatttggcaccccac

SEQ ID NO: 166671 - DNA, 156 bp, Saccharomyces pastorianus
gcatttccaaggcacaagaatgttttctcacagtgtacatacttccgaagaatccctttagggtgccttcagagatgcagctgcagcttttggccaagaaaaagctaaaaccaaatttgctttgaaccctcgttcagaggccatctaatctttgtg

SEQ ID NO: 166672 - DNA, 405 bp, Saccharomyces pastorianus
gccatcgtcacattgctgggactagctaatgttgtctctgcgactacagcggcatgcctgccagcaaactcaaggaagaatggtatgaatgtaaatttttaccagtattcattgatggattcttccacgtattccaatgcagcatatatggcttaccaatatgcagacaaagtcaaattgggctctgttagcgggcaaacggatatatctatcaactataatcttccttgtgttacaacttcagggacatatcagtgccctcaagaagatgcatatggtaattggggatgcagaggtaaggggagatgctccaacagtcaagccgtttcatactggagtacagatctatttggcttttataccaccccaacaaacatcaccttagaaatgacaggttacttttta

SEQ ID NO: 166673 - DNA, 180 bp, Saccharomyces pastorianus
atgttatctcttataaatagaagtattcttcattcaataccaattactcgtcacattcttccaatccgattaatattggttaaaatgaaccatgtgcaaatcagaaacataaaattatatcactttatttcatatggtttcatgcttacaaagcttactgtctttctctttaacttattt

SEQ ID NO: 166674 - DNA, 582 bp, Saccharomyces pastorianus
aaagatactgaaattgaagataagaaaagcataggtttattgtcccttggttatctggaccttaatggcttgtttgtacctcagaatattttcaaaaatagcttaacctggaagttttatgagtctttcaagttcttagcgtttcgtacctgggtaatagtatggttactaccaagcctttgctggataatgtccagcaagtgggtttactcatttatgatttctctttttgtcctctttttcgagccaatatttttacctgtcattcatgtatttttctcataagctttcgaaacaactccctgtatttacaaagaaattactaaaaaaacatcagatacgggcatcaatgatcggaaagttgtttcaacaaacctaattttgtacttgtatacaaatatagtctgggatagtaggtactttatcaatgcaacagattgtcaagaagtgtccaaaacaattcttcttcaaccattctctttgaaaaaagacgaaattgctaaggttaagtcatttcaggattttgccccttgcataaaagaggcatttgaagtttctttgaaaaaagatgtatgatactgg

SEQ ID NO: 166675 - DNA, 1143 bp, Saccharomyces pastorianus
atggacggtagaaatgaaaaaccaaccactcctgtgtcagattttcgggtgggaagctccgagcaaagtcaagcgggagtgaatcttgaagatagtagtgaccatcgcacttccaattcagccgagagcaaaaaaggcaatttaagtggtaaaagcatcagtgatctaggtatttctaataatgataacaaaaatgtaagattcactgctgatacggatgctctagaaaatgatttgtcttcaagatctacagaaaccagcgataattctaagggcacagatggacaagatgaacaagataggcctgctcgccacaagaggaagcctaaagtttctttcacacatttaaggaacaatggtaaggatggagacgatgagacgttcatcaagaagataataaataacctgactggaaatcaagggggtttggtccctggcttggcaccaataccttcagaaaatgaaaatgggaagaatgatatagaaaaaaataaccgtaatgaagaaattcccttatccgatctagctgatgcgtctaaaatcgtagacgttcatgagggcgacgataaagaaaaactggaggctctcaaattagaaggtgacgtaaattgtacgtcggatggcgaaacgttaggctcaagttcaaaaaattcatttctggcgcctgcagtggatcattttgatgattatgcggaaaacaattcatccgacgataacgaagggtttattgaaacctccacatatgtaccccctccatctcaagtgaaaagtggagtactagggtcattattgaaactttaccaaaatgaagatcaaaattcaagctcaatcttttcagattcacaagctgtaacaacagatgatgaaggtatttcttctactgctggaaacaaagacgtaccagttgccaagcgtagcagattacaaaatttaaaaggcaaggctaaaaaaggcagaatgcctagactgaagaaaagactaaaaactgaagcgaaaattacggttcacattgcagacattttacaaagacaccggttcatcctacgcatgtgtagagctcttatgatgtatggtgctccgacgcataggcttgaagaatatatggttatgacttctagagtccttgaaatagatggtcagttt

SEQ ID NO: 166676 - DNA, 78 bp, Saccharomyces pastorianus
ttttcatttttttttacaattttggcagttacgtctcgagctatttattataagagtcagaattggcgcagggagtgt

SEQ ID NO: 166677 - DNA, 270 bp, Saccharomyces pastorianus
tcaacttccggttcatctgcaccaagtgaaaccgtcgaaaaggaagaaggattggatgaaaagaagagacctcgtgaagaggaagccaaaaatggcgatgacgacaacaatgatgatgacggcgacgatgatgatgatgacgatgaagatgatgatgaagatgacgatgaagccccaacaaagagacgtcgtcaagagaggaataggttcttggatatcgaagccgaagttagtgatgatgaagatgaagatgaagacgaggaggattca

SEQ ID NO: 166678 - DNA, 867 bp, Saccharomyces pastorianus
atgtcaatttaccatctgccaacgctactgaacccgttgattaacgctatatttaactgccctgaaccagacaaatcgccgttgaagaagcttttcgctaatttgcaaacccgtaggtttattcttctggcgcctccttcccacctcctgttgaactatcacgatgttaaaactaaactgccattacatgagctttgttataatgctgattttatcaactcccacatattgttaactactgagaactcttatataaacacgactttacgagacgatcattacgaaactttagatggtaagactgtagttattcaatggaaaaataatgtcattcacactttgaatggattctctctcaggcgaagacttaaaattttggatacgaaaatattacccaatttcaatgactactttgaaggggctgaatatttcgctatattatatatagatcagcctctaggttgcgaatttgttcctaacgactacttgcactgtttcaatagttatggggaaagtccaaaacttgcacgcaatgcacccaacttgctaatggatacttcccaactagaaagatcatcatttgagaatatattacatattcatccggcttggttaacacaactgggtcaattgttttccaattacagaagagttgctcctaatgacgatccttcgaagaaaatgtttgaagaacttgtagaacaagcatttgatggaatgaaatctgactcacttttcaaaaacttttctaacctttatgatctcatacacgactattttgagctgaatctttatgaagacatttggtccagacttacaatacattttaaaggctatgaagtagatactgataactgcgaatatttt

SEQ ID NO: 166679 - DNA, 315 bp, Saccharomyces pastorianus
tgttggaatggcgaactaagcacatcgacgagtcctgaattatccgggaacagtacatatgaaaacggtgcaattgcatctgcgatctctgaagctactgatggtatccctataactgctcttttaggctcctcaagttccgggaacaccacttcgaactcaacatctgtttcctcttcgaattcagcaaattcatcaaataccatctcgagctcaaactcttcatcctcctcctcctcctcctcagtagcttcctctcatgcctcaacagcaagcaaagcgaatggcgccgctatttcttacgcaaacactagt

SEQ ID NO: 166680 - DNA, 330 bp, Saccharomyces pastorianus
atgtctctttcttctacagcggaaattaaagacattgatgttttgcgtttatttattgctattgctttgcggaactacttgacagctaaagattatgtagacgtggtaatgtactactttgttccgtcttaaagttattgttcagagtccaaaaatccctaagattgacttgcccaatgaacatcggtgatatactgaaggccaacaaggagttctttccatcgagtggcagtagttcttccccctctcgagcacgggcccctttcggcagttgcgattttcttccagaagggcccgattgccgcatcgggaaatggctctttctctttt

SEQ ID NO: 166681 - DNA, 603 bp, Saccharomyces pastorianus
aatatacaaagaggaaacttcaacgcttcatttgaaaatctgtacagatcttacaatttgggaatactaccagatcgatcctcagctgcaaatactttactgtcaagtatgtctatggtgacaaatatcggcattattgtgtatggctcaataattttataaaaaaaggaactattggttcttagtattttcttgctagaagacatattcttaccaatcctttcataagctaattatgccatccatatagcaagagaatccggtgggggtgccatgcctatccggcggcaacattattactctggtatacgggcgtaactccataatatgccaccacttacctttaacatgttcatggtaggtaccccacccagccataaggaaattttcaaaggcgttggatcaaaaaataggcctttatttcatcgcgtgattgaggagcataacatgtttagtgaaggtttcttttggaaaacttcagtcgctcattattagaaccagggaggtccaggctttgctggtgggagagaaagcttatgaagctggggttgcagatttgtcgattggtcgccagtacacagttttaaaaagtcagagaatgta

SEQ ID NO: 166682 - DNA, 543 bp, Saccharomyces pastorianus
tttacttttgggcagtcaacaagtgaaaataagatctctgagggaagtgcgaaacctacattctctttctctaagtcagaggaggaacgtaagagtagtccaatttcaaacgaagcagctaaaccctcgttttcgtttccgggcaagcctgttgatgttcaagcaccgacggatgataagactctcaagccaactttttcttttactgaacctgctcaaatagattcatctgttgtttcggaacctaaaaagccctcctttgcgtttgcgtcttcaaaaacctcacaaccaaagccattgttttcatttggtaagtcagatgcagctaaagaaccaccaggctctaacacctcattttctttcactaaacctcctgctaatgagacagataaaagacctacaccgccatctttcacctttggcggttccacaacaaataatacaacaaccactagcacaaaaccatcttttagttttggggctcccgagtcgatgaagtcgacagcaagtacagcggcagcaaatacggagaagctatcgaat

SEQ ID NO: 166683 - DNA, 159 bp, Saccharomyces pastorianus
ttctacatacctaatattattgccttattaaaaatggaatcccaacaattacatcaaaatccacattctcttcattgagatccttcaactactttgtttccacaccgttctgtgagattgatttgtataatcacatttttaccggtaacgttaactttt

SEQ ID NO: 166684 - DNA, 567 bp, Saccharomyces pastorianus
cattcatcacgtataattggacatccgtggagttccaaaaggagtataaacgcaaatagtaaagctaagatataagtagtgtctaagtaaatgacttctttgtaagcgtacagctaaagtttaccgataagttacgataagaaggcagatgtcacatctttagatgaagatttgagacaactaagagaaagcaaattttcaccggaagcaattccaaatatcaaaatatgggtatataaatctgtcctaaaagagatagctcctcctggagacttattggaatgcttgaaagatggaacagtcctatgtaagctggcaaatattttatatgaagcagacacaggagaagctaaccatattagttggaagagctctaaaatgccatttgttcaaatggatcaaatttcccaatttttatcattttcgagaaaatatggtgtgcctgaagatgaactgtttcagacaattgatctttttgagaaaaaggatcctgccattgttttccaaacgttgaagtcactatctcgttacgccaacaaaaaacatccagatagatttccagttcta

SEQ ID NO: 166685 - DNA, 345 bp, Saccharomyces pastorianus
tacatacatatatatatatataatcgcactacatgcacgaggccttggcatactccctcgaaggatcgactgtttgagtgcatccttcattttctgtcgcaattggcgagaataagagcacctgcaaatgggtgcacttttgaagatgggccttgcctgttgggcctgcctaagtcagcctcgcctagctctaggcggagggtctttatcggcgactcagcgtactgtagggaccaccccaggcgcaacgggctgactcgcacccggaaagtaaagcttatttctgtcggacggagagtgtcctttttctctcgcagaagaccatttattggtcctgaaacggta

SEQ ID NO: 166686 - DNA, 129 bp, Saccharomyces pastorianus
ttaattgttgggattccattgttgttagagcctacaatattaggtacacagaatatactagaacttcttctcgaggatgtaggaatcgtcaaaagggaatcgatagttttacgtaacgatattacttta

SEQ ID NO: 166687 - DNA, 267 bp, Saccharomyces pastorianus
gattctattgttggcaagggctttattttattatgtgtacagaatataatagaatttcccctgagagatatacgaatcctcaaattggaatcgatactcctatataatacaattacaattatttctccctccctttcgtatgtttcattatcctagtacattatcaatccttatatttctgcttccattaaattttaggactgtttctcaatgtttagatcatcttcttacactgtatatgataatatacgagtggcatgaatacta

SEQ ID NO: 166688 - DNA, 306 bp, Saccharomyces pastorianus
atgtctataaatgctcttctgctgtgtgtgttgcgttttgctttgctagtatgaacaggatcagtgattgttctttgtccttccttttcctttgcctcttcctcttgttcttctcactccactttttctgttttacccgtaaacacgttacaccgtacgctcccacttaaatgccacacacttaaattccgattcgattcgattccgagtttgacttcgtcttcgtctccttttccttttcctttttttcccaccacttcgtgcagttgcacttgcctctcccactctgtctttttttttcccatt

SEQ ID NO: 166689 - DNA, 492 bp, Saccharomyces pastorianus
atggaggaagtgaaagcagtcaattctgccgctaaagttttgtgctctgtggatcctcagtttgatccttctaaattaacactttctgtgggcgctactccgacttccaattccttgaaactcgataataaaagtacccttgttaaattcgttactactcaattagttagtacgcttgaaatccactgtggtaattactgcatgtatgacctgcaacaggtggcaacaggctgtgtccaagatcacgaattgtctggttttgtattaggaacagtactatcatcttacccttctagaggtgaattgttgagtaatacaggagtgatgtgtctaacgcgagaagcatcctcaataaaagggtttggaatatgtgccgatttggaacatgtgttaaaatccgagagcttcagtagggaatggtatgtagcaagggtctctcaagaacacgggatactgaggccaataagaaactggaacgaaactactgcgtta

SEQ ID NO: 166690 - DNA, 522 bp, Saccharomyces pastorianus
atgtcgtttactgctccttcagatcccgtcaataaaccgacaaaagtgaaggtatcacagttgtgtgaactatgtcattcaagaaaggctctcattagaagacccaaaaacctgtctaaactttgcaaacaatgcttctgcctcgtgttcgagacggagatccataacactattgtagcaaataacttgtttcagaggggagaaaaagtagccgtgggggcctctggtggtaaagactccacggtgttagcgcatatgctgaagcttctgaatgaccgttacgattacggcattgagattgtactgttgagtattgacgaaggaatcatcggatacagagatgattccttggccacggtgaaaaggaatcagcagcagtacggccttcctttggagattttttcctttaaggacctctatgattggacaatggatgagattgtatccgttgctggtataaggaacagttgcacgtattgtggtgtttttagaagacaatcattggaccgtggtgctgcaaag

SEQ ID NO: 166691 - DNA, 342 bp, Saccharomyces pastorianus
tttcgagcagtaattaccattttaggtttgattacaatcacagcttcagcagaatttgatttcgacgtaggctatgaagagtttgtccgtatcaaccctgataagaccttctgagaaagtgagattggcctttacgttggttggaccgagggtggtcaacggcagataacaacgataccacataattccacgttggcggcatcactacaagagtagaatggttgtggtggtaatggcacagaaacctccatcgctacgtccacacttacgatgagtgatatacctatcgctacgataatgaagcacagaaaaagtgtacttatcatattaccgcaactatgt

SEQ ID NO: 166692 - DNA, 243 bp, Saccharomyces pastorianus
cttaagaaagagttccattcctcaaagagcttccagccatttatccacttagacactcaaccaaaatttgcaatttgtggtttaatcgttacattagctgtattatcatctgccctgttcgccgtcggttctaaatcttcatacattaagaaactcttcttctacacaattttaagtgtaattggcagcttgtttgctggcttgaccactgtttttgcttcgaattctttcggtgtctacgtc

SEQ ID NO: 166693 - DNA, 144 bp, Saccharomyces pastorianus
gtcaagttttcagttcaaaagttagctgctatttcaaatataggcccacaggatgttcctactgtctaaaaaaaagtgaggtctgacggatctgactacgcttcaactgataattacgaactcatggcaatatttactgggccc

SEQ ID NO: 166694 - DNA, 213 bp, Saccharomyces pastorianus
gggtgccgaggtgccttgaaaaacccttttgcgcgcctgcgaagtttccgctttcggtcaaaaagaaaatccgaatttagattaagatcctcgtacagaagcctatgcccaagactgaattcagtctgctctaaacggcttccatggaaaaaatatttctatctcttgaaatccgtacaagatagtaggcgtgtgttgggagtcgtatactgt

SEQ ID NO: 166695 - DNA, 399 bp, Saccharomyces pastorianus
ctcactccaccgcttttatattctaaaaatttaactgcatcaaacctcttcgagccgactacctcactatcttcatctccgacatcttcaactatcccctttgacgagttggagaagctagagtccttattaatttcaccattgctgctacctcaggatggtatagtcaatcctaagcaggagtctaatccttctcgtgttgacgaatatgatgaaaatgaacattatttgaacttagccgactctcttagactcgattctagttaccaattgcattcaaaggcacatttgggttacgaaaacaacttgccacgatcaaacgatctaattgatgatcatttgatctcagatcagatcattgagaataactacaacctatggtttagactatcctccagt

SEQ ID NO: 166696 - DNA, 222 bp, Saccharomyces pastorianus
atcacggaaagaatcaccacaccaaacgccgataggacggtacagcaccatgccttgccagtggatacaacaggtttcattttattgcggtgcttgctttcgggttttgttctttatcgtaatagtctttactaacttacgctgcttttgttcttctcccttaagcgattttttcagtatttgtcaaaaaataatggcgtgtgaagcgataagcaatttttt

SEQ ID NO: 166697 - DNA, 108 bp, Saccharomyces pastorianus
agtgttgcacataccgtttatttggctgcattggtatacctgatgtttttcgtattctgcggattccaagtatacttggccagaagaaaaccttcgatcgagttgcgt

SEQ ID NO: 166698 - DNA, 444 bp, Saccharomyces pastorianus
tttaacgacggtaatgagaacttcgaagattttgatgtagagcatttctctgatgaagagacctacggagaaaaaccacaattcaaggagggcgaagccactgatgcggacggtaagaccattgtcactggtggtaatggaccagaagatttccaacaacaagagcaaataagaagaaagacacttaaggaaaaggctattccaaaggaagaaagagccactaccccatatatgaccaaatatgaaagagcaagaattttgggtacaagagctctgcaaatttccatgaatgccccagtttttgtagacttggaaggtgaaactgatccattgcgtattgccatgaaggaattggctgaaaagaaaattcctttggtcattagaagatatttgccagatggttccttcgaggattggagtgtggaggaacttattgtggatttg

SEQ ID NO: 166699 - DNA, 381 bp, Saccharomyces pastorianus
caaagtatccagcttacaaagtctttgtattacgaaaatagtgaaaatatatccaagtggcaaaaagaggctgatgaatcatcacagttggtatttaacaaattgagagatgtccttggtggcgtatcaaccgctaatttgaataatttggcaaaagcactatcgaagaatagggccctgaatgatcatactttgcaacttttcttgaagacagatctaaaaaggttaacttacagcgattgttctaaaatttcatttgatggttacaaaacgctagccattttttcgccacacctaaccgacttatccctacacatgtgtgggcagttgaaccatgaatcatcgctttacattgctgaaaagctaccgaacttgaaatcg

SEQ ID NO: 166700 - DNA, 834 bp, Saccharomyces pastorianus
tccaacaacaataatagacaatacagacagaaccgtaattataacggcaacaatcatggaaataattataacttcaacaacggtaatggctatataaagggctggaacaagaacttcaataaatatagaagacctagctcttccagttgcaccggaaaatcactactttcaagatatagcatgagctataaccacaacaatggttccaccaacggctatacaaggcgtggctccactagtacggttcaacattcgccaggcgcttatattccaccaaatgctagaaaccatcacgtcagccctagcaatcatcttttaagggttccacaatctactgctccggatatctccactgttttagatagcaagccttcatatcacgatcattatactcaggataacatagactccgagggagaacaagattcggacgacgttctattcactcttgaagaaagtgatcacgattttgtcaatggaatggacaatttatccatacatgatcacttgccaccaataacaacaagtgcccaaagcggtatttttgctcatgctaataacagccacgataacagcgatactagcaatactaataataatgatcaccatcacaatagacaatatattccacctcccttagcaacatcattgcacatcaacaacaataatgaaactaacgaactacctgatttattaaaatcaccagcatcttccgaagcacatctaaatttatcttccggaccagttgatccgatattgacagatagtagtaatattggcaacagatattcacgctcatctgattctaaagaacaacaagagcaagatcaagat

SEQ ID NO: 166701 - DNA, 99 bp, Saccharomyces pastorianus
ccgttccacgctctgtccacggagatatgtttcgaccgcaacaccctcgttccctgtcttcgtcgtggccatggtcacggcaacgttgtttgctttgga

SEQ ID NO: 166702 - DNA, 153 bp, Saccharomyces pastorianus
aaaagagaagtggtctctagcgggatcgaaccgctgatccccgcgttattagcacggtgccttaaccaactgggccaagagaccaggaatttctgttggagtctctttacaggcgatcctgtgttgccccgaacaacaccactgaagcaactt

SEQ ID NO: 166703 - DNA, 132 bp, Saccharomyces pastorianus
atcgatggatacgaattgacatttacaaacaacaagcggtcggataagtcgataatgtcggaaaaggtccaaagggattgcaatcctccaataacacaagggtaaatttggtctagcgggggtcaatacttt

SEQ ID NO: 166704 - DNA, 231 bp, Saccharomyces pastorianus
aattgtgtgatgatttttgggattccattgtttcttaatgttataaaactatgtatatagattgtactagagattctcctcatggacttaggaatccgcaaaaaggaatcttcaatcttgcataatgttacaagtgattctcttcctcttttgtacgttattgttcattgatcctattacattatcaatccttgcgcttcagcttccattaatttcgatgacaatgtgagt

SEQ ID NO: 166705 - DNA, 279 bp, Saccharomyces pastorianus
atggaactttcccagtacctcaactacgcattttcctttgcatattatattatcatccatcttctttgcctctcatatatttacgaaataatacataaaaaatattaaggatggatagcacataaacataaaaacgtctttgtgcgtccaagtaaacttgaagacacactctcgttatataaaactgcgaagaacactaacaaagaaggtgacttgcgcttaattagttttattcccttgcttctaaagtccgtaaaacattctattagagtctataca

SEQ ID NO: 166706 - DNA, 282 bp, Saccharomyces pastorianus
ccacaattggacatggattggtcttacgagcgataccagagaggttacgcttacgtctcttgatcatggtacaatgttcaccgtgactggaagaaggttaccggttacggtaaaagattgaacatctgaccaccagactatgtttctaagtacaccaacgaatacttatcttggccagaaccagaagaagtttctgatccattagaagctcaaagattgatggctcttcaccaagaaaagtgtagaaaagaacacactttcaagagattggctcttccagct

SEQ ID NO: 166707 - DNA, 666 bp, Saccharomyces pastorianus
gtccaccaagaaccatacgttttcaatgctagaccagatggtgttcacgttatcaacgttggtaagacctgggaaaagttggttttggctgctagaattattgctgccattccaaacccagaagatgttgttgccatctcttccagaacctacggtcaaagagctgtcttgaaatttgctgctcacactggtgctactccaatcgccggtagattcactccaggttctttcactaattacatcacccgttctttcaaggaaccaagattggttattgttaccgacccaagattagacgctcaagccattaaggaagcttcttacgttaacattccagtcattgctttgactgatttggactccccatctgaatttgttgatgtcgccatcccatgtaacaacagaggtaagcactccatcggtttaatctggtacttgttggctagagaagttttgagactaagaggtgctttggtcgacagaactcaaccatggtccatcatgccagatttgtacttctacagagacccagaagaagttgaacaacaagttgctgaagaagctaccaccgaagaagctggtgaagaagaagccaaggaagaggttaccgaagagcaagctgaagctactgaatgggctgaagaaaatgctgacaacgtcgagtgg

SEQ ID NO: 166708 - DNA, 387 bp, Saccharomyces pastorianus
atgatatatcccttattcaggctatgtattctaggtacgtttctatcgggcagctatgcgtgtctcgaaaatagtatgcaaaagggtattgaaggtgtaagtctctctaataatagtatgcaaattaatagcacttcggcaaattctgcggtatttggtcaatcagatgctctttcaatgaattattcaactgaaagtattttaagtaataatgcatgtgattataggaagaattcttcgtatccagatactatcaccaatgctactgaggcctttaataacacccttgaaacttttgttaatttgcaagcatacaaggagctttattatagtatgcggacactgctacagaattttttttaccaattgttgctaactgtgaattac

SEQ ID NO: 166709 - DNA, 1086 bp, Saccharomyces pastorianus
gtgaaagaaagtaaaatcgaagatatgaaaagcgtgggtttattgtcatctgaacatctcgtatcgaaaaaaattgtcttatctgcgggccttttttagaaacggctctatttggcactaatatcagagtttcaactccgtagtatttccttactgactgctactatggttacctattactgctgtttcgtgcaaaagctccgattgtcagatttatccatttataactgctatttctctctctgcatgaatagcatttttattccttattcaaatgctgtaccgtcaaatgaactcatccagctttataaacaaatcatcaagaatgctctaggtatagatgctaggaactggaattcggtggtaatgaattttaatttataattgtatgaaaacaaactttggaataccacgtacttttttttaagtggtacgaactgcaaagaagcattcagaaaaacacttccggagccattcctcttgaagaagaaagaaacgctaagatcaagttattgaataattctgcccattttattggagaagcactacaagcttattctacaaaagttgacaaagagtggaagttgataaatactgaaaaaaatatggagatatgtcaacttggagaattctctgctttctaaagaagttcactactttagactcactcgggttttacagaggattctcagtgttcaggaattaccattccttcttaattcaagttttgtccatatttcacagatttatgacatcctgttctttaatctttctcggattgtcaaatggattatcaatgcttattccttactattgtttctttcttatttgaattgtatctttgcgctacgcaattttgatcttctatgttatcttccgtctataggaggcttttttctcgaaacactaaacgatttccaaaatccaagaattgaaatggtgaacatgaaacacaaaatgcttttcttatcaagtactataaattttcgaggaagtgattctgagaggtgagctggaatcacaaagaaaatgaacagatgtcattttgagaaaacgctttggaagaacggagagtatttctttgat

SEQ ID NO: 166710 - DNA, 513 bp, Saccharomyces pastorianus
gccccaaagtggtatccttccgaagacgttgctatcccaaagagaactagaaagactgctcgtccacaaaagttacgtgcttctttgattccaggtaccgtcttgattttattagctggtcgtttcagaggtaagagagttgtttacttaaagcatctagaagacaacaccctattaatcaccggtccattcaaggtcaacggtgtcccattaagaagagtcaatgctcgttatgtcattgccacttctaccaaggtttccgttgaaggtgttaacgttgaaaagttcaacgtcgaatacttcgccaaggaaaaattgaccaagaaggaaaagaaggaagctaacttgttcccagaacaacaaaagaaggaaatcaagactgaacgtgttgaagaccaaaaggttgttgacaaagctttattggccgaattcaagaagaccccattgttgaagcaatatttgtctgcctctttctctttgaagaacggtgacaaaccacacttattgaaattc

SEQ ID NO: 166711 - DNA, 387 bp, Saccharomyces pastorianus
ttgaaatttttcaaaaatggtgcacgggcttcttgtgcacgtggtttgctttcgagcctttccggagtcacgtaatatttattacccgcctggcggtattaagttccctgtcctgcctcgcggcagattctgggcaccacgggtacgggtggtgactgggttcttggcggtgcggcgttcccgtgcactgcgtgggtcgtcgcaagaaaaagaaacaaaacgagcccacgtcgtgcaagagcacagaattttgtcagttacataataaggagcaatttcgaatcaactgaaatttggaacaagtgggcgatgcatccattttaaggctaatttgtatcataacgtcactatcagccattgtcacttgcaaccgtcgtctgctaccgc

SEQ ID NO: 166712 - DNA, 360 bp, Saccharomyces pastorianus
ttgctgttctcatgcgtgtaagctagttgcagtttcgtttgtatgaatatggtgtaaatttagaattcgatattgtcttgcccgaggttttcgagattttcacagttccattttgccccacacctggtgcttattgtatttctaccaaggacccatacctcacgcgttccacttgcacccgtgcatttcgaaaggccagtcctgcaaaaagaatttcacgtaatactttgaaaaagggcttacggcatatgtatgtttagttttctatttatgagtccctagtggcaaaagaactactcttatgtttgggaacgaaaacaaagctttcatcagtcttgccgaaaaacatgtcacttagct

SEQ ID NO: 166713 - DNA, 714 bp, Saccharomyces pastorianus
gaagctgttactctatattgtaaggcttacaggtacgatactgcatgcctagtggcaatcaaaggaaagaaagaggaattgttggaagaagttgtcgaccctggtttgggtgaaggtttcggtataattgcagaattgcttgcggattgtaagggccaagtaaattcacaattgagaagattaagagagttacgagctaaaaaagaggaaaatccatatgccttttatggtcaggaaactgagcaagctgatgatgtttctatcgcaccttctgagacatcgacgcaagaatcatttttcacaagatatacaggtaaaacggggggaactgcaaagacaggtgcctctagacgtacagctaaaaataaacgtagggaagagcgtaagcgtgctcgtggtaaaaaggggaccatatatgaagaggagtatttggttcaatctgttgcaaggttaattgagagactaacccaaacaaagtctgatgctgtgagagttgttgagggtctttgcagaagaaatatgagagagcaggctcaccaaattcaaaagaattttgttgaagtactcgatttattgaaggctaacgttaaggagatttattctattagcgaaaaagacagagagagagttaatgaaaacggggaagtttactacatcccagaaattccggttccagagatccaagatttccccaagagtcacatcgttgatttt

SEQ ID NO: 166714 - DNA, 288 bp, Saccharomyces pastorianus
acttaattaaatgttagatgggtacaagaaaattctgacagaggcaccgaaagtcttggctggcaagttgtttctaaaggtagctctaacgacaccagagttaccgtgagttctggtgactttgccccacataactctaatcttggaacctctgacttccttggaagctctgtaaacgtaggcgatacgcttacccaaatagaattgagcttcttgtggagtggcaacaccttcaatcttaatcaaagagacatttgggttgttaactctcttagatctttggtagga

SEQ ID NO: 166715 - DNA, 78 bp, Saccharomyces pastorianus
tgctccaggggaggttcgaactctcgaccttcagattatgagactgacgctctgccgactgagctactgaagcagtct

SEQ ID NO: 166716 - DNA, 312 bp, Saccharomyces pastorianus
accctcataacatatttttcacttttactgcttagatgcagcgcagcttaggttggcggcgaactagcaccacccttggaaagagacaatactactcgtaccgatgccattaacctgttacggtgcttgtgggttttcgggtacccagataactcagtagtaactgttcaggatgaaataccggtcttaggaatagtaattgacaggccgcctactaacactaccagaccaaataaggtagccattcattgtctctcacgcttttcctacgggctagcgttcttggagttctatggtatgtttccaagcggg

SEQ ID NO: 166717 - DNA, 126 bp, Saccharomyces pastorianus
gataataaacgtcgaagaaaaaatataatcaaacttcttccggataacacagaaacaagttctacaccgagaattaaaaccgtcctctacaatgaagctatttcaagaaatgctgacctcaaagaa

SEQ ID NO: 166718 - DNA, 234 bp, Saccharomyces pastorianus
accactttggtcatcatcacttcttgaaaagaccatatctattttgaaactgtctcctcagctttggttttcactgctaccgtcactgccaatgacgttgtcactcaatacactacctggtgtccattgaccaccgaagccccaaagaacggtacttctacttccgctccagttaagtcaactgaagattcagagaacaccacctctgctgctccgacccactctgtgacctcg

SEQ ID NO: 166719 - DNA, 264 bp, Saccharomyces pastorianus
gtctggtctgagttgttggaaatactagcgtattccgtcgattgctccgtcaatggagacttgtacaccaacacatcgggggagatttcaacagctgacatatttagttcgtggaaattgcagaatacccttttacctagactactaacacaccctatgcgtcaaaacacaccacacattacacaatgcactttctgctaaaaatcccgatcgactattcaccttgggaaaacaacaagcgaaaaaaaaagtgagggcgagaag

SEQ ID NO: 166720 - DNA, 318 bp, Saccharomyces pastorianus
agtaaaaacctgctttacatttctgcagcaggtattgcatccatttacatagttaagaccatagtgaagaccagaagagacgccaaatttacaccacaagctcggggaaagaacggagaattgaaggaacgtgattattatgataatttggcgcaggtgaagccgggattccccctacccaaacaagccaataacaacgctgacggctctgaggaccacgggttggtgagaaagagtaaatatgaaggtagtggacttagtgcggcaacaaggaaaagaggcgataaattagggtttctagatagaagaggaaacgaa

SEQ ID NO: 166721 - DNA, 1992 bp, Saccharomyces pastorianus
ttacaaaaaggccaccagaaccctaaggatgttgaaaatagtgcaggaagctctccggattctgctaccacagaaaaaaaactattagatgatagttctgagggttccgaaacttcttcagataatgccggattgggtctttccaaatcagaagcaattttccactggcgtgatttgtgctatgttgtccctgtgaagggcggcgaaagacgtattttgaacaacgttgatggctgggtgaaaccaggtactttgactgccctaatgggtgcttcaggtgctggtaaaacaactttattagattgtttggccgaaagagtcactatgggtgtcataacaggtaacatcttcgtcgatggtcgtttgcgtgatgaatcgttcccaagatcgattggttattgtcaacagcaggatttacatttgaaaacagctacagtaagagagtctctaaaattttccgcttacttgcgccaaccttcctcggtatccattgaagagaaagacaaatacgtggaagaagttattaagattttggaaatggaaaaatattcagacgctgtcgttggtgttgcaggtgaaggtctaaatgttgaacaaagaaaaagattgactattggtgttgaattagctgccagacctaaattactggtgttcttagatgaaccaacatcaggccttgattcccaaactgcttgggatacttgtcaattaatgagaaaattggccactcatggtcaagctattttgtgtaccatccatcaaccctccgctatcttaatgcaacagtttgacagattactattcttgcaaaagggtggtcagactgtttattttggtgatttaggggacggctgtaaaactatgattgattactttgaaagccatggtgctcataaatgtccacctgaggcaaaccctgctgaatggatgttagaaattgttggtgcggcccccggtactcatgccactcaagattacaatgaagtatggagaaattcagacgaatacaaggctatccaagacgaattggactggatggaaaagaacttaccaggaaaatcaaaagaaccgaccgctgaagaacataagccttatgcggcaccattaggttatcaattcaaaatggttaccattcgtctatttcaacaatactggagatcacctgattatctatggtccaaattcaccctgactattttcaatcaagtcttcattgggtttacttttttcaagtctgatagaagtttacaggggttgcaaaatcaaatgttatcaacattcatgtacaccgttattttcaatcctatgctacaacaatatctgccatcttttgttcagcaaagagacttgtatgaagcgagagaacgtccatcaagaactttttcgtgggtcgcgttcttcgtatcccaaatcattgttgaaattccatggaatattttagcaggtacacttgcctattgtatttactattacgcggttggattttattcgaatgcttcaaccgctggccaacttcacgagagaggtgccttgttttggttgttttctattgccttttacgtgtacattggttctatgggtttgttagtgatttccttcaatgaagttgctgaaacagcagctcatatggggtctcttatgttcacaatggcattgtcgttctgtggtgttatggctactcctagtgctatgccaagattttggatctttatgtatagagtgtctccgctgacctatctgatcgatgcattattagccattggtgtggctaatgttgacgttaaatgttccaaatatgaaatggttaaatttactccaccatccggaagcacctgtggcgaatatatggctggatatatcaaaatggctggaacaggttatttgggcgacccgtctgcaacagatcaatgtagtttctgttccgtatctaccactaacgttttcttagcttccgtcagctctcattattatagaagatggagaaattatggt

SEQ ID NO: 166722 - DNA, 171 bp, Saccharomyces pastorianus
agcgtcacatcagcatcagcgtcagcatcaggctctaaggtagtgagcactgtcaaatcagcttatgtaaccacctctggctccaaggcggagactttgaccactacatataagaccacggttaacgctaaagtagcctccgtaaactccagctcgaccaacggagcattt

SEQ ID NO: 166723 - DNA, 438 bp, Saccharomyces pastorianus
atgcccaacgttcatgttataaatatatgcgtttctacgttattataatttttttcttatgtatgatatctcaatatctgtaaatacaaaaatactaaccccacccccttcgtaatggttgacctaatagtccattaactaatccattcacctatacagtagtatactgactacagttgccatgacatatcctttccttttcggactatattaggcggaagaaaaatagccataaccatagtaagaaacaataatacgggggttttttttttttgggcctacataaggtacttcaccccaatttggaaagagataacagagtctttaccacattataaatcatgctttgtcgcaagactgccagaacgggctgtaaattctttcgtttatatcattcgaaccctatcgaacatgttaaaccaattcatattaaacctt

SEQ ID NO: 166724 - DNA, 204 bp, Saccharomyces pastorianus
aagaggaaagttagagtatgcgaaaactgctcgtttggcaaaaaggctaaaaactgtattatttgcaacttaaacatcggtatcaacgatgccttttactgttgggaatgctgccgcctgggtaaagacaaggatggctgccccaagattctaaatctaggtagcaataagctggatagacatttcgagaagaagaaaaaagta

SEQ ID NO: 166725 - DNA, 303 bp, Saccharomyces pastorianus
atggactttataagcggtgaaaaggaccaagggcaaaaacgtgataccacctagcaagtagacggcgaaaaacaccttcaagctagtcattgaggtcttgtaaggatgtggatcttgctactttgttgtttgctgtctttacaactatccctttcttaattattctcttgacattttatatcgaaaagggatctgcggagaaactgagtgaaaaaagtaaaaaatgtgccatcttcaataatgtacaacagccataagtggtataacaagggtaggagagagaggggaaagagagatagaagt

SEQ ID NO: 166726 - DNA, 564 bp, Saccharomyces pastorianus
gctaacttacgtactcaaaagagacttgccgcttctgtcgtcggtgttggtaagagaaaggtttggttagacccaaacgaagcttctgaaattgctcaagccaactccagaaacgctatcagaaaattggttaagaacggtaccatcgtcaagaaggccgttactgttcactctaaatccagaactagagcacatgcccaatccaagagagaaggtcgtcacagtggttacggtaagagaaagggtaccagagaagcccgtttgccatcccaagttgtctggatcagaagattacgtgtcttgagaagattattggctaagtaccgtgatgctggtaagattgacaagcacttgtaccatgttttgtacaaggaatctaagggtaacgctttcaaacacaagagagccttggttgaacacatcatccaagctaaggctgatgctcaacgtgaaaaggctttgaacgaagaagctgaagctagaagattgaagaacagagctgctcgtgacagaagagctcaaagagttgctgaaaagagagatgctttattgaaggaagacgct

SEQ ID NO: 166727 - DNA, 345 bp, Saccharomyces pastorianus
cacacccacaccagacccggacccacagccacagaccacacaccacagccacacacaccagacccacagagtccacacccacacacaccacacccacaccacaccccaacacaaacacctactctcacgtgatctagcccacaccaatatctagccttcactatcactatccacggcccttacctcaccatctcacgcccggtactactccactacataccacctaactactaccgttaccctccacatattataccatcaccctacctcaataccatatatcattaccttacctcaatatcacataccatcactctctctaccccataccatatatcattaccc

SEQ ID NO: 166728 - DNA, 450 bp, Saccharomyces pastorianus
ctagcatattttgtgctgttcagtaaaatggcagaagttctgtttatggaaagatacatggtattctccatatgttgttctttgttgtgggtgatatgactgggcgtgttccgtgagctgcaggtgttggatttccatcttcattggacaatttgaaatactgcgcgtatcttgattatcgtgaatcttttgatttagattttctgttacagtgtttcaatgttgaatcggattttcttccattacaaaatgaagacggagtccaacgggatcgcccaaagcaataaagtctgattccggttcaattacacccttttgggcggtaacattcttattattgccagatctattgtcagagcaatagaattcattatgggtctacgaagccacataattcaacacgaatggtgtctttacgttttcgataccatgccaatgttcttactacct

SEQ ID NO: 166729 - DNA, 183 bp, Saccharomyces pastorianus
aaaaagaaactcgtaggtgtcgttggtcattttctaaatccttagaaggtattcagaaaaaactaccctgccggtcaattaaaactgcctggcaccataaaagcacttcacacttcgatttatgctcacggagcattttcattacgaacaggccacccagtctctgccctgttggaacaaaac

SEQ ID NO: 166730 - DNA, 381 bp, Saccharomyces pastorianus
gagcattttacattacgacacaggccacacagtctactgccattgtagaacaaaaacgaacccgtgcccagtgctggctagaacacctagctacttacgactttaccctcaaatatctggctggacccaagaatgtcgcagatgcaatataccgtgccgtgcttaccataaccccccaaaacacctagtccaatcggcccagagaactggataactgactgcaattacgatccgccctgttatgctacgctgattcatatgaaagaacagacgcaacacaacatcaatccctaggatatgtccgctttccgaagttaccaaaagaagtttctattgtcggagacttttcgtacgcattattccctatcagatagtatacta

SEQ ID NO: 166731 - DNA, 84 bp, Saccharomyces pastorianus
aaatttactctgatgagcctgaagcacgaatcgttaagactcttttcgaacggaatgtacgacaagtatagttacactggtcga

SEQ ID NO: 166732 - DNA, 105 bp, Saccharomyces pastorianus
gtgtgtaaacatggtatcgtacctgtcacctcgttttgcagacgtcaaagaatcctagatgcccaaactttgttttcctttgacctggccgatgaggaagtcgat

SEQ ID NO: 166733 - DNA, 333 bp, Saccharomyces pastorianus
gaagaatttcctactttgagcaatgaaagcaaaatgcgtgcaattactgtcgtcatcatcggcactggcatgagatggtataaaaggaggaaacggatgccacaatttccaacggtttagtagaaccggccgtctacaccctggaactgcccagcgtcattgacactgacgctgttggaatctataaaacgtatcggaaaggcattgagccacatcaagtaacagagagctgaaaatttcctgacagacaagtactccgctcagataaaggtctcagccactccagcagcagggccagacgtggctttgaagaagattggcgtcgactacgtc

SEQ ID NO: 166734 - DNA, 357 bp, Saccharomyces pastorianus
gccggtgttaaaacttacgaactaagaaccaaatccaaggaacaattggcttcccaattggttgacttgaaaaaagaattggctgaattgaaggtccaaaagttgtccaagccatctttgccaaagatcaagaccgtcagaaagagcattgcctgtgtcttgaccatcatcaacgaacaacaaagagaagctgtcagacaattatacaagggtaagaagtaccaaccaaaggacttgagagccaagaagaccagagctttgagaagagctttgaccaagttcgaagcttcccaagttactgaaaagcaaaagaagaagcaaatcgctttcccacaaagaaagtacgctatcaaggct

SEQ ID NO: 166735 - DNA, 414 bp, Saccharomyces pastorianus
atagccaaaacttcttcttcctcctcatcttctaataatgggtcatcgtcatcattgttagcaccgccagcgagagtggaatttccaagtaaaactttttccctcttcgaagcaaaatcgtcaacttcgttcaagccatatggatcggtctcatccctactactgggggccttgcttctgtttgatcttttagcagccatattttgctaaatcacagtgctctacagtaaatatgcctattctcttttgtaaatcacttacacaaactgttttaatgagatgaggtgagatgagatgagctttactattgaatttttttttcttcatagaagaagcgcagattgaaaatttttcatttcacactgcaaatttcaatttttcagatcagcaaaacaagaatcgaagccaatattt

SEQ ID NO: 166736 - DNA, 228 bp, Saccharomyces pastorianus
cgccccccccacaagaaaacgtttctcttgcattcaataaggtccatcgaagctgtatttggaacttccgattttattaaacttctaggggcgaactcaacctttcgcttgaacaagcttgaatgtgtcgaaaaccttagctcgatccttaaaaaagtatttgcattatcagtaataaacagaaaattaaaacatttaccaaaggcaacgagtcttccatatgaaaaa

SEQ ID NO: 166737 - DNA, 174 bp, Saccharomyces pastorianus
gaatctgcaattctacacaattctataaatattattatcatcattttatatgttaatattcattgatcctattacattatcaatccttgcgtttcagcttccactaatttagatgactatttctcatcatttgcatcatcttctaacaccgtatatgataatatactagtaacg

SEQ ID NO: 166738 - DNA, 171 bp, Saccharomyces pastorianus
accagttgtcaaaatggattatcagcttgatttacgaaatgttacttatcctatatactacataaatatgattctgttggtgttggaacgagagtaattaatagtgacatgagttgctaaggtaacaatctaatgcttacatcgtatattaatgtacaactcgtatacgtt

SEQ ID NO: 166739 - DNA, 174 bp, Saccharomyces pastorianus
gaatctgcaattctacacaattctataaatattattatcatcattttatatgttaatattcattgatcctattacattatcaaaccttgcgtttcagcttccactaatttagatgactatttctcatcatttgcgtcatcttctaacaccgtatatgataatatactagtaacg

SEQ ID NO: 166740 - DNA, 120 bp, Saccharomyces pastorianus
attgctttccctcgtctacaaacagtaattcccctgcagcgaaatactcctgttcgaattacgaaatcggtgatagtgaaaggcgcagtgagcgtgccacggatctcctctccgatgcac

SEQ ID NO: 166741 - DNA, 1035 bp, Saccharomyces pastorianus
agttcaactgaagcaactacttcaagcgatgtaaccagctcaactgaagcaactacttcaactgcccaaactagttcagctgaagcaaccacttcaactgacacaactagctcagctgcaccatctgcttcatctggctcaaccgctacgattggcccaatcaaatctgttaatacaaccatttcaactattccaaatgcttcgtccaaccttgctggtatgtatcgtacagccacttcaagtgacttcaccacttcagttgatgtaaccagctctgtcgcttccaccacttcagttgatgtaaccagctctgtcgcttccaccacttcagttgatgtaaccagctctgtcgcttccaccacttcagctgacgcgactggtccaatcacttctgcccaaactagatcaactgacgcaaccagttcagctgctcaaacgacttcagctgttaaaaccagttcgatttcttcaattactttgactgattcagctagctcagtttccccaattagatcagttgagtcaaccacaactcttcatgcaagtatttcaactgtctcaaccacctctgttacattaaccagttcagtcatcccattggccacatctaacgtaactggttcaactgctttaacgagttcagctaatccagatgcttcatctagtccaacaactacggttggttcaaccattttgactgactcaagcgcttcagctggctcatccactttggtcgcctcatccactactagtgatttgattgcatcagctcatacaacgtcttctactggacaaactacgttagtcaacctattaacttcaatcgcttcaaccgcttcagttcacccaactgcatcaaatgatctaagctcttctgttggatccacttcttccaccggaaaggttaacccaacaaaatctactacagcagcaagcacaagaagtacagttaagcctaatatatcaagcgttaagagcaactctgagacacaatacagatccagcaactcagcttctgaaatcagtgcaactcgc

SEQ ID NO: 166742 - DNA, 192 bp, Saccharomyces pastorianus
ttgccacactcaccttcacttctactgatatgtcatacgcacacggatgctacagtatataccattcttaagttaccctactctcacattccactccatggcccatctctctcactaaatcagtaccaaatgcacccacatcattatgcacggcacttgcctcagcggtctataccctgtgccatttaccca

SEQ ID NO: 166743 - DNA, 309 bp, Saccharomyces pastorianus
gagcttaactaaagataaagaaatgaaggattattctcaaaggcatatggatgaagtagctctatttatacccattccttcatcaaccatcactacttaaacgattcgttaacagatgctcatttatcacttcacacctttcatgtttcatctttcgcaccatcttcatcattaaaaataagatgcacttgttcctgaacgaggcatgcatatatcatgaatttcttatgcgaaggtattgttctatggtgcctatgtgtattcgtatgtgggggaagtgagaatgccaattgtaggggtgccgagatg

SEQ ID NO: 166744 - DNA, 174 bp, Saccharomyces pastorianus
gtttggaaaaaaaaagagtttctctatagtggggctggttgtcaggcattctttgaacggagctttcgtggccttttgttctcaaagaaatccctgtcgcctagatcattaaacgttgaactttggaaatacattcaagaagcacaattaagctctgacggtgagccgttacca

SEQ ID NO: 166745 - DNA, 87 bp, Saccharomyces pastorianus
gaaaaaaatgggtgcttctttctaaaaatggccaacaacagagttttctcagtcaaaaatagcccaagattattgctcttctttata

SEQ ID NO: 166746 - DNA, 156 bp, Saccharomyces pastorianus
ttgttaggattttcattattattgaaggctataatattagatatgcagaatatgctagaagttcttctcagatatatagcaattcatgaaggatcgtcgattattctatagaatagtattattacttcactttccattttatatgttgtaattcat

SEQ ID NO: 166747 - DNA, 192 bp, Saccharomyces pastorianus
gtgaataattggataattgtttgaaatccactgttgaagaaaggctataatattcgtacacagagtatactagaagttcttctcgagggtcttggaatccacaaaaaggcgtcgataaatctccataactatattactttatgttctttcctttcatatgtttcgttatcctattacattatcaattcttgc

SEQ ID NO: 166748 - DNA, 231 bp, Saccharomyces pastorianus
aatgcttacctttactttgtttccaatgttcttctttaacaccaaaacatactatttgagaaatgggtgaatgttgagataattgttgggattccatttttgataaaggctataatattaggtatacagaatatactagaagttctcctcgaggatataggaatcctcaaaatggaatctatatttctatttactaatatcacgattattcctcattccgttttatatgtt

SEQ ID NO: 166749 - DNA, 486 bp, Saccharomyces pastorianus
gatgctgcggtgactctagaggatccccatattgaatggtctaacgctagcacatatcaatgtcctgactgtctaatcggcaaaagcacgaaacatagacatgtcaaaggatcacgactaaagtaccaagaatcatatgagccttttcagtacttgcataccgatatatttggtcctgtacatcacttaccgagaagtacaccttcttactttatatcgtttacagatgagaaaaccagattccaatgggtgtacccattacacgaccgtcgtgaagaatctatcctcaatgtttttacatcgatattagcatttattaagaaccaattcaatgctcgcgttctagttatccagatggatcgtggctccgagtacactaacaaaactcttcataagttctttacgaacagaggtattactgcatgctatacaaccacggcagattctagagcacacggtgtcgctgaacgattaaatcgtacttta

SEQ ID NO: 166750 - DNA, 312 bp, Saccharomyces pastorianus
gcagcagcgccgtttcttttttcccgctgcttcgccctttgtattactcattgcgcactttttcacttgccatattcgttcaccggtttttctttttatttcttcgtcttttttcgtctttttcttcactggatatacgctttttgcatttgcaatagcacatatgtgtatatatataagcaagtgttgagcttgcctgtcaaatcctccatgtgtccttctcgtctatcttgttctgtctggtatagagtaatacttacatacatatacgtacattgtttccgctggctagttcgtaaccacctcctttcc

SEQ ID NO: 166751 - DNA, 288 bp, Saccharomyces pastorianus
agtgaaaaatgggtgaattttgagataattgttgggattccctctgtgttgaaggcaataatattaggtatacaggatatactagaagatttcctcgagattatagaaatgcccaaaaggaagtcgatagtgctacataattatgtaacttcatccttcttccttttatactttgtcgttcgctaccctattacattattaattcttgcatatcagctttctttaaatttgatagctgtttcccatcatactttttgtcaactaattctgtcctatatgataatacat

SEQ ID NO: 166752 - DNA, 204 bp, Saccharomyces pastorianus
tgcttacaacctatcgatgtagtggaatgtacctatcaatattttacaaaatcacggaataaactgtctttaagggtaggcgatttgatttacgtactcactaaaggttctaatggctggtgggatggtgttcttatcagacacagcgctaataataataataattcgttgatactagacagaggttggttccccccttctttt

SEQ ID NO: 166753 - DNA, 273 bp, Saccharomyces pastorianus
atgagtcgcactgcgtcatatgccggcatgacaactccggtgaaagataaggaaggccacgggattccatgcttacaacctatcgatgtagtggaatgtacctatcaatattttacaaaatcgcagaataaactgtctttaagggtaggcgatttgatttacgtactcactaaaggttctaatggctggtgggatggtgttcttatcagacacagcgctaataataataataattcgttgatactagacagaggttggttccccccttctttt

SEQ ID NO: 166754 - DNA, 228 bp, Saccharomyces pastorianus
tttctacagaagtactcgggtaatagaattttacagcaattagaaaataaaactaatttgcctaaatcttatttagttgctggtttaggtttcgcttatctccttttgatttttattaacgtcggaggtgtaggtgaaattctttccaattttgctgggtttgtgttgccagcatatttatcgttggttgctttgaagacaccaacgtccaccgatgacacacaactg

SEQ ID NO: 166755 - DNA, 171 bp, Saccharomyces pastorianus
atatatacacatatatataaaatatatagatattgtagtttttattattcttatttggatcctcctctcttaccgcccgtcttcaatctaccttcgaacccggctcttttctttggtacagcactaccaacatattatcttctcatattttctttgcttgttcttctttta

SEQ ID NO: 166756 - DNA, 1080 bp, Saccharomyces pastorianus
tcagtagtaagttcaagttcagcagacccaactagttcaagcgctgtgactacttcagctgattcaactacttccgtagtcagttcaacttcagctgatccaactacctcgaccgttcaaactacttctgttgatccaactacttcagttgactcaactacctcgaccgttcaaactacttcagttgacccaactacttcaactgactcaactacctcgaccgttcaaactacttcagctgatccaactacttccgtagtcagttcaacttcagctgatccaactacctcgaccgttcaaactacttctgttgatccaactacttcagttgactcaactacctcgaccgttcaaaccacttcagttgacccaagtagctctagcgatttgaccagttcaactagctccattttgtctagttcatttgtctcatctaatttgagcacattagcaactccatatattcgttcatccagtactgttagtggcaccgctttagcagatcaaactacatcagtttatccaactagctcaagcgatataactacttcgactgttcagactacttcagctgatccaagtagccctgttaccatttctacttccacagactctacatcttcaattgagtatactacatcggatgatccacatgcctcatctagtttagcgggtatgtatcgtacaagaagctctgacgaggtaaccacatcaacagatctaactagctcaagtgacgttgctacttcagttgacccaactacttctgttatcagttcaacttcagcagacccaactacttcagcagactcaactacctcgaccgttcaaactacttcagctgatccaactacctcgaccgttcaaactacttctgttgatccaactacttctgtagtcagttcaactttagctgactcaactacttcaaccgttcaaaccacctcagctgatctaagtatctctgttatcagttctacttcagttgacccaactagttcaagcgctgtgactacttcgaccgttcaaaccacttcagctgatccaactagttctgtagtcagttccgctccagttgat

SEQ ID NO: 166757 - DNA, 345 bp, Saccharomyces pastorianus
atgacttctcctgcatcaacgtctactataagtaacgttcaatcaactgcttccgtaatgaatcacagtattgaggacaatatttctgcagctgcctctctagaaagtgtttctggtacctcaactaaagattattctagtcaatccagtgccattcattatacaaattccttcacgaccaccactactaacgcatttatcacatcaaagcattccattgctgctgtatcaacaggagccattacatcatctgccagcatttcattaatcatggaaggcagcgcaaacattgaagcagtaggaaaattggtgtggctcgctgccgctcttcctctagctttcatt

SEQ ID NO: 166758 - DNA, 522 bp, Saccharomyces pastorianus
gaagttccaggttacgtctattcccgtttccaaaacccaaccagtaatgttttggaagaaagaattgctgctttagaaggtggtgctgctgctttggctgtttcctccggtcaagccgctcaaacccttgccatccaaggtttggcacacactggtgacaacatcgtttccacttcttacttatacggtggtacttataaccagttcaaaatctcgttcaaaagatttggtatcgaggctagatttgttgaaggtgacgatccagaagaattcgaaaaagtctttgatgaaagaaccaaggctgtttatttggaaaccattggtaatccaaagtacaatgttccggattttgaaaaaattgttgcaattgctcacaaacacggtattccagttgtcgttgacaacacatttggtgccggtggttacttctgtcagccaattaaatacggtgctgatattgtaacacattctgctaccaaatggattggtggtcatggtactactatcggtggtataattgtt

SEQ ID NO: 166759 - DNA, 384 bp, Saccharomyces pastorianus
tttgggtccaataatgcatctaacacggcggccaccaccaattctactggtttatttagtaataaaccagttggtgcaggagcttctacaagtgctggaggactatttggaaacaataacaactcgtctctaaacaattccaacggttcaacgggcctgtttggtagtaataatacatctcaatccactaatgctggaggcttatttcagaataacactagtacgaacacttcgggcggagggttattttcccaaccttcccagccaatggcacaatcacaaaatgcgctccaacaacagcagcagcaacaacgattacaaattcagaataacaatccctacggtactaatgagcttttttcgaaagcaactgtcaccaacacg

SEQ ID NO: 166760 - DNA, 300 bp, Saccharomyces pastorianus
tgtatacagaatatactagaagttcttctcaaggatataggaattctcaaaatggaatcggtatttctacataataatattttattattctttttcattttatacgtttcattatcctattacattatcaatatttgcatttcagcttccataacagttgatgactgtttctcaatctttacgtcatctttttacaccgcatgtgataatatactagtaacacgaatactactaaaagatgacattttagagcttcaatccaacaacttctcagtgatgtggctttcgacatttcatatt

SEQ ID NO: 166761 - DNA, 135 bp, Saccharomyces pastorianus
atgagtaattgcagaaggctcctatgcagacagctaagcagtgcttaattgaattaccttcccttttatttcttgatatgtcgtcctttttctctctatcttagttcttgcgagtactggcaatcaagtttctcc

SEQ ID NO: 166762 - DNA, 324 bp, Saccharomyces pastorianus
ataaagcgggtaacattaattatcttaccaaggcgacaattcccttttctaaaatttcacagcaaagaagctttagaaagtgcagtaaatctacaactcataagaaggaaaaaaagcgtgaacattcaaatcgacagcgtaaccttctgtatttatttctgtttgttgtactttcgaactctcgaatatcatagaggaactattagtctccataatgtcacaggcagcaaaaaacgtgatagtaaagctaatagtaggagcaggccaagcggcaccatcacctcccgtggggcccgcattgggctccaagggtataaaagccat

SEQ ID NO: 166763 - DNA, 156 bp, Saccharomyces pastorianus
aaaaattgcgataaggaaggcgaaaaatatgagcggtacgagaatcgaacccgtgtccccaccttggaagggtgggatgataaccactacactaaccgcccggagaatgtcttgttgagctatagcaactgtcatattctcatatacaaaaaaggg

SEQ ID NO: 166764 - DNA, 174 bp, Saccharomyces pastorianus
tattccaacataattgattagtgttgtaataaccatttatattgtatgatgatctttgggattccattatttcttaatgttataatattacgtatatagattatactagagattctcctcatggatttaggaatccacagaaaggaatcaataattctacataatattataaat

SEQ ID NO: 166765 - DNA, 390 bp, Saccharomyces pastorianus
aatacagcaacggttagcggaagtactaccaccggcgttactggtaactcagtaaactccgaagctgctgaaacgaaaaccgtgacccacggcaacggtgtgccttcgatttcagaatctggttatgctgaagcacatccaactactactgctcatgcgattggctatagcagtagtgttgcttcagtcccaggggccgctaacaccaaggaccatacaactacttacttaaacactgtctcgcaacaacctcgtagcacttccataagcggtgtagtaggatctagtaccgtttctttagaaatgtcaagctacgctggtattgccaacggtctactggctaatagtgctctaagcgcgttcattgcctccatgctgctggcaattatt

SEQ ID NO: 166766 - DNA, 714 bp, Saccharomyces pastorianus
atggaacaactcgacaccccctccgtggtcatcagcaagccgctgctgaagctgaaactcctcgatgccctgcgccagggaagctttccgaacctgaaggacctgctacaaaggcagttccagcctttggacgacccgaacgtccaacaagtgctccatctcatgctccactacgccgtccaagtcgctcccatgaccgttatcaaagaaatcgtccaccactgggccactaccggcaccacctttttggatatccatctcgatctaaatgaacaggattctaacggcaacaccccactgcacatcgccgcgtaccaatcccgtggtgatatcgttgccttcctcatggaccagccaagcatcaatgactgcgtgcttaattactctcgtctgcaagccatcgaaatgtgcaagaacctgaacatcgcgcagatgatgcaagtgaaacgctccacatacgtagcagagaccgcccaggagttccgaactgcgttcaacaatagagactttggccacctggagtccattctcgctagcacccgaaacgcagaactgctagacatcaacggaatggacccagagactggtgacaccgtcctgcacgagtttgttaagaaaagagacgtcattatgtgccgctggctgctcgaacacggcgcagaccccttcaagagagaccgcaagggcaaactgcccatcgaccatgtaaggaaa

SEQ ID NO: 166767 - DNA, 126 bp, Saccharomyces pastorianus
cttgtcagcagaggcatttgccatgaaaatgctctcattctagccctaatgagattggaaccgatgcttcaacgcttaacactgaatggtcgatccagcagtgggtcgcaccagctaaatgattat

SEQ ID NO: 166768 - DNA, 111 bp, Saccharomyces pastorianus
aagagagtaggctttcataataaactagccttgttggcgcaatcggtagcgcgtatgactcttaatcataaggttaggggttcgagccccctacagggctttattattttt

SEQ ID NO: 166769 - DNA, 192 bp, Saccharomyces pastorianus
cttataatctctgcttctttacagaagtcaaaatatacgtatgcattggtaaacttgaaaccaattgtacccggacatgtactgatcgttccactgagaactacggttttaaacttatcagatctgaccatgcctgaatctcaagataatttcagacttaccagtttatacataggatttattaagtggcaa

SEQ ID NO: 166770 - DNA, 348 bp, Saccharomyces pastorianus
ggacagtcggtaccccacttgcatacacacattattccacgttataaaataaacaatgtaggggatttaatatacgataaattagatcattgggatggtaatgggactttgactgattggcaaggaagaagagacgaatatttgggtgttggtggtaggcaagcaagaaaaaataactctacatcggccactgtagacggggatgaactctcacaaggtcctaatgtcttgaagccagacagtcaaaggaaggttcgagctttaaccgaaatgaaaaaagaagctgaggatcttcaagccagactagaagaatttgtatcttctgatcctggtttaacacaatggtta

SEQ ID NO: 166771 - DNA, 228 bp, Saccharomyces pastorianus
ggcacgtcttctacattactagattgtgatacttcaattctcggtcgtcgcattacaaaagacaccgaacttgccgacttagcagaattgagcattgaaaacagaataacaaaattgaatatattcctgagatccgagaagtactactgttttttttgcggcatcaagtatacggatgaaggtgatctctacgagcattgcccaggagtgaatgaagacgaccacaaa

SEQ ID NO: 166772 - DNA, 75 bp, Saccharomyces pastorianus
tggaagttggtaactcgcgcaatacatcgatttggtgggtgcaactttgcgcacctaatgcaacgttacggcatg

SEQ ID NO: 166773 - DNA, 381 bp, Saccharomyces pastorianus
gtagctgtcgttgttcgtggtcgttacgctggtaagaaggttgtgatcgttaagccacacgatgagggttctaaatctcatccattcggtcacgctttggttgccggtattgaaaggtacccattaaaggtcaccaagaagcacggtgccaagaaggtcgctaagagaactaaaatcaagccattcatcaaagccgtcaactacaaccacttattgccaaccagatacaccttggatgttgaagctttcaagagcgttgtatctacagagacttttgaacaaccatcccaacgtgaagaagccaagaaggttgtaaagaaggcatttgaagaaagacatcaagctggtaaaaaccaatggttcttctccaagttgagattc

SEQ ID NO: 166774 - DNA, 378 bp, Saccharomyces pastorianus
caccatctttcacagggatcatcctcttctccttcatcgatttttgtgtcatcgtccttctcctcttcatcatcggattattcctcgtttccatcttcctcttcctcggcatcatacgtttccactattattactttggagtcatcaagctcagagtacgaaaacactcagtccacttctagctcaaggatggcgtcatcttcttcagctataccgccctccacatccgtcgtcgaatcgactcaaacagagtctttctcaacgagaactacttccacattgacaccatcctccaaggtaagcgcgatttctagaacaacgacatctgcgccagcgcaatcttcttctgttcagtcgatatctgtctcgagctcagaa

SEQ ID NO: 166775 - DNA, 879 bp, Saccharomyces pastorianus
tctgttagtactttgaaactattgggaaaacgcctgtttaattccagcagtcacacggataactcttcgttactgcttagtgccgaacaattgggcaatgggagaagtttaagaaaaaggccaacgtctccgtccattagtggcagtggtagcggtggtaattcaccttcgtcttctgctggggcacggcagagatctgcttctttacatagaagaaaaaacaatgcttctgtaggattttcaaatgggcctgtgtcgtcacacaagccctctgccgcattgcaggacttaattaaacataataataacccttacttgaactctccctctgatattctgggcacaggtactggcattgcctcggcaagagatagggatagagcagttttggatagagaaaaggaaaaagaaagggcgagaaacaaagaaagaaatactcatcacgcgggcttaccgcaaaggtctaatagcatggccagtcaccattttcccaacgagaatatagtttataatccatacggcataagcccaaaccatgctaggccagatactgcatttgcagacactctgaatacgaataaggagaacgatttgagtttttacatgcatgatggtaacagcaagatacggatgttgccccttccaattgctaatccgaacgattttttgcccgaagatatgaaacaatatagtgtccacttgacggataatttcgtatttgatacggacaataaacctattggttcgggtgggtctagtgaagttagaaaggttaaatcaagttacaggcaaaaggatgtttacgctctaaaaaaactgaatatgatataccacgagtcacccgagaagtttacaagagatgctcaaagaattatcata

SEQ ID NO: 166776 - DNA, 195 bp, Saccharomyces pastorianus
tatatactattaatgaaaaatttccttcttagtaatgacactcataaataggtaagtgttggaattaaaatcaactatcgtctaacaactagtagtcacactaccaatatattatcatacacggtgttaaacgatgacataagatatgagaaactgtcatcgaagttagacgaagctgaaatgcaaggattgata

SEQ ID NO: 166777 - DNA, 510 bp, Saccharomyces pastorianus
cctactggttacgcagttttcaaggttaagttgcaacaagatgacattggttcaagattaaaagaagttcaagagcaaatcaatgattttggtgcttttacaaagttaatcgaacttgtctctttcgcgccattcaaaggtgctgctgaagcccttgaaaatgctaacgacatatcagaaggtttagtctctgagagtttgaaagctatcttggatttaaacttaccaaaggcttcctcgaaaaagaagaacgttactttggctatttccgataaaaacttaggtccttctattaaggaagaatttccatatgttgattgtatttcaaatgaacttgctcaggatttgattcgtggtgtcagattacatggcgaaaaattattcaaaggtctacaatctggtgacttagaaagagcccaattaggtttaggtcacgcttactccagagctaaagtgaagttctctgttcaaaagaacgacaatcacatcattcaagctattgctttacta

SEQ ID NO: 166778 - DNA, 144 bp, Saccharomyces pastorianus
ttggtagaggctattatatcatgtatacagaatatagtagaagttctccccaagaatataggaatcctcaaaatgaaatcgatatctctacatagtaatacaacgattattcctcattccgtttcatatgtttcattatcctat

SEQ ID NO: 166779 - DNA, 171 bp, Saccharomyces pastorianus
cacgccgcagcagaagaagatgacgaagaaggtgaagttgatgccggtgacttgaataaggatgatatcgagttagtcgttcaacaaactaacgtttccaaaaaccaagccatcaaagccctgaaagctcacaatggtgacttagtcaacgctatcatgtccttgtctaaa

SEQ ID NO: 166780 - DNA, 393 bp, Saccharomyces pastorianus
atagcattgggtatacagagtttactagaacacctcctcagggatataggaatctgcacaagggaattgacatttcaaacatttcaagtaatattgttatttttcttttcattttatgtgttgtcagtcattaacctatcatattatcaatcactgcattcagattccattagatttgatggcagtttctcaatctttatgtgctcttcttacaccattgagaaatgggtgaattttgagataattgttgggattccattgttggtaaaggctataatattaggtatacacaatatactagaagttctcctcgaggatttaggaatcctcaaaatggaatctatatttctacaacctaatattacgattattcctcattccgttttatatgtt

SEQ ID NO: 166781 - DNA, 72 bp, Saccharomyces pastorianus
tcgagatatgatttacaaggagcgacatagaatcggacgctgaagctatctagctacactgataatgatgac

SEQ ID NO: 166782 - DNA, 279 bp, Saccharomyces pastorianus
ctagaggatcccgaagatggttcttccagaattttgatctccactgatttgttggctagaggtatcgatgtccaacaagtttctttggttattaactacgacttaccagctaacaaagaaaactatattcacagaatcggtagaggtggtcgtttcggtagaaagggtgttgccatcaactttgttactaacgaagacgttggcgctatgagagaactagaaaagttctactccactcaaattgaagaattgccatccgacatcgctactttgttgaac

SEQ ID NO: 166783 - DNA, 405 bp, Saccharomyces pastorianus
agtcattttttttttgcatccaattttattgaaagtccgcccgctctgttaaaaaaggcgtttcttctaaatttgaataggctacgatcgagattccctccgattaattatgcgctactggctcctctttcgtcgtattgcaagtggacttttcaacgaggctatgcatgcccagtgtcattcttgaagcaggcacacacagacgcgcttcaattagttttctttactagatgcatcatttgggcggtttttcactaccgttttcgagtaggggctctcacaaaacgggcacgaccttttgtttacaaccgcccaaagaggaaaaacatcaacaatcaagaagcggacacaaaatatagaagcaccataaaactcacgacaacggtaactttaaatttgttgtat

SEQ ID NO: 166784 - DNA, 108 bp, Saccharomyces pastorianus
aaaaaaaaaggatctcggaaccggaacgagattgctcatttttcgttccgtttccgcaggttttgcaaatcattaagcagatacacaagggtccttttaatgtttatg

SEQ ID NO: 166785 - DNA, 195 bp, Saccharomyces pastorianus
tctgctaaagcactgctatattaccagagggctgcccaactagggaatttaaaggctaagcaagtgctagcttataaatactattctggcttcaatgtcccacgaaattttcataaatctttggtattgtacagggacattgctgaacagctaagaaagtcgtactccagggacgaatgggatatgtcttcccct

SEQ ID NO: 166786 - DNA, 306 bp, Saccharomyces pastorianus
atgaacaaaattataaaagagtctaccaacttcgccagatatctacgaactagcggtgtactcaacagtcttcggaccacatctaagtttgtttaaattaataacaattcatattcaactcatggaagttttgatggcaatgtagctactattttcaatatttcaaaattcaattacatcaattcttcggccaaggggtcacttctaacttataaaagcattaccttcttttgtccaagatatttcaagaaacggcctttagggagacatgcgaagggaaaaggcaaatctgacgaaaagattcta

SEQ ID NO: 166787 - DNA, 267 bp, Saccharomyces pastorianus
atagccgttacactacatcggatttgattagcttgatttgtatagaaaaacatatcaccatatcagtaaatatgaatgatctttatttatatatatatgtccggaaaattgtaggaataaaaatctgttggagtaaaaatcaaccatcatctatcaactagtagtcatactatcaatatattatcatatacggtgttaaatggtgacgcaagttatgagaagctgtcattgaagttagaggaagctgaaatgcaaggattgataatg

SEQ ID NO: 166788 - DNA, 597 bp, Saccharomyces pastorianus
atggcgaaatacattgttgcggcccttcaaatcggctcttgtccgggctctactaaggataccttgaaaaaaattttgtcatatgagaaggagatcaaggaatctggtgccaagttggtcgttatcccagaagccattcttggtggttatccaaagggatcgaactttggggtttatctaggctaccgtcttcaagaaggaagggaggagtatgctaagtatcttgccgaagcaattgagatcggaaacggagagaaatatccagaaattagtcagttgtgcgcactatcgaaggccaccgacgcatccttatgtgtggggtgtatagagcgcgatgggacgacattatattgtaccatggtttatatagatcctaaagatggctacgttgggaagcatcgaaaactgatgccgacagctggcgaaagactgatatggggtcaaggcgatggttcgactctgcctgtcgtggataccgctgctgggaagattggcggtgctatctgctgggagaacatgatgcctctactgagatacgccatgtataaaaaaggggttgagatctggtgtgccccaacggtggatgctaggcctatt

SEQ ID NO: 166789 - DNA, 630 bp, Saccharomyces pastorianus
atggcgcaagaaagccaacatggttcgaagacactatatgtgcacccgtttgataatgagacaatttgggaaggtcattctacgattgtggatgaaatcatagaacaattgaaggaaaatgatatatccttacctagggtgaaagctttagtttgtagtgttggtggtggtgggctatttagtggcataattaaaggcctagagaggaatcaccttgctgaaaaaattccggtcgttgctgtagaaactgccggttgtgacgtattgcataagtctctcaaaaaaggtagtccagttactcttgaaaaattgacaagtgttgcaacttctttgggctccccatacatagcatcattcgcgtttgagagttttaacaagtatggatgtaagtctgtagttttatcagatcaagacgttctggcaacatgcttgagatatgccgatgactacaattttatagtggaaccagcctgtggagcatccttacatttatgttatcatccagagattcttgaagacattctggaacaaaaaatatatgaggatgatatcgttattataatcgcatgcggtggatcatgtatgacgtatgaagacttggtgaaagcgtcgagcacattaaacgtatca

SEQ ID NO: 166790 - DNA, 429 bp, Saccharomyces pastorianus
cccaaggttaccagaactttgtcaagatatgtattcgatatagtaaactttgatgattcaaacactttgatcagagcagaagaagactctgtcgagataagttttgatgctggagaaaattggaaaacaatagatgagattgaagagcctatcgagtcatttgttgttgatcccttccgtgggcatgatagagcttttgctttcgtgaaaacggcaccaaaattttacgtcacggatgatcaaggtaaatcgtggaggcctttgactatacccatttctgagaaagcatcgaattatttttgcgacgtaactactcaccctataaaaaagaagcatcttattattcgttgtgatttgttgacaataaaagactcaggcttaatgtatgttggaagagagatttacacaactaatgatggagtatccttt

SEQ ID NO: 166791 - DNA, 120 bp, Saccharomyces pastorianus
tttgaatgaaactttggtagccatttgttctcaaaggaatctgtgttggctgggttattaaacgtggaactttggaaatacatccaagaggcacaattgagctctaacgatgagccgtta

SEQ ID NO: 166792 - DNA, 738 bp, Saccharomyces pastorianus
atgtctgaaacagatcaaaagaaacaaaaggttgctaacaactctctagaacaatagaaagcctccggcactgtcgttgtagccgacactggtgatttcggctctatagccaagtttcaacctcaagactccacaactaacccatcattgatcttggctgctgccaagcaaccaacttacgccaagttgatcgatgttgccgtggaatacggtaagaagcatggtaagaccaccgaagaacaagtcgaaaatgctgtggacagattgttagtcgaattcggtaaggagatcttaaagattgttccaggcagagtctccaccgaagttgatgctagattgtcttttgacactcaagctaccattgaaaaggctagacatatcattaaattgtttgaacaagaaggtgtctccaaggaaagagtccttattaaaattgcttccacttgggaaggtattcaagctgccaaagaattggaagaaaaggacggtatccactgtaatttgactctattattctccttcgttcaagcagttgcctgtgccgaggcccaagttactttgatttccccatttgttggtagaattctagactggtacaaatccagcactggtaaagattacaagggtgaagccgacccaggtgttatttccgtcaagaaaatctacaactactacaagaagtacggttacaagactattgttatgggtgcttctttcagaagcactgacgaaatcaaa

SEQ ID NO: 166793 - DNA, 267 bp, Saccharomyces pastorianus
tacctgagaacataaagggagttgcgtcgtttagactctattactaggtctccaatctactctcatttccaagagactttgggtggccttgcaacggttagaggttattctcaacagaaaaggttttcccacattaatcaatgccgcattgataataacatgagtgcgttctatccctctatcaatgctaaccgttggctagcatataggttggaacttattggttcaattatcattctaggtgctgcaactttatccgtttttaga

SEQ ID NO: 166794 - DNA, 138 bp, Saccharomyces pastorianus
ttttttcttttatgtagaaacatcgattcgcttctgtgggttcccatatcctcgaggagaacttctaatatattctgtataattaatattatagcattaacaacggtataatctcagtcattatcccagaattcacct

SEQ ID NO: 166795 - DNA, 996 bp, Saccharomyces pastorianus
  modified_base (317)..(318): a, c, g, t, unknown, or other
  modified_base (394)..(394): a, c, g, t, unknown, or other
tttcaacctctagaaaaagattgcggacccgttacctcatttgaatttcgacgataatggccagtttctactgacctcttctctccacacgatagcgatgcaacttgtactagtgccacgaatctgcaaattgcttggacagctatagccctcccaagaaatagtggcttgtcacgtccgcgtatcgtttacgctacagcacatgaacgacagtgtattctatttctctcttaccaagtgaagaaatttttgtaccatgtaatataccgttaactctgggaaaccaaacccaagtatctgaagtatattgtttccgnngtctatcggtcgccctatgtggaactgatattgaagtatgaaccgcctgtgaagcgagtacgttctcttatcgtcntgtctatacgtatcgaatctcgttacggtctttgggatttgaagatctctaaaccgcaagttattataccaagtctcgtaccaaattgtatcgcatatgatccaagtggccttgtattcgcattggggaacccagagaatttcgaaatagggctatataatctgaaaaaaattcaggagggtcctttcttgataattaaaattaatgatacgactttcagtcaatggaataaattagaattttctaacaatggaaagtatttattagttggctcctcgataggaaaacatttaatttttgacgcattcacaggtcaacaattattcgaactaataggaacaagggccttcccgatgagagaatttctagattctggatctgcttgtttcacaccagatggtgaattcgtccttggaacggattatgacggtaggattgccatttggaatcattctgattcaataagtaacaaagtattaaggccgcaagggttcattccctgtgtttctcatgagacctgtcccaggtcaattgcattcaaccctaaatattcgatgtttgttaccgcagacgaaacagtagatttttacgtgtacgatgaa

SEQ ID NO: 166796 - DNA, 633 bp, Saccharomyces pastorianus
gtgtcattcgaggaaggagcactaatagagccattatcagtggcaatccatgctaataaattagcaaagatcaagtttggagcccgttgcgtcgtctttggagctgggcccataggtttgctagccgggaaagtagccagtgtctttggtgctgcagatgttgtttttgtagatctatcagaaaacaagctggaaagggctaggcagtttggtgccacccacatcgtcaactcaggtgatctcccacatggcgttactgtagatagtgttataaaaaaagcaatcggcaagaaaggtgctgacgttgtgtttgaatgttctggtgcagagccttgcgttcgagcaggcatcgaagtctgtaaggcaggtggaacgatcgttcaagttggaatgggacaagaggaaatacaatttcccatctcgatcattccaacaaaagaactgacattccaaggctgtttccgatactgtcaaggtgattatagtgactccatcgagctagtctctagcagaaaactctcgcttaaaccattgattacacatcgctatagctttaaggatgctgtcgaggcattcgaagaaacaagccaccacccgttaaataatatcaagacgatcattgagggcccggaa

SEQ ID NO: 166797 - DNA, 183 bp, Saccharomyces pastorianus
atacggccggaagacttccaagatgatgctaaccgggaactagtgagcaggaaattgaaactgaacgaatggtttagtttttgtttaagttgcaatcatggtatgcatgcgggtcacgctgaagaatggtttgacagacacaatgtctgtcccaccccaggttgcacttgtcagtgcaacaag

SEQ ID NO: 166798 - DNA, 117 bp, Saccharomyces pastorianus
atgattttcaatccggtcatatcaaatcacaagttgagccattatattcatgttttttgtacattcaccacgttctgcatattaggtactgaaacacgtcaggctataacggcgctc

SEQ ID NO: 166799 - DNA, 81 bp, Saccharomyces pastorianus
attcactttacgtgttacgagggggctcattgtaagccgataatgattatgttcctggcatctgtaattttgatttcactg

SEQ ID NO: 166800 - DNA, 123 bp, Saccharomyces pastorianus
gaagccgctactctccattccagaccaaactttataaagtgtcttaccaaggcagcggaaatcgaacaacaatcccaagacgaatattggcgacaagaatatcctggtgtcgatgagtttttt

SEQ ID NO: 166801 - DNA, 156 bp, Saccharomyces pastorianus
gtgcggttgccccaaaaacaccacggaacctcatctgttctcgtactttgttgtgacaaagtagctcactgccttattatcacattttcattatgcaacgcttcggaaaatacgatgttgaaaatgcctctagagatgaaaaacaatcgtaaaagg

SEQ ID NO: 166802 - DNA, 426 bp, Saccharomyces pastorianus
attgatgtcaccggtggtaagaaagcactagtcctttttgtcccagtcccagctttgtctgcataccataaggtccaaaccaaattgacccgtgaattggaaaagaaattccctgaccgtcatgttattttcttggctgaaagaagaatcttgccaaaaccatctagaacatctagacaagtccaaaagagaccaagatccagaactttgactgctgttcacgacaaggttttggaagacatggttttcccaactgaaattgtcggtaaaagagttagatatttggttggtggtaacaagatccaaaaggttttgttagactccaaggatgttcaacaaatcgactacaagttggaatctttccaagctgtctacaacaagttgactggcaaacaaattgtttttgaaattccaagccagaccaac

SEQ ID NO: 166803 - DNA, 516 bp, Saccharomyces pastorianus
actcctcttcttgaaggaactgaggaatgaaattgtacactataaccgtgtgacaagattaacttctccaagaacaggaataccgtatgtggagtagacctatactacccccattctactactttgaatattgcgaacagccttgtagtattttacgaaaaatacctaagaaaccggttcatttactctctatccaagaagaaggtttatgatctaatcaaaacggagttacagaatactgattccttgtgtatagcacctgttaaccaggcgttttgcgcacttgtcactcttattgaagaaggggtagactcggaagcgttccagcgtctccaatataggttcaaggatgcattgttccatggtccacagggtatgaccattatgggaacaaatggtgtgcaaacctgggattgtgcgtttgccattcaatactttttcgtcgcaggcctcgcagaaagacctgaattctataacacaattgtctctgcctataaattcttgtgtcatgctcaa

SEQ ID NO: 166804 - DNA, 99 bp, Saccharomyces pastorianus
ttcaaccactcttgtgcaattgaatacccaagttatcgattcttattccctattaaggcattaggtatgtacagcagggcatatgaaacacatacgctt

SEQ ID NO: 166805 - DNA, 177 bp, Saccharomyces pastorianus
tgtgtattataaattctgagttgtcatggtcctcagaaaagatcgggcgtgtggtctagtggtatgattctcgctttgggcgacttcctgattaacagggagacaaagcatgcgagaggccctgggttcaattcccagctcgcccccttttttactattgaaaatagaagtattcgg

SEQ ID NO: 166806 - DNA, 207 bp, Saccharomyces pastorianus
atctgtttagtattatttgtaatactagcatgtgagatatatgtgggtaattagataattgttgggattccattgttgataaaggctataatattaggtatacagaatatactagaagttctcctcgaggatataggaatcctcaaaatggaatctatatttctacatactaatattacgattattcctcattccgttttatatgtt

SEQ ID NO: 166807 - DNA, 426 bp, Saccharomyces pastorianus
aaatcattagaagtaagcgaaggagcactaattccaaccggtaaaatcgttcaaagaaaaattgctacttttgactcctccaaacctaccattttgcaggatgatggcccgatttatgactacgctttcattgttgatgaaaataagaatttgaaaacgacagactcagtaagtgtaaacaagctcgtccctgccttcaaggcttatcatccggcatcacgactttcattggaggtttcaacaacagaaccaactgtcctattttacacaggtgacaacttgtgtgatggatttacgccgagatctggctttgccgttgaacaaggcagatatgttgacgcaatcaaccgtgatggatggagagactgcgttcttttgagacgtggtgaggtatatacttctaagactcgatatcgttttgcggtg

SEQ ID NO: 166808 - DNA, 570 bp, Saccharomyces pastorianus
  modified_base (449)..(486): a, c, g, t, unknown, or other
aatatattacactcaaaatataaagattataagataaatggtaagctaaactcaaaccaagctacctcatttaagaacttatatgcggctttcaaaaagtttcaaaaggatcttagaaatttggagcagtatgttgagttaaataaaacgggattttcaaaagctctgaagaaatgggacaagagatctcaatctcacgataaagatttttaccttgctactgttgtttccattcaaccaatttttaccagagatgggccactaaaattaaacgatgaaactttacatattctcttagagctgaatgatattgacaacaacaatagaagggcagacatacaatccagtacgtttactaatgacgatgatgacgacaataataccagcaacaataataaacacaataataataataacaataataataacaacaacaacaacaacaatannnnnnnnnnnnnnnnnnnnnnnnnnnnnnnnnnnnnnacaacatcaaagatttcggaaaaccaacttgaacatctttttcaagcatcttcctcctccttggacatggagatggaaatcgaa

SEQ ID NO: 166809 - DNA, 93 bp, Saccharomyces pastorianus
atgagtagcgaggactacgggtatgattacgacctactatttaaaattgtactgatcggtgattccggggtagggaaatccaatctattgtca

SEQ ID NO: 166810 - DNA, 87 bp, Saccharomyces pastorianus
ttgctactaggaacacgtataggaacacgaataggaacacgaatatttattgttcatccgattatatcgccattgattgcagtggaa

SEQ ID NO: 166811 - DNA, 384 bp, Saccharomyces pastorianus
tttgatccaacaccagtaaatccttagttaagtcatcgcatgcatgtttaccacacattcactactatttgtgtacggaagaccaaataagataaaccataatgctggtctccttccatttactaacatacgtaattgctcctactgccgttcagcctaacctactcacacattctgatggtgatcatgcaatctttgactgaatatgttgagtaaaagaacattaagctttatttttttggcgtgaccagcgggtactgcgattctttgactttgttttctactgtatcactggaaattgattgaataaacaaccaatttaaagtaacaataacacagtatcacaaaaagtcacctgatggaccttatgggatatagaatttt

SEQ ID NO: 166812 - DNA, 726 bp, Saccharomyces pastorianus
agggtcaaaggtattgacttccatccaaccgaaccatgggttctaacaaccttgtactccggccgtgttgaaatttggaattacgaaacacaaattgaggtcagatccattcaagtcaccgaaactcctgtaagagcaggtaaattcattgcaagaaaaaactggataattgtaggaagtgacgatttcaggatcagagtcttcaattataacaccggtgaaaaagtcgttgattttgaagctcatccagactatatacgttccattgctgtacacccaacaaaaccttatgtcttgtccggtagtgacgatttaacagtcaaactgtggaattgggaaaacaattgggctctcgaacagacctttgagggtcatgaacattttgttatgtgcgtagcattcaatccaaaggaccctactacatttgcctccggttgtttagatcgaacagttaaagtttggtcgttgggccagtcaacaccaaatttcactttaactacggggcaagaaaggggcgttaactacgttgattactacccattacctgacaagccttatatgatcactgcgtcggatgacttgaccatcaagatctgggactaccaaacaaagtcatgcgtagccactttagaaggtcacatgtctaatgtttcgtttgctgttttccacccaactttaccaatcataatttctggttctgaagatggtactttgaagatctggaac

SEQ ID NO: 166813 - DNA, 111 bp, Saccharomyces pastorianus
gaaagagccttgttggcgcaatcggtagcgcgtatgactcttaatcataaggttaggggttcgagccccctacagggctttctttttatttacgtcttgtttctgatcaat

SEQ ID NO: 166814 - DNA, 90 bp, Saccharomyces pastorianus
aggtctatcagaagagatgcgcgttacaactggatctgtaacccagttcacaaacaccgtgaagccagaggtttgactgccactggtaag

SEQ ID NO: 166815 - DNA, 405 bp, Saccharomyces pastorianus
acttttggtaagaagaaatcagctactgctgttgcccacgtcaagactggtaagggtttgatcaaggttaacggttctccaatcactttggttgaaccagaaatcttaagattcaaggtttacgaaccattgttgttggtcggtttggacaaattctccaacatcgatatcagagttagagttaccggtggtggtcatgtttcccaagtttacgccatcagacaagccattgctaaaggtttggttgcttaccaccaaaagtatgtcgatgaacaatccaagaacgaattgaagaaggctttcacttcttacgacagaaccttgttgattgctgattctagaagaccagaaccaaagaaattcggtggtaagggtgctcgttccagattccaaaaatcttaccgt

SEQ ID NO: 166816 - DNA, 177 bp, Saccharomyces pastorianus
ttgtcagattgtctactatcgaaccagtacgatgatgcgaaatgcgctaaggtgattgaccaactctacgtctgttgttcaaggttctacaaggataacggagaagagtcgcggtctccctgttgtcccttaccttctctgctcaagttgaagatgaaacaaaggaacatcaaacct

SEQ ID NO: 166817 - DNA, 264 bp, Saccharomyces pastorianus
gaaggtgttgttgtcgctaagaaggatttcaaccaaccaaagcacgaagaaattgacaccaagaatttgtatgtcatcaaggctttgcaatctttgacttccaagggttacgttaagactcaattctcatggcaatattactactacaccttgactgaagaaggtgtcgaatatttgagagaatacttgaacttgccagaacacattgttccaggtacctacattcaagaaagaaacccatcccaaagaccccaaagaagatac

SEQ ID NO: 166818 - DNA, 378 bp, Saccharomyces pastorianus
atgcggaagaaatgtccgcaaggtaaaaaattgttgaaaaaggcgacgcgtccctttgtaggagctttttgaaggcgtatacgagccaagaaaaaccttatttcccagtttggccagaccggctgcattgggtacgacggtaaattctctataggcatcaccattgaaaagtatgtccttaatttagtcgtgagaatcatcattgtgttcgccctttgtcgtataaccgagttgagtgtctttgattcatctctaaggtgtaaaagcagaaaaaccagattatctaaagctgcaagaaagaaagaaactgatcatttttatgaacagtgcagatatgtggaagtgaaatttggcctgcagatggcatatctgcaatcc

SEQ ID NO: 166819 - DNA, 990 bp, Saccharomyces pastorianus
cagcaacagcaaaatgccaccaagaacgacgctatcccaccatctgctacgcccaatgccgctgccttccctcaacagcaacaacagaatgcaaactccaaattatatcaaatgcaacagcaacaacaagcccaggcgcaagctcaggctcaagcgcaagctcaagcgcaggctcaggctcaggtgcaagctcaggctcaggcgcaagctcaggctcaagcgcaagctcaagcgcaggctcaggctcaggctcaagcacaagctcaggcacaggctcaggcgcaagctcaagctcaagcacaggcccaggcgcagcaacagccccctcaacagccacaaactcaagcacaacctaacccactacacgggctgacaccaactgcaaaggatgtcgaagtcattaagcaattgtcgttagatgcttccaagactaatctaagactgacggatgtaacaaattctttatccaatgatgaaaaggaaaaaataaaaatgaagttaaagcaaggtcaaaaactatttgtgcaagtgagtaattttgcaccacaagtttacatcattactaagaacgaaaacttcttgaaagaagtcttccagttaagaattttcgtcaaagaaatcctggaaaaatgtgctgaaggtatttttgttgttaaattagacaccgttgacagactgatcatcaagtaccaaaagtactgggagagcatgagaatccaaattttaaggagacaagctatcttaaggcaacaacaacaaatgtccagtaccaacaacaacaataacaacaacaccgctaatgctcctgttaccggcaataacaataatgcgaacaatattgctactcagcaaaatatgcaacaatcgttacaacaaatgcaacatttgcaacaattgaaaatgcagcaacaacaacagcaacaacaacaacaacaacaacaacagcagcagcagcagcagcaacaacaacaacaacaacaacatatatac

SEQ ID NO: 166820 - DNA, 339 bp, Saccharomyces pastorianus
tcccaaaaaaacggaattgccaccctactacaagctgaaaaggaagcccacgaaatagtatcaaaggctagaaagtacagacaagataagttgaagcaagccaagactgatgcagccaaggaaatcgactcatacaaaattcaaaaagacaaggaattgaaggagtttgaacaaaagaatgccggtggtgttggtgaattggaaaagaaagcagaggctggtgtgcaaggtgaattagctgagattaagaaaattgcagagaagaaaaaggatgacgttgtcaaaattttgatcgagactgtcatcaagccttctgctgaagtccatatcaatgccttg

SEQ ID NO: 166821 - DNA, 81 bp, Saccharomyces pastorianus
gtgaatagttggataattgttgggatcccattgtgcacaaaggccataatattatgtctacagaatatactagatgtcctc

SEQ ID NO: 166822 - DNA, 168 bp, Saccharomyces pastorianus
aaatggaaccgatatttctacataataatattacgattattcctccttccgttttatatgtttcattatcctagcacactatcaatctttgcatttcagcttccattagatttgatgactatttctcaatctttatgttatctccttacgccgcatgtgataatatac

SEQ ID NO: 166823 - DNA, 408 bp, Saccharomyces pastorianus
cagacttttggtaagaagaaatcagctaccgctgttgcccacgtcaaggccggtaagggtttgattaaggtcaacggttctccaatcactttggttgaaccagaaatcctaagattcaaggtctacgaaccattattgttggttggtttggacaagttctccaacatcgatatcagagttagagtcactggtggtggtcatgtttctcaagtctacgccatcagacaagctattgctaagggtttagtcgcttaccaccaaaagtacgttgacgaacaatccaagaacgaattgaagaaggccttcacctcttacgacagaactttgttgatcgctgattctagaagaccagaaccaaagaaattcggtggtaagggtgctcgttctagattccaaaaatcttaccgt

SEQ ID NO: 166824 - DNA, 294 bp, Saccharomyces pastorianus
gttaacggtttagatgagccagaaacctcttttgaagaactgaatacaactctacctcgctttcaatcccatgaaacattaactttggaagaaaacgtgccaccattgagtacatcaacttatataccgcctccatcctcggtaggtacttctgacactggcacagtattttccaacagtaccagcgcgtattggtctaataagcaagcagacgatgatcaggacatggaggtagaccaggatgatgagtttctaaatgactaccaggaattccaaaataaaaaggatgatttt

SEQ ID NO: 166825 - DNA, 642 bp, Saccharomyces pastorianus
caattgataaccaaaaatgtagcaccagaggcagcagactatttaacacagcaagtctctcatgatcttgtaggctcaaaaactgcaaattggaccagtgttgagaatactgctcgtgaatctttaacaaaagcattaactcaaatattaacgcctggtgtatccgttgatctcctccgtgaaattcagagcaaaagaagcaaaaaggatgaagaaggtaaatgtgatccctatgtgttctctatagttggtgttaatggtgttggtaagtcaacaaatctttcaaagctagcgttttggttactgcaaaataatttcaaggtcttaattgttgcttgtgatacgtttaggtctggtgcagttgagcaactaagggtccatgttgaaaatttggcacagctaatggatgattcacacgttcgtggctccaagaacaaaaggggtaaaactggtaatgactacgttgaactatttgaagctggttatggtggatctgacttggtaaccaaaattgcaaagcaagccatcaaatattctcgtgatcaaaacttcgatatagtgttaatggatactgccgggagaaggcataatgatcctactttaatgtcgccattgaagtctttcgctgaccaagccaagcct

SEQ ID NO: 166826 - DNA, 141 bp, Saccharomyces pastorianus
gtcatttacattgtttggatctgtcaacttcagccaggaaagttctaccaaagcccacttcaagacatttttttcgaatcgttttttagagagataactggttttgtcatggcatggacatttggatacgccctaatcgga

SEQ ID NO: 166827 - DNA, 243 bp, Saccharomyces pastorianus
gagtgctcgttcaaggcttctcccgaagcctatttggtactgggtgcaatttcccatcttagactatcgagggactaagatcttggtattgctcaaatctacttgggtgaccctcaaattcaacaagatgtccaaatttctgtaaaattaggagacggtcatctgattgtaaagattaattacggtaaagacaagaatggtcaggtacctcccgtgccagaagttcctcaagaatacacgcag

SEQ ID NO: 166828 - DNA, 87 bp, Saccharomyces pastorianus
attcatataaatagggcagccttgatcatctacatttgagattatgcttcattctctttctttcccactaagctaataacatcacta

SEQ ID NO: 166829 - DNA, 234 bp, Saccharomyces pastorianus
tttcgatcgataaagtcttctagtttggtgaatttctccatcaaattagccttgttggcgcaatcggtagcgcgtatgactcttaatcataaggttaggggttcgagccccctacagggctatctttttttcaggaaaaaaacagtgatgatactttgtacataagatcatactgttacttgtaggaattattttgaatatcaaatgtcggtttgtttattttttattacatac

SEQ ID NO: 166830 - DNA, 351 bp, Saccharomyces pastorianus
gtgagcttcttgaaccagatccctggaggaggcatctacccagagctatccttagaatgtctttctatcttcccgatccaaccttccttgaccttcagatgtaagaataatccacacaagtttaaaaactttatctctggaattatgttaaatatgtgcttgatccactggccaaatgaagccagtcgtagtgtatattgtaaacgacacttattgaaccaagctgctcaatgtgcgggcgactttatcttacaacatgatgtacttgatgtaacatttgacaccttcatacaaggtctgtataattatttttacgagccacctggcgtcaaaaaattcttcaacgctatc

SEQ ID NO: 166831 - DNA, 135 bp, Saccharomyces pastorianus
tttccctagtgctcctgtaccaagccatcggagaggagatgccttctagaattcaaggcacgtaaggggtacgaaaatcggaacgggccgaaggccgaatagagacggccgtacgtgagagcacatgcaaagtgg

SEQ ID NO: 166832 - DNA, 354 bp, Saccharomyces pastorianus
ataaaaaccaatctaatctcctcgtttggtttccgaccgcatgtaaggttcggctttcttgacttcggatatagcttaaagtcgattcttgacgtcacttcgcaatatcatttcattcccattaaactggcgtatggactttgcgatcctttattaatagtttacccggattccagttttagtttggctcaagctgcaggtgaaaagaaaaaagtcgtattccctacgtatgaagatgttccgaaactactgttgacgtttaagaagattatgaatacgtataggaagggaagtttgggacagagacagagacagagagagtacgggcgaaatgggaatgaatcacattctacg

SEQ ID NO: 166833 - DNA, 303 bp, Saccharomyces pastorianus
ttgatctctttctttgtttactgagggctgtgtctaatcttccctatcaagatcaatgtcagacacgacgacaaggattattacggtgcattcaccgatgaaatagcaaaaaagaagggcttggtcccattcagcgaaatctctgaagaagaaatcactgcttacacattaggcaaaggatacaccactggccatgaattcagacctgacggatccggcgacgaaacacctgaattagccaaaactagctctgaaaacaccatcgagtttgaaatagtttcatcaaaagcaagatgaaaacaa

SEQ ID NO: 166834 - DNA, 270 bp, Saccharomyces pastorianus
aacgaaatagccttgttggcgcaatcggtagcgcgtatgactcttaatcataaggttaggggttcgagccccctacagggctatcttttttaggctcaaatcaaaaaaatgtctgatacatattattttctacttcctttttatatctcaaagaagaaggcatttaaccccattcatgtggtttacacttgtgttgagatttgttgcttgcgcttcttttatccttttaaaccgcttatttatccttttcaacgataaggctcaaatgac

SEQ ID NO: 166835 - DNA, 90 bp, Saccharomyces pastorianus
cttatcggctcacatttgattggattgtgcgttgcctcatttcttgagcttcttggaaagacttacaattttacatatacatataattta

SEQ ID NO: 166836 - DNA, 465 bp, Saccharomyces pastorianus
tcatctactccagcttcaacaccatccggcttcagtgttgaaacttcatctactccagcatccagctctagtgttgtaacttcatctaccccagttccaactccatccagctctaccactgaaagttcttctgttggcacaaccactcttgtctcatcttcaaccttctcatcactagctcctcgtagtagaaacgaaaccactgttgtcccaactacgacagttactactgctaccaccccaacaacaaccacaatcaccactactgtttgctctatgggtacaaactctgctggtgaaaccacctctggatgccatcccaaaactatcacaactactgtgccatgttcaagcggtacaggtgaaagcactatttccccatccaccactggcacaccagctaccactcccgtaacatcaatgatctcaactactgtcgttaccactgaatattcaacaagcaca

SEQ ID NO: 166837 - DNA, 438 bp, Saccharomyces pastorianus
gttagtgaattggaagacaaactcaaggcctcagaagataagaactctaaatatttggagctacagaaggaatcggagaagataaaagaagaactagatgctaaaacgactgaactaaaaattcaattggaaaagatcactaatttatctaaggccaaggagaaatcagaatctgagttgtctagattgaagaagacatcttctgaggaaagaaaaaatgcagaggagcaattggaaaaattgaaaaatgaaatacaaatcaaaaatcaggccttcgaaaaggaaagaaagctacttaatgaaggatcttcaacaattacacaagaatattctgaaaagatcaatactttggaagatgaattaattaggctacaaaatgaaaacgaattaaaagccaaagagatcgataatacgaggagtgaactagagaaggttagt

SEQ ID NO: 166838 - DNA, 300 bp, Saccharomyces pastorianus
gataagcgtaaatttgaaaaagcaaactttgaggagtttgagttggctctaaatgacttatacgacttggtacattgccactcaataactttatgtgaatcgatgcgcacggaagtgcgatcattctacgaagacgaaaagtctggtctaatcaaagtggtaaaattcagaactggtgcaatcgataggaaaagatcttttgaaaaaattgtcattcccgtcgtggtcaagaaaaatgcacaaaagtttctgaccttcgttgaagacgaaccagatttccagagcggaccaatcccttct

SEQ ID NO: 166839 - DNA, 138 bp, Saccharomyces pastorianus
atattcttctcagagcagatccaaattgttcattctcatggtagtgcttccacgttcgctcacgagggaattcttcatgctaatactatgggattgagaactgtgttcacggaccattcactctacggttttaataac

SEQ ID NO: 166840 - DNA, 252 bp, Saccharomyces pastorianus
tcggaaaagcagaggcagttgaagttgcagaagatatacaaacaaaagtacatcggactgggagatgagagcactacacgagaacagtggcagagaaatgtgagaaacgatacactaaatacattacaaggccactccgcatctttggagtacgtttcattgagccgaggagaccttagtatacgtgacactcgtattcacctcctgaaatccatgtcccctggctataaagcctacttacgagaagagagg

SEQ ID NO: 166841 - DNA, 438 bp, Saccharomyces pastorianus
gtggtgagaaacttgcccaccggtcttggtgagccatgtttcgacaagttggaagccatgctggctcacgccatgctgtccatcccagcatccaaggggttcgagatcggctcgggtttccaaggtgtctctgtaccagggtccaagcacaacgacccattctacttcgaaaaagaaaccaacaggttgagaacaaagaccaataactctggtggtgtgcaaggtggtatctccaacggtgaaaacatctacttctccgtcccattcaagtccgtagccacaatttcccaagaacaaaaaactgtcacttatgatggtgaagagggtgtcctggctgccaaaggtagacatgtaacctgccgtgactccaagagccatccctattgtcgaagccatgccgccctagtgttggccgatgccctcttgatccaaaagtca

SEQ ID NO: 166842 - DNA, 90 bp, Saccharomyces pastorianus
  modified_base (51)..(51): a, c, g, t, unknown, or other
  modified_base (58)..(58): a, c, g, t, unknown, or other
  modified_base (78)..(78): a, c, g, t, unknown, or other
ccattaagatgtccggacgcttccctagtggctggaattaatgcgtcaagngaaatcngagaagtaccaggggaaacnaaggactccatt

SEQ ID NO: 166843 - DNA, 363 bp, Saccharomyces pastorianus
atgtcctcacaagaatatacaacttttatagacataccagtgacaagagagcaggttgaacactgttcttactcgttgtggtcctctactgtatcccataatatgtgcgcgaaatctcatagtggttaaaatcccttactcgttaaatattgtattctaatatgttggatacaagactggtatccaagctaaccctcaagtaggaaaacgtccaggtgctgtgtacaccgtaggaaataatatgtaaatgaagataatgactatagtgattgggaggacgatgaggataccgccaccgaatttgtccaagaagttgagccattgatagattttccagaatacaccagaataaaggatgctttg

SEQ ID NO: 166844 - DNA, 183 bp, Saccharomyces pastorianus
aaaagtaagtgtcaatttaaatctgttctgcgcgtcaaaagtacgtttggtggtataccaacaattcttgaataagaagattccattgaaactgcttcgctaggtgcgacgacgactgattctattgggttatccgacacatcatcagaagattcgcattatggtaatgctaagaaggtaaca

SEQ ID NO: 166845 - DNA, 222 bp, Saccharomyces pastorianus
tttgtcaagactttgaccggtaaaaccataacattggaagttgaatcttccgataccatcgacaacgttaagtcgaaaattcaagacaaggaaggtatccctccagatcaacaaagattgatctttgccggtaagcagctagaagacggtagaacgctgtctgattacaacattcagaaggaatctactcttcacttggtgttgagattgagaggtggtatg

SEQ ID NO: 166846 - DNA, 324 bp, Saccharomyces pastorianus
ccgaacgacagctctacgatgcgtactttcactgactttgtttctggcgcacctattgtaaggagtcttctagaaaagcaccattaaggaaatatggggtacaatgttggcaccgccacatgtttgttgttacatacactgtagatgagctatcgatttttgtctgcatacacaagcaatgtttaccctggtcgaaatagaatagtcgtacatcagagctggctgtaagcgtgtatcttatgccctacgtaaatctcactgagtataaagtactttgtcacagtatatgtaatcgatatgatgaacaatacaggaccgattggg

SEQ ID NO: 166847 - DNA, 228 bp, Saccharomyces pastorianus
aatttgatgataatcttcggtattccattatgtcttaatgttataatattatgtgtacggattatagtagatattcttctcatggatttgggaatccacaaactataataagtgattttgcataatactgtaagtgatcatatcttactttttatgcactccgttcattgatcctattataatatcaatctttgcgcttccagatcccattaatttcgatcaaagttt

SEQ ID NO: 166848 - DNA, 159 bp, Saccharomyces pastorianus
cctgcattaagcaactatatcctgaacgtgtcagcaatcaatggcatcatggagaccttggttgaaactaagctgataccaacttcggagaacgtgacgcaatgagctaatgatatgtctgcttattggagtcaattcgactatggcggagagccaacg

SEQ ID NO: 166849 - DNA, 135 bp, Saccharomyces pastorianus
tttgatgctcccctttcaattaacgaatatctattgactggtatttatattactattatatttgttggaataaaaatccactaccgtctatcaactaatagttatattatcaatatattatcatatacggtgtta

SEQ ID NO: 166850 - DNA, 189 bp, Saccharomyces pastorianus
gaggatcttgggatccaaaatagggaatcggtatttctgcataatattgctattatttctccttctattttacatgcttcattatcctattacattatctagctatgcaattcagctctcattaagtctaatgactgtttttcaattgttgtataatcttcttatacctcatttgataatatagcaata

SEQ ID NO: 166851 - DNA, 474 bp, Saccharomyces pastorianus
tcttccagcgccctagcttcctcagcgctccagacctctgctagcagcatcagttcttcagctagattatccaacactaccagatcgtctgctgaggccgccacttctgcgcccgtggatatcactagcgccattgatgcaaacctcataagcacttctacacgcaccgcatcattggcttccaactctgcaagcattgcaatcagtgcaatagacgctgttgaacgcgtcaccagatctggatcatcctccgatgtctcctctgaggtcacctcctctgcctctgcctctgtctctgcctctgtctctgcctctgcctctgcctctgtctctgcctctgcttcaagttcggcacacacttccgccaccaccaccaccaccactgattctacttctgtaagttcgaatttggcttccaccactgacagatctaatcgcaactctgtcacccactctgccgaatactcggaaaat

SEQ ID NO: 166852 - DNA, 357 bp, Saccharomyces pastorianus
acttcctctactggatactccagcagtgtgccacaccatctactgagtgtacattgcgatgcgacttccactaccgactactccagcagtgccgccacatctaccgagtgtaccacttgtgatatgacttcctctactgaatactccagcagtgccgccacatctaccgagtgtaccacttgtgatatgacttcctctactgaatactccagcagtgccgccacatctaccgagtgtaccacttgtgatatgacttcctctactgaatactccagcagtgccgccacatctaccgagtgtaccacttgtgatatgacttcctctactgaatactccagcagtgcttccacatcatct

SEQ ID NO: 166853 - DNA, 189 bp, Saccharomyces pastorianus
atgtctcgtcattacatattttcgacggtactcgccttcctggctctagttaatgtaacttcaggaagtactgaggcatgtttgccatcaggtgaaaaaaaaagcgggatgaatattaatttttaccagtatacgttaaaggattcatccacatactctaacccagaatatatggctcatggatacgca

SEQ ID NO: 166854 - DNA, 222 bp, Saccharomyces pastorianus
caactagaacagcaactagaatccgcgcaaaaggaactacagctcgtcaaggagaagtgccatttgctgcaatcgatgctggacgataccaacatcgactaaaggtacctagagtcccgcagagatgtaaaaaacactgaacgggacaacctaaaggccaccgggattttgcagccttctccagtgagagcggtgaacccactagtggcttccagcccaatc

SEQ ID NO: 166855 - DNA, 237 bp, Saccharomyces pastorianus
gtcgaactttacgttccaagaaaatgttctgctaccaacagaatcatcaaggctgatgaccacgcctctgttcaaatcaacgttgccagagttgacgaagaaggccgtgccattccaggtgaatacgttacctacgctttgtccggttacgtcagatccagaggtgaatccgatgactctttgaaccgtttggctcaaaacgatggtttgttgaagaacgtctgggcttactcccgt

SEQ ID NO: 166856 - DNA, 1200 bp, Saccharomyces pastorianus
gaaataataagcgagatcagcgctgtcaatgacaacgtcaatgttgagatggcagcaacctcgggcagcaagcatctcttggcagatcccggtaaccacccagcagaacatttcaagaatcgaatgtcacggttaaggttccagtcgcgggaatacctcaccaaattcacaaacaatcaatcaaatttcttatattcattacaaaaaaggcatagaacaccgcttagagatatttatttcaagtacacgtcgttcatgggtgctcatactttctacgtcatcgcattgcccatgcccgtgtggtttgggtatttcgatgtaactcaagacatgatctacatccttggttactcaatctacttgagcgggtacttgaaggactactggtgcctaccaagaccaagagctccaccagtggaaagaattgcgcggagtaagtccactacgaaggaatatggggcgcccagctcacattctgccaatgctaccggagtgagtcttctgttcttttggaaaatatgtatggctgaaacactaacgtggccaatgagattattttttttgagtccggtggttctttactacttgactctggtctttggtagggtgtattgcggcatgcatggaacgttagatttgtttagcggtgcctctgttggggctatctgtttcattattagaattggatcgggttatgttttccggaatttccatagtggtgaacacttctggttccccttcttgagtgtagcatgggggcttttcatcctgttcaatcacgttaggcccgttgacgaatgtccttgttttgaagatagcgtagcatttattggtgttgtgggcgggttggaatttagcgattggctaatccagagatacggattgaacctggtatgcagtagatacacagtgtacggcctcaaagtgtttttaagacctcttgtgggtgtcgcctccgtgctcatttggaaagatgtcattagcaagacactagtttatacgctgctaatcaaactactaaaattccgcgatgacagaggtgaaaaggcccatttgcataacaagaacagggaagacgtcgagtgttctctgtacattggtgttcctaagatagaaatcttcgggagatacatcatatatgcaggtatacccgctaccgtcattttattgtgtccaatttttttcacttgggccaacctg

SEQ ID NO: 166857 - DNA, 174 bp, Saccharomyces pastorianus
cggcatccctgggttgcaatcaggatgtggtgcttggtatatatacatccaacgccagtcagtgtttggaggcaattgtaattgttgttgtgaaattttgggctgttccttgaaaagctgatgtctcataatatatttgttgtatcgagcgagatattatttattatattttat

SEQ ID NO: 166858 - DNA, 132 bp, Saccharomyces pastorianus
ccacagggctgtagcaatcttcacccgcttgtcgttgataacgagtttgggccttatcgcttatcaccagtgctaatcaaacagcaaagaacgtttcattgcgaccgatcgtaagcttatctcgctgccgtg

SEQ ID NO: 166859 - DNA, 117 bp, Saccharomyces pastorianus
tgtaacactctgagacaagcttatatatacaaaaagatcaagacgattgccttcgaacgacgtttacgtttcaaatctaccgcccacagacaaccccagcagaagagcgagacacac

SEQ ID NO: 166860 - DNA, 81 bp, Saccharomyces pastorianus
aaccccgtgagagggcaattataaaagagaatgccgccagcttttttctcttccgaatggattgataaggtcaacggtcta

SEQ ID NO: 166861 - DNA, 201 bp, Saccharomyces pastorianus
ctcctcgaggatataggcatccccaaaaaggaatcgatatttctacataataatatcacgattgttcctcattccatttcatatgtttcattatcctattacattattgatccttgtatttcagctttctctaacttcgatgacagtttctcataccttatgtcatcatgtccacatttgacaccatataagataatatac

SEQ ID NO: 166862 - DNA, 243 bp, Saccharomyces pastorianus
gttttagttcaagatttattgcacccaactgcagcttctgaagcaagaaagcacaaattaaagacattagtccaaggtccaagatcgtacttcctagacgttaagtgcccaggttgtttgaacatcactacagttttctcacacgcccaaactgcagttacctgcgaatcctgctcaacaattttgtgcaccccaactggtggtaaggcaaagctttctgagggtacatctttcagaagaaag

SEQ ID NO: 166863 - DNA, 105 bp, Saccharomyces pastorianus
atcaaagtttacgctgaatagctggtggcaaagtccaaagcaacctatccagataccgaatttaacatctccggtaataattggacgtgaccaggtaacttcaac

SEQ ID NO: 166864 - DNA, 549 bp, Saccharomyces pastorianus
agggctatttatggtataatattaatattaattctgctactgttactagacggtttcccgttcaaacttacacttttttccattgcatgttacatagtatattaccaaaacttaaaaagtttcccatttatttcgttaaccagcccaactttcctattaagctgcgtatgtgtggtcttgaatcactacttctggttcaaatattttaatgatacggaagttcccccacagttcaaatttgatccaaattatataccacgcagacgtgctagtttcgctgaagtagcctcattttttggtatatgcgtttggttcataccatttgccttatttgtttctctgtcagctggtgattatgtgctaccaacgactagtgagcaacatatggctaagaaaaatgatgacatcacaacgaacaaccagccaaaatttcgtaaaagggctgttgggttagctcgtgtagtcatcaactcggtaaggaagtacatctactctctagcccgtgtattcggttatgagatagaacctgactttgatagattggctgtt

SEQ ID NO: 166865 - DNA, 945 bp, Saccharomyces pastorianus
agtacagacaatactcaggctctcactgctagtgtctccagcagtaatgctgacaatcacaataataacaagaagaaaaccagcagcaacaacaacggcaataacagtaatagtgcatccaataaaaccaatgccgatatcaagaattctaacgccgacttgagcgcttctacctctaacaataatgcaataaatgacgactcacatgagagtaattcagaaaaaccaacaaaggcggattttttcgctgcaaggctggctacagctgtaggtgaaaatgaaattagtgattctgaggaaacatttgtttatgaatcggcagctaattcgactaaaaacctaatatttcctgactcctccagccagcagcagcagcaacagcaacctccaaaacaacagcaacagcaacaaaatcatggaataacctcaaagataagcgccccattgctaaacaataacaaaaaattattaagccgactgaaaaattcaagacatattagcactggtgccatattgaataacacaatcgcgactataagcacaaatccgaacttgaattctaatgtgatgcagaacaataacaatctgatgtcgggacacaatcacctggacgagttgagcagtataaaacaggagccaccgcatcaattgcagcagcagcaactaccaatggatgtacaatcggtagattcgtatacctctgacaacccagacagcaatgttattgccaagtcgcctgataagaggtcaagcttagtatccctatctaaagtttctccacatttactttcatccacatcaagcaacggtaacacaatatcgtgtcccaatgttgccacaaattcgcaggaattggaaccaaacaatgatatttcaacgaagaaatctctttccaattctactttgagacattcctccgctaatagaaattctaattatggtgac

SEQ ID NO: 166866 - DNA, 672 bp, Saccharomyces pastorianus
gacatcttcgacaactgattgaaaaactaccctactttggctacggaagacatctccttggccgacttggtggctgcctcgattttcaccagatactttgatagcctgttcggtactgaatggagagctcaacatccagccatcgtgagatggttcaacaccgttagagcctcacccttcttgaaggatgaatacaaggatttcaagttcgctgacaagccattgagtccccctcgaaagaagaaggaaaagaaggccccagccgccgctcccgccgcttcgaagaagaaggaggaagccaagccagctgctaccgaaactgaaacttcttccaagaaaccaaagcacccattagaattattgggcaagtcaactttcgttttggatgactggaagagaaagtactccaatgaagacaccagaccagttgctttaccttggttttgggagcactacaacccagaagatattccctgtggaaagtctcatacaagtacaacgatcaataaaatatgactttgcatgaaaaaaaaaatttgtcggtggtttattcaacagattgtccgcctctaagcaagtacatcattggttgtctgggagactacagttacatcatcaccggacggtattgttggtgcagttatggttagggaacaagattaggttccagct

SEQ ID NO: 166867 - DNA, 123 bp, Saccharomyces pastorianus
aaggctaaaaaacatgtataattatacacaagaaaaaaaaaaaaaaaaaaaaggaacactttcacacaagcaagtatatctcatgagaattttttcgagtcttacagaaccatatcttgcctc

SEQ ID NO: 166868 - DNA, 552 bp, Saccharomyces pastorianus
ttaagatacgtttctttgtttttgaattcatcgactttaggttttcttttcctgataacaaggagaatcaattgctctcgtttaatttcagcaacaggtttgctgatattatccaactgggaaactttcaggaatgagggcactattatatcatttgacagtttagaatggtgtctgttctcagtagtaatttacagttttataagcatttcaattgcaaaactgggaactacgaattggtttgctaatgtgattacattatctatttctttagggctggcaatctcttctaaatttattggaattgtcacttgggccttcgtaattctttcttttgtacgtcaatttgatagactgataagcgacgttaaagttacgaccatccaaataataaaatttgtcattctctgtctattattcgttttgattatccctggttccatcttcataataagttattcgaacttactttcgaattttaagacagacacgccacaattttcaaaatatatgagcacatatttcaagtcctatttaagagggcctcaagtt

SEQ ID NO: 166869 - DNA, 180 bp, Saccharomyces pastorianus
ttcaaattaaacatttatgtggtagtcatatatatgtgtcatgcaagtctttacattaaatatatggtaaccaccagagaacttgttatattagtcacaattaataatgttggaataaaaatccactaccgtctatcaactagtagttatattatcaatatattatcatatacggtgtta

SEQ ID NO: 166870 - DNA, 210 bp, Saccharomyces pastorianus
agatcgacactgatagtgatatacagcaacacaatggagcgattaccattcactcggaacggatccggacatcagccaaatatactccgggatccctaaaaggtccgtacacacttaccctatccgagcgaaatacactaattatatataacagggtaaaaaggtgcgcaagagaaaacgcacaggagtaggagcatcagtaaggggaac

SEQ ID NO: 166871 - DNA, 261 bp, Saccharomyces pastorianus
gtgtgtgtgtgtgcgatacccttttttgaattctttctaccttttatccctcactatgcctttcttttatttgtttcgtccgtacgctttactgtaaatgaacgttgttactacttagtgtgcgtgctcaagttgaattgtgcttttttttatggttatgatatttgaactaaaacgagtgtgtgtttcgtatttagacagatcccgtaaaatccaaattgttcgcttttttccttttatcactattattttttccactct

SEQ ID NO: 166872 - DNA, 213 bp, Saccharomyces pastorianus
atactagacgttctactcgaggacataggaatccttaaaatggaatcggtatttctacataataatactcctaccttctgtttcttatgtttcattatcttattacattatcaatccctgcatttcgcttccattaggtttgatgactgtatctcaatctttatgtcatcttcttacacctcatgtgataaaatgctagtagcatgaatactt

SEQ ID NO: 166873 - DNA, 204 bp, Saccharomyces pastorianus
gatgataaattaacagtaacggatgcacatctagtagagggaatgcaactccacttggtattaacactaagaggtggtaactagaaccattttccgtcatttatggaattttatcgaaggtgttcattagaaaagaagacaaaacgaacataagttcacttggactttggaaggctaccgcccccaatttgtcaaaaaaaaaaa

SEQ ID NO: 166874 - DNA, 192 bp, Saccharomyces pastorianus
gccagaaagtggaacgcagacaagaccatcgccacgtcgggtcacgatttgtacgggcgcaagaacactattaacaagatcatacacggtggcgaaagagctgtgtatgagaacaacgagaccggtgtcattaagaacttggaattgcaaaagcccaccatccagggttacgacaatgacatgaggccagtc

SEQ ID NO: 166875 - DNA, 528 bp, Saccharomyces pastorianus
acagtgaccacgacaaacgatttgggtaccacagttacattgactcaaacgttcacacattctagcaccagtgctacttcatccgcctcctcgtctgtgtcctcgtctgtatcttcgtctggttcatcctccagtgtaaagacgaccacatcgacagggagcgcagtagctgaaacaggcaccaggccagacccctccacagacttcacagaacctcctgtgtctgctgtcactagtctatctattgactcatacattaccatcactgaaggtacaacctccacttacacaaccacacgtgcgccaacgtccatgtgggtcaccgttgttagacagggcaacactgtcactgtgcaaactacttttgtccagcgtttctcctcccagtacgtaacagtcgcttctccctccgtggggtctattgggatgggtactttaaccggtactgtaggcgttattaaatctgcaataaagaaaacagtttcgcataatgaggcccagcatctaggtatgagttcgtttacttca

SEQ ID NO: 166876 - DNA, 279 bp, Saccharomyces pastorianus
gctagcaccagtgaacatcaatttactgctattaagcgccactttaacaaatgtgccagaaaacttttgaaagaagcaatcgactccaaatcaaactcagaaactgctacggtggttctgcaagaaagattttctggcatttgcttattgaaagcgtcttcaattatattaaaactaaaattgaagtttccaaaaaagaaagatagaactgatattagcaaattgtgtgacaagaaagaacggatgacacagtggttagaaatttcaattttgatgaac

SEQ ID NO: 166877 - DNA, 78 bp, Saccharomyces pastorianus
ctcattagtgaccgaacttcttgcaccaagtcctgtgcgagtgctgcacggccttgccttgagggttctgtcgccccc

SEQ ID NO: 166878 - DNA, 87 bp, Saccharomyces pastorianus
cctgtgttcctaattatatttgcgcacagtgacagtgcggcaattgatatgtcagggaccactggaaaacgacgttgcctagtagtt

SEQ ID NO: 166879 - DNA, 141 bp, Saccharomyces pastorianus
gcttcagtaaaacaaaccaacaaaactctccgggagggcaatccagagcatagcacaatcttttacatccgcggaagcattcttgctccgtcatatttccttccggacttcgctcggactctattttccgcggaagatatg

SEQ ID NO: 166880 - DNA, 942 bp, Saccharomyces pastorianus
aataatcattcattacctcgtggtagagcctatgctttggttacttctagggaagcgtacacaaaccaaattcgtcacacgtttccaatttgcaaacctcatatgataaggtttccagcaacgccaactttcaacggataatacacctgttttatctgctgctccagagaatcatcatcatcgtatctgctcaattactgtcgtcacagaatggaccgtacttatagcgatataatcactccgaatcaagccaagccatctagttggtcatttttaggacgcccgactataatgtcgtcgatgtattttcaatcagatactcaaccaacaattttatagtatatatcaccattgagaagcccttcacgtagttgaaacagtatactaacacaacaatctcgtatgttttttgatacaccaatcacgtctcgcaatttttcaccgccacacattctgtgggggaagaatacttctacttggactaaattctacatcaagttttgaaaaattccaacccacaggcaacattcattctaatgaacagggtgaattctgcgaccactatcgtacgaagagcatttatatttgtacaaaacatttcaaacgtttgttccgtttcatttgttgccaatttggttcaagaaaactttagaaatcaattgcagcaattttcaaactgttctctataaagtatgaagaatattgaaccttgaatataatggaagaatatctgcagatttatttgaagcagtgaacactctgacctacagattaaaggaagacgatataaaggtaatgacagactaacttggcagtttatctaaaaaacttttcggagaattcagttgcttacgccagcaatactgtggtagaagaaatattacttggtattcaagccatctacgaggaaggaaaatttataaaaaacacgagtacaataac

SEQ ID NO: 166881 - DNA, 189 bp, Saccharomyces pastorianus
aagaagcaagttgttttagataagacctctgtacccaaaagtttagctcacctattaaccataatggatgacaggtcacgtatgtcaaattcttcaatgtcttagacaacatcttcttcgtcatcatcttcttcttcgtcatcatcgtcgacattatcgtttccgtcttcccaagaaaaaacctgaaaa

SEQ ID NO: 166882 - DNA, 339 bp, Saccharomyces pastorianus
aaaaaaaaaggttgccaagtaaaagcgaggtatttgaagtatactgcaagcatcaccgaaacaggaaatcacgaagctgactcatctgtgattttccgtccccaccatagtgatgtaacatgcagtaacacacggcgggccgaaagtcggactttaccccagatttgtagttgtatcctattggatcacgggcgacagacaagacccgaagtgcggaccggcatggtcagcttgcacggaagctttaagggtttcccttgtttcggcattagaagaggcatttcgcacgttttaccgggtcagaaacttcgaggaagctgtgacaattggaaaaaaaag

SEQ ID NO: 166883 - DNA, 186 bp, Saccharomyces pastorianus
tcactagacttcttgaatcgagtctttcatccagacgaaaagggctaatttgctatgcttcttctaacttgcgaggccacgaagtaatctgtcttgaagcaagttcaagattttgaagaaaacgaccatcccaacagagttttgggacatttacactccaccgccttccaatacactccattatct

SEQ ID NO: 166884 - DNA, 270 bp, Saccharomyces pastorianus
agcgctgccccatcttctagcaaggcttgttccaccgaatcctcttcttcctcttcttcttccaccaaggctccttccagtgaagaatcctcttccacttatgtctcttcgagcaagcaagcttcctccactagcgaggctcactcttccagtgctgcctcttcgaccgtgtcccaagaaacagtctcctctgctctaccaacttctaccgccgttatttctactttctctgaaggttctggtaatgttctagaggcaggaaaatccgtt

SEQ ID NO: 166885 - DNA, 216 bp, Saccharomyces pastorianus
atgttgctatatttatatattttatatattgctctcaaaactgtatctcatctttttttctgcaatccttgctttcgtaatctaagtgtgggtgacatgctaaatccgcggctttccttaagctttttcacaaaccatctattatgtccagaagctccgctgattatccgtggaaaagggtcttattctgccgtaggaacttcttctcgagaaaaa

SEQ ID NO: 166886 - DNA, 369 bp, Saccharomyces pastorianus
tcaatagacgtttcctctgacagaagaaaggccagaaaggcttatttcactgctccatcctctgaacgtcgtgttttgttatctgctccattatccaaggaattgagagctcaatatggtatcaaggctttgccaatcagaagagacgatgaagtcttggttgttcgtggttccaagaagggtcaagaaggtaagatttcatctgtttacagattgaagtttgctgttcaagttgacaaggtcaccaaggaaaaggtcaacggtgcttccgttccaattaacttgcacccatccaagcttgttatcactaagttacacttggacaaggacagaaaggctttgatccaaagaaagggtggtaaattggaa

SEQ ID NO: 166887 - DNA, 771 bp, Saccharomyces pastorianus
atgtgtggcatttttggctattgcaattttttaattgagaagacaagaggagaaatcatcgacactttaatcgaagggttacaggcattggagtacaaggaatatgactccagtggaatttcgatccaaggtgatgagctgaagtctctcaatatttataagcaaaccggtaaaataagcagtttgaaggaagaaatcgacctttacaatcttaataagaacctgccctttatttcgcattgtggcattgcccatactaggcgggcaacacatggagggctaagacgtgcaaattgtcatccacataactcagatccatctaatgaatttgttgtggtacacaacggggttattaccaacttcgctaatttgaaagccttattgatggcaaagggctatgtgttcaaaagtgacactgataccgaatgtattcctaaactgtacaaacacatttatgatacaagcattgaactcgggtacaacctcgatttccatgtattaacaaatttagtacttaaagaattggaaggctcttatggtctgctatgcacttcttctcattttcccgatgaagtggttgccgcaagaaagggttccccgttagttattggtgttaaaggtaaaactgacatggacgtaaactttgtcgaggtggaatatttggatcaagaagaagactacttgaagcttaatactcaaaccaagagttctggtaatgtcttggctgccgcacctgtaaaatataacacttgtttaaggaagtcacccccc

SEQ ID NO: 166888 - DNA, 237 bp, Saccharomyces pastorianus
tttctgaagttttgtacttttaccagtccatctaataccatatattttgataataattatgtctttgacagtaacttatcatcaggactgttggaataaaaatcaaaaatcaactatcgtctatcaactagtagtcacactaccagtatattatgatatacggtgttagatgatggcataaggtatgagaagctgtcatcgaagttagaggatgctgaaatgcaaggattgataatg

SEQ ID NO: 166889 - DNA, 231 bp, Saccharomyces pastorianus
gtaggtattcagaatatactagaggttctcctcgaggatcttggaatccacaaaagggagtcgataaatctatataataaaaattactttatcttctttcgttttatacgttgtcgtttattatcctattacgttatcattcttcgcatttcagctttcattagatttgatgactgtttctcaaactttatgtcattttcttacacctcatatgattatatactagaaaca

SEQ ID NO: 166890 - DNA, 291 bp, Saccharomyces pastorianus
atgtctaatccatgccagaaggaggcctgcgccatccaaggtttgtaatattaacttcaaaagattcgatcgtttttttcttttcactaacgttttttcacattaattttagattgccttctatcacatcagtacgatgatgctaaatgcgctaaagttatagatcagctgtacatctgctgctcaaaattttacaaggacaatggaaaagattcacggtcaccctgctgtccgctaccttcgcttcttgagttgaagatgaaacagcgaaagcttacaccaggggacagt

SEQ ID NO: 166891 - DNA, 240 bp, Saccharomyces pastorianus
caatttgggggcataactaaccttgattttgacgcttttgagaaagcaatctttttgagcggcacagcccctgaggctgtagctgatgctgcgttgcagcgtattgggcttacgggactggccaagaaatcgatggacatcaacgagctcaaacggtcggaagatctcagcagaggtctatccagctatccaacacggatgtttaatctaatcaaggagaaatccgaggtgcctttaggg

SEQ ID NO: 166892 - DNA, 204 bp, Saccharomyces pastorianus
atcccaacaattgtctcaatatttacctatttctcacattgtcaccgctcgaaagtgcattttgttggaataaaaatcaactatcatctactaactagtatttatgttactagtatattatcatatacggtgttagaagatgacgcaaatgatgagaaatagtcatctaaattagtggaagctgaaacgcaaggattgataatg

SEQ ID NO: 166893 - DNA, 411 bp, Saccharomyces pastorianus
gtccaccaagaaccatacgttttcaatgctagaccagacggtgttcacgttatcaacgttggtaagacctgggaaaagttggttttggctgctagaattattgctgccattccaaacccagaagatgttgttgccatctcttccagaacttacggtcaaagagctgtcttgaagtttgctgctcacactggtgctactccaattgccggtagattcaccccaggttctttcaccaattacatcacccgttctttcaaggaaccaagattagttattgtcactgacccaagattagacgctcaagccatcaaggaagcttcttacgttaacatcccagtcattgctttgactgatttggactccccatctggattcgttgatgtccctatccaatgtaacaacagaggtaag

SEQ ID NO: 166894 - DNA, 99 bp, Saccharomyces pastorianus
aaaaaaaaaaaaaaaaaaaaaaagagaattcttcatgtgatttaccatgattctacgtttttgcaagcaaaaatgaagataatccgagcgcatgcgcaa

SEQ ID NO: 166895 - DNA, 315 bp, Saccharomyces pastorianus
aacgagaagtcaggaaactcgactgctcctggtaccgccggttacaacgataatttggcacaagctaaacccgtctcaagttacatttcccatgaaggccctcccaaagacgaactggaagagcttcagaaggaggttgacaaccaactagagaagaaatcgaagtcggatttactatttgtatccgtctgctgtttgatggttgcttttggtgggttcgtgtttgggtgggatactggtactatatctggttttgtcaggcaaacagacttcattaggcgatttggcagcacccgtgcaaacgggactacctat

SEQ ID NO: 166896 - DNA, 366 bp, Saccharomyces pastorianus
gaaccattttcaccaacgacatgtgaaactgtaccgttgtacccccaatgaagtgggttaatagctggccactttgaaacttctgacatatctttttctgttagtttattcgttagtcgagtgttctgaagataacgttcgactttcgagacacgtctcatactgttaaatagtaaggaaaatcttcgaagggactattacttccccggccagcacccgatattttacatccgctcctaatctgcacatgcggagggcttaaaaaaaggatctcggaaccggaacgagtttgccttttttcgttcatcttccgtgccgtgtcgcaaatcattaaacagatacaaacagggccctttgacggttatg

SEQ ID NO: 166897 - DNA, 129 bp, Saccharomyces pastorianus
aacgcatattggctccattgcaaagcgtcaatcaagtaagagaagcaaaaccataaacgcaaatttctcggcagggccaggaacaactgccttgcttatcttatctggatctttttatcgtgcctcgtc

SEQ ID NO: 166898 - DNA, 90 bp, Saccharomyces pastorianus
aaaggcaattccacagagcgcgaaaagggatgcgcgaacacggcacccaaaggtgcgctgccgttacgtttggctaacaaactggcgttt

SEQ ID NO: 166899 - DNA, 204 bp, Saccharomyces pastorianus
atggagcatactgcgcatatatttcctattatcatcaagggttccccaccagtaatgtcttctaatccccgacgacaatatcgtttaaatctccggtcaattaagtgcctcaaaaaaccccgtgtgcgggtatggcaagcgccgtggcccctggagccagcactatcagcggctaaaatgcctcgagctgcgcacgcccacgca

SEQ ID NO: 166900 - DNA, 90 bp, Saccharomyces pastorianus
gctaaagttcacggttccctagctcgtgctggtaaggttaagtctcaaactccaaaagttgaaaaaactgaaaagccaagaagccaaagg

SEQ ID NO: 166901 - DNA, 225 bp, Saccharomyces pastorianus
ccagaaaagaccttaatgatgaaaagcacaaacccaaaaaacggcactaatttattttcaacgcccgcggtcgatctaaccgcagccacaatttggtcacgagctttctaacccaactattctcaccgtgcgaaacgaaaattcatgactctttccaagcatcgtgagttcatgactactttcgcatatataacaggcatatacgtacatatctgtatatatatg

SEQ ID NO: 166902 - DNA, 303 bp, Saccharomyces pastorianus
ccaacgacgtgccctccaccaagggtgttctcatgtagcaccacttcacaagagtatttaaagcttatgtatgtatatatccagtacagtaaataacggtaatagtaacaaaaggcatcaccctgcacatatcaccatgcacgaggcgcaccttccttttttttctttcttcttctttcttttttttcttcgactcgagaaaaaattataaaagagatggaggaacgggaaaaagagagttgcataggaacgtgtctaaggacatatagcaagaataccaagcaaagcattatatattatggc

SEQ ID NO: 166903 - DNA, 213 bp, Saccharomyces pastorianus
atttatgattgttaatattgattacttattataataactagttagtgtaacccttctataagaccagaaaaaaaaataacaccggaaaaagcgccccttgtattccatttagtttctccttcaatgcaagacggaggggttcctcttcgtcttgtaatccttgattgccgccttgatggcgtcttctgcgagcatggagcaatgcagcttcac

SEQ ID NO: 166904 - DNA, 318 bp, Saccharomyces pastorianus
  modified_base (247)..(247): a, c, g, t, unknown, or other
atttttttttttttgtttttgtttttgtgttttccaagtttcctagaagccggaacaaaagacacaggcttaaaacggcgtagagccagaatttaaaaaaccacgcggacgagacgggccgtgactggtgccgtcggatccccgcgtgtaatccgtggcacgctaaagggtgaaatcggtttatccgagcggtttatgggaagggtcttttgctatttcgcactcttgtgttcctggttgtctcggnactactacttcgcctgtgcttctttattatcatcatctcacttctctcgtgtgcgtgctgcgtgtgtgtgt

SEQ ID NO: 166905 - DNA, 333 bp, Saccharomyces pastorianus
agtagggcgtgctctagctcctttttacataacatcctacgtatccgcccacatacacattctgtatactacaatatatgcataccagttcaagccctacacccaaagagtctctttttctctctatctctctctatctctctccactgtatttactgttttttgattttctgcaggtcctgcttttgattcaccggcagcggcctcgaaactgccgttttcttttttttcgcactcatttttttttttttcttcttccaattacgtcaagcagtgtttgactcattttctttgattaccaccacttcgaaatgccaaaaaacaagaaaaaag

SEQ ID NO: 166906 - DNA, 507 bp, Saccharomyces pastorianus
cctgctacagatgatgcccaagcaactttgaatacggattcatccgaagcaaatgaaattgtcaagaaggaagagggctctgatgaaaggaagagacctcgcgaagaggacaccaaaaacagtgatggtgataccaaagatgagggcgataacaaagatgaagacgatgatgaagacgacgatgacgatgatgatgatgaggacgatgacgatgaagccccaactaaaaggcgtcgtcaggagaggaacagattcttggatattgaagctgaggttagtgatgatgaagatgaagatgaagatgaagaggattcagagttggttcgtgaaggtttcattacccatggtgatgatgaagatgacgaagcaagtgctccaggcgcaagaagagacgatagattacatagacaactggaccaagatttgaacaagacttcagaagaagacgctcaaaggttagcgaaagaattaagggagcgttacggtagaagcagctccaagcaatac

SEQ ID NO: 166907 - DNA, 102 bp, Saccharomyces pastorianus
gcagcctcctctttgcatcgtttctcttggtttcatctttccactatccaagttaccctgactctcgttcctgtctatcatgagtctcttgtcaagcctaca

SEQ ID NO: 166908 - DNA, 105 bp, Saccharomyces pastorianus
atgaccaccaattctcggctctgtccttcgagtccatcttcttccctaataaaacatttaactacatccgggggaccatcaacctcacttactataatgttgtca

SEQ ID NO: 166909 - DNA, 927 bp, Saccharomyces pastorianus
tcttctactacctcttctaccacctcttctactacttcctctactacttcctccactacttcgtctactgctccctctacggcttcctctactacacgcgtcacgggggttcttctacatgcagctattacttcttctccaacaggccattgcatactctctcttataacgacgaccggctcctgtaaatcagcagacgcagtctcttccgatttgtccttgattaaatctaagggtataactagaattcgtgtttatggtactgactgtaattcttttgaaactgtccaaccagctgccgtgaaattaggtattaagattaaccaaggtttgtacatcaccagtagcggtgttgactccatcgatgattctctatccactttgattgaatatggtcatactaacggttgggatgtctttgattttattactgttggtaacgaagcaattatcaacgggtggtgttccgtttctgatttgattagtaaaatttcatctgttaaatctcaactaaacagtgctggctattctggtcaaattactacaagtgaaccaccagtctcctttgaaaataatccagatttgtgtacaagctctggaattgactttgtaggtattaatccacacgcctattttgatgctagctccagtgctgaaagcgctggcacatttgttaagggtcaagtcgaattagtaaaaagtgtttgtggtacttccaacattttcatcactgaaactggctacccttcagctggtattcaaaacggtggcaatatcccatctacctccaatcaaattcttgccgttcaaaacatcttgaacgaaatggacctggatgttacaattttatcgacttataatgattactggaaagaacctggtcaatacggtatcgaacaatcattcggtgtcattgaatatctgcca

SEQ ID NO: 166910 - DNA, 591 bp, Saccharomyces pastorianus
gcttcagctgaacaattaatagaagactatctggtgtcacagtataagccgtacgccgttaatgatataatccagaatctgaacaataaagtaagcaggacaaccgccgccaaagcattagaaaacctggtcaacgaaaagcgcatagtatccaaggcatttggcaaaatcttgatctactcttgcaacgaacaggaaccggaattacccaaagatattgacttttctaaatttgatttcgaaacagtgtcgcagttgagaaatgatttgatagaattagaaagagacaaagcgaccgccagagacgctcttgactccgtaactaaagaaccggaaaacggtgaacttttaagtatcatcgaaaaagaagaaactgaactgagagagattgaatcaaaattggaaagcctacagaacgattggaatccggctaacgatgaaatcgttaaacagataatttctagagacacacttttgcagaaggaaatttccaaacggtcaaaaatctgcaaaaacctagttgctacaataaaggactcagtgtgcccaaaaaatatggatgaatttttggtatgtatctggaatgaattt

SEQ ID NO: 166911 - DNA, 126 bp, Saccharomyces pastorianus
ttctcacacactgttgcttctaagcatcccatcacaggtatcatcgtccaatttgaaggtattgctactggtttgagaaccaattctttgagcactttggccgatattttcatccttgcttttttt

SEQ ID NO: 166912 - DNA, 498 bp, Saccharomyces pastorianus
gtcttgactgcaacccagggcaacagacagtatattttcgctatcagtaccagattctctagttttgccttcagtgtctccgaaggaactttcgcagaagcctacgcttattgcctaggctacgacggtgttatcgctactagtgacatgagcatccactacctctggcgtttcttcactgccactggctcagtcacttcaccttctaaagcttctactaccgtctcagagtcagtagtttcctcatctagcgcctatctctggtgtatccaattccatcacagcctctggttcaatcacttctgctgcctctgctactagctccacctcaggttccacctctgcttatactacaacactaaactacataaaaaccaccagcgcagtcgtatttacatttcagaaacaactaatcctaatggtaacattcacaccattaccacaaccactccctgttcacctaccactgccaccatcaccccttgtgacgaaaacgga

SEQ ID NO: 166913 - DNA, 381 bp, Saccharomyces pastorianus
atagctgtcgttgtccgtggtcgttacgccggtaagaaggttgttatcgtcaagccacatgatgaaggttccaagtctcatccatttggtcacgctttggttgccggtattgaaagatacccattaaaggttaccaagaagcacggtgccaagaaggttgctaagagaaccaagatcaagcctttcatcaaggccgttaactacaaccatttattgccaaccagatacactttagatgttgaagctttcaaatccgttgtttccactgaaacatttgaacaaccttcccaacgtgaagaagctaagaaggtcgtcaaaaaggctttcgaagaaagacaccaagctggtaagaaccaatggttcttctctaagttgagattt

SEQ ID NO: 166914 - DNA, 756 bp, Saccharomyces pastorianus
gatttgcctctaaaattcaaaaaattactaagcgttcctgataaaatttcccaagtagctttactaggtaatagcacgaagtcctataattttttgaagtttgtaaatcaaatatcgagtaatataacaatcgtaagaggagagtttgataatgggcatttgccaagcacaaagaaggataaggtatccgaaagctccagaaacctggaggagattcctaatgaacagtataataaaggcaaggcgctttgaaaattggttgttgcagcggttatactgtggtacccaagaatgaccccttgtctttgtatagcatagtcacgccagttggtcatagatgtttcctgtttgggtggcactcataacgtcagaagcttacaccttggaagggaagttctttgtaaatccaggtagttgtacaggagctttaatactgattggccgattgtctttgatgtcgaggatagtgatgaagctgtaacttcagaggtcgagaaaacacctaaggaaagcggagccaggcaggaggacgattctgttgagggagcatcagaaactgacgtagctaatgggaatgagcttaaagctgaaagccaattcaaagaggatgaggtcaatatatcagatctggatgtaaacgggtctaattcgccaagtttttgtctcttggatattcaaggcactacctgtacgttatacatttatctttatgttgatggggaagtgaaggtcgataaagttgtttatgagaaggaa

SEQ ID NO: 166915 - DNA, 231 bp, Saccharomyces pastorianus
ttcctgtatacacgtaacccgcgtgcgcctggtaacctcagaaggccccattgtccggttttcttacggaatggaatcatcatcatcatcctcagcatcaccatcgccgctacttctgctattatcaagatcattcctgatggctgatctttgttatgtgaccctttggtattcgctggcaccttactattttcctttgtcttttcttgattttttgaccatcttgacctt

SEQ ID NO: 166916 - DNA, 384 bp, Saccharomyces pastorianus
tcagtgctcgagccctgtgtcaagaatgtaataatgcccatcgcagacgtggtctaggaatagagaaccggtctccgcaacctcaaagctccctgtcgagcagtccacttactttgtcgagttaattgcaacttattgaacttagtaacttcttttttttgttccgcaagctctctttcatcctgaggagcactaactacaatcgcaactacaagactagaatagctgcttaacagaaaatactatccattctccaaaaaacaactttcaggctctaacatacacgtgaataaagaaggatttacaaattatggtacagcttcaactttcgttattgttggtacctattatatcgctactccacctggtggtagccacgcccta

SEQ ID NO: 166917 - DNA, 249 bp, Saccharomyces pastorianus
agaaaaatattgtcttatgagaaagaaataaaagaatctggtgccaagctggtcgtcattctagaagccacccttggtggttatcccaaaggatcaagttttggggtttatctaggctatcgtttgcaagaaggaagagaagggtttgctaggtatcgtgcggaggcaatcgaaatagggtctggtgattaatatccaggaataagccaattatgtgcattatcaaaggctactaacgcttcgctatgt

SEQ ID NO: 166918 - DNA, 366 bp, Saccharomyces pastorianus
atgcgcaataatgtaactgaattggttgatgccataataagtgtagaagctcctggaacattgccggacactctttctggatctcaaactttacagagacgcgtgaactattttgatgtcaattggatatcatggaattgggacaacgcaaacgttgatcttactgaacgggcagaaacaagtaggcctctccttgaagaggaatatgatgaaggtatattcgactggtttaataataacccaggatggaaatattgttggtcggtaactgataatcctgacccagggcatatagagaattactctgatattggagaagagaatgctgtccatggtgaattgtattttaatacatatgggggggtt

SEQ ID NO: 166919 - DNA, 93 bp, Saccharomyces pastorianus
aaaaaattggtctctagcgggatcgaaccgctgatccccgcgttattagcacggtgccttaaccaactgggccaagagacctgtaatctgtgt

SEQ ID NO: 166920 - DNA, 693 bp, Saccharomyces pastorianus
tctataaatctgttttcaagtaggaagcatcccttcaagtcatttacggcggatggagagggcttgccgttatttgccttccgcactaagaaacctttttttgttaggcgagattatgtgggttttcttttttatcgatacgagatattgaaaaatggggacttccctgaagagtcggattatgaggcaaaaggagagtgcgacggtttcactctgtttaaagttcttttttgcactgttaaggtgaagaaaacaagctattatcgcaataaggagagcatatcccacatactagaactcaacttcggaaaaaaggaagattttaggatattgacacttgttagatgctctgaagttagatcagtatatgttgtagagggtaaaaaggttattatgaaatgggttttcacctcagagagtaaatttaatttgaattcctcactgttcatcataaaggccgcaattggctgtttaccagaggtgggtgatagcatagaggacatacctaaatttgattgggactcctgccctactatcggatgtatttgcagaactaaggaggctctttttcaacttgagtctcgaaaagatatacatatatgccctcaattatttttaggggaaacccggaccgccacattatgatgagatttcagttccgtggctaaaaaaatgaatatatgcacttcagta

SEQ ID NO: 166921 - DNA, 420 bp, Saccharomyces pastorianus
ctcatcgataaaattgtggcagcggtaccaggggtccctgatacaggtggtaatgcttctgctctatcgtttcagaaacgcagtcaggagttcgctacctcatggatatcaatgacatatgatcagagttatggtgaccttgcgcaaacgtggcaaaatgacgaaggcggagcaggaaattttgattcttatgcggaagaggagttacagaatttcttttcaggtaatagagactggaagtactgctttgctgctgaggacacgaagagtggtgagccaattgattacgatgacatacctggtgacggtccaggcacgggttcggcattcaaatcggagatatatttcaacacttacggtggtatagataattattgtaatgacgagcatatcggtgctcagaacactggagatggtcga

SEQ ID NO: 166922 - DNA, 222 bp, Saccharomyces pastorianus
gggaaatgcataccagactacaacctaatcgttctctctgacgtatgtgataagacaaagaaaaaaactgtgcctgtaaaaccattgcaactagttaaaggtgataaatgtaaaaaaccaatgacagtcaaatcagtggatatttcgtgtgagggagttccaaagaagggaacgaatgataaagaaatagtggttacagaaaacaaatttgatttcaagatt

SEQ ID NO: 166923 - DNA, 294 bp, Saccharomyces pastorianus
gcctgtttggacttcatcaatgcactcgataaatgccatcaaaaggaatattacaagagaatatttggcctttgtaacaacgaaaaggatgctttgaacaagtgtctcaaggaggcaagtttgaataacaagaaacgtgctgtcattgaaagtagaataaagagagctgatgtagaaaagagatggaagaaaattgaggaagaagaatatggcgaggacgctatattaaagactatcttagatagacagtacgccaagaaaaagcaggcaagtgacaatgatgcgaactcgaaa

SEQ ID NO: 166924 - DNA, 183 bp, Saccharomyces pastorianus
atgcagacagaagactctcaagatggtgcaaatcgcgaactcgtaagtagaaaactgaagttgaacgagtggttcagcttctgtttgagttgcaaccatggtatgcatgccggtcacgctgaagaatggtttgacagacataatgtttgtcccactccaggttgcacctgccagtgtaataag

SEQ ID NO: 166925 - DNA, 252 bp, Saccharomyces pastorianus
gtatacaatttactagaagctctcgtcgatggtattggaatcctcaaaatggaatcggtatttccacataatagtattactatttttttttttttttttttttttttttttcatttatactttgtcattcagtatcctgttacattatcaatccttgcattccagcttccattatatttgaagactgtttgtcgatctttatgtcatcttctttttcggcatgtgataatatactggtaactggaatactac

SEQ ID NO: 166926 - DNA, 303 bp, Saccharomyces pastorianus
ttgttttttgggttattgcttagtgatgatataggcttaactggaaggaaaagaacagagaaatgtctcaaacaaagctgatcaagccgctgtatttatatgaaaattggaacaactacatctgcacacatgggctcttactggtcgcccatctcacactcatgtcttccacattccacttagcgactaagtcattattactatggggacgggttgttcttgaacgatgctatacttcgtataggaagccgttcttttatgccccatcctttcatatgttccatagcacaagaatgttctcta

SEQ ID NO: 166927 - DNA, 84 bp, Saccharomyces pastorianus
aaaaagtaaatggtctctagcgggatcgaaccgctgatccccgcgttattagcacggtgccttaaccaactgggccaagagacc

SEQ ID NO: 166928 - DNA, 162 bp, Saccharomyces pastorianus
aggaaaaaaaggagctgaaaatttgttggaataaaaatccactatcttatatcaactagtattcctaatgtcagtatattgtcatataaggcgttagatggtgacataaggtatgaaaagttgccatcgaagttagaggaagctgaaatgcaagcattgatg

SEQ ID NO: 166929 - DNA, 114 bp, Saccharomyces pastorianus
atgcatactatttgccttagaagcccgatcgatgaatcctctcctcttccatataaatcaataaggcaacctctagaaaacgcccattcctgccaagcgctttgcagccttatg

SEQ ID NO: 166930 - DNA, 423 bp, Saccharomyces pastorianus
cttggaccaaaagtttggctgagctttacgcacgatactgatattctaaattatttgacaactgctggattgattgatgacactagaaatttaacaaccaatcatgttccctttcgtgatcattcctaccacaggtcgtggtacattcctcagggagctagagtctacacagaaaagtttcgatgctcaaacgattcgtacgtccgttatgtggtcaacgatgctgtggttcctatagagagttgctccagtggtccaggtttttcatgtgaagagggcacattttacgagtatgccaaagacagattacgaggtgtgagcttctatgaagattgcgacgtctccaaagttagcaaagaaaaggaattgacgttttactgggattggaacacaacaaggtataacgcatccttagtgaatcaa

SEQ ID NO: 166931 - DNA, 84 bp, Saccharomyces pastorianus
ttccgactacgaattaggtcagctgatgagccgatgactaccttttataagtgtgtaaactgtggtcatagatggaaggaaaat

SEQ ID NO: 166932 - DNA, 582 bp, Saccharomyces pastorianus
gtcccaactatcttccgttacatcactacttgggaaaatgaatttttagactctcaaagggtgtgggccgagtatgcaacgaaaaggcaggaagctattcagcagaataggaggttagcttttgaagaacttgaaggatcgtgggatcgtggtatacctcgtattagcactttatttcaaagagatcgacatactctagcgtatgacagaggtcacagaatccgtagggaatttaaacagtactctctagagagaaacagccccttttggtggacaaactcccaccatgacggtaaattatggaatttaaatgcctatagaactgatgtgattcaagccttaggaggtattgaaacaattttggaacacactttatttaaggggactggttttaattcatgggaaggtttgtattgggaaaaggcgtccgggtttgaggattccatgcaatttaagaagctaactcatgctcaaagaactggtttaagccaaatcccaaatcgtagatataccttatggtggtcaccaactattaacagagcaaatgtctatgtcggttccttggtgcacttggatctgact

SEQ ID NO: 166933 - DNA, 183 bp, Saccharomyces pastorianus
gaagtgtcaccattaattattgcatcatcaaaaactaagggagagttggcgttgcctgcaaacaatgcgtcgctagagtccttcatcacaagaaactgtgtagcgtcattcttgagagccgcgatcggatccttttctggagccaaagagtcaattagggcatttgctttggaattatcatgt

SEQ ID NO: 166934 - DNA, 219 bp, Saccharomyces pastorianus
actcattttatgtatatacatatatttgtacatatctataccaagcaagtatagtgcaatactgttcttcgacgttattaaacgtaatagcattttcttagttatccttggaatcttatatacaagtacgagtacatactgcgcagtaaattgatcctgatggtgtgtttagatttcgccagaagcggaggcgttctggattctggagatgtaagcctt

SEQ ID NO: 166935 - DNA, 405 bp, Saccharomyces pastorianus
acttttggtaagaagaaatcagctactgctgttgcccatgtcaaggccggtaagggtttgatcaaggttaatggttctccaatcactttggttgaaccagaaatcttaagattcaaggtctacgaaccattattgttagttggtttggacaaattctccaacatcgatattagagttagagttactggtggtggtcatgtttcccaagtttacgccatcagacaagctattgctaaaggtttagttgcttaccatcaaaaatatgtcgatgaacaatccaagaacgaattgaagaaggctttcacttcttacgacagaaccttgttgattgctgattctagaagaccagaaccaaagaaattcggtggtaagggtgctcgttccagattccaaaaatcttaccgt

SEQ ID NO: 166936 - DNA, 513 bp, Saccharomyces pastorianus
gccccaaagtggtatccttcagaagacgttgctgccccaaagaaaaccagaaaggctgttcgcccacaaaagttgcgtgcctctctagttccaggcactgttttgatcttgctagctggccgtttcagaggtaagagagttgtctacttgaaacatctagaagacaacactctattggtcactggtccattcaaggtcaatggtgttccattgagaagagtcaacgctcgttatgtcattgctacctctaccaaagtctccgtggaaggtgtcaacgttgaaaaattcaacgttgaatactttgccaaggaaaaattgaccaagaaggaaaagaaggaagctaacttgttcccagaacaacaaactaaggaaatcaagactgaacgtgttgaagatcaaaaggttgttgacaaggctttgttggctgaaatcaagaagaccccattgttgaagcaatatttgtccgcttctttctctttgaagaacggtgacaagccacacctattgaaattc

SEQ ID NO: 166937 - DNA, 1038 bp, Saccharomyces pastorianus
ctagaggatccctcttcctcttctatctcttctgagtcaccaaagtctacatattcgtcttcttcattaccacctgttaccagtgcgacaacaagccaggaaactgcttcatcattaccgcctgttaccagtgtaacaacaagtcaggaaatcacttcatcattaccacctgttatcagtacaacaacaagccaggaaagtgcttcttcattaccacctgttaccagtgcgacaacaagccaggaaactgcttcatcattaccgcctgttaccagtgtaacaacaagtcaggaaatcacttcatcattaccacctgttaccagtgtaacaacaagtcaggaaataacttcatcattaccacctgttaccagtgcgacaacaagtcaggaaataacttcatcattaccacctgttaccagtgcgacaacaagccaggaaactgcttcatcattaccgcctgttaccagtgcggcaacaagccaggaaactgcttcatcattaccgcctgttaccagtgtaacaacaagtcaggaaatcacttcatcattaccacctgttaccagtgtaacaacaagtcaggaaatcacttcatcattaccacctgttaccagtgtaacaacaagtcaggaaataacttcatcattaccacctgttaccagtgcgacaacaagccaagaaactgcttcttcattaccacctgctaccactacaaaaacgagcgaacaaaccactttggttaccgtgacatcctgcgaatctcatgtgtgcactgaatccatctcctctgcgattgtttccacggccaccgttactgttagcggcgttacaacagagtataccacatggtgccctatttctaccacagagataacaaagcaaactacggagacaacaaagcaaaccaaggggacaacaaagcaaaccaaggggacaacagagcaaaccacagaaacaacaaaacaaaccacagtagttacaatttcttcttgtgaatctgacatatgctctaagactgcttctccagccattgtgtctaca

SEQ ID NO: 166938 - DNA, 321 bp, Saccharomyces pastorianus
ggtacttccacttctacttctaccgaattgaccacagtcaccggtaccaatggtttaccaactgatgaaaccatcattgttgtcagaacaccaacaactgctagcaccatcataactacaactgagccatggactggtactttcacctctacatccacagaaatgactactgtcactggtaccaacggtcaaccaactgacgaaactgtcattgttgtcaaaacaccaacaactgctaacaccatcgtaactacgaccaaaccatggactggtactttcacctctacatccacagaaatgaccacagtcaccggtactaat

SEQ ID NO: 166939 - DNA, 399 bp, Saccharomyces pastorianus
aaattacgtcaattacaaaagaaaaagcaaaaagaaaatgaaaacagcagttctattcagcctaatttatcggcagcaagaattcgtttgaaaagggaccttgattcgctggacctcccaccaacagtgactttgaatgtaataacatcaccagatagtgcggatagatcacaatcgccgaaattggaggtaattgttaggcctgatgaaggatattataattatggatctattaatttcaatttggattttaacgaagtttatccgattgaaccaccaaaagttgtatgtttgaagaagatctttcatccaaatatcgatttaaaggggaacgtgtgcctaaatattcttcgagaagactggtcgccagctctagatttgcagagtatataaccgggc

SEQ ID NO: 166940 - DNA, 339 bp, Saccharomyces pastorianus
  modified_base (186)..(210): a, c, g, t, unknown, or other
aaaagaaaacagcaggctttaagtgcaaacatcaatccaacccccgtcaacgctagaatatcgatgacagcaccattgactccacagcaacagctacttcaaagacaacagcaggccttggagcaacaacagaatggtggagccatgaaaaacgcaaataaacggagtggtaacaatgccaccagnnnnnnnnnnnnnnnnnnnnnnnnngataaaccaaaggttaagcgacctagaaaaaatgcaaaaaaaagcgagagcggtacaccagctcctaaaaagaaaagaatgactaagaagaaacagagcgcaagtagcacgccctcttctactacaatg

SEQ ID NO: 166941 - DNA, 171 bp, Saccharomyces pastorianus
atgtttaaccatgattggaagtactccattaattctaagactttcgccgatttaaacattgaattatttcgaaaccacaagttcaaaactgttttaaattacataataggtgtagttgggtggaatggattaaaacttgccctttttgtttctgacatttacacatgtatc

SEQ ID NO: 166942 - DNA, 180 bp, Saccharomyces pastorianus
atatactcatcctcgcctcttcctttttttttcatattttagttctaattagcagcactggagtttgttttttgtttcccataccataggataaatttcgtggcccttcttaatttctcctatatctaactccagacaaggataatcatactacccaaaagccaaataaatcgttctcta

SEQ ID NO: 166943 - DNA, 243 bp, Saccharomyces pastorianus
gttttagttcaagatttattacatccaactcctgcctctgaagcaagaaagcacaaattaaagactctggtccaaagcccaagatcctactttttggacgttaaatgtccaggttgtttgaacatcactacggttttctctcacgcccaaaccgcggtcacttgtgaatcctgctcaacagtcttgtgcacaccaaccggtggtaaggctaagctttctgaaggtacatctttcagaagaaag

SEQ ID NO: 166944 - DNA, 252 bp, Saccharomyces pastorianus
tgcttggacacgttgtctctcacctcgttctcgttgttggccagcgtcacttccaagtcctctaacttgacgtctgcgggaatgatcgcctccatcctggtcgtgctggtggtgtgcttgctgctctccttggccggctaatcgaagttgaagttgatgatgatggtttatattgttctttttcaaaatttcgctcggcgccgggtcggaaattctggtgaaatcgatattattatattgtattatattgta

SEQ ID NO: 166945 - DNA, 663 bp, Saccharomyces pastorianus
ttaggccaggaacttactgaatctacggtgaatcacactaatcattctgatgatgaactccctggacacctccttctcgattcaggagcatcacgaacccttataagatctgctcatcacatacactcagcatcatctaatcctgacataaacgtagttgatgctcaaaaaagaaatataccaattaacgctattggtgacctacaatttcacttccaggacaacaccaaaacatcaataaaggtattgcacactcctaacatagcctatgacttactcagtttgaatgaattggctgcagtagatatcacagcatgctttaccaaaaacgtcttagaacgatctgacggcactgtacttgcgcctatcgtaaaatatggagacttttactgggtatctaaaaagtacttgcttccttcaaatatctccgtacccaccatcaataatgcccatacaaatgaaagtacacgcaagtatccttatcctttcattcatcgaatgcttgcgcatgccaatgcacagacaattcgatactcacttaaaaataacaccatcacgtattttaacgaatcagatgtcgactggtctagtgctgttgactatcaatgtcctgattgtttaatcggcaaaagcaccaaacacagacatatcaaaggttcgcga

SEQ ID NO: 166946 - DNA, 459 bp, Saccharomyces pastorianus
cacacacccacacccagacacccacagacaccacacgcacacaccacacaccacacccacacccacaccacacccagacacagaccggacgcaaccacacccacacacaccacacccacaccagacccacacccacacccacacacacacccacacccacacccacaccacaccacactacacacactaccctaatccaacccctaatccaaccctgatgaacctgctccaaacttaccctccattaccctacctcaccactcgttaccctgacccatttcattataccactcccaaccaccatccatctctctacttactactactcatccaccgcccatcataaccgttaccctccaattgcccttatccaactccactaccattaccctaccattaccctaccatccaccctgtcctactcactgtactgttgttctaccctccatattgaaacgt

SEQ ID NO: 166947 - DNA, 294 bp, Saccharomyces pastorianus
gcctgtttggattttattaatgcactcgataaatgccaccaaaaggagtactataaaagactatttggtctttgtaacaacgaaaaggatgccttaaacaaatgtctcaaagaggcaagcttgaacaataaaaagcgtgcagttaaagaaagtagaggtaaaagagctgatctagagaaaaagtggaagaaaattgaggaagaagaatatggtgaagacgccatactgaagactatcttagatagacagtacgccaagaaaaagcaggcaagtaacaatgatgcagactcgaaa

SEQ ID NO: 166948 - DNA, 564 bp, Saccharomyces pastorianus
gctaacttacgtactcaaaagagacttgccgcttctgttgtcggtgttggtaagagaaaggtttggttagacccaaacgaagcctctgaaattgctcaagccaactccagaaacgccattagaaaattggttaagaacggtaccatcgttaagaaggccgttactgtccactctaaatctagaaccagagcccacgctcaatccaagagagaaggtcgtcacagtggttacggtaagagaaagggtaccagagaagcccgtttaccatcccaagtcgtctggatcagaagattgcgtgtcttgagaagattattggccaagtaccgtgatgctggtaagattgacaagcatttgtaccatgttttgtacaaggaatccaagggtaacgctttcaagcacaagagagctttggtcgaacacattattcaagctaaggctgatgctcaacgtgaaaaggctttgaacgaagaagctgaagctagaagattgaagaacagagctgctcgtgacagaagagctcaaagagttgctgaaaagagagatgctttgttgaaggaagacgct

SEQ ID NO: 166949 - DNA, 243 bp, Saccharomyces pastorianus
gttttaaatcagctaaaaaacgacattgaaataaaaggtacactgcaatctgtagaccagttcttaaacctgaaactagataatatatcatgcacggatgagaagaaatatccgcatttaggttccgtaagaaatatcttcataagaggttccacagttagatatgtctacctcaataagaacatggtggatacgaatttactgcaagacgccaccagaagggaggtaatgaccgaaagaaag

SEQ ID NO: 166950 - DNA, 90 bp, Saccharomyces pastorianus
aaaaaataaatggtctctagcgggatcgaaccgctgatccccgcgttattagcacggtgccttaaccaactgggccaagagaccatgata

SEQ ID NO: 166951 - DNA, 309 bp, Saccharomyces pastorianus
ccgtccctccaacccccctccctcctccactcaccaggcaacacccaagagcgtgggtacccaccgcagcaacagcagcagtactaccagcagcaaccgcaacagcaacagcagcccggatactacaatcaacaagggtacaaccagcaggggtacaatcaacaaggatacaatcagcaaggatacaatcagcaagggcaccagcagcctgtctacgtccagcaacagcctcctaaaaagggcaatgaaggttgcatgactgcatgcctggctgcattatgtatatgttgtaccatggatatgctgttc

SEQ ID NO: 166952 - DNA, 195 bp, Saccharomyces pastorianus
ttcctttatgtggtcattacctccctggcccaatcgatgtgtgtttttaataaccatttaaattgtatgatgatctttgggattccattttgtcttaatgttataatattatgtatatagattatactagagattctcctcatggatttaggaatccacagaaaggaatcaataattttgcataatattataaat

SEQ ID NO: 166953 - DNA, 147 bp, Saccharomyces pastorianus
ttctttccttctatatttgtccttcacattcatattacgctgacaatctttgcatttcagcttccaccaagcctgatcaccgtttatcaatatttgggtcattttcttatacctcaggtaataataaactagcaacctgaataatat

SEQ ID NO: 166954 - DNA, 708 bp, Saccharomyces pastorianus
  modified_base (6)..(6): a, c, g, t, unknown, or other
acttcnaagaaggttaatgttcagcttcctaagcccagtgcaaatgataaattgaaggatttgaaggctaaatttactaatagtaaaacactcgtgccacctggaataatttctaatgaaaaaaataattctagtgcaaacgatgatgattctagctcctcaggttcttccacagaagacgagtctagttcatcttcctcgtcttctgatgaggaaacttcaacatccaggaaggctagaagagttgttgtaaatacaccaagagaaccagttagatcttcatctaagattgaagccccctctccatctgttaacaaaaaaatcaatgccacccctgataaaattccagttaaacagctaatggacatgtcgtctcctccgtcagttaaatccaagaccacctcaaatccgtctagtatacttcatgaccttccaagaaaagttcgtccttctttgagttcattatctgatcttgtttcaagaggcatcccagatgtaaaggaaaaaacttctaaatcgaatgagaagtcacaaacaaaagccccttcaagcagtgatgatgaatctagctctgattctgactctaactccagttcggactccgtatcggattccagttcagattctaaatctgagtcagattcggatgactcaggggattcatctgatgatggaaaaagttttattagtgcgaaatccgctagtgct

SEQ ID NO: 166955 - DNA, 2127 bp, Saccharomyces pastorianus
gtgaacttcaatacacctcaacaaaacaaaacgcccttttcgttcgggactgccaacaataactctaacaccaccaatcagaattcctctactggtgcgggcgccttcggaacaggtcaatcaacatttggtttcaacaattctgcgccaaataacacgaacaatgcaaactcttcaatcacacctgcatttggtagcaataacactggtaatactgcattcggtaacagtaaccccacaagtaacgtttttggcagcaacaattctacgactaatacatttggtagtaatagtgcagggacatccctttttggatcttccagtgctcaacaaacgaagagcaatggaactgctggaggaaatacatttggttcttcatccttattcaataacagtactaatagcaatacgacaaaacctgcgttcggcggtttgaattttggcggcggcaataacacaactcctagctcgaccggtaatgctaacacaagtaataacttatttggcgctaccgcaaatgcgaataagccagccttttcctttggtgcaaccactaacgacgataaaaaaacagaaccagacaagcctgctttctcctttaattcaagtgtcggtaataagacagacgctcaagctcccactacaggattttcctttggttcacaactaggtggaaacaaaacggttaacgaggctgcaaagccttccctttcatttggttcaggatcagctggtgctaacccagctggagcttcgcaacccgaacctacaactaatgaaccagcaaaaccagccctctcttttggtactgcaacatccgacaataagacaactaacacaaccccaagtttttcgtttggtgctaaatcggatgaaaataaagctggtgctacttctaagcctgccttctcattcggtgctaagccagaagaaaagaaggatgataattcctcaaaaccagctttctcatttggtgccaaatcaaatgaagacaagcaagatggaacggctaagccagcattttcctttggtgccaagcccgcggagaagaataacaatgaaacctccaagccggcattctcttttggagcaaagtccgatgagaaaaaggatggtgatgcctctaaacctgccttctcatttggtgctaaatcggatgaaaataaggacagtgattcttcgaagcctgccttctcatttggtgctaaacccgatgaaaagaagaatgatgaagcctccaagcctgccttctcattcggagcaaaggctaacgaaaagaaagaaagtgatgaatcaaaatcagccttttcatttggttctaagcctacaggaaaggaggaaggcgatgggacgaaggctgccatttcctttggtgctaaacccgaagaacagaaatccagtgatacgagcaagccagcgtttacttttggtgctcaaaaagataatgagaagaaaacagaggaatcttctacggggaagtcaaccgcagatgtcaaatcaagtgatagcttgaaattaaattctaaaccagtagaattgaagccagtttctctcgacaataaaacactggacgatttagtaacgaaatggactaaccaactaacagaatcggcctctcattttgaacagtataccaaaaaaattaatagttgggatcaggtactagtgaaaggaggtgaacaaattagtcagttatactcagatgctgtgatggcggaacatagtcaaaacaaaatagatcaatctctacaatatatcgagaggcaacaggatgaattagaaaacttcttagacaattttgaaaccaagacagaggcacttctgtccgatgttgtgtctacaagttcaggtgctgcggccaacaataatgaccaaaaaagacaacaggcctataagacagcccagactttggacgaaaatttaaactcgttgtcatccaatctttcttctctaatactagaaatcaacaatgttagtaatacattcaacaaaaccactaacatcgatataaacaatgaagacgaaaatattcaactaatcaaaatcttgaattcacatttcgacgctttaaggtcactagacgataactccacctctctggaaaaacaaatcaactcgataaagaaa

SEQ ID NO: 166956 - DNA, 99 bp, Saccharomyces pastorianus
gcagcacctgagtttcgcgtatggtcacccactacactactcggtcaggctcttaccagctgaactacagttgatcggacgggaaacggtgctttctgg

SEQ ID NO: 166957 - DNA, 309 bp, Saccharomyces pastorianus
cttaacaagaaatagtgaaatgaaagcgcatacctcaaggcatacagttgaagcagctctatttatacccgttcctccatcagtcatcactacttaaacgattcgttaacagatgctcatttagcacctcacatatcctccatatctcatcttttgcacaatctcattatcactatggagatgaccttgtttctgaacgaatcatacatctttcatagacttcgtatgtggagtactgttttctggggcctttgtctattcgtatgcgcagaatgtgacagtgccaataataggggtgccagggtgcct

SEQ ID NO: 166958 - DNA, 450 bp, Saccharomyces pastorianus
atgaaacagcgtttttctcaagtagcaactgttatattcttcgtcatgagtatccgttctccaagaaatctcggctttttttttactcttgccctttttgtcgtacttgtttgctcccaggaatggttctcctttgaaatgaatagatcttgttcaatgaaagtggaacatagaatgcaatttttgtcaactataatcagtgaacatcagaaatcggatgtgaattgttgggaccaaatcgcaaagaagatgaatgtatacttatttgagcagaaagtttccggctcagacgtgtttttcttagatggagcagattgtgagcgctttttcgaacgtaatttcctccgttatctaccctcaagaaagtcttcccatcctgacctaccaattgctgaattgttgccgtatatcagaaaagccgacattgcctgtgctggtaagcaattgatt

SEQ ID NO: 166959 - DNA, 150 bp, Saccharomyces pastorianus
aatggaactgagtatccttcgattttttgcaactcttcccccaccattagttacagcaaacattttatacttataacagaatgccctctgtaagtataaggactattatcgttaggtcttagaacagcaatgttcaaacaagtaagaggt

SEQ ID NO: 166960 - DNA, 192 bp, Saccharomyces pastorianus
ctggtattatttcttttcttcgtagtttttgtacagatcacttatacagctttacacagattttcccgcttgttgtgcacttttttttcgaagattattgaagagggatgcgtttggtacaataaaaaacataggttcccaaacctatataaatatatatatgtatatgtatatatactacatatatgctac

SEQ ID NO: 166961 - DNA, 285 bp, Saccharomyces pastorianus
gataattctttgaccaatgctggcactggctctagttcaaaatcagccgctaaccataacggcgaaactactaaacgaactgatgaaaagaattatgttaatcaaaacaataacaatgaaggaaataccaagtactccagtaacggcaacggaaatcgaagtgatattaatcgtggcaatcaaaataatgctttaaatgcgagaagtaaacagtctgctgagccacaaaaaaattcaagcgccaacgctaaaaaggaatctagtggtggttgttgtataatttgt

SEQ ID NO: 166962 - DNA, 675 bp, Saccharomyces pastorianus
  modified_base (660)..(660): a, c, g, t, unknown, or other
acttcagctgactcaactacctcgaccgttcaaactacttctgttgatccaactacttcagttgacccaactagttctatagtcagttctacttcagttgatccaactacttcagttgacccaactacttcagctgacccaactacctcgaccgttcaaactacttcagctgatccaactacttccgtagtcagttcaagttcagctgatctaagtagctctgttatcagttcaagttcagcagacccaactagttcaagtgctgtgactacttcaattaacccaactactccagctgattcaactacttcggccgttcaaactagcccagctgatccaagtagctctgttaccatttccacttccacggactctacatctttaattgagtctactacaacagttggtccacatgcctcatcaagtgttgctggtatgtatcgtacaagaagctctgacgaggtaaccacatcaacagatccaactagctcaagtgacgttgctacttcagcagatccaactagttcaagcgctgtgactactttagttgacccaactacttctgtagtcatttcaacctcagttgatcaaactagctcaagtgacgtttgctacttcagttgaccgaaccacttctgttatcagttcaacttcagcagnccaactacttcagct

SEQ ID NO: 166963 - DNA, 159 bp, Saccharomyces pastorianus
atgaagaacgcagcattgtgtgaggctcttcctctgctcgccacgtgctcccacgaaatcccacccacaccacacacggtctgtttcgccttcccccccgcattattactatccccgagcaaactcacacttttgaattcgcgtcgcgtcgcgtcgcgt

SEQ ID NO: 166964 - DNA, 237 bp, Saccharomyces pastorianus
atttacttgacagattttgataaaaatgtgaaaaagacaaacaacaccgaaagtgaatgtgaaaaggcgagggaagttttcaaagagagcgattccatcgattccgctttggaagaactaaacctaaaaatcaattctaatgagctagaattgcggctcctaaataaccagtgcgacaagcatgcattaaatattcaactgacccaagaaaagctggactcattgttattaatgcag

SEQ ID NO: 166965 - DNA, 522 bp, Saccharomyces pastorianus
tcaaatcaggctccaaagtggtatccatccgaagacgtcgctgctctaaagaagaccagaaagactgctcgcccacaaaagttgcgtgcctctctagttccaggtaccgtcttgatcttactagctggtcgtttcagaggtaagagagttgtttacttgaagcatctagaagacaacactttgttggtttctggtccattcaaggtcaacggtgtcccattgagaagagtcaatgctcgttacgtcattgccacctccaccaacgtctctgtcgaaggtgttaatgttgaaaaattcaacgttgaatactttgccaaggaaaagttgaccaagaaggaaaagaaggaagctaacttgttcccagaacaacaaaagaaggaaatcaagaccgaacgtgttgaagaccaaaaggttgttgacaaggctttgttggctgaaatcaagaagactccattattgaagcaatacttgtctgcttctttctctttgaagaacggtgacaagcctcacatgttgaaattc

SEQ ID NO: 166966 - DNA, 516 bp, Saccharomyces pastorianus
agtgcacatgctcgcaagattatatgctaaatatcacccaatcggtccttgttgttcatcatatcgttacatatctgtgaaaagtactttatctcagtgggtttacgtgggcatagatcacgcttcaagccgctctgtgtcggcctcttttcgccaggtaacttgcttggtatgcaggaaaatcgatagctcatatacgtgtagtaactcaaacatgtagggtgccaaattgtacccatatttccttatggtgcttttactgaagactccttacatatggtgcgccagaaaccaagtcagtgagaagtacgcatcgtacgagctgtcgttcggcctggcactcgcgtatttcgtgacaacgttccaggacacggcaaactcaactcattatagtatcctctgttgaggtgaacaagagaaagggtgatcgtaatcctttgctattgaatttcaaagtatgcacattgagaacaacgtgtagaccatcaagttgattttcttgggaataagatactt

SEQ ID NO: 166967 - DNA, 216 bp, Saccharomyces pastorianus
tattatttgcacgtaacaattatcagaaaatgggtgaacttcgtattaattgttgggatttcgttgttgatattaggtatacaaaatatactagaagttctcctcaacagtcttggaattcacgaaagggagttgatagttctaacaataaaatcactttgtcttcctttcttttatactttgtcattcattattctactacattatcaatttgtt

SEQ ID NO: 166968 - DNA, 540 bp, Saccharomyces pastorianus
cagattagttttgaggaacatccaaatgaagagtgtcaaaattctgttgggttaatcaagagagtgagtactttctttaaaaagaggccattgtctcgaaagaatagcataaagtcaatcggtgacgtaaaatcggaggcacgtaaccggggagaaggcctcctgggtgaagttgataatcttaacgagcagaatgtccgagaaaacctgactagtgaacatgaaaagaatcctgaaggagattccaaaaggtatggcctgttctcctttgaagagaccccccctatacaagtgttggagcagggcaataccaattctgagctttcttcatttaaaaacacttctttggcggaaaacaaacgctcttctgacagcttcgtttcgttaaaaccgggtgaagatgaacatagccctttagagattagtacgtgtggtaatttgactgaaagagaggatttggaatctggcgaagaacggtttgactcagcagcccaaaatataaaggtagcttcgatgaaggaaaaaaaaaaaattcttcaa

SEQ ID NO: 166969 - DNA, 159 bp, Saccharomyces pastorianus
gaaactttgaggtcatgctctagctcagtaagttcacgggaaaatcgcgaaggagacgcaagcatttgatgaagtgatgctatgatagccgaccttctagacatagtcggactcgaagtagagaaggcatccattggccatattgagctaataggcgag

SEQ ID NO: 166970 - DNA, 447 bp, Saccharomyces pastorianus
cccgggcccaggcacagaataccacctggcccggaacttccagagcggcacgcggcccgcgtggcctggcggctcgccgacccggcgcccgccacccgctacaccattcccgacctgttcgaggacccgtggttccagggcgtggagacgtgcgtggagacgtgcgtgggcggcgacggcgatgcccacgccgtcacgtgcaagaagcctattatcaagactacaacgtacgacaacccgcgcgggttcaacatcgctgccaccactactactaccgctgctgccgccaaacctacctccaacccgttccccatcaggtcaatggttgatatagcagtcagcagtcccgcaccggcgccgccgccgccactggcgcgctcgaacagcagcggagaagcgctgttcacgctgtgcgaaaccccgccgcagttgctggacaagctcacc

SEQ ID NO: 166971 - DNA, 168 bp, Saccharomyces pastorianus
atgatcactcgatattatcgatgcttttttgatataatgctctctactcactttattgagtggcgatttgctatttttttttcttcgcaccatgcgtcacgttaaacgaaaaagttagtattaggatggaagtatataatatcacataagattattcagggtatattg

SEQ ID NO: 166972 - DNA, 153 bp, Saccharomyces pastorianus
aaaaaatattcacctgttattattatccaagccttgaagaaagcactgactgatgcactagaagttatcaaacaagtaagtaaacctgtcgatgtggtaaatgatgccgctatgaaaaaattcgattcagcctctatcggtactaaatatgtc

SEQ ID NO: 166973 - DNA, 507 bp, Saccharomyces pastorianus
tcttcctactccccggaaaaacttgcattttgcggacggaacaactttcgatggaggcttggtggaggtatttccggagagaacccatgtcccggatttgccacaaggatggcgtagtgtctcagtccctcgtgcgcgctttgcatgttacattcgggcgcgtgattatagtgggaagcactgcgcggtgcgacctagctgggcatcgggccgcatgcagccaatcacgcgcgagaaaagtagagcaaaagaaaaatctccccaccgcgcacccacgtttttcgggacatttctcgtgacatttctcgtgacatttcccggacgcacgccctttctggttttggaggtttccacgaaaccggaactaatcgaccagccgaaagaaagcgcgttggacgggcactggtgcagatttgtggggacggagaatcccaggacaattgccaaaaaaagaaatgggcggaacaaaatagcagtaggcaggggcccacgcgcgcttctgtacct

SEQ ID NO: 166974 - DNA, 186 bp, Saccharomyces pastorianus
gaatgccaattatagggtgccgaggtgccttataaaacccttttacgcgcgcctgtgacatttcctttttcggtcaaaaagaatatccgaattttagatttggaccctcgtacagaagcttattgttaaagcccatactcagtctgttctaaacggcttccatggaagaaaaataactatattata

SEQ ID NO: 166975 - DNA, 93 bp, Saccharomyces pastorianus
ccggaagagtgcgaggcgcttcgagcttggtataagagaatgcaacagcgccccagcgtgaagaaactgctagaaatccgttctaaatcctcg

SEQ ID NO: 166976 - DNA, 495 bp, Saccharomyces pastorianus
tgtgcatgtgtgtggtgttggtatattttagtatacttcttgataaaggtaccaaagtactgtatacacatgataattactggttagtcatcctggtgttttacttcttggcattcggctcgatcatgaggatttcgggccgaacctgctccgaagaaatctttcggccaggcatcatatcacaatgggttgcagaatttctcgaaggaatcacctgtaggagtgaacctcgaaaaaaagaaaacacatatttcatactgcatcatccttgcaacacaacgcttcctgcagaagttttcgaacaaaaggcttggcaatcctcacttacaccccactcgcgaatccacattttcacgtgagcttgcaacagagaataatagcggaaactttcccgtattatttagatatcatatcttcagacagctagatatcgaaaatggaattttattatgtcaagttctgtaggcgctaattattgtttaagtaatgttttcg

SEQ ID NO: 166977 - DNA, 936 bp, Saccharomyces pastorianus
tccaatgattctcctctaactccacaacagtcacaacaacaacaacaacaacaacaaaaacaacagcaacagcaacagcaacaacagcaacagcaacagcaacaacagcaacagcaacagcaacagcaacagcaacagcaacagcaacagcaacagcaacagcaacagcaacagcaacagcaacagcaacagcaacagcaacagcaacagcaacagcaacagcaacaacaacaacagcagcaggaaacgcagcaacaacaacaacaacatcatcaacatcaacaatcgtctcagaaacattcaccacaacaatctaaccaacaacaagtgaattcttcagtaccgttaccttcacaaggtcaagctgttgggttacactctaatcaatcgcaccaagatttgtccgttgaaccatctgacattggccaatctttcctcttgagggataatactgaaattaacgaaaaaatatggggcacgagcggtataccttccagcattaatggctatatgagtactccccaaccttctacaccaactttagaatggggaaacacttcagtgtctcaacacggttcttcattctttttgccttctgccgcatcaacagctacggtacctgtcaataacggtacaaatgccaatgctatttccaataatgtaactaccaacagcgcaaacacctccaccacactttccaacaactctcaacaacagatgatgcaaatgggtaatgcaatgaacgcttccatttcatcttcgaattcaatgcccccatacggtttgatgtcttctcaaacacaacatatgtcaaatatggttaacacttctgatattaatatcacgcctcaaaagcaaaacagattcatgcaacaacctcagccagagcacatgtatccggtgaatcaaagtggtacccctcaaaaagttcctcca

SEQ ID NO: 166978 - DNA, 195 bp, Saccharomyces pastorianus
ctattttctttcgtcaatttgtccaaaataaaattttcacgacatttcttctccaaataccgcgattactggagaggttgtccattaaacacaacaatcattaacgcatctacgaaggtgctcacattttttattcaacttcccaacattctcacccgtagactgaatgggaaaacaaaccaagaagttgaaagg

SEQ ID NO: 166979 - DNA, 87 bp, Saccharomyces pastorianus
atgcatcaactacgagcgtattgtgttatatcagctctgtccgatataccgcctatttgctgtacgagcccgtccgagctatacgag

SEQ ID NO: 166980 - DNA, 174 bp, Saccharomyces pastorianus
acaaacaagaacagcaaggtcgtgtatggtgaacttctacaaggtgagaaatcacagttcaaattcaccaacgcaaaggttgggaaagttggataccgttatggtagtggaaatagagacaacaagaaagacaggagaatcggtttcaataagttgggccaaatggtatacatt

SEQ ID NO: 166981 - DNA, 324 bp, Saccharomyces pastorianus
acggttcctaaagatcatcctgtctctaaccctgaataggaaaaatactatgtttgttgagctcctgggtgttcattcacccacagggcaattctgacccaatctttgaagcggttaaaaatctgttgtggggcttatgatttgccgctggcagttagattccaaaaaaggttccacttgctacctgccctttcgtatccgggatcagatagaggtcagtttttcgctatcgcttacagcgttgtttcagccaagcaagacaaaccagaagagttatgtggtgggaataacgactcggcaaggcagttagtagatggcactttt

SEQ ID NO: 166982 - DNA, 123 bp, Saccharomyces pastorianus
aattatttaacgcaattggaaacggttaaggatgggtccctgtatctccacttgtgcgttactaatttattctaaaattccagagtgtgtagatttaccacagatttcaaccaagtcaaactg

SEQ ID NO: 166983 - DNA, 249 bp, Saccharomyces pastorianus
ttaaacttgaaacttgaaactgaaactgaaattgaaagaaagaaaaatattaaatatattattaggggaggggagaaggggaggtgttgttgtatattgttctctataaacacaaacaatagaacggtattacttttctttggtgtgataagcgagtaacaaaacatacaaatagtaatacagaaccactacaaaaactggaaaagggcgtatgcatgatgtatatatatagcaagaaaaaaaaaaaga

SEQ ID NO: 166984 - DNA, 243 bp, Saccharomyces pastorianus
cttaagaaaaaagggccacgggatttttttttcgcgttttggcgttttcatataaaaaaaaaccatattaacatctgtacattattattaactaaacatccgtacacaaaaggttttccaagacaaaacgttgtcgagactattctctttcgaagaaattctaaaacacacttcggcaggccggcaacaagaaggcggccccttggggaaagggaagtcaatccgtctgcccgttctctaggc

SEQ ID NO: 166985 - DNA, 258 bp, Saccharomyces pastorianus
gagggtactccttcattcggtaaacgtcacaacaagtcccacactttgtgtaacagatgtggtcgtcgttctttccatgttcaaaagaagacctgttcctcctgtggttatccagctgctaagaccagatcttacaactggggtgctaaggctaagagaagacacactactggtactggtagaatgagatacttgaaacacgtttcaagaagattcaagaacggtttccaaaccggctctgcttctaaggcttctgct

SEQ ID NO: 166986 - DNA, 534 bp, Saccharomyces pastorianus
  modified_base (16)..(16): a, c, g, t, unknown, or other
gaaggtcatgaagatntgctaaattcattggatgctactgaggatggcctgtggatcgcaaccgcctctaaagataatacggctattgtttggagatacaatgagaacagctgcaagtttgatatttatgccaagtatattggtcattcagctgccgtaactgctgttggattgccaaatatagtttcaaagggatatcctgaatttttattgacagcatcgaatgatttaacaatcaagaaatggataattccaaagccaactgctagtatggatgttcaaatcatcaaggtatccgaatatactcgtcatgcccatgaaaaggatatcaatgctttgtcagtttctcctaacgattctatttttgcaacagcatcatacgacaagacctgtaagatctggaacctagaaaatggtgaattggaagccacgttggccaaccacaagcgtggactatgggatgtatcattttgccaatatgataaattattggcaacttcttcaggtgataaaacagtcaagatatggtcattg

SEQ ID NO: 166987 - DNA, 123 bp, Saccharomyces pastorianus
atgatttctgtttgcccacaaaatgacttgcaaaaatgctacagaagcctcacattcgatgttccaggacaacaattcgaagagagaaatgaacaaacccttaaaaacgggccaaaaagaaag

SEQ ID NO: 166988 - DNA, 189 bp, Saccharomyces pastorianus
atagatgctgaccactcggtaaaggatagcaggtctgcaataacagataaagataaggatatatacaaattacagaataactatgatgtgggcaatatcggggaaattgctgaggaagatcaatacgaaaacgaatttaccaactactcacagagtaagagagagttcatagaaagtctaaggcctaaa

SEQ ID NO: 166989 - DNA, 156 bp, Saccharomyces pastorianus
acactccccatatcgctacaggagtacggtggcaatgacggggatgattcggaatctaatgttgctgtacctacaccaaacacgagtggtaacgggtattgccatgttgataaacaccataaaagtgtcgacatcttattatctcaagtatgcatg

SEQ ID NO: 166990 - DNA, 123 bp, Saccharomyces pastorianus
agcttttcaaaatttgatttcgacgtaggcaatgaagagttcgtcaacaccgaccgcgagactatcttttcaaagtgcattattggttttcatattgattatatcgaaaatggccaacgacaa

SEQ ID NO: 166991 - DNA, 249 bp, Saccharomyces pastorianus
aataacaaaaacgacttggtacattgtccctcaataactttatttgaatcgatccccacggaagtgcggtcattctacgaagacgaaaagtctggcctaatcaaagtggtaaaattcagaactggtgcaatggataggaaaaggtcttttgaaaaagttgtcatttccgtcatggtcgggaaaaatgtaaaaaagttcctgacgtttgttgaagacgaaccagatttccagggcggaccaatcccttca

SEQ ID NO: 166992 - DNA, 354 bp, Saccharomyces pastorianus
aaataaaatgtcgatataatacttgaaaatacaagcaatgtcatcaaaaaatttgagcggtacgagaatcgaacccgtgtccccaccttggaagggtgggatgataaccactacactaaccgcccatgtgttggatagtgtaactgtaatgacgaggtaataagtgatggcgactatatcaccaccgaaacacagcgattacttaaaagggtaatcactactgcgattctaattgttggaataaaccaaacctcttccgataatgttggaacgagagtaattaatagtgacatgcgttgctatggtaacaatctaatgcttacatcgtatattaatgtacacctcgtatacgtt

SEQ ID NO: 166993 - DNA, 363 bp, Saccharomyces pastorianus
gaagccgcattgaatatctatttggacaattttgccaccacagttggttctcgtgaacagttagctattgctgagtttgcagctgcattattaatcattccaaaaactttagctgttaacgctgccaaggattctagtgaattagttgcaaaattaaggtcctaccatgccgctagtcaaatggccaagccagaggacgttaagaggagaagctacagaaattacggcctagatttgattagaggtaaaattgtggacgagattcacgctggtgttcttgagccaaccataagcaaagtcaaatccttgaaatcagcattggaggcttgtgtagcaattctaagaattgatacaatgattaca

SEQ ID NO: 166994 - DNA, 609 bp, Saccharomyces pastorianus
aacacgcccttgaccacaacttctccttttggttcactgcaacaaaacgcatcacaaaatgcatcatctacatcgtcagcgtttggcaaaccgactttcggcgcagctactaatacccagtcgccatttggtactattcaaaatacaagtacaagcagtggaacaggagtatccccatttggcacatttggaactaatagtaataacaaatcaccttttagtaatctacagagcggagcaggcgctggttcttcgccgtttggtactacaacctccaaagctaacaacaacaataacgtaggcagtagcgcattcggaacgacgaataatcgatctccttttagcggaggttctgggggcaccttcggttctgcttctaacctcaataaaaataccaatggcaactttcaatcttcttttggtaataaagggttttcattcggaattacaccacaaaacgatgccaacaaagtctcgcaatctaacccttcatttgggcaaacagtgcaaaacacagatccaaacataagtttgaagagcaatggtaacgcaacctcttttggatttggacaacaacagatgaatgctactaatgtcaacgctaatacg

SEQ ID NO: 166995 - DNA, 99 bp, Saccharomyces pastorianus
gtcttaggtgaactagaaagaagagctaaagctggcaagcgtttggctttcgtccatctagttgaacctcgtgtcaccaacccatttttaactgaaggt

SEQ ID NO: 166996 - DNA, 255 bp, Saccharomyces pastorianus
atatataattattatgagtgagtggattttgagataattattgggaattcattattgcttgagataatattattacttatacagaatacactagaagtgctcctcggggacatagagatccataaaaggaaatcgataattctacacattaatctgttttatttctttatctgttttacacgttttcattcattatcttattacaaaatcagcccttgcgcttcatgttccattatactcgcagactgtttctca

SEQ ID NO: 166997 - DNA, 450 bp, Saccharomyces pastorianus
actgaaagacattatctttgcaaaggttgtaaaaggagtatttcagaatcattgctgattcacacgggagaccacattagtaaattttttactctcgggctgaattcctcggcgaagctttgccttgccattttaggtgagaatacgtatttgcggtatcatattgtttttcttctcttccttaactcatttagaaagttcgataatgaacaaagcgctacacaaatatttgatcatggcaaagttaccgcgccaatcgccctgcgcattgtagtcgcctgctccttcagttcgtccgctggttgcggaatatttgaacgtcagttttcaacattgaaacatcagataatgttggtatcgtgtttaaatgatggacgcatctacgtcaccttaagtgcgtttttgcctgtgagatttttatttcattgtgtccacttgctattgtctggt

SEQ ID NO: 166998 - DNA, 117 bp, Saccharomyces pastorianus
aaaccatctggtctggggcttactgaggcatttgagtttatatccatttttttccctgatgttcagcaaaccgaaagaaatataaaatacaactgggaaagatgttttaatggtgag

SEQ ID NO: 166999 - DNA, 126 bp, Saccharomyces pastorianus
aacgtaaaacatgcatgtgaggcttaggtgatttttgagataattgttgggattccattgttgacaaaggctataatattaggtatacagaatatactagaagttctcctcgaggatctaggaatc

SEQ ID NO: 167000 - DNA, 426 bp, Saccharomyces pastorianus
gttgatgttactagtggtaagaaagctttagtcattttcgttccagtcccagctttgtctgcataccacaaggtccaaacaaagttgacccgtgaattggaaaagaagttcccagaccgtcattttattttcttggctgaaagaagaattttgccaaagccatctagaacatctagacaagtccaaaagagaccaagatccagaaccttgactgctgtccacgacaaggtcttggaagacatggttttcccaaccgaaattgtcggaaagagagttagatatttggtcggtggtaacaagatccaaaaggtcttattggactccaaggacgttcaacaaattgactacaaattggaatctttccaagctgtttacaacaagttgactggtaagcaaattgtctttgaaattccaagtcagactaac

SEQ ID NO: 167001 - DNA, 261 bp, Saccharomyces pastorianus
aacacaatcttttaaaagaagagaaatggtatttgtaaagcaagaattgtttttagaggtgatatccaaacaccagacacgtataatgttattggaacagaatccctgaaccataaccacattaaaatattttcaatgattgcaaacaacaggaacatgttcatgaaaacaccggatattaactatccgtccctttatgctaaattagaacaagacatatacattccacacccacatgacagaagatgcgttgctaaacta

SEQ ID NO: 167002 - DNA, 198 bp, Saccharomyces pastorianus
gatgtcaaaggtattaactatgttatcaactatgacatgccaggtaacattgaagattatgttcacagaattggtagaactggtagagcaggtgctactggtactgctgtttctttcttcacagaagaaaacaaaggtttaggtagcaagttgatttccatcatgaaagaagctaaccaaatcattccacccgaatta

SEQ ID NO: 167003 - DNA, 333 bp, Saccharomyces pastorianus
tcgatcatctttcttcccttctttccttggtatttttccgtcttttccttccatcttgcttctccgtagtactgggatttatagcttctcctttttttttctcttttcttttttactttccagtttgtggtaattttccagttttgctatttaaagtaaggttacctggtaccctcactaaaactcgtacggccgatccaccaaagaacaacaacacaatccttgacgagttgctgttttttcgaacggttggaacatttagttattttcggccaattgcacaaggcaacattcaggatatataaataacacggtagtctaaaaagggacgca

SEQ ID NO: 167004 - DNA, 231 bp, Saccharomyces pastorianus
aatgagactataacaaaaagaagagatagtttagctttttggatcgatatcaaagcttttcaaatttattctcatttttgtatttcgactgtcgtaccttgcacagaacgattggatatccataatgtcacaggcagccaaaaacgtaatagtgaagctgatagtaggagcaggtcaagcagcaccatcaccacccgtagggccggcgctgggttccaaaggtataaaagc

SEQ ID NO: 167005 - DNA, 93 bp, Saccharomyces pastorianus
aaaagttggaaaagcagaaagatgagtaagccaatatacttcagcaaatttttggtcactgaacaagtcttctacgtatgcatgctcgtgtat

SEQ ID NO: 167006 - DNA, 309 bp, Saccharomyces pastorianus
atgtagtccttccacgtttctgctacctttggggcatctctgtactgcaaaagcaaccatttcgaagcacttgcaatagactcttgagagtcttccaacgtatttaacttggtggtaaattgttcagacgaaaagggcatactggttgtatttggttcttgatatcggctttcttcagatttcctcacccttttgttaaaaaccttctgcgctcttgcttgggctattattctggcctttcaagtttatatttttttaaaggaaaaagataacaattttagttttcataattaggtagaaggtttacat

SEQ ID NO: 167007 - DNA, 279 bp, Saccharomyces pastorianus
actataatcagagagtcattagtctcgccggggaacgagatatctgcgagacaacatgcaggtttagctggaggggacattactactatactacctttcggtcaaccggttatagttaacaaccataatcccgactcgaaaatacatcctcgtggcattccaggttacgccttacatccgtcacgaaactcttatggctatattatctatcttccatcattaaaaaagacagtagatactgccaattacgttatattacaagacaaccaatccaaattg

SEQ ID NO: 167008 - DNA, 699 bp, Saccharomyces pastorianus
ttgctactgcctacgcatttcggtgccttaggtcccttgatatttgggctgaatttcgctcaaatgtttctggtaatcattttcttcgatcttatgggattgatatctgtagcgttcttttctgtttagaggtgcagaatctaggtctaagacagatggtcctttccagatacttagttggtaatgttgtcagcacgaatgttctcagttaatcaagtttatcgcttgtattgtttggggtattgtaaatactgtagcatgtttacaagtgatgtatactggtcaatccaggtaataagtgtcctatttgggacgtatgcattgttattatcggtgcaacatgtgattgtgacttttcttggtaataatgtcattaaatattatgagaaatgggagtgggtaccaaagtacgctgttttcttagtaatcatcgcgagtttgacaagatctggaaaatttgtcataggagtatgaacatagggcaatactactgcaaggaaatgggcatatcggtgggttgaacagtgttagggatatgttgtaggttggacaacgtacgccattgattacacatgtatataggcgaaggaagacaagtgaagtacaaaatatttatttactcagtagcaggtgtagcagctccagttgtatttcacaatgattcttgtgtctacagtagcaatgactggtgtcggtgat

SEQ ID NO: 167009 - DNA, 135 bp, Saccharomyces pastorianus
ttacaggttcaccaagaaccatatgttttcaacgctagaccagatggtgtccacgttatcaacgttggtaagacctgggaaaacttggtcttagccgctaaattatcgctgcattcaaacccagaagacttgttg

SEQ ID NO: 167010 - DNA, 666 bp, Saccharomyces pastorianus
caggttcaccaagaaccatatgttttcaacgcaagaccagatggtgtccacgttatcaacgttggtaagacctgggaaaaattggttttagccgctagaatcatcgctgccattccaaacccagaagacgttgttgccatctcttccagaactttcggtcaaagagctgtcttaaagttcgctgctcacactggtgctaccccaattgccggtagattcaccccaggttctttcaccaattacattacccgttctttcaaggaaccaagattagttatcgtcaccgacccaagatcagacgctcaagccatcaaggaagcttcttacgttaacatcccagtcattgccctaactgacttggactccccatcagaatacgtcgatgtcgctatcccatgtaacaacagaggtaagcactccatcggtttaatttggtacttattggccagagaagtcttgagactaagaggcgctctagtcgacagaacccaaccatggtctatcatgccagatttgtacttctacagagaccctgaagaagttgaacaagtcgctgaagaagccgccaccgaagaagctggtgaagaagaagccaaggaagaggttactgaagaacaagctgaggccactgaatgggctgaagaaaacgccgacaacgtcgaatgg

SEQ ID NO: 167011 - DNA, 225 bp, Saccharomyces pastorianus
atcttcggcccgcccgacaaatttcctgggctgtcattggcccgctgaagtatcggcgcagcatgcgcttggaactaccgggaattacagcacatacaattgggaaatctggcaaaaaaaaaaccttgttctagaacttggcgattgctgacaaagaaggaaagggcctattgttgttgcctcttttgttgttcctcttattgttctttgagtgctgttatttgt

SEQ ID NO: 167012 - DNA, 420 bp, Saccharomyces pastorianus
caagtgtcacaaattagtggcgccgtgtcctacccgcacgcctcgtcgcacgcgatacactgttaatcacccgccttttgccgcctgtttttttcgccgttcgtttatttagcggtgggcaaacaaacaacacagtgtttattgctggtgaccactgttaaggaaggtttgttttgggtcgtgttttgtacttgtttctgctcaattgactagcacacacacattaccacacacatacaatggctgccccaagagaacctaagaagagaaccactagaaagaagaaggacccaaacgcccccaaaagggctttgtccgcctatatgtttttcgctaacgaaaacagagacattgttcgttctgaaaatccagatatcacgtttggacaggtcggtaagaagcttggtgagaagtggaagg

SEQ ID NO: 167013 - DNA, 684 bp, Saccharomyces pastorianus
atgtccgaatatgcatccagtatccattctcaaatgaaacaatttgataccgtatgtaacctacacacgttttttatgcgttcctcggtagtacagataccaaaatgactcgggaaacgtgattatcgcaacttatactaacatcatggccacttttctctcattgcccttttttccttacagaaatactccggtaacagatttttacaacaattggaaaacaaaaccaacttaccaaaatcttatttgattgccggtttaggttttgcttatcttcttttgatttttatcaatgtcggaggtatcggtgaaatcctctccaaccttgctgggttcgtattgccaacatacctatccttggttgccttgaagaccacaactgccaatgatgacacgcaattgttgacatattggattgtcttctcgtttttgagcgtcattgaattctggtctaaggcaatcttatatttgattccattttattggtttttgaagactgttttcttactctacattgccttaccccaaactggcggtgctagaatgatctaccaaaaaattgttgctccattgactgacagatatattttgagagacgttagcaagactgaaaaggacgaaattagagcctctgttaacgaagcttcaagatccggatcaaagactacaggttcttctgtccat

SEQ ID NO: 167014 - DNA, 177 bp, Saccharomyces pastorianus
agctgcgtggagtcgcgccttccgtatcttgtgctttgcattctgtgcatacgtaaggaataagcaacaccttctggttagaagacaaatttcttttttatccttcatttttttttatcatcaaatgaaaatcctccctacgagatttctggtcgctcttcagtccccgaagtgaga

SEQ ID NO: 167015 - DNA, 390 bp, Saccharomyces pastorianus
atgacatatcttaagatggcattagcatcaaacaaagtaaattgttcctttgcgtgatgcaattccatagatgtgttctcatcatcgatttcaagctttaaacctttgcttgcaaattctagcgccaaggcaaccttcaaattattggccaactgcaaatgagcaggatgactctttgatttatcaaaggagatttgtaaagacatgattagtctgaaaatttcctctttttttgttgtatctctccactaagctacgtatttccaagcaaatcatcgatataatagtcatagccattttttttcttcttttgctctcgataaactggatatagcaattttttttctgcctctcaaaaatcttcccgtcttacgtgacattgcagaaaag

SEQ ID NO: 167016 - DNA, 186 bp, Saccharomyces pastorianus
atggatgcaaacgcgcttgatgtatcatttaaagacattttaatgggtaagaaactggatgaagactctgtcggattaactttgtccgacaagtcagacaataagagtgaatcccatacatcttctacaaatgacaaaaatgaatcagcagtcgaaggagaagatgaagaggatgacttctttgaa

SEQ ID NO: 167017 - DNA, 348 bp, Saccharomyces pastorianus
ttgaatgataaactaagagaaaacttaagtaacagtgatagtacaaaggcgaaggacaaagtgaaactggtatcagaagaagagttagagtcttcactcgcagacaaaacaaaagccattaaagatgcccctgtcgtaatagagtacgataccacagttattgatgacgacatcatagaagatggcgaattggctgcactaagagagctaagcatagaaaaaaggataaccaaattaaatgttcttctgcgatctgaaaaatattactgtttcttttgtggggtacggtacaaggatgaaggcgatctttacgagcattgtcccggtacaaatgaagaggaccatgaa

SEQ ID NO: 167018 - DNA, 228 bp, Saccharomyces pastorianus
cgaagtcacatattccgacaaattcaatcgcacgttctattattagtgcaacagagttcgtttttaatttatattgctagtagtgtccatttaaattgtacaatgatctttgggatttcattgtttcttaatgttataatattatgtatatagattatactagagattctcctcgtggatttaggaatccacaaaaaggaatcagtaattttgcataatattataaat

SEQ ID NO: 167019 - DNA, 285 bp, Saccharomyces pastorianus
atgactacagaggtaatgacccaacagaattctaaatcatatttgaacaagcacgctaactggatagttaaagggctaacggactgctcgaaaaggctaacaagtttatgcagtggtgtacacaccctcttaaagttcagcgataaacatttctatcaaaaattagcgggtatcctgttcgatgtggtcaaatgcgctaaggaattggttaaatgcgtggaaaaggcgagtggccgcgtagcgctgtagaacttttcatcgtcactagttaatataaagaagata

SEQ ID NO: 167020 - DNA, 432 bp, Saccharomyces pastorianus
atgggtcgacaaagacgctcacgatggggaaccgttgccctgccgcagccatgttcgttgacagcgccgatgcccgtgctagctcaactcgtacttcccccatgtcgatcttatagtcgttcaatatctggtcgttggggttgccgttccagatcagcggccaatactttgcagaccatgcactgttcagctcctttgtgctaggcgcaaactctggtacttcgatcacgtcctttacctcgtacttttctgctgtgggccaagcactcttcagcttaagatctatctcatccttttcataaatgtactctttggaacacaacactacttccaatgtggagctctccacattcttgcggatccttttcagatgcttcagtgaaacagggtcatttatctggaaatcgttccgaattagcctactctactagt

SEQ ID NO: 167021 - DNA, 285 bp, Saccharomyces pastorianus
  modified_base (16)..(16): a, c, g, t, unknown, or other
tgtgaaggcgttaaantggtcttggtggcgctgaaatgcgatttgagaaacaatgaaaacgaatcgaacgctatcacaccgaacaatatccaacaacaggacatcaacgtttccagtggcaacaacaacaacataaacagtaactctaatgctaagaatctaataagctatgaagaaggccttgccatggctaagaaaattggtgcattgcgttatttggagtgtagtgcaaaattaaataaaggtgttaatgaagcattcacggaagcagcaagagttgcttta

SEQ ID NO: 167022 - DNA, 201 bp, Saccharomyces pastorianus
tttctcaagtctcaattcgtcaaagtgatatttcattgtactgggtccaagaataggggaccaaaagtagctgctaaattcgaaacctacttacaagaagaagatattacaagtaagtttgagagttgcatcctcgttggaggtttttacgcttgggagacccattgtagagagagtaaccttaaattgattgttagtggt

SEQ ID NO: 167023 - DNA, 231 bp, Saccharomyces pastorianus
aaaataagagagctgcgcaacttagagcatcccaaaacgccatttagaaaacgaaagttggaaagatttgaagaactagagaagaaagaagctcagctaacggttaccaatgatccaattcccatatttaagaaggaaaatgaacttctccattttatgttgaggagtcttttcactgagaggaacatgccttctgatgaacgggacattagttaggcgtgttgttgagaa

SEQ ID NO: 167024 - DNA, 237 bp, Saccharomyces pastorianus
ttatatatattcgtgccaattcctcacaatacacttccacgaccttcgacagagatccaaatgacaataagttgaaagccagaatgcaatggaaaaaaaaaaatgtaggaccacgttgaaccaaatgatcaatacagccaaagaaactaccctagtagtgtgtatgctgacctggtaccaactcgaaatttcgtgagctttgcgcttggaaaggtcgacaaaagtggtcttcaaaaa

SEQ ID NO: 167025 - DNA, 645 bp, Saccharomyces pastorianus
attggattaatcgcgtatatgccagcgaatgtattaactgcatacttgacattggtattaaagagtattggctttaaaactctgcaagttaacttacttgctatacctcaatatgcactccatatagttctattactcggtattacctatttgacggagaggctaaacaacagattaggactatgtcttttgcagcctttgtatactgtaccgttactagccatcttgcgtttttggaaaggaactatggttgataaatggggaacatatattatcattacattgctcttgggaaatccatatatacatgctatttgtgtttcgatgtgttccaggaattcacactcaataaaaacaagaacagtctctgcttcattatacaacatgtttgttcaagccggtctgataatatcttcgaacatttaccaacaaagtgataaaccgctatatcgcaagggtaattcggttttgtttggcctttctctcgccatgtttcctttattgattggaagtaagtttttctatatacatatcaaccgtaagagagataaaatttggaacgcaatgtctgaagaagaaagggagcattatatgaatgtaactacggatacaggttcacgtagattagactttaggtttactcat

SEQ ID NO: 167026 - DNA, 333 bp, Saccharomyces pastorianus
cataccatatatcattaccctacctcaatatcacataccatcactctctctaccccataccatatatcattaccctacctcaatatcacataccatcactctctaccccataccatataccattaccctacctcaataccacaccatacatctttaccctgatctactatcaataccatatatcattaccctactttaataccatataccatcattccgtatcccataccatatatcattaccatcactctctctaccccatacaatatatcattaccctaccatcaatatcacataccatcaccctctccatcacataccattaccctacct

SEQ ID NO: 167027 - DNA, 1041 bp, Saccharomyces pastorianus
gtgaactttaatacaccacaacaaaacaagcaacccttttcgttcggtactgcaaataatggcgctaatgccaccacccaaaataactctggtacaggagcctttggaacaggccaacctgcatttagttttaatagtgcagcaaccaataattcgagtaatcaaaacacttcaaccacacccgcatttggcagtagctctggcaccaacgcattcggtagcaacaatgcgggcgccaatacattcggtaatagcaaccctacggcaaacacatttggcagcaataattcgacaactaatgcgttcggtagcaacaataccggaacatctcttttcggctcttctggtgctacacagacaaaaggcgaaggaaataccggaactaatacattcggttcctcatccttattcaataccaatactaatggtaatgccacgaaaccggcttttggcggtttgaattttggcggcaatagtaacacaactcctgcttccactaacaacgctgccccaagcaacagcttatttggtaacaccgcaaatgcaaacaaacctgccttttcttttggtgcaaactctaacgacaaaaaggaaccggaaccatctaaaactgctttctcctttaactcaaatttaggcaacaaggcagaaggccaagctccttctccgggagtttcccaaggtacacagttaggtgggaatggagctggcagcgaacctgccaagccagcattttcctttggttcgcaattgaatgacagtaaaccagcggtagattctcagccaacgctctcctttggcaccaaacctgcagagacaaaggctaatgacacagcaaagccggcattttcctttggtgctacaacggcggaaaacaagacgactaacataacgccaagtctttcatttggcaccaagcctgccgaaaataatgatggggaagcttctaaacctgcgttctcattcggcgctaagcttggtgaaaagaaggatagtgacgcttctaagcctgcattctccttcggtgctaagccagaagaa

SEQ ID NO: 167028 - DNA, 297 bp, Saccharomyces pastorianus
tacaagatgcaaggatcttatttccggccgtgtccgctttttaaccgccgaaggcgaaccaccggaccaatgaaacgcgagagcgcacaaaaagtggggccgctccgaatgcgcgcgttctcattggctgggcgctcggggccgaggctcggtgtgccttttagctgcatttagttgccccatgacaaagcaaaaactggcaggttccctcgaatcaaatacacgtcaattacaaatccacggattaagtcgattctcgttcgttcttgttccttatttctcgttgcttgtgttctg

SEQ ID NO: 167029 - DNA, 78 bp, Saccharomyces pastorianus
aaataatataaagcctttattatgtgtggtttcaaattctattttaccgacttggactgcgacgaaacatttagctat

SEQ ID NO: 167030 - DNA, 234 bp, Saccharomyces pastorianus
gccctttctgaactattcagatgccttaattgtactgactgttggtgtcttatttatttggagagcctcgatcaacctcgcccgatcgccatatttggtgacggatccccaaggaatcgtgtcatcttcggagaacaatagtcatatctagttttaccaggtgcttcaactgctttaactggtaccctatatatttactggggacaagattttggtaaaactgatttcaaaaac

SEQ ID NO: 167031 - DNA, 105 bp, Saccharomyces pastorianus
ctcgaagaatacggggatgttgagataagaagccactatgctataagtaagaaggcctacgatgagatgaagaaacgcttaggggctgccgcactgttctcccag

SEQ ID NO: 167032 - DNA, 570 bp, Saccharomyces pastorianus
ttcgcggctcctccaagacgataaggatatggtatctccaactacgaaaaagtttgccccacatatggtaccaacaagaactgtctcaagccaatcgaaaagactcacaagcttagtatgaaatttattaccgatttgctcatcaaccactgctctacagaacacaagtgattcaaggagagtacgttttctaagaccaatccaaagcgtgattggttcttttacaagccaccaaaaggttacgatgagaatggtaagccccttcctcctttagtggtccagcttggacttttgatgaaactaaaaatgaactatacctacgtttatttgcaagttgtaaagtcgaattgggtagatgcatattgcagaaaggcaatctgtgaaagtgctattgggttttggttaaaccacggagtagatggttttagaattgacaacgcgggtttatatttgaaacttcctggcttaccagactcaccaatttttggcaaaacctcaaacttgtagcatcctaattgagagtctcataatggccctagaatccgcaagtagcaccgagagctacacaag

SEQ ID NO: 167033 - DNA, 168 bp, Saccharomyces pastorianus
atgaagggcttgtccttattaataaacagaaaaaaagataataatgacttgaatttagatgagatcgagaatgttataagtgctactggatttagctgaatagagacggaggagcaagataagaaagccgattttgagtacggtccagaaacacgaatcgataatgat

SEQ ID NO: 167034 - DNA, 171 bp, Saccharomyces pastorianus
ttgcccgaaagtgccgatagaactttcattgaagtagataaactatttagacttggtgtgtaagtaaggaagctcaagtcaacaaaagtggacccatttgccatcaaagcaaatactggaaatgtcacccataaggatcctaaggaagatgtggaaggttccaccgaggag

SEQ ID NO: 167035 - DNA, 297 bp, Saccharomyces pastorianus
ctaattacgtatagcgtttttcttttttttttcagcctgaagccggttctaccagaaaagagtgctcgcgctttcttcttccgctcatttccattgtggtacctgacgtttggagaaaacggcgcagcagctgataacagcccctctccgttgattggccgcgggaccgcaccgtttctttttcgttgccccaccgcactcaaaatacgtgggccggttccggcgccctagcttcacgataagcagatcgaggccgtccaatgggatcgaaagataaggttatgccagatcaggccc

SEQ ID NO: 167036 - DNA, 375 bp, Saccharomyces pastorianus
acaaaacttttactggaggtaataacacgtaaaccagcagtaaaagggaaggaatggagaactatcacatacaacatgaatcaatatttgtttgacaatggattatgggataccccatactatttctacagtgaaaacaattgttaccgctattttataaaccttattgaaagaaaacatctatattcacaatcagacaccacggctatcggtgcacagtgggatgtgctagaaagtgaaacctcggaagatgcacctaaatcgtatgtctctagttccaagtcggatctggaaagatgtcgtttccaagcagctttacttgaaagacaggcgcaacgtgaatattggagaaaacattatccagatgctggtata

SEQ ID NO: 167037 - DNA, 585 bp, Saccharomyces pastorianus
gaccaaactgttaaggtttgggacttccacaacggctggtcgctgaaatcatttcagccgcattcccaatgggtacgctccatagacgttctaggcgactatatcatctccgggtctcacgacactacattaagattgacacactggccgtcaggtaatggtctcagcgtgggcacagggcacgagtttcccatagagaaagtgaagtttattcatttcattgaggacccggcaaacgtaagattcagaaccccatcaacaacccaatacgagaactggggggttcaatattgcgtttctgcgtcaagagatagaacgataaaaatttgggaaatacctctgcccagattaatggctcatagagcccccataccgaatcccacagattcgaattttaaatgccttttaacgctaaagggccatctttcatgggttagagacattttcatccgtggtcagtatctgttttcttgtggtgatgataaatctgttaggtgttgggatttaaacactgggcaatgtttacatacttggaacgatttgcattcagggtttattaattgtctggatatggatgtagactac

SEQ ID NO: 167038 - DNA, 285 bp, Saccharomyces pastorianus
aatgaagaacccattattccctctgtggacgagcatggcctgaaagtatgtaagttgcgcagtcctaacactccacgaagactcagaaaaacactagatgccgtgaaagctttattggtgtcgtcttgtgcttgtaccgcaagggatttagatatatttgatgacaacaacggcgttgcaatgtggaaatggatcaaaattctgtaccacgaagtagcgcaggaaaccacgctgaaggactcttatagaataactttggtaccttcttctgatggtatatcagta

SEQ ID NO: 167039 - DNA, 123 bp, Saccharomyces pastorianus
tctgatggtatatcagtatgtggaaaactttttaatcgcgagtatgtccgcggcttttactttgcatgcaaggctcagtttgataacctttggggagagttgaacaactgcttttatatgcct

SEQ ID NO: 167040 - DNA, 114 bp, Saccharomyces pastorianus
tccgagcgctggattcaatggttaggccttgaaagcgactaccattgttcattctctagtactcggaatgcggaagacgtagtggcaggtgaggcggcgagttcagatcatgat

SEQ ID NO: 167041 - DNA, 705 bp, Saccharomyces pastorianus
ttttcgggaatgcgtcaggggtgaattgccgtaggacggcactgcgtaggtagcagatttgaaacagatttgtacgagtcggccgacgagtgaactcatggccaatcattccgttcaaacagggcgcaacgtatacggtgacgattcaacgataactagtgtcagtgggacgacgccagacgattgcaggaacgagcttccgagcgctggattcaatggttaggccttgaaagcgactaccattgttcattctccagtactcggaatgcggaagacgtagtggcaggtgaggcggcgagttcagatcatgatcaaaaaatttcaagagtaacgcgaaaaaggccccgagagcccaagagtacaaacgatatcctcgtcgcaggccagaaactctttggcagctcctttgaattcagggacttgcatcagttgcgcttatgtcatgaaatatacatggcagacacaccctctgtggcagtacaggccccaccgggctatggtaagacggagttatttcatctccccttgatagcactggcgtctaagggcgacgtgaaatatgtgtcgtttctgtttgtaccgtacacagtgttgcttgctaattgcatgatcaggttgggccgacgcggttgcttgaatgtggcccctgtaagaaactttattgaagaaggttacgatggcgttactgatttatacgtggggatc

SEQ ID NO: 167042 - DNA, 219 bp, Saccharomyces pastorianus
gtggggtgccaaattgtacccatatccccttatggtgcttttctgaagactccttacaataggtgcgccagaaaccaagtcagtgaaagtacgcatcggagagctgtcgttcggcctgccactcgctatttcgtgaccacgtcccaggacacggaaaactcactcattatagtatcctctgttgaggtaccaaagagaaagggtatcgtcactctttcc

SEQ ID NO: 167043 - DNA, 25 bp, Saccharomyces pastorianus
gtgccactgatattgcttatcttac

SEQ ID NO: 167044 - DNA, 25 bp, Saccharomyces pastorianus
acgcccagcatcattgatgttacat

SEQ ID NO: 167045 - DNA, 25 bp, Saccharomyces pastorianus
aaatggcaaacaacgcccagcatca

SEQ ID NO: 167046 - DNA, 25 bp, Saccharomyces pastorianus
cacgtgctcgttacaaaatacactg

SEQ ID NO: 167047 - DNA, 25 bp, Saccharomyces pastorianus
cgccctgtaaatcacgtgctcgtta

SEQ ID NO: 167048 - DNA, 25 bp, Saccharomyces pastorianus
gatgttacatatactatgcacgttt

SEQ ID NO: 167049 - DNA, 25 bp, Saccharomyces pastorianus
atttctgcgccctgtaaatcacgtg

SEQ ID NO: 167050 - DNA, 25 bp, Saccharomyces pastorianus
attttcaacatttctgcgccctgta

SEQ ID NO: 167051 - DNA, 25 bp, Saccharomyces pastorianus
aaatacactgccatagtaaatacaa

SEQ ID NO: 167052 - DNA, 25 bp, Saccharomyces pastorianus
atattgcttatcttacttttttcta

SEQ ID NO: 167053 - DNA, 25 bp, Saccharomyces pastorianus
aaacaacgcccagcatcattgatgt

SEQ ID NO: 167054 - DNA, 25 bp, Saccharomyces pastorianus
aagtttgacttcttcatctccaact

SEQ ID NO: 167055 - DNA, 25 bp, Saccharomyces pastorianus
ttggcttccacttctccaagttcaa

SEQ ID NO: 167056 - DNA, 25 bp, Saccharomyces pastorianus
ttactgattcaacttcatcccttgg

SEQ ID NO: 167057 - DNA, 25 bp, Saccharomyces pastorianus
ttagctctacttttactgattcaac

SEQ ID NO: 167058 - DNA, 25 bp, Saccharomyces pastorianus
aacatctacctcatcaagttctaaa

SEQ ID NO: 167059 - DNA, 25 bp, Saccharomyces pastorianus
tggctcctctatggcatcttcatca

SEQ ID NO: 167060 - DNA, 25 bp, Saccharomyces pastorianus
atcttcaagttctacatctacctcc

SEQ ID NO: 167061 - DNA, 25 bp, Saccharomyces pastorianus
ccaagttcaacatctattagctcta

SEQ ID NO: 167062 - DNA, 25 bp, Saccharomyces pastorianus
tctacctccctaagttctacatcta

SEQ ID NO: 167063 - DNA, 25 bp, Saccharomyces pastorianus
atctacatccctaagttctacatct

SEQ ID NO: 167064 - DNA, 25 bp, Saccharomyces pastorianus
ttcaagttcagcatctacatcccta

SEQ ID NO: 167065 - DNA, 25 bp, Saccharomyces pastorianus
gcaaccctatctacagttactacgt

SEQ ID NO: 167066 - DNA, 25 bp, Saccharomyces pastorianus
ggtagttggctacagcacgtctgtc

SEQ ID NO: 167067 - DNA, 25 bp, Saccharomyces pastorianus
ttccacttattccacagctgttgat

SEQ ID NO: 167068 - DNA, 25 bp, Saccharomyces pastorianus
acactagcttagttccagtttccac

SEQ ID NO: 167069 - DNA, 25 bp, Saccharomyces pastorianus
tactagcttagttccagtttccact

SEQ ID NO: 167070 - DNA, 25 bp, Saccharomyces pastorianus
agttggctatagtacatctgtcggt

SEQ ID NO: 167071 - DNA, 25 bp, Saccharomyces pastorianus
gtttgtaccacatgtactgccactt

SEQ ID NO: 167072 - DNA, 25 bp, Saccharomyces pastorianus
gggcttaaagtgtctacttccacag

SEQ ID NO: 167073 - DNA, 25 bp, Saccharomyces pastorianus
acgtctgtcggtgatgctcaatatg

SEQ ID NO: 167074 - DNA, 25 bp, Saccharomyces pastorianus
gtggtattcatcctcaacagccaag

SEQ ID NO: 167075 - DNA, 25 bp, Saccharomyces pastorianus
ccaagccacctacgatttcaattta

SEQ ID NO: 167076 - DNA, 25 bp, Saccharomyces pastorianus
gctttcgttccaaacgatggttgtt

SEQ ID NO: 167077 - DNA, 25 bp, Saccharomyces pastorianus
aggtcgttaaggtctctggtgtctc

SEQ ID NO: 167078 - DNA, 25 bp, Saccharomyces pastorianus
actgctttcgttccaaacgatggtt

SEQ ID NO: 167079 - DNA, 25 bp, Saccharomyces pastorianus
gtcgttaaggtctctggtgtctcct

SEQ ID NO: 167080 - DNA, 25 bp, Saccharomyces pastorianus
taagggtgatattccaggtgttaga

SEQ ID NO: 167081 - DNA, 25 bp, Saccharomyces pastorianus
taaggtctctggtgtctccttgttg

SEQ ID NO: 167082 - DNA, 25 bp, Saccharomyces pastorianus
tccaggtgttagattcaaggtcgtt

SEQ ID NO: 167083 - DNA, 25 bp, Saccharomyces pastorianus
aggtctctggtgtctccttgttggc

SEQ ID NO: 167084 - DNA, 25 bp, Saccharomyces pastorianus
gattcaaggtcgttaaggtctctgg

SEQ ID NO: 167085 - DNA, 25 bp, Saccharomyces pastorianus
caaggtcgttaaggtctctggtgtc

SEQ ID NO: 167086 - DNA, 25 bp, Saccharomyces pastorianus
gttccaaacgatggttgtttgaact

SEQ ID NO: 167087 - DNA, 25 bp, Saccharomyces pastorianus
ggatatattactaatctccatcatt

SEQ ID NO: 167088 - DNA, 25 bp, Saccharomyces pastorianus
ttactaatctccatcattaaaaaga

SEQ ID NO: 167089 - DNA, 25 bp, Saccharomyces pastorianus
gccttcatccgtcacgaaatcttat

SEQ ID NO: 167090 - DNA, 25 bp, Saccharomyces pastorianus
ataacatacgttattccagacagca

SEQ ID NO: 167091 - DNA, 25 bp, Saccharomyces pastorianus
tatattactaatctccatcattaaa

SEQ ID NO: 167092 - DNA, 25 bp, Saccharomyces pastorianus
gtcacgaaatcttatggatatatta

SEQ ID NO: 167093 - DNA, 25 bp, Saccharomyces pastorianus
taacatacgttattccagacagcat

SEQ ID NO: 167094 - DNA, 25 bp, Saccharomyces pastorianus
ccttcatccgtcacgaaatcttatg

SEQ ID NO: 167095 - DNA, 25 bp, Saccharomyces pastorianus
gatatattactaatctccatcatta

SEQ ID NO: 167096 - DNA, 25 bp, Saccharomyces pastorianus
ccgtcacgaaatcttatggatatat

SEQ ID NO: 167097 - DNA, 25 bp, Saccharomyces pastorianus
aacatacgttattccagacagcatc

SEQ ID NO: 167098 - DNA, 25 bp, Saccharomyces pastorianus
gtaagcacactcaacacaaggttac

SEQ ID NO: 167099 - DNA, 25 bp, Saccharomyces pastorianus
gtcgtaagcacactcaacacaaggt

SEQ ID NO: 167100 - DNA, 25 bp, Saccharomyces pastorianus
accaagcctgttttccacaagaaag

SEQ ID NO: 167101 - DNA, 25 bp, Saccharomyces pastorianus
tcaaaccaagcctgttttccacaag

SEQ ID NO: 167102 - DNA, 25 bp, Saccharomyces pastorianus
acaaagctggtaaggcttccttgtt

SEQ ID NO: 167103 - DNA, 25 bp, Saccharomyces pastorianus
gtttcggtggtcaaaccaagcctgt

SEQ ID NO: 167104 - DNA, 25 bp, Saccharomyces pastorianus
agactaccaagaaggttgttttgag

SEQ ID NO: 167105 - DNA, 25 bp, Saccharomyces pastorianus
gtaagagacgttatgaccgtaaaca

SEQ ID NO: 167106 - DNA, 25 bp, Saccharomyces pastorianus
gtggtcaaaccaagcctgttttcca

SEQ ID NO: 167107 - DNA, 25 bp, Saccharomyces pastorianus
cctgtcgtaagcacactcaacacaa

SEQ ID NO: 167108 - DNA, 25 bp, Saccharomyces pastorianus
ggttgttttgagattggaatgtgtc

SEQ ID NO: 167109 - DNA, 25 bp, Saccharomyces pastorianus
agcaaccaaattcccggcaacaaca

SEQ ID NO: 167110 - DNA, 25 bp, Saccharomyces pastorianus
agcaacaactgtcccaagcacagca

SEQ ID NO: 167111 - DNA, 25 bp, Saccharomyces pastorianus
aacatccacaacaacatatgcaaat

SEQ ID NO: 167112 - DNA, 25 bp, Saccharomyces pastorianus
agaggtaccaacaagaacaggaaga

SEQ ID NO: 167113 - DNA, 25 bp, Saccharomyces pastorianus
aacaggaagacgtccaagtgcagca

SEQ ID NO: 167114 - DNA, 25 bp, Saccharomyces pastorianus
aagcacagcaaccaaattcccggca

SEQ ID NO: 167115 - DNA, 25 bp, Saccharomyces pastorianus
gaagacgtccaagtgcagcaacaac

SEQ ID NO: 167116 - DNA, 25 bp, Saccharomyces pastorianus
aagtgcagcaacaactgtcccaagc

SEQ ID NO: 167117 - DNA, 25 bp, Saccharomyces pastorianus
aggaagacgtccaagtgcagcaaca

SEQ ID NO: 167118 - DNA, 25 bp, Saccharomyces pastorianus
gacgtccaagtgcagcaacaactgt

SEQ ID NO: 167119 - DNA, 25 bp, Saccharomyces pastorianus
gcaacaacttcaataccagcagcag

SEQ ID NO: 167120 - DNA, 25 bp, Saccharomyces pastorianus
agatgtctacggcatcgaaaagacg

SEQ ID NO: 167121 - DNA, 25 bp, Saccharomyces pastorianus
gaaaagacgtataaatgcatctgag

SEQ ID NO: 167122 - DNA, 25 bp, Saccharomyces pastorianus
aaaagatgtctacggcatcgaaaag

SEQ ID NO: 167123 - DNA, 25 bp, Saccharomyces pastorianus
gtctacggcatcgaaaagacgtata

SEQ ID NO: 167124 - DNA, 25 bp, Saccharomyces pastorianus
atgtctacggcatcgaaaagacgta

SEQ ID NO: 167125 - DNA, 25 bp, Saccharomyces pastorianus
acggcatcgaaaagacgtataaatg

SEQ ID NO: 167126 - DNA, 25 bp, Saccharomyces pastorianus
tctacggcatcgaaaagacgtataa

SEQ ID NO: 167127 - DNA, 25 bp, Saccharomyces pastorianus
tgtctacggcatcgaaaagacgtat

SEQ ID NO: 167128 - DNA, 25 bp, Saccharomyces pastorianus
tcgaaaagacgtataaatgcatctg

SEQ ID NO: 167129 - DNA, 25 bp, Saccharomyces pastorianus
ctacggcatcgaaaagacgtataaa

SEQ ID NO: 167130 - DNA, 25 bp, Saccharomyces pastorianus
gatgtctacggcatcgaaaagacgt

SEQ ID NO: 167131 - DNA, 25 bp, Saccharomyces pastorianus
aggttgtatctctaacaaaaagatt

SEQ ID NO: 167132 - DNA, 25 bp, Saccharomyces pastorianus
tctaaaaagacaaagcacccctact

SEQ ID NO: 167133 - DNA, 25 bp, Saccharomyces pastorianus
tcccaaaggtgcgtttttgtagcgg

SEQ ID NO: 167134 - DNA, 25 bp, Saccharomyces pastorianus
gttgtatctctaacaaaaagattcc

SEQ ID NO: 167135 - DNA, 25 bp, Saccharomyces pastorianus
tatctctaacaaaaagattcctttc

SEQ ID NO: 167136 - DNA, 25 bp, Saccharomyces pastorianus
ttgtagcgggaagggtgcttctaaa

SEQ ID NO: 167137 - DNA, 25 bp, Saccharomyces pastorianus
tagcgggaagggtgcttctaaaaag

SEQ ID NO: 167138 - DNA, 25 bp, Saccharomyces pastorianus
gtatctctaacaaaaagattccttt

SEQ ID NO: 167139 - DNA, 25 bp, Saccharomyces pastorianus
taaaaagacaaagcacccctactgc

SEQ ID NO: 167140 - DNA, 25 bp, Saccharomyces pastorianus
tttttgtagcgggaagggtgcttct

SEQ ID NO: 167141 - DNA, 25 bp, Saccharomyces pastorianus
ctaaaaagacaaagcacccctactg

SEQ ID NO: 167142 - DNA, 25 bp, Saccharomyces pastorianus
agcacaaatgacagaccttatagta

SEQ ID NO: 167143 - DNA, 25 bp, Saccharomyces pastorianus
gatagagcacaaatgacagacctta

SEQ ID NO: 167144 - DNA, 25 bp, Saccharomyces pastorianus
gcctgcaggtctttgagattctgta

SEQ ID NO: 167145 - DNA, 25 bp, Saccharomyces pastorianus
ggatagagcacaaatgacagacctt

SEQ ID NO: 167146 - DNA, 25 bp, Saccharomyces pastorianus
gagcacaaatgacagaccttatagt

SEQ ID NO: 167147 - DNA, 25 bp, Saccharomyces pastorianus
gcaggtctttgagattctgtatata

SEQ ID NO: 167148 - DNA, 25 bp, Saccharomyces pastorianus
cctgcaggtctttgagattctgtat

SEQ ID NO: 167149 - DNA, 25 bp, Saccharomyces pastorianus
tgcctgcaggtctttgagattctgt

SEQ ID NO: 167150 - DNA, 25 bp, Saccharomyces pastorianus
tagagcacaaatgacagaccttata

SEQ ID NO: 167151 - DNA, 25 bp, Saccharomyces pastorianus
ctgcaggtctttgagattctgtata

SEQ ID NO: 167152 - DNA, 25 bp, Saccharomyces pastorianus
ggtctttgagattctgtatataaat

SEQ ID NO: 167153 - DNA, 25 bp, Saccharomyces pastorianus
aatcaactctggtacattcgtcaaa

SEQ ID NO: 167154 - DNA, 25 bp, Saccharomyces pastorianus
tcctactctactattagacaattgg

SEQ ID NO: 167155 - DNA, 25 bp, Saccharomyces pastorianus
caaggctactttggaactattgaag

SEQ ID NO: 167156 - DNA, 25 bp, Saccharomyces pastorianus
attcgtcaaagttaccaaggctact

SEQ ID NO: 167157 - DNA, 25 bp, Saccharomyces pastorianus
gggtaagtatggtatcttgtccatt

SEQ ID NO: 167158 - DNA, 25 bp, Saccharomyces pastorianus
gtccgacaatgctatcatcgaagcc

SEQ ID NO: 167159 - DNA, 25 bp, Saccharomyces pastorianus
catcgaagccaacttgggtaagtat

SEQ ID NO: 167160 - DNA, 25 bp, Saccharomyces pastorianus
atggtatcttgtccattgacgattt

SEQ ID NO: 167161 - DNA, 25 bp, Saccharomyces pastorianus
caacacaagttggtcttcgttgtca

SEQ ID NO: 167162 - DNA, 25 bp, Saccharomyces pastorianus
caagttggtcttcgttgtcagaatc

SEQ ID NO: 167163 - DNA, 25 bp, Saccharomyces pastorianus
ctactacgtcgaagctcaacacaag

SEQ ID NO: 167164 - DNA, 25 bp, Saccharomyces pastorianus
ttggcagatattcaggtatataaac

SEQ ID NO: 167165 - DNA, 25 bp, Saccharomyces pastorianus
cattggcagatattcaggtatataa

SEQ ID NO: 167166 - DNA, 25 bp, Saccharomyces pastorianus
ccattggcagatattcaggtatata

SEQ ID NO: 167167 - DNA, 25 bp, Saccharomyces pastorianus
atggccgcgcaaaatccattggcag

SEQ ID NO: 167168 - DNA, 25 bp, Saccharomyces pastorianus
tattcaggtatataaacgttacaaa

SEQ ID NO: 167169 - DNA, 25 bp, Saccharomyces pastorianus
ccgcgcaaaatccattggcagatat

SEQ ID NO: 167170 - DNA, 25 bp, Saccharomyces pastorianus
gccgcgcaaaatccattggcagata

SEQ ID NO: 167171 - DNA, 25 bp, Saccharomyces pastorianus
tggccgcgcaaaatccattggcaga

SEQ ID NO: 167172 - DNA, 25 bp, Saccharomyces pastorianus
gatattcaggtatataaacgttaca

SEQ ID NO: 167173 - DNA, 25 bp, Saccharomyces pastorianus
gcagatattcaggtatataaacgtt

SEQ ID NO: 167174 - DNA, 25 bp, Saccharomyces pastorianus
ggccgcgcaaaatccattggcagat

SEQ ID NO: 167175 - DNA, 25 bp, Saccharomyces pastorianus
tgatcactttccttgctgcttctgt

SEQ ID NO: 167176 - DNA, 25 bp, Saccharomyces pastorianus
tacggtacaccatggactcaagaat

SEQ ID NO: 167177 - DNA, 25 bp, Saccharomyces pastorianus
ccaaaccttgactaaacgtgaatct

SEQ ID NO: 167178 - DNA, 25 bp, Saccharomyces pastorianus
actaaacgtgaatctcaacctgccg

SEQ ID NO: 167179 - DNA, 25 bp, Saccharomyces pastorianus
gagcttcagtccaattatttacggt

SEQ ID NO: 167180 - DNA, 25 bp, Saccharomyces pastorianus
gtctggttgggactacaattgtaac

SEQ ID NO: 167181 - DNA, 25 bp, Saccharomyces pastorianus
agatctcatgaacgaggatggcaag

SEQ ID NO: 167182 - DNA, 25 bp, Saccharomyces pastorianus
acctgccgccactagtacagttgaa

SEQ ID NO: 167183 - DNA, 25 bp, Saccharomyces pastorianus
cttgctgcttctgtgtatttcttca

SEQ ID NO: 167184 - DNA, 25 bp, Saccharomyces pastorianus
gtaacacatacttttcttcattaga

SEQ ID NO: 167185 - DNA, 25 bp, Saccharomyces pastorianus
tgtgtatttcttcaagagcttcagt

SEQ ID NO: 167186 - DNA, 25 bp, Saccharomyces pastorianus
aacttttacatttggctcctctgca

SEQ ID NO: 167187 - DNA, 25 bp, Saccharomyces pastorianus
gttgaaaaaccttcctctaagcctg

SEQ ID NO: 167188 - DNA, 25 bp, Saccharomyces pastorianus
ttaccctctgcggttgatggtgaaa

SEQ ID NO: 167189 - DNA, 25 bp, Saccharomyces pastorianus
cctctgcactcgctgacaataaaga

SEQ ID NO: 167190 - DNA, 25 bp, Saccharomyces pastorianus
ggactcaaagccagctttttcattt

SEQ ID NO: 167191 - DNA, 25 bp, Saccharomyces pastorianus
tacaaatactactaaaaccgcggat

SEQ ID NO: 167192 - DNA, 25 bp, Saccharomyces pastorianus
aaccgcggatactaaagctccaact

SEQ ID NO: 167193 - DNA, 25 bp, Saccharomyces pastorianus
aatatctaacgctggtaccgagaaa

SEQ ID NO: 167194 - DNA, 25 bp, Saccharomyces pastorianus
gcaaagactctgacaaaccctcttt

SEQ ID NO: 167195 - DNA, 25 bp, Saccharomyces pastorianus
aagtagatgctaccccagaagaatc

SEQ ID NO: 167196 - DNA, 25 bp, Saccharomyces pastorianus
aagcctgccttcaatttaatatcta

SEQ ID NO: 167197 - DNA, 25 bp, Saccharomyces pastorianus
ggtaagtacctaggcaaagcatttg

SEQ ID NO: 167198 - DNA, 25 bp, Saccharomyces pastorianus
ttaccaccgttcagtgagttacaat

SEQ ID NO: 167199 - DNA, 25 bp, Saccharomyces pastorianus
gtgaagctcgtgatgagtccaatga

SEQ ID NO: 167200 - DNA, 25 bp, Saccharomyces pastorianus
gaggattcatatcttgctatctttc

SEQ ID NO: 167201 - DNA, 25 bp, Saccharomyces pastorianus
aaatccgatcagcttactgtgttga

SEQ ID NO: 167202 - DNA, 25 bp, Saccharomyces pastorianus
gttctttgaggcaacggactatgta

SEQ ID NO: 167203 - DNA, 25 bp, Saccharomyces pastorianus
gttctatcttggatattggcaacat

SEQ ID NO: 167204 - DNA, 25 bp, Saccharomyces pastorianus
gggaaaggcaagactattaccagtt

SEQ ID NO: 167205 - DNA, 25 bp, Saccharomyces pastorianus
caatcagctgttttaacggtggaac

SEQ ID NO: 167206 - DNA, 25 bp, Saccharomyces pastorianus
gggttactatccaacaatcagctgt

SEQ ID NO: 167207 - DNA, 25 bp, Saccharomyces pastorianus
cagcttactgtgttgacgggaattc

SEQ ID NO: 167208 - DNA, 25 bp, Saccharomyces pastorianus
acatagattataggagctcaggaca

SEQ ID NO: 167209 - DNA, 25 bp, Saccharomyces pastorianus
gagccatactgtgagcacatagatt

SEQ ID NO: 167210 - DNA, 25 bp, Saccharomyces pastorianus
aggacagcttgtaaaccccagtttg

SEQ ID NO: 167211 - DNA, 25 bp, Saccharomyces pastorianus
gacattaaagttactggagttgaca

SEQ ID NO: 167212 - DNA, 25 bp, Saccharomyces pastorianus
ggagttgacaatcagtgagccatac

SEQ ID NO: 167213 - DNA, 25 bp, Saccharomyces pastorianus
tcagtgagccatactgtgagcacat

SEQ ID NO: 167214 - DNA, 25 bp, Saccharomyces pastorianus
ttgcctttggagacattaaagttac

SEQ ID NO: 167215 - DNA, 25 bp, Saccharomyces pastorianus
tgtaaaccccagtttgtcgagtttg

SEQ ID NO: 167216 - DNA, 25 bp, Saccharomyces pastorianus
gctcaggacagcttgtaaaccccag

SEQ ID NO: 167217 - DNA, 25 bp, Saccharomyces pastorianus
agacgatattgagaagggttactat

SEQ ID NO: 167218 - DNA, 25 bp, Saccharomyces pastorianus
tgtcgagtttgtttgaagacgatat

SEQ ID NO: 167219 - DNA, 25 bp, Saccharomyces pastorianus
tataccctccttccatcttgaagaa

SEQ ID NO: 167220 - DNA, 25 bp, Saccharomyces pastorianus
gtgagcgaccgtatgttctgtgaca

SEQ ID NO: 167221 - DNA, 25 bp, Saccharomyces pastorianus
agatcattattataccctccttcca

SEQ ID NO: 167222 - DNA, 25 bp, Saccharomyces pastorianus
gtcaaagggctattttaaaccagag

SEQ ID NO: 167223 - DNA, 25 bp, Saccharomyces pastorianus
ttagggcggctttcacggtgatgaa

SEQ ID NO: 167224 - DNA, 25 bp, Saccharomyces pastorianus
gaccagggatacttgcgggaagatc

SEQ ID NO: 167225 - DNA, 25 bp, Saccharomyces pastorianus
atcaatgggtaattctttatgtcaa

SEQ ID NO: 167226 - DNA, 25 bp, Saccharomyces pastorianus
gggaagatcatacccatcacacaat

SEQ ID NO: 167227 - DNA, 25 bp, Saccharomyces pastorianus
agcattatctagagggctggtcctg

SEQ ID NO: 167228 - DNA, 25 bp, Saccharomyces pastorianus
gatccgcattactataggcacaagt

SEQ ID NO: 167229 - DNA, 25 bp, Saccharomyces pastorianus
ccatcacacaattcatccagcatgt

SEQ ID NO: 167230 - DNA, 25 bp, Saccharomyces pastorianus
gaacgccttttttttgcaatatgct

SEQ ID NO: 167231 - DNA, 25 bp, Saccharomyces pastorianus
gcaatatgctctcttatattacgaa

SEQ ID NO: 167232 - DNA, 25 bp, Saccharomyces pastorianus
ttcgcgatatgcaacggccaatcaa

SEQ ID NO: 167233 - DNA, 25 bp, Saccharomyces pastorianus
aagcagcgcagggatattccactct

SEQ ID NO: 167234 - DNA, 25 bp, Saccharomyces pastorianus
gatccacgggattagccgcccacgg

SEQ ID NO: 167235 - DNA, 25 bp, Saccharomyces pastorianus
cacggcaacccggtgcaacgggtag

SEQ ID NO: 167236 - DNA, 25 bp, Saccharomyces pastorianus
tcgagccgtaagctataacacttat

SEQ ID NO: 167237 - DNA, 25 bp, Saccharomyces pastorianus
ttcttaactccccaggacaggccaa

SEQ ID NO: 167238 - DNA, 25 bp, Saccharomyces pastorianus
gatattccactcttcgagccgtaag

SEQ ID NO: 167239 - DNA, 25 bp, Saccharomyces pastorianus
aatcaacggcgagctccgggcgcgt

SEQ ID NO: 167240 - DNA, 25 bp, Saccharomyces pastorianus
gtgtttcgcgatatgcaacggccaa

SEQ ID NO: 167241 - DNA, 25 bp, Saccharomyces pastorianus
gacgaggatggtatgcctcacgcta

SEQ ID NO: 167242 - DNA, 25 bp, Saccharomyces pastorianus
ctaccgagagattggttgacactaa

SEQ ID NO: 167243 - DNA, 25 bp, Saccharomyces pastorianus
gcgactatacacttaacatctctgt

SEQ ID NO: 167244 - DNA, 25 bp, Saccharomyces pastorianus
atgcctcacgctactgatgtatcag

SEQ ID NO: 167245 - DNA, 25 bp, Saccharomyces pastorianus
tatatccattgctcaacatgctggg

SEQ ID NO: 167246 - DNA, 25 bp, Saccharomyces pastorianus
aacgctcgagaatgcaactgcctgg

SEQ ID NO: 167247 - DNA, 25 bp, Saccharomyces pastorianus
gggcacaagcgactatacacttaac

SEQ ID NO: 167248 - DNA, 25 bp, Saccharomyces pastorianus
tgatgtatcagaccgactctatgag

SEQ ID NO: 167249 - DNA, 25 bp, Saccharomyces pastorianus
gcaactgcctggattaattcaaatt

SEQ ID NO: 167250 - DNA, 25 bp, Saccharomyces pastorianus
atagctcaattctactgacctcgac

SEQ ID NO: 167251 - DNA, 25 bp, Saccharomyces pastorianus
tgacctcgacacatatatccattgc

SEQ ID NO: 167252 - DNA, 25 bp, Saccharomyces pastorianus
agccattgctatacgaggcctccta

SEQ ID NO: 167253 - DNA, 25 bp, Saccharomyces pastorianus
ttgcactgtttctcttagcttatcc

SEQ ID NO: 167254 - DNA, 25 bp, Saccharomyces pastorianus
aattgtcgtttctgctcttggagcc

SEQ ID NO: 167255 - DNA, 25 bp, Saccharomyces pastorianus
actataatgtcaccagccattgcta

SEQ ID NO: 167256 - DNA, 25 bp, Saccharomyces pastorianus
tcattgctctttctttgcactgttt

SEQ ID NO: 167257 - DNA, 25 bp, Saccharomyces pastorianus
acaattccttcattgctctttcttt

SEQ ID NO: 167258 - DNA, 25 bp, Saccharomyces pastorianus
agcttatcctgctactgcccaatta

SEQ ID NO: 167259 - DNA, 25 bp, Saccharomyces pastorianus
cgtccacctcactaactataatgtc

SEQ ID NO: 167260 - DNA, 25 bp, Saccharomyces pastorianus
tgcgaagccacacacacaattcctt

SEQ ID NO: 167261 - DNA, 25 bp, Saccharomyces pastorianus
tggagcccatcttctttcctaacaa

SEQ ID NO: 167262 - DNA, 25 bp, Saccharomyces pastorianus
ttcctaacaaagcatccgaccacgt

SEQ ID NO: 167263 - DNA, 25 bp, Saccharomyces pastorianus
ttcgtcgttgtctttgtctcctttt

SEQ ID NO: 167264 - DNA, 25 bp, Saccharomyces pastorianus
aggatcggtagttactcttctcttg

SEQ ID NO: 167265 - DNA, 25 bp, Saccharomyces pastorianus
gctttgctaatatggacaggatcgg

SEQ ID NO: 167266 - DNA, 25 bp, Saccharomyces pastorianus
gtgaacacgtacactatacgctccc

SEQ ID NO: 167267 - DNA, 25 bp, Saccharomyces pastorianus
gattccgagttcgtcgttgtctttg

SEQ ID NO: 167268 - DNA, 25 bp, Saccharomyces pastorianus
acccaaatgccactcacttaaattc

SEQ ID NO: 167269 - DNA, 25 bp, Saccharomyces pastorianus
tatggacaggatcggtagttactct

SEQ ID NO: 167270 - DNA, 25 bp, Saccharomyces pastorianus
aatgctcttctatatgtcttaagcc

SEQ ID NO: 167271 - DNA, 25 bp, Saccharomyces pastorianus
agttcgtcgttgtctttgtctcctt

SEQ ID NO: 167272 - DNA, 25 bp, Saccharomyces pastorianus
gacaggatcggtagttactcttctc

SEQ ID NO: 167273 - DNA, 25 bp, Saccharomyces pastorianus
attcgattccgagttcgtcgttgtc

SEQ ID NO: 167274 - DNA, 25 bp, Saccharomyces pastorianus
gttagaccccgaatgccaattacaa

SEQ ID NO: 167275 - DNA, 25 bp, Saccharomyces pastorianus
gttaaacgcgcagaatattgcattt

SEQ ID NO: 167276 - DNA, 25 bp, Saccharomyces pastorianus
ttacaaaactctgataactctgaag

SEQ ID NO: 167277 - DNA, 25 bp, Saccharomyces pastorianus
agtgaagttagaccccgaatgccaa

SEQ ID NO: 167278 - DNA, 25 bp, Saccharomyces pastorianus
tgttaaacgcgcagaatattgcatt

SEQ ID NO: 167279 - DNA, 25 bp, Saccharomyces pastorianus
tatggataaattgaacagtgtgcta

SEQ ID NO: 167280 - DNA, 25 bp, Saccharomyces pastorianus
ggatagtgaagttagaccccgaatg

SEQ ID NO: 167281 - DNA, 25 bp, Saccharomyces pastorianus
ttgttaaacgcgcagaatattgcat

SEQ ID NO: 167282 - DNA, 25 bp, Saccharomyces pastorianus
ttaaacgcgcagaatattgcatttg

SEQ ID NO: 167283 - DNA, 25 bp, Saccharomyces pastorianus
attgaacagtgtgctaatagcagac

SEQ ID NO: 167284 - DNA, 25 bp, Saccharomyces pastorianus
aaacgcgcagaatattgcatttgct

SEQ ID NO: 167285 - DNA, 25 bp, Saccharomyces pastorianus
tttgttctctttcgccatgccatat

SEQ ID NO: 167286 - DNA, 25 bp, Saccharomyces pastorianus
attacgcttgctttgcttgttttgt

SEQ ID NO: 167287 - DNA, 25 bp, Saccharomyces pastorianus
acagctgtgcattacgcttgctttg

SEQ ID NO: 167288 - DNA, 25 bp, Saccharomyces pastorianus
tgtgctcttttttagccacagctgt

SEQ ID NO: 167289 - DNA, 25 bp, Saccharomyces pastorianus
ttctctttcgccatgccatattact

SEQ ID NO: 167290 - DNA, 25 bp, Saccharomyces pastorianus
ctcttttttagccacagctgtgcat

SEQ ID NO: 167291 - DNA, 25 bp, Saccharomyces pastorianus
acgcttgctttgcttgttttgttct

SEQ ID NO: 167292 - DNA, 25 bp, Saccharomyces pastorianus
tgttttgttctctttcgccatgcca

SEQ ID NO: 167293 - DNA, 25 bp, Saccharomyces pastorianus
ttagccacagctgtgcattacgctt

SEQ ID NO: 167294 - DNA, 25 bp, Saccharomyces pastorianus
gcttgctttgcttgttttgttctct

SEQ ID NO: 167295 - DNA, 25 bp, Saccharomyces pastorianus
tgcattacgcttgctttgcttgttt

SEQ ID NO: 167296 - DNA, 25 bp, Saccharomyces pastorianus
tatagtatcctaatcctttctattg

SEQ ID NO: 167297 - DNA, 25 bp, Saccharomyces pastorianus
gtactgcgcaacttacatgctttca

SEQ ID NO: 167298 - DNA, 25 bp, Saccharomyces pastorianus
ctcgcatttcgtaacaacccattat

SEQ ID NO: 167299 - DNA, 25 bp, Saccharomyces pastorianus
catcgtggagtcttagtactgcgca

SEQ ID NO: 167300 - DNA, 25 bp, Saccharomyces pastorianus
ccttacaataggtgccggcgaaagt

SEQ ID NO: 167301 - DNA, 25 bp, Saccharomyces pastorianus
aagtaccaatcctagagctctcgtt

SEQ ID NO: 167302 - DNA, 25 bp, Saccharomyces pastorianus
ttgccgtacaaccacaacacgacat

SEQ ID NO: 167303 - DNA, 25 bp, Saccharomyces pastorianus
tgccggcgaaagtaccaatcctaga

SEQ ID NO: 167304 - DNA, 25 bp, Saccharomyces pastorianus
aatatatctaaatcccttgccgtac

SEQ ID NO: 167305 - DNA, 25 bp, Saccharomyces pastorianus
tacatgctttcaagccatgctcgtc

SEQ ID NO: 167306 - DNA, 25 bp, Saccharomyces pastorianus
atgctcgtccgctctgtgtgtcgac

SEQ ID NO: 167307 - DNA, 25 bp, Saccharomyces pastorianus
cttttcgccagttaacttgcttggt

SEQ ID NO: 167308 - DNA, 25 bp, Saccharomyces pastorianus
tagatcacgcttcacccgctctgtg

SEQ ID NO: 167309 - DNA, 25 bp, Saccharomyces pastorianus
ttcgccagttaacttgcttggtatg

SEQ ID NO: 167310 - DNA, 25 bp, Saccharomyces pastorianus
acccgctctgtgtcgactttctttt

SEQ ID NO: 167311 - DNA, 25 bp, Saccharomyces pastorianus
tttcgccagttaacttgcttggtat

SEQ ID NO: 167312 - DNA, 25 bp, Saccharomyces pastorianus
atagatcacgcttcacccgctctgt

SEQ ID NO: 167313 - DNA, 25 bp, Saccharomyces pastorianus
ttttcgccagttaacttgcttggta

SEQ ID NO: 167314 - DNA, 25 bp, Saccharomyces pastorianus
cccgctctgtgtcgactttcttttc

SEQ ID NO: 167315 - DNA, 25 bp, Saccharomyces pastorianus
tcacccgctctgtgtcgactttctt

SEQ ID NO: 167316 - DNA, 25 bp, Saccharomyces pastorianus
gcttcacccgctctgtgtcgacttt

SEQ ID NO: 167317 - DNA, 25 bp, Saccharomyces pastorianus
gtgggcatagatcacgcttcacccg

SEQ ID NO: 167318 - DNA, 25 bp, Saccharomyces pastorianus
tagtttgttttaaaatagcaacgca

SEQ ID NO: 167319 - DNA, 25 bp, Saccharomyces pastorianus
gcagctcaaagctgttttgattaat

SEQ ID NO: 167320 - DNA, 25 bp, Saccharomyces pastorianus
tttctatttctgagctatataaagc

SEQ ID NO: 167321 - DNA, 25 bp, Saccharomyces pastorianus
tcgccggtttttttctatttctgag

SEQ ID NO: 167322 - DNA, 25 bp, Saccharomyces pastorianus
gcacgtacagtatctcatcgaggtt

SEQ ID NO: 167323 - DNA, 25 bp, Saccharomyces pastorianus
tttaacagccattcgcagcacgtac

SEQ ID NO: 167324 - DNA, 25 bp, Saccharomyces pastorianus
cattcgcagcacgtacagtatctca

SEQ ID NO: 167325 - DNA, 25 bp, Saccharomyces pastorianus
aatcttctctatactttcttctctt

SEQ ID NO: 167326 - DNA, 25 bp, Saccharomyces pastorianus
cgtacagtatctcatcgaggttgaa

SEQ ID NO: 167327 - DNA, 25 bp, Saccharomyces pastorianus
ttctctatactttcttctctttaaa

SEQ ID NO: 167328 - DNA, 25 bp, Saccharomyces pastorianus
aagctgttttgattaatcttctcta

SEQ ID NO: 167329 - DNA, 25 bp, Saccharomyces pastorianus
gtccgacaacgctatcattgaagct

SEQ ID NO: 167330 - DNA, 25 bp, Saccharomyces pastorianus
gttcttactacgttgaagctcaacg

SEQ ID NO: 167331 - DNA, 25 bp, Saccharomyces pastorianus
acggaatcttgtctattgacgattt

SEQ ID NO: 167332 - DNA, 25 bp, Saccharomyces pastorianus
gctaacttgggtaagtacggaatct

SEQ ID NO: 167333 - DNA, 25 bp, Saccharomyces pastorianus
agtacggaatcttgtctattgacga

SEQ ID NO: 167334 - DNA, 25 bp, Saccharomyces pastorianus
gtcaaggtcaccaaggccactttgg

SEQ ID NO: 167335 - DNA, 25 bp, Saccharomyces pastorianus
acgctatcattgaagctaacttggg

SEQ ID NO: 167336 - DNA, 25 bp, Saccharomyces pastorianus
ggtcaccaaggccactttggaattg

SEQ ID NO: 167337 - DNA, 25 bp, Saccharomyces pastorianus
accatcagacaattagtctacaaga

SEQ ID NO: 167338 - DNA, 25 bp, Saccharomyces pastorianus
aggccactttggaattgttgaagtt

SEQ ID NO: 167339 - DNA, 25 bp, Saccharomyces pastorianus
accaaggccactttggaattgttga

SEQ ID NO: 167340 - DNA, 25 bp, Saccharomyces pastorianus
gtcgaacccataatcttctgattag

SEQ ID NO: 167341 - DNA, 25 bp, Saccharomyces pastorianus
agtcagacgcgttgccattacgcca

SEQ ID NO: 167342 - DNA, 25 bp, Saccharomyces pastorianus
gggtcgaacccataatcttctgatt

SEQ ID NO: 167343 - DNA, 25 bp, Saccharomyces pastorianus
attagaagtcagacgcgttgccatt

SEQ ID NO: 167344 - DNA, 25 bp, Saccharomyces pastorianus
aagtcagacgcgttgccattacgcc

SEQ ID NO: 167345 - DNA, 25 bp, Saccharomyces pastorianus
ttagaagtcagacgcgttgccatta

SEQ ID NO: 167346 - DNA, 25 bp, Saccharomyces pastorianus
tcagacgcgttgccattacgccacg

SEQ ID NO: 167347 - DNA, 25 bp, Saccharomyces pastorianus
ttacgccacgcaagcttaatgttgt

SEQ ID NO: 167348 - DNA, 25 bp, Saccharomyces pastorianus
ggtcgaacccataatcttctgatta

SEQ ID NO: 167349 - DNA, 25 bp, Saccharomyces pastorianus
gaacccataatcttctgattagaag

SEQ ID NO: 167350 - DNA, 25 bp, Saccharomyces pastorianus
gaagtcagacgcgttgccattacgc

SEQ ID NO: 167351 - DNA, 25 bp, Saccharomyces pastorianus
ttagtggcagatgctccttgaacta

SEQ ID NO: 167352 - DNA, 25 bp, Saccharomyces pastorianus
tgctcccccccgagttgaaacaaag

SEQ ID NO: 167353 - DNA, 25 bp, Saccharomyces pastorianus
cgaagcatgagaaagtttgctcccc

SEQ ID NO: 167354 - DNA, 25 bp, Saccharomyces pastorianus
tatttgccaagttaacgaagcatga

SEQ ID NO: 167355 - DNA, 25 bp, Saccharomyces pastorianus
gagttgaaacaaagttatctcttct

SEQ ID NO: 167356 - DNA, 25 bp, Saccharomyces pastorianus
ccacagttaggtcacaaatctttta

SEQ ID NO: 167357 - DNA, 25 bp, Saccharomyces pastorianus
aaagttatctcttctaatatgatgg

SEQ ID NO: 167358 - DNA, 25 bp, Saccharomyces pastorianus
aggtcacaaatcttttagtggcaga

SEQ ID NO: 167359 - DNA, 25 bp, Saccharomyces pastorianus
tctcttctaatatgatggttgtttg

SEQ ID NO: 167360 - DNA, 25 bp, Saccharomyces pastorianus
ggttactaccacagttaggtcacaa

SEQ ID NO: 167361 - DNA, 25 bp, Saccharomyces pastorianus
atgagaaagtttgctcccccccgag

SEQ ID NO: 167362 - DNA, 25 bp, Saccharomyces pastorianus
tggcttcaaaacttttacgaccagg

SEQ ID NO: 167363 - DNA, 25 bp, Saccharomyces pastorianus
tacgaccagggagatggcaaacatt

SEQ ID NO: 167364 - DNA, 25 bp, Saccharomyces pastorianus
aggaaatatatacaggcggccttat

SEQ ID NO: 167365 - DNA, 25 bp, Saccharomyces pastorianus
tttccggctcatgaaatatcgcttc

SEQ ID NO: 167366 - DNA, 25 bp, Saccharomyces pastorianus
ggcagcacttaaaacctttcctgga

SEQ ID NO: 167367 - DNA, 25 bp, Saccharomyces pastorianus
gaaagcattgaatggcagcacttaa

SEQ ID NO: 167368 - DNA, 25 bp, Saccharomyces pastorianus
tacaggcggccttattaattactgc

SEQ ID NO: 167369 - DNA, 25 bp, Saccharomyces pastorianus
ataaactaatatgcatcaaccggaa

SEQ ID NO: 167370 - DNA, 25 bp, Saccharomyces pastorianus
agaaatttgatagcgcgctttcgat

SEQ ID NO: 167371 - DNA, 25 bp, Saccharomyces pastorianus
aaatacgtatctgttctgaaattaa

SEQ ID NO: 167372 - DNA, 25 bp, Saccharomyces pastorianus
gaacacatacttatcatcatcgaaa

SEQ ID NO: 167373 - DNA, 25 bp, Saccharomyces pastorianus
ctatttctcatcatttacgtcatct

SEQ ID NO: 167374 - DNA, 25 bp, Saccharomyces pastorianus
gaatctgcaattctacacaattcta

SEQ ID NO: 167375 - DNA, 25 bp, Saccharomyces pastorianus
actatttctcatcatttacgtcatc

SEQ ID NO: 167376 - DNA, 25 bp, Saccharomyces pastorianus
tttctcatcatttacgtcatcttct

SEQ ID NO: 167377 - DNA, 25 bp, Saccharomyces pastorianus
tatttctcatcatttacgtcatctt

SEQ ID NO: 167378 - DNA, 25 bp, Saccharomyces pastorianus
atgactatttctcatcatttacgtc

SEQ ID NO: 167379 - DNA, 25 bp, Saccharomyces pastorianus
atttctcatcatttacgtcatcttc

SEQ ID NO: 167380 - DNA, 25 bp, Saccharomyces pastorianus
gcgtttcagcttccactaatttaga

SEQ ID NO: 167381 - DNA, 25 bp, Saccharomyces pastorianus
gactatttctcatcatttacgtcat

SEQ ID NO: 167382 - DNA, 25 bp, Saccharomyces pastorianus
tgactatttctcatcatttacgtca

SEQ ID NO: 167383 - DNA, 25 bp, Saccharomyces pastorianus
gatgactatttctcatcatttacgt

SEQ ID NO: 167384 - DNA, 25 bp, Saccharomyces pastorianus
tttttcccttttctctcactagtct

SEQ ID NO: 167385 - DNA, 25 bp, Saccharomyces pastorianus
ctgggctgcacgtgatactatgtta

SEQ ID NO: 167386 - DNA, 25 bp, Saccharomyces pastorianus
gaaaaacatacatctatcccgttat

SEQ ID NO: 167387 - DNA, 25 bp, Saccharomyces pastorianus
gtgatactatgttaccctgtcgggc

SEQ ID NO: 167388 - DNA, 25 bp, Saccharomyces pastorianus
aagcagcatgtctaattggtaattc

SEQ ID NO: 167389 - DNA, 25 bp, Saccharomyces pastorianus
gttacgcgtgcattttcttgttgca

SEQ ID NO: 167390 - DNA, 25 bp, Saccharomyces pastorianus
actagtctctttttccaatttgcca

SEQ ID NO: 167391 - DNA, 25 bp, Saccharomyces pastorianus
ttttctgctggtgccgtcctgtcat

SEQ ID NO: 167392 - DNA, 25 bp, Saccharomyces pastorianus
ggtaattctaaagctgccaagctct

SEQ ID NO: 167393 - DNA, 25 bp, Saccharomyces pastorianus
atttgccaccgtgtagcattttgtt

SEQ ID NO: 167394 - DNA, 25 bp, Saccharomyces pastorianus
tatcccgttatgaagttttctgctg

SEQ ID NO: 167395 - DNA, 25 bp, Saccharomyces pastorianus
atacatactcgatcagcatttcact

SEQ ID NO: 167396 - DNA, 25 bp, Saccharomyces pastorianus
tagcagcacgcaggatggaagagaa

SEQ ID NO: 167397 - DNA, 25 bp, Saccharomyces pastorianus
aggatgctacaaacttgtggttcat

SEQ ID NO: 167398 - DNA, 25 bp, Saccharomyces pastorianus
ggttcattctatacaaagtacttat

SEQ ID NO: 167399 - DNA, 25 bp, Saccharomyces pastorianus
aaaggatgctacaaacttgtggttc

SEQ ID NO: 167400 - DNA, 25 bp, Saccharomyces pastorianus
aacttgtggttcattctatacaaag

SEQ ID NO: 167401 - DNA, 25 bp, Saccharomyces pastorianus
gctacaaacttgtggttcattctat

SEQ ID NO: 167402 - DNA, 25 bp, Saccharomyces pastorianus
gtggttcattctatacaaagtactt

SEQ ID NO: 167403 - DNA, 25 bp, Saccharomyces pastorianus
acaaacttgtggttcattctataca

SEQ ID NO: 167404 - DNA, 25 bp, Saccharomyces pastorianus
gatgctacaaacttgtggttcattc

SEQ ID NO: 167405 - DNA, 25 bp, Saccharomyces pastorianus
ttagcagcacgcaggatggaagaga

SEQ ID NO: 167406 - DNA, 25 bp, Saccharomyces pastorianus
gaggttcatctcattttgttagctt

SEQ ID NO: 167407 - DNA, 25 bp, Saccharomyces pastorianus
tataagcttagagatacgatttcaa

SEQ ID NO: 167408 - DNA, 25 bp, Saccharomyces pastorianus
tctacgactttgtatgaggttcatc

SEQ ID NO: 167409 - DNA, 25 bp, Saccharomyces pastorianus
agcttctattcacatacctactata

SEQ ID NO: 167410 - DNA, 25 bp, Saccharomyces pastorianus
gttagcttctattcacatacctact

SEQ ID NO: 167411 - DNA, 25 bp, Saccharomyces pastorianus
aaggcgcagctcttctgttagcagt

SEQ ID NO: 167412 - DNA, 25 bp, Saccharomyces pastorianus
gttagcagttttctctacgactttg

SEQ ID NO: 167413 - DNA, 25 bp, Saccharomyces pastorianus
catctcattttgttagcttctattc

SEQ ID NO: 167414 - DNA, 25 bp, Saccharomyces pastorianus
gcagctcttctgttagcagttttct

SEQ ID NO: 167415 - DNA, 25 bp, Saccharomyces pastorianus
gcagttttctctacgactttgtatg

SEQ ID NO: 167416 - DNA, 25 bp, Saccharomyces pastorianus
atacgatttcaaggcgcagctcttc

SEQ ID NO: 167417 - DNA, 25 bp, Saccharomyces pastorianus
tacaggatttttcatggattttgca

SEQ ID NO: 167418 - DNA, 25 bp, Saccharomyces pastorianus
aataactatctttgagcatcgtacc

SEQ ID NO: 167419 - DNA, 25 bp, Saccharomyces pastorianus
tcaggcgcaacaataactatctttg

SEQ ID NO: 167420 - DNA, 25 bp, Saccharomyces pastorianus
ttttcatttccgcttttgcctcagg

SEQ ID NO: 167421 - DNA, 25 bp, Saccharomyces pastorianus
gcatcgtaccaccaatacaaaagga

SEQ ID NO: 167422 - DNA, 25 bp, Saccharomyces pastorianus
ttgagcatcgtaccaccaatacaaa

SEQ ID NO: 167423 - DNA, 25 bp, Saccharomyces pastorianus
ggatttttcatttccgcttttgcct

SEQ ID NO: 167424 - DNA, 25 bp, Saccharomyces pastorianus
gatcgttatcatacaggatttttca

SEQ ID NO: 167425 - DNA, 25 bp, Saccharomyces pastorianus
tcatctggatttttcatttccgctt

SEQ ID NO: 167426 - DNA, 25 bp, Saccharomyces pastorianus
atttccgcttttgcctcaggcgcaa

SEQ ID NO: 167427 - DNA, 25 bp, Saccharomyces pastorianus
tttcatggattttgcatgtttcggt

SEQ ID NO: 167428 - DNA, 25 bp, Saccharomyces pastorianus
tcagggaattcggatcgggcgcgtc

SEQ ID NO: 167429 - DNA, 25 bp, Saccharomyces pastorianus
gcaacgttcagggaattcggatcgg

SEQ ID NO: 167430 - DNA, 25 bp, Saccharomyces pastorianus
caaagtcgcaacgttcagggaattc

SEQ ID NO: 167431 - DNA, 25 bp, Saccharomyces pastorianus
ggatcgggcgcgtcctctggatact

SEQ ID NO: 167432 - DNA, 25 bp, Saccharomyces pastorianus
gtcgcaacgttcagggaattcggat

SEQ ID NO: 167433 - DNA, 25 bp, Saccharomyces pastorianus
ctcaaagtcgcaacgttcagggaat

SEQ ID NO: 167434 - DNA, 25 bp, Saccharomyces pastorianus
tcgcaacgttcagggaattcggatc

SEQ ID NO: 167435 - DNA, 25 bp, Saccharomyces pastorianus
ggcgcgtcctctggatactccaagt

SEQ ID NO: 167436 - DNA, 25 bp, Saccharomyces pastorianus
caacgttcagggaattcggatcggg

SEQ ID NO: 167437 - DNA, 25 bp, Saccharomyces pastorianus
gggcgcgtcctctggatactccaag

SEQ ID NO: 167438 - DNA, 25 bp, Saccharomyces pastorianus
aagtcgcaacgttcagggaattcgg

SEQ ID NO: 167439 - DNA, 25 bp, Saccharomyces pastorianus
catcaaaaaatttcaagagtaacgc

SEQ ID NO: 167440 - DNA, 25 bp, Saccharomyces pastorianus
aatcatcatcaaaaaatttcaagag

SEQ ID NO: 167441 - DNA, 25 bp, Saccharomyces pastorianus
gcggcgagttcaaatcatcatcaaa

SEQ ID NO: 167442 - DNA, 25 bp, Saccharomyces pastorianus
ggcgagttcaaatcatcatcaaaaa

SEQ ID NO: 167443 - DNA, 25 bp, Saccharomyces pastorianus
gacggactcacttccgagcgctgga

SEQ ID NO: 167444 - DNA, 25 bp, Saccharomyces pastorianus
gaggcggcgagttcaaatcatcatc

SEQ ID NO: 167445 - DNA, 25 bp, Saccharomyces pastorianus
tgacggactcacttccgagcgctgg

SEQ ID NO: 167446 - DNA, 25 bp, Saccharomyces pastorianus
aggcggcgagttcaaatcatcatca

SEQ ID NO: 167447 - DNA, 25 bp, Saccharomyces pastorianus
cggcgagttcaaatcatcatcaaaa

SEQ ID NO: 167448 - DNA, 25 bp, Saccharomyces pastorianus
acttccgagcgctggattcagtggt

SEQ ID NO: 167449 - DNA, 25 bp, Saccharomyces pastorianus
ggcggcgagttcaaatcatcatcaa

SEQ ID NO: 167450 - DNA, 25 bp, Saccharomyces pastorianus
aaaacgcctgtatcgcatttatctt

SEQ ID NO: 167451 - DNA, 25 bp, Saccharomyces pastorianus
gcctgtatcgcatttatcttttaat

SEQ ID NO: 167452 - DNA, 25 bp, Saccharomyces pastorianus
cctcaaaaacgcctgtatcgcattt

SEQ ID NO: 167453 - DNA, 25 bp, Saccharomyces pastorianus
aaacgcctgtatcgcatttatcttt

SEQ ID NO: 167454 - DNA, 25 bp, Saccharomyces pastorianus
tttcctcaaaaacgcctgtatcgca

SEQ ID NO: 167455 - DNA, 25 bp, Saccharomyces pastorianus
cgcctgtatcgcatttatcttttaa

SEQ ID NO: 167456 - DNA, 25 bp, Saccharomyces pastorianus
ttttcctcaaaaacgcctgtatcgc

SEQ ID NO: 167457 - DNA, 25 bp, Saccharomyces pastorianus
caaaaacgcctgtatcgcatttatc

SEQ ID NO: 167458 - DNA, 25 bp, Saccharomyces pastorianus
gtatcgcatttatcttttaatgttg

SEQ ID NO: 167459 - DNA, 25 bp, Saccharomyces pastorianus
gcatttatcttttaatgttggacta

SEQ ID NO: 167460 - DNA, 25 bp, Saccharomyces pastorianus
acgcctgtatcgcatttatctttta

SEQ ID NO: 167461 - DNA, 25 bp, Saccharomyces pastorianus
tcttttttggcggttcgtgttgcta

SEQ ID NO: 167462 - DNA, 25 bp, Saccharomyces pastorianus
cggttcgtgttgctatgagtcgttt

SEQ ID NO: 167463 - DNA, 25 bp, Saccharomyces pastorianus
ttcgtgttgctatgagtcgttttcg

SEQ ID NO: 167464 - DNA, 25 bp, Saccharomyces pastorianus
ttggcggttcgtgttgctatgagtc

SEQ ID NO: 167465 - DNA, 25 bp, Saccharomyces pastorianus
tttggcggttcgtgttgctatgagt

SEQ ID NO: 167466 - DNA, 25 bp, Saccharomyces pastorianus
gattacacgtgtgaaaacaagcttt

SEQ ID NO: 167467 - DNA, 25 bp, Saccharomyces pastorianus
gcggttcgtgttgctatgagtcgtt

SEQ ID NO: 167468 - DNA, 25 bp, Saccharomyces pastorianus
tacacgtgtgaaaacaagctttaaa

SEQ ID NO: 167469 - DNA, 25 bp, Saccharomyces pastorianus
gttcgtgttgctatgagtcgttttc

SEQ ID NO: 167470 - DNA, 25 bp, Saccharomyces pastorianus
gtgaaaacaagctttaaaacaatag

SEQ ID NO: 167471 - DNA, 25 bp, Saccharomyces pastorianus
tttttggcggttcgtgttgctatga

SEQ ID NO: 167472 - DNA, 25 bp, Saccharomyces pastorianus
tagacaagagtagcgcggagcaagt

SEQ ID NO: 167473 - DNA, 25 bp, Saccharomyces pastorianus
tagcgcggagcaagtagatatcctc

SEQ ID NO: 167474 - DNA, 25 bp, Saccharomyces pastorianus
agccctggagttttgatgaggtcga

SEQ ID NO: 167475 - DNA, 25 bp, Saccharomyces pastorianus
ccatgcggtgtgctggtaaagccct

SEQ ID NO: 167476 - DNA, 25 bp, Saccharomyces pastorianus
agcacctagacaagagtagcgcgga

SEQ ID NO: 167477 - DNA, 25 bp, Saccharomyces pastorianus
gctggtaaagccctggagttttgat

SEQ ID NO: 167478 - DNA, 25 bp, Saccharomyces pastorianus
tgatgccatgcggtgtgctggtaaa

SEQ ID NO: 167479 - DNA, 25 bp, Saccharomyces pastorianus
atgaggtcgaaacctagcagcacct

SEQ ID NO: 167480 - DNA, 25 bp, Saccharomyces pastorianus
gaaacctagcagcacctagacaaga

SEQ ID NO: 167481 - DNA, 25 bp, Saccharomyces pastorianus
gtgtgctggtaaagccctggagttt

SEQ ID NO: 167482 - DNA, 25 bp, Saccharomyces pastorianus
ggtcgaaacctagcagcacctagac

SEQ ID NO: 167483 - DNA, 25 bp, Saccharomyces pastorianus
tcagtttcgtttagaggtacgagaa

SEQ ID NO: 167484 - DNA, 25 bp, Saccharomyces pastorianus
gatttcaaatgagatagctcctcga

SEQ ID NO: 167485 - DNA, 25 bp, Saccharomyces pastorianus
tttgtttgcggccttgaacttcggc

SEQ ID NO: 167486 - DNA, 25 bp, Saccharomyces pastorianus
gctcctcgattaagttgaagtttga

SEQ ID NO: 167487 - DNA, 25 bp, Saccharomyces pastorianus
ggctccattaaatttggactttacg

SEQ ID NO: 167488 - DNA, 25 bp, Saccharomyces pastorianus
agatagctcctcgattaagttgaag

SEQ ID NO: 167489 - DNA, 25 bp, Saccharomyces pastorianus
cttcggctccattaaatttggactt

SEQ ID NO: 167490 - DNA, 25 bp, Saccharomyces pastorianus
ttgaacttcggctccattaaatttg

SEQ ID NO: 167491 - DNA, 25 bp, Saccharomyces pastorianus
ttggactttacgatttcaaatgaga

SEQ ID NO: 167492 - DNA, 25 bp, Saccharomyces pastorianus
ggccttgaacttcggctccattaaa

SEQ ID NO: 167493 - DNA, 25 bp, Saccharomyces pastorianus
ctgttcagtttcgtttagaggtacg

SEQ ID NO: 167494 - DNA, 25 bp, Saccharomyces pastorianus
aaagtcatcgccttatctgctacga

SEQ ID NO: 167495 - DNA, 25 bp, Saccharomyces pastorianus
gcaactatgcatggacatctgtcgt

SEQ ID NO: 167496 - DNA, 25 bp, Saccharomyces pastorianus
atgtgaacgcggtgacgaaaatgcc

SEQ ID NO: 167497 - DNA, 25 bp, Saccharomyces pastorianus
atgtgtccattgcagtcgatatagt

SEQ ID NO: 167498 - DNA, 25 bp, Saccharomyces pastorianus
tgaaacaagccggtatgtgaacgcg

SEQ ID NO: 167499 - DNA, 25 bp, Saccharomyces pastorianus
tggtcctccttcttgaaagtcatcg

SEQ ID NO: 167500 - DNA, 25 bp, Saccharomyces pastorianus
gaaaatgccgaatgtgtccattgca

SEQ ID NO: 167501 - DNA, 25 bp, Saccharomyces pastorianus
aagtgtgctttgctagacaaggttt

SEQ ID NO: 167502 - DNA, 25 bp, Saccharomyces pastorianus
ctgtcgttggtgtagacgctgacat

SEQ ID NO: 167503 - DNA, 25 bp, Saccharomyces pastorianus
atctgctacgatgcccaagcaacta

SEQ ID NO: 167504 - DNA, 25 bp, Saccharomyces pastorianus
gggttcagtgacgtcttgattgaaa

SEQ ID NO: 167505 - DNA, 25 bp, Saccharomyces pastorianus
agaccattgtaatctgttttccacc

SEQ ID NO: 167506 - DNA, 25 bp, Saccharomyces pastorianus
aagagaccattgtaatctgttttcc

SEQ ID NO: 167507 - DNA, 25 bp, Saccharomyces pastorianus
gaccattgtaatctgttttccaccc

SEQ ID NO: 167508 - DNA, 25 bp, Saccharomyces pastorianus
actaccaaaccaacgtcacaaatgc

SEQ ID NO: 167509 - DNA, 25 bp, Saccharomyces pastorianus
accattgtaatctgttttccaccct

SEQ ID NO: 167510 - DNA, 25 bp, Saccharomyces pastorianus
gccaagagaccattgtaatctgttt

SEQ ID NO: 167511 - DNA, 25 bp, Saccharomyces pastorianus
taccaaaccaacgtcacaaatgcgt

SEQ ID NO: 167512 - DNA, 25 bp, Saccharomyces pastorianus
gagaccattgtaatctgttttccac

SEQ ID NO: 167513 - DNA, 25 bp, Saccharomyces pastorianus
acactaccaaaccaacgtcacaaat

SEQ ID NO: 167514 - DNA, 25 bp, Saccharomyces pastorianus
cattgtaatctgttttccaccctcc

SEQ ID NO: 167515 - DNA, 25 bp, Saccharomyces pastorianus
ttgtaatctgttttccaccctccct

SEQ ID NO: 167516 - DNA, 25 bp, Saccharomyces pastorianus
agagccaatgtgataccaggccaat

SEQ ID NO: 167517 - DNA, 25 bp, Saccharomyces pastorianus
gataccaggccaatgggtcactata

SEQ ID NO: 167518 - DNA, 25 bp, Saccharomyces pastorianus
atgggtcactatatccggtgcatgc

SEQ ID NO: 167519 - DNA, 25 bp, Saccharomyces pastorianus
tgggttctctggcaatccaatacgc

SEQ ID NO: 167520 - DNA, 25 bp, Saccharomyces pastorianus
tgcccatattccaccaaacgtcaat

SEQ ID NO: 167521 - DNA, 25 bp, Saccharomyces pastorianus
tgccccaatcttgtgtgcaggtatc

SEQ ID NO: 167522 - DNA, 25 bp, Saccharomyces pastorianus
cggtggcttgggttctctggcaatc

SEQ ID NO: 167523 - DNA, 25 bp, Saccharomyces pastorianus
actatatccggtgcatgcggtggct

SEQ ID NO: 167524 - DNA, 25 bp, Saccharomyces pastorianus
accaaacgtcaatcttgctgaagtt

SEQ ID NO: 167525 - DNA, 25 bp, Saccharomyces pastorianus
atacgcaactgccgatgccgttcaa

SEQ ID NO: 167526 - DNA, 25 bp, Saccharomyces pastorianus
atacgcccttgctatgggttacagg

SEQ ID NO: 167527 - DNA, 25 bp, Saccharomyces pastorianus
acacgagatctttcacgcatacatc

SEQ ID NO: 167528 - DNA, 25 bp, Saccharomyces pastorianus
caacacgagatctttcacgcataca

SEQ ID NO: 167529 - DNA, 25 bp, Saccharomyces pastorianus
ctttcctgcacaacacgagatcttt

SEQ ID NO: 167530 - DNA, 25 bp, Saccharomyces pastorianus
atgattccctttcctgcacaacacg

SEQ ID NO: 167531 - DNA, 25 bp, Saccharomyces pastorianus
ttccctttcctgcacaacacgagat

SEQ ID NO: 167532 - DNA, 25 bp, Saccharomyces pastorianus
ttcctgcacaacacgagatctttca

SEQ ID NO: 167533 - DNA, 25 bp, Saccharomyces pastorianus
tcctgcacaacacgagatctttcac

SEQ ID NO: 167534 - DNA, 25 bp, Saccharomyces pastorianus
cgagatctttcacgcatacatcgga

SEQ ID NO: 167535 - DNA, 25 bp, Saccharomyces pastorianus
aacacgagatctttcacgcatacat

SEQ ID NO: 167536 - DNA, 25 bp, Saccharomyces pastorianus
acgagatctttcacgcatacatcgg

SEQ ID NO: 167537 - DNA, 25 bp, Saccharomyces pastorianus
gcacaacacgagatctttcacgcat

SEQ ID NO: 167538 - DNA, 25 bp, Saccharomyces pastorianus
tttgccattctccatccagttgcat

SEQ ID NO: 167539 - DNA, 25 bp, Saccharomyces pastorianus
atattttgccattctccatccagtt

SEQ ID NO: 167540 - DNA, 25 bp, Saccharomyces pastorianus
cttcttcatattttgccattctcca

SEQ ID NO: 167541 - DNA, 25 bp, Saccharomyces pastorianus
attctccatccagttgcatctttaa

SEQ ID NO: 167542 - DNA, 25 bp, Saccharomyces pastorianus
ttcatattttgccattctccatcca

SEQ ID NO: 167543 - DNA, 25 bp, Saccharomyces pastorianus
acagttacgcataataatatttctt

SEQ ID NO: 167544 - DNA, 25 bp, Saccharomyces pastorianus
ttttccttccttcttcttcatattt

SEQ ID NO: 167545 - DNA, 25 bp, Saccharomyces pastorianus
gacattctcctcaagaaatccacaa

SEQ ID NO: 167546 - DNA, 25 bp, Saccharomyces pastorianus
aaaggaatcaacagttacgcataat

SEQ ID NO: 167547 - DNA, 25 bp, Saccharomyces pastorianus
aaagacattctcctcaagaaatcca

SEQ ID NO: 167548 - DNA, 25 bp, Saccharomyces pastorianus
ctccatccagttgcatctttaagat

SEQ ID NO: 167549 - DNA, 25 bp, Saccharomyces pastorianus
gtcaagattttctagctacctgcaa

SEQ ID NO: 167550 - DNA, 25 bp, Saccharomyces pastorianus
gaagaggagattgcccatttgatga

SEQ ID NO: 167551 - DNA, 25 bp, Saccharomyces pastorianus
gatactgacgatactatggctttaa

SEQ ID NO: 167552 - DNA, 25 bp, Saccharomyces pastorianus
atgatcaggttcattattcctttga

SEQ ID NO: 167553 - DNA, 25 bp, Saccharomyces pastorianus
gagggatcactctaaacttaattgc

SEQ ID NO: 167554 - DNA, 25 bp, Saccharomyces pastorianus
attcctttgatggattgtgcaagac

SEQ ID NO: 167555 - DNA, 25 bp, Saccharomyces pastorianus
agaactcaacttcaggacctttagt

SEQ ID NO: 167556 - DNA, 25 bp, Saccharomyces pastorianus
tggattacctaaattgccctcagtg

SEQ ID NO: 167557 - DNA, 25 bp, Saccharomyces pastorianus
gatgacccaggaatttaatcctttg

SEQ ID NO: 167558 - DNA, 25 bp, Saccharomyces pastorianus
aggacctttagtgatgtaatgggca

SEQ ID NO: 167559 - DNA, 25 bp, Saccharomyces pastorianus
ttgtgcaagactttatgggcgtcca

SEQ ID NO: 167560 - DNA, 25 bp, Saccharomyces pastorianus
ttctatctcttgaaatccgtacaag

SEQ ID NO: 167561 - DNA, 25 bp, Saccharomyces pastorianus
ctctaaacggcttccatggaagtaa

SEQ ID NO: 167562 - DNA, 25 bp, Saccharomyces pastorianus
ttaagaccctcgttcagaagcttat

SEQ ID NO: 167563 - DNA, 25 bp, Saccharomyces pastorianus
agattaagaccctcgttcagaagct

SEQ ID NO: 167564 - DNA, 25 bp, Saccharomyces pastorianus
attttagattaagaccctcgttcag

SEQ ID NO: 167565 - DNA, 25 bp, Saccharomyces pastorianus
tttagattaagaccctcgttcagaa

SEQ ID NO: 167566 - DNA, 25 bp, Saccharomyces pastorianus
gcttccatggaagtaatatttctat

SEQ ID NO: 167567 - DNA, 25 bp, Saccharomyces pastorianus
ctaagcccatattcagtctgctcta

SEQ ID NO: 167568 - DNA, 25 bp, Saccharomyces pastorianus
gattaagaccctcgttcagaagctt

SEQ ID NO: 167569 - DNA, 25 bp, Saccharomyces pastorianus
ttttagattaagaccctcgttcaga

SEQ ID NO: 167570 - DNA, 25 bp, Saccharomyces pastorianus
attaagaccctcgttcagaagctta

SEQ ID NO: 167571 - DNA, 25 bp, Saccharomyces pastorianus
attattctgttcctctttttatatg

SEQ ID NO: 167572 - DNA, 25 bp, Saccharomyces pastorianus
ttttaaaatatcaatccttgcgctt

SEQ ID NO: 167573 - DNA, 25 bp, Saccharomyces pastorianus
cttttaaaatatcaatccttgcgct

SEQ ID NO: 167574 - DNA, 25 bp, Saccharomyces pastorianus
attctgttcctctttttatatgttg

SEQ ID NO: 167575 - DNA, 25 bp, Saccharomyces pastorianus
tgttgtcattcattgatccttttaa

SEQ ID NO: 167576 - DNA, 25 bp, Saccharomyces pastorianus
tccttttaaaatatcaatccttgcg

SEQ ID NO: 167577 - DNA, 25 bp, Saccharomyces pastorianus
ctgttcctctttttatatgttgtca

SEQ ID NO: 167578 - DNA, 25 bp, Saccharomyces pastorianus
atccttttaaaatatcaatccttgc

SEQ ID NO: 167579 - DNA, 25 bp, Saccharomyces pastorianus
tattctgttcctctttttatatgtt

SEQ ID NO: 167580 - DNA, 25 bp, Saccharomyces pastorianus
ttattctgttcctctttttatatgt

SEQ ID NO: 167581 - DNA, 25 bp, Saccharomyces pastorianus
ccttttaaaatatcaatccttgcgc

SEQ ID NO: 167582 - DNA, 25 bp, Saccharomyces pastorianus
aaatgaaatcaaagactacccttat

SEQ ID NO: 167583 - DNA, 25 bp, Saccharomyces pastorianus
ttctccactcggatttaggaatcca

SEQ ID NO: 167584 - DNA, 25 bp, Saccharomyces pastorianus
caaagactacccttattatttgatt

SEQ ID NO: 167585 - DNA, 25 bp, Saccharomyces pastorianus
gaaatcaaagactacccttattatt

SEQ ID NO: 167586 - DNA, 25 bp, Saccharomyces pastorianus
tactagagattctccactcggattt

SEQ ID NO: 167587 - DNA, 25 bp, Saccharomyces pastorianus
gactacccttattatttgattaatg

SEQ ID NO: 167588 - DNA, 25 bp, Saccharomyces pastorianus
gagattctccactcggatttaggaa

SEQ ID NO: 167589 - DNA, 25 bp, Saccharomyces pastorianus
attctccactcggatttaggaatcc

SEQ ID NO: 167590 - DNA, 25 bp, Saccharomyces pastorianus
agagattctccactcggatttagga

SEQ ID NO: 167591 - DNA, 25 bp, Saccharomyces pastorianus
actagagattctccactcggattta

SEQ ID NO: 167592 - DNA, 25 bp, Saccharomyces pastorianus
tacccttattatttgattaatgaac

SEQ ID NO: 167593 - DNA, 25 bp, Saccharomyces pastorianus
atgactaccaaagcaatggtccaaa

SEQ ID NO: 167594 - DNA, 25 bp, Saccharomyces pastorianus
ggatgcgattccacaaagcttggga

SEQ ID NO: 167595 - DNA, 25 bp, Saccharomyces pastorianus
aagcgcaccagggaattggttgaat

SEQ ID NO: 167596 - DNA, 25 bp, Saccharomyces pastorianus
gcagatatcctgatggaagtaacca

SEQ ID NO: 167597 - DNA, 25 bp, Saccharomyces pastorianus
gattgctcgcaaaagttatcggaat

SEQ ID NO: 167598 - DNA, 25 bp, Saccharomyces pastorianus
ggaagtaaccaagcgcaccagggaa

SEQ ID NO: 167599 - DNA, 25 bp, Saccharomyces pastorianus
gaaaggctcacagattgctcgcaaa

SEQ ID NO: 167600 - DNA, 25 bp, Saccharomyces pastorianus
taaactggatttaggcgagcactgt

SEQ ID NO: 167601 - DNA, 25 bp, Saccharomyces pastorianus
aagcttgggaagaaacgattctatc

SEQ ID NO: 167602 - DNA, 25 bp, Saccharomyces pastorianus
agatggcgaacaggcagactctttc

SEQ ID NO: 167603 - DNA, 25 bp, Saccharomyces pastorianus
aattgtgtacttatggatgcgattc

SEQ ID NO: 167604 - DNA, 25 bp, Saccharomyces pastorianus
caattgtttttgtattccttataat

SEQ ID NO: 167605 - DNA, 25 bp, Saccharomyces pastorianus
caaagaaacatttttagatctaaca

SEQ ID NO: 167606 - DNA, 25 bp, Saccharomyces pastorianus
ataattagaaagacctgctgtttaa

SEQ ID NO: 167607 - DNA, 25 bp, Saccharomyces pastorianus
gacgaagtgaagtattcaggagtat

SEQ ID NO: 167608 - DNA, 25 bp, Saccharomyces pastorianus
ttagaaagacctgctgtttaatgtg

SEQ ID NO: 167609 - DNA, 25 bp, Saccharomyces pastorianus
tccttataattagaaagacctgctg

SEQ ID NO: 167610 - DNA, 25 bp, Saccharomyces pastorianus
tagatctaacattttacttcaattg

SEQ ID NO: 167611 - DNA, 25 bp, Saccharomyces pastorianus
gtattcaggagtatattattacata

SEQ ID NO: 167612 - DNA, 25 bp, Saccharomyces pastorianus
gaagaaactgcctttttagaattgt

SEQ ID NO: 167613 - DNA, 25 bp, Saccharomyces pastorianus
attacatacatacaaagcaagacaa

SEQ ID NO: 167614 - DNA, 25 bp, Saccharomyces pastorianus
tacttcaattgtttttgtattcctt

SEQ ID NO: 167615 - DNA, 25 bp, Saccharomyces pastorianus
tgtccctcaatctttatgtgatctt

SEQ ID NO: 167616 - DNA, 25 bp, Saccharomyces pastorianus
gagattgatattctcgatacaatag

SEQ ID NO: 167617 - DNA, 25 bp, Saccharomyces pastorianus
atcctactaaattatcattcattgc

SEQ ID NO: 167618 - DNA, 25 bp, Saccharomyces pastorianus
tccctcaatctttatgtgatctttt

SEQ ID NO: 167619 - DNA, 25 bp, Saccharomyces pastorianus
gattggatttgatgactgtccctca

SEQ ID NO: 167620 - DNA, 25 bp, Saccharomyces pastorianus
tggatttgatgactgtccctcaatc

SEQ ID NO: 167621 - DNA, 25 bp, Saccharomyces pastorianus
agcttcgattggatttgatgactgt

SEQ ID NO: 167622 - DNA, 25 bp, Saccharomyces pastorianus
tgatattctcgatacaatagcatta

SEQ ID NO: 167623 - DNA, 25 bp, Saccharomyces pastorianus
ttggatttgatgactgtccctcaat

SEQ ID NO: 167624 - DNA, 25 bp, Saccharomyces pastorianus
tgactgtccctcaatctttatgtga

SEQ ID NO: 167625 - DNA, 25 bp, Saccharomyces pastorianus
gactgtccctcaatctttatgtgat

SEQ ID NO: 167626 - DNA, 25 bp, Saccharomyces pastorianus
gctaacggttagtcagccacacatt

SEQ ID NO: 167627 - DNA, 25 bp, Saccharomyces pastorianus
ttttttcttacatacactgcaccag

SEQ ID NO: 167628 - DNA, 25 bp, Saccharomyces pastorianus
tacactgcaccagacatgtcggttc

SEQ ID NO: 167629 - DNA, 25 bp, Saccharomyces pastorianus
tcagccacacattgacgtacactgt

SEQ ID NO: 167630 - DNA, 25 bp, Saccharomyces pastorianus
atttctttccatgtatctcagtgcc

SEQ ID NO: 167631 - DNA, 25 bp, Saccharomyces pastorianus
gcctcattcccattgcatacagaaa

SEQ ID NO: 167632 - DNA, 25 bp, Saccharomyces pastorianus
ttcttaatatgtcgctacgcctcat

SEQ ID NO: 167633 - DNA, 25 bp, Saccharomyces pastorianus
gtgaacagcgtatttctttccatgt

SEQ ID NO: 167634 - DNA, 25 bp, Saccharomyces pastorianus
agtagtgcgttttgcgaacgtcaca

SEQ ID NO: 167635 - DNA, 25 bp, Saccharomyces pastorianus
aagtttggccatgcattgtcattct

SEQ ID NO: 167636 - DNA, 25 bp, Saccharomyces pastorianus
aacgtcacagatcaaaagtttggcc

SEQ ID NO: 167637 - DNA, 25 bp, Saccharomyces pastorianus
tacatcaggtgtcgcaaaagtcatc

SEQ ID NO: 167638 - DNA, 25 bp, Saccharomyces pastorianus
aaaagtcatcgaaaagtcaccaatc

SEQ ID NO: 167639 - DNA, 25 bp, Saccharomyces pastorianus
tttactggatacatcaggtgtcgca

SEQ ID NO: 167640 - DNA, 25 bp, Saccharomyces pastorianus
actccgtctacgaagatgctcaata

SEQ ID NO: 167641 - DNA, 25 bp, Saccharomyces pastorianus
gatgctcaatatataggtcatgcct

SEQ ID NO: 167642 - DNA, 25 bp, Saccharomyces pastorianus
tgggctactccgtctacgaagatgc

SEQ ID NO: 167643 - DNA, 25 bp, Saccharomyces pastorianus
ccttcaagaaagctggccattttat

SEQ ID NO: 167644 - DNA, 25 bp, Saccharomyces pastorianus
gtcaccaatcgcagaaataatcagg

SEQ ID NO: 167645 - DNA, 25 bp, Saccharomyces pastorianus
taggtcatgccttcaagaaagctgg

SEQ ID NO: 167646 - DNA, 25 bp, Saccharomyces pastorianus
caggaaatcaaatgccgagttaggt

SEQ ID NO: 167647 - DNA, 25 bp, Saccharomyces pastorianus
agttaggtaggctgggctactccgt

SEQ ID NO: 167648 - DNA, 25 bp, Saccharomyces pastorianus
tgaacaagagcacctgcaaacgggt

SEQ ID NO: 167649 - DNA, 25 bp, Saccharomyces pastorianus
caaggcttccttgcctattgggcct

SEQ ID NO: 167650 - DNA, 25 bp, Saccharomyces pastorianus
ttagcacgctatctcgaaggatcga

SEQ ID NO: 167651 - DNA, 25 bp, Saccharomyces pastorianus
tcagccttgcttggctctgggcgga

SEQ ID NO: 167652 - DNA, 25 bp, Saccharomyces pastorianus
ggatcgaccgtatgggtgcatccat

SEQ ID NO: 167653 - DNA, 25 bp, Saccharomyces pastorianus
tcagtgcagcgtagggactcactca

SEQ ID NO: 167654 - DNA, 25 bp, Saccharomyces pastorianus
ttatcggcgactcagtgcagcgtag

SEQ ID NO: 167655 - DNA, 25 bp, Saccharomyces pastorianus
aacgggtgcacttttgcaaggcttc

SEQ ID NO: 167656 - DNA, 25 bp, Saccharomyces pastorianus
tattgggcctgcttgggtcagcctt

SEQ ID NO: 167657 - DNA, 25 bp, Saccharomyces pastorianus
atttgctgtcgtcgcttgaacaaga

SEQ ID NO: 167658 - DNA, 25 bp, Saccharomyces pastorianus
acacacaactgtactctttctctct

SEQ ID NO: 167659 - DNA, 25 bp, Saccharomyces pastorianus
acttctctacactaaagactacagt

SEQ ID NO: 167660 - DNA, 25 bp, Saccharomyces pastorianus
gtctgctaccgttgttagcgttcaa

SEQ ID NO: 167661 - DNA, 25 bp, Saccharomyces pastorianus
aagactacagttaccgtatgtgact

SEQ ID NO: 167662 - DNA, 25 bp, Saccharomyces pastorianus
ctaccgttgttagcgttcaatctaa

SEQ ID NO: 167663 - DNA, 25 bp, Saccharomyces pastorianus
tccgcctgtcaagctaagaagtctg

SEQ ID NO: 167664 - DNA, 25 bp, Saccharomyces pastorianus
tacagttaccgtatgtgactccgcc

SEQ ID NO: 167665 - DNA, 25 bp, Saccharomyces pastorianus
agttaccgtatgtgactccgcctgt

SEQ ID NO: 167666 - DNA, 25 bp, Saccharomyces pastorianus
gctaagaagtctgctaccgttgtta

SEQ ID NO: 167667 - DNA, 25 bp, Saccharomyces pastorianus
gactccgcctgtcaagctaagaagt

SEQ ID NO: 167668 - DNA, 25 bp, Saccharomyces pastorianus
gcgttcaatctaaaactaccggtat

SEQ ID NO: 167669 - DNA, 25 bp, Saccharomyces pastorianus
caatctaaaactaccggtatcgttg

SEQ ID NO: 167670 - DNA, 25 bp, Saccharomyces pastorianus
gataactgtccatatcgcagacatt

SEQ ID NO: 167671 - DNA, 25 bp, Saccharomyces pastorianus
gaaaaaactttgtctgccgctattg

SEQ ID NO: 167672 - DNA, 25 bp, Saccharomyces pastorianus
attgagggccagagtcttccggcaa

SEQ ID NO: 167673 - DNA, 25 bp, Saccharomyces pastorianus
atgtgcagggccctcatgatgtatg

SEQ ID NO: 167674 - DNA, 25 bp, Saccharomyces pastorianus
gtgccgcctccaactcaagtgagga

SEQ ID NO: 167675 - DNA, 25 bp, Saccharomyces pastorianus
aaaaatcattcttagcacctgcagt

SEQ ID NO: 167676 - DNA, 25 bp, Saccharomyces pastorianus
agtcgcaagctccaacagatgatga

SEQ ID NO: 167677 - DNA, 25 bp, Saccharomyces pastorianus
gagtcttccggcaattaagcgtact

SEQ ID NO: 167678 - DNA, 25 bp, Saccharomyces pastorianus
agcacctgcagtggaccattttgac

SEQ ID NO: 167679 - DNA, 25 bp, Saccharomyces pastorianus
gtttcaccgaaacttccacatacgt

SEQ ID NO: 167680 - DNA, 25 bp, Saccharomyces pastorianus
aagacaccgttttattctgcgcatg

SEQ ID NO: 167681 - DNA, 25 bp, Saccharomyces pastorianus
ggatcctggcaaacatgcccgctac

SEQ ID NO: 167682 - DNA, 25 bp, Saccharomyces pastorianus
tgatcaactctatggctggaaggga

SEQ ID NO: 167683 - DNA, 25 bp, Saccharomyces pastorianus
gatttcggagaggttggaacccaag

SEQ ID NO: 167684 - DNA, 25 bp, Saccharomyces pastorianus
ggcgctattgatcaactctatggct

SEQ ID NO: 167685 - DNA, 25 bp, Saccharomyces pastorianus
gctattgatcaactctatggctgga

SEQ ID NO: 167686 - DNA, 25 bp, Saccharomyces pastorianus
ctctatggctggaagggatttcgga

SEQ ID NO: 167687 - DNA, 25 bp, Saccharomyces pastorianus
ggaacccaaggatcctggcaaacat

SEQ ID NO: 167688 - DNA, 25 bp, Saccharomyces pastorianus
aaggatcctggcaaacatgcccgct

SEQ ID NO: 167689 - DNA, 25 bp, Saccharomyces pastorianus
ggccggcgctattgatcaactctat

SEQ ID NO: 167690 - DNA, 25 bp, Saccharomyces pastorianus
caactctatggctggaagggatttc

SEQ ID NO: 167691 - DNA, 25 bp, Saccharomyces pastorianus
ggttggaacccaaggatcctggcaa

SEQ ID NO: 167692 - DNA, 25 bp, Saccharomyces pastorianus
acttaggacgcccacaaggtcacca

SEQ ID NO: 167693 - DNA, 25 bp, Saccharomyces pastorianus
ttttttgcagctgtagtgggatctt

SEQ ID NO: 167694 - DNA, 25 bp, Saccharomyces pastorianus
gggatctttgagttactatgtgtac

SEQ ID NO: 167695 - DNA, 25 bp, Saccharomyces pastorianus
tctctgatccattttttgcagctgt

SEQ ID NO: 167696 - DNA, 25 bp, Saccharomyces pastorianus
aggacgcccacaaggtcaccatcta

SEQ ID NO: 167697 - DNA, 25 bp, Saccharomyces pastorianus
cagctgtagtgggatctttgagtta

SEQ ID NO: 167698 - DNA, 25 bp, Saccharomyces pastorianus
tttgcagctgtagtgggatctttga

SEQ ID NO: 167699 - DNA, 25 bp, Saccharomyces pastorianus
tgatccattttttgcagctgtagtg

SEQ ID NO: 167700 - DNA, 25 bp, Saccharomyces pastorianus
atctttgagttactatgtgtacgaa

SEQ ID NO: 167701 - DNA, 25 bp, Saccharomyces pastorianus
gaaagaaacttaggacgcccacaag

SEQ ID NO: 167702 - DNA, 25 bp, Saccharomyces pastorianus
agattctctgatccattttttgcag

SEQ ID NO: 167703 - DNA, 25 bp, Saccharomyces pastorianus
aggctgctttctctggaacttctct

SEQ ID NO: 167704 - DNA, 25 bp, Saccharomyces pastorianus
gatgctctaggctgctttctctgga

SEQ ID NO: 167705 - DNA, 25 bp, Saccharomyces pastorianus
ctcgttgttgaatccccgcggaggt

SEQ ID NO: 167706 - DNA, 25 bp, Saccharomyces pastorianus
tgctttctctggaacttctctcctt

SEQ ID NO: 167707 - DNA, 25 bp, Saccharomyces pastorianus
tgctctaggctgctttctctggaac

SEQ ID NO: 167708 - DNA, 25 bp, Saccharomyces pastorianus
atacctcgttgttgaatccccgcgg

SEQ ID NO: 167709 - DNA, 25 bp, Saccharomyces pastorianus
ttccccacatacctcgttgttgaat

SEQ ID NO: 167710 - DNA, 25 bp, Saccharomyces pastorianus
tctaggctgctttctctggaacttc

SEQ ID NO: 167711 - DNA, 25 bp, Saccharomyces pastorianus
cacatacctcgttgttgaatccccg

SEQ ID NO: 167712 - DNA, 25 bp, Saccharomyces pastorianus
acctcgttgttgaatccccgcggag

SEQ ID NO: 167713 - DNA, 25 bp, Saccharomyces pastorianus
taggctgctttctctggaacttctc

SEQ ID NO: 167714 - DNA, 25 bp, Saccharomyces pastorianus
ccgttttcatatgtttcgtttctat

SEQ ID NO: 167715 - DNA, 25 bp, Saccharomyces pastorianus
tttcgtttctattacactatcaatc

SEQ ID NO: 167716 - DNA, 25 bp, Saccharomyces pastorianus
cgtttctattacactatcaatcctt

SEQ ID NO: 167717 - DNA, 25 bp, Saccharomyces pastorianus
ccgttgttgatagaggctacaatat

SEQ ID NO: 167718 - DNA, 25 bp, Saccharomyces pastorianus
atgtttcgtttctattacactatca

SEQ ID NO: 167719 - DNA, 25 bp, Saccharomyces pastorianus
tcgtttctattacactatcaatcct

SEQ ID NO: 167720 - DNA, 25 bp, Saccharomyces pastorianus
tgtttcgtttctattacactatcaa

SEQ ID NO: 167721 - DNA, 25 bp, Saccharomyces pastorianus
cgttgttgatagaggctacaatatt

SEQ ID NO: 167722 - DNA, 25 bp, Saccharomyces pastorianus
attgagatttattattcctcattcc

SEQ ID NO: 167723 - DNA, 25 bp, Saccharomyces pastorianus
gtttcgtttctattacactatcaat

SEQ ID NO: 167724 - DNA, 25 bp, Saccharomyces pastorianus
gttgttgatagaggctacaatatta

SEQ ID NO: 167725 - DNA, 25 bp, Saccharomyces pastorianus
gaaacatatcgtgcacatacgaagt

SEQ ID NO: 167726 - DNA, 25 bp, Saccharomyces pastorianus
agtaacaatgttcaaactcatcaat

SEQ ID NO: 167727 - DNA, 25 bp, Saccharomyces pastorianus
tttcttctcttagcgttgtaacgga

SEQ ID NO: 167728 - DNA, 25 bp, Saccharomyces pastorianus
taacggatagtgttgttggttctca

SEQ ID NO: 167729 - DNA, 25 bp, Saccharomyces pastorianus
ctcaatctgatccattgtggcaatg

SEQ ID NO: 167730 - DNA, 25 bp, Saccharomyces pastorianus
gttggttctcaatctgatccattgt

SEQ ID NO: 167731 - DNA, 25 bp, Saccharomyces pastorianus
aatggtctgttttgcttcttagcct

SEQ ID NO: 167732 - DNA, 25 bp, Saccharomyces pastorianus
atgttcttcgcttagatgttcatct

SEQ ID NO: 167733 - DNA, 25 bp, Saccharomyces pastorianus
gcttcttagccttagccattttttg

SEQ ID NO: 167734 - DNA, 25 bp, Saccharomyces pastorianus
gttcttctccagtttcttctcttag

SEQ ID NO: 167735 - DNA, 25 bp, Saccharomyces pastorianus
gtgcacatacgaagtgtacaattgt

SEQ ID NO: 167736 - DNA, 25 bp, Saccharomyces pastorianus
ggcttggtgccatcatgatatacta

SEQ ID NO: 167737 - DNA, 25 bp, Saccharomyces pastorianus
attttattacggcttggtgccatca

SEQ ID NO: 167738 - DNA, 25 bp, Saccharomyces pastorianus
acggcttggtgccatcatgatatac

SEQ ID NO: 167739 - DNA, 25 bp, Saccharomyces pastorianus
ggtgccatcatgatatactaaataa

SEQ ID NO: 167740 - DNA, 25 bp, Saccharomyces pastorianus
ttacggcttggtgccatcatgatat

SEQ ID NO: 167741 - DNA, 25 bp, Saccharomyces pastorianus
tattacggcttggtgccatcatgat

SEQ ID NO: 167742 - DNA, 25 bp, Saccharomyces pastorianus
gttatttgtctgacttttcttaact

SEQ ID NO: 167743 - DNA, 25 bp, Saccharomyces pastorianus
gtctgacttttcttaactacccatt

SEQ ID NO: 167744 - DNA, 25 bp, Saccharomyces pastorianus
gacttttcttaactacccatttcat

SEQ ID NO: 167745 - DNA, 25 bp, Saccharomyces pastorianus
tatgaattttgccttttcttaattt

SEQ ID NO: 167746 - DNA, 25 bp, Saccharomyces pastorianus
tcttaactacccatttcattttatt

SEQ ID NO: 167747 - DNA, 25 bp, Saccharomyces pastorianus
taggtttgccattttatttcacctg

SEQ ID NO: 167748 - DNA, 25 bp, Saccharomyces pastorianus
ggtttgccattttatttcacctgta

SEQ ID NO: 167749 - DNA, 25 bp, Saccharomyces pastorianus
atttcacctgtatgtccatcatgga

SEQ ID NO: 167750 - DNA, 25 bp, Saccharomyces pastorianus
ttgccattttatttcacctgtatgt

SEQ ID NO: 167751 - DNA, 25 bp, Saccharomyces pastorianus
gtagatcatttgacgtagctaagtt

SEQ ID NO: 167752 - DNA, 25 bp, Saccharomyces pastorianus
ttcacctgtatgtccatcatggaag

SEQ ID NO: 167753 - DNA, 25 bp, Saccharomyces pastorianus
attttatttcacctgtatgtccatc

SEQ ID NO: 167754 - DNA, 25 bp, Saccharomyces pastorianus
atcatttgacgtagctaagttgaaa

SEQ ID NO: 167755 - DNA, 25 bp, Saccharomyces pastorianus
ttatttcacctgtatgtccatcatg

SEQ ID NO: 167756 - DNA, 25 bp, Saccharomyces pastorianus
acctgtatgtccatcatggaaggta

SEQ ID NO: 167757 - DNA, 25 bp, Saccharomyces pastorianus
gaaggtagatcatttgacgtagcta

SEQ ID NO: 167758 - DNA, 25 bp, Saccharomyces pastorianus
catacctcaaaggcatatagttgaa

SEQ ID NO: 167759 - DNA, 25 bp, Saccharomyces pastorianus
ggcatatagttgaagcagctctatt

SEQ ID NO: 167760 - DNA, 25 bp, Saccharomyces pastorianus
catctttcacacaatctcattatct

SEQ ID NO: 167761 - DNA, 25 bp, Saccharomyces pastorianus
atctcattatctctatggagatgct

SEQ ID NO: 167762 - DNA, 25 bp, Saccharomyces pastorianus
taacagacgctcatttagcacctca

SEQ ID NO: 167763 - DNA, 25 bp, Saccharomyces pastorianus
tcctccatctgtcatcactacttaa

SEQ ID NO: 167764 - DNA, 25 bp, Saccharomyces pastorianus
tctcattatctctatggagatgctc

SEQ ID NO: 167765 - DNA, 25 bp, Saccharomyces pastorianus
tcattatctctatggagatgctctt

SEQ ID NO: 167766 - DNA, 25 bp, Saccharomyces pastorianus
cattatctctatggagatgctcttg

SEQ ID NO: 167767 - DNA, 25 bp, Saccharomyces pastorianus
ctcattatctctatggagatgctct

SEQ ID NO: 167768 - DNA, 25 bp, Saccharomyces pastorianus
ttagcacctcacatattctccatat

SEQ ID NO: 167769 - DNA, 25 bp, Saccharomyces pastorianus
gaaacatttcacgatttccaaaatt

SEQ ID NO: 167770 - DNA, 25 bp, Saccharomyces pastorianus
ggcggtttctcgaaacatttcacga

SEQ ID NO: 167771 - DNA, 25 bp, Saccharomyces pastorianus
aaatgccttttttatcaactattat

SEQ ID NO: 167772 - DNA, 25 bp, Saccharomyces pastorianus
actatcgcacctttcttatctgaat

SEQ ID NO: 167773 - DNA, 25 bp, Saccharomyces pastorianus
gagtggcctaattgtaatcttttat

SEQ ID NO: 167774 - DNA, 25 bp, Saccharomyces pastorianus
ctaattattgaaggcggtttctcga

SEQ ID NO: 167775 - DNA, 25 bp, Saccharomyces pastorianus
gaattgtattcttgagtggcctaat

SEQ ID NO: 167776 - DNA, 25 bp, Saccharomyces pastorianus
atttccaattcttattccccactat

SEQ ID NO: 167777 - DNA, 25 bp, Saccharomyces pastorianus
atcaactattatgaattctctagaa

SEQ ID NO: 167778 - DNA, 25 bp, Saccharomyces pastorianus
tctctagaaagtggttgcaaaggaa

SEQ ID NO: 167779 - DNA, 25 bp, Saccharomyces pastorianus
gcacctttcttatctgaattgtatt

SEQ ID NO: 167780 - DNA, 25 bp, Saccharomyces pastorianus
gtgttgcgactctcaagacgctctt

SEQ ID NO: 167781 - DNA, 25 bp, Saccharomyces pastorianus
actaatggtcgagacgccgtgatta

SEQ ID NO: 167782 - DNA, 25 bp, Saccharomyces pastorianus
aagtcggacttgctagatttagaac

SEQ ID NO: 167783 - DNA, 25 bp, Saccharomyces pastorianus
gaatttcaagtttctgttggacgac

SEQ ID NO: 167784 - DNA, 25 bp, Saccharomyces pastorianus
ataccttgatatcaggctacttggg

SEQ ID NO: 167785 - DNA, 25 bp, Saccharomyces pastorianus
gagaagctagcttattacttttaga

SEQ ID NO: 167786 - DNA, 25 bp, Saccharomyces pastorianus
agacgctcttctttgcatacttaaa

SEQ ID NO: 167787 - DNA, 25 bp, Saccharomyces pastorianus
agagatgcttctgccataaattggg

SEQ ID NO: 167788 - DNA, 25 bp, Saccharomyces pastorianus
ggtgattgttgttcaaaaggtccaa

SEQ ID NO: 167789 - DNA, 25 bp, Saccharomyces pastorianus
aacggtgctcgtattatcggtgatt

SEQ ID NO: 167790 - DNA, 25 bp, Saccharomyces pastorianus
aatttaatctgtgccgtgttgcgac

SEQ ID NO: 167791 - DNA, 25 bp, Saccharomyces pastorianus
gccgttcgtcagaaaagggttcaca

SEQ ID NO: 167792 - DNA, 25 bp, Saccharomyces pastorianus
gctaggacactaaatccgggcgata

SEQ ID NO: 167793 - DNA, 25 bp, Saccharomyces pastorianus
gctttcaaagaccacccagttctaa

SEQ ID NO: 167794 - DNA, 25 bp, Saccharomyces pastorianus
ttgggctaactaatgctaggacact

SEQ ID NO: 167795 - DNA, 25 bp, Saccharomyces pastorianus
gattccaaaccaattgctagacaca

SEQ ID NO: 167796 - DNA, 25 bp, Saccharomyces pastorianus
gggttcacaacttttactgatggac

SEQ ID NO: 167797 - DNA, 25 bp, Saccharomyces pastorianus
gatcccactgatcatacaaaatttg

SEQ ID NO: 167798 - DNA, 25 bp, Saccharomyces pastorianus
caatttaggttatggccgttcgtca

SEQ ID NO: 167799 - DNA, 25 bp, Saccharomyces pastorianus
gtcgctgatataaaactttcacgca

SEQ ID NO: 167800 - DNA, 25 bp, Saccharomyces pastorianus
ttgcctcccagtttgggctttcaaa

SEQ ID NO: 167801 - DNA, 25 bp, Saccharomyces pastorianus
gcaaacacgggcatttctctcattc

SEQ ID NO: 167802 - DNA, 25 bp, Saccharomyces pastorianus
gagcatcttgtggagtagcgacacc

SEQ ID NO: 167803 - DNA, 25 bp, Saccharomyces pastorianus
agtagcgacaccttcgatcttgatc

SEQ ID NO: 167804 - DNA, 25 bp, Saccharomyces pastorianus
gcatcttgtggagtagcgacacctt

SEQ ID NO: 167805 - DNA, 25 bp, Saccharomyces pastorianus
gacaccttcgatcttgatcaaagag

SEQ ID NO: 167806 - DNA, 25 bp, Saccharomyces pastorianus
tcttgtggagtagcgacaccttcga

SEQ ID NO: 167807 - DNA, 25 bp, Saccharomyces pastorianus
tagcgacaccttcgatcttgatcaa

SEQ ID NO: 167808 - DNA, 25 bp, Saccharomyces pastorianus
ggagtagcgacaccttcgatcttga

SEQ ID NO: 167809 - DNA, 25 bp, Saccharomyces pastorianus
attgagcatcttgtggagtagcgac

SEQ ID NO: 167810 - DNA, 25 bp, Saccharomyces pastorianus
gtggagtagcgacaccttcgatctt

SEQ ID NO: 167811 - DNA, 25 bp, Saccharomyces pastorianus
ttgtggagtagcgacaccttcgatc

SEQ ID NO: 167812 - DNA, 25 bp, Saccharomyces pastorianus
agcgacaccttcgatcttgatcaaa

SEQ ID NO: 167813 - DNA, 25 bp, Saccharomyces pastorianus
actttggctccaagtgcaccagtaa

SEQ ID NO: 167814 - DNA, 25 bp, Saccharomyces pastorianus
ttgttaccactgaatcctctacggg

SEQ ID NO: 167815 - DNA, 25 bp, Saccharomyces pastorianus
tgctgctacaaacgctgccggtgaa

SEQ ID NO: 167816 - DNA, 25 bp, Saccharomyces pastorianus
gttggtactaactccgctggcgaaa

SEQ ID NO: 167817 - DNA, 25 bp, Saccharomyces pastorianus
aaccactactgaatgttctgctgct

SEQ ID NO: 167818 - DNA, 25 bp, Saccharomyces pastorianus
tacaacagcttctgcttctagcatg

SEQ ID NO: 167819 - DNA, 25 bp, Saccharomyces pastorianus
gcaaccaaccctatttcaatcaaga

SEQ ID NO: 167820 - DNA, 25 bp, Saccharomyces pastorianus
gttgttaccactgagtcatctgttg

SEQ ID NO: 167821 - DNA, 25 bp, Saccharomyces pastorianus
aactacatctgtatgctctgctaag

SEQ ID NO: 167822 - DNA, 25 bp, Saccharomyces pastorianus
taactccgctggtgagacgacaact

SEQ ID NO: 167823 - DNA, 25 bp, Saccharomyces pastorianus
acgacagctattccaaccacagttg

SEQ ID NO: 167824 - DNA, 25 bp, Saccharomyces pastorianus
tcttcaactccattcagctctacta

SEQ ID NO: 167825 - DNA, 25 bp, Saccharomyces pastorianus
tacaactacgacttctgtcactaca

SEQ ID NO: 167826 - DNA, 25 bp, Saccharomyces pastorianus
atcatccaaataccctggcagtcaa

SEQ ID NO: 167827 - DNA, 25 bp, Saccharomyces pastorianus
gaaagcttttctactggcactactg

SEQ ID NO: 167828 - DNA, 25 bp, Saccharomyces pastorianus
actactgaaagctctgtagcaccag

SEQ ID NO: 167829 - DNA, 25 bp, Saccharomyces pastorianus
gaaactaccattgttccaactacaa

SEQ ID NO: 167830 - DNA, 25 bp, Saccharomyces pastorianus
actattactactacggtttgctcta

SEQ ID NO: 167831 - DNA, 25 bp, Saccharomyces pastorianus
gaaacctctgtttcttctacaaccg

SEQ ID NO: 167832 - DNA, 25 bp, Saccharomyces pastorianus
tactgtcactccatcatcatccaaa

SEQ ID NO: 167833 - DNA, 25 bp, Saccharomyces pastorianus
cctggcagtcaaacagaaacctctg

SEQ ID NO: 167834 - DNA, 25 bp, Saccharomyces pastorianus
gaaagctctgtagcaccagtaccaa

SEQ ID NO: 167835 - DNA, 25 bp, Saccharomyces pastorianus
atcgagcaccttaagcagaacattg

SEQ ID NO: 167836 - DNA, 25 bp, Saccharomyces pastorianus
ggacaggacccagctattagtaaac

SEQ ID NO: 167837 - DNA, 25 bp, Saccharomyces pastorianus
gatttccgaccaattttattggaca

SEQ ID NO: 167838 - DNA, 25 bp, Saccharomyces pastorianus
gaaagcgtcgttccttttgacattg

SEQ ID NO: 167839 - DNA, 25 bp, Saccharomyces pastorianus
tccaaagcgaggaatgtttttccat

SEQ ID NO: 167840 - DNA, 25 bp, Saccharomyces pastorianus
ccttttgacattggatttccgacca

SEQ ID NO: 167841 - DNA, 25 bp, Saccharomyces pastorianus
gtttttccattgatcggaggacgta

SEQ ID NO: 167842 - DNA, 25 bp, Saccharomyces pastorianus
ttgagtattaagttgacaccagatc

SEQ ID NO: 167843 - DNA, 25 bp, Saccharomyces pastorianus
gacaccagatcagatagaacgtcta

SEQ ID NO: 167844 - DNA, 25 bp, Saccharomyces pastorianus
gctattagtaaacaggttccttcct

SEQ ID NO: 167845 - DNA, 25 bp, Saccharomyces pastorianus
ggaggacgtaaaatcgagcacctta

SEQ ID NO: 167846 - DNA, 25 bp, Saccharomyces pastorianus
tgaggctttctggacttttaaaaca

SEQ ID NO: 167847 - DNA, 25 bp, Saccharomyces pastorianus
ctatcgttttgaggctttctggact

SEQ ID NO: 167848 - DNA, 25 bp, Saccharomyces pastorianus
agacattgagtgctattaacttaga

SEQ ID NO: 167849 - DNA, 25 bp, Saccharomyces pastorianus
acttcctaagcaatcctatcgtttt

SEQ ID NO: 167850 - DNA, 25 bp, Saccharomyces pastorianus
gacattctacttcctaagcaatcct

SEQ ID NO: 167851 - DNA, 25 bp, Saccharomyces pastorianus
gagtttctctttgacaaaattgctt

SEQ ID NO: 167852 - DNA, 25 bp, Saccharomyces pastorianus
ggctgtaattttgcagtattttatc

SEQ ID NO: 167853 - DNA, 25 bp, Saccharomyces pastorianus
taagaggttctttggctgtaatttt

SEQ ID NO: 167854 - DNA, 25 bp, Saccharomyces pastorianus
gaaatctgtgctacatttgttatta

SEQ ID NO: 167855 - DNA, 25 bp, Saccharomyces pastorianus
gttattaaacgttgaactatggcca

SEQ ID NO: 167856 - DNA, 25 bp, Saccharomyces pastorianus
aacagctatgaatcgccgttacttt

SEQ ID NO: 167857 - DNA, 25 bp, Saccharomyces pastorianus
tgtccgcgtatgtcggtccattaga

SEQ ID NO: 167858 - DNA, 25 bp, Saccharomyces pastorianus
aagcttatccgtatgattaaatcta

SEQ ID NO: 167859 - DNA, 25 bp, Saccharomyces pastorianus
cgcgtatgtcggtccattagattca

SEQ ID NO: 167860 - DNA, 25 bp, Saccharomyces pastorianus
agttttgtccgcgtatgtcggtcca

SEQ ID NO: 167861 - DNA, 25 bp, Saccharomyces pastorianus
gattatccaagcttatccgtatgat

SEQ ID NO: 167862 - DNA, 25 bp, Saccharomyces pastorianus
aagtactctgagattgaatatatca

SEQ ID NO: 167863 - DNA, 25 bp, Saccharomyces pastorianus
gaatatatcagcgaatctggtgatt

SEQ ID NO: 167864 - DNA, 25 bp, Saccharomyces pastorianus
gattaaatctaaggctgtatcagat

SEQ ID NO: 167865 - DNA, 25 bp, Saccharomyces pastorianus
attatagttttgtccgcgtatgtcg

SEQ ID NO: 167866 - DNA, 25 bp, Saccharomyces pastorianus
gcgaatctggtgattatccaagctt

SEQ ID NO: 167867 - DNA, 25 bp, Saccharomyces pastorianus
atcagattatagttttgtccgcgta

SEQ ID NO: 167868 - DNA, 25 bp, Saccharomyces pastorianus
ctctccatctgtctctacgaaatta

SEQ ID NO: 167869 - DNA, 25 bp, Saccharomyces pastorianus
ttatcacacattaaccctgcaatcc

SEQ ID NO: 167870 - DNA, 25 bp, Saccharomyces pastorianus
ttctacgggtggaaactcagactgc

SEQ ID NO: 167871 - DNA, 25 bp, Saccharomyces pastorianus
gggtggaaactcagactgcagctga

SEQ ID NO: 167872 - DNA, 25 bp, Saccharomyces pastorianus
acgggtggaaactcagactgcagct

SEQ ID NO: 167873 - DNA, 25 bp, Saccharomyces pastorianus
gaaactcagactgcagctgagattt

SEQ ID NO: 167874 - DNA, 25 bp, Saccharomyces pastorianus
ctacgggtggaaactcagactgcag

SEQ ID NO: 167875 - DNA, 25 bp, Saccharomyces pastorianus
tgccagaaggtttctacgggtggaa

SEQ ID NO: 167876 - DNA, 25 bp, Saccharomyces pastorianus
ccatctgtctctacgaaattattgg

SEQ ID NO: 167877 - DNA, 25 bp, Saccharomyces pastorianus
ttgccagaaggtttctacgggtgga

SEQ ID NO: 167878 - DNA, 25 bp, Saccharomyces pastorianus
ctccatctgtctctacgaaattatt

SEQ ID NO: 167879 - DNA, 25 bp, Saccharomyces pastorianus
tagcctatgatttaagtatttcagc

SEQ ID NO: 167880 - DNA, 25 bp, Saccharomyces pastorianus
gatttcaattccttttattatacaa

SEQ ID NO: 167881 - DNA, 25 bp, Saccharomyces pastorianus
gacaagatctacaatttcggtgaac

SEQ ID NO: 167882 - DNA, 25 bp, Saccharomyces pastorianus
gacaccatagtcgatgattccaatt

SEQ ID NO: 167883 - DNA, 25 bp, Saccharomyces pastorianus
aagtatttcagcattgttgggtgac

SEQ ID NO: 167884 - DNA, 25 bp, Saccharomyces pastorianus
ttagcggaacgccaacaattagcct

SEQ ID NO: 167885 - DNA, 25 bp, Saccharomyces pastorianus
ttcggtgaactgttacatcatcaag

SEQ ID NO: 167886 - DNA, 25 bp, Saccharomyces pastorianus
caagcatcactttagcggaacgcca

SEQ ID NO: 167887 - DNA, 25 bp, Saccharomyces pastorianus
tacatcatcaagtaatggacaccat

SEQ ID NO: 167888 - DNA, 25 bp, Saccharomyces pastorianus
ggaacgccaacaattagcctatgat

SEQ ID NO: 167889 - DNA, 25 bp, Saccharomyces pastorianus
gcattgttgggtgacaagatctaca

SEQ ID NO: 167890 - DNA, 25 bp, Saccharomyces pastorianus
aaaatacctaattccttcgcacatt

SEQ ID NO: 167891 - DNA, 25 bp, Saccharomyces pastorianus
gctaacaataaacaacgtcaacaaa

SEQ ID NO: 167892 - DNA, 25 bp, Saccharomyces pastorianus
caacgtcaacaaaagcaaaagcgta

SEQ ID NO: 167893 - DNA, 25 bp, Saccharomyces pastorianus
ttcgcacatttcaaagctaacaata

SEQ ID NO: 167894 - DNA, 25 bp, Saccharomyces pastorianus
cgtcaacaaaagcaaaagcgtaaat

SEQ ID NO: 167895 - DNA, 25 bp, Saccharomyces pastorianus
taattccttcgcacatttcaaagct

SEQ ID NO: 167896 - DNA, 25 bp, Saccharomyces pastorianus
taaacaacgtcaacaaaagcaaaag

SEQ ID NO: 167897 - DNA, 25 bp, Saccharomyces pastorianus
gcacatttcaaagctaacaataaac

SEQ ID NO: 167898 - DNA, 25 bp, Saccharomyces pastorianus
agcaaaagcgtaaataaatatccat

SEQ ID NO: 167899 - DNA, 25 bp, Saccharomyces pastorianus
ttccttcgcacatttcaaagctaac

SEQ ID NO: 167900 - DNA, 25 bp, Saccharomyces pastorianus
aagctaacaataaacaacgtcaaca

SEQ ID NO: 167901 - DNA, 25 bp, Saccharomyces pastorianus
ctcgttattcccaagcactcttaaa

SEQ ID NO: 167902 - DNA, 25 bp, Saccharomyces pastorianus
atagggttcagcgaatatgcagtac

SEQ ID NO: 167903 - DNA, 25 bp, Saccharomyces pastorianus
cactggcggtatatgtgcacctgta

SEQ ID NO: 167904 - DNA, 25 bp, Saccharomyces pastorianus
taaaactggctctatacctgaccgc

SEQ ID NO: 167905 - DNA, 25 bp, Saccharomyces pastorianus
gaccatatactcaatgaccagacat

SEQ ID NO: 167906 - DNA, 25 bp, Saccharomyces pastorianus
gacattgtccaatggtactgctaga

SEQ ID NO: 167907 - DNA, 25 bp, Saccharomyces pastorianus
aacgccgggctaggtggtcatttgc

SEQ ID NO: 167908 - DNA, 25 bp, Saccharomyces pastorianus
acctgtagctcgtgctgctttagtg

SEQ ID NO: 167909 - DNA, 25 bp, Saccharomyces pastorianus
tttgatagcgtactcgttattccca

SEQ ID NO: 167910 - DNA, 25 bp, Saccharomyces pastorianus
gtcgcagcaatatgtgtcgcagcca

SEQ ID NO: 167911 - DNA, 25 bp, Saccharomyces pastorianus
taacactgctactctagaacgccgg

SEQ ID NO: 167912 - DNA, 25 bp, Saccharomyces pastorianus
tagggcagtcttggtcagctatatt

SEQ ID NO: 167913 - DNA, 25 bp, Saccharomyces pastorianus
aaatagggcagtcttggtcagctat

SEQ ID NO: 167914 - DNA, 25 bp, Saccharomyces pastorianus
gcagtcttggtcagctatatttgag

SEQ ID NO: 167915 - DNA, 25 bp, Saccharomyces pastorianus
atagggcagtcttggtcagctatat

SEQ ID NO: 167916 - DNA, 25 bp, Saccharomyces pastorianus
taaatagggcagtcttggtcagcta

SEQ ID NO: 167917 - DNA, 25 bp, Saccharomyces pastorianus
ataaatagggcagtcttggtcagct

SEQ ID NO: 167918 - DNA, 25 bp, Saccharomyces pastorianus
aatagggcagtcttggtcagctata

SEQ ID NO: 167919 - DNA, 25 bp, Saccharomyces pastorianus
cagtcttggtcagctatatttgaga

SEQ ID NO: 167920 - DNA, 25 bp, Saccharomyces pastorianus
ggcagtcttggtcagctatatttga

SEQ ID NO: 167921 - DNA, 25 bp, Saccharomyces pastorianus
agggcagtcttggtcagctatattt

SEQ ID NO: 167922 - DNA, 25 bp, Saccharomyces pastorianus
gggcagtcttggtcagctatatttg

SEQ ID NO: 167923 - DNA, 25 bp, Saccharomyces pastorianus
gactcgcgggacaagctgtctctga

SEQ ID NO: 167924 - DNA, 25 bp, Saccharomyces pastorianus
atagaggctggttcccttgttcttt

SEQ ID NO: 167925 - DNA, 25 bp, Saccharomyces pastorianus
gctgtctctgagattgggcgattta

SEQ ID NO: 167926 - DNA, 25 bp, Saccharomyces pastorianus
gatagcagccccttgatgttggata

SEQ ID NO: 167927 - DNA, 25 bp, Saccharomyces pastorianus
atggtgttctcatacggcattgcgc

SEQ ID NO: 167928 - DNA, 25 bp, Saccharomyces pastorianus
gcttacagcccatcgatgtggtgga

SEQ ID NO: 167929 - DNA, 25 bp, Saccharomyces pastorianus
gaataaaggatagcggcggccacga

SEQ ID NO: 167930 - DNA, 25 bp, Saccharomyces pastorianus
gggcgatttagtctacgtactcaat

SEQ ID NO: 167931 - DNA, 25 bp, Saccharomyces pastorianus
ttatgagcacttcagcgactcgcgg

SEQ ID NO: 167932 - DNA, 25 bp, Saccharomyces pastorianus
atgagtttccttgggtcagacgcca

SEQ ID NO: 167933 - DNA, 25 bp, Saccharomyces pastorianus
gggtcagacgccagtacgactacaa

SEQ ID NO: 167934 - DNA, 25 bp, Saccharomyces pastorianus
gaaccaaatcgtcatctggcagttt

SEQ ID NO: 167935 - DNA, 25 bp, Saccharomyces pastorianus
acagcccgctttaaggaacttgcct

SEQ ID NO: 167936 - DNA, 25 bp, Saccharomyces pastorianus
tgcgccgttcaagaatcccactgaa

SEQ ID NO: 167937 - DNA, 25 bp, Saccharomyces pastorianus
ttagcgccggatacaacatctctta

SEQ ID NO: 167938 - DNA, 25 bp, Saccharomyces pastorianus
tcatctggcagttttgtctcgttag

SEQ ID NO: 167939 - DNA, 25 bp, Saccharomyces pastorianus
aagtttgctactttggagcctgcgc

SEQ ID NO: 167940 - DNA, 25 bp, Saccharomyces pastorianus
ggtcatccatgatcctttgcaaggt

SEQ ID NO: 167941 - DNA, 25 bp, Saccharomyces pastorianus
gacttgaatttgtcccatcatccgg

SEQ ID NO: 167942 - DNA, 25 bp, Saccharomyces pastorianus
ttgaagagacacctcccgtggaagt

SEQ ID NO: 167943 - DNA, 25 bp, Saccharomyces pastorianus
gtatcaaatcaactggcggtgtcaa

SEQ ID NO: 167944 - DNA, 25 bp, Saccharomyces pastorianus
gacatggcctgttttcttttgaaga

SEQ ID NO: 167945 - DNA, 25 bp, Saccharomyces pastorianus
cttctccaactgaaaacggtgtctt

SEQ ID NO: 167946 - DNA, 25 bp, Saccharomyces pastorianus
aacgaatacagattggccttctacc

SEQ ID NO: 167947 - DNA, 25 bp, Saccharomyces pastorianus
cagattggccttctaccaagtcact

SEQ ID NO: 167948 - DNA, 25 bp, Saccharomyces pastorianus
gctaagtacttgatcgaccacatca

SEQ ID NO: 167949 - DNA, 25 bp, Saccharomyces pastorianus
gtgctgtcggtaacttgggtaacgc

SEQ ID NO: 167950 - DNA, 25 bp, Saccharomyces pastorianus
gtctcttctccaactgaaaacggtg

SEQ ID NO: 167951 - DNA, 25 bp, Saccharomyces pastorianus
tgggtaacgctgtcactgtcactga

SEQ ID NO: 167952 - DNA, 25 bp, Saccharomyces pastorianus
ctgtcactgaagatggtaccgttgt

SEQ ID NO: 167953 - DNA, 25 bp, Saccharomyces pastorianus
taccgttgttactgttgtttccact

SEQ ID NO: 167954 - DNA, 25 bp, Saccharomyces pastorianus
cagcttcctacgctaagtacttgat

SEQ ID NO: 167955 - DNA, 25 bp, Saccharomyces pastorianus
gtaacttgggtaacgctgtcactgt

SEQ ID NO: 167956 - DNA, 25 bp, Saccharomyces pastorianus
gatgtctgttttatgtccccacgtt

SEQ ID NO: 167957 - DNA, 25 bp, Saccharomyces pastorianus
tatttgatgtctgttttatgtcccc

SEQ ID NO: 167958 - DNA, 25 bp, Saccharomyces pastorianus
gtctgttttatgtccccacgttaca

SEQ ID NO: 167959 - DNA, 25 bp, Saccharomyces pastorianus
atttgatgtctgttttatgtcccca

SEQ ID NO: 167960 - DNA, 25 bp, Saccharomyces pastorianus
tttgatgtctgttttatgtccccac

SEQ ID NO: 167961 - DNA, 25 bp, Saccharomyces pastorianus
ttgatgtctgttttatgtccccacg

SEQ ID NO: 167962 - DNA, 25 bp, Saccharomyces pastorianus
tgtctgttttatgtccccacgttac

SEQ ID NO: 167963 - DNA, 25 bp, Saccharomyces pastorianus
tctgttttatgtccccacgttacac

SEQ ID NO: 167964 - DNA, 25 bp, Saccharomyces pastorianus
atgtctgttttatgtccccacgtta

SEQ ID NO: 167965 - DNA, 25 bp, Saccharomyces pastorianus
ccattatatttgatgtctgttttat

SEQ ID NO: 167966 - DNA, 25 bp, Saccharomyces pastorianus
tgatgtctgttttatgtccccacgt

SEQ ID NO: 167967 - DNA, 25 bp, Saccharomyces pastorianus
gagcgcaagctacttctaatttatg

SEQ ID NO: 167968 - DNA, 25 bp, Saccharomyces pastorianus
gaaattctcgaagccttgcaagtct

SEQ ID NO: 167969 - DNA, 25 bp, Saccharomyces pastorianus
agattcaccgtcctcagtagtaacg

SEQ ID NO: 167970 - DNA, 25 bp, Saccharomyces pastorianus
gtctttttatcctttttcgtcatct

SEQ ID NO: 167971 - DNA, 25 bp, Saccharomyces pastorianus
gtcaaaatcgtcatcttcggtttcg

SEQ ID NO: 167972 - DNA, 25 bp, Saccharomyces pastorianus
taacggtctgtacctttactgtctt

SEQ ID NO: 167973 - DNA, 25 bp, Saccharomyces pastorianus
tactatacagttccacaagcttttg

SEQ ID NO: 167974 - DNA, 25 bp, Saccharomyces pastorianus
gtcatcttcggtttcgttggcaatg

SEQ ID NO: 167975 - DNA, 25 bp, Saccharomyces pastorianus
aaatagcttcacagattcaccgtcc

SEQ ID NO: 167976 - DNA, 25 bp, Saccharomyces pastorianus
gaacttgcccttttgcaaaacaact

SEQ ID NO: 167977 - DNA, 25 bp, Saccharomyces pastorianus
aagcttttgatacccctgagcgcaa

SEQ ID NO: 167978 - DNA, 25 bp, Saccharomyces pastorianus
gtttccagagcttacggtggttcca

SEQ ID NO: 167979 - DNA, 25 bp, Saccharomyces pastorianus
cagagcttacggtggttccagatgt

SEQ ID NO: 167980 - DNA, 25 bp, Saccharomyces pastorianus
agcttacggtggttccagatgtgcc

SEQ ID NO: 167981 - DNA, 25 bp, Saccharomyces pastorianus
ctgtttccagagcttacggtggttc

SEQ ID NO: 167982 - DNA, 25 bp, Saccharomyces pastorianus
gtggttccagatgtgccaactgtgt

SEQ ID NO: 167983 - DNA, 25 bp, Saccharomyces pastorianus
ttccagagcttacggtggttccaga

SEQ ID NO: 167984 - DNA, 25 bp, Saccharomyces pastorianus
gactgtttccagagcttacggtggt

SEQ ID NO: 167985 - DNA, 25 bp, Saccharomyces pastorianus
cggtggttccagatgtgccaactgt

SEQ ID NO: 167986 - DNA, 25 bp, Saccharomyces pastorianus
tacggtggttccagatgtgccaact

SEQ ID NO: 167987 - DNA, 25 bp, Saccharomyces pastorianus
cttacggtggttccagatgtgccaa

SEQ ID NO: 167988 - DNA, 25 bp, Saccharomyces pastorianus
aagactgtttccagagcttacggtg

SEQ ID NO: 167989 - DNA, 25 bp, Saccharomyces pastorianus
gagagcttattgtcaagtgtatctt

SEQ ID NO: 167990 - DNA, 25 bp, Saccharomyces pastorianus
gtgcttattagacttatatccaggc

SEQ ID NO: 167991 - DNA, 25 bp, Saccharomyces pastorianus
aatcaaacacttgaaccccagcttt

SEQ ID NO: 167992 - DNA, 25 bp, Saccharomyces pastorianus
gacgatgtggactgcgagattttgt

SEQ ID NO: 167993 - DNA, 25 bp, Saccharomyces pastorianus
gattttgtgttcgttgcacttcacc

SEQ ID NO: 167994 - DNA, 25 bp, Saccharomyces pastorianus
gaatacatctcgatcttgaaactta

SEQ ID NO: 167995 - DNA, 25 bp, Saccharomyces pastorianus
agaactgcaaggtctcttaaaaatg

SEQ ID NO: 167996 - DNA, 25 bp, Saccharomyces pastorianus
gtttgccattatcgaaagcctaatt

SEQ ID NO: 167997 - DNA, 25 bp, Saccharomyces pastorianus
caataaccctccaaatgacgatgtg

SEQ ID NO: 167998 - DNA, 25 bp, Saccharomyces pastorianus
gaaccccagctttcagaatacatct

SEQ ID NO: 167999 - DNA, 25 bp, Saccharomyces pastorianus
gttgcacttcaccacagtttattct

SEQ ID NO: 168000 - DNA, 25 bp, Saccharomyces pastorianus
atgctttttgtgcagtcgctggtat

SEQ ID NO: 168001 - DNA, 25 bp, Saccharomyces pastorianus
atgaacttcgtgatgctttttgtgc

SEQ ID NO: 168002 - DNA, 25 bp, Saccharomyces pastorianus
gcgtcgtcgatcctgatgacagtga

SEQ ID NO: 168003 - DNA, 25 bp, Saccharomyces pastorianus
aatgggctgactcggtggccaactc

SEQ ID NO: 168004 - DNA, 25 bp, Saccharomyces pastorianus
acaagttcgttgtcaacctggccaa

SEQ ID NO: 168005 - DNA, 25 bp, Saccharomyces pastorianus
gctggtatgtacactagcgttgtgc

SEQ ID NO: 168006 - DNA, 25 bp, Saccharomyces pastorianus
ggccaacttcaacatgaacttcgtg

SEQ ID NO: 168007 - DNA, 25 bp, Saccharomyces pastorianus
atcctgtcgtactgcgcgtcgtcga

SEQ ID NO: 168008 - DNA, 25 bp, Saccharomyces pastorianus
gcaagcatgaatgggctgactcggt

SEQ ID NO: 168009 - DNA, 25 bp, Saccharomyces pastorianus
gtgcagtcgctggtatgtacactag

SEQ ID NO: 168010 - DNA, 25 bp, Saccharomyces pastorianus
tcaacctggccaacttcaacatgaa

SEQ ID NO: 168011 - DNA, 25 bp, Saccharomyces pastorianus
ccaggtctgtgtacaccgaggaaat

SEQ ID NO: 168012 - DNA, 25 bp, Saccharomyces pastorianus
ggtcctcactgtatcccaaatatgt

SEQ ID NO: 168013 - DNA, 25 bp, Saccharomyces pastorianus
aacgaattaggtgcagtggctccca

SEQ ID NO: 168014 - DNA, 25 bp, Saccharomyces pastorianus
caatatttggaacaagacggtatca

SEQ ID NO: 168015 - DNA, 25 bp, Saccharomyces pastorianus
ttactcgttttggtcctcactgtat

SEQ ID NO: 168016 - DNA, 25 bp, Saccharomyces pastorianus
gtggctcccaagttaaactggtctg

SEQ ID NO: 168017 - DNA, 25 bp, Saccharomyces pastorianus
gaaaactccaggtctgtgtacaccg

SEQ ID NO: 168018 - DNA, 25 bp, Saccharomyces pastorianus
agagacgctacctggattttgccga

SEQ ID NO: 168019 - DNA, 25 bp, Saccharomyces pastorianus
acgctacctggattttgccgaataa

SEQ ID NO: 168020 - DNA, 25 bp, Saccharomyces pastorianus
gattttgccgaataacactatgaag

SEQ ID NO: 168021 - DNA, 25 bp, Saccharomyces pastorianus
aactggtctgcaccaagagacgcta

SEQ ID NO: 168022 - DNA, 25 bp, Saccharomyces pastorianus
gtgccttaggcatggatcaaaattc

SEQ ID NO: 168023 - DNA, 25 bp, Saccharomyces pastorianus
tcaagagaatccgaggtgccttagg

SEQ ID NO: 168024 - DNA, 25 bp, Saccharomyces pastorianus
atccgaggtgccttaggcatggatc

SEQ ID NO: 168025 - DNA, 25 bp, Saccharomyces pastorianus
ctatcaagagaatccgaggtgcctt

SEQ ID NO: 168026 - DNA, 25 bp, Saccharomyces pastorianus
agaatccgaggtgccttaggcatgg

SEQ ID NO: 168027 - DNA, 25 bp, Saccharomyces pastorianus
ggcatggatcaaaattcggaagaaa

SEQ ID NO: 168028 - DNA, 25 bp, Saccharomyces pastorianus
ccgaggtgccttaggcatggatcaa

SEQ ID NO: 168029 - DNA, 25 bp, Saccharomyces pastorianus
cttaggcatggatcaaaattcggaa

SEQ ID NO: 168030 - DNA, 25 bp, Saccharomyces pastorianus
gagaatccgaggtgccttaggcatg

SEQ ID NO: 168031 - DNA, 25 bp, Saccharomyces pastorianus
agagaatccgaggtgccttaggcat

SEQ ID NO: 168032 - DNA, 25 bp, Saccharomyces pastorianus
gccttaggcatggatcaaaattcgg

SEQ ID NO: 168033 - DNA, 25 bp, Saccharomyces pastorianus
cattgtagatgacttgcacgattgg

SEQ ID NO: 168034 - DNA, 25 bp, Saccharomyces pastorianus
tgcacgattgggaaacggagttcta

SEQ ID NO: 168035 - DNA, 25 bp, Saccharomyces pastorianus
ttgtagatgacttgcacgattggga

SEQ ID NO: 168036 - DNA, 25 bp, Saccharomyces pastorianus
gacttgcacgattgggaaacggagt

SEQ ID NO: 168037 - DNA, 25 bp, Saccharomyces pastorianus
atgacttgcacgattgggaaacgga

SEQ ID NO: 168038 - DNA, 25 bp, Saccharomyces pastorianus
aacctcgattttgacgctttcgagt

SEQ ID NO: 168039 - DNA, 25 bp, Saccharomyces pastorianus
gtagatgacttgcacgattgggaaa

SEQ ID NO: 168040 - DNA, 25 bp, Saccharomyces pastorianus
tagatgacttgcacgattgggaaac

SEQ ID NO: 168041 - DNA, 25 bp, Saccharomyces pastorianus
agttctaccgtcagtcgctatttgg

SEQ ID NO: 168042 - DNA, 25 bp, Saccharomyces pastorianus
cctcattgtagatgacttgcacgat

SEQ ID NO: 168043 - DNA, 25 bp, Saccharomyces pastorianus
gtaagcaatctctgtgagcgacaca

SEQ ID NO: 168044 - DNA, 25 bp, Saccharomyces pastorianus
taagggtgattaccaccgattaagg

SEQ ID NO: 168045 - DNA, 25 bp, Saccharomyces pastorianus
gattaccaccgattaaggaaggctg

SEQ ID NO: 168046 - DNA, 25 bp, Saccharomyces pastorianus
aaccgatacaggtacgcgagttcta

SEQ ID NO: 168047 - DNA, 25 bp, Saccharomyces pastorianus
ggtgattaccaccgattaaggaagg

SEQ ID NO: 168048 - DNA, 25 bp, Saccharomyces pastorianus
tacaggtacgcgagttctatggact

SEQ ID NO: 168049 - DNA, 25 bp, Saccharomyces pastorianus
gtaagggtgattaccaccgattaag

SEQ ID NO: 168050 - DNA, 25 bp, Saccharomyces pastorianus
gtgattaccaccgattaaggaaggc

SEQ ID NO: 168051 - DNA, 25 bp, Saccharomyces pastorianus
ccgatacaggtacgcgagttctatg

SEQ ID NO: 168052 - DNA, 25 bp, Saccharomyces pastorianus
gggtgattaccaccgattaaggaag

SEQ ID NO: 168053 - DNA, 25 bp, Saccharomyces pastorianus
tgattaccaccgattaaggaaggct

SEQ ID NO: 168054 - DNA, 25 bp, Saccharomyces pastorianus
gtataaccgatacaggtacgcgagt

SEQ ID NO: 168055 - DNA, 25 bp, Saccharomyces pastorianus
ggcagctacgtgacccacgagaagg

SEQ ID NO: 168056 - DNA, 25 bp, Saccharomyces pastorianus
agggccatttcgtatatttttacat

SEQ ID NO: 168057 - DNA, 25 bp, Saccharomyces pastorianus
taaaaacttcggcagctacgtgacc

SEQ ID NO: 168058 - DNA, 25 bp, Saccharomyces pastorianus
gtgacccacgagaagggccatttcg

SEQ ID NO: 168059 - DNA, 25 bp, Saccharomyces pastorianus
aaaacttcggcagctacgtgaccca

SEQ ID NO: 168060 - DNA, 25 bp, Saccharomyces pastorianus
tcgttggtaaaaacttcggcagcta

SEQ ID NO: 168061 - DNA, 25 bp, Saccharomyces pastorianus
ttggtaaaaacttcggcagctacgt

SEQ ID NO: 168062 - DNA, 25 bp, Saccharomyces pastorianus
gagaagggccatttcgtatattttt

SEQ ID NO: 168063 - DNA, 25 bp, Saccharomyces pastorianus
gacccacgagaagggccatttcgta

SEQ ID NO: 168064 - DNA, 25 bp, Saccharomyces pastorianus
ccatttcgtatatttttacatcggg

SEQ ID NO: 168065 - DNA, 25 bp, Saccharomyces pastorianus
ttcggcagctacgtgacccacgaga

SEQ ID NO: 168066 - DNA, 25 bp, Saccharomyces pastorianus
tatgccagaactatcggtatcgccg

SEQ ID NO: 168067 - DNA, 25 bp, Saccharomyces pastorianus
actgctgcttatgccagaactatcg

SEQ ID NO: 168068 - DNA, 25 bp, Saccharomyces pastorianus
aaagtgcacttcgaccaagctggta

SEQ ID NO: 168069 - DNA, 25 bp, Saccharomyces pastorianus
gaacgtgttaaagtgcacttcgacc

SEQ ID NO: 168070 - DNA, 25 bp, Saccharomyces pastorianus
agaactatcggtatcgccgttgacc

SEQ ID NO: 168071 - DNA, 25 bp, Saccharomyces pastorianus
agtgcacttcgaccaagctggtaag

SEQ ID NO: 168072 - DNA, 25 bp, Saccharomyces pastorianus
taacagaaaggtcagagctggcaga

SEQ ID NO: 168073 - DNA, 25 bp, Saccharomyces pastorianus
attgctccaagacctctagatctct

SEQ ID NO: 168074 - DNA, 25 bp, Saccharomyces pastorianus
tctagatctcttgagacctgttgtt

SEQ ID NO: 168075 - DNA, 25 bp, Saccharomyces pastorianus
aactatcggtatcgccgttgaccac

SEQ ID NO: 168076 - DNA, 25 bp, Saccharomyces pastorianus
aagacctctagatctcttgagacct

SEQ ID NO: 168077 - DNA, 25 bp, Saccharomyces pastorianus
gtgtcacaatataaaccattttctg

SEQ ID NO: 168078 - DNA, 25 bp, Saccharomyces pastorianus
gatccttctcagtttgattttgaaa

SEQ ID NO: 168079 - DNA, 25 bp, Saccharomyces pastorianus
gttaacgagaaacgcatagtgtcta

SEQ ID NO: 168080 - DNA, 25 bp, Saccharomyces pastorianus
gcatagtgtctaaaaccttcggaaa

SEQ ID NO: 168081 - DNA, 25 bp, Saccharomyces pastorianus
agaacctgaaaatgaagatctccta

SEQ ID NO: 168082 - DNA, 25 bp, Saccharomyces pastorianus
ggccaaagacgctcttgactctgta

SEQ ID NO: 168083 - DNA, 25 bp, Saccharomyces pastorianus
aaatcaatggccaaagacgctcttg

SEQ ID NO: 168084 - DNA, 25 bp, Saccharomyces pastorianus
gaaactgtattgcaactgagaaatg

SEQ ID NO: 168085 - DNA, 25 bp, Saccharomyces pastorianus
acgaacaagatacagcattaccaag

SEQ ID NO: 168086 - DNA, 25 bp, Saccharomyces pastorianus
atagaagattacttggtgtcacaat

SEQ ID NO: 168087 - DNA, 25 bp, Saccharomyces pastorianus
ttaccaagcaatattgatccttctc

SEQ ID NO: 168088 - DNA, 25 bp, Saccharomyces pastorianus
atttgccatggtttcatcgtatttt

SEQ ID NO: 168089 - DNA, 25 bp, Saccharomyces pastorianus
agaagtcccatctagattaaccaat

SEQ ID NO: 168090 - DNA, 25 bp, Saccharomyces pastorianus
tcatagcgtgtctcagatctctgtc

SEQ ID NO: 168091 - DNA, 25 bp, Saccharomyces pastorianus
atctctgtccattaagatcttaatc

SEQ ID NO: 168092 - DNA, 25 bp, Saccharomyces pastorianus
taaccaattttttttcgatcatgat

SEQ ID NO: 168093 - DNA, 25 bp, Saccharomyces pastorianus
gccatggtttcatcgtattttcttc

SEQ ID NO: 168094 - DNA, 25 bp, Saccharomyces pastorianus
tcatcgtattttcttcattggcaga

SEQ ID NO: 168095 - DNA, 25 bp, Saccharomyces pastorianus
gtgtctcagatctctgtccattaag

SEQ ID NO: 168096 - DNA, 25 bp, Saccharomyces pastorianus
attttcttcattggcagaagtccca

SEQ ID NO: 168097 - DNA, 25 bp, Saccharomyces pastorianus
gtcccatctagattaaccaattttt

SEQ ID NO: 168098 - DNA, 25 bp, Saccharomyces pastorianus
gatcttaatcatttgccatggtttc

SEQ ID NO: 168099 - DNA, 25 bp, Saccharomyces pastorianus
ttgtctcttagttgcacttcatcta

SEQ ID NO: 168100 - DNA, 25 bp, Saccharomyces pastorianus
gagctattttgcgtttgtctcttag

SEQ ID NO: 168101 - DNA, 25 bp, Saccharomyces pastorianus
gtctattcaacgttttcaacctata

SEQ ID NO: 168102 - DNA, 25 bp, Saccharomyces pastorianus
aaacggtgttattcgatgggatgaa

SEQ ID NO: 168103 - DNA, 25 bp, Saccharomyces pastorianus
ttggcttttcgagatagctattaaa

SEQ ID NO: 168104 - DNA, 25 bp, Saccharomyces pastorianus
gtgtctcaatttatgtttactcaag

SEQ ID NO: 168105 - DNA, 25 bp, Saccharomyces pastorianus
aattgcaacattttccttggcggtg

SEQ ID NO: 168106 - DNA, 25 bp, Saccharomyces pastorianus
cttggcggtgtgtgtctcaatttat

SEQ ID NO: 168107 - DNA, 25 bp, Saccharomyces pastorianus
aagtttgtcggtgggagctattttg

SEQ ID NO: 168108 - DNA, 25 bp, Saccharomyces pastorianus
gtttactcaagtctattcaacgttt

SEQ ID NO: 168109 - DNA, 25 bp, Saccharomyces pastorianus
aaccttatttggcttttcgagatag

SEQ ID NO: 168110 - DNA, 25 bp, Saccharomyces pastorianus
aatcatgttgccagaatcgtcgaat

SEQ ID NO: 168111 - DNA, 25 bp, Saccharomyces pastorianus
gcagccatactgtctgatatcgttc

SEQ ID NO: 168112 - DNA, 25 bp, Saccharomyces pastorianus
tatatcagccttcccatatgttttc

SEQ ID NO: 168113 - DNA, 25 bp, Saccharomyces pastorianus
caagcattgttggacctgatcgaca

SEQ ID NO: 168114 - DNA, 25 bp, Saccharomyces pastorianus
gtctgttcttcggatgtagttctat

SEQ ID NO: 168115 - DNA, 25 bp, Saccharomyces pastorianus
actgcaactagcttttatccaacac

SEQ ID NO: 168116 - DNA, 25 bp, Saccharomyces pastorianus
taagagtgcgtgctgcagccatact

SEQ ID NO: 168117 - DNA, 25 bp, Saccharomyces pastorianus
gggcttgacgccaacaaatacactt

SEQ ID NO: 168118 - DNA, 25 bp, Saccharomyces pastorianus
tatccaacacttcctgtcagcagaa

SEQ ID NO: 168119 - DNA, 25 bp, Saccharomyces pastorianus
gatagagtctctttcaacacggaag

SEQ ID NO: 168120 - DNA, 25 bp, Saccharomyces pastorianus
gggcaagctgccaagaacaccatca

SEQ ID NO: 168121 - DNA, 25 bp, Saccharomyces pastorianus
gctcaatgctgccataggtcaagat

SEQ ID NO: 168122 - DNA, 25 bp, Saccharomyces pastorianus
tgctgccataggtcaagatgggatc

SEQ ID NO: 168123 - DNA, 25 bp, Saccharomyces pastorianus
atagagctcaatgctgccataggtc

SEQ ID NO: 168124 - DNA, 25 bp, Saccharomyces pastorianus
aacatagagctcaatgctgccatag

SEQ ID NO: 168125 - DNA, 25 bp, Saccharomyces pastorianus
aggtcaagatgggatctccgagtct

SEQ ID NO: 168126 - DNA, 25 bp, Saccharomyces pastorianus
gtcaagatgggatctccgagtctag

SEQ ID NO: 168127 - DNA, 25 bp, Saccharomyces pastorianus
aaaacatagagctcaatgctgccat

SEQ ID NO: 168128 - DNA, 25 bp, Saccharomyces pastorianus
aagatgggatctccgagtctagatt

SEQ ID NO: 168129 - DNA, 25 bp, Saccharomyces pastorianus
ctcaatgctgccataggtcaagatg

SEQ ID NO: 168130 - DNA, 25 bp, Saccharomyces pastorianus
gagctcaatgctgccataggtcaag

SEQ ID NO: 168131 - DNA, 25 bp, Saccharomyces pastorianus
aacatcgaaaacatagagctcaatg

SEQ ID NO: 168132 - DNA, 25 bp, Saccharomyces pastorianus
gattccacttatcccaatctgtaaa

SEQ ID NO: 168133 - DNA, 25 bp, Saccharomyces pastorianus
cccaatctgtaaatttttgctatgg

SEQ ID NO: 168134 - DNA, 25 bp, Saccharomyces pastorianus
ggcttgactttagtagcgattccac

SEQ ID NO: 168135 - DNA, 25 bp, Saccharomyces pastorianus
tttgctatggaaatataggccatcc

SEQ ID NO: 168136 - DNA, 25 bp, Saccharomyces pastorianus
aatgttcaaagatagcatgctccat

SEQ ID NO: 168137 - DNA, 25 bp, Saccharomyces pastorianus
agcatccaaaagtcaccatcttcgg

SEQ ID NO: 168138 - DNA, 25 bp, Saccharomyces pastorianus
ttcaaagatagcatgctccatctgt

SEQ ID NO: 168139 - DNA, 25 bp, Saccharomyces pastorianus
taggccatccaaaaggcatgataga

SEQ ID NO: 168140 - DNA, 25 bp, Saccharomyces pastorianus
attggcgcgatttggcttgacttta

SEQ ID NO: 168141 - DNA, 25 bp, Saccharomyces pastorianus
tagtagcgattccacttatcccaat

SEQ ID NO: 168142 - DNA, 25 bp, Saccharomyces pastorianus
tcaccatcttcggattggcgcgatt

SEQ ID NO: 168143 - DNA, 25 bp, Saccharomyces pastorianus
agatggctctatagtcaccgtcgtg

SEQ ID NO: 168144 - DNA, 25 bp, Saccharomyces pastorianus
ctccaagtacttgatcgatcatatc

SEQ ID NO: 168145 - DNA, 25 bp, Saccharomyces pastorianus
atcatatcaaggtagacggtgccgt

SEQ ID NO: 168146 - DNA, 25 bp, Saccharomyces pastorianus
atcagattcatctctataaggcaga

SEQ ID NO: 168147 - DNA, 25 bp, Saccharomyces pastorianus
ggcagaaccagtacaaattagtctt

SEQ ID NO: 168148 - DNA, 25 bp, Saccharomyces pastorianus
aagatcgtcagatcattgaccgttg

SEQ ID NO: 168149 - DNA, 25 bp, Saccharomyces pastorianus
tgacgttacatcaccaaccgaaaac

SEQ ID NO: 168150 - DNA, 25 bp, Saccharomyces pastorianus
ttgaccgttgacgttacatcaccaa

SEQ ID NO: 168151 - DNA, 25 bp, Saccharomyces pastorianus
ttaggcaaagccatcgaggtcaccg

SEQ ID NO: 168152 - DNA, 25 bp, Saccharomyces pastorianus
tcgaggtcaccgaagatggctctat

SEQ ID NO: 168153 - DNA, 25 bp, Saccharomyces pastorianus
tcgacccagcttcatactccaagta

SEQ ID NO: 168154 - DNA, 25 bp, Saccharomyces pastorianus
gggcgattacatcatttgttcctac

SEQ ID NO: 168155 - DNA, 25 bp, Saccharomyces pastorianus
caaccctggttttagtgaaagcgca

SEQ ID NO: 168156 - DNA, 25 bp, Saccharomyces pastorianus
gcgttgcacaaggataccggttctt

SEQ ID NO: 168157 - DNA, 25 bp, Saccharomyces pastorianus
tgaaagcgcaggtcacttcacccaa

SEQ ID NO: 168158 - DNA, 25 bp, Saccharomyces pastorianus
tgaaaacttggcacttggttacggt

SEQ ID NO: 168159 - DNA, 25 bp, Saccharomyces pastorianus
tggtctgacacactagcaacatatg

SEQ ID NO: 168160 - DNA, 25 bp, Saccharomyces pastorianus
aaaactacgctgactcctacgattg

SEQ ID NO: 168161 - DNA, 25 bp, Saccharomyces pastorianus
tttgttcctacaaagccgctggtaa

SEQ ID NO: 168162 - DNA, 25 bp, Saccharomyces pastorianus
gattgttcaggcaacctagtccact

SEQ ID NO: 168163 - DNA, 25 bp, Saccharomyces pastorianus
ccggctctgttgatgcctggtataa

SEQ ID NO: 168164 - DNA, 25 bp, Saccharomyces pastorianus
accggttctttgacatggtctgaca

SEQ ID NO: 168165 - DNA, 25 bp, Saccharomyces pastorianus
aatcaatggcttggcggtatctcaa

SEQ ID NO: 168166 - DNA, 25 bp, Saccharomyces pastorianus
gaaaacattgcgctgactttcccca

SEQ ID NO: 168167 - DNA, 25 bp, Saccharomyces pastorianus
tacactccgactaatgtccttctaa

SEQ ID NO: 168168 - DNA, 25 bp, Saccharomyces pastorianus
tagatatgctataccggcggaactt

SEQ ID NO: 168169 - DNA, 25 bp, Saccharomyces pastorianus
aagtgtgaccttttccgtagctaga

SEQ ID NO: 168170 - DNA, 25 bp, Saccharomyces pastorianus
ggcggaactttgttacacacggctc

SEQ ID NO: 168171 - DNA, 25 bp, Saccharomyces pastorianus
tgttgccacaacataagccgctttg

SEQ ID NO: 168172 - DNA, 25 bp, Saccharomyces pastorianus
ggtcacgacctattttttcttgcag

SEQ ID NO: 168173 - DNA, 25 bp, Saccharomyces pastorianus
tatgcaaccgtcttatttacactcc

SEQ ID NO: 168174 - DNA, 25 bp, Saccharomyces pastorianus
ataagcgtccttctgtggtttagat

SEQ ID NO: 168175 - DNA, 25 bp, Saccharomyces pastorianus
attcgacgcatttatccggtggtca

SEQ ID NO: 168176 - DNA, 25 bp, Saccharomyces pastorianus
aagcgaattgatagctctacataat

SEQ ID NO: 168177 - DNA, 25 bp, Saccharomyces pastorianus
tataccttgtcattctttattttat

SEQ ID NO: 168178 - DNA, 25 bp, Saccharomyces pastorianus
tacataataatgttactctatcttc

SEQ ID NO: 168179 - DNA, 25 bp, Saccharomyces pastorianus
gcgaattgatagctctacataataa

SEQ ID NO: 168180 - DNA, 25 bp, Saccharomyces pastorianus
tttataccttgtcattctttatttt

SEQ ID NO: 168181 - DNA, 25 bp, Saccharomyces pastorianus
ttttattacattatcaacccttgaa

SEQ ID NO: 168182 - DNA, 25 bp, Saccharomyces pastorianus
gatagctctacataataatgttact

SEQ ID NO: 168183 - DNA, 25 bp, Saccharomyces pastorianus
gactatttttcaatgtttatgacat

SEQ ID NO: 168184 - DNA, 25 bp, Saccharomyces pastorianus
taccttgtcattctttattttatta

SEQ ID NO: 168185 - DNA, 25 bp, Saccharomyces pastorianus
caaaaagcgaattgatagctctaca

SEQ ID NO: 168186 - DNA, 25 bp, Saccharomyces pastorianus
gtcattctttattttattacattat

SEQ ID NO: 168187 - DNA, 25 bp, Saccharomyces pastorianus
agaaagactttgttgtgtcggaatg

SEQ ID NO: 168188 - DNA, 25 bp, Saccharomyces pastorianus
aaagactttgttgtgtcggaatgtt

SEQ ID NO: 168189 - DNA, 25 bp, Saccharomyces pastorianus
agactttgttgtgtcggaatgttgg

SEQ ID NO: 168190 - DNA, 25 bp, Saccharomyces pastorianus
tgttgtgtcggaatgttggaataaa

SEQ ID NO: 168191 - DNA, 25 bp, Saccharomyces pastorianus
gactttgttgtgtcggaatgttgga

SEQ ID NO: 168192 - DNA, 25 bp, Saccharomyces pastorianus
ttgttgtgtcggaatgttggaataa

SEQ ID NO: 168193 - DNA, 25 bp, Saccharomyces pastorianus
gttgtgtcggaatgttggaataaaa

SEQ ID NO: 168194 - DNA, 25 bp, Saccharomyces pastorianus
actttgttgtgtcggaatgttggaa

SEQ ID NO: 168195 - DNA, 25 bp, Saccharomyces pastorianus
gaaagactttgttgtgtcggaatgt

SEQ ID NO: 168196 - DNA, 25 bp, Saccharomyces pastorianus
aagactttgttgtgtcggaatgttg

SEQ ID NO: 168197 - DNA, 25 bp, Saccharomyces pastorianus
tttgttgtgtcggaatgttggaata

SEQ ID NO: 168198 - DNA, 25 bp, Saccharomyces pastorianus
tatactctttcgaacacaacaccac

SEQ ID NO: 168199 - DNA, 25 bp, Saccharomyces pastorianus
tattgtttatttcaccttcgtcgca

SEQ ID NO: 168200 - DNA, 25 bp, Saccharomyces pastorianus
ggcacttcgatatcatcactcagtt

SEQ ID NO: 168201 - DNA, 25 bp, Saccharomyces pastorianus
tgggcgcaaactcaggcacttcgat

SEQ ID NO: 168202 - DNA, 25 bp, Saccharomyces pastorianus
aaatcaacggccagtacttcacaga

SEQ ID NO: 168203 - DNA, 25 bp, Saccharomyces pastorianus
gcggatccttttcaaatgtctcaat

SEQ ID NO: 168204 - DNA, 25 bp, Saccharomyces pastorianus
ctcagttcatactttttcgttccaa

SEQ ID NO: 168205 - DNA, 25 bp, Saccharomyces pastorianus
agaccaggcattgttcagttccttt

SEQ ID NO: 168206 - DNA, 25 bp, Saccharomyces pastorianus
accttcgtcgcaaatatactctttc

SEQ ID NO: 168207 - DNA, 25 bp, Saccharomyces pastorianus
gttccaacccaaatactcttcaatt

SEQ ID NO: 168208 - DNA, 25 bp, Saccharomyces pastorianus
ggaggtctcgatgtccttgcggatc

SEQ ID NO: 168209 - DNA, 25 bp, Saccharomyces pastorianus
ggttgttttctgatgtactcacatg

SEQ ID NO: 168210 - DNA, 25 bp, Saccharomyces pastorianus
tttcagatcaacattcaaacacggt

SEQ ID NO: 168211 - DNA, 25 bp, Saccharomyces pastorianus
ggttgttaggtggttgttttctgat

SEQ ID NO: 168212 - DNA, 25 bp, Saccharomyces pastorianus
gttttctgatgtactcacatgagaa

SEQ ID NO: 168213 - DNA, 25 bp, Saccharomyces pastorianus
tctgatgtactcacatgagaatcac

SEQ ID NO: 168214 - DNA, 25 bp, Saccharomyces pastorianus
gagagattaatttttgttttcagat

SEQ ID NO: 168215 - DNA, 25 bp, Saccharomyces pastorianus
acaatatccataataagtacgagag

SEQ ID NO: 168216 - DNA, 25 bp, Saccharomyces pastorianus
gatcaacattcaaacacggttgtta

SEQ ID NO: 168217 - DNA, 25 bp, Saccharomyces pastorianus
cattcaaacacggttgttaggtggt

SEQ ID NO: 168218 - DNA, 25 bp, Saccharomyces pastorianus
taggtggttgttttctgatgtactc

SEQ ID NO: 168219 - DNA, 25 bp, Saccharomyces pastorianus
gtggttgttttctgatgtactcaca

SEQ ID NO: 168220 - DNA, 25 bp, Saccharomyces pastorianus
gtggtcaagaccatagtgaaagcta

SEQ ID NO: 168221 - DNA, 25 bp, Saccharomyces pastorianus
gattgctctgaggaccatcaattag

SEQ ID NO: 168222 - DNA, 25 bp, Saccharomyces pastorianus
gctaaatttataccaaaggcgcggg

SEQ ID NO: 168223 - DNA, 25 bp, Saccharomyces pastorianus
tttactatacatttctgcagccggg

SEQ ID NO: 168224 - DNA, 25 bp, Saccharomyces pastorianus
tgcagccgggattgcgtctatttat

SEQ ID NO: 168225 - DNA, 25 bp, Saccharomyces pastorianus
cagggttccccatacctaaagatgg

SEQ ID NO: 168226 - DNA, 25 bp, Saccharomyces pastorianus
tattatgataaccttgctcaagtca

SEQ ID NO: 168227 - DNA, 25 bp, Saccharomyces pastorianus
gaggagacaacattgattgctctga

SEQ ID NO: 168228 - DNA, 25 bp, Saccharomyces pastorianus
ttgctcaagtcaaaccagggttccc

SEQ ID NO: 168229 - DNA, 25 bp, Saccharomyces pastorianus
gattgcgtctatttatgtggtcaag

SEQ ID NO: 168230 - DNA, 25 bp, Saccharomyces pastorianus
ggtagcgggcttagtgctgtaacaa

SEQ ID NO: 168231 - DNA, 25 bp, Saccharomyces pastorianus
gaaatcctccaagtggagtcggtaa

SEQ ID NO: 168232 - DNA, 25 bp, Saccharomyces pastorianus
ctgatgactggttctcaatatttat

SEQ ID NO: 168233 - DNA, 25 bp, Saccharomyces pastorianus
taggtgtacgaatataccaagtttc

SEQ ID NO: 168234 - DNA, 25 bp, Saccharomyces pastorianus
tagtctgatgactggttctcaatat

SEQ ID NO: 168235 - DNA, 25 bp, Saccharomyces pastorianus
aatagagaaatcctccaagtggagt

SEQ ID NO: 168236 - DNA, 25 bp, Saccharomyces pastorianus
gaaatttcattgttatcaagagcta

SEQ ID NO: 168237 - DNA, 25 bp, Saccharomyces pastorianus
ctccaagtggagtcggtaaatctac

SEQ ID NO: 168238 - DNA, 25 bp, Saccharomyces pastorianus
gtttccctcgagaatagagaaatcc

SEQ ID NO: 168239 - DNA, 25 bp, Saccharomyces pastorianus
gtggagtcggtaaatctacataata

SEQ ID NO: 168240 - DNA, 25 bp, Saccharomyces pastorianus
atataccaagtttccctcgagaata

SEQ ID NO: 168241 - DNA, 25 bp, Saccharomyces pastorianus
accaagtttccctcgagaatagaga

SEQ ID NO: 168242 - DNA, 25 bp, Saccharomyces pastorianus
attgttaggtcaggcattccctttc

SEQ ID NO: 168243 - DNA, 25 bp, Saccharomyces pastorianus
attccctttccacttttatgttcat

SEQ ID NO: 168244 - DNA, 25 bp, Saccharomyces pastorianus
tccacttttatgttcatttggacgc

SEQ ID NO: 168245 - DNA, 25 bp, Saccharomyces pastorianus
taggtcaggcattccctttccactt

SEQ ID NO: 168246 - DNA, 25 bp, Saccharomyces pastorianus
aatcacgataattgttaggtcaggc

SEQ ID NO: 168247 - DNA, 25 bp, Saccharomyces pastorianus
aattgttaggtcaggcattcccttt

SEQ ID NO: 168248 - DNA, 25 bp, Saccharomyces pastorianus
tgttaggtcaggcattccctttcca

SEQ ID NO: 168249 - DNA, 25 bp, Saccharomyces pastorianus
gataattgttaggtcaggcattccc

SEQ ID NO: 168250 - DNA, 25 bp, Saccharomyces pastorianus
ccctttccacttttatgttcatttg

SEQ ID NO: 168251 - DNA, 25 bp, Saccharomyces pastorianus
tttttgacacaataatcacgataat

SEQ ID NO: 168252 - DNA, 25 bp, Saccharomyces pastorianus
aggcattccctttccacttttatgt

SEQ ID NO: 168253 - DNA, 25 bp, Saccharomyces pastorianus
gcctatgatttaaaccacccaattt

SEQ ID NO: 168254 - DNA, 25 bp, Saccharomyces pastorianus
agagccttgatgtgtttaactgttc

SEQ ID NO: 168255 - DNA, 25 bp, Saccharomyces pastorianus
ttgcacgctgcgtacacagaaaaag

SEQ ID NO: 168256 - DNA, 25 bp, Saccharomyces pastorianus
tggaaccaccgcctatgatttaaac

SEQ ID NO: 168257 - DNA, 25 bp, Saccharomyces pastorianus
aaatggcgatgtgtctgttggctcc

SEQ ID NO: 168258 - DNA, 25 bp, Saccharomyces pastorianus
tgtctgttggctccactttggaaaa

SEQ ID NO: 168259 - DNA, 25 bp, Saccharomyces pastorianus
ggttcctgtatttcgttctagaaat

SEQ ID NO: 168260 - DNA, 25 bp, Saccharomyces pastorianus
aacatcttccgtaacgataaagcct

SEQ ID NO: 168261 - DNA, 25 bp, Saccharomyces pastorianus
cacccaatttccagagccttgatgt

SEQ ID NO: 168262 - DNA, 25 bp, Saccharomyces pastorianus
gataaagcctacacacctttaacca

SEQ ID NO: 168263 - DNA, 25 bp, Saccharomyces pastorianus
aacatcttagatttgcacgctgcgt

SEQ ID NO: 168264 - DNA, 25 bp, Saccharomyces pastorianus
gagaaatgttgctgacataatgaca

SEQ ID NO: 168265 - DNA, 25 bp, Saccharomyces pastorianus
gttgctgacataatgacaaaacctc

SEQ ID NO: 168266 - DNA, 25 bp, Saccharomyces pastorianus
gtactaacctgaacatataccacat

SEQ ID NO: 168267 - DNA, 25 bp, Saccharomyces pastorianus
gaacatataccacatcgacataaag

SEQ ID NO: 168268 - DNA, 25 bp, Saccharomyces pastorianus
acctgaacatataccacatcgacat

SEQ ID NO: 168269 - DNA, 25 bp, Saccharomyces pastorianus
ataccacatcgacataaagagaaat

SEQ ID NO: 168270 - DNA, 25 bp, Saccharomyces pastorianus
ctgaacatataccacatcgacataa

SEQ ID NO: 168271 - DNA, 25 bp, Saccharomyces pastorianus
tgctgacataatgacaaaacctctt

SEQ ID NO: 168272 - DNA, 25 bp, Saccharomyces pastorianus
taacctgaacatataccacatcgac

SEQ ID NO: 168273 - DNA, 25 bp, Saccharomyces pastorianus
gacaaaacctcttccattaaaatca

SEQ ID NO: 168274 - DNA, 25 bp, Saccharomyces pastorianus
catataccacatcgacataaagaga

SEQ ID NO: 168275 - DNA, 25 bp, Saccharomyces pastorianus
agatatgacgtatgagttaatccaa

SEQ ID NO: 168276 - DNA, 25 bp, Saccharomyces pastorianus
atccaatacctatgggatactagag

SEQ ID NO: 168277 - DNA, 25 bp, Saccharomyces pastorianus
gttaatccaatacctatgggatact

SEQ ID NO: 168278 - DNA, 25 bp, Saccharomyces pastorianus
gtatgagttaatccaatacctatgg

SEQ ID NO: 168279 - DNA, 25 bp, Saccharomyces pastorianus
aatacctatgggatactagagataa

SEQ ID NO: 168280 - DNA, 25 bp, Saccharomyces pastorianus
gacgtatgagttaatccaataccta

SEQ ID NO: 168281 - DNA, 25 bp, Saccharomyces pastorianus
atgagttaatccaatacctatggga

SEQ ID NO: 168282 - DNA, 25 bp, Saccharomyces pastorianus
gagttaatccaatacctatgggata

SEQ ID NO: 168283 - DNA, 25 bp, Saccharomyces pastorianus
tacctatgggatactagagataaac

SEQ ID NO: 168284 - DNA, 25 bp, Saccharomyces pastorianus
cgagtattagatatgacgtatgagt

SEQ ID NO: 168285 - DNA, 25 bp, Saccharomyces pastorianus
atatgacgtatgagttaatccaata

SEQ ID NO: 168286 - DNA, 25 bp, Saccharomyces pastorianus
gcaacccggtatgaaactattaagt

SEQ ID NO: 168287 - DNA, 25 bp, Saccharomyces pastorianus
agcaaagtggtgcaacccggtatga

SEQ ID NO: 168288 - DNA, 25 bp, Saccharomyces pastorianus
agtacgtggatggtcatgtgtgttc

SEQ ID NO: 168289 - DNA, 25 bp, Saccharomyces pastorianus
acccggtatgaaactattaagtcat

SEQ ID NO: 168290 - DNA, 25 bp, Saccharomyces pastorianus
gtgcaacccggtatgaaactattaa

SEQ ID NO: 168291 - DNA, 25 bp, Saccharomyces pastorianus
agtcatatctaataattcagtgtta

SEQ ID NO: 168292 - DNA, 25 bp, Saccharomyces pastorianus
gaaagaagtacgtggatggtcatgt

SEQ ID NO: 168293 - DNA, 25 bp, Saccharomyces pastorianus
aaagcaaagtggtgcaacccggtat

SEQ ID NO: 168294 - DNA, 25 bp, Saccharomyces pastorianus
aatcacctctagtaggtttaaagca

SEQ ID NO: 168295 - DNA, 25 bp, Saccharomyces pastorianus
ctacaatcacctctagtaggtttaa

SEQ ID NO: 168296 - DNA, 25 bp, Saccharomyces pastorianus
cctctagtaggtttaaagcaaagtg

SEQ ID NO: 168297 - DNA, 25 bp, Saccharomyces pastorianus
gtacaccgaacatagagtcagcacc

SEQ ID NO: 168298 - DNA, 25 bp, Saccharomyces pastorianus
atgaagacgcggagataagtacacc

SEQ ID NO: 168299 - DNA, 25 bp, Saccharomyces pastorianus
gagagtgctgttcctatcgagtcaa

SEQ ID NO: 168300 - DNA, 25 bp, Saccharomyces pastorianus
atttggtagaaagtgcctcaaggtt

SEQ ID NO: 168301 - DNA, 25 bp, Saccharomyces pastorianus
gcaagcattcacaacggtaaggaga

SEQ ID NO: 168302 - DNA, 25 bp, Saccharomyces pastorianus
acgatggtgtcgatttactaggaga

SEQ ID NO: 168303 - DNA, 25 bp, Saccharomyces pastorianus
catcaggcaaagcaagacgaaagtg

SEQ ID NO: 168304 - DNA, 25 bp, Saccharomyces pastorianus
gttcctatcgagtcaatcaccgaag

SEQ ID NO: 168305 - DNA, 25 bp, Saccharomyces pastorianus
gtcagcaccaggaaaacatcaggca

SEQ ID NO: 168306 - DNA, 25 bp, Saccharomyces pastorianus
gtgcctcaaggttggaaagtttact

SEQ ID NO: 168307 - DNA, 25 bp, Saccharomyces pastorianus
gggtcttctgcaagcattcacaacg

SEQ ID NO: 168308 - DNA, 25 bp, Saccharomyces pastorianus
ttagaagtgcggaaacataagtatt

SEQ ID NO: 168309 - DNA, 25 bp, Saccharomyces pastorianus
tgggcacagggcgagcgaatttttt

SEQ ID NO: 168310 - DNA, 25 bp, Saccharomyces pastorianus
acctttagaagtgcggaaacataag

SEQ ID NO: 168311 - DNA, 25 bp, Saccharomyces pastorianus
gaagtgcggaaacataagtattttt

SEQ ID NO: 168312 - DNA, 25 bp, Saccharomyces pastorianus
ccaaggaaaatccaaatgggcacag

SEQ ID NO: 168313 - DNA, 25 bp, Saccharomyces pastorianus
tacctttagaagtgcggaaacataa

SEQ ID NO: 168314 - DNA, 25 bp, Saccharomyces pastorianus
tgtttgtttacctttagaagtgcgg

SEQ ID NO: 168315 - DNA, 25 bp, Saccharomyces pastorianus
tttacctttagaagtgcggaaacat

SEQ ID NO: 168316 - DNA, 25 bp, Saccharomyces pastorianus
caaatgggcacagggcgagcgaatt

SEQ ID NO: 168317 - DNA, 25 bp, Saccharomyces pastorianus
taccaaggaaaatccaaatgggcac

SEQ ID NO: 168318 - DNA, 25 bp, Saccharomyces pastorianus
ttacctttagaagtgcggaaacata

SEQ ID NO: 168319 - DNA, 25 bp, Saccharomyces pastorianus
gaagcgggctacattaaaactgtcc

SEQ ID NO: 168320 - DNA, 25 bp, Saccharomyces pastorianus
aaaactgtcccaggcagctcattaa

SEQ ID NO: 168321 - DNA, 25 bp, Saccharomyces pastorianus
caacaaagattgtcgctggccaagt

SEQ ID NO: 168322 - DNA, 25 bp, Saccharomyces pastorianus
agctcattaacctccgttccaggat

SEQ ID NO: 168323 - DNA, 25 bp, Saccharomyces pastorianus
acctccgttccaggatttttcgctg

SEQ ID NO: 168324 - DNA, 25 bp, Saccharomyces pastorianus
gtcgacactgatgaagcgggctaca

SEQ ID NO: 168325 - DNA, 25 bp, Saccharomyces pastorianus
tacttctgctggctctggttgtatg

SEQ ID NO: 168326 - DNA, 25 bp, Saccharomyces pastorianus
cgctggccaagtcgacactgatgaa

SEQ ID NO: 168327 - DNA, 25 bp, Saccharomyces pastorianus
ggattctaaatacagacaagctatt

SEQ ID NO: 168328 - DNA, 25 bp, Saccharomyces pastorianus
tggctctggttgtatggccgctttg

SEQ ID NO: 168329 - DNA, 25 bp, Saccharomyces pastorianus
ctattacttctgctggctctggttg

SEQ ID NO: 168330 - DNA, 25 bp, Saccharomyces pastorianus
ttgacgccatggtcatccttgccgt

SEQ ID NO: 168331 - DNA, 25 bp, Saccharomyces pastorianus
caatcattctagcatgttccgcatg

SEQ ID NO: 168332 - DNA, 25 bp, Saccharomyces pastorianus
gttccttgacgccatggtcatcctt

SEQ ID NO: 168333 - DNA, 25 bp, Saccharomyces pastorianus
attctagcatgttccgcatgttcct

SEQ ID NO: 168334 - DNA, 25 bp, Saccharomyces pastorianus
tagcatgttccgcatgttccttgac

SEQ ID NO: 168335 - DNA, 25 bp, Saccharomyces pastorianus
aacgcaagcacacccggcgccaaaa

SEQ ID NO: 168336 - DNA, 25 bp, Saccharomyces pastorianus
agggcgccgttcacacaacgcaagc

SEQ ID NO: 168337 - DNA, 25 bp, Saccharomyces pastorianus
atgttccgcatgttccttgacgcca

SEQ ID NO: 168338 - DNA, 25 bp, Saccharomyces pastorianus
gcatgttccttgacgccatggtcat

SEQ ID NO: 168339 - DNA, 25 bp, Saccharomyces pastorianus
ctttcggcaatcattctagcatgtt

SEQ ID NO: 168340 - DNA, 25 bp, Saccharomyces pastorianus
ggcaatcattctagcatgttccgca

SEQ ID NO: 168341 - DNA, 25 bp, Saccharomyces pastorianus
gtaggcggtgccacgcaaattagga

SEQ ID NO: 168342 - DNA, 25 bp, Saccharomyces pastorianus
catgtaggcggtgccacgcaaatta

SEQ ID NO: 168343 - DNA, 25 bp, Saccharomyces pastorianus
caagatcaaccagttttggcatgta

SEQ ID NO: 168344 - DNA, 25 bp, Saccharomyces pastorianus
ttttggcatgtaggcggtgccacgc

SEQ ID NO: 168345 - DNA, 25 bp, Saccharomyces pastorianus
gacaagatcaaccagttttggcatg

SEQ ID NO: 168346 - DNA, 25 bp, Saccharomyces pastorianus
ggcatgtaggcggtgccacgcaaat

SEQ ID NO: 168347 - DNA, 25 bp, Saccharomyces pastorianus
aggcggtgccacgcaaattaggaat

SEQ ID NO: 168348 - DNA, 25 bp, Saccharomyces pastorianus
agatcaaccagttttggcatgtagg

SEQ ID NO: 168349 - DNA, 25 bp, Saccharomyces pastorianus
taggcggtgccacgcaaattaggaa

SEQ ID NO: 168350 - DNA, 25 bp, Saccharomyces pastorianus
gcatgtaggcggtgccacgcaaatt

SEQ ID NO: 168351 - DNA, 25 bp, Saccharomyces pastorianus
agttttggcatgtaggcggtgccac

SEQ ID NO: 168352 - DNA, 25 bp, Saccharomyces pastorianus
ttctattgttgggagtgctgccgct

SEQ ID NO: 168353 - DNA, 25 bp, Saccharomyces pastorianus
ggatcttaaaccttggcagcaatag

SEQ ID NO: 168354 - DNA, 25 bp, Saccharomyces pastorianus
agataaagatggctgtcctaggatc

SEQ ID NO: 168355 - DNA, 25 bp, Saccharomyces pastorianus
gcaaatgtcctatctgcgactctta

SEQ ID NO: 168356 - DNA, 25 bp, Saccharomyces pastorianus
aaatgtgatggcaaatgtcctatct

SEQ ID NO: 168357 - DNA, 25 bp, Saccharomyces pastorianus
gtcctatctgcgactcttatgtaag

SEQ ID NO: 168358 - DNA, 25 bp, Saccharomyces pastorianus
aatgacgcattctattgttgggagt

SEQ ID NO: 168359 - DNA, 25 bp, Saccharomyces pastorianus
gtatgtgaaaactgttcgtttggta

SEQ ID NO: 168360 - DNA, 25 bp, Saccharomyces pastorianus
ggctgtcctaggatcttaaaccttg

SEQ ID NO: 168361 - DNA, 25 bp, Saccharomyces pastorianus
gagtgctgccgcttaggtaaagata

SEQ ID NO: 168362 - DNA, 25 bp, Saccharomyces pastorianus
gcgactcttatgtaaggcccaaaag

SEQ ID NO: 168363 - DNA, 25 bp, Saccharomyces pastorianus
agaaacaatctttttgagcggcaca

SEQ ID NO: 168364 - DNA, 25 bp, Saccharomyces pastorianus
ataactaaccttgatttgacgcttt

SEQ ID NO: 168365 - DNA, 25 bp, Saccharomyces pastorianus
tttgacgcttttgagaaacaatctt

SEQ ID NO: 168366 - DNA, 25 bp, Saccharomyces pastorianus
aggtctaccggcagtcgcaattggg

SEQ ID NO: 168367 - DNA, 25 bp, Saccharomyces pastorianus
cttgatttgacgcttttgagaaaca

SEQ ID NO: 168368 - DNA, 25 bp, Saccharomyces pastorianus
acaatctttttgagcggcacagccc

SEQ ID NO: 168369 - DNA, 25 bp, Saccharomyces pastorianus
gagaaacaatctttttgagcggcac

SEQ ID NO: 168370 - DNA, 25 bp, Saccharomyces pastorianus
gggcataactaaccttgatttgacg

SEQ ID NO: 168371 - DNA, 25 bp, Saccharomyces pastorianus
ctaaccttgatttgacgcttttgag

SEQ ID NO: 168372 - DNA, 25 bp, Saccharomyces pastorianus
accggcagtcgcaattgggggcata

SEQ ID NO: 168373 - DNA, 25 bp, Saccharomyces pastorianus
aaccttgatttgacgcttttgagaa

SEQ ID NO: 168374 - DNA, 25 bp, Saccharomyces pastorianus
ccttttttgttggacttgactccat

SEQ ID NO: 168375 - DNA, 25 bp, Saccharomyces pastorianus
actttggtactttgtatggtggtca

SEQ ID NO: 168376 - DNA, 25 bp, Saccharomyces pastorianus
atggtgtagcatgccactttggtac

SEQ ID NO: 168377 - DNA, 25 bp, Saccharomyces pastorianus
aatgacgatgaactaccaataaggg

SEQ ID NO: 168378 - DNA, 25 bp, Saccharomyces pastorianus
gacttcgtcatatacccttttttgt

SEQ ID NO: 168379 - DNA, 25 bp, Saccharomyces pastorianus
tttcctccaggtgttaatgacgatg

SEQ ID NO: 168380 - DNA, 25 bp, Saccharomyces pastorianus
gacaataacgagattaccgaggaat

SEQ ID NO: 168381 - DNA, 25 bp, Saccharomyces pastorianus
gaatctgatagtccatttaaagaga

SEQ ID NO: 168382 - DNA, 25 bp, Saccharomyces pastorianus
attttgggccaatgattttgacggt

SEQ ID NO: 168383 - DNA, 25 bp, Saccharomyces pastorianus
gattttgacggtgtttttcctccag

SEQ ID NO: 168384 - DNA, 25 bp, Saccharomyces pastorianus
ggtggtcattatacagcctatgtga

SEQ ID NO: 168385 - DNA, 25 bp, Saccharomyces pastorianus
ggaggatcaaacacctgcttgttat

SEQ ID NO: 168386 - DNA, 25 bp, Saccharomyces pastorianus
gcatatgctacatacctctttgcaa

SEQ ID NO: 168387 - DNA, 25 bp, Saccharomyces pastorianus
gggagcatcggcgtactttaatcat

SEQ ID NO: 168388 - DNA, 25 bp, Saccharomyces pastorianus
tgagggactccatacagtacacttc

SEQ ID NO: 168389 - DNA, 25 bp, Saccharomyces pastorianus
aagagtttggcctgttgggagcatc

SEQ ID NO: 168390 - DNA, 25 bp, Saccharomyces pastorianus
aatttcacccattgtcgtaatcggc

SEQ ID NO: 168391 - DNA, 25 bp, Saccharomyces pastorianus
gtaatcggcctgtatctaatttccc

SEQ ID NO: 168392 - DNA, 25 bp, Saccharomyces pastorianus
gaccggacagaaccttaatcttcaa

SEQ ID NO: 168393 - DNA, 25 bp, Saccharomyces pastorianus
aatcatccatggtccgttctaacta

SEQ ID NO: 168394 - DNA, 25 bp, Saccharomyces pastorianus
aagttcgtacgtggtgtctaattca

SEQ ID NO: 168395 - DNA, 25 bp, Saccharomyces pastorianus
gaacatccgatacttcaactgcaaa

SEQ ID NO: 168396 - DNA, 25 bp, Saccharomyces pastorianus
gagagtggtttatatgacgaacata

SEQ ID NO: 168397 - DNA, 25 bp, Saccharomyces pastorianus
aaacgatctgatgcctcagggctgt

SEQ ID NO: 168398 - DNA, 25 bp, Saccharomyces pastorianus
aggctttgaccggaaggactgcaaa

SEQ ID NO: 168399 - DNA, 25 bp, Saccharomyces pastorianus
ctcagggctgtaggctttgaccgga

SEQ ID NO: 168400 - DNA, 25 bp, Saccharomyces pastorianus
atctgatgcctcagggctgtaggct

SEQ ID NO: 168401 - DNA, 25 bp, Saccharomyces pastorianus
gactgcaaaggagagtggtttatat

SEQ ID NO: 168402 - DNA, 25 bp, Saccharomyces pastorianus
gctgtaggctttgaccggaaggact

SEQ ID NO: 168403 - DNA, 25 bp, Saccharomyces pastorianus
agtccattatgggtaaacgatctga

SEQ ID NO: 168404 - DNA, 25 bp, Saccharomyces pastorianus
ttgaccggaaggactgcaaaggaga

SEQ ID NO: 168405 - DNA, 25 bp, Saccharomyces pastorianus
atgggtaaacgatctgatgcctcag

SEQ ID NO: 168406 - DNA, 25 bp, Saccharomyces pastorianus
atgcctcagggctgtaggctttgac

SEQ ID NO: 168407 - DNA, 25 bp, Saccharomyces pastorianus
agatcaggcaacctcaatgagatag

SEQ ID NO: 168408 - DNA, 25 bp, Saccharomyces pastorianus
gtatcgtgacttcagataattacac

SEQ ID NO: 168409 - DNA, 25 bp, Saccharomyces pastorianus
gaacatatgcctagatgatctaact

SEQ ID NO: 168410 - DNA, 25 bp, Saccharomyces pastorianus
atctaactagatcaggcaacctcaa

SEQ ID NO: 168411 - DNA, 25 bp, Saccharomyces pastorianus
gacttcagataattacactcttcaa

SEQ ID NO: 168412 - DNA, 25 bp, Saccharomyces pastorianus
gacacgcaatggttccgacattaag

SEQ ID NO: 168413 - DNA, 25 bp, Saccharomyces pastorianus
catctttcaaaagtatcgtgacttc

SEQ ID NO: 168414 - DNA, 25 bp, Saccharomyces pastorianus
tacactcttcaaagacacgcaatgg

SEQ ID NO: 168415 - DNA, 25 bp, Saccharomyces pastorianus
caaagacacgcaatggttccgacat

SEQ ID NO: 168416 - DNA, 25 bp, Saccharomyces pastorianus
ggtgcacacagaacatatgcctaga

SEQ ID NO: 168417 - DNA, 25 bp, Saccharomyces pastorianus
ggttccgacattaaggtgcacacag

SEQ ID NO: 168418 - DNA, 25 bp, Saccharomyces pastorianus
aataaaaggcaatgctaactattca

SEQ ID NO: 168419 - DNA, 25 bp, Saccharomyces pastorianus
actgaaattccagacatgtttacta

SEQ ID NO: 168420 - DNA, 25 bp, Saccharomyces pastorianus
attccagacatgtttactacagaaa

SEQ ID NO: 168421 - DNA, 25 bp, Saccharomyces pastorianus
acactgaaattccagacatgtttac

SEQ ID NO: 168422 - DNA, 25 bp, Saccharomyces pastorianus
gaaattccagacatgtttactacag

SEQ ID NO: 168423 - DNA, 25 bp, Saccharomyces pastorianus
aaattccagacatgtttactacaga

SEQ ID NO: 168424 - DNA, 25 bp, Saccharomyces pastorianus
tatcgacaaaacactgaaattccag

SEQ ID NO: 168425 - DNA, 25 bp, Saccharomyces pastorianus
aaatgattatcgacaaaacactgaa

SEQ ID NO: 168426 - DNA, 25 bp, Saccharomyces pastorianus
gaaggttatgaaaatgattatcgac

SEQ ID NO: 168427 - DNA, 25 bp, Saccharomyces pastorianus
gtttactacagaaaaactagctgaa

SEQ ID NO: 168428 - DNA, 25 bp, Saccharomyces pastorianus
aaactagctgaaataaaaggcaatg

SEQ ID NO: 168429 - DNA, 25 bp, Saccharomyces pastorianus
tgcctccaatcattcaaaacactaa

SEQ ID NO: 168430 - DNA, 25 bp, Saccharomyces pastorianus
actaatgatactagcgtcgcacgtc

SEQ ID NO: 168431 - DNA, 25 bp, Saccharomyces pastorianus
aatgatactagcgtcgcacgtccaa

SEQ ID NO: 168432 - DNA, 25 bp, Saccharomyces pastorianus
tagcgtcgcacgtccaaataacctt

SEQ ID NO: 168433 - DNA, 25 bp, Saccharomyces pastorianus
aaaacactaatgatactagcgtcgc

SEQ ID NO: 168434 - DNA, 25 bp, Saccharomyces pastorianus
acactaatgatactagcgtcgcacg

SEQ ID NO: 168435 - DNA, 25 bp, Saccharomyces pastorianus
tgatactagcgtcgcacgtccaaat

SEQ ID NO: 168436 - DNA, 25 bp, Saccharomyces pastorianus
gcgtcgcacgtccaaataaccttaa

SEQ ID NO: 168437 - DNA, 25 bp, Saccharomyces pastorianus
tactagcgtcgcacgtccaaataac

SEQ ID NO: 168438 - DNA, 25 bp, Saccharomyces pastorianus
gtcgcacgtccaaataaccttaaat

SEQ ID NO: 168439 - DNA, 25 bp, Saccharomyces pastorianus
gcacgtccaaataaccttaaatcaa

SEQ ID NO: 168440 - DNA, 25 bp, Saccharomyces pastorianus
agttgcgttctgataggttggctga

SEQ ID NO: 168441 - DNA, 25 bp, Saccharomyces pastorianus
aatatatggcgtttccgctacttct

SEQ ID NO: 168442 - DNA, 25 bp, Saccharomyces pastorianus
ttgctattgaacctgtgttcccagc

SEQ ID NO: 168443 - DNA, 25 bp, Saccharomyces pastorianus
tcatctgctcagttgcgttctgata

SEQ ID NO: 168444 - DNA, 25 bp, Saccharomyces pastorianus
taaatgtcgaaatcgcgcgcgtttg

SEQ ID NO: 168445 - DNA, 25 bp, Saccharomyces pastorianus
ggttggctgaggtccactttggaac

SEQ ID NO: 168446 - DNA, 25 bp, Saccharomyces pastorianus
aaagcttgtgtagcaccttcatctg

SEQ ID NO: 168447 - DNA, 25 bp, Saccharomyces pastorianus
tgtgaagttatatttgtccccagaa

SEQ ID NO: 168448 - DNA, 25 bp, Saccharomyces pastorianus
atggattttactgttattgcggtta

SEQ ID NO: 168449 - DNA, 25 bp, Saccharomyces pastorianus
tttccgctacttctccaattgatgg

SEQ ID NO: 168450 - DNA, 25 bp, Saccharomyces pastorianus
agccgctatcctgacgaatccaagg

SEQ ID NO: 168451 - DNA, 25 bp, Saccharomyces pastorianus
aatcattgaaagctctttgtcgacg

SEQ ID NO: 168452 - DNA, 25 bp, Saccharomyces pastorianus
ctaaggtttcgtcaagtaattccag

SEQ ID NO: 168453 - DNA, 25 bp, Saccharomyces pastorianus
aattcgaccgtttctaccacaacat

SEQ ID NO: 168454 - DNA, 25 bp, Saccharomyces pastorianus
gaaagctctttgtcgacgggttaca

SEQ ID NO: 168455 - DNA, 25 bp, Saccharomyces pastorianus
tgtcgacgggttacaattcgaccgt

SEQ ID NO: 168456 - DNA, 25 bp, Saccharomyces pastorianus
gttcacttgaatctaaggtttcgtc

SEQ ID NO: 168457 - DNA, 25 bp, Saccharomyces pastorianus
tacaattcgaccgtttctaccacaa

SEQ ID NO: 168458 - DNA, 25 bp, Saccharomyces pastorianus
gtaattccagaatggccacttccaa

SEQ ID NO: 168459 - DNA, 25 bp, Saccharomyces pastorianus
atccgccgcatctagttcacttgaa

SEQ ID NO: 168460 - DNA, 25 bp, Saccharomyces pastorianus
ttccagaatggccacttccaaaacc

SEQ ID NO: 168461 - DNA, 25 bp, Saccharomyces pastorianus
gccgcatctagttcacttgaatcta

SEQ ID NO: 168462 - DNA, 25 bp, Saccharomyces pastorianus
ttcatctccctttctttattcacgg

SEQ ID NO: 168463 - DNA, 25 bp, Saccharomyces pastorianus
gtcctttcatctccctttctttatt

SEQ ID NO: 168464 - DNA, 25 bp, Saccharomyces pastorianus
tttcatctccctttctttattcacg

SEQ ID NO: 168465 - DNA, 25 bp, Saccharomyces pastorianus
agaaagctattgcagctgctacggc

SEQ ID NO: 168466 - DNA, 25 bp, Saccharomyces pastorianus
ttgcagctgctacggcgtcctttca

SEQ ID NO: 168467 - DNA, 25 bp, Saccharomyces pastorianus
agctattgcagctgctacggcgtcc

SEQ ID NO: 168468 - DNA, 25 bp, Saccharomyces pastorianus
atctccctttctttattcacggcct

SEQ ID NO: 168469 - DNA, 25 bp, Saccharomyces pastorianus
tttctttattcacggccttaagagc

SEQ ID NO: 168470 - DNA, 25 bp, Saccharomyces pastorianus
aaagctattgcagctgctacggcgt

SEQ ID NO: 168471 - DNA, 25 bp, Saccharomyces pastorianus
atgaccgaaagaaagctattgcagc

SEQ ID NO: 168472 - DNA, 25 bp, Saccharomyces pastorianus
tattgcagctgctacggcgtccttt

SEQ ID NO: 168473 - DNA, 25 bp, Saccharomyces pastorianus
gaaccaagaatttattctgctttaa

SEQ ID NO: 168474 - DNA, 25 bp, Saccharomyces pastorianus
ttctgctttaattgatggccattgt

SEQ ID NO: 168475 - DNA, 25 bp, Saccharomyces pastorianus
tgctttaattgatggccattgtgaa

SEQ ID NO: 168476 - DNA, 25 bp, Saccharomyces pastorianus
agacgccccaaatttagaattcaat

SEQ ID NO: 168477 - DNA, 25 bp, Saccharomyces pastorianus
gacaaccaaaatcacccgttgattt

SEQ ID NO: 168478 - DNA, 25 bp, Saccharomyces pastorianus
attcaattgtctggtaatccaattc

SEQ ID NO: 168479 - DNA, 25 bp, Saccharomyces pastorianus
tgacaaccaaaatcacccgttgatt

SEQ ID NO: 168480 - DNA, 25 bp, Saccharomyces pastorianus
aatctgacaaccaaaatcacccgtt

SEQ ID NO: 168481 - DNA, 25 bp, Saccharomyces pastorianus
tagaattcaattgtctggtaatcca

SEQ ID NO: 168482 - DNA, 25 bp, Saccharomyces pastorianus
aatacattcaactgattgatgctaa

SEQ ID NO: 168483 - DNA, 25 bp, Saccharomyces pastorianus
acgccccaaatttagaattcaattg

SEQ ID NO: 168484 - DNA, 25 bp, Saccharomyces pastorianus
tttacactcacctaggttctcatga

SEQ ID NO: 168485 - DNA, 25 bp, Saccharomyces pastorianus
ggttctcatgagtattgctagctag

SEQ ID NO: 168486 - DNA, 25 bp, Saccharomyces pastorianus
ctagtgcgagtttgatctatacttc

SEQ ID NO: 168487 - DNA, 25 bp, Saccharomyces pastorianus
tggaggatttttctctgctttctaa

SEQ ID NO: 168488 - DNA, 25 bp, Saccharomyces pastorianus
gagtaagtatggaagactgttaact

SEQ ID NO: 168489 - DNA, 25 bp, Saccharomyces pastorianus
ggaacttgatccatactgagtaagt

SEQ ID NO: 168490 - DNA, 25 bp, Saccharomyces pastorianus
agaaggttcactgctttacactcac

SEQ ID NO: 168491 - DNA, 25 bp, Saccharomyces pastorianus
gactgttaacttggaggatttttct

SEQ ID NO: 168492 - DNA, 25 bp, Saccharomyces pastorianus
ttgctagctagtgcgagtttgatct

SEQ ID NO: 168493 - DNA, 25 bp, Saccharomyces pastorianus
gtggacaaactgtggaacttgatcc

SEQ ID NO: 168494 - DNA, 25 bp, Saccharomyces pastorianus
tcactgctttacactcacctaggtt

SEQ ID NO: 168495 - DNA, 25 bp, Saccharomyces pastorianus
gtgatgtcactaaacccgagagatg

SEQ ID NO: 168496 - DNA, 25 bp, Saccharomyces pastorianus
agaggaaactaaagtatctgttgat

SEQ ID NO: 168497 - DNA, 25 bp, Saccharomyces pastorianus
ttgtgatgtcactaaacccgagaga

SEQ ID NO: 168498 - DNA, 25 bp, Saccharomyces pastorianus
gatgtcactaaacccgagagatgtt

SEQ ID NO: 168499 - DNA, 25 bp, Saccharomyces pastorianus
gttgttgaccgggaaaatgtagatt

SEQ ID NO: 168500 - DNA, 25 bp, Saccharomyces pastorianus
tcccttcattgaatattctgataga

SEQ ID NO: 168501 - DNA, 25 bp, Saccharomyces pastorianus
cactaaacccgagagatgttcgctt

SEQ ID NO: 168502 - DNA, 25 bp, Saccharomyces pastorianus
aaaggaaatacagccgacagaaagt

SEQ ID NO: 168503 - DNA, 25 bp, Saccharomyces pastorianus
tacagccgacagaaagtaagagagg

SEQ ID NO: 168504 - DNA, 25 bp, Saccharomyces pastorianus
ttgaaagttgttgaccgggaaaatg

SEQ ID NO: 168505 - DNA, 25 bp, Saccharomyces pastorianus
tcatcccttcattgaatattctgat

SEQ ID NO: 168506 - DNA, 25 bp, Saccharomyces pastorianus
actcactctggcttgggtcattatt

SEQ ID NO: 168507 - DNA, 25 bp, Saccharomyces pastorianus
gggtcattattgatttgcccgagac

SEQ ID NO: 168508 - DNA, 25 bp, Saccharomyces pastorianus
tgaacttttcagtcaaggtgtccct

SEQ ID NO: 168509 - DNA, 25 bp, Saccharomyces pastorianus
aactggcagaaccttgagcgaaatc

SEQ ID NO: 168510 - DNA, 25 bp, Saccharomyces pastorianus
ggtgtccctgctagaaaatttgcat

SEQ ID NO: 168511 - DNA, 25 bp, Saccharomyces pastorianus
gcatctacagtagttgatccctttg

SEQ ID NO: 168512 - DNA, 25 bp, Saccharomyces pastorianus
gatttgcccgagacaactggcagaa

SEQ ID NO: 168513 - DNA, 25 bp, Saccharomyces pastorianus
ctacagtagttgatccctttggaaa

SEQ ID NO: 168514 - DNA, 25 bp, Saccharomyces pastorianus
atcgtccgcaagttgataacattat

SEQ ID NO: 168515 - DNA, 25 bp, Saccharomyces pastorianus
gagggctacaaaatcgtccgcaagt

SEQ ID NO: 168516 - DNA, 25 bp, Saccharomyces pastorianus
ggtggctttacgcactcactctggc

SEQ ID NO: 168517 - DNA, 25 bp, Saccharomyces pastorianus
cgagatatacggttttgattatgac

SEQ ID NO: 168518 - DNA, 25 bp, Saccharomyces pastorianus
gattatgaccatggaccacaagagg

SEQ ID NO: 168519 - DNA, 25 bp, Saccharomyces pastorianus
gatatacggttttgattatgaccat

SEQ ID NO: 168520 - DNA, 25 bp, Saccharomyces pastorianus
ttatgaccatggaccacaagaggca

SEQ ID NO: 168521 - DNA, 25 bp, Saccharomyces pastorianus
acggttttgattatgaccatggacc

SEQ ID NO: 168522 - DNA, 25 bp, Saccharomyces pastorianus
tatacggttttgattatgaccatgg

SEQ ID NO: 168523 - DNA, 25 bp, Saccharomyces pastorianus
tatgaccatggaccacaagaggcag

SEQ ID NO: 168524 - DNA, 25 bp, Saccharomyces pastorianus
ccgagatatacggttttgattatga

SEQ ID NO: 168525 - DNA, 25 bp, Saccharomyces pastorianus
tgattatgaccatggaccacaagag

SEQ ID NO: 168526 - DNA, 25 bp, Saccharomyces pastorianus
cggttttgattatgaccatggacca

SEQ ID NO: 168527 - DNA, 25 bp, Saccharomyces pastorianus
tacggttttgattatgaccatggac

SEQ ID NO: 168528 - DNA, 25 bp, Saccharomyces pastorianus
tggcaccagttcctcatcagatatt

SEQ ID NO: 168529 - DNA, 25 bp, Saccharomyces pastorianus
cagttcctcatcagatattctccat

SEQ ID NO: 168530 - DNA, 25 bp, Saccharomyces pastorianus
gacatgggacagaagcagctctatt

SEQ ID NO: 168531 - DNA, 25 bp, Saccharomyces pastorianus
tttaaacgatcgctgactggcacca

SEQ ID NO: 168532 - DNA, 25 bp, Saccharomyces pastorianus
aaggcatatctttaagacatgggac

SEQ ID NO: 168533 - DNA, 25 bp, Saccharomyces pastorianus
gttgctatttaaacgatcgctgact

SEQ ID NO: 168534 - DNA, 25 bp, Saccharomyces pastorianus
ccctcatgggttgttgctatttaaa

SEQ ID NO: 168535 - DNA, 25 bp, Saccharomyces pastorianus
aaacgatcgctgactggcaccagtt

SEQ ID NO: 168536 - DNA, 25 bp, Saccharomyces pastorianus
gttcctcatcagatattctccatat

SEQ ID NO: 168537 - DNA, 25 bp, Saccharomyces pastorianus
ttccctcatgggttgttgctattta

SEQ ID NO: 168538 - DNA, 25 bp, Saccharomyces pastorianus
atttatacccattccctcatgggtt

SEQ ID NO: 168539 - DNA, 25 bp, Saccharomyces pastorianus
tccagaggcggttacggtggctcta

SEQ ID NO: 168540 - DNA, 25 bp, Saccharomyces pastorianus
ggccccccaagagatgcgtacagaa

SEQ ID NO: 168541 - DNA, 25 bp, Saccharomyces pastorianus
gctctagaggcggttacgacagtcc

SEQ ID NO: 168542 - DNA, 25 bp, Saccharomyces pastorianus
aggcggttacggtggctctagaggc

SEQ ID NO: 168543 - DNA, 25 bp, Saccharomyces pastorianus
tacgacggccccagaggtggctttg

SEQ ID NO: 168544 - DNA, 25 bp, Saccharomyces pastorianus
cagaggtggctttggcgccccaaga

SEQ ID NO: 168545 - DNA, 25 bp, Saccharomyces pastorianus
attatggccccccaagagatgcgta

SEQ ID NO: 168546 - DNA, 25 bp, Saccharomyces pastorianus
tctagaggcggttacgacagtccaa

SEQ ID NO: 168547 - DNA, 25 bp, Saccharomyces pastorianus
agaggcggttacgacggccccagag

SEQ ID NO: 168548 - DNA, 25 bp, Saccharomyces pastorianus
tttggcgccccaagaggtggctacg

SEQ ID NO: 168549 - DNA, 25 bp, Saccharomyces pastorianus
ttacgacggccccagaggtggcttt

SEQ ID NO: 168550 - DNA, 25 bp, Saccharomyces pastorianus
catttgactggtccgactgtcgagg

SEQ ID NO: 168551 - DNA, 25 bp, Saccharomyces pastorianus
gttccttgtcaatacttttccgatt

SEQ ID NO: 168552 - DNA, 25 bp, Saccharomyces pastorianus
aatacttttccgatttgctaggctt

SEQ ID NO: 168553 - DNA, 25 bp, Saccharomyces pastorianus
agctcgctacaaactttggtaccga

SEQ ID NO: 168554 - DNA, 25 bp, Saccharomyces pastorianus
ttttttatacttgctctatgcgaaa

SEQ ID NO: 168555 - DNA, 25 bp, Saccharomyces pastorianus
tgctaggcttgttgcgcccatttga

SEQ ID NO: 168556 - DNA, 25 bp, Saccharomyces pastorianus
aaattaagtggccttgttggcgcaa

SEQ ID NO: 168557 - DNA, 25 bp, Saccharomyces pastorianus
agctttctctgctatcattctcatt

SEQ ID NO: 168558 - DNA, 25 bp, Saccharomyces pastorianus
actgtcgaggctggtctggttcatc

SEQ ID NO: 168559 - DNA, 25 bp, Saccharomyces pastorianus
gtttggatcatcaacaagctcgcta

SEQ ID NO: 168560 - DNA, 25 bp, Saccharomyces pastorianus
tctggttcatcttttggttcgtttg

SEQ ID NO: 168561 - DNA, 25 bp, Saccharomyces pastorianus
attgctgcatggatcggtcgtgtgc

SEQ ID NO: 168562 - DNA, 25 bp, Saccharomyces pastorianus
atcggtcgtgtgcatttccaattac

SEQ ID NO: 168563 - DNA, 25 bp, Saccharomyces pastorianus
gaagactacaagcacatacataggt

SEQ ID NO: 168564 - DNA, 25 bp, Saccharomyces pastorianus
gatgctctgcggataaaaatcgttg

SEQ ID NO: 168565 - DNA, 25 bp, Saccharomyces pastorianus
gcaagctttgcattgattgctgcat

SEQ ID NO: 168566 - DNA, 25 bp, Saccharomyces pastorianus
aggaacatccatcttcaacagaaag

SEQ ID NO: 168567 - DNA, 25 bp, Saccharomyces pastorianus
agtgacgggctacgcaagctttgca

SEQ ID NO: 168568 - DNA, 25 bp, Saccharomyces pastorianus
ttccaattaccgatgctctgcggat

SEQ ID NO: 168569 - DNA, 25 bp, Saccharomyces pastorianus
gtacgcatcgctgagtgacgggcta

SEQ ID NO: 168570 - DNA, 25 bp, Saccharomyces pastorianus
gatacagctttacaggaacatccat

SEQ ID NO: 168571 - DNA, 25 bp, Saccharomyces pastorianus
atgtatattagtacgcatcgctgag

SEQ ID NO: 168572 - DNA, 25 bp, Saccharomyces pastorianus
aacagacggtctcttgatttctcct

SEQ ID NO: 168573 - DNA, 25 bp, Saccharomyces pastorianus
ataacttttcactttgactcgattg

SEQ ID NO: 168574 - DNA, 25 bp, Saccharomyces pastorianus
gtctcttgatttctccttctagtag

SEQ ID NO: 168575 - DNA, 25 bp, Saccharomyces pastorianus
ctccttctagtagcagtaatactca

SEQ ID NO: 168576 - DNA, 25 bp, Saccharomyces pastorianus
atggaaaacggaatctgaatcactt

SEQ ID NO: 168577 - DNA, 25 bp, Saccharomyces pastorianus
actttgactcgattgtgggcagcta

SEQ ID NO: 168578 - DNA, 25 bp, Saccharomyces pastorianus
atggaagtcgttgttgtcttgcaac

SEQ ID NO: 168579 - DNA, 25 bp, Saccharomyces pastorianus
tgactcgattgtgggcagctaataa

SEQ ID NO: 168580 - DNA, 25 bp, Saccharomyces pastorianus
gtaatactcataacttttcactttg

SEQ ID NO: 168581 - DNA, 25 bp, Saccharomyces pastorianus
ttgatttctccttctagtagcagta

SEQ ID NO: 168582 - DNA, 25 bp, Saccharomyces pastorianus
gttgtcttgcaacagacggtctctt

SEQ ID NO: 168583 - DNA, 25 bp, Saccharomyces pastorianus
gcaccaaatcgcctgtaaataataa

SEQ ID NO: 168584 - DNA, 25 bp, Saccharomyces pastorianus
tttgccgtttcggaaatagactttg

SEQ ID NO: 168585 - DNA, 25 bp, Saccharomyces pastorianus
ttttttcttccctgagctctatttc

SEQ ID NO: 168586 - DNA, 25 bp, Saccharomyces pastorianus
tctatttctttttcccacacggata

SEQ ID NO: 168587 - DNA, 25 bp, Saccharomyces pastorianus
ttgcaaaagaaaagacgtggctcgg

SEQ ID NO: 168588 - DNA, 25 bp, Saccharomyces pastorianus
gagaagaaatccaccgcgatgacac

SEQ ID NO: 168589 - DNA, 25 bp, Saccharomyces pastorianus
gaaatagactttggcgttccacgcc

SEQ ID NO: 168590 - DNA, 25 bp, Saccharomyces pastorianus
cgagattttctcgagttctttatat

SEQ ID NO: 168591 - DNA, 25 bp, Saccharomyces pastorianus
ttttcccacacggatattccgcttg

SEQ ID NO: 168592 - DNA, 25 bp, Saccharomyces pastorianus
tgagctctatttctttttcccacac

SEQ ID NO: 168593 - DNA, 25 bp, Saccharomyces pastorianus
gatgacacacacagcaccaaatcgc

SEQ ID NO: 168594 - DNA, 25 bp, Saccharomyces pastorianus
gtgaaatttcatgattttggcttta

SEQ ID NO: 168595 - DNA, 25 bp, Saccharomyces pastorianus
gaatcagtacttgttcggtttatga

SEQ ID NO: 168596 - DNA, 25 bp, Saccharomyces pastorianus
gagacatttcccaataaacttactg

SEQ ID NO: 168597 - DNA, 25 bp, Saccharomyces pastorianus
atctctgagagacatttcccaataa

SEQ ID NO: 168598 - DNA, 25 bp, Saccharomyces pastorianus
taaaagaggcatttctttttccatt

SEQ ID NO: 168599 - DNA, 25 bp, Saccharomyces pastorianus
ggctttattgtttgtaatctttcat

SEQ ID NO: 168600 - DNA, 25 bp, Saccharomyces pastorianus
gagaatagagagttatcacatataa

SEQ ID NO: 168601 - DNA, 25 bp, Saccharomyces pastorianus
tcaatgagccaatctctgagagaca

SEQ ID NO: 168602 - DNA, 25 bp, Saccharomyces pastorianus
tgttcggtttatgaaatacttcgta

SEQ ID NO: 168603 - DNA, 25 bp, Saccharomyces pastorianus
tagtgctctaggcaacttcaatgag

SEQ ID NO: 168604 - DNA, 25 bp, Saccharomyces pastorianus
gggcatatttagtgctctaggcaac

SEQ ID NO: 168605 - DNA, 25 bp, Saccharomyces pastorianus
gatgatcgaagaccttcttagaagg

SEQ ID NO: 168606 - DNA, 25 bp, Saccharomyces pastorianus
gctttcagatgatcgaagaccttct

SEQ ID NO: 168607 - DNA, 25 bp, Saccharomyces pastorianus
ggcaatagttagcttgtcgtttgac

SEQ ID NO: 168608 - DNA, 25 bp, Saccharomyces pastorianus
aactatccttaggaagatatgcatt

SEQ ID NO: 168609 - DNA, 25 bp, Saccharomyces pastorianus
attagggcaatagttagcttgtcgt

SEQ ID NO: 168610 - DNA, 25 bp, Saccharomyces pastorianus
gagcgagagctgctttcagatgatc

SEQ ID NO: 168611 - DNA, 25 bp, Saccharomyces pastorianus
gagctgctttcagatgatcgaagac

SEQ ID NO: 168612 - DNA, 25 bp, Saccharomyces pastorianus
gaggaaggtttgacttcgccatgat

SEQ ID NO: 168613 - DNA, 25 bp, Saccharomyces pastorianus
gccatgataagagcgagagctgctt

SEQ ID NO: 168614 - DNA, 25 bp, Saccharomyces pastorianus
aaggtttgacttcgccatgataaga

SEQ ID NO: 168615 - DNA, 25 bp, Saccharomyces pastorianus
cttcttagaaggagtattagggcaa

SEQ ID NO: 168616 - DNA, 25 bp, Saccharomyces pastorianus
gagcgtgtattccttatcaaatcta

SEQ ID NO: 168617 - DNA, 25 bp, Saccharomyces pastorianus
acagaaacttatattttgacgccga

SEQ ID NO: 168618 - DNA, 25 bp, Saccharomyces pastorianus
ggatctgtcctggtttaccgctaag

SEQ ID NO: 168619 - DNA, 25 bp, Saccharomyces pastorianus
acaaagatccttatggttgccgttt

SEQ ID NO: 168620 - DNA, 25 bp, Saccharomyces pastorianus
ttttgtgtttttctggttccaacag

SEQ ID NO: 168621 - DNA, 25 bp, Saccharomyces pastorianus
gaatcttattcttggatgtaccggt

SEQ ID NO: 168622 - DNA, 25 bp, Saccharomyces pastorianus
atggttgccgtttggatctgtcctg

SEQ ID NO: 168623 - DNA, 25 bp, Saccharomyces pastorianus
aagtcacacaagttcgattcacgaa

SEQ ID NO: 168624 - DNA, 25 bp, Saccharomyces pastorianus
cagggcaaccattctgaaaatcgtt

SEQ ID NO: 168625 - DNA, 25 bp, Saccharomyces pastorianus
aaatctaggtacaacaagtcacaca

SEQ ID NO: 168626 - DNA, 25 bp, Saccharomyces pastorianus
tggtttaccgctaaggtttcctgag

SEQ ID NO: 168627 - DNA, 25 bp, Saccharomyces pastorianus
tattctctctcaactagtagtctta

SEQ ID NO: 168628 - DNA, 25 bp, Saccharomyces pastorianus
ttctctctcaactagtagtcttact

SEQ ID NO: 168629 - DNA, 25 bp, Saccharomyces pastorianus
ctattctctctcaactagtagtctt

SEQ ID NO: 168630 - DNA, 25 bp, Saccharomyces pastorianus
aatcaactattctctctcaactagt

SEQ ID NO: 168631 - DNA, 25 bp, Saccharomyces pastorianus
gtagtcttactacgagtatattata

SEQ ID NO: 168632 - DNA, 25 bp, Saccharomyces pastorianus
aaatcaactattctctctcaactag

SEQ ID NO: 168633 - DNA, 25 bp, Saccharomyces pastorianus
caactagtagtcttactacgagtat

SEQ ID NO: 168634 - DNA, 25 bp, Saccharomyces pastorianus
aaaaatcaactattctctctcaact

SEQ ID NO: 168635 - DNA, 25 bp, Saccharomyces pastorianus
tcaactattctctctcaactagtag

SEQ ID NO: 168636 - DNA, 25 bp, Saccharomyces pastorianus
aactattctctctcaactagtagtc

SEQ ID NO: 168637 - DNA, 25 bp, Saccharomyces pastorianus
tctctcaactagtagtcttactacg

SEQ ID NO: 168638 - DNA, 25 bp, Saccharomyces pastorianus
attcccttaacctagatgccaatga

SEQ ID NO: 168639 - DNA, 25 bp, Saccharomyces pastorianus
acctagatgccaatgagccacctat

SEQ ID NO: 168640 - DNA, 25 bp, Saccharomyces pastorianus
agatgccaatgagccacctattgac

SEQ ID NO: 168641 - DNA, 25 bp, Saccharomyces pastorianus
tagatgccaatgagccacctattga

SEQ ID NO: 168642 - DNA, 25 bp, Saccharomyces pastorianus
cttaacctagatgccaatgagccac

SEQ ID NO: 168643 - DNA, 25 bp, Saccharomyces pastorianus
aaattcccttaacctagatgccaat

SEQ ID NO: 168644 - DNA, 25 bp, Saccharomyces pastorianus
tcccttaacctagatgccaatgagc

SEQ ID NO: 168645 - DNA, 25 bp, Saccharomyces pastorianus
agactgaacacggtgactctaaaaa

SEQ ID NO: 168646 - DNA, 25 bp, Saccharomyces pastorianus
taacctagatgccaatgagccacct

SEQ ID NO: 168647 - DNA, 25 bp, Saccharomyces pastorianus
cctagatgccaatgagccacctatt

SEQ ID NO: 168648 - DNA, 25 bp, Saccharomyces pastorianus
tgaacacggtgactctaaaaattcc

SEQ ID NO: 168649 - DNA, 25 bp, Saccharomyces pastorianus
tatcccgttctaccgatgacgtcag

SEQ ID NO: 168650 - DNA, 25 bp, Saccharomyces pastorianus
ccgttctaccgatgacgtcagtgaa

SEQ ID NO: 168651 - DNA, 25 bp, Saccharomyces pastorianus
gtaaacaccaaggacagaacccaga

SEQ ID NO: 168652 - DNA, 25 bp, Saccharomyces pastorianus
agatatcccgttctaccgatgacgt

SEQ ID NO: 168653 - DNA, 25 bp, Saccharomyces pastorianus
aaagatatcccgttctaccgatgac

SEQ ID NO: 168654 - DNA, 25 bp, Saccharomyces pastorianus
tctaccgatgacgtcagtgaaaaaa

SEQ ID NO: 168655 - DNA, 25 bp, Saccharomyces pastorianus
gaacccagagacaaagatatcccgt

SEQ ID NO: 168656 - DNA, 25 bp, Saccharomyces pastorianus
gagacaaagatatcccgttctaccg

SEQ ID NO: 168657 - DNA, 25 bp, Saccharomyces pastorianus
gttctaccgatgacgtcagtgaaaa

SEQ ID NO: 168658 - DNA, 25 bp, Saccharomyces pastorianus
ttcttcactagtaaacaccaaggac

SEQ ID NO: 168659 - DNA, 25 bp, Saccharomyces pastorianus
ggacagaacccagagacaaagatat

SEQ ID NO: 168660 - DNA, 25 bp, Saccharomyces pastorianus
tttccaaatccgtttacgtgacttg

SEQ ID NO: 168661 - DNA, 25 bp, Saccharomyces pastorianus
aatagtgccctttctggttctttgt

SEQ ID NO: 168662 - DNA, 25 bp, Saccharomyces pastorianus
tctctaaccccttccaaagcgaaga

SEQ ID NO: 168663 - DNA, 25 bp, Saccharomyces pastorianus
aagcactcgggaccacctaattata

SEQ ID NO: 168664 - DNA, 25 bp, Saccharomyces pastorianus
gtctccttccgacaaggatttccaa

SEQ ID NO: 168665 - DNA, 25 bp, Saccharomyces pastorianus
tcataactgattgtacggattctat

SEQ ID NO: 168666 - DNA, 25 bp, Saccharomyces pastorianus
agagttttgtactgttacatcaaca

SEQ ID NO: 168667 - DNA, 25 bp, Saccharomyces pastorianus
tctataatttttctacggtctcctt

SEQ ID NO: 168668 - DNA, 25 bp, Saccharomyces pastorianus
gcattttcaacgcaagcactcggga

SEQ ID NO: 168669 - DNA, 25 bp, Saccharomyces pastorianus
tatacaagatttctctaaccccttc

SEQ ID NO: 168670 - DNA, 25 bp, Saccharomyces pastorianus
gaggacaattctgcctttgcatttg

SEQ ID NO: 168671 - DNA, 25 bp, Saccharomyces pastorianus
tcaattgaaaaaggctaaggcccaa

SEQ ID NO: 168672 - DNA, 25 bp, Saccharomyces pastorianus
cttgactcctgaatctcaattgaaa

SEQ ID NO: 168673 - DNA, 25 bp, Saccharomyces pastorianus
gctaaggcccaacaaaagaccgctg

SEQ ID NO: 168674 - DNA, 25 bp, Saccharomyces pastorianus
ctcaattgaaaaaggctaaggccca

SEQ ID NO: 168675 - DNA, 25 bp, Saccharomyces pastorianus
tctcaattgaaaaaggctaaggccc

SEQ ID NO: 168676 - DNA, 25 bp, Saccharomyces pastorianus
ggctaaggcccaacaaaagaccgct

SEQ ID NO: 168677 - DNA, 25 bp, Saccharomyces pastorianus
ggcccaacaaaagaccgctgagcaa

SEQ ID NO: 168678 - DNA, 25 bp, Saccharomyces pastorianus
ttgactcctgaatctcaattgaaaa

SEQ ID NO: 168679 - DNA, 25 bp, Saccharomyces pastorianus
aggcccaacaaaagaccgctgagca

SEQ ID NO: 168680 - DNA, 25 bp, Saccharomyces pastorianus
aaggcccaacaaaagaccgctgagc

SEQ ID NO: 168681 - DNA, 25 bp, Saccharomyces pastorianus
taaggcccaacaaaagaccgctgag

SEQ ID NO: 168682 - DNA, 25 bp, Saccharomyces pastorianus
gatagagctactttctacaccatgt

SEQ ID NO: 168683 - DNA, 25 bp, Saccharomyces pastorianus
ttacattgattacccaacttacggt

SEQ ID NO: 168684 - DNA, 25 bp, Saccharomyces pastorianus
gtacgatagagctactttctacacc

SEQ ID NO: 168685 - DNA, 25 bp, Saccharomyces pastorianus
gtccgcagaaggttacattgattac

SEQ ID NO: 168686 - DNA, 25 bp, Saccharomyces pastorianus
gaacaagtacgatagagctactttc

SEQ ID NO: 168687 - DNA, 25 bp, Saccharomyces pastorianus
accatgtccgcagaaggttacattg

SEQ ID NO: 168688 - DNA, 25 bp, Saccharomyces pastorianus
ggttacattgattacccaacttacg

SEQ ID NO: 168689 - DNA, 25 bp, Saccharomyces pastorianus
acgatagagctactttctacaccat

SEQ ID NO: 168690 - DNA, 25 bp, Saccharomyces pastorianus
gaaggttacattgattacccaactt

SEQ ID NO: 168691 - DNA, 25 bp, Saccharomyces pastorianus
catgtccgcagaaggttacattgat

SEQ ID NO: 168692 - DNA, 25 bp, Saccharomyces pastorianus
tagagctactttctacaccatgtcc

SEQ ID NO: 168693 - DNA, 25 bp, Saccharomyces pastorianus
aagaacccaatgcatgcagattgtt

SEQ ID NO: 168694 - DNA, 25 bp, Saccharomyces pastorianus
tccaggtacataggtatcgttctag

SEQ ID NO: 168695 - DNA, 25 bp, Saccharomyces pastorianus
aacagactttggatttgtcaacgaa

SEQ ID NO: 168696 - DNA, 25 bp, Saccharomyces pastorianus
agtgctgcaaaattccaggtacata

SEQ ID NO: 168697 - DNA, 25 bp, Saccharomyces pastorianus
gggtacattacatccattcgaaggg

SEQ ID NO: 168698 - DNA, 25 bp, Saccharomyces pastorianus
ccattcgaagggtcttgttcacaga

SEQ ID NO: 168699 - DNA, 25 bp, Saccharomyces pastorianus
agactaaaagaacccaatgcatgca

SEQ ID NO: 168700 - DNA, 25 bp, Saccharomyces pastorianus
gcagattgttttcccaattgataag

SEQ ID NO: 168701 - DNA, 25 bp, Saccharomyces pastorianus
atcgttctagaatatgcatgtggag

SEQ ID NO: 168702 - DNA, 25 bp, Saccharomyces pastorianus
aacgaattttgctcacgtaacgaat

SEQ ID NO: 168703 - DNA, 25 bp, Saccharomyces pastorianus
atttgtcaacgaattttgctcacgt

SEQ ID NO: 168704 - DNA, 25 bp, Saccharomyces pastorianus
accgacaagctgaaagaggatattt

SEQ ID NO: 168705 - DNA, 25 bp, Saccharomyces pastorianus
gtgacacacgaaaagggccattttg

SEQ ID NO: 168706 - DNA, 25 bp, Saccharomyces pastorianus
atacggcaatacctggcatgtgatt

SEQ ID NO: 168707 - DNA, 25 bp, Saccharomyces pastorianus
aagaactttgggagctacgtgacac

SEQ ID NO: 168708 - DNA, 25 bp, Saccharomyces pastorianus
gaaagagacattgctgggacggtaa

SEQ ID NO: 168709 - DNA, 25 bp, Saccharomyces pastorianus
agtaaagatgctctggacaagtacc

SEQ ID NO: 168710 - DNA, 25 bp, Saccharomyces pastorianus
agcaattggatgtcaaatacggcaa

SEQ ID NO: 168711 - DNA, 25 bp, Saccharomyces pastorianus
actttgggagctacgtgacacacga

SEQ ID NO: 168712 - DNA, 25 bp, Saccharomyces pastorianus
aatacctggcatgtgattgtcggaa

SEQ ID NO: 168713 - DNA, 25 bp, Saccharomyces pastorianus
gcatgtgattgtcggaaagaacttt

SEQ ID NO: 168714 - DNA, 25 bp, Saccharomyces pastorianus
gctctggacaagtaccagttggaaa

SEQ ID NO: 168715 - DNA, 25 bp, Saccharomyces pastorianus
ggagagccagcaattgcggaagtac

SEQ ID NO: 168716 - DNA, 25 bp, Saccharomyces pastorianus
cagcaattgcggaagtacatagcat

SEQ ID NO: 168717 - DNA, 25 bp, Saccharomyces pastorianus
gagagccagcaattgcggaagtaca

SEQ ID NO: 168718 - DNA, 25 bp, Saccharomyces pastorianus
ccagcaattgcggaagtacatagca

SEQ ID NO: 168719 - DNA, 25 bp, Saccharomyces pastorianus
gaagtacatagcattgtacaacaga

SEQ ID NO: 168720 - DNA, 25 bp, Saccharomyces pastorianus
aattgcggaagtacatagcattgta

SEQ ID NO: 168721 - DNA, 25 bp, Saccharomyces pastorianus
agagccagcaattgcggaagtacat

SEQ ID NO: 168722 - DNA, 25 bp, Saccharomyces pastorianus
gcggaagtacatagcattgtacaac

SEQ ID NO: 168723 - DNA, 25 bp, Saccharomyces pastorianus
gcaattgcggaagtacatagcattg

SEQ ID NO: 168724 - DNA, 25 bp, Saccharomyces pastorianus
gagccagcaattgcggaagtacata

SEQ ID NO: 168725 - DNA, 25 bp, Saccharomyces pastorianus
tggagagccagcaattgcggaagta

SEQ ID NO: 168726 - DNA, 25 bp, Saccharomyces pastorianus
tctacttccggttccacttcatttg

SEQ ID NO: 168727 - DNA, 25 bp, Saccharomyces pastorianus
gctttctctttctcaaatgctattc

SEQ ID NO: 168728 - DNA, 25 bp, Saccharomyces pastorianus
aatcttgagaatggcagtacctacg

SEQ ID NO: 168729 - DNA, 25 bp, Saccharomyces pastorianus
tggtggttccgtctctggtttgcaa

SEQ ID NO: 168730 - DNA, 25 bp, Saccharomyces pastorianus
gcaacacaaggcaactcacaattct

SEQ ID NO: 168731 - DNA, 25 bp, Saccharomyces pastorianus
aatcaggttctgtcaacaacggtga

SEQ ID NO: 168732 - DNA, 25 bp, Saccharomyces pastorianus
gtctccgaaggaacatttgctggtg

SEQ ID NO: 168733 - DNA, 25 bp, Saccharomyces pastorianus
tattctcaatggtggttccgtctct

SEQ ID NO: 168734 - DNA, 25 bp, Saccharomyces pastorianus
tggtgcttccgtaactggttcaacc

SEQ ID NO: 168735 - DNA, 25 bp, Saccharomyces pastorianus
gctggtgcctatgcttattatctaa

SEQ ID NO: 168736 - DNA, 25 bp, Saccharomyces pastorianus
aattctccttctctattggtactgg

SEQ ID NO: 168737 - DNA, 25 bp, Saccharomyces pastorianus
gaatataaaggtctcatcaccatta

SEQ ID NO: 168738 - DNA, 25 bp, Saccharomyces pastorianus
gagtcaaattcaactttcgacaaat

SEQ ID NO: 168739 - DNA, 25 bp, Saccharomyces pastorianus
attcggccaggatgatactgagtca

SEQ ID NO: 168740 - DNA, 25 bp, Saccharomyces pastorianus
gttctgacagcctaaggtataccgt

SEQ ID NO: 168741 - DNA, 25 bp, Saccharomyces pastorianus
actttccctcaaacaatagacaccg

SEQ ID NO: 168742 - DNA, 25 bp, Saccharomyces pastorianus
ccattattccttccaaacctgattt

SEQ ID NO: 168743 - DNA, 25 bp, Saccharomyces pastorianus
aaaagataccgaattcggccaggat

SEQ ID NO: 168744 - DNA, 25 bp, Saccharomyces pastorianus
aattgggttcaggaactgcttcatt

SEQ ID NO: 168745 - DNA, 25 bp, Saccharomyces pastorianus
gaactgcttcatttgttcaggttct

SEQ ID NO: 168746 - DNA, 25 bp, Saccharomyces pastorianus
aaacaatagacaccgccagtgacca

SEQ ID NO: 168747 - DNA, 25 bp, Saccharomyces pastorianus
gtataccgtcggaaattccgtggca

SEQ ID NO: 168748 - DNA, 25 bp, Saccharomyces pastorianus
ctgatttaatctcagcggctgcttt

SEQ ID NO: 168749 - DNA, 25 bp, Saccharomyces pastorianus
agaggttacgcgctggtttaatcga

SEQ ID NO: 168750 - DNA, 25 bp, Saccharomyces pastorianus
aataccttgtctgtgatgaccacga

SEQ ID NO: 168751 - DNA, 25 bp, Saccharomyces pastorianus
taatcgagtaattaagtcccgcttt

SEQ ID NO: 168752 - DNA, 25 bp, Saccharomyces pastorianus
tcccgcttttttgaaggtgaatttg

SEQ ID NO: 168753 - DNA, 25 bp, Saccharomyces pastorianus
gcgtaaagccatataatgccactga

SEQ ID NO: 168754 - DNA, 25 bp, Saccharomyces pastorianus
gaggtctaagcatccagaggttacg

SEQ ID NO: 168755 - DNA, 25 bp, Saccharomyces pastorianus
gatgaccacgaaactcttgctgatt

SEQ ID NO: 168756 - DNA, 25 bp, Saccharomyces pastorianus
gccgcaagagagaatgtcgacacca

SEQ ID NO: 168757 - DNA, 25 bp, Saccharomyces pastorianus
gctgctttttcgctagggtttataa

SEQ ID NO: 168758 - DNA, 25 bp, Saccharomyces pastorianus
gacaccattgtttcgctttacgaga

SEQ ID NO: 168759 - DNA, 25 bp, Saccharomyces pastorianus
cgtcgactgcgtttactgattaccg

SEQ ID NO: 168760 - DNA, 25 bp, Saccharomyces pastorianus
gcaccctttgtcaagagttcgtggt

SEQ ID NO: 168761 - DNA, 25 bp, Saccharomyces pastorianus
gttaacgtcgactgcgtttactgat

SEQ ID NO: 168762 - DNA, 25 bp, Saccharomyces pastorianus
gacggcaccctttgtcaagagttcg

SEQ ID NO: 168763 - DNA, 25 bp, Saccharomyces pastorianus
ctttgtcaagagttcgtggttaacg

SEQ ID NO: 168764 - DNA, 25 bp, Saccharomyces pastorianus
cggcaccctttgtcaagagttcgtg

SEQ ID NO: 168765 - DNA, 25 bp, Saccharomyces pastorianus
caagagttcgtggttaacgtcgact

SEQ ID NO: 168766 - DNA, 25 bp, Saccharomyces pastorianus
tcgactgcgtttactgattaccgtt

SEQ ID NO: 168767 - DNA, 25 bp, Saccharomyces pastorianus
gtggttaacgtcgactgcgtttact

SEQ ID NO: 168768 - DNA, 25 bp, Saccharomyces pastorianus
agttcgtggttaacgtcgactgcgt

SEQ ID NO: 168769 - DNA, 25 bp, Saccharomyces pastorianus
ttcgtggttaacgtcgactgcgttt

SEQ ID NO: 168770 - DNA, 25 bp, Saccharomyces pastorianus
atgactttgggccacgaatccaacg

SEQ ID NO: 168771 - DNA, 25 bp, Saccharomyces pastorianus
atctgcggattagacattcactact

SEQ ID NO: 168772 - DNA, 25 bp, Saccharomyces pastorianus
atagccctcatacccaaataggttt

SEQ ID NO: 168773 - DNA, 25 bp, Saccharomyces pastorianus
gaaggctattggaatctgcggatta

SEQ ID NO: 168774 - DNA, 25 bp, Saccharomyces pastorianus
agaatttctgtgaggccattatagt

SEQ ID NO: 168775 - DNA, 25 bp, Saccharomyces pastorianus
gcgtaaagtaacctgggaagcccat

SEQ ID NO: 168776 - DNA, 25 bp, Saccharomyces pastorianus
attcactactacacggatggccagg

SEQ ID NO: 168777 - DNA, 25 bp, Saccharomyces pastorianus
atgcagtaagcatatagccctcata

SEQ ID NO: 168778 - DNA, 25 bp, Saccharomyces pastorianus
gaatccaacggtgctgttcttgaaa

SEQ ID NO: 168779 - DNA, 25 bp, Saccharomyces pastorianus
cggatggccaggtcagcgtaaagta

SEQ ID NO: 168780 - DNA, 25 bp, Saccharomyces pastorianus
caaactactgtaaagcgggtgatgc

SEQ ID NO: 168781 - DNA, 25 bp, Saccharomyces pastorianus
cggtacaatcaacatcgtctctggt

SEQ ID NO: 168782 - DNA, 25 bp, Saccharomyces pastorianus
gcgcctactcatattacctaaacta

SEQ ID NO: 168783 - DNA, 25 bp, Saccharomyces pastorianus
atctctggtgtctcaaactccacta

SEQ ID NO: 168784 - DNA, 25 bp, Saccharomyces pastorianus
tcaataattccttcatctagcgcct

SEQ ID NO: 168785 - DNA, 25 bp, Saccharomyces pastorianus
tactgccactggttcagtcacttta

SEQ ID NO: 168786 - DNA, 25 bp, Saccharomyces pastorianus
ggtactactggtgtcttaactgcaa

SEQ ID NO: 168787 - DNA, 25 bp, Saccharomyces pastorianus
actacctctggtgttgtctctactg

SEQ ID NO: 168788 - DNA, 25 bp, Saccharomyces pastorianus
atgacggtgtcatcgctacaagcgc

SEQ ID NO: 168789 - DNA, 25 bp, Saccharomyces pastorianus
acagcatctggttcaatcgcttcta

SEQ ID NO: 168790 - DNA, 25 bp, Saccharomyces pastorianus
tggattctctagttctggcttcagt

SEQ ID NO: 168791 - DNA, 25 bp, Saccharomyces pastorianus
agtcactttatcctctaacgcttct

SEQ ID NO: 168792 - DNA, 25 bp, Saccharomyces pastorianus
aaggagatattatccgaccgactgt

SEQ ID NO: 168793 - DNA, 25 bp, Saccharomyces pastorianus
attatccgaccgactgttttgtgat

SEQ ID NO: 168794 - DNA, 25 bp, Saccharomyces pastorianus
atccgaccgactgttttgtgatatg

SEQ ID NO: 168795 - DNA, 25 bp, Saccharomyces pastorianus
aaagtgcccaagtgacatttagcta

SEQ ID NO: 168796 - DNA, 25 bp, Saccharomyces pastorianus
cgaccgactgttttgtgatatggca

SEQ ID NO: 168797 - DNA, 25 bp, Saccharomyces pastorianus
aatgtcattagaaagtgcccaagtg

SEQ ID NO: 168798 - DNA, 25 bp, Saccharomyces pastorianus
gagcaaaattacttcttttggctgg

SEQ ID NO: 168799 - DNA, 25 bp, Saccharomyces pastorianus
gactgttttgtgatatggcaaacta

SEQ ID NO: 168800 - DNA, 25 bp, Saccharomyces pastorianus
gatattatccgaccgactgttttgt

SEQ ID NO: 168801 - DNA, 25 bp, Saccharomyces pastorianus
tacttcttttggctggaaatgtcat

SEQ ID NO: 168802 - DNA, 25 bp, Saccharomyces pastorianus
ttcttttggctggaaatgtcattag

SEQ ID NO: 168803 - DNA, 25 bp, Saccharomyces pastorianus
tgtacatccaacaaagccttatgtt

SEQ ID NO: 168804 - DNA, 25 bp, Saccharomyces pastorianus
tgggccttagaacaaacttttgaag

SEQ ID NO: 168805 - DNA, 25 bp, Saccharomyces pastorianus
gaacactttgtcatgtgcgtcgcat

SEQ ID NO: 168806 - DNA, 25 bp, Saccharomyces pastorianus
gagtcttcaactacaatacaggtga

SEQ ID NO: 168807 - DNA, 25 bp, Saccharomyces pastorianus
acttttgaaggccacgaacactttg

SEQ ID NO: 168808 - DNA, 25 bp, Saccharomyces pastorianus
tgttgggagtgatgatttcaggatc

SEQ ID NO: 168809 - DNA, 25 bp, Saccharomyces pastorianus
aagccttatgttttatccggcagtg

SEQ ID NO: 168810 - DNA, 25 bp, Saccharomyces pastorianus
gttacggaaactcctgttagagcag

SEQ ID NO: 168811 - DNA, 25 bp, Saccharomyces pastorianus
gaagttagatccatccaagttacgg

SEQ ID NO: 168812 - DNA, 25 bp, Saccharomyces pastorianus
tccggcagtgatgatttgacagtca

SEQ ID NO: 168813 - DNA, 25 bp, Saccharomyces pastorianus
tggaattgggaaaataactgggcct

SEQ ID NO: 168814 - DNA, 25 bp, Saccharomyces pastorianus
tcaattcctggctatccaaattctc

SEQ ID NO: 168815 - DNA, 25 bp, Saccharomyces pastorianus
ggaacgtagtagctccttatcagca

SEQ ID NO: 168816 - DNA, 25 bp, Saccharomyces pastorianus
atcagcaacgttcaattcctggcta

SEQ ID NO: 168817 - DNA, 25 bp, Saccharomyces pastorianus
ggctatccaaattctctatagcttc

SEQ ID NO: 168818 - DNA, 25 bp, Saccharomyces pastorianus
gtatccagaagataatggtacccgt

SEQ ID NO: 168819 - DNA, 25 bp, Saccharomyces pastorianus
cagaagataatggtacccgtaagaa

SEQ ID NO: 168820 - DNA, 25 bp, Saccharomyces pastorianus
gtagctccttatcagcaacgttcaa

SEQ ID NO: 168821 - DNA, 25 bp, Saccharomyces pastorianus
gtagtagctccttatcagcaacgtt

SEQ ID NO: 168822 - DNA, 25 bp, Saccharomyces pastorianus
tcctggctatccaaattctctatag

SEQ ID NO: 168823 - DNA, 25 bp, Saccharomyces pastorianus
ctccttatcagcaacgttcaattcc

SEQ ID NO: 168824 - DNA, 25 bp, Saccharomyces pastorianus
aacgttcaattcctggctatccaaa

SEQ ID NO: 168825 - DNA, 25 bp, Saccharomyces pastorianus
gaaagcgcgttggacagatacttga

SEQ ID NO: 168826 - DNA, 25 bp, Saccharomyces pastorianus
gagaatcttgggacaaatgcaaaaa

SEQ ID NO: 168827 - DNA, 25 bp, Saccharomyces pastorianus
gagagagaatcttgggacaaatgca

SEQ ID NO: 168828 - DNA, 25 bp, Saccharomyces pastorianus
ttttgcttcccacgaaatcggaact

SEQ ID NO: 168829 - DNA, 25 bp, Saccharomyces pastorianus
ttggacagatacttgagcagatttt

SEQ ID NO: 168830 - DNA, 25 bp, Saccharomyces pastorianus
atgcaaaaaagaaatggtcggaaca

SEQ ID NO: 168831 - DNA, 25 bp, Saccharomyces pastorianus
atctatcagccgaagaaagcgcgtt

SEQ ID NO: 168832 - DNA, 25 bp, Saccharomyces pastorianus
cagatacttgagcagattttgtggg

SEQ ID NO: 168833 - DNA, 25 bp, Saccharomyces pastorianus
gcgttggacagatacttgagcagat

SEQ ID NO: 168834 - DNA, 25 bp, Saccharomyces pastorianus
agcgcgttggacagatacttgagca

SEQ ID NO: 168835 - DNA, 25 bp, Saccharomyces pastorianus
tcggggagcaatttttgggagcaaa

SEQ ID NO: 168836 - DNA, 25 bp, Saccharomyces pastorianus
gattcatctggttcatttgaaacga

SEQ ID NO: 168837 - DNA, 25 bp, Saccharomyces pastorianus
tatttccaaggaacaccccagccaa

SEQ ID NO: 168838 - DNA, 25 bp, Saccharomyces pastorianus
ccgcacagctctagcgttgtaacat

SEQ ID NO: 168839 - DNA, 25 bp, Saccharomyces pastorianus
aaagactactgtcttgtctcaattg

SEQ ID NO: 168840 - DNA, 25 bp, Saccharomyces pastorianus
ttttcccaacagtccggtcaaacag

SEQ ID NO: 168841 - DNA, 25 bp, Saccharomyces pastorianus
tctggtccgagtgggccaagttatt

SEQ ID NO: 168842 - DNA, 25 bp, Saccharomyces pastorianus
gtctcaattgttcatcacgacttca

SEQ ID NO: 168843 - DNA, 25 bp, Saccharomyces pastorianus
tttgaaacgaacctagacccgcaca

SEQ ID NO: 168844 - DNA, 25 bp, Saccharomyces pastorianus
agaagagtcattcaaggcatggaga

SEQ ID NO: 168845 - DNA, 25 bp, Saccharomyces pastorianus
gtttagtatctggtccgagtgggcc

SEQ ID NO: 168846 - DNA, 25 bp, Saccharomyces pastorianus
gtccggtcaaacagactacaatcat

SEQ ID NO: 168847 - DNA, 25 bp, Saccharomyces pastorianus
actctccaggaatcatgcattgtta

SEQ ID NO: 168848 - DNA, 25 bp, Saccharomyces pastorianus
gtacaacctttattagaatcaccga

SEQ ID NO: 168849 - DNA, 25 bp, Saccharomyces pastorianus
gggcggtaaaagagtggattcacac

SEQ ID NO: 168850 - DNA, 25 bp, Saccharomyces pastorianus
gaggctgctgccataacaagtcaca

SEQ ID NO: 168851 - DNA, 25 bp, Saccharomyces pastorianus
gcattgttaagttgcgacccgctca

SEQ ID NO: 168852 - DNA, 25 bp, Saccharomyces pastorianus
agaagttatcctgggctctgataca

SEQ ID NO: 168853 - DNA, 25 bp, Saccharomyces pastorianus
ggattcacacactttttcccaagta

SEQ ID NO: 168854 - DNA, 25 bp, Saccharomyces pastorianus
taacggtcaaagaattggctcaaat

SEQ ID NO: 168855 - DNA, 25 bp, Saccharomyces pastorianus
cccgctcacgggtaaggtatatata

SEQ ID NO: 168856 - DNA, 25 bp, Saccharomyces pastorianus
gtaatggtacgttcattaacggtca

SEQ ID NO: 168857 - DNA, 25 bp, Saccharomyces pastorianus
gtacgagcccgactttatctaatat

SEQ ID NO: 168858 - DNA, 25 bp, Saccharomyces pastorianus
aggtttacctagagccagcatccta

SEQ ID NO: 168859 - DNA, 25 bp, Saccharomyces pastorianus
atcctacctacagctttcagacgaa

SEQ ID NO: 168860 - DNA, 25 bp, Saccharomyces pastorianus
atgaacccggtgatacagtaaccat

SEQ ID NO: 168861 - DNA, 25 bp, Saccharomyces pastorianus
atggtggattagttcgcccgatgac

SEQ ID NO: 168862 - DNA, 25 bp, Saccharomyces pastorianus
catttccaagacgtgaggcagttca

SEQ ID NO: 168863 - DNA, 25 bp, Saccharomyces pastorianus
ttggaccctgaggtttacctagagc

SEQ ID NO: 168864 - DNA, 25 bp, Saccharomyces pastorianus
ggatgtttcaagattcctagcaaat

SEQ ID NO: 168865 - DNA, 25 bp, Saccharomyces pastorianus
cagtggagttcctaatgatcttaag

SEQ ID NO: 168866 - DNA, 25 bp, Saccharomyces pastorianus
gaaaagttcactagcaccaaggtta

SEQ ID NO: 168867 - DNA, 25 bp, Saccharomyces pastorianus
agctttcagacgaacatgccaatga

SEQ ID NO: 168868 - DNA, 25 bp, Saccharomyces pastorianus
gattacatctgaaggtcatttccaa

SEQ ID NO: 168869 - DNA, 25 bp, Saccharomyces pastorianus
gcataacgagatgtcatctacggac

SEQ ID NO: 168870 - DNA, 25 bp, Saccharomyces pastorianus
gataagattgttactcaatacaaga

SEQ ID NO: 168871 - DNA, 25 bp, Saccharomyces pastorianus
aaacgtttagagattttgatgaatt

SEQ ID NO: 168872 - DNA, 25 bp, Saccharomyces pastorianus
gatggaggcaaaacgtttagagatt

SEQ ID NO: 168873 - DNA, 25 bp, Saccharomyces pastorianus
acgggcataacgagatgtcatctac

SEQ ID NO: 168874 - DNA, 25 bp, Saccharomyces pastorianus
agtcatatgtggtcgttttaacgca

SEQ ID NO: 168875 - DNA, 25 bp, Saccharomyces pastorianus
cagttggctttcagtagtgatggag

SEQ ID NO: 168876 - DNA, 25 bp, Saccharomyces pastorianus
taacgcaagatgacgggcataacga

SEQ ID NO: 168877 - DNA, 25 bp, Saccharomyces pastorianus
tattgaagtcatatgtggtcgtttt

SEQ ID NO: 168878 - DNA, 25 bp, Saccharomyces pastorianus
ggctttcagtagtgatggaggcaaa

SEQ ID NO: 168879 - DNA, 25 bp, Saccharomyces pastorianus
gttttaacgcaagatgacgggcata

SEQ ID NO: 168880 - DNA, 25 bp, Saccharomyces pastorianus
caacgaattatccagtttcacgagt

SEQ ID NO: 168881 - DNA, 25 bp, Saccharomyces pastorianus
gagtcaaggcggtaattttgaaatc

SEQ ID NO: 168882 - DNA, 25 bp, Saccharomyces pastorianus
gacttacatgaaaacgccaacgaat

SEQ ID NO: 168883 - DNA, 25 bp, Saccharomyces pastorianus
gacgacttacatgaaaacgccaacg

SEQ ID NO: 168884 - DNA, 25 bp, Saccharomyces pastorianus
cagtttcacgagtcaaggcggtaat

SEQ ID NO: 168885 - DNA, 25 bp, Saccharomyces pastorianus
gccaacgaattatccagtttcacga

SEQ ID NO: 168886 - DNA, 25 bp, Saccharomyces pastorianus
atccagtttcacgagtcaaggcggt

SEQ ID NO: 168887 - DNA, 25 bp, Saccharomyces pastorianus
ttcacgagtcaaggcggtaattttg

SEQ ID NO: 168888 - DNA, 25 bp, Saccharomyces pastorianus
gaaaacgccaacgaattatccagtt

SEQ ID NO: 168889 - DNA, 25 bp, Saccharomyces pastorianus
aacgccaacgaattatccagtttca

SEQ ID NO: 168890 - DNA, 25 bp, Saccharomyces pastorianus
aattatccagtttcacgagtcaagg

SEQ ID NO: 168891 - DNA, 25 bp, Saccharomyces pastorianus
gggattgccggaatcggtcgcaatc

SEQ ID NO: 168892 - DNA, 25 bp, Saccharomyces pastorianus
agtgccgcccctaaaaacgcttgcg

SEQ ID NO: 168893 - DNA, 25 bp, Saccharomyces pastorianus
agaaattcctgtttggggattgccg

SEQ ID NO: 168894 - DNA, 25 bp, Saccharomyces pastorianus
gcgcattgggcagaaattcctgttt

SEQ ID NO: 168895 - DNA, 25 bp, Saccharomyces pastorianus
tcaaaacagttttgctgaaggaaaa

SEQ ID NO: 168896 - DNA, 25 bp, Saccharomyces pastorianus
tgccggaatcggtcgcaatcgggta

SEQ ID NO: 168897 - DNA, 25 bp, Saccharomyces pastorianus
tgccgcggccatttctggggctgtc

SEQ ID NO: 168898 - DNA, 25 bp, Saccharomyces pastorianus
ggctgtccgcgcattgggcagaaat

SEQ ID NO: 168899 - DNA, 25 bp, Saccharomyces pastorianus
cgagtgccgcccctaaaaacgcttg

SEQ ID NO: 168900 - DNA, 25 bp, Saccharomyces pastorianus
tgtccgcgcattgggcagaaattcc

SEQ ID NO: 168901 - DNA, 25 bp, Saccharomyces pastorianus
cattgggcagaaattcctgtttggg

SEQ ID NO: 168902 - DNA, 25 bp, Saccharomyces pastorianus
gaagacgtcttcaagtgccgttttt

SEQ ID NO: 168903 - DNA, 25 bp, Saccharomyces pastorianus
gatatcgtttgcactagcttttctt

SEQ ID NO: 168904 - DNA, 25 bp, Saccharomyces pastorianus
gatacctgtggtccattttattggc

SEQ ID NO: 168905 - DNA, 25 bp, Saccharomyces pastorianus
accctgacggtgatttgtttaatga

SEQ ID NO: 168906 - DNA, 25 bp, Saccharomyces pastorianus
ttttattggctctaacctctcacta

SEQ ID NO: 168907 - DNA, 25 bp, Saccharomyces pastorianus
atttgtgcaatggttcccttcactg

SEQ ID NO: 168908 - DNA, 25 bp, Saccharomyces pastorianus
attccgttatgcaggtggatcctac

SEQ ID NO: 168909 - DNA, 25 bp, Saccharomyces pastorianus
cccttcactgaaccaatctctaatg

SEQ ID NO: 168910 - DNA, 25 bp, Saccharomyces pastorianus
gaaatggctcactataccctgacgg

SEQ ID NO: 168911 - DNA, 25 bp, Saccharomyces pastorianus
gcgcctttgataacggagaatatta

SEQ ID NO: 168912 - DNA, 25 bp, Saccharomyces pastorianus
ctaacctctcactacgatatcgttt

SEQ ID NO: 168913 - DNA, 25 bp, Saccharomyces pastorianus
tttttcgtagctgggcgtctatcag

SEQ ID NO: 168914 - DNA, 25 bp, Saccharomyces pastorianus
cgcaaacctaataccgcgcatgttt

SEQ ID NO: 168915 - DNA, 25 bp, Saccharomyces pastorianus
gcgcatgtttggtcgcatttatccg

SEQ ID NO: 168916 - DNA, 25 bp, Saccharomyces pastorianus
ttatccggcggtcatcgccaaaggg

SEQ ID NO: 168917 - DNA, 25 bp, Saccharomyces pastorianus
aataccgcgcatgtttggtcgcatt

SEQ ID NO: 168918 - DNA, 25 bp, Saccharomyces pastorianus
gcggtattctaaaagagcgcaaacc

SEQ ID NO: 168919 - DNA, 25 bp, Saccharomyces pastorianus
aagtgtgacctttttcgtagctggg

SEQ ID NO: 168920 - DNA, 25 bp, Saccharomyces pastorianus
ggcggacaggtcacgtcccggtctc

SEQ ID NO: 168921 - DNA, 25 bp, Saccharomyces pastorianus
cgtcccggtctctgcttcagcaaaa

SEQ ID NO: 168922 - DNA, 25 bp, Saccharomyces pastorianus
ttggtcgcatttatccggcggtcat

SEQ ID NO: 168923 - DNA, 25 bp, Saccharomyces pastorianus
cgccaaagggcggacaggtcacgtc

SEQ ID NO: 168924 - DNA, 25 bp, Saccharomyces pastorianus
gatagaaacgtaatggcccacatca

SEQ ID NO: 168925 - DNA, 25 bp, Saccharomyces pastorianus
gttaggatgactgtgctcctccaaa

SEQ ID NO: 168926 - DNA, 25 bp, Saccharomyces pastorianus
tgactgtgctcctccaaacactata

SEQ ID NO: 168927 - DNA, 25 bp, Saccharomyces pastorianus
atggagctgggatagaaacgtaatg

SEQ ID NO: 168928 - DNA, 25 bp, Saccharomyces pastorianus
atggccaacgttaggatgactgtgc

SEQ ID NO: 168929 - DNA, 25 bp, Saccharomyces pastorianus
aacatcatggccaacgttaggatga

SEQ ID NO: 168930 - DNA, 25 bp, Saccharomyces pastorianus
acgtaatggcccacatcaaaaacat

SEQ ID NO: 168931 - DNA, 25 bp, Saccharomyces pastorianus
tcaaaaacatcatggccaacgttag

SEQ ID NO: 168932 - DNA, 25 bp, Saccharomyces pastorianus
ggccaacgttaggatgactgtgctc

SEQ ID NO: 168933 - DNA, 25 bp, Saccharomyces pastorianus
taggatgactgtgctcctccaaaca

SEQ ID NO: 168934 - DNA, 25 bp, Saccharomyces pastorianus
aacgttaggatgactgtgctcctcc

SEQ ID NO: 168935 - DNA, 25 bp, Saccharomyces pastorianus
ttatccagaatagcacggacagtgc

SEQ ID NO: 168936 - DNA, 25 bp, Saccharomyces pastorianus
gactcttgcaaaactgtacatacgt

SEQ ID NO: 168937 - DNA, 25 bp, Saccharomyces pastorianus
tacatacgtttggttgttctttggg

SEQ ID NO: 168938 - DNA, 25 bp, Saccharomyces pastorianus
gtatagctaaattggtcacgcaaac

SEQ ID NO: 168939 - DNA, 25 bp, Saccharomyces pastorianus
acgggactcttgcaaaactgtacat

SEQ ID NO: 168940 - DNA, 25 bp, Saccharomyces pastorianus
aattggtcacgcaaacagacagatt

SEQ ID NO: 168941 - DNA, 25 bp, Saccharomyces pastorianus
cagacagattagttagtagaaggaa

SEQ ID NO: 168942 - DNA, 25 bp, Saccharomyces pastorianus
atagcacggacagtgcactaaccac

SEQ ID NO: 168943 - DNA, 25 bp, Saccharomyces pastorianus
tggcacgggactcttgcaaaactgt

SEQ ID NO: 168944 - DNA, 25 bp, Saccharomyces pastorianus
aactgtacatacgtttggttgttct

SEQ ID NO: 168945 - DNA, 25 bp, Saccharomyces pastorianus
ggtcacgcaaacagacagattagtt

SEQ ID NO: 168946 - DNA, 25 bp, Saccharomyces pastorianus
tgtatcatagcctttagcaacaata

SEQ ID NO: 168947 - DNA, 25 bp, Saccharomyces pastorianus
acctgtatcatagcctttagcaaca

SEQ ID NO: 168948 - DNA, 25 bp, Saccharomyces pastorianus
ctgtatcatagcctttagcaacaat

SEQ ID NO: 168949 - DNA, 25 bp, Saccharomyces pastorianus
atacctgtatcatagcctttagcaa

SEQ ID NO: 168950 - DNA, 25 bp, Saccharomyces pastorianus
ttttgtagaattatcgattcccttt

SEQ ID NO: 168951 - DNA, 25 bp, Saccharomyces pastorianus
catagcctttagcaacaatagaatc

SEQ ID NO: 168952 - DNA, 25 bp, Saccharomyces pastorianus
ccttttgtggatccctatatcctcg

SEQ ID NO: 168953 - DNA, 25 bp, Saccharomyces pastorianus
ttcccttttgtggatccctatatcc

SEQ ID NO: 168954 - DNA, 25 bp, Saccharomyces pastorianus
ttagcaacaatagaatcccaacaat

SEQ ID NO: 168955 - DNA, 25 bp, Saccharomyces pastorianus
gtatcatagcctttagcaacaatag

SEQ ID NO: 168956 - DNA, 25 bp, Saccharomyces pastorianus
tacctgtatcatagcctttagcaac

SEQ ID NO: 168957 - DNA, 25 bp, Saccharomyces pastorianus
gacctagaagtaacaacaccacaac

SEQ ID NO: 168958 - DNA, 25 bp, Saccharomyces pastorianus
gggccaccaggccagcaagtcacac

SEQ ID NO: 168959 - DNA, 25 bp, Saccharomyces pastorianus
agggccactcgctacacaggaccta

SEQ ID NO: 168960 - DNA, 25 bp, Saccharomyces pastorianus
ttcattcaccgggtggtgtgccggt

SEQ ID NO: 168961 - DNA, 25 bp, Saccharomyces pastorianus
atttttcattcaccgggtggtgtgc

SEQ ID NO: 168962 - DNA, 25 bp, Saccharomyces pastorianus
gcccagcgaaaatgcgcgcccatat

SEQ ID NO: 168963 - DNA, 25 bp, Saccharomyces pastorianus
cactcgctacacaggacctagaagt

SEQ ID NO: 168964 - DNA, 25 bp, Saccharomyces pastorianus
cgcatttttcattcaccgggtggtg

SEQ ID NO: 168965 - DNA, 25 bp, Saccharomyces pastorianus
ccacaacatgtcttttgacgaccta

SEQ ID NO: 168966 - DNA, 25 bp, Saccharomyces pastorianus
acaactcaccacaacatgtcttttg

SEQ ID NO: 168967 - DNA, 25 bp, Saccharomyces pastorianus
catataaatacccgccggtcacgac

SEQ ID NO: 168968 - DNA, 25 bp, Saccharomyces pastorianus
gtttctgttgtggtgttgcaacaca

SEQ ID NO: 168969 - DNA, 25 bp, Saccharomyces pastorianus
aacttttagggacacgtggcacgat

SEQ ID NO: 168970 - DNA, 25 bp, Saccharomyces pastorianus
cccactcaagtcaccaagctaaaag

SEQ ID NO: 168971 - DNA, 25 bp, Saccharomyces pastorianus
tctttctttaatatccagtttccaa

SEQ ID NO: 168972 - DNA, 25 bp, Saccharomyces pastorianus
tttttctctctcgtgcaaggtcgtc

SEQ ID NO: 168973 - DNA, 25 bp, Saccharomyces pastorianus
tttgccaccgtgtaagtttctgttg

SEQ ID NO: 168974 - DNA, 25 bp, Saccharomyces pastorianus
acgtggcacgattcttttctcgtca

SEQ ID NO: 168975 - DNA, 25 bp, Saccharomyces pastorianus
tgcaacacaacatatcctatctcac

SEQ ID NO: 168976 - DNA, 25 bp, Saccharomyces pastorianus
tcctatctcaccgttgtattacaca

SEQ ID NO: 168977 - DNA, 25 bp, Saccharomyces pastorianus
gattcttttctcgtcacgtgctcat

SEQ ID NO: 168978 - DNA, 25 bp, Saccharomyces pastorianus
gtatagttttttctctctcgtgcaa

SEQ ID NO: 168979 - DNA, 25 bp, Saccharomyces pastorianus
ccaatcatggtgtagtgtgtatcga

SEQ ID NO: 168980 - DNA, 25 bp, Saccharomyces pastorianus
gtgtcgacagattcaccatggatga

SEQ ID NO: 168981 - DNA, 25 bp, Saccharomyces pastorianus
agatgaccggtgtcgacagattcac

SEQ ID NO: 168982 - DNA, 25 bp, Saccharomyces pastorianus
aatcatggtgtagtgtgtatcgatg

SEQ ID NO: 168983 - DNA, 25 bp, Saccharomyces pastorianus
cgacagattcaccatggatgaagtt

SEQ ID NO: 168984 - DNA, 25 bp, Saccharomyces pastorianus
ggccaatcatggtgtagtgtgtatc

SEQ ID NO: 168985 - DNA, 25 bp, Saccharomyces pastorianus
atcggaggccactgccatggttgtg

SEQ ID NO: 168986 - DNA, 25 bp, Saccharomyces pastorianus
atggttgtggccaatcatggtgtag

SEQ ID NO: 168987 - DNA, 25 bp, Saccharomyces pastorianus
acaagatgaccggtgtcgacagatt

SEQ ID NO: 168988 - DNA, 25 bp, Saccharomyces pastorianus
gaccggtgtcgacagattcaccatg

SEQ ID NO: 168989 - DNA, 25 bp, Saccharomyces pastorianus
acatcggaggccactgccatggttg

SEQ ID NO: 168990 - DNA, 25 bp, Saccharomyces pastorianus
ttggttatttccacaaccggtagag

SEQ ID NO: 168991 - DNA, 25 bp, Saccharomyces pastorianus
ccctcaatcgccaaatctcaattgt

SEQ ID NO: 168992 - DNA, 25 bp, Saccharomyces pastorianus
gcatctttggttatttccacaaccg

SEQ ID NO: 168993 - DNA, 25 bp, Saccharomyces pastorianus
tccctcaatcgccaaatctcaattg

SEQ ID NO: 168994 - DNA, 25 bp, Saccharomyces pastorianus
caatcgccaaatctcaattgttgag

SEQ ID NO: 168995 - DNA, 25 bp, Saccharomyces pastorianus
acggcatctttggttatttccacaa

SEQ ID NO: 168996 - DNA, 25 bp, Saccharomyces pastorianus
atttttgttaaatacggcatctttg

SEQ ID NO: 168997 - DNA, 25 bp, Saccharomyces pastorianus
tggttatttccacaaccggtagagg

SEQ ID NO: 168998 - DNA, 25 bp, Saccharomyces pastorianus
ctcaattgttgagatttttgttaaa

SEQ ID NO: 168999 - DNA, 25 bp, Saccharomyces pastorianus
tacggcatctttggttatttccaca

SEQ ID NO: 169000 - DNA, 25 bp, Saccharomyces pastorianus
cggcatctttggttatttccacaac

SEQ ID NO: 169001 - DNA, 25 bp, Saccharomyces pastorianus
acctttcatttattggcatgaccat

SEQ ID NO: 169002 - DNA, 25 bp, Saccharomyces pastorianus
tggtatggagaaatttttagacacc

SEQ ID NO: 169003 - DNA, 25 bp, Saccharomyces pastorianus
gtccctgacacctttcatttattgg

SEQ ID NO: 169004 - DNA, 25 bp, Saccharomyces pastorianus
agtccctgacacctttcatttattg

SEQ ID NO: 169005 - DNA, 25 bp, Saccharomyces pastorianus
gacacctttcatttattggcatgac

SEQ ID NO: 169006 - DNA, 25 bp, Saccharomyces pastorianus
ttggcatgaccatatttagaagatc

SEQ ID NO: 169007 - DNA, 25 bp, Saccharomyces pastorianus
gaccatatttagaagatcatcgcat

SEQ ID NO: 169008 - DNA, 25 bp, Saccharomyces pastorianus
gaagatcatcgcattgatgctcatg

SEQ ID NO: 169009 - DNA, 25 bp, Saccharomyces pastorianus
ccctgacacctttcatttattggca

SEQ ID NO: 169010 - DNA, 25 bp, Saccharomyces pastorianus
ctgacacctttcatttattggcatg

SEQ ID NO: 169011 - DNA, 25 bp, Saccharomyces pastorianus
agatcatcgcattgatgctcatggg

SEQ ID NO: 169012 - DNA, 25 bp, Saccharomyces pastorianus
ggcaccgactgtaattcctttgaaa

SEQ ID NO: 169013 - DNA, 25 bp, Saccharomyces pastorianus
aacaggttacccatcgtctggtatt

SEQ ID NO: 169014 - DNA, 25 bp, Saccharomyces pastorianus
gtccaaccagcagccgtaaaactag

SEQ ID NO: 169015 - DNA, 25 bp, Saccharomyces pastorianus
agtgctgaaactgccggtacatttg

SEQ ID NO: 169016 - DNA, 25 bp, Saccharomyces pastorianus
gtacttctaatgttttcgtcacgga

SEQ ID NO: 169017 - DNA, 25 bp, Saccharomyces pastorianus
aaatccgtgtttatggcaccgactg

SEQ ID NO: 169018 - DNA, 25 bp, Saccharomyces pastorianus
actttgatactagcgccagtgctga

SEQ ID NO: 169019 - DNA, 25 bp, Saccharomyces pastorianus
gcggcgttgattccatagatgattc

SEQ ID NO: 169020 - DNA, 25 bp, Saccharomyces pastorianus
gcgaagctggctattctggccaaat

SEQ ID NO: 169021 - DNA, 25 bp, Saccharomyces pastorianus
aacccacatgcctactttgatacta

SEQ ID NO: 169022 - DNA, 25 bp, Saccharomyces pastorianus
attccatccactgctaaccaaatta

SEQ ID NO: 169023 - DNA, 25 bp, Saccharomyces pastorianus
gcacctattgtaagaagtcttcaga

SEQ ID NO: 169024 - DNA, 25 bp, Saccharomyces pastorianus
cgcacctattgtaagaagtcttcag

SEQ ID NO: 169025 - DNA, 25 bp, Saccharomyces pastorianus
ttctggcgcacctattgtaagaagt

SEQ ID NO: 169026 - DNA, 25 bp, Saccharomyces pastorianus
tttcactgactttgtttctggcgca

SEQ ID NO: 169027 - DNA, 25 bp, Saccharomyces pastorianus
cacctattgtaagaagtcttcagaa

SEQ ID NO: 169028 - DNA, 25 bp, Saccharomyces pastorianus
ggcgcacctattgtaagaagtcttc

SEQ ID NO: 169029 - DNA, 25 bp, Saccharomyces pastorianus
ctggcgcacctattgtaagaagtct

SEQ ID NO: 169030 - DNA, 25 bp, Saccharomyces pastorianus
tggcgcacctattgtaagaagtctt

SEQ ID NO: 169031 - DNA, 25 bp, Saccharomyces pastorianus
aagaagtcttcagaaaagcaccata

SEQ ID NO: 169032 - DNA, 25 bp, Saccharomyces pastorianus
gcgcacctattgtaagaagtcttca

SEQ ID NO: 169033 - DNA, 25 bp, Saccharomyces pastorianus
tctggcgcacctattgtaagaagtc

SEQ ID NO: 169034 - DNA, 25 bp, Saccharomyces pastorianus
gaagaatccctttagggtgccttca

SEQ ID NO: 169035 - DNA, 25 bp, Saccharomyces pastorianus
agggtgccttcagagatgcagctgc

SEQ ID NO: 169036 - DNA, 25 bp, Saccharomyces pastorianus
ggtgccttcagagatgcagctgcag

SEQ ID NO: 169037 - DNA, 25 bp, Saccharomyces pastorianus
cctttagggtgccttcagagatgca

SEQ ID NO: 169038 - DNA, 25 bp, Saccharomyces pastorianus
agagatgcagctgcagcttttggcc

SEQ ID NO: 169039 - DNA, 25 bp, Saccharomyces pastorianus
ttagggtgccttcagagatgcagct

SEQ ID NO: 169040 - DNA, 25 bp, Saccharomyces pastorianus
agaatccctttagggtgccttcaga

SEQ ID NO: 169041 - DNA, 25 bp, Saccharomyces pastorianus
aatccctttagggtgccttcagaga

SEQ ID NO: 169042 - DNA, 25 bp, Saccharomyces pastorianus
tccctttagggtgccttcagagatg

SEQ ID NO: 169043 - DNA, 25 bp, Saccharomyces pastorianus
agatgcagctgcagcttttggccaa

SEQ ID NO: 169044 - DNA, 25 bp, Saccharomyces pastorianus
gatgcagctgcagcttttggccaag

SEQ ID NO: 169045 - DNA, 25 bp, Saccharomyces pastorianus
ttgtctctgcgactacagcggcatg

SEQ ID NO: 169046 - DNA, 25 bp, Saccharomyces pastorianus
tcgtcacattgctgggactagctaa

SEQ ID NO: 169047 - DNA, 25 bp, Saccharomyces pastorianus
cagtattcattgatggattcttcca

SEQ ID NO: 169048 - DNA, 25 bp, Saccharomyces pastorianus
taatgttgtctctgcgactacagcg

SEQ ID NO: 169049 - DNA, 25 bp, Saccharomyces pastorianus
gcatgcctgccagcaaactcaagga

SEQ ID NO: 169050 - DNA, 25 bp, Saccharomyces pastorianus
gctgggactagctaatgttgtctct

SEQ ID NO: 169051 - DNA, 25 bp, Saccharomyces pastorianus
ctgccagcaaactcaaggaagaatg

SEQ ID NO: 169052 - DNA, 25 bp, Saccharomyces pastorianus
gccatcgtcacattgctgggactag

SEQ ID NO: 169053 - DNA, 25 bp, Saccharomyces pastorianus
actacagcggcatgcctgccagcaa

SEQ ID NO: 169054 - DNA, 25 bp, Saccharomyces pastorianus
actagctaatgttgtctctgcgact

SEQ ID NO: 169055 - DNA, 25 bp, Saccharomyces pastorianus
ggattcttccacgtattccaatgca

SEQ ID NO: 169056 - DNA, 25 bp, Saccharomyces pastorianus
attcaataccaattactcgtcacat

SEQ ID NO: 169057 - DNA, 25 bp, Saccharomyces pastorianus
aaaatgaaccatgtgcaaatcagaa

SEQ ID NO: 169058 - DNA, 25 bp, Saccharomyces pastorianus
aattactcgtcacattcttccaatc

SEQ ID NO: 169059 - DNA, 25 bp, Saccharomyces pastorianus
caattactcgtcacattcttccaat

SEQ ID NO: 169060 - DNA, 25 bp, Saccharomyces pastorianus
ataccaattactcgtcacattcttc

SEQ ID NO: 169061 - DNA, 25 bp, Saccharomyces pastorianus
gaaccatgtgcaaatcagaaacata

SEQ ID NO: 169062 - DNA, 25 bp, Saccharomyces pastorianus
tatcactttatttcatatggtttca

SEQ ID NO: 169063 - DNA, 25 bp, Saccharomyces pastorianus
cattcttccaatccgattaatattg

SEQ ID NO: 169064 - DNA, 25 bp, Saccharomyces pastorianus
tatttcatatggtttcatgcttaca

SEQ ID NO: 169065 - DNA, 25 bp, Saccharomyces pastorianus
gtcacattcttccaatccgattaat

SEQ ID NO: 169066 - DNA, 25 bp, Saccharomyces pastorianus
gaagtattcttcattcaataccaat

SEQ ID NO: 169067 - DNA, 25 bp, Saccharomyces pastorianus
gcataggtttattgtcccttggtta

SEQ ID NO: 169068 - DNA, 25 bp, Saccharomyces pastorianus
ggattttgccccttgcataaaagag

SEQ ID NO: 169069 - DNA, 25 bp, Saccharomyces pastorianus
tcttagcgtttcgtacctgggtaat

SEQ ID NO: 169070 - DNA, 25 bp, Saccharomyces pastorianus
gtgtccaaaacaattcttcttcaac

SEQ ID NO: 169071 - DNA, 25 bp, Saccharomyces pastorianus
ggttatctggaccttaatggcttgt

SEQ ID NO: 169072 - DNA, 25 bp, Saccharomyces pastorianus
aatggcttgtttgtacctcagaata

SEQ ID NO: 169073 - DNA, 25 bp, Saccharomyces pastorianus
gagtctttcaagttcttagcgtttc

SEQ ID NO: 169074 - DNA, 25 bp, Saccharomyces pastorianus
attcttcttcaaccattctctttga

SEQ ID NO: 169075 - DNA, 25 bp, Saccharomyces pastorianus
agtcatttcaggattttgccccttg

SEQ ID NO: 169076 - DNA, 25 bp, Saccharomyces pastorianus
tcagatacgggcatcaatgatcgga

SEQ ID NO: 169077 - DNA, 25 bp, Saccharomyces pastorianus
acctggaagttttatgagtctttca

SEQ ID NO: 169078 - DNA, 25 bp, Saccharomyces pastorianus
gttcatcctacgcatgtgtagagct

SEQ ID NO: 169079 - DNA, 25 bp, Saccharomyces pastorianus
ggatggcgaaacgttaggctcaagt

SEQ ID NO: 169080 - DNA, 25 bp, Saccharomyces pastorianus
gctcttatgatgtatggtgctccga

SEQ ID NO: 169081 - DNA, 25 bp, Saccharomyces pastorianus
tttacaaagacaccggttcatccta

SEQ ID NO: 169082 - DNA, 25 bp, Saccharomyces pastorianus
ttacggttcacattgcagacatttt

SEQ ID NO: 169083 - DNA, 25 bp, Saccharomyces pastorianus
gaaggtatttcttctactgctggaa

SEQ ID NO: 169084 - DNA, 25 bp, Saccharomyces pastorianus
aatcgtagacgttcatgagggcgac

SEQ ID NO: 169085 - DNA, 25 bp, Saccharomyces pastorianus
gtgctccgacgcataggcttgaaga

SEQ ID NO: 169086 - DNA, 25 bp, Saccharomyces pastorianus
aagacgtaccagttgccaagcgtag

SEQ ID NO: 169087 - DNA, 25 bp, Saccharomyces pastorianus
tatccgatctagctgatgcgtctaa

SEQ ID NO: 169088 - DNA, 25 bp, Saccharomyces pastorianus
ttcatccgacgataacgaagggttt

SEQ ID NO: 169089 - DNA, 25 bp, Saccharomyces pastorianus
ttggcagttacgtctcgagctattt

SEQ ID NO: 169090 - DNA, 25 bp, Saccharomyces pastorianus
attttggcagttacgtctcgagcta

SEQ ID NO: 169091 - DNA, 25 bp, Saccharomyces pastorianus
ttacaattttggcagttacgtctcg

SEQ ID NO: 169092 - DNA, 25 bp, Saccharomyces pastorianus
aattttggcagttacgtctcgagct

SEQ ID NO: 169093 - DNA, 25 bp, Saccharomyces pastorianus
tttggcagttacgtctcgagctatt

SEQ ID NO: 169094 - DNA, 25 bp, Saccharomyces pastorianus
caattttggcagttacgtctcgagc

SEQ ID NO: 169095 - DNA, 25 bp, Saccharomyces pastorianus
tggcagttacgtctcgagctattta

SEQ ID NO: 169096 - DNA, 25 bp, Saccharomyces pastorianus
acaattttggcagttacgtctcgag

SEQ ID NO: 169097 - DNA, 25 bp, Saccharomyces pastorianus
ttttggcagttacgtctcgagctat

SEQ ID NO: 169098 - DNA, 25 bp, Saccharomyces pastorianus
tacaattttggcagttacgtctcga

SEQ ID NO: 169099 - DNA, 25 bp, Saccharomyces pastorianus
ggcagttacgtctcgagctatttat

SEQ ID NO: 169100 - DNA, 25 bp, Saccharomyces pastorianus
gttcatctgcaccaagtgaaaccgt

SEQ ID NO: 169101 - DNA, 25 bp, Saccharomyces pastorianus
agccccaacaaagagacgtcgtcaa

SEQ ID NO: 169102 - DNA, 25 bp, Saccharomyces pastorianus
ttccggttcatctgcaccaagtgaa

SEQ ID NO: 169103 - DNA, 25 bp, Saccharomyces pastorianus
tgcaccaagtgaaaccgtcgaaaag

SEQ ID NO: 169104 - DNA, 25 bp, Saccharomyces pastorianus
tcaacttccggttcatctgcaccaa

SEQ ID NO: 169105 - DNA, 25 bp, Saccharomyces pastorianus
tatcgaagccgaagttagtgatgat

SEQ ID NO: 169106 - DNA, 25 bp, Saccharomyces pastorianus
gatgaagccccaacaaagagacgtc

SEQ ID NO: 169107 - DNA, 25 bp, Saccharomyces pastorianus
gccaaaaatggcgatgacgacaaca

SEQ ID NO: 169108 - DNA, 25 bp, Saccharomyces pastorianus
ataggttcttggatatcgaagccga

SEQ ID NO: 169109 - DNA, 25 bp, Saccharomyces pastorianus
acgtcgtcaagagaggaataggttc

SEQ ID NO: 169110 - DNA, 25 bp, Saccharomyces pastorianus
agagacctcgtgaagaggaagccaa

SEQ ID NO: 169111 - DNA, 25 bp, Saccharomyces pastorianus
tccggcttggttaacacaactgggt

SEQ ID NO: 169112 - DNA, 25 bp, Saccharomyces pastorianus
gaatggattctctctcaggcgaaga

SEQ ID NO: 169113 - DNA, 25 bp, Saccharomyces pastorianus
tggtccagacttacaatacatttta

SEQ ID NO: 169114 - DNA, 25 bp, Saccharomyces pastorianus
agagttgctcctaatgacgatcctt

SEQ ID NO: 169115 - DNA, 25 bp, Saccharomyces pastorianus
cagcctctaggttgcgaatttgttc

SEQ ID NO: 169116 - DNA, 25 bp, Saccharomyces pastorianus
aatgcacccaacttgctaatggata

SEQ ID NO: 169117 - DNA, 25 bp, Saccharomyces pastorianus
ttgttcctaacgactacttgcactg

SEQ ID NO: 169118 - DNA, 25 bp, Saccharomyces pastorianus
atattacatattcatccggcttggt

SEQ ID NO: 169119 - DNA, 25 bp, Saccharomyces pastorianus
aaacacgactttacgagacgatcat

SEQ ID NO: 169120 - DNA, 25 bp, Saccharomyces pastorianus
acaactgggtcaattgttttccaat

SEQ ID NO: 169121 - DNA, 25 bp, Saccharomyces pastorianus
ggaaagtccaaaacttgcacgcaat

SEQ ID NO: 169122 - DNA, 25 bp, Saccharomyces pastorianus
ataactgctcttttaggctcctcaa

SEQ ID NO: 169123 - DNA, 25 bp, Saccharomyces pastorianus
ctctcatgcctcaacagcaagcaaa

SEQ ID NO: 169124 - DNA, 25 bp, Saccharomyces pastorianus
tgatggtatccctataactgctctt

SEQ ID NO: 169125 - DNA, 25 bp, Saccharomyces pastorianus
aataccatctcgagctcaaactctt

SEQ ID NO: 169126 - DNA, 25 bp, Saccharomyces pastorianus
gcgatctctgaagctactgatggta

SEQ ID NO: 169127 - DNA, 25 bp, Saccharomyces pastorianus
ttaggctcctcaagttccgggaaca

SEQ ID NO: 169128 - DNA, 25 bp, Saccharomyces pastorianus
tggcgaactaagcacatcgacgagt

SEQ ID NO: 169129 - DNA, 25 bp, Saccharomyces pastorianus
gtgcaattgcatctgcgatctctga

SEQ ID NO: 169130 - DNA, 25 bp, Saccharomyces pastorianus
atcgacgagtcctgaattatccggg

SEQ ID NO: 169131 - DNA, 25 bp, Saccharomyces pastorianus
accacttcgaactcaacatctgttt

SEQ ID NO: 169132 - DNA, 25 bp, Saccharomyces pastorianus
atctgtttcctcttcgaattcagca

SEQ ID NO: 169133 - DNA, 25 bp, Saccharomyces pastorianus
tttgcggaactacttgacagctaaa

SEQ ID NO: 169134 - DNA, 25 bp, Saccharomyces pastorianus
aaatccctaagattgacttgcccaa

SEQ ID NO: 169135 - DNA, 25 bp, Saccharomyces pastorianus
gtaatgtactactttgttccgtctt

SEQ ID NO: 169136 - DNA, 25 bp, Saccharomyces pastorianus
gacattgatgttttgcgtttattta

SEQ ID NO: 169137 - DNA, 25 bp, Saccharomyces pastorianus
ctttcggcagttgcgattttcttcc

SEQ ID NO: 169138 - DNA, 25 bp, Saccharomyces pastorianus
ttgctattgctttgcggaactactt

SEQ ID NO: 169139 - DNA, 25 bp, Saccharomyces pastorianus
catcggtgatatactgaaggccaac

SEQ ID NO: 169140 - DNA, 25 bp, Saccharomyces pastorianus
ggccaacaaggagttctttccatcg

SEQ ID NO: 169141 - DNA, 25 bp, Saccharomyces pastorianus
acgggcccctttcggcagttgcgat

SEQ ID NO: 169142 - DNA, 25 bp, Saccharomyces pastorianus
gttccgtcttaaagttattgttcag

SEQ ID NO: 169143 - DNA, 25 bp, Saccharomyces pastorianus
gacttgcccaatgaacatcggtgat

SEQ ID NO: 169144 - DNA, 25 bp, Saccharomyces pastorianus
tatccggcggcaacattattactct

SEQ ID NO: 169145 - DNA, 25 bp, Saccharomyces pastorianus
gaaaacttcagtcgctcattattag

SEQ ID NO: 169146 - DNA, 25 bp, Saccharomyces pastorianus
aagaggaaacttcaacgcttcattt

SEQ ID NO: 169147 - DNA, 25 bp, Saccharomyces pastorianus
gaaccagggaggtccaggctttgct

SEQ ID NO: 169148 - DNA, 25 bp, Saccharomyces pastorianus
atcggcattattgtgtatggctcaa

SEQ ID NO: 169149 - DNA, 25 bp, Saccharomyces pastorianus
ataatatgccaccacttacctttaa

SEQ ID NO: 169150 - DNA, 25 bp, Saccharomyces pastorianus
gacatattcttaccaatcctttcat

SEQ ID NO: 169151 - DNA, 25 bp, Saccharomyces pastorianus
atacgggcgtaactccataatatgc

SEQ ID NO: 169152 - DNA, 25 bp, Saccharomyces pastorianus
gttgcagatttgtcgattggtcgcc

SEQ ID NO: 169153 - DNA, 25 bp, Saccharomyces pastorianus
gatcgatcctcagctgcaaatactt

SEQ ID NO: 169154 - DNA, 25 bp, Saccharomyces pastorianus
gaatactaccagatcgatcctcagc

SEQ ID NO: 169155 - DNA, 25 bp, Saccharomyces pastorianus
tcattttctttcactaaacctcctg

SEQ ID NO: 169156 - DNA, 25 bp, Saccharomyces pastorianus
gcgtttgcgtcttcaaaaacctcac

SEQ ID NO: 169157 - DNA, 25 bp, Saccharomyces pastorianus
taaacctcctgctaatgagacagat

SEQ ID NO: 169158 - DNA, 25 bp, Saccharomyces pastorianus
tcacctttggcggttccacaacaaa

SEQ ID NO: 169159 - DNA, 25 bp, Saccharomyces pastorianus
taaaaagccctcctttgcgtttgcg

SEQ ID NO: 169160 - DNA, 25 bp, Saccharomyces pastorianus
gataaaagacctacaccgccatctt

SEQ ID NO: 169161 - DNA, 25 bp, Saccharomyces pastorianus
gattcatctgttgtttcggaaccta

SEQ ID NO: 169162 - DNA, 25 bp, Saccharomyces pastorianus
ggctcccgagtcgatgaagtcgaca

SEQ ID NO: 169163 - DNA, 25 bp, Saccharomyces pastorianus
caaccactagcacaaaaccatcttt

SEQ ID NO: 169164 - DNA, 25 bp, Saccharomyces pastorianus
aacctgctcaaatagattcatctgt

SEQ ID NO: 169165 - DNA, 25 bp, Saccharomyces pastorianus
gcagctaaagaaccaccaggctcta

SEQ ID NO: 169166 - DNA, 25 bp, Saccharomyces pastorianus
tttgtttccacaccgttctgtgaga

SEQ ID NO: 169167 - DNA, 25 bp, Saccharomyces pastorianus
ttcaactactttgtttccacaccgt

SEQ ID NO: 169168 - DNA, 25 bp, Saccharomyces pastorianus
caccgttctgtgagattgatttgta

SEQ ID NO: 169169 - DNA, 25 bp, Saccharomyces pastorianus
attctcttcattgagatccttcaac

SEQ ID NO: 169170 - DNA, 25 bp, Saccharomyces pastorianus
tccacaccgttctgtgagattgatt

SEQ ID NO: 169171 - DNA, 25 bp, Saccharomyces pastorianus
atccttcaactactttgtttccaca

SEQ ID NO: 169172 - DNA, 25 bp, Saccharomyces pastorianus
ccacattctcttcattgagatcctt

SEQ ID NO: 169173 - DNA, 25 bp, Saccharomyces pastorianus
cattgagatccttcaactactttgt

SEQ ID NO: 169174 - DNA, 25 bp, Saccharomyces pastorianus
gagatccttcaactactttgtttcc

SEQ ID NO: 169175 - DNA, 25 bp, Saccharomyces pastorianus
actactttgtttccacaccgttctg

SEQ ID NO: 169176 - DNA, 25 bp, Saccharomyces pastorianus
gtttccacaccgttctgtgagattg

SEQ ID NO: 169177 - DNA, 25 bp, Saccharomyces pastorianus
gacttctttgtaagcgtacagctaa

SEQ ID NO: 169178 - DNA, 25 bp, Saccharomyces pastorianus
gagtataaacgcaaatagtaaagct

SEQ ID NO: 169179 - DNA, 25 bp, Saccharomyces pastorianus
attcatcacgtataattggacatcc

SEQ ID NO: 169180 - DNA, 25 bp, Saccharomyces pastorianus
gtacagctaaagtttaccgataagt

SEQ ID NO: 169181 - DNA, 25 bp, Saccharomyces pastorianus
aagcgtacagctaaagtttaccgat

SEQ ID NO: 169182 - DNA, 25 bp, Saccharomyces pastorianus
tataattggacatccgtggagttcc

SEQ ID NO: 169183 - DNA, 25 bp, Saccharomyces pastorianus
tttaccgataagttacgataagaag

SEQ ID NO: 169184 - DNA, 25 bp, Saccharomyces pastorianus
aaatgacttctttgtaagcgtacag

SEQ ID NO: 169185 - DNA, 25 bp, Saccharomyces pastorianus
gtagtgtctaagtaaatgacttctt

SEQ ID NO: 169186 - DNA, 25 bp, Saccharomyces pastorianus
atccgtggagttccaaaaggagtat

SEQ ID NO: 169187 - DNA, 25 bp, Saccharomyces pastorianus
ggacatccgtggagttccaaaagga

SEQ ID NO: 169188 - DNA, 25 bp, Saccharomyces pastorianus
ttatcggcgactcagcgtactgtag

SEQ ID NO: 169189 - DNA, 25 bp, Saccharomyces pastorianus
atccttcattttctgtcgcaattgg

SEQ ID NO: 169190 - DNA, 25 bp, Saccharomyces pastorianus
ggacggagagtgtcctttttctctc

SEQ ID NO: 169191 - DNA, 25 bp, Saccharomyces pastorianus
tgcctgttgggcctgcctaagtcag

SEQ ID NO: 169192 - DNA, 25 bp, Saccharomyces pastorianus
tcgcacccggaaagtaaagcttatt

SEQ ID NO: 169193 - DNA, 25 bp, Saccharomyces pastorianus
tagctctaggcggagggtctttatc

SEQ ID NO: 169194 - DNA, 25 bp, Saccharomyces pastorianus
acttttgaagatgggccttgcctgt

SEQ ID NO: 169195 - DNA, 25 bp, Saccharomyces pastorianus
ttggcatactccctcgaaggatcga

SEQ ID NO: 169196 - DNA, 25 bp, Saccharomyces pastorianus
gactcagcgtactgtagggaccacc

SEQ ID NO: 169197 - DNA, 25 bp, Saccharomyces pastorianus
gatcgactgtttgagtgcatccttc

SEQ ID NO: 169198 - DNA, 25 bp, Saccharomyces pastorianus
taatcgcactacatgcacgaggcct

SEQ ID NO: 169199 - DNA, 25 bp, Saccharomyces pastorianus
gttgttagagcctacaatattaggt

SEQ ID NO: 169200 - DNA, 25 bp, Saccharomyces pastorianus
agaacttcttctcgaggatgtagga

SEQ ID NO: 169201 - DNA, 25 bp, Saccharomyces pastorianus
tccattgttgttagagcctacaata

SEQ ID NO: 169202 - DNA, 25 bp, Saccharomyces pastorianus
gttagagcctacaatattaggtaca

SEQ ID NO: 169203 - DNA, 25 bp, Saccharomyces pastorianus
gcctacaatattaggtacacagaat

SEQ ID NO: 169204 - DNA, 25 bp, Saccharomyces pastorianus
ggattccattgttgttagagcctac

SEQ ID NO: 169205 - DNA, 25 bp, Saccharomyces pastorianus
cattgttgttagagcctacaatatt

SEQ ID NO: 169206 - DNA, 25 bp, Saccharomyces pastorianus
gattccattgttgttagagcctaca

SEQ ID NO: 169207 - DNA, 25 bp, Saccharomyces pastorianus
agagcctacaatattaggtacacag

SEQ ID NO: 169208 - DNA, 25 bp, Saccharomyces pastorianus
ttccattgttgttagagcctacaat

SEQ ID NO: 169209 - DNA, 25 bp, Saccharomyces pastorianus
attccattgttgttagagcctacaa

SEQ ID NO: 169210 - DNA, 25 bp, Saccharomyces pastorianus
tccctccctttcgtatgtttcatta

SEQ ID NO: 169211 - DNA, 25 bp, Saccharomyces pastorianus
gaatataatagaatttcccctgaga

SEQ ID NO: 169212 - DNA, 25 bp, Saccharomyces pastorianus
ttatttctccctccctttcgtatgt

SEQ ID NO: 169213 - DNA, 25 bp, Saccharomyces pastorianus
caattacaattatttctccctccct

SEQ ID NO: 169214 - DNA, 25 bp, Saccharomyces pastorianus
gattctattgttggcaagggcttta

SEQ ID NO: 169215 - DNA, 25 bp, Saccharomyces pastorianus
ctcaaattggaatcgatactcctat

SEQ ID NO: 169216 - DNA, 25 bp, Saccharomyces pastorianus
cgaatcctcaaattggaatcgatac

SEQ ID NO: 169217 - DNA, 25 bp, Saccharomyces pastorianus
gagagatatacgaatcctcaaattg

SEQ ID NO: 169218 - DNA, 25 bp, Saccharomyces pastorianus
atagaatttcccctgagagatatac

SEQ ID NO: 169219 - DNA, 25 bp, Saccharomyces pastorianus
gaatcgatactcctatataatacaa

SEQ ID NO: 169220 - DNA, 25 bp, Saccharomyces pastorianus
tattgttggcaagggctttatttta

SEQ ID NO: 169221 - DNA, 25 bp, Saccharomyces pastorianus
ataaatgctcttctgctgtgtgtgt

SEQ ID NO: 169222 - DNA, 25 bp, Saccharomyces pastorianus
gatcagtgattgttctttgtccttc

SEQ ID NO: 169223 - DNA, 25 bp, Saccharomyces pastorianus
atgctcttctgctgtgtgtgttgcg

SEQ ID NO: 169224 - DNA, 25 bp, Saccharomyces pastorianus
tacaccgtacgctcccacttaaatg

SEQ ID NO: 169225 - DNA, 25 bp, Saccharomyces pastorianus
cacttaaatgccacacacttaaatt

SEQ ID NO: 169226 - DNA, 25 bp, Saccharomyces pastorianus
tgctttgctagtatgaacaggatca

SEQ ID NO: 169227 - DNA, 25 bp, Saccharomyces pastorianus
tcgattccgagtttgacttcgtctt

SEQ ID NO: 169228 - DNA, 25 bp, Saccharomyces pastorianus
attccgagtttgacttcgtcttcgt

SEQ ID NO: 169229 - DNA, 25 bp, Saccharomyces pastorianus
gttgcgttttgctttgctagtatga

SEQ ID NO: 169230 - DNA, 25 bp, Saccharomyces pastorianus
cagtgattgttctttgtccttcctt

SEQ ID NO: 169231 - DNA, 25 bp, Saccharomyces pastorianus
tgtgttgcgttttgctttgctagta

SEQ ID NO: 169232 - DNA, 25 bp, Saccharomyces pastorianus
aattctgccgctaaagttttgtgct

SEQ ID NO: 169233 - DNA, 25 bp, Saccharomyces pastorianus
ggtctctcaagaacacgggatactg

SEQ ID NO: 169234 - DNA, 25 bp, Saccharomyces pastorianus
gtggatcctcagtttgatccttcta

SEQ ID NO: 169235 - DNA, 25 bp, Saccharomyces pastorianus
attaacactttctgtgggcgctact

SEQ ID NO: 169236 - DNA, 25 bp, Saccharomyces pastorianus
aaagttttgtgctctgtggatcctc

SEQ ID NO: 169237 - DNA, 25 bp, Saccharomyces pastorianus
gatcacgaattgtctggttttgtat

SEQ ID NO: 169238 - DNA, 25 bp, Saccharomyces pastorianus
ggcaacaggctgtgtccaagatcac

SEQ ID NO: 169239 - DNA, 25 bp, Saccharomyces pastorianus
atggtatgtagcaagggtctctcaa

SEQ ID NO: 169240 - DNA, 25 bp, Saccharomyces pastorianus
caggagtgatgtgtctaacgcgaga

SEQ ID NO: 169241 - DNA, 25 bp, Saccharomyces pastorianus
agtactatcatcttacccttctaga

SEQ ID NO: 169242 - DNA, 25 bp, Saccharomyces pastorianus
gtacgcttgaaatccactgtggtaa

SEQ ID NO: 169243 - DNA, 25 bp, Saccharomyces pastorianus
aaggacctctatgattggacaatgg

SEQ ID NO: 169244 - DNA, 25 bp, Saccharomyces pastorianus
atgtcgtttactgctccttcagatc

SEQ ID NO: 169245 - DNA, 25 bp, Saccharomyces pastorianus
ttctgcctcgtgttcgagacggaga

SEQ ID NO: 169246 - DNA, 25 bp, Saccharomyces pastorianus
gacggagatccataacactattgta

SEQ ID NO: 169247 - DNA, 25 bp, Saccharomyces pastorianus
gaagcttctgaatgaccgttacgat

SEQ ID NO: 169248 - DNA, 25 bp, Saccharomyces pastorianus
cagtacggccttcctttggagattt

SEQ ID NO: 169249 - DNA, 25 bp, Saccharomyces pastorianus
aggaatcagcagcagtacggccttc

SEQ ID NO: 169250 - DNA, 25 bp, Saccharomyces pastorianus
tttgcaaacaatgcttctgcctcgt

SEQ ID NO: 169251 - DNA, 25 bp, Saccharomyces pastorianus
gaaaggctctcattagaagacccaa

SEQ ID NO: 169252 - DNA, 25 bp, Saccharomyces pastorianus
gagattgtatccgttgctggtataa

SEQ ID NO: 169253 - DNA, 25 bp, Saccharomyces pastorianus
gactccacggtgttagcgcatatgc

SEQ ID NO: 169254 - DNA, 25 bp, Saccharomyces pastorianus
tacgtccacacttacgatgagtgat

SEQ ID NO: 169255 - DNA, 25 bp, Saccharomyces pastorianus
tcgagcagtaattaccattttaggt

SEQ ID NO: 169256 - DNA, 25 bp, Saccharomyces pastorianus
aaccctgataagaccttctgagaaa

SEQ ID NO: 169257 - DNA, 25 bp, Saccharomyces pastorianus
gagtgatatacctatcgctacgata

SEQ ID NO: 169258 - DNA, 25 bp, Saccharomyces pastorianus
cgagggtggtcaacggcagataaca

SEQ ID NO: 169259 - DNA, 25 bp, Saccharomyces pastorianus
ggcagataacaacgataccacataa

SEQ ID NO: 169260 - DNA, 25 bp, Saccharomyces pastorianus
acgttggcggcatcactacaagagt

SEQ ID NO: 169261 - DNA, 25 bp, Saccharomyces pastorianus
tgattacaatcacagcttcagcaga

SEQ ID NO: 169262 - DNA, 25 bp, Saccharomyces pastorianus
agtttgtccgtatcaaccctgataa

SEQ ID NO: 169263 - DNA, 25 bp, Saccharomyces pastorianus
taccacataattccacgttggcggc

SEQ ID NO: 169264 - DNA, 25 bp, Saccharomyces pastorianus
tggcctttacgttggttggaccgag

SEQ ID NO: 169265 - DNA, 25 bp, Saccharomyces pastorianus
ttccagccatttatccacttagaca

SEQ ID NO: 169266 - DNA, 25 bp, Saccharomyces pastorianus
gaaactcttcttctacacaatttta

SEQ ID NO: 169267 - DNA, 25 bp, Saccharomyces pastorianus
aagtgtaattggcagcttgtttgct

SEQ ID NO: 169268 - DNA, 25 bp, Saccharomyces pastorianus
tagctgtattatcatctgccctgtt

SEQ ID NO: 169269 - DNA, 25 bp, Saccharomyces pastorianus
attcctcaaagagcttccagccatt

SEQ ID NO: 169270 - DNA, 25 bp, Saccharomyces pastorianus
gaaagagttccattcctcaaagagc

SEQ ID NO: 169271 - DNA, 25 bp, Saccharomyces pastorianus
tcgccgtcggttctaaatcttcata

SEQ ID NO: 169272 - DNA, 25 bp, Saccharomyces pastorianus
ttatccacttagacactcaaccaaa

SEQ ID NO: 169273 - DNA, 25 bp, Saccharomyces pastorianus
ttgcaatttgtggtttaatcgttac

SEQ ID NO: 169274 - DNA, 25 bp, Saccharomyces pastorianus
gtggtttaatcgttacattagctgt

SEQ ID NO: 169275 - DNA, 25 bp, Saccharomyces pastorianus
agcttgtttgctggcttgaccactg

SEQ ID NO: 169276 - DNA, 25 bp, Saccharomyces pastorianus
cccacaggatgttcctactgtctaa

SEQ ID NO: 169277 - DNA, 25 bp, Saccharomyces pastorianus
agctgctatttcaaatataggccca

SEQ ID NO: 169278 - DNA, 25 bp, Saccharomyces pastorianus
aaaaagtgaggtctgacggatctga

SEQ ID NO: 169279 - DNA, 25 bp, Saccharomyces pastorianus
cacaggatgttcctactgtctaaaa

SEQ ID NO: 169280 - DNA, 25 bp, Saccharomyces pastorianus
taggcccacaggatgttcctactgt

SEQ ID NO: 169281 - DNA, 25 bp, Saccharomyces pastorianus
tatttcaaatataggcccacaggat

SEQ ID NO: 169282 - DNA, 25 bp, Saccharomyces pastorianus
caaatataggcccacaggatgttcc

SEQ ID NO: 169283 - DNA, 25 bp, Saccharomyces pastorianus
tttcagttcaaaagttagctgctat

SEQ ID NO: 169284 - DNA, 25 bp, Saccharomyces pastorianus
gttttcagttcaaaagttagctgct

SEQ ID NO: 169285 - DNA, 25 bp, Saccharomyces pastorianus
caggatgttcctactgtctaaaaaa

SEQ ID NO: 169286 - DNA, 25 bp, Saccharomyces pastorianus
tataggcccacaggatgttcctact

SEQ ID NO: 169287 - DNA, 25 bp, Saccharomyces pastorianus
gaatttagattaagatcctcgtaca

SEQ ID NO: 169288 - DNA, 25 bp, Saccharomyces pastorianus
agcctatgcccaagactgaattcag

SEQ ID NO: 169289 - DNA, 25 bp, Saccharomyces pastorianus
atccgaatttagattaagatcctcg

SEQ ID NO: 169290 - DNA, 25 bp, Saccharomyces pastorianus
agattaagatcctcgtacagaagcc

SEQ ID NO: 169291 - DNA, 25 bp, Saccharomyces pastorianus
gcctatgcccaagactgaattcagt

SEQ ID NO: 169292 - DNA, 25 bp, Saccharomyces pastorianus
acagaagcctatgcccaagactgaa

SEQ ID NO: 169293 - DNA, 25 bp, Saccharomyces pastorianus
gcccaagactgaattcagtctgctc

SEQ ID NO: 169294 - DNA, 25 bp, Saccharomyces pastorianus
gaagcctatgcccaagactgaattc

SEQ ID NO: 169295 - DNA, 25 bp, Saccharomyces pastorianus
aagcctatgcccaagactgaattca

SEQ ID NO: 169296 - DNA, 25 bp, Saccharomyces pastorianus
gtacagaagcctatgcccaagactg

SEQ ID NO: 169297 - DNA, 25 bp, Saccharomyces pastorianus
cgtacagaagcctatgcccaagact

SEQ ID NO: 169298 - DNA, 25 bp, Saccharomyces pastorianus
gaacattatttgaacttagccgact

SEQ ID NO: 169299 - DNA, 25 bp, Saccharomyces pastorianus
gtctaatccttctcgtgttgacgaa

SEQ ID NO: 169300 - DNA, 25 bp, Saccharomyces pastorianus
attgctgctacctcaggatggtata

SEQ ID NO: 169301 - DNA, 25 bp, Saccharomyces pastorianus
gactcgattctagttaccaattgca

SEQ ID NO: 169302 - DNA, 25 bp, Saccharomyces pastorianus
attaatttcaccattgctgctacct

SEQ ID NO: 169303 - DNA, 25 bp, Saccharomyces pastorianus
ttcatctccgacatcttcaactatc

SEQ ID NO: 169304 - DNA, 25 bp, Saccharomyces pastorianus
gctagagtccttattaatttcacca

SEQ ID NO: 169305 - DNA, 25 bp, Saccharomyces pastorianus
aactatcccctttgacgagttggag

SEQ ID NO: 169306 - DNA, 25 bp, Saccharomyces pastorianus
gcatcaaacctcttcgagccgacta

SEQ ID NO: 169307 - DNA, 25 bp, Saccharomyces pastorianus
ttagccgactctcttagactcgatt

SEQ ID NO: 169308 - DNA, 25 bp, Saccharomyces pastorianus
ggttacgaaaacaacttgccacgat

SEQ ID NO: 169309 - DNA, 25 bp, Saccharomyces pastorianus
taacttacgctgcttttgttcttct

SEQ ID NO: 169310 - DNA, 25 bp, Saccharomyces pastorianus
tgctttcgggttttgttctttatcg

SEQ ID NO: 169311 - DNA, 25 bp, Saccharomyces pastorianus
atcacggaaagaatcaccacaccaa

SEQ ID NO: 169312 - DNA, 25 bp, Saccharomyces pastorianus
ttttgttcttctcccttaagcgatt

SEQ ID NO: 169313 - DNA, 25 bp, Saccharomyces pastorianus
cattttattgcggtgcttgctttcg

SEQ ID NO: 169314 - DNA, 25 bp, Saccharomyces pastorianus
tagtctttactaacttacgctgctt

SEQ ID NO: 169315 - DNA, 25 bp, Saccharomyces pastorianus
atcaccacaccaaacgccgatagga

SEQ ID NO: 169316 - DNA, 25 bp, Saccharomyces pastorianus
cttctcccttaagcgattttttcag

SEQ ID NO: 169317 - DNA, 25 bp, Saccharomyces pastorianus
aacaggtttcattttattgcggtgc

SEQ ID NO: 169318 - DNA, 25 bp, Saccharomyces pastorianus
gttttgttctttatcgtaatagtct

SEQ ID NO: 169319 - DNA, 25 bp, Saccharomyces pastorianus
cttgccagtggatacaacaggtttc

SEQ ID NO: 169320 - DNA, 25 bp, Saccharomyces pastorianus
ggctgcattggtatacctgatgttt

SEQ ID NO: 169321 - DNA, 25 bp, Saccharomyces pastorianus
tgcattggtatacctgatgtttttc

SEQ ID NO: 169322 - DNA, 25 bp, Saccharomyces pastorianus
tggctgcattggtatacctgatgtt

SEQ ID NO: 169323 - DNA, 25 bp, Saccharomyces pastorianus
attctgcggattccaagtatacttg

SEQ ID NO: 169324 - DNA, 25 bp, Saccharomyces pastorianus
cgtattctgcggattccaagtatac

SEQ ID NO: 169325 - DNA, 25 bp, Saccharomyces pastorianus
tattctgcggattccaagtatactt

SEQ ID NO: 169326 - DNA, 25 bp, Saccharomyces pastorianus
gctgcattggtatacctgatgtttt

SEQ ID NO: 169327 - DNA, 25 bp, Saccharomyces pastorianus
tcgtattctgcggattccaagtata

SEQ ID NO: 169328 - DNA, 25 bp, Saccharomyces pastorianus
gtattctgcggattccaagtatact

SEQ ID NO: 169329 - DNA, 25 bp, Saccharomyces pastorianus
cattggtatacctgatgtttttcgt

SEQ ID NO: 169330 - DNA, 25 bp, Saccharomyces pastorianus
attggtatacctgatgtttttcgta

SEQ ID NO: 169331 - DNA, 25 bp, Saccharomyces pastorianus
cattgtcactggtggtaatggacca

SEQ ID NO: 169332 - DNA, 25 bp, Saccharomyces pastorianus
gccactaccccatatatgaccaaat

SEQ ID NO: 169333 - DNA, 25 bp, Saccharomyces pastorianus
acaattcaaggagggcgaagccact

SEQ ID NO: 169334 - DNA, 25 bp, Saccharomyces pastorianus
gagcatttctctgatgaagagacct

SEQ ID NO: 169335 - DNA, 25 bp, Saccharomyces pastorianus
cactgatgcggacggtaagaccatt

SEQ ID NO: 169336 - DNA, 25 bp, Saccharomyces pastorianus
aaggaagaaagagccactaccccat

SEQ ID NO: 169337 - DNA, 25 bp, Saccharomyces pastorianus
gagacctacggagaaaaaccacaat

SEQ ID NO: 169338 - DNA, 25 bp, Saccharomyces pastorianus
gaagatttccaacaacaagagcaaa

SEQ ID NO: 169339 - DNA, 25 bp, Saccharomyces pastorianus
gcgaagccactgatgcggacggtaa

SEQ ID NO: 169340 - DNA, 25 bp, Saccharomyces pastorianus
aatggaccagaagatttccaacaac

SEQ ID NO: 169341 - DNA, 25 bp, Saccharomyces pastorianus
gaaagagccactaccccatatatga

SEQ ID NO: 169342 - DNA, 25 bp, Saccharomyces pastorianus
taatttggcaaaagcactatcgaag

SEQ ID NO: 169343 - DNA, 25 bp, Saccharomyces pastorianus
ggcaaaaagaggctgatgaatcatc

SEQ ID NO: 169344 - DNA, 25 bp, Saccharomyces pastorianus
cagcgattgttctaaaatttcattt

SEQ ID NO: 169345 - DNA, 25 bp, Saccharomyces pastorianus
gaatagggccctgaatgatcatact

SEQ ID NO: 169346 - DNA, 25 bp, Saccharomyces pastorianus
cttggtggcgtatcaaccgctaatt

SEQ ID NO: 169347 - DNA, 25 bp, Saccharomyces pastorianus
gcgtatcaaccgctaatttgaataa

SEQ ID NO: 169348 - DNA, 25 bp, Saccharomyces pastorianus
tagtgaaaatatatccaagtggcaa

SEQ ID NO: 169349 - DNA, 25 bp, Saccharomyces pastorianus
gtgtgggcagttgaaccatgaatca

SEQ ID NO: 169350 - DNA, 25 bp, Saccharomyces pastorianus
agagatgtccttggtggcgtatcaa

SEQ ID NO: 169351 - DNA, 25 bp, Saccharomyces pastorianus
gcactatcgaagaatagggccctga

SEQ ID NO: 169352 - DNA, 25 bp, Saccharomyces pastorianus
aaacgctagccattttttcgccaca

SEQ ID NO: 169353 - DNA, 25 bp, Saccharomyces pastorianus
agattcggacgacgttctattcact

SEQ ID NO: 169354 - DNA, 25 bp, Saccharomyces pastorianus
agcaagccttcatatcacgatcatt

SEQ ID NO: 169355 - DNA, 25 bp, Saccharomyces pastorianus
tggctccactagtacggttcaacat

SEQ ID NO: 169356 - DNA, 25 bp, Saccharomyces pastorianus
aacggctatacaaggcgtggctcca

SEQ ID NO: 169357 - DNA, 25 bp, Saccharomyces pastorianus
tctaaatttatcttccggaccagtt

SEQ ID NO: 169358 - DNA, 25 bp, Saccharomyces pastorianus
catacatgatcacttgccaccaata

SEQ ID NO: 169359 - DNA, 25 bp, Saccharomyces pastorianus
taaaatcaccagcatcttccgaagc

SEQ ID NO: 169360 - DNA, 25 bp, Saccharomyces pastorianus
gtgcccaaagcggtatttttgctca

SEQ ID NO: 169361 - DNA, 25 bp, Saccharomyces pastorianus
ttaagggttccacaatctactgctc

SEQ ID NO: 169362 - DNA, 25 bp, Saccharomyces pastorianus
attggcaacagatattcacgctcat

SEQ ID NO: 169363 - DNA, 25 bp, Saccharomyces pastorianus
gtcagccctagcaatcatcttttaa

SEQ ID NO: 169364 - DNA, 25 bp, Saccharomyces pastorianus
agatatgtttcgaccgcaacaccct

SEQ ID NO: 169365 - DNA, 25 bp, Saccharomyces pastorianus
gttccacgctctgtccacggagata

SEQ ID NO: 169366 - DNA, 25 bp, Saccharomyces pastorianus
gtccacggagatatgtttcgaccgc

SEQ ID NO: 169367 - DNA, 25 bp, Saccharomyces pastorianus
tctgtccacggagatatgtttcgac

SEQ ID NO: 169368 - DNA, 25 bp, Saccharomyces pastorianus
ggagatatgtttcgaccgcaacacc

SEQ ID NO: 169369 - DNA, 25 bp, Saccharomyces pastorianus
tccacgctctgtccacggagatatg

SEQ ID NO: 169370 - DNA, 25 bp, Saccharomyces pastorianus
cacgctctgtccacggagatatgtt

SEQ ID NO: 169371 - DNA, 25 bp, Saccharomyces pastorianus
acgctctgtccacggagatatgttt

SEQ ID NO: 169372 - DNA, 25 bp, Saccharomyces pastorianus
gctctgtccacggagatatgtttcg

SEQ ID NO: 169373 - DNA, 25 bp, Saccharomyces pastorianus
acggagatatgtttcgaccgcaaca

SEQ ID NO: 169374 - DNA, 25 bp, Saccharomyces pastorianus
gatatgtttcgaccgcaacaccctc

SEQ ID NO: 169375 - DNA, 25 bp, Saccharomyces pastorianus
gagtctctttacaggcgatcctgtg

SEQ ID NO: 169376 - DNA, 25 bp, Saccharomyces pastorianus
tgttggagtctctttacaggcgatc

SEQ ID NO: 169377 - DNA, 25 bp, Saccharomyces pastorianus
aaaagagaagtggtctctagcggga

SEQ ID NO: 169378 - DNA, 25 bp, Saccharomyces pastorianus
caggaatttctgttggagtctcttt

SEQ ID NO: 169379 - DNA, 25 bp, Saccharomyces pastorianus
gagaccaggaatttctgttggagtc

SEQ ID NO: 169380 - DNA, 25 bp, Saccharomyces pastorianus
gttggagtctctttacaggcgatcc

SEQ ID NO: 169381 - DNA, 25 bp, Saccharomyces pastorianus
gaccaggaatttctgttggagtctc

SEQ ID NO: 169382 - DNA, 25 bp, Saccharomyces pastorianus
tttctgttggagtctctttacaggc

SEQ ID NO: 169383 - DNA, 25 bp, Saccharomyces pastorianus
ggaatttctgttggagtctctttac

SEQ ID NO: 169384 - DNA, 25 bp, Saccharomyces pastorianus
tggagtctctttacaggcgatcctg

SEQ ID NO: 169385 - DNA, 25 bp, Saccharomyces pastorianus
gaatttctgttggagtctctttaca

SEQ ID NO: 169386 - DNA, 25 bp, Saccharomyces pastorianus
gatggatacgaattgacatttacaa

SEQ ID NO: 169387 - DNA, 25 bp, Saccharomyces pastorianus
ggtccaaagggattgcaatcctcca

SEQ ID NO: 169388 - DNA, 25 bp, Saccharomyces pastorianus
atcgatggatacgaattgacattta

SEQ ID NO: 169389 - DNA, 25 bp, Saccharomyces pastorianus
acaagcggtcggataagtcgataat

SEQ ID NO: 169390 - DNA, 25 bp, Saccharomyces pastorianus
agtcgataatgtcggaaaaggtcca

SEQ ID NO: 169391 - DNA, 25 bp, Saccharomyces pastorianus
ggatacgaattgacatttacaaaca

SEQ ID NO: 169392 - DNA, 25 bp, Saccharomyces pastorianus
tttacaaacaacaagcggtcggata

SEQ ID NO: 169393 - DNA, 25 bp, Saccharomyces pastorianus
gggattgcaatcctccaataacaca

SEQ ID NO: 169394 - DNA, 25 bp, Saccharomyces pastorianus
acgaattgacatttacaaacaacaa

SEQ ID NO: 169395 - DNA, 25 bp, Saccharomyces pastorianus
tcgataatgtcggaaaaggtccaaa

SEQ ID NO: 169396 - DNA, 25 bp, Saccharomyces pastorianus
gataatgtcggaaaaggtccaaagg

SEQ ID NO: 169397 - DNA, 25 bp, Saccharomyces pastorianus
tctcttcctcttttgtacgttattg

SEQ ID NO: 169398 - DNA, 25 bp, Saccharomyces pastorianus
cgcaaaaaggaatcttcaatcttgc

SEQ ID NO: 169399 - DNA, 25 bp, Saccharomyces pastorianus
atcttcaatcttgcataatgttaca

SEQ ID NO: 169400 - DNA, 25 bp, Saccharomyces pastorianus
tcttttgtacgttattgttcattga

SEQ ID NO: 169401 - DNA, 25 bp, Saccharomyces pastorianus
ttcctcttttgtacgttattgttca

SEQ ID NO: 169402 - DNA, 25 bp, Saccharomyces pastorianus
tcttcctcttttgtacgttattgtt

SEQ ID NO: 169403 - DNA, 25 bp, Saccharomyces pastorianus
ctcttcctcttttgtacgttattgt

SEQ ID NO: 169404 - DNA, 25 bp, Saccharomyces pastorianus
tcctcttttgtacgttattgttcat

SEQ ID NO: 169405 - DNA, 25 bp, Saccharomyces pastorianus
ctcttttgtacgttattgttcattg

SEQ ID NO: 169406 - DNA, 25 bp, Saccharomyces pastorianus
cctcttttgtacgttattgttcatt

SEQ ID NO: 169407 - DNA, 25 bp, Saccharomyces pastorianus
aactatgtatatagattgtactaga

SEQ ID NO: 169408 - DNA, 25 bp, Saccharomyces pastorianus
acactctcgttatataaaactgcga

SEQ ID NO: 169409 - DNA, 25 bp, Saccharomyces pastorianus
gtaaacttgaagacacactctcgtt

SEQ ID NO: 169410 - DNA, 25 bp, Saccharomyces pastorianus
gtctttgtgcgtccaagtaaacttg

SEQ ID NO: 169411 - DNA, 25 bp, Saccharomyces pastorianus
aaaactgcgaagaacactaacaaag

SEQ ID NO: 169412 - DNA, 25 bp, Saccharomyces pastorianus
agaaggtgacttgcgcttaattagt

SEQ ID NO: 169413 - DNA, 25 bp, Saccharomyces pastorianus
ctaacaaagaaggtgacttgcgctt

SEQ ID NO: 169414 - DNA, 25 bp, Saccharomyces pastorianus
taaggatggatagcacataaacata

SEQ ID NO: 169415 - DNA, 25 bp, Saccharomyces pastorianus
tagttttattcccttgcttctaaag

SEQ ID NO: 169416 - DNA, 25 bp, Saccharomyces pastorianus
gaagacacactctcgttatataaaa

SEQ ID NO: 169417 - DNA, 25 bp, Saccharomyces pastorianus
taaaaacgtctttgtgcgtccaagt

SEQ ID NO: 169418 - DNA, 25 bp, Saccharomyces pastorianus
gcgcttaattagttttattcccttg

SEQ ID NO: 169419 - DNA, 25 bp, Saccharomyces pastorianus
aggttacgcttacgtctcttgatca

SEQ ID NO: 169420 - DNA, 25 bp, Saccharomyces pastorianus
tcttacgagcgataccagagaggtt

SEQ ID NO: 169421 - DNA, 25 bp, Saccharomyces pastorianus
gagaggttacgcttacgtctcttga

SEQ ID NO: 169422 - DNA, 25 bp, Saccharomyces pastorianus
gattggtcttacgagcgataccaga

SEQ ID NO: 169423 - DNA, 25 bp, Saccharomyces pastorianus
catggattggtcttacgagcgatac

SEQ ID NO: 169424 - DNA, 25 bp, Saccharomyces pastorianus
tacgcttacgtctcttgatcatggt

SEQ ID NO: 169425 - DNA, 25 bp, Saccharomyces pastorianus
gtctcttgatcatggtacaatgttc

SEQ ID NO: 169426 - DNA, 25 bp, Saccharomyces pastorianus
caattggacatggattggtcttacg

SEQ ID NO: 169427 - DNA, 25 bp, Saccharomyces pastorianus
gcttacgtctcttgatcatggtaca

SEQ ID NO: 169428 - DNA, 25 bp, Saccharomyces pastorianus
taccagagaggttacgcttacgtct

SEQ ID NO: 169429 - DNA, 25 bp, Saccharomyces pastorianus
tacgtctcttgatcatggtacaatg

SEQ ID NO: 169430 - DNA, 25 bp, Saccharomyces pastorianus
tccccatctgaatttgttgatgtcg

SEQ ID NO: 169431 - DNA, 25 bp, Saccharomyces pastorianus
gattggttattgttaccgacccaag

SEQ ID NO: 169432 - DNA, 25 bp, Saccharomyces pastorianus
gaatttgttgatgtcgccatcccat

SEQ ID NO: 169433 - DNA, 25 bp, Saccharomyces pastorianus
taagaggtgctttggtcgacagaac

SEQ ID NO: 169434 - DNA, 25 bp, Saccharomyces pastorianus
ggtgctttggtcgacagaactcaac

SEQ ID NO: 169435 - DNA, 25 bp, Saccharomyces pastorianus
atttgttgatgtcgccatcccatgt

SEQ ID NO: 169436 - DNA, 25 bp, Saccharomyces pastorianus
tgttggctagagaagttttgagact

SEQ ID NO: 169437 - DNA, 25 bp, Saccharomyces pastorianus
ggtcgacagaactcaaccatggtcc

SEQ ID NO: 169438 - DNA, 25 bp, Saccharomyces pastorianus
cggtttaatctggtacttgttggct

SEQ ID NO: 169439 - DNA, 25 bp, Saccharomyces pastorianus
aatctggtacttgttggctagagaa

SEQ ID NO: 169440 - DNA, 25 bp, Saccharomyces pastorianus
tggttattgttaccgacccaagatt

SEQ ID NO: 169441 - DNA, 25 bp, Saccharomyces pastorianus
tagtatgcggacactgctacagaat

SEQ ID NO: 169442 - DNA, 25 bp, Saccharomyces pastorianus
tgaggcctttaataacacccttgaa

SEQ ID NO: 169443 - DNA, 25 bp, Saccharomyces pastorianus
gtattgaaggtgtaagtctctctaa

SEQ ID NO: 169444 - DNA, 25 bp, Saccharomyces pastorianus
gatatatcccttattcaggctatgt

SEQ ID NO: 169445 - DNA, 25 bp, Saccharomyces pastorianus
aaattctgcggtatttggtcaatca

SEQ ID NO: 169446 - DNA, 25 bp, Saccharomyces pastorianus
atagcacttcggcaaattctgcggt

SEQ ID NO: 169447 - DNA, 25 bp, Saccharomyces pastorianus
ggcagctatgcgtgtctcgaaaata

SEQ ID NO: 169448 - DNA, 25 bp, Saccharomyces pastorianus
gaagaattcttcgtatccagatact

SEQ ID NO: 169449 - DNA, 25 bp, Saccharomyces pastorianus
taggtacgtttctatcgggcagcta

SEQ ID NO: 169450 - DNA, 25 bp, Saccharomyces pastorianus
ggtcaatcagatgctctttcaatga

SEQ ID NO: 169451 - DNA, 25 bp, Saccharomyces pastorianus
tatcaccaatgctactgaggccttt

SEQ ID NO: 169452 - DNA, 25 bp, Saccharomyces pastorianus
gcgctacgcaattttgatcttctat

SEQ ID NO: 169453 - DNA, 25 bp, Saccharomyces pastorianus
gttattgaataattctgcccatttt

SEQ ID NO: 169454 - DNA, 25 bp, Saccharomyces pastorianus
gcccattttattggagaagcactac

SEQ ID NO: 169455 - DNA, 25 bp, Saccharomyces pastorianus
tggagaagcactacaagcttattct

SEQ ID NO: 169456 - DNA, 25 bp, Saccharomyces pastorianus
gatcttctatgttatcttccgtcta

SEQ ID NO: 169457 - DNA, 25 bp, Saccharomyces pastorianus
tccggagccattcctcttgaagaag

SEQ ID NO: 169458 - DNA, 25 bp, Saccharomyces pastorianus
taggaggcttttttctcgaaacact

SEQ ID NO: 169459 - DNA, 25 bp, Saccharomyces pastorianus
ttctgagaggtgagctggaatcaca

SEQ ID NO: 169460 - DNA, 25 bp, Saccharomyces pastorianus
tgaattgtatctttgcgctacgcaa

SEQ ID NO: 169461 - DNA, 25 bp, Saccharomyces pastorianus
gttatcttccgtctataggaggctt

SEQ ID NO: 169462 - DNA, 25 bp, Saccharomyces pastorianus
aaaatgcttttcttatcaagtacta

SEQ ID NO: 169463 - DNA, 25 bp, Saccharomyces pastorianus
tctaccaaggtttccgttgaaggtg

SEQ ID NO: 169464 - DNA, 25 bp, Saccharomyces pastorianus
caaagctttattggccgaattcaag

SEQ ID NO: 169465 - DNA, 25 bp, Saccharomyces pastorianus
gctcgtccacaaaagttacgtgctt

SEQ ID NO: 169466 - DNA, 25 bp, Saccharomyces pastorianus
agttacgtgcttctttgattccagg

SEQ ID NO: 169467 - DNA, 25 bp, Saccharomyces pastorianus
attaatcaccggtccattcaaggtc

SEQ ID NO: 169468 - DNA, 25 bp, Saccharomyces pastorianus
gaactagaaagactgctcgtccaca

SEQ ID NO: 169469 - DNA, 25 bp, Saccharomyces pastorianus
gaagacaacaccctattaatcaccg

SEQ ID NO: 169470 - DNA, 25 bp, Saccharomyces pastorianus
ggttgttgacaaagctttattggcc

SEQ ID NO: 169471 - DNA, 25 bp, Saccharomyces pastorianus
aagacgttgctatcccaaagagaac

SEQ ID NO: 169472 - DNA, 25 bp, Saccharomyces pastorianus
gttcaacgtcgaatacttcgccaag

SEQ ID NO: 169473 - DNA, 25 bp, Saccharomyces pastorianus
gcttctttgattccaggtaccgtct

SEQ ID NO: 169474 - DNA, 25 bp, Saccharomyces pastorianus
gatgcatccattttaaggctaattt

SEQ ID NO: 169475 - DNA, 25 bp, Saccharomyces pastorianus
gcgatgcatccattttaaggctaat

SEQ ID NO: 169476 - DNA, 25 bp, Saccharomyces pastorianus
aaggctaatttgtatcataacgtca

SEQ ID NO: 169477 - DNA, 25 bp, Saccharomyces pastorianus
gtgggcgatgcatccattttaaggc

SEQ ID NO: 169478 - DNA, 25 bp, Saccharomyces pastorianus
acaagtgggcgatgcatccatttta

SEQ ID NO: 169479 - DNA, 25 bp, Saccharomyces pastorianus
gaacaagtgggcgatgcatccattt

SEQ ID NO: 169480 - DNA, 25 bp, Saccharomyces pastorianus
ggctaatttgtatcataacgtcact

SEQ ID NO: 169481 - DNA, 25 bp, Saccharomyces pastorianus
aagtgggcgatgcatccattttaag

SEQ ID NO: 169482 - DNA, 25 bp, Saccharomyces pastorianus
ggcgatgcatccattttaaggctaa

SEQ ID NO: 169483 - DNA, 25 bp, Saccharomyces pastorianus
gcatccattttaaggctaatttgta

SEQ ID NO: 169484 - DNA, 25 bp, Saccharomyces pastorianus
gggcgatgcatccattttaaggcta

SEQ ID NO: 169485 - DNA, 25 bp, Saccharomyces pastorianus
aagctagttgcagtttcgtttgtat

SEQ ID NO: 169486 - DNA, 25 bp, Saccharomyces pastorianus
ccacacctggtgcttattgtatttc

SEQ ID NO: 169487 - DNA, 25 bp, Saccharomyces pastorianus
acccgtgcatttcgaaaggccagtc

SEQ ID NO: 169488 - DNA, 25 bp, Saccharomyces pastorianus
gaattcgatattgtcttgcccgagg

SEQ ID NO: 169489 - DNA, 25 bp, Saccharomyces pastorianus
ctatttatgagtccctagtggcaaa

SEQ ID NO: 169490 - DNA, 25 bp, Saccharomyces pastorianus
gaactactcttatgtttgggaacga

SEQ ID NO: 169491 - DNA, 25 bp, Saccharomyces pastorianus
attgtatttctaccaaggacccata

SEQ ID NO: 169492 - DNA, 25 bp, Saccharomyces pastorianus
ttgcccgaggttttcgagattttca

SEQ ID NO: 169493 - DNA, 25 bp, Saccharomyces pastorianus
ttgctgttctcatgcgtgtaagcta

SEQ ID NO: 169494 - DNA, 25 bp, Saccharomyces pastorianus
agattttcacagttccattttgccc

SEQ ID NO: 169495 - DNA, 25 bp, Saccharomyces pastorianus
aggccagtcctgcaaaaagaatttc

SEQ ID NO: 169496 - DNA, 25 bp, Saccharomyces pastorianus
aacccaaacaaagtctgatgctgtg

SEQ ID NO: 169497 - DNA, 25 bp, Saccharomyces pastorianus
gttaattgagagactaacccaaaca

SEQ ID NO: 169498 - DNA, 25 bp, Saccharomyces pastorianus
gtaagggccaagtaaattcacaatt

SEQ ID NO: 169499 - DNA, 25 bp, Saccharomyces pastorianus
ataattgcagaattgcttgcggatt

SEQ ID NO: 169500 - DNA, 25 bp, Saccharomyces pastorianus
aagattaagagagttacgagctaaa

SEQ ID NO: 169501 - DNA, 25 bp, Saccharomyces pastorianus
caaagtctgatgctgtgagagttgt

SEQ ID NO: 169502 - DNA, 25 bp, Saccharomyces pastorianus
gaagaagttgtcgaccctggtttgg

SEQ ID NO: 169503 - DNA, 25 bp, Saccharomyces pastorianus
tgttgagggtctttgcagaagaaat

SEQ ID NO: 169504 - DNA, 25 bp, Saccharomyces pastorianus
agaggaaaatccatatgccttttat

SEQ ID NO: 169505 - DNA, 25 bp, Saccharomyces pastorianus
attgcttgcggattgtaagggccaa

SEQ ID NO: 169506 - DNA, 25 bp, Saccharomyces pastorianus
tgggtgaaggtttcggtataattgc

SEQ ID NO: 169507 - DNA, 25 bp, Saccharomyces pastorianus
ttcttgtggagtggcaacaccttca

SEQ ID NO: 169508 - DNA, 25 bp, Saccharomyces pastorianus
accgtgagttctggtgactttgccc

SEQ ID NO: 169509 - DNA, 25 bp, Saccharomyces pastorianus
gagtggcaacaccttcaatcttaat

SEQ ID NO: 169510 - DNA, 25 bp, Saccharomyces pastorianus
gtggcaacaccttcaatcttaatca

SEQ ID NO: 169511 - DNA, 25 bp, Saccharomyces pastorianus
gaattgagcttcttgtggagtggca

SEQ ID NO: 169512 - DNA, 25 bp, Saccharomyces pastorianus
ggcaacaccttcaatcttaatcaaa

SEQ ID NO: 169513 - DNA, 25 bp, Saccharomyces pastorianus
tgagttctggtgactttgccccaca

SEQ ID NO: 169514 - DNA, 25 bp, Saccharomyces pastorianus
gcttcttgtggagtggcaacacctt

SEQ ID NO: 169515 - DNA, 25 bp, Saccharomyces pastorianus
gtggagtggcaacaccttcaatctt

SEQ ID NO: 169516 - DNA, 25 bp, Saccharomyces pastorianus
agttctggtgactttgccccacata

SEQ ID NO: 169517 - DNA, 25 bp, Saccharomyces pastorianus
ttgagcttcttgtggagtggcaaca

SEQ ID NO: 169518 - DNA, 25 bp, Saccharomyces pastorianus
gttcgaactctcgaccttcagatta

SEQ ID NO: 169519 - DNA, 25 bp, Saccharomyces pastorianus
gaactctcgaccttcagattatgag

SEQ ID NO: 169520 - DNA, 25 bp, Saccharomyces pastorianus
ctcgaccttcagattatgagactga

SEQ ID NO: 169521 - DNA, 25 bp, Saccharomyces pastorianus
ttcgaactctcgaccttcagattat

SEQ ID NO: 169522 - DNA, 25 bp, Saccharomyces pastorianus
cgaactctcgaccttcagattatga

SEQ ID NO: 169523 - DNA, 25 bp, Saccharomyces pastorianus
tcgaccttcagattatgagactgac

SEQ ID NO: 169524 - DNA, 25 bp, Saccharomyces pastorianus
tctcgaccttcagattatgagactg

SEQ ID NO: 169525 - DNA, 25 bp, Saccharomyces pastorianus
gggaggttcgaactctcgaccttca

SEQ ID NO: 169526 - DNA, 25 bp, Saccharomyces pastorianus
ctctcgaccttcagattatgagact

SEQ ID NO: 169527 - DNA, 25 bp, Saccharomyces pastorianus
aggttcgaactctcgaccttcagat

SEQ ID NO: 169528 - DNA, 25 bp, Saccharomyces pastorianus
tcgaactctcgaccttcagattatg

SEQ ID NO: 169529 - DNA, 25 bp, Saccharomyces pastorianus
ttttcacttttactgcttagatgca

SEQ ID NO: 169530 - DNA, 25 bp, Saccharomyces pastorianus
gaatagtaattgacaggccgcctac

SEQ ID NO: 169531 - DNA, 25 bp, Saccharomyces pastorianus
taacctgttacggtgcttgtgggtt

SEQ ID NO: 169532 - DNA, 25 bp, Saccharomyces pastorianus
tagatgcagcgcagcttaggttggc

SEQ ID NO: 169533 - DNA, 25 bp, Saccharomyces pastorianus
gaactagcaccacccttggaaagag

SEQ ID NO: 169534 - DNA, 25 bp, Saccharomyces pastorianus
taggttggcggcgaactagcaccac

SEQ ID NO: 169535 - DNA, 25 bp, Saccharomyces pastorianus
tttcgggtacccagataactcagta

SEQ ID NO: 169536 - DNA, 25 bp, Saccharomyces pastorianus
gtaccgatgccattaacctgttacg

SEQ ID NO: 169537 - DNA, 25 bp, Saccharomyces pastorianus
aaggtagccattcattgtctctcac

SEQ ID NO: 169538 - DNA, 25 bp, Saccharomyces pastorianus
gttcaggatgaaataccggtcttag

SEQ ID NO: 169539 - DNA, 25 bp, Saccharomyces pastorianus
gagacaatactactcgtaccgatgc

SEQ ID NO: 169540 - DNA, 25 bp, Saccharomyces pastorianus
aatataatcaaacttcttccggata

SEQ ID NO: 169541 - DNA, 25 bp, Saccharomyces pastorianus
caaacttcttccggataacacagaa

SEQ ID NO: 169542 - DNA, 25 bp, Saccharomyces pastorianus
gaaacaagttctacaccgagaatta

SEQ ID NO: 169543 - DNA, 25 bp, Saccharomyces pastorianus
cacagaaacaagttctacaccgaga

SEQ ID NO: 169544 - DNA, 25 bp, Saccharomyces pastorianus
aaatataatcaaacttcttccggat

SEQ ID NO: 169545 - DNA, 25 bp, Saccharomyces pastorianus
taatcaaacttcttccggataacac

SEQ ID NO: 169546 - DNA, 25 bp, Saccharomyces pastorianus
cagaaacaagttctacaccgagaat

SEQ ID NO: 169547 - DNA, 25 bp, Saccharomyces pastorianus
taacacagaaacaagttctacaccg

SEQ ID NO: 169548 - DNA, 25 bp, Saccharomyces pastorianus
gaattaaaaccgtcctctacaatga

SEQ ID NO: 169549 - DNA, 25 bp, Saccharomyces pastorianus
tataatcaaacttcttccggataac

SEQ ID NO: 169550 - DNA, 25 bp, Saccharomyces pastorianus
atcaaacttcttccggataacacag

SEQ ID NO: 169551 - DNA, 25 bp, Saccharomyces pastorianus
ctccagttaagtcaactgaagattc

SEQ ID NO: 169552 - DNA, 25 bp, Saccharomyces pastorianus
gtcatcatcacttcttgaaaagacc

SEQ ID NO: 169553 - DNA, 25 bp, Saccharomyces pastorianus
atatctattttgaaactgtctcctc

SEQ ID NO: 169554 - DNA, 25 bp, Saccharomyces pastorianus
ttggtcatcatcacttcttgaaaag

SEQ ID NO: 169555 - DNA, 25 bp, Saccharomyces pastorianus
ggtcatcatcacttcttgaaaagac

SEQ ID NO: 169556 - DNA, 25 bp, Saccharomyces pastorianus
tggtcatcatcacttcttgaaaaga

SEQ ID NO: 169557 - DNA, 25 bp, Saccharomyces pastorianus
aactgaagattcagagaacaccacc

SEQ ID NO: 169558 - DNA, 25 bp, Saccharomyces pastorianus
tctattttgaaactgtctcctcagc

SEQ ID NO: 169559 - DNA, 25 bp, Saccharomyces pastorianus
atcacttcttgaaaagaccatatct

SEQ ID NO: 169560 - DNA, 25 bp, Saccharomyces pastorianus
aagaccatatctattttgaaactgt

SEQ ID NO: 169561 - DNA, 25 bp, Saccharomyces pastorianus
atctattttgaaactgtctcctcag

SEQ ID NO: 169562 - DNA, 25 bp, Saccharomyces pastorianus
tttacctagactactaacacaccct

SEQ ID NO: 169563 - DNA, 25 bp, Saccharomyces pastorianus
atgcgtcaaaacacaccacacatta

SEQ ID NO: 169564 - DNA, 25 bp, Saccharomyces pastorianus
gatcgactattcaccttgggaaaac

SEQ ID NO: 169565 - DNA, 25 bp, Saccharomyces pastorianus
aaaaatcccgatcgactattcacct

SEQ ID NO: 169566 - DNA, 25 bp, Saccharomyces pastorianus
gggagatttcaacagctgacatatt

SEQ ID NO: 169567 - DNA, 25 bp, Saccharomyces pastorianus
ggagacttgtacaccaacacatcgg

SEQ ID NO: 169568 - DNA, 25 bp, Saccharomyces pastorianus
aattgcagaatacccttttacctag

SEQ ID NO: 169569 - DNA, 25 bp, Saccharomyces pastorianus
acattacacaatgcactttctgcta

SEQ ID NO: 169570 - DNA, 25 bp, Saccharomyces pastorianus
tgcactttctgctaaaaatcccgat

SEQ ID NO: 169571 - DNA, 25 bp, Saccharomyces pastorianus
tactaacacaccctatgcgtcaaaa

SEQ ID NO: 169572 - DNA, 25 bp, Saccharomyces pastorianus
agctgacatatttagttcgtggaaa

SEQ ID NO: 169573 - DNA, 25 bp, Saccharomyces pastorianus
agagacgccaaatttacaccacaag

SEQ ID NO: 169574 - DNA, 25 bp, Saccharomyces pastorianus
tgaagaccagaagagacgccaaatt

SEQ ID NO: 169575 - DNA, 25 bp, Saccharomyces pastorianus
gccaaatttacaccacaagctcggg

SEQ ID NO: 169576 - DNA, 25 bp, Saccharomyces pastorianus
gttaagaccatagtgaagaccagaa

SEQ ID NO: 169577 - DNA, 25 bp, Saccharomyces pastorianus
ctgacggctctgaggaccacgggtt

SEQ ID NO: 169578 - DNA, 25 bp, Saccharomyces pastorianus
ggtattgcatccatttacatagtta

SEQ ID NO: 169579 - DNA, 25 bp, Saccharomyces pastorianus
tattatgataatttggcgcaggtga

SEQ ID NO: 169580 - DNA, 25 bp, Saccharomyces pastorianus
aaacctgctttacatttctgcagca

SEQ ID NO: 169581 - DNA, 25 bp, Saccharomyces pastorianus
tttctgcagcaggtattgcatccat

SEQ ID NO: 169582 - DNA, 25 bp, Saccharomyces pastorianus
ataacaacgctgacggctctgagga

SEQ ID NO: 169583 - DNA, 25 bp, Saccharomyces pastorianus
ggtagtggacttagtgcggcaacaa

SEQ ID NO: 169584 - DNA, 25 bp, Saccharomyces pastorianus
caatggcattgtcgttctgtggtgt

SEQ ID NO: 169585 - DNA, 25 bp, Saccharomyces pastorianus
accgctggccaacttcacgagagag

SEQ ID NO: 169586 - DNA, 25 bp, Saccharomyces pastorianus
gttgttttctattgccttttacgtg

SEQ ID NO: 169587 - DNA, 25 bp, Saccharomyces pastorianus
tagcaggtacacttgcctattgtat

SEQ ID NO: 169588 - DNA, 25 bp, Saccharomyces pastorianus
gggtctcttatgttcacaatggcat

SEQ ID NO: 169589 - DNA, 25 bp, Saccharomyces pastorianus
tcaagaactttttcgtgggtcgcgt

SEQ ID NO: 169590 - DNA, 25 bp, Saccharomyces pastorianus
tgttatggctactcctagtgctatg

SEQ ID NO: 169591 - DNA, 25 bp, Saccharomyces pastorianus
ttattcgaatgcttcaaccgctggc

SEQ ID NO: 169592 - DNA, 25 bp, Saccharomyces pastorianus
cgctgacctatctgatcgatgcatt

SEQ ID NO: 169593 - DNA, 25 bp, Saccharomyces pastorianus
atgtatagagtgtctccgctgacct

SEQ ID NO: 169594 - DNA, 25 bp, Saccharomyces pastorianus
tcgcgttcttcgtatcccaaatcat

SEQ ID NO: 169595 - DNA, 25 bp, Saccharomyces pastorianus
caggctctaaggtagtgagcactgt

SEQ ID NO: 169596 - DNA, 25 bp, Saccharomyces pastorianus
aggcggagactttgaccactacata

SEQ ID NO: 169597 - DNA, 25 bp, Saccharomyces pastorianus
ttgaccactacatataagaccacgg

SEQ ID NO: 169598 - DNA, 25 bp, Saccharomyces pastorianus
gtcaaatcagcttatgtaaccacct

SEQ ID NO: 169599 - DNA, 25 bp, Saccharomyces pastorianus
atcagcttatgtaaccacctctggc

SEQ ID NO: 169600 - DNA, 25 bp, Saccharomyces pastorianus
tccaaggcggagactttgaccacta

SEQ ID NO: 169601 - DNA, 25 bp, Saccharomyces pastorianus
tataagaccacggttaacgctaaag

SEQ ID NO: 169602 - DNA, 25 bp, Saccharomyces pastorianus
tatgtaaccacctctggctccaagg

SEQ ID NO: 169603 - DNA, 25 bp, Saccharomyces pastorianus
gcggagactttgaccactacatata

SEQ ID NO: 169604 - DNA, 25 bp, Saccharomyces pastorianus
gagcactgtcaaatcagcttatgta

SEQ ID NO: 169605 - DNA, 25 bp, Saccharomyces pastorianus
gtagtgagcactgtcaaatcagctt

SEQ ID NO: 169606 - DNA, 25 bp, Saccharomyces pastorianus
tagtatactgactacagttgccatg

SEQ ID NO: 169607 - DNA, 25 bp, Saccharomyces pastorianus
gtccattaactaatccattcaccta

SEQ ID NO: 169608 - DNA, 25 bp, Saccharomyces pastorianus
aatccattcacctatacagtagtat

SEQ ID NO: 169609 - DNA, 25 bp, Saccharomyces pastorianus
tggttgacctaatagtccattaact

SEQ ID NO: 169610 - DNA, 25 bp, Saccharomyces pastorianus
agttgccatgacatatcctttcctt

SEQ ID NO: 169611 - DNA, 25 bp, Saccharomyces pastorianus
cccttcgtaatggttgacctaatag

SEQ ID NO: 169612 - DNA, 25 bp, Saccharomyces pastorianus
acatatcctttccttttcggactat

SEQ ID NO: 169613 - DNA, 25 bp, Saccharomyces pastorianus
tgggcctacataaggtacttcaccc

SEQ ID NO: 169614 - DNA, 25 bp, Saccharomyces pastorianus
cttttcggactatattaggcggaag

SEQ ID NO: 169615 - DNA, 25 bp, Saccharomyces pastorianus
gtacttcaccccaatttggaaagag

SEQ ID NO: 169616 - DNA, 25 bp, Saccharomyces pastorianus
acattataaatcatgctttgtcgca

SEQ ID NO: 169617 - DNA, 25 bp, Saccharomyces pastorianus
gtaaagacaaggatggctgccccaa

SEQ ID NO: 169618 - DNA, 25 bp, Saccharomyces pastorianus
ttttactgttgggaatgctgccgcc

SEQ ID NO: 169619 - DNA, 25 bp, Saccharomyces pastorianus
tcggtatcaacgatgccttttactg

SEQ ID NO: 169620 - DNA, 25 bp, Saccharomyces pastorianus
atggctgccccaagattctaaatct

SEQ ID NO: 169621 - DNA, 25 bp, Saccharomyces pastorianus
ggctaaaaactgtattatttgcaac

SEQ ID NO: 169622 - DNA, 25 bp, Saccharomyces pastorianus
aatgctgccgcctgggtaaagacaa

SEQ ID NO: 169623 - DNA, 25 bp, Saccharomyces pastorianus
aacgatgccttttactgttgggaat

SEQ ID NO: 169624 - DNA, 25 bp, Saccharomyces pastorianus
gtatgcgaaaactgctcgtttggca

SEQ ID NO: 169625 - DNA, 25 bp, Saccharomyces pastorianus
aactgctcgtttggcaaaaaggcta

SEQ ID NO: 169626 - DNA, 25 bp, Saccharomyces pastorianus
gattctaaatctaggtagcaataag

SEQ ID NO: 169627 - DNA, 25 bp, Saccharomyces pastorianus
atttgcaacttaaacatcggtatca

SEQ ID NO: 169628 - DNA, 25 bp, Saccharomyces pastorianus
taatgtacaacagccataagtggta

SEQ ID NO: 169629 - DNA, 25 bp, Saccharomyces pastorianus
aaaaatgtgccatcttcaataatgt

SEQ ID NO: 169630 - DNA, 25 bp, Saccharomyces pastorianus
gtttgctgtctttacaactatccct

SEQ ID NO: 169631 - DNA, 25 bp, Saccharomyces pastorianus
aggatgtggatcttgctactttgtt

SEQ ID NO: 169632 - DNA, 25 bp, Saccharomyces pastorianus
ataccacctagcaagtagacggcga

SEQ ID NO: 169633 - DNA, 25 bp, Saccharomyces pastorianus
aagctagtcattgaggtcttgtaag

SEQ ID NO: 169634 - DNA, 25 bp, Saccharomyces pastorianus
cttgctactttgttgtttgctgtct

SEQ ID NO: 169635 - DNA, 25 bp, Saccharomyces pastorianus
gggcaaaaacgtgataccacctagc

SEQ ID NO: 169636 - DNA, 25 bp, Saccharomyces pastorianus
gacggcgaaaaacaccttcaagcta

SEQ ID NO: 169637 - DNA, 25 bp, Saccharomyces pastorianus
tgtctttacaactatccctttctta

SEQ ID NO: 169638 - DNA, 25 bp, Saccharomyces pastorianus
atccctttcttaattattctcttga

SEQ ID NO: 169639 - DNA, 25 bp, Saccharomyces pastorianus
ggttagacccaaacgaagcttctga

SEQ ID NO: 169640 - DNA, 25 bp, Saccharomyces pastorianus
cagaactagagcacatgcccaatcc

SEQ ID NO: 169641 - DNA, 25 bp, Saccharomyces pastorianus
aatccagaactagagcacatgccca

SEQ ID NO: 169642 - DNA, 25 bp, Saccharomyces pastorianus
atccagaactagagcacatgcccaa

SEQ ID NO: 169643 - DNA, 25 bp, Saccharomyces pastorianus
aaatccagaactagagcacatgccc

SEQ ID NO: 169644 - DNA, 25 bp, Saccharomyces pastorianus
aagcccgtttgccatcccaagttgt

SEQ ID NO: 169645 - DNA, 25 bp, Saccharomyces pastorianus
ccagaactagagcacatgcccaatc

SEQ ID NO: 169646 - DNA, 25 bp, Saccharomyces pastorianus
gagagccttggttgaacacatcatc

SEQ ID NO: 169647 - DNA, 25 bp, Saccharomyces pastorianus
tccagaactagagcacatgcccaat

SEQ ID NO: 169648 - DNA, 25 bp, Saccharomyces pastorianus
ggtaccagagaagcccgtttgccat

SEQ ID NO: 169649 - DNA, 25 bp, Saccharomyces pastorianus
taaatccagaactagagcacatgcc

SEQ ID NO: 169650 - DNA, 25 bp, Saccharomyces pastorianus
atatctagccttcactatcactatc

SEQ ID NO: 169651 - DNA, 25 bp, Saccharomyces pastorianus
gtactactccactacataccaccta

SEQ ID NO: 169652 - DNA, 25 bp, Saccharomyces pastorianus
tacataccacctaactactaccgtt

SEQ ID NO: 169653 - DNA, 25 bp, Saccharomyces pastorianus
atctagccttcactatcactatcca

SEQ ID NO: 169654 - DNA, 25 bp, Saccharomyces pastorianus
ttcactatcactatccacggccctt

SEQ ID NO: 169655 - DNA, 25 bp, Saccharomyces pastorianus
cgttaccctccacatattataccat

SEQ ID NO: 169656 - DNA, 25 bp, Saccharomyces pastorianus
taccgttaccctccacatattatac

SEQ ID NO: 169657 - DNA, 25 bp, Saccharomyces pastorianus
tagccttcactatcactatccacgg

SEQ ID NO: 169658 - DNA, 25 bp, Saccharomyces pastorianus
actaccgttaccctccacatattat

SEQ ID NO: 169659 - DNA, 25 bp, Saccharomyces pastorianus
caatatctagccttcactatcacta

SEQ ID NO: 169660 - DNA, 25 bp, Saccharomyces pastorianus
tatctagccttcactatcactatcc

SEQ ID NO: 169661 - DNA, 25 bp, Saccharomyces pastorianus
tatgttgttctttgttgtgggtgat

SEQ ID NO: 169662 - DNA, 25 bp, Saccharomyces pastorianus
gaatcggattttcttccattacaaa

SEQ ID NO: 169663 - DNA, 25 bp, Saccharomyces pastorianus
ccgtgagctgcaggtgttggatttc

SEQ ID NO: 169664 - DNA, 25 bp, Saccharomyces pastorianus
gttggatttccatcttcattggaca

SEQ ID NO: 169665 - DNA, 25 bp, Saccharomyces pastorianus
tgattccggttcaattacacccttt

SEQ ID NO: 169666 - DNA, 25 bp, Saccharomyces pastorianus
aagcaataaagtctgattccggttc

SEQ ID NO: 169667 - DNA, 25 bp, Saccharomyces pastorianus
ggtattctccatatgttgttctttg

SEQ ID NO: 169668 - DNA, 25 bp, Saccharomyces pastorianus
agaattcattatgggtctacgaagc

SEQ ID NO: 169669 - DNA, 25 bp, Saccharomyces pastorianus
gcatattttgtgctgttcagtaaaa

SEQ ID NO: 169670 - DNA, 25 bp, Saccharomyces pastorianus
agacggagtccaacgggatcgccca

SEQ ID NO: 169671 - DNA, 25 bp, Saccharomyces pastorianus
ggaaagatacatggtattctccata

SEQ ID NO: 169672 - DNA, 25 bp, Saccharomyces pastorianus
aaagcacttcacacttcgatttatg

SEQ ID NO: 169673 - DNA, 25 bp, Saccharomyces pastorianus
gcctggcaccataaaagcacttcac

SEQ ID NO: 169674 - DNA, 25 bp, Saccharomyces pastorianus
taccctgccggtcaattaaaactgc

SEQ ID NO: 169675 - DNA, 25 bp, Saccharomyces pastorianus
gctcacggagcattttcattacgaa

SEQ ID NO: 169676 - DNA, 25 bp, Saccharomyces pastorianus
tcagaaaaaactaccctgccggtca

SEQ ID NO: 169677 - DNA, 25 bp, Saccharomyces pastorianus
gaaactcgtaggtgtcgttggtcat

SEQ ID NO: 169678 - DNA, 25 bp, Saccharomyces pastorianus
gtcaattaaaactgcctggcaccat

SEQ ID NO: 169679 - DNA, 25 bp, Saccharomyces pastorianus
cggagcattttcattacgaacaggc

SEQ ID NO: 169680 - DNA, 25 bp, Saccharomyces pastorianus
acttcacacttcgatttatgctcac

SEQ ID NO: 169681 - DNA, 25 bp, Saccharomyces pastorianus
acacttcgatttatgctcacggagc

SEQ ID NO: 169682 - DNA, 25 bp, Saccharomyces pastorianus
taggtgtcgttggtcattttctaaa

SEQ ID NO: 169683 - DNA, 25 bp, Saccharomyces pastorianus
ttttacattacgacacaggccacac

SEQ ID NO: 169684 - DNA, 25 bp, Saccharomyces pastorianus
aaagaagtttctattgtcggagact

SEQ ID NO: 169685 - DNA, 25 bp, Saccharomyces pastorianus
aaaaacgaacccgtgcccagtgctg

SEQ ID NO: 169686 - DNA, 25 bp, Saccharomyces pastorianus
gccctgttatgctacgctgattcat

SEQ ID NO: 169687 - DNA, 25 bp, Saccharomyces pastorianus
tatgtccgctttccgaagttaccaa

SEQ ID NO: 169688 - DNA, 25 bp, Saccharomyces pastorianus
gacgcaacacaacatcaatccctag

SEQ ID NO: 169689 - DNA, 25 bp, Saccharomyces pastorianus
taactgactgcaattacgatccgcc

SEQ ID NO: 169690 - DNA, 25 bp, Saccharomyces pastorianus
tgcaattacgatccgccctgttatg

SEQ ID NO: 169691 - DNA, 25 bp, Saccharomyces pastorianus
caatccctaggatatgtccgctttc

SEQ ID NO: 169692 - DNA, 25 bp, Saccharomyces pastorianus
gccacacagtctactgccattgtag

SEQ ID NO: 169693 - DNA, 25 bp, Saccharomyces pastorianus
aaaacacctagtccaatcggcccag

SEQ ID NO: 169694 - DNA, 25 bp, Saccharomyces pastorianus
tgatgagcctgaagcacgaatcgtt

SEQ ID NO: 169695 - DNA, 25 bp, Saccharomyces pastorianus
atttactctgatgagcctgaagcac

SEQ ID NO: 169696 - DNA, 25 bp, Saccharomyces pastorianus
actctgatgagcctgaagcacgaat

SEQ ID NO: 169697 - DNA, 25 bp, Saccharomyces pastorianus
tgagcctgaagcacgaatcgttaag

SEQ ID NO: 169698 - DNA, 25 bp, Saccharomyces pastorianus
aaatttactctgatgagcctgaagc

SEQ ID NO: 169699 - DNA, 25 bp, Saccharomyces pastorianus
ttactctgatgagcctgaagcacga

SEQ ID NO: 169700 - DNA, 25 bp, Saccharomyces pastorianus
gcctgaagcacgaatcgttaagact

SEQ ID NO: 169701 - DNA, 25 bp, Saccharomyces pastorianus
agcacgaatcgttaagactcttttc

SEQ ID NO: 169702 - DNA, 25 bp, Saccharomyces pastorianus
atgagcctgaagcacgaatcgttaa

SEQ ID NO: 169703 - DNA, 25 bp, Saccharomyces pastorianus
gaatcgttaagactcttttcgaacg

SEQ ID NO: 169704 - DNA, 25 bp, Saccharomyces pastorianus
tctgatgagcctgaagcacgaatcg

SEQ ID NO: 169705 - DNA, 25 bp, Saccharomyces pastorianus
gtatcgtacctgtcacctcgttttg

SEQ ID NO: 169706 - DNA, 25 bp, Saccharomyces pastorianus
acctcgttttgcagacgtcaaagaa

SEQ ID NO: 169707 - DNA, 25 bp, Saccharomyces pastorianus
atggtatcgtacctgtcacctcgtt

SEQ ID NO: 169708 - DNA, 25 bp, Saccharomyces pastorianus
tgtcacctcgttttgcagacgtcaa

SEQ ID NO: 169709 - DNA, 25 bp, Saccharomyces pastorianus
agaatcctagatgcccaaactttgt

SEQ ID NO: 169710 - DNA, 25 bp, Saccharomyces pastorianus
gtacctgtcacctcgttttgcagac

SEQ ID NO: 169711 - DNA, 25 bp, Saccharomyces pastorianus
aaacatggtatcgtacctgtcacct

SEQ ID NO: 169712 - DNA, 25 bp, Saccharomyces pastorianus
gacgtcaaagaatcctagatgccca

SEQ ID NO: 169713 - DNA, 25 bp, Saccharomyces pastorianus
gtgtgtaaacatggtatcgtacctg

SEQ ID NO: 169714 - DNA, 25 bp, Saccharomyces pastorianus
tgcagacgtcaaagaatcctagatg

SEQ ID NO: 169715 - DNA, 25 bp, Saccharomyces pastorianus
tcacctcgttttgcagacgtcaaag

SEQ ID NO: 169716 - DNA, 25 bp, Saccharomyces pastorianus
cactgacgctgttggaatctataaa

SEQ ID NO: 169717 - DNA, 25 bp, Saccharomyces pastorianus
tagaaccggccgtctacaccctgga

SEQ ID NO: 169718 - DNA, 25 bp, Saccharomyces pastorianus
aacgtatcggaaaggcattgagcca

SEQ ID NO: 169719 - DNA, 25 bp, Saccharomyces pastorianus
gacagacaagtactccgctcagata

SEQ ID NO: 169720 - DNA, 25 bp, Saccharomyces pastorianus
gtactccgctcagataaaggtctca

SEQ ID NO: 169721 - DNA, 25 bp, Saccharomyces pastorianus
tggaactgcccagcgtcattgacac

SEQ ID NO: 169722 - DNA, 25 bp, Saccharomyces pastorianus
agataaaggtctcagccactccagc

SEQ ID NO: 169723 - DNA, 25 bp, Saccharomyces pastorianus
tcattgacactgacgctgttggaat

SEQ ID NO: 169724 - DNA, 25 bp, Saccharomyces pastorianus
cactccagcagcagggccagacgtg

SEQ ID NO: 169725 - DNA, 25 bp, Saccharomyces pastorianus
ggcattgagccacatcaagtaacag

SEQ ID NO: 169726 - DNA, 25 bp, Saccharomyces pastorianus
gagagctgaaaatttcctgacagac

SEQ ID NO: 169727 - DNA, 25 bp, Saccharomyces pastorianus
cattgcctgtgtcttgaccatcatc

SEQ ID NO: 169728 - DNA, 25 bp, Saccharomyces pastorianus
aagagcattgcctgtgtcttgacca

SEQ ID NO: 169729 - DNA, 25 bp, Saccharomyces pastorianus
tggcttcccaattggttgacttgaa

SEQ ID NO: 169730 - DNA, 25 bp, Saccharomyces pastorianus
gagcattgcctgtgtcttgaccatc

SEQ ID NO: 169731 - DNA, 25 bp, Saccharomyces pastorianus
gcattgcctgtgtcttgaccatcat

SEQ ID NO: 169732 - DNA, 25 bp, Saccharomyces pastorianus
agcattgcctgtgtcttgaccatca

SEQ ID NO: 169733 - DNA, 25 bp, Saccharomyces pastorianus
aaagttgtccaagccatctttgcca

SEQ ID NO: 169734 - DNA, 25 bp, Saccharomyces pastorianus
tcccaagttactgaaaagcaaaaga

SEQ ID NO: 169735 - DNA, 25 bp, Saccharomyces pastorianus
tccaaggaacaattggcttcccaat

SEQ ID NO: 169736 - DNA, 25 bp, Saccharomyces pastorianus
agagcattgcctgtgtcttgaccat

SEQ ID NO: 169737 - DNA, 25 bp, Saccharomyces pastorianus
ccaagttactgaaaagcaaaagaag

SEQ ID NO: 169738 - DNA, 25 bp, Saccharomyces pastorianus
accgccagcgagagtggaatttcca

SEQ ID NO: 169739 - DNA, 25 bp, Saccharomyces pastorianus
tgtttgatcttttagcagccatatt

SEQ ID NO: 169740 - DNA, 25 bp, Saccharomyces pastorianus
atatggatcggtctcatccctacta

SEQ ID NO: 169741 - DNA, 25 bp, Saccharomyces pastorianus
tattttgctaaatcacagtgctcta

SEQ ID NO: 169742 - DNA, 25 bp, Saccharomyces pastorianus
gggccttgcttctgtttgatctttt

SEQ ID NO: 169743 - DNA, 25 bp, Saccharomyces pastorianus
cctcctcatcttctaataatgggtc

SEQ ID NO: 169744 - DNA, 25 bp, Saccharomyces pastorianus
gggtcatcgtcatcattgttagcac

SEQ ID NO: 169745 - DNA, 25 bp, Saccharomyces pastorianus
atcattgttagcaccgccagcgaga

SEQ ID NO: 169746 - DNA, 25 bp, Saccharomyces pastorianus
atatgcctattctcttttgtaaatc

SEQ ID NO: 169747 - DNA, 25 bp, Saccharomyces pastorianus
atcgtcaacttcgttcaagccatat

SEQ ID NO: 169748 - DNA, 25 bp, Saccharomyces pastorianus
agtgctctacagtaaatatgcctat

SEQ ID NO: 169749 - DNA, 25 bp, Saccharomyces pastorianus
cttagctcgatccttaaaaaagtat

SEQ ID NO: 169750 - DNA, 25 bp, Saccharomyces pastorianus
ttgaatgtgtcgaaaaccttagctc

SEQ ID NO: 169751 - DNA, 25 bp, Saccharomyces pastorianus
ataaggtccatcgaagctgtatttg

SEQ ID NO: 169752 - DNA, 25 bp, Saccharomyces pastorianus
gaaaacgtttctcttgcattcaata

SEQ ID NO: 169753 - DNA, 25 bp, Saccharomyces pastorianus
gggcgaactcaacctttcgcttgaa

SEQ ID NO: 169754 - DNA, 25 bp, Saccharomyces pastorianus
gaactcaacctttcgcttgaacaag

SEQ ID NO: 169755 - DNA, 25 bp, Saccharomyces pastorianus
gcttgaacaagcttgaatgtgtcga

SEQ ID NO: 169756 - DNA, 25 bp, Saccharomyces pastorianus
gaagctgtatttggaacttccgatt

SEQ ID NO: 169757 - DNA, 25 bp, Saccharomyces pastorianus
tcttgcattcaataaggtccatcga

SEQ ID NO: 169758 - DNA, 25 bp, Saccharomyces pastorianus
gtcgaaaaccttagctcgatcctta

SEQ ID NO: 169759 - DNA, 25 bp, Saccharomyces pastorianus
aaaaagtatttgcattatcagtaat

SEQ ID NO: 169760 - DNA, 25 bp, Saccharomyces pastorianus
ctatttctcatcatttgcatcatct

SEQ ID NO: 169761 - DNA, 25 bp, Saccharomyces pastorianus
gaatctgcaattctacacaattcta

SEQ ID NO: 169762 - DNA, 25 bp, Saccharomyces pastorianus
actatttctcatcatttgcatcatc

SEQ ID NO: 169763 - DNA, 25 bp, Saccharomyces pastorianus
tatttctcatcatttgcatcatctt

SEQ ID NO: 169764 - DNA, 25 bp, Saccharomyces pastorianus
tttctcatcatttgcatcatcttct

SEQ ID NO: 169765 - DNA, 25 bp, Saccharomyces pastorianus
atgactatttctcatcatttgcatc

SEQ ID NO: 169766 - DNA, 25 bp, Saccharomyces pastorianus
atttctcatcatttgcatcatcttc

SEQ ID NO: 169767 - DNA, 25 bp, Saccharomyces pastorianus
gcgtttcagcttccactaatttaga

SEQ ID NO: 169768 - DNA, 25 bp, Saccharomyces pastorianus
gactatttctcatcatttgcatcat

SEQ ID NO: 169769 - DNA, 25 bp, Saccharomyces pastorianus
tgactatttctcatcatttgcatca

SEQ ID NO: 169770 - DNA, 25 bp, Saccharomyces pastorianus
gatgactatttctcatcatttgcat

SEQ ID NO: 169771 - DNA, 25 bp, Saccharomyces pastorianus
cataaatatgattctgttggtgttg

SEQ ID NO: 169772 - DNA, 25 bp, Saccharomyces pastorianus
atggattatcagcttgatttacgaa

SEQ ID NO: 169773 - DNA, 25 bp, Saccharomyces pastorianus
tcagcttgatttacgaaatgttact

SEQ ID NO: 169774 - DNA, 25 bp, Saccharomyces pastorianus
aatatgattctgttggtgttggaac

SEQ ID NO: 169775 - DNA, 25 bp, Saccharomyces pastorianus
tacttatcctatatactacataaat

SEQ ID NO: 169776 - DNA, 25 bp, Saccharomyces pastorianus
accagttgtcaaaatggattatcag

SEQ ID NO: 169777 - DNA, 25 bp, Saccharomyces pastorianus
attctgttggtgttggaacgagagt

SEQ ID NO: 169778 - DNA, 25 bp, Saccharomyces pastorianus
gaaatgttacttatcctatatacta

SEQ ID NO: 169779 - DNA, 25 bp, Saccharomyces pastorianus
tgatttacgaaatgttacttatcct

SEQ ID NO: 169780 - DNA, 25 bp, Saccharomyces pastorianus
ttatcagcttgatttacgaaatgtt

SEQ ID NO: 169781 - DNA, 25 bp, Saccharomyces pastorianus
gttacttatcctatatactacataa

SEQ ID NO: 169782 - DNA, 25 bp, Saccharomyces pastorianus
ctatttctcatcatttgcgtcatct

SEQ ID NO: 169783 - DNA, 25 bp, Saccharomyces pastorianus
accttgcgtttcagcttccactaat

SEQ ID NO: 169784 - DNA, 25 bp, Saccharomyces pastorianus
gaatctgcaattctacacaattcta

SEQ ID NO: 169785 - DNA, 25 bp, Saccharomyces pastorianus
tatttctcatcatttgcgtcatctt

SEQ ID NO: 169786 - DNA, 25 bp, Saccharomyces pastorianus
tttctcatcatttgcgtcatcttct

SEQ ID NO: 169787 - DNA, 25 bp, Saccharomyces pastorianus
atttctcatcatttgcgtcatcttc

SEQ ID NO: 169788 - DNA, 25 bp, Saccharomyces pastorianus
gcgtttcagcttccactaatttaga

SEQ ID NO: 169789 - DNA, 25 bp, Saccharomyces pastorianus
tgcgtttcagcttccactaatttag

SEQ ID NO: 169790 - DNA, 25 bp, Saccharomyces pastorianus
gtttcagcttccactaatttagatg

SEQ ID NO: 169791 - DNA, 25 bp, Saccharomyces pastorianus
atctgcaattctacacaattctata

SEQ ID NO: 169792 - DNA, 25 bp, Saccharomyces pastorianus
cactaatttagatgactatttctca

SEQ ID NO: 169793 - DNA, 25 bp, Saccharomyces pastorianus
ttcgaattacgaaatcggtgatagt

SEQ ID NO: 169794 - DNA, 25 bp, Saccharomyces pastorianus
cctgcagcgaaatactcctgttcga

SEQ ID NO: 169795 - DNA, 25 bp, Saccharomyces pastorianus
acagtaattcccctgcagcgaaata

SEQ ID NO: 169796 - DNA, 25 bp, Saccharomyces pastorianus
ctttccctcgtctacaaacagtaat

SEQ ID NO: 169797 - DNA, 25 bp, Saccharomyces pastorianus
gaaatactcctgttcgaattacgaa

SEQ ID NO: 169798 - DNA, 25 bp, Saccharomyces pastorianus
caaacagtaattcccctgcagcgaa

SEQ ID NO: 169799 - DNA, 25 bp, Saccharomyces pastorianus
actcctgttcgaattacgaaatcgg

SEQ ID NO: 169800 - DNA, 25 bp, Saccharomyces pastorianus
gcagcgaaatactcctgttcgaatt

SEQ ID NO: 169801 - DNA, 25 bp, Saccharomyces pastorianus
tacaaacagtaattcccctgcagcg

SEQ ID NO: 169802 - DNA, 25 bp, Saccharomyces pastorianus
gtaattcccctgcagcgaaatactc

SEQ ID NO: 169803 - DNA, 25 bp, Saccharomyces pastorianus
attgctttccctcgtctacaaacag

SEQ ID NO: 169804 - DNA, 25 bp, Saccharomyces pastorianus
agatgcttcatctagtccaacaact

SEQ ID NO: 169805 - DNA, 25 bp, Saccharomyces pastorianus
gtctcaaccacctctgttacattaa

SEQ ID NO: 169806 - DNA, 25 bp, Saccharomyces pastorianus
gtaactggttcaactgctttaacga

SEQ ID NO: 169807 - DNA, 25 bp, Saccharomyces pastorianus
taaaaccagttcgatttcttcaatt

SEQ ID NO: 169808 - DNA, 25 bp, Saccharomyces pastorianus
ccattggccacatctaacgtaactg

SEQ ID NO: 169809 - DNA, 25 bp, Saccharomyces pastorianus
gctcagtttccccaattagatcagt

SEQ ID NO: 169810 - DNA, 25 bp, Saccharomyces pastorianus
attaaccagttcagtcatcccattg

SEQ ID NO: 169811 - DNA, 25 bp, Saccharomyces pastorianus
gagttcagctaatccagatgcttca

SEQ ID NO: 169812 - DNA, 25 bp, Saccharomyces pastorianus
agttcagctgctcaaacgacttcag

SEQ ID NO: 169813 - DNA, 25 bp, Saccharomyces pastorianus
aagtatttcaactgtctcaaccacc

SEQ ID NO: 169814 - DNA, 25 bp, Saccharomyces pastorianus
gttgagtcaaccacaactcttcatg

SEQ ID NO: 169815 - DNA, 25 bp, Saccharomyces pastorianus
tcacttctactgatatgtcatacgc

SEQ ID NO: 169816 - DNA, 25 bp, Saccharomyces pastorianus
accttcacttctactgatatgtcat

SEQ ID NO: 169817 - DNA, 25 bp, Saccharomyces pastorianus
acttctactgatatgtcatacgcac

SEQ ID NO: 169818 - DNA, 25 bp, Saccharomyces pastorianus
ccttcacttctactgatatgtcata

SEQ ID NO: 169819 - DNA, 25 bp, Saccharomyces pastorianus
ctcaccttcacttctactgatatgt

SEQ ID NO: 169820 - DNA, 25 bp, Saccharomyces pastorianus
ttcacttctactgatatgtcatacg

SEQ ID NO: 169821 - DNA, 25 bp, Saccharomyces pastorianus
cattcttaagttaccctactctcac

SEQ ID NO: 169822 - DNA, 25 bp, Saccharomyces pastorianus
cacttctactgatatgtcatacgca

SEQ ID NO: 169823 - DNA, 25 bp, Saccharomyces pastorianus
taccattcttaagttaccctactct

SEQ ID NO: 169824 - DNA, 25 bp, Saccharomyces pastorianus
ccattcttaagttaccctactctca

SEQ ID NO: 169825 - DNA, 25 bp, Saccharomyces pastorianus
ttctactgatatgtcatacgcacac

SEQ ID NO: 169826 - DNA, 25 bp, Saccharomyces pastorianus
taagatgcacttgttcctgaacgag

SEQ ID NO: 169827 - DNA, 25 bp, Saccharomyces pastorianus
agatgctcatttatcacttcacacc

SEQ ID NO: 169828 - DNA, 25 bp, Saccharomyces pastorianus
atcacttcacacctttcatgtttca

SEQ ID NO: 169829 - DNA, 25 bp, Saccharomyces pastorianus
ctatggtgcctatgtgtattcgtat

SEQ ID NO: 169830 - DNA, 25 bp, Saccharomyces pastorianus
ggtattgttctatggtgcctatgtg

SEQ ID NO: 169831 - DNA, 25 bp, Saccharomyces pastorianus
attccttcatcaaccatcactactt

SEQ ID NO: 169832 - DNA, 25 bp, Saccharomyces pastorianus
atcatgaatttcttatgcgaaggta

SEQ ID NO: 169833 - DNA, 25 bp, Saccharomyces pastorianus
tttcatgtttcatctttcgcaccat

SEQ ID NO: 169834 - DNA, 25 bp, Saccharomyces pastorianus
ctttcgcaccatcttcatcattaaa

SEQ ID NO: 169835 - DNA, 25 bp, Saccharomyces pastorianus
tttatacccattccttcatcaacca

SEQ ID NO: 169836 - DNA, 25 bp, Saccharomyces pastorianus
gttcctgaacgaggcatgcatatat

SEQ ID NO: 169837 - DNA, 25 bp, Saccharomyces pastorianus
agaaatccctgtcgcctagatcatt

SEQ ID NO: 169838 - DNA, 25 bp, Saccharomyces pastorianus
aagagtttctctatagtggggctgg

SEQ ID NO: 169839 - DNA, 25 bp, Saccharomyces pastorianus
tctttgaacggagctttcgtggcct

SEQ ID NO: 169840 - DNA, 25 bp, Saccharomyces pastorianus
ttgaacggagctttcgtggcctttt

SEQ ID NO: 169841 - DNA, 25 bp, Saccharomyces pastorianus
gaacggagctttcgtggccttttgt

SEQ ID NO: 169842 - DNA, 25 bp, Saccharomyces pastorianus
tcaaagaaatccctgtcgcctagat

SEQ ID NO: 169843 - DNA, 25 bp, Saccharomyces pastorianus
ttctcaaagaaatccctgtcgccta

SEQ ID NO: 169844 - DNA, 25 bp, Saccharomyces pastorianus
attctttgaacggagctttcgtggc

SEQ ID NO: 169845 - DNA, 25 bp, Saccharomyces pastorianus
tgttctcaaagaaatccctgtcgcc

SEQ ID NO: 169846 - DNA, 25 bp, Saccharomyces pastorianus
agctttcgtggccttttgttctcaa

SEQ ID NO: 169847 - DNA, 25 bp, Saccharomyces pastorianus
aaagaaatccctgtcgcctagatca

SEQ ID NO: 169848 - DNA, 25 bp, Saccharomyces pastorianus
gccaacaacagagttttctcagtca

SEQ ID NO: 169849 - DNA, 25 bp, Saccharomyces pastorianus
gcttctttctaaaaatggccaacaa

SEQ ID NO: 169850 - DNA, 25 bp, Saccharomyces pastorianus
ccaacaacagagttttctcagtcaa

SEQ ID NO: 169851 - DNA, 25 bp, Saccharomyces pastorianus
atggccaacaacagagttttctcag

SEQ ID NO: 169852 - DNA, 25 bp, Saccharomyces pastorianus
aaatggccaacaacagagttttctc

SEQ ID NO: 169853 - DNA, 25 bp, Saccharomyces pastorianus
tggccaacaacagagttttctcagt

SEQ ID NO: 169854 - DNA, 25 bp, Saccharomyces pastorianus
ggccaacaacagagttttctcagtc

SEQ ID NO: 169855 - DNA, 25 bp, Saccharomyces pastorianus
tctttctaaaaatggccaacaacag

SEQ ID NO: 169856 - DNA, 25 bp, Saccharomyces pastorianus
aatggccaacaacagagttttctca

SEQ ID NO: 169857 - DNA, 25 bp, Saccharomyces pastorianus
caacaacagagttttctcagtcaaa

SEQ ID NO: 169858 - DNA, 25 bp, Saccharomyces pastorianus
ttctttctaaaaatggccaacaaca

SEQ ID NO: 169859 - DNA, 25 bp, Saccharomyces pastorianus
ggatcgtcgattattctatagaata

SEQ ID NO: 169860 - DNA, 25 bp, Saccharomyces pastorianus
gaagttcttctcagatatatagcaa

SEQ ID NO: 169861 - DNA, 25 bp, Saccharomyces pastorianus
tagcaattcatgaaggatcgtcgat

SEQ ID NO: 169862 - DNA, 25 bp, Saccharomyces pastorianus
caattcatgaaggatcgtcgattat

SEQ ID NO: 169863 - DNA, 25 bp, Saccharomyces pastorianus
tagatatgcagaatatgctagaagt

SEQ ID NO: 169864 - DNA, 25 bp, Saccharomyces pastorianus
aaggatcgtcgattattctatagaa

SEQ ID NO: 169865 - DNA, 25 bp, Saccharomyces pastorianus
gttcttctcagatatatagcaattc

SEQ ID NO: 169866 - DNA, 25 bp, Saccharomyces pastorianus
tagaagttcttctcagatatatagc

SEQ ID NO: 169867 - DNA, 25 bp, Saccharomyces pastorianus
gcaattcatgaaggatcgtcgatta

SEQ ID NO: 169868 - DNA, 25 bp, Saccharomyces pastorianus
ggattttcattattattgaaggcta

SEQ ID NO: 169869 - DNA, 25 bp, Saccharomyces pastorianus
cttctcagatatatagcaattcatg

SEQ ID NO: 169870 - DNA, 25 bp, Saccharomyces pastorianus
caaaaaggcgtcgataaatctccat

SEQ ID NO: 169871 - DNA, 25 bp, Saccharomyces pastorianus
tccactgttgaagaaaggctataat

SEQ ID NO: 169872 - DNA, 25 bp, Saccharomyces pastorianus
ggcgtcgataaatctccataactat

SEQ ID NO: 169873 - DNA, 25 bp, Saccharomyces pastorianus
aaaggcgtcgataaatctccataac

SEQ ID NO: 169874 - DNA, 25 bp, Saccharomyces pastorianus
gtcgataaatctccataactatatt

SEQ ID NO: 169875 - DNA, 25 bp, Saccharomyces pastorianus
cgtacacagagtatactagaagttc

SEQ ID NO: 169876 - DNA, 25 bp, Saccharomyces pastorianus
gaaatccactgttgaagaaaggcta

SEQ ID NO: 169877 - DNA, 25 bp, Saccharomyces pastorianus
ctatattactttatgttctttcctt

SEQ ID NO: 169878 - DNA, 25 bp, Saccharomyces pastorianus
aattgtttgaaatccactgttgaag

SEQ ID NO: 169879 - DNA, 25 bp, Saccharomyces pastorianus
aaggctataatattcgtacacagag

SEQ ID NO: 169880 - DNA, 25 bp, Saccharomyces pastorianus
atattcgtacacagagtatactaga

SEQ ID NO: 169881 - DNA, 25 bp, Saccharomyces pastorianus
tgcttacctttactttgtttccaat

SEQ ID NO: 169882 - DNA, 25 bp, Saccharomyces pastorianus
ttactttgtttccaatgttcttctt

SEQ ID NO: 169883 - DNA, 25 bp, Saccharomyces pastorianus
tttactttgtttccaatgttcttct

SEQ ID NO: 169884 - DNA, 25 bp, Saccharomyces pastorianus
tgtttccaatgttcttctttaacac

SEQ ID NO: 169885 - DNA, 25 bp, Saccharomyces pastorianus
tactttgtttccaatgttcttcttt

SEQ ID NO: 169886 - DNA, 25 bp, Saccharomyces pastorianus
ttgtttccaatgttcttctttaaca

SEQ ID NO: 169887 - DNA, 25 bp, Saccharomyces pastorianus
tttccaatgttcttctttaacacca

SEQ ID NO: 169888 - DNA, 25 bp, Saccharomyces pastorianus
gcttacctttactttgtttccaatg

SEQ ID NO: 169889 - DNA, 25 bp, Saccharomyces pastorianus
tccaatgttcttctttaacaccaaa

SEQ ID NO: 169890 - DNA, 25 bp, Saccharomyces pastorianus
aacaccaaaacatactatttgagaa

SEQ ID NO: 169891 - DNA, 25 bp, Saccharomyces pastorianus
tctttaacaccaaaacatactattt

SEQ ID NO: 169892 - DNA, 25 bp, Saccharomyces pastorianus
gtacaccttcttactttatatcgtt

SEQ ID NO: 169893 - DNA, 25 bp, Saccharomyces pastorianus
gctcgcgttctagttatccagatgg

SEQ ID NO: 169894 - DNA, 25 bp, Saccharomyces pastorianus
gatgctgcggtgactctagaggatc

SEQ ID NO: 169895 - DNA, 25 bp, Saccharomyces pastorianus
agaggatccccatattgaatggtct

SEQ ID NO: 169896 - DNA, 25 bp, Saccharomyces pastorianus
ggtcctgtacatcacttaccgagaa

SEQ ID NO: 169897 - DNA, 25 bp, Saccharomyces pastorianus
catattgaatggtctaacgctagca

SEQ ID NO: 169898 - DNA, 25 bp, Saccharomyces pastorianus
tagaggatccccatattgaatggtc

SEQ ID NO: 169899 - DNA, 25 bp, Saccharomyces pastorianus
ctagaggatccccatattgaatggt

SEQ ID NO: 169900 - DNA, 25 bp, Saccharomyces pastorianus
agaatctatcctcaatgtttttaca

SEQ ID NO: 169901 - DNA, 25 bp, Saccharomyces pastorianus
aaccaattcaatgctcgcgttctag

SEQ ID NO: 169902 - DNA, 25 bp, Saccharomyces pastorianus
gaggatccccatattgaatggtcta

SEQ ID NO: 169903 - DNA, 25 bp, Saccharomyces pastorianus
aagtgttgagcttgcctgtcaaatc

SEQ ID NO: 169904 - DNA, 25 bp, Saccharomyces pastorianus
tcttcactggatatacgctttttgc

SEQ ID NO: 169905 - DNA, 25 bp, Saccharomyces pastorianus
gctgcttcgccctttgtattactca

SEQ ID NO: 169906 - DNA, 25 bp, Saccharomyces pastorianus
tttcgtctttttcttcactggatat

SEQ ID NO: 169907 - DNA, 25 bp, Saccharomyces pastorianus
ggatatacgctttttgcatttgcaa

SEQ ID NO: 169908 - DNA, 25 bp, Saccharomyces pastorianus
gcatttgcaatagcacatatgtgta

SEQ ID NO: 169909 - DNA, 25 bp, Saccharomyces pastorianus
ttttcacttgccatattcgttcacc

SEQ ID NO: 169910 - DNA, 25 bp, Saccharomyces pastorianus
cttgccatattcgttcaccggtttt

SEQ ID NO: 169911 - DNA, 25 bp, Saccharomyces pastorianus
tgagcttgcctgtcaaatcctccat

SEQ ID NO: 169912 - DNA, 25 bp, Saccharomyces pastorianus
cactttttcacttgccatattcgtt

SEQ ID NO: 169913 - DNA, 25 bp, Saccharomyces pastorianus
tgtcaaatcctccatgtgtccttct

SEQ ID NO: 169914 - DNA, 25 bp, Saccharomyces pastorianus
gggattccctctgtgttgaaggcaa

SEQ ID NO: 169915 - DNA, 25 bp, Saccharomyces pastorianus
tgttgggattccctctgtgttgaag

SEQ ID NO: 169916 - DNA, 25 bp, Saccharomyces pastorianus
tatactagaagatttcctcgagatt

SEQ ID NO: 169917 - DNA, 25 bp, Saccharomyces pastorianus
ttgggattccctctgtgttgaaggc

SEQ ID NO: 169918 - DNA, 25 bp, Saccharomyces pastorianus
ccctctgtgttgaaggcaataatat

SEQ ID NO: 169919 - DNA, 25 bp, Saccharomyces pastorianus
tatacaggatatactagaagatttc

SEQ ID NO: 169920 - DNA, 25 bp, Saccharomyces pastorianus
ttccctctgtgttgaaggcaataat

SEQ ID NO: 169921 - DNA, 25 bp, Saccharomyces pastorianus
ttcctcgagattatagaaatgccca

SEQ ID NO: 169922 - DNA, 25 bp, Saccharomyces pastorianus
gattccctctgtgttgaaggcaata

SEQ ID NO: 169923 - DNA, 25 bp, Saccharomyces pastorianus
tagaagatttcctcgagattataga

SEQ ID NO: 169924 - DNA, 25 bp, Saccharomyces pastorianus
aattgttgggattccctctgtgttg

SEQ ID NO: 169925 - DNA, 25 bp, Saccharomyces pastorianus
taaactgtctttaagggtaggcgat

SEQ ID NO: 169926 - DNA, 25 bp, Saccharomyces pastorianus
ggcgatttgatttacgtactcacta

SEQ ID NO: 169927 - DNA, 25 bp, Saccharomyces pastorianus
gtgggatggtgttcttatcagacac

SEQ ID NO: 169928 - DNA, 25 bp, Saccharomyces pastorianus
tacgtactcactaaaggttctaatg

SEQ ID NO: 169929 - DNA, 25 bp, Saccharomyces pastorianus
gtggaatgtacctatcaatatttta

SEQ ID NO: 169930 - DNA, 25 bp, Saccharomyces pastorianus
atcgatgtagtggaatgtacctatc

SEQ ID NO: 169931 - DNA, 25 bp, Saccharomyces pastorianus
ctgtctttaagggtaggcgatttga

SEQ ID NO: 169932 - DNA, 25 bp, Saccharomyces pastorianus
cagacacagcgctaataataataat

SEQ ID NO: 169933 - DNA, 25 bp, Saccharomyces pastorianus
tgcttacaacctatcgatgtagtgg

SEQ ID NO: 169934 - DNA, 25 bp, Saccharomyces pastorianus
tgttcttatcagacacagcgctaat

SEQ ID NO: 169935 - DNA, 25 bp, Saccharomyces pastorianus
actaaaggttctaatggctggtggg

SEQ ID NO: 169936 - DNA, 25 bp, Saccharomyces pastorianus
agtcgcactgcgtcatatgccggca

SEQ ID NO: 169937 - DNA, 25 bp, Saccharomyces pastorianus
ggcatgacaactccggtgaaagata

SEQ ID NO: 169938 - DNA, 25 bp, Saccharomyces pastorianus
actgcgtcatatgccggcatgacaa

SEQ ID NO: 169939 - DNA, 25 bp, Saccharomyces pastorianus
acgggattccatgcttacaacctat

SEQ ID NO: 169940 - DNA, 25 bp, Saccharomyces pastorianus
cgggattccatgcttacaacctatc

SEQ ID NO: 169941 - DNA, 25 bp, Saccharomyces pastorianus
gacaactccggtgaaagataaggaa

SEQ ID NO: 169942 - DNA, 25 bp, Saccharomyces pastorianus
tatgccggcatgacaactccggtga

SEQ ID NO: 169943 - DNA, 25 bp, Saccharomyces pastorianus
atgagtcgcactgcgtcatatgccg

SEQ ID NO: 169944 - DNA, 25 bp, Saccharomyces pastorianus
ggaaggccacgggattccatgctta

SEQ ID NO: 169945 - DNA, 25 bp, Saccharomyces pastorianus
aggccacgggattccatgcttacaa

SEQ ID NO: 169946 - DNA, 25 bp, Saccharomyces pastorianus
gataaggaaggccacgggattccat

SEQ ID NO: 169947 - DNA, 25 bp, Saccharomyces pastorianus
tatctccttttgatttttattaacg

SEQ ID NO: 169948 - DNA, 25 bp, Saccharomyces pastorianus
tggtttaggtttcgcttatctcctt

SEQ ID NO: 169949 - DNA, 25 bp, Saccharomyces pastorianus
gttgctggtttaggtttcgcttatc

SEQ ID NO: 169950 - DNA, 25 bp, Saccharomyces pastorianus
tgatttttattaacgtcggaggtgt

SEQ ID NO: 169951 - DNA, 25 bp, Saccharomyces pastorianus
caattttgctgggtttgtgttgcca

SEQ ID NO: 169952 - DNA, 25 bp, Saccharomyces pastorianus
taaaactaatttgcctaaatcttat

SEQ ID NO: 169953 - DNA, 25 bp, Saccharomyces pastorianus
gaaattctttccaattttgctgggt

SEQ ID NO: 169954 - DNA, 25 bp, Saccharomyces pastorianus
gctgggtttgtgttgccagcatatt

SEQ ID NO: 169955 - DNA, 25 bp, Saccharomyces pastorianus
aaatcttatttagttgctggtttag

SEQ ID NO: 169956 - DNA, 25 bp, Saccharomyces pastorianus
gaggtgtaggtgaaattctttccaa

SEQ ID NO: 169957 - DNA, 25 bp, Saccharomyces pastorianus
acgtcggaggtgtaggtgaaattct

SEQ ID NO: 169958 - DNA, 25 bp, Saccharomyces pastorianus
gatattgtagtttttattattctta

SEQ ID NO: 169959 - DNA, 25 bp, Saccharomyces pastorianus
tattattcttatttggatcctcctc

SEQ ID NO: 169960 - DNA, 25 bp, Saccharomyces pastorianus
tatttggatcctcctctcttaccgc

SEQ ID NO: 169961 - DNA, 25 bp, Saccharomyces pastorianus
tacagcactaccaacatattatctt

SEQ ID NO: 169962 - DNA, 25 bp, Saccharomyces pastorianus
ttaccgcccgtcttcaatctacctt

SEQ ID NO: 169963 - DNA, 25 bp, Saccharomyces pastorianus
caatctaccttcgaacccggctctt

SEQ ID NO: 169964 - DNA, 25 bp, Saccharomyces pastorianus
gtacagcactaccaacatattatct

SEQ ID NO: 169965 - DNA, 25 bp, Saccharomyces pastorianus
ctttggtacagcactaccaacatat

SEQ ID NO: 169966 - DNA, 25 bp, Saccharomyces pastorianus
ttatttggatcctcctctcttaccg

SEQ ID NO: 169967 - DNA, 25 bp, Saccharomyces pastorianus
tattcttatttggatcctcctctct

SEQ ID NO: 169968 - DNA, 25 bp, Saccharomyces pastorianus
ttcttatttggatcctcctctctta

SEQ ID NO: 169969 - DNA, 25 bp, Saccharomyces pastorianus
atattcgttcatccagtactgttag

SEQ ID NO: 169970 - DNA, 25 bp, Saccharomyces pastorianus
agtactgttagtggcaccgctttag

SEQ ID NO: 169971 - DNA, 25 bp, Saccharomyces pastorianus
gcaactccatatattcgttcatcca

SEQ ID NO: 169972 - DNA, 25 bp, Saccharomyces pastorianus
tatactacatcggatgatccacatg

SEQ ID NO: 169973 - DNA, 25 bp, Saccharomyces pastorianus
gatataactacttcgactgttcaga

SEQ ID NO: 169974 - DNA, 25 bp, Saccharomyces pastorianus
acatcagtttatccaactagctcaa

SEQ ID NO: 169975 - DNA, 25 bp, Saccharomyces pastorianus
gcctcatctagtttagcgggtatgt

SEQ ID NO: 169976 - DNA, 25 bp, Saccharomyces pastorianus
ttcgactgttcagactacttcagct

SEQ ID NO: 169977 - DNA, 25 bp, Saccharomyces pastorianus
gatccacatgcctcatctagtttag

SEQ ID NO: 169978 - DNA, 25 bp, Saccharomyces pastorianus
actagctcaagcgatataactactt

SEQ ID NO: 169979 - DNA, 25 bp, Saccharomyces pastorianus
gtggcaccgctttagcagatcaaac

SEQ ID NO: 169980 - DNA, 25 bp, Saccharomyces pastorianus
tgaggacaatatttctgcagctgcc

SEQ ID NO: 169981 - DNA, 25 bp, Saccharomyces pastorianus
caccactactaacgcatttatcaca

SEQ ID NO: 169982 - DNA, 25 bp, Saccharomyces pastorianus
tctcctgcatcaacgtctactataa

SEQ ID NO: 169983 - DNA, 25 bp, Saccharomyces pastorianus
gaaagtgtttctggtacctcaacta

SEQ ID NO: 169984 - DNA, 25 bp, Saccharomyces pastorianus
tgcagctgcctctctagaaagtgtt

SEQ ID NO: 169985 - DNA, 25 bp, Saccharomyces pastorianus
atctgccagcatttcattaatcatg

SEQ ID NO: 169986 - DNA, 25 bp, Saccharomyces pastorianus
cgttcaatcaactgcttccgtaatg

SEQ ID NO: 169987 - DNA, 25 bp, Saccharomyces pastorianus
gcattccattgctgctgtatcaaca

SEQ ID NO: 169988 - DNA, 25 bp, Saccharomyces pastorianus
tattctagtcaatccagtgccattc

SEQ ID NO: 169989 - DNA, 25 bp, Saccharomyces pastorianus
aggagccattacatcatctgccagc

SEQ ID NO: 169990 - DNA, 25 bp, Saccharomyces pastorianus
attaatcatggaaggcagcgcaaac

SEQ ID NO: 169991 - DNA, 25 bp, Saccharomyces pastorianus
gttgaaggtgacgatccagaagaat

SEQ ID NO: 169992 - DNA, 25 bp, Saccharomyces pastorianus
tctgtcagccaattaaatacggtgc

SEQ ID NO: 169993 - DNA, 25 bp, Saccharomyces pastorianus
gtcgttgacaacacatttggtgccg

SEQ ID NO: 169994 - DNA, 25 bp, Saccharomyces pastorianus
tgctttggctgtttcctccggtcaa

SEQ ID NO: 169995 - DNA, 25 bp, Saccharomyces pastorianus
aaagatttggtatcgaggctagatt

SEQ ID NO: 169996 - DNA, 25 bp, Saccharomyces pastorianus
taaccagttcaaaatctcgttcaaa

SEQ ID NO: 169997 - DNA, 25 bp, Saccharomyces pastorianus
ggtaatccaaagtacaatgttccgg

SEQ ID NO: 169998 - DNA, 25 bp, Saccharomyces pastorianus
cacggtattccagttgtcgttgaca

SEQ ID NO: 169999 - DNA, 25 bp, Saccharomyces pastorianus
aacacatttggtgccggtggttact

SEQ ID NO: 170000 - DNA, 25 bp, Saccharomyces pastorianus
aacccttgccatccaaggtttggca

SEQ ID NO: 170001 - DNA, 25 bp, Saccharomyces pastorianus
ggtggttacttctgtcagccaatta

SEQ ID NO: 170002 - DNA, 25 bp, Saccharomyces pastorianus
gtctctaaacaattccaacggttca

SEQ ID NO: 170003 - DNA, 25 bp, Saccharomyces pastorianus
actagtacgaacacttcgggcggag

SEQ ID NO: 170004 - DNA, 25 bp, Saccharomyces pastorianus
ggaaacaataacaactcgtctctaa

SEQ ID NO: 170005 - DNA, 25 bp, Saccharomyces pastorianus
gagcttctacaagtgctggaggact

SEQ ID NO: 170006 - DNA, 25 bp, Saccharomyces pastorianus
tccaacggttcaacgggcctgtttg

SEQ ID NO: 170007 - DNA, 25 bp, Saccharomyces pastorianus
ggaggcttatttcagaataacacta

SEQ ID NO: 170008 - DNA, 25 bp, Saccharomyces pastorianus
ccagccaatggcacaatcacaaaat

SEQ ID NO: 170009 - DNA, 25 bp, Saccharomyces pastorianus
tttgggtccaataatgcatctaaca

SEQ ID NO: 170010 - DNA, 25 bp, Saccharomyces pastorianus
gccaccaccaattctactggtttat

SEQ ID NO: 170011 - DNA, 25 bp, Saccharomyces pastorianus
ataatgcatctaacacggcggccac

SEQ ID NO: 170012 - DNA, 25 bp, Saccharomyces pastorianus
gtgctggaggactatttggaaacaa

SEQ ID NO: 170013 - DNA, 25 bp, Saccharomyces pastorianus
gtaacacgaatactactaaaagatg

SEQ ID NO: 170014 - DNA, 25 bp, Saccharomyces pastorianus
tttagagcttcaatccaacaacttc

SEQ ID NO: 170015 - DNA, 25 bp, Saccharomyces pastorianus
cgaatactactaaaagatgacattt

SEQ ID NO: 170016 - DNA, 25 bp, Saccharomyces pastorianus
ctttacgtcatctttttacaccgca

SEQ ID NO: 170017 - DNA, 25 bp, Saccharomyces pastorianus
tccataacagttgatgactgtttct

SEQ ID NO: 170018 - DNA, 25 bp, Saccharomyces pastorianus
agcttccataacagttgatgactgt

SEQ ID NO: 170019 - DNA, 25 bp, Saccharomyces pastorianus
gacattttagagcttcaatccaaca

SEQ ID NO: 170020 - DNA, 25 bp, Saccharomyces pastorianus
attttagagcttcaatccaacaact

SEQ ID NO: 170021 - DNA, 25 bp, Saccharomyces pastorianus
acattttagagcttcaatccaacaa

SEQ ID NO: 170022 - DNA, 25 bp, Saccharomyces pastorianus
gatgacattttagagcttcaatcca

SEQ ID NO: 170023 - DNA, 25 bp, Saccharomyces pastorianus
tgacattttagagcttcaatccaac

SEQ ID NO: 170024 - DNA, 25 bp, Saccharomyces pastorianus
gcagaaggctcctatgcagacagct

SEQ ID NO: 170025 - DNA, 25 bp, Saccharomyces pastorianus
gctcctatgcagacagctaagcagt

SEQ ID NO: 170026 - DNA, 25 bp, Saccharomyces pastorianus
tgatatgtcgtcctttttctctcta

SEQ ID NO: 170027 - DNA, 25 bp, Saccharomyces pastorianus
taccttcccttttatttcttgatat

SEQ ID NO: 170028 - DNA, 25 bp, Saccharomyces pastorianus
gaaggctcctatgcagacagctaag

SEQ ID NO: 170029 - DNA, 25 bp, Saccharomyces pastorianus
taagcagtgcttaattgaattacct

SEQ ID NO: 170030 - DNA, 25 bp, Saccharomyces pastorianus
ttcccttttatttcttgatatgtcg

SEQ ID NO: 170031 - DNA, 25 bp, Saccharomyces pastorianus
gtgcttaattgaattaccttccctt

SEQ ID NO: 170032 - DNA, 25 bp, Saccharomyces pastorianus
atttcttgatatgtcgtcctttttc

SEQ ID NO: 170033 - DNA, 25 bp, Saccharomyces pastorianus
gtaattgcagaaggctcctatgcag

SEQ ID NO: 170034 - DNA, 25 bp, Saccharomyces pastorianus
atgcagacagctaagcagtgcttaa

SEQ ID NO: 170035 - DNA, 25 bp, Saccharomyces pastorianus
gtttgttgtactttcgaactctcga

SEQ ID NO: 170036 - DNA, 25 bp, Saccharomyces pastorianus
gcgtgaacattcaaatcgacagcgt

SEQ ID NO: 170037 - DNA, 25 bp, Saccharomyces pastorianus
catagaggaactattagtctccata

SEQ ID NO: 170038 - DNA, 25 bp, Saccharomyces pastorianus
ttcccttttctaaaatttcacagca

SEQ ID NO: 170039 - DNA, 25 bp, Saccharomyces pastorianus
ttatttctgtttgttgtactttcga

SEQ ID NO: 170040 - DNA, 25 bp, Saccharomyces pastorianus
atcgacagcgtaaccttctgtattt

SEQ ID NO: 170041 - DNA, 25 bp, Saccharomyces pastorianus
aatttcacagcaaagaagctttaga

SEQ ID NO: 170042 - DNA, 25 bp, Saccharomyces pastorianus
actattagtctccataatgtcacag

SEQ ID NO: 170043 - DNA, 25 bp, Saccharomyces pastorianus
taccaaggcgacaattcccttttct

SEQ ID NO: 170044 - DNA, 25 bp, Saccharomyces pastorianus
gtgcagtaaatctacaactcataag

SEQ ID NO: 170045 - DNA, 25 bp, Saccharomyces pastorianus
aaccttctgtatttatttctgtttg

SEQ ID NO: 170046 - DNA, 25 bp, Saccharomyces pastorianus
ggcgaaaaatatgagcggtacgaga

SEQ ID NO: 170047 - DNA, 25 bp, Saccharomyces pastorianus
actaaccgcccggagaatgtcttgt

SEQ ID NO: 170048 - DNA, 25 bp, Saccharomyces pastorianus
taaccgcccggagaatgtcttgttg

SEQ ID NO: 170049 - DNA, 25 bp, Saccharomyces pastorianus
accgcccggagaatgtcttgttgag

SEQ ID NO: 170050 - DNA, 25 bp, Saccharomyces pastorianus
aaccgcccggagaatgtcttgttga

SEQ ID NO: 170051 - DNA, 25 bp, Saccharomyces pastorianus
ctaaccgcccggagaatgtcttgtt

SEQ ID NO: 170052 - DNA, 25 bp, Saccharomyces pastorianus
gcccggagaatgtcttgttgagcta

SEQ ID NO: 170053 - DNA, 25 bp, Saccharomyces pastorianus
ggaaggcgaaaaatatgagcggtac

SEQ ID NO: 170054 - DNA, 25 bp, Saccharomyces pastorianus
ccggagaatgtcttgttgagctata

SEQ ID NO: 170055 - DNA, 25 bp, Saccharomyces pastorianus
ggagaatgtcttgttgagctatagc

SEQ ID NO: 170056 - DNA, 25 bp, Saccharomyces pastorianus
ccgcccggagaatgtcttgttgagc

SEQ ID NO: 170057 - DNA, 25 bp, Saccharomyces pastorianus
tagtgttgtaataaccatttatatt

SEQ ID NO: 170058 - DNA, 25 bp, Saccharomyces pastorianus
tgattagtgttgtaataaccattta

SEQ ID NO: 170059 - DNA, 25 bp, Saccharomyces pastorianus
attgattagtgttgtaataaccatt

SEQ ID NO: 170060 - DNA, 25 bp, Saccharomyces pastorianus
gttgtaataaccatttatattgtat

SEQ ID NO: 170061 - DNA, 25 bp, Saccharomyces pastorianus
aattgattagtgttgtaataaccat

SEQ ID NO: 170062 - DNA, 25 bp, Saccharomyces pastorianus
gtgttgtaataaccatttatattgt

SEQ ID NO: 170063 - DNA, 25 bp, Saccharomyces pastorianus
agtgttgtaataaccatttatattg

SEQ ID NO: 170064 - DNA, 25 bp, Saccharomyces pastorianus
tattccaacataattgattagtgtt

SEQ ID NO: 170065 - DNA, 25 bp, Saccharomyces pastorianus
ttgattagtgttgtaataaccattt

SEQ ID NO: 170066 - DNA, 25 bp, Saccharomyces pastorianus
attagtgttgtaataaccatttata

SEQ ID NO: 170067 - DNA, 25 bp, Saccharomyces pastorianus
gattagtgttgtaataaccatttat

SEQ ID NO: 170068 - DNA, 25 bp, Saccharomyces pastorianus
ttaaacactgtctcgcaacaacctc

SEQ ID NO: 170069 - DNA, 25 bp, Saccharomyces pastorianus
gggccgctaacaccaaggaccatac

SEQ ID NO: 170070 - DNA, 25 bp, Saccharomyces pastorianus
tggtattgccaacggtctactggct

SEQ ID NO: 170071 - DNA, 25 bp, Saccharomyces pastorianus
actactgctcatgcgattggctata

SEQ ID NO: 170072 - DNA, 25 bp, Saccharomyces pastorianus
cagtagtgttgcttcagtcccaggg

SEQ ID NO: 170073 - DNA, 25 bp, Saccharomyces pastorianus
accaccggcgttactggtaactcag

SEQ ID NO: 170074 - DNA, 25 bp, Saccharomyces pastorianus
ggtctactggctaatagtgctctaa

SEQ ID NO: 170075 - DNA, 25 bp, Saccharomyces pastorianus
gtagtaggatctagtaccgtttctt

SEQ ID NO: 170076 - DNA, 25 bp, Saccharomyces pastorianus
gtagcacttccataagcggtgtagt

SEQ ID NO: 170077 - DNA, 25 bp, Saccharomyces pastorianus
aactcagtaaactccgaagctgctg

SEQ ID NO: 170078 - DNA, 25 bp, Saccharomyces pastorianus
acggcaacggtgtgccttcgatttc

SEQ ID NO: 170079 - DNA, 25 bp, Saccharomyces pastorianus
acaccgtcctgcacgagtttgttaa

SEQ ID NO: 170080 - DNA, 25 bp, Saccharomyces pastorianus
tgactgcgtgcttaattactctcgt

SEQ ID NO: 170081 - DNA, 25 bp, Saccharomyces pastorianus
tttccgaacctgaaggacctgctac

SEQ ID NO: 170082 - DNA, 25 bp, Saccharomyces pastorianus
aaggcagttccagcctttggacgac

SEQ ID NO: 170083 - DNA, 25 bp, Saccharomyces pastorianus
aatagagactttggccacctggagt

SEQ ID NO: 170084 - DNA, 25 bp, Saccharomyces pastorianus
aatcccgtggtgatatcgttgcctt

SEQ ID NO: 170085 - DNA, 25 bp, Saccharomyces pastorianus
aggagttccgaactgcgttcaacaa

SEQ ID NO: 170086 - DNA, 25 bp, Saccharomyces pastorianus
atcaaagaaatcgtccaccactggg

SEQ ID NO: 170087 - DNA, 25 bp, Saccharomyces pastorianus
ggcaccacctttttggatatccatc

SEQ ID NO: 170088 - DNA, 25 bp, Saccharomyces pastorianus
ttaattactctcgtctgcaagccat

SEQ ID NO: 170089 - DNA, 25 bp, Saccharomyces pastorianus
tcgctcccatgaccgttatcaaaga

SEQ ID NO: 170090 - DNA, 25 bp, Saccharomyces pastorianus
cattctagccctaatgagattggaa

SEQ ID NO: 170091 - DNA, 25 bp, Saccharomyces pastorianus
gatgcttcaacgcttaacactgaat

SEQ ID NO: 170092 - DNA, 25 bp, Saccharomyces pastorianus
atgctctcattctagccctaatgag

SEQ ID NO: 170093 - DNA, 25 bp, Saccharomyces pastorianus
gctctcattctagccctaatgagat

SEQ ID NO: 170094 - DNA, 25 bp, Saccharomyces pastorianus
tgcttcaacgcttaacactgaatgg

SEQ ID NO: 170095 - DNA, 25 bp, Saccharomyces pastorianus
gcttcaacgcttaacactgaatggt

SEQ ID NO: 170096 - DNA, 25 bp, Saccharomyces pastorianus
ttcaacgcttaacactgaatggtcg

SEQ ID NO: 170097 - DNA, 25 bp, Saccharomyces pastorianus
accgatgcttcaacgcttaacactg

SEQ ID NO: 170098 - DNA, 25 bp, Saccharomyces pastorianus
atgcttcaacgcttaacactgaatg

SEQ ID NO: 170099 - DNA, 25 bp, Saccharomyces pastorianus
aaccgatgcttcaacgcttaacact

SEQ ID NO: 170100 - DNA, 25 bp, Saccharomyces pastorianus
ccgatgcttcaacgcttaacactga

SEQ ID NO: 170101 - DNA, 25 bp, Saccharomyces pastorianus
cataataaactagccttgttggcgc

SEQ ID NO: 170102 - DNA, 25 bp, Saccharomyces pastorianus
gagagtaggctttcataataaacta

SEQ ID NO: 170103 - DNA, 25 bp, Saccharomyces pastorianus
agagagtaggctttcataataaact

SEQ ID NO: 170104 - DNA, 25 bp, Saccharomyces pastorianus
agagtaggctttcataataaactag

SEQ ID NO: 170105 - DNA, 25 bp, Saccharomyces pastorianus
gagtaggctttcataataaactagc

SEQ ID NO: 170106 - DNA, 25 bp, Saccharomyces pastorianus
tttcataataaactagccttgttgg

SEQ ID NO: 170107 - DNA, 25 bp, Saccharomyces pastorianus
ctttcataataaactagccttgttg

SEQ ID NO: 170108 - DNA, 25 bp, Saccharomyces pastorianus
gctttcataataaactagccttgtt

SEQ ID NO: 170109 - DNA, 25 bp, Saccharomyces pastorianus
ggctttcataataaactagccttgt

SEQ ID NO: 170110 - DNA, 25 bp, Saccharomyces pastorianus
aagagagtaggctttcataataaac

SEQ ID NO: 170111 - DNA, 25 bp, Saccharomyces pastorianus
tcataataaactagccttgttggcg

SEQ ID NO: 170112 - DNA, 25 bp, Saccharomyces pastorianus
tcgttccactgagaactacggtttt

SEQ ID NO: 170113 - DNA, 25 bp, Saccharomyces pastorianus
gtatgcattggtaaacttgaaacca

SEQ ID NO: 170114 - DNA, 25 bp, Saccharomyces pastorianus
gacatgtactgatcgttccactgag

SEQ ID NO: 170115 - DNA, 25 bp, Saccharomyces pastorianus
gtactgatcgttccactgagaacta

SEQ ID NO: 170116 - DNA, 25 bp, Saccharomyces pastorianus
aacttatcagatctgaccatgcctg

SEQ ID NO: 170117 - DNA, 25 bp, Saccharomyces pastorianus
agatctgaccatgcctgaatctcaa

SEQ ID NO: 170118 - DNA, 25 bp, Saccharomyces pastorianus
ttgaaaccaattgtacccggacatg

SEQ ID NO: 170119 - DNA, 25 bp, Saccharomyces pastorianus
ttgtacccggacatgtactgatcgt

SEQ ID NO: 170120 - DNA, 25 bp, Saccharomyces pastorianus
tataatctctgcttctttacagaag

SEQ ID NO: 170121 - DNA, 25 bp, Saccharomyces pastorianus
tctgaccatgcctgaatctcaagat

SEQ ID NO: 170122 - DNA, 25 bp, Saccharomyces pastorianus
cagaagtcaaaatatacgtatgcat

SEQ ID NO: 170123 - DNA, 25 bp, Saccharomyces pastorianus
aaataactctacatcggccactgta

SEQ ID NO: 170124 - DNA, 25 bp, Saccharomyces pastorianus
gggatgaactctcacaaggtcctaa

SEQ ID NO: 170125 - DNA, 25 bp, Saccharomyces pastorianus
ggatggtaatgggactttgactgat

SEQ ID NO: 170126 - DNA, 25 bp, Saccharomyces pastorianus
taatgtcttgaagccagacagtcaa

SEQ ID NO: 170127 - DNA, 25 bp, Saccharomyces pastorianus
gcatacacacattattccacgttat

SEQ ID NO: 170128 - DNA, 25 bp, Saccharomyces pastorianus
cacttgcatacacacattattccac

SEQ ID NO: 170129 - DNA, 25 bp, Saccharomyces pastorianus
ggacagtcggtaccccacttgcata

SEQ ID NO: 170130 - DNA, 25 bp, Saccharomyces pastorianus
gaaggttcgagctttaaccgaaatg

SEQ ID NO: 170131 - DNA, 25 bp, Saccharomyces pastorianus
aaggtcctaatgtcttgaagccaga

SEQ ID NO: 170132 - DNA, 25 bp, Saccharomyces pastorianus
gacagtcaaaggaaggttcgagctt

SEQ ID NO: 170133 - DNA, 25 bp, Saccharomyces pastorianus
gggactttgactgattggcaaggaa

SEQ ID NO: 170134 - DNA, 25 bp, Saccharomyces pastorianus
gaacttgccgacttagcagaattga

SEQ ID NO: 170135 - DNA, 25 bp, Saccharomyces pastorianus
aaagacaccgaacttgccgacttag

SEQ ID NO: 170136 - DNA, 25 bp, Saccharomyces pastorianus
acttgccgacttagcagaattgagc

SEQ ID NO: 170137 - DNA, 25 bp, Saccharomyces pastorianus
gtcttctacattactagattgtgat

SEQ ID NO: 170138 - DNA, 25 bp, Saccharomyces pastorianus
accgaacttgccgacttagcagaat

SEQ ID NO: 170139 - DNA, 25 bp, Saccharomyces pastorianus
aagacaccgaacttgccgacttagc

SEQ ID NO: 170140 - DNA, 25 bp, Saccharomyces pastorianus
ccgacttagcagaattgagcattga

SEQ ID NO: 170141 - DNA, 25 bp, Saccharomyces pastorianus
ggcacgtcttctacattactagatt

SEQ ID NO: 170142 - DNA, 25 bp, Saccharomyces pastorianus
acaaaagacaccgaacttgccgact

SEQ ID NO: 170143 - DNA, 25 bp, Saccharomyces pastorianus
gacaccgaacttgccgacttagcag

SEQ ID NO: 170144 - DNA, 25 bp, Saccharomyces pastorianus
acgtcttctacattactagattgtg

SEQ ID NO: 170145 - DNA, 25 bp, Saccharomyces pastorianus
aatacatcgatttggtgggtgcaac

SEQ ID NO: 170146 - DNA, 25 bp, Saccharomyces pastorianus
aagttggtaactcgcgcaatacatc

SEQ ID NO: 170147 - DNA, 25 bp, Saccharomyces pastorianus
ggtaactcgcgcaatacatcgattt

SEQ ID NO: 170148 - DNA, 25 bp, Saccharomyces pastorianus
gaagttggtaactcgcgcaatacat

SEQ ID NO: 170149 - DNA, 25 bp, Saccharomyces pastorianus
gtaactcgcgcaatacatcgatttg

SEQ ID NO: 170150 - DNA, 25 bp, Saccharomyces pastorianus
cgcgcaatacatcgatttggtgggt

SEQ ID NO: 170151 - DNA, 25 bp, Saccharomyces pastorianus
tggtaactcgcgcaatacatcgatt

SEQ ID NO: 170152 - DNA, 25 bp, Saccharomyces pastorianus
caatacatcgatttggtgggtgcaa

SEQ ID NO: 170153 - DNA, 25 bp, Saccharomyces pastorianus
aactcgcgcaatacatcgatttggt

SEQ ID NO: 170154 - DNA, 25 bp, Saccharomyces pastorianus
ctcgcgcaatacatcgatttggtgg

SEQ ID NO: 170155 - DNA, 25 bp, Saccharomyces pastorianus
tggaagttggtaactcgcgcaatac

SEQ ID NO: 170156 - DNA, 25 bp, Saccharomyces pastorianus
gttctaaatctcatccattcggtca

SEQ ID NO: 170157 - DNA, 25 bp, Saccharomyces pastorianus
caagaaggtcgctaagagaactaaa

SEQ ID NO: 170158 - DNA, 25 bp, Saccharomyces pastorianus
gaaggtcgctaagagaactaaaatc

SEQ ID NO: 170159 - DNA, 25 bp, Saccharomyces pastorianus
taaatctcatccattcggtcacgct

SEQ ID NO: 170160 - DNA, 25 bp, Saccharomyces pastorianus
tttcaagagcgttgtatctacagag

SEQ ID NO: 170161 - DNA, 25 bp, Saccharomyces pastorianus
agggttctaaatctcatccattcgg

SEQ ID NO: 170162 - DNA, 25 bp, Saccharomyces pastorianus
tctaaatctcatccattcggtcacg

SEQ ID NO: 170163 - DNA, 25 bp, Saccharomyces pastorianus
ccaagaaggttgtaaagaaggcatt

SEQ ID NO: 170164 - DNA, 25 bp, Saccharomyces pastorianus
acacgatgagggttctaaatctcat

SEQ ID NO: 170165 - DNA, 25 bp, Saccharomyces pastorianus
gagcgttgtatctacagagactttt

SEQ ID NO: 170166 - DNA, 25 bp, Saccharomyces pastorianus
atctacagagacttttgaacaacca

SEQ ID NO: 170167 - DNA, 25 bp, Saccharomyces pastorianus
atacgtttccactattattactttg

SEQ ID NO: 170168 - DNA, 25 bp, Saccharomyces pastorianus
ctcaaggatggcgtcatcttcttca

SEQ ID NO: 170169 - DNA, 25 bp, Saccharomyces pastorianus
gtacgaaaacactcagtccacttct

SEQ ID NO: 170170 - DNA, 25 bp, Saccharomyces pastorianus
catcctcttctccttcatcgatttt

SEQ ID NO: 170171 - DNA, 25 bp, Saccharomyces pastorianus
cttctcctcttcatcatcggattat

SEQ ID NO: 170172 - DNA, 25 bp, Saccharomyces pastorianus
agtccacttctagctcaaggatggc

SEQ ID NO: 170173 - DNA, 25 bp, Saccharomyces pastorianus
atcggattattcctcgtttccatct

SEQ ID NO: 170174 - DNA, 25 bp, Saccharomyces pastorianus
tcgatttttgtgtcatcgtccttct

SEQ ID NO: 170175 - DNA, 25 bp, Saccharomyces pastorianus
atctttcacagggatcatcctcttc

SEQ ID NO: 170176 - DNA, 25 bp, Saccharomyces pastorianus
tggagtcatcaagctcagagtacga

SEQ ID NO: 170177 - DNA, 25 bp, Saccharomyces pastorianus
tcggcatcatacgtttccactatta

SEQ ID NO: 170178 - DNA, 25 bp, Saccharomyces pastorianus
ttacttgaactctccctctgatatt

SEQ ID NO: 170179 - DNA, 25 bp, Saccharomyces pastorianus
agccctctgccgcattgcaggactt

SEQ ID NO: 170180 - DNA, 25 bp, Saccharomyces pastorianus
tgccgcattgcaggacttaattaaa

SEQ ID NO: 170181 - DNA, 25 bp, Saccharomyces pastorianus
agaaatactcatcacgcgggcttac

SEQ ID NO: 170182 - DNA, 25 bp, Saccharomyces pastorianus
taataataacccttacttgaactct

SEQ ID NO: 170183 - DNA, 25 bp, Saccharomyces pastorianus
gcattgcaggacttaattaaacata

SEQ ID NO: 170184 - DNA, 25 bp, Saccharomyces pastorianus
tccctctgatattctgggcacaggt

SEQ ID NO: 170185 - DNA, 25 bp, Saccharomyces pastorianus
ctctgatattctgggcacaggtact

SEQ ID NO: 170186 - DNA, 25 bp, Saccharomyces pastorianus
taccgcaaaggtctaatagcatggc

SEQ ID NO: 170187 - DNA, 25 bp, Saccharomyces pastorianus
gaaagaaatactcatcacgcgggct

SEQ ID NO: 170188 - DNA, 25 bp, Saccharomyces pastorianus
gcgggcttaccgcaaaggtctaata

SEQ ID NO: 170189 - DNA, 25 bp, Saccharomyces pastorianus
ctcataaataggtaagtgttggaat

SEQ ID NO: 170190 - DNA, 25 bp, Saccharomyces pastorianus
taggtaagtgttggaattaaaatca

SEQ ID NO: 170191 - DNA, 25 bp, Saccharomyces pastorianus
tttccttcttagtaatgacactcat

SEQ ID NO: 170192 - DNA, 25 bp, Saccharomyces pastorianus
taatgacactcataaataggtaagt

SEQ ID NO: 170193 - DNA, 25 bp, Saccharomyces pastorianus
catacacggtgttaaacgatgacat

SEQ ID NO: 170194 - DNA, 25 bp, Saccharomyces pastorianus
ttccttcttagtaatgacactcata

SEQ ID NO: 170195 - DNA, 25 bp, Saccharomyces pastorianus
tccttcttagtaatgacactcataa

SEQ ID NO: 170196 - DNA, 25 bp, Saccharomyces pastorianus
aatttccttcttagtaatgacactc

SEQ ID NO: 170197 - DNA, 25 bp, Saccharomyces pastorianus
aaatttccttcttagtaatgacact

SEQ ID NO: 170198 - DNA, 25 bp, Saccharomyces pastorianus
ttatcatacacggtgttaaacgatg

SEQ ID NO: 170199 - DNA, 25 bp, Saccharomyces pastorianus
atttccttcttagtaatgacactca

SEQ ID NO: 170200 - DNA, 25 bp, Saccharomyces pastorianus
gattcgtggtgtcagattacatggc

SEQ ID NO: 170201 - DNA, 25 bp, Saccharomyces pastorianus
ctggtgacttagaaagagcccaatt

SEQ ID NO: 170202 - DNA, 25 bp, Saccharomyces pastorianus
ggaagaatttccatatgttgattgt

SEQ ID NO: 170203 - DNA, 25 bp, Saccharomyces pastorianus
tttcgcgccattcaaaggtgctgct

SEQ ID NO: 170204 - DNA, 25 bp, Saccharomyces pastorianus
gcagttttcaaggttaagttgcaac

SEQ ID NO: 170205 - DNA, 25 bp, Saccharomyces pastorianus
aaaggtctacaatctggtgacttag

SEQ ID NO: 170206 - DNA, 25 bp, Saccharomyces pastorianus
gctgaagcccttgaaaatgctaacg

SEQ ID NO: 170207 - DNA, 25 bp, Saccharomyces pastorianus
gaacttgctcaggatttgattcgtg

SEQ ID NO: 170208 - DNA, 25 bp, Saccharomyces pastorianus
ctactggttacgcagttttcaaggt

SEQ ID NO: 170209 - DNA, 25 bp, Saccharomyces pastorianus
atcaatgattttggtgcttttacaa

SEQ ID NO: 170210 - DNA, 25 bp, Saccharomyces pastorianus
atgctaacgacatatcagaaggttt

SEQ ID NO: 170211 - DNA, 25 bp, Saccharomyces pastorianus
gaaatcgatatctctacatagtaat

SEQ ID NO: 170212 - DNA, 25 bp, Saccharomyces pastorianus
atagtagaagttctccccaagaata

SEQ ID NO: 170213 - DNA, 25 bp, Saccharomyces pastorianus
aatatagtagaagttctccccaaga

SEQ ID NO: 170214 - DNA, 25 bp, Saccharomyces pastorianus
gaggctattatatcatgtatacaga

SEQ ID NO: 170215 - DNA, 25 bp, Saccharomyces pastorianus
tagtagaagttctccccaagaatat

SEQ ID NO: 170216 - DNA, 25 bp, Saccharomyces pastorianus
agtagaagttctccccaagaatata

SEQ ID NO: 170217 - DNA, 25 bp, Saccharomyces pastorianus
gtagaggctattatatcatgtatac

SEQ ID NO: 170218 - DNA, 25 bp, Saccharomyces pastorianus
gatatctctacatagtaatacaacg

SEQ ID NO: 170219 - DNA, 25 bp, Saccharomyces pastorianus
atgaaatcgatatctctacatagta

SEQ ID NO: 170220 - DNA, 25 bp, Saccharomyces pastorianus
tggtagaggctattatatcatgtat

SEQ ID NO: 170221 - DNA, 25 bp, Saccharomyces pastorianus
tatagtagaagttctccccaagaat

SEQ ID NO: 170222 - DNA, 25 bp, Saccharomyces pastorianus
agttgatgccggtgacttgaataag

SEQ ID NO: 170223 - DNA, 25 bp, Saccharomyces pastorianus
gatgatatcgagttagtcgttcaac

SEQ ID NO: 170224 - DNA, 25 bp, Saccharomyces pastorianus
aaggatgatatcgagttagtcgttc

SEQ ID NO: 170225 - DNA, 25 bp, Saccharomyces pastorianus
aaagccctgaaagctcacaatggtg

SEQ ID NO: 170226 - DNA, 25 bp, Saccharomyces pastorianus
gatatcgagttagtcgttcaacaaa

SEQ ID NO: 170227 - DNA, 25 bp, Saccharomyces pastorianus
aaggtgaagttgatgccggtgactt

SEQ ID NO: 170228 - DNA, 25 bp, Saccharomyces pastorianus
gccggtgacttgaataaggatgata

SEQ ID NO: 170229 - DNA, 25 bp, Saccharomyces pastorianus
tgatgccggtgacttgaataaggat

SEQ ID NO: 170230 - DNA, 25 bp, Saccharomyces pastorianus
atcaaagccctgaaagctcacaatg

SEQ ID NO: 170231 - DNA, 25 bp, Saccharomyces pastorianus
agccctgaaagctcacaatggtgac

SEQ ID NO: 170232 - DNA, 25 bp, Saccharomyces pastorianus
atcgagttagtcgttcaacaaacta

SEQ ID NO: 170233 - DNA, 25 bp, Saccharomyces pastorianus
atgtgttgtcagtcattaacctatc

SEQ ID NO: 170234 - DNA, 25 bp, Saccharomyces pastorianus
gtgctcttcttacaccattgagaaa

SEQ ID NO: 170235 - DNA, 25 bp, Saccharomyces pastorianus
cactgcattcagattccattagatt

SEQ ID NO: 170236 - DNA, 25 bp, Saccharomyces pastorianus
tttatgtgctcttcttacaccattg

SEQ ID NO: 170237 - DNA, 25 bp, Saccharomyces pastorianus
gtcagtcattaacctatcatattat

SEQ ID NO: 170238 - DNA, 25 bp, Saccharomyces pastorianus
ataggaatctgcacaagggaattga

SEQ ID NO: 170239 - DNA, 25 bp, Saccharomyces pastorianus
tagatttgatggcagtttctcaatc

SEQ ID NO: 170240 - DNA, 25 bp, Saccharomyces pastorianus
atctgcacaagggaattgacatttc

SEQ ID NO: 170241 - DNA, 25 bp, Saccharomyces pastorianus
ttttcttttcattttatgtgttgtc

SEQ ID NO: 170242 - DNA, 25 bp, Saccharomyces pastorianus
tgacatttcaaacatttcaagtaat

SEQ ID NO: 170243 - DNA, 25 bp, Saccharomyces pastorianus
tcatattatcaatcactgcattcag

SEQ ID NO: 170244 - DNA, 25 bp, Saccharomyces pastorianus
aggagcgacatagaatcggacgctg

SEQ ID NO: 170245 - DNA, 25 bp, Saccharomyces pastorianus
aaggagcgacatagaatcggacgct

SEQ ID NO: 170246 - DNA, 25 bp, Saccharomyces pastorianus
tacaaggagcgacatagaatcggac

SEQ ID NO: 170247 - DNA, 25 bp, Saccharomyces pastorianus
agatatgatttacaaggagcgacat

SEQ ID NO: 170248 - DNA, 25 bp, Saccharomyces pastorianus
acaaggagcgacatagaatcggacg

SEQ ID NO: 170249 - DNA, 25 bp, Saccharomyces pastorianus
gatttacaaggagcgacatagaatc

SEQ ID NO: 170250 - DNA, 25 bp, Saccharomyces pastorianus
atgatttacaaggagcgacatagaa

SEQ ID NO: 170251 - DNA, 25 bp, Saccharomyces pastorianus
tttacaaggagcgacatagaatcgg

SEQ ID NO: 170252 - DNA, 25 bp, Saccharomyces pastorianus
caaggagcgacatagaatcggacgc

SEQ ID NO: 170253 - DNA, 25 bp, Saccharomyces pastorianus
gatatgatttacaaggagcgacata

SEQ ID NO: 170254 - DNA, 25 bp, Saccharomyces pastorianus
tgatttacaaggagcgacatagaat

SEQ ID NO: 170255 - DNA, 25 bp, Saccharomyces pastorianus
tattaactacgacttaccagctaac

SEQ ID NO: 170256 - DNA, 25 bp, Saccharomyces pastorianus
taactacgacttaccagctaacaaa

SEQ ID NO: 170257 - DNA, 25 bp, Saccharomyces pastorianus
ttaactacgacttaccagctaacaa

SEQ ID NO: 170258 - DNA, 25 bp, Saccharomyces pastorianus
gttattaactacgacttaccagcta

SEQ ID NO: 170259 - DNA, 25 bp, Saccharomyces pastorianus
ggttattaactacgacttaccagct

SEQ ID NO: 170260 - DNA, 25 bp, Saccharomyces pastorianus
gacttaccagctaacaaagaaaact

SEQ ID NO: 170261 - DNA, 25 bp, Saccharomyces pastorianus
acgttggcgctatgagagaactaga

SEQ ID NO: 170262 - DNA, 25 bp, Saccharomyces pastorianus
tacgacttaccagctaacaaagaaa

SEQ ID NO: 170263 - DNA, 25 bp, Saccharomyces pastorianus
attaactacgacttaccagctaaca

SEQ ID NO: 170264 - DNA, 25 bp, Saccharomyces pastorianus
actacgacttaccagctaacaaaga

SEQ ID NO: 170265 - DNA, 25 bp, Saccharomyces pastorianus
ttggcgctatgagagaactagaaaa

SEQ ID NO: 170266 - DNA, 25 bp, Saccharomyces pastorianus
tcgagattccctccgattaattatg

SEQ ID NO: 170267 - DNA, 25 bp, Saccharomyces pastorianus
ttcaacgaggctatgcatgcccagt

SEQ ID NO: 170268 - DNA, 25 bp, Saccharomyces pastorianus
atgcatgcccagtgtcattcttgaa

SEQ ID NO: 170269 - DNA, 25 bp, Saccharomyces pastorianus
aggcacacacagacgcgcttcaatt

SEQ ID NO: 170270 - DNA, 25 bp, Saccharomyces pastorianus
caattttattgaaagtccgcccgct

SEQ ID NO: 170271 - DNA, 25 bp, Saccharomyces pastorianus
gtcattcttgaagcaggcacacaca

SEQ ID NO: 170272 - DNA, 25 bp, Saccharomyces pastorianus
gcaagtggacttttcaacgaggcta

SEQ ID NO: 170273 - DNA, 25 bp, Saccharomyces pastorianus
gacgcgcttcaattagttttcttta

SEQ ID NO: 170274 - DNA, 25 bp, Saccharomyces pastorianus
tcctctttcgtcgtattgcaagtgg

SEQ ID NO: 170275 - DNA, 25 bp, Saccharomyces pastorianus
tccgcccgctctgttaaaaaaggcg

SEQ ID NO: 170276 - DNA, 25 bp, Saccharomyces pastorianus
tctttactagatgcatcatttgggc

SEQ ID NO: 170277 - DNA, 25 bp, Saccharomyces pastorianus
acgagattgctcatttttcgttccg

SEQ ID NO: 170278 - DNA, 25 bp, Saccharomyces pastorianus
gtttccgcaggttttgcaaatcatt

SEQ ID NO: 170279 - DNA, 25 bp, Saccharomyces pastorianus
accggaacgagattgctcatttttc

SEQ ID NO: 170280 - DNA, 25 bp, Saccharomyces pastorianus
gaaccggaacgagattgctcatttt

SEQ ID NO: 170281 - DNA, 25 bp, Saccharomyces pastorianus
ttccgcaggttttgcaaatcattaa

SEQ ID NO: 170282 - DNA, 25 bp, Saccharomyces pastorianus
cggaacgagattgctcatttttcgt

SEQ ID NO: 170283 - DNA, 25 bp, Saccharomyces pastorianus
ccgtttccgcaggttttgcaaatca

SEQ ID NO: 170284 - DNA, 25 bp, Saccharomyces pastorianus
cggaaccggaacgagattgctcatt

SEQ ID NO: 170285 - DNA, 25 bp, Saccharomyces pastorianus
gagattgctcatttttcgttccgtt

SEQ ID NO: 170286 - DNA, 25 bp, Saccharomyces pastorianus
ttccgtttccgcaggttttgcaaat

SEQ ID NO: 170287 - DNA, 25 bp, Saccharomyces pastorianus
ccgcaggttttgcaaatcattaagc

SEQ ID NO: 170288 - DNA, 25 bp, Saccharomyces pastorianus
tattctggcttcaatgtcccacgaa

SEQ ID NO: 170289 - DNA, 25 bp, Saccharomyces pastorianus
gtgctagcttataaatactattctg

SEQ ID NO: 170290 - DNA, 25 bp, Saccharomyces pastorianus
tgtacagggacattgctgaacagct

SEQ ID NO: 170291 - DNA, 25 bp, Saccharomyces pastorianus
tactattctggcttcaatgtcccac

SEQ ID NO: 170292 - DNA, 25 bp, Saccharomyces pastorianus
gtcccacgaaattttcataaatctt

SEQ ID NO: 170293 - DNA, 25 bp, Saccharomyces pastorianus
ggctgcccaactagggaatttaaag

SEQ ID NO: 170294 - DNA, 25 bp, Saccharomyces pastorianus
ctggcttcaatgtcccacgaaattt

SEQ ID NO: 170295 - DNA, 25 bp, Saccharomyces pastorianus
ttaaaggctaagcaagtgctagctt

SEQ ID NO: 170296 - DNA, 25 bp, Saccharomyces pastorianus
gtattgtacagggacattgctgaac

SEQ ID NO: 170297 - DNA, 25 bp, Saccharomyces pastorianus
gcttcaatgtcccacgaaattttca

SEQ ID NO: 170298 - DNA, 25 bp, Saccharomyces pastorianus
tctgctaaagcactgctatattacc

SEQ ID NO: 170299 - DNA, 25 bp, Saccharomyces pastorianus
gtagctactattttcaatatttcaa

SEQ ID NO: 170300 - DNA, 25 bp, Saccharomyces pastorianus
taacaattcatattcaactcatgga

SEQ ID NO: 170301 - DNA, 25 bp, Saccharomyces pastorianus
aattacatcaattcttcggccaagg

SEQ ID NO: 170302 - DNA, 25 bp, Saccharomyces pastorianus
ggcaatgtagctactattttcaata

SEQ ID NO: 170303 - DNA, 25 bp, Saccharomyces pastorianus
caactcatggaagttttgatggcaa

SEQ ID NO: 170304 - DNA, 25 bp, Saccharomyces pastorianus
aaagcattaccttcttttgtccaag

SEQ ID NO: 170305 - DNA, 25 bp, Saccharomyces pastorianus
gggtcacttctaacttataaaagca

SEQ ID NO: 170306 - DNA, 25 bp, Saccharomyces pastorianus
gttttgatggcaatgtagctactat

SEQ ID NO: 170307 - DNA, 25 bp, Saccharomyces pastorianus
attacatcaattcttcggccaaggg

SEQ ID NO: 170308 - DNA, 25 bp, Saccharomyces pastorianus
gcattaccttcttttgtccaagata

SEQ ID NO: 170309 - DNA, 25 bp, Saccharomyces pastorianus
accttcttttgtccaagatatttca

SEQ ID NO: 170310 - DNA, 25 bp, Saccharomyces pastorianus
ttatatatatatgtccggaaaattg

SEQ ID NO: 170311 - DNA, 25 bp, Saccharomyces pastorianus
gaaaaacatatcaccatatcagtaa

SEQ ID NO: 170312 - DNA, 25 bp, Saccharomyces pastorianus
gtgttaaatggtgacgcaagttatg

SEQ ID NO: 170313 - DNA, 25 bp, Saccharomyces pastorianus
gattagcttgatttgtatagaaaaa

SEQ ID NO: 170314 - DNA, 25 bp, Saccharomyces pastorianus
atggtgacgcaagttatgagaagct

SEQ ID NO: 170315 - DNA, 25 bp, Saccharomyces pastorianus
ctacatcggatttgattagcttgat

SEQ ID NO: 170316 - DNA, 25 bp, Saccharomyces pastorianus
aacatatcaccatatcagtaaatat

SEQ ID NO: 170317 - DNA, 25 bp, Saccharomyces pastorianus
tgtaggaataaaaatctgttggagt

SEQ ID NO: 170318 - DNA, 25 bp, Saccharomyces pastorianus
cggatttgattagcttgatttgtat

SEQ ID NO: 170319 - DNA, 25 bp, Saccharomyces pastorianus
tacactacatcggatttgattagct

SEQ ID NO: 170320 - DNA, 25 bp, Saccharomyces pastorianus
cgttacactacatcggatttgatta

SEQ ID NO: 170321 - DNA, 25 bp, Saccharomyces pastorianus
gtttatctaggctaccgtcttcaag

SEQ ID NO: 170322 - DNA, 25 bp, Saccharomyces pastorianus
caaggaatctggtgccaagttggtc

SEQ ID NO: 170323 - DNA, 25 bp, Saccharomyces pastorianus
atccagaaattagtcagttgtgcgc

SEQ ID NO: 170324 - DNA, 25 bp, Saccharomyces pastorianus
gggctctactaaggataccttgaaa

SEQ ID NO: 170325 - DNA, 25 bp, Saccharomyces pastorianus
gagcgcgatgggacgacattatatt

SEQ ID NO: 170326 - DNA, 25 bp, Saccharomyces pastorianus
gaagccattcttggtggttatccaa

SEQ ID NO: 170327 - DNA, 25 bp, Saccharomyces pastorianus
gaaatacattgttgcggcccttcaa

SEQ ID NO: 170328 - DNA, 25 bp, Saccharomyces pastorianus
agttgtgcgcactatcgaaggccac

SEQ ID NO: 170329 - DNA, 25 bp, Saccharomyces pastorianus
agttggtcgttatcccagaagccat

SEQ ID NO: 170330 - DNA, 25 bp, Saccharomyces pastorianus
gagtatgctaagtatcttgccgaag

SEQ ID NO: 170331 - DNA, 25 bp, Saccharomyces pastorianus
aggccaccgacgcatccttatgtgt

SEQ ID NO: 170332 - DNA, 25 bp, Saccharomyces pastorianus
gtggagcatccttacatttatgtta

SEQ ID NO: 170333 - DNA, 25 bp, Saccharomyces pastorianus
gatcaagacgttctggcaacatgct

SEQ ID NO: 170334 - DNA, 25 bp, Saccharomyces pastorianus
tcgttattataatcgcatgcggtgg

SEQ ID NO: 170335 - DNA, 25 bp, Saccharomyces pastorianus
aagtgttgcaacttctttgggctcc

SEQ ID NO: 170336 - DNA, 25 bp, Saccharomyces pastorianus
ggaaccagcctgtggagcatcctta

SEQ ID NO: 170337 - DNA, 25 bp, Saccharomyces pastorianus
gaaactgccggttgtgacgtattgc

SEQ ID NO: 170338 - DNA, 25 bp, Saccharomyces pastorianus
atgcttgagatatgccgatgactac

SEQ ID NO: 170339 - DNA, 25 bp, Saccharomyces pastorianus
gcatcattcgcgtttgagagtttta

SEQ ID NO: 170340 - DNA, 25 bp, Saccharomyces pastorianus
tgggctccccatacatagcatcatt

SEQ ID NO: 170341 - DNA, 25 bp, Saccharomyces pastorianus
ggtagtccagttactcttgaaaaat

SEQ ID NO: 170342 - DNA, 25 bp, Saccharomyces pastorianus
gtgacgtattgcataagtctctcaa

SEQ ID NO: 170343 - DNA, 25 bp, Saccharomyces pastorianus
gaagcatcttattattcgttgtgat

SEQ ID NO: 170344 - DNA, 25 bp, Saccharomyces pastorianus
gatcccttccgtgggcatgatagag

SEQ ID NO: 170345 - DNA, 25 bp, Saccharomyces pastorianus
gtcgagataagttttgatgctggag

SEQ ID NO: 170346 - DNA, 25 bp, Saccharomyces pastorianus
gattcaaacactttgatcagagcag

SEQ ID NO: 170347 - DNA, 25 bp, Saccharomyces pastorianus
ttgctttcgtgaaaacggcaccaaa

SEQ ID NO: 170348 - DNA, 25 bp, Saccharomyces pastorianus
gcctttgactatacccatttctgag

SEQ ID NO: 170349 - DNA, 25 bp, Saccharomyces pastorianus
gaagagcctatcgagtcatttgttg

SEQ ID NO: 170350 - DNA, 25 bp, Saccharomyces pastorianus
ggcaccaaaattttacgtcacggat

SEQ ID NO: 170351 - DNA, 25 bp, Saccharomyces pastorianus
gtaaatcgtggaggcctttgactat

SEQ ID NO: 170352 - DNA, 25 bp, Saccharomyces pastorianus
gatagagcttttgctttcgtgaaaa

SEQ ID NO: 170353 - DNA, 25 bp, Saccharomyces pastorianus
gagtcatttgttgttgatcccttcc

SEQ ID NO: 170354 - DNA, 25 bp, Saccharomyces pastorianus
ggtagccatttgttctcaaaggaat

SEQ ID NO: 170355 - DNA, 25 bp, Saccharomyces pastorianus
tttggtagccatttgttctcaaagg

SEQ ID NO: 170356 - DNA, 25 bp, Saccharomyces pastorianus
agccatttgttctcaaaggaatctg

SEQ ID NO: 170357 - DNA, 25 bp, Saccharomyces pastorianus
atttgttctcaaaggaatctgtgtt

SEQ ID NO: 170358 - DNA, 25 bp, Saccharomyces pastorianus
ggaatctgtgttggctgggttatta

SEQ ID NO: 170359 - DNA, 25 bp, Saccharomyces pastorianus
aatctgtgttggctgggttattaaa

SEQ ID NO: 170360 - DNA, 25 bp, Saccharomyces pastorianus
gttctcaaaggaatctgtgttggct

SEQ ID NO: 170361 - DNA, 25 bp, Saccharomyces pastorianus
tctgtgttggctgggttattaaacg

SEQ ID NO: 170362 - DNA, 25 bp, Saccharomyces pastorianus
tttgaatgaaactttggtagccatt

SEQ ID NO: 170363 - DNA, 25 bp, Saccharomyces pastorianus
gaaactttggtagccatttgttctc

SEQ ID NO: 170364 - DNA, 25 bp, Saccharomyces pastorianus
aaggaatctgtgttggctgggttat

SEQ ID NO: 170365 - DNA, 25 bp, Saccharomyces pastorianus
gagtctccaccgaagttgatgctag

SEQ ID NO: 170366 - DNA, 25 bp, Saccharomyces pastorianus
taacccatcattgatcttggctgct

SEQ ID NO: 170367 - DNA, 25 bp, Saccharomyces pastorianus
aagattgttccaggcagagtctcca

SEQ ID NO: 170368 - DNA, 25 bp, Saccharomyces pastorianus
gttgatcgatgttgccgtggaatac

SEQ ID NO: 170369 - DNA, 25 bp, Saccharomyces pastorianus
tggctgctgccaagcaaccaactta

SEQ ID NO: 170370 - DNA, 25 bp, Saccharomyces pastorianus
ttccccatttgttggtagaattcta

SEQ ID NO: 170371 - DNA, 25 bp, Saccharomyces pastorianus
gacagattgttagtcgaattcggta

SEQ ID NO: 170372 - DNA, 25 bp, Saccharomyces pastorianus
gccgaggcccaagttactttgattt

SEQ ID NO: 170373 - DNA, 25 bp, Saccharomyces pastorianus
gaagccgacccaggtgttatttccg

SEQ ID NO: 170374 - DNA, 25 bp, Saccharomyces pastorianus
aagactccacaactaacccatcatt

SEQ ID NO: 170375 - DNA, 25 bp, Saccharomyces pastorianus
ctattattctccttcgttcaagcag

SEQ ID NO: 170376 - DNA, 25 bp, Saccharomyces pastorianus
gactctattactaggtctccaatct

SEQ ID NO: 170377 - DNA, 25 bp, Saccharomyces pastorianus
tcccacattaatcaatgccgcattg

SEQ ID NO: 170378 - DNA, 25 bp, Saccharomyces pastorianus
tttgggtggccttgcaacggttaga

SEQ ID NO: 170379 - DNA, 25 bp, Saccharomyces pastorianus
ctgagaacataaagggagttgcgtc

SEQ ID NO: 170380 - DNA, 25 bp, Saccharomyces pastorianus
aagagactttgggtggccttgcaac

SEQ ID NO: 170381 - DNA, 25 bp, Saccharomyces pastorianus
gttgcgtcgtttagactctattact

SEQ ID NO: 170382 - DNA, 25 bp, Saccharomyces pastorianus
tctactctcatttccaagagacttt

SEQ ID NO: 170383 - DNA, 25 bp, Saccharomyces pastorianus
gaggttattctcaacagaaaaggtt

SEQ ID NO: 170384 - DNA, 25 bp, Saccharomyces pastorianus
gcaacggttagaggttattctcaac

SEQ ID NO: 170385 - DNA, 25 bp, Saccharomyces pastorianus
tactaggtctccaatctactctcat

SEQ ID NO: 170386 - DNA, 25 bp, Saccharomyces pastorianus
aaaggttttcccacattaatcaatg

SEQ ID NO: 170387 - DNA, 25 bp, Saccharomyces pastorianus
atcgattcgcttctgtgggttccca

SEQ ID NO: 170388 - DNA, 25 bp, Saccharomyces pastorianus
gtagaaacatcgattcgcttctgtg

SEQ ID NO: 170389 - DNA, 25 bp, Saccharomyces pastorianus
tcgattcgcttctgtgggttcccat

SEQ ID NO: 170390 - DNA, 25 bp, Saccharomyces pastorianus
attcgcttctgtgggttcccatatc

SEQ ID NO: 170391 - DNA, 25 bp, Saccharomyces pastorianus
acatcgattcgcttctgtgggttcc

SEQ ID NO: 170392 - DNA, 25 bp, Saccharomyces pastorianus
gaaacatcgattcgcttctgtgggt

SEQ ID NO: 170393 - DNA, 25 bp, Saccharomyces pastorianus
gattcgcttctgtgggttcccatat

SEQ ID NO: 170394 - DNA, 25 bp, Saccharomyces pastorianus
agaaacatcgattcgcttctgtggg

SEQ ID NO: 170395 - DNA, 25 bp, Saccharomyces pastorianus
gcttctgtgggttcccatatcctcg

SEQ ID NO: 170396 - DNA, 25 bp, Saccharomyces pastorianus
ttatgtagaaacatcgattcgcttc

SEQ ID NO: 170397 - DNA, 25 bp, Saccharomyces pastorianus
aacatcgattcgcttctgtgggttc

SEQ ID NO: 170398 - DNA, 25 bp, Saccharomyces pastorianus
gtgaagcgagtacgttctcttatcg

SEQ ID NO: 170399 - DNA, 25 bp, Saccharomyces pastorianus
cgaatctcgttacggtctttgggat

SEQ ID NO: 170400 - DNA, 25 bp, Saccharomyces pastorianus
tctcgttacggtctttgggatttga

SEQ ID NO: 170401 - DNA, 25 bp, Saccharomyces pastorianus
tcgttacggtctttgggatttgaag

SEQ ID NO: 170402 - DNA, 25 bp, Saccharomyces pastorianus
atcgaatctcgttacggtctttggg

SEQ ID NO: 170403 - DNA, 25 bp, Saccharomyces pastorianus
atctcgttacggtctttgggatttg

SEQ ID NO: 170404 - DNA, 25 bp, Saccharomyces pastorianus
acgtatcgaatctcgttacggtctt

SEQ ID NO: 170405 - DNA, 25 bp, Saccharomyces pastorianus
tctatacgtatcgaatctcgttacg

SEQ ID NO: 170406 - DNA, 25 bp, Saccharomyces pastorianus
gtatcgaatctcgttacggtctttg

SEQ ID NO: 170407 - DNA, 25 bp, Saccharomyces pastorianus
atacgtatcgaatctcgttacggtc

SEQ ID NO: 170408 - DNA, 25 bp, Saccharomyces pastorianus
gaagcgagtacgttctcttatcgtc

SEQ ID NO: 170409 - DNA, 25 bp, Saccharomyces pastorianus
gcccataggtttgctagccgggaaa

SEQ ID NO: 170410 - DNA, 25 bp, Saccharomyces pastorianus
aatgttctggtgcagagccttgcgt

SEQ ID NO: 170411 - DNA, 25 bp, Saccharomyces pastorianus
attatcagtggcaatccatgctaat

SEQ ID NO: 170412 - DNA, 25 bp, Saccharomyces pastorianus
gtctttggagctgggcccataggtt

SEQ ID NO: 170413 - DNA, 25 bp, Saccharomyces pastorianus
ctcccacatggcgttactgtagata

SEQ ID NO: 170414 - DNA, 25 bp, Saccharomyces pastorianus
tagccagtgtctttggtgctgcaga

SEQ ID NO: 170415 - DNA, 25 bp, Saccharomyces pastorianus
agccttgcgttcgagcaggcatcga

SEQ ID NO: 170416 - DNA, 25 bp, Saccharomyces pastorianus
gtcaactcaggtgatctcccacatg

SEQ ID NO: 170417 - DNA, 25 bp, Saccharomyces pastorianus
gggctaggcagtttggtgccaccca

SEQ ID NO: 170418 - DNA, 25 bp, Saccharomyces pastorianus
aaaggtgctgacgttgtgtttgaat

SEQ ID NO: 170419 - DNA, 25 bp, Saccharomyces pastorianus
agatcaagtttggagcccgttgcgt

SEQ ID NO: 170420 - DNA, 25 bp, Saccharomyces pastorianus
gacttccaagatgatgctaaccggg

SEQ ID NO: 170421 - DNA, 25 bp, Saccharomyces pastorianus
ccaagatgatgctaaccgggaacta

SEQ ID NO: 170422 - DNA, 25 bp, Saccharomyces pastorianus
cggaagacttccaagatgatgctaa

SEQ ID NO: 170423 - DNA, 25 bp, Saccharomyces pastorianus
gaactagtgagcaggaaattgaaac

SEQ ID NO: 170424 - DNA, 25 bp, Saccharomyces pastorianus
ttagtttttgtttaagttgcaatca

SEQ ID NO: 170425 - DNA, 25 bp, Saccharomyces pastorianus
ttgtttaagttgcaatcatggtatg

SEQ ID NO: 170426 - DNA, 25 bp, Saccharomyces pastorianus
atacggccggaagacttccaagatg

SEQ ID NO: 170427 - DNA, 25 bp, Saccharomyces pastorianus
aggaaattgaaactgaacgaatggt

SEQ ID NO: 170428 - DNA, 25 bp, Saccharomyces pastorianus
accgggaactagtgagcaggaaatt

SEQ ID NO: 170429 - DNA, 25 bp, Saccharomyces pastorianus
ctaaccgggaactagtgagcaggaa

SEQ ID NO: 170430 - DNA, 25 bp, Saccharomyces pastorianus
agatgatgctaaccgggaactagtg

SEQ ID NO: 170431 - DNA, 25 bp, Saccharomyces pastorianus
attcaccacgttctgcatattaggt

SEQ ID NO: 170432 - DNA, 25 bp, Saccharomyces pastorianus
gagccattatattcatgttttttgt

SEQ ID NO: 170433 - DNA, 25 bp, Saccharomyces pastorianus
aatccggtcatatcaaatcacaagt

SEQ ID NO: 170434 - DNA, 25 bp, Saccharomyces pastorianus
tgtacattcaccacgttctgcatat

SEQ ID NO: 170435 - DNA, 25 bp, Saccharomyces pastorianus
ttttgtacattcaccacgttctgca

SEQ ID NO: 170436 - DNA, 25 bp, Saccharomyces pastorianus
acattcaccacgttctgcatattag

SEQ ID NO: 170437 - DNA, 25 bp, Saccharomyces pastorianus
atcacaagttgagccattatattca

SEQ ID NO: 170438 - DNA, 25 bp, Saccharomyces pastorianus
ttttcaatccggtcatatcaaatca

SEQ ID NO: 170439 - DNA, 25 bp, Saccharomyces pastorianus
tccggtcatatcaaatcacaagttg

SEQ ID NO: 170440 - DNA, 25 bp, Saccharomyces pastorianus
agttgagccattatattcatgtttt

SEQ ID NO: 170441 - DNA, 25 bp, Saccharomyces pastorianus
gttttttgtacattcaccacgttct

SEQ ID NO: 170442 - DNA, 25 bp, Saccharomyces pastorianus
tacgtgttacgagggggctcattgt

SEQ ID NO: 170443 - DNA, 25 bp, Saccharomyces pastorianus
gggctcattgtaagccgataatgat

SEQ ID NO: 170444 - DNA, 25 bp, Saccharomyces pastorianus
tcattgtaagccgataatgattatg

SEQ ID NO: 170445 - DNA, 25 bp, Saccharomyces pastorianus
gctcattgtaagccgataatgatta

SEQ ID NO: 170446 - DNA, 25 bp, Saccharomyces pastorianus
ttacgtgttacgagggggctcattg

SEQ ID NO: 170447 - DNA, 25 bp, Saccharomyces pastorianus
tcactttacgtgttacgagggggct

SEQ ID NO: 170448 - DNA, 25 bp, Saccharomyces pastorianus
ctcattgtaagccgataatgattat

SEQ ID NO: 170449 - DNA, 25 bp, Saccharomyces pastorianus
ggctcattgtaagccgataatgatt

SEQ ID NO: 170450 - DNA, 25 bp, Saccharomyces pastorianus
cgtgttacgagggggctcattgtaa

SEQ ID NO: 170451 - DNA, 25 bp, Saccharomyces pastorianus
ctttacgtgttacgagggggctcat

SEQ ID NO: 170452 - DNA, 25 bp, Saccharomyces pastorianus
acgtgttacgagggggctcattgta

SEQ ID NO: 170453 - DNA, 25 bp, Saccharomyces pastorianus
tctccattccagaccaaactttata

SEQ ID NO: 170454 - DNA, 25 bp, Saccharomyces pastorianus
gaacaacaatcccaagacgaatatt

SEQ ID NO: 170455 - DNA, 25 bp, Saccharomyces pastorianus
gtcttaccaaggcagcggaaatcga

SEQ ID NO: 170456 - DNA, 25 bp, Saccharomyces pastorianus
taaagtgtcttaccaaggcagcgga

SEQ ID NO: 170457 - DNA, 25 bp, Saccharomyces pastorianus
aagtgtcttaccaaggcagcggaaa

SEQ ID NO: 170458 - DNA, 25 bp, Saccharomyces pastorianus
accaaggcagcggaaatcgaacaac

SEQ ID NO: 170459 - DNA, 25 bp, Saccharomyces pastorianus
attccagaccaaactttataaagtg

SEQ ID NO: 170460 - DNA, 25 bp, Saccharomyces pastorianus
tactctccattccagaccaaacttt

SEQ ID NO: 170461 - DNA, 25 bp, Saccharomyces pastorianus
gaaatcgaacaacaatcccaagacg

SEQ ID NO: 170462 - DNA, 25 bp, Saccharomyces pastorianus
gtgtcttaccaaggcagcggaaatc

SEQ ID NO: 170463 - DNA, 25 bp, Saccharomyces pastorianus
ttataaagtgtcttaccaaggcagc

SEQ ID NO: 170464 - DNA, 25 bp, Saccharomyces pastorianus
aaaacaccacggaacctcatctgtt

SEQ ID NO: 170465 - DNA, 25 bp, Saccharomyces pastorianus
acggaacctcatctgttctcgtact

SEQ ID NO: 170466 - DNA, 25 bp, Saccharomyces pastorianus
aaaaacaccacggaacctcatctgt

SEQ ID NO: 170467 - DNA, 25 bp, Saccharomyces pastorianus
aacaccacggaacctcatctgttct

SEQ ID NO: 170468 - DNA, 25 bp, Saccharomyces pastorianus
accacggaacctcatctgttctcgt

SEQ ID NO: 170469 - DNA, 25 bp, Saccharomyces pastorianus
gtgacaaagtagctcactgccttat

SEQ ID NO: 170470 - DNA, 25 bp, Saccharomyces pastorianus
tgacaaagtagctcactgccttatt

SEQ ID NO: 170471 - DNA, 25 bp, Saccharomyces pastorianus
gacaaagtagctcactgccttatta

SEQ ID NO: 170472 - DNA, 25 bp, Saccharomyces pastorianus
tgttctcgtactttgttgtgacaaa

SEQ ID NO: 170473 - DNA, 25 bp, Saccharomyces pastorianus
ttgtgacaaagtagctcactgcctt

SEQ ID NO: 170474 - DNA, 25 bp, Saccharomyces pastorianus
gttgtgacaaagtagctcactgcct

SEQ ID NO: 170475 - DNA, 25 bp, Saccharomyces pastorianus
gaaattccctgaccgtcatgttatt

SEQ ID NO: 170476 - DNA, 25 bp, Saccharomyces pastorianus
tttgactgctgttcacgacaaggtt

SEQ ID NO: 170477 - DNA, 25 bp, Saccharomyces pastorianus
attccctgaccgtcatgttattttc

SEQ ID NO: 170478 - DNA, 25 bp, Saccharomyces pastorianus
taccataaggtccaaaccaaattga

SEQ ID NO: 170479 - DNA, 25 bp, Saccharomyces pastorianus
gcataccataaggtccaaaccaaat

SEQ ID NO: 170480 - DNA, 25 bp, Saccharomyces pastorianus
aaagaaattccctgaccgtcatgtt

SEQ ID NO: 170481 - DNA, 25 bp, Saccharomyces pastorianus
ggtggtaagaaagcactagtccttt

SEQ ID NO: 170482 - DNA, 25 bp, Saccharomyces pastorianus
gtaagaaagcactagtcctttttgt

SEQ ID NO: 170483 - DNA, 25 bp, Saccharomyces pastorianus
ttgatgtcaccggtggtaagaaagc

SEQ ID NO: 170484 - DNA, 25 bp, Saccharomyces pastorianus
tgtcaccggtggtaagaaagcacta

SEQ ID NO: 170485 - DNA, 25 bp, Saccharomyces pastorianus
agaaattccctgaccgtcatgttat

SEQ ID NO: 170486 - DNA, 25 bp, Saccharomyces pastorianus
tgcgcacttgtcactcttattgaag

SEQ ID NO: 170487 - DNA, 25 bp, Saccharomyces pastorianus
gttccagcgtctccaatataggttc

SEQ ID NO: 170488 - DNA, 25 bp, Saccharomyces pastorianus
actactttgaatattgcgaacagcc

SEQ ID NO: 170489 - DNA, 25 bp, Saccharomyces pastorianus
gaatactgattccttgtgtatagca

SEQ ID NO: 170490 - DNA, 25 bp, Saccharomyces pastorianus
gacaagattaacttctccaagaaca

SEQ ID NO: 170491 - DNA, 25 bp, Saccharomyces pastorianus
cattgttccatggtccacagggtat

SEQ ID NO: 170492 - DNA, 25 bp, Saccharomyces pastorianus
ataccgtatgtggagtagacctata

SEQ ID NO: 170493 - DNA, 25 bp, Saccharomyces pastorianus
gttaaccaggcgttttgcgcacttg

SEQ ID NO: 170494 - DNA, 25 bp, Saccharomyces pastorianus
gcgaacagccttgtagtattttacg

SEQ ID NO: 170495 - DNA, 25 bp, Saccharomyces pastorianus
gaaaccggttcatttactctctatc

SEQ ID NO: 170496 - DNA, 25 bp, Saccharomyces pastorianus
ggtagactcggaagcgttccagcgt

SEQ ID NO: 170497 - DNA, 25 bp, Saccharomyces pastorianus
atcgattcttattccctattaaggc

SEQ ID NO: 170498 - DNA, 25 bp, Saccharomyces pastorianus
agttatcgattcttattccctatta

SEQ ID NO: 170499 - DNA, 25 bp, Saccharomyces pastorianus
ttcaaccactcttgtgcaattgaat

SEQ ID NO: 170500 - DNA, 25 bp, Saccharomyces pastorianus
ttcttattccctattaaggcattag

SEQ ID NO: 170501 - DNA, 25 bp, Saccharomyces pastorianus
gattcttattccctattaaggcatt

SEQ ID NO: 170502 - DNA, 25 bp, Saccharomyces pastorianus
accactcttgtgcaattgaataccc

SEQ ID NO: 170503 - DNA, 25 bp, Saccharomyces pastorianus
gttatcgattcttattccctattaa

SEQ ID NO: 170504 - DNA, 25 bp, Saccharomyces pastorianus
ccaagttatcgattcttattcccta

SEQ ID NO: 170505 - DNA, 25 bp, Saccharomyces pastorianus
attccctattaaggcattaggtatg

SEQ ID NO: 170506 - DNA, 25 bp, Saccharomyces pastorianus
gaatacccaagttatcgattcttat

SEQ ID NO: 170507 - DNA, 25 bp, Saccharomyces pastorianus
cactcttgtgcaattgaatacccaa

SEQ ID NO: 170508 - DNA, 25 bp, Saccharomyces pastorianus
cctcagaaaagatcgggcgtgtggt

SEQ ID NO: 170509 - DNA, 25 bp, Saccharomyces pastorianus
ataaattctgagttgtcatggtcct

SEQ ID NO: 170510 - DNA, 25 bp, Saccharomyces pastorianus
gtcctcagaaaagatcgggcgtgtg

SEQ ID NO: 170511 - DNA, 25 bp, Saccharomyces pastorianus
gtgtattataaattctgagttgtca

SEQ ID NO: 170512 - DNA, 25 bp, Saccharomyces pastorianus
gttgtcatggtcctcagaaaagatc

SEQ ID NO: 170513 - DNA, 25 bp, Saccharomyces pastorianus
gtcatggtcctcagaaaagatcggg

SEQ ID NO: 170514 - DNA, 25 bp, Saccharomyces pastorianus
ggtcctcagaaaagatcgggcgtgt

SEQ ID NO: 170515 - DNA, 25 bp, Saccharomyces pastorianus
aaattctgagttgtcatggtcctca

SEQ ID NO: 170516 - DNA, 25 bp, Saccharomyces pastorianus
gagttgtcatggtcctcagaaaaga

SEQ ID NO: 170517 - DNA, 25 bp, Saccharomyces pastorianus
attctgagttgtcatggtcctcaga

SEQ ID NO: 170518 - DNA, 25 bp, Saccharomyces pastorianus
atggtcctcagaaaagatcgggcgt

SEQ ID NO: 170519 - DNA, 25 bp, Saccharomyces pastorianus
aatactagcatgtgagatatatgtg

SEQ ID NO: 170520 - DNA, 25 bp, Saccharomyces pastorianus
taatactagcatgtgagatatatgt

SEQ ID NO: 170521 - DNA, 25 bp, Saccharomyces pastorianus
tttgtaatactagcatgtgagatat

SEQ ID NO: 170522 - DNA, 25 bp, Saccharomyces pastorianus
tatttgtaatactagcatgtgagat

SEQ ID NO: 170523 - DNA, 25 bp, Saccharomyces pastorianus
atttgtaatactagcatgtgagata

SEQ ID NO: 170524 - DNA, 25 bp, Saccharomyces pastorianus
gtaatactagcatgtgagatatatg

SEQ ID NO: 170525 - DNA, 25 bp, Saccharomyces pastorianus
ttatttgtaatactagcatgtgaga

SEQ ID NO: 170526 - DNA, 25 bp, Saccharomyces pastorianus
tattatttgtaatactagcatgtga

SEQ ID NO: 170527 - DNA, 25 bp, Saccharomyces pastorianus
ttgtaatactagcatgtgagatata

SEQ ID NO: 170528 - DNA, 25 bp, Saccharomyces pastorianus
attatttgtaatactagcatgtgag

SEQ ID NO: 170529 - DNA, 25 bp, Saccharomyces pastorianus
tgtaatactagcatgtgagatatat

SEQ ID NO: 170530 - DNA, 25 bp, Saccharomyces pastorianus
ttcaaggcttatcatccggcatcac

SEQ ID NO: 170531 - DNA, 25 bp, Saccharomyces pastorianus
aaaattgctacttttgactcctcca

SEQ ID NO: 170532 - DNA, 25 bp, Saccharomyces pastorianus
gtgtgatggatttacgccgagatct

SEQ ID NO: 170533 - DNA, 25 bp, Saccharomyces pastorianus
gaaggagcactaattccaaccggta

SEQ ID NO: 170534 - DNA, 25 bp, Saccharomyces pastorianus
gatggcccgatttatgactacgctt

SEQ ID NO: 170535 - DNA, 25 bp, Saccharomyces pastorianus
gagatctggctttgccgttgaacaa

SEQ ID NO: 170536 - DNA, 25 bp, Saccharomyces pastorianus
taagtgtaaacaagctcgtccctgc

SEQ ID NO: 170537 - DNA, 25 bp, Saccharomyces pastorianus
ggcatcacgactttcattggaggtt

SEQ ID NO: 170538 - DNA, 25 bp, Saccharomyces pastorianus
agaaccaactgtcctattttacaca

SEQ ID NO: 170539 - DNA, 25 bp, Saccharomyces pastorianus
atgactacgctttcattgttgatga

SEQ ID NO: 170540 - DNA, 25 bp, Saccharomyces pastorianus
gagagactgcgttcttttgagacgt

SEQ ID NO: 170541 - DNA, 25 bp, Saccharomyces pastorianus
tttccattcaaccaatttttaccag

SEQ ID NO: 170542 - DNA, 25 bp, Saccharomyces pastorianus
ggacaagagatctcaatctcacgat

SEQ ID NO: 170543 - DNA, 25 bp, Saccharomyces pastorianus
aaactcaaaccaagctacctcattt

SEQ ID NO: 170544 - DNA, 25 bp, Saccharomyces pastorianus
aagaacttatatgcggctttcaaaa

SEQ ID NO: 170545 - DNA, 25 bp, Saccharomyces pastorianus
gaaactttacatattctcttagagc

SEQ ID NO: 170546 - DNA, 25 bp, Saccharomyces pastorianus
tttttaccagagatgggccactaaa

SEQ ID NO: 170547 - DNA, 25 bp, Saccharomyces pastorianus
aacgggattttcaaaagctctgaag

SEQ ID NO: 170548 - DNA, 25 bp, Saccharomyces pastorianus
gggcagacatacaatccagtacgtt

SEQ ID NO: 170549 - DNA, 25 bp, Saccharomyces pastorianus
tttaccttgctactgttgtttccat

SEQ ID NO: 170550 - DNA, 25 bp, Saccharomyces pastorianus
gatttcggaaaaccaacttgaacat

SEQ ID NO: 170551 - DNA, 25 bp, Saccharomyces pastorianus
gacgacaataataccagcaacaata

SEQ ID NO: 170552 - DNA, 25 bp, Saccharomyces pastorianus
atttaaaattgtactgatcggtgat

SEQ ID NO: 170553 - DNA, 25 bp, Saccharomyces pastorianus
ggtatgattacgacctactatttaa

SEQ ID NO: 170554 - DNA, 25 bp, Saccharomyces pastorianus
cgggtatgattacgacctactattt

SEQ ID NO: 170555 - DNA, 25 bp, Saccharomyces pastorianus
acgggtatgattacgacctactatt

SEQ ID NO: 170556 - DNA, 25 bp, Saccharomyces pastorianus
ctacgggtatgattacgacctacta

SEQ ID NO: 170557 - DNA, 25 bp, Saccharomyces pastorianus
ggactacgggtatgattacgaccta

SEQ ID NO: 170558 - DNA, 25 bp, Saccharomyces pastorianus
gactacgggtatgattacgacctac

SEQ ID NO: 170559 - DNA, 25 bp, Saccharomyces pastorianus
gggtatgattacgacctactattta

SEQ ID NO: 170560 - DNA, 25 bp, Saccharomyces pastorianus
tgattacgacctactatttaaaatt

SEQ ID NO: 170561 - DNA, 25 bp, Saccharomyces pastorianus
ctatttaaaattgtactgatcggtg

SEQ ID NO: 170562 - DNA, 25 bp, Saccharomyces pastorianus
tacgggtatgattacgacctactat

SEQ ID NO: 170563 - DNA, 25 bp, Saccharomyces pastorianus
gtataggaacacgaataggaacacg

SEQ ID NO: 170564 - DNA, 25 bp, Saccharomyces pastorianus
gaacacgaataggaacacgaatatt

SEQ ID NO: 170565 - DNA, 25 bp, Saccharomyces pastorianus
gaataggaacacgaatatttattgt

SEQ ID NO: 170566 - DNA, 25 bp, Saccharomyces pastorianus
ctactaggaacacgtataggaacac

SEQ ID NO: 170567 - DNA, 25 bp, Saccharomyces pastorianus
gctactaggaacacgtataggaaca

SEQ ID NO: 170568 - DNA, 25 bp, Saccharomyces pastorianus
actaggaacacgtataggaacacga

SEQ ID NO: 170569 - DNA, 25 bp, Saccharomyces pastorianus
aggaacacgaatatttattgttcat

SEQ ID NO: 170570 - DNA, 25 bp, Saccharomyces pastorianus
aacacgtataggaacacgaatagga

SEQ ID NO: 170571 - DNA, 25 bp, Saccharomyces pastorianus
cacgtataggaacacgaataggaac

SEQ ID NO: 170572 - DNA, 25 bp, Saccharomyces pastorianus
tataggaacacgaataggaacacga

SEQ ID NO: 170573 - DNA, 25 bp, Saccharomyces pastorianus
ttgctactaggaacacgtataggaa

SEQ ID NO: 170574 - DNA, 25 bp, Saccharomyces pastorianus
agcgggtactgcgattctttgactt

SEQ ID NO: 170575 - DNA, 25 bp, Saccharomyces pastorianus
gatccaacaccagtaaatccttagt

SEQ ID NO: 170576 - DNA, 25 bp, Saccharomyces pastorianus
agtcatcgcatgcatgtttaccaca

SEQ ID NO: 170577 - DNA, 25 bp, Saccharomyces pastorianus
gtctccttccatttactaacatacg

SEQ ID NO: 170578 - DNA, 25 bp, Saccharomyces pastorianus
ctttgttttctactgtatcactgga

SEQ ID NO: 170579 - DNA, 25 bp, Saccharomyces pastorianus
gatggtgatcatgcaatctttgact

SEQ ID NO: 170580 - DNA, 25 bp, Saccharomyces pastorianus
gtaattgctcctactgccgttcagc

SEQ ID NO: 170581 - DNA, 25 bp, Saccharomyces pastorianus
taaaccataatgctggtctccttcc

SEQ ID NO: 170582 - DNA, 25 bp, Saccharomyces pastorianus
gtttaccacacattcactactattt

SEQ ID NO: 170583 - DNA, 25 bp, Saccharomyces pastorianus
ctaacctactcacacattctgatgg

SEQ ID NO: 170584 - DNA, 25 bp, Saccharomyces pastorianus
ttttttggcgtgaccagcgggtact

SEQ ID NO: 170585 - DNA, 25 bp, Saccharomyces pastorianus
aaaccttatgtcttgtccggtagtg

SEQ ID NO: 170586 - DNA, 25 bp, Saccharomyces pastorianus
ttgggctctcgaacagacctttgag

SEQ ID NO: 170587 - DNA, 25 bp, Saccharomyces pastorianus
cagagtcttcaattataacaccggt

SEQ ID NO: 170588 - DNA, 25 bp, Saccharomyces pastorianus
gtacacccaacaaaaccttatgtct

SEQ ID NO: 170589 - DNA, 25 bp, Saccharomyces pastorianus
caagtcaccgaaactcctgtaagag

SEQ ID NO: 170590 - DNA, 25 bp, Saccharomyces pastorianus
tgggaaaacaattgggctctcgaac

SEQ ID NO: 170591 - DNA, 25 bp, Saccharomyces pastorianus
gaacattttgttatgtgcgtagcat

SEQ ID NO: 170592 - DNA, 25 bp, Saccharomyces pastorianus
aggaagtgacgatttcaggatcaga

SEQ ID NO: 170593 - DNA, 25 bp, Saccharomyces pastorianus
gaggtcagatccattcaagtcaccg

SEQ ID NO: 170594 - DNA, 25 bp, Saccharomyces pastorianus
acctttgagggtcatgaacattttg

SEQ ID NO: 170595 - DNA, 25 bp, Saccharomyces pastorianus
gtccggtagtgacgatttaacagtc

SEQ ID NO: 170596 - DNA, 25 bp, Saccharomyces pastorianus
gcaatcggtagcgcgtatgactctt

SEQ ID NO: 170597 - DNA, 25 bp, Saccharomyces pastorianus
agagccttgttggcgcaatcggtag

SEQ ID NO: 170598 - DNA, 25 bp, Saccharomyces pastorianus
agccttgttggcgcaatcggtagcg

SEQ ID NO: 170599 - DNA, 25 bp, Saccharomyces pastorianus
aagagccttgttggcgcaatcggta

SEQ ID NO: 170600 - DNA, 25 bp, Saccharomyces pastorianus
ggcgcaatcggtagcgcgtatgact

SEQ ID NO: 170601 - DNA, 25 bp, Saccharomyces pastorianus
gcgcaatcggtagcgcgtatgactc

SEQ ID NO: 170602 - DNA, 25 bp, Saccharomyces pastorianus
ttgttggcgcaatcggtagcgcgta

SEQ ID NO: 170603 - DNA, 25 bp, Saccharomyces pastorianus
gaaagagccttgttggcgcaatcgg

SEQ ID NO: 170604 - DNA, 25 bp, Saccharomyces pastorianus
aaagagccttgttggcgcaatcggt

SEQ ID NO: 170605 - DNA, 25 bp, Saccharomyces pastorianus
gagccttgttggcgcaatcggtagc

SEQ ID NO: 170606 - DNA, 25 bp, Saccharomyces pastorianus
ggtagcgcgtatgactcttaatcat

SEQ ID NO: 170607 - DNA, 25 bp, Saccharomyces pastorianus
caactggatctgtaacccagttcac

SEQ ID NO: 170608 - DNA, 25 bp, Saccharomyces pastorianus
aactggatctgtaacccagttcaca

SEQ ID NO: 170609 - DNA, 25 bp, Saccharomyces pastorianus
agatgcgcgttacaactggatctgt

SEQ ID NO: 170610 - DNA, 25 bp, Saccharomyces pastorianus
tgcgcgttacaactggatctgtaac

SEQ ID NO: 170611 - DNA, 25 bp, Saccharomyces pastorianus
actggatctgtaacccagttcacaa

SEQ ID NO: 170612 - DNA, 25 bp, Saccharomyces pastorianus
aggtctatcagaagagatgcgcgtt

SEQ ID NO: 170613 - DNA, 25 bp, Saccharomyces pastorianus
ctggatctgtaacccagttcacaaa

SEQ ID NO: 170614 - DNA, 25 bp, Saccharomyces pastorianus
ggatctgtaacccagttcacaaaca

SEQ ID NO: 170615 - DNA, 25 bp, Saccharomyces pastorianus
ctgtaacccagttcacaaacaccgt

SEQ ID NO: 170616 - DNA, 25 bp, Saccharomyces pastorianus
tctgtaacccagttcacaaacaccg

SEQ ID NO: 170617 - DNA, 25 bp, Saccharomyces pastorianus
gatctgtaacccagttcacaaacac

SEQ ID NO: 170618 - DNA, 25 bp, Saccharomyces pastorianus
tgctaaaggtttggttgcttaccac

SEQ ID NO: 170619 - DNA, 25 bp, Saccharomyces pastorianus
ttaccaccaaaagtatgtcgatgaa

SEQ ID NO: 170620 - DNA, 25 bp, Saccharomyces pastorianus
aaagtatgtcgatgaacaatccaag

SEQ ID NO: 170621 - DNA, 25 bp, Saccharomyces pastorianus
aagccattgctaaaggtttggttgc

SEQ ID NO: 170622 - DNA, 25 bp, Saccharomyces pastorianus
actgctgttgcccacgtcaagactg

SEQ ID NO: 170623 - DNA, 25 bp, Saccharomyces pastorianus
tgttgttggtcggtttggacaaatt

SEQ ID NO: 170624 - DNA, 25 bp, Saccharomyces pastorianus
tttacgaaccattgttgttggtcgg

SEQ ID NO: 170625 - DNA, 25 bp, Saccharomyces pastorianus
cagacaagccattgctaaaggtttg

SEQ ID NO: 170626 - DNA, 25 bp, Saccharomyces pastorianus
gtttacgaaccattgttgttggtcg

SEQ ID NO: 170627 - DNA, 25 bp, Saccharomyces pastorianus
ttacgaaccattgttgttggtcggt

SEQ ID NO: 170628 - DNA, 25 bp, Saccharomyces pastorianus
cgtcaagactggtaagggtttgatc

SEQ ID NO: 170629 - DNA, 25 bp, Saccharomyces pastorianus
aacggagaagagtcgcggtctccct

SEQ ID NO: 170630 - DNA, 25 bp, Saccharomyces pastorianus
gcgaaatgcgctaaggtgattgacc

SEQ ID NO: 170631 - DNA, 25 bp, Saccharomyces pastorianus
agaagagtcgcggtctccctgttgt

SEQ ID NO: 170632 - DNA, 25 bp, Saccharomyces pastorianus
caactctacgtctgttgttcaaggt

SEQ ID NO: 170633 - DNA, 25 bp, Saccharomyces pastorianus
caaggttctacaaggataacggaga

SEQ ID NO: 170634 - DNA, 25 bp, Saccharomyces pastorianus
ctgttgttcaaggttctacaaggat

SEQ ID NO: 170635 - DNA, 25 bp, Saccharomyces pastorianus
gtgattgaccaactctacgtctgtt

SEQ ID NO: 170636 - DNA, 25 bp, Saccharomyces pastorianus
gaccaactctacgtctgttgttcaa

SEQ ID NO: 170637 - DNA, 25 bp, Saccharomyces pastorianus
ttgtcagattgtctactatcgaacc

SEQ ID NO: 170638 - DNA, 25 bp, Saccharomyces pastorianus
aaccagtacgatgatgcgaaatgcg

SEQ ID NO: 170639 - DNA, 25 bp, Saccharomyces pastorianus
ctatcgaaccagtacgatgatgcga

SEQ ID NO: 170640 - DNA, 25 bp, Saccharomyces pastorianus
gtatgtcatcaaggctttgcaatct

SEQ ID NO: 170641 - DNA, 25 bp, Saccharomyces pastorianus
atggcaatattactactacaccttg

SEQ ID NO: 170642 - DNA, 25 bp, Saccharomyces pastorianus
aatattactactacaccttgactga

SEQ ID NO: 170643 - DNA, 25 bp, Saccharomyces pastorianus
tattactactacaccttgactgaag

SEQ ID NO: 170644 - DNA, 25 bp, Saccharomyces pastorianus
ggcaatattactactacaccttgac

SEQ ID NO: 170645 - DNA, 25 bp, Saccharomyces pastorianus
tcatggcaatattactactacacct

SEQ ID NO: 170646 - DNA, 25 bp, Saccharomyces pastorianus
catggcaatattactactacacctt

SEQ ID NO: 170647 - DNA, 25 bp, Saccharomyces pastorianus
aattgacaccaagaatttgtatgtc

SEQ ID NO: 170648 - DNA, 25 bp, Saccharomyces pastorianus
tttgcaatctttgacttccaagggt

SEQ ID NO: 170649 - DNA, 25 bp, Saccharomyces pastorianus
attactactacaccttgactgaaga

SEQ ID NO: 170650 - DNA, 25 bp, Saccharomyces pastorianus
caccaagaatttgtatgtcatcaag

SEQ ID NO: 170651 - DNA, 25 bp, Saccharomyces pastorianus
gccagaccggctgcattgggtacga

SEQ ID NO: 170652 - DNA, 25 bp, Saccharomyces pastorianus
gtgtctttgattcatctctaaggtg

SEQ ID NO: 170653 - DNA, 25 bp, Saccharomyces pastorianus
ttgggtacgacggtaaattctctat

SEQ ID NO: 170654 - DNA, 25 bp, Saccharomyces pastorianus
taaccgagttgagtgtctttgattc

SEQ ID NO: 170655 - DNA, 25 bp, Saccharomyces pastorianus
gcgtatacgagccaagaaaaacctt

SEQ ID NO: 170656 - DNA, 25 bp, Saccharomyces pastorianus
ttatttcccagtttggccagaccgg

SEQ ID NO: 170657 - DNA, 25 bp, Saccharomyces pastorianus
aaattctctataggcatcaccattg

SEQ ID NO: 170658 - DNA, 25 bp, Saccharomyces pastorianus
gtatgtccttaatttagtcgtgaga

SEQ ID NO: 170659 - DNA, 25 bp, Saccharomyces pastorianus
aggagctttttgaaggcgtatacga

SEQ ID NO: 170660 - DNA, 25 bp, Saccharomyces pastorianus
aatcatcattgtgttcgccctttgt

SEQ ID NO: 170661 - DNA, 25 bp, Saccharomyces pastorianus
tcgccctttgtcgtataaccgagtt

SEQ ID NO: 170662 - DNA, 25 bp, Saccharomyces pastorianus
ggagacaagctatcttaaggcaaca

SEQ ID NO: 170663 - DNA, 25 bp, Saccharomyces pastorianus
gtcttccagttaagaattttcgtca

SEQ ID NO: 170664 - DNA, 25 bp, Saccharomyces pastorianus
gatgcttccaagactaatctaagac

SEQ ID NO: 170665 - DNA, 25 bp, Saccharomyces pastorianus
acgggctgacaccaactgcaaagga

SEQ ID NO: 170666 - DNA, 25 bp, Saccharomyces pastorianus
gacaccgttgacagactgatcatca

SEQ ID NO: 170667 - DNA, 25 bp, Saccharomyces pastorianus
gactgacggatgtaacaaattcttt

SEQ ID NO: 170668 - DNA, 25 bp, Saccharomyces pastorianus
ttgcaccacaagtttacatcattac

SEQ ID NO: 170669 - DNA, 25 bp, Saccharomyces pastorianus
aatgcgaacaatattgctactcagc

SEQ ID NO: 170670 - DNA, 25 bp, Saccharomyces pastorianus
ctaatgctcctgttaccggcaataa

SEQ ID NO: 170671 - DNA, 25 bp, Saccharomyces pastorianus
ataacaacaacaccgctaatgctcc

SEQ ID NO: 170672 - DNA, 25 bp, Saccharomyces pastorianus
gcaattgtcgttagatgcttccaag

SEQ ID NO: 170673 - DNA, 25 bp, Saccharomyces pastorianus
aattttgatcgagactgtcatcaag

SEQ ID NO: 170674 - DNA, 25 bp, Saccharomyces pastorianus
gacaagataagttgaagcaagccaa

SEQ ID NO: 170675 - DNA, 25 bp, Saccharomyces pastorianus
gcagccaaggaaatcgactcataca

SEQ ID NO: 170676 - DNA, 25 bp, Saccharomyces pastorianus
gtgcaaggtgaattagctgagatta

SEQ ID NO: 170677 - DNA, 25 bp, Saccharomyces pastorianus
aaagaaagcagaggctggtgtgcaa

SEQ ID NO: 170678 - DNA, 25 bp, Saccharomyces pastorianus
ggatgacgttgtcaaaattttgatc

SEQ ID NO: 170679 - DNA, 25 bp, Saccharomyces pastorianus
aaaggctagaaagtacagacaagat

SEQ ID NO: 170680 - DNA, 25 bp, Saccharomyces pastorianus
actgatgcagccaaggaaatcgact

SEQ ID NO: 170681 - DNA, 25 bp, Saccharomyces pastorianus
ggaaatcgactcatacaaaattcaa

SEQ ID NO: 170682 - DNA, 25 bp, Saccharomyces pastorianus
gtttgaacaaaagaatgccggtggt

SEQ ID NO: 170683 - DNA, 25 bp, Saccharomyces pastorianus
agaatgccggtggtgttggtgaatt

SEQ ID NO: 170684 - DNA, 25 bp, Saccharomyces pastorianus
ttgttgggatcccattgtgcacaaa

SEQ ID NO: 170685 - DNA, 25 bp, Saccharomyces pastorianus
tcccattgtgcacaaaggccataat

SEQ ID NO: 170686 - DNA, 25 bp, Saccharomyces pastorianus
gttgggatcccattgtgcacaaagg

SEQ ID NO: 170687 - DNA, 25 bp, Saccharomyces pastorianus
gggatcccattgtgcacaaaggcca

SEQ ID NO: 170688 - DNA, 25 bp, Saccharomyces pastorianus
tgttgggatcccattgtgcacaaag

SEQ ID NO: 170689 - DNA, 25 bp, Saccharomyces pastorianus
tgggatcccattgtgcacaaaggcc

SEQ ID NO: 170690 - DNA, 25 bp, Saccharomyces pastorianus
ggatcccattgtgcacaaaggccat

SEQ ID NO: 170691 - DNA, 25 bp, Saccharomyces pastorianus
ttgggatcccattgtgcacaaaggc

SEQ ID NO: 170692 - DNA, 25 bp, Saccharomyces pastorianus
cccattgtgcacaaaggccataata

SEQ ID NO: 170693 - DNA, 25 bp, Saccharomyces pastorianus
gatcccattgtgcacaaaggccata

SEQ ID NO: 170694 - DNA, 25 bp, Saccharomyces pastorianus
atcccattgtgcacaaaggccataa

SEQ ID NO: 170695 - DNA, 25 bp, Saccharomyces pastorianus
cctagcacactatcaatctttgcat

SEQ ID NO: 170696 - DNA, 25 bp, Saccharomyces pastorianus
atcctagcacactatcaatctttgc

SEQ ID NO: 170697 - DNA, 25 bp, Saccharomyces pastorianus
tatcctagcacactatcaatctttg

SEQ ID NO: 170698 - DNA, 25 bp, Saccharomyces pastorianus
tagcacactatcaatctttgcattt

SEQ ID NO: 170699 - DNA, 25 bp, Saccharomyces pastorianus
ctagcacactatcaatctttgcatt

SEQ ID NO: 170700 - DNA, 25 bp, Saccharomyces pastorianus
agcacactatcaatctttgcatttc

SEQ ID NO: 170701 - DNA, 25 bp, Saccharomyces pastorianus
agcttccattagatttgatgactat

SEQ ID NO: 170702 - DNA, 25 bp, Saccharomyces pastorianus
cacactatcaatctttgcatttcag

SEQ ID NO: 170703 - DNA, 25 bp, Saccharomyces pastorianus
aatggaaccgatatttctacataat

SEQ ID NO: 170704 - DNA, 25 bp, Saccharomyces pastorianus
gcacactatcaatctttgcatttca

SEQ ID NO: 170705 - DNA, 25 bp, Saccharomyces pastorianus
tcctagcacactatcaatctttgca

SEQ ID NO: 170706 - DNA, 25 bp, Saccharomyces pastorianus
ttgattaaggtcaacggttctccaa

SEQ ID NO: 170707 - DNA, 25 bp, Saccharomyces pastorianus
tgctaagggtttagtcgcttaccac

SEQ ID NO: 170708 - DNA, 25 bp, Saccharomyces pastorianus
ggtctacgaaccattattgttggtt

SEQ ID NO: 170709 - DNA, 25 bp, Saccharomyces pastorianus
tattgttggttggtttggacaagtt

SEQ ID NO: 170710 - DNA, 25 bp, Saccharomyces pastorianus
taaggtcaacggttctccaatcact

SEQ ID NO: 170711 - DNA, 25 bp, Saccharomyces pastorianus
gtacgttgacgaacaatccaagaac

SEQ ID NO: 170712 - DNA, 25 bp, Saccharomyces pastorianus
ggacaagttctccaacatcgatatc

SEQ ID NO: 170713 - DNA, 25 bp, Saccharomyces pastorianus
aagtacgttgacgaacaatccaaga

SEQ ID NO: 170714 - DNA, 25 bp, Saccharomyces pastorianus
ggccttcacctcttacgacagaact

SEQ ID NO: 170715 - DNA, 25 bp, Saccharomyces pastorianus
cttcacctcttacgacagaactttg

SEQ ID NO: 170716 - DNA, 25 bp, Saccharomyces pastorianus
gtcgcttaccaccaaaagtacgttg

SEQ ID NO: 170717 - DNA, 25 bp, Saccharomyces pastorianus
aatcccatgaaacattaactttgga

SEQ ID NO: 170718 - DNA, 25 bp, Saccharomyces pastorianus
actttggaagaaaacgtgccaccat

SEQ ID NO: 170719 - DNA, 25 bp, Saccharomyces pastorianus
taagcaagcagacgatgatcaggac

SEQ ID NO: 170720 - DNA, 25 bp, Saccharomyces pastorianus
cggtaggtacttctgacactggcac

SEQ ID NO: 170721 - DNA, 25 bp, Saccharomyces pastorianus
agaaaacgtgccaccattgagtaca

SEQ ID NO: 170722 - DNA, 25 bp, Saccharomyces pastorianus
aatacaactctacctcgctttcaat

SEQ ID NO: 170723 - DNA, 25 bp, Saccharomyces pastorianus
gatgatcaggacatggaggtagacc

SEQ ID NO: 170724 - DNA, 25 bp, Saccharomyces pastorianus
gtacatcaacttatataccgcctcc

SEQ ID NO: 170725 - DNA, 25 bp, Saccharomyces pastorianus
ctccatcctcggtaggtacttctga

SEQ ID NO: 170726 - DNA, 25 bp, Saccharomyces pastorianus
tacctcgctttcaatcccatgaaac

SEQ ID NO: 170727 - DNA, 25 bp, Saccharomyces pastorianus
gaactgaatacaactctacctcgct

SEQ ID NO: 170728 - DNA, 25 bp, Saccharomyces pastorianus
cgttgatctcctccgtgaaattcag

SEQ ID NO: 170729 - DNA, 25 bp, Saccharomyces pastorianus
aatgtgatccctatgtgttctctat

SEQ ID NO: 170730 - DNA, 25 bp, Saccharomyces pastorianus
aaaaatgtagcaccagaggcagcag

SEQ ID NO: 170731 - DNA, 25 bp, Saccharomyces pastorianus
atgattcacacgttcgtggctccaa

SEQ ID NO: 170732 - DNA, 25 bp, Saccharomyces pastorianus
agttgagcaactaagggtccatgtt

SEQ ID NO: 170733 - DNA, 25 bp, Saccharomyces pastorianus
gaatactgctcgtgaatctttaaca

SEQ ID NO: 170734 - DNA, 25 bp, Saccharomyces pastorianus
aaagctagcgttttggttactgcaa

SEQ ID NO: 170735 - DNA, 25 bp, Saccharomyces pastorianus
caaattggaccagtgttgagaatac

SEQ ID NO: 170736 - DNA, 25 bp, Saccharomyces pastorianus
taacgcctggtgtatccgttgatct

SEQ ID NO: 170737 - DNA, 25 bp, Saccharomyces pastorianus
gatacgtttaggtctggtgcagttg

SEQ ID NO: 170738 - DNA, 25 bp, Saccharomyces pastorianus
gaggcagcagactatttaacacagc

SEQ ID NO: 170739 - DNA, 25 bp, Saccharomyces pastorianus
tcaagacatttttttcgaatcgttt

SEQ ID NO: 170740 - DNA, 25 bp, Saccharomyces pastorianus
ttttcgaatcgttttttagagagat

SEQ ID NO: 170741 - DNA, 25 bp, Saccharomyces pastorianus
ttggatctgtcaacttcagccagga

SEQ ID NO: 170742 - DNA, 25 bp, Saccharomyces pastorianus
ggatctgtcaacttcagccaggaaa

SEQ ID NO: 170743 - DNA, 25 bp, Saccharomyces pastorianus
taccaaagcccacttcaagacattt

SEQ ID NO: 170744 - DNA, 25 bp, Saccharomyces pastorianus
cttcagccaggaaagttctaccaaa

SEQ ID NO: 170745 - DNA, 25 bp, Saccharomyces pastorianus
atctgtcaacttcagccaggaaagt

SEQ ID NO: 170746 - DNA, 25 bp, Saccharomyces pastorianus
gccaggaaagttctaccaaagccca

SEQ ID NO: 170747 - DNA, 25 bp, Saccharomyces pastorianus
gtcaacttcagccaggaaagttcta

SEQ ID NO: 170748 - DNA, 25 bp, Saccharomyces pastorianus
gtttggatctgtcaacttcagccag

SEQ ID NO: 170749 - DNA, 25 bp, Saccharomyces pastorianus
tttagagagataactggttttgtca

SEQ ID NO: 170750 - DNA, 25 bp, Saccharomyces pastorianus
gggtgaccctcaaattcaacaagat

SEQ ID NO: 170751 - DNA, 25 bp, Saccharomyces pastorianus
gatcttggtattgctcaaatctact

SEQ ID NO: 170752 - DNA, 25 bp, Saccharomyces pastorianus
ggtgcaatttcccatcttagactat

SEQ ID NO: 170753 - DNA, 25 bp, Saccharomyces pastorianus
ttctcccgaagcctatttggtactg

SEQ ID NO: 170754 - DNA, 25 bp, Saccharomyces pastorianus
gctcaaatctacttgggtgaccctc

SEQ ID NO: 170755 - DNA, 25 bp, Saccharomyces pastorianus
aatttcccatcttagactatcgagg

SEQ ID NO: 170756 - DNA, 25 bp, Saccharomyces pastorianus
gactatcgagggactaagatcttgg

SEQ ID NO: 170757 - DNA, 25 bp, Saccharomyces pastorianus
ggtactgggtgcaatttcccatctt

SEQ ID NO: 170758 - DNA, 25 bp, Saccharomyces pastorianus
aagcctatttggtactgggtgcaat

SEQ ID NO: 170759 - DNA, 25 bp, Saccharomyces pastorianus
caacaagatgtccaaatttctgtaa

SEQ ID NO: 170760 - DNA, 25 bp, Saccharomyces pastorianus
gagtgctcgttcaaggcttctcccg

SEQ ID NO: 170761 - DNA, 25 bp, Saccharomyces pastorianus
tagggcagccttgatcatctacatt

SEQ ID NO: 170762 - DNA, 25 bp, Saccharomyces pastorianus
gcagccttgatcatctacatttgag

SEQ ID NO: 170763 - DNA, 25 bp, Saccharomyces pastorianus
ggcagccttgatcatctacatttga

SEQ ID NO: 170764 - DNA, 25 bp, Saccharomyces pastorianus
tctacatttgagattatgcttcatt

SEQ ID NO: 170765 - DNA, 25 bp, Saccharomyces pastorianus
aatagggcagccttgatcatctaca

SEQ ID NO: 170766 - DNA, 25 bp, Saccharomyces pastorianus
attcatataaatagggcagccttga

SEQ ID NO: 170767 - DNA, 25 bp, Saccharomyces pastorianus
agggcagccttgatcatctacattt

SEQ ID NO: 170768 - DNA, 25 bp, Saccharomyces pastorianus
gggcagccttgatcatctacatttg

SEQ ID NO: 170769 - DNA, 25 bp, Saccharomyces pastorianus
gatcatctacatttgagattatgct

SEQ ID NO: 170770 - DNA, 25 bp, Saccharomyces pastorianus
atagggcagccttgatcatctacat

SEQ ID NO: 170771 - DNA, 25 bp, Saccharomyces pastorianus
gccttgatcatctacatttgagatt

SEQ ID NO: 170772 - DNA, 25 bp, Saccharomyces pastorianus
gtttggtgaatttctccatcaaatt

SEQ ID NO: 170773 - DNA, 25 bp, Saccharomyces pastorianus
gataaagtcttctagtttggtgaat

SEQ ID NO: 170774 - DNA, 25 bp, Saccharomyces pastorianus
gatcgataaagtcttctagtttggt

SEQ ID NO: 170775 - DNA, 25 bp, Saccharomyces pastorianus
ttctccatcaaattagccttgttgg

SEQ ID NO: 170776 - DNA, 25 bp, Saccharomyces pastorianus
ctgttacttgtaggaattattttga

SEQ ID NO: 170777 - DNA, 25 bp, Saccharomyces pastorianus
aagatcatactgttacttgtaggaa

SEQ ID NO: 170778 - DNA, 25 bp, Saccharomyces pastorianus
gtacataagatcatactgttacttg

SEQ ID NO: 170779 - DNA, 25 bp, Saccharomyces pastorianus
gtgatgatactttgtacataagatc

SEQ ID NO: 170780 - DNA, 25 bp, Saccharomyces pastorianus
gaatttctccatcaaattagccttg

SEQ ID NO: 170781 - DNA, 25 bp, Saccharomyces pastorianus
aaacagtgatgatactttgtacata

SEQ ID NO: 170782 - DNA, 25 bp, Saccharomyces pastorianus
tttcgatcgataaagtcttctagtt

SEQ ID NO: 170783 - DNA, 25 bp, Saccharomyces pastorianus
gtgagcttcttgaaccagatccctg

SEQ ID NO: 170784 - DNA, 25 bp, Saccharomyces pastorianus
gccagtcgtagtgtatattgtaaac

SEQ ID NO: 170785 - DNA, 25 bp, Saccharomyces pastorianus
aaatatgtgcttgatccactggcca

SEQ ID NO: 170786 - DNA, 25 bp, Saccharomyces pastorianus
gtgcttgatccactggccaaatgaa

SEQ ID NO: 170787 - DNA, 25 bp, Saccharomyces pastorianus
accagatccctggaggaggcatcta

SEQ ID NO: 170788 - DNA, 25 bp, Saccharomyces pastorianus
ggaggaggcatctacccagagctat

SEQ ID NO: 170789 - DNA, 25 bp, Saccharomyces pastorianus
agaatgtctttctatcttcccgatc

SEQ ID NO: 170790 - DNA, 25 bp, Saccharomyces pastorianus
tacccagagctatccttagaatgtc

SEQ ID NO: 170791 - DNA, 25 bp, Saccharomyces pastorianus
aaccttccttgaccttcagatgtaa

SEQ ID NO: 170792 - DNA, 25 bp, Saccharomyces pastorianus
gccaaatgaagccagtcgtagtgta

SEQ ID NO: 170793 - DNA, 25 bp, Saccharomyces pastorianus
gacacttattgaaccaagctgctca

SEQ ID NO: 170794 - DNA, 25 bp, Saccharomyces pastorianus
gatgccttctagaattcaaggcacg

SEQ ID NO: 170795 - DNA, 25 bp, Saccharomyces pastorianus
atcggagaggagatgccttctagaa

SEQ ID NO: 170796 - DNA, 25 bp, Saccharomyces pastorianus
aagccatcggagaggagatgccttc

SEQ ID NO: 170797 - DNA, 25 bp, Saccharomyces pastorianus
cggagaggagatgccttctagaatt

SEQ ID NO: 170798 - DNA, 25 bp, Saccharomyces pastorianus
ttctagaattcaaggcacgtaaggg

SEQ ID NO: 170799 - DNA, 25 bp, Saccharomyces pastorianus
ggagatgccttctagaattcaaggc

SEQ ID NO: 170800 - DNA, 25 bp, Saccharomyces pastorianus
gagaggagatgccttctagaattca

SEQ ID NO: 170801 - DNA, 25 bp, Saccharomyces pastorianus
gaggagatgccttctagaattcaag

SEQ ID NO: 170802 - DNA, 25 bp, Saccharomyces pastorianus
tcggaacgggccgaaggccgaatag

SEQ ID NO: 170803 - DNA, 25 bp, Saccharomyces pastorianus
gccatcggagaggagatgccttcta

SEQ ID NO: 170804 - DNA, 25 bp, Saccharomyces pastorianus
ccaagccatcggagaggagatgcct

SEQ ID NO: 170805 - DNA, 25 bp, Saccharomyces pastorianus
tattaatagtttacccggattccag

SEQ ID NO: 170806 - DNA, 25 bp, Saccharomyces pastorianus
agtttggctcaagctgcaggtgaaa

SEQ ID NO: 170807 - DNA, 25 bp, Saccharomyces pastorianus
cacttcgcaatatcatttcattccc

SEQ ID NO: 170808 - DNA, 25 bp, Saccharomyces pastorianus
aagtcgattcttgacgtcacttcgc

SEQ ID NO: 170809 - DNA, 25 bp, Saccharomyces pastorianus
tcggctttcttgacttcggatatag

SEQ ID NO: 170810 - DNA, 25 bp, Saccharomyces pastorianus
tttggtttccgaccgcatgtaaggt

SEQ ID NO: 170811 - DNA, 25 bp, Saccharomyces pastorianus
aaactggcgtatggactttgcgatc

SEQ ID NO: 170812 - DNA, 25 bp, Saccharomyces pastorianus
aagtcgtattccctacgtatgaaga

SEQ ID NO: 170813 - DNA, 25 bp, Saccharomyces pastorianus
gcatgtaaggttcggctttcttgac

SEQ ID NO: 170814 - DNA, 25 bp, Saccharomyces pastorianus
caatctaatctcctcgtttggtttc

SEQ ID NO: 170815 - DNA, 25 bp, Saccharomyces pastorianus
cggattccagttttagtttggctca

SEQ ID NO: 170816 - DNA, 25 bp, Saccharomyces pastorianus
aagatcaatgtcagacacgacgaca

SEQ ID NO: 170817 - DNA, 25 bp, Saccharomyces pastorianus
ttccctatcaagatcaatgtcagac

SEQ ID NO: 170818 - DNA, 25 bp, Saccharomyces pastorianus
tattacggtgcattcaccgatgaaa

SEQ ID NO: 170819 - DNA, 25 bp, Saccharomyces pastorianus
ggtgcattcaccgatgaaatagcaa

SEQ ID NO: 170820 - DNA, 25 bp, Saccharomyces pastorianus
ggattattacggtgcattcaccgat

SEQ ID NO: 170821 - DNA, 25 bp, Saccharomyces pastorianus
gacacgacgacaaggattattacgg

SEQ ID NO: 170822 - DNA, 25 bp, Saccharomyces pastorianus
gcattcaccgatgaaatagcaaaaa

SEQ ID NO: 170823 - DNA, 25 bp, Saccharomyces pastorianus
tatcaagatcaatgtcagacacgac

SEQ ID NO: 170824 - DNA, 25 bp, Saccharomyces pastorianus
gatcaatgtcagacacgacgacaag

SEQ ID NO: 170825 - DNA, 25 bp, Saccharomyces pastorianus
aatgtcagacacgacgacaaggatt

SEQ ID NO: 170826 - DNA, 25 bp, Saccharomyces pastorianus
cagacacgacgacaaggattattac

SEQ ID NO: 170827 - DNA, 25 bp, Saccharomyces pastorianus
tgttgagatttgttgcttgcgcttc

SEQ ID NO: 170828 - DNA, 25 bp, Saccharomyces pastorianus
accccattcatgtggtttacacttg

SEQ ID NO: 170829 - DNA, 25 bp, Saccharomyces pastorianus
agatttgttgcttgcgcttctttta

SEQ ID NO: 170830 - DNA, 25 bp, Saccharomyces pastorianus
ggcatttaaccccattcatgtggtt

SEQ ID NO: 170831 - DNA, 25 bp, Saccharomyces pastorianus
gaagaaggcatttaaccccattcat

SEQ ID NO: 170832 - DNA, 25 bp, Saccharomyces pastorianus
acttgtgttgagatttgttgcttgc

SEQ ID NO: 170833 - DNA, 25 bp, Saccharomyces pastorianus
gggctatcttttttaggctcaaatc

SEQ ID NO: 170834 - DNA, 25 bp, Saccharomyces pastorianus
gatacatattattttctacttcctt

SEQ ID NO: 170835 - DNA, 25 bp, Saccharomyces pastorianus
ttcatgtggtttacacttgtgttga

SEQ ID NO: 170836 - DNA, 25 bp, Saccharomyces pastorianus
tttctacttcctttttatatctcaa

SEQ ID NO: 170837 - DNA, 25 bp, Saccharomyces pastorianus
gaaggcatttaaccccattcatgtg

SEQ ID NO: 170838 - DNA, 25 bp, Saccharomyces pastorianus
tgattggattgtgcgttgcctcatt

SEQ ID NO: 170839 - DNA, 25 bp, Saccharomyces pastorianus
gcctcatttcttgagcttcttggaa

SEQ ID NO: 170840 - DNA, 25 bp, Saccharomyces pastorianus
tttgattggattgtgcgttgcctca

SEQ ID NO: 170841 - DNA, 25 bp, Saccharomyces pastorianus
ctcatttcttgagcttcttggaaag

SEQ ID NO: 170842 - DNA, 25 bp, Saccharomyces pastorianus
tggattgtgcgttgcctcatttctt

SEQ ID NO: 170843 - DNA, 25 bp, Saccharomyces pastorianus
acatttgattggattgtgcgttgcc

SEQ ID NO: 170844 - DNA, 25 bp, Saccharomyces pastorianus
attgtgcgttgcctcatttcttgag

SEQ ID NO: 170845 - DNA, 25 bp, Saccharomyces pastorianus
attggattgtgcgttgcctcatttc

SEQ ID NO: 170846 - DNA, 25 bp, Saccharomyces pastorianus
gttgcctcatttcttgagcttcttg

SEQ ID NO: 170847 - DNA, 25 bp, Saccharomyces pastorianus
tatcggctcacatttgattggattg

SEQ ID NO: 170848 - DNA, 25 bp, Saccharomyces pastorianus
gtgcgttgcctcatttcttgagctt

SEQ ID NO: 170849 - DNA, 25 bp, Saccharomyces pastorianus
cagcatccagctctagtgttgtaac

SEQ ID NO: 170850 - DNA, 25 bp, Saccharomyces pastorianus
cagtgttgaaacttcatctactcca

SEQ ID NO: 170851 - DNA, 25 bp, Saccharomyces pastorianus
gtgttgtaacttcatctaccccagt

SEQ ID NO: 170852 - DNA, 25 bp, Saccharomyces pastorianus
tcatcactagctcctcgtagtagaa

SEQ ID NO: 170853 - DNA, 25 bp, Saccharomyces pastorianus
tacgacagttactactgctaccacc

SEQ ID NO: 170854 - DNA, 25 bp, Saccharomyces pastorianus
tagaaacgaaaccactgttgtccca

SEQ ID NO: 170855 - DNA, 25 bp, Saccharomyces pastorianus
atcttcaaccttctcatcactagct

SEQ ID NO: 170856 - DNA, 25 bp, Saccharomyces pastorianus
gttggcacaaccactcttgtctcat

SEQ ID NO: 170857 - DNA, 25 bp, Saccharomyces pastorianus
tgttgtcccaactacgacagttact

SEQ ID NO: 170858 - DNA, 25 bp, Saccharomyces pastorianus
gaaagttcttctgttggcacaacca

SEQ ID NO: 170859 - DNA, 25 bp, Saccharomyces pastorianus
acaccatccggcttcagtgttgaaa

SEQ ID NO: 170860 - DNA, 25 bp, Saccharomyces pastorianus
gaaagctacttaatgaaggatcttc

SEQ ID NO: 170861 - DNA, 25 bp, Saccharomyces pastorianus
atcactaatttatctaaggccaagg

SEQ ID NO: 170862 - DNA, 25 bp, Saccharomyces pastorianus
cagaatctgagttgtctagattgaa

SEQ ID NO: 170863 - DNA, 25 bp, Saccharomyces pastorianus
ggaagatgaattaattaggctacaa

SEQ ID NO: 170864 - DNA, 25 bp, Saccharomyces pastorianus
gaactctaaatatttggagctacag

SEQ ID NO: 170865 - DNA, 25 bp, Saccharomyces pastorianus
taaggccaaggagaaatcagaatct

SEQ ID NO: 170866 - DNA, 25 bp, Saccharomyces pastorianus
aactagatgctaaaacgactgaact

SEQ ID NO: 170867 - DNA, 25 bp, Saccharomyces pastorianus
tggaagacaaactcaaggcctcaga

SEQ ID NO: 170868 - DNA, 25 bp, Saccharomyces pastorianus
atttggagctacagaaggaatcgga

SEQ ID NO: 170869 - DNA, 25 bp, Saccharomyces pastorianus
gaaggatcttcaacaattacacaag

SEQ ID NO: 170870 - DNA, 25 bp, Saccharomyces pastorianus
aaggcctcagaagataagaactcta

SEQ ID NO: 170871 - DNA, 25 bp, Saccharomyces pastorianus
agttggctctaaatgacttatacga

SEQ ID NO: 170872 - DNA, 25 bp, Saccharomyces pastorianus
agtttctgaccttcgttgaagacga

SEQ ID NO: 170873 - DNA, 25 bp, Saccharomyces pastorianus
ggctctaaatgacttatacgacttg

SEQ ID NO: 170874 - DNA, 25 bp, Saccharomyces pastorianus
ctctaaatgacttatacgacttggt

SEQ ID NO: 170875 - DNA, 25 bp, Saccharomyces pastorianus
aaaattgtcattcccgtcgtggtca

SEQ ID NO: 170876 - DNA, 25 bp, Saccharomyces pastorianus
attgccactcaataactttatgtga

SEQ ID NO: 170877 - DNA, 25 bp, Saccharomyces pastorianus
atgcacaaaagtttctgaccttcgt

SEQ ID NO: 170878 - DNA, 25 bp, Saccharomyces pastorianus
ctttatgtgaatcgatgcgcacgga

SEQ ID NO: 170879 - DNA, 25 bp, Saccharomyces pastorianus
tgtcattcccgtcgtggtcaagaaa

SEQ ID NO: 170880 - DNA, 25 bp, Saccharomyces pastorianus
gagttggctctaaatgacttatacg

SEQ ID NO: 170881 - DNA, 25 bp, Saccharomyces pastorianus
aatgacttatacgacttggtacatt

SEQ ID NO: 170882 - DNA, 25 bp, Saccharomyces pastorianus
gctcacgagggaattcttcatgcta

SEQ ID NO: 170883 - DNA, 25 bp, Saccharomyces pastorianus
ttccacgttcgctcacgagggaatt

SEQ ID NO: 170884 - DNA, 25 bp, Saccharomyces pastorianus
ggaattcttcatgctaatactatgg

SEQ ID NO: 170885 - DNA, 25 bp, Saccharomyces pastorianus
acgagggaattcttcatgctaatac

SEQ ID NO: 170886 - DNA, 25 bp, Saccharomyces pastorianus
tcgctcacgagggaattcttcatgc

SEQ ID NO: 170887 - DNA, 25 bp, Saccharomyces pastorianus
cacgttcgctcacgagggaattctt

SEQ ID NO: 170888 - DNA, 25 bp, Saccharomyces pastorianus
attcttcatgctaatactatgggat

SEQ ID NO: 170889 - DNA, 25 bp, Saccharomyces pastorianus
tactatgggattgagaactgtgttc

SEQ ID NO: 170890 - DNA, 25 bp, Saccharomyces pastorianus
tcacgagggaattcttcatgctaat

SEQ ID NO: 170891 - DNA, 25 bp, Saccharomyces pastorianus
gttcgctcacgagggaattcttcat

SEQ ID NO: 170892 - DNA, 25 bp, Saccharomyces pastorianus
gagggaattcttcatgctaatacta

SEQ ID NO: 170893 - DNA, 25 bp, Saccharomyces pastorianus
gaggagaccttagtatacgtgacac

SEQ ID NO: 170894 - DNA, 25 bp, Saccharomyces pastorianus
agaccttagtatacgtgacactcgt

SEQ ID NO: 170895 - DNA, 25 bp, Saccharomyces pastorianus
cggactgggagatgagagcactaca

SEQ ID NO: 170896 - DNA, 25 bp, Saccharomyces pastorianus
gatgagagcactacacgagaacagt

SEQ ID NO: 170897 - DNA, 25 bp, Saccharomyces pastorianus
gagaaacgatacactaaatacatta

SEQ ID NO: 170898 - DNA, 25 bp, Saccharomyces pastorianus
actacacgagaacagtggcagagaa

SEQ ID NO: 170899 - DNA, 25 bp, Saccharomyces pastorianus
tttggagtacgtttcattgagccga

SEQ ID NO: 170900 - DNA, 25 bp, Saccharomyces pastorianus
aaggccactccgcatctttggagta

SEQ ID NO: 170901 - DNA, 25 bp, Saccharomyces pastorianus
aaatacattacaaggccactccgca

SEQ ID NO: 170902 - DNA, 25 bp, Saccharomyces pastorianus
tgacactcgtattcacctcctgaaa

SEQ ID NO: 170903 - DNA, 25 bp, Saccharomyces pastorianus
acgtttcattgagccgaggagacct

SEQ ID NO: 170904 - DNA, 25 bp, Saccharomyces pastorianus
gtcttggtgagccatgtttcgacaa

SEQ ID NO: 170905 - DNA, 25 bp, Saccharomyces pastorianus
gtagccacaatttcccaagaacaaa

SEQ ID NO: 170906 - DNA, 25 bp, Saccharomyces pastorianus
ccattcaagtccgtagccacaattt

SEQ ID NO: 170907 - DNA, 25 bp, Saccharomyces pastorianus
cggtgaaaacatctacttctccgtc

SEQ ID NO: 170908 - DNA, 25 bp, Saccharomyces pastorianus
ctgtaccagggtccaagcacaacga

SEQ ID NO: 170909 - DNA, 25 bp, Saccharomyces pastorianus
agatcggctcgggtttccaaggtgt

SEQ ID NO: 170910 - DNA, 25 bp, Saccharomyces pastorianus
ttccaaggtgtctctgtaccagggt

SEQ ID NO: 170911 - DNA, 25 bp, Saccharomyces pastorianus
caataactctggtggtgtgcaaggt

SEQ ID NO: 170912 - DNA, 25 bp, Saccharomyces pastorianus
gcaaggtggtatctccaacggtgaa

SEQ ID NO: 170913 - DNA, 25 bp, Saccharomyces pastorianus
ttggaagccatgctggctcacgcca

SEQ ID NO: 170914 - DNA, 25 bp, Saccharomyces pastorianus
cacaacgacccattctacttcgaaa

SEQ ID NO: 170915 - DNA, 25 bp, Saccharomyces pastorianus
cgcttccctagtggctggaattaat

SEQ ID NO: 170916 - DNA, 25 bp, Saccharomyces pastorianus
cggacgcttccctagtggctggaat

SEQ ID NO: 170917 - DNA, 25 bp, Saccharomyces pastorianus
ccattaagatgtccggacgcttccc

SEQ ID NO: 170918 - DNA, 25 bp, Saccharomyces pastorianus
ccctagtggctggaattaatgcgtc

SEQ ID NO: 170919 - DNA, 25 bp, Saccharomyces pastorianus
taagatgtccggacgcttccctagt

SEQ ID NO: 170920 - DNA, 25 bp, Saccharomyces pastorianus
tagtggctggaattaatgcgtcaag

SEQ ID NO: 170921 - DNA, 25 bp, Saccharomyces pastorianus
gacgcttccctagtggctggaatta

SEQ ID NO: 170922 - DNA, 25 bp, Saccharomyces pastorianus
ttaagatgtccggacgcttccctag

SEQ ID NO: 170923 - DNA, 25 bp, Saccharomyces pastorianus
atgtccggacgcttccctagtggct

SEQ ID NO: 170924 - DNA, 25 bp, Saccharomyces pastorianus
aagatgtccggacgcttccctagtg

SEQ ID NO: 170925 - DNA, 25 bp, Saccharomyces pastorianus
acgcttccctagtggctggaattaa

SEQ ID NO: 170926 - DNA, 25 bp, Saccharomyces pastorianus
tctcatagtggttaaaatcccttac

SEQ ID NO: 170927 - DNA, 25 bp, Saccharomyces pastorianus
catagtggttaaaatcccttactcg

SEQ ID NO: 170928 - DNA, 25 bp, Saccharomyces pastorianus
aagactggtatccaagctaaccctc

SEQ ID NO: 170929 - DNA, 25 bp, Saccharomyces pastorianus
acgtccaggtgctgtgtacaccgta

SEQ ID NO: 170930 - DNA, 25 bp, Saccharomyces pastorianus
gtgtacaccgtaggaaataatatgt

SEQ ID NO: 170931 - DNA, 25 bp, Saccharomyces pastorianus
ctaatatgttggatacaagactggt

SEQ ID NO: 170932 - DNA, 25 bp, Saccharomyces pastorianus
gtatccaagctaaccctcaagtagg

SEQ ID NO: 170933 - DNA, 25 bp, Saccharomyces pastorianus
caggtgctgtgtacaccgtaggaaa

SEQ ID NO: 170934 - DNA, 25 bp, Saccharomyces pastorianus
gaaaacgtccaggtgctgtgtacac

SEQ ID NO: 170935 - DNA, 25 bp, Saccharomyces pastorianus
tcaagtaggaaaacgtccaggtgct

SEQ ID NO: 170936 - DNA, 25 bp, Saccharomyces pastorianus
atcccttactcgttaaatattgtat

SEQ ID NO: 170937 - DNA, 25 bp, Saccharomyces pastorianus
attgaaactgcttcgctaggtgcga

SEQ ID NO: 170938 - DNA, 25 bp, Saccharomyces pastorianus
attgggttatccgacacatcatcag

SEQ ID NO: 170939 - DNA, 25 bp, Saccharomyces pastorianus
tggtggtataccaacaattcttgaa

SEQ ID NO: 170940 - DNA, 25 bp, Saccharomyces pastorianus
aagattccattgaaactgcttcgct

SEQ ID NO: 170941 - DNA, 25 bp, Saccharomyces pastorianus
ttccattgaaactgcttcgctaggt

SEQ ID NO: 170942 - DNA, 25 bp, Saccharomyces pastorianus
gctaggtgcgacgacgactgattct

SEQ ID NO: 170943 - DNA, 25 bp, Saccharomyces pastorianus
gattccattgaaactgcttcgctag

SEQ ID NO: 170944 - DNA, 25 bp, Saccharomyces pastorianus
gggttatccgacacatcatcagaag

SEQ ID NO: 170945 - DNA, 25 bp, Saccharomyces pastorianus
gttatccgacacatcatcagaagat

SEQ ID NO: 170946 - DNA, 25 bp, Saccharomyces pastorianus
aaactgcttcgctaggtgcgacgac

SEQ ID NO: 170947 - DNA, 25 bp, Saccharomyces pastorianus
gactgattctattgggttatccgac

SEQ ID NO: 170948 - DNA, 25 bp, Saccharomyces pastorianus
gaatcttccgataccatcgacaacg

SEQ ID NO: 170949 - DNA, 25 bp, Saccharomyces pastorianus
aaccataacattggaagttgaatct

SEQ ID NO: 170950 - DNA, 25 bp, Saccharomyces pastorianus
aagttgaatcttccgataccatcga

SEQ ID NO: 170951 - DNA, 25 bp, Saccharomyces pastorianus
tccgataccatcgacaacgttaagt

SEQ ID NO: 170952 - DNA, 25 bp, Saccharomyces pastorianus
caacattcagaaggaatctactctt

SEQ ID NO: 170953 - DNA, 25 bp, Saccharomyces pastorianus
cttccgataccatcgacaacgttaa

SEQ ID NO: 170954 - DNA, 25 bp, Saccharomyces pastorianus
atcttccgataccatcgacaacgtt

SEQ ID NO: 170955 - DNA, 25 bp, Saccharomyces pastorianus
cgataccatcgacaacgttaagtcg

SEQ ID NO: 170956 - DNA, 25 bp, Saccharomyces pastorianus
gttgaatcttccgataccatcgaca

SEQ ID NO: 170957 - DNA, 25 bp, Saccharomyces pastorianus
ttgaccggtaaaaccataacattgg

SEQ ID NO: 170958 - DNA, 25 bp, Saccharomyces pastorianus
gtctgattacaacattcagaaggaa

SEQ ID NO: 170959 - DNA, 25 bp, Saccharomyces pastorianus
gagctggctgtaagcgtgtatctta

SEQ ID NO: 170960 - DNA, 25 bp, Saccharomyces pastorianus
gtttaccctggtcgaaatagaatag

SEQ ID NO: 170961 - DNA, 25 bp, Saccharomyces pastorianus
aatagtcgtacatcagagctggctg

SEQ ID NO: 170962 - DNA, 25 bp, Saccharomyces pastorianus
aagcgtgtatcttatgccctacgta

SEQ ID NO: 170963 - DNA, 25 bp, Saccharomyces pastorianus
gatttttgtctgcatacacaagcaa

SEQ ID NO: 170964 - DNA, 25 bp, Saccharomyces pastorianus
gtacaatgttggcaccgccacatgt

SEQ ID NO: 170965 - DNA, 25 bp, Saccharomyces pastorianus
acaagcaatgtttaccctggtcgaa

SEQ ID NO: 170966 - DNA, 25 bp, Saccharomyces pastorianus
agtcttctagaaaagcaccattaag

SEQ ID NO: 170967 - DNA, 25 bp, Saccharomyces pastorianus
gcaccgccacatgtttgttgttaca

SEQ ID NO: 170968 - DNA, 25 bp, Saccharomyces pastorianus
atgccctacgtaaatctcactgagt

SEQ ID NO: 170969 - DNA, 25 bp, Saccharomyces pastorianus
tacatacactgtagatgagctatcg

SEQ ID NO: 170970 - DNA, 25 bp, Saccharomyces pastorianus
gtgattttgcataatactgtaagtg

SEQ ID NO: 170971 - DNA, 25 bp, Saccharomyces pastorianus
aatcttcggtattccattatgtctt

SEQ ID NO: 170972 - DNA, 25 bp, Saccharomyces pastorianus
tatgcactccgttcattgatcctat

SEQ ID NO: 170973 - DNA, 25 bp, Saccharomyces pastorianus
ggatttgggaatccacaaactataa

SEQ ID NO: 170974 - DNA, 25 bp, Saccharomyces pastorianus
ttgatgataatcttcggtattccat

SEQ ID NO: 170975 - DNA, 25 bp, Saccharomyces pastorianus
tcttactttttatgcactccgttca

SEQ ID NO: 170976 - DNA, 25 bp, Saccharomyces pastorianus
gtagatattcttctcatggatttgg

SEQ ID NO: 170977 - DNA, 25 bp, Saccharomyces pastorianus
actttttatgcactccgttcattga

SEQ ID NO: 170978 - DNA, 25 bp, Saccharomyces pastorianus
cttcggtattccattatgtcttaat

SEQ ID NO: 170979 - DNA, 25 bp, Saccharomyces pastorianus
cggattatagtagatattcttctca

SEQ ID NO: 170980 - DNA, 25 bp, Saccharomyces pastorianus
tgggaatccacaaactataataagt

SEQ ID NO: 170981 - DNA, 25 bp, Saccharomyces pastorianus
gtgacgcaatgagctaatgatatgt

SEQ ID NO: 170982 - DNA, 25 bp, Saccharomyces pastorianus
taagctgataccaacttcggagaac

SEQ ID NO: 170983 - DNA, 25 bp, Saccharomyces pastorianus
aactaagctgataccaacttcggag

SEQ ID NO: 170984 - DNA, 25 bp, Saccharomyces pastorianus
ataccaacttcggagaacgtgacgc

SEQ ID NO: 170985 - DNA, 25 bp, Saccharomyces pastorianus
agctaatgatatgtctgcttattgg

SEQ ID NO: 170986 - DNA, 25 bp, Saccharomyces pastorianus
gaaactaagctgataccaacttcgg

SEQ ID NO: 170987 - DNA, 25 bp, Saccharomyces pastorianus
ccaacttcggagaacgtgacgcaat

SEQ ID NO: 170988 - DNA, 25 bp, Saccharomyces pastorianus
atgagctaatgatatgtctgcttat

SEQ ID NO: 170989 - DNA, 25 bp, Saccharomyces pastorianus
gctgataccaacttcggagaacgtg

SEQ ID NO: 170990 - DNA, 25 bp, Saccharomyces pastorianus
ttcggagaacgtgacgcaatgagct

SEQ ID NO: 170991 - DNA, 25 bp, Saccharomyces pastorianus
gaacgtgacgcaatgagctaatgat

SEQ ID NO: 170992 - DNA, 25 bp, Saccharomyces pastorianus
gatgctcccctttcaattaacgaat

SEQ ID NO: 170993 - DNA, 25 bp, Saccharomyces pastorianus
tttgatgctcccctttcaattaacg

SEQ ID NO: 170994 - DNA, 25 bp, Saccharomyces pastorianus
gaatatctattgactggtatttata

SEQ ID NO: 170995 - DNA, 25 bp, Saccharomyces pastorianus
tgatgctcccctttcaattaacgaa

SEQ ID NO: 170996 - DNA, 25 bp, Saccharomyces pastorianus
gctcccctttcaattaacgaatatc

SEQ ID NO: 170997 - DNA, 25 bp, Saccharomyces pastorianus
aacgaatatctattgactggtattt

SEQ ID NO: 170998 - DNA, 25 bp, Saccharomyces pastorianus
ttgatgctcccctttcaattaacga

SEQ ID NO: 170999 - DNA, 25 bp, Saccharomyces pastorianus
atgctcccctttcaattaacgaata

SEQ ID NO: 171000 - DNA, 25 bp, Saccharomyces pastorianus
tcccctttcaattaacgaatatcta

SEQ ID NO: 171001 - DNA, 25 bp, Saccharomyces pastorianus
tgctcccctttcaattaacgaatat

SEQ ID NO: 171002 - DNA, 25 bp, Saccharomyces pastorianus
tatctattgactggtatttatatta

SEQ ID NO: 171003 - DNA, 25 bp, Saccharomyces pastorianus
ccttctattttacatgcttcattat

SEQ ID NO: 171004 - DNA, 25 bp, Saccharomyces pastorianus
ttctccttctattttacatgcttca

SEQ ID NO: 171005 - DNA, 25 bp, Saccharomyces pastorianus
attatttctccttctattttacatg

SEQ ID NO: 171006 - DNA, 25 bp, Saccharomyces pastorianus
tgactgtttttcaattgttgtataa

SEQ ID NO: 171007 - DNA, 25 bp, Saccharomyces pastorianus
ggatcttgggatccaaaatagggaa

SEQ ID NO: 171008 - DNA, 25 bp, Saccharomyces pastorianus
caattcagctctcattaagtctaat

SEQ ID NO: 171009 - DNA, 25 bp, Saccharomyces pastorianus
ggatccaaaatagggaatcggtatt

SEQ ID NO: 171010 - DNA, 25 bp, Saccharomyces pastorianus
ctagctatgcaattcagctctcatt

SEQ ID NO: 171011 - DNA, 25 bp, Saccharomyces pastorianus
cggtatttctgcataatattgctat

SEQ ID NO: 171012 - DNA, 25 bp, Saccharomyces pastorianus
gctctcattaagtctaatgactgtt

SEQ ID NO: 171013 - DNA, 25 bp, Saccharomyces pastorianus
tcctattacattatctagctatgca

SEQ ID NO: 171014 - DNA, 25 bp, Saccharomyces pastorianus
gcaaacctcataagcacttctacac

SEQ ID NO: 171015 - DNA, 25 bp, Saccharomyces pastorianus
agcagcatcagttcttcagctagat

SEQ ID NO: 171016 - DNA, 25 bp, Saccharomyces pastorianus
aagttcgaatttggcttccaccact

SEQ ID NO: 171017 - DNA, 25 bp, Saccharomyces pastorianus
ccaccactgattctacttctgtaag

SEQ ID NO: 171018 - DNA, 25 bp, Saccharomyces pastorianus
gattatccaacactaccagatcgtc

SEQ ID NO: 171019 - DNA, 25 bp, Saccharomyces pastorianus
gttgaacgcgtcaccagatctggat

SEQ ID NO: 171020 - DNA, 25 bp, Saccharomyces pastorianus
attggcttccaactctgcaagcatt

SEQ ID NO: 171021 - DNA, 25 bp, Saccharomyces pastorianus
tctgcttcaagttcggcacacactt

SEQ ID NO: 171022 - DNA, 25 bp, Saccharomyces pastorianus
agatctggatcatcctccgatgtct

SEQ ID NO: 171023 - DNA, 25 bp, Saccharomyces pastorianus
acttctgcgcccgtggatatcacta

SEQ ID NO: 171024 - DNA, 25 bp, Saccharomyces pastorianus
tcactagcgccattgatgcaaacct

SEQ ID NO: 171025 - DNA, 25 bp, Saccharomyces pastorianus
gcagtgtgccacaccatctactgag

SEQ ID NO: 171026 - DNA, 25 bp, Saccharomyces pastorianus
ctgagtgtacattgcgatgcgactt

SEQ ID NO: 171027 - DNA, 25 bp, Saccharomyces pastorianus
agtgtacattgcgatgcgacttcca

SEQ ID NO: 171028 - DNA, 25 bp, Saccharomyces pastorianus
attgcgatgcgacttccactaccga

SEQ ID NO: 171029 - DNA, 25 bp, Saccharomyces pastorianus
gtacattgcgatgcgacttccacta

SEQ ID NO: 171030 - DNA, 25 bp, Saccharomyces pastorianus
tccactaccgactactccagcagtg

SEQ ID NO: 171031 - DNA, 25 bp, Saccharomyces pastorianus
gatgcgacttccactaccgactact

SEQ ID NO: 171032 - DNA, 25 bp, Saccharomyces pastorianus
tactgagtgtacattgcgatgcgac

SEQ ID NO: 171033 - DNA, 25 bp, Saccharomyces pastorianus
atactccagcagtgtgccacaccat

SEQ ID NO: 171034 - DNA, 25 bp, Saccharomyces pastorianus
accatctactgagtgtacattgcga

SEQ ID NO: 171035 - DNA, 25 bp, Saccharomyces pastorianus
atctactgagtgtacattgcgatgc

SEQ ID NO: 171036 - DNA, 25 bp, Saccharomyces pastorianus
tactgaggcatgtttgccatcaggt

SEQ ID NO: 171037 - DNA, 25 bp, Saccharomyces pastorianus
taacttcaggaagtactgaggcatg

SEQ ID NO: 171038 - DNA, 25 bp, Saccharomyces pastorianus
attttcgacggtactcgccttcctg

SEQ ID NO: 171039 - DNA, 25 bp, Saccharomyces pastorianus
aggcatgtttgccatcaggtgaaaa

SEQ ID NO: 171040 - DNA, 25 bp, Saccharomyces pastorianus
gacggtactcgccttcctggctcta

SEQ ID NO: 171041 - DNA, 25 bp, Saccharomyces pastorianus
gtcattacatattttcgacggtact

SEQ ID NO: 171042 - DNA, 25 bp, Saccharomyces pastorianus
gaatattaatttttaccagtatacg

SEQ ID NO: 171043 - DNA, 25 bp, Saccharomyces pastorianus
gcatgtttgccatcaggtgaaaaaa

SEQ ID NO: 171044 - DNA, 25 bp, Saccharomyces pastorianus
caggaagtactgaggcatgtttgcc

SEQ ID NO: 171045 - DNA, 25 bp, Saccharomyces pastorianus
aagtactgaggcatgtttgccatca

SEQ ID NO: 171046 - DNA, 25 bp, Saccharomyces pastorianus
acatattttcgacggtactcgcctt

SEQ ID NO: 171047 - DNA, 25 bp, Saccharomyces pastorianus
ccaacatcgactaaaggtacctaga

SEQ ID NO: 171048 - DNA, 25 bp, Saccharomyces pastorianus
ctagagtcccgcagagatgtaaaaa

SEQ ID NO: 171049 - DNA, 25 bp, Saccharomyces pastorianus
atgctggacgataccaacatcgact

SEQ ID NO: 171050 - DNA, 25 bp, Saccharomyces pastorianus
ggtacctagagtcccgcagagatgt

SEQ ID NO: 171051 - DNA, 25 bp, Saccharomyces pastorianus
gattttgcagccttctccagtgaga

SEQ ID NO: 171052 - DNA, 25 bp, Saccharomyces pastorianus
gaacagcaactagaatccgcgcaaa

SEQ ID NO: 171053 - DNA, 25 bp, Saccharomyces pastorianus
gatgtaaaaaacactgaacgggaca

SEQ ID NO: 171054 - DNA, 25 bp, Saccharomyces pastorianus
actacagctcgtcaaggagaagtgc

SEQ ID NO: 171055 - DNA, 25 bp, Saccharomyces pastorianus
aaaggccaccgggattttgcagcct

SEQ ID NO: 171056 - DNA, 25 bp, Saccharomyces pastorianus
gctgcaatcgatgctggacgatacc

SEQ ID NO: 171057 - DNA, 25 bp, Saccharomyces pastorianus
gcaaaaggaactacagctcgtcaag

SEQ ID NO: 171058 - DNA, 25 bp, Saccharomyces pastorianus
aacgttgccagagttgacgaagaag

SEQ ID NO: 171059 - DNA, 25 bp, Saccharomyces pastorianus
aatcaacgttgccagagttgacgaa

SEQ ID NO: 171060 - DNA, 25 bp, Saccharomyces pastorianus
gtgccattccaggtgaatacgttac

SEQ ID NO: 171061 - DNA, 25 bp, Saccharomyces pastorianus
gaaccgtttggctcaaaacgatggt

SEQ ID NO: 171062 - DNA, 25 bp, Saccharomyces pastorianus
tcgaactttacgttccaagaaaatg

SEQ ID NO: 171063 - DNA, 25 bp, Saccharomyces pastorianus
gagttgacgaagaaggccgtgccat

SEQ ID NO: 171064 - DNA, 25 bp, Saccharomyces pastorianus
ttacgttccaagaaaatgttctgct

SEQ ID NO: 171065 - DNA, 25 bp, Saccharomyces pastorianus
ccgatgactctttgaaccgtttggc

SEQ ID NO: 171066 - DNA, 25 bp, Saccharomyces pastorianus
tgactctttgaaccgtttggctcaa

SEQ ID NO: 171067 - DNA, 25 bp, Saccharomyces pastorianus
agttgacgaagaaggccgtgccatt

SEQ ID NO: 171068 - DNA, 25 bp, Saccharomyces pastorianus
gatgactctttgaaccgtttggctc

SEQ ID NO: 171069 - DNA, 25 bp, Saccharomyces pastorianus
gggcttttcatcctgttcaatcacg

SEQ ID NO: 171070 - DNA, 25 bp, Saccharomyces pastorianus
gcggcatgcatggaacgttagattt

SEQ ID NO: 171071 - DNA, 25 bp, Saccharomyces pastorianus
tgttcaatcacgttaggcccgttga

SEQ ID NO: 171072 - DNA, 25 bp, Saccharomyces pastorianus
ttctttactacttgactctggtctt

SEQ ID NO: 171073 - DNA, 25 bp, Saccharomyces pastorianus
gggctatctgtttcattattagaat

SEQ ID NO: 171074 - DNA, 25 bp, Saccharomyces pastorianus
tctggttccccttcttgagtgtagc

SEQ ID NO: 171075 - DNA, 25 bp, Saccharomyces pastorianus
tggatcgggttatgttttccggaat

SEQ ID NO: 171076 - DNA, 25 bp, Saccharomyces pastorianus
taggcccgttgacgaatgtccttgt

SEQ ID NO: 171077 - DNA, 25 bp, Saccharomyces pastorianus
tagatttgtttagcggtgcctctgt

SEQ ID NO: 171078 - DNA, 25 bp, Saccharomyces pastorianus
tagtggtgaacacttctggttcccc

SEQ ID NO: 171079 - DNA, 25 bp, Saccharomyces pastorianus
gactctggtctttggtagggtgtat

SEQ ID NO: 171080 - DNA, 25 bp, Saccharomyces pastorianus
ggtatatatacatccaacgccagtc

SEQ ID NO: 171081 - DNA, 25 bp, Saccharomyces pastorianus
caggatgtggtgcttggtatatata

SEQ ID NO: 171082 - DNA, 25 bp, Saccharomyces pastorianus
gcaatcaggatgtggtgcttggtat

SEQ ID NO: 171083 - DNA, 25 bp, Saccharomyces pastorianus
gttccttgaaaagctgatgtctcat

SEQ ID NO: 171084 - DNA, 25 bp, Saccharomyces pastorianus
ttttgggctgttccttgaaaagctg

SEQ ID NO: 171085 - DNA, 25 bp, Saccharomyces pastorianus
gtcagtgtttggaggcaattgtaat

SEQ ID NO: 171086 - DNA, 25 bp, Saccharomyces pastorianus
ggcatccctgggttgcaatcaggat

SEQ ID NO: 171087 - DNA, 25 bp, Saccharomyces pastorianus
tacatccaacgccagtcagtgtttg

SEQ ID NO: 171088 - DNA, 25 bp, Saccharomyces pastorianus
attgttgttgtgaaattttgggctg

SEQ ID NO: 171089 - DNA, 25 bp, Saccharomyces pastorianus
gatgtctcataatatatttgttgta

SEQ ID NO: 171090 - DNA, 25 bp, Saccharomyces pastorianus
aacgccagtcagtgtttggaggcaa

SEQ ID NO: 171091 - DNA, 25 bp, Saccharomyces pastorianus
ttcacccgcttgtcgttgataacga

SEQ ID NO: 171092 - DNA, 25 bp, Saccharomyces pastorianus
tcaaacagcaaagaacgtttcattg

SEQ ID NO: 171093 - DNA, 25 bp, Saccharomyces pastorianus
tttgggccttatcgcttatcaccag

SEQ ID NO: 171094 - DNA, 25 bp, Saccharomyces pastorianus
ttatcaccagtgctaatcaaacagc

SEQ ID NO: 171095 - DNA, 25 bp, Saccharomyces pastorianus
ataacgagtttgggccttatcgctt

SEQ ID NO: 171096 - DNA, 25 bp, Saccharomyces pastorianus
atcgcttatcaccagtgctaatcaa

SEQ ID NO: 171097 - DNA, 25 bp, Saccharomyces pastorianus
gttgataacgagtttgggccttatc

SEQ ID NO: 171098 - DNA, 25 bp, Saccharomyces pastorianus
ccttatcgcttatcaccagtgctaa

SEQ ID NO: 171099 - DNA, 25 bp, Saccharomyces pastorianus
acagggctgtagcaatcttcacccg

SEQ ID NO: 171100 - DNA, 25 bp, Saccharomyces pastorianus
cgagtttgggccttatcgcttatca

SEQ ID NO: 171101 - DNA, 25 bp, Saccharomyces pastorianus
aatcttcacccgcttgtcgttgata

SEQ ID NO: 171102 - DNA, 25 bp, Saccharomyces pastorianus
gatcaagacgattgccttcgaacga

SEQ ID NO: 171103 - DNA, 25 bp, Saccharomyces pastorianus
gacgattgccttcgaacgacgttta

SEQ ID NO: 171104 - DNA, 25 bp, Saccharomyces pastorianus
aaaaagatcaagacgattgccttcg

SEQ ID NO: 171105 - DNA, 25 bp, Saccharomyces pastorianus
caagacgattgccttcgaacgacgt

SEQ ID NO: 171106 - DNA, 25 bp, Saccharomyces pastorianus
aagacgattgccttcgaacgacgtt

SEQ ID NO: 171107 - DNA, 25 bp, Saccharomyces pastorianus
cgattgccttcgaacgacgtttacg

SEQ ID NO: 171108 - DNA, 25 bp, Saccharomyces pastorianus
aaagatcaagacgattgccttcgaa

SEQ ID NO: 171109 - DNA, 25 bp, Saccharomyces pastorianus
atcaagacgattgccttcgaacgac

SEQ ID NO: 171110 - DNA, 25 bp, Saccharomyces pastorianus
gattgccttcgaacgacgtttacgt

SEQ ID NO: 171111 - DNA, 25 bp, Saccharomyces pastorianus
agacgattgccttcgaacgacgttt

SEQ ID NO: 171112 - DNA, 25 bp, Saccharomyces pastorianus
agatcaagacgattgccttcgaacg

SEQ ID NO: 171113 - DNA, 25 bp, Saccharomyces pastorianus
ttataaaagagaatgccgccagctt

SEQ ID NO: 171114 - DNA, 25 bp, Saccharomyces pastorianus
tataaaagagaatgccgccagcttt

SEQ ID NO: 171115 - DNA, 25 bp, Saccharomyces pastorianus
caattataaaagagaatgccgccag

SEQ ID NO: 171116 - DNA, 25 bp, Saccharomyces pastorianus
gagaatgccgccagcttttttctct

SEQ ID NO: 171117 - DNA, 25 bp, Saccharomyces pastorianus
aattataaaagagaatgccgccagc

SEQ ID NO: 171118 - DNA, 25 bp, Saccharomyces pastorianus
attataaaagagaatgccgccagct

SEQ ID NO: 171119 - DNA, 25 bp, Saccharomyces pastorianus
ataaaagagaatgccgccagctttt

SEQ ID NO: 171120 - DNA, 25 bp, Saccharomyces pastorianus
aaaagagaatgccgccagctttttt

SEQ ID NO: 171121 - DNA, 25 bp, Saccharomyces pastorianus
taaaagagaatgccgccagcttttt

SEQ ID NO: 171122 - DNA, 25 bp, Saccharomyces pastorianus
agagaatgccgccagcttttttctc

SEQ ID NO: 171123 - DNA, 25 bp, Saccharomyces pastorianus
ccgtgagagggcaattataaaagag

SEQ ID NO: 171124 - DNA, 25 bp, Saccharomyces pastorianus
tacattattgatccttgtatttcag

SEQ ID NO: 171125 - DNA, 25 bp, Saccharomyces pastorianus
gaggatataggcatccccaaaaagg

SEQ ID NO: 171126 - DNA, 25 bp, Saccharomyces pastorianus
tattgatccttgtatttcagctttc

SEQ ID NO: 171127 - DNA, 25 bp, Saccharomyces pastorianus
cgaggatataggcatccccaaaaag

SEQ ID NO: 171128 - DNA, 25 bp, Saccharomyces pastorianus
ttgatccttgtatttcagctttctc

SEQ ID NO: 171129 - DNA, 25 bp, Saccharomyces pastorianus
tgatccttgtatttcagctttctct

SEQ ID NO: 171130 - DNA, 25 bp, Saccharomyces pastorianus
gcatccccaaaaaggaatcgatatt

SEQ ID NO: 171131 - DNA, 25 bp, Saccharomyces pastorianus
taggcatccccaaaaaggaatcgat

SEQ ID NO: 171132 - DNA, 25 bp, Saccharomyces pastorianus
tataggcatccccaaaaaggaatcg

SEQ ID NO: 171133 - DNA, 25 bp, Saccharomyces pastorianus
ggatataggcatccccaaaaaggaa

SEQ ID NO: 171134 - DNA, 25 bp, Saccharomyces pastorianus
aggatataggcatccccaaaaagga

SEQ ID NO: 171135 - DNA, 25 bp, Saccharomyces pastorianus
tagtccaaggtccaagatcgtactt

SEQ ID NO: 171136 - DNA, 25 bp, Saccharomyces pastorianus
aactgcagttacctgcgaatcctgc

SEQ ID NO: 171137 - DNA, 25 bp, Saccharomyces pastorianus
tgctcaacaattttgtgcaccccaa

SEQ ID NO: 171138 - DNA, 25 bp, Saccharomyces pastorianus
gcaccccaactggtggtaaggcaaa

SEQ ID NO: 171139 - DNA, 25 bp, Saccharomyces pastorianus
ggtccaagatcgtacttcctagacg

SEQ ID NO: 171140 - DNA, 25 bp, Saccharomyces pastorianus
ctagacgttaagtgcccaggttgtt

SEQ ID NO: 171141 - DNA, 25 bp, Saccharomyces pastorianus
gtacttcctagacgttaagtgccca

SEQ ID NO: 171142 - DNA, 25 bp, Saccharomyces pastorianus
ttttgtgcaccccaactggtggtaa

SEQ ID NO: 171143 - DNA, 25 bp, Saccharomyces pastorianus
ttctcacacgcccaaactgcagtta

SEQ ID NO: 171144 - DNA, 25 bp, Saccharomyces pastorianus
ctgcgaatcctgctcaacaattttg

SEQ ID NO: 171145 - DNA, 25 bp, Saccharomyces pastorianus
taaagacattagtccaaggtccaag

SEQ ID NO: 171146 - DNA, 25 bp, Saccharomyces pastorianus
caaagtccaaagcaacctatccaga

SEQ ID NO: 171147 - DNA, 25 bp, Saccharomyces pastorianus
agataccgaatttaacatctccggt

SEQ ID NO: 171148 - DNA, 25 bp, Saccharomyces pastorianus
agcaacctatccagataccgaattt

SEQ ID NO: 171149 - DNA, 25 bp, Saccharomyces pastorianus
ggcaaagtccaaagcaacctatcca

SEQ ID NO: 171150 - DNA, 25 bp, Saccharomyces pastorianus
gtttacgctgaatagctggtggcaa

SEQ ID NO: 171151 - DNA, 25 bp, Saccharomyces pastorianus
acgctgaatagctggtggcaaagtc

SEQ ID NO: 171152 - DNA, 25 bp, Saccharomyces pastorianus
tcaaagtttacgctgaatagctggt

SEQ ID NO: 171153 - DNA, 25 bp, Saccharomyces pastorianus
ggtggcaaagtccaaagcaacctat

SEQ ID NO: 171154 - DNA, 25 bp, Saccharomyces pastorianus
atagctggtggcaaagtccaaagca

SEQ ID NO: 171155 - DNA, 25 bp, Saccharomyces pastorianus
acctatccagataccgaatttaaca

SEQ ID NO: 171156 - DNA, 25 bp, Saccharomyces pastorianus
ctgaatagctggtggcaaagtccaa

SEQ ID NO: 171157 - DNA, 25 bp, Saccharomyces pastorianus
agcccaactttcctattaagctgcg

SEQ ID NO: 171158 - DNA, 25 bp, Saccharomyces pastorianus
accatttgccttatttgtttctctg

SEQ ID NO: 171159 - DNA, 25 bp, Saccharomyces pastorianus
tacacttttttccattgcatgttac

SEQ ID NO: 171160 - DNA, 25 bp, Saccharomyces pastorianus
gtttcgctgaagtagcctcattttt

SEQ ID NO: 171161 - DNA, 25 bp, Saccharomyces pastorianus
ggtcttgaatcactacttctggttc

SEQ ID NO: 171162 - DNA, 25 bp, Saccharomyces pastorianus
agctgcgtatgtgtggtcttgaatc

SEQ ID NO: 171163 - DNA, 25 bp, Saccharomyces pastorianus
cttatttgtttctctgtcagctggt

SEQ ID NO: 171164 - DNA, 25 bp, Saccharomyces pastorianus
tgatccaaattatataccacgcaga

SEQ ID NO: 171165 - DNA, 25 bp, Saccharomyces pastorianus
acgcagacgtgctagtttcgctgaa

SEQ ID NO: 171166 - DNA, 25 bp, Saccharomyces pastorianus
gctactgttactagacggtttcccg

SEQ ID NO: 171167 - DNA, 25 bp, Saccharomyces pastorianus
gattatgtgctaccaacgactagtg

SEQ ID NO: 171168 - DNA, 25 bp, Saccharomyces pastorianus
gcgactataagcacaaatccgaact

SEQ ID NO: 171169 - DNA, 25 bp, Saccharomyces pastorianus
gaacttgaattctaatgtgatgcag

SEQ ID NO: 171170 - DNA, 25 bp, Saccharomyces pastorianus
agcactggtgccatattgaataaca

SEQ ID NO: 171171 - DNA, 25 bp, Saccharomyces pastorianus
aacctaatatttcctgactcctcca

SEQ ID NO: 171172 - DNA, 25 bp, Saccharomyces pastorianus
gcacaaatccgaacttgaattctaa

SEQ ID NO: 171173 - DNA, 25 bp, Saccharomyces pastorianus
ggcagctaattcgactaaaaaccta

SEQ ID NO: 171174 - DNA, 25 bp, Saccharomyces pastorianus
agcaacaaaatcatggaataacctc

SEQ ID NO: 171175 - DNA, 25 bp, Saccharomyces pastorianus
attcaagacatattagcactggtgc

SEQ ID NO: 171176 - DNA, 25 bp, Saccharomyces pastorianus
gataagcgccccattgctaaacaat

SEQ ID NO: 171177 - DNA, 25 bp, Saccharomyces pastorianus
gaataacacaatcgcgactataagc

SEQ ID NO: 171178 - DNA, 25 bp, Saccharomyces pastorianus
taacctcaaagataagcgccccatt

SEQ ID NO: 171179 - DNA, 25 bp, Saccharomyces pastorianus
gtccgcctctaagcaagtacatcat

SEQ ID NO: 171180 - DNA, 25 bp, Saccharomyces pastorianus
aagcaagtacatcattggttgtctg

SEQ ID NO: 171181 - DNA, 25 bp, Saccharomyces pastorianus
tacatcattggttgtctgggagact

SEQ ID NO: 171182 - DNA, 25 bp, Saccharomyces pastorianus
atcatcaccggacggtattgttggt

SEQ ID NO: 171183 - DNA, 25 bp, Saccharomyces pastorianus
tacagttacatcatcaccggacggt

SEQ ID NO: 171184 - DNA, 25 bp, Saccharomyces pastorianus
gtctcatacaagtacaacgatcaat

SEQ ID NO: 171185 - DNA, 25 bp, Saccharomyces pastorianus
gtctgggagactacagttacatcat

SEQ ID NO: 171186 - DNA, 25 bp, Saccharomyces pastorianus
gagactacagttacatcatcaccgg

SEQ ID NO: 171187 - DNA, 25 bp, Saccharomyces pastorianus
aatttgtcggtggtttattcaacag

SEQ ID NO: 171188 - DNA, 25 bp, Saccharomyces pastorianus
agttacatcatcaccggacggtatt

SEQ ID NO: 171189 - DNA, 25 bp, Saccharomyces pastorianus
aaagtctcatacaagtacaacgatc

SEQ ID NO: 171190 - DNA, 25 bp, Saccharomyces pastorianus
aaaaaggaacactttcacacaagca

SEQ ID NO: 171191 - DNA, 25 bp, Saccharomyces pastorianus
ggaacactttcacacaagcaagtat

SEQ ID NO: 171192 - DNA, 25 bp, Saccharomyces pastorianus
aggaacactttcacacaagcaagta

SEQ ID NO: 171193 - DNA, 25 bp, Saccharomyces pastorianus
gaacactttcacacaagcaagtata

SEQ ID NO: 171194 - DNA, 25 bp, Saccharomyces pastorianus
aaaggaacactttcacacaagcaag

SEQ ID NO: 171195 - DNA, 25 bp, Saccharomyces pastorianus
caagcaagtatatctcatgagaatt

SEQ ID NO: 171196 - DNA, 25 bp, Saccharomyces pastorianus
aaaaggaacactttcacacaagcaa

SEQ ID NO: 171197 - DNA, 25 bp, Saccharomyces pastorianus
cacaagcaagtatatctcatgagaa

SEQ ID NO: 171198 - DNA, 25 bp, Saccharomyces pastorianus
agcaagtatatctcatgagaatttt

SEQ ID NO: 171199 - DNA, 25 bp, Saccharomyces pastorianus
aaggaacactttcacacaagcaagt

SEQ ID NO: 171200 - DNA, 25 bp, Saccharomyces pastorianus
acaagcaagtatatctcatgagaat

SEQ ID NO: 171201 - DNA, 25 bp, Saccharomyces pastorianus
tcaattgctctcgtttaatttcagc

SEQ ID NO: 171202 - DNA, 25 bp, Saccharomyces pastorianus
tcgttttgattatccctggttccat

SEQ ID NO: 171203 - DNA, 25 bp, Saccharomyces pastorianus
tccctggttccatcttcataataag

SEQ ID NO: 171204 - DNA, 25 bp, Saccharomyces pastorianus
taggttttcttttcctgataacaag

SEQ ID NO: 171205 - DNA, 25 bp, Saccharomyces pastorianus
gggctggcaatctcttctaaattta

SEQ ID NO: 171206 - DNA, 25 bp, Saccharomyces pastorianus
attggaattgtcacttgggccttcg

SEQ ID NO: 171207 - DNA, 25 bp, Saccharomyces pastorianus
tatctatttctttagggctggcaat

SEQ ID NO: 171208 - DNA, 25 bp, Saccharomyces pastorianus
gtcattctctgtctattattcgttt

SEQ ID NO: 171209 - DNA, 25 bp, Saccharomyces pastorianus
tgggccttcgtaattctttcttttg

SEQ ID NO: 171210 - DNA, 25 bp, Saccharomyces pastorianus
gacagacacgccacaattttcaaaa

SEQ ID NO: 171211 - DNA, 25 bp, Saccharomyces pastorianus
gaatggtgtctgttctcagtagtaa

SEQ ID NO: 171212 - DNA, 25 bp, Saccharomyces pastorianus
attagtcacaattaataatgttgga

SEQ ID NO: 171213 - DNA, 25 bp, Saccharomyces pastorianus
ccagagaacttgttatattagtcac

SEQ ID NO: 171214 - DNA, 25 bp, Saccharomyces pastorianus
gtgtcatgcaagtctttacattaaa

SEQ ID NO: 171215 - DNA, 25 bp, Saccharomyces pastorianus
accaccagagaacttgttatattag

SEQ ID NO: 171216 - DNA, 25 bp, Saccharomyces pastorianus
tatggtaaccaccagagaacttgtt

SEQ ID NO: 171217 - DNA, 25 bp, Saccharomyces pastorianus
gtaaccaccagagaacttgttatat

SEQ ID NO: 171218 - DNA, 25 bp, Saccharomyces pastorianus
tacattaaatatatggtaaccacca

SEQ ID NO: 171219 - DNA, 25 bp, Saccharomyces pastorianus
tggtaaccaccagagaacttgttat

SEQ ID NO: 171220 - DNA, 25 bp, Saccharomyces pastorianus
atgtgtcatgcaagtctttacatta

SEQ ID NO: 171221 - DNA, 25 bp, Saccharomyces pastorianus
gagaacttgttatattagtcacaat

SEQ ID NO: 171222 - DNA, 25 bp, Saccharomyces pastorianus
tatatggtaaccaccagagaacttg

SEQ ID NO: 171223 - DNA, 25 bp, Saccharomyces pastorianus
gaacggatccggacatcagccaaat

SEQ ID NO: 171224 - DNA, 25 bp, Saccharomyces pastorianus
acacttaccctatccgagcgaaata

SEQ ID NO: 171225 - DNA, 25 bp, Saccharomyces pastorianus
gacatcagccaaatatactccggga

SEQ ID NO: 171226 - DNA, 25 bp, Saccharomyces pastorianus
cctatccgagcgaaatacactaatt

SEQ ID NO: 171227 - DNA, 25 bp, Saccharomyces pastorianus
attaccattcactcggaacggatcc

SEQ ID NO: 171228 - DNA, 25 bp, Saccharomyces pastorianus
gacactgatagtgatatacagcaac

SEQ ID NO: 171229 - DNA, 25 bp, Saccharomyces pastorianus
tggagcgattaccattcactcggaa

SEQ ID NO: 171230 - DNA, 25 bp, Saccharomyces pastorianus
gccaaatatactccgggatccctaa

SEQ ID NO: 171231 - DNA, 25 bp, Saccharomyces pastorianus
tatacagcaacacaatggagcgatt

SEQ ID NO: 171232 - DNA, 25 bp, Saccharomyces pastorianus
ataacagggtaaaaaggtgcgcaag

SEQ ID NO: 171233 - DNA, 25 bp, Saccharomyces pastorianus
gatccctaaaaggtccgtacacact

SEQ ID NO: 171234 - DNA, 25 bp, Saccharomyces pastorianus
ctaaaacgagtgtgtgtttcgtatt

SEQ ID NO: 171235 - DNA, 25 bp, Saccharomyces pastorianus
cgtccgtacgctttactgtaaatga

SEQ ID NO: 171236 - DNA, 25 bp, Saccharomyces pastorianus
tgaattctttctaccttttatccct

SEQ ID NO: 171237 - DNA, 25 bp, Saccharomyces pastorianus
ttcgtccgtacgctttactgtaaat

SEQ ID NO: 171238 - DNA, 25 bp, Saccharomyces pastorianus
ttttatccctcactatgcctttctt

SEQ ID NO: 171239 - DNA, 25 bp, Saccharomyces pastorianus
tttctaccttttatccctcactatg

SEQ ID NO: 171240 - DNA, 25 bp, Saccharomyces pastorianus
gttactacttagtgtgcgtgctcaa

SEQ ID NO: 171241 - DNA, 25 bp, Saccharomyces pastorianus
cctcactatgcctttcttttatttg

SEQ ID NO: 171242 - DNA, 25 bp, Saccharomyces pastorianus
aaatgaacgttgttactacttagtg

SEQ ID NO: 171243 - DNA, 25 bp, Saccharomyces pastorianus
tttgtttcgtccgtacgctttactg

SEQ ID NO: 171244 - DNA, 25 bp, Saccharomyces pastorianus
tactacttagtgtgcgtgctcaagt

SEQ ID NO: 171245 - DNA, 25 bp, Saccharomyces pastorianus
aatactcctaccttctgtttcttat

SEQ ID NO: 171246 - DNA, 25 bp, Saccharomyces pastorianus
ccttctgtttcttatgtttcattat

SEQ ID NO: 171247 - DNA, 25 bp, Saccharomyces pastorianus
ttaggtttgatgactgtatctcaat

SEQ ID NO: 171248 - DNA, 25 bp, Saccharomyces pastorianus
ctaccttctgtttcttatgtttcat

SEQ ID NO: 171249 - DNA, 25 bp, Saccharomyces pastorianus
actcctaccttctgtttcttatgtt

SEQ ID NO: 171250 - DNA, 25 bp, Saccharomyces pastorianus
tacataataatactcctaccttctg

SEQ ID NO: 171251 - DNA, 25 bp, Saccharomyces pastorianus
aataatactcctaccttctgtttct

SEQ ID NO: 171252 - DNA, 25 bp, Saccharomyces pastorianus
attatcaatccctgcatttcgcttc

SEQ ID NO: 171253 - DNA, 25 bp, Saccharomyces pastorianus
ttcgcttccattaggtttgatgact

SEQ ID NO: 171254 - DNA, 25 bp, Saccharomyces pastorianus
gcatttcgcttccattaggtttgat

SEQ ID NO: 171255 - DNA, 25 bp, Saccharomyces pastorianus
aatccctgcatttcgcttccattag

SEQ ID NO: 171256 - DNA, 25 bp, Saccharomyces pastorianus
gtaactagaaccattttccgtcatt

SEQ ID NO: 171257 - DNA, 25 bp, Saccharomyces pastorianus
ttaacagtaacggatgcacatctag

SEQ ID NO: 171258 - DNA, 25 bp, Saccharomyces pastorianus
gtagagggaatgcaactccacttgg

SEQ ID NO: 171259 - DNA, 25 bp, Saccharomyces pastorianus
agggaatgcaactccacttggtatt

SEQ ID NO: 171260 - DNA, 25 bp, Saccharomyces pastorianus
taacactaagaggtggtaactagaa

SEQ ID NO: 171261 - DNA, 25 bp, Saccharomyces pastorianus
aactccacttggtattaacactaag

SEQ ID NO: 171262 - DNA, 25 bp, Saccharomyces pastorianus
gaaccattttccgtcatttatggaa

SEQ ID NO: 171263 - DNA, 25 bp, Saccharomyces pastorianus
gaacataagttcacttggactttgg

SEQ ID NO: 171264 - DNA, 25 bp, Saccharomyces pastorianus
tccgtcatttatggaattttatcga

SEQ ID NO: 171265 - DNA, 25 bp, Saccharomyces pastorianus
ggaattttatcgaaggtgttcatta

SEQ ID NO: 171266 - DNA, 25 bp, Saccharomyces pastorianus
acggatgcacatctagtagagggaa

SEQ ID NO: 171267 - DNA, 25 bp, Saccharomyces pastorianus
agacaagaccatcgccacgtcgggt

SEQ ID NO: 171268 - DNA, 25 bp, Saccharomyces pastorianus
cgggtcacgatttgtacgggcgcaa

SEQ ID NO: 171269 - DNA, 25 bp, Saccharomyces pastorianus
tggcgaaagagctgtgtatgagaac

SEQ ID NO: 171270 - DNA, 25 bp, Saccharomyces pastorianus
ctattaacaagatcatacacggtgg

SEQ ID NO: 171271 - DNA, 25 bp, Saccharomyces pastorianus
acgagaccggtgtcattaagaactt

SEQ ID NO: 171272 - DNA, 25 bp, Saccharomyces pastorianus
gtatgagaacaacgagaccggtgtc

SEQ ID NO: 171273 - DNA, 25 bp, Saccharomyces pastorianus
cttggaattgcaaaagcccaccatc

SEQ ID NO: 171274 - DNA, 25 bp, Saccharomyces pastorianus
accggtgtcattaagaacttggaat

SEQ ID NO: 171275 - DNA, 25 bp, Saccharomyces pastorianus
ggaacgcagacaagaccatcgccac

SEQ ID NO: 171276 - DNA, 25 bp, Saccharomyces pastorianus
gtacgggcgcaagaacactattaac

SEQ ID NO: 171277 - DNA, 25 bp, Saccharomyces pastorianus
tcgccacgtcgggtcacgatttgta

SEQ ID NO: 171278 - DNA, 25 bp, Saccharomyces pastorianus
agtagctgaaacaggcaccaggcca

SEQ ID NO: 171279 - DNA, 25 bp, Saccharomyces pastorianus
gactcatacattaccatcactgaag

SEQ ID NO: 171280 - DNA, 25 bp, Saccharomyces pastorianus
tcgtctgtatcttcgtctggttcat

SEQ ID NO: 171281 - DNA, 25 bp, Saccharomyces pastorianus
gggtaccacagttacattgactcaa

SEQ ID NO: 171282 - DNA, 25 bp, Saccharomyces pastorianus
gtgcgccaacgtccatgtgggtcac

SEQ ID NO: 171283 - DNA, 25 bp, Saccharomyces pastorianus
tgtctgctgtcactagtctatctat

SEQ ID NO: 171284 - DNA, 25 bp, Saccharomyces pastorianus
acagacttcacagaacctcctgtgt

SEQ ID NO: 171285 - DNA, 25 bp, Saccharomyces pastorianus
gaccacatcgacagggagcgcagta

SEQ ID NO: 171286 - DNA, 25 bp, Saccharomyces pastorianus
aaacgttcacacattctagcaccag

SEQ ID NO: 171287 - DNA, 25 bp, Saccharomyces pastorianus
gaaggtacaacctccacttacacaa

SEQ ID NO: 171288 - DNA, 25 bp, Saccharomyces pastorianus
ggttcatcctccagtgtaaagacga

SEQ ID NO: 171289 - DNA, 25 bp, Saccharomyces pastorianus
gctagcaccagtgaacatcaattta

SEQ ID NO: 171290 - DNA, 25 bp, Saccharomyces pastorianus
actgctacggtggttctgcaagaaa

SEQ ID NO: 171291 - DNA, 25 bp, Saccharomyces pastorianus
gaaagattttctggcatttgcttat

SEQ ID NO: 171292 - DNA, 25 bp, Saccharomyces pastorianus
aaatgtgccagaaaacttttgaaag

SEQ ID NO: 171293 - DNA, 25 bp, Saccharomyces pastorianus
gaaagcgtcttcaattatattaaaa

SEQ ID NO: 171294 - DNA, 25 bp, Saccharomyces pastorianus
aatcgactccaaatcaaactcagaa

SEQ ID NO: 171295 - DNA, 25 bp, Saccharomyces pastorianus
agcgccactttaacaaatgtgccag

SEQ ID NO: 171296 - DNA, 25 bp, Saccharomyces pastorianus
gaaagaagcaatcgactccaaatca

SEQ ID NO: 171297 - DNA, 25 bp, Saccharomyces pastorianus
gcatttgcttattgaaagcgtcttc

SEQ ID NO: 171298 - DNA, 25 bp, Saccharomyces pastorianus
aactcagaaactgctacggtggttc

SEQ ID NO: 171299 - DNA, 25 bp, Saccharomyces pastorianus
atttactgctattaagcgccacttt

SEQ ID NO: 171300 - DNA, 25 bp, Saccharomyces pastorianus
caccaagtcctgtgcgagtgctgca

SEQ ID NO: 171301 - DNA, 25 bp, Saccharomyces pastorianus
attagtgaccgaacttcttgcacca

SEQ ID NO: 171302 - DNA, 25 bp, Saccharomyces pastorianus
agtgaccgaacttcttgcaccaagt

SEQ ID NO: 171303 - DNA, 25 bp, Saccharomyces pastorianus
tgaccgaacttcttgcaccaagtcc

SEQ ID NO: 171304 - DNA, 25 bp, Saccharomyces pastorianus
cattagtgaccgaacttcttgcacc

SEQ ID NO: 171305 - DNA, 25 bp, Saccharomyces pastorianus
gtgaccgaacttcttgcaccaagtc

SEQ ID NO: 171306 - DNA, 25 bp, Saccharomyces pastorianus
gcaccaagtcctgtgcgagtgctgc

SEQ ID NO: 171307 - DNA, 25 bp, Saccharomyces pastorianus
tagtgaccgaacttcttgcaccaag

SEQ ID NO: 171308 - DNA, 25 bp, Saccharomyces pastorianus
ttagtgaccgaacttcttgcaccaa

SEQ ID NO: 171309 - DNA, 25 bp, Saccharomyces pastorianus
tcattagtgaccgaacttcttgcac

SEQ ID NO: 171310 - DNA, 25 bp, Saccharomyces pastorianus
tgcaccaagtcctgtgcgagtgctg

SEQ ID NO: 171311 - DNA, 25 bp, Saccharomyces pastorianus
tgtgttcctaattatatttgcgcac

SEQ ID NO: 171312 - DNA, 25 bp, Saccharomyces pastorianus
attatatttgcgcacagtgacagtg

SEQ ID NO: 171313 - DNA, 25 bp, Saccharomyces pastorianus
cctgtgttcctaattatatttgcgc

SEQ ID NO: 171314 - DNA, 25 bp, Saccharomyces pastorianus
acagtgcggcaattgatatgtcagg

SEQ ID NO: 171315 - DNA, 25 bp, Saccharomyces pastorianus
gtgttcctaattatatttgcgcaca

SEQ ID NO: 171316 - DNA, 25 bp, Saccharomyces pastorianus
cacagtgacagtgcggcaattgata

SEQ ID NO: 171317 - DNA, 25 bp, Saccharomyces pastorianus
ctaattatatttgcgcacagtgaca

SEQ ID NO: 171318 - DNA, 25 bp, Saccharomyces pastorianus
atttgcgcacagtgacagtgcggca

SEQ ID NO: 171319 - DNA, 25 bp, Saccharomyces pastorianus
ctgtgttcctaattatatttgcgca

SEQ ID NO: 171320 - DNA, 25 bp, Saccharomyces pastorianus
gttcctaattatatttgcgcacagt

SEQ ID NO: 171321 - DNA, 25 bp, Saccharomyces pastorianus
tcctaattatatttgcgcacagtga

SEQ ID NO: 171322 - DNA, 25 bp, Saccharomyces pastorianus
ggcaatccagagcatagcacaatct

SEQ ID NO: 171323 - DNA, 25 bp, Saccharomyces pastorianus
gcggaagcattcttgctccgtcata

SEQ ID NO: 171324 - DNA, 25 bp, Saccharomyces pastorianus
tttacatccgcggaagcattcttgc

SEQ ID NO: 171325 - DNA, 25 bp, Saccharomyces pastorianus
agcacaatcttttacatccgcggaa

SEQ ID NO: 171326 - DNA, 25 bp, Saccharomyces pastorianus
tacatccgcggaagcattcttgctc

SEQ ID NO: 171327 - DNA, 25 bp, Saccharomyces pastorianus
gagggcaatccagagcatagcacaa

SEQ ID NO: 171328 - DNA, 25 bp, Saccharomyces pastorianus
acaatcttttacatccgcggaagca

SEQ ID NO: 171329 - DNA, 25 bp, Saccharomyces pastorianus
atagcacaatcttttacatccgcgg

SEQ ID NO: 171330 - DNA, 25 bp, Saccharomyces pastorianus
ttgctccgtcatatttccttccgga

SEQ ID NO: 171331 - DNA, 25 bp, Saccharomyces pastorianus
tccgtcatatttccttccggacttc

SEQ ID NO: 171332 - DNA, 25 bp, Saccharomyces pastorianus
aagcattcttgctccgtcatatttc

SEQ ID NO: 171333 - DNA, 25 bp, Saccharomyces pastorianus
aaaattccaacccacaggcaacatt

SEQ ID NO: 171334 - DNA, 25 bp, Saccharomyces pastorianus
gaagcccttcacgtagttgaaacag

SEQ ID NO: 171335 - DNA, 25 bp, Saccharomyces pastorianus
ttttgatacaccaatcacgtctcgc

SEQ ID NO: 171336 - DNA, 25 bp, Saccharomyces pastorianus
gcttacgccagcaatactgtggtag

SEQ ID NO: 171337 - DNA, 25 bp, Saccharomyces pastorianus
agcagtgaacactctgacctacaga

SEQ ID NO: 171338 - DNA, 25 bp, Saccharomyces pastorianus
cttggtattcaagccatctacgagg

SEQ ID NO: 171339 - DNA, 25 bp, Saccharomyces pastorianus
atttttcaccgccacacattctgtg

SEQ ID NO: 171340 - DNA, 25 bp, Saccharomyces pastorianus
cggagaattcagttgcttacgccag

SEQ ID NO: 171341 - DNA, 25 bp, Saccharomyces pastorianus
aatcacgtctcgcaatttttcaccg

SEQ ID NO: 171342 - DNA, 25 bp, Saccharomyces pastorianus
gaagaatacttctacttggactaaa

SEQ ID NO: 171343 - DNA, 25 bp, Saccharomyces pastorianus
atatcaccattgagaagcccttcac

SEQ ID NO: 171344 - DNA, 25 bp, Saccharomyces pastorianus
tgtacccaaaagtttagctcaccta

SEQ ID NO: 171345 - DNA, 25 bp, Saccharomyces pastorianus
ttcgtcatcatcgtcgacattatcg

SEQ ID NO: 171346 - DNA, 25 bp, Saccharomyces pastorianus
tacccaaaagtttagctcacctatt

SEQ ID NO: 171347 - DNA, 25 bp, Saccharomyces pastorianus
gtacccaaaagtttagctcacctat

SEQ ID NO: 171348 - DNA, 25 bp, Saccharomyces pastorianus
tctgtacccaaaagtttagctcacc

SEQ ID NO: 171349 - DNA, 25 bp, Saccharomyces pastorianus
ctgtacccaaaagtttagctcacct

SEQ ID NO: 171350 - DNA, 25 bp, Saccharomyces pastorianus
gacctctgtacccaaaagtttagct

SEQ ID NO: 171351 - DNA, 25 bp, Saccharomyces pastorianus
cctctgtacccaaaagtttagctca

SEQ ID NO: 171352 - DNA, 25 bp, Saccharomyces pastorianus
cttcgtcatcatcgtcgacattatc

SEQ ID NO: 171353 - DNA, 25 bp, Saccharomyces pastorianus
ctctgtacccaaaagtttagctcac

SEQ ID NO: 171354 - DNA, 25 bp, Saccharomyces pastorianus
aagacccgaagtgcggaccggcatg

SEQ ID NO: 171355 - DNA, 25 bp, Saccharomyces pastorianus
ggactttaccccagatttgtagttg

SEQ ID NO: 171356 - DNA, 25 bp, Saccharomyces pastorianus
gtttcccttgtttcggcattagaag

SEQ ID NO: 171357 - DNA, 25 bp, Saccharomyces pastorianus
atgcagtaacacacggcgggccgaa

SEQ ID NO: 171358 - DNA, 25 bp, Saccharomyces pastorianus
agaggcatttcgcacgttttaccgg

SEQ ID NO: 171359 - DNA, 25 bp, Saccharomyces pastorianus
agctgactcatctgtgattttccgt

SEQ ID NO: 171360 - DNA, 25 bp, Saccharomyces pastorianus
ggaaatcacgaagctgactcatctg

SEQ ID NO: 171361 - DNA, 25 bp, Saccharomyces pastorianus
ttccgtccccaccatagtgatgtaa

SEQ ID NO: 171362 - DNA, 25 bp, Saccharomyces pastorianus
gaagtatactgcaagcatcaccgaa

SEQ ID NO: 171363 - DNA, 25 bp, Saccharomyces pastorianus
atcctattggatcacgggcgacaga

SEQ ID NO: 171364 - DNA, 25 bp, Saccharomyces pastorianus
accggcatggtcagcttgcacggaa

SEQ ID NO: 171365 - DNA, 25 bp, Saccharomyces pastorianus
tgcgaggccacgaagtaatctgtct

SEQ ID NO: 171366 - DNA, 25 bp, Saccharomyces pastorianus
aacgaccatcccaacagagttttgg

SEQ ID NO: 171367 - DNA, 25 bp, Saccharomyces pastorianus
gaaaacgaccatcccaacagagttt

SEQ ID NO: 171368 - DNA, 25 bp, Saccharomyces pastorianus
gaggccacgaagtaatctgtcttga

SEQ ID NO: 171369 - DNA, 25 bp, Saccharomyces pastorianus
tatgcttcttctaacttgcgaggcc

SEQ ID NO: 171370 - DNA, 25 bp, Saccharomyces pastorianus
gaagtaatctgtcttgaagcaagtt

SEQ ID NO: 171371 - DNA, 25 bp, Saccharomyces pastorianus
ggccacgaagtaatctgtcttgaag

SEQ ID NO: 171372 - DNA, 25 bp, Saccharomyces pastorianus
ttctaacttgcgaggccacgaagta

SEQ ID NO: 171373 - DNA, 25 bp, Saccharomyces pastorianus
ttcttctaacttgcgaggccacgaa

SEQ ID NO: 171374 - DNA, 25 bp, Saccharomyces pastorianus
gaagaaaacgaccatcccaacagag

SEQ ID NO: 171375 - DNA, 25 bp, Saccharomyces pastorianus
caacagagttttgggacatttacac

SEQ ID NO: 171376 - DNA, 25 bp, Saccharomyces pastorianus
actagcgaggctcactcttccagtg

SEQ ID NO: 171377 - DNA, 25 bp, Saccharomyces pastorianus
tagcaaggcttgttccaccgaatcc

SEQ ID NO: 171378 - DNA, 25 bp, Saccharomyces pastorianus
gccgttatttctactttctctgaag

SEQ ID NO: 171379 - DNA, 25 bp, Saccharomyces pastorianus
aagaatcctcttccacttatgtctc

SEQ ID NO: 171380 - DNA, 25 bp, Saccharomyces pastorianus
tgccccatcttctagcaaggcttgt

SEQ ID NO: 171381 - DNA, 25 bp, Saccharomyces pastorianus
tatgtctcttcgagcaagcaagctt

SEQ ID NO: 171382 - DNA, 25 bp, Saccharomyces pastorianus
tcttcgaccgtgtcccaagaaacag

SEQ ID NO: 171383 - DNA, 25 bp, Saccharomyces pastorianus
accaaggctccttccagtgaagaat

SEQ ID NO: 171384 - DNA, 25 bp, Saccharomyces pastorianus
tctaccaacttctaccgccgttatt

SEQ ID NO: 171385 - DNA, 25 bp, Saccharomyces pastorianus
caagaaacagtctcctctgctctac

SEQ ID NO: 171386 - DNA, 25 bp, Saccharomyces pastorianus
aagcaagcttcctccactagcgagg

SEQ ID NO: 171387 - DNA, 25 bp, Saccharomyces pastorianus
tattgctctcaaaactgtatctcat

SEQ ID NO: 171388 - DNA, 25 bp, Saccharomyces pastorianus
tgcaatccttgctttcgtaatctaa

SEQ ID NO: 171389 - DNA, 25 bp, Saccharomyces pastorianus
gtgacatgctaaatccgcggctttc

SEQ ID NO: 171390 - DNA, 25 bp, Saccharomyces pastorianus
ttcgtaatctaagtgtgggtgacat

SEQ ID NO: 171391 - DNA, 25 bp, Saccharomyces pastorianus
ttaagctttttcacaaaccatctat

SEQ ID NO: 171392 - DNA, 25 bp, Saccharomyces pastorianus
taaatccgcggctttccttaagctt

SEQ ID NO: 171393 - DNA, 25 bp, Saccharomyces pastorianus
ttttttctgcaatccttgctttcgt

SEQ ID NO: 171394 - DNA, 25 bp, Saccharomyces pastorianus
aaaccatctattatgtccagaagct

SEQ ID NO: 171395 - DNA, 25 bp, Saccharomyces pastorianus
gcggctttccttaagctttttcaca

SEQ ID NO: 171396 - DNA, 25 bp, Saccharomyces pastorianus
tgggtgacatgctaaatccgcggct

SEQ ID NO: 171397 - DNA, 25 bp, Saccharomyces pastorianus
gctctcaaaactgtatctcatcttt

SEQ ID NO: 171398 - DNA, 25 bp, Saccharomyces pastorianus
tatttcactgctccatcctctgaac

SEQ ID NO: 171399 - DNA, 25 bp, Saccharomyces pastorianus
ttatttcactgctccatcctctgaa

SEQ ID NO: 171400 - DNA, 25 bp, Saccharomyces pastorianus
ctgaacgtcgtgttttgttatctgc

SEQ ID NO: 171401 - DNA, 25 bp, Saccharomyces pastorianus
actgctccatcctctgaacgtcgtg

SEQ ID NO: 171402 - DNA, 25 bp, Saccharomyces pastorianus
tggtatcaaggctttgccaatcaga

SEQ ID NO: 171403 - DNA, 25 bp, Saccharomyces pastorianus
tcaatagacgtttcctctgacagaa

SEQ ID NO: 171404 - DNA, 25 bp, Saccharomyces pastorianus
atttcactgctccatcctctgaacg

SEQ ID NO: 171405 - DNA, 25 bp, Saccharomyces pastorianus
atccaaggaattgagagctcaatat

SEQ ID NO: 171406 - DNA, 25 bp, Saccharomyces pastorianus
aggccagaaaggcttatttcactgc

SEQ ID NO: 171407 - DNA, 25 bp, Saccharomyces pastorianus
ctgctccatcctctgaacgtcgtgt

SEQ ID NO: 171408 - DNA, 25 bp, Saccharomyces pastorianus
tttcactgctccatcctctgaacgt

SEQ ID NO: 171409 - DNA, 25 bp, Saccharomyces pastorianus
tatttcgcattgtggcattgcccat

SEQ ID NO: 171410 - DNA, 25 bp, Saccharomyces pastorianus
tttcccgatgaagtggttgccgcaa

SEQ ID NO: 171411 - DNA, 25 bp, Saccharomyces pastorianus
gaaatcgacctttacaatcttaata

SEQ ID NO: 171412 - DNA, 25 bp, Saccharomyces pastorianus
ttctggtaatgtcttggctgccgca

SEQ ID NO: 171413 - DNA, 25 bp, Saccharomyces pastorianus
aagacgtgcaaattgtcatccacat

SEQ ID NO: 171414 - DNA, 25 bp, Saccharomyces pastorianus
gatacaagcattgaactcgggtaca

SEQ ID NO: 171415 - DNA, 25 bp, Saccharomyces pastorianus
tatgcacttcttctcattttcccga

SEQ ID NO: 171416 - DNA, 25 bp, Saccharomyces pastorianus
gggtacaacctcgatttccatgtat

SEQ ID NO: 171417 - DNA, 25 bp, Saccharomyces pastorianus
agaacctgccctttatttcgcattg

SEQ ID NO: 171418 - DNA, 25 bp, Saccharomyces pastorianus
aaggctcttatggtctgctatgcac

SEQ ID NO: 171419 - DNA, 25 bp, Saccharomyces pastorianus
tcatccacataactcagatccatct

SEQ ID NO: 171420 - DNA, 25 bp, Saccharomyces pastorianus
gtccatctaataccatatattttga

SEQ ID NO: 171421 - DNA, 25 bp, Saccharomyces pastorianus
ttctgaagttttgtacttttaccag

SEQ ID NO: 171422 - DNA, 25 bp, Saccharomyces pastorianus
gtctttgacagtaacttatcatcag

SEQ ID NO: 171423 - DNA, 25 bp, Saccharomyces pastorianus
taccagtccatctaataccatatat

SEQ ID NO: 171424 - DNA, 25 bp, Saccharomyces pastorianus
agtaacttatcatcaggactgttgg

SEQ ID NO: 171425 - DNA, 25 bp, Saccharomyces pastorianus
cttatcatcaggactgttggaataa

SEQ ID NO: 171426 - DNA, 25 bp, Saccharomyces pastorianus
gttttgtacttttaccagtccatct

SEQ ID NO: 171427 - DNA, 25 bp, Saccharomyces pastorianus
tgataataattatgtctttgacagt

SEQ ID NO: 171428 - DNA, 25 bp, Saccharomyces pastorianus
ttgacagtaacttatcatcaggact

SEQ ID NO: 171429 - DNA, 25 bp, Saccharomyces pastorianus
gtacttttaccagtccatctaatac

SEQ ID NO: 171430 - DNA, 25 bp, Saccharomyces pastorianus
ttttaccagtccatctaataccata

SEQ ID NO: 171431 - DNA, 25 bp, Saccharomyces pastorianus
aagggagtcgataaatctatataat

SEQ ID NO: 171432 - DNA, 25 bp, Saccharomyces pastorianus
tacgttgtcgtttattatcctatta

SEQ ID NO: 171433 - DNA, 25 bp, Saccharomyces pastorianus
cacaaaagggagtcgataaatctat

SEQ ID NO: 171434 - DNA, 25 bp, Saccharomyces pastorianus
atcattcttcgcatttcagctttca

SEQ ID NO: 171435 - DNA, 25 bp, Saccharomyces pastorianus
cgttatcattcttcgcatttcagct

SEQ ID NO: 171436 - DNA, 25 bp, Saccharomyces pastorianus
tcttctttcgttttatacgttgtcg

SEQ ID NO: 171437 - DNA, 25 bp, Saccharomyces pastorianus
atacgttgtcgtttattatcctatt

SEQ ID NO: 171438 - DNA, 25 bp, Saccharomyces pastorianus
acgttatcattcttcgcatttcagc

SEQ ID NO: 171439 - DNA, 25 bp, Saccharomyces pastorianus
cctattacgttatcattcttcgcat

SEQ ID NO: 171440 - DNA, 25 bp, Saccharomyces pastorianus
ttacgttatcattcttcgcatttca

SEQ ID NO: 171441 - DNA, 25 bp, Saccharomyces pastorianus
tacgttatcattcttcgcatttcag

SEQ ID NO: 171442 - DNA, 25 bp, Saccharomyces pastorianus
tggaaaagattcacggtcaccctgc

SEQ ID NO: 171443 - DNA, 25 bp, Saccharomyces pastorianus
gatgatgctaaatgcgctaaagtta

SEQ ID NO: 171444 - DNA, 25 bp, Saccharomyces pastorianus
gttatagatcagctgtacatctgct

SEQ ID NO: 171445 - DNA, 25 bp, Saccharomyces pastorianus
atgtctaatccatgccagaaggagg

SEQ ID NO: 171446 - DNA, 25 bp, Saccharomyces pastorianus
ttcactaacgttttttcacattaat

SEQ ID NO: 171447 - DNA, 25 bp, Saccharomyces pastorianus
attgccttctatcacatcagtacga

SEQ ID NO: 171448 - DNA, 25 bp, Saccharomyces pastorianus
agaaggaggcctgcgccatccaagg

SEQ ID NO: 171449 - DNA, 25 bp, Saccharomyces pastorianus
tcacattaattttagattgccttct

SEQ ID NO: 171450 - DNA, 25 bp, Saccharomyces pastorianus
ctgcgccatccaaggtttgtaatat

SEQ ID NO: 171451 - DNA, 25 bp, Saccharomyces pastorianus
gctaccttcgcttcttgagttgaag

SEQ ID NO: 171452 - DNA, 25 bp, Saccharomyces pastorianus
gctgtacatctgctgctcaaaattt

SEQ ID NO: 171453 - DNA, 25 bp, Saccharomyces pastorianus
ggccaagaaatcgatggacatcaac

SEQ ID NO: 171454 - DNA, 25 bp, Saccharomyces pastorianus
agcaatctttttgagcggcacagcc

SEQ ID NO: 171455 - DNA, 25 bp, Saccharomyces pastorianus
ctttttgagcggcacagcccctgag

SEQ ID NO: 171456 - DNA, 25 bp, Saccharomyces pastorianus
ctggccaagaaatcgatggacatca

SEQ ID NO: 171457 - DNA, 25 bp, Saccharomyces pastorianus
gcaatctttttgagcggcacagccc

SEQ ID NO: 171458 - DNA, 25 bp, Saccharomyces pastorianus
ttttgagcggcacagcccctgaggc

SEQ ID NO: 171459 - DNA, 25 bp, Saccharomyces pastorianus
tgggcttacgggactggccaagaaa

SEQ ID NO: 171460 - DNA, 25 bp, Saccharomyces pastorianus
gcacagcccctgaggctgtagctga

SEQ ID NO: 171461 - DNA, 25 bp, Saccharomyces pastorianus
ccctgaggctgtagctgatgctgcg

SEQ ID NO: 171462 - DNA, 25 bp, Saccharomyces pastorianus
tttttgagcggcacagcccctgagg

SEQ ID NO: 171463 - DNA, 25 bp, Saccharomyces pastorianus
tacgggactggccaagaaatcgatg

SEQ ID NO: 171464 - DNA, 25 bp, Saccharomyces pastorianus
ttgtctcaatatttacctatttctc

SEQ ID NO: 171465 - DNA, 25 bp, Saccharomyces pastorianus
tttacctatttctcacattgtcacc

SEQ ID NO: 171466 - DNA, 25 bp, Saccharomyces pastorianus
gctcgaaagtgcattttgttggaat

SEQ ID NO: 171467 - DNA, 25 bp, Saccharomyces pastorianus
ttgtcaccgctcgaaagtgcatttt

SEQ ID NO: 171468 - DNA, 25 bp, Saccharomyces pastorianus
tatttctcacattgtcaccgctcga

SEQ ID NO: 171469 - DNA, 25 bp, Saccharomyces pastorianus
tctcacattgtcaccgctcgaaagt

SEQ ID NO: 171470 - DNA, 25 bp, Saccharomyces pastorianus
ttacctatttctcacattgtcaccg

SEQ ID NO: 171471 - DNA, 25 bp, Saccharomyces pastorianus
tttctcacattgtcaccgctcgaaa

SEQ ID NO: 171472 - DNA, 25 bp, Saccharomyces pastorianus
gtcaccgctcgaaagtgcattttgt

SEQ ID NO: 171473 - DNA, 25 bp, Saccharomyces pastorianus
acattgtcaccgctcgaaagtgcat

SEQ ID NO: 171474 - DNA, 25 bp, Saccharomyces pastorianus
accgctcgaaagtgcattttgttgg

SEQ ID NO: 171475 - DNA, 25 bp, Saccharomyces pastorianus
tggtgctactccaattgccggtaga

SEQ ID NO: 171476 - DNA, 25 bp, Saccharomyces pastorianus
gattagacgctcaagccatcaagga

SEQ ID NO: 171477 - DNA, 25 bp, Saccharomyces pastorianus
tgctttgactgatttggactcccca

SEQ ID NO: 171478 - DNA, 25 bp, Saccharomyces pastorianus
catcccagtcattgctttgactgat

SEQ ID NO: 171479 - DNA, 25 bp, Saccharomyces pastorianus
atacgttttcaatgctagaccagac

SEQ ID NO: 171480 - DNA, 25 bp, Saccharomyces pastorianus
gaagcttcttacgttaacatcccag

SEQ ID NO: 171481 - DNA, 25 bp, Saccharomyces pastorianus
tgtcactgacccaagattagacgct

SEQ ID NO: 171482 - DNA, 25 bp, Saccharomyces pastorianus
tagttattgtcactgacccaagatt

SEQ ID NO: 171483 - DNA, 25 bp, Saccharomyces pastorianus
ggactccccatctggattcgttgat

SEQ ID NO: 171484 - DNA, 25 bp, Saccharomyces pastorianus
gctgtcttgaagtttgctgctcaca

SEQ ID NO: 171485 - DNA, 25 bp, Saccharomyces pastorianus
tgctagaccagacggtgttcacgtt

SEQ ID NO: 171486 - DNA, 25 bp, Saccharomyces pastorianus
atttaccatgattctacgtttttgc

SEQ ID NO: 171487 - DNA, 25 bp, Saccharomyces pastorianus
gaattcttcatgtgatttaccatga

SEQ ID NO: 171488 - DNA, 25 bp, Saccharomyces pastorianus
tttaccatgattctacgtttttgca

SEQ ID NO: 171489 - DNA, 25 bp, Saccharomyces pastorianus
gtgatttaccatgattctacgtttt

SEQ ID NO: 171490 - DNA, 25 bp, Saccharomyces pastorianus
gagaattcttcatgtgatttaccat

SEQ ID NO: 171491 - DNA, 25 bp, Saccharomyces pastorianus
taccatgattctacgtttttgcaag

SEQ ID NO: 171492 - DNA, 25 bp, Saccharomyces pastorianus
aagagaattcttcatgtgatttacc

SEQ ID NO: 171493 - DNA, 25 bp, Saccharomyces pastorianus
ccatgattctacgtttttgcaagca

SEQ ID NO: 171494 - DNA, 25 bp, Saccharomyces pastorianus
gatttaccatgattctacgtttttg

SEQ ID NO: 171495 - DNA, 25 bp, Saccharomyces pastorianus
tgtgatttaccatgattctacgttt

SEQ ID NO: 171496 - DNA, 25 bp, Saccharomyces pastorianus
accatgattctacgtttttgcaagc

SEQ ID NO: 171497 - DNA, 25 bp, Saccharomyces pastorianus
tggtaccgccggttacaacgataat

SEQ ID NO: 171498 - DNA, 25 bp, Saccharomyces pastorianus
gaagtcaggaaactcgactgctcct

SEQ ID NO: 171499 - DNA, 25 bp, Saccharomyces pastorianus
atcgaagtcggatttactatttgta

SEQ ID NO: 171500 - DNA, 25 bp, Saccharomyces pastorianus
tactatttgtatccgtctgctgttt

SEQ ID NO: 171501 - DNA, 25 bp, Saccharomyces pastorianus
ggaaactcgactgctcctggtaccg

SEQ ID NO: 171502 - DNA, 25 bp, Saccharomyces pastorianus
gctaaacccgtctcaagttacattt

SEQ ID NO: 171503 - DNA, 25 bp, Saccharomyces pastorianus
agttacatttcccatgaaggccctc

SEQ ID NO: 171504 - DNA, 25 bp, Saccharomyces pastorianus
aatttggcacaagctaaacccgtct

SEQ ID NO: 171505 - DNA, 25 bp, Saccharomyces pastorianus
agcttcagaaggaggttgacaacca

SEQ ID NO: 171506 - DNA, 25 bp, Saccharomyces pastorianus
ccgtctgctgtttgatggttgcttt

SEQ ID NO: 171507 - DNA, 25 bp, Saccharomyces pastorianus
tgaaggccctcccaaagacgaactg

SEQ ID NO: 171508 - DNA, 25 bp, Saccharomyces pastorianus
acttctgacatatctttttctgtta

SEQ ID NO: 171509 - DNA, 25 bp, Saccharomyces pastorianus
gatattttacatccgctcctaatct

SEQ ID NO: 171510 - DNA, 25 bp, Saccharomyces pastorianus
gagacacgtctcatactgttaaata

SEQ ID NO: 171511 - DNA, 25 bp, Saccharomyces pastorianus
atagctggccactttgaaacttctg

SEQ ID NO: 171512 - DNA, 25 bp, Saccharomyces pastorianus
gaaccattttcaccaacgacatgtg

SEQ ID NO: 171513 - DNA, 25 bp, Saccharomyces pastorianus
tcgttagtcgagtgttctgaagata

SEQ ID NO: 171514 - DNA, 25 bp, Saccharomyces pastorianus
acatgtgaaactgtaccgttgtacc

SEQ ID NO: 171515 - DNA, 25 bp, Saccharomyces pastorianus
taacgttcgactttcgagacacgtc

SEQ ID NO: 171516 - DNA, 25 bp, Saccharomyces pastorianus
ttctgttagtttattcgttagtcga

SEQ ID NO: 171517 - DNA, 25 bp, Saccharomyces pastorianus
tccgtgccgtgtcgcaaatcattaa

SEQ ID NO: 171518 - DNA, 25 bp, Saccharomyces pastorianus
taatctgcacatgcggagggcttaa

SEQ ID NO: 171519 - DNA, 25 bp, Saccharomyces pastorianus
agaagcaaaaccataaacgcaaatt

SEQ ID NO: 171520 - DNA, 25 bp, Saccharomyces pastorianus
gcaaagcgtcaatcaagtaagagaa

SEQ ID NO: 171521 - DNA, 25 bp, Saccharomyces pastorianus
taaacgcaaatttctcggcagggcc

SEQ ID NO: 171522 - DNA, 25 bp, Saccharomyces pastorianus
ggctccattgcaaagcgtcaatcaa

SEQ ID NO: 171523 - DNA, 25 bp, Saccharomyces pastorianus
acgcaaatttctcggcagggccagg

SEQ ID NO: 171524 - DNA, 25 bp, Saccharomyces pastorianus
aacgcatattggctccattgcaaag

SEQ ID NO: 171525 - DNA, 25 bp, Saccharomyces pastorianus
aatttctcggcagggccaggaacaa

SEQ ID NO: 171526 - DNA, 25 bp, Saccharomyces pastorianus
ggccaggaacaactgccttgcttat

SEQ ID NO: 171527 - DNA, 25 bp, Saccharomyces pastorianus
atattggctccattgcaaagcgtca

SEQ ID NO: 171528 - DNA, 25 bp, Saccharomyces pastorianus
attggctccattgcaaagcgtcaat

SEQ ID NO: 171529 - DNA, 25 bp, Saccharomyces pastorianus
agggccaggaacaactgccttgctt

SEQ ID NO: 171530 - DNA, 25 bp, Saccharomyces pastorianus
tccacagagcgcgaaaagggatgcg

SEQ ID NO: 171531 - DNA, 25 bp, Saccharomyces pastorianus
ggatgcgcgaacacggcacccaaag

SEQ ID NO: 171532 - DNA, 25 bp, Saccharomyces pastorianus
aaagggatgcgcgaacacggcaccc

SEQ ID NO: 171533 - DNA, 25 bp, Saccharomyces pastorianus
aaaggcaattccacagagcgcgaaa

SEQ ID NO: 171534 - DNA, 25 bp, Saccharomyces pastorianus
gatgcgcgaacacggcacccaaagg

SEQ ID NO: 171535 - DNA, 25 bp, Saccharomyces pastorianus
caattccacagagcgcgaaaaggga

SEQ ID NO: 171536 - DNA, 25 bp, Saccharomyces pastorianus
aaggcaattccacagagcgcgaaaa

SEQ ID NO: 171537 - DNA, 25 bp, Saccharomyces pastorianus
agggatgcgcgaacacggcacccaa

SEQ ID NO: 171538 - DNA, 25 bp, Saccharomyces pastorianus
gcgcgaacacggcacccaaaggtgc

SEQ ID NO: 171539 - DNA, 25 bp, Saccharomyces pastorianus
ggcaattccacagagcgcgaaaagg

SEQ ID NO: 171540 - DNA, 25 bp, Saccharomyces pastorianus
gaacacggcacccaaaggtgcgctg

SEQ ID NO: 171541 - DNA, 25 bp, Saccharomyces pastorianus
agtaatgtcttctaatccccgacga

SEQ ID NO: 171542 - DNA, 25 bp, Saccharomyces pastorianus
ttccccaccagtaatgtcttctaat

SEQ ID NO: 171543 - DNA, 25 bp, Saccharomyces pastorianus
atcatcaagggttccccaccagtaa

SEQ ID NO: 171544 - DNA, 25 bp, Saccharomyces pastorianus
cgtgtgcgggtatggcaagcgccgt

SEQ ID NO: 171545 - DNA, 25 bp, Saccharomyces pastorianus
ttctaatccccgacgacaatatcgt

SEQ ID NO: 171546 - DNA, 25 bp, Saccharomyces pastorianus
gcgcatatatttcctattatcatca

SEQ ID NO: 171547 - DNA, 25 bp, Saccharomyces pastorianus
gagcatactgcgcatatatttccta

SEQ ID NO: 171548 - DNA, 25 bp, Saccharomyces pastorianus
tgcctcaaaaaaccccgtgtgcggg

SEQ ID NO: 171549 - DNA, 25 bp, Saccharomyces pastorianus
taagtgcctcaaaaaaccccgtgtg

SEQ ID NO: 171550 - DNA, 25 bp, Saccharomyces pastorianus
aatctccggtcaattaagtgcctca

SEQ ID NO: 171551 - DNA, 25 bp, Saccharomyces pastorianus
aatatcgtttaaatctccggtcaat

SEQ ID NO: 171552 - DNA, 25 bp, Saccharomyces pastorianus
taaagttcacggttccctagctcgt

SEQ ID NO: 171553 - DNA, 25 bp, Saccharomyces pastorianus
cggttccctagctcgtgctggtaag

SEQ ID NO: 171554 - DNA, 25 bp, Saccharomyces pastorianus
ctaaagttcacggttccctagctcg

SEQ ID NO: 171555 - DNA, 25 bp, Saccharomyces pastorianus
ttcacggttccctagctcgtgctgg

SEQ ID NO: 171556 - DNA, 25 bp, Saccharomyces pastorianus
gttcacggttccctagctcgtgctg

SEQ ID NO: 171557 - DNA, 25 bp, Saccharomyces pastorianus
aaagttcacggttccctagctcgtg

SEQ ID NO: 171558 - DNA, 25 bp, Saccharomyces pastorianus
gctggtaaggttaagtctcaaactc

SEQ ID NO: 171559 - DNA, 25 bp, Saccharomyces pastorianus
acggttccctagctcgtgctggtaa

SEQ ID NO: 171560 - DNA, 25 bp, Saccharomyces pastorianus
tgctggtaaggttaagtctcaaact

SEQ ID NO: 171561 - DNA, 25 bp, Saccharomyces pastorianus
aagttcacggttccctagctcgtgc

SEQ ID NO: 171562 - DNA, 25 bp, Saccharomyces pastorianus
tggtaaggttaagtctcaaactcca

SEQ ID NO: 171563 - DNA, 25 bp, Saccharomyces pastorianus
attttcaacgcccgcggtcgatcta

SEQ ID NO: 171564 - DNA, 25 bp, Saccharomyces pastorianus
tttggtcacgagctttctaacccaa

SEQ ID NO: 171565 - DNA, 25 bp, Saccharomyces pastorianus
cgatctaaccgcagccacaatttgg

SEQ ID NO: 171566 - DNA, 25 bp, Saccharomyces pastorianus
gtcacgagctttctaacccaactat

SEQ ID NO: 171567 - DNA, 25 bp, Saccharomyces pastorianus
aaacgaaaattcatgactctttcca

SEQ ID NO: 171568 - DNA, 25 bp, Saccharomyces pastorianus
tattctcaccgtgcgaaacgaaaat

SEQ ID NO: 171569 - DNA, 25 bp, Saccharomyces pastorianus
caactattctcaccgtgcgaaacga

SEQ ID NO: 171570 - DNA, 25 bp, Saccharomyces pastorianus
tttctaacccaactattctcaccgt

SEQ ID NO: 171571 - DNA, 25 bp, Saccharomyces pastorianus
acgagctttctaacccaactattct

SEQ ID NO: 171572 - DNA, 25 bp, Saccharomyces pastorianus
cactaatttattttcaacgcccgcg

SEQ ID NO: 171573 - DNA, 25 bp, Saccharomyces pastorianus
aagaccttaatgatgaaaagcacaa

SEQ ID NO: 171574 - DNA, 25 bp, Saccharomyces pastorianus
gtaacaaaaggcatcaccctgcaca

SEQ ID NO: 171575 - DNA, 25 bp, Saccharomyces pastorianus
atgtatgtatatatccagtacagta

SEQ ID NO: 171576 - DNA, 25 bp, Saccharomyces pastorianus
aagggtgttctcatgtagcaccact

SEQ ID NO: 171577 - DNA, 25 bp, Saccharomyces pastorianus
tgcacatatcaccatgcacgaggcg

SEQ ID NO: 171578 - DNA, 25 bp, Saccharomyces pastorianus
gtagcaccacttcacaagagtattt

SEQ ID NO: 171579 - DNA, 25 bp, Saccharomyces pastorianus
gagagttgcataggaacgtgtctaa

SEQ ID NO: 171580 - DNA, 25 bp, Saccharomyces pastorianus
aaaggcatcaccctgcacatatcac

SEQ ID NO: 171581 - DNA, 25 bp, Saccharomyces pastorianus
atgcacgaggcgcaccttccttttt

SEQ ID NO: 171582 - DNA, 25 bp, Saccharomyces pastorianus
tatccagtacagtaaataacggtaa

SEQ ID NO: 171583 - DNA, 25 bp, Saccharomyces pastorianus
ttctcatgtagcaccacttcacaag

SEQ ID NO: 171584 - DNA, 25 bp, Saccharomyces pastorianus
gaacgtgtctaaggacatatagcaa

SEQ ID NO: 171585 - DNA, 25 bp, Saccharomyces pastorianus
gggttcctcttcgtcttgtaatcct

SEQ ID NO: 171586 - DNA, 25 bp, Saccharomyces pastorianus
cgtcttgtaatccttgattgccgcc

SEQ ID NO: 171587 - DNA, 25 bp, Saccharomyces pastorianus
gtattccatttagtttctccttcaa

SEQ ID NO: 171588 - DNA, 25 bp, Saccharomyces pastorianus
aagcgccccttgtattccatttagt

SEQ ID NO: 171589 - DNA, 25 bp, Saccharomyces pastorianus
gaaaaagcgccccttgtattccatt

SEQ ID NO: 171590 - DNA, 25 bp, Saccharomyces pastorianus
agtgtaacccttctataagaccaga

SEQ ID NO: 171591 - DNA, 25 bp, Saccharomyces pastorianus
tcttcgtcttgtaatccttgattgc

SEQ ID NO: 171592 - DNA, 25 bp, Saccharomyces pastorianus
gccccttgtattccatttagtttct

SEQ ID NO: 171593 - DNA, 25 bp, Saccharomyces pastorianus
taactagttagtgtaacccttctat

SEQ ID NO: 171594 - DNA, 25 bp, Saccharomyces pastorianus
tcctcttcgtcttgtaatccttgat

SEQ ID NO: 171595 - DNA, 25 bp, Saccharomyces pastorianus
tttagtttctccttcaatgcaagac

SEQ ID NO: 171596 - DNA, 25 bp, Saccharomyces pastorianus
gtgcttctttattatcatcatctca

SEQ ID NO: 171597 - DNA, 25 bp, Saccharomyces pastorianus
ctagaagccggaacaaaagacacag

SEQ ID NO: 171598 - DNA, 25 bp, Saccharomyces pastorianus
tgttttccaagtttcctagaagccg

SEQ ID NO: 171599 - DNA, 25 bp, Saccharomyces pastorianus
tactacttcgcctgtgcttctttat

SEQ ID NO: 171600 - DNA, 25 bp, Saccharomyces pastorianus
taaaacggcgtagagccagaattta

SEQ ID NO: 171601 - DNA, 25 bp, Saccharomyces pastorianus
atccgtggcacgctaaagggtgaaa

SEQ ID NO: 171602 - DNA, 25 bp, Saccharomyces pastorianus
aagacacaggcttaaaacggcgtag

SEQ ID NO: 171603 - DNA, 25 bp, Saccharomyces pastorianus
atttcgcactcttgtgttcctggtt

SEQ ID NO: 171604 - DNA, 25 bp, Saccharomyces pastorianus
tcgcctgtgcttctttattatcatc

SEQ ID NO: 171605 - DNA, 25 bp, Saccharomyces pastorianus
agggtcttttgctatttcgcactct

SEQ ID NO: 171606 - DNA, 25 bp, Saccharomyces pastorianus
gtgccgtcggatccccgcgtgtaat

SEQ ID NO: 171607 - DNA, 25 bp, Saccharomyces pastorianus
ttcttcttccaattacgtcaagcag

SEQ ID NO: 171608 - DNA, 25 bp, Saccharomyces pastorianus
tatccgcccacatacacattctgta

SEQ ID NO: 171609 - DNA, 25 bp, Saccharomyces pastorianus
agttcaagccctacacccaaagagt

SEQ ID NO: 171610 - DNA, 25 bp, Saccharomyces pastorianus
caaagagtctctttttctctctatc

SEQ ID NO: 171611 - DNA, 25 bp, Saccharomyces pastorianus
aggtcctgcttttgattcaccggca

SEQ ID NO: 171612 - DNA, 25 bp, Saccharomyces pastorianus
gtgctctagctcctttttacataac

SEQ ID NO: 171613 - DNA, 25 bp, Saccharomyces pastorianus
atatgcataccagttcaagccctac

SEQ ID NO: 171614 - DNA, 25 bp, Saccharomyces pastorianus
gcagtgtttgactcattttctttga

SEQ ID NO: 171615 - DNA, 25 bp, Saccharomyces pastorianus
atctctctccactgtatttactgtt

SEQ ID NO: 171616 - DNA, 25 bp, Saccharomyces pastorianus
ttttttgattttctgcaggtcctgc

SEQ ID NO: 171617 - DNA, 25 bp, Saccharomyces pastorianus
ttacataacatcctacgtatccgcc

SEQ ID NO: 171618 - DNA, 25 bp, Saccharomyces pastorianus
gcgtcgtcaggagaggaacagattc

SEQ ID NO: 171619 - DNA, 25 bp, Saccharomyces pastorianus
gattacatagacaactggaccaaga

SEQ ID NO: 171620 - DNA, 25 bp, Saccharomyces pastorianus
tgaagccccaactaaaaggcgtcgt

SEQ ID NO: 171621 - DNA, 25 bp, Saccharomyces pastorianus
gaaggtttcattacccatggtgatg

SEQ ID NO: 171622 - DNA, 25 bp, Saccharomyces pastorianus
gaagcaagtgctccaggcgcaagaa

SEQ ID NO: 171623 - DNA, 25 bp, Saccharomyces pastorianus
cagagttggttcgtgaaggtttcat

SEQ ID NO: 171624 - DNA, 25 bp, Saccharomyces pastorianus
tgcccaagcaactttgaatacggat

SEQ ID NO: 171625 - DNA, 25 bp, Saccharomyces pastorianus
caggcgcaagaagagacgatagatt

SEQ ID NO: 171626 - DNA, 25 bp, Saccharomyces pastorianus
gctacagatgatgcccaagcaactt

SEQ ID NO: 171627 - DNA, 25 bp, Saccharomyces pastorianus
agagacctcgcgaagaggacaccaa

SEQ ID NO: 171628 - DNA, 25 bp, Saccharomyces pastorianus
gaatacggattcatccgaagcaaat

SEQ ID NO: 171629 - DNA, 25 bp, Saccharomyces pastorianus
atcgtttctcttggtttcatctttc

SEQ ID NO: 171630 - DNA, 25 bp, Saccharomyces pastorianus
ttccactatccaagttaccctgact

SEQ ID NO: 171631 - DNA, 25 bp, Saccharomyces pastorianus
cttggtttcatctttccactatcca

SEQ ID NO: 171632 - DNA, 25 bp, Saccharomyces pastorianus
ttgcatcgtttctcttggtttcatc

SEQ ID NO: 171633 - DNA, 25 bp, Saccharomyces pastorianus
ctttccactatccaagttaccctga

SEQ ID NO: 171634 - DNA, 25 bp, Saccharomyces pastorianus
tctcttggtttcatctttccactat

SEQ ID NO: 171635 - DNA, 25 bp, Saccharomyces pastorianus
gcatcgtttctcttggtttcatctt

SEQ ID NO: 171636 - DNA, 25 bp, Saccharomyces pastorianus
actatccaagttaccctgactctcg

SEQ ID NO: 171637 - DNA, 25 bp, Saccharomyces pastorianus
ttctcttggtttcatctttccacta

SEQ ID NO: 171638 - DNA, 25 bp, Saccharomyces pastorianus
ctttgcatcgtttctcttggtttca

SEQ ID NO: 171639 - DNA, 25 bp, Saccharomyces pastorianus
gtttctcttggtttcatctttccac

SEQ ID NO: 171640 - DNA, 25 bp, Saccharomyces pastorianus
tcgagtccatcttcttccctaataa

SEQ ID NO: 171641 - DNA, 25 bp, Saccharomyces pastorianus
taataaaacatttaactacatccgg

SEQ ID NO: 171642 - DNA, 25 bp, Saccharomyces pastorianus
tctcggctctgtccttcgagtccat

SEQ ID NO: 171643 - DNA, 25 bp, Saccharomyces pastorianus
ctctgtccttcgagtccatcttctt

SEQ ID NO: 171644 - DNA, 25 bp, Saccharomyces pastorianus
aattctcggctctgtccttcgagtc

SEQ ID NO: 171645 - DNA, 25 bp, Saccharomyces pastorianus
gagtccatcttcttccctaataaaa

SEQ ID NO: 171646 - DNA, 25 bp, Saccharomyces pastorianus
ggctctgtccttcgagtccatcttc

SEQ ID NO: 171647 - DNA, 25 bp, Saccharomyces pastorianus
ttcgagtccatcttcttccctaata

SEQ ID NO: 171648 - DNA, 25 bp, Saccharomyces pastorianus
gtccatcttcttccctaataaaaca

SEQ ID NO: 171649 - DNA, 25 bp, Saccharomyces pastorianus
accaattctcggctctgtccttcga

SEQ ID NO: 171650 - DNA, 25 bp, Saccharomyces pastorianus
atgaccaccaattctcggctctgtc

SEQ ID NO: 171651 - DNA, 25 bp, Saccharomyces pastorianus
agtgctggctattctggtcaaatta

SEQ ID NO: 171652 - DNA, 25 bp, Saccharomyces pastorianus
aaacggtggcaatatcccatctacc

SEQ ID NO: 171653 - DNA, 25 bp, Saccharomyces pastorianus
gatgattctctatccactttgattg

SEQ ID NO: 171654 - DNA, 25 bp, Saccharomyces pastorianus
caacgggtggtgttccgtttctgat

SEQ ID NO: 171655 - DNA, 25 bp, Saccharomyces pastorianus
ggctacccttcagctggtattcaaa

SEQ ID NO: 171656 - DNA, 25 bp, Saccharomyces pastorianus
acgcctattttgatgctagctccag

SEQ ID NO: 171657 - DNA, 25 bp, Saccharomyces pastorianus
gaaccaccagtctcctttgaaaata

SEQ ID NO: 171658 - DNA, 25 bp, Saccharomyces pastorianus
tagcggtgttgactccatcgatgat

SEQ ID NO: 171659 - DNA, 25 bp, Saccharomyces pastorianus
tgctgaaagcgctggcacatttgtt

SEQ ID NO: 171660 - DNA, 25 bp, Saccharomyces pastorianus
ggtattaatccacacgcctattttg

SEQ ID NO: 171661 - DNA, 25 bp, Saccharomyces pastorianus
ttcatcactgaaactggctaccctt

SEQ ID NO: 171662 - DNA, 25 bp, Saccharomyces pastorianus
gacaaccgccgccaaagcattagaa

SEQ ID NO: 171663 - DNA, 25 bp, Saccharomyces pastorianus
gaacgattggaatccggctaacgat

SEQ ID NO: 171664 - DNA, 25 bp, Saccharomyces pastorianus
agaagactatctggtgtcacagtat

SEQ ID NO: 171665 - DNA, 25 bp, Saccharomyces pastorianus
aatttctagagacacacttttgcag

SEQ ID NO: 171666 - DNA, 25 bp, Saccharomyces pastorianus
aagcgcatagtatccaaggcatttg

SEQ ID NO: 171667 - DNA, 25 bp, Saccharomyces pastorianus
gtcacagtataagccgtacgccgtt

SEQ ID NO: 171668 - DNA, 25 bp, Saccharomyces pastorianus
taaagtaagcaggacaaccgccgcc

SEQ ID NO: 171669 - DNA, 25 bp, Saccharomyces pastorianus
tgatctactcttgcaacgaacagga

SEQ ID NO: 171670 - DNA, 25 bp, Saccharomyces pastorianus
tagaaagagacaaagcgaccgccag

SEQ ID NO: 171671 - DNA, 25 bp, Saccharomyces pastorianus
gaaaacctggtcaacgaaaagcgca

SEQ ID NO: 171672 - DNA, 25 bp, Saccharomyces pastorianus
gccgtacgccgttaatgatataatc

SEQ ID NO: 171673 - DNA, 25 bp, Saccharomyces pastorianus
tcccatcacaggtatcatcgtccaa

SEQ ID NO: 171674 - DNA, 25 bp, Saccharomyces pastorianus
ctaagcatcccatcacaggtatcat

SEQ ID NO: 171675 - DNA, 25 bp, Saccharomyces pastorianus
actggtttgagaaccaattctttga

SEQ ID NO: 171676 - DNA, 25 bp, Saccharomyces pastorianus
ttctcacacactgttgcttctaagc

SEQ ID NO: 171677 - DNA, 25 bp, Saccharomyces pastorianus
atcacaggtatcatcgtccaatttg

SEQ ID NO: 171678 - DNA, 25 bp, Saccharomyces pastorianus
gtattgctactggtttgagaaccaa

SEQ ID NO: 171679 - DNA, 25 bp, Saccharomyces pastorianus
aggtatcatcgtccaatttgaaggt

SEQ ID NO: 171680 - DNA, 25 bp, Saccharomyces pastorianus
agcatcccatcacaggtatcatcgt

SEQ ID NO: 171681 - DNA, 25 bp, Saccharomyces pastorianus
gcttctaagcatcccatcacaggta

SEQ ID NO: 171682 - DNA, 25 bp, Saccharomyces pastorianus
aaggtattgctactggtttgagaac

SEQ ID NO: 171683 - DNA, 25 bp, Saccharomyces pastorianus
tgttgcttctaagcatcccatcaca

SEQ ID NO: 171684 - DNA, 25 bp, Saccharomyces pastorianus
tacgcttattgcctaggctacgacg

SEQ ID NO: 171685 - DNA, 25 bp, Saccharomyces pastorianus
ataaaaaccaccagcgcagtcgtat

SEQ ID NO: 171686 - DNA, 25 bp, Saccharomyces pastorianus
tttcgctatcagtaccagattctct

SEQ ID NO: 171687 - DNA, 25 bp, Saccharomyces pastorianus
ggttccacctctgcttatactacaa

SEQ ID NO: 171688 - DNA, 25 bp, Saccharomyces pastorianus
gtcttgactgcaacccagggcaaca

SEQ ID NO: 171689 - DNA, 25 bp, Saccharomyces pastorianus
agcgcagtcgtatttacatttcaga

SEQ ID NO: 171690 - DNA, 25 bp, Saccharomyces pastorianus
gaactttcgcagaagcctacgctta

SEQ ID NO: 171691 - DNA, 25 bp, Saccharomyces pastorianus
ggcaacagacagtatattttcgcta

SEQ ID NO: 171692 - DNA, 25 bp, Saccharomyces pastorianus
cagattctctagttttgccttcagt

SEQ ID NO: 171693 - DNA, 25 bp, Saccharomyces pastorianus
tcgctactagtgacatgagcatcca

SEQ ID NO: 171694 - DNA, 25 bp, Saccharomyces pastorianus
ggctacgacggtgttatcgctacta

SEQ ID NO: 171695 - DNA, 25 bp, Saccharomyces pastorianus
gttccaagtctcatccatttggtca

SEQ ID NO: 171696 - DNA, 25 bp, Saccharomyces pastorianus
gaagctttcaaatccgttgtttcca

SEQ ID NO: 171697 - DNA, 25 bp, Saccharomyces pastorianus
tcaaggccgttaactacaaccattt

SEQ ID NO: 171698 - DNA, 25 bp, Saccharomyces pastorianus
gaaggttgttatcgtcaagccacat

SEQ ID NO: 171699 - DNA, 25 bp, Saccharomyces pastorianus
caagtctcatccatttggtcacgct

SEQ ID NO: 171700 - DNA, 25 bp, Saccharomyces pastorianus
tgatgaaggttccaagtctcatcca

SEQ ID NO: 171701 - DNA, 25 bp, Saccharomyces pastorianus
gatcaagcctttcatcaaggccgtt

SEQ ID NO: 171702 - DNA, 25 bp, Saccharomyces pastorianus
aggttccaagtctcatccatttggt

SEQ ID NO: 171703 - DNA, 25 bp, Saccharomyces pastorianus
tgaaacatttgaacaaccttcccaa

SEQ ID NO: 171704 - DNA, 25 bp, Saccharomyces pastorianus
tccgttgtttccactgaaacatttg

SEQ ID NO: 171705 - DNA, 25 bp, Saccharomyces pastorianus
acatgatgaaggttccaagtctcat

SEQ ID NO: 171706 - DNA, 25 bp, Saccharomyces pastorianus
gagtttgataatgggcatttgccaa

SEQ ID NO: 171707 - DNA, 25 bp, Saccharomyces pastorianus
gttggtcatagatgtttcctgtttg

SEQ ID NO: 171708 - DNA, 25 bp, Saccharomyces pastorianus
aagctgtaacttcagaggtcgagaa

SEQ ID NO: 171709 - DNA, 25 bp, Saccharomyces pastorianus
ggtacccaagaatgaccccttgtct

SEQ ID NO: 171710 - DNA, 25 bp, Saccharomyces pastorianus
ctaattcgccaagtttttgtctctt

SEQ ID NO: 171711 - DNA, 25 bp, Saccharomyces pastorianus
gaccccttgtctttgtatagcatag

SEQ ID NO: 171712 - DNA, 25 bp, Saccharomyces pastorianus
tatagcatagtcacgccagttggtc

SEQ ID NO: 171713 - DNA, 25 bp, Saccharomyces pastorianus
actacctgtacgttatacatttatc

SEQ ID NO: 171714 - DNA, 25 bp, Saccharomyces pastorianus
cgccaagtttttgtctcttggatat

SEQ ID NO: 171715 - DNA, 25 bp, Saccharomyces pastorianus
gatgtaaacgggtctaattcgccaa

SEQ ID NO: 171716 - DNA, 25 bp, Saccharomyces pastorianus
cacgccagttggtcatagatgtttc

SEQ ID NO: 171717 - DNA, 25 bp, Saccharomyces pastorianus
ggttttcttacggaatggaatcatc

SEQ ID NO: 171718 - DNA, 25 bp, Saccharomyces pastorianus
tttggtattcgctggcaccttacta

SEQ ID NO: 171719 - DNA, 25 bp, Saccharomyces pastorianus
tatgtgaccctttggtattcgctgg

SEQ ID NO: 171720 - DNA, 25 bp, Saccharomyces pastorianus
ttatcaagatcattcctgatggctg

SEQ ID NO: 171721 - DNA, 25 bp, Saccharomyces pastorianus
cattcctgatggctgatctttgtta

SEQ ID NO: 171722 - DNA, 25 bp, Saccharomyces pastorianus
gccgctacttctgctattatcaaga

SEQ ID NO: 171723 - DNA, 25 bp, Saccharomyces pastorianus
gcgtgcgcctggtaacctcagaagg

SEQ ID NO: 171724 - DNA, 25 bp, Saccharomyces pastorianus
tggcaccttactattttcctttgtc

SEQ ID NO: 171725 - DNA, 25 bp, Saccharomyces pastorianus
ggctgatctttgttatgtgaccctt

SEQ ID NO: 171726 - DNA, 25 bp, Saccharomyces pastorianus
tcagaaggccccattgtccggtttt

SEQ ID NO: 171727 - DNA, 25 bp, Saccharomyces pastorianus
tgtatacacgtaacccgcgtgcgcc

SEQ ID NO: 171728 - DNA, 25 bp, Saccharomyces pastorianus
gcagtccacttactttgtcgagtta

SEQ ID NO: 171729 - DNA, 25 bp, Saccharomyces pastorianus
gaaaatactatccattctccaaaaa

SEQ ID NO: 171730 - DNA, 25 bp, Saccharomyces pastorianus
acaaattatggtacagcttcaactt

SEQ ID NO: 171731 - DNA, 25 bp, Saccharomyces pastorianus
actttcaggctctaacatacacgtg

SEQ ID NO: 171732 - DNA, 25 bp, Saccharomyces pastorianus
aacctcaaagctccctgtcgagcag

SEQ ID NO: 171733 - DNA, 25 bp, Saccharomyces pastorianus
aggaatagagaaccggtctccgcaa

SEQ ID NO: 171734 - DNA, 25 bp, Saccharomyces pastorianus
taataatgcccatcgcagacgtggt

SEQ ID NO: 171735 - DNA, 25 bp, Saccharomyces pastorianus
tttttgttccgcaagctctctttca

SEQ ID NO: 171736 - DNA, 25 bp, Saccharomyces pastorianus
ctctctttcatcctgaggagcacta

SEQ ID NO: 171737 - DNA, 25 bp, Saccharomyces pastorianus
gcccatcgcagacgtggtctaggaa

SEQ ID NO: 171738 - DNA, 25 bp, Saccharomyces pastorianus
ggagcactaactacaatcgcaacta

SEQ ID NO: 171739 - DNA, 25 bp, Saccharomyces pastorianus
ctaggctatcgtttgcaagaaggaa

SEQ ID NO: 171740 - DNA, 25 bp, Saccharomyces pastorianus
ggtatcgtgcggaggcaatcgaaat

SEQ ID NO: 171741 - DNA, 25 bp, Saccharomyces pastorianus
gtcattctagaagccacccttggtg

SEQ ID NO: 171742 - DNA, 25 bp, Saccharomyces pastorianus
gtggttatcccaaaggatcaagttt

SEQ ID NO: 171743 - DNA, 25 bp, Saccharomyces pastorianus
gccaagctggtcgtcattctagaag

SEQ ID NO: 171744 - DNA, 25 bp, Saccharomyces pastorianus
gccacccttggtggttatcccaaag

SEQ ID NO: 171745 - DNA, 25 bp, Saccharomyces pastorianus
aagagaagggtttgctaggtatcgt

SEQ ID NO: 171746 - DNA, 25 bp, Saccharomyces pastorianus
agaatctggtgccaagctggtcgtc

SEQ ID NO: 171747 - DNA, 25 bp, Saccharomyces pastorianus
aaatagggtctggtgattaatatcc

SEQ ID NO: 171748 - DNA, 25 bp, Saccharomyces pastorianus
atccaggaataagccaattatgtgc

SEQ ID NO: 171749 - DNA, 25 bp, Saccharomyces pastorianus
ggtttatctaggctatcgtttgcaa

SEQ ID NO: 171750 - DNA, 25 bp, Saccharomyces pastorianus
gacgcgtgaactattttgatgtcaa

SEQ ID NO: 171751 - DNA, 25 bp, Saccharomyces pastorianus
gacactctttctggatctcaaactt

SEQ ID NO: 171752 - DNA, 25 bp, Saccharomyces pastorianus
gccataataagtgtagaagctcctg

SEQ ID NO: 171753 - DNA, 25 bp, Saccharomyces pastorianus
ctgacccagggcatatagagaatta

SEQ ID NO: 171754 - DNA, 25 bp, Saccharomyces pastorianus
aacattgccggacactctttctgga

SEQ ID NO: 171755 - DNA, 25 bp, Saccharomyces pastorianus
ggcagaaacaagtaggcctctcctt

SEQ ID NO: 171756 - DNA, 25 bp, Saccharomyces pastorianus
gaagctcctggaacattgccggaca

SEQ ID NO: 171757 - DNA, 25 bp, Saccharomyces pastorianus
gtaggcctctccttgaagaggaata

SEQ ID NO: 171758 - DNA, 25 bp, Saccharomyces pastorianus
aactgataatcctgacccagggcat

SEQ ID NO: 171759 - DNA, 25 bp, Saccharomyces pastorianus
aacgcaaacgttgatcttactgaac

SEQ ID NO: 171760 - DNA, 25 bp, Saccharomyces pastorianus
caaactttacagagacgcgtgaact

SEQ ID NO: 171761 - DNA, 25 bp, Saccharomyces pastorianus
aaaattggtctctagcgggatcgaa

SEQ ID NO: 171762 - DNA, 25 bp, Saccharomyces pastorianus
attggtctctagcgggatcgaaccg

SEQ ID NO: 171763 - DNA, 25 bp, Saccharomyces pastorianus
aaaaaattggtctctagcgggatcg

SEQ ID NO: 171764 - DNA, 25 bp, Saccharomyces pastorianus
aaattggtctctagcgggatcgaac

SEQ ID NO: 171765 - DNA, 25 bp, Saccharomyces pastorianus
cgaaccgctgatccccgcgttatta

SEQ ID NO: 171766 - DNA, 25 bp, Saccharomyces pastorianus
gtctctagcgggatcgaaccgctga

SEQ ID NO: 171767 - DNA, 25 bp, Saccharomyces pastorianus
ctctagcgggatcgaaccgctgatc

SEQ ID NO: 171768 - DNA, 25 bp, Saccharomyces pastorianus
tagcgggatcgaaccgctgatcccc

SEQ ID NO: 171769 - DNA, 25 bp, Saccharomyces pastorianus
aaaaattggtctctagcgggatcga

SEQ ID NO: 171770 - DNA, 25 bp, Saccharomyces pastorianus
ttggtctctagcgggatcgaaccgc

SEQ ID NO: 171771 - DNA, 25 bp, Saccharomyces pastorianus
aattggtctctagcgggatcgaacc

SEQ ID NO: 171772 - DNA, 25 bp, Saccharomyces pastorianus
gaaatgggttttcacctcagagagt

SEQ ID NO: 171773 - DNA, 25 bp, Saccharomyces pastorianus
tgcgacggtttcactctgtttaaag

SEQ ID NO: 171774 - DNA, 25 bp, Saccharomyces pastorianus
accgccacattatgatgagatttca

SEQ ID NO: 171775 - DNA, 25 bp, Saccharomyces pastorianus
gcaaaaggagagtgcgacggtttca

SEQ ID NO: 171776 - DNA, 25 bp, Saccharomyces pastorianus
attgacacttgttagatgctctgaa

SEQ ID NO: 171777 - DNA, 25 bp, Saccharomyces pastorianus
gggacttccctgaagagtcggatta

SEQ ID NO: 171778 - DNA, 25 bp, Saccharomyces pastorianus
ggcgagattatgtgggttttctttt

SEQ ID NO: 171779 - DNA, 25 bp, Saccharomyces pastorianus
acatactagaactcaacttcggaaa

SEQ ID NO: 171780 - DNA, 25 bp, Saccharomyces pastorianus
taaagttcttttttgcactgttaag

SEQ ID NO: 171781 - DNA, 25 bp, Saccharomyces pastorianus
gttatttgccttccgcactaagaaa

SEQ ID NO: 171782 - DNA, 25 bp, Saccharomyces pastorianus
gagagcatatcccacatactagaac

SEQ ID NO: 171783 - DNA, 25 bp, Saccharomyces pastorianus
gagtggtgagccaattgattacgat

SEQ ID NO: 171784 - DNA, 25 bp, Saccharomyces pastorianus
aacgtggcaaaatgacgaaggcgga

SEQ ID NO: 171785 - DNA, 25 bp, Saccharomyces pastorianus
ggacacgaagagtggtgagccaatt

SEQ ID NO: 171786 - DNA, 25 bp, Saccharomyces pastorianus
aggtggtaatgcttctgctctatcg

SEQ ID NO: 171787 - DNA, 25 bp, Saccharomyces pastorianus
gttatggtgaccttgcgcaaacgtg

SEQ ID NO: 171788 - DNA, 25 bp, Saccharomyces pastorianus
gtttcagaaacgcagtcaggagttc

SEQ ID NO: 171789 - DNA, 25 bp, Saccharomyces pastorianus
atcggagatatatttcaacacttac

SEQ ID NO: 171790 - DNA, 25 bp, Saccharomyces pastorianus
aatgcttctgctctatcgtttcaga

SEQ ID NO: 171791 - DNA, 25 bp, Saccharomyces pastorianus
gtgaccttgcgcaaacgtggcaaaa

SEQ ID NO: 171792 - DNA, 25 bp, Saccharomyces pastorianus
ccctgatacaggtggtaatgcttct

SEQ ID NO: 171793 - DNA, 25 bp, Saccharomyces pastorianus
agactggaagtactgctttgctgct

SEQ ID NO: 171794 - DNA, 25 bp, Saccharomyces pastorianus
ccattgcaactagttaaaggtgata

SEQ ID NO: 171795 - DNA, 25 bp, Saccharomyces pastorianus
gttctctctgacgtatgtgataaga

SEQ ID NO: 171796 - DNA, 25 bp, Saccharomyces pastorianus
gggaaatgcataccagactacaacc

SEQ ID NO: 171797 - DNA, 25 bp, Saccharomyces pastorianus
aatcgttctctctgacgtatgtgat

SEQ ID NO: 171798 - DNA, 25 bp, Saccharomyces pastorianus
aaaaactgtgcctgtaaaaccattg

SEQ ID NO: 171799 - DNA, 25 bp, Saccharomyces pastorianus
gtaaaaaaccaatgacagtcaaatc

SEQ ID NO: 171800 - DNA, 25 bp, Saccharomyces pastorianus
gcctgtaaaaccattgcaactagtt

SEQ ID NO: 171801 - DNA, 25 bp, Saccharomyces pastorianus
ctctctgacgtatgtgataagacaa

SEQ ID NO: 171802 - DNA, 25 bp, Saccharomyces pastorianus
agactacaacctaatcgttctctct

SEQ ID NO: 171803 - DNA, 25 bp, Saccharomyces pastorianus
aacctaatcgttctctctgacgtat

SEQ ID NO: 171804 - DNA, 25 bp, Saccharomyces pastorianus
gcataccagactacaacctaatcgt

SEQ ID NO: 171805 - DNA, 25 bp, Saccharomyces pastorianus
gaagaatatggcgaggacgctatat

SEQ ID NO: 171806 - DNA, 25 bp, Saccharomyces pastorianus
gcctgtttggacttcatcaatgcac

SEQ ID NO: 171807 - DNA, 25 bp, Saccharomyces pastorianus
aagtgtctcaaggaggcaagtttga

SEQ ID NO: 171808 - DNA, 25 bp, Saccharomyces pastorianus
tggcgaggacgctatattaaagact

SEQ ID NO: 171809 - DNA, 25 bp, Saccharomyces pastorianus
aagagaatatttggcctttgtaaca

SEQ ID NO: 171810 - DNA, 25 bp, Saccharomyces pastorianus
tgccatcaaaaggaatattacaaga

SEQ ID NO: 171811 - DNA, 25 bp, Saccharomyces pastorianus
ggacttcatcaatgcactcgataaa

SEQ ID NO: 171812 - DNA, 25 bp, Saccharomyces pastorianus
aaggatgctttgaacaagtgtctca

SEQ ID NO: 171813 - DNA, 25 bp, Saccharomyces pastorianus
gaaacgtgctgtcattgaaagtaga

SEQ ID NO: 171814 - DNA, 25 bp, Saccharomyces pastorianus
gaataacaagaaacgtgctgtcatt

SEQ ID NO: 171815 - DNA, 25 bp, Saccharomyces pastorianus
ggacgctatattaaagactatctta

SEQ ID NO: 171816 - DNA, 25 bp, Saccharomyces pastorianus
atcgcgaactcgtaagtagaaaact

SEQ ID NO: 171817 - DNA, 25 bp, Saccharomyces pastorianus
gaacgagtggttcagcttctgtttg

SEQ ID NO: 171818 - DNA, 25 bp, Saccharomyces pastorianus
gagtggttcagcttctgtttgagtt

SEQ ID NO: 171819 - DNA, 25 bp, Saccharomyces pastorianus
atgcagacagaagactctcaagatg

SEQ ID NO: 171820 - DNA, 25 bp, Saccharomyces pastorianus
ctgtttgagttgcaaccatggtatg

SEQ ID NO: 171821 - DNA, 25 bp, Saccharomyces pastorianus
gatggtgcaaatcgcgaactcgtaa

SEQ ID NO: 171822 - DNA, 25 bp, Saccharomyces pastorianus
gactctcaagatggtgcaaatcgcg

SEQ ID NO: 171823 - DNA, 25 bp, Saccharomyces pastorianus
agcttctgtttgagttgcaaccatg

SEQ ID NO: 171824 - DNA, 25 bp, Saccharomyces pastorianus
acagaagactctcaagatggtgcaa

SEQ ID NO: 171825 - DNA, 25 bp, Saccharomyces pastorianus
ggtgcaaatcgcgaactcgtaagta

SEQ ID NO: 171826 - DNA, 25 bp, Saccharomyces pastorianus
gttcagcttctgtttgagttgcaac

SEQ ID NO: 171827 - DNA, 25 bp, Saccharomyces pastorianus
gaagctctcgtcgatggtattggaa

SEQ ID NO: 171828 - DNA, 25 bp, Saccharomyces pastorianus
tttactagaagctctcgtcgatggt

SEQ ID NO: 171829 - DNA, 25 bp, Saccharomyces pastorianus
aatttactagaagctctcgtcgatg

SEQ ID NO: 171830 - DNA, 25 bp, Saccharomyces pastorianus
tactagaagctctcgtcgatggtat

SEQ ID NO: 171831 - DNA, 25 bp, Saccharomyces pastorianus
agctctcgtcgatggtattggaatc

SEQ ID NO: 171832 - DNA, 25 bp, Saccharomyces pastorianus
tagaagctctcgtcgatggtattgg

SEQ ID NO: 171833 - DNA, 25 bp, Saccharomyces pastorianus
gctctcgtcgatggtattggaatcc

SEQ ID NO: 171834 - DNA, 25 bp, Saccharomyces pastorianus
acaatttactagaagctctcgtcga

SEQ ID NO: 171835 - DNA, 25 bp, Saccharomyces pastorianus
tatacaatttactagaagctctcgt

SEQ ID NO: 171836 - DNA, 25 bp, Saccharomyces pastorianus
ttactagaagctctcgtcgatggta

SEQ ID NO: 171837 - DNA, 25 bp, Saccharomyces pastorianus
actagaagctctcgtcgatggtatt

SEQ ID NO: 171838 - DNA, 25 bp, Saccharomyces pastorianus
atgggctcttactggtcgcccatct

SEQ ID NO: 171839 - DNA, 25 bp, Saccharomyces pastorianus
tatacttcgtataggaagccgttct

SEQ ID NO: 171840 - DNA, 25 bp, Saccharomyces pastorianus
aacaaagctgatcaagccgctgtat

SEQ ID NO: 171841 - DNA, 25 bp, Saccharomyces pastorianus
aattggaacaactacatctgcacac

SEQ ID NO: 171842 - DNA, 25 bp, Saccharomyces pastorianus
atctcacactcatgtcttccacatt

SEQ ID NO: 171843 - DNA, 25 bp, Saccharomyces pastorianus
taggaagccgttcttttatgcccca

SEQ ID NO: 171844 - DNA, 25 bp, Saccharomyces pastorianus
gatcaagccgctgtatttatatgaa

SEQ ID NO: 171845 - DNA, 25 bp, Saccharomyces pastorianus
gttcttgaacgatgctatacttcgt

SEQ ID NO: 171846 - DNA, 25 bp, Saccharomyces pastorianus
atctgcacacatgggctcttactgg

SEQ ID NO: 171847 - DNA, 25 bp, Saccharomyces pastorianus
ttccacattccacttagcgactaag

SEQ ID NO: 171848 - DNA, 25 bp, Saccharomyces pastorianus
gcgactaagtcattattactatggg

SEQ ID NO: 171849 - DNA, 25 bp, Saccharomyces pastorianus
aaatggtctctagcgggatcgaacc

SEQ ID NO: 171850 - DNA, 25 bp, Saccharomyces pastorianus
aaaagtaaatggtctctagcgggat

SEQ ID NO: 171851 - DNA, 25 bp, Saccharomyces pastorianus
aagtaaatggtctctagcgggatcg

SEQ ID NO: 171852 - DNA, 25 bp, Saccharomyces pastorianus
gtaaatggtctctagcgggatcgaa

SEQ ID NO: 171853 - DNA, 25 bp, Saccharomyces pastorianus
cgaaccgctgatccccgcgttatta

SEQ ID NO: 171854 - DNA, 25 bp, Saccharomyces pastorianus
gtctctagcgggatcgaaccgctga

SEQ ID NO: 171855 - DNA, 25 bp, Saccharomyces pastorianus
ctctagcgggatcgaaccgctgatc

SEQ ID NO: 171856 - DNA, 25 bp, Saccharomyces pastorianus
aaagtaaatggtctctagcgggatc

SEQ ID NO: 171857 - DNA, 25 bp, Saccharomyces pastorianus
agtaaatggtctctagcgggatcga

SEQ ID NO: 171858 - DNA, 25 bp, Saccharomyces pastorianus
taaatggtctctagcgggatcgaac

SEQ ID NO: 171859 - DNA, 25 bp, Saccharomyces pastorianus
aatggtctctagcgggatcgaaccg

SEQ ID NO: 171860 - DNA, 25 bp, Saccharomyces pastorianus
aaggcgttagatggtgacataaggt

SEQ ID NO: 171861 - DNA, 25 bp, Saccharomyces pastorianus
tcctaatgtcagtatattgtcatat

SEQ ID NO: 171862 - DNA, 25 bp, Saccharomyces pastorianus
tatattgtcatataaggcgttagat

SEQ ID NO: 171863 - DNA, 25 bp, Saccharomyces pastorianus
aaaggagctgaaaatttgttggaat

SEQ ID NO: 171864 - DNA, 25 bp, Saccharomyces pastorianus
atataaggcgttagatggtgacata

SEQ ID NO: 171865 - DNA, 25 bp, Saccharomyces pastorianus
gtattcctaatgtcagtatattgtc

SEQ ID NO: 171866 - DNA, 25 bp, Saccharomyces pastorianus
aactagtattcctaatgtcagtata

SEQ ID NO: 171867 - DNA, 25 bp, Saccharomyces pastorianus
atcttatatcaactagtattcctaa

SEQ ID NO: 171868 - DNA, 25 bp, Saccharomyces pastorianus
gtgacataaggtatgaaaagttgcc

SEQ ID NO: 171869 - DNA, 25 bp, Saccharomyces pastorianus
ctagtattcctaatgtcagtatatt

SEQ ID NO: 171870 - DNA, 25 bp, Saccharomyces pastorianus
atcaactagtattcctaatgtcagt

SEQ ID NO: 171871 - DNA, 25 bp, Saccharomyces pastorianus
tgcatactatttgccttagaagccc

SEQ ID NO: 171872 - DNA, 25 bp, Saccharomyces pastorianus
ctatttgccttagaagcccgatcga

SEQ ID NO: 171873 - DNA, 25 bp, Saccharomyces pastorianus
atactatttgccttagaagcccgat

SEQ ID NO: 171874 - DNA, 25 bp, Saccharomyces pastorianus
gaatcctctcctcttccatataaat

SEQ ID NO: 171875 - DNA, 25 bp, Saccharomyces pastorianus
cctctcctcttccatataaatcaat

SEQ ID NO: 171876 - DNA, 25 bp, Saccharomyces pastorianus
aagcccgatcgatgaatcctctcct

SEQ ID NO: 171877 - DNA, 25 bp, Saccharomyces pastorianus
tttgccttagaagcccgatcgatga

SEQ ID NO: 171878 - DNA, 25 bp, Saccharomyces pastorianus
agaagcccgatcgatgaatcctctc

SEQ ID NO: 171879 - DNA, 25 bp, Saccharomyces pastorianus
ttagaagcccgatcgatgaatcctc

SEQ ID NO: 171880 - DNA, 25 bp, Saccharomyces pastorianus
caataaggcaacctctagaaaacgc

SEQ ID NO: 171881 - DNA, 25 bp, Saccharomyces pastorianus
tataaatcaataaggcaacctctag

SEQ ID NO: 171882 - DNA, 25 bp, Saccharomyces pastorianus
gcttctatgaagattgcgacgtctc

SEQ ID NO: 171883 - DNA, 25 bp, Saccharomyces pastorianus
gcgacgtctccaaagttagcaaaga

SEQ ID NO: 171884 - DNA, 25 bp, Saccharomyces pastorianus
gagagttgctccagtggtccaggtt

SEQ ID NO: 171885 - DNA, 25 bp, Saccharomyces pastorianus
gtggtccaggtttttcatgtgaaga

SEQ ID NO: 171886 - DNA, 25 bp, Saccharomyces pastorianus
ctgtggttcctatagagagttgctc

SEQ ID NO: 171887 - DNA, 25 bp, Saccharomyces pastorianus
tgagctttacgcacgatactgatat

SEQ ID NO: 171888 - DNA, 25 bp, Saccharomyces pastorianus
tgacgttttactgggattggaacac

SEQ ID NO: 171889 - DNA, 25 bp, Saccharomyces pastorianus
tgaagagggcacattttacgagtat

SEQ ID NO: 171890 - DNA, 25 bp, Saccharomyces pastorianus
taacaaccaatcatgttccctttcg

SEQ ID NO: 171891 - DNA, 25 bp, Saccharomyces pastorianus
gattacgaggtgtgagcttctatga

SEQ ID NO: 171892 - DNA, 25 bp, Saccharomyces pastorianus
ttttacgagtatgccaaagacagat

SEQ ID NO: 171893 - DNA, 25 bp, Saccharomyces pastorianus
actacgaattaggtcagctgatgag

SEQ ID NO: 171894 - DNA, 25 bp, Saccharomyces pastorianus
gaattaggtcagctgatgagccgat

SEQ ID NO: 171895 - DNA, 25 bp, Saccharomyces pastorianus
gatgagccgatgactaccttttata

SEQ ID NO: 171896 - DNA, 25 bp, Saccharomyces pastorianus
gactacgaattaggtcagctgatga

SEQ ID NO: 171897 - DNA, 25 bp, Saccharomyces pastorianus
tacgaattaggtcagctgatgagcc

SEQ ID NO: 171898 - DNA, 25 bp, Saccharomyces pastorianus
gccgatgactaccttttataagtgt

SEQ ID NO: 171899 - DNA, 25 bp, Saccharomyces pastorianus
ccgactacgaattaggtcagctgat

SEQ ID NO: 171900 - DNA, 25 bp, Saccharomyces pastorianus
agctgatgagccgatgactaccttt

SEQ ID NO: 171901 - DNA, 25 bp, Saccharomyces pastorianus
acgaattaggtcagctgatgagccg

SEQ ID NO: 171902 - DNA, 25 bp, Saccharomyces pastorianus
ttccgactacgaattaggtcagctg

SEQ ID NO: 171903 - DNA, 25 bp, Saccharomyces pastorianus
tccgactacgaattaggtcagctga

SEQ ID NO: 171904 - DNA, 25 bp, Saccharomyces pastorianus
ccgttacatcactacttgggaaaat

SEQ ID NO: 171905 - DNA, 25 bp, Saccharomyces pastorianus
aaatgcctatagaactgatgtgatt

SEQ ID NO: 171906 - DNA, 25 bp, Saccharomyces pastorianus
tctagagagaaacagccccttttgg

SEQ ID NO: 171907 - DNA, 25 bp, Saccharomyces pastorianus
gtatgacagaggtcacagaatccgt

SEQ ID NO: 171908 - DNA, 25 bp, Saccharomyces pastorianus
acctcgtattagcactttatttcaa

SEQ ID NO: 171909 - DNA, 25 bp, Saccharomyces pastorianus
aggcaggaagctattcagcagaata

SEQ ID NO: 171910 - DNA, 25 bp, Saccharomyces pastorianus
ggatcgtggtatacctcgtattagc

SEQ ID NO: 171911 - DNA, 25 bp, Saccharomyces pastorianus
aactatcttccgttacatcactact

SEQ ID NO: 171912 - DNA, 25 bp, Saccharomyces pastorianus
gggaatttaaacagtactctctaga

SEQ ID NO: 171913 - DNA, 25 bp, Saccharomyces pastorianus
acaaactcccaccatgacggtaaat

SEQ ID NO: 171914 - DNA, 25 bp, Saccharomyces pastorianus
aagagatcgacatactctagcgtat

SEQ ID NO: 171915 - DNA, 25 bp, Saccharomyces pastorianus
gtcgctagagtccttcatcacaaga

SEQ ID NO: 171916 - DNA, 25 bp, Saccharomyces pastorianus
gaagtgtcaccattaattattgcat

SEQ ID NO: 171917 - DNA, 25 bp, Saccharomyces pastorianus
tattgcatcatcaaaaactaaggga

SEQ ID NO: 171918 - DNA, 25 bp, Saccharomyces pastorianus
tcattcttgagagccgcgatcggat

SEQ ID NO: 171919 - DNA, 25 bp, Saccharomyces pastorianus
acaatgcgtcgctagagtccttcat

SEQ ID NO: 171920 - DNA, 25 bp, Saccharomyces pastorianus
ggagagttggcgttgcctgcaaaca

SEQ ID NO: 171921 - DNA, 25 bp, Saccharomyces pastorianus
aaactgtgtagcgtcattcttgaga

SEQ ID NO: 171922 - DNA, 25 bp, Saccharomyces pastorianus
gttgcctgcaaacaatgcgtcgcta

SEQ ID NO: 171923 - DNA, 25 bp, Saccharomyces pastorianus
agagtccttcatcacaagaaactgt

SEQ ID NO: 171924 - DNA, 25 bp, Saccharomyces pastorianus
atccttttctggagccaaagagtca

SEQ ID NO: 171925 - DNA, 25 bp, Saccharomyces pastorianus
gatcggatccttttctggagccaaa

SEQ ID NO: 171926 - DNA, 25 bp, Saccharomyces pastorianus
tgcgcagtaaattgatcctgatggt

SEQ ID NO: 171927 - DNA, 25 bp, Saccharomyces pastorianus
tactgttcttcgacgttattaaacg

SEQ ID NO: 171928 - DNA, 25 bp, Saccharomyces pastorianus
gaatcttatatacaagtacgagtac

SEQ ID NO: 171929 - DNA, 25 bp, Saccharomyces pastorianus
aagtacgagtacatactgcgcagta

SEQ ID NO: 171930 - DNA, 25 bp, Saccharomyces pastorianus
tagtgcaatactgttcttcgacgtt

SEQ ID NO: 171931 - DNA, 25 bp, Saccharomyces pastorianus
tcctgatggtgtgtttagatttcgc

SEQ ID NO: 171932 - DNA, 25 bp, Saccharomyces pastorianus
catactgcgcagtaaattgatcctg

SEQ ID NO: 171933 - DNA, 25 bp, Saccharomyces pastorianus
gtgcaatactgttcttcgacgttat

SEQ ID NO: 171934 - DNA, 25 bp, Saccharomyces pastorianus
gcaatactgttcttcgacgttatta

SEQ ID NO: 171935 - DNA, 25 bp, Saccharomyces pastorianus
ataccaagcaagtatagtgcaatac

SEQ ID NO: 171936 - DNA, 25 bp, Saccharomyces pastorianus
tgatggtgtgtttagatttcgccag

SEQ ID NO: 171937 - DNA, 25 bp, Saccharomyces pastorianus
aaaatatgtcgatgaacaatccaag

SEQ ID NO: 171938 - DNA, 25 bp, Saccharomyces pastorianus
gtttagttgcttaccatcaaaaata

SEQ ID NO: 171939 - DNA, 25 bp, Saccharomyces pastorianus
agttgcttaccatcaaaaatatgtc

SEQ ID NO: 171940 - DNA, 25 bp, Saccharomyces pastorianus
ttagttgcttaccatcaaaaatatg

SEQ ID NO: 171941 - DNA, 25 bp, Saccharomyces pastorianus
caaggttaatggttctccaatcact

SEQ ID NO: 171942 - DNA, 25 bp, Saccharomyces pastorianus
ggtttagttgcttaccatcaaaaat

SEQ ID NO: 171943 - DNA, 25 bp, Saccharomyces pastorianus
tttagttgcttaccatcaaaaatat

SEQ ID NO: 171944 - DNA, 25 bp, Saccharomyces pastorianus
tgttgcccatgtcaaggccggtaag

SEQ ID NO: 171945 - DNA, 25 bp, Saccharomyces pastorianus
ggctttcacttcttacgacagaacc

SEQ ID NO: 171946 - DNA, 25 bp, Saccharomyces pastorianus
gatcaaggttaatggttctccaatc

SEQ ID NO: 171947 - DNA, 25 bp, Saccharomyces pastorianus
aaggtctacgaaccattattgttag

SEQ ID NO: 171948 - DNA, 25 bp, Saccharomyces pastorianus
agacaacactctattggtcactggt

SEQ ID NO: 171949 - DNA, 25 bp, Saccharomyces pastorianus
tacctctaccaaagtctccgtggaa

SEQ ID NO: 171950 - DNA, 25 bp, Saccharomyces pastorianus
agaagacaacactctattggtcact

SEQ ID NO: 171951 - DNA, 25 bp, Saccharomyces pastorianus
ctctaccaaagtctccgtggaaggt

SEQ ID NO: 171952 - DNA, 25 bp, Saccharomyces pastorianus
ctaccaaagtctccgtggaaggtgt

SEQ ID NO: 171953 - DNA, 25 bp, Saccharomyces pastorianus
aacactctattggtcactggtccat

SEQ ID NO: 171954 - DNA, 25 bp, Saccharomyces pastorianus
actctattggtcactggtccattca

SEQ ID NO: 171955 - DNA, 25 bp, Saccharomyces pastorianus
acaacactctattggtcactggtcc

SEQ ID NO: 171956 - DNA, 25 bp, Saccharomyces pastorianus
ccaaagtctccgtggaaggtgtcaa

SEQ ID NO: 171957 - DNA, 25 bp, Saccharomyces pastorianus
acactctattggtcactggtccatt

SEQ ID NO: 171958 - DNA, 25 bp, Saccharomyces pastorianus
attgctacctctaccaaagtctccg

SEQ ID NO: 171959 - DNA, 25 bp, Saccharomyces pastorianus
cacctgttaccagtgtaacaacaag

SEQ ID NO: 171960 - DNA, 25 bp, Saccharomyces pastorianus
gttaccagtgtaacaacaagtcagg

SEQ ID NO: 171961 - DNA, 25 bp, Saccharomyces pastorianus
actgcttcatcattaccgcctgtta

SEQ ID NO: 171962 - DNA, 25 bp, Saccharomyces pastorianus
ttaccagtgtaacaacaagtcagga

SEQ ID NO: 171963 - DNA, 25 bp, Saccharomyces pastorianus
caggaaataacttcatcattaccac

SEQ ID NO: 171964 - DNA, 25 bp, Saccharomyces pastorianus
cgcctgttaccagtgcggcaacaag

SEQ ID NO: 171965 - DNA, 25 bp, Saccharomyces pastorianus
ccgcctgttaccagtgcggcaacaa

SEQ ID NO: 171966 - DNA, 25 bp, Saccharomyces pastorianus
cagtgtaacaacaagtcaggaaata

SEQ ID NO: 171967 - DNA, 25 bp, Saccharomyces pastorianus
accagtgtaacaacaagtcaggaaa

SEQ ID NO: 171968 - DNA, 25 bp, Saccharomyces pastorianus
aactgcttcatcattaccgcctgtt

SEQ ID NO: 171969 - DNA, 25 bp, Saccharomyces pastorianus
aaactgcttcatcattaccgcctgt

SEQ ID NO: 171970 - DNA, 25 bp, Saccharomyces pastorianus
aactgctagcaccatcataactaca

SEQ ID NO: 171971 - DNA, 25 bp, Saccharomyces pastorianus
tactgtcactggtaccaacggtcaa

SEQ ID NO: 171972 - DNA, 25 bp, Saccharomyces pastorianus
tagcaccatcataactacaactgag

SEQ ID NO: 171973 - DNA, 25 bp, Saccharomyces pastorianus
tctacttctaccgaattgaccacag

SEQ ID NO: 171974 - DNA, 25 bp, Saccharomyces pastorianus
taacaccatcgtaactacgaccaaa

SEQ ID NO: 171975 - DNA, 25 bp, Saccharomyces pastorianus
tctaccgaattgaccacagtcaccg

SEQ ID NO: 171976 - DNA, 25 bp, Saccharomyces pastorianus
aatgactactgtcactggtaccaac

SEQ ID NO: 171977 - DNA, 25 bp, Saccharomyces pastorianus
agaaatgactactgtcactggtacc

SEQ ID NO: 171978 - DNA, 25 bp, Saccharomyces pastorianus
atccacagaaatgactactgtcact

SEQ ID NO: 171979 - DNA, 25 bp, Saccharomyces pastorianus
aactacgaccaaaccatggactggt

SEQ ID NO: 171980 - DNA, 25 bp, Saccharomyces pastorianus
cacagtcaccggtaccaatggttta

SEQ ID NO: 171981 - DNA, 25 bp, Saccharomyces pastorianus
atcggcagcaagaattcgtttgaaa

SEQ ID NO: 171982 - DNA, 25 bp, Saccharomyces pastorianus
agcctaatttatcggcagcaagaat

SEQ ID NO: 171983 - DNA, 25 bp, Saccharomyces pastorianus
aattggaggtaattgttaggcctga

SEQ ID NO: 171984 - DNA, 25 bp, Saccharomyces pastorianus
aaagggaccttgattcgctggacct

SEQ ID NO: 171985 - DNA, 25 bp, Saccharomyces pastorianus
acctcccaccaacagtgactttgaa

SEQ ID NO: 171986 - DNA, 25 bp, Saccharomyces pastorianus
taacatcaccagatagtgcggatag

SEQ ID NO: 171987 - DNA, 25 bp, Saccharomyces pastorianus
gaagatctttcatccaaatatcgat

SEQ ID NO: 171988 - DNA, 25 bp, Saccharomyces pastorianus
gtgcggatagatcacaatcgccgaa

SEQ ID NO: 171989 - DNA, 25 bp, Saccharomyces pastorianus
aaacagcagttctattcagcctaat

SEQ ID NO: 171990 - DNA, 25 bp, Saccharomyces pastorianus
tattcttcgagaagactggtcgcca

SEQ ID NO: 171991 - DNA, 25 bp, Saccharomyces pastorianus
gaagtttatccgattgaaccaccaa

SEQ ID NO: 171992 - DNA, 25 bp, Saccharomyces pastorianus
atcgatgacagcaccattgactcca

SEQ ID NO: 171993 - DNA, 25 bp, Saccharomyces pastorianus
attgactccacagcaacagctactt

SEQ ID NO: 171994 - DNA, 25 bp, Saccharomyces pastorianus
ggagcaacaacagaatggtggagcc

SEQ ID NO: 171995 - DNA, 25 bp, Saccharomyces pastorianus
taagtgcaaacatcaatccaacccc

SEQ ID NO: 171996 - DNA, 25 bp, Saccharomyces pastorianus
tacttcaaagacaacagcaggcctt

SEQ ID NO: 171997 - DNA, 25 bp, Saccharomyces pastorianus
aacggagtggtaacaatgccaccag

SEQ ID NO: 171998 - DNA, 25 bp, Saccharomyces pastorianus
ctccacagcaacagctacttcaaag

SEQ ID NO: 171999 - DNA, 25 bp, Saccharomyces pastorianus
aaaacagcaggctttaagtgcaaac

SEQ ID NO: 172000 - DNA, 25 bp, Saccharomyces pastorianus
aacagcaggccttggagcaacaaca

SEQ ID NO: 172001 - DNA, 25 bp, Saccharomyces pastorianus
tcaacgctagaatatcgatgacagc

SEQ ID NO: 172002 - DNA, 25 bp, Saccharomyces pastorianus
tggtggagccatgaaaaacgcaaat

SEQ ID NO: 172003 - DNA, 25 bp, Saccharomyces pastorianus
ctttcgccgatttaaacattgaatt

SEQ ID NO: 172004 - DNA, 25 bp, Saccharomyces pastorianus
gtactccattaattctaagactttc

SEQ ID NO: 172005 - DNA, 25 bp, Saccharomyces pastorianus
attaattctaagactttcgccgatt

SEQ ID NO: 172006 - DNA, 25 bp, Saccharomyces pastorianus
ttaattctaagactttcgccgattt

SEQ ID NO: 172007 - DNA, 25 bp, Saccharomyces pastorianus
cattaattctaagactttcgccgat

SEQ ID NO: 172008 - DNA, 25 bp, Saccharomyces pastorianus
aagactttcgccgatttaaacattg

SEQ ID NO: 172009 - DNA, 25 bp, Saccharomyces pastorianus
taattctaagactttcgccgattta

SEQ ID NO: 172010 - DNA, 25 bp, Saccharomyces pastorianus
gactttcgccgatttaaacattgaa

SEQ ID NO: 172011 - DNA, 25 bp, Saccharomyces pastorianus
tcgccgatttaaacattgaattatt

SEQ ID NO: 172012 - DNA, 25 bp, Saccharomyces pastorianus
aacattgaattatttcgaaaccaca

SEQ ID NO: 172013 - DNA, 25 bp, Saccharomyces pastorianus
ttcgaaaccacaagttcaaaactgt

SEQ ID NO: 172014 - DNA, 25 bp, Saccharomyces pastorianus
gataaatttcgtggcccttcttaat

SEQ ID NO: 172015 - DNA, 25 bp, Saccharomyces pastorianus
gcccttcttaatttctcctatatct

SEQ ID NO: 172016 - DNA, 25 bp, Saccharomyces pastorianus
gcagcactggagtttgttttttgtt

SEQ ID NO: 172017 - DNA, 25 bp, Saccharomyces pastorianus
gttctaattagcagcactggagttt

SEQ ID NO: 172018 - DNA, 25 bp, Saccharomyces pastorianus
taatttctcctatatctaactccag

SEQ ID NO: 172019 - DNA, 25 bp, Saccharomyces pastorianus
ataggataaatttcgtggcccttct

SEQ ID NO: 172020 - DNA, 25 bp, Saccharomyces pastorianus
ttttgtttcccataccataggataa

SEQ ID NO: 172021 - DNA, 25 bp, Saccharomyces pastorianus
tctcctatatctaactccagacaag

SEQ ID NO: 172022 - DNA, 25 bp, Saccharomyces pastorianus
tggcccttcttaatttctcctatat

SEQ ID NO: 172023 - DNA, 25 bp, Saccharomyces pastorianus
tctaactccagacaaggataatcat

SEQ ID NO: 172024 - DNA, 25 bp, Saccharomyces pastorianus
ttttagttctaattagcagcactgg

SEQ ID NO: 172025 - DNA, 25 bp, Saccharomyces pastorianus
agatttattacatccaactcctgcc

SEQ ID NO: 172026 - DNA, 25 bp, Saccharomyces pastorianus
gcccaaaccgcggtcacttgtgaat

SEQ ID NO: 172027 - DNA, 25 bp, Saccharomyces pastorianus
tcttgtgcacaccaaccggtggtaa

SEQ ID NO: 172028 - DNA, 25 bp, Saccharomyces pastorianus
aaaccgcggtcacttgtgaatcctg

SEQ ID NO: 172029 - DNA, 25 bp, Saccharomyces pastorianus
gcacaaattaaagactctggtccaa

SEQ ID NO: 172030 - DNA, 25 bp, Saccharomyces pastorianus
tggacgttaaatgtccaggttgttt

SEQ ID NO: 172031 - DNA, 25 bp, Saccharomyces pastorianus
caactcctgcctctgaagcaagaaa

SEQ ID NO: 172032 - DNA, 25 bp, Saccharomyces pastorianus
tgaatcctgctcaacagtcttgtgc

SEQ ID NO: 172033 - DNA, 25 bp, Saccharomyces pastorianus
aagactctggtccaaagcccaagat

SEQ ID NO: 172034 - DNA, 25 bp, Saccharomyces pastorianus
tgctcaacagtcttgtgcacaccaa

SEQ ID NO: 172035 - DNA, 25 bp, Saccharomyces pastorianus
gtcacttgtgaatcctgctcaacag

SEQ ID NO: 172036 - DNA, 25 bp, Saccharomyces pastorianus
aagtcctctaacttgacgtctgcgg

SEQ ID NO: 172037 - DNA, 25 bp, Saccharomyces pastorianus
tgcttggacacgttgtctctcacct

SEQ ID NO: 172038 - DNA, 25 bp, Saccharomyces pastorianus
tccatcctggtcgtgctggtggtgt

SEQ ID NO: 172039 - DNA, 25 bp, Saccharomyces pastorianus
gggaatgatcgcctccatcctggtc

SEQ ID NO: 172040 - DNA, 25 bp, Saccharomyces pastorianus
tggtggtgtgcttgctgctctcctt

SEQ ID NO: 172041 - DNA, 25 bp, Saccharomyces pastorianus
tgacgtctgcgggaatgatcgcctc

SEQ ID NO: 172042 - DNA, 25 bp, Saccharomyces pastorianus
tcacctcgttctcgttgttggccag

SEQ ID NO: 172043 - DNA, 25 bp, Saccharomyces pastorianus
gtcacttccaagtcctctaacttga

SEQ ID NO: 172044 - DNA, 25 bp, Saccharomyces pastorianus
ttgttggccagcgtcacttccaagt

SEQ ID NO: 172045 - DNA, 25 bp, Saccharomyces pastorianus
tccttggccggctaatcgaagttga

SEQ ID NO: 172046 - DNA, 25 bp, Saccharomyces pastorianus
tgttctttttcaaaatttcgctcgg

SEQ ID NO: 172047 - DNA, 25 bp, Saccharomyces pastorianus
aggtattgcacactcctaacatagc

SEQ ID NO: 172048 - DNA, 25 bp, Saccharomyces pastorianus
gtagatatcacagcatgctttacca

SEQ ID NO: 172049 - DNA, 25 bp, Saccharomyces pastorianus
gcatgctttaccaaaaacgtcttag

SEQ ID NO: 172050 - DNA, 25 bp, Saccharomyces pastorianus
gcctatgacttactcagtttgaatg

SEQ ID NO: 172051 - DNA, 25 bp, Saccharomyces pastorianus
aattaacgctattggtgacctacaa

SEQ ID NO: 172052 - DNA, 25 bp, Saccharomyces pastorianus
atttcacttccaggacaacaccaaa

SEQ ID NO: 172053 - DNA, 25 bp, Saccharomyces pastorianus
ggtgacctacaatttcacttccagg

SEQ ID NO: 172054 - DNA, 25 bp, Saccharomyces pastorianus
atgaattggctgcagtagatatcac

SEQ ID NO: 172055 - DNA, 25 bp, Saccharomyces pastorianus
acatacactcagcatcatctaatcc

SEQ ID NO: 172056 - DNA, 25 bp, Saccharomyces pastorianus
cacgaacccttataagatctgctca

SEQ ID NO: 172057 - DNA, 25 bp, Saccharomyces pastorianus
gattcaggagcatcacgaaccctta

SEQ ID NO: 172058 - DNA, 25 bp, Saccharomyces pastorianus
ccctgatgaacctgctccaaactta

SEQ ID NO: 172059 - DNA, 25 bp, Saccharomyces pastorianus
gatgaacctgctccaaacttaccct

SEQ ID NO: 172060 - DNA, 25 bp, Saccharomyces pastorianus
gttaccctgacccatttcattatac

SEQ ID NO: 172061 - DNA, 25 bp, Saccharomyces pastorianus
aaccctgatgaacctgctccaaact

SEQ ID NO: 172062 - DNA, 25 bp, Saccharomyces pastorianus
acccatttcattataccactcccaa

SEQ ID NO: 172063 - DNA, 25 bp, Saccharomyces pastorianus
taccctgacccatttcattatacca

SEQ ID NO: 172064 - DNA, 25 bp, Saccharomyces pastorianus
tcgttaccctgacccatttcattat

SEQ ID NO: 172065 - DNA, 25 bp, Saccharomyces pastorianus
tgatgaacctgctccaaacttaccc

SEQ ID NO: 172066 - DNA, 25 bp, Saccharomyces pastorianus
tgctccaaacttaccctccattacc

SEQ ID NO: 172067 - DNA, 25 bp, Saccharomyces pastorianus
ctaatccaaccctgatgaacctgct

SEQ ID NO: 172068 - DNA, 25 bp, Saccharomyces pastorianus
ctgatgaacctgctccaaacttacc

SEQ ID NO: 172069 - DNA, 25 bp, Saccharomyces pastorianus
aaaagcgtgcagttaaagaaagtag

SEQ ID NO: 172070 - DNA, 25 bp, Saccharomyces pastorianus
aaggatgccttaaacaaatgtctca

SEQ ID NO: 172071 - DNA, 25 bp, Saccharomyces pastorianus
gacgccatactgaagactatcttag

SEQ ID NO: 172072 - DNA, 25 bp, Saccharomyces pastorianus
gagtactataaaagactatttggtc

SEQ ID NO: 172073 - DNA, 25 bp, Saccharomyces pastorianus
gataaatgccaccaaaaggagtact

SEQ ID NO: 172074 - DNA, 25 bp, Saccharomyces pastorianus
tggattttattaatgcactcgataa

SEQ ID NO: 172075 - DNA, 25 bp, Saccharomyces pastorianus
aaatgtctcaaagaggcaagcttga

SEQ ID NO: 172076 - DNA, 25 bp, Saccharomyces pastorianus
aggtaaaagagctgatctagagaaa

SEQ ID NO: 172077 - DNA, 25 bp, Saccharomyces pastorianus
aatgccaccaaaaggagtactataa

SEQ ID NO: 172078 - DNA, 25 bp, Saccharomyces pastorianus
caaagaggcaagcttgaacaataaa

SEQ ID NO: 172079 - DNA, 25 bp, Saccharomyces pastorianus
ggtgaagacgccatactgaagacta

SEQ ID NO: 172080 - DNA, 25 bp, Saccharomyces pastorianus
gaagattgaagaacagagctgctcg

SEQ ID NO: 172081 - DNA, 25 bp, Saccharomyces pastorianus
tgacagaagagctcaaagagttgct

SEQ ID NO: 172082 - DNA, 25 bp, Saccharomyces pastorianus
gattgaagaacagagctgctcgtga

SEQ ID NO: 172083 - DNA, 25 bp, Saccharomyces pastorianus
aaaaggctttgaacgaagaagctga

SEQ ID NO: 172084 - DNA, 25 bp, Saccharomyces pastorianus
cagaagagctcaaagagttgctgaa

SEQ ID NO: 172085 - DNA, 25 bp, Saccharomyces pastorianus
agaacagagctgctcgtgacagaag

SEQ ID NO: 172086 - DNA, 25 bp, Saccharomyces pastorianus
gaagctgaagctagaagattgaaga

SEQ ID NO: 172087 - DNA, 25 bp, Saccharomyces pastorianus
cagagctgctcgtgacagaagagct

SEQ ID NO: 172088 - DNA, 25 bp, Saccharomyces pastorianus
gctttgaacgaagaagctgaagcta

SEQ ID NO: 172089 - DNA, 25 bp, Saccharomyces pastorianus
gaagaacagagctgctcgtgacaga

SEQ ID NO: 172090 - DNA, 25 bp, Saccharomyces pastorianus
aacagagctgctcgtgacagaagag

SEQ ID NO: 172091 - DNA, 25 bp, Saccharomyces pastorianus
tagatatgtctacctcaataagaac

SEQ ID NO: 172092 - DNA, 25 bp, Saccharomyces pastorianus
ggttccgtaagaaatatcttcataa

SEQ ID NO: 172093 - DNA, 25 bp, Saccharomyces pastorianus
gaggttccacagttagatatgtcta

SEQ ID NO: 172094 - DNA, 25 bp, Saccharomyces pastorianus
gataatatatcatgcacggatgaga

SEQ ID NO: 172095 - DNA, 25 bp, Saccharomyces pastorianus
ggatacgaatttactgcaagacgcc

SEQ ID NO: 172096 - DNA, 25 bp, Saccharomyces pastorianus
aacatggtggatacgaatttactgc

SEQ ID NO: 172097 - DNA, 25 bp, Saccharomyces pastorianus
aatatccgcatttaggttccgtaag

SEQ ID NO: 172098 - DNA, 25 bp, Saccharomyces pastorianus
gaccagttcttaaacctgaaactag

SEQ ID NO: 172099 - DNA, 25 bp, Saccharomyces pastorianus
atcttcataagaggttccacagtta

SEQ ID NO: 172100 - DNA, 25 bp, Saccharomyces pastorianus
aaggtacactgcaatctgtagacca

SEQ ID NO: 172101 - DNA, 25 bp, Saccharomyces pastorianus
ctgcaatctgtagaccagttcttaa

SEQ ID NO: 172102 - DNA, 25 bp, Saccharomyces pastorianus
ataaatggtctctagcgggatcgaa

SEQ ID NO: 172103 - DNA, 25 bp, Saccharomyces pastorianus
aaatggtctctagcgggatcgaacc

SEQ ID NO: 172104 - DNA, 25 bp, Saccharomyces pastorianus
aaaataaatggtctctagcgggatc

SEQ ID NO: 172105 - DNA, 25 bp, Saccharomyces pastorianus
aataaatggtctctagcgggatcga

SEQ ID NO: 172106 - DNA, 25 bp, Saccharomyces pastorianus
aaaaataaatggtctctagcgggat

SEQ ID NO: 172107 - DNA, 25 bp, Saccharomyces pastorianus
cgaaccgctgatccccgcgttatta

SEQ ID NO: 172108 - DNA, 25 bp, Saccharomyces pastorianus
gtctctagcgggatcgaaccgctga

SEQ ID NO: 172109 - DNA, 25 bp, Saccharomyces pastorianus
ctctagcgggatcgaaccgctgatc

SEQ ID NO: 172110 - DNA, 25 bp, Saccharomyces pastorianus
aaataaatggtctctagcgggatcg

SEQ ID NO: 172111 - DNA, 25 bp, Saccharomyces pastorianus
taaatggtctctagcgggatcgaac

SEQ ID NO: 172112 - DNA, 25 bp, Saccharomyces pastorianus
aatggtctctagcgggatcgaaccg

SEQ ID NO: 172113 - DNA, 25 bp, Saccharomyces pastorianus
tacaatcagcaagggcaccagcagc

SEQ ID NO: 172114 - DNA, 25 bp, Saccharomyces pastorianus
actacaatcaacaagggtacaacca

SEQ ID NO: 172115 - DNA, 25 bp, Saccharomyces pastorianus
aagggcaccagcagcctgtctacgt

SEQ ID NO: 172116 - DNA, 25 bp, Saccharomyces pastorianus
acagcagcccggatactacaatcaa

SEQ ID NO: 172117 - DNA, 25 bp, Saccharomyces pastorianus
ggcaatgaaggttgcatgactgcat

SEQ ID NO: 172118 - DNA, 25 bp, Saccharomyces pastorianus
aggttgcatgactgcatgcctggct

SEQ ID NO: 172119 - DNA, 25 bp, Saccharomyces pastorianus
agagcgtgggtacccaccgcagcaa

SEQ ID NO: 172120 - DNA, 25 bp, Saccharomyces pastorianus
agcagcctgtctacgtccagcaaca

SEQ ID NO: 172121 - DNA, 25 bp, Saccharomyces pastorianus
gcatgactgcatgcctggctgcatt

SEQ ID NO: 172122 - DNA, 25 bp, Saccharomyces pastorianus
tacgtccagcaacagcctcctaaaa

SEQ ID NO: 172123 - DNA, 25 bp, Saccharomyces pastorianus
gcaacagcctcctaaaaagggcaat

SEQ ID NO: 172124 - DNA, 25 bp, Saccharomyces pastorianus
ttcctttatgtggtcattacctccc

SEQ ID NO: 172125 - DNA, 25 bp, Saccharomyces pastorianus
tggcccaatcgatgtgtgtttttaa

SEQ ID NO: 172126 - DNA, 25 bp, Saccharomyces pastorianus
ccctggcccaatcgatgtgtgtttt

SEQ ID NO: 172127 - DNA, 25 bp, Saccharomyces pastorianus
cctggcccaatcgatgtgtgttttt

SEQ ID NO: 172128 - DNA, 25 bp, Saccharomyces pastorianus
ctggcccaatcgatgtgtgttttta

SEQ ID NO: 172129 - DNA, 25 bp, Saccharomyces pastorianus
tccctggcccaatcgatgtgtgttt

SEQ ID NO: 172130 - DNA, 25 bp, Saccharomyces pastorianus
ttatgtggtcattacctccctggcc

SEQ ID NO: 172131 - DNA, 25 bp, Saccharomyces pastorianus
tttatgtggtcattacctccctggc

SEQ ID NO: 172132 - DNA, 25 bp, Saccharomyces pastorianus
tcctttatgtggtcattacctccct

SEQ ID NO: 172133 - DNA, 25 bp, Saccharomyces pastorianus
tgtggtcattacctccctggcccaa

SEQ ID NO: 172134 - DNA, 25 bp, Saccharomyces pastorianus
ctttatgtggtcattacctccctgg

SEQ ID NO: 172135 - DNA, 25 bp, Saccharomyces pastorianus
accaagcctgatcaccgtttatcaa

SEQ ID NO: 172136 - DNA, 25 bp, Saccharomyces pastorianus
caccgtttatcaatatttgggtcat

SEQ ID NO: 172137 - DNA, 25 bp, Saccharomyces pastorianus
agcctgatcaccgtttatcaatatt

SEQ ID NO: 172138 - DNA, 25 bp, Saccharomyces pastorianus
tgtccttcacattcatattacgctg

SEQ ID NO: 172139 - DNA, 25 bp, Saccharomyces pastorianus
ttcacattcatattacgctgacaat

SEQ ID NO: 172140 - DNA, 25 bp, Saccharomyces pastorianus
atttgtccttcacattcatattacg

SEQ ID NO: 172141 - DNA, 25 bp, Saccharomyces pastorianus
ttccaccaagcctgatcaccgttta

SEQ ID NO: 172142 - DNA, 25 bp, Saccharomyces pastorianus
atcaatatttgggtcattttcttat

SEQ ID NO: 172143 - DNA, 25 bp, Saccharomyces pastorianus
caagcctgatcaccgtttatcaata

SEQ ID NO: 172144 - DNA, 25 bp, Saccharomyces pastorianus
gtccttcacattcatattacgctga

SEQ ID NO: 172145 - DNA, 25 bp, Saccharomyces pastorianus
gatcaccgtttatcaatatttgggt

SEQ ID NO: 172146 - DNA, 25 bp, Saccharomyces pastorianus
cgtgccacctggaataatttctaat

SEQ ID NO: 172147 - DNA, 25 bp, Saccharomyces pastorianus
tagtaaaacactcgtgccacctgga

SEQ ID NO: 172148 - DNA, 25 bp, Saccharomyces pastorianus
tcgtcttctgatgaggaaacttcaa

SEQ ID NO: 172149 - DNA, 25 bp, Saccharomyces pastorianus
aagacgagtctagttcatcttcctc

SEQ ID NO: 172150 - DNA, 25 bp, Saccharomyces pastorianus
cgatgatgattctagctcctcaggt

SEQ ID NO: 172151 - DNA, 25 bp, Saccharomyces pastorianus
agagaaccagttagatcttcatcta

SEQ ID NO: 172152 - DNA, 25 bp, Saccharomyces pastorianus
agctcctcaggttcttccacagaag

SEQ ID NO: 172153 - DNA, 25 bp, Saccharomyces pastorianus
atgccacccctgataaaattccagt

SEQ ID NO: 172154 - DNA, 25 bp, Saccharomyces pastorianus
tagttcatcttcctcgtcttctgat

SEQ ID NO: 172155 - DNA, 25 bp, Saccharomyces pastorianus
aaacttcaacatccaggaaggctag

SEQ ID NO: 172156 - DNA, 25 bp, Saccharomyces pastorianus
ttaaacagctaatggacatgtcgtc

SEQ ID NO: 172157 - DNA, 25 bp, Saccharomyces pastorianus
ttgaagccagtttctctcgacaata

SEQ ID NO: 172158 - DNA, 25 bp, Saccharomyces pastorianus
ctcgacaataaaacactggacgatt

SEQ ID NO: 172159 - DNA, 25 bp, Saccharomyces pastorianus
ctaaaccagtagaattgaagccagt

SEQ ID NO: 172160 - DNA, 25 bp, Saccharomyces pastorianus
caactaacagaatcggcctctcatt

SEQ ID NO: 172161 - DNA, 25 bp, Saccharomyces pastorianus
ttatactcagatgctgtgatggcgg

SEQ ID NO: 172162 - DNA, 25 bp, Saccharomyces pastorianus
atggactaaccaactaacagaatcg

SEQ ID NO: 172163 - DNA, 25 bp, Saccharomyces pastorianus
actagtgaaaggaggtgaacaaatt

SEQ ID NO: 172164 - DNA, 25 bp, Saccharomyces pastorianus
gaattgaagccagtttctctcgaca

SEQ ID NO: 172165 - DNA, 25 bp, Saccharomyces pastorianus
gaacaaattagtcagttatactcag

SEQ ID NO: 172166 - DNA, 25 bp, Saccharomyces pastorianus
atagttgggatcaggtactagtgaa

SEQ ID NO: 172167 - DNA, 25 bp, Saccharomyces pastorianus
aacagaatcggcctctcattttgaa

SEQ ID NO: 172168 - DNA, 25 bp, Saccharomyces pastorianus
cagcacctgagtttcgcgtatggtc

SEQ ID NO: 172169 - DNA, 25 bp, Saccharomyces pastorianus
cggtcaggctcttaccagctgaact

SEQ ID NO: 172170 - DNA, 25 bp, Saccharomyces pastorianus
gtcaggctcttaccagctgaactac

SEQ ID NO: 172171 - DNA, 25 bp, Saccharomyces pastorianus
ctcggtcaggctcttaccagctgaa

SEQ ID NO: 172172 - DNA, 25 bp, Saccharomyces pastorianus
gcagcacctgagtttcgcgtatggt

SEQ ID NO: 172173 - DNA, 25 bp, Saccharomyces pastorianus
tcggtcaggctcttaccagctgaac

SEQ ID NO: 172174 - DNA, 25 bp, Saccharomyces pastorianus
agcacctgagtttcgcgtatggtca

SEQ ID NO: 172175 - DNA, 25 bp, Saccharomyces pastorianus
tcaggctcttaccagctgaactaca

SEQ ID NO: 172176 - DNA, 25 bp, Saccharomyces pastorianus
tactcggtcaggctcttaccagctg

SEQ ID NO: 172177 - DNA, 25 bp, Saccharomyces pastorianus
ggtcaggctcttaccagctgaacta

SEQ ID NO: 172178 - DNA, 25 bp, Saccharomyces pastorianus
actcggtcaggctcttaccagctga

SEQ ID NO: 172179 - DNA, 25 bp, Saccharomyces pastorianus
catacctcaaggcatacagttgaag

SEQ ID NO: 172180 - DNA, 25 bp, Saccharomyces pastorianus
actatggagatgaccttgtttctga

SEQ ID NO: 172181 - DNA, 25 bp, Saccharomyces pastorianus
catcttttgcacaatctcattatca

SEQ ID NO: 172182 - DNA, 25 bp, Saccharomyces pastorianus
tacctcaaggcatacagttgaagca

SEQ ID NO: 172183 - DNA, 25 bp, Saccharomyces pastorianus
tatcactatggagatgaccttgttt

SEQ ID NO: 172184 - DNA, 25 bp, Saccharomyces pastorianus
acctcaaggcatacagttgaagcag

SEQ ID NO: 172185 - DNA, 25 bp, Saccharomyces pastorianus
tcattatcactatggagatgacctt

SEQ ID NO: 172186 - DNA, 25 bp, Saccharomyces pastorianus
atacctcaaggcatacagttgaagc

SEQ ID NO: 172187 - DNA, 25 bp, Saccharomyces pastorianus
cattatcactatggagatgaccttg

SEQ ID NO: 172188 - DNA, 25 bp, Saccharomyces pastorianus
ctcattatcactatggagatgacct

SEQ ID NO: 172189 - DNA, 25 bp, Saccharomyces pastorianus
tcactatggagatgaccttgtttct

SEQ ID NO: 172190 - DNA, 25 bp, Saccharomyces pastorianus
gcaactgttatattcttcgtcatga

SEQ ID NO: 172191 - DNA, 25 bp, Saccharomyces pastorianus
catcctgacctaccaattgctgaat

SEQ ID NO: 172192 - DNA, 25 bp, Saccharomyces pastorianus
ctcccaggaatggttctcctttgaa

SEQ ID NO: 172193 - DNA, 25 bp, Saccharomyces pastorianus
actcttgccctttttgtcgtacttg

SEQ ID NO: 172194 - DNA, 25 bp, Saccharomyces pastorianus
aattgctgaattgttgccgtatatc

SEQ ID NO: 172195 - DNA, 25 bp, Saccharomyces pastorianus
gattgtgagcgctttttcgaacgta

SEQ ID NO: 172196 - DNA, 25 bp, Saccharomyces pastorianus
tcgtcatgagtatccgttctccaag

SEQ ID NO: 172197 - DNA, 25 bp, Saccharomyces pastorianus
ctccgttatctaccctcaagaaagt

SEQ ID NO: 172198 - DNA, 25 bp, Saccharomyces pastorianus
tcgtacttgtttgctcccaggaatg

SEQ ID NO: 172199 - DNA, 25 bp, Saccharomyces pastorianus
aaacagcgtttttctcaagtagcaa

SEQ ID NO: 172200 - DNA, 25 bp, Saccharomyces pastorianus
gaaagtttccggctcagacgtgttt

SEQ ID NO: 172201 - DNA, 25 bp, Saccharomyces pastorianus
tccttcgattttttgcaactcttcc

SEQ ID NO: 172202 - DNA, 25 bp, Saccharomyces pastorianus
acttataacagaatgccctctgtaa

SEQ ID NO: 172203 - DNA, 25 bp, Saccharomyces pastorianus
atgccctctgtaagtataaggacta

SEQ ID NO: 172204 - DNA, 25 bp, Saccharomyces pastorianus
tgagtatccttcgattttttgcaac

SEQ ID NO: 172205 - DNA, 25 bp, Saccharomyces pastorianus
agtataaggactattatcgttaggt

SEQ ID NO: 172206 - DNA, 25 bp, Saccharomyces pastorianus
aatggaactgagtatccttcgattt

SEQ ID NO: 172207 - DNA, 25 bp, Saccharomyces pastorianus
ggaactgagtatccttcgatttttt

SEQ ID NO: 172208 - DNA, 25 bp, Saccharomyces pastorianus
gccctctgtaagtataaggactatt

SEQ ID NO: 172209 - DNA, 25 bp, Saccharomyces pastorianus
gtatccttcgattttttgcaactct

SEQ ID NO: 172210 - DNA, 25 bp, Saccharomyces pastorianus
actgagtatccttcgattttttgca

SEQ ID NO: 172211 - DNA, 25 bp, Saccharomyces pastorianus
tcgattttttgcaactcttccccca

SEQ ID NO: 172212 - DNA, 25 bp, Saccharomyces pastorianus
ggttcccaaacctatataaatatat

SEQ ID NO: 172213 - DNA, 25 bp, Saccharomyces pastorianus
gttgtgcacttttttttcgaagatt

SEQ ID NO: 172214 - DNA, 25 bp, Saccharomyces pastorianus
tttacacagattttcccgcttgttg

SEQ ID NO: 172215 - DNA, 25 bp, Saccharomyces pastorianus
tcttttcttcgtagtttttgtacag

SEQ ID NO: 172216 - DNA, 25 bp, Saccharomyces pastorianus
gatcacttatacagctttacacaga

SEQ ID NO: 172217 - DNA, 25 bp, Saccharomyces pastorianus
aagagggatgcgtttggtacaataa

SEQ ID NO: 172218 - DNA, 25 bp, Saccharomyces pastorianus
acagctttacacagattttcccgct

SEQ ID NO: 172219 - DNA, 25 bp, Saccharomyces pastorianus
tattgaagagggatgcgtttggtac

SEQ ID NO: 172220 - DNA, 25 bp, Saccharomyces pastorianus
cgtagtttttgtacagatcacttat

SEQ ID NO: 172221 - DNA, 25 bp, Saccharomyces pastorianus
agattttcccgcttgttgtgcactt

SEQ ID NO: 172222 - DNA, 25 bp, Saccharomyces pastorianus
tttcccgcttgttgtgcactttttt

SEQ ID NO: 172223 - DNA, 25 bp, Saccharomyces pastorianus
gaaactactaaacgaactgatgaaa

SEQ ID NO: 172224 - DNA, 25 bp, Saccharomyces pastorianus
cggcaacggaaatcgaagtgatatt

SEQ ID NO: 172225 - DNA, 25 bp, Saccharomyces pastorianus
gtaaacagtctgctgagccacaaaa

SEQ ID NO: 172226 - DNA, 25 bp, Saccharomyces pastorianus
cagtaacggcaacggaaatcgaagt

SEQ ID NO: 172227 - DNA, 25 bp, Saccharomyces pastorianus
aaacagtctgctgagccacaaaaaa

SEQ ID NO: 172228 - DNA, 25 bp, Saccharomyces pastorianus
caagtactccagtaacggcaacgga

SEQ ID NO: 172229 - DNA, 25 bp, Saccharomyces pastorianus
gaagtaaacagtctgctgagccaca

SEQ ID NO: 172230 - DNA, 25 bp, Saccharomyces pastorianus
gataattctttgaccaatgctggca

SEQ ID NO: 172231 - DNA, 25 bp, Saccharomyces pastorianus
ggaaataccaagtactccagtaacg

SEQ ID NO: 172232 - DNA, 25 bp, Saccharomyces pastorianus
acaaaaaaattcaagcgccaacgct

SEQ ID NO: 172233 - DNA, 25 bp, Saccharomyces pastorianus
gtactccagtaacggcaacggaaat

SEQ ID NO: 172234 - DNA, 25 bp, Saccharomyces pastorianus
tacaacagttggtccacatgcctca

SEQ ID NO: 172235 - DNA, 25 bp, Saccharomyces pastorianus
tcatcaagtgttgctggtatgtatc

SEQ ID NO: 172236 - DNA, 25 bp, Saccharomyces pastorianus
cagttcaagttcagctgatctaagt

SEQ ID NO: 172237 - DNA, 25 bp, Saccharomyces pastorianus
ttgagtctactacaacagttggtcc

SEQ ID NO: 172238 - DNA, 25 bp, Saccharomyces pastorianus
gtgactacttcaattaacccaacta

SEQ ID NO: 172239 - DNA, 25 bp, Saccharomyces pastorianus
cggccgttcaaactagcccagctga

SEQ ID NO: 172240 - DNA, 25 bp, Saccharomyces pastorianus
attaacccaactactccagctgatt

SEQ ID NO: 172241 - DNA, 25 bp, Saccharomyces pastorianus
agttctatagtcagttctacttcag

SEQ ID NO: 172242 - DNA, 25 bp, Saccharomyces pastorianus
acatgcctcatcaagtgttgctggt

SEQ ID NO: 172243 - DNA, 25 bp, Saccharomyces pastorianus
gttcaagtgctgtgactacttcaat

SEQ ID NO: 172244 - DNA, 25 bp, Saccharomyces pastorianus
tgattcaactacttcggccgttcaa

SEQ ID NO: 172245 - DNA, 25 bp, Saccharomyces pastorianus
attgtgtgaggctcttcctctgctc

SEQ ID NO: 172246 - DNA, 25 bp, Saccharomyces pastorianus
gaacgcagcattgtgtgaggctctt

SEQ ID NO: 172247 - DNA, 25 bp, Saccharomyces pastorianus
cgcattattactatccccgagcaaa

SEQ ID NO: 172248 - DNA, 25 bp, Saccharomyces pastorianus
acgcagcattgtgtgaggctcttcc

SEQ ID NO: 172249 - DNA, 25 bp, Saccharomyces pastorianus
acaccacacacggtctgtttcgcct

SEQ ID NO: 172250 - DNA, 25 bp, Saccharomyces pastorianus
agcattgtgtgaggctcttcctctg

SEQ ID NO: 172251 - DNA, 25 bp, Saccharomyces pastorianus
cattattactatccccgagcaaact

SEQ ID NO: 172252 - DNA, 25 bp, Saccharomyces pastorianus
tgctcgccacgtgctcccacgaaat

SEQ ID NO: 172253 - DNA, 25 bp, Saccharomyces pastorianus
gcagcattgtgtgaggctcttcctc

SEQ ID NO: 172254 - DNA, 25 bp, Saccharomyces pastorianus
aagaacgcagcattgtgtgaggctc

SEQ ID NO: 172255 - DNA, 25 bp, Saccharomyces pastorianus
tgtgaggctcttcctctgctcgcca

SEQ ID NO: 172256 - DNA, 25 bp, Saccharomyces pastorianus
ttgcggctcctaaataaccagtgcg

SEQ ID NO: 172257 - DNA, 25 bp, Saccharomyces pastorianus
aagacaaacaacaccgaaagtgaat

SEQ ID NO: 172258 - DNA, 25 bp, Saccharomyces pastorianus
gttttcaaagagagcgattccatcg

SEQ ID NO: 172259 - DNA, 25 bp, Saccharomyces pastorianus
cctaaataaccagtgcgacaagcat

SEQ ID NO: 172260 - DNA, 25 bp, Saccharomyces pastorianus
ccagtgcgacaagcatgcattaaat

SEQ ID NO: 172261 - DNA, 25 bp, Saccharomyces pastorianus
gattccatcgattccgctttggaag

SEQ ID NO: 172262 - DNA, 25 bp, Saccharomyces pastorianus
aatgagctagaattgcggctcctaa

SEQ ID NO: 172263 - DNA, 25 bp, Saccharomyces pastorianus
gaattgcggctcctaaataaccagt

SEQ ID NO: 172264 - DNA, 25 bp, Saccharomyces pastorianus
ggctcctaaataaccagtgcgacaa

SEQ ID NO: 172265 - DNA, 25 bp, Saccharomyces pastorianus
atgcattaaatattcaactgaccca

SEQ ID NO: 172266 - DNA, 25 bp, Saccharomyces pastorianus
atcgattccgctttggaagaactaa

SEQ ID NO: 172267 - DNA, 25 bp, Saccharomyces pastorianus
gtatccatccgaagacgtcgctgct

SEQ ID NO: 172268 - DNA, 25 bp, Saccharomyces pastorianus
cgctgctctaaagaagaccagaaag

SEQ ID NO: 172269 - DNA, 25 bp, Saccharomyces pastorianus
atccgaagacgtcgctgctctaaag

SEQ ID NO: 172270 - DNA, 25 bp, Saccharomyces pastorianus
gacgtcgctgctctaaagaagacca

SEQ ID NO: 172271 - DNA, 25 bp, Saccharomyces pastorianus
gaagacgtcgctgctctaaagaaga

SEQ ID NO: 172272 - DNA, 25 bp, Saccharomyces pastorianus
acgtcgctgctctaaagaagaccag

SEQ ID NO: 172273 - DNA, 25 bp, Saccharomyces pastorianus
atccatccgaagacgtcgctgctct

SEQ ID NO: 172274 - DNA, 25 bp, Saccharomyces pastorianus
gtcgctgctctaaagaagaccagaa

SEQ ID NO: 172275 - DNA, 25 bp, Saccharomyces pastorianus
cgaagacgtcgctgctctaaagaag

SEQ ID NO: 172276 - DNA, 25 bp, Saccharomyces pastorianus
ccgaagacgtcgctgctctaaagaa

SEQ ID NO: 172277 - DNA, 25 bp, Saccharomyces pastorianus
aagacgtcgctgctctaaagaagac

SEQ ID NO: 172278 - DNA, 25 bp, Saccharomyces pastorianus
aactcaaacatgtagggtgccaaat

SEQ ID NO: 172279 - DNA, 25 bp, Saccharomyces pastorianus
ccttacatatggtgcgccagaaacc

SEQ ID NO: 172280 - DNA, 25 bp, Saccharomyces pastorianus
tgaagactccttacatatggtgcgc

SEQ ID NO: 172281 - DNA, 25 bp, Saccharomyces pastorianus
gactccttacatatggtgcgccaga

SEQ ID NO: 172282 - DNA, 25 bp, Saccharomyces pastorianus
gcttcaagccgctctgtgtcggcct

SEQ ID NO: 172283 - DNA, 25 bp, Saccharomyces pastorianus
gagaagtacgcatcgtacgagctgt

SEQ ID NO: 172284 - DNA, 25 bp, Saccharomyces pastorianus
gtatgcacattgagaacaacgtgta

SEQ ID NO: 172285 - DNA, 25 bp, Saccharomyces pastorianus
gggtgatcgtaatcctttgctattg

SEQ ID NO: 172286 - DNA, 25 bp, Saccharomyces pastorianus
tgtgtcggcctcttttcgccaggta

SEQ ID NO: 172287 - DNA, 25 bp, Saccharomyces pastorianus
agctcatatacgtgtagtaactcaa

SEQ ID NO: 172288 - DNA, 25 bp, Saccharomyces pastorianus
agtaactcaaacatgtagggtgcca

SEQ ID NO: 172289 - DNA, 25 bp, Saccharomyces pastorianus
gaaagggagttgatagttctaacaa

SEQ ID NO: 172290 - DNA, 25 bp, Saccharomyces pastorianus
gggatttcgttgttgatattaggta

SEQ ID NO: 172291 - DNA, 25 bp, Saccharomyces pastorianus
tcactttgtcttcctttcttttata

SEQ ID NO: 172292 - DNA, 25 bp, Saccharomyces pastorianus
tcagaaaatgggtgaacttcgtatt

SEQ ID NO: 172293 - DNA, 25 bp, Saccharomyces pastorianus
gaacttcgtattaattgttgggatt

SEQ ID NO: 172294 - DNA, 25 bp, Saccharomyces pastorianus
gttctcctcaacagtcttggaattc

SEQ ID NO: 172295 - DNA, 25 bp, Saccharomyces pastorianus
agaagttctcctcaacagtcttgga

SEQ ID NO: 172296 - DNA, 25 bp, Saccharomyces pastorianus
ctcaacagtcttggaattcacgaaa

SEQ ID NO: 172297 - DNA, 25 bp, Saccharomyces pastorianus
gtcttggaattcacgaaagggagtt

SEQ ID NO: 172298 - DNA, 25 bp, Saccharomyces pastorianus
attatttgcacgtaacaattatcag

SEQ ID NO: 172299 - DNA, 25 bp, Saccharomyces pastorianus
taaaatcactttgtcttcctttctt

SEQ ID NO: 172300 - DNA, 25 bp, Saccharomyces pastorianus
gaatgtccgagaaaacctgactagt

SEQ ID NO: 172301 - DNA, 25 bp, Saccharomyces pastorianus
agccctttagagattagtacgtgtg

SEQ ID NO: 172302 - DNA, 25 bp, Saccharomyces pastorianus
caattctgagctttcttcatttaaa

SEQ ID NO: 172303 - DNA, 25 bp, Saccharomyces pastorianus
tatggcctgttctcctttgaagaga

SEQ ID NO: 172304 - DNA, 25 bp, Saccharomyces pastorianus
ggcggaaaacaaacgctcttctgac

SEQ ID NO: 172305 - DNA, 25 bp, Saccharomyces pastorianus
gaggccattgtctcgaaagaatagc

SEQ ID NO: 172306 - DNA, 25 bp, Saccharomyces pastorianus
aggcctcctgggtgaagttgataat

SEQ ID NO: 172307 - DNA, 25 bp, Saccharomyces pastorianus
aagaacggtttgactcagcagccca

SEQ ID NO: 172308 - DNA, 25 bp, Saccharomyces pastorianus
tcttctgacagcttcgtttcgttaa

SEQ ID NO: 172309 - DNA, 25 bp, Saccharomyces pastorianus
gattccaaaaggtatggcctgttct

SEQ ID NO: 172310 - DNA, 25 bp, Saccharomyces pastorianus
gggtgaagatgaacatagcccttta

SEQ ID NO: 172311 - DNA, 25 bp, Saccharomyces pastorianus
aaatcgcgaaggagacgcaagcatt

SEQ ID NO: 172312 - DNA, 25 bp, Saccharomyces pastorianus
ctttgaggtcatgctctagctcagt

SEQ ID NO: 172313 - DNA, 25 bp, Saccharomyces pastorianus
tttgatgaagtgatgctatgatagc

SEQ ID NO: 172314 - DNA, 25 bp, Saccharomyces pastorianus
aactttgaggtcatgctctagctca

SEQ ID NO: 172315 - DNA, 25 bp, Saccharomyces pastorianus
gaaactttgaggtcatgctctagct

SEQ ID NO: 172316 - DNA, 25 bp, Saccharomyces pastorianus
gagacgcaagcatttgatgaagtga

SEQ ID NO: 172317 - DNA, 25 bp, Saccharomyces pastorianus
gaaggagacgcaagcatttgatgaa

SEQ ID NO: 172318 - DNA, 25 bp, Saccharomyces pastorianus
gacgcaagcatttgatgaagtgatg

SEQ ID NO: 172319 - DNA, 25 bp, Saccharomyces pastorianus
gttcacgggaaaatcgcgaaggaga

SEQ ID NO: 172320 - DNA, 25 bp, Saccharomyces pastorianus
atcgcgaaggagacgcaagcatttg

SEQ ID NO: 172321 - DNA, 25 bp, Saccharomyces pastorianus
aaactttgaggtcatgctctagctc

SEQ ID NO: 172322 - DNA, 25 bp, Saccharomyces pastorianus
aacccgcgcgggttcaacatcgctg

SEQ ID NO: 172323 - DNA, 25 bp, Saccharomyces pastorianus
actggcgcgctcgaacagcagcgga

SEQ ID NO: 172324 - DNA, 25 bp, Saccharomyces pastorianus
cctgttcgaggacccgtggttccag

SEQ ID NO: 172325 - DNA, 25 bp, Saccharomyces pastorianus
aggcacagaataccacctggcccgg

SEQ ID NO: 172326 - DNA, 25 bp, Saccharomyces pastorianus
gaagcctattatcaagactacaacg

SEQ ID NO: 172327 - DNA, 25 bp, Saccharomyces pastorianus
acaccattcccgacctgttcgagga

SEQ ID NO: 172328 - DNA, 25 bp, Saccharomyces pastorianus
tgatatagcagtcagcagtcccgca

SEQ ID NO: 172329 - DNA, 25 bp, Saccharomyces pastorianus
agactacaacgtacgacaacccgcg

SEQ ID NO: 172330 - DNA, 25 bp, Saccharomyces pastorianus
agaagcgctgttcacgctgtgcgaa

SEQ ID NO: 172331 - DNA, 25 bp, Saccharomyces pastorianus
cggaacttccagagcggcacgcggc

SEQ ID NO: 172332 - DNA, 25 bp, Saccharomyces pastorianus
gccgtcacgtgcaagaagcctatta

SEQ ID NO: 172333 - DNA, 25 bp, Saccharomyces pastorianus
taatgctctctactcactttattga

SEQ ID NO: 172334 - DNA, 25 bp, Saccharomyces pastorianus
attgagtggcgatttgctatttttt

SEQ ID NO: 172335 - DNA, 25 bp, Saccharomyces pastorianus
ttttttgatataatgctctctactc

SEQ ID NO: 172336 - DNA, 25 bp, Saccharomyces pastorianus
ttttttcttcgcaccatgcgtcacg

SEQ ID NO: 172337 - DNA, 25 bp, Saccharomyces pastorianus
aatgctctctactcactttattgag

SEQ ID NO: 172338 - DNA, 25 bp, Saccharomyces pastorianus
gatataatgctctctactcacttta

SEQ ID NO: 172339 - DNA, 25 bp, Saccharomyces pastorianus
ctactcactttattgagtggcgatt

SEQ ID NO: 172340 - DNA, 25 bp, Saccharomyces pastorianus
actttattgagtggcgatttgctat

SEQ ID NO: 172341 - DNA, 25 bp, Saccharomyces pastorianus
tgctctctactcactttattgagtg

SEQ ID NO: 172342 - DNA, 25 bp, Saccharomyces pastorianus
ttcttcgcaccatgcgtcacgttaa

SEQ ID NO: 172343 - DNA, 25 bp, Saccharomyces pastorianus
tctctactcactttattgagtggcg

SEQ ID NO: 172344 - DNA, 25 bp, Saccharomyces pastorianus
ctgatgcactagaagttatcaaaca

SEQ ID NO: 172345 - DNA, 25 bp, Saccharomyces pastorianus
aagaaagcactgactgatgcactag

SEQ ID NO: 172346 - DNA, 25 bp, Saccharomyces pastorianus
tgaagaaagcactgactgatgcact

SEQ ID NO: 172347 - DNA, 25 bp, Saccharomyces pastorianus
cctgttattattatccaagccttga

SEQ ID NO: 172348 - DNA, 25 bp, Saccharomyces pastorianus
gccttgaagaaagcactgactgatg

SEQ ID NO: 172349 - DNA, 25 bp, Saccharomyces pastorianus
tatcaaacaagtaagtaaacctgtc

SEQ ID NO: 172350 - DNA, 25 bp, Saccharomyces pastorianus
gactgatgcactagaagttatcaaa

SEQ ID NO: 172351 - DNA, 25 bp, Saccharomyces pastorianus
ctgttattattatccaagccttgaa

SEQ ID NO: 172352 - DNA, 25 bp, Saccharomyces pastorianus
agccttgaagaaagcactgactgat

SEQ ID NO: 172353 - DNA, 25 bp, Saccharomyces pastorianus
gttattattatccaagccttgaaga

SEQ ID NO: 172354 - DNA, 25 bp, Saccharomyces pastorianus
caagccttgaagaaagcactgactg

SEQ ID NO: 172355 - DNA, 25 bp, Saccharomyces pastorianus
aacttgcattttgcggacggaacaa

SEQ ID NO: 172356 - DNA, 25 bp, Saccharomyces pastorianus
ttttgcggacggaacaactttcgat

SEQ ID NO: 172357 - DNA, 25 bp, Saccharomyces pastorianus
aaacttgcattttgcggacggaaca

SEQ ID NO: 172358 - DNA, 25 bp, Saccharomyces pastorianus
gcattttgcggacggaacaactttc

SEQ ID NO: 172359 - DNA, 25 bp, Saccharomyces pastorianus
ttgcattttgcggacggaacaactt

SEQ ID NO: 172360 - DNA, 25 bp, Saccharomyces pastorianus
ttgcggacggaacaactttcgatgg

SEQ ID NO: 172361 - DNA, 25 bp, Saccharomyces pastorianus
acaactttcgatggaggcttggtgg

SEQ ID NO: 172362 - DNA, 25 bp, Saccharomyces pastorianus
gcggacggaacaactttcgatggag

SEQ ID NO: 172363 - DNA, 25 bp, Saccharomyces pastorianus
tcctactccccggaaaaacttgcat

SEQ ID NO: 172364 - DNA, 25 bp, Saccharomyces pastorianus
acggaacaactttcgatggaggctt

SEQ ID NO: 172365 - DNA, 25 bp, Saccharomyces pastorianus
gaacaactttcgatggaggcttggt

SEQ ID NO: 172366 - DNA, 25 bp, Saccharomyces pastorianus
ttaaagcccatactcagtctgttct

SEQ ID NO: 172367 - DNA, 25 bp, Saccharomyces pastorianus
gttaaagcccatactcagtctgttc

SEQ ID NO: 172368 - DNA, 25 bp, Saccharomyces pastorianus
aagcttattgttaaagcccatactc

SEQ ID NO: 172369 - DNA, 25 bp, Saccharomyces pastorianus
ttgttaaagcccatactcagtctgt

SEQ ID NO: 172370 - DNA, 25 bp, Saccharomyces pastorianus
tataaaacccttttacgcgcgcctg

SEQ ID NO: 172371 - DNA, 25 bp, Saccharomyces pastorianus
attgttaaagcccatactcagtctg

SEQ ID NO: 172372 - DNA, 25 bp, Saccharomyces pastorianus
taaagcccatactcagtctgttcta

SEQ ID NO: 172373 - DNA, 25 bp, Saccharomyces pastorianus
cttattgttaaagcccatactcagt

SEQ ID NO: 172374 - DNA, 25 bp, Saccharomyces pastorianus
agcttattgttaaagcccatactca

SEQ ID NO: 172375 - DNA, 25 bp, Saccharomyces pastorianus
aaagcccatactcagtctgttctaa

SEQ ID NO: 172376 - DNA, 25 bp, Saccharomyces pastorianus
tgttaaagcccatactcagtctgtt

SEQ ID NO: 172377 - DNA, 25 bp, Saccharomyces pastorianus
aatgcaacagcgccccagcgtgaag

SEQ ID NO: 172378 - DNA, 25 bp, Saccharomyces pastorianus
taagagaatgcaacagcgccccagc

SEQ ID NO: 172379 - DNA, 25 bp, Saccharomyces pastorianus
aagagaatgcaacagcgccccagcg

SEQ ID NO: 172380 - DNA, 25 bp, Saccharomyces pastorianus
cgcttcgagcttggtataagagaat

SEQ ID NO: 172381 - DNA, 25 bp, Saccharomyces pastorianus
gtataagagaatgcaacagcgcccc

SEQ ID NO: 172382 - DNA, 25 bp, Saccharomyces pastorianus
agagaatgcaacagcgccccagcgt

SEQ ID NO: 172383 - DNA, 25 bp, Saccharomyces pastorianus
gagaatgcaacagcgccccagcgtg

SEQ ID NO: 172384 - DNA, 25 bp, Saccharomyces pastorianus
ggcgcttcgagcttggtataagaga

SEQ ID NO: 172385 - DNA, 25 bp, Saccharomyces pastorianus
gcgaggcgcttcgagcttggtataa

SEQ ID NO: 172386 - DNA, 25 bp, Saccharomyces pastorianus
gaggcgcttcgagcttggtataaga

SEQ ID NO: 172387 - DNA, 25 bp, Saccharomyces pastorianus
ataagagaatgcaacagcgccccag

SEQ ID NO: 172388 - DNA, 25 bp, Saccharomyces pastorianus
gatcatgaggatttcgggccgaacc

SEQ ID NO: 172389 - DNA, 25 bp, Saccharomyces pastorianus
cacaatgggttgcagaatttctcga

SEQ ID NO: 172390 - DNA, 25 bp, Saccharomyces pastorianus
atcctggtgttttacttcttggcat

SEQ ID NO: 172391 - DNA, 25 bp, Saccharomyces pastorianus
gatatcatatcttcagacagctaga

SEQ ID NO: 172392 - DNA, 25 bp, Saccharomyces pastorianus
acattttcacgtgagcttgcaacag

SEQ ID NO: 172393 - DNA, 25 bp, Saccharomyces pastorianus
ggccgaacctgctccgaagaaatct

SEQ ID NO: 172394 - DNA, 25 bp, Saccharomyces pastorianus
gaagaaatctttcggccaggcatca

SEQ ID NO: 172395 - DNA, 25 bp, Saccharomyces pastorianus
aattactggttagtcatcctggtgt

SEQ ID NO: 172396 - DNA, 25 bp, Saccharomyces pastorianus
tggcattcggctcgatcatgaggat

SEQ ID NO: 172397 - DNA, 25 bp, Saccharomyces pastorianus
gccaggcatcatatcacaatgggtt

SEQ ID NO: 172398 - DNA, 25 bp, Saccharomyces pastorianus
ggtaccaaagtactgtatacacatg

SEQ ID NO: 172399 - DNA, 25 bp, Saccharomyces pastorianus
ggtcaagctgttgggttacactcta

SEQ ID NO: 172400 - DNA, 25 bp, Saccharomyces pastorianus
gaattcttcagtaccgttaccttca

SEQ ID NO: 172401 - DNA, 25 bp, Saccharomyces pastorianus
taatggctatatgagtactccccaa

SEQ ID NO: 172402 - DNA, 25 bp, Saccharomyces pastorianus
ttcagtaccgttaccttcacaaggt

SEQ ID NO: 172403 - DNA, 25 bp, Saccharomyces pastorianus
gttacactctaatcaatcgcaccaa

SEQ ID NO: 172404 - DNA, 25 bp, Saccharomyces pastorianus
accttcacaaggtcaagctgttggg

SEQ ID NO: 172405 - DNA, 25 bp, Saccharomyces pastorianus
tggccaatctttcctcttgagggat

SEQ ID NO: 172406 - DNA, 25 bp, Saccharomyces pastorianus
agatttgtccgttgaaccatctgac

SEQ ID NO: 172407 - DNA, 25 bp, Saccharomyces pastorianus
gaaccatctgacattggccaatctt

SEQ ID NO: 172408 - DNA, 25 bp, Saccharomyces pastorianus
tataccttccagcattaatggctat

SEQ ID NO: 172409 - DNA, 25 bp, Saccharomyces pastorianus
atcgcaccaagatttgtccgttgaa

SEQ ID NO: 172410 - DNA, 25 bp, Saccharomyces pastorianus
aacgcatctacgaaggtgctcacat

SEQ ID NO: 172411 - DNA, 25 bp, Saccharomyces pastorianus
tttattcaacttcccaacattctca

SEQ ID NO: 172412 - DNA, 25 bp, Saccharomyces pastorianus
attttcacgacatttcttctccaaa

SEQ ID NO: 172413 - DNA, 25 bp, Saccharomyces pastorianus
accgcgattactggagaggttgtcc

SEQ ID NO: 172414 - DNA, 25 bp, Saccharomyces pastorianus
atttcttctccaaataccgcgatta

SEQ ID NO: 172415 - DNA, 25 bp, Saccharomyces pastorianus
aaggtgctcacattttttattcaac

SEQ ID NO: 172416 - DNA, 25 bp, Saccharomyces pastorianus
acaacaatcattaacgcatctacga

SEQ ID NO: 172417 - DNA, 25 bp, Saccharomyces pastorianus
tattttctttcgtcaatttgtccaa

SEQ ID NO: 172418 - DNA, 25 bp, Saccharomyces pastorianus
ttcacgacatttcttctccaaatac

SEQ ID NO: 172419 - DNA, 25 bp, Saccharomyces pastorianus
ggagaggttgtccattaaacacaac

SEQ ID NO: 172420 - DNA, 25 bp, Saccharomyces pastorianus
tcttctccaaataccgcgattactg

SEQ ID NO: 172421 - DNA, 25 bp, Saccharomyces pastorianus
agctctgtccgatataccgcctatt

SEQ ID NO: 172422 - DNA, 25 bp, Saccharomyces pastorianus
aactacgagcgtattgtgttatatc

SEQ ID NO: 172423 - DNA, 25 bp, Saccharomyces pastorianus
tgcatcaactacgagcgtattgtgt

SEQ ID NO: 172424 - DNA, 25 bp, Saccharomyces pastorianus
tcaactacgagcgtattgtgttata

SEQ ID NO: 172425 - DNA, 25 bp, Saccharomyces pastorianus
cgtattgtgttatatcagctctgtc

SEQ ID NO: 172426 - DNA, 25 bp, Saccharomyces pastorianus
catcaactacgagcgtattgtgtta

SEQ ID NO: 172427 - DNA, 25 bp, Saccharomyces pastorianus
tacgagcgtattgtgttatatcagc

SEQ ID NO: 172428 - DNA, 25 bp, Saccharomyces pastorianus
atgcatcaactacgagcgtattgtg

SEQ ID NO: 172429 - DNA, 25 bp, Saccharomyces pastorianus
actacgagcgtattgtgttatatca

SEQ ID NO: 172430 - DNA, 25 bp, Saccharomyces pastorianus
cagctctgtccgatataccgcctat

SEQ ID NO: 172431 - DNA, 25 bp, Saccharomyces pastorianus
gcatcaactacgagcgtattgtgtt

SEQ ID NO: 172432 - DNA, 25 bp, Saccharomyces pastorianus
caaacaagaacagcaaggtcgtgta

SEQ ID NO: 172433 - DNA, 25 bp, Saccharomyces pastorianus
atcacagttcaaattcaccaacgca

SEQ ID NO: 172434 - DNA, 25 bp, Saccharomyces pastorianus
aaggtcgtgtatggtgaacttctac

SEQ ID NO: 172435 - DNA, 25 bp, Saccharomyces pastorianus
taccgttatggtagtggaaatagag

SEQ ID NO: 172436 - DNA, 25 bp, Saccharomyces pastorianus
tatggtgaacttctacaaggtgaga

SEQ ID NO: 172437 - DNA, 25 bp, Saccharomyces pastorianus
gaacttctacaaggtgagaaatcac

SEQ ID NO: 172438 - DNA, 25 bp, Saccharomyces pastorianus
gagacaacaagaaagacaggagaat

SEQ ID NO: 172439 - DNA, 25 bp, Saccharomyces pastorianus
gttcaaattcaccaacgcaaaggtt

SEQ ID NO: 172440 - DNA, 25 bp, Saccharomyces pastorianus
aacagcaaggtcgtgtatggtgaac

SEQ ID NO: 172441 - DNA, 25 bp, Saccharomyces pastorianus
gagaaatcacagttcaaattcacca

SEQ ID NO: 172442 - DNA, 25 bp, Saccharomyces pastorianus
tgggaaagttggataccgttatggt

SEQ ID NO: 172443 - DNA, 25 bp, Saccharomyces pastorianus
tgttgagctcctgggtgttcattca

SEQ ID NO: 172444 - DNA, 25 bp, Saccharomyces pastorianus
gaagcggttaaaaatctgttgtggg

SEQ ID NO: 172445 - DNA, 25 bp, Saccharomyces pastorianus
tcatcctgtctctaaccctgaatag

SEQ ID NO: 172446 - DNA, 25 bp, Saccharomyces pastorianus
tctgacccaatctttgaagcggtta

SEQ ID NO: 172447 - DNA, 25 bp, Saccharomyces pastorianus
ttcattcacccacagggcaattctg

SEQ ID NO: 172448 - DNA, 25 bp, Saccharomyces pastorianus
ggtgttcattcacccacagggcaat

SEQ ID NO: 172449 - DNA, 25 bp, Saccharomyces pastorianus
gggcaattctgacccaatctttgaa

SEQ ID NO: 172450 - DNA, 25 bp, Saccharomyces pastorianus
taaagatcatcctgtctctaaccct

SEQ ID NO: 172451 - DNA, 25 bp, Saccharomyces pastorianus
ggttcctaaagatcatcctgtctct

SEQ ID NO: 172452 - DNA, 25 bp, Saccharomyces pastorianus
aaaaatactatgtttgttgagctcc

SEQ ID NO: 172453 - DNA, 25 bp, Saccharomyces pastorianus
ctgtctctaaccctgaataggaaaa

SEQ ID NO: 172454 - DNA, 25 bp, Saccharomyces pastorianus
ctccacttgtgcgttactaatttat

SEQ ID NO: 172455 - DNA, 25 bp, Saccharomyces pastorianus
gtatctccacttgtgcgttactaat

SEQ ID NO: 172456 - DNA, 25 bp, Saccharomyces pastorianus
tgtgcgttactaatttattctaaaa

SEQ ID NO: 172457 - DNA, 25 bp, Saccharomyces pastorianus
atgggtccctgtatctccacttgtg

SEQ ID NO: 172458 - DNA, 25 bp, Saccharomyces pastorianus
tccctgtatctccacttgtgcgtta

SEQ ID NO: 172459 - DNA, 25 bp, Saccharomyces pastorianus
gttaaggatgggtccctgtatctcc

SEQ ID NO: 172460 - DNA, 25 bp, Saccharomyces pastorianus
ctgtatctccacttgtgcgttacta

SEQ ID NO: 172461 - DNA, 25 bp, Saccharomyces pastorianus
cacttgtgcgttactaatttattct

SEQ ID NO: 172462 - DNA, 25 bp, Saccharomyces pastorianus
aaggatgggtccctgtatctccact

SEQ ID NO: 172463 - DNA, 25 bp, Saccharomyces pastorianus
tattctaaaattccagagtgtgtag

SEQ ID NO: 172464 - DNA, 25 bp, Saccharomyces pastorianus
acgcaattggaaacggttaaggatg

SEQ ID NO: 172465 - DNA, 25 bp, Saccharomyces pastorianus
atacagaaccactacaaaaactgga

SEQ ID NO: 172466 - DNA, 25 bp, Saccharomyces pastorianus
gggaggtgttgttgtatattgttct

SEQ ID NO: 172467 - DNA, 25 bp, Saccharomyces pastorianus
cacaaacaatagaacggtattactt

SEQ ID NO: 172468 - DNA, 25 bp, Saccharomyces pastorianus
gtgataagcgagtaacaaaacatac

SEQ ID NO: 172469 - DNA, 25 bp, Saccharomyces pastorianus
ttctttggtgtgataagcgagtaac

SEQ ID NO: 172470 - DNA, 25 bp, Saccharomyces pastorianus
caaaaactggaaaagggcgtatgca

SEQ ID NO: 172471 - DNA, 25 bp, Saccharomyces pastorianus
acttttctttggtgtgataagcgag

SEQ ID NO: 172472 - DNA, 25 bp, Saccharomyces pastorianus
aaaactggaaaagggcgtatgcatg

SEQ ID NO: 172473 - DNA, 25 bp, Saccharomyces pastorianus
gtaatacagaaccactacaaaaact

SEQ ID NO: 172474 - DNA, 25 bp, Saccharomyces pastorianus
ctttggtgtgataagcgagtaacaa

SEQ ID NO: 172475 - DNA, 25 bp, Saccharomyces pastorianus
gcgagtaacaaaacatacaaatagt

SEQ ID NO: 172476 - DNA, 25 bp, Saccharomyces pastorianus
gtcgagactattctctttcgaagaa

SEQ ID NO: 172477 - DNA, 25 bp, Saccharomyces pastorianus
cggcaacaagaaggcggccccttgg

SEQ ID NO: 172478 - DNA, 25 bp, Saccharomyces pastorianus
ttctaaaacacacttcggcaggccg

SEQ ID NO: 172479 - DNA, 25 bp, Saccharomyces pastorianus
aaaaaccatattaacatctgtacat

SEQ ID NO: 172480 - DNA, 25 bp, Saccharomyces pastorianus
aaattctaaaacacacttcggcagg

SEQ ID NO: 172481 - DNA, 25 bp, Saccharomyces pastorianus
acgttgtcgagactattctctttcg

SEQ ID NO: 172482 - DNA, 25 bp, Saccharomyces pastorianus
taaaacacacttcggcaggccggca

SEQ ID NO: 172483 - DNA, 25 bp, Saccharomyces pastorianus
acacacttcggcaggccggcaacaa

SEQ ID NO: 172484 - DNA, 25 bp, Saccharomyces pastorianus
tttccaagacaaaacgttgtcgaga

SEQ ID NO: 172485 - DNA, 25 bp, Saccharomyces pastorianus
ttaactaaacatccgtacacaaaag

SEQ ID NO: 172486 - DNA, 25 bp, Saccharomyces pastorianus
gactattctctttcgaagaaattct

SEQ ID NO: 172487 - DNA, 25 bp, Saccharomyces pastorianus
ggtaaacgtcacaacaagtcccaca

SEQ ID NO: 172488 - DNA, 25 bp, Saccharomyces pastorianus
taaacgtcacaacaagtcccacact

SEQ ID NO: 172489 - DNA, 25 bp, Saccharomyces pastorianus
acaacaagtcccacactttgtgtaa

SEQ ID NO: 172490 - DNA, 25 bp, Saccharomyces pastorianus
acaagtcccacactttgtgtaacag

SEQ ID NO: 172491 - DNA, 25 bp, Saccharomyces pastorianus
gtcacaacaagtcccacactttgtg

SEQ ID NO: 172492 - DNA, 25 bp, Saccharomyces pastorianus
gctaagaccagatcttacaactggg

SEQ ID NO: 172493 - DNA, 25 bp, Saccharomyces pastorianus
gtgctaaggctaagagaagacacac

SEQ ID NO: 172494 - DNA, 25 bp, Saccharomyces pastorianus
aagtcccacactttgtgtaacagat

SEQ ID NO: 172495 - DNA, 25 bp, Saccharomyces pastorianus
ttacaactggggtgctaaggctaag

SEQ ID NO: 172496 - DNA, 25 bp, Saccharomyces pastorianus
gtcccacactttgtgtaacagatgt

SEQ ID NO: 172497 - DNA, 25 bp, Saccharomyces pastorianus
tccagctgctaagaccagatcttac

SEQ ID NO: 172498 - DNA, 25 bp, Saccharomyces pastorianus
taatacggctattgtttggagatac

SEQ ID NO: 172499 - DNA, 25 bp, Saccharomyces pastorianus
atattggtcattcagctgccgtaac

SEQ ID NO: 172500 - DNA, 25 bp, Saccharomyces pastorianus
gacagcatcgaatgatttaacaatc

SEQ ID NO: 172501 - DNA, 25 bp, Saccharomyces pastorianus
tgtggatcgcaaccgcctctaaaga

SEQ ID NO: 172502 - DNA, 25 bp, Saccharomyces pastorianus
caatgagaacagctgcaagtttgat

SEQ ID NO: 172503 - DNA, 25 bp, Saccharomyces pastorianus
ggataattccaaagccaactgctag

SEQ ID NO: 172504 - DNA, 25 bp, Saccharomyces pastorianus
gccgtaactgctgttggattgccaa

SEQ ID NO: 172505 - DNA, 25 bp, Saccharomyces pastorianus
ttggatgctactgaggatggcctgt

SEQ ID NO: 172506 - DNA, 25 bp, Saccharomyces pastorianus
gcaagtttgatatttatgccaagta

SEQ ID NO: 172507 - DNA, 25 bp, Saccharomyces pastorianus
gccaactgctagtatggatgttcaa

SEQ ID NO: 172508 - DNA, 25 bp, Saccharomyces pastorianus
tgaggatggcctgtggatcgcaacc

SEQ ID NO: 172509 - DNA, 25 bp, Saccharomyces pastorianus
atgatttctgtttgcccacaaaatg

SEQ ID NO: 172510 - DNA, 25 bp, Saccharomyces pastorianus
aagcctcacattcgatgttccagga

SEQ ID NO: 172511 - DNA, 25 bp, Saccharomyces pastorianus
gcctcacattcgatgttccaggaca

SEQ ID NO: 172512 - DNA, 25 bp, Saccharomyces pastorianus
aaatgacttgcaaaaatgctacaga

SEQ ID NO: 172513 - DNA, 25 bp, Saccharomyces pastorianus
aatgctacagaagcctcacattcga

SEQ ID NO: 172514 - DNA, 25 bp, Saccharomyces pastorianus
agaagcctcacattcgatgttccag

SEQ ID NO: 172515 - DNA, 25 bp, Saccharomyces pastorianus
tacagaagcctcacattcgatgttc

SEQ ID NO: 172516 - DNA, 25 bp, Saccharomyces pastorianus
ctgtttgcccacaaaatgacttgca

SEQ ID NO: 172517 - DNA, 25 bp, Saccharomyces pastorianus
gctacagaagcctcacattcgatgt

SEQ ID NO: 172518 - DNA, 25 bp, Saccharomyces pastorianus
tcacattcgatgttccaggacaaca

SEQ ID NO: 172519 - DNA, 25 bp, Saccharomyces pastorianus
acattcgatgttccaggacaacaat

SEQ ID NO: 172520 - DNA, 25 bp, Saccharomyces pastorianus
ggatagcaggtctgcaataacagat

SEQ ID NO: 172521 - DNA, 25 bp, Saccharomyces pastorianus
gatgctgaccactcggtaaaggata

SEQ ID NO: 172522 - DNA, 25 bp, Saccharomyces pastorianus
ccactcggtaaaggatagcaggtct

SEQ ID NO: 172523 - DNA, 25 bp, Saccharomyces pastorianus
gaatttaccaactactcacagagta

SEQ ID NO: 172524 - DNA, 25 bp, Saccharomyces pastorianus
gcaggtctgcaataacagataaaga

SEQ ID NO: 172525 - DNA, 25 bp, Saccharomyces pastorianus
cagaataactatgatgtgggcaata

SEQ ID NO: 172526 - DNA, 25 bp, Saccharomyces pastorianus
ctcggtaaaggatagcaggtctgca

SEQ ID NO: 172527 - DNA, 25 bp, Saccharomyces pastorianus
aaacgaatttaccaactactcacag

SEQ ID NO: 172528 - DNA, 25 bp, Saccharomyces pastorianus
tgaccactcggtaaaggatagcagg

SEQ ID NO: 172529 - DNA, 25 bp, Saccharomyces pastorianus
gatcaatacgaaaacgaatttacca

SEQ ID NO: 172530 - DNA, 25 bp, Saccharomyces pastorianus
taactatgatgtgggcaatatcggg

SEQ ID NO: 172531 - DNA, 25 bp, Saccharomyces pastorianus
atgttgctgtacctacaccaaacac

SEQ ID NO: 172532 - DNA, 25 bp, Saccharomyces pastorianus
gtacctacaccaaacacgagtggta

SEQ ID NO: 172533 - DNA, 25 bp, Saccharomyces pastorianus
ggtattgccatgttgataaacacca

SEQ ID NO: 172534 - DNA, 25 bp, Saccharomyces pastorianus
gtggtaacgggtattgccatgttga

SEQ ID NO: 172535 - DNA, 25 bp, Saccharomyces pastorianus
acacgagtggtaacgggtattgcca

SEQ ID NO: 172536 - DNA, 25 bp, Saccharomyces pastorianus
ttgccatgttgataaacaccataaa

SEQ ID NO: 172537 - DNA, 25 bp, Saccharomyces pastorianus
tgctgtacctacaccaaacacgagt

SEQ ID NO: 172538 - DNA, 25 bp, Saccharomyces pastorianus
aacgggtattgccatgttgataaac

SEQ ID NO: 172539 - DNA, 25 bp, Saccharomyces pastorianus
atgattcggaatctaatgttgctgt

SEQ ID NO: 172540 - DNA, 25 bp, Saccharomyces pastorianus
cggaatctaatgttgctgtacctac

SEQ ID NO: 172541 - DNA, 25 bp, Saccharomyces pastorianus
atctaatgttgctgtacctacacca

SEQ ID NO: 172542 - DNA, 25 bp, Saccharomyces pastorianus
atgaagagttcgtcaacaccgaccg

SEQ ID NO: 172543 - DNA, 25 bp, Saccharomyces pastorianus
accgaccgcgagactatcttttcaa

SEQ ID NO: 172544 - DNA, 25 bp, Saccharomyces pastorianus
accgcgagactatcttttcaaagtg

SEQ ID NO: 172545 - DNA, 25 bp, Saccharomyces pastorianus
ttcaaagtgcattattggttttcat

SEQ ID NO: 172546 - DNA, 25 bp, Saccharomyces pastorianus
gagttcgtcaacaccgaccgcgaga

SEQ ID NO: 172547 - DNA, 25 bp, Saccharomyces pastorianus
gcgagactatcttttcaaagtgcat

SEQ ID NO: 172548 - DNA, 25 bp, Saccharomyces pastorianus
aacaccgaccgcgagactatctttt

SEQ ID NO: 172549 - DNA, 25 bp, Saccharomyces pastorianus
gaagagttcgtcaacaccgaccgcg

SEQ ID NO: 172550 - DNA, 25 bp, Saccharomyces pastorianus
cgaccgcgagactatcttttcaaag

SEQ ID NO: 172551 - DNA, 25 bp, Saccharomyces pastorianus
gagactatcttttcaaagtgcatta

SEQ ID NO: 172552 - DNA, 25 bp, Saccharomyces pastorianus
tcgtcaacaccgaccgcgagactat

SEQ ID NO: 172553 - DNA, 25 bp, Saccharomyces pastorianus
cgaagacgaaaagtctggcctaatc

SEQ ID NO: 172554 - DNA, 25 bp, Saccharomyces pastorianus
ggcctaatcaaagtggtaaaattca

SEQ ID NO: 172555 - DNA, 25 bp, Saccharomyces pastorianus
ctggcctaatcaaagtggtaaaatt

SEQ ID NO: 172556 - DNA, 25 bp, Saccharomyces pastorianus
gaaaagtctggcctaatcaaagtgg

SEQ ID NO: 172557 - DNA, 25 bp, Saccharomyces pastorianus
aagtctggcctaatcaaagtggtaa

SEQ ID NO: 172558 - DNA, 25 bp, Saccharomyces pastorianus
aaagtctggcctaatcaaagtggta

SEQ ID NO: 172559 - DNA, 25 bp, Saccharomyces pastorianus
gacgaaaagtctggcctaatcaaag

SEQ ID NO: 172560 - DNA, 25 bp, Saccharomyces pastorianus
gtctggcctaatcaaagtggtaaaa

SEQ ID NO: 172561 - DNA, 25 bp, Saccharomyces pastorianus
gttgtcatttccgtcatggtcggga

SEQ ID NO: 172562 - DNA, 25 bp, Saccharomyces pastorianus
agacgaaaagtctggcctaatcaaa

SEQ ID NO: 172563 - DNA, 25 bp, Saccharomyces pastorianus
aaagttgtcatttccgtcatggtcg

SEQ ID NO: 172564 - DNA, 25 bp, Saccharomyces pastorianus
atatcaccaccgaaacacagcgatt

SEQ ID NO: 172565 - DNA, 25 bp, Saccharomyces pastorianus
cgaggtaataagtgatggcgactat

SEQ ID NO: 172566 - DNA, 25 bp, Saccharomyces pastorianus
gtgtaactgtaatgacgaggtaata

SEQ ID NO: 172567 - DNA, 25 bp, Saccharomyces pastorianus
tcaaaaaatttgagcggtacgagaa

SEQ ID NO: 172568 - DNA, 25 bp, Saccharomyces pastorianus
aacctcttccgataatgttggaacg

SEQ ID NO: 172569 - DNA, 25 bp, Saccharomyces pastorianus
gggtaatcactactgcgattctaat

SEQ ID NO: 172570 - DNA, 25 bp, Saccharomyces pastorianus
ttaaaagggtaatcactactgcgat

SEQ ID NO: 172571 - DNA, 25 bp, Saccharomyces pastorianus
gaaacacagcgattacttaaaaggg

SEQ ID NO: 172572 - DNA, 25 bp, Saccharomyces pastorianus
gatggcgactatatcaccaccgaaa

SEQ ID NO: 172573 - DNA, 25 bp, Saccharomyces pastorianus
tacactaaccgcccatgtgttggat

SEQ ID NO: 172574 - DNA, 25 bp, Saccharomyces pastorianus
cactactgcgattctaattgttgga

SEQ ID NO: 172575 - DNA, 25 bp, Saccharomyces pastorianus
gaagccgcattgaatatctatttgg

SEQ ID NO: 172576 - DNA, 25 bp, Saccharomyces pastorianus
agttgcaaaattaaggtcctaccat

SEQ ID NO: 172577 - DNA, 25 bp, Saccharomyces pastorianus
tagctgttaacgctgccaaggattc

SEQ ID NO: 172578 - DNA, 25 bp, Saccharomyces pastorianus
ggacaattttgccaccacagttggt

SEQ ID NO: 172579 - DNA, 25 bp, Saccharomyces pastorianus
atctatttggacaattttgccacca

SEQ ID NO: 172580 - DNA, 25 bp, Saccharomyces pastorianus
ttgcagctgcattattaatcattcc

SEQ ID NO: 172581 - DNA, 25 bp, Saccharomyces pastorianus
taatcattccaaaaactttagctgt

SEQ ID NO: 172582 - DNA, 25 bp, Saccharomyces pastorianus
attaaggtcctaccatgccgctagt

SEQ ID NO: 172583 - DNA, 25 bp, Saccharomyces pastorianus
acagttagctattgctgagtttgca

SEQ ID NO: 172584 - DNA, 25 bp, Saccharomyces pastorianus
atgccgctagtcaaatggccaagcc

SEQ ID NO: 172585 - DNA, 25 bp, Saccharomyces pastorianus
acgctgccaaggattctagtgaatt

SEQ ID NO: 172586 - DNA, 25 bp, Saccharomyces pastorianus
ggtaacgcaacctcttttggatttg

SEQ ID NO: 172587 - DNA, 25 bp, Saccharomyces pastorianus
cgaataatcgatctccttttagcgg

SEQ ID NO: 172588 - DNA, 25 bp, Saccharomyces pastorianus
ttcggttctgcttctaacctcaata

SEQ ID NO: 172589 - DNA, 25 bp, Saccharomyces pastorianus
aaagtctcgcaatctaacccttcat

SEQ ID NO: 172590 - DNA, 25 bp, Saccharomyces pastorianus
tacatcgtcagcgtttggcaaaccg

SEQ ID NO: 172591 - DNA, 25 bp, Saccharomyces pastorianus
ggcaactttcaatcttcttttggta

SEQ ID NO: 172592 - DNA, 25 bp, Saccharomyces pastorianus
aggagtatccccatttggcacattt

SEQ ID NO: 172593 - DNA, 25 bp, Saccharomyces pastorianus
taggcagtagcgcattcggaacgac

SEQ ID NO: 172594 - DNA, 25 bp, Saccharomyces pastorianus
aacttctccttttggttcactgcaa

SEQ ID NO: 172595 - DNA, 25 bp, Saccharomyces pastorianus
atacccagtcgccatttggtactat

SEQ ID NO: 172596 - DNA, 25 bp, Saccharomyces pastorianus
tggttcttcgccgtttggtactaca

SEQ ID NO: 172597 - DNA, 25 bp, Saccharomyces pastorianus
cttaggtgaactagaaagaagagct

SEQ ID NO: 172598 - DNA, 25 bp, Saccharomyces pastorianus
gaagagctaaagctggcaagcgttt

SEQ ID NO: 172599 - DNA, 25 bp, Saccharomyces pastorianus
ttggctttcgtccatctagttgaac

SEQ ID NO: 172600 - DNA, 25 bp, Saccharomyces pastorianus
gctaaagctggcaagcgtttggctt

SEQ ID NO: 172601 - DNA, 25 bp, Saccharomyces pastorianus
agctggcaagcgtttggctttcgtc

SEQ ID NO: 172602 - DNA, 25 bp, Saccharomyces pastorianus
ggctttcgtccatctagttgaacct

SEQ ID NO: 172603 - DNA, 25 bp, Saccharomyces pastorianus
aagctggcaagcgtttggctttcgt

SEQ ID NO: 172604 - DNA, 25 bp, Saccharomyces pastorianus
aagcgtttggctttcgtccatctag

SEQ ID NO: 172605 - DNA, 25 bp, Saccharomyces pastorianus
gcgtttggctttcgtccatctagtt

SEQ ID NO: 172606 - DNA, 25 bp, Saccharomyces pastorianus
tggcaagcgtttggctttcgtccat

SEQ ID NO: 172607 - DNA, 25 bp, Saccharomyces pastorianus
tttggctttcgtccatctagttgaa

SEQ ID NO: 172608 - DNA, 25 bp, Saccharomyces pastorianus
gaatacactagaagtgctcctcggg

SEQ ID NO: 172609 - DNA, 25 bp, Saccharomyces pastorianus
attattgggaattcattattgcttg

SEQ ID NO: 172610 - DNA, 25 bp, Saccharomyces pastorianus
atctgttttacacgttttcattcat

SEQ ID NO: 172611 - DNA, 25 bp, Saccharomyces pastorianus
gggacatagagatccataaaaggaa

SEQ ID NO: 172612 - DNA, 25 bp, Saccharomyces pastorianus
tgttttacacgttttcattcattat

SEQ ID NO: 172613 - DNA, 25 bp, Saccharomyces pastorianus
gggaattcattattgcttgagataa

SEQ ID NO: 172614 - DNA, 25 bp, Saccharomyces pastorianus
aaggaaatcgataattctacacatt

SEQ ID NO: 172615 - DNA, 25 bp, Saccharomyces pastorianus
atctgttttatttctttatctgttt

SEQ ID NO: 172616 - DNA, 25 bp, Saccharomyces pastorianus
ttattacaaaatcagcccttgcgct

SEQ ID NO: 172617 - DNA, 25 bp, Saccharomyces pastorianus
gataattctacacattaatctgttt

SEQ ID NO: 172618 - DNA, 25 bp, Saccharomyces pastorianus
attatgagtgagtggattttgagat

SEQ ID NO: 172619 - DNA, 25 bp, Saccharomyces pastorianus
attgtagtcgcctgctccttcagtt

SEQ ID NO: 172620 - DNA, 25 bp, Saccharomyces pastorianus
tgcggtatcatattgtttttcttct

SEQ ID NO: 172621 - DNA, 25 bp, Saccharomyces pastorianus
gggctgaattcctcggcgaagcttt

SEQ ID NO: 172622 - DNA, 25 bp, Saccharomyces pastorianus
cagttcgtccgctggttgcggaata

SEQ ID NO: 172623 - DNA, 25 bp, Saccharomyces pastorianus
gatcatggcaaagttaccgcgccaa

SEQ ID NO: 172624 - DNA, 25 bp, Saccharomyces pastorianus
aatcgccctgcgcattgtagtcgcc

SEQ ID NO: 172625 - DNA, 25 bp, Saccharomyces pastorianus
taaattttttactctcgggctgaat

SEQ ID NO: 172626 - DNA, 25 bp, Saccharomyces pastorianus
tttcttctcttccttaactcattta

SEQ ID NO: 172627 - DNA, 25 bp, Saccharomyces pastorianus
gcggaatatttgaacgtcagttttc

SEQ ID NO: 172628 - DNA, 25 bp, Saccharomyces pastorianus
attgctgattcacacgggagaccac

SEQ ID NO: 172629 - DNA, 25 bp, Saccharomyces pastorianus
aagctttgccttgccattttaggtg

SEQ ID NO: 172630 - DNA, 25 bp, Saccharomyces pastorianus
ggcatttgagtttatatccattttt

SEQ ID NO: 172631 - DNA, 25 bp, Saccharomyces pastorianus
cctgatgttcagcaaaccgaaagaa

SEQ ID NO: 172632 - DNA, 25 bp, Saccharomyces pastorianus
gaggcatttgagtttatatccattt

SEQ ID NO: 172633 - DNA, 25 bp, Saccharomyces pastorianus
ctgaggcatttgagtttatatccat

SEQ ID NO: 172634 - DNA, 25 bp, Saccharomyces pastorianus
tactgaggcatttgagtttatatcc

SEQ ID NO: 172635 - DNA, 25 bp, Saccharomyces pastorianus
ttttttccctgatgttcagcaaacc

SEQ ID NO: 172636 - DNA, 25 bp, Saccharomyces pastorianus
gagtttatatccatttttttccctg

SEQ ID NO: 172637 - DNA, 25 bp, Saccharomyces pastorianus
ttccctgatgttcagcaaaccgaaa

SEQ ID NO: 172638 - DNA, 25 bp, Saccharomyces pastorianus
ttttccctgatgttcagcaaaccga

SEQ ID NO: 172639 - DNA, 25 bp, Saccharomyces pastorianus
ggcttactgaggcatttgagtttat

SEQ ID NO: 172640 - DNA, 25 bp, Saccharomyces pastorianus
gatgttcagcaaaccgaaagaaata

SEQ ID NO: 172641 - DNA, 25 bp, Saccharomyces pastorianus
gtgaggcttaggtgatttttgagat

SEQ ID NO: 172642 - DNA, 25 bp, Saccharomyces pastorianus
acgtaaaacatgcatgtgaggctta

SEQ ID NO: 172643 - DNA, 25 bp, Saccharomyces pastorianus
ggcttaggtgatttttgagataatt

SEQ ID NO: 172644 - DNA, 25 bp, Saccharomyces pastorianus
tgcatgtgaggcttaggtgattttt

SEQ ID NO: 172645 - DNA, 25 bp, Saccharomyces pastorianus
catgtgaggcttaggtgatttttga

SEQ ID NO: 172646 - DNA, 25 bp, Saccharomyces pastorianus
gaggcttaggtgatttttgagataa

SEQ ID NO: 172647 - DNA, 25 bp, Saccharomyces pastorianus
aaacatgcatgtgaggcttaggtga

SEQ ID NO: 172648 - DNA, 25 bp, Saccharomyces pastorianus
acatgcatgtgaggcttaggtgatt

SEQ ID NO: 172649 - DNA, 25 bp, Saccharomyces pastorianus
aacgtaaaacatgcatgtgaggctt

SEQ ID NO: 172650 - DNA, 25 bp, Saccharomyces pastorianus
atgcatgtgaggcttaggtgatttt

SEQ ID NO: 172651 - DNA, 25 bp, Saccharomyces pastorianus
aacatgcatgtgaggcttaggtgat

SEQ ID NO: 172652 - DNA, 25 bp, Saccharomyces pastorianus
agaagttcccagaccgtcattttat

SEQ ID NO: 172653 - DNA, 25 bp, Saccharomyces pastorianus
tttgtctgcataccacaaggtccaa

SEQ ID NO: 172654 - DNA, 25 bp, Saccharomyces pastorianus
ttccagtcccagctttgtctgcata

SEQ ID NO: 172655 - DNA, 25 bp, Saccharomyces pastorianus
gatgttactagtggtaagaaagctt

SEQ ID NO: 172656 - DNA, 25 bp, Saccharomyces pastorianus
cttgactgctgtccacgacaaggtc

SEQ ID NO: 172657 - DNA, 25 bp, Saccharomyces pastorianus
aaagctttagtcattttcgttccag

SEQ ID NO: 172658 - DNA, 25 bp, Saccharomyces pastorianus
caaaaggtcttattggactccaagg

SEQ ID NO: 172659 - DNA, 25 bp, Saccharomyces pastorianus
ggactccaaggacgttcaacaaatt

SEQ ID NO: 172660 - DNA, 25 bp, Saccharomyces pastorianus
ataccacaaggtccaaacaaagttg

SEQ ID NO: 172661 - DNA, 25 bp, Saccharomyces pastorianus
aagctttagtcattttcgttccagt

SEQ ID NO: 172662 - DNA, 25 bp, Saccharomyces pastorianus
gtcttggaagacatggttttcccaa

SEQ ID NO: 172663 - DNA, 25 bp, Saccharomyces pastorianus
cgtccctttatgctaaattagaaca

SEQ ID NO: 172664 - DNA, 25 bp, Saccharomyces pastorianus
tattaactatccgtccctttatgct

SEQ ID NO: 172665 - DNA, 25 bp, Saccharomyces pastorianus
actatccgtccctttatgctaaatt

SEQ ID NO: 172666 - DNA, 25 bp, Saccharomyces pastorianus
gaacatgttcatgaaaacaccggat

SEQ ID NO: 172667 - DNA, 25 bp, Saccharomyces pastorianus
aactatccgtccctttatgctaaat

SEQ ID NO: 172668 - DNA, 25 bp, Saccharomyces pastorianus
tccgtccctttatgctaaattagaa

SEQ ID NO: 172669 - DNA, 25 bp, Saccharomyces pastorianus
ttaactatccgtccctttatgctaa

SEQ ID NO: 172670 - DNA, 25 bp, Saccharomyces pastorianus
ttcatgaaaacaccggatattaact

SEQ ID NO: 172671 - DNA, 25 bp, Saccharomyces pastorianus
gatattaactatccgtccctttatg

SEQ ID NO: 172672 - DNA, 25 bp, Saccharomyces pastorianus
gattgcaaacaacaggaacatgttc

SEQ ID NO: 172673 - DNA, 25 bp, Saccharomyces pastorianus
tatccgtccctttatgctaaattag

SEQ ID NO: 172674 - DNA, 25 bp, Saccharomyces pastorianus
aggtgctactggtactgctgtttct

SEQ ID NO: 172675 - DNA, 25 bp, Saccharomyces pastorianus
tgctactggtactgctgtttctttc

SEQ ID NO: 172676 - DNA, 25 bp, Saccharomyces pastorianus
tgttatcaactatgacatgccaggt

SEQ ID NO: 172677 - DNA, 25 bp, Saccharomyces pastorianus
actggtactgctgtttctttcttca

SEQ ID NO: 172678 - DNA, 25 bp, Saccharomyces pastorianus
caaaggtttaggtagcaagttgatt

SEQ ID NO: 172679 - DNA, 25 bp, Saccharomyces pastorianus
tggtactgctgtttctttcttcaca

SEQ ID NO: 172680 - DNA, 25 bp, Saccharomyces pastorianus
gcaggtgctactggtactgctgttt

SEQ ID NO: 172681 - DNA, 25 bp, Saccharomyces pastorianus
ctactggtactgctgtttctttctt

SEQ ID NO: 172682 - DNA, 25 bp, Saccharomyces pastorianus
caactatgacatgccaggtaacatt

SEQ ID NO: 172683 - DNA, 25 bp, Saccharomyces pastorianus
gatgtcaaaggtattaactatgtta

SEQ ID NO: 172684 - DNA, 25 bp, Saccharomyces pastorianus
tatcaactatgacatgccaggtaac

SEQ ID NO: 172685 - DNA, 25 bp, Saccharomyces pastorianus
ttccagttttgctatttaaagtaag

SEQ ID NO: 172686 - DNA, 25 bp, Saccharomyces pastorianus
cggccgatccaccaaagaacaacaa

SEQ ID NO: 172687 - DNA, 25 bp, Saccharomyces pastorianus
atccttgacgagttgctgttttttc

SEQ ID NO: 172688 - DNA, 25 bp, Saccharomyces pastorianus
tggtaccctcactaaaactcgtacg

SEQ ID NO: 172689 - DNA, 25 bp, Saccharomyces pastorianus
tccagtttgtggtaattttccagtt

SEQ ID NO: 172690 - DNA, 25 bp, Saccharomyces pastorianus
gagttgctgttttttcgaacggttg

SEQ ID NO: 172691 - DNA, 25 bp, Saccharomyces pastorianus
gttattttcggccaattgcacaagg

SEQ ID NO: 172692 - DNA, 25 bp, Saccharomyces pastorianus
gtggtaattttccagttttgctatt

SEQ ID NO: 172693 - DNA, 25 bp, Saccharomyces pastorianus
cactaaaactcgtacggccgatcca

SEQ ID NO: 172694 - DNA, 25 bp, Saccharomyces pastorianus
gaacaacaacacaatccttgacgag

SEQ ID NO: 172695 - DNA, 25 bp, Saccharomyces pastorianus
gcacaaggcaacattcaggatatat

SEQ ID NO: 172696 - DNA, 25 bp, Saccharomyces pastorianus
ttcgactgtcgtaccttgcacagaa

SEQ ID NO: 172697 - DNA, 25 bp, Saccharomyces pastorianus
cgattggatatccataatgtcacag

SEQ ID NO: 172698 - DNA, 25 bp, Saccharomyces pastorianus
catttttgtatttcgactgtcgtac

SEQ ID NO: 172699 - DNA, 25 bp, Saccharomyces pastorianus
gtatttcgactgtcgtaccttgcac

SEQ ID NO: 172700 - DNA, 25 bp, Saccharomyces pastorianus
aaagcttttcaaatttattctcatt

SEQ ID NO: 172701 - DNA, 25 bp, Saccharomyces pastorianus
gactgtcgtaccttgcacagaacga

SEQ ID NO: 172702 - DNA, 25 bp, Saccharomyces pastorianus
gtaccttgcacagaacgattggata

SEQ ID NO: 172703 - DNA, 25 bp, Saccharomyces pastorianus
tgcacagaacgattggatatccata

SEQ ID NO: 172704 - DNA, 25 bp, Saccharomyces pastorianus
ggatcgatatcaaagcttttcaaat

SEQ ID NO: 172705 - DNA, 25 bp, Saccharomyces pastorianus
ttctcatttttgtatttcgactgtc

SEQ ID NO: 172706 - DNA, 25 bp, Saccharomyces pastorianus
tagtttagctttttggatcgatatc

SEQ ID NO: 172707 - DNA, 25 bp, Saccharomyces pastorianus
aagccaatatacttcagcaaatttt

SEQ ID NO: 172708 - DNA, 25 bp, Saccharomyces pastorianus
tacttcagcaaatttttggtcactg

SEQ ID NO: 172709 - DNA, 25 bp, Saccharomyces pastorianus
aaagcagaaagatgagtaagccaat

SEQ ID NO: 172710 - DNA, 25 bp, Saccharomyces pastorianus
tatacttcagcaaatttttggtcac

SEQ ID NO: 172711 - DNA, 25 bp, Saccharomyces pastorianus
gccaatatacttcagcaaatttttg

SEQ ID NO: 172712 - DNA, 25 bp, Saccharomyces pastorianus
caatatacttcagcaaatttttggt

SEQ ID NO: 172713 - DNA, 25 bp, Saccharomyces pastorianus
gatgagtaagccaatatacttcagc

SEQ ID NO: 172714 - DNA, 25 bp, Saccharomyces pastorianus
atacttcagcaaatttttggtcact

SEQ ID NO: 172715 - DNA, 25 bp, Saccharomyces pastorianus
aatatacttcagcaaatttttggtc

SEQ ID NO: 172716 - DNA, 25 bp, Saccharomyces pastorianus
acttcagcaaatttttggtcactga

SEQ ID NO: 172717 - DNA, 25 bp, Saccharomyces pastorianus
cttcagcaaatttttggtcactgaa

SEQ ID NO: 172718 - DNA, 25 bp, Saccharomyces pastorianus
atgtagtccttccacgtttctgcta

SEQ ID NO: 172719 - DNA, 25 bp, Saccharomyces pastorianus
atatcggctttcttcagatttcctc

SEQ ID NO: 172720 - DNA, 25 bp, Saccharomyces pastorianus
gaagcacttgcaatagactcttgag

SEQ ID NO: 172721 - DNA, 25 bp, Saccharomyces pastorianus
atttggttcttgatatcggctttct

SEQ ID NO: 172722 - DNA, 25 bp, Saccharomyces pastorianus
aaaagcaaccatttcgaagcacttg

SEQ ID NO: 172723 - DNA, 25 bp, Saccharomyces pastorianus
ttgttaaaaaccttctgcgctcttg

SEQ ID NO: 172724 - DNA, 25 bp, Saccharomyces pastorianus
ttctgcgctcttgcttgggctatta

SEQ ID NO: 172725 - DNA, 25 bp, Saccharomyces pastorianus
gggcatctctgtactgcaaaagcaa

SEQ ID NO: 172726 - DNA, 25 bp, Saccharomyces pastorianus
gggctattattctggcctttcaagt

SEQ ID NO: 172727 - DNA, 25 bp, Saccharomyces pastorianus
actcttgagagtcttccaacgtatt

SEQ ID NO: 172728 - DNA, 25 bp, Saccharomyces pastorianus
tcagatttcctcacccttttgttaa

SEQ ID NO: 172729 - DNA, 25 bp, Saccharomyces pastorianus
aacgagatatctgcgagacaacatg

SEQ ID NO: 172730 - DNA, 25 bp, Saccharomyces pastorianus
tcagagagtcattagtctcgccggg

SEQ ID NO: 172731 - DNA, 25 bp, Saccharomyces pastorianus
atcagagagtcattagtctcgccgg

SEQ ID NO: 172732 - DNA, 25 bp, Saccharomyces pastorianus
gatatctgcgagacaacatgcaggt

SEQ ID NO: 172733 - DNA, 25 bp, Saccharomyces pastorianus
taatcagagagtcattagtctcgcc

SEQ ID NO: 172734 - DNA, 25 bp, Saccharomyces pastorianus
gggaacgagatatctgcgagacaac

SEQ ID NO: 172735 - DNA, 25 bp, Saccharomyces pastorianus
gaacgagatatctgcgagacaacat

SEQ ID NO: 172736 - DNA, 25 bp, Saccharomyces pastorianus
cgagatatctgcgagacaacatgca

SEQ ID NO: 172737 - DNA, 25 bp, Saccharomyces pastorianus
ggaacgagatatctgcgagacaaca

SEQ ID NO: 172738 - DNA, 25 bp, Saccharomyces pastorianus
agtcattagtctcgccggggaacga

SEQ ID NO: 172739 - DNA, 25 bp, Saccharomyces pastorianus
aatcagagagtcattagtctcgccg

SEQ ID NO: 172740 - DNA, 25 bp, Saccharomyces pastorianus
caagtgatgtatactggtcaatcca

SEQ ID NO: 172741 - DNA, 25 bp, Saccharomyces pastorianus
gttgtcagcacgaatgttctcagtt

SEQ ID NO: 172742 - DNA, 25 bp, Saccharomyces pastorianus
gtagcagctccagttgtatttcaca

SEQ ID NO: 172743 - DNA, 25 bp, Saccharomyces pastorianus
gaggtgcagaatctaggtctaagac

SEQ ID NO: 172744 - DNA, 25 bp, Saccharomyces pastorianus
tcggtgcaacatgtgattgtgactt

SEQ ID NO: 172745 - DNA, 25 bp, Saccharomyces pastorianus
tcctatttgggacgtatgcattgtt

SEQ ID NO: 172746 - DNA, 25 bp, Saccharomyces pastorianus
acttagttggtaatgttgtcagcac

SEQ ID NO: 172747 - DNA, 25 bp, Saccharomyces pastorianus
gttggacaacgtacgccattgatta

SEQ ID NO: 172748 - DNA, 25 bp, Saccharomyces pastorianus
tttactcagtagcaggtgtagcagc

SEQ ID NO: 172749 - DNA, 25 bp, Saccharomyces pastorianus
cgttcttttctgtttagaggtgcag

SEQ ID NO: 172750 - DNA, 25 bp, Saccharomyces pastorianus
gaacatagggcaatactactgcaag

SEQ ID NO: 172751 - DNA, 25 bp, Saccharomyces pastorianus
caggttcaccaagaaccatatgttt

SEQ ID NO: 172752 - DNA, 25 bp, Saccharomyces pastorianus
tgttttcaacgctagaccagatggt

SEQ ID NO: 172753 - DNA, 25 bp, Saccharomyces pastorianus
cgctagaccagatggtgtccacgtt

SEQ ID NO: 172754 - DNA, 25 bp, Saccharomyces pastorianus
ttacaggttcaccaagaaccatatg

SEQ ID NO: 172755 - DNA, 25 bp, Saccharomyces pastorianus
tttcaacgctagaccagatggtgtc

SEQ ID NO: 172756 - DNA, 25 bp, Saccharomyces pastorianus
caacgctagaccagatggtgtccac

SEQ ID NO: 172757 - DNA, 25 bp, Saccharomyces pastorianus
tacaggttcaccaagaaccatatgt

SEQ ID NO: 172758 - DNA, 25 bp, Saccharomyces pastorianus
atatgttttcaacgctagaccagat

SEQ ID NO: 172759 - DNA, 25 bp, Saccharomyces pastorianus
ggttcaccaagaaccatatgttttc

SEQ ID NO: 172760 - DNA, 25 bp, Saccharomyces pastorianus
acaggttcaccaagaaccatatgtt

SEQ ID NO: 172761 - DNA, 25 bp, Saccharomyces pastorianus
gaaaacttggtcttagccgctaaat

SEQ ID NO: 172762 - DNA, 25 bp, Saccharomyces pastorianus
agtcttgagactaagaggcgctcta

SEQ ID NO: 172763 - DNA, 25 bp, Saccharomyces pastorianus
gtcattgccctaactgacttggact

SEQ ID NO: 172764 - DNA, 25 bp, Saccharomyces pastorianus
ggttttagccgctagaatcatcgct

SEQ ID NO: 172765 - DNA, 25 bp, Saccharomyces pastorianus
ctagtcgacagaacccaaccatggt

SEQ ID NO: 172766 - DNA, 25 bp, Saccharomyces pastorianus
taagaggcgctctagtcgacagaac

SEQ ID NO: 172767 - DNA, 25 bp, Saccharomyces pastorianus
acttggactccccatcagaatacgt

SEQ ID NO: 172768 - DNA, 25 bp, Saccharomyces pastorianus
agaatacgtcgatgtcgctatccca

SEQ ID NO: 172769 - DNA, 25 bp, Saccharomyces pastorianus
tagttatcgtcaccgacccaagatc

SEQ ID NO: 172770 - DNA, 25 bp, Saccharomyces pastorianus
gtttaatttggtacttattggccag

SEQ ID NO: 172771 - DNA, 25 bp, Saccharomyces pastorianus
tattggccagagaagtcttgagact

SEQ ID NO: 172772 - DNA, 25 bp, Saccharomyces pastorianus
acgtcgatgtcgctatcccatgtaa

SEQ ID NO: 172773 - DNA, 25 bp, Saccharomyces pastorianus
actaccgggaattacagcacataca

SEQ ID NO: 172774 - DNA, 25 bp, Saccharomyces pastorianus
cccgctgaagtatcggcgcagcatg

SEQ ID NO: 172775 - DNA, 25 bp, Saccharomyces pastorianus
ttggcccgctgaagtatcggcgcag

SEQ ID NO: 172776 - DNA, 25 bp, Saccharomyces pastorianus
gcagcatgcgcttggaactaccggg

SEQ ID NO: 172777 - DNA, 25 bp, Saccharomyces pastorianus
agtatcggcgcagcatgcgcttgga

SEQ ID NO: 172778 - DNA, 25 bp, Saccharomyces pastorianus
tcattggcccgctgaagtatcggcg

SEQ ID NO: 172779 - DNA, 25 bp, Saccharomyces pastorianus
gaaagggcctattgttgttgcctct

SEQ ID NO: 172780 - DNA, 25 bp, Saccharomyces pastorianus
taccgggaattacagcacatacaat

SEQ ID NO: 172781 - DNA, 25 bp, Saccharomyces pastorianus
gcacatacaattgggaaatctggca

SEQ ID NO: 172782 - DNA, 25 bp, Saccharomyces pastorianus
agcatgcgcttggaactaccgggaa

SEQ ID NO: 172783 - DNA, 25 bp, Saccharomyces pastorianus
ggaattacagcacatacaattggga

SEQ ID NO: 172784 - DNA, 25 bp, Saccharomyces pastorianus
ttgctggtgaccactgttaaggaag

SEQ ID NO: 172785 - DNA, 25 bp, Saccharomyces pastorianus
acacacattaccacacacatacaat

SEQ ID NO: 172786 - DNA, 25 bp, Saccharomyces pastorianus
acacacatacaatggctgccccaag

SEQ ID NO: 172787 - DNA, 25 bp, Saccharomyces pastorianus
attgactagcacacacacattacca

SEQ ID NO: 172788 - DNA, 25 bp, Saccharomyces pastorianus
ttagtggcgccgtgtcctacccgca

SEQ ID NO: 172789 - DNA, 25 bp, Saccharomyces pastorianus
tgttttgggtcgtgttttgtacttg

SEQ ID NO: 172790 - DNA, 25 bp, Saccharomyces pastorianus
tcgtcgcacgcgatacactgttaat

SEQ ID NO: 172791 - DNA, 25 bp, Saccharomyces pastorianus
acacagtgtttattgctggtgacca

SEQ ID NO: 172792 - DNA, 25 bp, Saccharomyces pastorianus
gtttctgctcaattgactagcacac

SEQ ID NO: 172793 - DNA, 25 bp, Saccharomyces pastorianus
cgtgttttgtacttgtttctgctca

SEQ ID NO: 172794 - DNA, 25 bp, Saccharomyces pastorianus
atacactgttaatcacccgcctttt

SEQ ID NO: 172795 - DNA, 25 bp, Saccharomyces pastorianus
ttaccccaaactggcggtgctagaa

SEQ ID NO: 172796 - DNA, 25 bp, Saccharomyces pastorianus
atacctatccttggttgccttgaag

SEQ ID NO: 172797 - DNA, 25 bp, Saccharomyces pastorianus
tgccggtttaggttttgcttatctt

SEQ ID NO: 172798 - DNA, 25 bp, Saccharomyces pastorianus
gattgtcttctcgtttttgagcgtc

SEQ ID NO: 172799 - DNA, 25 bp, Saccharomyces pastorianus
gactcgggaaacgtgattatcgcaa

SEQ ID NO: 172800 - DNA, 25 bp, Saccharomyces pastorianus
aaccttgctgggttcgtattgccaa

SEQ ID NO: 172801 - DNA, 25 bp, Saccharomyces pastorianus
taacatcatggccacttttctctca

SEQ ID NO: 172802 - DNA, 25 bp, Saccharomyces pastorianus
tgccttgaagaccacaactgccaat

SEQ ID NO: 172803 - DNA, 25 bp, Saccharomyces pastorianus
acacacgttttttatgcgttcctcg

SEQ ID NO: 172804 - DNA, 25 bp, Saccharomyces pastorianus
atgcgttcctcggtagtacagatac

SEQ ID NO: 172805 - DNA, 25 bp, Saccharomyces pastorianus
aggtatcggtgaaatcctctccaac

SEQ ID NO: 172806 - DNA, 25 bp, Saccharomyces pastorianus
aggaataagcaacaccttctggtta

SEQ ID NO: 172807 - DNA, 25 bp, Saccharomyces pastorianus
tggagtcgcgccttccgtatcttgt

SEQ ID NO: 172808 - DNA, 25 bp, Saccharomyces pastorianus
tctggttagaagacaaatttctttt

SEQ ID NO: 172809 - DNA, 25 bp, Saccharomyces pastorianus
agctgcgtggagtcgcgccttccgt

SEQ ID NO: 172810 - DNA, 25 bp, Saccharomyces pastorianus
aataagcaacaccttctggttagaa

SEQ ID NO: 172811 - DNA, 25 bp, Saccharomyces pastorianus
gcaacaccttctggttagaagacaa

SEQ ID NO: 172812 - DNA, 25 bp, Saccharomyces pastorianus
ctgtgcatacgtaaggaataagcaa

SEQ ID NO: 172813 - DNA, 25 bp, Saccharomyces pastorianus
ttccgtatcttgtgctttgcattct

SEQ ID NO: 172814 - DNA, 25 bp, Saccharomyces pastorianus
tcatcaaatgaaaatcctccctacg

SEQ ID NO: 172815 - DNA, 25 bp, Saccharomyces pastorianus
gtatcttgtgctttgcattctgtgc

SEQ ID NO: 172816 - DNA, 25 bp, Saccharomyces pastorianus
gccttccgtatcttgtgctttgcat

SEQ ID NO: 172817 - DNA, 25 bp, Saccharomyces pastorianus
ctttgcttgcaaattctagcgccaa

SEQ ID NO: 172818 - DNA, 25 bp, Saccharomyces pastorianus
gcgtgatgcaattccatagatgtgt

SEQ ID NO: 172819 - DNA, 25 bp, Saccharomyces pastorianus
ctagcgccaaggcaaccttcaaatt

SEQ ID NO: 172820 - DNA, 25 bp, Saccharomyces pastorianus
cttttgctctcgataaactggatat

SEQ ID NO: 172821 - DNA, 25 bp, Saccharomyces pastorianus
ttttttgttgtatctctccactaag

SEQ ID NO: 172822 - DNA, 25 bp, Saccharomyces pastorianus
tctccactaagctacgtatttccaa

SEQ ID NO: 172823 - DNA, 25 bp, Saccharomyces pastorianus
gtaaattgttcctttgcgtgatgca

SEQ ID NO: 172824 - DNA, 25 bp, Saccharomyces pastorianus
attattggccaactgcaaatgagca

SEQ ID NO: 172825 - DNA, 25 bp, Saccharomyces pastorianus
ttttttcttcttttgctctcgataa

SEQ ID NO: 172826 - DNA, 25 bp, Saccharomyces pastorianus
gagcaggatgactctttgatttatc

SEQ ID NO: 172827 - DNA, 25 bp, Saccharomyces pastorianus
gtgttctcatcatcgatttcaagct

SEQ ID NO: 172828 - DNA, 25 bp, Saccharomyces pastorianus
agactctgtcggattaactttgtcc

SEQ ID NO: 172829 - DNA, 25 bp, Saccharomyces pastorianus
agacattttaatgggtaagaaactg

SEQ ID NO: 172830 - DNA, 25 bp, Saccharomyces pastorianus
aacgcgcttgatgtatcatttaaag

SEQ ID NO: 172831 - DNA, 25 bp, Saccharomyces pastorianus
gagtgaatcccatacatcttctaca

SEQ ID NO: 172832 - DNA, 25 bp, Saccharomyces pastorianus
gtcagacaataagagtgaatcccat

SEQ ID NO: 172833 - DNA, 25 bp, Saccharomyces pastorianus
gatgcaaacgcgcttgatgtatcat

SEQ ID NO: 172834 - DNA, 25 bp, Saccharomyces pastorianus
aagaaactggatgaagactctgtcg

SEQ ID NO: 172835 - DNA, 25 bp, Saccharomyces pastorianus
aactttgtccgacaagtcagacaat

SEQ ID NO: 172836 - DNA, 25 bp, Saccharomyces pastorianus
gaatcccatacatcttctacaaatg

SEQ ID NO: 172837 - DNA, 25 bp, Saccharomyces pastorianus
tgacaaaaatgaatcagcagtcgaa

SEQ ID NO: 172838 - DNA, 25 bp, Saccharomyces pastorianus
ggattaactttgtccgacaagtcag

SEQ ID NO: 172839 - DNA, 25 bp, Saccharomyces pastorianus
gagtacgataccacagttattgatg

SEQ ID NO: 172840 - DNA, 25 bp, Saccharomyces pastorianus
agatgcccctgtcgtaatagagtac

SEQ ID NO: 172841 - DNA, 25 bp, Saccharomyces pastorianus
gctgcactaagagagctaagcatag

SEQ ID NO: 172842 - DNA, 25 bp, Saccharomyces pastorianus
agagtcttcactcgcagacaaaaca

SEQ ID NO: 172843 - DNA, 25 bp, Saccharomyces pastorianus
acggtacaaggatgaaggcgatctt

SEQ ID NO: 172844 - DNA, 25 bp, Saccharomyces pastorianus
gagttagagtcttcactcgcagaca

SEQ ID NO: 172845 - DNA, 25 bp, Saccharomyces pastorianus
cagtgatagtacaaaggcgaaggac

SEQ ID NO: 172846 - DNA, 25 bp, Saccharomyces pastorianus
aaatgttcttctgcgatctgaaaaa

SEQ ID NO: 172847 - DNA, 25 bp, Saccharomyces pastorianus
aagccattaaagatgcccctgtcgt

SEQ ID NO: 172848 - DNA, 25 bp, Saccharomyces pastorianus
accaaattaaatgttcttctgcgat

SEQ ID NO: 172849 - DNA, 25 bp, Saccharomyces pastorianus
gaagatggcgaattggctgcactaa

SEQ ID NO: 172850 - DNA, 25 bp, Saccharomyces pastorianus
gtgcaacagagttcgtttttaattt

SEQ ID NO: 172851 - DNA, 25 bp, Saccharomyces pastorianus
gaagtcacatattccgacaaattca

SEQ ID NO: 172852 - DNA, 25 bp, Saccharomyces pastorianus
gtagtgtccatttaaattgtacaat

SEQ ID NO: 172853 - DNA, 25 bp, Saccharomyces pastorianus
attccgacaaattcaatcgcacgtt

SEQ ID NO: 172854 - DNA, 25 bp, Saccharomyces pastorianus
attagtgcaacagagttcgttttta

SEQ ID NO: 172855 - DNA, 25 bp, Saccharomyces pastorianus
atattgctagtagtgtccatttaaa

SEQ ID NO: 172856 - DNA, 25 bp, Saccharomyces pastorianus
cacgttctattattagtgcaacaga

SEQ ID NO: 172857 - DNA, 25 bp, Saccharomyces pastorianus
gacaaattcaatcgcacgttctatt

SEQ ID NO: 172858 - DNA, 25 bp, Saccharomyces pastorianus
ttcaatcgcacgttctattattagt

SEQ ID NO: 172859 - DNA, 25 bp, Saccharomyces pastorianus
gttcgtttttaatttatattgctag

SEQ ID NO: 172860 - DNA, 25 bp, Saccharomyces pastorianus
gctagtagtgtccatttaaattgta

SEQ ID NO: 172861 - DNA, 25 bp, Saccharomyces pastorianus
aaattagcgggtatcctgttcgatg

SEQ ID NO: 172862 - DNA, 25 bp, Saccharomyces pastorianus
cggactgctcgaaaaggctaacaag

SEQ ID NO: 172863 - DNA, 25 bp, Saccharomyces pastorianus
agttcagcgataaacatttctatca

SEQ ID NO: 172864 - DNA, 25 bp, Saccharomyces pastorianus
gtgtacacaccctcttaaagttcag

SEQ ID NO: 172865 - DNA, 25 bp, Saccharomyces pastorianus
agtttatgcagtggtgtacacaccc

SEQ ID NO: 172866 - DNA, 25 bp, Saccharomyces pastorianus
gaacaagcacgctaactggatagtt

SEQ ID NO: 172867 - DNA, 25 bp, Saccharomyces pastorianus
atgtggtcaaatgcgctaaggaatt

SEQ ID NO: 172868 - DNA, 25 bp, Saccharomyces pastorianus
gaggtaatgacccaacagaattcta

SEQ ID NO: 172869 - DNA, 25 bp, Saccharomyces pastorianus
ttaaagggctaacggactgctcgaa

SEQ ID NO: 172870 - DNA, 25 bp, Saccharomyces pastorianus
agtggccgcgtagcgctgtagaact

SEQ ID NO: 172871 - DNA, 25 bp, Saccharomyces pastorianus
gggtatcctgttcgatgtggtcaaa

SEQ ID NO: 172872 - DNA, 25 bp, Saccharomyces pastorianus
taggcgcaaactctggtacttcgat

SEQ ID NO: 172873 - DNA, 25 bp, Saccharomyces pastorianus
gtactctttggaacacaacactact

SEQ ID NO: 172874 - DNA, 25 bp, Saccharomyces pastorianus
tgcggatccttttcagatgcttcag

SEQ ID NO: 172875 - DNA, 25 bp, Saccharomyces pastorianus
tttacctcgtacttttctgctgtgg

SEQ ID NO: 172876 - DNA, 25 bp, Saccharomyces pastorianus
tctggtacttcgatcacgtccttta

SEQ ID NO: 172877 - DNA, 25 bp, Saccharomyces pastorianus
tggagctctccacattcttgcggat

SEQ ID NO: 172878 - DNA, 25 bp, Saccharomyces pastorianus
ctcctttgtgctaggcgcaaactct

SEQ ID NO: 172879 - DNA, 25 bp, Saccharomyces pastorianus
gtacttttctgctgtgggccaagca

SEQ ID NO: 172880 - DNA, 25 bp, Saccharomyces pastorianus
gatgcttcagtgaaacagggtcatt

SEQ ID NO: 172881 - DNA, 25 bp, Saccharomyces pastorianus
actacttccaatgtggagctctcca

SEQ ID NO: 172882 - DNA, 25 bp, Saccharomyces pastorianus
gggccaagcactcttcagcttaaga

SEQ ID NO: 172883 - DNA, 25 bp, Saccharomyces pastorianus
gaaggccttgccatggctaagaaaa

SEQ ID NO: 172884 - DNA, 25 bp, Saccharomyces pastorianus
taagctatgaagaaggccttgccat

SEQ ID NO: 172885 - DNA, 25 bp, Saccharomyces pastorianus
tcaacgtttccagtggcaacaacaa

SEQ ID NO: 172886 - DNA, 25 bp, Saccharomyces pastorianus
gacatcaacgtttccagtggcaaca

SEQ ID NO: 172887 - DNA, 25 bp, Saccharomyces pastorianus
acagtaactctaatgctaagaatct

SEQ ID NO: 172888 - DNA, 25 bp, Saccharomyces pastorianus
tatccaacaacaggacatcaacgtt

SEQ ID NO: 172889 - DNA, 25 bp, Saccharomyces pastorianus
cgaatcgaacgctatcacaccgaac

SEQ ID NO: 172890 - DNA, 25 bp, Saccharomyces pastorianus
gaagaaggccttgccatggctaaga

SEQ ID NO: 172891 - DNA, 25 bp, Saccharomyces pastorianus
gaaaacgaatcgaacgctatcacac

SEQ ID NO: 172892 - DNA, 25 bp, Saccharomyces pastorianus
gccttgccatggctaagaaaattgg

SEQ ID NO: 172893 - DNA, 25 bp, Saccharomyces pastorianus
gcgctgaaatgcgatttgagaaaca

SEQ ID NO: 172894 - DNA, 25 bp, Saccharomyces pastorianus
agctgctaaattcgaaacctactta

SEQ ID NO: 172895 - DNA, 25 bp, Saccharomyces pastorianus
tcctcgttggaggtttttacgcttg

SEQ ID NO: 172896 - DNA, 25 bp, Saccharomyces pastorianus
gtgatatttcattgtactgggtcca

SEQ ID NO: 172897 - DNA, 25 bp, Saccharomyces pastorianus
tcattgtactgggtccaagaatagg

SEQ ID NO: 172898 - DNA, 25 bp, Saccharomyces pastorianus
gggaccaaaagtagctgctaaattc

SEQ ID NO: 172899 - DNA, 25 bp, Saccharomyces pastorianus
ttgagagttgcatcctcgttggagg

SEQ ID NO: 172900 - DNA, 25 bp, Saccharomyces pastorianus
gtaagtttgagagttgcatcctcgt

SEQ ID NO: 172901 - DNA, 25 bp, Saccharomyces pastorianus
gctaaattcgaaacctacttacaag

SEQ ID NO: 172902 - DNA, 25 bp, Saccharomyces pastorianus
gtttttacgcttgggagacccattg

SEQ ID NO: 172903 - DNA, 25 bp, Saccharomyces pastorianus
ttacgcttgggagacccattgtaga

SEQ ID NO: 172904 - DNA, 25 bp, Saccharomyces pastorianus
tctcaattcgtcaaagtgatatttc

SEQ ID NO: 172905 - DNA, 25 bp, Saccharomyces pastorianus
gctaacggttaccaatgatccaatt

SEQ ID NO: 172906 - DNA, 25 bp, Saccharomyces pastorianus
gttaccaatgatccaattcccatat

SEQ ID NO: 172907 - DNA, 25 bp, Saccharomyces pastorianus
acggttaccaatgatccaattccca

SEQ ID NO: 172908 - DNA, 25 bp, Saccharomyces pastorianus
taacggttaccaatgatccaattcc

SEQ ID NO: 172909 - DNA, 25 bp, Saccharomyces pastorianus
cagctaacggttaccaatgatccaa

SEQ ID NO: 172910 - DNA, 25 bp, Saccharomyces pastorianus
ggttaccaatgatccaattcccata

SEQ ID NO: 172911 - DNA, 25 bp, Saccharomyces pastorianus
aatgatccaattcccatatttaaga

SEQ ID NO: 172912 - DNA, 25 bp, Saccharomyces pastorianus
gatccaattcccatatttaagaagg

SEQ ID NO: 172913 - DNA, 25 bp, Saccharomyces pastorianus
ctcagctaacggttaccaatgatcc

SEQ ID NO: 172914 - DNA, 25 bp, Saccharomyces pastorianus
accaatgatccaattcccatattta

SEQ ID NO: 172915 - DNA, 25 bp, Saccharomyces pastorianus
cggttaccaatgatccaattcccat

SEQ ID NO: 172916 - DNA, 25 bp, Saccharomyces pastorianus
atattcgtgccaattcctcacaata

SEQ ID NO: 172917 - DNA, 25 bp, Saccharomyces pastorianus
acttccacgaccttcgacagagatc

SEQ ID NO: 172918 - DNA, 25 bp, Saccharomyces pastorianus
gtaggaccacgttgaaccaaatgat

SEQ ID NO: 172919 - DNA, 25 bp, Saccharomyces pastorianus
gaccttcgacagagatccaaatgac

SEQ ID NO: 172920 - DNA, 25 bp, Saccharomyces pastorianus
cctagtagtgtgtatgctgacctgg

SEQ ID NO: 172921 - DNA, 25 bp, Saccharomyces pastorianus
aattcctcacaatacacttccacga

SEQ ID NO: 172922 - DNA, 25 bp, Saccharomyces pastorianus
acagccaaagaaactaccctagtag

SEQ ID NO: 172923 - DNA, 25 bp, Saccharomyces pastorianus
tcgaaatttcgtgagctttgcgctt

SEQ ID NO: 172924 - DNA, 25 bp, Saccharomyces pastorianus
gacaataagttgaaagccagaatgc

SEQ ID NO: 172925 - DNA, 25 bp, Saccharomyces pastorianus
gacctggtaccaactcgaaatttcg

SEQ ID NO: 172926 - DNA, 25 bp, Saccharomyces pastorianus
agtgtgtatgctgacctggtaccaa

SEQ ID NO: 172927 - DNA, 25 bp, Saccharomyces pastorianus
gttccaggaattcacactcaataaa

SEQ ID NO: 172928 - DNA, 25 bp, Saccharomyces pastorianus
gataaaccgctatatcgcaagggta

SEQ ID NO: 172929 - DNA, 25 bp, Saccharomyces pastorianus
gaacagtctctgcttcattatacaa

SEQ ID NO: 172930 - DNA, 25 bp, Saccharomyces pastorianus
gctatacctcaatatgcactccata

SEQ ID NO: 172931 - DNA, 25 bp, Saccharomyces pastorianus
tctcgccatgtttcctttattgatt

SEQ ID NO: 172932 - DNA, 25 bp, Saccharomyces pastorianus
gactatgtcttttgcagcctttgta

SEQ ID NO: 172933 - DNA, 25 bp, Saccharomyces pastorianus
gctatttgtgtttcgatgtgttcca

SEQ ID NO: 172934 - DNA, 25 bp, Saccharomyces pastorianus
acatgtttgttcaagccggtctgat

SEQ ID NO: 172935 - DNA, 25 bp, Saccharomyces pastorianus
atactgtaccgttactagccatctt

SEQ ID NO: 172936 - DNA, 25 bp, Saccharomyces pastorianus
attacattgctcttgggaaatccat

SEQ ID NO: 172937 - DNA, 25 bp, Saccharomyces pastorianus
actagccatcttgcgtttttggaaa

SEQ ID NO: 172938 - DNA, 25 bp, Saccharomyces pastorianus
acatctttaccctgatctactatca

SEQ ID NO: 172939 - DNA, 25 bp, Saccharomyces pastorianus
tctttaccctgatctactatcaata

SEQ ID NO: 172940 - DNA, 25 bp, Saccharomyces pastorianus
caccatacatctttaccctgatcta

SEQ ID NO: 172941 - DNA, 25 bp, Saccharomyces pastorianus
accatacatctttaccctgatctac

SEQ ID NO: 172942 - DNA, 25 bp, Saccharomyces pastorianus
tacatctttaccctgatctactatc

SEQ ID NO: 172943 - DNA, 25 bp, Saccharomyces pastorianus
catctttaccctgatctactatcaa

SEQ ID NO: 172944 - DNA, 25 bp, Saccharomyces pastorianus
tcaataccacaccatacatctttac

SEQ ID NO: 172945 - DNA, 25 bp, Saccharomyces pastorianus
acaccatacatctttaccctgatct

SEQ ID NO: 172946 - DNA, 25 bp, Saccharomyces pastorianus
catacatctttaccctgatctacta

SEQ ID NO: 172947 - DNA, 25 bp, Saccharomyces pastorianus
ctcaataccacaccatacatcttta

SEQ ID NO: 172948 - DNA, 25 bp, Saccharomyces pastorianus
atctttaccctgatctactatcaat

SEQ ID NO: 172949 - DNA, 25 bp, Saccharomyces pastorianus
aaaccagcggtagattctcagccaa

SEQ ID NO: 172950 - DNA, 25 bp, Saccharomyces pastorianus
ggaagcttctaaacctgcgttctca

SEQ ID NO: 172951 - DNA, 25 bp, Saccharomyces pastorianus
atgcaaacaaacctgccttttcttt

SEQ ID NO: 172952 - DNA, 25 bp, Saccharomyces pastorianus
aatagtaacacaactcctgcttcca

SEQ ID NO: 172953 - DNA, 25 bp, Saccharomyces pastorianus
caagtctttcatttggcaccaagcc

SEQ ID NO: 172954 - DNA, 25 bp, Saccharomyces pastorianus
tcctttggtgctacaacggcggaaa

SEQ ID NO: 172955 - DNA, 25 bp, Saccharomyces pastorianus
tctcattcggcgctaagcttggtga

SEQ ID NO: 172956 - DNA, 25 bp, Saccharomyces pastorianus
cctgccttttcttttggtgcaaact

SEQ ID NO: 172957 - DNA, 25 bp, Saccharomyces pastorianus
aaccatctaaaactgctttctcctt

SEQ ID NO: 172958 - DNA, 25 bp, Saccharomyces pastorianus
tgacacagcaaagccggcattttcc

SEQ ID NO: 172959 - DNA, 25 bp, Saccharomyces pastorianus
ggagtttcccaaggtacacagttag

SEQ ID NO: 172960 - DNA, 25 bp, Saccharomyces pastorianus
aggatcttatttccggccgtgtccg

SEQ ID NO: 172961 - DNA, 25 bp, Saccharomyces pastorianus
gaaccaccggaccaatgaaacgcga

SEQ ID NO: 172962 - DNA, 25 bp, Saccharomyces pastorianus
ggcgaaccaccggaccaatgaaacg

SEQ ID NO: 172963 - DNA, 25 bp, Saccharomyces pastorianus
atgcaaggatcttatttccggccgt

SEQ ID NO: 172964 - DNA, 25 bp, Saccharomyces pastorianus
gccgaggctcggtgtgccttttagc

SEQ ID NO: 172965 - DNA, 25 bp, Saccharomyces pastorianus
cggtgtgccttttagctgcatttag

SEQ ID NO: 172966 - DNA, 25 bp, Saccharomyces pastorianus
gaaggcgaaccaccggaccaatgaa

SEQ ID NO: 172967 - DNA, 25 bp, Saccharomyces pastorianus
ggctcggtgtgccttttagctgcat

SEQ ID NO: 172968 - DNA, 25 bp, Saccharomyces pastorianus
gcaaggatcttatttccggccgtgt

SEQ ID NO: 172969 - DNA, 25 bp, Saccharomyces pastorianus
cgcgttctcattggctgggcgctcg

SEQ ID NO: 172970 - DNA, 25 bp, Saccharomyces pastorianus
cggaccaatgaaacgcgagagcgca

SEQ ID NO: 172971 - DNA, 25 bp, Saccharomyces pastorianus
taaagcctttattatgtgtggtttc

SEQ ID NO: 172972 - DNA, 25 bp, Saccharomyces pastorianus
gcctttattatgtgtggtttcaaat

SEQ ID NO: 172973 - DNA, 25 bp, Saccharomyces pastorianus
attatgtgtggtttcaaattctatt

SEQ ID NO: 172974 - DNA, 25 bp, Saccharomyces pastorianus
aaagcctttattatgtgtggtttca

SEQ ID NO: 172975 - DNA, 25 bp, Saccharomyces pastorianus
ttatgtgtggtttcaaattctattt

SEQ ID NO: 172976 - DNA, 25 bp, Saccharomyces pastorianus
tattatgtgtggtttcaaattctat

SEQ ID NO: 172977 - DNA, 25 bp, Saccharomyces pastorianus
atgtgtggtttcaaattctatttta

SEQ ID NO: 172978 - DNA, 25 bp, Saccharomyces pastorianus
tgtgtggtttcaaattctattttac

SEQ ID NO: 172979 - DNA, 25 bp, Saccharomyces pastorianus
ctttattatgtgtggtttcaaattc

SEQ ID NO: 172980 - DNA, 25 bp, Saccharomyces pastorianus
agcctttattatgtgtggtttcaaa

SEQ ID NO: 172981 - DNA, 25 bp, Saccharomyces pastorianus
aagcctttattatgtgtggtttcaa

SEQ ID NO: 172982 - DNA, 25 bp, Saccharomyces pastorianus
agttttaccaggtgcttcaactgct

SEQ ID NO: 172983 - DNA, 25 bp, Saccharomyces pastorianus
taccaggtgcttcaactgctttaac

SEQ ID NO: 172984 - DNA, 25 bp, Saccharomyces pastorianus
catatctagttttaccaggtgcttc

SEQ ID NO: 172985 - DNA, 25 bp, Saccharomyces pastorianus
aactggtaccctatatatttactgg

SEQ ID NO: 172986 - DNA, 25 bp, Saccharomyces pastorianus
gtgcttcaactgctttaactggtac

SEQ ID NO: 172987 - DNA, 25 bp, Saccharomyces pastorianus
tttaccaggtgcttcaactgcttta

SEQ ID NO: 172988 - DNA, 25 bp, Saccharomyces pastorianus
gcttcaactgctttaactggtaccc

SEQ ID NO: 172989 - DNA, 25 bp, Saccharomyces pastorianus
ctgctttaactggtaccctatatat

SEQ ID NO: 172990 - DNA, 25 bp, Saccharomyces pastorianus
gtcatatctagttttaccaggtgct

SEQ ID NO: 172991 - DNA, 25 bp, Saccharomyces pastorianus
aggtgcttcaactgctttaactggt

SEQ ID NO: 172992 - DNA, 25 bp, Saccharomyces pastorianus
caactgctttaactggtaccctata

SEQ ID NO: 172993 - DNA, 25 bp, Saccharomyces pastorianus
tgttgagataagaagccactatgct

SEQ ID NO: 172994 - DNA, 25 bp, Saccharomyces pastorianus
gaaggcctacgatgagatgaagaaa

SEQ ID NO: 172995 - DNA, 25 bp, Saccharomyces pastorianus
aagaagccactatgctataagtaag

SEQ ID NO: 172996 - DNA, 25 bp, Saccharomyces pastorianus
aagaaggcctacgatgagatgaaga

SEQ ID NO: 172997 - DNA, 25 bp, Saccharomyces pastorianus
gaagccactatgctataagtaagaa

SEQ ID NO: 172998 - DNA, 25 bp, Saccharomyces pastorianus
tgctataagtaagaaggcctacgat

SEQ ID NO: 172999 - DNA, 25 bp, Saccharomyces pastorianus
gagataagaagccactatgctataa

SEQ ID NO: 173000 - DNA, 25 bp, Saccharomyces pastorianus
ctatgctataagtaagaaggcctac

SEQ ID NO: 173001 - DNA, 25 bp, Saccharomyces pastorianus
gtaagaaggcctacgatgagatgaa

SEQ ID NO: 173002 - DNA, 25 bp, Saccharomyces pastorianus
ggatgttgagataagaagccactat

SEQ ID NO: 173003 - DNA, 25 bp, Saccharomyces pastorianus
gataagaagccactatgctataagt

SEQ ID NO: 173004 - DNA, 25 bp, Saccharomyces pastorianus
gatgagaatggtaagccccttcctc

SEQ ID NO: 173005 - DNA, 25 bp, Saccharomyces pastorianus
gagtacgttttctaagaccaatcca

SEQ ID NO: 173006 - DNA, 25 bp, Saccharomyces pastorianus
gtagcatcctaattgagagtctcat

SEQ ID NO: 173007 - DNA, 25 bp, Saccharomyces pastorianus
ggcttaccagactcaccaatttttg

SEQ ID NO: 173008 - DNA, 25 bp, Saccharomyces pastorianus
tcctcctttagtggtccagcttgga

SEQ ID NO: 173009 - DNA, 25 bp, Saccharomyces pastorianus
tggcaaaacctcaaacttgtagcat

SEQ ID NO: 173010 - DNA, 25 bp, Saccharomyces pastorianus
agcgtgattggttcttttacaagcc

SEQ ID NO: 173011 - DNA, 25 bp, Saccharomyces pastorianus
ttgaaacttcctggcttaccagact

SEQ ID NO: 173012 - DNA, 25 bp, Saccharomyces pastorianus
tattaccgatttgctcatcaaccac

SEQ ID NO: 173013 - DNA, 25 bp, Saccharomyces pastorianus
ttgagagtctcataatggccctaga

SEQ ID NO: 173014 - DNA, 25 bp, Saccharomyces pastorianus
actgctctacagaacacaagtgatt

SEQ ID NO: 173015 - DNA, 25 bp, Saccharomyces pastorianus
tactggatttagctgaatagagacg

SEQ ID NO: 173016 - DNA, 25 bp, Saccharomyces pastorianus
agggcttgtccttattaataaacag

SEQ ID NO: 173017 - DNA, 25 bp, Saccharomyces pastorianus
taagtgctactggatttagctgaat

SEQ ID NO: 173018 - DNA, 25 bp, Saccharomyces pastorianus
ggagcaagataagaaagccgatttt

SEQ ID NO: 173019 - DNA, 25 bp, Saccharomyces pastorianus
atgaagggcttgtccttattaataa

SEQ ID NO: 173020 - DNA, 25 bp, Saccharomyces pastorianus
atgacttgaatttagatgagatcga

SEQ ID NO: 173021 - DNA, 25 bp, Saccharomyces pastorianus
gaatgttataagtgctactggattt

SEQ ID NO: 173022 - DNA, 25 bp, Saccharomyces pastorianus
gatttagctgaatagagacggagga

SEQ ID NO: 173023 - DNA, 25 bp, Saccharomyces pastorianus
gatcgagaatgttataagtgctact

SEQ ID NO: 173024 - DNA, 25 bp, Saccharomyces pastorianus
ggcttgtccttattaataaacagaa

SEQ ID NO: 173025 - DNA, 25 bp, Saccharomyces pastorianus
tgaatagagacggaggagcaagata

SEQ ID NO: 173026 - DNA, 25 bp, Saccharomyces pastorianus
gtgtaagtaaggaagctcaagtcaa

SEQ ID NO: 173027 - DNA, 25 bp, Saccharomyces pastorianus
agcaaatactggaaatgtcacccat

SEQ ID NO: 173028 - DNA, 25 bp, Saccharomyces pastorianus
atactggaaatgtcacccataagga

SEQ ID NO: 173029 - DNA, 25 bp, Saccharomyces pastorianus
gtaaggaagctcaagtcaacaaaag

SEQ ID NO: 173030 - DNA, 25 bp, Saccharomyces pastorianus
ttgcccgaaagtgccgatagaactt

SEQ ID NO: 173031 - DNA, 25 bp, Saccharomyces pastorianus
actatttagacttggtgtgtaagta

SEQ ID NO: 173032 - DNA, 25 bp, Saccharomyces pastorianus
agtgccgatagaactttcattgaag

SEQ ID NO: 173033 - DNA, 25 bp, Saccharomyces pastorianus
acccatttgccatcaaagcaaatac

SEQ ID NO: 173034 - DNA, 25 bp, Saccharomyces pastorianus
gaactttcattgaagtagataaact

SEQ ID NO: 173035 - DNA, 25 bp, Saccharomyces pastorianus
gccgatagaactttcattgaagtag

SEQ ID NO: 173036 - DNA, 25 bp, Saccharomyces pastorianus
ctggaaatgtcacccataaggatcc

SEQ ID NO: 173037 - DNA, 25 bp, Saccharomyces pastorianus
tttccattgtggtacctgacgtttg

SEQ ID NO: 173038 - DNA, 25 bp, Saccharomyces pastorianus
gaaaagagtgctcgcgctttcttct

SEQ ID NO: 173039 - DNA, 25 bp, Saccharomyces pastorianus
tctccgttgattggccgcgggaccg

SEQ ID NO: 173040 - DNA, 25 bp, Saccharomyces pastorianus
gcgccctagcttcacgataagcaga

SEQ ID NO: 173041 - DNA, 25 bp, Saccharomyces pastorianus
tgtggtacctgacgtttggagaaaa

SEQ ID NO: 173042 - DNA, 25 bp, Saccharomyces pastorianus
gcctgaagccggttctaccagaaaa

SEQ ID NO: 173043 - DNA, 25 bp, Saccharomyces pastorianus
tgataacagcccctctccgttgatt

SEQ ID NO: 173044 - DNA, 25 bp, Saccharomyces pastorianus
ttttttcagcctgaagccggttcta

SEQ ID NO: 173045 - DNA, 25 bp, Saccharomyces pastorianus
tcttccgctcatttccattgtggta

SEQ ID NO: 173046 - DNA, 25 bp, Saccharomyces pastorianus
gcactcaaaatacgtgggccggttc

SEQ ID NO: 173047 - DNA, 25 bp, Saccharomyces pastorianus
gttctaccagaaaagagtgctcgcg

SEQ ID NO: 173048 - DNA, 25 bp, Saccharomyces pastorianus
atattcacaatcagacaccacggct

SEQ ID NO: 173049 - DNA, 25 bp, Saccharomyces pastorianus
tttacttgaaagacaggcgcaacgt

SEQ ID NO: 173050 - DNA, 25 bp, Saccharomyces pastorianus
agatgtcgtttccaagcagctttac

SEQ ID NO: 173051 - DNA, 25 bp, Saccharomyces pastorianus
gatgcacctaaatcgtatgtctcta

SEQ ID NO: 173052 - DNA, 25 bp, Saccharomyces pastorianus
gtcggatctggaaagatgtcgtttc

SEQ ID NO: 173053 - DNA, 25 bp, Saccharomyces pastorianus
gatgtgctagaaagtgaaacctcgg

SEQ ID NO: 173054 - DNA, 25 bp, Saccharomyces pastorianus
gtatgtctctagttccaagtcggat

SEQ ID NO: 173055 - DNA, 25 bp, Saccharomyces pastorianus
gaaacctcggaagatgcacctaaat

SEQ ID NO: 173056 - DNA, 25 bp, Saccharomyces pastorianus
cacggctatcggtgcacagtgggat

SEQ ID NO: 173057 - DNA, 25 bp, Saccharomyces pastorianus
taccgctattttataaaccttattg

SEQ ID NO: 173058 - DNA, 25 bp, Saccharomyces pastorianus
gtgaaaacaattgttaccgctattt

SEQ ID NO: 173059 - DNA, 25 bp, Saccharomyces pastorianus
aacggctggtcgctgaaatcatttc

SEQ ID NO: 173060 - DNA, 25 bp, Saccharomyces pastorianus
tctaggcgactatatcatctccggg

SEQ ID NO: 173061 - DNA, 25 bp, Saccharomyces pastorianus
gtaagattcagaaccccatcaacaa

SEQ ID NO: 173062 - DNA, 25 bp, Saccharomyces pastorianus
gttcaatattgcgtttctgcgtcaa

SEQ ID NO: 173063 - DNA, 25 bp, Saccharomyces pastorianus
gcacagggcacgagtttcccataga

SEQ ID NO: 173064 - DNA, 25 bp, Saccharomyces pastorianus
agattgacacactggccgtcaggta

SEQ ID NO: 173065 - DNA, 25 bp, Saccharomyces pastorianus
gggaaatacctctgcccagattaat

SEQ ID NO: 173066 - DNA, 25 bp, Saccharomyces pastorianus
tattcatttcattgaggacccggca

SEQ ID NO: 173067 - DNA, 25 bp, Saccharomyces pastorianus
caggtaatggtctcagcgtgggcac

SEQ ID NO: 173068 - DNA, 25 bp, Saccharomyces pastorianus
gaggacccggcaaacgtaagattca

SEQ ID NO: 173069 - DNA, 25 bp, Saccharomyces pastorianus
gggtctcacgacactacattaagat

SEQ ID NO: 173070 - DNA, 25 bp, Saccharomyces pastorianus
cttgtgcttgtaccgcaagggattt

SEQ ID NO: 173071 - DNA, 25 bp, Saccharomyces pastorianus
gtcttgtgcttgtaccgcaagggat

SEQ ID NO: 173072 - DNA, 25 bp, Saccharomyces pastorianus
gtgtcgtcttgtgcttgtaccgcaa

SEQ ID NO: 173073 - DNA, 25 bp, Saccharomyces pastorianus
ctgaaagtatgtaagttgcgcagtc

SEQ ID NO: 173074 - DNA, 25 bp, Saccharomyces pastorianus
attccctctgtggacgagcatggcc

SEQ ID NO: 173075 - DNA, 25 bp, Saccharomyces pastorianus
gtaccgcaagggatttagatatatt

SEQ ID NO: 173076 - DNA, 25 bp, Saccharomyces pastorianus
gtggacgagcatggcctgaaagtat

SEQ ID NO: 173077 - DNA, 25 bp, Saccharomyces pastorianus
aacaacggcgttgcaatgtggaaat

SEQ ID NO: 173078 - DNA, 25 bp, Saccharomyces pastorianus
tggcctgaaagtatgtaagttgcgc

SEQ ID NO: 173079 - DNA, 25 bp, Saccharomyces pastorianus
gacgagcatggcctgaaagtatgta

SEQ ID NO: 173080 - DNA, 25 bp, Saccharomyces pastorianus
attggtgtcgtcttgtgcttgtacc

SEQ ID NO: 173081 - DNA, 25 bp, Saccharomyces pastorianus
ttttaatcgcgagtatgtccgcggc

SEQ ID NO: 173082 - DNA, 25 bp, Saccharomyces pastorianus
gaaaactttttaatcgcgagtatgt

SEQ ID NO: 173083 - DNA, 25 bp, Saccharomyces pastorianus
ggaaaactttttaatcgcgagtatg

SEQ ID NO: 173084 - DNA, 25 bp, Saccharomyces pastorianus
gcttttactttgcatgcaaggctca

SEQ ID NO: 173085 - DNA, 25 bp, Saccharomyces pastorianus
tgcaaggctcagtttgataaccttt

SEQ ID NO: 173086 - DNA, 25 bp, Saccharomyces pastorianus
gcggcttttactttgcatgcaaggc

SEQ ID NO: 173087 - DNA, 25 bp, Saccharomyces pastorianus
ctttgcatgcaaggctcagtttgat

SEQ ID NO: 173088 - DNA, 25 bp, Saccharomyces pastorianus
cgcggcttttactttgcatgcaagg

SEQ ID NO: 173089 - DNA, 25 bp, Saccharomyces pastorianus
ctttttaatcgcgagtatgtccgcg

SEQ ID NO: 173090 - DNA, 25 bp, Saccharomyces pastorianus
gcatgcaaggctcagtttgataacc

SEQ ID NO: 173091 - DNA, 25 bp, Saccharomyces pastorianus
caaggctcagtttgataacctttgg

SEQ ID NO: 173092 - DNA, 25 bp, Saccharomyces pastorianus
cgactaccattgttcattctctagt

SEQ ID NO: 173093 - DNA, 25 bp, Saccharomyces pastorianus
ttctctagtactcggaatgcggaag

SEQ ID NO: 173094 - DNA, 25 bp, Saccharomyces pastorianus
gcgctggattcaatggttaggcctt

SEQ ID NO: 173095 - DNA, 25 bp, Saccharomyces pastorianus
tagtactcggaatgcggaagacgta

SEQ ID NO: 173096 - DNA, 25 bp, Saccharomyces pastorianus
ctaccattgttcattctctagtact

SEQ ID NO: 173097 - DNA, 25 bp, Saccharomyces pastorianus
attgttcattctctagtactcggaa

SEQ ID NO: 173098 - DNA, 25 bp, Saccharomyces pastorianus
gactaccattgttcattctctagta

SEQ ID NO: 173099 - DNA, 25 bp, Saccharomyces pastorianus
accattgttcattctctagtactcg

SEQ ID NO: 173100 - DNA, 25 bp, Saccharomyces pastorianus
taccattgttcattctctagtactc

SEQ ID NO: 173101 - DNA, 25 bp, Saccharomyces pastorianus
actaccattgttcattctctagtac

SEQ ID NO: 173102 - DNA, 25 bp, Saccharomyces pastorianus
ccattgttcattctctagtactcgg

SEQ ID NO: 173103 - DNA, 25 bp, Saccharomyces pastorianus
gcaacgtatacggtgacgattcaac

SEQ ID NO: 173104 - DNA, 25 bp, Saccharomyces pastorianus
tcaaacagggcgcaacgtatacggt

SEQ ID NO: 173105 - DNA, 25 bp, Saccharomyces pastorianus
acgacgccagacgattgcaggaacg

SEQ ID NO: 173106 - DNA, 25 bp, Saccharomyces pastorianus
gggcgcaacgtatacggtgacgatt

SEQ ID NO: 173107 - DNA, 25 bp, Saccharomyces pastorianus
acgccagacgattgcaggaacgagc

SEQ ID NO: 173108 - DNA, 25 bp, Saccharomyces pastorianus
gtgacgattcaacgataactagtgt

SEQ ID NO: 173109 - DNA, 25 bp, Saccharomyces pastorianus
aacagggcgcaacgtatacggtgac

SEQ ID NO: 173110 - DNA, 25 bp, Saccharomyces pastorianus
gtcagtgggacgacgccagacgatt

SEQ ID NO: 173111 - DNA, 25 bp, Saccharomyces pastorianus
ggacgacgccagacgattgcaggaa

SEQ ID NO: 173112 - DNA, 25 bp, Saccharomyces pastorianus
atacggtgacgattcaacgataact

SEQ ID NO: 173113 - DNA, 25 bp, Saccharomyces pastorianus
gattcaacgataactagtgtcagtg

SEQ ID NO: 173114 - DNA, 25 bp, Saccharomyces pastorianus
cgtcccaggacacggaaaactcact

SEQ ID NO: 173115 - DNA, 25 bp, Saccharomyces pastorianus
ggacacggaaaactcactcattata

SEQ ID NO: 173116 - DNA, 25 bp, Saccharomyces pastorianus
cacgtcccaggacacggaaaactca

SEQ ID NO: 173117 - DNA, 25 bp, Saccharomyces pastorianus
cggaaaactcactcattatagtatc

SEQ ID NO: 173118 - DNA, 25 bp, Saccharomyces pastorianus
cccaggacacggaaaactcactcat

SEQ ID NO: 173119 - DNA, 25 bp, Saccharomyces pastorianus
tgccactcgctatttcgtgaccacg

SEQ ID NO: 173120 - DNA, 25 bp, Saccharomyces pastorianus
ccaggacacggaaaactcactcatt

SEQ ID NO: 173121 - DNA, 25 bp, Saccharomyces pastorianus
gacacggaaaactcactcattatag

SEQ ID NO: 173122 - DNA, 25 bp, Saccharomyces pastorianus
acggaaaactcactcattatagtat

SEQ ID NO: 173123 - DNA, 25 bp, Saccharomyces pastorianus
tgaccacgtcccaggacacggaaaa

SEQ ID NO: 173124 - DNA, 25 bp, Saccharomyces pastorianus
tatccccttatggtgcttttctgaa

SEQ ID NO: 173125 - DNA, 885 bp, Saccharomyces pastorianus
acgtactactgtttgcatcgtagctttgcacaaatatcgaacgcaagaacttcttacagactctgttgtgaagcggtcggtctgattacggtagcagggttacatcgggaagaaacttacggatcccttacatttgaagaacagcaacttagacggaaactttattacttgcttctcatgacggagagatactatgccatatatcttcattgtgcgacgagcctggatgccacaatagcaccaccgcaacttgaacttgtaactgatcctcagctttctatggacagtttccttgaaatgattaggatatttaccgtgccgggaaaatgtttcttcgatgctttagccgctgactctacagatgcttcttgcactgaagagtcattgaaaaagatatggaacgaactccacacaacttcctcggaaatagagccatggtctaacggttacatagacatctcattttcccggcgttggattaggatactagcatggaagctagcttatcaaatgaggggtagcaacttttcattgaacgctaacaatgggcaaataccaatagaaattgcgagagatatgttaatagatacttacttaaccccagagaatctttacgatgtccatggtcccggggtaccagtgaaaacattagaaatagctactgctttggtggacattgtaggccagtatgatcataacatgaaattagaagcatggaatgttttgcatgatgtatgcaaatttgctttttctttaaaccactataacaatgatatgctgaagagattttccaccaaatgccagaatgccctaattactctgcccatttctaaacctttacaattggatggttatcccaaggataatgaagacatagacccttga

SEQ ID NO: 173126 - DNA, 360 bp, Saccharomyces pastorianus
atgacggccgagcctgctactaagaagatcaagctagaattaagcgatcctagtgaaccgcttactcaatctgatgtgatagcgtttcaaaaagaagctttgtttagatgtataaatcgtcgaagagtcgactttgaagccttgcgaaagcaatatgaactttcaagaagggagtgcatagatgtttcccgcaagttggcaaatattatggcgctgatagtaactttagctaggtttatcgaaacattctgcacagacgccaacgagaagcaactatgtagggaaatagcccaaggcgatgagacgttgatagttcagcgcagtgattctttcatgaagctactgactaaatatgggaag

SEQ ID NO: 173127 - DNA, 177 bp, Saccharomyces pastorianus
gagaagaaacatacaggcagcgttcatggcgtaaccaaaggctcaatgagcggcggtttaactcatgcaagcgatgatgatgatacagatgggaccattcctgacctgggtcgtgctgacgctgacgcgtcttatccatcaattgaagaactcacagatacccttaattccaccata

SEQ ID NO: 173128 - DNA, 213 bp, Saccharomyces pastorianus
atggaatcccaacaattatctcaaaattcacccaatcttcatggtagcgcctatgcttcggttacttctaaggaagtcccatcaaatcaagatccgttagccgtttcagcttccaatttaccggaatctgatagagattccactaaggttaattctcaacaagagacaacacctgggacatcagctgttccagagaaccatcatcatgtctct

SEQ ID NO: 173129 - DNA, 180 bp, Saccharomyces pastorianus
aatctgcaaagcaccatagaaaatactgaggatattacagtgaataaaattactagagaagatgccattagtttgtaccacttataccttcattatctaaaagacgtatttaaagtttttgagcaaagtttgccgaacttagaatatctaaccatcaactggtatacctacataaaataa

SEQ ID NO: 173130 - DNA, 111 bp, Saccharomyces pastorianus
gttgaatcagatactacttcacctagacactcgtctaccttcactgcacgaaaccaaaaccgacctggggatcctctagagtcgacctgcagcacaagcgtgcactgccgt

SEQ ID NO: 173131 - DNA, 1626 bp, Saccharomyces pastorianus
actttgtcgttccagaagtattttcattacccacttacttctccgctgggcaatatagtgagcattgttaatctgggtgcgttcatggcgtcgttatttgtctattctggcatcctggagccttgtagcaggaaaaaaatgctccaaataagcacaatgatatactctttgggtgcaattgttcaggtcttggctctaaaccaatggtgtctactactgggtagattcttactcggagtaggtatgggctttgccttttctatggtaataatttatcaattcgagtttccccttccctatataagaaaacggacattaatttccattcaatgcatctctagtgtcattgcgtattcattcggaatatggattaattgtgctttcagatatttgggctttgcatggaaataccctttgtcaacacatgtggcacttggaataatactaaacctaatgtcgttctatcttattttagagtccccttcgtggctgttgaagcaaaaaaacgacgtagaggcattggttttaatatcgaatgttttcgatgatggaaatttcgaagaaaaccaaactcagttgaaatttagggtcctgaaacgagacatattattaaagtcacaccttcaaaaaaactcctatccatatgcgtatatcttaaaggatttttcttcaataataaaattgttgataggtttccaacttctcacacgaacaaatggagtggatgctttcttgtattactcaccgttaatattacaacaaatggggagaggagaaagaaaatctatctatttaacgggacttaatgctttaatttacagcatcgtaatattagcatatgttcccttggtgttacggaaacgtaaagagaaaacgaatgtactcttaggttcgattgtgatgtgtgtattgctatttaccatatcttttacagactggtttcccaagagcacaacgaggtatatatcaatactatttgctgtttttctttttacgcacttcatcagttgggattctatagggtgggttatgaccattgagcttttacctcacttgtcacaggccccagtgatactactagtctcaaacttttattggatttttaagtggttcgtcagcttaataacccctatacttattgaccgtctgtcttggaagttttatcttattccatctttatcttcctttatttccattatatttgtgctaaagatttttcctatagaaacccgtgacgaaggattagattctgatgatgattctaccggaaatggtagcggtaaccatgatgatgtttttgacgatactggttctgaattctcctcctcaccatctttttccgcgtatcagataaacactctaggaagtagtatcaaacaaaataatcaagcctattcatctattcaaaatgagcaaattctacccaaaaacggaaacttatcgaaccagacacacggttctgcacaaaatgtttatttcattacatctgattcaggaccatcaaggactggagaatttttcagttttcataacagaaccgatccaaatatcagcgacaacattgctgcgaataaacccagttcaggtgggggccagaattcgcctggagacatggcagttgcctag

SEQ ID NO: 173132 - DNA, 645 bp, Saccharomyces pastorianus
ttctttacgaacagaggtattactgcatgctatacaaccacggcagattctagagcacacggtgtcgctgaacgattaaatcgtactttattaaacgattgtcgcacactgcttcattgcagtggtctaccaaatcatctatggttctcagcagtcgaattttctactataatcagaaattcattagtctcaccaaaaaacgataaatctgcaagacaacatgcaggtttagctggactggacattactactatactacctttcggtcaaccggttatagttaacaaccataatcccgactcgaaaatacatcctcgtggcattccaggttacgccttacatccgtcacgaaactcttatggctatattatctatcttccatcattaaaaaagacagtagatactgccaattacgttatattacaagacaaccaatccaaattggaccaattcaattatgatacactcacctttgatgatgatctcaatcgtttaacagcccataaccaatctttcattgaacaaaatgaaacagagcagtcatatgatcagaatacagaatctgatcatgactatcaatcggagattgaaataaactctgatcgacaagcttggatccggccagtaaggccaattcactgcacg

SEQ ID NO: 173133 - DNA, 666 bp, Saccharomyces pastorianus
atgtcgttttcattagggtctctaggatttttaacaaattttaagtttgaacatttcagggaggatttacctcggattatgaatcataaaatcaagacaaatttacggttgaggttggagtgcacaatttatcgtagacaccgccctgaagtagacccaaacacggggaagaaaatatgtgtggtggaaaaactaagcacacaccacattttgaacgaagtgaccatcgatcgtggtccaagtcctttcctatccatgttagaattgtatggtgacggctcattaatgaccgttgcgcaggcggacggactgattgctgctactccgactgggtccacggcctattctttgagtgcaggtgggtcattggtatgcccaaccgtcaatgcaatcgctttaacacccatttgtccacatgcattgagtttcagacccatcatcttaccagaaagtataaatttaaaagtgaaagtctcgatgaagtcaagggctccagcatgggcggcttttgatgggaaagatagaattgaattgcaaaaaggtgattttataaccatatgcgccagcccatatgcttttccaaccgtggaagcctcgcccgatgagtctattaacagtatcagtcgaaaactaaactggaatgtgagggaacaacaaaagtctttt

SEQ ID NO: 173134 - DNA, 501 bp, Saccharomyces pastorianus
atgcttggacatgctaacttccgaagtattcagaagtctcttaagaagaatgcagttacatatttgaaggaatcggatattgaatggtctaacgctagcacatatcaatgtcctgactgtctaatcggcaaaagcacgaaacatagacatgtcaaaggatcacgactaaagtaccaagaatcatatgagccttttcagtacttgcataccgatatatttggtcctgtacatcacttaccgaaaagtgcaccttcttactttatatcgtttacagatgagaaaaccagattccaatgggtgtacccattacacgaccgtcgtgaagaatctatcctcaatgtttttacatcgatattagcatttattaagaaccaattcaatgctcgcgttctagttatccagatggatcgtggctccgagtacactaacaaaactcttcataagttctttacgaacagaggtattactgcatgctatacaaccacggcagattctagagca

SEQ ID NO: 173135 - DNA, 207 bp, Saccharomyces pastorianus
aaccaagctgctcaatgtgcgggcgactttatcttacaacatgatgtacttgatgtaacatttgacaccttcatacaaggtctgtataattatttttacgagccacctggcgtcaaaaaattcttcaacgctatcatcgcagcgccaactcgtgcccacgaagatcgctactctgacaacgagccagaagataatacattacactag

SEQ ID NO: 173136 - DNA, 78 bp, Saccharomyces pastorianus
atggaatctatatttctatataccaatattacgattattcctcattccgttttatatgtttcattatcctattacatt

SEQ ID NO: 173137 - DNA, 120 bp, Saccharomyces pastorianus
atgaaccctttacaattagaccacgaaccagtccaaaaagtacgtgcaccaaaagaagttgatgccgacatatctgaatacaatattcttccatctcctgtacgatctcgtacgacccat

SEQ ID NO: 173138 - DNA, 114 bp, Saccharomyces pastorianus
ccagcagcgattgaagttaatttgaccattgtatttgttttgtttgttagtgctgatgtaatcttaacaagaaatagtgaaatgaaagcgcatacctcaaaggcatatagttga

SEQ ID NO: 173139 - DNA, 318 bp, Saccharomyces pastorianus
agagcgataacctatctgttgcactaccaattgaacgacacgctctacacaaaggctcaggttgatataccggaagatcgggcggatttgaaagttgggttgtggcttggcgcagacgtgatgctggaatatcccatcgacgaggccatagagttgttaaagaagaaactcgcggactccgaacagtctttaacggtgtccaccgaggacgtagagtttttgagggaaaatatcacgacaatggaggtcaattgcgcgcgattgtataactgggacgttcagagaaggcaagacttgaagcaggctcaagaagggact

SEQ ID NO: 173140 - DNA, 84 bp, Saccharomyces pastorianus
gggaatatagaagacgaatggactttaccctcaacaaagactatgctgtcattctccatgtcaaaactgggcgaattgggagcg

SEQ ID NO: 173141 - DNA, 5712 bp, Saccharomyces pastorianus
atgtcccaggatagaattttgttagatttagacgcagttaaccaaaggttaattctcttcaattctgcctttccctctgatgctattgaagcgcccttccactttagcaacaaggaatcaacttctgagaatttagacaatttagcaggaactatactacatagccgttccatcacaggtcatgttttcctttacaaacatatttttttagagatagtggcacgttggataaaggactccaaaaaaaaagattacgttcttgtaattgaaaagttggcaagtataattacaatatttcccgttgcaatgccattaattgaagactatttagataaagagaatgatcatttcatcactattcttcaaaatccatccacacaaaaggattccgacatgtttaaaatactattagcatactataggttactatatcacaataaagaagtatttgcacgcttcattcaacccgacattttataccaacttgtggatttactcaccaaagaacaagaaaatcaggttgttatatttttagcattaaaggttttatctttatacttagacatgggagaaaaaacattaaacgatatgctcgacacttatataaaatcacgcgattcattgttgggccattttgagggcgattctggaattgattacagcttcctcgaactgaacgaagctaagagatgtgcaaatttctctaaactacccagtgttccagaatgcttcactatagaaaaaaaatctagctacttcattattgagcctcaggatttgagtactaaggtcgcgtcaatctgtggcgttatcgtccctaaggtccacactatccacgacaaagtattctacccattaacctttgtccctactcataaaacggtttcctctcttcgtcaactcgggagaaagattcaaaattcaactccaataatgctcattggaaaagcgggatctggtaaaacctttttaatcaatgagctaagtaaatatatgggttgccatgactccattgtgaaaattcatttaggtgaacaaactgatgccaagttactgattggtacttatacctctggtgacaagccaggcacgtttgaatggagagctggtgttctcgctaccgcggtcaaagaagggagatgggtacttatagaagacatagataaagctcctacagatgttttatcaatacttttatcgcttttagaaaagcgcgaactaaccattccatccagaggagagactgtaaaggctgcaaatggtttccagttaatatcaactgttagaataaacgaagatcatcagaaggatagttccaataagatctataacttgaatatgattggtatgagaatctggaatgttattgaattagaggaacctagcgaagaggatttgacacacattttagcccaaaagtttcccattttgaccaaccttatccccaaactaatcgatacatacaaaaacgtcaaaagtatttatatgaacaccaagttcatttcattgaacaagggggcacacacaagagttgtatctgtaagagatttaattaagctgtgcgaaaggttagacatcctattcaaaaacaatggcatcaacaaacctgaccaactaatccagtcttctgtctacgacagtattttctccgaagccgccgactgtttcgctggcgctattggagaattcaaagctttggaacctattatacaagcaatcggcgagtcattagacattgcttcctcaaggatttcgttatttttgacccaacatgtgcccactttggaaaaccttgatgatagcattaaaattggaagagccgtattacttaaggaaaagctaaatatacaaaaaaaatcaatgaacagcacatcgttcgcatttacgaatcattctttaagactaatggaacagatttctgtttgtatacagatgactgaacctgttttactagtcggggaaacgggtaccgggaaaactacagtcgttcaacaacttgctaagatgttagcaaaaaaattaacggtaatcaatgtttcacaacaaacagaaactggtgatcttcttggtgggtacaaacccgtaaattctaaaacagttgcagttcctatacaagaaaattttgaaactctttttaatgctacattttccttaaagaagaacgagaagtttcacaagatgctacataggtgcttcaacaagaatcaatggaagaacgttgttaaactttggaacgaagcgtacaaaatggctcaaagcatattaaaaattacaaacactgaaaatgaaaacgaaaatgcaaagaagaagaaaagaagactcaatactcatgaaaaaaaattgttacttgacaaatgggctgacttcaatgactcagtgaagaagtttgaggcccagtctagctctattgaaaactcgtttgtcttcaattttgtcgagggttccttggtaaaggctatcagggctggggagtggctattgctcgatgaagtgaatttagcaaccgcagataccttagaaagtatttctgaccttctcaccgagcctgattctcgtagtattcttctttcagaaaagggtgacgctgagcctataaaagctcaccccgattttagaatatttgcttgtatgaaccccgctactgatgttggtaaaagagacttacctatgggtatcagatcaagatttaccgaaatatatgtacattctccggaacgtgatattactgatttgctttccataattgataaatatattggaaagtacagtgtcagcgatgaatgggtaggaaatgacatcgctgaactttaccttgaagccaaaaaactgtccgataacaatactatagttgatggctcaaaccaaaaaccacactttagtatccgtaccctgacgcgtacattgctttatgttactgatattattcatatctacggtctacgccgttccctgtatgatggattctgcatgagttttttgactttactggaccaaaaatctgaggccattctgaagccagtaatagaaaaattcacattggggaggctaaaaaatgtcaagtcaatcatgtcacagacacctccctctccaggaccagattatgttcagtttaagcattattggatgaaaaagggccctaatacaattcaagaacaagctcactatatcattacgccttttgttgaaaagaatatgatgaatttggtaagagctacatcaggcaaaagatttcctgtgcttattcaaggtccaacttcatcgggaaaaaccagtatgatcaaatatcttgcggatataacgggccataagtttgtccgtataaataaccatgagcatacagatttacaggaatatttaggtacatatgttaccgatgataccggaaagctgtcgtttaaggaaggtgttttagtcgaggcactacgaaaaggatattggattgttttggatgaattaaatcttgccccaaccgatgttttagaagccttaaataggttacttgacgataacagagaactttttattccagaaacacaagaagttgtacatcctcatcctgatttccttctttttgctacccagaatccacctgggatatacggtggccgtaaaattctttcaagagcttttaggaatcgttttctggagttgcacttcgacgatattccgcaagatgaattagaaattatcctacgtgagcgctgccaaattgccccatcatatgcaaagaaaatcgttgaagtataccgccaattatccatcgaacgttccgcttcaaggttgttcgaacagaaaaatagttttgcaactctacgtgatcttttccgctgggctttaagggacgcagtgggctatgagcagcttgctgccagtggctatatgcttcttgcagaaaggtgcagaactccacaagaaaaagttacagtcaaaaagactttagaaaaagtaatgaaagttaaattagatatggaccaatattatgcaagtctggaagataaatccttagaagccattggctctgttacttggacaaaaggaatgcgccgactatccgtcttagtttctagttgtttaaagaataaggagccagtactactggtaggtgaaactgggtgcggcaaaacaacaatttgccaattattggcgcaattcatgggtcgagaactgatcacactaaatgcccatcaaaacacagaaactggagacatattaggtgctcaaagacctgttcgtaacaggtctgaaattcaatataagctaataaaatccctaaaaacagcattgaatattgctaatgaccaagatgtagacttgaaagagttattacagctatattctaagtcagataataaaaatatagccgaagatgttcaactggaaatacaaaagctgagggatagtttgaatgttttatttgaatggagtgacgggcctctgattcaggctatgaggacgggaaatttttttctacttgatgaaatatcgctagcagatgattccgttcttgaaagactaaatagtgttttggagccagaaaggagtttgttgttagcagaacagggttcatccgatagccttgtaacggcttcagaaaactttcaattcttcgcaaccatgaaccctggtggagattacggtaaaaaagaattatctccagcgttaagaaatagatttactgaaatatgggtaccatccatggaagatttcaacgatgtaaacatgatcgtatcctcaaggcttttagaggacttgaaagatcttgctaatccaattgtgaaattctctgaatggtttggcaagaagctgggaggcggaaatgcaacaagtggtgtcatttctttacgtgacatacttgcatgggttgaatttattaataaagtgtttccgaaaatacagaacaagtcaactgccttaattcaaggtgcctcaatggtttttattgacgcccttggtacaaataacactgcttacttagctgaaaacgaaaatgatttaaagtcacttagaacagaatgtattatacaactattgaaactatgtggtgacaatttggaactacaacaaattgaaacgaacgaaattattgtgactcaggatgaattacaagtcggaatgttcaaaataccaagatttccagatgctcagtcttcatcctttaacttaaccgcccccactactgcctcaaacttagtaagggttgtacgggctatgcaagtacacaagccaattttacttgaaggtagtccaggtgttggtaaaacaagtttaatcaccgctcttgccaatattacaggaaataagcttacaagaatcaatttgtctgaacaaacggatctagtagatcttttcggtgcagacgctcctggtgagcgaagtggtgaatttttatggcacgatgctccgtttttaagagcaatgaagaaaggtgagtgggttctattagatgaaatgaatttagcctcccaatccgtcctagaagggttgaatgcctgtttagatcatcgaggcgaagcgtatatccccgagttggacatatcgttttcctgccaccccaattttctagtctttgctgctcaaaatcctcagtatcaaggtggtggtaggaaaggtcttcctaaatctttcgttaatcgatttagcgtggtatttattgacatgcttacatctgatgatctccttttgattgcaaaacacttatatccaagtattgaa

SEQ ID NO: 173142 - DNA, 192 bp, Saccharomyces pastorianus
atggaatcccaacaattatctcaaaattcacccactcttcatggtagcgcctatgcttcggttacttctaaggaagtcccatcaaatcaagatccgttagccgtttcagcttccaatttaccggaatttgatagagattccactaaggtaatctcaacaaggcaacaccctgggacatcagctgttccagag

SEQ ID NO: 173143 - DNA, 252 bp, Saccharomyces pastorianus
cacggcacttgcctcagcggtctataccctgtgccatttacgcataacgcccatcattatccacattttaatatctatatctcattcggcgaccccaaatattgtataactgcccttaatacatacgttataccacttttgcaccatatactaaccactcaatttatacacacttatgtcaatattacagaaaaattaccactaaaatcacctaaacataaaaatattctatccttcaacaataatacataa

SEQ ID NO: 173144 - DNA, 672 bp, Saccharomyces pastorianus
ttattagctcattatgttcctgaggaagaaactaccattatcagtggctacgagttagctaaagaaaccgacctggtactaagcaaaaaatattccaccttggaaaacaaggacatgaacattaaaactcatgtaaaagatggaatcattcacgtaaaaaaggatgacttaattgatcatcctacatatgatttcaaagtaaatgcaatacaaccaacttcttctaaaaaggttagactgaagaccaaagttgtaagcttgaaagatgctcataaacgaatgggacatacaggagttcaacaaattgaaaactccatcaaacataatcactacgaagaaagtattgatttaattaaagaaccaaatgaattttggtgtgaaacttgtaaagtttcaaaagccacgagaaggaaccattatacgggatccatgaacgaatacagtatcgataatgaacctggttcatcgtggtgcatggatatctttggtccagtatcaaactcgaactcggatacgaaaagatacatgtttattatggttgataacaatacaagatattgtatgacctccacacattttaataaaaatgctgaaactatcttggcacagatcagaagaacattcaatatgtggaaactcattgacagaaaagtcagaaatcattcagtcgac

SEQ ID NO: 173145 - DNA, 141 bp, Saccharomyces pastorianus
tctgggctggcatttaggattgcccacgaaatcggcctacatttgaatccagaagcatggagtaatgtttatgaagacgagctgtcaataatggattttgaagtgagaagtagaatcttattggggctgctacattgctga

SEQ ID NO: 173146 - DNA, 651 bp, Saccharomyces pastorianus
cctttcggccggaccaagctggtcgatcctaaaaaagtcataaactcaatgtttatatttaacagaaaacgtgatggtacacacaaagctagatttgttgcaagaggcgacattcaacaccccgatacatatgattctgatatgcaatccaataccgtacatcactatgcactgatgacgtcactgtcaatcgcattagacaacgactattatatcacacagctggacatatcctctgcttacttatatgctgatatcaaagaagaattatacataagacctccaccacatttaggtttgaatgataaattactacgtttgagaaaatcactctatggtttgaaacaaagtggtgcaaactggtatgaaaccattaaatcatatttaataaattggtgcgacatgcaagaagttcgcggatggtcatgcgtatttaagaatagtcaagtaacaatttgcttattcgttgatgatatgatattattcagcaaagacttaaatgcaaataagaaaatcataacaacactcaagaaacaatacgatacaaagataataaatctgggtgaaagtgataacgaaattcagtacgacatacttggattagagatcagatatcaaagaagcaagtacatgaaattaggtatggaaaaa

SEQ ID NO: 173147 - DNA, 576 bp, Saccharomyces pastorianus
atctataaaatcatacaatatttagtacaacatacgaatatcggaatacactatgacagagacctcaacaaagataagaaaatcactactataaccgatgcatcagttggaacagaatacgatgcacaatcaagaattggagttataatttggtatggaaagaatattttcaatgtatactcaaataaaagcaccaacaagtgcgtatcctcaaccgaagcggaacttcatgctatctatgaaggttatgcagactcagaaaccctgaaagcaaccttaacagaacttggagaaggtaaagataaagaaattacaatgattacggattctaaaccagctattgaaggcttaaaccggagctatctgcaacccaaacagaagttcacatggataaaaaccgaaataattaaagagaaactaaaagagaagactataaaactaataaaaatcaatggtaaagacaatatagcagatttactcacaaaaccagtatcaatttctgattttgatagatttattaaagtattaaataaccagataacaccacaggatattttggcctcaacggactattga

SEQ ID NO: 173148 - DNA, 204 bp, Saccharomyces pastorianus
atgttcgctggaacagtgattgatgaccaagtcagtgataaatttcataccgagcttatgtgtcttttcgatcaaggcaaagcagtcctcgttcgtaccgtaggttggccagaccttttcgtagttggcaatatcgtaacccatatcatcttgtggcgagtcgtaaaatggcgagatccaaatggcatcggcgccaagctcctt

SEQ ID NO: 173149 - DNA, 87 bp, Saccharomyces pastorianus
aatgatcacattaatgaatcaaccgtttcatcacaatacttaagcgatgacaacgaacttagtcttaggccagcaacagaaagaatc

SEQ ID NO: 173150 - DNA, 216 bp, Saccharomyces pastorianus
gatgtaagggcagagaaactagccatatcactattgattttatcattgtttctgatattccaattagtggctgagatttatctcaataatggtgatcagtaccatacagagactagcccctttacaagaagaagatcacatgtaacgcgtgtgcccaaccatgatgctagtttatctataccgtttttgacaagatcaaccagttttggcatgtag

SEQ ID NO: 173151 - DNA, 135 bp, Saccharomyces pastorianus
atgagacttagagatgaagtatcaggtaataatttatacgtatactacatcgagaccaagaagaacattgctgatgtgatgacaaaacctcttccgataaaaacatttaaactattaactaacaaatggattcat

SEQ ID NO: 173152 - DNA, 441 bp, Saccharomyces pastorianus
cttccaaacaatatgacaaacaatcaaatatgctggttagttcaggcgtcatattttgacatagcttctaacaatactggtaagacactgagatccggaagatttgaacctagtgatgaaatttctatgattttcagagacatcctggtcgaattaccaaatattgcggattcttatgaatacagtgacttggatctatcaacttacagcggacctgagccctatgatccagagtctgattactgtacagatatcatggatttgatgatgggcgtatatgatgaagaaggaaattatgttaagccaagatctgaagttgattctgctgctacaaactcaacagttcaacgtagatcttccgattctgacattgacgaatgcgttgacgagccaatgacgtcaaagcatgccggtataacaaaaatcagggaacttttgtaa

SEQ ID NO: 173153 - DNA, 123 bp, Saccharomyces pastorianus
aacaagtcagagcttttgacaaagagaaagaaggcttcaaacaaaaacctggtcataattgatacaggttcaggcgtcaatattacaaacaataggagattattacacgattatgaagacaac

SEQ ID NO: 173154 - DNA, 186 bp, Saccharomyces pastorianus
ataatattatgtatacagaatatactgaaagttctcctcgaggacataggaatcctcaaaatggaatttatatttttacatactaatattacgattgttcctcattccgttttatatgtttcgttatcctattacattatcaatttttgtatttcagcttcctctaacctcgatgacagcttctca

SEQ ID NO: 173155 - DNA, 270 bp, Saccharomyces pastorianus
atgaatctaaataaaccgtcccaatacaaacaacacagcgaatacaaaaatgtttctcgcacatctccaaacacgactaacacaaaggttacaactcgtaattatcatagaacaaatagttcaaaaccaagagcagcaaaagctcacaatattgctacatctagtaaattctcaagggtgaacaatgatcacattaatgaatcaaccgtttcatcacaatacttaagcgatgacaacgaacttagtcttaggccagcaacagaaagaatc

SEQ ID NO: 173156 - DNA, 312 bp, Saccharomyces pastorianus
acaagtttaaattcaactacaacgccaaggaccgctcgcaacaaaacagcactggcaacaacagcaacgagaacaataacgttatcaatctcaacagcaacaacaacaacaacaacaacaacaacaacaacaacaacaacaacaacaacaacaacaacagcaacagcaacggcaacagcaacggcaacagcaatagcaacaacatcatcatcagtagcagcagtggtggcggtgatggtattgatgacagcagtaataccacctcaaacaacaacagtaccactttcgcacttaacagaaagaaaaaaaatc

SEQ ID NO: 173157 - DNA, 90 bp, Saccharomyces pastorianus
atggaatcccaacaattacatcaaaattcaccaaatcttcatggtagcgcctatgcttcggttacttctaaggaagtcccatcaaatcag

SEQ ID NO: 173158 - DNA, 195 bp, Saccharomyces pastorianus
atggcaaatgctggaccaaacactaacggttctcaattcttcattaccactgtgccttgtccatggttggatggaaaacacgttgtctttggtgaggtaaccaaaggtatggacattgtcaaagcaatcgaatcatacggtactgcttctggtaaaccaagagctgaaatcgttatcgaagaagctggtgagtta

SEQ ID NO: 173159 - DNA, 141 bp, Saccharomyces pastorianus
attcagaagtctcttaagaagaatgcagttacatatttgaaggaatcggatattgaatggtctaacgctagcacatatcaatgtcctgactgtctaatcggcaaaagcacgaaacgggatcctctagagtcgaccgcagca

SEQ ID NO: 173160 - DNA, 612 bp, Saccharomyces pastorianus
atggattccgatgccacgtcacataatcaagatcattggcattcagacataaacagggcaggaacatcaatgtcaacgagtgatatcccaacagatttacatttagaacatatcggctctgtttcatcaactaataataatagtaacaatgccctaatcaaccacaaccctctgtcatctcatctttccaatccgtcatcttcattacgaaacaagaagagctctttgttggtagcttctaaccctgcgtttgcttcagatgttgaactctcgaagaagaaacctgccgtcatctccaataatatgcctacaagtaacattgccctttatcaaacagcgagatcggcgaatattcatggtccatcatcaacttccgcatctaaagcgttcagaaaggcttcggccttctccaataacacggcacccagcactagtaataacatcggctcgaatacacctccagctcctcttttacctctaccttcactatcacaacaaaataagccaaaaataatagagaggcccacaatgcacgtcactaattcaagagaaatacttttaggtgaaaacctgttagatgatacaaaggcgaagaatgctcccgcgaattca

SEQ ID NO: 173161 - DNA, 624 bp, Saccharomyces pastorianus
tttgatagagattccactaaggttaattctcaacaagagacaacacctgggacatcagctgttccagagaaccatcatcatgtctctcctcaacctgcttcagtaccacctccacagaatggacagtaccaacagcacggcatgatgaccccaaacaaagctatggcctctaactgggcacattaccaacaaccatctatgatgacgtgttcacattatcaaacgtcacctgcgtattatcaaccggacccacactatccgttgccacagtatatcccaccactgagtacttcctcacctgatccaatcgattcacagaatcaacactctgaagtacctcaagctaagacaaaggtgagaaataacgtcttaccaccacacactttaacatcagaagaaaacttttctacatgggttaaattttacatcagatttttgaagaactctaatctcggtgacataattccaaatgaccagggtgaaatcaaaagacaaatgacttatgaagaacatgcttatatatacaataccttccaagcatttgccccatttcatttattgccaacatgggtaaaacaaattttagaaattaattattctgacatccttacagtcctttgtaaa

SEQ ID NO: 173162 - DNA, 81 bp, Saccharomyces pastorianus
actttcttttcgccaggtaaacttgcttggtatgcagaaaaaatcgatagctcatctacgtgtagtaacaaaaacatgtag

SEQ ID NO: 173163 - DNA, 129 bp, Saccharomyces pastorianus
atggagatgctcttgtatctgaacgaatcatacatctttcataggtttcgtatgtggagtactgttttatggcactcatgtgtattcgtatgcgcagaatgtgggaatgcctattataggggtgccggg

SEQ ID NO: 173164 - DNA, 153 bp, Saccharomyces pastorianus
agatattgtatgacctccacacattttaacaaaagtgctgaaactatcttagcacaaatcaagaagaacattcagtatgtggaaactcaatttgacagaaaagtcagggaaatcaattcagatcgacggccgatttggccagcttgcgtatca

SEQ ID NO: 173165 - DNA, 441 bp, Saccharomyces pastorianus
atgtgggggttatgcaagaatcattttccgagcaataaaattcaagtgcaggagagaaacaaagcattaaaaccaaagaagagtggcagcgaacataagacaaagcaactgtttcctgtattcaattgcaagaagaaggaaaaaggggtaatgatacggtttgcgattctacgtaatgctaacacatctctactgtctgcgagaagtatatgcttatttacccaggcgcctacctattgtcatgtaaggttgaataccttgaataaaagcattacaactaaaagaaattcattggcagagtcgaaaaggcatgtccatgatggcaagcatttttttacgacgccacatcaacagcaacagacgaagttgggggaaattgaagagggacacagtcctaacataaaagaagaggacttgagaagcattggtcaagcaataaca

SEQ ID NO: 173166 - DNA, 237 bp, Saccharomyces pastorianus
cttcatggtagcgcctatgcttcggttacttctaaggaagtcccatcaaatcaagatccgttagccgtttcagcttccaatttaccggaatttgatagagattccactaaggttaattctcaacaagagacaacacctgggacatcagctgttccagagaaccatcatcatgtctctcctcaacctgctgcagtaccacctgacctgcaggcatgcaagctggcactgccgtcgttt

SEQ ID NO: 173167 - DNA, 219 bp, Saccharomyces pastorianus
gcaaactatgccttatacagagacacaaagagcatggaggtcttttacaaccatttagacccggctgagtttagagaaaccatgctgagaagctttgttttcatcgacaccagtaactgtggtttaatgaagcgaactcatttttcgtctgtcctttcgacctacccaaaatctgtcagtaagacctgcaggcatgcaagcttgcactgccgtcgttta

SEQ ID NO: 173168 - DNA, 312 bp, Saccharomyces pastorianus
atggaatcccaacaattatctcaaaattcacccaatcttcatggtagcgcctatgcttcggttacttctaaggaagtcccatcaaatcaagatccgttagccgtttctgcttccaatttaccggaatttgatagagattccactaaggttaattctcaacaagagacaacacctgggacatcagctgttccagagaaccatcatcatgtctctcctcaacctgcttcagtaccacctccacagaatggacagtaccaacagaacggcatgatgaccccaaacaaagctatggcctctaactgggcacattac

SEQ ID NO: 173169 - DNA, 111 bp, Saccharomyces pastorianus
acgattgttcctcattccgttttatacgtttcattatcctattacattatcaatccttgcatttcagcttccactttttttcccgttaaaataggaagcggcggaagctga

SEQ ID NO: 173170 - DNA, 381 bp, Saccharomyces pastorianus
aacatcaaaactcaggtaaaaaatggaattatttacgtaaaaataaatgacctaattgatcatcctgcgtatgatttcaaaaggaatacaatacaaccaaaatcttccccaaaaactagattgatgcccaaaattataagcttagaagatgctcataaacgaatgggacatacaggagtgcaacagattgaaaactccattaaacacagtcaatacgaagaaagtattgatttgattaaagaaccaaatgaattttggtgtgaaacttgtaaagtttcaaaaatcacgagaagaaaccattatgctggatctatgaacgaacacggtatcgatcatgaacctggttcatcgtggtgcatggatatacttggtccagtataa

SEQ ID NO: 173171 - DNA, 141 bp, Saccharomyces pastorianus
ctcattccgttttatatgtttcattatcctattacattatcaatccttgcacttcagcttcctctaacttcgatgacagcttctcataacttatgtcatcatcttaacaccgtatatgataatatattgatagtacaacta

SEQ ID NO: 173172 - DNA, 396 bp, Saccharomyces pastorianus
  modified_base (353)..(353): a, c, g, t, unknown, or other
tatgaagaacatgcgtatatatacaataccttccaagcatttgccccatttcatttattgccaacatgggtaaaacaaattttagaaattaattattctgacatccttacagtcctttgtaaaagtgtgtccaaaatgcaaactaacaatcaagaattaaaagattggatagctcttgccaaccttgagtacaacggaagtacatctgctgatacatttgaaattacagtcagcacgatcattcaaaggctaaaagaaaacaatatcaatgttagcgacagattggcctgtcaactaatacttaaaggtctatccggtgacttcaaatacctacgtaatcaatatcgtaccanaacgaacatgaaactttcccaattattcgctgaaattcattaa

SEQ ID NO: 173173 - DNA, 138 bp, Saccharomyces pastorianus
atgatgtctgttttcagggacatcggtcttgtgacaccgtgcagcttgaggaacaggccacaggcgttgcagaggggcaggcccttggggtcctttctccacaacggggtggtggaggtggtgcagttggagcacttg

SEQ ID NO: 173174 - DNA, 717 bp, Saccharomyces pastorianus
gacaatactgaccaaacatatgataaaccgagcaaggcagaaagcaaaaacaactctgatacaagtatctcaccgaaaggtaataatgaagagttagtacaattggtaggaagtagcgaagcggaaaaaccgaatgctacaccagaatcatcaattataacagatgaaccaattgagccaggaaactcagcagtaaacaaagctggattcctaaacaaaacgtttaattctctcaataagaaaaggaagagacctgttgaaaacaagactccctttaatgacacagttgaaagagattataaacgtcgaagaaaaaaaataatcaaactacttccggataacacagaaacaagttctgcaccgagaattaaaaccatctactacaatgaagctatttcaagaaatgttgattacaaagaaaaacatgcttataaagaagcatacaggaaggaattacaaaatctcaaggatatgaaggtattcgacgttgatgtcaaatacaacagatctgatgttcccagtaatctaataatcccgacgaatacaatattctcaaagaagagaaatggtatttataaagcaagaattgtttgtagaggtgatatccagacaccagacacatataatgttattggaacagagtccctgaaccataaccacattaaaatatttctgatgattgcaaacaataggaatatgtttatgaaaacattagac

SEQ ID NO: 173175 - DNA, 1782 bp, Saccharomyces pastorianus
atgcatagattagatgttcctttacttgctcccatgtcccaatctaacacacatgaatcgtcgcacaccagtaaatctaaagatttcagacactcagactcgtacagtgacaatgagactaatcatacaaacgtaccaatatccagtacgggtggtaccaataataaaactgttccgcagacaagcgaacaggagactgagaaaaggattatacaccgttcaccttcgatcgatacttcctcatcagaaagtaattcactacaccacgtcgttcctatcaaaacgtcagatacctgtcctaaggagaatacagaggaatctataattgctgatcttccacttcccgatctgcctccagaacctcctaccaaattatcagactcctttaaagaacttccaccgatcaattctcgtcaaactaattccagtttgggtggtattggtgactctaatgcctatactactatcaacagtaagaaaagatcattagaagataatgaaactgaaattaaggtatcacgagacacatggaatactaagaatatgcgtagtttagaacctccgagatcgaagaaacgaattcacctgattgcagctgtaaaagcagtaaaatcaatcaaaccaatacgaacaaccttacgatacgatgaggcaatcacctataataaagatattaaagaaaaagaaaaatatatccaggcataccacaaagaagtcaatcaactgttgaagatgaaaacttgggacactgacagatattatgacagaaaagaaatagaccccaaaagagtaataaattcaatgtttatctttaacaggaaacgtgacggtactcataaagctagatttgttgcaagaggtgatattcagcatcctgacacttacgactcaggcatgcaatccaataccgtacatcactatgcattaatgacatccctgtcacttgcattagacaataactactatattacacaattagacatatcttcggcatatttgtatgcagacatcaaagaagaattatacataagacctccaccacatttaggaatgaatgataagttgatacgtttgaagaaatcactttatggattgaaacaaagtggagcgaactggtacgaaactatcaaatcatacctgataaaacagtgtggtatggaagaagttcgtggatggtcatgcgtatttaaaaacagtcaagtgacaatttgtttattcgtagatgatatggtattgtttagcaaaaatctaaattcaaacaaaagaattatagagaagcttaagatgcaatacgacaccaagattataaatctaggcgaaagtgatgaggaaattcaatatgacattcttggcttggaaatcaaataccaaagaggtaaatacatgaaattgggtatggaaaattcattaactgaaaaaatacccaaactaaacgtacctttaaacccaaaaggaaggaagcttagcgcaccaggtcaaccaggtctatatatagaccagcaagaactagagctagaagaagatgattacaaaatgaaggtacatgaaatgcaaaagctgataggtctagcatcatatgttggatataaatttagatttgacctattatactacatcaacacacttgcacaacatatactatttccgtccaagcaagtgttagatatgacatatgaattgatacagttcatatggaatacgagagataagcaattaatatggcacaaaagcaaacctgttaagccaacaaataaattagttgttataagcgatgcctcgtat

SEQ ID NO: 173176 - DNA, 129 bp, Saccharomyces pastorianus
ctcttgtttctgaacgaatcatacatctttcataggtttcgtatgtggagtattgttttatggcactcatgtgtattcgtatgcgcagaatgtgggaatgccaattataggggtgccggggtgccttga

SEQ ID NO: 173177 - DNA, 138 bp, Saccharomyces pastorianus
atgactctctcccatgatcacaccctatttggagaacatttttgtgttacagtaacattcgggaaaattgtcccaatatactattggccaaaattacaacactccataacccactacatccagacttgcttaaaatgc

SEQ ID NO: 173178 - DNA, 156 bp, Saccharomyces pastorianus
atcacctttaataaccatttaaattgtatgatgatctttgggattccattgtttcttaatgttataatattacgtatatatattatactagagattctcctcatggatttaggaatccacagaaaggaatcaataattctacataatattataaat

SEQ ID NO: 173179 - DNA, 486 bp, Saccharomyces pastorianus
gcaaaagtgctaagaccagccaacggtttaatttaccgtatcgctatgtcatggttcacctttttctttgcgtctttgttcttctgcacaacaaccgccatctttcaagtcgattttaccaagtcctttggtagaggtggcttcgtcgtatattggatgtctacgtggctcttcatgcttgctgcgggaggagctaacgaaaatgcggttatgcttgttattacgttaggaccccagtatctcgggttctggatcctatcatttgtcattctcaatattgcaccttctttcttcccattagcgctaaacaataatgtttatagatatgggtacatgatgcccgttcacaacgtcatcgatatctacagggttattttttttgacgtgacaagacgcaagatgggtcggaattatggtattttagtcgcactcattgccttgaatacggcactgttaccatttgttggcaagcatgctagtagataa

SEQ ID NO: 173180 - DNA, 561 bp, Saccharomyces pastorianus
atctataacaaaaaacttggtacggttgatttaacattaaaatcattcatagaaaaaatgggtgagaagtataaaaaggaattggataaggttagaaaaagttcaattccacatacatcaatatacagggttgatcccaaaaagggagaactaaaaatgaccgaaaaagaatataaagacggtgtgttgaaattacaacaactactaggagaacttaactatgttaggtacaagtgtagatacgatgttgaatttgcggttaagaaagtagctaggctagtaaactttcctcatgaacaggtattttacatgatctataaaatcatacaatatttagtacaagatacgaatatcggaatacactatgacagagacctcaacaaagataagaaaatcactactataaccgatgcatcagttggaacagaatacgatgcacaatcaagaattggagttataatttggtatggaaagaatattttcaatgtatactcaaataaaagcaccaacaagtgcgtatcctcaaccgaagcggaacttcatgctatctatggactctag

SEQ ID NO: 173181 - DNA, 498 bp, Saccharomyces pastorianus
tatgttacggctgattctattcttgacgacctcccacttcctgacttaacccatcaatctcctacggacacttctgatgtttcaaaagatattccacacatacactctcgtcagactaattccagtttgggtggtatggatgattctaatgttctgactactaccaaaagtaagaaaagatcattagaagataatgaaactgaaattgaggtatcccgagacacatggaataataagaatatgagaagtctggaaccaccaagatcgaagaaacgcataaatttaattgcagcaataaaaggagtgaaatcgatcaaaccagttcgaacgaccttaagatatgatgaagcaattacatataataaagacaacaaagaaaaagacagatatgttgaagcttatcataaagaaattagccaactattgaaaatgaacacttgggatacaaacaaatattatgatagaaatgacatagatcgacaagctgatccgccataa

SEQ ID NO: 173182 - DNA, 741 bp, Saccharomyces pastorianus
atgtcttcactagaagtggtagatgggtgcccctatggataccgaccatatccagatagtggcactaatgcattaaatccatgttttatatccgtaatatccgcctggcaagccgtctttttcctattgattggtagctatcaattgtggaaactttataagaacaataaagtaccacccagatttaagaactttcctacattaccaagtaaaatcaacagtcgacatctaacgcatttgaccaatgtctgcttccagtccacgcttataatttgtgaactggccttggtatcccaatctagcgatagggtttatccatttatactaaagaaggctctgtacttgaatctccttttcaatttgggtatttctctccctactcaatacttagcgtattttaaaagtacattttcaatgggcaaccagcttttctattacatgtttcaaattcttctacagctcttcttgatattgcagaggtactatcatggttctagtaacgaaaggcttactgttattagcggacaaactgctatgattttagaagtactccttcttttcaattctgtggcaatttttatttatgatctatgcatttttgagccaattaacgaattatctgaatactacaagaaaaatgggtggtatccccccgttcatgtactatcctatattacatttatctggatgaacaaactgattgtggaaacttaccgtaacaagaaaatccaagatcctaac

SEQ ID NO: 173183 - DNA, 153 bp, Saccharomyces pastorianus
atgaatggttctattgtcgttgtggctgctattcatggacaaacacttcaacccatagagcatctgctagtagctggacaagttagtaatcaacatgtagttattttcgttaacaaggtggatgctattgacaattcaaagttaatagagttg

SEQ ID NO: 173184 - DNA, 192 bp, Saccharomyces pastorianus
atgaaccctttacaattagaccacgaaccagtccaaaaagtacgtgcaccaaaagaagttgatgccgacatatctgaatacaatattcttccatctcctgtacgatctcgtacaccccatatcattaataaagagagtaccgaaatgggtggtaccattgaatcagatactacttcacctagacactcgtct

SEQ ID NO: 173185 - DNA, 129 bp, Saccharomyces pastorianus
catgataatattactctaacttcttttcttctatactttgccattcattaccctatcacgttatcaatccttgcatttcagcttccattaagaccgataactgtttcccaatctctatgtcatcatctt

SEQ ID NO: 173186 - DNA, 345 bp, Saccharomyces pastorianus
agcaagcctaagaagcgagaaaacaaattggtgacaataagcgatgcctcatacggcaatcaactatattatagaccccaaattggtaacataatattactcaataggaaagtaattggaggaaaatcaacaaaagcttccttaacatgtacctcaactacagaatctgaaatacatgcagttagtgaagctataccgctattaaacaacctaagttacctagttcaggaactcgataagaagccaattatcaaaggcttatttactgatagtagatctacatcagtattattatatctgaaaatgaagagaaatttagaaacagattcttcggtactaacctga

SEQ ID NO: 173187 - DNA, 225 bp, Saccharomyces pastorianus
gatgaaggatcctcgtcttcatcctcatcctcatcctcatcctcgtcttcagccccatcctcatctccggcctcttccgcatcagacgcatcttcaccgcctgacgattccgaatcagacgagtcggagaaactgccttccacagcctcatcgttcttaattccatccgcatcgtcacccaagagctccaaatcaacgtcatccttgggaagtccaactgcaggt

SEQ ID NO: 173188 - DNA, 255 bp, Saccharomyces pastorianus
atggaatcccaacaattacatcaaaatccacattctcttcatggtagcgcctatgcttcggttacttctaaggaagtcccatcaaatcaagatccgttagccgtttcagcttccaatttaccggaatttgatagagattccactaaggttaattctcaacaagagacaacacctgggacatcagctgttccagagaaccatcatcatgtctctcctcaacctgctgcagtacacactccacagaatggacagtac

SEQ ID NO: 173189 - DNA, 177 bp, Saccharomyces pastorianus
aaggtcaagctgcatgagaaaggggagatagataagccaacaatgctgaaatcaagtggcccgatttcaaaagacaaaaaaacaaaacctaccccaccacctaagccttcacatttaaagcctaaacctcctccaaaaccactgctcctcgcgggacgaaagttatccttggataag

SEQ ID NO: 173190 - DNA, 312 bp, Saccharomyces pastorianus
tcaagtaatactgatgaggattttttcgatgaaaatgtttatagaattccaacggcaatacaagaaaatcttgttggaagccagaagactataaacatcaataatgaggataatattgctagcagaatgcaaaggaagactagtggaaatgaaataaactacaatgagttgtcggatgacgagagcgattacagctctcatgaccccacaaatgacttacttacagttgtaagcaaaaaagataattccacagatgataacatctcgaatcccagcaagaaatattcaagaaactatcgattcagaagtact

SEQ ID NO: 173191 - DNA, 135 bp, Saccharomyces pastorianus
accattgtatttgttttgtttgttagtgctgatgtaatcttaacaagaaatagtgaaatgaaagcgcatacctcaaaggcatatagttgtagcagctctgacctgcaggcatgcaagctggcactgccgtcgttt

SEQ ID NO: 173192 - DNA, 909 bp, Saccharomyces pastorianus
ttcgagctctgtgtctgctgggctcgccagaaagtatcgtatcggaggatagcttgggaagcactagctgtggagagaatgctgcgaaatgacgaggaatacaaagaatacttggaagacatcgagccatatcatggggaccctgtaggatatttgaaatattttagcgtaaaaaggggagagatctactctcggatacaaagaaattatgcttggtacttggctattactagaagaagagaaacaattagtgtattggattcgacaagaggcaagcaagggagccgagttttccgcatgtctggaaggcaaatcaaagagttgtattttaaagtatggagcaacttgcgtgaatcgaagacggaggtgctgcagtactttttgaactgggacgaaaaaaagtgccaggaagaatgggaggcaaaagacgatacggtcgttgtagaggcgctcgagaaactggaagtttttcagcgtttgcgttccatgacaagcgctggactgcagggtccgcagtatgtcaagctgcagtttggcaggcatcatcaacagctgaggagcaggtatgaattgagtttaggaatgcacttgcgagatcagcttgcgctgggagttaccccatctaaactgccgcattggacgcctttcctctcgatgctgataggcctgttctacaataaaatatttcggcagaaactggagtatctcttggagcagatttcggaagtgtggttattaccacattggcttgatttggcgaatgttgaagttctcgctgcagataacacgagagtaccactgtacatgctgatggtggcggttcacaaagagctaggtagcgatgatgttccagacggcaaaattgatataatatcacgtagaggtcccagcagagaagttggagagtga

SEQ ID NO: 173193 - DNA, 585 bp, Saccharomyces pastorianus
atgggtggtaccattgaatcagatactacttcacctagacactcgtctaccttcactgcacgaaaccaaaaccgacctggtagtcccaatgagatgattgatttgacctcacaggatagagttaattatggacttgaaaaaatcaaaactacacgtttgggtggtacggaggaaccatatattcaacgaaatagtgatacaaatatcaaatacaggactacaaatagtacgccctcaatagatgaccgttcgtccaacagtgaatccactactcccatcatctccatagaaacaaaggctgtatgtgataatacaccctccattgatacggatccgccagaatatcgatcttctgaccatgcgactcctaatataatgcctgacaaatcctcaaaaaatgttacggctgattctattcttgacgacctcccacttcctgacttaacccatcaatctcctacggacacttctgatgtttcaaaagatattccacacatacactctcgtcagactaattccagtttgggtggtatggatgattctaatgttctgactactaggggatcctctagagtcgacctgcag

SEQ ID NO: 173194 - DNA, 477 bp, Saccharomyces pastorianus
atgtcttcacaagatgttctgatacattcagatgatccgtgccatccagcaaatctcatttgcacgctatgcaagcagttttttcataataattggtgcaccggaactggaggtgggatttcaataaaagatcctaacacgaattattattatctcgccccatctggggtgcagaaggagaagatgacacctgaggatttgtttgtcatggacgctcagacattagagtatttgcgctctcccaagctttacaagccaagcgcatgtactccattgttcttagcgtgctaccaaaagaaagatgcaggtgcgataatacatacacactccccaaatgctgtgatatgctccatggtatttggcgatgagttcaggattgcttacatcgaacaaatcaaagcaattccaagcggtaaggtggaccctgtgattaagaaacccatggcgctatcgttttatgatacgctgcagattccc

SEQ ID NO: 173195 - DNA, 315 bp, Saccharomyces pastorianus
atgaacattaaaactcatgtaaaagatggaatcattcacgtaaaaaaggatgacttaattgatcatcctacatatgatttcaaagtaaatgcaatacaaccaacttcttctaaaaaggttagactgaagaccaaagttgtaagcttgaaagatgctcataaacgaatgggacatacaggagttcaacaaattgaaaactccatcaaacataatcactacgaagaaagtattgatttaattaaagaaccaaatgaattttggtgtgaaacttgtaaagtttcaaaagccacgagaaggaaccattatacgggatcg

SEQ ID NO: 173196 - DNA, 144 bp, Saccharomyces pastorianus
catacaggagttcaacaaattgaaaactccatcaaacataatcactacgaagaaagtattgatttaattaaagaaccaaatgaattttggtgtgaaacttgtaaagtttcaaaagccacgagaaggaaccattatacggatgac

SEQ ID NO: 173197 - DNA, 444 bp, Saccharomyces pastorianus
aattataatttttttttagctgataacaatatgggtgtcgataaaagtctaaaactgcccacagttacacggttatttcttggtatagataacattcatattgtttccaacacagctgcatacatgacggaagttatctgccaagctggcgatttgaatttaccactggaacagaatttaattaggagtcaaaaattttccaattggttgaagttaaacactcttatattaaaatccgttgatatgcttttaaagtccatcattttcaatcattccaacgttttggttcattgttctgacggttgggacagaactagtcaagttgtatcactattagaaatttgtttggatcctttctatagaacttttgaaggttttatgatcctagtggaaaaagattggtgctcttttgtcaccggtttttggaaagaagtggtcatttaa

SEQ ID NO: 173198 - DNA, 183 bp, Saccharomyces pastorianus
cagaatcaacactctgaagtacctcaagctaagacaaaggtgggaaataacgtcttaccaccacacactttaacatcagaagaaaacttttctacatgggttaaattttacatcagatttttgaagaactctaatctcggtgacataattccaaatgaccaggtgaaatcaaaagacaaatga

SEQ ID NO: 173199 - DNA, 537 bp, Saccharomyces pastorianus
atgggcggcgatgttgggacaattcgtggcagaaagtatccatggggcatactggacgtggaagattcatcgatctctgattttgttatcttaaggaatgcgttattgatctctcatttacatgacttgaaaaactacacacatgagatattatatgaaagatatagaaccgaggcattatcaggtgaatctgtcgcggcagaatccatacgtccaaatctgacaaaattgaatggttcgtcgtcatcgtccaccacaacaaggagaaacacaaatcccttcaagcaaagtaataatattaataacgatgttctcaacccagcatccgatatgcacgggcaaagtactggcgaaaataacgaaacctacatgacacgtgaggagcaaatacggttagaagaagagcgactaaaggcatttgaggagagagttcagcaagaactgctgttgaaaagacaagaactgttgcaaagagaaaaggaattaagagaaattgaagccaggttggaaaaagaggcgaaaatcaaacaggaagaa

SEQ ID NO: 173200 - DNA, 165 bp, Saccharomyces pastorianus
atggaatcccaacaattatctcaaaattcacccaatcttcatggtagcgcctatgcttcggttacttctaaggaagtcccatcaaatcaagatccgttagccgtttcagcttccaatttaccggaatttgatagagattccactaaggttaattctcaacaagaa

SEQ ID NO: 173201 - DNA, 2154 bp, Saccharomyces pastorianus
aagagcattgatattttggaaaaattaaagctcagcgtcgttacttcgtctgaatacgcgactaatgcaatcgcagatatcaatagacagcttgaaactctgctctcatttcaacatgttaatataaattcagaatcagttcgtacatacaaggataacggcgcactcgaaaatcagctgctagacggtaattatgttgcgtttgatgcttttagtacttttgaaaatgttagcaaaggaaaggcagtggatgatatttttggcctctattcgcctatatcagtaatgtcaccaaaaggaatatgctggctaatacaacagcttatagtaaagtccagagagaaggatacggaagagactgtatatattcttctaaagtttttagatgcagggagctccagctacaaatgggaattgatagcgcctgtgtatcggttgcagtttattttgatagagttctttgggtgtaaggtacccttcactcgaaatgagactttgaaggaagcgattgatgctatcccaccatcattgagaagtgaactaaaagaggagggcggaaattctattcaggactccagaaaactatttatgtattgtgtgaaacttttaggcaaacacttcacgtcatctcgccacttgttaagaaatatcaatatctttgagcaattttttcaagttgaagaactgctgtctacgctctgttacacatttttggaaaattccctaaattttagattactcgacgctgaatttctacatgatttgttatgctttgttaagcagcggcactggaaagacaattcatttataataggtggggttatcgcaccattatgtagacaagtgcaagatctgggattgagccgatgggaatattatcttgggatgaatgaagagcatgcaaaccccctccgtgaaatatggtgggacacttactggtgggacaaatggtacgtggtagtgaccggaaagctaccgatgattgatagctcaaccgtgacatgtttactcccccaacaaataatgagacttggagtagatgatgcgatgtcaagttggcaaatgctagaacgtgttgattttacttatggatcgttgaaggaccacatcatgtttggatacattgttctctcgattagcatcaatgatgtgttttcaaatgtactttacaatcgcaagtttacggattatagagtgttttcggggatcactgcgttggatttcaaagttgtggaggaactactaacaagaataaatggaataaggaagggattcacggtgttgaaaacaacggttgtgcatgagcttgaaaaaagcttgctggacgatgatgttttcaggttttgcatacactttgcatacagtcgaatatcatgtcttagggctataggaaacctgttgatgcggtttaagagtatttttcatggtacaagtagcaatctaatcagtgatcagataggtgagtgtgataaagatatccttcaaactacagttgaaacttttactttcattctacgtgcgaacgataatataaaaatcaaggaacacgttcggcccataagcgagatggggttgaacattttactcgaagcagtgaaagcccccgccggaatcgatgtttaccatatttctctattttgtggagtagcgagtttgttcgaccgcattacgtgctcagaaaatggtgcagagaagcaatataatcatccgggaaggatagttttaatggagatcacatgtatcttcatttttgttcgcgtgtgctgtttagtttatcggcagtataaaaaagtttcaaaggaagaattaatggccattttgacggattttgatcacacaacagcgaggttctgcaatgaaacgttagatataaggtccgatttgtttcagcacataataagagacaaaaaaaagtcggactatcatagggatattatacacggcatcgagaaagttcttgggagagacataataactactatcgaaagctgtgagagggaggttataagttctgatgaatatcgacaggcgcaatatatgggaaatgttgccactaaagaccttgattatttgcgctactttctcaaccttgatattttcccagagttgaatacagacgacgagttatgggatgatttaaaagagatagataag

SEQ ID NO: 173202 - DNA, 126 bp, Saccharomyces pastorianus
gccattagttggcattttgtgcttattggtgggtgcctcatattggcaatattacagagcagcttctgtttaagtaaaatccagataattgtaaactttatttatactttttttttcaacaaataa

SEQ ID NO: 173203 - DNA, 162 bp, Saccharomyces pastorianus
ttagaagttctcctcgatgatataggaatcctcgaaatggaatctatatttctacatactaatattacgattattcctcattcccttttatatgtttcattatcctattgcattatcaatccttgcacttcagcttcctctaacttcgatgacagcttctca

SEQ ID NO: 173204 - DNA, 105 bp, Saccharomyces pastorianus
ggaattgttattttagctatgatagctcctgcattaagcaactatatcctgaacgtgtcagcaatcaatggcatcatggagaccttggttgaaactaagctgata

SEQ ID NO: 173205 - DNA, 93 bp, Saccharomyces pastorianus
atggaatcccaacaattatctaattacccacctttatctcatggtagcgcctgtgcttgtacttctaaggaagtccacacaaatcaagatccg

SEQ ID NO: 173206 - DNA, 528 bp, Saccharomyces pastorianus
atgtatcgcagtagaaaccgaccaaaaagaggtggagaaaatgaagttaagggaccaaattctgccttgactcaatttttaagagaagaagggatcagtgctgaaaatatcaaacaaaaatggtaccagcgacagtcgaagaagcaagaagatgcaacagacgaaaaaaaaggtaaagcggaggatgatagctttactgccgagatatctcgagtagttgaagatgaagaaattgatgaaattggaacaggtagtggtaccgagacagaaagagctcaggtttcctacgatgccaggatgaaattagtccctgctgatagtgatgaagaagaatatgaaactagccacatttctgacacgccagtcagtttaagttcggctaatgaccgggaatcattcactaaaaaaaggcaaaatactgcaaaaattatccaaaatcgtcgcagaaagcgtaaaagagcagctgacctattggatagacgcgtcaacaaagtatccagcttacaaagtctttgtattacgaaaata

SEQ ID NO: 173207 - DNA, 468 bp, Saccharomyces pastorianus
gtcaaatacaacagatctgatgttcccagtaatctaataatcccgacgaatacaatattctcaaagaagagaaatggtatttataaagcaagaattgtttgtagaggtgatatccagacaccagacacatataatgttattggaacagagtccctgaaccataaccacattaaaatatttctgatgattgcaaacaataggaatatgtttatgaaaacattagacattaaccatgcattcctatatgctaaattagaagaagacatatacattccacatccacatgacaggagatgcgttgttaaactagataaagcgttatatggtctcaagcagagtcctaaggaatggaacgaccatcttagacgatatttaaacagtattggactaaaagataacacttatactccaggactataccaatccaaggataaaatactcatgatcgacaagcttgatccgccataa

SEQ ID NO: 173208 - DNA, 300 bp, Saccharomyces pastorianus
atgaatgtctacgaggacggttgttctaataagaccatagcaaacgccacccaattcttcaccaaactatcgagaaatatgacaaataactacattttgcaacaaagcggtggtagtactgagtcctcgtcatcatctgggcgcatccccgtagcacaaacaagctatgtgcagccacctaatgctccttcataccaatccgtacaaggtggtagctctatttcggccactacaaatacagcaacttatgtgccagtacggttggccaagtatcccactggtccttcgcttactgaacat

SEQ ID NO: 173209 - DNA, 117 bp, Saccharomyces pastorianus
gaatcccaacaattatctcaaaattcaccaaattttcatggtagcgcctatgcttcggttacttctaaggaagtcccatcaaatcaagatccgttagccgtttcagcttccaattga

SEQ ID NO: 173210 - DNA, 564 bp, Saccharomyces pastorianus
tcaaacttcccaatcaccaaaagaaaagtttattcaaacacaggaggaaaccacttcaactttgatttcttaagattgaaattatcagtcaatcctgctgaatgtgaaaaactggtcaccaagggtcctgctcattccccaacgatgtctactgaagctgctgtctttaaaaacttttggggaataaaatcatctttgagaagattcaaagatggctctattacacattgttgtgtttggtctacatcctcatcagaacctattatctcctctattgttgactttgtattgcaaaaacatatctcgaaaaaggtgcaagtgtcaaacgatattactaagcaatttcaaaattttctaccattaccaaacttaccatcaagtgctagtacatctgttttgaacttgagtagttttttcaatgtaaagaaatcctttgatgatatttacaaaatagttttccaaatgaaactaccactttctgtaatatgcatcttaccagtcggctccggattaagatggacttccttatgccgcccagtaccaatcgcagtactcagcatcctg

SEQ ID NO: 173211 - DNA, 732 bp, Saccharomyces pastorianus
gtatacgtcgatgatacaacaagacgcatccaactgtacactgattacaacaagaacggttcatcggagcctcgactaaagacgcttgacggactcacctcagattacgtgttttattttgtcactgtgctaaggcaaatgcaaatatgtgcgcttggtaacagttatgacgcttttaatcatgatccttggatggatgtggtgggatttgaggatccaaatcaagtaacaaatcgaggcatttcgaggatagttttgtattcctacatgtttctgaataccgcgaagggctgtctggttgaatacgcaacttttcggcagtacatgagggaacttccgaagaatgcacctcagaagctgaattttcgggagatgcgtcaggggttgattgccctaggacggcactgcgtaggtagcagatttgaaacagatttgtacgagtcggcgacgagtgaactcatggccaatcattccgttcaaacagggcgaaatatttacggtgtggattccttttcgttaactagtgtcagtgggacaaccgccactttattgcaggaacgagcttccgagcgctggattcagtggttaggccttgaaagcgaactacattgttcattctccagtactccgaatgcggaaaacgtagtggaggtgaagcggcgagtccaattctcctcaaaaattccagataacgcaaaaagcccgaaaccagattcaacgaatcccgtgagc

SEQ ID NO: 173212 - DNA, 1161 bp, Saccharomyces pastorianus
ggatttggttttccaaaatcattaagaaataaatcgttcgtctttgagggtctcccatttgaacacattacgtctatgcatgacaggcttctacgaagctatcatgggtcaaatattgtacactcacaagaagaagtggatatgttattgatgaatctcccaatgggaaaatacattcatgtagcttccgtcgaaccgtgcttaagtatatccgataattacaacagtagtgacaagaaaagctcaattaacaacaaagtgcggatgtacattgagaatagagatttgaggactttcagtaattctcgacgtttgccaggcgcaaaaggagtcactgacctgtgggtggaggaatatacgtatcatactatgaatacttttccaacacttatgaatagatcagaaattgtaaaggttacgaagagcaaactttctccacttgaaaatgcaattcgttccttacaagttaaaatacaggagttatatgggcttgaaaacatgtgcaataaaactctgaaggaccacggtgatgtgaacgatttatttaccgagttttctacaaatattacgggaacaatatcagctccagttaatggaggcatatcacagtacaaggcctttttagaaccctccacatccaagcagttcagtactgatgatttaggaagattgacgctagcttttgatgagcttgttgcagtattaggtcgctgtctaacgttgcatgcagaactactaccatcaaaggatctaaaaccatcacatgatcttctagtgcgtctttttgaggaaaatttcgctgaggagatagaaagatatagtcgtactctcagtgaggccaatcgtagcaggaataacatgattactgctcgaataatttcgcacaagaaccccaataaaaaggcaagcttttctggaagggatcatcacacctcagggtccaatcatagccaatttgtattagaacatagcgactcatttggcccaaacagtttactttttggaaaatatttaacaagaacgttatcacactcgtccactacgagtagtttggataaaagtggaattgtttccggcacttcaagcacctttttggcagggtcacagccaaacaccaacacagattcacagcacaagcatgattactcacattcgggataa

SEQ ID NO: 173213 - DNA, 1968 bp, Saccharomyces pastorianus
aagctaaagttaatgattgtttactataaagatgccattagtttcattaaagagatacacaagagtattgaattgatatctaatttgctgttttctaagaacagaaacgaagttttagaatcaatggacttcctagttttagcagacgcttttgacattgagttaagcgaatttggtataaaaaaaatgctgcatttggtttggatgaagggcacaaacgatgaaggaacgagtatatcagtacatttgatagaatgttataagcagctatttttaaccgcgccagatagttgcaatatgcaggagaaggcggcacatattgccaaaaatttaattaatctaagcatcggcgcatctattgcagacttggcctctttggaacagctattaggaatgatgtatgaacaaaaaatgattgatcaacatgtcattaatatcctttgggctatttacaattctgcatcgaaggccagtatgcagaaagaacaaaatgtgaacaaccgtgactccgaaaaagggttttctaaggaacaaattcatggttctattattattttaggaatgttatcgttagccgataacgaaatagcattaaaaggactggagtcacttttaaacattggacttggtgccgttggtttaaaagatctgaccctttgtcggtattcttgtttagcgttagagagaatggttcccaagagaagcactattattaccaaggcaataaatcaagagcttgaagatgttgcagtgaaaaagttgtatgccataattatcaactataccaaggataatgaatattatcctatgtgcgaacaagcgcttagtgcactgtttacaatctcttctaagcctgatatactagctacagatctgattagagaaaagacaatgatgacatttggtaaacctgaagaggaagactctattttgtcgttagaacaatcatctagagttgtttctctcagtcaattattattcattgtgggtcaagtggcgattaaaacacttgtctatctagagaaatgtgaggcagaattcaagaaaagaaagatcgaggcagaaactcggaacggtaaagtaaaaaaccaaggtgcagatgtaactaacaccacacaagataacggtggtgataaagagctagaaatgataggaggtactaatgaggacgatttcacggatgctattcaatttgtaaaagagaatgaattactatttggagaaaaatctatattagggaagttttgcccaattgtagaagagattgtttctaattcaagcaggtttagcgatccaatgcttcaaagaacggcaaccttatgtctagaaaaactaatgtgtttatcatcaaaatattgtgaaaagagcctgccgctattaatcacagtaatggaaaaatctcctgatcctactattcgctcaaatgctgtcttaggactaggtgacatggcagtatgcttcaacaacttagtggacgaaaacacagattatttgtatcgccgtttgcatgatgaaaacttaatggtacaaagaacatgtttaatgacagttaccttcttgattttagctggccaggttaaggttaaaggacaattaggagaaatggccaaatgcctagacaatccagaccagggaataagtgatatgtgcagattatttttcaccgagttagcatccaaggacaacgccatttataatggattcatcgatatctttagtaatttatcgtcagatgatttattgggtaaggagagtttcaagaaaatcatcaaatttctgttgacttttatcgataaggaacggcaccaaaagcaattaaacgagaaattagttggaagactaagaaagtgcgagacccaaaagcaatgggatgatattgcattcgtactaaacaatctaccatacaaaaatgaagacgtcactgcattattggagcaaggtttcaaggttgtatccgcaaaagaataa

SEQ ID NO: 173214 - DNA, 414 bp, Saccharomyces pastorianus
  modified_base (9)..(9): a, c, g, t, unknown, or other
atgaggttnttcaacacatgttatgctgcacgaaagaagggagggaaatttgtggcccagttctacccgaaaaacgacgaccaggtggacgacatactgcagtctgccaaggtggcagggttcagtggcgggcttgtggtggacgacccagagtctaaaaagaataagaagtactaccttgtgttgagcagtggggccccaccgcagggggaggagcaggtgaatttggacggtgtgaccatggacgaggagaacgtcaacttgaagaaacaactgcgccagcgcttgaagggaggcaaagacaaggagtctgccaagagtttcattctaagaaagaaggagctcatgaaaagacgtgggaggaaagttgcgaaggactccaagttcaccgggaggaaaagaagacacaggttc

SEQ ID NO: 173215 - DNA, 90 bp, Saccharomyces pastorianus
agcgcctgtgcttcggttacttctaaggaagtccacacaaatcagatcgttagacgtttcagcttccaaaattcaagatatgataagctc

SEQ ID NO: 173216 - DNA, 588 bp, Saccharomyces pastorianus
  modified_base (180)..(224): a, c, g, t, unknown, or other
atggacatattcagacagacttttggaaacaatgacgaatcatttattcgaatcccaggagctttcaatgaggaaccgcccgcaaatgtgaatggagagggagataatgggaacaacagtgcggatgaaccaataagaagtcaaagtacgcgttcgaggtcagtccttcgttttctgttnnnnnnnnnnnnnnnnnnnnnnnnnnnnnnnnnnnnnnnnnnnnnccgaagttcacgtcttctgaaaccactgttaagatttcatgggttctatcaaagaaagcacaatcgtttgttggatcatggctctcaattgaaccgtctattggaaggcttgcagaatgagtctcaggttgtaatgccttctgaaggtaacggaaatgctgacggcggcagcaatagtgaaaatacgggcaacagtcaaagtagccaagttcagttcagtttcggttccttatacaatcctgaaaatggaatgttttccaaaggtatcatgcaaaatagttataccgaattgctggacaattgcagcgaacaagtaaaatttggagtgatttacctgcatgacccgcttttggatgatcatatg

SEQ ID NO: 173217 - DNA, 597 bp, Saccharomyces pastorianus
tcactttatggattgaaacaaagtggagcgaactggtacgaaactatcaaatcatacctgataaaacagtgtggtatggaagaagttcgtggatggtcatgcgtatttaaaaacagtcaagtgacaatttgtttattcgtagatgatatggtattgtttagcaaaaatctaaattcaaacaaaagaattatagagaagcttaagatgcaatacgacaccaagattataaatctaggcgaaagtgatgaggaaattcaatatgacattcttggcttggaaatcaaataccaaagaggtaaatacatgaaattgggtatggaaaactcattaactgaaaaaatacccaaactaaacgtacctttaaacccaaaaggaaggaagcttagcgcaccaggtcaaccaggtctatatatagaccagcaagaactagagctagaagaagatgattacaaaatgaaggtacatgaaatgcaaaagctgataggtctagcatcatatgttggatataaatttagatttgacctattatactacatcaacacacttgcacaaactctagaggatccccggtaccgagctcgaattgtatcatgtcat

SEQ ID NO: 173218 - DNA, 114 bp, Saccharomyces pastorianus
atgaaattttctaaagtctcactactggccgcatctgcatctgtcgctttatctgccccagttgctgtgactgtcacacaacatgtccaccaagctgccaatgtagtggtacag

SEQ ID NO: 173219 - DNA, 96 bp, Saccharomyces pastorianus
atcattatctatgaaggcgattcatatgtagtgccaggtaatgttcctcacagtcctggtcggtgtgctgatactgggggtattgttgtggtacaa

SEQ ID NO: 173220 - DNA, 1488 bp, Saccharomyces pastorianus
agtgaaaccgaagcaaattcacagtgcacgatgagtgatgaaggtgctgataaaagtctagatactaacacagaatttattatacaaacacgatctaggaggtctaatgccggtaataaattacaaaaactattggagcaggagctaagagatatagaatctaccaaaagacaaatttcttcctataagaatggtaatgatgatgaagaagatgaaatagggctgttgtttcaggaagatgaagatgatgaagatttcgaaatgatggcaaaagatgacgatgatgaaggggaagaaaaagaagatgagactcaaagtataaggaaagagccctctcaggcttcaagtgagcaagcagccgatgacttaatgttcagcagtagcgaatctgaggactccagcaacgagaatgatgaagatgcagaggaaaaggaaatacgaagacaagaactactttcaagaaagaaaagaaacaagagattacagaagggtcccgttgtaatcaaaaaacaaaaacctaagcctaagtcaggagaagctataccaagatcgcaccatacccatgaacaattaaacgcagagacgttactattaaatacaaggagaacttctaaaagatcatcggtaatggaaaacacgatgaaagtttatgagaaattgtctaaagctgaaaaaaagagaaaaattatacaagaaagaataaggaaacacaaggagcaggagtctcagcatatgctgacgcaagaagagaggctacggattgccaaggagactgagaagctgaatattttgtcactggataagttcaaggaacaagaagtttggaaaaaggagaatcgtctagctttgcagaaaagacaaaagcagaaattccagccaaatgagactatactgcaatttttatctactgcttggctaatgacgccagcgatggagttagaagatcgtaaatattggcaggaacaattgaataaacgtgataagaagaagaaaaaatatccgaggaagccaaagaagaatttaaatctcggaaaacaggacgcatcagatgataaaaagcgggagagtgaagaatcgataaagaacgatggcgacgtgaattctttgggtgagaattcttcatctgtacacaaccagaaaaggattgaggaaacttctactaacgatacagttgaaggagaatcgagtccagatgcagcggtgagtagagtaaattcagacgaattaaagccaacagcattatctgatgttacattggacgcaattgcaaacaagcagagtaccgttgatgaagctcccaacagccaaccacaaaagaatataataactaatgagcaaaaaattaccaatgtaggcgaaccgatacaaaatttacataatgaagaaattaaagatgaaatggtaagtgctctcgagagcagggaaaatacttttgaaaactcatcacctgctgcccaagtggtctcacaaaggactttagcagattaa

SEQ ID NO: 173221 - DNA, 135 bp, Saccharomyces pastorianus
atgagacttagagatgaagtatcaggtaataatttatacgtatactacatcgagaccaagatgaacattgctgatgtgatgacaaaacctcttccgataaaaacatttaaactattaactaacaaatggattcat

SEQ ID NO: 173222 - DNA, 222 bp, Saccharomyces pastorianus
ggacaagacgcgacggttcccatccaacccaacagcagcggaaacggaaaccgcctcaacgatatgaacaagccaaggcctctgtggggcccatatttcggcctttctcttcaactgatcatcgatgaccgtatattcagaaacgacttcaacggtgtgatatcggggtttaactacaacatggtttataaacccgatgactctctgctgagaattcaatga

SEQ ID NO: 173223 - DNA, 564 bp, Saccharomyces pastorianus
aagagttttattcaatcaccgacggaatcaaaggtgaaacaggctaccaacgaggacgaaacaagtggagcaacggggacgcttatgaacgaaatatcaatcttgacctacagccccaagacagtacgagaaatcatccaggtaatccggaagcgattgttacttgggcagaacagaagaaattctcatcgaaattgtatccaggtgatgaagacgctgactttggtctcatatctgatgaataacgggtccaatgaattcatcaagtggctgaaaggaaacatgatactaattgagatcctggaggattttcaggttcaggatcctcgggatgaacgtaaggcggaagatattcaaaagctaagcaggaacgttctggggctgctgcaagacgacgggttactagaaaaacaacgcaaggatgtaatacaattccgctcaagcatatcgactccgggcaggaagtccacggacaatagccatttgaagctggaggaaataagaaacgagctcacgcgacaaagccttagaacagaaagcaaagcctcccaccaccagcactag

SEQ ID NO: 173224 - DNA, 258 bp, Saccharomyces pastorianus
atgattactgattcaaaaccagctattgaaggcttaaaccggagctatctgcaacccaaacagaagttcacatggataaaaaccgaaataattaaagagaaactaaaagagaagactataaaactaataaaaatcaatggtaaagaaaatatagcagatttactcacaaaaccagtatcgatttctgactttgatagatttatcaaagtattgaaaaacaagataacaccacaggatattttggcctcaacggactat

SEQ ID NO: 173225 - DNA, 1881 bp, Saccharomyces pastorianus
atggattcggtgagatgttttatagtgttttctctactgtgcgtcgttgataatattcccgcagcggctaaggtcttgactgccgacgaacagtcacgagacatgttttttccctggtttaagagcatttacgccaaagcagttaacgaggagaatactgaggcgcacacttttatcaccgccaatttcgtgacgcagagcgtcgagatccatggcctatatctgtcgtttggttacatcaaggatctgcgcaaggacgttcaccgtgatatcgaactgtgcgttgatatgctctcggagtggttgagctttgggacaatcagtcaggtctattacaacggcatgggcaaccggtcggtccgcatcagagacgatctttatagggatagtgatattgtcaatgtttttcacgttatcgatcgcagtctcctatcttcttttttcatgggttggagaagcccagggtatatcaacgatgaaaatatcagggcaaccattctgaaaatcgttaaccgtatcacaaagatccttatggttgccgtttggatctgtcctggtttaccgctaaggtttcctgagttaagtattttgtgtttttctggttccaacagaaacttatattttgacgccgatgagcgtgtattccttatcaaatctaggtacaacaagtcacacaagttcgattcacgaatcttattcttggatgtaccggtttccgcagttttgttctggtacatatacatactgcgaccattcataatgtctttgtacccagtagaggccggtcgcttggaaaaagctctaattgtgtcctccattggcaaacttgtaggagacagcgtgtttgacgaggacgaggtggacggaatagttgcggaagaggaggaggaggaggaccgcgctgcaaactatgccttatacagagacacaaagagcatggaggtcttttacaaccatttagacccggctgagtttagagaaaccatgctgagaagctttgttttcatcgacaccagtaactgtggtttaatgaagcgaactcatttttcgtctgtcctttcgacctacccaaaatctgtcagtaaaagagaggcgcacaagatcagaacattcagacagggattggcggccttgtggagacacttcattgttccctcgaactatagctcgctggcggtaattgagtcgcacgttgccaagctgttcggccacagcgtacagacggacagatccggctatggggttaatagatcgagagctgtgcagcattcgacatcggaatctgagctggactattacagggcaaagattttatgtcagaagttccagcgtctcacttctcccgccacaacccccccgatagcggacctccgtagagacgacaagaaagagatcgagaagcctataggagatatttacgatctgatggaggcaggatcgtgtttgtttggtaattcccaattccccgcgttcaaatcaacagaccaatccaacttcactgccacggtcttgaatggtgacagaaaattgttggccttgcaagcccccacgtcgtttgggaaaaccgtaacttatcttcttcccatgatggttctagccaagacccggcctggtaaattcatccattttgtcagcgtcccttacgttgccttgaagactgcaacgatgaaaagagtgcaacaggcaggccttgtagctgctgatagctccgctcttggtgctattgacttctacacgcaggtggtcaccattgatgtcatagtgggcgtgtttgatggatttgctcaggacgaatgcgtttccaaatgggacgttatgtatggcggatgcaggaagttgggctactttgtcattgatgagttccacgtacttgaggtggag

SEQ ID NO: 173226 - DNA, 285 bp, Saccharomyces pastorianus
agttccgaaactggcattaagttggcattggacccgaacttaattacattggcactaagttctaatccaaactctagccttcattcaccaacgtctgatgaacccgtacctgaatctacaggaaaagcagatactagtattcgactagaaggtgatgagttagagaataaaactaagaaaggcaatgataagaacttaaaatttttgaagaataaagattctctagtcagtaatccacacgaaattaatggtcttgccgttggagcaatgatcccatcatctaag

SEQ ID NO: 173227 - DNA, 123 bp, Saccharomyces pastorianus
cgtgcccagtgctggctagaacacctagctacttacgactttaccctcaaatatctggctggacccaagaatgtcgcagatgcaatataccgtgccgtgcttaccataaccccccaaaacacc

SEQ ID NO: 173228 - DNA, 81 bp, Saccharomyces pastorianus
atggtctacacgttgtttcaagtgcatactttgaaattcaatagaaaggattacgataccctttctcttttttacctcaac

SEQ ID NO: 173229 - DNA, 621 bp, Saccharomyces pastorianus
atgaaattaggtatggaaaaatccttgacagaaaaattacccaaactaaacgtacctttgaacccaaaaggaaagaaacttagagctccaggtcaaccaggtcattatatagaccaggatgaactagaaatagatgaagatgaatacaaagagaaagtacatgaaatgcaaaagttgattggtctagcttcatatgttggatataaatttagatttgacttactatactacatcaacacacttgctcaacatatactattcccctctaggcaagttttagacatgacatatgagttaatacaattcatgtgggacactagagataaacaattaatatggcacaaaaacaaacctaccaagccagataataaactagtcgcaataagcgatgcttcatatggtaaccaaccatattacaagtcacaaattggtaacattttcctactcaacggaaaagtgattggaggaaagtcgacaaaggcttcgttaacatgcacttcaactacagaagcagaaatacacgcagtcagtgaagctataccgctattgaataacctcagtcaccttgtgcaagaacttaacaagaaaccaattattaaaggcttacttactgatagtaga

SEQ ID NO: 173230 - DNA, 885 bp, Saccharomyces pastorianus
atgtctactatcacaggtaccaatgggttaccaacggatgaaaccatcatcatagtcagaaccccagccagtgtcagctcgtcttctgctgcatcaggaatcatcactactacaacagaaccatggacgagtgcttccacaacaacgtctactgagatgtctactatcacaggtaccaatgggctaccaacggatgaaaccatcgtcatagtcagaaccccagccagtgccagctcatcttccgccggcattatcactaccacaacagaaccatggactggtgcttccacaacaacgtctactgagacatctactatcacaggtaccaatgggctaccaacggatgaaaccaccatcatagtcagaactccaaccagtgccagctcttcttccgccgcatcctctaacgtgactagctctgccgccacatcagacataattacaggctcgaaggatctaacatctatagtttcttctaccaccacttcaaccgactctggctcccctaagccttctggatccacagctacggtaacaaacgaacaaactactttaatcacagttacttcctgcgagtctggtgtgtgtaccgagtctgtatcatcggctatcgtttctacagccacaactacggttagtggcgtgactacagaatacactacatggtgtcctatgtctaccacagagccaacaaagccaactacgttgattacagttacttcttgcgaatctggtgtctgttctgagaccacctctcctgccatcgtttctactgctacgaccactgttagcggcgtcgctactgaatacactacatggtgtcctatgtctaccacagagccaacaaagcaaactactttagttacagttacttcctgtgaatct

SEQ ID NO: 173231 - DNA, 69 bp, Saccharomyces pastorianus
gaggtagaccaggatgatgagtttctaaatgactaccaggaattccaaaataaaaaggatgatttttga

SEQ ID NO: 173232 - DNA, 549 bp, Saccharomyces pastorianus
gtaagcaaaaaagataattccacagatgataacatctcgaaatcccagcaagaaatattcaagaaaactatcgattcagaagtactacctgaacagataaacatcgaaaaacatgttgcattacaagattcggataattgtaccccacaaagcgtagaggttcaatctgaatcaattgtcacatcatcgagtgaagatgatgttcaaaatgatgactattcttctgacaaagaaagtcatcacctgcccctggttgtaaaagttatggacaatactgaccaaacatatgataaaccgagcaaggcagaaagcaaaaacaactctgatacaagtatctcaccgaaaggtaataatgaagagttagtacaattggtaggaagtagcgaagcggaaaaaccgaatgctacaccagaatcatcaattataacagatgaaccaattgagccaggaaactcagcagtaaacaaagctggattcctaaacaaaacgtttaattctctcaataagaaaaggaagagacctgttgaaaacaagactcctttaatgaca

SEQ ID NO: 173233 - DNA, 177 bp, Saccharomyces pastorianus
atggatcatccacgtaagtggcaccgtaagctcgtcaattgcaacagccactttatttttaagagccgcggtcattttgttagcatctcttctcaactttggcagcacaatttcgcgatatttaacaggtatcatttgaagggaagaatcgttctccagatactcgtcaattcctcg

SEQ ID NO: 173234 - DNA, 585 bp, Saccharomyces pastorianus
ttacccaaactaaacgtacctttgaacccaaaaggaaagaaacttagagctccaggtcaaccaggtcattatatagaccaggatgaactagaaatagatgaagatgaatacaaagagaaagtacatgaaatgcaaaagttgattggtctagcttcatatgttggatataaatttagatttgacttactatactacatcaacacacttgctcaacatatactattcccctctaggcaagttttagacatgacatatgagttaatacaattcatgtgggacactagagataaacaattaatatggcacaaaaacaaacctaccaagccagataataaactagtcgcaataagcgatgcttcatatggtaaccaaccatattacaagtcacaaattggtaacattttcctactcaacggaaaagtgattggaggaaagtcgacaaaggcttcgttaacatgcacttcaactacagaagcagaaatacacgcagtcagtgaagctataccgctattgaataacctcagtcaccttttgcaagaacttaacagacctgcaggcaagcaagcgttgcgctgccgtcgttac

SEQ ID NO: 173235 - DNA, 306 bp, Saccharomyces pastorianus
gtttcaagggctattagagatggtgttattgaagccaagattaatcacgaggatggctttatcgaaaccacagaattactaaacatttatgatagtgaagatcctcagcaagtatttgatgaaagaatcaaatttgccaaccaattacatgatgaataccttgtttcaatgaggtaccctgaggataaaaagactcaacaaaatgagaaaagtgaaaatggtgaaaatgatgatgatacgctagatggtgatttgatggatgacatgtctgatatctcggatctcgacgatttgggattcttataa

SEQ ID NO: 173236 - DNA, 204 bp, Saccharomyces pastorianus
cccaaacagaagttcacatggataacaaacgaaataattaaagagaaactaaaagagaagactataaaactaataaaaatcaatggtaaagacaatatagcagatttactcacaaaaccagtatcaatttctgattttgatagatttattaaagtattaaataaccagataacaccacaggatattttggcctcaacggactat

SEQ ID NO: 173237 - DNA, 186 bp, Saccharomyces pastorianus
ttacagactttgttcaccacagaagaactagctcaaatcgaagctaatgctaaatatccatcacccagtgataatctagaaggtaatttagactacgtcttcgctaacacagaagaatctgaagaagaagaatctgaagaagatgaatctgatcatgtcaccaaccttgatatatattccgatcgt

SEQ ID NO: 173238 - DNA, 567 bp, Saccharomyces pastorianus
ctatacattaaatcgtccagttcttcatgtgaagaaaaagtgtcgagttcaacaacaaaaccgggagctgattcggaaaaagaccaactgctgggtagactgcttggagttctgaactgggacgttaacgtcagcaaccagggtttaccacgtgaacaactgagcaatcgcttacaaaatttattgagggaaaaaccatcatcttttcagcttgctaaagaaagagccaaatacacgaccgaggtcattgaatacatcccgatatgtagtgactattcgcatgcatctctattgtccacctcggtgtacattgtcaataacaaaatcgtttctttacaatggtccaaaatatccgcatgtcaggaaaaccacccaggattaattgaatgcattcaatcaaaaattcactttatccctaatatcaaaccacaaactgatatttcgttaggagattgttcttatttggatacctgtcataaattaaatacgtgtcgatacattcattatctgcaatatattccgtcatgcttgcaagagcgagctgatcgtgaaactgcgagtgaaaat

SEQ ID NO: 173239 - DNA, 78 bp, Saccharomyces pastorianus
gtcgaatttcttactataatcagaagttcattagtctcaccaaaaaacgataaatctgcaagacaacatgcaggttga

SEQ ID NO: 173240 - DNA, 261 bp, Saccharomyces pastorianus
aaatcgtcgaatcaggatactggatttagctctcaacaccaacatccaaatggacagaacaatggaaacaataatagcagcaccgctggcaacggcaacggatacccatgtaaactggtgtccagtgggccctgcgcttcatcaaataatggtgccttttttacgaattttactttacaaactgcaacgccgaccaccgctattagtcaggacttatatgcaatgggcacaacaggaatacatcagaaaatgcctttttca

SEQ ID NO: 173241 - DNA, 924 bp, Saccharomyces pastorianus
agaccggttgatctggtaaatcaaccgcttggattccaagaaagatataaaattttgcagaaattattcaagcagttacaaaaggcatatgcacacacaaaaggaactaatattgaccttgaaagacttgccactcgcttagaagtccatgttgctaaaaacagcttgtctggtcagagttacaagtttaacatgagcattttactgcgggatgtgcttaaatataaaggagatctctcgaagatcaaaattaatgggcgcccccttaaaggagccaagcctcatttatcctcaattggtaatgcaaactctatcactacaaaatcaaaagcgatggaagctttaaaggctctgattttggattcgaaggtcttggagaaaaatgggtatattgttaaggaaatgcgaaataaaactaatgatgacaatagtacgcaactgtatgcaccttgtttgcgttgcagcacacatttcaaaaaaacagacatcatggaaaagactctatgtaggtatcaccctttgaaaagaatatacaacagagataccaagaaccatcagtatccatgctgtggtgaaactactgattccgtttcttttctaaggctaggatgcaagacgttttttcaccatgtgtttagaggagaatcatatgacgagttatgcaaaatttcgaagttttctagtacagatgacattgatggtgttgagaatgttctttctcttgactgtgaaatggcttttacatcattgggctatgagatgatacgtttaacaattgtggattttttcaccggcaagacactatttgatcatgtaattcagccaataggggatattgtcgatctgaattcagacttcagtggtgtccatgagatgaccgaacctatgccgacgtacaaggaggcactgatgtgttgtatccga

SEQ ID NO: 173242 - DNA, 1053 bp, Saccharomyces pastorianus
atggcgaccccagtgagggatgagacaagatatgttactgacgacaacatttctaacctggttcaatcaaaagtcaaacttcaaaaatcaagtattgatacttctgttgaaatcgaccaaaaagatctaggaatacttaaaccattattacaaaaattaatcatcaagaaggatgagatagctaataatcatagacaggaaagtgaattatttattaccgataagttaatggaagtcattgaaagaatcgataaagtacaaaacaagattcataccttggaaaaaaggctggaaacaattgattccgtagaagatcaacatatcttacacgaaagaaatgattccactggaacatattacttattcgataatatttttgatcaacaaatacaaaacatcgatcctcgtgaaaacgaaatcttatgtaagattatcagagacggtttcgatgaaagtcctgatataatgaacattaacacagttgacatctttagaatcattcgtgatttaaagaaaaaatacacaagcttttttggcagagatgtgagattaaaggtatgggaaaaggtgttggtggacacaacttgtaagaatactgatctattaatgaaggaacttcaaaagttagtattaatggaaaaatggatcctttcaaaatgttgccaagattgtccaaatcttacacacatcttagaagaagcaattcttgggaccttacatgaatctttgagaaatccggttaaacaacgtttacacatctactctgttgatgaaaatgagagaattgaagaagttttaatcaatatcataattgaaacagtaatggacttgagttcgacagactcgcattattcagaaagaaattgcaagtactgtaaatcggaattacacagctcagtaaactgtagaaagaaattaaacagagaacttaggcctaccacgcctaactactcaaaaggtaattattcgcaaggttcaacccaaaaagaatacacaaaaactggcacacaacaagtcagagcttttgacaaagagaaagaaggcttcaaacaa

SEQ ID NO: 173243 - DNA, 162 bp, Saccharomyces pastorianus
atggcatatgcacacggatgctacagtatataccactctcaaacttaccctactctcacactccactccatggcccatctctcactaaatcagtaccaaatgcactcacatcattatgcacggcgcttgcctcagcggtctataccctgtgccatttaccca

SEQ ID NO: 173244 - DNA, 492 bp, Saccharomyces pastorianus
atgcaagaagttcgcggatggtcatgcgtatttaagaatagtcaagtaacaatttgcttactcgttgatgatatgatattattcagcaaagacttaaatgcaaataagaaaatcataacaacactcaagaaacaatacgatacaaagataataaatctgggtgaaagtgataacgaaattcagtacgacatacttggattagagatcaaatatcaaagaagcaagtacatgaaattaggtatggaaaaatccttgacagaaaaattacccaaactaaacgtacctttgaacccaaaaggaaagaaacttagagctccaggtcaaccaggtcattatatagaccaggatgaactagaaatagacgaagatgaatacaaagagaaagtgcatgaaatgcagaagttgattggtctagcttcatatgttggatataaatttagatttgacttactatactacatcaacacacttgctcaacatatactattccct

SEQ ID NO: 173245 - DNA, 69 bp, Saccharomyces pastorianus
atgatatggctcgatgtcttccaagtattctttgtattcctcgtcatttcgcagcattctctccacagc

SEQ ID NO: 173246 - DNA, 144 bp, Saccharomyces pastorianus
ggtggtaccattgaatcagatactacttcacctagacactcgtctaccttcactgcacgaaaccaaaagcgacctggtagtcccaatgatatgattgatttgacctcacaggatagagttaattatggacttgaaaacatctaa

SEQ ID NO: 173247 - DNA, 192 bp, Saccharomyces pastorianus
attgccatctttattggcgtcctccttggcactagcgttggtactttcagtggtagtggcattagtgctggagttggtgctagcagtggtagtggcattagtgctggagttggtgctagcagtggtagtggcattagtgctggagttggtgcttgcagtggtagtagcactatgtctgacgttgatgctggc

SEQ ID NO: 173248 - DNA, 255 bp, Saccharomyces pastorianus
agttctttaacggataagttacctaaagtgaatgtgcccttaaatccaaaaggtaagaaaattagtgcaccaggtcaaccaggactctatataaacaaagaagaactgaaactagacgaagatgactacaattcgaaggtacacaaaatgcaaatgttaataggactagcatcatatgtcgggtacaagtttagatttgatctactatactacattaacacacttgcacaacacatacatctaaacgagtattag

SEQ ID NO: 173249 - DNA, 87 bp, Saccharomyces pastorianus
cgcgtatggtcacccactacactactcggtcaggctcttaccagcttaactacagttgatcggacgggaaacggtgctttctggtag

SEQ ID NO: 173250 - DNA, 315 bp, Saccharomyces pastorianus
ttgatctataacaaaaaacttggtacggttgatttaacattaaaatcattcatagaaaaaatgggtgagaagtataaaaaggaattggataaggttagaaaaagttcaattccacatacatcaatatacagggttgatcccaaaaagggagaactaaaaatgaccgaaaaagaatataaagacggtgtgttgaaattacaacaactactaggagaacttaactatgttaggtacaagtgtagatacgatgttgaatttgcggttaagaaagtagctaggctagtaactttcctcatgaacaggtattttacatga

SEQ ID NO: 173251 - DNA, 924 bp, Saccharomyces pastorianus
atgactttggtcaagcaagcatgcgactgttgtcgcgttcgtcgagtaaaatgtgatggtaaaggaccgtgcggtcgttgtattcaacgcgatttgaattgtacttatctccaaacgttaagaaaacgaggtccaaagtctattaggtcaagaagcccaaaaaaagtagtctgtgtgcagagggttaatgaggacagcagtacaatgactgctccaagggtgctcacgaaggttccaaaggtgctgattgaccaatgtttaaagctgtaccatgacaatttatacgtgatctggcctttactctgctatgatgatcttcacaagcttttggaagaaaaattcgatgactgccacgtttactggtttttggtagctctttcagcagccactcttagcgatttgcataccgggatagaatctgaggaaggaatccattatactggaaggcagttatcagttctctgtatgtcatcgcgccaagacttcgacgatcttagtaccagcggcatattcaagattatgacatattactgcttgcttcgttgttttgctcagtttgctgatacaggaacttcatacagactttcttgtgaagccgttggccttataaaggtcggcgaattgcatcttgaagaaacgtatgaatctctttcatttggtgagcagcagcttagacggaaagtttactatttgcttcttttaacagagagatactattctgtgtatattcgttgtgcgacaagcctggatgtcacgatatcaccaccgcaacctgaagctgtaactgatcctcggctttccctggatagttttctcgagatgatcagggttttcactctaccaggaaaacatttctttgatgctttagctagtaactctgcgaatgtttcttgtacagaagactctttaaaaaaatatggaaag

SEQ ID NO: 173252 - DNA, 186 bp, Saccharomyces pastorianus
ttagtcttaggccagcaacagaaagaatctaagccaacacgcacaatagactcgaatgacgaactacctgatcaccttcttattgattcaggagcttcgcaaacgcttgtcagatcagcccattatttacaccatgcaacacccaattctgaaataaacatagtcgatgctcaaagggatcctcta

SEQ ID NO: 173253 - DNA, 186 bp, Saccharomyces pastorianus
caattcataactttttattatgttggtcttttcgagagcgcaggcgcaagagaatatgcatcaagaggaaaaggtttgttgaagacgaaccagatttccagggcggaccaatcccttcaaacaaaccacgtgatggtgtacacgttgtttcaagtgcatactttgaaattcaatagaaaggattac

SEQ ID NO: 173254 - DNA, 171 bp, Saccharomyces pastorianus
aagagaattagaaacagattttttggcacaaaggcaatgagacttagagatgaagtatcaggtaataatttatacgtatactacatcgagaccaagatgaacattgctgatgtgatgacaaaacctcttccgataaaaacatttaaactattaactaacaaatggattcat

SEQ ID NO: 173255 - DNA, 309 bp, Saccharomyces pastorianus
atgaatgaagaggattctacagaaacgaaaagcctagtcataactaatggcatgtttatcatagacgacatcgagcgtagtaaatataatattcactataagaatgtcccgggaggtggaggaacttttgccattttgggtgcatgcataatatcttccggcaatgtcacatccaaaggtttgaagtggatagtggacagaggctctgactttccaaaggaagttataagggaaatagactcatggggtactgatgtgaggtttcgagatgactttagcagattaactaccaaagggttgaattattag

SEQ ID NO: 173256 - DNA, 1044 bp, Saccharomyces pastorianus
aaggaaatcactgttttcgtttcgggcgctactggtttcattgccttacacgttgtgcatgatttgttgaaagctggatacaaagtaatcggttcaggtagatctcaagaaaaaaacgatggtatattgaagaagttcaataacaatcccaacctttcaatggaaattgtcaaagacatcgctgcaccaaacgcttttgatgatgttttccaaaagcgtggtagggaaatcaaagttgtcttgcacatagcctctccggtccatttcaaaaccaccgattttgaaaaagaccttttaattccagctgtgaatggtaccaagtccattttggaagcaattaaaaaatacgcagcagacaccgttgaaaaggtcgtcatcacctcttctgttgctgcacttgctaaccctatagatataagaaacaacagcttgattcttaccgaggagacttggaacaaggacacatgggaaagctgtcaagctgatgccgttgccgcatattgcggttccaaaaagtttgctgaacaagctgcttggaaattccttgaggaaaaccagtcgagcatcaagtttacgctctccactatcaacccagggttcgtttttggccctcaattgtttgctgattcacttaaagatggtataaatagctcttcaggtattattgctcgattagttcattccaagaccgatgaaaagttctacaattacagcggcccatttattgacgtccgtgacgtttcggaagctcacttggttgcatttgaaaattctgaatgtgctggtaaaagactagtcttgagcgaagatttattttgctcccaagaagcagttgatatcttgaacgaagaatttccccagctaaagggtaagattactactggtgaacctggcagcggtccaagctttctggaaaaatattcatgcaggttcgacaactcgaaaaccaaaaaactgctaggatttaagtttcacaatttcagagattgcattgtcgataccgcatctcaaatgttagaagttcaaggtggagcctcgatttag

SEQ ID NO: 173257 - DNA, 204 bp, Saccharomyces pastorianus
tcagcacccttgatggagtgtaaaagatcaggatcggccactagattatggggcaggtcaatattgggtagatatttaacgttctggtgtcttgtatttatgatatccgtcagattttcgtcgccgatcttttcatcaaaaacccacattctcacctctggctcgaagatatgggaatgcaattctgtgttttccgcaatgact

SEQ ID NO: 173258 - DNA, 408 bp, Saccharomyces pastorianus
atggcgaccctagcgagagatgagataaaatctgttactgacgacaacatttctgcgcaggttcgatcaaaagtcaaacttcaagctactaaggaatttcaagtatgtattgaaaatgatggaaatgatataaaattacttagacagatgttatcgaaattaatcactaaaaagaatgaaattgcacgcaaggctagacgggatgttgatatatcagaactcgaccagttatttgaagtcgatgaaagaattaataaagttaatattaaaattcttagtctagaaaaaaagttactttcaatagattccgatgaagaccaacattctttacacgaaagaaacgattctactggaacatactacttgttcaataccaaaagcgtaaaaaacaaaaaaatattatccaaa

SEQ ID NO: 173259 - DNA, 456 bp, Saccharomyces pastorianus
atgaaaagtataatattcaaattgaaggacttcaaaaacttcataacgataggtccatcctggaagactacccaggacggaaatgataatataagtttatggttttgccacccaggggaccctattcttatgcaaatgcaaaaaccgggcgtaaaattagaattggttgaagtcactgacagtaacattaacgatgatattttaggaggaaaattcataaaaacagcaatctctggctccaaagaagaggccggactgaaagacaacaaagaaagctgcgaaagtccattaaaaagcaaaactgctttaaagagagaaaacctgccacactctgtggctggaactcgaaacagtcctttgaaagtgtcgtatctgacccctgataatggaagcacagttgctaagacctatagaaataacacggcaagaaaattattcgtggaagaacaaagccaa

SEQ ID NO: 173260 - DNA, 105 bp, Saccharomyces pastorianus
tggtcatgtgtgttcaaaaatagtcaagtcacaatctgtttattcgtaaatgacatgatattgttcagcgaagacttaaacgacaatatgacaccaaaactataa

SEQ ID NO: 173261 - DNA, 417 bp, Saccharomyces pastorianus
atgtaccatgttcctgaaatgaggctacattaccccctggtgaacactcaatctaacgccgcaataacacccaccagaagttacgacaatacccttccttcgtttaacgagctatcacaccagagtacaatcaatcttccattcgtccaacgcgaaactccaaacgcatatgctaatgttgcccaattagctacgtcgccaactcaggctaaatcagggtattattgtcgctattatgctgtgccttttcccacatatccacaacaaccacaatctccatatcaacaagctgtacttccttatgccaccattcccaacagcaatttccaaccatcttctttccctgtgatggcagtgatgcctccagaggttcaatttgatggatcattcttgaacaccttacatcctcacacagag

SEQ ID NO: 173262 - DNA, 1545 bp, Saccharomyces pastorianus
ataattgttcagaacttggatctctcctttgataagaaaaccttgttcacggaccttgactttaaggtatcatatggagacaaggtgaccattgttggagagaatgggagcggaaagactacatttctcaagctcttatccggcgtagaggattatccatattctgggtcgattgtaatccaagggagaatcggatttctacctcaacatttcgaagaagttgacggcgagttactggcaattaaagtattactcagatcgttgtatgatgacgagatcaacgaatttctagaattgcatttggaatccttttcacacgagtggctccaggagctcaactctctagggggacacgagatattcaagcaattatcccacattggactgagagatgaaatattgaaacgtcctttcaagtcccttagtggcggtgagaagacaaaaatccttctctgtgcactgagcatcttggatcctgactttattttgctggacgaaccaacaaatcacctggacaacaaaggaattgaatggttagagtcttttttgaaaagatacatgggtgctgtcgtaatagttactcatgatcgtagtatagtcaatgcagtttcaaacagtatttcggaattgtcacctcacaccaaaaagtttacacattttagaggtggctacaagcactacttggaagaagaaaataagagacgacaaaaattaactgtagagagacgcttccaggacagggagctcaaaaaactaaagtctaaggctgcaaaagcacaatctaaagttaagacacgaatcgttaggtcggggtcagatagagataaactaagttacaacaataaagaacaaagggctcagaagggaattatgggtcttgtaaatcagctttctgataaagttgagaatcttaatgataatttagtggagattattcctgacagatcacagatatccttcgatttcgatgatctttctgcgtttagctctcttttggggatatctgtaaccggtgtatcaaaatcatacaaaaagcaaatattcaccaatatatcctttacgttgacaagaggtgaaaagctggttatccagggaccaaatggttctggcaaaactactttaaatcggatcctcatgggtctaactgaaccagaccacgggacagtttctatcagcgggaatgccgttgttgggtacttggaccaggagcaagagaaccttcccttggaaaagtctccgatagagctgctagaagaagatactaaaatcaatgtatcaagacagtccgcaattcgtaatttacgtgatttcgggatttataaatggcacgatttaaagagtcctttgaaaaatttgagtgtcggttgccgtcgtaaatcacagctctgtcagattattatgaggaaatgctctatacttgttttagatgagcctaccaaccacattgattttccaagtttagaaattattgaagacgctttattaacatttccgggtattattattgctaccacacatgacagatactttacagaaaaaattgcc

SEQ ID NO: 173263 - DNA, 225 bp, Saccharomyces pastorianus
caatcgatcagtaattgtcccatcgggttagtttcaaaaaacacaatcaactcagcttccactattgcagagtgggtagcatgtccatggaaatatatcaacgttgttggttcaggcagatatgtgagcaataaacctgataaaattaccagatatgatctactcaaggctgcccaggaagcggaaatgcaggagttgcttacaagaaatgatatgaaaggttga

SEQ ID NO: 173264 - DNA, 213 bp, Saccharomyces pastorianus
acatctccacacacgactaacacaaaggttacaactcgtaattatcatagaacaaatagttcaaaaccaagagcagcaaaagctcacaatattgctacatctagtaaattctcaagggtgaacaatgatcacattaatgaatcaaccgtttcatcacaatacttaagcgatgacgacgaacttagtcttaggccagcaacagaaagaatctaa

SEQ ID NO: 173265 - DNA, 138 bp, Saccharomyces pastorianus
aaccctggaaatcacataccagatataactttcgtaacagacaacgaaaggaagcgttacgaaagcatgtgggtaagcaacagacaccgtcatttgaacctgttgagctggtggccctctataacgggtgattccgga

SEQ ID NO: 173266 - DNA, 171 bp, Saccharomyces pastorianus
cattttcttcatggtagcgcctatgcttcggttacttctaaggaagtcccatcaaatcaagatccgttagccgtttcagcttccaatttaccggaatttgatagagattccactaaggttaattctcaacaagagacaacacgacctgcaggcatgaagcttgcactgccg

SEQ ID NO: 173267 - DNA, 480 bp, Saccharomyces pastorianus
accaaattacagctactatactacttatcactattactgggcgtatacgaaaatagacgcgtgaataacaagacgaagttgttagaaaggttgaacagtcctcctgaaatcttggtagatggtatcttaagcagatttaccgtgataaagcctggacagtttggaagatcaaaggatcgctcctatttcattgacccacaaaatgaagataaaatcttatgctacatcttggcaatcataatgcatttggataacttcattgttgaaatcacacccttagcacacgaattgaacttgaaaccttccaaagttgtcagtttgttcagggtacttggtgctattgtcaaaggtgccacagtggctcaagctgaggcttttggcattccaaaaagtactgcagcttcttataaaattgccactatgaaagttccatttaagctacctgaaatgacaagaagaggaagaggtccaagacgttag

SEQ ID NO: 173268 - DNA, 231 bp, Saccharomyces pastorianus
atgctatctaagggtgggaagactagaagtctaactgttcattatatttttgccatgggattatacagagcattgtatattcctaactggatttggaggtacagcacggaagataaaaaattggacaagattgcctttttcgcgggacttttgcaaactttgttatactctgatttcttttacatttactacactaaagtcatcagaggaaaaggtttcaaactgccaaaa

SEQ ID NO: 173269 - DNA, 87 bp, Saccharomyces pastorianus
agaggaccccaatttatacacacttatgttaatattacagaaaaattactactaaaatcacctaaacataaaaatattctactcttc

SEQ ID NO: 173270 - DNA, 996 bp, Saccharomyces pastorianus
attccgtatacaccttatcatatgtcgcctatgtactttccacctgggccacaatcacagtttccgcagtatccatcatcagttggaacgcctctgagcactccgtcacctgagtcaggtaatacatttactgattcatcctcagcaaagtctaatatgacatccactaatcaacatgtcagaccaccaccaatcttaacctcacctaatgactttccaaattgggttaaaatatacatcaaatttttacaaaattcgaatctcggtgatattattccgacagcaacaagaaaagccgtacgtcagatgactgatgacgaactcaccttcttatgtcacacctttcaactatttgctctatctcaattcttacccacctgggttaaagacatcttatctgttgattatacagatatcatgaaaattctttccaaaagcattaacaaaatgcagtctgatactcaagaggtaaatgacattacgaccctagcaactttgcattataatggaagtacacctgcagatgcatttgaagcagaagtcacaaacattcttgacagactaaacaacaatggcattcctatcaataacaaggtagcatgccaattcattatgagaggtctatctggcgagtacaaatttttacgctacgcacgtcatcgatgtatacatatgacagttgctgatctgttttcagacatacattctatgtatgaagaacaacaggaatcaaaacgtaataaatctacttataggagaagtccgagtgatgagaagaaagactctcacacctatacgaatacaaccaaacccaaatccataactcggaattcccaaaaaccaaataattcacaatcaagaacagccagggctcataacgtatccacatctaataactttcccggccctgataacgatctcataagaggatcaactactgaaccgattcaattgaagaataaacacgaccttcaccttaggccaggaacttactga

SEQ ID NO: 173271 - DNA, 546 bp, Saccharomyces pastorianus
ttcacgacttggaaacggagttctaccggcagtcgcaatttggggggcatgactaacctcgattttgacgctttcgagaaagcaatctctttgagcgacacagcacctgaggctgtagctgatgctgcgttgcagcgcattgggcttacgagactgaccaagaaatcgatggacatcaacgagctcaatcggtcggaagatctcagcagaggtttatccagctatccaacacagatgttcaatctgataaaggagaaatctgaggtgcctttggggcacgttcataaaatttggaggaaagtcgaatcacctcccgaagaagcactgaagcttcttctagccctgtttgaaattgaaccagagtcgaaggccattgtagttgcaagcacaaccaaccaagtggaagaattggcctgctcttggagggagtatttcagggtggtatggatacacgggaagctgggtgctgcagaaaaggtgtctcgcacaaaggagtttgtcactgacggtagcatgcgagttctcatcggaacgaaattagtgact

SEQ ID NO: 173272 - DNA, 141 bp, Saccharomyces pastorianus
gaacatgcgtatatatacaataccttccaagcatttgccccatttcatttattgccaacatgggtaaaacaaattttagaaattaattattctgacatccttacagtcctttgtaaaagtgtgtccaaaaatgcaaactaa

SEQ ID NO: 173273 - DNA, 96 bp, Saccharomyces pastorianus
gaaactgcatattatagaagcatcttagtgcctactggtttcccattgactactggactaggactctctgttaaagtactaaataagaaatggtaa

SEQ ID NO: 173274 - DNA, 78 bp, Saccharomyces pastorianus
atggaatcccaacaattatctaattacccacatatatctcatggtagcgcctgtgcttcggtaacttctaaggaagtc

SEQ ID NO: 173275 - DNA, 258 bp, Saccharomyces pastorianus; identical to SEQ ID NO: 173224

SEQ ID NO: 173276 - DNA, 267 bp, Saccharomyces pastorianus
  modified_base (220)..(220): a, c, g, t, unknown, or other
  modified_base (256)..(256): a, c, g, t, unknown, or other
aatgaactttacctattgttgaacgcatccaattacataatgcatgaccttcaaagagcatttaaaggctgcgtggacggggatgatataaaaggattgaaatttgacttggtacttagacaatggtgtgatatgaatccggcactcgaatttagggtcttcgttaagaatgcgcatatcgttggggccacccagcgtgatttaaattattatgactatntagatgagttgtcagataccttcaaggacccttatnggatgacatag

SEQ ID NO: 173277 - DNA, 84 bp, Saccharomyces pastorianus
gtgagtggtagtggagttggaaatgcaattcataaatttttattatgttggtcttttcgagagcggaggcgcaagagaatatgc

SEQ ID NO: 173278 - DNA, 297 bp, Saccharomyces pastorianus
atgaacattaaaactcatgtaaaagatggaatcattcacgtaaaaaaggatgacttaattgatcatcctacatatgatttcaaagtaaatgcaatacaaccaacttcttctaaaaaggttagactgaagaccaaagttgtaagcttgaaagatgctcataaacgaatgggacatacaggagttcaacaaattgaaaactccatcaaacataatcactacgaagaaagtattgatttaattaaagaaccaaatgaattttggtgtgaaacttgtaaagtttcaaaagccacgagaaga

SEQ ID NO: 173279 - DNA, 120 bp, Saccharomyces pastorianus
atgagggttgtaaggcaaagtggctcagcattaagtagggctaaaaagagtcgcaaatatacatcgtaccgagtgatgaacgtggttttgaacaccttgttctcttttgttctcgctccc

SEQ ID NO: 173280 - DNA, 135 bp, Saccharomyces pastorianus
tcatacatttttgatagacttcgtatgtggagtactgttttatggcgcttatgtgtattcgtatgcgcagaatgtgggaattcctattataggggtgccgaggtgccttatgaaacccttttccgtgcctgttaa

SEQ ID NO: 173281 - DNA, 369 bp, Saccharomyces pastorianus
attgcatttggcggcttcatctttggttgggataccggtaccatttctggttttgttaacctttctgactttatcagaaggttcggtcaaaaaaatgacaagggaacctactacttatcgaaagtaagaatgggtttgatcgtctcaatattcaacattggctgcgccataggcggaattgtcttgtcaaaagtcggtgatatatatggtcgtcgtattggattgattacagttactgccatttacgttgtaggcatcctaatccaaataacctccataaacaagtggtaccaatacttcattggaagaattatttctgggctaagagtgggaagaattgctgtcctttccccaatggtcatctcctga

SEQ ID NO: 173282 - DNA, 609 bp, Saccharomyces pastorianus
atgtctggaaggcagatcaaagagttgtattataaagtatggagcaacttgcgtgaatcgaagacagaggtgctgcagtactttttgaactgggacgagaaaaagtgccaggaagaatgggaggcaaaagacgatacggtctttgtggaagcgctcgagaaagttggagtttttcagcgtttgcgttccatgacgagcgctggactgcagggtccgcagtacgtcaagctgcagtttagcaggcatcatcgacagttgaggagcagatatgaattaagtctaggaatgcacttgcgagatcagattgcgctgggagttaccccatctaaagtgccggattggacggcattcctctcgatgctgatagggctgttctacaataaaacatttcggcagaaactggagtatcttttggagcagatttcggaggtgtggttgttaccacattggcttgatttggcaaacgttgaagttctcgctgcagataacacgagggtaccgctgtacatgctgatggtagcggttcacaaagagctggatagcgatgatgttccagacggtagatttgatataatattatgtagggattcgagcagagaagttggagag

SEQ ID NO: 173283 - DNA, 375 bp, Saccharomyces pastorianus
atggaatcccaacaattacatcaaaattcaccaaatcttcatggtagcgcctatgcttcggttacttctaaggaagtcccatcaaatcaagatccgttagccgtttcagcttccaatttaccggaatttgatagagattccactaaggttaattctcaacaagagacaacacctgggacatcagctgttccagagaaccatcatcatgtctctcctcaacctgctgcagtaccacctccacagaatggacagtaccaacagcacggcatgatgaccccaaacaaagctatggcctctaactgggcacattaccaacaaccgtctatgatgacgtgttcacattatcaaacgtcacctgcgtattatcaaccggac

SEQ ID NO: 173284 - DNA, 915 bp, Saccharomyces pastorianus
atgataaaaatgtggaggttacaaattgtactggtgccgccaagtgctcaagatattatcacatttctcgaagcacgcttgaatactccacaatcagtgtctcctatggtccagtataatgaagatataattacgcacaacaacagtatcaataactgtagcgacccctctcctacgagcccgtcttcgcaaaattctattcagtcgaatcgtagtagtgatttcattaactacctcccgaattgtaaaaagtttttacattttacggacggtgacaatacccttttacaactatctaatgaaattttaactaaatttgatagactttatccaaatttcaaagaatccattgaaatcgtatctctacaagataggcatggttgtgatttggactctgaatttataataaaagacgtatttgaaaatgatggtgtggttttggtaattttaaaagatgaattagactggagtagaaatcaacatatttcacttttacaattggcaagacagcggagacggcaggacaacaagccatccacaaaatccatcgttactgaaaagagaaaaaagatctctaaggaagacttatcttctatatcaagtaaagatacaatgcatctaatagctaaaagctcgctcaagaataacttcattaataaatcaagagtatcaacgccgctaatgaacgaaattctaccgcttgcaagcaagtatgatgcactgaataaagaaaagtgtcccatgccacttacttccacagtagtggcatcaaatgtacacaaagacgtaaaagatcacgctcgtgttaaagagggagttgtaacgcaagggagtgataacaataaagaaaatataccttcatccactcaacaacagaaaaatgatggcgctaaaagggccgaatcaaaggattta

SEQ ID NO: 173285 - DNA, 714 bp, Saccharomyces pastorianus
gaaatatatattagtggtactgaaggtaacgaacaggatattgagatcgattatattgattaccatgacccccatatagacgtcgcggatgaaggtactaacacaccttcgcgggtacagggttatgggctaagagacgattctatgttatcagacgggactgcgccgtatgctgaacccaacgagaattctgctctgttgagtaagaaatccactttgagaactcaccagtctaccaagacaaacgacatacctgacagtaatgcagacgatgaaatagactttacttatgcttttggtagatctaagtcaaagaaaaacatcacccgtgggaccttaaccacacatttctcgctcaatgggtcgaatgttttcagacaaccgaagactattgagccgcctgtacaagaacaacagggcgattcgccatcagcaacaccaccgaaaaaaatcagaataccagcaggggtcaaagtcttctttggtaggcctacactcggcgataaagactatgagtggtgcctgcaaacagaatgtgacgcggagacagattctattcaatgctgcaggtgggcaaaccaaggcagagatcacgccgaatacctatcgcaagtgtgggtgcttgctgccggcccaagaggtttaatagaaagcacaagaagatgggcagtagacggtggactgcacttccacggagaaagcttcgcattatga

SEQ ID NO: 173286 - DNA, 711 bp, Saccharomyces pastorianus
atgactactgtcactggtaccaacggtcaaccaactgacgaaactgtcattgttgtcaaaacaccaacaactgctaacaccatcgtaactacgaccaaaccatggactggtactttcacctctacatccacagaaatgaccacagtcaccggtactaatggtcaaccaactgatgaaaccgtgattgttatcagaactccaaccagtgaaggtctaatcagcaccaccactgaaccatggactggcactttcacctctacatccactgaggttaccaccatcaccggtactaatggtcaaccaactgacgaaaccgttattgttatcagaactccaactagtgagggtttggttacaaccaccactgaaccatggactggtactttcacttcgacttccactgggatgaccaccatcaccggtactaatggtttgccaactgatgaaactgttattgttgtcaaaactccaactactgccatctcatccagtttgtcattatcttcttcaggacaaatcaccagctctatcacgtcttcgcgtccaattattaccccattctatcctagcaatggaacttcagtaatttcttcctcagacacttcttcctcagacacttcttctctagtcacttcttctctagtcacttcttctctagtcacttcttcagtcatttcttcttcagtcacttcttctctagtcacttcctca

SEQ ID NO: 173287 - DNA, 117 bp, Saccharomyces pastorianus
caattatatcaaaattcaccaaatcatcatggtagcgcctatgcttcggttacttctaaggaagtcccatcaaatcaagatccgttagccgtttcagcttccaatttaccggaattg

SEQ ID NO: 173288 - DNA, 102 bp, Saccharomyces pastorianus
gatctcgtaggcaaaggactggttgccaatgatttttttgtcaacacaattagcgaactgagcagatgcttccaacaagccgtgcagctttctcggagctaa

SEQ ID NO: 173289 - DNA, 390 bp, Saccharomyces pastorianus
atgcttggacatgctaacttccgaagtattcagaagtctcttaagaagaatgcagttacatatttgaaggaatcggatattgaatggtctaacgctagcacatatcaatgtcctgactgtctaatcggcaaaagcacgaaacatagacatgtcaaaggatcacgactaaagtaccaagaatcatatgagccttttcagtacttgcacaccgatatatttggtcctgtacatcacttaccgaaaagtgcaccttcttactttatatcgtttacagatgagaaaaccagattccaatgggtgtacccattacacgaccgtcgtgaagaatctatcctcatgttttacatcgatattagcattattaagaacaattcatgctcgcgtctagta

SEQ ID NO: 173290 - DNA, 126 bp, Saccharomyces pastorianus
gaatctgtatttctacatactaatattacgattattcctcattccgttttatatgtttcattatcctattacattatcaatccttgcacttcagcttcctctaacttcgatgacagcttctcataa

SEQ ID NO: 173291 - DNA, 756 bp, Saccharomyces pastorianus
atggaatcccaacaattatctcaacattcacccatttctcatggtagcgcctgtgcttcggttacttctaaagaagtccaaacaactcaagatccgttagacatttcagcttccaaaacagaagaatgtgagaaggttttcactcaggctaattctcaacagccaacaacacctccctcagctgctgttccagagaaccatcatcatgcctctcctcaagctgctcaagtaccattgccacaaaatgggccgtacccacagcagcgaatgatgactccccaacaagccaatatttctggttggccagtatacgggcacccatctttgatgccgtatccaccttatcaaatgtcacctatgtacgctccacctggggcacaatcacagtttacacaatatccacaatatgttggaacacatttgaacaccccgtcacctgagtcaggtaattcatttcctgattcatcctcagcaaagtctaatatgacatccactaatcaacatgtcagaccaccgccaatcttaacctcacctaatgactttctaaattgggttaaaatatacatcaaatttttacaaaattcgaatctcggtgatattattccgacagcaaccagaaaagccgtacgtcagatgactgatgacgaactcaccttcttatgtcacacctttcaactatttgctctattctcaattcttaacccagctgggtttaaagacatcttatctgttgattatacggatctcatgaaaatt

SEQ ID NO: 173292 - DNA, 282 bp, Saccharomyces pastorianus
acagcaccactaactccccaacaacagcttttacaaagacaacagcaagctttggaacagcagcagaatggtggagccataaaaagctcgaataaaagaagcaacaccaatgcaagtagtaataatagtaataatgggaataattcagataaaccgaaggccaaacgacccagaaagaacgcaaaaaagagtgatagtggcacaccagctcctaaaaagaaacgggtgactaagaagaaacaaagcgcaagtagcacacccttctccaccacaatttcatag

SEQ ID NO: 173293 - DNA, 342 bp, Saccharomyces pastorianus
atgtccttcttaccattcggagaacaaggaataatttggaatcataatcacaacaaactaaaaccatcagggtttaatgctatagtattatgcaaagatgctaatagttacggatacaaattttttgtaccatccatcaaaaaaattgtcacttccgataattacacaattccagactacgcagtggatccaatattaaggaacacacagaacatatacctagatgatccaagtagatcagatacgctcaatgaagcagaaaactcagaagcagtttcaaggttacatgatgcattggaaaattacgaagatgatcataaacaagttacactacttacagac

SEQ ID NO: 173294 - DNA, 384 bp, Saccharomyces pastorianus
atggtatctagtgcagttaaatgtggcatatgtcgcggagttgatggtaaatataaatgtcctaaatgtggcgtacgatattgctccttgaaatgctataaagatgctgcaaagcatgttcataaggaaagcgaacaacccagggctggtacagaagctaatgtggaagttgctaataacgataagatcataaacagttcactcgcaatgaataaaacattaaagacgaaggcattcgatgatatatatcaaaatagcgcagaattgcaagagctgttgaagtacaacacggtgaagttccatttggcaaaggtttatagaattttgtccagtactgttaacgatggaagttctggaaaaatgaacagcgatctgcaaaaagaa

SEQ ID NO: 173295 - DNA, 447 bp, Saccharomyces pastorianus
ttagtattaatggaaaaatggatcctttcaaaatgttgccaagattgtccaaatcttacacacatcttagaagaagcaattcttgggaccttacatgaatctttgagaaatccggttaaacaacgtttacacatctactctgttgatgaaaatgagagaattgaagaagttttaatcaatatcataattgaaacagtaatggacttgagttcgacagactcgcattattcagaaagaaattgcaagtactgtaaatcggaattacacagctcagtaaactgtagaaagaaattaaacagagaacttaggcctaccacgcctaactactcaaaaggtaattattcgcaaggttcaacccaaaaagaatacacaaaaactggcacacaacaagtcagagcttttgacaaagagaaagaaggcttcaaacaaaaacctggtcataattga

SEQ ID NO: 173296 - DNA, 126 bp, Saccharomyces pastorianus
atggaatctatatttctatataccaatattacgattattcctcattccgttttatatgtttcattatcctattacattatcaatccttgcacttcagcttcctctaacttcgatgacagcttctca

SEQ ID NO: 173297 - DNA, 87 bp, Saccharomyces pastorianus
aaaatcaactatcatctactaactagtatttacgttactagtatattatcatatacggtgttagaagatgacgcaaatgatgagaaa

SEQ ID NO: 173298 - DNA, 162 bp, Saccharomyces pastorianus
agaaacagatttttaggcacaaaggcaatgagacttagagatgaagtatcaggtaataatttatacgtatactacatcgagaccaagatgaacattgctgatgtgatgacaaaacctcttccgataaaaacatttaaactattaactaacaaatggattcat

SEQ ID NO: 173299 - DNA, 1716 bp, Saccharomyces pastorianus
tcaagccttggtgatatacctgcgaataatttatctccggctagttcgaatccccattcaacggctagcgcatctcctattaggaccaaacaagaagattcaaaaaactcctctgctctggctttggctgaaccggctacggctgaaccggctatcgaaataccaaagaaacccctctctgcctataccactgtttcgattctgtgtttgatgattgcgtttggcgggtttatctttggttgggataccggtacaatctcgggttttgtcaacctctccgacttcgtcaaaagatttggccaaaaaaacgacaagggaatttactacctgtcaaaggtgagaatggggctgattgtttcgatattcaacgttggttgcgccgtgggcgggattcttttgtcaaaagtaggtgatatatatggccgccgtattggtttaattgcggtcacgtctatctatgtcgtcggcatcctagtccaaatcacctcgacacataaatggtatcaatacttcatcggcagaatcatttctggtttaggcgtgggaggcattgccgtcctctccccaatgctaatatccgaggtgtctccgaaacagatcagaggtaaccttgtccaactgtatcaactgatggggacaatgggtattttcctgggctactgcaccaactatggtacaaaaaactatgacgactcaacccagtggagggtcggtcttggtctttgctttgcttgggccacgttcatgatcagcgggatgatgttcgtgcccgagtccccacgtttcctggtcgaagttggtaggcatgaagaagccaaacgttccatatcgaaatctaacaaggtttcagtcgatgaccctgctctattagctgaatatgacgctataagggcgggtatcgagctcgaaaagctagcaggtaacgcatcatggggtgagcttctctccacaaaaacaaaggtgttccaacgtgtgatcatgggagtcatgatccaatctttgcagcaactaaccggtgacaactacttcttctattacggcacgacaatcttcaagtctattggtctaaaagactcctttcaaacatcgatcatcattggtgtagtcaattttttctcttcattcgtggcaatatacactattgagaggtttggacgccgtacgtgcctgttgtggggtgccgctgccatgctatgctgctttattgtgttcgcttccgtcggtgtaaccaagctttggcctcagggaagtggtcatcaggatatcacatctcaaggtgctggtaactgtatgattgttttcaccatgtttttcatttttgcgttcgctaccacctgggcaggcggctgctttgttatcgtgtcagaaacctttccgcttagagtcaaatcaagaggtatggcgatcgcaacggctgcgaactggatgtggggtttcataattagtttcttcactcctttcatcaccggtgccatcaacttttactatggctatgttttcattggctgtctatgtgttgccttcttttacgtctttttctttgtcccagaaacgaagggcctgacgctagaagaagtcgacactatgtggctagaaggcattccaccatggaagtcagcttcatgggtgccaccggacagaagaaccgcagattacgatgaggaggctgtggctcatgacgatagaccagcttacaaaaggtttttctccaactga

SEQ ID NO: 173300 - DNA, 255 bp, Saccharomyces pastorianus
aaaaaaagaatggtctctagcgggatcgaaccgctgatccccgcgttattagcacggtgccttaaccaactgggccaagagaccattgttatctgttttccaccctccctccacactaccaaaccaacgtcactactgtgtgccaacaccaccgctcattatctctgtgccacaaaaatcaacttacactgtcattcgaatttccggcaaactccgactgagaaatgttcgtactacttcctttctagggtacat

SEQ ID NO: 173301 - DNA, 363 bp, Saccharomyces pastorianus
atgacttatgaagaacatgcgtatatatacaataccttccaagcatttgccccatttcatttattgccaacatgggtaaaacaaattttagaaattaattattctgacatccttacagtcctttgtaaaagtgtgtccaaaatgcaaactaacaatcaagaattaaaagattggatagctcttgccaaccttgagtacaacggaagtacatctgctgatacatttgaaattacagtcagcacgatcattcaaaggctaaaagaaaacaatatcaatgttagcgacagattggcctgtcaactaatacttaaaggtctatccggtgacttcaaatacctacgtaatcaatatcgtaccaaaacg

SEQ ID NO: 173302 - DNA, 1059 bp, Saccharomyces pastorianus
ttgagagataattatgtcattacaggggcaaacgataatatgatcagagtctatgattcgataaataaaaaatttctattgcaactatcaggtcacgatggtggggtttgggctttgaaatatgtacatgatggtatcttggtcagcggctccgccgacagaacggtgcggatctgggatatcaaaaggggttgttgtacccatgtattcaagggccacagctcaacggtgggatgtcttgatctactagaatacaaaaatacgaaatatgttgtaactggttcgagagataatactttacatgtctggaaacttccggaggtgtcttctactactgatcatcaagctgaacacgattgtccattgatatttcataccccggaggaaaatccatattttgtaggtgtcttaagaggacacactgcatctataagaactgtctctggccatggtaatattgtcatcagtgcctcttatgatagcacactgattgtgtgggatattgccgaaatgaagtgtctttatattttaagtggacacactgatcgtgtatatcctgctatctatgactatgaaagaaaaaggtgtatctctgcaggtatggattctaccataagaatttgggacttagaaaatatttcgaataatggagagtgctccaatgcaacgaattgtgcatatccatgcaccaagattcttgagtcaatgtatgccttacagggtcatacggcattggtcggtttattaaaactgtctgataaatttttagtcagtgctgctgcggacggttcgataagagtttgggatgcaaacgattactctagaaaattttcttatgatcacaccgacttcagctcgatcacggcatgttacgtttctgatagtattttggcaagcgggtctgagggccaattagatatttacaatttaagaaatgggcaattagttcattcgaatattctgggaggcgctgatcatatttggtcaattgagtttaggggcaatacgcttgttacagcagcggagaaagacgggcagagtttcttggcatttttggac

SEQ ID NO: 173303 - DNA, 1278 bp, Saccharomyces pastorianus
atgcgtagtttagaacctccgagatcgaagaaacgaattcacctgattgcagctgtaaaagcagtaaaatcaatcaaaccaatacggacaaccttaagatacgatgaggcaatcacctataataaagatattaaagaaaaggaaaaatatatcgaagcataccacaaagaagtcaaccaactattgaaaatgaatacttgggacactgacaaatattatgacagaaaagaaatagaccctaaaagagtaataaattcaatgtttatcttcaacaggaaacgtgacggtactcataaagctagatttgttgcaagaggtgatattcagcatcctgacacttacgactcaggcatgcaatccaataccgtacatcactatgcattaatgacatccctgtcacttgcattagacaataactactatattacacaattagacatatcttcggcatatttgtatgcagacatcaaagaagaattatacataagacctccaccacatttaggaatgaatgataagttgatacgtttgaagaaatcactttatggattgaaacaaagtggagcgaactggtacgaaactatcaaatcatacctgataaaacagtgtggtatggaagaagttcgtggatggtcatgcgtatttaagaatagtcaagtaacaatttgcttattcgttgatgatatgatattgttcagcaaagacttaaatgcaaataagaaaatcataacaacactcaagaaacaatacgatacaaagataataaatctgggtgaaagtgataacgaaattcagtacgacatacttggcttagaaatcaaatatcaaagaggtaaatacatgaaattaggtatggaaaactcattaactgagaaaatacccaaattaaacgtacctttgaatccaaaaggaagaaaacttagcgctccaggtcaaccaggtctttatatagaccaggatgaactagaaatagatgaagatgaatacaaagagaaggtacatgaaatgcaaaagttgattggtctagcttcatatgttggatataaatttagatttgacttactatactacatcaacacacttgctcaacatatactattcccctctaggcaagttttaggcatgtcatatgagttaatacaattcatgtgggacactagagataaacaactgatatggcacaaaaacaaacctaccgagccagataataaactagtcgcaataagtgatgcttcatatggtaaccaaccatattacaagtcacaaattggcaacata

SEQ ID NO: 173304 - DNA, 234 bp, Saccharomyces pastorianus
aacattaaaactcatgtaaaagatggaatcattcacgtaaaaaaggatgacttaattgatcatcctacatatgatttcaaagtcaatgcaatacaaccaacttcttctaaaaaggttagattgaagaccaaagttgtaagtttgaaagatgctcataaacgaatgggacatacaggagttcaacaaattgaaaactccatcaaacataatcactacgaagaaagtattgattaa

SEQ ID NO: 173305 - DNA, 705 bp, Saccharomyces pastorianus
atggataccgataatttcgaagatgtgaaggcttatacgattggtgagaacttttgtcacgctgaaactaggaaatcacctgtggttgatggtatagttagaagaaatactcatggtaaagaagttagatatattactgagttatcagacgaagagaaaaccattgctgggaaagtttccaaagctttttcacaaatgatctgtggtttcgatttgcttcgcgtttctggtaaaagttacgtcattgatgttaacggattttcttttgttaaggataacaaagcttactatgattcatgcgccaatatattgagaagtaccttcattgaagccaaaaagaagatggatatggaaaagaagaatctgcccattattcgtgaagaaaaggaacaaaagtgggtattcaaaggactggctatcattatccgtcacgcggacagaacaccaaaacagaaattcaaacattcattcacttcgcctatttttatatcgttactaaaaggtcacaaagaagaagttgtcattcggaatgtaaatgatttaaagattgttcttcaggccttaagaattgcgttagatgaaaaagcaggaaatccagctaaaattaaagtgttagcaaacgctctagaaaagaaactgaattttcccggtacgaaaatacaattgaaaccggttttaaataaagagaacgaagtggaaaaagtg

SEQ ID NO: 173306 - DNA, 177 bp, Saccharomyces pastorianus
aaatcggaattacacagctcagtaaactgtagaaagaaattaaacagagaacttaggcctaccacgcctaactactcaaaaggtaattattcgcaaggttcaacccaaaaagaatacacaaaaactggcacacaacaagtcagagcttttgacaaagagaaagaaggcttcaaacaa

SEQ ID NO: 173307 - DNA, 651 bp, Saccharomyces pastorianus
tctcatttcgaaaatggcactgccaatttttttaggttgaacgacagtcaagacgatgtgcctataacatttaaagtctcagaaagtactgctctctttggaaacgtgatcaagtccgattttttctccttttcgtccaagattgacagctctaaacgaatattgattactttcgtcatatttctgataataataggattcatgatactcatggcttggttattgattcgagttctttccaagaaacctaatgcgtctccagtgccggggaatactgctcttcccaaagacacatttgagtcatatttttcttatttgttatacgaaatcactcaatttccaccattcgtgctttctttcgtggtactgataattttgattgtgtcagctgaaaactgcaatgttcactccttttacgtcctactttttgtgtggttgtttatagcagacttcttaggtttaggttattcggtgtttagatttaatgccgggagcttcgacgacaattgtgatacaaaacttttactggaggtaataacacgtaaaccagcagtaaaagggaaggaatggagaactatcacatacaacatgaatcaatatttgtttgacaatggattatgggataccccatactatttctacagtgaaaac

SEQ ID NO: 173308 - DNA, 168 bp, Saccharomyces pastorianus
atggagacttttactgggtatctaaaaagtacttgcttccatcaaatatctccgtaccaaccatcaataatgtccatacaagtgaaagtacacgcaaatatccttatcctttcattcatcgaatgcttgcgcatgccaatgcacagacaattcgatactcacttaaaa

SEQ ID NO: 173309 - DNA, 177 bp, Saccharomyces pastorianus
tggtacaacaacagcatcctgctcaacaaacgcctattaactcttctgcaacaatgtacagtaatggagcttcccctcaattacaagctcaagctcaagctcaagcacaagcacaagcacaagcacaagcacaagcacaagcacaagcacaagcacaagcacaagcgcaagcacaag

SEQ ID NO: 173310 - DNA, 294 bp, Saccharomyces pastorianus
atgtcccaatctaacacacatgaatcgtcgcacaccagtaaatctaaagatttcagacactcagactcgtacagtgacaatgagactaatcatacaaacgtaccaatatccagtacgggtggtaccaataataaaactgttccgcagacaagcgaacaggagactgagaaaaggattatacaccgttcaccttcgatcgatacttcctcatcagaaagtaattcactacaccacgtcgttcctatcaaaacgtcagatacctggggatcctctagagtcacctgcagcatgcaa

SEQ ID NO: 173311 - DNA, 135 bp, Saccharomyces pastorianus; identical to SEQ ID NO: 173151

SEQ ID NO: 173312 - DNA, 237 bp, Saccharomyces pastorianus
ggatcccgtggcggtggtaatgtgaagtcacaactttcttcagcgtttatttcgaagttgcttggaggaggtggtggaggcggaaggaatgtatcctcatttaccgatgatggcaccatcggattatccagttcttcgatttcgtatccaggcggtggtggtggtggtggtggaagtgctaagtcgctgtcctcttcaaaaccaggaggtgggggcggtagtccactcatctttctt

SEQ ID NO: 173313 - DNA, 249 bp, Saccharomyces pastorianus
atggaatcccaacaattatctcaaaattcaccaaattttcatggtagcgcctatgcttcggttacttctaaggaagtcccatcaaatcaagatccgttagccgtttcagcttccaatttaccggaatttgatagagattccactaaggttaattctcaacaagagacaacacctgggacatcagctgttccagagaaccatcatcatgtctctcctcaacctgcttcagtaccacctccacagaatgga

SEQ ID NO: 173314 - DNA, 93 bp, Saccharomyces pastorianus
attatccacagatccacgatcattaagcaaaccttagaagaagatggtgttgtcccctccacagcaagaattatttctaaagcagaaaaataa

SEQ ID NO: 173315 - DNA, 258 bp, Saccharomyces pastorianus; identical to SEQ ID NO: 173224

SEQ ID NO: 173316 - DNA, 750 bp, Saccharomyces pastorianus
atgtctccaaaacaggataaaagcggcacaaacggtattgagaacaaactgagagcggctaataaagatgatcttaacgcgaatgtattaccttctgatattgacgttcccgatgggggatacggatggtttgttcttctggcttttgttctctacaatttctgtacctggggagcaaattctggttatgctatctatttggcatattacttagataaaaatacatttgctgggggagataaattagattatgcagctattggtgggctagcattcagtggtggacttttattcgctccagttataacatggctttaccatgtatcttcggttcaagtcattattggcttgggaattttgcttcaaggagcagctcttctactagcagctttttctacaactctctgggagctttatctaacgcagggcgtcttgatttcatttggcttagcatctatcttaatacctagcattacattgatcccgctgtggttcagaaagaaaagatcgctggcctctgggataggaactgccgggagtggcttaggaggtatcgtatttagtttagggatgcaaagtattatagaaaggaaaagtgttaaatgggcacttatagctcaatgcgttatatgcacatcacttagtgtcattgcacttacgttaactaggacaagaacgcaaagcacaagccagcacaaaaagtacaagtttaaattgctagattgggatgtactctcaaacttcggggtt

SEQ ID NO: 173317 - DNA, 645 bp, Saccharomyces pastorianus
atgttcattatggttgataacaatacgagatattgtatgacctccacacattttaacaaaagtgctgaaactatcttagcacaaatcaagaagaacattcagtatgtggaaactcaatttgacagaaaagtcagggaaatcaattcagatcgaggaactgaatttacaaatgatcagatagcggaatattttgtctcaaagggaattcatcatatattctctggtacacaagatcatgctgcaaacgggagagcagaaagatacatcagaaccataatcaccgatgcgataactctgttaagacaaagcaacttatgcattaaattttgggaatacgcagtgaattctgctaccgatgtacgcaattgtttagaaaaccatagtacaggtcaattgccacttaaggcgatatctggtcaacctgttaaagttagattcatgtccttcttacctttcggagaacaaggaataattttgaatcataaatacagcaaactaaaacaaccaggacttagcgctataatcttatgcaaagatcctgatcgtcatggatataaactttttgtaccctctactaaaaaaattgtcacttcaagtaattacaggctttcaaactacgcaaaggatccaatattaaggaacaca

SEQ ID NO: 173318 - DNA, 273 bp, Saccharomyces pastorianus
aatttcgaacctgtttttgccatttataacgagataaatgaggactttcaaggcataatatctgacgaattggaggccgaaagcatggcattttatcacactgagggctgcagaagagaaataggagaaaataataaggttaataccgttgcttatcacaaatacattgaggatctagttgctacagttgatagtgacgggttgttaactgtatataagccgtttactggaaaagttttagatggcagtagagaggttggagctgccaaaagt

SEQ ID NO: 173319 - DNA, 165 bp, Saccharomyces pastorianus
atcacgtattttaacgaatcagatgtcgactggtctagtgctgttgactatcaatgtcctgattgtttaatcggcaaaagcaccaaacacagacatatcaaaggttcgcgacatcacatacctttattcatacgaaccctttcaatacgtagcataaggacatag

SEQ ID NO: 173320 - DNA, 210 bp, Saccharomyces pastorianus
acccgtgagcacaggtatagaaagaaactagaggatgaacgtattaaacttgttgagatagccctaaagaccatcccttacttcgttcctccggatgattacaagagacccaccaaatttcaggacaagtattatatcccggtggatcagtatcctgatgtcaattttgttggtttattattaggtcctcgtggacgtacgttaagaaaa

SEQ ID NO: 173321 - DNA, 258 bp, Saccharomyces pastorianus; identical to SEQ ID NO: 173224

SEQ ID NO: 173322 - DNA, 96 bp, Saccharomyces pastorianus
cacggcactgcctcagcggtttataccctgtgccatttacccataacgcccatgattatctacattttaatatctatatctcattcggtgccccca

SEQ ID NO: 173323 - DNA, 90 bp, Saccharomyces pastorianus
tcaggtaataatttatacgtatactacatcgagaccaagatgaacattgctgatgtgatgacaaaaccttcttccgataaaaacatttaa

SEQ ID NO: 173324 - DNA, 1233 bp, Saccharomyces pastorianus
atggctaacgtagaaaaaccaaacgattgttcaggctttcccgttgttgacttgaattcgtgcttttctaacggcttcaataatgggaaacaagaaatagaaatggaaacggatgattcaccgattttattaatgtcatcatcagcttccagagaaaactcaaacactttctctgtgatacagaggacgccagatggaaagatcattaccacaaataataatatgaactccaagattaacaagcaactggacaagttgcccgaaaatttaaggcttaatggtagaacccccagtgggaaactaaggtcatttgtttgcgaggtttgtacgagagcgttcgcaagacaagagcacttgaaaagacattacagatcgcatacaaatgaaaaaccttatccctgtggcctctgcaacagatgctttactaggagggacttactgatcaggcatgctcaaaaaatccatagtggtaatttaggggaaacgatttcccataccaagaaagtgtcgagaactataactaaagctcggaaaaattctgcatcctcagtcaagtttcaaactccaacctatggtactccagataatggtaattttttgaatcgcactactgccaatacaagaagaaaagcaagccctgaagctaatgttaaacgtaagtacttgaaaaaactgacgcgcagggcttcatttagcgcacaatcagcatccagctatgctttgcccgaccaatcttcgctagaacaacatccaaaggatcgtgttaaattttctacgcctgaattagttccacttgacttgaagaatcctgaacttgactcttcgtttgacctgaatatgaatctagatttaaacctaaatctagattccaatttcaatatagcattaaaccgttctgattcttctggatcaacaatgaatttggattataaattgcccgaatcagcaaataactacacatattcttccggctcaccaacccgcgcatatgtcggcgctaacacgaattctaagaacgcttcatttagtgacgcagacttattgtcgtcgtcgtactggataaaagcctataatgatcatttgttttcagtatctgaaagtgatgaaacttctccaatgaactctgaattaaatgacactaaattaatcgtcccagattttaaatcgactatacatcatttgaaggattcaaggtcctcctcttggactgttgctatagataataatagcaat

SEQ ID NO: 173325 - DNA, 75 bp, Saccharomyces pastorianus
atggaatcccaacaattatctcaacattcacccatttctcatggtagcgcctgtgcttcgggtacttctaaagaa

SEQ ID NO: 173326 - DNA, 423 bp, Saccharomyces pastorianus
tacactaacaaaactcttcataagttctttacgaacagaggtattactgcatgctatacaaccacggcagattctagagcacacggtgtcgctgaacgattaaatcgtactttattaaacgattgtcgcacactgcttcattgcagtggtctacccaatcatctatggttctcagcagtcgaattttctactataatcagaaattcattagtctcaccaaaaaacgataaatctgcaagacaacatgcaggtttagctggactggacattactactatactacctttcggtcaaccggttatagttaacaaccataatcccgactcgaaaatacatccttcgtggcattccaaggttacgcccttacatccatcacgcaaactcttattggctaatatttatctatctttcccatccatttaa

SEQ ID NO: 173327 - DNA, 225 bp, Saccharomyces pastorianus
agttgctatgagtcatttagaacattcattctagagccattttccctaacaaaagacaacggcgcaaagttcaagtcattcaaggagtcagttctttacattgaagaggccttgcaagtctactttgcaagagtagacgaacaatggaatcagttcagttctgaaaaactattgaatgtaattgacttgcaaggcgttccactcccaagaaactatactattttt

SEQ ID NO: 173328 - DNA, 132 bp, Saccharomyces pastorianus
tccgagtacactaacaaaactcttcataagttctttacgaacagaggtattactgcatgctatacaaccacggcagattctagagcacacggtgtcgctgaacgattaaatcgtactttatacacacgatag

SEQ ID NO: 173329 - DNA, 543 bp, Saccharomyces pastorianus
atgattgatgatgattccaagaattatcacgtttggtcgtacagaaagtggtgctgtttgttcttcagtgactttcaacatgagctcgcctacgccagcgacctcatcgagacagacatttataacaacagcgcatggactcataggatgttttactgggtgaacgctaaagatgtcatttcaaaagtggaattggccgacgagctccagttcattatggacaagattcaattggttccgcagaacatcagtccgtggacctacctccgtggtttccaagagctattccatgataggctacagtgggatagcaaagtagtcgacttcgccacaaccttcatcggtgacgtattgtcacttccaattggctcaccagaggatttgcccgagatcgagtcctcatatgccctggaattcctggcatatcactggggtgcagacccttgtacccgagacaacgctgttaaggcctatagcttgctagcaatcaaatacgatcctattagaaaaaacttgtggcaccacaaaataaataatctgaac

SEQ ID NO: 173330 - DNA, 150 bp, Saccharomyces pastorianus
ccggaatttgatagagattccactaaggttattctcaacaagagacaacacctgggacatcagctgttccagagaaccatcatcatgtctctcctcaacctgcttcagtaccacctccacagaatggacagtaccaacagcacggactga

SEQ ID NO: 173331 - DNA, 306 bp, Saccharomyces pastorianus
atggacaaatttccatcagaatataaagaatcattaaaagacccatatcattttcgattccctagggcggaatcttaccatgacttagccgttcgtatggaacctttactattagaaatggagcatacgagcaaggacattctcatcattgcacatgagtcaacattaagagtattatatggctatttaatggcttgcacctgcgtagagttaccaaatctaaatttcacaagagacaaattagttgaaatttcattcagccctttctgtaatactgtagagttactgaacattcctttaactagc

SEQ ID NO: 173332 - DNA, 1266 bp, Saccharomyces pastorianus
atgtttttgttactacacgtagatgagctatcgattttttctgcataccaagcaagtttacctggcgaaaagaaagtcgacacagagcggctgaagcgtgatctatgcccacgtaaacccattgagataaagtacttttcacagatatgtaacgatatgatgaacaaaaaggaccgattgggtgatattttgcatattatcttgcgagcatgtgcactcaatttcggggcaggtccccgtggtggcgctggtgacgaagaggatcgatctattgcgaatgaacaatccattattccctctgtggacgagcatggcttaaaagtatgtaagttgcgcagtcctaacactccacgaagactcagaaaaacactagatgccgtgaaagctttattggtgtcctcttgtgcttgcacagcaaaggatttagatatatttgatgacaacaacggcgttgcgatgtggaaatggatcaaaactctgtaccacgaagtagcacaggaaactgcgctgaaggactcttatagaataactttggtaccttcttctgatggtatatcagtatgtggaaaactgtttaatcgcgagtatgtccgcggctattactttgcatgcaaggctcagtttgataacctttgggaagaattgaacgactgcttttatatgcctacagtggttgatattgccagtctcattctgcgtaatcgagacgttttgttcagagagccaaagcgaggaattgacgagtatctggagaacgattctttccttcaaatgatacctgttaaatatcgtgaaattgtgctgccaaagttgagaagagatgctaacaaaatgaccgcggctcttaaaaataaagtggctgttgcaattgacgagcttacggtgccacttacgtggatgatccattttgccgtaggatacccttaccgttatccagaacttcagctactcgcttttgccggtcctcggcgcaacgtatacgtcgacgataaaacaagacgcatccaactgtacactgatcagaacaaaaacggttcatcggagcctcgactaaagacacttgacggactcacttcagattacttgttttattttgtcactgtgctaaggcaaatgcaaatatgtgcgcttggtaacagttatgacgcctttaaacatgagccttggatggatgtcgtgggatttgaggatccagatcaagcaacaaatcgagatatttcgaggatagttttgtattcccacttgtttctgaataccgcgaagggc

SEQ ID NO: 173333 - DNA, 249 bp, Saccharomyces pastorianus
ttatactcctgtggtgaagatggttgcgttaaaatttgggaaaacaaacaggggccgttagatattccagaaaatttttgggattactctaaaaaaatgaacgtcttaggagatgacgacagagaaggttccattaatttagacgaacctcttattattcaaaaagaatcggtttccacgaggccaaggaaggagaaacacaagaaagccaagaaacattccacgaaaagtcgtttcaaaccatactag

SEQ ID NO: 173334 - DNA, 150 bp, Saccharomyces pastorianus
aagagagactataaactaataaaaatcaatggtaaagacaatatagcagatttactcacaaaaccagtatcaatttctgattttgatagatttattaaagtattaaataaccagataacaccacaggatattttggcctcaacggactat

SEQ ID NO: 173335 - DNA, 87 bp, Saccharomyces pastorianus
atgcaattctctactgtcgcctctatcgccgctgtcgccgccgttgcctctgccgctgctaacgtcaccactgctactgtcagtgaa

SEQ ID NO: 173336 - DNA, 378 bp, Saccharomyces pastorianus
gtcgaagaagacgtaagaagtagagggaaaaattctaagatattttcccctttccggattattggtaatgttagcaatggtgttccttttgctactggtacattgggatctaccttttacattgtaacgtgtgttggtaaaacatttcagatatatgatgcgaataccttacatttactttttgtttccgagaaagaaacaccatcctcaattgtagcattatcagcacactttcactacgtctacgcagcatatgaaaacaaggttggtatttacaagaggggtattgaggaacatttgcttgagctagaaactgatgcaaatgtcgaacatttgtgcatattcggagatatctttgcgctacctgcaggcatgcag

SEQ ID NO: 173337 - DNA, 168 bp, Saccharomyces pastorianus
caaatgaaagtacacgcaagtatccttatcctttcattcatcgaatgcttgcgcatgccaatgcacagacaattcgatactcacttaaaaataacaccatcacgtattttaacgaatcagatgtcgactggtctagtgctgttgactatcaatgtcctgattgtttaa

SEQ ID NO: 173338 - DNA, 138 bp, Saccharomyces pastorianus
attatttctccctctgttttatgtgtttcattatcctattacgttatcaatccttgcatttcagcttcgtctaacttcgatgacagtttctcatatcttatgtcatcgtttaacaccgtgtatgataatatattggta

SEQ ID NO: 173339 - DNA, 1164 bp, Saccharomyces pastorianus
atggttgacagaaaatgtaaaaaactggaatcattaagaactgaactcaacaaattagttttaatatgtatcataccaaagtgttacgacaataatgaaacaagagattatattttgaaagaaaatctattggacgttttacatgaatccttgaaaatgccagtgtacctgcgattattcagcattcaaaatgaacaaaaattaagagttgaagaatatatgattaatatcattattcaaacaataaacgaattaggtgtaaatgttacagatcaatatgaaatgcattgtaagtactgtaaatcagaattccacagctcgataaactgcagaatgaaattagacaaaaaacacaggtctaacacgaatagctacttgaaaggtaatgtttcacaaggtacaaccaaaaaaaatacaccaaaactggtacaaaaccagccagaacctttgaaaagacaacaaaagaagaggaacaaaaagggttcagacaaaaatctggtcattattggcaccggttcaaacatcagtattacgaataataagaatttattacacaattatgaagacaaccaagaaaatacacaattatttggtattggtaaaactaacccagtttctgttaaaggttcaggatacatacaaataaaaagtaacacaaatgacaattacttattggctcattatgttcctgaagaagaaactaccattatcagtggttatgagttggctaaagaaaccgatctggttttaaccaaaaattatttgaccctgggaaacaaggacatgaacatcaaaactcaggtaaaaaatggaattatttacgtaaaaataaatgacctaattgatcatcctgcgtatgatttcaaaaggaatacaatacaaccaaaatcttccccaaaaactagattgatgcccaaaattataagcttagaagatgctcataaacgaatgggacatacaggagtgcaacagattgaaaactccattaaacacagtcaatacgaagaaagtattgatttgattaaagaaccaaatgaattttggtgtgaaacttgtaaagtttcaaaaatcacgagaagaaaccattatgctggatctatgaacgaacacggtatcgatcatgaacctggttcatcgtggtgcatggatatacttggtccagta

SEQ ID NO: 173340 - DNA, 360 bp, Saccharomyces pastorianus
gtcaaattaacttcaatcgctgctggtgttgccgccatcgctgctactgcttccgcaaccaccactctagctcaatctgacgaaagagtcaacttggtggaattgggtgtctacgtctctgatataagagctcacttggcccaatactacatgttccaagccgcccacccaacggaaacctacccagtcgaagttgctgaagccgttttcaactacggtgacttcaccaccatgttgactggtattgccccagaccaagtgaccagaatgatcaccggtgttccatggtactccagcagattaaagccagccatctctagtgctctatccaaggacggtatctacactatcgcaaattag

SEQ ID NO: 173341 - DNA, 753 bp, Saccharomyces pastorianus
tcatcgtggtgcatggatatctttggtccagtatcaaactcgaactcggatacgaaaagatacatgtttattatggttgataacaatacaagatattgtatgacctccacacatcttaataaaaatgctgaaactatcttggcacagatcaagaagaacattcaatatgtggaaactcaatttgacagaaaagtcagaaaaatcaattcagatcaaggaactgaattcacaaatgatcagatagcaaaatattttgtttcaaaaggaatccatcatattttttccactacacaagatcatgctgccaacggaagagcagaaagatacatcagaaccatcgttactgatgcaacaaccttgttaaaacatagtaacttgcgtatcaaattttgggaatatgcagtaacatctgccaccaatgtacgcaattgtttagaaaacaagaccacaggtcaactaccgctaaaggcgatatctagtcaacctgttaaagtgagattcatgtccttcttaccattcggagaacaaggaataatttggaatcataatcacaacaaactaaaaccatcagggtttaatgctatagtattatgcaaagatgctaatagttacggatacaaattttttgtaccatccatcaaaaaaattgtcacttccgataattacacaattccagactacgcagtggatccaatattaaggaacacacagaacatatacctagaagatccaagtagatcagatcgctcatga

SEQ ID NO: 173342 - DNA, 429 bp, Saccharomyces pastorianus
aggatactgatctataagaaggaacttcaaaagttagtattaatggaaaaatggatcctttcaaaatgttgccaagattgtccaaatcttacacacatcttagaagaagcaattcttgggaccttacatgaatctttgagaaatccggttaaacaacgtttacacatctactctgttgatgaaaatgagagaattgaagaagttttaatcaatatcataattgaaacagtaatggacttgagttcgacagactcgcattattcagaaagaaattgcaagtactgtaaatcggaattacacagctcagtaaactgtagaaagaaattaaacagagaacttaggcctaccacgcctaactactcaaaaggtaattattcgcaaggttcaacccaaaaagaatacacaaaaactggcacacaacaagtcaga

SEQ ID NO: 173343 - DNA, 84 bp, Saccharomyces pastorianus
atgtgcactataataatggaagttttgtctcagatgcctcacagccttgaaatggtagacgagcttgtgcgagtgaccatatcg

SEQ ID NO: 173344 - DNA, 951 bp, Saccharomyces pastorianus
atgccaaatgtgctttctgatgatgaagagctccttaatggactaggaagtgagattatgaaaccctctagacaaggtaaccatatggcaaggacggtcaaaaggtgggtaaataaagaacgtgctaccacagccgatctgaaaaatgttaatattgatggagttcatggaccggtaaataccgaaagttatatatcaccaggacagctttactccactgactcgggcaatttatttcatgctggaagaatccttgtcgttctagtcggtcttccagcaacatcaaagacactattgtcagtagcgattacaagatatacaagatggttaggagttaggacgaaatcgttccatttttcagaatataaagaatcagctaaaaatataccctcagactatttttgcgtagtgccaacgtcaaaagaaggtgtagcgtttgttgaaaagcttcgcatgcagatgttgaatgatatactggcatttttcaacgacttgtcaggtcagctggccatttatgatgccctaaacatccgtaaaattgacagaaagaatttggagacaacgttttctgaaattggagttaaagtactcttcatagaatcaatcgtgtctgatcaagaaatcatgaatagaaacatagctcttgcactggagtcgaacgattacaagggactttcaactgatgaagccattgacgaatatatgagacgtttatcagtgaacgaaccatactatgaaatgatgacacatgacgaagaattatcgtacattaaatatataaatttgggaaagcagataattgtgaaagataacatacatggttatttggtcaacaaaatagtatttttcttaatgaatttgaggcagaaaaagaggtgtgtatattttgctcgctgtggcaccagcgataaagacaactacatacatgatgaggaactaaacgaggaggga

SEQ ID NO: 173345 - DNA, 354 bp, Saccharomyces pastorianus
cttggacatgctaacttccgaagtattcagaagtctcttaagaagaatgcagttacatatttgaaggaatcggatattgaatggtctaacgctagcacatatcaatgtcctgactgtctaatcggcaaaagcacgaaacatagacatgtcaaaggatcacgactaaagtaccaagaatcatatgagccttttcagtacttgcacaccgatatatttggtcctgtacatcacttaccgaaaagtgcaccttcttactttatatcgtttacagatgagaaaaccagattccaatgggtgtacccattacacgaccgtcgtgaagaatctatcctcatgttttacctcgatttagca

SEQ ID NO: 173346 - DNA, 1653 bp, Saccharomyces pastorianus
atgaagggtatcgcctccaagttggagtacatcaaggagcttggcgccgatgccatttggatctcgccattttacgactcgccacaagatgatatgggttacgatattgccaactacgaaaaggtctggccaacctacggtacgaacgaggactgctttgccttgatcgaaaagacacataagctcggtatgaaatttatcactgacttggtcatcaatcactgttccagcgaacatgaatggttcaaagagagcagatcctcaaaaaccaatccaaaacgtgactggttcttctggagacctcctaagggttatgacgccgaaggcaagccaattcctccaaacaattggaggtcttacttcggtggttctgcatggacgttcgatgaaaagacacaagagttttacttgcgtttgttttgctccacccaacctgatttgaattgggagaatgaggactgtagaaaggcaatctacgaaagtgccgttggatactggttagaccatggtgtagacggctttagaattgatgtgggaagcttgtactccaaggttgctggtctaccggatgctcctgtgattgacgaaaactcaaagtggcaacccagtgattctttcacaatgaacggaccacgtatccatgagtttcatcaagaaatgaacaagttcatcagaaacagagtgaaggatggcagagaaattatgacagttggtgaaatgcaacatgctactgatgagaccaagaggttgtatacaagtgcatcaagacacgaacttagtgagttattcaacttttcccacactgatgtcgggacttcgcccaagttccgtcaaaatttgatcccatatgaactaaaggattggaaggttgcccttgctgaacttttcagatacgttaacggaactgattgttggtcaacaatttatctggaaaatcacgaccaacctcgttcaattaccagatttggtgacgattctcccaagaaccgtgttatttctggtaagttactctctgtgttgctaagtgccttgaccggtactctatatgtgtatcagggacaagagcttggccaaatcaatttcaagaactggcctgttgaaaagtacgaggatgtcgaaatcagaaacaactacaatgcaattaaagaagagcatggagaaaactcagaggagatgaaaaagtttcttgaaggaattgccttggtttctagagatcatgcgaggactcccatgccttggacacctaatgaaccgaatgccggcttttccggccctaataccaagccttggttttatttgaatgagtcctttagacagggtataaatgtagaggaggaacagaaaaattctgattctgttctagcattctggaaaaaggctttggaatttagaaaaaatcacaaagacatcgcagtttacggttttgatttcaagtttattgacttggataacaaaaagctattcagtttcacgaaaaggtataacaacaaaactttgtttgctgctttgaattttagctctgatgcgacggattttaagattccaaatgatggttcatcgttcaaattagagtttggaaactatccaaagaatgaagtagatgcctcttctagaacattgaagccatgggaaggaagaatttacattaatgaa

SEQ ID NO: 173347 - DNA, 204 bp, Saccharomyces pastorianus
atggaatcccaacaattatctcaaaattcacccaatcttcatggtagcgcctatgcttcggttacttctaaggaagtcccatcaaatcaagatccgttagccgtttcagcttccaatttaccggaatttgatagagattccactaaggttaattctcaacaagagacaacacctgggacatcagctgttccagagaaccatcat

SEQ ID NO: 173348 - DNA, 192 bp, Saccharomyces pastorianus
gaggacgaagaacgagaaagagaagatcaacgagagtttaattacaagattgataacgatacgcaggacacaattttggcgaaattcagttcagatgatgaaggtgactttctgacaggatttgaagaattagagggtgagcagttgatgaaacgatttcttcgaacgggggatcctctagagtcacctcag

SEQ ID NO: 173349 - DNA, 585 bp, Saccharomyces pastorianus
atgactaaaacaggagaaacaacagctaccagcttgaatgctaaaaccctcaagagtttccaatcgactctaccggtaccaacttaccccagagaaggtgtcaaacaaggtatcgtccatctaggtgttggtgcattccaccgttcccatttggctgtctttatgcagcgtctaatgcaggaacacaacgtcaaggactggtccatctgtggggttggtttaatgaaagcggacgctcttatgcgtgatgccatggacgcccaagactgcctttacacgcttgtggagcgcggtatcaaggacaccaacgcctacattgttggttccattacggcctacatgtacgcaccagatgaaccaaaggctgtcattgcaaaaatggcccatctggacacacacatcgtgtctcttaccgtcacagagaacggttactatcacaatgaggccacacactcgttgatggccgatgatgccgcaattgtcaacgatttgaatcacccagaaagaccggacactatttacggatatctgtatgaagctttgttgctacgttacaaggcaggtggtcatcctttcactatcatg

SEQ ID NO: 173350 - DNA, 774 bp, Saccharomyces pastorianus
ttgagtgatgagatcaagaaccacgtcgaaaaatcaattgaatccatatctggaaagatatccaacaaggagactcctcgactacaggaaaacgacagtaacagatctaaagtatataaaactttgaggatcgggctccaggatcattggaagctaggcttgggaatttctgccacctccctgtgcttataccttgggtataggaccttttttaaactgccacctaatttacctgaagcagaatctcaagtggtattaatactgggcgatatgaatgatcctatcataaggaatcaagtgatggatttatatcgcagacggtttacagtatatatttgtactgaaaatgcagacgtctataagaagcacgaagaagatcaggatttcatatattacattgatcccacctgcgaaaaagacttcgagggtttttttgttgatgtaccaaggctagcatccatattgtttatgccaaggttatcatatcatccatccggagtaatttcatgtgactcattggaatctgaaattcattcaagtatatttgtgtattatcaagcattattaagcattataccccatttgaagagaaaaacccaactaattatgttcaatccatctttgactgcggacctgaacttagtccatcatagtacagaaattataacgtctggaataatcgactcactatttaaattttcaaggatatcaaaggttaaatgtttccacaatcaagcgacctgcaggcatggcagcttggcactgccgtccgtt

SEQ ID NO: 173351 - DNA, 192 bp, Saccharomyces pastorianus
aggcctgggggagaaaacgataagataaggtggtactgttctcattgtcgccaagtggtccacgagagtgaactgcaaatgttagacttaggtacccaagtgaaagaagccattttagattttgaaaatgatgtcgagaagaggacatgtttccattgcaagacgttaaactacgcacgccctcaatctaat

SEQ ID NO: 173352 - DNA, 660 bp, Saccharomyces pastorianus
atgcaaaagttgattggtctagcttcatatgttggatataaatttagatttgacttactatactacatcaacacacttgctcaacatatactattcccctctaggcaagttttagacatgacatatgagttaatacaattcatgtgggacactagagataaacaactgatatggcacaaaaacaaacctaccgagccagataataaactagtcgcaataagtgatgcttcatatggtaaccaaccatattacaagtcacaaattggcaacatatatttacttaatggaaaggtaattggaggaaagtccaccaaggcttcattaacatgtacttcaactacggaagcagaaatacacgcgataagtgaatctgtcccattattaaataacctcagttaccttgtacaagaacttaacaagaaaccaattactaaaggattactaaccgacagtaaatctacaatcagtataattatatccaataatgaagagaaatttagaaacagattttttggtactaaagcaatgagattgagagatgaagtatcaggaaatcatctgcacgtatgctatatcgaaaccaaaaagaatattgcagacgtaatgaccaaacctcttccgataaaaacattcaaactattaacaaacaaatggattcat

SEQ ID NO: 173353 - DNA, 402 bp, Saccharomyces pastorianus
aacataaccaatgaacagagacttccgtctggacccaaagatgacgtagatacgttagcacttaccagtgctcaaaatcaagctaatagtttgaggaagctagatacagatgcgaacgctaaagctttgccatccatcacagacataccagtcagtgatgattctgatataaaacgacaagttggctctggttttggttcaaatccgcttcatataaaagattccgaggcctttccacattcatctattgaagccctaaaagagggtatggacaaagtcacaaaacaatgcaacgatttgaagacggctttgctttccaaagacacttccctcactgattctgtgcaggatttgtttaactcattaaaagtttatcacacaaccaatcagtttggaaaatag

SEQ ID NO: 173354 - DNA, 135 bp, Saccharomyces pastorianus; identical to SEQ ID NO: 173221

SEQ ID NO: 173355 - DNA, 84 bp, Saccharomyces pastorianus
aatgcacgtgtcgctttcctcatcactgctgcaatactttctgcacctgtcactgctattgctctcctggaagctagacggtaa

SEQ ID NO: 173356 - DNA, 159 bp, Saccharomyces pastorianus
gaatcccaacaattatctcaaaattcaccaaatcatcatggtagcgcctatgcttcggttacttctaaggaagtcccatcaaatcaagatccgttagccgtttcagcttccaatttaccggaatttgatagagattccactaaggttaattctcaataa

SEQ ID NO: 173357 - DNA, 1134 bp, Saccharomyces pastorianus
atgtgtggttcctttgcctacgcaggatctgtgtttacaagtgcttcaactacattgtctgttgcgacagaagttgttggtatgtacgcgttaatgaatcctaattttactccaaaaaggtggcatgtatttgtttgttttgaattgctacatctgtttttaatgctgttcaactgttatggtaaatcattaccactaatttcatcttcatccctatacatatcgcttttgtcctttttcacaattacaataacagtcttggcatgctcccatggcaaatttaacgacgcaaagtttgtttttgctacattctataacgagactggctggaaaaatggtggcattgcctttatcgttggtttgattaacccagcttggtcattttcatgtcttgattgtgcaactcatatggcttttgaagtagagaaaccggaaagagtcattcctattgctatcatgggcacagttgcaatcggttttgttacttcattgtgctatgttatcgctatgtttttctctatcaaagatctggatgctgtcttgtcatccacgacaggggcgccaattctggacatctacaatcaagctttgaataataaatcaggtgcgattttccttggttgcttggttttgtttacatcttttggttgtgtcattgcctgtcacacctggcaagcaagattgtgttggtcattttctagggacaatggtctcccattatcccgcttgtggtcacaagtcaatccacatactggtgtgcctttgaatgctcatctgatgtcatgtgcttggatatccttgattggtctgctttacttggcctctagtacagctttccagtccttaataacaggttgtattgcatttttgttattatcctacgttattcccgtaatatgtttacttgccaagaaacgtgacatcgcacatggaccattctggctcggcaaatttggcttcttttcaaacattgttctattgggttggactgttttttctgtagtatttttttccttcccaccagttttacctgtaacaaaggataacatgaactatgtttgtgtggtcattgtcggttatagtgcgtattcagttctttattggaggtacaagggtaagaacgaatttcatgcc

SEQ ID NO: 173358 - DNA, 258 bp, Saccharomyces pastorianus
atgattacggattctaaaccagctattgaaggcttaaaccggagctatctgcaacccaaacagaagttcacatggataaaaaccgaaataattaaagagaaactaaaagagaagactataaaactaataaaaatcaatggtaaagacaatatagcagatttactcacaaaaccagtatcaatttctgattttgatagatttattaaagtattaaataaccagataacaccacaggatattttggcctcaacggactat

SEQ ID NO: 173359 - DNA, 168 bp, Saccharomyces pastorianus
ttccttatcagatttatccaaaccgtaggcaatggcggctgcggttggttcattaacaattctcaaaacgttcaaaccagcgatggtaccagcatccttggtggcttgtctttgcgcgtcattgaaataagcaggaacagtaacaacagcatgggtaaccttagtgcc

SEQ ID NO: 173360 - DNA, 99 bp, Saccharomyces pastorianus
ttactcacaataccagtatcgatttctgactttgatagatttatcaaagtattgcaacacaagataacaccacaggatattttggcctcaacggactag

SEQ ID NO: 173361 - DNA, 177 bp, Saccharomyces pastorianus
catgctcttcatggtagcgcctatgcttcggttacttctaaggaagtcccatcaaatcaagatccgttagccgtttcagcttccaatttaccggaatttgatagagattccactaaggttaattctcaccaagagacaaccctgggacatcagctgttccagagaccatcatcatgt

SEQ ID NO: 173362 - DNA, 375 bp, Saccharomyces pastorianus
atgcgccaaactttagcaccatatgccattttatcacagttctacgaagagagcgacagtggacgttgggaccaagcactatatctattgcttttattgattgaattcccatttttaccaaaacactatttgattttacttgtggcgaagtttctgtatccaatctttctcttagatgataaaaggccaatagatgaagagtcagcggcgaaaataattgaagtcatagaagccaaatgggacgaaactgatgagaggactttgaacttgtatgaaactattattgaaacagaaaagagtctacccaatagtaccttggagcttttgaagagtgtaagaaaaaaactgaattttaagttatgtcaaacgttcatg

SEQ ID NO: 173363 - DNA, 219 bp, Saccharomyces pastorianus
atggacttgagttcgacagactcgcattattcagaaagaaattgcaagtactgtaaatcggaattacacagctcagtaaactgtagaaagaaattaaacagagaacttaggcctaccacgcctaactactcaaaaggtaattattcgcaaggttcaacccaaaaagaatacacaaaaactggcacacaacaagtcagagcttttgacaaagcgaaagaa

SEQ ID NO: 173364 - DNA, 1476 bp, Saccharomyces pastorianus
tttactaatcagaagaaagtatcacatctacagtcattaatgaacactaaaaggagtgaacagcccacggaatttgccaaaaaacataggtttaaagatacgcttgcattgttcctggtttttttgagttttaaccacttcacttccctatgtttattggtttcctttattgttgctaccaaatgcaaagattttctggcaaattgttttattatacttttcctatcgaaaaaaccttcccgccatatcagtgaagtggcgcacatagatataagtacttccaaagtgaccaatggtagttcaaaccgaaaatctaattcacgattttttggcaattcaaaaaatagcttcgtcattccgatccccgtattaatttgtgaaattttatttgcaatgttactaaagatttacggtggcaattattttgttaagccaataaaaaatcaggcaatttctattattgcctcatttttgatcaatgatccaagcgattgcttaagctatgcaacttcatgctcagtattgtatgctgtgtcaactaacacttttcaaagagtgtcacacttctttgacactatacagttatttgatatgcctttacgaggaaccagccaatcaattaaattattcactgtttttcgcaagtattcacagtttttcaaaaagcttttctctctatttttgccaatgcctttcaagatgcttggcaaacattcagacagtatgatttattatctatcctttcacatcctttttttctcatttgcttcaagtttattacaccctcatagacaaacagcggaaaacaagccattgaaaaaaagtttcaattcaactaaaccagatgtagcccgtgttcaaggtctgcaaaagatgagaatttcttcttcttcttccatttctgccgattcgaacactttagaggaccaaagtcctatgataccgaacgatccaggtggacttagcagcagcaatcaaactatccatccatcccaacaaaataactcgccagttcccctatcatcacacagtaatattttgaaccctgccgcctcttatcctactgatgctacttctagttttccctatttcacttctatggtcaaggaatataagtcatatcagccatcggtaatctctgctgaaggaagcaattctcaagccgttactactactaccagtacaacaacctctcctacaacgttcaacttttctggtgataacactagtttgtcaaatgaaatctctctatctgattcctcgaatggaaattcgaaaaaggattctgatttcttttccccttccaatgacaagtatactaaccaactgtttgaactgaatgttgattttgggaacatgttttcttctagcaaattatcttcagacatatctgttacatcaaacttggaaaattttatccgtcttctattcagaagaaagaatcaacacttgattgcacctcttggtctatggtag

SEQ ID NO: 173365 - DNA, 135 bp, Saccharomyces pastorianus
agacttagagatgaagtatcaggtaataatttatacgtatactacatcgagaccaagaagaacattgctgatgtgatgacaaaacctcttccgataaaaacatttaaactattaactaacaaatggattcattag

SEQ ID NO: 173366 - DNA, 510 bp, Saccharomyces pastorianus
caagtccatgactcctacagattatccgtttcaacagcctattcagattgtgaagatacagtcgtcagtacagttgcggtggacggctacttttacatgttcaatccaaaagacattgctacaacaaagaccacggtgtccagattcaggggaagtaatttggttccagttgtttattgtcctcaaatctactcgtatatctgctcagatggtgcaagttccttaagggctgtgccgcctagggctgctttcgcagttcatcctttagtgtcgcgagagacgactataacggccattggggtgtcaagattacatccaatggtccttgctggatcagcagatggaagtcttatcataaccaacgcagctaggcgccttttgcatggcattaaaaacagttcagcaactcaaaagtcattaaggctttggaaatgggattatagcataaaagatgacaaatatagaattgatagttcttatgaagtgtatccgctgacggtcaacgatgtt

SEQ ID NO: 173367 - DNA, 135 bp, Saccharomyces pastorianus; identical to SEQ ID NO: 173151

SEQ ID NO: 173368 - DNA, 243 bp, Saccharomyces pastorianus
atgaaaaattggcaaattataagtgggctccatgcaaaggatctatctctaatggaaagatggtgtctgggtaagctgaattatgagctggccattccatatgacgagtttttgctatgggaaacgaacactttaatgaaagcgaaattgcgcgtcggaactcccgccaacgctccggtgaagagacccagagaatcagacaatgattatgatgcaaattcttggaaacatattaaatcttgt

SEQ ID NO: 173369 - DNA, 75 bp, Saccharomyces pastorianus
aacattgctgatgtgatgaccaaacctcttccgataaaaacatttgaactattaactaacaaatggattcattag

SEQ ID NO: 173370 - DNA, 285 bp, Saccharomyces pastorianus
atggccaatcgtggtaaaaacaccaacggatcccaatttttcatcaccaccgtcccatgcccatggttggacggtaagcacgttgtctttggagaagtcttggatggtatggacgtagttcactacattgaaaacgttaagaccgacagtagaaatatgcctgtaaaggaagttattattgtggaaagtggtgaactggaaactgttcctttggacaataaagacgccgccaagctacaggaagagatcaaagcggaagctagcgaagcagcccacgatgaactc

SEQ ID NO: 173371 - DNA, 258 bp, Saccharomyces pastorianus
cgagttctcatcggaacgaaattagtgactgaaggaattgacattaagcaattgatgatggtgatcatgcttgataatagacttaatattattgagctcattcaaggcgtagggagactaagagatgggggcctctgttatctattatctagaaaaaacagttgggcggcaaggaatcgtaagggtgaattaccaccgattaaggaaggctgtataaccgaacaggtacgcgagttctatggacttgaatcaaagtaa

SEQ ID NO: 173372 - DNA, 534 bp, Saccharomyces pastorianus
  modified_base (503)..(503): a, c, g, t, unknown, or other
  modified_base (510)..(510): a, c, g, t, unknown, or other
  modified_base (517)..(517): a, c, g, t, unknown, or other
  modified_base (528)..(528): a, c, g, t, unknown, or other
atggatttgatctataacaaaaaacttggtacggttgatttaacattaaaatcattcatagaaaaaatgggtgagaagtataaaaaggaattggataaggttagaaaaagttcaattccacatacatcaatatacagggttgatcccaaaaagggagaactaaaaatgaccgaaaaagaatataaagacggtgtgttgaaattacaacaactactaggagaacttaactatgttaggtacaagtgtagatacgatgttgaatttgcggttaagaaagtagctaggctagtaaactttcctcatgaacaggtattttacatgatttataaaatcatacaatatttagtacaacatacgaatatcggaatacactatgacagagacctcaacaaagataagaaaatcactactataaccgatgcatcagttggaacagaataccaatgcacaatcaagaattggagttataatttggtatggaaagaatatttcaatgtatactncaataanagcaccnacagtgcgtantcctca

SEQ ID NO: 173373 - DNA, 171 bp, Saccharomyces pastorianus
atgctgggttacgttgttgttttatattccttctctagtattgcggtcagcagaggccaaatcctatatgcattatatgtggttagcattgactccttaatagaacggccagttatcaatcaaattgcctataagcatggatcactagcggctagtattgtattgcatttg

SEQ ID NO: 173374 - DNA, 240 bp, Saccharomyces pastorianus
  modified_base (41)..(41): a, c, g, t, unknown, or other
ccagctattgaaggcttaaaccggagctatctgcaacccanacagaagttcacatggataaaaaccgaaataattaaagagaaactaaaagagaagactataaaactaataaaaatcaatggtaaagaaaatatagcagatttactcacaaaaccagtatcgatttctgactttgatagatttatcaaagtattgaaaaacaagataacaccacaggatattttggcctcaacggactat

SEQ ID NO: 173375 - DNA, 357 bp, Saccharomyces pastorianus
tccagtagtgtgatcgacgaatccttgtcctccaatttattttcttcttcttcttcttcctttcgttcttctccgtcttttccttcctcttcgtcctcctcttcatcttcctcttcatcttcctctatcgcttcatatccgcttaccgcataccaagtaatgtcatcgagtaatcccttgtctccttcactgctctcattttctttgtcatcgctccggtcaatcttcaataccaacactggagaatcctgttcttctaatcggagaagcttaccggaaacactgaaaaacagcttcttaatatggttcagatctatggcaagttcctgtggtgtgtcttctttgtcatcatcctca

SEQ ID NO: 173376 - DNA, 177 bp, Saccharomyces pastorianus
cattctcttcatggtagcgcctatgcttcggttacttctaaggaagtcccatcaaatcaagatccgttagccgtttcagcttccaatttaccggaatttgatagagattccactaaggttaattctcaacaagagacacacctgggacatcagctgttccagagagggatcctctag

SEQ ID NO: 173377 - DNA, 216 bp, Saccharomyces pastorianus
gagtattcgttggagaggaaaatcctggaaaagagttatactaagcctacttcaacagagaatcgcaacggcgatgaaaatcaacttgatggagatagtcattctgaaccatcgctgtcatcatcgccagtaaggacgaagaaaagtgtaaagttcgcaaatgatattaaagacgtcaaggacctgcaggcatgcaagcttgcactgccgtcgttt

SEQ ID NO: 173378 - DNA, 492 bp, Saccharomyces pastorianus
atgtacagcaacgaggggcaaaactttgtcgaatttgaccctagggtccgttactctcggtggaagaagttgctctacaatgcagctatcaacacatccacggcacttgtggggctagacgttccgcgttgcctggagtttggggttaacaagaagagcacagaaattgaagtgttccaccctgccatgagggagatcatcgccattgcggcgagtgaaggcatcattatcgaagaggagttcataacgatgtttacagagattaccaggaaaaaggtgttcaagccatccatgtgcgtggactgcgagaagggccaattgatggagctagaagtcatcctaggcaaccccataagaatcgcgaaaagaaacggcgtcgctacacccactctttctatcttatacaacctacttgtgctagtgcaggccaaactaaaggagcggaaaggcctattgaagttcgacgaaaaaactgccactcttgtggacgag

SEQ ID NO: 173379 - DNA, 342 bp, Saccharomyces pastorianus
caattacatcaaaatccacattctctacatggtagcgcctatgcttcggttacttctaaggaagtcccatcaaatcaagatccgttagccgtttcagcttccaatttaccggaatttgatagagattccactaaggttaattctcaacaagagacaacacctgggacatcagctgttccagagaaccatcatcatgtctctcctcaacctgcttcagtaccacctccacagaatggacagtaccaacagcacggcatgatgaccccaaacaaagctatggcctctaactgggcacattaccaacaaccatctaacctgcaggcatgcagctgcatgccgtcg

SEQ ID NO: 173380 - DNA, 225 bp, Saccharomyces pastorianus
tatggtttaaacgaagttgatgattttgcttctaaaagggaaaaggttttacttggacaatccacctttggcgacagtaataaagatgatgaccattctttgttagaagacgaagatgaggaagaagtcttagccatggatgaagatgatgagtcaatagatgaaagagaagatgaggaagaagaagaggaagaggaactagatggtgctgcagcctatagaaaa

SEQ ID NO: 173381 - DNA, 171 bp, Saccharomyces pastorianus
cttgatgaggccgataaaattaaaaacacggaaatcgcgaaggagctaagtcttcctccagtaaaactgcattgttccatgcttgcagaagacgctatcaaggcggcaatcaaggactacaaaacaaagaggaacccctccgtttgcattgaaagagaggtgatacgataa

SEQ ID NO: 173382 - DNA, 120 bp, Saccharomyces pastorianus
atgggtatgaaacatgttcaagaatttataatggaacccaaaggttcagtctttgtagttcgagcgacattgcgcgtttccttagaaaacgctggaaagatattctttaacgagacggag

SEQ ID NO: 173383 - DNA, 135 bp, Saccharomyces pastorianus
atgagacttagagatgaagtatcaggtaataatttatacgtatactacatcgagaccaagaagaacattgctgatgtgatgacaaaacctcttccgataaaaccatttaaactattaactaacaaatggattcat

SEQ ID NO: 173384 - DNA, 348 bp, Saccharomyces pastorianus
atgacgcatctagaaactaaattaaatgatacagaaatagaattgaagcacttcaagcagaaggcatctcatctagaatccaagtgtgaaaaactacatgatacattgttccgtggtaacaacaaaaataagggctcgagcgatgaagcactcgtagaagaactagcaaatttccgtacacttgtttattgttccctgtgttctaaaaattggaaaaacatggctattaaaacctgtggccatgtcttttgtgagaattgctgtaaggaacgattggcagcgagaatgagaaaatgccctacatgcaacaaagcattcagttccaatgatttattgacagtgcacttg

SEQ ID NO: 173385 - DNA, 84 bp, Saccharomyces pastorianus
tacgtacgaaagggagccaaaagcaatctgaccaatttgtatatatatatatacatccatccgaaatggaagacatcaattagt

SEQ ID NO: 173386 - DNA, 486 bp, Saccharomyces pastorianus
atggatttgttagcggccagcgtagaaagtacgttgaaaaatctgcaagataagagaaactttctttcggaacaaagagagcactatatagatatcagaagccgactggttagatttatcaatgacaatgatgatggcgaagaagaacgcgaaggccaagggatggtgtttggtgatatcataatttctacgagtaagatatatctaagtctaggctatgagtattacgttgaaaagaccaaagaggaggccatcacgtttgttgatgataaattaaaactaatggaggacgccattgagcaatttaacctgaagatcgaagaggctaaaaagaccttagacaacttgaatcacatggaggacggaaatggaattgaagaagacgaagcgaacaacgacgaagattttctgccctctatggagattagagaagaactagatgacgagggcaatgtcataagtagttccgtaacccctacaacaaag

SEQ ID NO: 173387 - DNA, 849 bp, Saccharomyces pastorianus
atgttcgatttaaggtatgttcctgatggtatgacttttgatgatgatgtaagagatgaatgcagtatattgcctaagaactataggccacaccagtttagcacagatgctctacaacattcaagcgtcaaattgacctgggatgaaacgccagctgatagggtcgaagttgctaagagggcctttacccaaaaggaaattgatgatatggactttaaggcttacttggcgtcagatagtgatgaatcggatgggcaggtcgatgaagaggcgaaaaataaactaaagtcgttggttggtgactttgggtttaattccaagaaagaaacccctaacgatgaagatgaagaagttgatatggaaattacatttactccagccttggaaggaggaaacgagaaatcgtcggaagacaaagaagaaacgactatagagaaaataagaagaaaagagaaggaacgtcgtaaagcaagaaagcagaaagtaaaggaattgaaacagcagtcggagaaggataagaaaagcaagttgaaatctgttaataaaaagcatactaacgatgaagaggagatcgaaaagaatgccaaatcaaaggctgaattggagcttttaatggatgatgatgatgataccgaaactcagggcacaataaataacaaagcacatttcaacatgaacgaaatcttaagatcagaaaaagaaaaacacaagaaaggccggtatcaaaagaaagagagaattgttgaagacacctttacacctgatttagaagatcctagatttaaagaagtcttcgaagatcacgattttgctatcgacccgacccagcctgaattcaaaggtacacag

SEQ ID NO: 173388 - DNA, 147 bp, Saccharomyces pastorianus
acggatgctacagtatataccactctcaaacttaccctactctcacattccactccatcacccatctctcaccatcagtaccaaatgcactcgcatcattatgcacggcacttgcctcagcggtctataccctgtgccatttacgca

SEQ ID NO: 173389 - DNA, 435 bp, Saccharomyces pastorianus
attcttgtcggaccgggtgtcggtctagcaccattattatcagtggttaaagcggagatatctaaagatatcaaactcctcttcggttgtagatataaagataaagattatatttataaagatatgctggaagattggttccgtaagggcaaaattgccttacattcatccttttccagagatgaggaaaattcaccaggtgttaaatatgtccaagactacttatggagattaggtgaggaaataactaatttggtagttaataaagacgccgtttttttcttatgtggctcatcaggtaaaatgcctatccaagtcagattaacattcattgaaatgttaaaaaaatggggcaattttagtgatgaagaaactgccaaaaaatacctgaaagaaatggaaaaatctgatagatatatccaggaaacttggtag

SEQ ID NO: 173390 - DNA, 249 bp, Saccharomyces pastorianus
agagaatttctagattctggatctgcttgtttcacaccagatggtgaattcgtccttggaacggattatgacggtaggattgccatttggaatcattctgattcaataagtaacaaagtattaaggccgcaagggttcattccctgtgtttctcatgagacctgtcccaggtcaattgcattcaaccctaaatattcgatgtttgttaccgcagacgaaacagtagatttttacgtgtacgatgaatga

SEQ ID NO: 173391 - DNA, 1143 bp, Saccharomyces pastorianus
ttagaagatttcggagagaacgaaaatacgattatcactttggtgcctcaaactaaggatgatcttttcacaatatatcaaataattgacaaagaagacgaagttatctttaagaaattgttcacgacaaaaaaggatgaagtaaatagaaaaacaagtactgatttagtaaatctgaggctgaaaatcctctcttatgaatttgatataaaagaggaatacctgcgttataagggtgtcactgtcgctgatgatacgaataccgcgaatttggatgtcccagttggtaaatttcttagttttagcgtaacgtatgaacaccagtttactattttcaagcaccatttcaataagtatgccaagagacttttaaaggaagctctcgagttagaaaccaaatcagataccgcggcagtggtactgcaagaaggaatttctcatgtttgcttattaacagcttcttcaactatcttaaagcaaaagactgaaatttcaatgcccaaaaaaaaggatgcgactgatattaacaaattcaatgaaaagactgaaaagttctatagagcaacttataatgcaatgatgaagaatttcaactttgatgaattaaggatgattatactgtgctccccaggattctatgcaaaggctttaatggaaaaaatcttgaagtacgcagagaaagaacaaaacaattcaattttagagaaccaagagatgtttattatcgcccattgttccactggttatttacagggaattaccgaagttttaagagatcctgaatattctaccgtactgcaaaataccaaactcattaaagaaattcaaataatggatgatttctttgaacatttaaataaagacgataacaaagcgtggtacggtaaagaggaaatcaagagagccgcaaaattagaagcagtagaaacattacttattaccgataccgtactgaaaagtgacgacattgatgagcgtgagacattcttggacttgacatacaatattgaacagagcggcggaagagtatttgtattcagtactctacaaagtcatggtgaagaacttgggaggttaaaagggttggcttgtattttaaaatatccaattccagacctagacgagattcttgaaaataaataa

SEQ ID NO: 173392 - DNA, 222 bp, Saccharomyces pastorianus
tctatcatctgcataataccaaaaacggaaccgcggggcgcggagcattctttgatgttccccatagatgctctaaagactcgagtacaagctgcaggtttgaataagaccgtctcttctgggatgatatctcagatatccaagatatctaccatggaaggatcgatggccctatggaaaggtgttcaatcggtcatgctgggggcaggaccggcaaacagg

SEQ ID NO: 173393 - DNA, 357 bp, Saccharomyces pastorianus
atggatagagtgagggcagggcccgttgcaggatcttactattataaaatttgtaaacagcaaggtttacaatacgaggacgagccattatcagaaactgctaaatacttttacgaggatttgaagctaccacgtactttttcacaatggtttcaaatcactgtattgcacgagtggatactttttgtacgtatgagagccatgcctttcaaatacggcagaaactatcagcagaaattggtagatagaacattttctgacattgagctgagattattcgaggaaatgaaagttaattctggtagaatcgcagatcaatatttgacagatttcaatacgcaattaagaggagcgata

SEQ ID NO: 173394 - DNA, 372 bp, Saccharomyces pastorianus
atggatgttaagtcgagtatatgtcaatattccatagaatatagattatcaccagagatcacaaatcccaggaatctatatgatgtagtgacaaatattacaagattggttgaagagaaaggattgacaaaccttaatttggtgggacactctgtcggagcaacatttatatggcagattttgtctgttctcaaagatgctcgggaagagatgaacgaagttcaattacaaatgctgaaacttttgcaggtggttaaaagagtatttttgttggatggcagatactcaataaaggaactgttggaagagtaccctcagtataacagtttcacgaagttagcctcgcctgaaggcatacatttgtatgagaag

SEQ ID NO: 173395 - DNA, 537 bp, Saccharomyces pastorianus
  modified_base (139)..(167): a, c, g, t, unknown, or other
aacgggccaccaacgaaaatgagagactcggctaatagcgctcagaattatttagattccccaaaagtacagaagtcattgggatcttttttctttgcaatcgatagggatattgaaaaagttgacacattttataatnnnnnnnnnnnnnnnnnnnnnnnnnnnnntgaaaggttacttttgtctaaccaatttaatgaaataaaactgacttcagaggacaatgtcaatgccgaagatggggtagcacaaaccttactcgcaaaggatacatgtgagattgatcaacttttaaaaggagccggccaagctaatcgcacaccttaccacaaagatgatttgatagagattcagtctattctcgctgacttgacgaagcaattcaggaatttgaaatggtatgcagaactgaataaaagggcttttatcaagattgtaaagaaattagacaagaaagttggcaccaatcaacaaagtcatctttggaaactagatcttaccattacaattgtgatgatgcctataataaagatcgac

SEQ ID NO: 173396 - DNA, 111 bp, Saccharomyces pastorianus
ttcatgaaaaatagaatcaaagatggtagagaaataatggcagtaggtgaagccgcccacggatgtgataatgcgttatacaccagtgaatttagatacgaaatcagcgag

SEQ ID NO: 173397 - DNA, 486 bp, Saccharomyces pastorianus
gaaatgacagattttaacccaaccatagcttacgtatggtttcattactatatcgtgctaatttcctataataaacctttcatatacgaaatcaaacaaagccgggaattggttgaaggttatgttgatgaactgtattatcttttaaaagtttggaaaaataaatttaagacgtttgagaaggccacaatttacatgatttattctgcgattttagccatccaatgcatgaagtccaacttgattaaaaaggatagaaaacaagacttcttaaattttttaagtgcgcctaccctgaattacgaacttgctagaaaattcatagaaaactctgaagatgctttgcataattcagaaactatggatttattagggactctatctcacggtaacgattttgccttagagtacaattttgactttactttattgaatgagattgatatgctgattggtggaaacaccaatgatggtttgtcgaagtaa

SEQ ID NO: 173398 - DNA, 162 bp, Saccharomyces pastorianus
atgtctgctacactacaagctgaaaaattcagtgagtttttcaataatgcaccaattttgtttgtggaaggtagaaaatttgatgtttcacaatactacttgaaggcaccaacggacgatatagtagatgctggttgttgcatacaaataaaccagggtgac

SEQ ID NO: 173399 - DNA, 1938 bp, Saccharomyces pastorianus
gaacgcgaaggtgaaagaaactaccttatgcaagtcgtctgtgaagccactcaagctgaagatatagaagtccaagcagctgcctttggttgtttgtgtaaaatcatgtcactatactatacatttatgaaaccttacatggagcaagccctatatgcattgaccatagctacaatgaaatctccaaatgataaagtagcttccatgactgtggaattctggtccactatttgtgaagaagaaatcgatattgcctatgagctcgctcaatttcctcaatctcctttacagagttataatttcgctctcgcttctattaaagatgttgtccccaatttgttgaaccttctaacgagacaaaatgaagatccagaagatgacgattggaatgtttccatgtccgcaggtgcatgcttgcagttgtttgcccaaaactgtggcaatcatatcttagaacctgtattggaatttgttgaacaaaatattaccgctgacaactggaggaatcgtgaagctgctgtaatggcctttggttccattatggatggccctgataaggtccaaagaacctattacgttcaccaagccttaccatctattttgaatttaatgaacgatcaatccctacaagttaaggaaaccactgcttggtgtattggtagaattgctgattctgttgctgaatctatcgacccacaacagcatcttccaggtgtcgttcaagcttgtttaattgggttgcaagatcacccaaaagtggccacaaactgttcttggaccattatcaacttagtcgaacaattagcagaagccacaccatctccaatctataacttctatcccgctcttgtagatggtttgatcggtgctgcaaatagaattgataatgagttcaatgcccgtgcatccgccttttcagccttgacaacaatggttgaatacgccacggacacggtagctgaaacttccgcctccatttctacgtttgttatggacaaattagggcagacaatgagtgttgatgaaaatcaattaacgttagaagatgcgcaaagtttgcaagaattgcagtcaaatatattgactgttctagcagccgttattagaaaaagtccaagtagtgtagaaccggttgcagatatgcttatgggactgttcttcaggttgttggaaaaaaaggactctgcgtttattgaagacgatgtgttttatgctatttcagctctagctgcttctttgggtaaaggatttgagaaatacctggaaacattttctccctatttattaaaggctttaaatcaagtagattcgccagtttcaatcaccgcagtgggcttcatcgctgatatttcaaattcgttagaagaagatttcagaagatattccgatgctatgatgaatgtcttggctcaaatgatctctaatccaaatgcaaggagagagttgaaaccagccgtcttgagcgtgttcggtgatattgcttccaatataggtgctgattttattccctacttgaatgacatcatggcgttgtgtgttgctgcccaaaacacgaagccggaaaacggcacattagaagcccttgattatcaaataaaagtactagaagcagtactagatgcttatgtgggtatagtagcgggtcttcatgataaacctgaagctctgttcccttatgttggtactatattccagttcattgcacaagttgcagaagatcctcagctgtacagtgaggatgctacctcaagagcagcagtcggattgattggtgatatagcagcgatgtttccagacggctcaatcaaacaattttatggacaagactgggttattgattacattaaaagaactaggagtggccaattgttcagtcaagccacaaaagatacagcaagatgggctagagagcaacagaagcgtcaattatccttataa

SEQ ID NO: 173400 - DNA, 114 bp, Saccharomyces pastorianus
atggcagcgacaccagcagcgattgaagttaatttgaccattgtatttgttttgtttgttagtgctgatgtaatcttaacaagaaatagtgaaatgaaagcgcatacctcaaag

SEQ ID NO: 173401 - DNA, 1932 bp, Saccharomyces pastorianus
agtaatgttgatgctggcgacgcgaatgaattcaggaaaacgataaagtccgttacgacaaattccaatccaaacctgatgaggcaagacaaagatcagtatacgattttcttggagaaaaaactaaaaagtttggagactttgctcgatttatcgccgggatgcaaccagtacaactacgaattatcccagtacaagaaggtttctcatttgttcagtaacaacacttctgattactctagaccgaacagcagcaatatggtcatacttccgctgccatctccttccaacaaacccctggagaacacaaacaataacggcagcaacgttaatgcggccactaacgatacatcggccagtacgaacaacataaacaacaataatgctatctgccaatccgcgaaccttttgaatgaccctttagagacgctggacttcactaagtgtattttggccaaatacaatttgaaaaaagagtttttgatgtatgaccctatttttgaactgaatgagaagctgtcacattccttcttggacacttttttcacaagattacaattcaagtaccctatcttagacgaacaagaaatctatactttttatgaccactacctccacaacaagattcttatcccgccatcttctcccgccacgtcttccgcagcaccaccgtcgaattcacattcgtactctgaaatagaatttcattttctatccggcagaatgtggcttgtcttcagcatcagcgcctacttactgatgaccacaggtaagtacaaggggtttccacctcaccgatatttctccaccgctatccgtcacatcactaagtgtggtttacatttgaattatgttcagcaaatagaactgttgacattgcttgtcctttacattattaggactgatagagattctctgatactatatgacataatcaaggatgtcatgggcatatccaagaagaaacttcatctaaatcaatggtatcctaatgatccatttgcaaataagaaactgcgactattttggtgtgtttacctcttggaaagaatgatttgtgttgctgtggggaaaccttatacaatcaaggagtcggaaataaatttacctcttttcaataacgactctttttatacaaaaggtgtgcatgcggcggctccatcaaccaatgaccatggtgtgcaattcatcaatcagtctctaaagctgcgaagaattgaatctcaatttgtagagactttgcagctattgaaaaacgattctaggtcagtgaagcaatccattgatcaattgcccctagtacgaaagttttttgaagatttggaagtttggagaaaaagttattccactcttgacgtgaaaaatttcgaaaacgagacactaaaactttattactatagatcagtgcgattgcttatacagccatatttggaatttttcgccccggaggatagactatttagagaatgtcaagctgctgcgggtcaaatttgtcagttatacaagatattccatcaaaaaacgcttaatggtcattctacaccagcagtacatacggtttttgtagctggcgtaactttaatctactgtatgtggttagccaggaattttgacgatcaaaggaggaagaaattaggcgatgcttcgaagcatactagacctttaatcagtgcaagtctcttttcgacgatggatgatttgagagcttgctccgtttgtttatatgttatgacagaaaggtctaattttgcaagaacctttagagatactttcgatcagttaatgaatgccacggtaggtaatttgattgaaagatgtggtccagactcttcagagttaattttcatggctagtagtgtcgccaagcgtactgaacccaagaacatcaatgatgaggccataaggcatttcatctgggggtactcttcatga

SEQ ID NO: 173402 - DNA, 177 bp, Saccharomyces pastorianus
atcatcatccttgataactccccagcttcttacatcttccaccctcaacatgcaataccaatatcgtcctggttttcagatacccatgataacgaactattagatattattcctcttttagaagacctttcagtgaaaacttcattagacgtaggcaaaattctggatgtaacaata

SEQ ID NO: 173403 - DNA, 627 bp, Saccharomyces pastorianus
cctgttgttcattgttcgtccaacctgcccatcactccatatatctatgagcgtctagtatattttattaaggcaagctctatatcaagctgcatatctgacaacttacttcttgttaataaaaccttcaacgacggaggttgtccaccacatattaacttctgcaatgatgagataattaacccaacagcgggtcaaacagtgattgaattagttcttaatgcaaaaaaaggtgaattaggctcgggttatctggctgttgaccacggaaaaaaggttgttattctagcatttagaggatccacaacaagacaagattggtttagtgattttgaaatatatcctgttaactattctcccctttgcgttaaggaatatcgtaagcttatagaggaaggaaaaatcagagaatgtgaaggttgtaaaatgcatagaggatttctaaggttcacagaaactctcgggatggacgtctttaaaaaaatggagtcgattctggaaagctttccggaatataggatcgttgtcactgggcactccttgggggcagcattagcaagtttggctgggattgaattaaagataagaggctttgatccattagtagctgacattcgcaacaccaaa

SEQ ID NO: 173404 - DNA, 126 bp, Saccharomyces pastorianus
gaatctatatttctatttactaatatcacgattattcctcattccgttttatatgtttcattatcctattacattatcaatccttgcacttcagcttcctctaacatcgatgacagcttctcataa

SEQ ID NO: 173405 - DNA, 291 bp, Saccharomyces pastorianus
gcggataattttaggtatgatagtgatttggacgacgatgagaacgggtccgtcattttacaagacgacgactacgacgatggaaacaaccatatcccctttgaagatgatgacgtttacaactataacgacaacgacgacgatgacgaaagaatcgaattcgaagatgatgacgatgatgacgacgatagtatagataacgacagcgtcatggataggaaacaaccccacaaggctgaagatgaaagtgaagatgtggaggatgtagaaagagtttcaaagaaaatataa

SEQ ID NO: 173406 - DNA, 1617 bp, Saccharomyces pastorianus
acttcatctttgaatagtgatcaggcaactttgacagggtcgaggctacatatgagtagttcattgtcccagcaaaagaaccctgcagccattcataacgtcaatggtgtgtttacattactggcggaatgctattcccctacgtgcacaagagacgctttgtgttactctatttcgtgtccaagacgtcttgagcaacaagcaaggttaaatctgaaaccaaatggcggcctgaaacgtaatatatcaatggcattggatgatgatgacgaagaaaagccatcttggacaagttccgtatctaaagaggattgggaaaacttaccaaaaaaggaaataaaaagacaagaggctatttatgaagtttatatcacggagaagaactttgtaaaatcattagaaattacaagagacacattcatgaagactttggctgaaacaaatattatttcagcagatattagaaaaaatttcatcaagcatgtttttgcacatataaacgatatctattcagtgaatagacgttttttgaaggctttaactgataggcaaagaagttcaccagttgtgagaggaattggggacattgttttaagattcattccattttttgaaccatttgtttcatatgtcgcttcaagaccatatgctaagtacttgattgaaacccaaagatcagtcaatccctattttgctagatttgatgacgatatgatgagctcctccttacgtcatggtattgattcgtttttatctcaaggtgtttcaagaccaggtcgatatatgctattggtcaaagaaatcatgaaatctactgaccccgagaaggacaaaagtgattatgaagatttaagcaaagccatggatgcattaagggattttatgaaaaggattgatcaagcaagtggtgctgcacaagatagacatgatgtaaaattgttgaaacaaaagattcttttcaaaaacgaatacgttaatttaggattaaatgacgaaaggagaaaaattaaacatgaaggtatactatcacggaaggagttgtcaaaatcggacggaacagttgttggtgacatacaattttatcttctagataatatgctcttatttttaaaggccaaagcagttaataaatggcaccagcataaggtattccaaaggcccattccattgccattgttatttgcatgtccaggtgaagatatgcctgcgttgaggaaatatattggagaccacccagattgttcaggaactgtaattcaaccagaatacaacacgagtaatcctaaaaacgcaataactttcttatactacggtgccaagcagagatatcaagttacattatatgctgcgcaatacgctggattgcaaacgcttttggaaaaaataaagcaaggacaagcagctattataagcaaaacggagatgttcaatgtaacgaaaatgagcgataggttcttcgattacaccaacaaaattaacagtgttacttcctgtgatgggggtagaaaacttctgattgcaacgaactctggattgtatatgagcaacattaaaagacagcagaataaagatcatagacataaagctctgcttttttttcaactccaatccaactag

SEQ ID NO: 173407 - DNA, 84 bp, Saccharomyces pastorianus
gaggattgccgccaagctggcgctgccgttcatagtgagggcttcgagcgcgacaattggtgggtggtggcccagaagagatga

SEQ ID NO: 173408 - DNA, 123 bp, Saccharomyces pastorianus
tgcatcttttccgctgacttgggagtagagtacagctgcgcggagtcgcgtattacaaatcttgtactttgcattctgtgcatacgtgaggaaaaagcagcacctgttgtgaaaaaaagataa

SEQ ID NO: 173409 - DNA, 390 bp, Saccharomyces pastorianus
atgcaagttctcatcggaacgaaattagtgactgaaggaattgacattaagcaattgatgatggtgatcatgcttgataatagacttaatattattgagctcattcaaggtgtagggagactaagagatgggggcctctgttatctattatctagaaaaaacagttgggcggcaaggaatcgtaagggtgaattaccaccaattaaggaaggctgtataaccgaacaggtacgcgagttctatggacttgaatcaaagaaaggaaaaaagggccagcatgttggatgctgtggctccaggacagacctgtctgctggcacagtggaactgatagaaagaatggacagattggctgaaaaacaggcgacagcttccatgtcgatcgttgcg

SEQ ID NO: 173410 - DNA, 72 bp, Saccharomyces pastorianus
atgggtaaaggtaagccaagaggtttgaactccgctagaaagttgcgtgtccacagaagaaacaagtatgta

SEQ ID NO: 173411 - DNA, 81 bp, Saccharomyces pastorianus
atggtctctagcgggatcgaaccgctgatccccgcgttattagcacggtgccttaaccaactgggccaagagaccagaaat

SEQ ID NO: 173412 - DNA, 90 bp, Saccharomyces pastorianus
atgaagcagaaaaaatttaactccaaaaaaagtaatagaacagatttatcaaaaagaggagattctcctaatataggaatttccaaatca

SEQ ID NO: 173413 - DNA, 639 bp, Saccharomyces pastorianus
agtacatcttcgcagccaacctctactttgcagccaagcactattccacaatcaacctcttcttttcaagcagaatctactttgcaagccgtctctacgcaacaaactgctatgtctgtttctgcaggtactagtgaggatgtgcaacaattagctactacttctacctctatctcctcctctccttcccctaccactacgtctacttccacacaaaatatcgtgagtggtgtcggtgaagccaatgttgaaggcaacactcaaagtcagcatcattctcaccaagcagctgcgacttcaactttgaatcaaccaacgactacctcaattgcttctcaggcgtccaccgaatcaaccaatacacctacgtcgtcctctacttcttcctctacttcttcctctacttcttcttctacttcttcctctacttcttcttcttctacttcttcctctacttcctggttcgtatcttgcgtggaattcgtgactcggatactaccatcacagcaggaaacagctacgacctctgaagggtactcgagttcgggacctgatagaatttattctgcaaagggtaatgtacattcaccagataatgatgatggctattgtaagtctgcagacgcggtctgttcttga

SEQ ID NO: 173414 - DNA, 93 bp, Saccharomyces pastorianus
ttgccaacctcattttgcgtaatcgagaagttttgttcagagaaccgaagcgaggaattgacgagtatctggaaaacgattcttttcttcaaa

SEQ ID NO: 173415 - DNA, 252 bp, Saccharomyces pastorianus
atgcacggcacttgcctcagcggtctataccctgtgccatttacccataaagcccacgattatccacattttaatatctatatctcattcggcggccccaaatattgtataaatgcccttgatacatacgttataccacttttgcaccatatactaaccactcaatttatacacacttatgccaatattacaaaaaaatcaccactaaaatcacctaaacataaaaatattctactcttcaacaataataca

SEQ ID NO: 173416 - DNA, 357 bp, Saccharomyces pastorianus
actccgggtttaggtatggtttatttgatgcttactggtgttattgcagataaattacactctcgttggtttgcgattatttttactcaggttttcaatatcattggtaactccatattagccgcttgggacgtcgcagaaggagccaaatggtttgcatttatgctgcaatgttttggttgggctatggctcctgttttatactcttggcagaacgatatttgtcgccgagatgctcaaactagagctattactttagttacaatgaatattatgggtcaatcatctaccgcatggataagtgtccaggtttggaaaacagaagaagttccaggtattaaagggttcagtcactgc

SEQ ID NO: 173417 - DNA, 96 bp, Saccharomyces pastorianus
gccagaaaaagaatttctaaaaatgagcggtacgagaatcgaacccgtgtccccaccttggaagggtgggatgataaccactacactaaccgcccg

SEQ ID NO: 173418 - DNA, 1110 bp, Saccharomyces pastorianus
agaaaatccatggtaaagacggaaatcctcattgaagaacctttgaatcctactaccgatatcaagtcttttataaactcatacaaccatggcaaagcgtatagtctaggtgaaactcaacatttacattattatcagttgccatttccatggagggaaaacagatacataatccatggctataggttttacaatacccattccaaatctttgctgtctatttttaactggtacggctggcataatgaaacttcaaatatttggtctcatttgttaggagccatttatataatctacttggcaatttacgatttccctcagtctgaagtttggcggaattcccaggttccaccacaggctagatggattgttttcatgtttttggcagctgcgttgaaatgtatgctaagctccgtgttttggcatactttcaacggaacgtccttcttgaagctacgttctaaatttgcgtgtgtcgactatagcggtattacgatcttaattacagcttcgatattgacaactgagtttgttaccatgtattcatgttactgggcgatgtgcacttacatgggtatttctctggcgctgggtgtatttggtgtgtttatgaattggtcgcctcgctttgatagacctgaagcaaggccattaagaattagattcttcattttgttggctactatgggtgtattgtcgtttttacatttgatatttttgactgatcttcattatgctgcaacgctatttagccccgtcacatacaaatctgttgtttggtatttggttggtgtggtattttacggttcgttcattcctgaacggttcagatctgacgttcaggttgataagaccattccaacaaactacgaattatctactgatttagaaatcatcacaaagcaaagggaaattcattttagagaggtgccaacagcccattccaaatgcagttcctgtccgtctcatgccaaatcatttaaatctctatggtgggttgactattttggttgttcgcacactttttggcatttcttcgtagtgttgggtgtcatcggccattatagagctattttagatatgtttgccaagaggtggattttgtcatga

SEQ ID NO: 173419 - DNA, 183 bp, Saccharomyces pastorianus
gtaagttatgtggaagttataaaaaatggtgaaacaatatctagttgtttccagccgttccagaaaaacgaaaactatggtacaataacttcagcaaacgagcagataacgccggtcattttccataatttgatcatggatatggtactacccaaagtagttccgatcaaggggaacaaagtt

SEQ ID NO: 173420 - DNA, 168 bp, Saccharomyces pastorianus
atggcagcgacaccagcagcgattgaagttaatttgaccattgtatttgttttgtttgttagtgctgatataagcttaacaggaaaggaaagaaaacagacatattctcaaaagcatacagttgaagcagctctatttatacccgttcctctatcagtcatcactact

SEQ ID NO: 173421 - DNA, 714 bp, Saccharomyces pastorianus
atgaaaaacagatatactgatgcggtacacttgacgaggtatgccgcttggtcaaacaataagagagaccaagatacttctagtcaggctttaatcgatgagatctttggcttgtattcccccttccaattcttatcgctccaaggtatcggtaaatgcttccttaattatagatctaaaacgaagtgcgatgccttccctaaaactgccaaggaaactttatacatcatgctgagattttttgacatttgtttccatcatctcaaccaaggttgcatatccatagccaacccgctagaaaactacttacaaaaaatgaatcttttgccatcaactccatcctcagtgtcatctgcaggaagtccgaatacagcacatacgaaatcgcatgtagccatagtgataaacaacttacctcaaccctttgtgcaagacataacggggataagtaactcagaactactacataaaatcaatgacgacacgaacatgtttggaattttattggaaatgttgcatgtactcagaaattcgtaccagaatttcttaatagaagtaacgtctaatcctatggtcaaaagcacgcaatcaaaagatactttgcaagagtttattcattattgccaagcagtggaggcgctgattgccttatgctacagttattataattccacattatacaactacgtggactttacatgcgacctaacgcat

SEQ ID NO: 173422 - DNA, 102 bp, Saccharomyces pastorianus
atgcgtactttcactgactttgtttctggcacacctattgtaaggagtcttcagaaaagcaccataaggaaatatggatacaattggcaccctacatgtttt

SEQ ID NO: 173423 - DNA, 207 bp, Saccharomyces pastorianus
atgttcttgtttctgaacgaatcatacatctttgatagacttcgtatgtggagtactgttttatggcgcttatgtgtattcgtatgcgcagaatgtgggaatgccaattataggggtgccgggtgccttatgaaacccttttccgtgcctgtatttccgttttcgtcgaaccaagaatatccgtattgtagatgtgacccgggatcc

SEQ ID NO: 173424 - DNA, 237 bp, Saccharomyces pastorianus
gcattcagagcttactattctcagtttggcgccggtgttaagcagaacatcttgtcttctttactttctgaggaatggcacgcggacaaaatgcagcacggaatatgggactacttcgcgcaacagtataattttataaaccctggttttggttttgtagagtggttgacgaataattatgctgaagtacgtggtgacggatattgggaagatgtgtttgtacatttggccttatag

SEQ ID NO: 173425 - DNA, 129 bp, Saccharomyces pastorianus
ttaaattcctttgaagattattacggaaagccctctgaaacgccaaaaatggaggaagagaaattggaagtaacaattcggcacgcatcctgtgcggaattagtacaggataacaatcacacagaggaa

SEQ ID NO: 173426 - DNA, 96 bp, Saccharomyces pastorianus
gttggaataaaaatcaactatcatctactaactagtatttacgttactagtatattatcatatacggtgttagaagatgacgcaaatgatgagaaa

SEQ ID NO: 173427 - DNA, 1413 bp, Saccharomyces pastorianus
atgagtttcgttaagcaagcatgcgactgttgtcgcgttcgccgaataaagtgtgacggtaaaggaccgtgtagtcgctgccttcagcatgatttgaagtgtacataccttaaacagttaaagaaaagaggtccaaagtccatcagggctcgaagcttgaaaaaaatagccgatgtacagaaagctagtaatggtggcactacgatagctactgcggaagaatccacgaaggttccaaagaggctaatcgaccaatgcctaaggctttaccacaataatctgtacgttatatggcctctgctctgttacgaagatcttcacaggcttctggaagaaaggtatgatgactgttatgtgtactggtttctggtagctctctcggcagccactcttagtgacttgcaaactgaaatagaatctaaggagggagcttccttgactggaaaacagctatgtgacctttgtatgtcattacaccaccgttttgatgacctcaggggtagcgatgtttttagaataatgacgtattattatttgcatcgttgttttgctcaatcttctgatacaagaacttcgtacagactctcttgtgaagccattagcctcatcaagatcgccggatttcatcgcgaggaaacgtatgagcgtatctcgttcaatgagcagcagcttagacggaaggtgtattatttgcttcttttgactgaaagatattattccgtgtatatttactgcgcaacaagcctggatgccacgatatcaccaccgcaacctgaagttgtaactgaccctcgactttccttggatagtttcctcgagatgatcagagtatttactgtagcaggaaaatgtttttttgattcattagctgccaactccgtaaacgtttcttgtactgaagactccctcaaaaaaatatggagggaacttcatacaacgtcacttgaaatagagccatggtcgtacggatacatagacatttcattttcccggcattggatcagaacactggcttggaagctagcgcctctaacaaaaggtatacgaaccggtttcctttcaaacactaataatgcgctcataccagtcaaaattgccaaagacatgttggttgatacatttttaaccccaaaaagcttctatgaagttcacggccccggaataccaacaaaggcgctagaagtagcgaatgcgttggtagacgttgttatgaatcagttagaccagaatatgaaattggaggctttgaacgttttgcacgatatatccaaatttgttttttctttagaacactgtgatagtcggctgatcaagatatttaccgctaaatgtcaaactgcccttatttctatacctatttctagaccactagaattaagcgatgattctgaagaagacactaataaaattctt

SEQ ID NO: 173428 - DNA, 138 bp, Saccharomyces pastorianus
atggaggcggaagtttcagctaccgtgtccgtggcgtattcaaccattgttgtcaaggctgaaaaggcggatgcacgggcattgaactcattatcaattctatttgcagcaccgatcaaaccatctacaagagcggga

SEQ ID NO: 173429 - DNA, 222 bp, Saccharomyces pastorianus
tctaaagccaacgtgaatttcatgcattcaagtactacaaacgatctgatcaagtcaaattttgaaagctattttaaattgatggccgaagactatgaaacttttgacttgagagcctggtcgagacaaagacctcgaaaatttcagcttgtggaaaaaaaaaaaatcactaaaaaccctgctaatagccatcatccgcataaaaatggcaaattatcattt

SEQ ID NO: 173430 - DNA, 255 bp, Saccharomyces pastorianus
atgtataagaagctggctattgccacattgctctattccgcagattatttaccaggtgtgtttgcccttggtcaccaagtgaataaattgttagaggaagcaggcaaaaaaggcgacattgaaacatgcctcattgtgacgacctctctatttaatgacactttaagcgagctagccacgaatattttacaatcaatatacaccacaatcgtgttggtagagcctttagatagccaagaagaaagcatacagaag

SEQ ID NO: 173431 - DNA, 552 bp, Saccharomyces pastorianus
gctgctattgcttacgctcaaacccaagcacaaatcaacgaattgaacgttgttttagatgatgttaagaccaacattgccgactacatcaccctatccaacactccaaattcaggtctttccttggaccaaattccagctggtattatggacattgctgggcaattgattgcaaatccaagtgatgactcctacaccactttgtactctgaagtggacttttctgctgttgagcatatgttgactatggtcccatggtactcttctagactgcttccagaattagaagcaatggatgcttctctaactacctcaagttctgctgccacatcttcaagtgaagttgctagctcttctattgcttcatccactagctcttctgttgcaccatcctcaagtgaagttgtcagctcttccgttgcaccattctcaagtgaagttgtcagctcttccgttgcttcatcctcaagtgaagttgccagctcctctgttgcgccatcctcaagtgaagttgccagacctgcaggcatcaagctgcatgccgtcgtttac

SEQ ID NO: 173432 - DNA, 96 bp, Saccharomyces pastorianus
gcacctgagtttcgcgtatggtcacccactacactactcggtcaggctcttaccagcttaactacagttgatcggacgggaaacggtgctttctgg

SEQ ID NO: 173433 - DNA, 756 bp, Saccharomyces pastorianus
gtgaacaaaggccagcttgatgcattaagcacgtcaagtaacaacaagaccgatgccttgggcaacagcacagccaacaatcttggcggtggatcaagctatgacagcactacaggtgctgtaagttcaccaacctatgtcaccactaaaactgacggcacaacagttaatgctagcaatgtgggtgatgccttaaccaacctgaacaatgaagtggttaaaccgattacctttgcgggtaacagcggcagtgttgaccgtaagttgggtgaaaccctgaatatcacaggtggtctgacagcctcaggttcgaactcgaatgtgaagactgtgatcagtggtaatactgttgacattcaacttgcagatgcgcctgtatttgcagggaagttgacagcaaacggactggatgctaatggtgagaaagttaccaatgttggtgcgggcacagcagccactgatgcagtaaacaaaggccagcttgatgcattaagtacgtcaagcaacaccaagactgatgccttgggcaacagcacagccaacaatctgggtggtggatcaagctatgacagcactacaggtacagtcagctcgccaacctacaccgtgaatggcaacaacgtcaataacgtgggcgatgcaattactgcactggacaaaggctggactttacaaagcaacgggttaaatgcggctgcagtaaaagctggtgatacggttgatattggtacggttgcaggtgaaacgaacctgaaa

SEQ ID NO: 173434 - DNA, 162 bp, Saccharomyces pastorianus
atgatgataataatatttatagaattgtgtagaattgcagattcccttttatggattcctaaatcctcgaggagaacttctagtacattctacatacctaatattattgccttattaaaaatggaatcccaacaattatccaaaaatccacattcttttcat

SEQ ID NO: 173435 - DNA, 186 bp, Saccharomyces pastorianus
atgatattaggtaaacagaatatactaaaagttctccacgaggacataggaatcctcaaaatggaatgtatatttttacatactaatattacgattatccctctttctattttatatgtttcattatcctatcatattatcaatctttgcatttcagcttcttctaactttgatcacagcttctca

SEQ ID NO: 173436 - DNA, 1077 bp, Saccharomyces pastorianus
atgcttacgaatctatcccaattaaatgaaacgttaaaagaggctttatccaattacatgatacaaagaacatcagaagtaatcacggaattgaacacacaatatgaaaactcgaaaagggagtttgaaaagaatcttcaaaaaaacctattacaagaagtagacgaattcaaagaaaacttgaccaagcaaaaggacaaagaactagaagaaaaattaaaggcgaatgaagaattgttacaagccaaacatgcaaatgaagtgggcttactatccatcactcaagtcaaagaatttaataaaattatcaaagacaaaattgagaaggaaagaaatggcagattagctcatttagaggaaataaattctgaagttaacgacctcagcaaatccatcgacagatcgagcaaaatcttaagtaaaaacgaggctctagtgcaattaactttccaagtagatgagatcaaatctaggattaacaacaataacttacccgatgtgaatatcgacaaggaactatccagattgaaacttctttccaatcttctctctaccttcaacaaaaaatcttgttgcgacgatggcgactgctgctcctgcaaaaagggtaataagaatgaaggcaaggaagggaagatatcatgcaaatgcaaaccaaagacaaaccctccatcgctattaagcgtagctttagatgaattagaatccacatgtagcggtaaaaaaatcttatcgaatgagcagatctataacaggtggaacttactggcagatgactttaagacagcctctttattgccaccaaattccggtattttggggcaattaaccgccaaagttttttcccttttcttattcacaaagacaggtaatccttcaaatgccacggatttcgattctgtttatgcaagagtcggcgataacttgagggtatccaacctcaacgatgctgtagaagaggttgtctccctaaagggttggcctcataaagtttgcgaaagctggatcgaagatgctagaagaaaattagaagtccagcgcctggtagagattcttgactgtgaaataaggacgttg

SEQ ID NO: 173437 - DNA, 390 bp, Saccharomyces pastorianus
atggaaccgctatcaatacccaaaaacagatctattgtgaggctcactaaccagttctctcccatggatgatcctaaatcccccacacccatgagaagtttccggatcaccagtcggcacagcggtaatcaacagtcgatggaccaggaggcatcggatcaccatcaacagcaagaatttggttacgataacagagaagacagaatggaggtcgactctatcctgtcatcagacagaaaggctaatcacaacaccaccagcgattggaaaccggacaatggccacatgaatgacctcaatagcagcgaagttacaattgaattacgagaagcccaattgaccatcgaaaagctacacaggaaacaactacactacaaaaggctactcgat

SEQ ID NO: 173438 - DNA, 309 bp, Saccharomyces pastorianus
atggtcgtaattaacggggtcaaatatgcctgtgaaacgtgtatcaggggtcacagggcggcgcagtgtactcacactgatggtccgctacagatgatcagacgcaagggaagaccatcgaccacatgtggccattgtaaagagctgagaagaaccaagaacttcaacccatccggtgggtgcatgtgtgcctctgcacgacggccagctgttggcagcgaggaagatgaaacacgatgtcgttgtgatgagggtgaaccttgtaaatgtcataccaagaggaaagcagccggaaatcaaagggagggt

SEQ ID NO: 173439 - DNA, 93 bp, Saccharomyces pastorianus
atgtctttaccagctacttttgatttgaccccagaagatgcccaacttttgttggcctctaacgcccacttaggtgctagaaacgttcaagta

SEQ ID NO: 173440 - DNA, 123 bp, Saccharomyces pastorianus
atggaatcgatacttctacataataatattacgattattcctcattccgttttaaatgtttcattatcatattacattatcaatctttgcatttcagcttcctctaacttcaatggcagtttt

SEQ ID NO: 173441 - DNA, 300 bp, Saccharomyces pastorianus
atgtctgactatttcacgtttcctaagcaggagaatggcggtatctcgaagcagcctgcgacaccaggttcaactcggagctcttctagaaatttggagttaccgaagaactatcgttcatttggtggtagtagcgatgaactggcatctatgtattccgccgactcccagtacttgatggatatgattcctgattcattgacgctgaaaaatgagccagcatctggaaatacgcaaatgaacgggccagatggcaaagagaataaggacataaaacttgacgagtatatattacccaag

SEQ ID NO: 173442 - DNA, 864 bp, Saccharomyces pastorianus
tattctcgcgatcatgacttaaagggcgaagaataccaaaaaatggaatattccccttacgacaaagcaggtatcaacagagatgcaaaaaatgcatcccaagctatgcaaccacatcttcatgttattaaattttttgcttcccatttcgagggcacactatttcaaagtgactttttattgaaaattttcacgaaatgtgcgctttatggtatcaagaatctgtataaggcttcactacacccgttcgctagaatgattcgccacgaattattgttattcgcgactctcgtactaaacgcaagttataagcagggatccaagtatatgggccgtttgtcgcaagaaatcacaaacggtgccctaagttggtttaaaagaccagtagcgtggccattcggctcaaatgagctgaaaatcaaagcagatttatctgttactagggaccttttccttcagctcaacaaattaagctcgctaatgtcacgtcattgcgggaaagattacaagatcctgaactatttcttggcaagcgaaatccagcagattcaaacctggcttactccgactgagaagattgaaggagccgacagcaacgagcttacaagcgatatcgttgaagctacctttgctaaagatccaacattagcaataaatctcttacaacgatgttatagcaagaaagctgaggatgttttagtgggcttagttgcaaaacatgctttaatgtgtgtggggtccccaagtgctcttgacctgttcataaaaggaagccacctgagcagtaagaaagacctacacgcaaccttatactgggcgccagtgagcccgttaaaactctatcaaccattttccgttcccgaa

SEQ ID NO: 173443 - DNA, 192 bp, Saccharomyces pastorianus
atgaataatgaaatcacggctagtaaaattgatgatggtaataattcaaaaccactgtcacctggttggacggaccaaactgcgtataacgcgtttggaatcactacagggatgtttaataccactacaatggatgatgtatataactatctattcgatgatgaagataccccaccaaacccaaaaaaagag

SEQ ID NO: 173444 - DNA, 501 bp, Saccharomyces pastorianus
atgagtcaagtggcagacacgagtctaaaagttggtatatgttggtgtgatgtgagtactggggagatatttgttcaacaagtgtatcttagagatttggtttctgcaataaccagaattcaacctaaggagattttattagatgaaagattacttgagtttcatatcgagtcagggacgtggtatcctgaacttgttgagcttaaaaaattttttataaaatatcagaaaatgcccagtcaacatcgcactattgaatcattctatgggctgtttaatttgggaggtaaagaagcaacggaaaggcaattgataatccaatttcaaacttttactcagaaggagttagctgctttgaggaatacattaatatacgtaagtaatcatctacctgatttctctattaattttcagattcctcagagacaattagcaacggcgataatgcaaattgattcaagtaccagcactgcacttgaattgcattctactgtaagagac

SEQ ID NO: 173445 - DNA, 426 bp, Saccharomyces pastorianus
atgaaacacattacctcaaactttttcagaaaaaaacttggtattcctggaaaactgaaaagaagaagccattataatcccaacgcagagggccacaccaaagggaattcttctatattgagttccactactgatgtaattgataacgccagctacaggaatattgcaatagatgaaaatgttgacataacacataaagaacacgccattgacgaaataaacgagcagggtgcatcaggtggtgaatctgttgtggaaggtggatcgttattgcatgacattgaaaaggttttcaataggtccagggcaactaggaaataccatatccaacggaaattaaaagtgcgccatattcaaatgctctctatcggggcttgctttagtgtcggattatttttaacctcagggaaaaccttttcaatgtca

SEQ ID NO: 173446 - DNA, 87 bp, Saccharomyces pastorianus
ggtgaatttgaggtaattgttgggattccatttttgataaaggctataatattaggtatacagaatatactagaagttctcctcgac

SEQ ID NO: 173447 - DNA, 465 bp, Saccharomyces pastorianus
gtcaatatggaccctaatgacgtccacgaagaagaagagtttgtggatgaagatgatacttatgtttctttgaatcctattattagatgcactcccgatcggtacttcagcaaaggaccagcgaaagatatccccagtgaaccattctgtacacctcgtgaaaattccgactggaaagttggcaagacttatttcgtcacttggtatacaaggtttttcgaagacgagaattctgatacagtcgctgataaagtccgtgtccatttgtcttatgtcaaagaaaaatccgtagagatgggaaatcacaagagggatatttctggaacatttttcacatctgaatggattgacaatgtcgatggcctactgccaattgaaatcaaagaagattggttgcagaatacatacgagcgtagaataatgtcggggatccattatagagtcggacctgcagcatgcagctgc

SEQ ID NO: 173448 - DNA, 144 bp, Saccharomyces pastorianus
ctattacgattatttcttcttccgtcttatattttttattgtcctattacatcatcaatcctcgcatttcagcttccattatatttgatgactgtttctcaatctttatgttatcttcttacaccgtatgtgatgatatactaa

SEQ ID NO: 173449 - DNA, 1743 bp, Saccharomyces pastorianus
ggtgctaaggtctcgaagtttttgaaatttctggaaatccctgttgaaaatagaaactccatcagttttttgaagaacccagatttgcagccaattaaggcggaacaccaaacatgggggttctggtccaatttcgcatactggggggttatgtccttctctgtgggtacttggctttgtgcctcgtctgcattgacctctgggctgagttatccagagactattggtacgtttattatcggtgatgtgttgactatcgtattcaccctggccaattcaagtcctggttacgactggaaggttggttacacgttggctcagagatttgtcttcggtatcaatggttccgctttcggtattatcatcagagttttgatgagtattgtcaactatggttccaacgcttggttgggtggtctttgtatcaacatgatcttagattcctggtctcatcactatttgcatttacgtaacactttgtccccaagtgtcgccatgactactaaggagttgatcgggttcattattttccacgtcctcactgccttctgctacctaatgaagccctaccgcatgaactatatgttgatctggtcatgtgtggccaccttcttctccatgctgggtattgtgatctatttgacccaccaagctggcggtgttggtgactcgttcgcctctacgaagtcaaccctcactggttctaaaaaggcttgggcttgggtctacatgatctcatactggtttggtgccgtctctccaggctccaccaaccagagtgactactcgaggtttggttcttcccaaactgccatctggctcggtaccatctgtgctctaatgatcccgagcactttggttccagtatttggtctcattggttcttccactaccgaaaagctatatgggaaacaaatatggatgcctatggagattttcgactactggttaaaggacaactattctgcaggtgcccgtgctggtgccttcttctgtggtgtttccttcgccatgacccaaattggctacaacatctccaactgtgggtttgctagtggtatggatttggctggtttgttgcccaagtacttcgatattaaaagaggtgctattctaactgcatgtctctcctgggcttgcttgccctggaacttctacaactcttcgtctactttcttgactgtcattagttctttcggtgtcgttatgactcctatcatctctgtcatggtctgcgataacttcttgattagaaagagacaatactccgtcaccaatgcctttattcttaagggtgaatactatttcagcaagggtgttaattggagagccatcatcgcctgggtttgtggcatgactcccggtttaccaggcattgcctggcaagtcaataacaattatttccacaacgccggtattgtaaacttctactacggtgattcattcttctcatttttgatctcgttctttgtctattgggggctatgtctagtgttccctatgaaaatcgttgtcagacatgatgacaaggattattatggtgcatttactgacgaagaagcaagaaagaagggcttggtcccattcagcgaaatctctgaagaagaaatcactgcttacacattaggcaaaggatacaccactggccatgaattcagacctgacggatccggcgacgaaacacctgaattagccaaaactagctctgaaaacaccatcgagtttgaaatagtttcatcaaaa

SEQ ID NO: 173450 - DNA, 363 bp, Saccharomyces pastorianus
tccatagctgcaccagcgttcttggaggtagcagaggaggagctattagtagatttttctgcagaagaggaggcctttgcagaagaggaagctgcagaagaggccttggaagaagcagatgaagcagcagatgaagcagcagatgaagcagcagaagagccagaagacttggcagagctagaagacttggcagagccagaagacttggcagagctagaagacttagcagcttcagaagcagaagaggaggcagcagaagaagattctgaagcagaagaagaagcagctgaagaggattcagaagcagaagaagaagcagctgaggaagcagtggcagattcggaaccagattcggaaacggat

SEQ ID NO: 173451 - DNA, 777 bp, Saccharomyces pastorianus
cagagatcttacgattcggtggacttcttcgagattatggatatgttagacaagaggctgaacgataagggcaaatactggagacacgttgccaaatcgctgaccgttttggactatcttgttcgtttcgggagtgagaactgtgtgctatggtgcagagagaatttttacgtaattaagacattaagggaattcagacacgaaaatgagtccggatttgacgaaggacagattatcagagtaaaggctaaagaactcgtctctctgttgaatgatgaagaaaggctacgcgaagagaggtctatgaatacaagaaacagaagggcggacagagctgctaggccaaggccaagaagacaaagaacaaggagcaacccacacgattcttctccctcttaccaggacgatttggaaaaggccctagaggagagcagaattactgctcaagaagatgaacaacgtagaagagaactggcccagtacgacgatgaagatcctgacttccaagctgccttacaactaagtaaagaagaagaggagttgaagcaattgcaggaactacagagattacagaagcaacaacagtctctgtctcaatttcaagctcctttacaacaacaacaaccacaacaacaaccagcgtactacgacattttcggtaatccaatctcccaagatgatacttacagtatcagtaccaacaggaccaggaacaagcaatggcgcagcaaagatggctggagacctgcaggcatgcaagcttgcactgccgtcgtt

SEQ ID NO: 173452 - DNA, 402 bp, Saccharomyces pastorianus
ttagctctcaaaacacttcattacgatcaagagattagtgaattaacggaaaggattttagacttaaataatgaaaacgacagattacttattagtgtttctgatctaacaagtgaaattaattccttacagagcaatagaactgaaagaataaaaattcaaaagcaacttgatgacgccaaagcatctatttcttcgttaaaaagaaaagtacaaaagaagtattatcaaaaacagcatacttccgatactacagtaacatctgatcctgattctgaggggaccactagtgaagaagacatttttgatatagtgatcgaaattgaccacatgattgaaacaggcccctctgtcgaggacatttctgaagatcttgtcaagaaatactcagaaaaaaacaat

SEQ ID NO: 173453 - DNA, 114 bp, Saccharomyces pastorianus
atgtgtcttttcgatcaaggcaaagcagtcttcattcgtaccatatgttggccagaccttttcgtagttggcaatatcgtaacccatatcatcttgtggcgagtcgtagaatgg

SEQ ID NO: 173454 - DNA, 798 bp, Saccharomyces pastorianus
cctcgagcagcagtagcagcagcgactccgaatcaagttcgtcatcatctagctccagctccagctccagcgactctgattcctctagcgactctgattcttccagcgattccgattccgactccagttccagcggatcctcttcctcttcctcttcctcttcctcttcctcttcctcttcttcttcttcttcctctagctctagcgagtcttcctccgaatcggaagctgaagacgacaccaagaagagatcgagagaatccgataatgaagatgtcaaggagactaaaaaggcaaagactgaaccagaatcttcatcctcttcctcgtcagattcaagctccagtgagtcctcttcatcttccgactccgactccagctccagctccagctccgactccagctccagtagttcctccgactcagaatccgactcgagctcaagctctggctctgggtctggctctagttctagttctagcgactcttcgtcagattcggattcagaatcggactcgagctcaagttctagctctagctctagctctagttctagcgactcttcatctgattccgactcagactcagactcagactcagactcctcttcttcctcgagttccagttccagctccaactccagctccagctcgagctccagtgaatcctcatcatcatcatcatcatcatcatcatcatccgactccgactccgactccgactccgactccgactccgactccgattctgaaacaaagaaaatatcaaaagatgagcccaaggccgaagaaacccctg

SEQ ID NO: 173455 - DNA, 150 bp, Saccharomyces pastorianus
cacacggatgctacagtatataccactctcaaacttaccctaatctcactttccactccatcacccatctctcaccatcagtaccaaatgcactcgcatcattatgcacggcacttgcctcagcggtctataccctgtgccatttaccca

SEQ ID NO: 173456 - DNA, 252 bp, Saccharomyces pastorianus
acttactcatcaccctctgcaccaaatagcatcatcatatcgagatcgttctggtcgagtgtttcctctgcgggggcttcatcaagttcgcgcaccaccttgttctcttgtatgtgttcccgttcatgcacattatcctcgtcctcatcgttttcttcgtcatcctcctcgtcttcgtccacttcatcctcttcctcttcttcttcctcttcctcttcttcttcctcgacgttatttgcagtttctgcgtca

SEQ ID NO: 173457 - DNA, 162 bp, Saccharomyces pastorianus
atgaatacttttattttggcccaagttatgaagtgtgaagatatccttgaatacaaggacgacgctgccatcaaagccgccggtaagttgatgcaaaagggtaaggaatacgttgtcgaagacggtgacgttatttacttcagatccggtgctggtaagaat

SEQ ID NO: 173458 - DNA, 180 bp, Saccharomyces pastorianus
atggcagcgacaccagcagcgattgaagttaatttgaccattgtatttgttttgtttgttagtgctgatataagccctactaggaagaaaaaaatgagtgcatattcacaaagacagggggtcaagtctgctctatttatacaaattccttcaccagctggtgctgcccaaacgagccac

SEQ ID NO: 173459 - DNA, 213 bp, Saccharomyces pastorianus
atgtcttctaaggttgatttatataatagcgcgagtgaatctacacattcagcccaagatgcaagacaacagacacctacagcatttgcagcatcaagagatgtcaatgggcagcccgaagctttgctaggtgatgaaaatccaattgagccagaggaaaaggccaaactaaaccatatgactttagactcatggcagccattgaccccaaaa

SEQ ID NO: 173460 - DNA, 225 bp, Saccharomyces pastorianus
atggagcttttcatgtttgctatttccttagacaaaatcaccaacgaactcactgtattcaatacacatatatcagtccctgtgcaaggcatcgatgtaatagacattatgtctcatgaaagattgggtagaattttcttcgtaggccaggccactggcctgaatatctgggagttgcactactcagcttccgacgactggttcaatagcaaatgtagtaaggtc

SEQ ID NO: 173461 - DNA, 219 bp, Saccharomyces pastorianus
tcatacgcacacggatgctacagtatataccactctcaaacttaccctactctcacattccactccatgacccatctctcaccatcagtaccaaatgcattcgcatcattatgcacggcacttgcctcagcggtctataccctgtgccatttacccataaagcccatcattatccacattttaatatctatatctcattcggcggccccaaatattgta

SEQ ID NO: 173462 - DNA, 336 bp, Saccharomyces pastorianus
tcattgacgacagttgtggccgtagaaacgatggcaggagaggtggtctcggaacagacaccagattcacaggaagtaactgtaactaaagtagtttgctttgttggctctgtggtagacataggacaccatgtagtgtattcagtagcgacgccgctaacagtggtcgtagcagtagaaacgatggcaggagaggtggtctcagaacagacaccagattcgcaagaagtaactgtaatcaacgtagttggttttgttggctctgtggtagacataggacaccatgtagtgtattctgtagccacgccactaaccgtagttgtggctgtagaaacg

SEQ ID NO: 173463 - DNA, 465 bp, Saccharomyces pastorianus
cccttccagccttggtatttaaagactataccagctactttgattgctggtatctttccatttggctccatcgccgttgagttgtatttcatatacacaagtttatggtttaataagattttttacatgtttggtttcctctttttctctttcctcctattaactttgacaagttcactcgtcactattttgatcacttatcattccttatgcctggagaactggaagtggcaatggagaggattcataattggaggtgccggttgtgctttgtatgtgtttattcattctattttattcaccaaatttaagttgggtggattcacgactattgtcttatacgtgggatactcctcagtcatttcattactctgctgtttggtacggggtcaattggctttatcagcagtatgctctttgttagaaaaatctactcatccattaaagttgactaggccaacgaaa

SEQ ID NO: 173464 - DNA, 402 bp, Saccharomyces pastorianus
gtcattcccgtcgtggtcaagaaaaatgcacaaaagtttctgaccttcgttgaagacgaaccagatttccagagcggaccaatcccttctaagtatcttattcccaagaaaatcaacttgatggtctacacgttgtttcaagtacatactttgaaattcaatagaaaggattacgataccctttctcttttttacctcaacagaggatactataatgagttgagttttccgtgtcctggaacgttgtcacgaaatagcgagtgccaggccgaacgacagctctacgatgcgtactttcaccaactttgtttctggcacacctattgtaaggagtcttcagaaaagcaccataaggaaatatggatacaatttggcaccctacatgtttttgttactacacgt

SEQ ID NO: 173465 - DNA, 120 bp, Saccharomyces pastorianus
ttacaggggccctacagaaagtacattccctataatattttccaacaatgtggaattggtcacttaaatacgcttgattatattttcgcgtttttgattgttataccaatttcacattaa

SEQ ID NO: 173466 - DNA, 357 bp, Saccharomyces pastorianus
attgacagcagtgacaatgacgctcagaataagaatgctagtgaaattgctcctgagtatttaacaaacttgcaaaattatctgccacgaaagggttcaagagcgaaaatagtttctgacgaacaagaagttatcgaattgaattcttccaatgcttcagagtatatgtatgattgcatgaatagaaagttctttacagatgatgcaaaagaacggatttctagaaacaacttcaatcagggagctgaggaagaccctctaaacgacccattcgcttcaagtagatctttatcattgccgtcctcgggagcagatgctgtcaaaaggaagaagaccctaccaaggctactaaaaatc

SEQ ID NO: 173467 - DNA, 363 bp, Saccharomyces pastorianus
atggtcaaattagcttctatcgccgctggtgtcgtcgccatcgcttccggtgccgccgccgccaccaccaccctagctcaatccgacgaaagagtcaacttggttgaattgggtgtctacgtctctgatatcagagctcacatggcccaatactacctgttccaagccgctcacccaaccgaaacctacccagtcgaagttgctgaagccgttttcaactacggtgacttcaccaccatgttgaccggtattgctccagaccaagtcaccagaatgatcactggtgtcccatggtactccaccagattgagaccagccatctccagcgccttgtctaaggacggtatctacactgtcgccaaa

SEQ ID NO: 173468 - DNA, 222 bp, Saccharomyces pastorianus
agaaagagaagaaggacaagaaggacaagaaggaaaagaaggaaaagaaagacaagaaggacaagaaggaaaagaaagagaaaaaggagaagaaaagaaagtctgaagacggtgattctgaggaaaagaaatctaagaaatctaagaaatgattctcatcactccatctcatcctatatatttaacagctttcttttttttcaaaaaactttttctattatt

SEQ ID NO: 173469 - DNA, 240 bp, Saccharomyces pastorianus
atgatcaaggctatagtattatgtatacagcatatactagaagttctcctcatggatataggaatcctcaaaatggaatccatatttttacatactaatattacgattattcctcattccgttttatatgtttcattaaatcctattacattatcaatccttgcatttcagcttcttctaacttcgatgacagcttctcataacttatgtcatcatctaacaccgtatatgataatatat

SEQ ID NO: 173470 - DNA, 1284 bp, Saccharomyces pastorianus
aaaacgtatgatttattggtaccactaccagaaagaaaaccattaaaactacatcgctcttcaagtacgatggacttggaaatcaaagatattcgcccggcgcatgtcagctcgttcgaggatttaaaaagctacattcaatcagttcaaaattctggcaataggatgggatatagtagtgaagcagaacggtcaagatcgcatgtcgtttttcagctacacatagagcagagaaatagagggcgtgacatactgaaaaatagttctttatatttaatcgatttacatggagcagagaaatttgataaaaggactgaaaatacgctatcacaagatgcactaaaaaaactaaaccaatccattgaagccttaaaaaatactgtagagtgtttggaaattaaaaacctggattcaatatatagtgcgaaagcatcacatagctctacctaccgcgaatctcaactaacggaagttttacaagactctcttggtggcaacaggaaaacgaaagtgattctgacttgctttttaagtaatgtgccaactactctatcaacacttaagtttggtgacagtatccgccaaattaataacagagttatggataataccagcggtttgaatttgaaaaaaaaaatggacttatttgtgcaggacatgaaaattaaagatgataattacatctcccaaattaacattttaaaggccgaaattgacaccttgaaaggtcacagcagccaatctgtctccaaggaggacttagcaacgaaatatgatgatagcaaaaaggaaaacacaaaactaaagctacagttggacagtattgcacagttattgaacagattgaccactgaaaatcccaataatagcatcaatgacgaagtttctgaaatattaatgaagaggtgtgagcaaatcgctcagttagaattatctttcgaccgacaggtaaatgctaattcaaaattggaaaaagagctagaatacaaaaaatccaaagaggaagcattagagtccatgaacgttaaactactagaacaaattcaacttcaagaaaaggagattcaagaactgctaaccactaatgctatcttaaagggtgaattagagactcatactaaactaaatgagacacgaaatgaaagaataaaatacttggaaggctctgtcacagagctcggaattaataaatcagcaaccccatcgcccagaaaaggatccgtaagctcatcatcgggaaataccatgtcgcatattgaagcaggttctgaattatctaaatag

SEQ ID NO: 173471 - DNA, 108 bp, Saccharomyces pastorianus
tctgagctattcaaatatctaaagacattaaacgggttcgcttctacattgtctagcgatgtgctcaggtcgatttctagaaagtttctgactctagaggatccccgg

SEQ ID NO: 173472 - DNA, 150 bp, Saccharomyces pastorianus
gaagaggtaaccggtcaaggcagtcggtccgaagacgtactagaagatgggcaaattggagaacctggacaagaagaagaaggtgctgtcgaaggacatgaacaagtcggacaccagcaaagtgagtctcttccccaacaaacaacagct

SEQ ID NO: 173473 - DNA, 189 bp, Saccharomyces pastorianus
atgcacggcacttgcctcagcggtctataccctgtgccatttacccataaagtccatcattatccacattttaatatctatatctcattcggcggccccaaatattgtataactgctcttaatacatacgttataccacttttacgccatatactaaccactcaatttatacacacttatgttaatatt

SEQ ID NO: 173474 - DNA, 111 bp, Saccharomyces pastorianus
atggcagacacaccctctgtggcagtacaggccccaccgggctatggtaagacggagttatttcatctccccttgatagcactggcgtctaagggcgacgtgaaatatgtg

SEQ ID NO: 173475 - DNA, 117 bp, Saccharomyces pastorianus
caaccagttcaactgaagcaaccagttcaactgctccaaccagttcaactgacgcaaccagctcaaccagctcaactacttcaactgctccaaccagttcaactgacgcaaccactt

SEQ ID NO: 173476 - DNA, 573 bp, Saccharomyces pastorianus
cgtatcattgtgggctcatacgagcacaacattttgtgtttatccttagatatcccaaatcaaaaggaaaatgatgcagcaaagacaccacattttatgccaatatttcattttcaagcccattcgttgagtattaaatgtttggctgtttcaagaagatacctagtttctggatccaatgacgagcacatcagaatttatgatttgcaaaagaggaaggaactgggtactttgttaagtcatcagggctctattactgctctacaattctcacatccagcttcttccagtgaggatgctgctgtttcaaaggggagcaagaatagcaaatggttattatcagcatcagaagaccacaaaattatggtttggagagtaaaggactgggaaacagtggggactttaaagggacacacggcaagggttaatgatgtggatattcaccccaccaatagaattgccatcagtgttagtgatgaccattctatacgtctttggaatttgatgactctaagaaatgctgctgtactaaaactaagaaaagacctgcaggcatgcagcttgcactgccgt

SEQ ID NO: 173477 - DNA, 183 bp, Saccharomyces pastorianus
ataacatcatgcaaaattgaagattcgtttttgtggattcctaaatccacgaggaaaatctctagtataatctatatacgtaatataatagcattaagaacaatggaatcccaaaaattatcgtctgatttttacagggtaatactaaaaacgcttgctgttatcttaagctctatgtattta

SEQ ID NO: 173478 - DNA, 360 bp, Saccharomyces pastorianus
gtcaaattaacttcaatcgctgctggtgtcgctgccatcgctgctactgcttctgcaaccaccactctagctcaatctgacgaaagagtcaacttggtggaattgggtgtctacgtctctgatatcagagctcacttggcccaatactacatgttccaagccgcccacccaactgaaacctacccagtcgaagttgctgaagccgttttcaactacggtgacttcaccaccatgttgactggtattgccccagaccaagtgaccagaatgatcaccggtgttccatggtactccagcagattaaagccagccatctccagtgctctatccaaggacggtatctacactatcgcaaactag

SEQ ID NO: 173479 - DNA, 99 bp, Saccharomyces pastorianus
atgggatctgctaaggataaccttaccttttgtaagtttggtggtaagagatataagaacctaaacggtttaaaatatcacagaggtcattccactcat

SEQ ID NO: 173480 - DNA, 390 bp, Saccharomyces pastorianus
atgtcacattccggagctgccatttttgagaaagtttctgggataattgccataaatgaggatgtttcacccgcagaattgacatggaggtctacggacggtgacaaggttcacacagttgtcttatccactattgacaagttacaagctacccctgcttccagtgaaaaaatgatgttgaggctaatcgggaaagtggatgagtcaaaaaagagaaaagacaacgaaggaaatgaggttgtgcccaaaccgcaacgtcatatgttatcgtttaacaatagaacagttatggataatatcaagatgacccttcaacaaatcatctcacggtataaagatgcagatatctacgagaaaagagaagaagagaggagtctgcgcaaaacacag

SEQ ID NO: 173481 - DNA, 411 bp, Saccharomyces pastorianus
atgtatttggataaaagactaacattttacaaattaatttttgatgcaaaggcgtccaattcggtaatcaagaatatcgacaactccattactaatgatgttgcaaaattatgcgatgcgacatgctccgtttttgcaaacattgcaaagccagttattgatttaatattcttttcggtttatttacgtgataatttgggaactgtgggagtagcaggtatatttgttaattatttcattactgggtttattttgaggaaatacacgccaccattaggtaaattggcaggcgagagatctgcttcagacggcgattactacaattatcatctaaacatgatcaataatagcgaagagatcgcattttaccaaggaacagcagtggaaaggacgacagtcaaagagttgtat

SEQ ID NO: 173482 - DNA, 216 bp, Saccharomyces pastorianus
atatgttttagttctaagtatcgttgtctggagcaagcaaagaaaagcagacctgtatgtgcaactttcctgttttccattaaaatctcaagaaccgaccccttgactgtgctcatatatcaagtatcggttttaaagtcccctaattgtgataattgcaagaacgacagtcagaaagatattttttttttctttctctttacctatcctccataa

SEQ ID NO: 173483 - DNA, 288 bp, Saccharomyces pastorianus
  modified_base (223)..(223): a, c, g, t, unknown, or other
  modified_base (280)..(280): a, c, g, t, unknown, or other
aaaagcaaccgcaggagtttacgtgacatggggaataccattggtcgaaataatataccaagtgacaaggacaatgtctttgtgagattgagtatgtcccctttgaggacgacaagccaaaaagagtttttgaaaccacctatgaggatatcacctaacaagacagatggaatgaagcatagtatacaagtaacaccaagaaggattatgtcgccggaatgtntgaagggctatgtctctaaggaaactcaaagcctggataggcctcagttcaaaaatntcgaataa

SEQ ID NO: 173484 - DNA, 138 bp, Saccharomyces pastorianus
atgcacggcacttgcctcagcggtctataccctgtgccatttacccataacgcccacgattatccacattttaatatctatatctcattcggcggacccaaatattgtataactgctcttaatacatacgttatacct

SEQ ID NO: 173485 - DNA, 222 bp, Saccharomyces pastorianus
tatacagtatatatactagaagttttcctcgaggatataggaatcctcaaaatggaatctgtatttctacatactaatattaagattattcctcattccgttttattccttattccgttttatatgtttcattatcctattacattatcaatccttgcatttcagcttcctctaacttcaatgacagcttctcataacttgcgtcaccatttaacaccgtat

SEQ ID NO: 173486 - DNA, 132 bp, Saccharomyces pastorianus
ttgctaccattaattttcttagtctgtttccgtgcaagtaatgtcttcaaactgcaggaagagtcagtcgaagcacaattgtcatggaatttcccaacccaagaaacggacaaatctaactcagacgtctag

SEQ ID NO: 173487 - DNA, 885 bp, Saccharomyces pastorianus
attggtgatttgtcaagacccattggttcttctatcaaatatatggcgttccagtttacctgtctattagctattcctgccttcatctattttctcattttcagcgtgcatattaagacattaaacgtgaatggtattagtagtagcttttttcccgctgagtttagaaaaactttaaaatacaacaacgttattaaagagactgtggcagaagttgcagtgggttccgctgtttcactgaatcatgttggaacggcaggtggttacttgcattctcatcttcacaattatccggctggttccatgcaacaacaagttactttgtatcctcacgtcgaccaaaataacaaatggattattgagctggctgaacatccaaatgaaaatgtcacaagtttccaaaatttaaccgacggtaccataattaaattaagacagcttaagaacggctgcaggttacactcacatgaccacaaacctccagtttctcaaaatgcggattggcaaaaagaggtgtcatgttatggatacgagggcttcgaaggtgatataaatgatgattggataattgaaatcgataaaaaaagatcagagccgggacctgcccaggaacatattagggctattgaaaccaaatttaggctgaaacattatctaactggttgttacttattttcacatcctgaaaaactacctgagtggggatttgggcagcaggaagttacatgtgcatactttgcaagggaggacttaactttatggtatattgaagaaaacgaaaacgaaatttctttgccaaatccagagaaggtttcttataagaaaatgagcttttggcagaagtttgttgctatccacaagttcatgttctaccttaacaattga

SEQ ID NO: 173488 - DNA, 1494 bp, Saccharomyces pastorianus
ttggctgccggtttgtctgattgggtcgatttcggtgtcatctgtgctttactgctattaaacgcatctgtcggatttattcaagaattccaggcaggttccatcgtagacgagctgaaaaagacgttggccaatactgcaacagttattagagatggccaattgatcgaaattccggctaatgaggtagttcctggtgagattttgcaattggaaagtggcacaattgctcccgcagatggccgtattgtcactgaagactgttttttgcagatcgatcaatcggccatcactggtgaatccttagccgctgaaaagcattacggtgatgaggtgttctcctcatccactgtgaaaaccggcgaggcttttatggttgttactgccactggtgacaataccttcgtcggcagggctgccgccttagtggggcaggcttccggtgtagagggccatttcactgaagtattgaatggaattggtattatcttacttgttctagttatcgctactttgttgttggtctggaccgcatgtttctatagaacggtcggtattgtaagcattttgagatacactttgggtataaccatcattggtgtcccagtcggtttgccagcagttgttaccaccaccatggctgtcggtgcagcttacttggctaagaagcaagccattgttcaaaagttatctgctattgaatcccttgctggtgttgagattttatgttctgacaagactggtactttaaccaaaaacaagttatctttacacgaaccctacactgtcgaaggcgtttctccggacgacttgatgttgaccgcttgtttagctgcctctagaaagaagaaaggtttggatgctattgataaggcttttttgaagtcattgattgagtatccaaaagctaaagacgccctgaccaagtacaaagttctggaattccatccgttcgatcctgtctcaaaaaaggttaccgctgttgtagaatccccagagggtgaaagaattgtttgtgtcaagggagctccattgtttgtcttgaagactgttgaagaagatcacccagttccggaagatgtgcatgaaaactacgaaaacaaggttgctgaactagcttctagaggtttccgtgctttaggtgttgctagaaagagaggggaaggtcactgggaaatcttgggtgttatgccatgtatggacccccctagagatgacaccgctcaaacaatcaatgaggccagaaaccttggtttgagaatcaagatgttaaccggtgacgctgttggtatcgcgaaagaaacgtgtaggcaattaggacttggtacaaacatttataacgcagaaaggttaggtctgggaggtggaggtgatatgcctggttcagagttggctgattttgttgaaatgccgatggtttcgcagaagttttcccacagcataaatacagagtcgttgaaatcttgcaaaacagaggttacttggttgctatga

SEQ ID NO: 173489 - DNA, 120 bp, Saccharomyces pastorianus
atatatatacttttagtcatgatattaattctgcaaaaacaagattactgcatcacagcttatgcagtaatctgtccgtcatcatcgtcatcgtcatcgtcgtcgtcttcgtcgtcgtca

SEQ ID NO: 173490 - DNA, 345 bp, Saccharomyces pastorianus
gctactattactactgaaataataagcgagatcagcgctgtcaatgacaacgtcaatgttgagatggcagcaacctcgggcagcaagcatctcttggcagatcccggtaaccacccagcagaacatttcaagaatcgaatgtcacggttaaggttccagtcgcgggaatacctcaccaaattcacaaacaatcaatcaaatttcttatattcattacaaaaaaggcatagaacaccgcttagagatatttatttcaagtacacgtcgttcatgggtgctcatactttctacgtcatcgcattgcccatgcccgtgtggtttgggtattttgatgtaactcaagac

SEQ ID NO: 173491 - DNA, 159 bp, Saccharomyces pastorianus
atccatggcccatctctctctaaatcagtactaaatgcactcacatcattatgcacggcacttgcctcagcggtctataccctgtgccatttacccataacgcccacgattatccacattttaatatctatatctcattcggcggacccaaatattgta

SEQ ID NO: 173492 - DNA, 114 bp, Saccharomyces pastorianus
atgaaagctaagggtaagttgttagccaaagttggtgaggatccaatgactacttacgtcaaaaagagatcccacaaactgaaaaaaatagcaacaaagttttgggggaagcat

SEQ ID NO: 173493 - DNA, 294 bp, Saccharomyces pastorianus
atgaagcttcaatttttttcctttattaccttatttgcttgtctcttcacaacagccatttttgcgaaagaggacacggcagaagatcctgagatcacacacaaggtctactttgacattaatcacggtgataaacaaattggtagaattgttatgggattgtatggtctcaccacaccccaaaccgttgaaaacttttaccagttgaccatttccagggaccctaagatgggttatttgaactctatcttccatcgcgttattcctaacttcatgattcaagggtggcgattt

SEQ ID NO: 173494 - DNA, 114 bp, Saccharomyces pastorianus
atctacccaggtagaggtactttatttgtccgtggtgactccaaaattttcagattccaaaactccaaatctgcttcgacctgcaggcatgcaagctggcactgccgtcgttta

SEQ ID NO: 173495 - DNA, 432 bp, Saccharomyces pastorianus
atccccgatgtgactattaaacgcggccctttgaggtcttttctcataacaaaaccctgtgataatttgagttcattacgaacagttacttcatctaaggaaaagcttctagttggctgtttactgatatttactgctatcgtaaggctacacaatatctccctgccaaatagtgttgtttttggtgaaaatgaagttggtacatttgtttctcaatacgtgaacaacatattcttcaccgatgttcatcctcctttagtggcaatgctatatgcaaccgtgtcctctgtttttggttataaagggcttttcaattatgggaacattggtactgaatacacggcaaacgttccatacgtcgcgatgaggttcttttctgctactttgggcatcgtgacctgcaggcatgcaagcttgcactgccgtcgttta

SEQ ID NO: 173496 - DNA, 324 bp, Saccharomyces pastorianus
atgagcggtatagcagaagacgctgaagaaggttacggtgatgttcccactatcgctagggaggaggcttccgaatctaaagtagaagtagttatcgacatgttttgtaccgctgctatggttaatttctcattgactccaatgcgcctattttatcattggacagtgttcaccaataatccaaagttaaccaatgtctctatgttagcatacgcagcacttatatctatctggtggttttcagtatggaaggaaagagcgtgtagaatccaaaagaaggcccaatttccaagatgttcgaggatgccctgctttctttgtcgt

SEQ ID NO: 173497 - DNA, 144 bp, Saccharomyces pastorianus
gaattgtgtagaattgcagattccattttatggattcctaaatcctcgaggagaacttctagtacattctacatacctaatattattgccttattaaaaatggaatcccaacaattacatcagaatccacattctcatcagtaa

SEQ ID NO: 173498 - DNA, 381 bp, Saccharomyces pastorianus
actgtcacttatgatggtgaagagggtgtcctggctgccaaaggtagacatgtaacctgccgtgactccaagagccatccctattgtcgaagccatgccgccctagtgttggccgatgccctcttgatccaaaagtcagagagttctccagatccgtggttcattaaaaagatgaaggcaactacatcatgttttttaactatttttatctgtatacatacaaggaatagaaaacacgttttttattatcagttttttgattttcgtatcggttggattatactatatattagatatacaaaattttttatattgaattattcttttctgttactttatagaatcacggaaactaataaaaagcttacaaatcttcagtaa

SEQ ID NO: 173499 - DNA, 1782 bp, Saccharomyces pastorianus
aaaggtctatcttcaatattgaatagaaagagaaacgaaagtgattcgatttccagtaaaatcaagcataacttgggtgctgctgaatgcaactctatagagttgcatgaacaagctaaaaagactgattttgaccttgtacataccgagtgcgtcccagctacgacaattctaaacgacattaaagatggcgacacccccgatattctttacactatggaggatgctagggaagccgacgaaagtgaaagaacaatgccacttataaaagctttgaaaacatatcccaaagcagcggcttggtcattattagtttccacaacattgatccaggaaggatacgatactgccattcttggggccttttatgccctacccgtctttcagaaggagtacggctttctgaatagcaagacaggggaatatgaaatttcagtttcgtggcagattggactggctttatgctacatggcaggagagattgtgggtttgcagttgacaggcccctccgtggatttaatgggtaatcgttacacattgattatggcgttgtttttcttattggctttcattttcattctgtactttagtaaaagtttaggaatgattgctgtgggacaagcattatgtggtatgccatggggttgttttcaatgtttgactgtctcttatgcttctgaaatctgtcctttagccttgagatattatttgacaacctattcgaacttatgctggttattgggccagctgtttgctgccggtatcatgaagaattctcaaaacaaatacgcagactcagacatgggatataggctaccctttgctttacagtggatctggcctgttcctttggcaataggaatttttcttgcccctgaatcaccatggtggctaatcaaaaaaggaaggctcgatcaggcaaagagatcacttgaaagaacactaagcggcaagggagtcgagaaagaactactcgtggttatggagctggataaaataaaagtcactatagaaaaagagaaaaagcttgcaagtgaagagggttcctatttggattgtgtgagagacaaaattaatcggagaagaacgagaatatcctgcgtttgctggatcggccaaactgtttgcggtgcatcacttatcggttattcaacatacttttacgaaaaagctggtgtaagcactgatacagctttcacttttagtattatccaatactgtctgggtattgttgcgacatttttatcctggtgggcctctaagtactttggtagatatgacctttacgcttttggactagcctttcagaccattatatttttcattataggcgggttggaatgttcagacactcacggcgctaagatggggagcggctctcttctaatggtcgtcgcgtttttctacaacctggggattgcccctgtcgttttctgcttagtctctgaaataccatcttcgagactgaggactaaatcgatcattttagctcgtaacgcttataacgtggtaagtatggtggttgctgttttgatattgtaccaactgaattccgagaaatggaactggggtgcaaaatcgggttttttttggggagcattttgccttgccactttgatttgggcttacattgatctacccgaaacagccggtaaaacttttattgaaattgatcaacttttccaacttggcgtcccagcaagaaagttcaagtcaacggaagtggatccgtttctcataaaaacagactctggtgatatcacacatgaagacctaaagtaa

SEQ ID NO: 173500 - DNA, 930 bp, Saccharomyces pastorianus
ctaaaatactaccattcaatgggagatacatcgaaaaaaaggtttttgacaattaagaaggggtaccacggtgacgcctttggagccgtatcagtttgcgaccatgtcaattcaagacatggtacttataacggatttctccctgaaaacatattctgcaaagccccagaagtccgctttgattgttgtgaaaaggacgttaggaaactggttgaggaactcgacgtaaaaccattcgctgagattattaatacacaccatagtgaagtttctggtgttgtgatggaaagcatagtgcagggtgctggcggtctaagaatgtatcatccatacttcttgaaacgtgttcgtgagctctgcgacgaactcgatattttgttgatccttggcgaagtcgcagtagggcttgggagaaccggcatgctctttgggtttcagcatgcaggaatagtgcctgacatagtctgtctagttaagactttgaccgccgggtatttgacattatctgcaacagttaccaccagaaagattggtgatcagatctccaatggacctgagggctgcttcatgcacggacaaacctatatggccaatccgttagcatgcgctgttgcaagtgaaaacttatcgattttgatggaaggtaaatggaaatctcaagttaaacaaatagaagcacagttgaaaaatgagcttttgcccttactggaacaccccatcgtagctgacgtgagaatcctaggggctataggtgttgtcgaggtcatgaaacgtgtgaacgtcgaagtcctgcaagagcggtttatcaaggcaggagcatggattagacctttcggtaacataatctacattctgcctccatatgtaattacttctgaggggttgaccgtcttgacagaagctattcgatccgttcttgactttatttag

SEQ ID NO: 173501 - DNA, 336 bp, Saccharomyces pastorianus
gcagttgttggtgttttgacaacaatgatggtttcgtcagttggtacaccgttggttccagtgacagtagtcatctcagtagacgtagaggtgaaagtgccagtccatggctcagttgtagttatgatggtgttggcagttgtaggtgttctgatgacgatgatggtttcatcagttggcaaaccgttggtaccggtgacggtggtcatttctgtgggtgtagatgtaaaagtgcgagtccatggttcggtcgtagttatggcagtacttgctggtagtaggtgtagtgacaacaatgatggtttcgtcagttggtacaccgttgggtgccagtga

SEQ ID NO: 173502 - DNA, 189 bp, Saccharomyces pastorianus
atgactacagacaacgcgaaagcgcagctgacttcgtcctcagggggcaacatcattgtggtttctaacagactgcctgtgaccattagcaagaacagcagtacgggccagtacgagtacgccatgtcgtccggggcgttggtgaccgcgctggaggggctgaagaagacatatactttcaagtggtac

SEQ ID NO: 173503 - DNA, 816 bp, Saccharomyces pastorianus
atggttctcttctccatattggaggctcacaaattgtggcatacccaaaatggttataaagtgctggtcattttcttctattatttttgggtcataacgctagcatcctttatcagaacagccactagtgatcctggcgttcttccgagaaatattcatttaagccaactaagaaataattatcagatcccgcaagaatattacaacttgataacactaccaacacattcttcaatttcaaaagacattactatcaagtattgtccatcatgtaggatatggagaccacctcggtcttctcactgttccacatgtaacgtctgcgtaatggttcatgaccaccattgcatatgggtcaataattgcataggaaaaaggaactaccggttctttttaatattcctgttaggtgcaatactttcgtccgtcatattattaactaattgtgccatccatattgcacgggaatcaggggggcctcgcgattgtcccgttgcaatattgttactttgctatgcagggctaaccttatggtatccggcaatactgtttacttatcacatatttatggcaggtaatcagcaaacaacaagggaatttttgaaaggtattggatcgaaaaaaaaccctgtattccatcgtgtggtcaaggaggaaaacatatataataaggggtcctttttgaaaaatatgggtcacttgatgttagaaccaaggggcccaagctttgtaagtgccagaaagccacatgaagctggagattggagatttatggatttatcgccagcacacagctttgaaaaaatacagaaaata

SEQ ID NO: 173504 - DNA, 135 bp, Saccharomyces pastorianus
agggttgccgaggtgccgtatgttacccttttccgtgccgtgttaagtttccgttttcggtcaaaaagatatccgaattttagatatggaccctcgttcagaagcttattgtctaagcccatattcagtctgctc

SEQ ID NO: 173505 - DNA, 588 bp, Saccharomyces pastorianus
attgagcactttgttgatccgttgaataagtcacatgcaaaattcaatgaagtgttaaatgaggagattccactactatcacgcagattacaggaaagtggtgaagtccaactgcctgtgaaaatgactataggagaggcagtgaattctggaatggtagaaaatgaaacattgggatattttatggcaagagttcatcaatttttgttgaatattgggatcaacaaggacaaattcagatttcgccagcatttgaagaatgaaatggcacactatgccacagattgttgggacggtgaaattttaacatcgtatggttggattgaatgtgtcggttgtgctgacagggcggcttttgatttaactgtacactccaagaaaacgggaagaagtctgacggtaaagcaaaagctagatacaccaaaagaaagaaccgagtgggttgtggaagtgaataagaaatttttcggatcgaagttcaaacagaaagcaaaattaatcgaatctgttttgtcaaaattttcccaggatgaattgattaggaggcatgaagaactggaaaagaacggtgaatttactgtcaagtaa

SEQ ID NO: 173506 - DNA, 735 bp, Saccharomyces pastorianus
aatcaaaatattcagcgtatgggtagaacaggcagaaaacgagatggtaagatagtactactgtttagcagtaatgaatcatacaaattcgagcgtgctatggaagactattcaaccctgcaagcgcttatatccaagcaatgtattgactataaaaaatcagatcggataatccctgaagacattattccggaatgtcacgagacattgatcacgattaatgatgaaaacgaaataattaatgaaatggaagatgttgacgaagttattcgttatgcgactcagtgtatgatgggcaaaaaggtgaagccaaaaaaagccataacaaagaagaagttctttatgcctgataatgttgagaccagtattgttagtgcaagcactttaattaataagttcttggtgaatgaaagtggcgggaaacaactagtaacgagtaatgaaaacccaagtaagaagcagaagatttttaaagctttggataatctggagaatgattcaaccgaggaagcttcctcctcattagaaactgaagatgaagaagtcagtgatgataataatgttttcattgcggaagggcagaatggatgccaaaaagatttggaaactgccattatgcacactggcgaaagtcttaccacactcaagccacttcataattttgaacgccctaatatggctttatttgtgaatgattgtggtcttccaactaaaatcgagaaaaatgtgaagaca

SEQ ID NO: 173507 - DNA, 87 bp, Saccharomyces pastorianus
tcgaggactttaggaatccataaaagggaatctgctattctacacaattctataaatattattatcatcattttatatgttaatatt

SEQ ID NO: 173508 - DNA, 1227 bp, Saccharomyces pastorianus
ttttcagattatattaaatactgcagagtgaatccgcaaatgatttcattaggattgacttccttcaccaaaaataataatatccaactagccgtggaattttacactcaagcgataactaaccctgatactttccccattactgagaagcaactttttgaatttcttcgatgtctgcaaaaatacttggacatatctgatatgaagcatgttttttttatgtggcttaaagtgaaatgtagtgatgaggagttttcttcgactaatctcccatcgatcaaaactcttaccataatgcacagaatgtttttacggcatcccaacacagatgaactgagagattttttgactcatccggtggttgtaagaacgggatatacttccagtgtgcaatttgatttagttgagttttgtcactctttgtattccacagagaggagtatggaaaaaagcattgatgacttaagaatcaaggaaaacgtccacaaattcgtcatcaagttaaataatgacatttcgatacgaagagaactttacatgtcagttgttaaagcttatgtttccaccaacaacttttcaagtctaaagaatgtcttggaaaaaatacagaatgacaaatatattgacatagatggttctttccatttaagcatttctagatattttgtcaatactaatcaattcgaagcgctgttcaaatactattttaccattattaaaaatggcaatggtaaaacccgattgcggcctgcgttcattcaacaattatggtcatgtgctgtaaatgtgtatccaatgctaacaaaagaaatcacaaatgacatattagtgacattgagaaaggatgagtacggaaggagacttgtatggttgtacacatttttacaagaagaagcccgtatttatacgaggaagatcaatgggggagaggagtcctctttatcacgatttaatgtgatcgatttcgagagatttgaagaatttaagaaaaaagtttctcgcaatgatgtgtacggagcagagtcggtaatttcgaatagcttgaaagacggtattgcgccccaattttgttttttatacgctgttttggaactatgtttgagcagttctttaaccaacatggcacatgtagttgataagataataaggaccaggttctgttatatcccaattaaaagtcgatatattatggttgaaatgggacgttgtttccagttacagtcgacg

SEQ ID NO: 173509 - DNA, 648 bp, Saccharomyces pastorianus
ttgtcatcagactcgtcaagaagctcatccagcgatacgcattcgacgggcaccacgggaaccacaggcgtcgaacctgtagatttcaccggtgaaggtgccaaatacacaactgctacggagggcaatggtggtgcagatttagcgattcaaagaacgacgactatgaattctgctgcagaatcagaggttaatatcacgagacgattaactaaaatccttactgggtctgttaacgagcctgaccgtgtagaggttgattataccaattgtgcccccatgggtggtgacagaccttaccctccatcgttgccgagcagagacctgtacgaggttacttttgatggtcctaacgacccactacatccatttaactggcccatgaagaagaaagtgctgctatgtctggtcttatgtctggattgtattgccattgctatgtgttcttccatttttgcctctgcagtgccgcaaatctgcgagatataccacgtcatcgaagttgtcgccattttgggtatcacgctttttgttcttggatttgcggcctcaccggtgatctatgctccgctttctgaattgtacggtagaaagggtgttttggtttatctgcgtttggatttgcccttttccaatttgctgtcgcta

SEQ ID NO: 173510 - DNA, 483 bp, Saccharomyces pastorianus
aaaagaaattgtggacaaataataacgctttttagctcgagaagattacaagccaaacgccttaaagatgttgaatgggtcaagttgcacaggctattacagagagcactttttagacagttaaagagatggtactggcagttcaatggcgtaattgcgctgggacaatttgtaacgttgggttgtacactagtaacattgctggcaaatgtgagggcactgtatatgagattatgggagattaatgaaactgagtttataagatgtggatgcttaataaagaacttaccgagaacaaaagcaaaatcggttgtgaacgatgtcgaagaacttggagaaattatagatgaagatattggcaacaacgttcaagaaaacgaactagtgataacgtctataccaaagcctctgacagagaactgtaagaagaaaaagaaaaggaaaaagaagaacaaatcagccattgatggcatattcggataa

SEQ ID NO: 173511 - DNA, 285 bp, Saccharomyces pastorianus
atcgattgttcccacggcaacagtaataaagatttcaagaaccaaccaaaggttgccaaatgtatttatgaccagctgacggagggtgagaatagtctctgtggtgttatgattgagtccaacataaatgaaggtagacaagatattcccaaagaaggtggcacagagggattgaagtatggttgttctgttacggatgcttgtattggctgggagtccaccgaacaggtattggagctattggcagaaggtgttagaaacagaagaaaggccttgaaaaaatag

SEQ ID NO: 173512 - DNA, 123 bp, Saccharomyces pastorianus
atggggatatattcattttggatcttggataggcattgtaactgtatatttgatagagaatggacatgggcgtccaatagcgcaagtggtacaataaaatccaaacagaatgaagaagatgca

SEQ ID NO: 173513 - DNA, 804 bp, Saccharomyces pastorianus
cctgcaggtccttcatattcgtcatcgtcattgtcttcagatttctcgtcttcaattacctctacatctgcttcatccaccataaccccagcttcacagtattcagacttgaagaaaaccataacaagcattatagagggccaaacaattctttccaactactatacaactataacatactcaccaacagcttcagcgtcttcgaaaaaaagcgcacaacactcaggtctatctaaaaaaaatcgcaatattgttattggttgtgtagttggtattggtgttcccctcttaattattttactagtgttgatatacatgttttgcatccggcctaagaagacggatttcattgattctgatggcaaagttgttaccgcttatcgtagtaacttctttaaaagagtttggtatttcttattgggtaaaaaatttggtgaaaccgacaaattcagctctgactctcctataggcaacaacaacactcaaacttttgacgatattgatcccgaagacatacttaacaatgacaacccttacaccgctaagcatagtaacgtcgaaggctatgacgatgatgatgatgaaaacttgccatctgctttttataatagcggcaccaatgatcaatattcgcctgctaaatctgcgtcatattcgatgtcaaatagcaacggtcaagacgatagtgaccaagatcacgctgatggaataatacataatggagaaatccatcgcgtttatgatgacagcgaaagcagcatcgacgaaaactattacacaagaccgaataacggattaaacatt

SEQ ID NO: 173514 - DNA, 381 bp, Saccharomyces pastorianus
caaaacggtagaatgaaagataatgctataatcgtcacaacgaactctgcaaatggcggatatcaatttcctcctccaacgttaatatcgcctccgatgtcaaatacttcaataaatggttcaccatccaggaaataccataggcaacgatatccaaataaaagcccagaaagtaatggattgaaccttttttcctctaacagtggttatttgagagattctgaactgctttcattttctccacaaaattataatttaaacttggacggcttgacttataatgaccataataacatcagtgataaaaacaataatgataaaaaaaatagtactggtgataacatattccgtctgttcgaaaagacttccccggtgggctaa

SEQ ID NO: 173515 - DNA, 102 bp, Saccharomyces pastorianus
aagtctattgaagaatgggaaggtgatgctatcgaatcggtcccttatttggcaagtgatgaaaagggttcaaactataaggaggccacacaatcccattag

SEQ ID NO: 173516 - DNA, 381 bp, Saccharomyces pastorianus
tcttcttctggagtaatggtcaagtccaaagattgttggtattgggcttccggagataaagtcaaaaggacggattcttggaactcatcgtcctcgtcatcgtcttcttcatcatcctcactttcactttcagccttcttgcctttactcttctttttcttttgggttttttcctcttcttcttcctcagaggattcttcgtctatttcgtcttcatcaaaatcaccacctaaaaaatcatcatcttcaaagtccgggtttcttttgataattcttaaagtcgatggtttgttctcttcatcgatggcttccgggttcaaagcagccatagtaatacgaacggtgatgggcatcgtgacgtcgattgctggaaccggggta

SEQ ID NO: 173517 - DNA, 414 bp, Saccharomyces pastorianus
atgggtagtaggaataacgaaaatgaaaatgagtcaagccgaaggataaagaatgaatttcttgttcagtggtcatccttgtccagcgcagcggctggttcaaacaaaagtaacactaacaattctgacaccaatggcgacgaagatgatacaagggtactggtacttgccgcgacaaacttaccatggtctattgatgaggctgcaaggagaagatttgtgagaagacaatatatcccattaccagaggaccagaccagacacgttcaatttaagaagcttctttcccatcaaaagcacacgttaaccgaatcagattttgatgaactggtaaagattactgagggctattcaggaagtgatataacgtctttagcgaaggatgctgccatgggtccactacgaagatctggg

SEQ ID NO: 173518 - DNA, 1263 bp, Saccharomyces pastorianus
atgatgaattttggaatgtggagagtggtcggacttgattttagagatacaaaagaaccagatagtgagaatattactccgtcagtaagtcccgctaacggcgatcgcaaacttactgaaataacaaagttacctaatattacacgtcctacaaatgcctatcaatcggaagatgcgagaagtaatagcgatttgtcttgtaactctattactacaaatgaaatgacaccgcaggcatactacgaaggttttactggctacatcaaaccctataaagaatcaaatggtgcatcccataaatttgaaagtgaccttccgcatgctgaaatatatagggtttcctcgacttattcaagcccaggcgcattggagttctcgcgaatagacggcagttccctctcatatagtcgtatatcgaaaaatagcgatggcagaagttatagaagaaaaaggaaagcggatatgaatgagttgatttccaaatacagtgccgccgaaaaaataaggcaaggtgaattagatttatcaagaccactatccttgactgaagaagttggaagcaggaacgcaagtattggtaatgtgcacactggttataccgatgaaagttccatcgaagaagaaaattgcactaatatggccaccgacgggaggggtagcctctccttcttgatagagagacacaatctcaaatggttgcagtactttattataaattgcctcaggccagcatctctgggggcaatactaggaataatatgtgcattaattccctgggttaaagcatgcttcgtaacgacatatgttcacgttcataaggcgcctgatggagaacctgttctgaattttttaatggattttacagagtatattggaaatgcatgtgttccattggggcttctattacttggcggaacgttggcaagattagaaattaagtcattgccacctggatttattaaatccgccttattgatgacatgctttcgattaattgtcattcctattattggcgtcctatgggtaaataaactatattcgatcgattggctggatacgggcatgggaaaatttgacatgatattaacgtggtccatgccgagtgctactgctcaagtatatttcacagcattttatacgccagcatgtggtgatcacattcaaatgaactgtttgtccgtcttatttgtcatgcagtatgcgattcttttcatcactgtggcgtttgttgttacatataccttaaaggtcgatttaaaagtt

SEQ ID NO: 173519 - DNA, 93 bp, Saccharomyces pastorianus
aacaccgtatatgataatattgttggaataaaaatccactatcgtctatcaactaatagttatattatcaatatattatcatatacggtgtta

SEQ ID NO: 173520 - DNA, 120 bp, Saccharomyces pastorianus
atgaatgaaaccttttatgaaaccagaattgtcccagctattatcaatgtccgtgaatggcttgaccatatggaggcaaacgatccttcacctagtgtaactaacccactcgaaacttca

SEQ ID NO: 173521 - DNA, 135 bp, Saccharomyces pastorianus
ccaagtgagccatggtcaaccttaactccttctgctactacctcatgcggcgttactgaatttacttccttcttcggtatcactgtccaaacaattacaacaggatctaccacggttaagagagacgttttttct

SEQ ID NO: 173522 - DNA, 180 bp, Saccharomyces pastorianus
gtaagtgcagggcgacaaaagttaaccatcgaacaaaagcaggaaatcataagtggattacgcaaggagctagacgaaatttattctcagagaatcagaaagaaggaaactgaaaaaatctcaaatggatcaggtggagagggagaacaattctactacaaatgtaatatccttccatag

SEQ ID NO: 173523 - DNA, 246 bp, Saccharomyces pastorianus
attaaagacagcgagttcatagatagtttggtggatgaagaagaagaggaagatctctttctccttttctcgacatcgggattaaagtcctcatcgtcattgtcatcctgttcttcaaaggcggcgaaatcttcttcatcaagatcctcgatttcctcttcctcttcgtcctcctctccattttcttcctcgtcatcattgtcactgtcattgtcattttcattttcgttgtcgttgtcgttgtcg

SEQ ID NO: 173524 - DNA, 159 bp, Saccharomyces pastorianus
tggtcaacaaacaagtccagcaacagcagcaaattcagcaacaacagcagcaacaacagcagcaacagcaacagcaacagcaacagcagcaacagcaacagcagcaacaacagcaacaacagcaacaacaacagcaacaacagcaacaacagcaacaac

SEQ ID NO: 173525 - DNA, 330 bp, Saccharomyces pastorianus
agtttgaatattgtaattcgtgataatttgattgaaaattctgcaaacatgggtgatctatttaggtcagaattgaagaagctacaagccaagtataatcaaatcggtaatattagaggtcgtggtttaatgactggtgttgagattatcaagccggaaaccagagaggctgatggagaattggctgggaagctagcggacaggatgatggaacttggactgtctgcaaatttgatatctgttcctgcgtttggaggtgtctttagaattgcaccccctatcaccatttctaaagaagaaattatgcaaggtgtggaaattttcaataaa

SEQ ID NO: 173526 - DNA, 342 bp, Saccharomyces pastorianus
aacaacaacaacaacaacaacaaccacagcaaccacagcaacagcaacaaccacaacaacaactacaacagcaacagcaacaacaaccagtacaagctcaagctcaagcccaagaagaacaattatctcaaaactactatactcaacaacagcagcaacaattcgctcaacaacagcatcagttccagcaacagtatttgtcccaacaacaacaatatgctcagcaacagcaacagcatccacaacctcaatcacaacaacctcaatcacaacaacctcaatcacagcaaagtccacaaagtcaaaaacaagggaacaacgtggctgcccaacagtactaca

SEQ ID NO: 173527 - DNA, 792 bp, Saccharomyces pastorianus
atggatttaaagattttggaagatttatgcaatatttcttctttgtatgaagtaccgtttggaaaacacattaaccaccacgaccacaataatgccggtaacggctgcgatggttcgagcacaggaaataacgaaaacggtaaccaaacaatgaatcttctattatcaagcattaatagatgcaaccctaaaaataatcttaatggaagcaataacaatacggctggagcaacttcaactgatcatcaacaccatcaccatagaatacagtttcattctcacaaaccaaatagaaacaatattatgaacaattcagggattagcgcggcgaacacaacagccgatctaactaacaacgatttaaatgacttaatttcaagagagtatagttatgaaagatttagaaatcaaagtgagcccccttcgctacccaaagtcactcatcagaatcagaaaaatcgtagatcttggcctacaaaagatctagaatctactgatttcagctctttggaagactcattaccttctagtatctctcctcctatacagacaacaagcactataaatttcaactggtgttttaaagaagagaaaaacaatgacttaaaatgcaaatggaaagaatgtcctgagtcttgtagctcactatttgacctacaaagacatcttttgaaggatcatgtctctcaagatttcaaacaccctatggaaccattagcttgtaattgggaggactgtgatatccttggagatgatacatgtaccatagtgaaccatattaattgtcaacat

SEQ ID NO: 173528 - DNA, 417 bp, Saccharomyces pastorianus
tctgaagagcatttggagctaacaaagaaaatgctaactgagtatagaaatcccgccattgaagctttagactcagatcaggagttaatcaaagatctcttggtctctttgacattaagaagattaggtcatatccaagaaggttgtgatatattggatgaaaaggttctacctaagtttttctccattcaaaatggcaaggtcaaatatataaagaaaactgaagatccatgggcctatccgactgcactttatgaacgcgctctatttacatggaagttggagggcatggatggccttccagagagtaaagaatggttactgagggctcagggctacgcagatgattatgaattgagtacgagagtaggtatgaaaattaaggctgccattgaccgcgttgaccattcattgtaa

SEQ ID NO: 173529 - DNA, 1560 bp, Saccharomyces pastorianus
atgggttacgatattgccaactacgaaaaggtctggccaacatatggtacgaatgaagactgctttgccttgatcgaaaagacacataagcttggtatgaaattcatcaccgacttggtcatcaatcactgttccagcgaacatgaatggttcaaagagagcagatcctcgaagaccaatccgaagcgtgactggttcttctggagacctcctaagggttatgacgccgaaggcaagccaattcctccaaataattggaagtcctattttggtggttccgcatggaccttcgatgaaaagacacaagaattctacttgcgtttgttttgctccactcaacctgatttgaattgggagaatgaagactgtagaaaggcaatctacgaaagtgccgttggatactggttagaccatggtgtagacggctttagaattgatgtcggaagtttgtactccaaagttgtaggtttaccagatgcccctgttgttgacaaaaactcgacttggcaatccagtgatccatacacattgaatggaccacgtattcacgagttccatcaagaaatgaatcaattcatcagaaacagagtgaaggatggcagggagattatgacagttggtgaaatgcaacatgcttccgacgaaactaagagactttatacgagtgcttcaagacacgaacttagtgagttatttaacttttcccacactgatgtggggacttcacctttgttccgttacaacttggtcccatttgaactgaaggattggaagattgcccttgctgagctgttcaggtacattaatggtacagattgttggtcaacaatctatctggaaaatcacgaccaacctcgttcaattacgagatttggtgacgattctcctaagaaccgtgttatttctggtaagttactctctgtgttgctaagtgccttgaccggtactctatatgtgtatcagggacaagagcttggccaaatcaatttcaagaactggcctgttgaaaagtacgaggatgtcgaaatcagaaacaactacaatgcaattaaagaagagcatggggaaaactcagaggagatgaaaaagtttttagaagccattgcccttatctccagggaccatgctagaacacctatgcaatggtctcgtgaggagccaaatgctggtttttctggtcctagtgctaaaccatggttttacttgaacgactctttcagagaaggcattaacgtcgaagatgaaatcaaggatcccaactcggttttgaacttctggaaggaggccttgaagtttagaaaggcgcataaagacattactgtgtacggatacgatttcgagtttattgatttagacaataagaagttgtttagcttcacaaagaagtacaacaataaaacattgtttgcggctttgaactttagctctgatgcgacagatttcaagattccaaatgatgattcatcgttcaagttagagtttggaaactatccaaagaaggaggtagatgcctcttccagaacattgaagccatgggaaggaagaatatatatcagcgaa

SEQ ID NO: 173530 - DNA, 279 bp, Saccharomyces pastorianus
gcagcatggctaaattctaccgaatccaatacgtatatccactactcaacatgttggggcacaagtgattacacacttaatatctctgttatagatgctactacagagaaattggttgacactagattattaacaacactcgagaatgcaaccgcttggattaactcaaactctattgatgaagacgaagatgatatgcctcatgtcactaacgtagcagaccggcttgatggattatcccttagcaagcgcgtatatagcatctgtcactacgaattt

SEQ ID NO: 173531 - DNA, 333 bp, Saccharomyces pastorianus
tatcaatcattattggattcccattgtttctacaatcatccctcgtcgccgaattttcaatctacttcattctcgagcgcagctcctttctcgggaatttcccaagcttctgatatttttgactatgaaaacgaagatagtgatagtaatcagattgcgggagaaatagacaataattcgtttcctcctcacttttacttagatgaggatgataaatctgcatgtctcagtgatgacgctttgattgatcatcacagaaataccaacccatttataaatactttcagttcatctccacccatcctttcccaagaggttgatcgatggcgactt

SEQ ID NO: 173532 - DNA, 114 bp, Saccharomyces pastorianus
agattaacaaaattattcaggaaattcgatactaatcaagaaggcattgcaaccatacagtacaaagattttatcgatgctacattatatttaggtcgtttcctacctcattga

SEQ ID NO: 173533 - DNA, 81 bp, Saccharomyces pastorianus
gccttgttggcgcaatcggtagcgcgtatgactcttaatcataaggttaggggttcgagccccctacagggcttacttttt

SEQ ID NO: 173534 - DNA, 132 bp, Saccharomyces pastorianus
aaatataaggataccctttattcaggtatctcgaagtcatttggaatggaaccagcaccactgactgaaatgcaaatatatatgagaaagaaatgtttgatcccggaacctctaaagtcaacaaaatatgcg

SEQ ID NO: 173535 - DNA, 771 bp, Saccharomyces pastorianus
tcggtagtaaactcgttggtttcttgtacgggttcaccggcatttttcgcaggctcactggtatcttccacaggttcattggaatcctccacaggcttgttggcatcctccacaggcttgttggcatcctccacaggttcactggtatcttccacaggttcattggcatcctccacaggttcattggcatcttttatagactcatttacttctggagtttcaacttcagcttctggacgtccaaattccattgctgcatcatctgcaggttcgttattttcccttgcactttctgtggttatgttgttttcagctacttcttcagtctgtacaaatccattatcagcttgttcgttagaatgtgtatcggtatcctcacttttctgtcccgttgcttcttcatttggagaactttcagccacaacttcattcggttcttctaccacggcttctgcggaagagtccgctttgttttcctctatattgggagtaccaacaggttcgcttttcaaacttcttacggaggggttgacggtttcgatggtggtttcattctccaaagccgtcgaagcatgcaatggatcttctacaggacttactggggcagtttcatgtccactcttttctccttgctccttagcttccgaaggattaccctcattgtcattatgtgatgcaacctgttcgacatctgttgtgtcctcgggcatcttattttcatctgctacttcggctaccggctcattctcctttgagtacgaaagttcttcc

SEQ ID NO: 173536 - DNA, 216 bp, Saccharomyces pastorianus
tatgcacacggatgctacagtatataccactctcaaacttaccctactctcactttccactccatcacccatctctcaccatcagtaccaaatgcactcgcatcattatgcacggcacttgcctcagcggtctataccctgtgccatttacccataaagtccatcattatccacattttaatatctatatctcattcggcggccccaaatatagta

SEQ ID NO: 173537 - DNA, 354 bp, Saccharomyces pastorianus
atgtcagttgcgccagtaaccgactggagattttacgattctgtttatactgagaggtacatgcatactcctcaagaaaactttgatggatacgtagaatcaagcgttcataatgtcactgctttggcacaagcaaatagatttttgttgatgcacggaacaggagatgataacgttcactttcaaaattccctaaagtttctggaccttttggatctaaatggtgtggaaaattatgacgtccacgtctttcctgactcagatcatagtataagataccataatgcgaatgtaatcgtttttgacaagctattggattgggcaaagcgtgctttcgatgggcaatttgtcaaa

SEQ ID NO: 173538 - DNA, 372 bp, Saccharomyces pastorianus
gatacaggtaagacctgttacggtatagatgatactttgagggctttatatttgggtgcagtggagaagttaattgtttttgaaaatttgaaaactgtcagatacacatttaatgacgctgagggcaatgaggtcgtaaaatttgtggaaccagaaactaagggtaaaccccacgccattgacaaagcgactggccaagaaatggatgctgtctctgaagagccttttatcgaatggctagctgctaaccacacgatccatggtgtcattttagaatttgtcacagagaggtcttctgaaggtagtcgattcgttaccgagtttggtggtattggtgctatgctacttaataaggtcaacttttatacttga

SEQ ID NO: 173539 - DNA, 117 bp, Saccharomyces pastorianus
gaacggaacatatgtgatcatggaatagagtttacgaatcctacggatgttaatagaataaattcgctgttcagtggtaagcagtaccaaagacagtgcactccaagaaacccccga

SEQ ID NO: 173540 - DNA, 588 bp, Saccharomyces pastorianus
aacatcgaaaacatagagctcaatgctgccataggtcaagatgggatctccgagtctagatttgtcgtaatttttgagaaactatcgaaaatcactcgttttgtttttttttggataaattttgctactccattattgttttatttaaaagagcaacacccaaaagtcgccatcttcggactggcgcgaaatggcttaactttggcagcggtcccatttatcttagtgcgtaatttcaatggattatcaaagaagcaagagccaaaaagatgttcaaaagccatgtgttctcgctgtgctgctaggaagcaccatcctaaattgttctctttcaaattttgcttaattatgctggtgctgccctgtttcccactctattcggcttttagaatcaattttttctttagagataaccagaccattgatctataccgattgttccaactactcggctggcagattagtgtaattgttagtgtgaatataaccactttttactacgaacaattccagtcgcataatggccctcttgaagtgaatagtgacgcctttgaaagggaagctgtagtcgagagcaaaatcgtttag

SEQ ID NO: 173541 - DNA, 219 bp, Saccharomyces pastorianus
atgattgttgggattccattgttgataaaggctataatattaggtatacagaatatactaaaagttctcctcgagggtagaggaatcctcaaaggggaagcgatatttctacataatattattacgattattcctcattccgttttatatgtttcattatcctattacattatcaatccttgcacttcagcttcctctaacttcgatgacagtttctca

SEQ ID NO: 173542 - DNA, 549 bp, Saccharomyces pastorianus
atggactgttccctggcattgaaaaatgaagatatagataaagtgatgggacatccttcgagtagtaagttgatggattcttcaatcaaaagttttgttcaaaaacataatcgtaactataaatggtgcccgtttgctgactgtaaatccatcgtgcacttgcgagatacgtcatcattaccagaatatacccgtttgcattattcacctttcgttaagtgtaattcatttcatagattctgtttcaattgcggattcgaagttcattccccagcagattgtaaaataaccactgcttgggttaaaaaagccagaaaagaatcagaaattttgaattgggtcttgtcccacactaaagaatgtccaaaatgttctgttaatattgaaaaaaatggtggctgcaaccacatggtttgctcaagttgtaaatacgaattctgttggatttgtgagggcccctgggcgccccacggtaagaacttttttcaatgtacaatgtataagaataatgaggataatcaaagtaagaaccctcaagacgcttataaa

SEQ ID NO: 173543 - DNA, 327 bp, Saccharomyces pastorianus
atgccatatgtgctgctgccactaattctttccgcagcgcttccttcagatggaacaatggatatggttatcaccgatgcaagaacctcgttgacgaggatggcaccaatcctgctgggactagataagggttcccatgttttacaaccggaagtcttacactctaaaattttggcatacaagataataccaaagctagggaacggcttgttctctgtcgatggcgagaaatttcctctagagccccttcaagtcgaaattatgccacgcttatgcaagacgttactgagaaatggccgctatgtggacacagatttcgattctatg

SEQ ID NO: 173544 - DNA, 258 bp, Saccharomyces pastorianus
tcttcgtttaatttctgttttcttagcgcatcctctgcaattaatctttgtctctcttcttcttctttttctttctgtagcttttcttgttctagccttttctgttctctaatacgtttcctttcttcttccctcttgcgttttagttcctctttctgtttccgttgtttttcttgcatttcttctctccgctgctgctcttccaatctacgctttctctcctcgtctttcttccgtttggcttcttcaacctttttc

SEQ ID NO: 173545 - DNA, 327 bp, Saccharomyces pastorianus
gccaactacgaaaaggtctggccaacatatggtacgaatgaagactgctttgccttgatcgaaaagacacataagcttggtatgaaattcatcaccgacttggtcatcaatcactgttccagcgaacatgaatggttcaaagagagcagatcctcgaagaccaatccgaagcgtgactggttcttctggagacctcctaagggttatgacgccgaaggcaagccaattcctccaaataattggaagtcctattttggtggttccgcatggaccttcgatgaaaagacacaagaattctacttgcgtttgttttgggggatcctctag

SEQ ID NO: 173546 - DNA, 402 bp, Saccharomyces pastorianus
ttggagaaagcaggagtaaaagatatagatactgcacggatctacccagatagcgaaaaaatccttggcgaattccgggttccaagtagatttactattcatacaaaggctagcggattttcagctggatgtttaacaaaagataacattaataagtctattgaagagtcgttgagcctgctaggcgttccaaatgttgaaacatattttttgcactcgccagaccctgaaactcctattgaagaaactctcggcgcaataaactctctgtatgaacaaggtaaattcaaaaagtttgggttatcaaacttcgcaacggaggacgtgaagcgcatccacgaatatgcaaaaagcaagaattacgtcttaccaacagtgtatcaaggaaactataacgcgttc

SEQ ID NO: 173547 - DNA, 1302 bp, Saccharomyces pastorianus
atgggacaggacgatttactttttagtatggatgatgttctacaagaggtcttcagaatacagctctatttgaataagatgctgccgcacaactctcacaaatggcaaaagccatccccctttgactccgcaaacttactacttaacttcagagactggacaactgacaatgctctcctccaagagttgctactatcctatcccacaattaataaaaacaaacacaaaaatcactccgtccctcgtctaatacaaatctgggtagagtcttattggcaagatagtgagacaacattaaaagatatcctcaatttttggtacagtcacttggctgaatattatgaataccaagaactgtttgcagacatagttcagctgtttataaacaaaaaaagaacgaggcaattgaagattcattacattggtctaactgataaggaaatcgaagaaaataaaccgcccctggactacgaaaacttatttctccaatacgagatagacaaaacgaacgcaaatgatgaattgtgcggtgcaactgacctcagtgatttacttttccaatggaaacagggtgaacctctagaagtcgaagccttcgctctaaacgtatctccatggtcacttgcaaagacattgactctcttagaatcttctctttacttggatattgaaacaatagaattcacaagacatttcaaacacaacgatacaacaattgactccgtgtttacgctttccaaccagttatcgtcctacgttcttgagacaactttgcagcaaacgcacaccatttcctactggttacaagttgcactgtcttgtctatacttacgaaacttaaactcacttgcttcaatcattacatcattgcaaaatcattcaatagaaagactatctctcccgatagatgttaaatcagaccacctttttcagcgcctaaaagtcgtcgtacatccaaacaacaactacaacgtttatagaagaacaattaaacatattttccacagtcagcttccttgtgtaccttttacatcactgcttatcagggacattaccttcataagagacggaaacgatacattcactaaagatggtaataacgtgaatatgcaaaagttcaaccaaatcacaaagatagtcgcttttgcgcaatatttacaacaaaagcaatatgaagatatacactgttcaaatactactgcaagaagcttattaggggctatgataaaggtgcacactttatataacgacaacaaagacagggcgtatcaagtcagtatagctaaggttccaaggcttacc

SEQ ID NO: 173548 - DNA, 84 bp, Saccharomyces pastorianus
caagcttatgatttaaagtcaagagtacaagtggaccaaaatgcagacgcatcagtagaacagaatattcttgctgtactttga

SEQ ID NO: 173549 - DNA, 1179 bp, Saccharomyces pastorianus
tacgaaatcacttcgcagtggcaaattggcttgaacatgtgtgttctttgtggtgaaatgattggtctacagataaccacttacatggtcgagttcatgggtaatcgttatacaatgattacggcgctttctcttttgactgcttatatctttatcctttactattgcaagagtttggccatgattgctgtaggacaaattctttcggctatgccatggggttgcttccagagtctggctgttacctatgcttctgaagtttgccccctggcattgagatattacatgaccagttactccaacatttgttggttgtttggtcaaatttttgcttctggaatcatgaaaaattcccaggagaatttgggaaactccgacttaggttacaagttaccattcgccttacaatggatctggcctgcacccttaattattggtatctttttcgctcctgagtcgccttggtggttggtaagaaagaataagatcgtggaagccaaaaagtctttgaacagaattctgagtggcactgttaccgagaaggagatacaagtggatattactttgaagcaaattgaaatgaccattgagaaggaaagacttcgggcatccaaatcggggtcatttttcagctgtttcaagggagttgatggaagaagaacgaggcttgcgtgtttgacttgggttgctcagaacagtagtggtgcagtattacttggttattcgacgtacttctttgaaagagcaggcatggccactgacaaggccttcactttctcgctaattcaatactgtcttggtttggcaggcacgcttggttcctgggtaatatctggccgtgttggtagatggactatactgacctatggtctttcattccaaatggtttgtctatttatcattggcggaatgggttttgcatccggaagcagtgctagtaacgctgctggtggcctactgcttgctttatctttcttctataacgcgggtatcggagctgtcgtttactgtattgttgcagaaatcccatccgcagaattaaggaccaagaccattgtgctggcccgtatttgctacaatctaatggccgtcttcaatgctattctaacgccctatatgcttaacgtgagcgactggaactggggtgccaaaactggtctatattggggtggctttacg

SEQ ID NO: 173550 - DNA, 117 bp, Saccharomyces pastorianus
tctctacaagaagttctcctcgaggatctaggaatcctcaaaatggaatctatatttctacatactaatattacgattattcctcattccgttttatatgtttcattattacattat

SEQ ID NO: 173551 - DNA, 465 bp, Saccharomyces pastorianus
cctaagaaagattgggagttggtagaccttttggtcgttaatgaaattgagggtcttcaaatcgtggaaagtgtatttgataatgaacttgttgaagaaataagggagaagataaaggacgactttttaggagaatatcgtaaaatttgtgagcttttgtatgaaaaactcatgaatcgaaagaaaagaggaattgtggttatgactttgggttcgagaggggtgcttttctgttcgcacgaaagccctgaagtacaattccttccggctattcaaaatgtttcggttgttgatactacaggagctggagatactttcctgggcggtttggttactcaattgtatcaaggagagaccttgtctacggctataaagttctctactctagctagttcattgaccattcaaagaaaaggtgctgctgaaagcatgccactgtataaagatgttcagaaagatgcataa

SEQ ID NO: 173552 - DNA, 1392 bp, Saccharomyces pastorianus
atgaatcaacctcaaattggcacttacaatgtaggtacacagttaacagttgggtcacatcaggttgagatcattaaatatctaacaagcggtgggttcgctcaagtatattccgcgttaatcaacccacctgacccacattctaattcaagcgttgcatgcttaaaaagagtcattgttccagacaaacctagtctaaacactttaagagctgaagtagatgctatgaggttgctgaaaaacaataggtatgttgtatcttacattgattctcatgcagctaaggcaatgttacataatggttcgtatgaagtattcgtcttaatggaatattgtgaaagaggtggtctcattgattttatgaacacaaggctacaaaacaggcttcatgaatttgaaattttgcaaataatgagccaagttactcaaggagttgccgctctgcatgctttgcaacctccgttaattcaccgtgatataaagatagaaaatgttcttatctcagccaataatgagtacaagctttgtgactttggttctgtatgcggtattataaggcctcctaggaattcacaagagctatcatatgttcagcaagacattttgaaaaacacaactgcacagtaccggtcgccagagatgattgatacatttcgcggtctgccgatagatgaaaagtcggatatatgggcgctgggtatttttctatataagctttgctattacacaacaccgtttgaaaagggcggtgatcttgccatattaagcggaaagtttgaatttccattgtatccgaactacagtgaacagttgaaaggcttaatacgtgatatattggttcaagatccgcgccataggcctaacgtttatcaactactgaagaggatatcaattatgcaaaatgttccgtgtccaataaatgacatacaagtggttcaggcgcccagtagccatttgaatttgaccgaacttcatcagctttcggcaacacaaaatattctaagcttgaactctcccacaaccatggaaaatacgatgccgaacgctacatttcaaatcagcatggctgataatactacaacagcacaaatgcatcctaatagaaaaccatcacaaatagcatatgacgctagcttcagtaattccgccaaaggttctcaaccactttttgacaaatcacagaatatgtaccacgcattggatcctccacttgttgaaccgctagcgagtagtgtttcaaataatgacaacgaactcaaggcaaattccgcaaccaagttaaagcaggcaattgtctctgaagcacatacttttaggcagaataattcaatagactttccactacaaaacataataccccagtacgaagattcttcttcctcttcagatgat

SEQ ID NO: 173553 - DNA, 468 bp, Saccharomyces pastorianus
tacaacaagaacggttcatcggagcctcgactaaagacgcttgacggactcacttccgagcgctggattcaatggttaggccttgaaagcgactaccattgttcattctccagtactcggaatgcggaagacgtagtggcaggtgaggcggcgagttcagatcatcatcaaaaaatttcaagagtaacgcgaaaaaggccccgagagcccaagagtacaaacgatatcctcgtcgcaggccagaaactctttggcagctcctttgaattcagggacttgcatcagttgcgcttatgtcatgaaatatacatggcagacacaccctctgtggcagtacaggccccaccgggctatggtaagacggagttatttcatctccccttgatagcactggcgtctaagggcgacgtgaaatatgtgtcgtttctgtttgtaccgtacacagtgttgcttgctaattgcatgatc

SEQ ID NO: 173554 - DNA, 708 bp, Saccharomyces pastorianus
atgcaatctcatttagaaaataatgatgctgatgaaaatatcaaactagacaagttgaaccaaagcatctctgatgagcctaatgcatctttagtatcagggaatatcactcttcctgaagacatgttcaagtctcacttttattatttattatacgagatttctcactttaaattaggtatgttttttgtcattttacttgtaatttcaatttcatcggttctaatctttaatgttaacgatggtaacctcatcgtattcatatttttgtttttgttttcaatttttggttcaatagcgtcattgattacatttaacgaatcgattaaagatgaaaactttaaaataaaactgttactggaggtaataacacgtaaaccgccggtagaggggatagaatggaggactattacacacaacatgaatcaatatatatgcgataagggatattggcctactccatactacttttactgtgaacatggttgctataatagttttcgtgacctaattaaagcaaagaatcccgatgcacattcggatccatcaaccggcgatggggctgataaacaatttattacggatgcgagagacgctccgaatgatggcgacccaattttagaagaatattttattaaggcagctgaaattcaaaaacaggccgtacgagaatattggaaaaagcagtatccagatgctgatgtgcct

SEQ ID NO: 173555 - DNA, 114 bp, Saccharomyces pastorianus
atggaatccatatttctacataatagtattacgattattcttcactctgttttacatgtttcattatcctattacattatcaatccttgcatttcagcatcctctaacttcgac

SEQ ID NO: 173556 - DNA, 996 bp, Saccharomyces pastorianus
atggagcgaacaaatacaacaacattcaaatttttttcattgggaggaagtaacgaagttggacgatcatgtcatatattgcaatataaaggtaaaacagtgatgctcgacgcaggaattcatccggcatatcaaggattagcttcattacctttttacgatgaatttgatctttccaaagtcgatatcttactgatatcacatttccatttagaccatgccgcttcacttccgtatgtgatgcaacggactaactttcaaggcagagttttcatgacacatccaaccaaagccatttacagatggctactgcgggattttgtaagagttactagtataggttcttcatcctcctctatggggactaaagacgaaggtctattctcagatgaggatttagttgattctttcgataaaattgaaacggtagactatcattctactgttgacgtcaatggtatcaaatttacggcattccatgcaggccatgtattgggtgcagcgatgtttcaaatagagattgctggccttagggtgttattcacaggtgattattcgagaggagtagatcgtcacttaaattctgctgaggtgcctccactttcatccaacgtattaattgtggaatctacctttggtaccgctactcacgagccccgtttaaatagagaaaggaagctaacccaactaatccattccacagtgatgagaggaggccgtgttctactgcctgtttttgctttagggagagctcaagaaatcatgcttatactggatgagtactggtctcaacatgctgatgaactcggtggtggacaagtcccaatattttatgcatcaaatttggcaaaaaaatgtatgagcgtttttcaaacctatgtaaatatgatgaatgatgacattagaaaaaaatttagagactctcagactaatcccttcatattcaaaaatatatcttatcttagaaacttggaggattccaagaatttggtccca

SEQ ID NO: 173557 - DNA, 195 bp, Saccharomyces pastorianus
gacaagaaacaagaacaagaaaaccgcgcggacgaaggcgacaagcccaagccatgctgtgtttgcaagcccgagaaggaggagcgtgacacctgcatcttgttcaacggacaggactccgacaagtgcaaggagttcatcgacaagtacaaggagtgcatgaagggctacggcttcgaggtcccaagcgcgaac

SEQ ID NO: 173558 - DNA, 126 bp, Saccharomyces pastorianus
atgttgactggtattgccccagaccaagtgactagaatgatcaccggtgtcccatggtactccagcagattaaagccagccatctccagtgctctatccaaggacggtatctacactatcgcaaac

SEQ ID NO: 173559 - DNA, 165 bp, Saccharomyces pastorianus
atgaggcctcttttgaaattacaagaaaattctgttatcttaagaactccacaatgccagacagactataagatcacgtcagattacattcaagatcttttacctgatttcgaccagaccaatccggatgcttggttatctgaacaaaaggcctccaagaatttc

SEQ ID NO: 173560 - DNA, 360 bp, Saccharomyces pastorianus
atgcgagttctcatcggaacgaaattagtgactgaaggaattgacattaagcaattgatgatggtgatcatgcttgataatagacttaatattattgagctcattcaaggcgtagggagactaagagatgggggcctctgttatctattatctagacaatacagttgggcggcaaggaatcgtaagggtgaattaccaccgaacaaggaaggctgtataaccgaacaggtacgcgagttctatggacttgaatcaaagaaaggaaaaaagggccagcatgttggatgctgtggctccaggacagacctgtctgctgacacagtggaactgatagaaagaatggacagattggctgaaaaa

SEQ ID NO: 173561 - DNA, 186 bp, Saccharomyces pastorianus
tgctgctgctgctgctgctgctgctgctgttgttgtggttgctgtttctgttgtggtttctgttgtggttgctgctgctgctgctgctgctgttgctccatctcttttaacagcagctgtctcttcttagactttcttattggcttgtacttgtattctgggtattttctctcgtgttctaacttt

SEQ ID NO: 173562 - DNA, 204 bp, Saccharomyces pastorianus
caggattttgaatccctgcatcagtccgttaagaaaaataagctcgctgacaagttgaatgcagaagaactttacatggtcaagggccgtaatgagccttgtaatatggaacaagtagcaattgtcgtatcggaagtcaaggacgtggatctggctactttgatagataccacgtggaagacgacctgtaagatatttggagag

SEQ ID NO: 173563 - DNA, 891 bp, Saccharomyces pastorianus
atgggaggtgaagacgaaatattaagcacgatggaggatattgcggcagtttacgatgtcctggtaattggttgcgggcctggtggctttactgcagcgatgcaggcttcgcaagcaggtctgctcacagcatgtgttgaccagcgtgcctcgctggggggcgcctaccttgtagacggggcagtcccgtccaagaccttgttatatgagtcttatctttatcggctgctacaacagcaagaacttatcgagcaacgtggcacgcggctgtttcctgcaaaattcgatatgcaggcggcccagagtgcactcaaacataatatagaagagttgggcaatgtgtataaacgtgagctatctaaaaataatgttactgtgtataaaggcacggctgctttcaaagatcctcaccacgttgagattgcgcagcgcggcatgaaaccgttcatcgtagaggcgaaatatattgttgtggcgaccggatctgcggttattcagtgtcctggtgttgcaatagataatgacaagataatttcatctgataaggcattgtcactggattatataccttcacgttttactatcatgggaggaggtacaattggactagaaatcgcatgcatattcaataatttgggctctcgggttactatcgttgaatctcaaagcgagatctgtcaaaatatggacaatgagttggcttctgccacgaagaccctcttgcagtgtcagggtatagcttttcttttagacactagagtgcagctcgcggaagccgatgctgccggtcagctgaacatcaccttgcttaacaaggtgtcaaagaaaacatatgtacatcattgcgacgtcttgatggtttctatcggtagacgtcccctgctaaaaggt

SEQ ID NO: 173564 - DNA, 132 bp, Saccharomyces pastorianus
gacaatcggatatcgcacaacagcaacaacagcaacaacaacaacaacagcaacaacagcaacagcagcaaccagacatcgcgcaacagcaacctcaacagcaacttcaacttcaaccacttcagccacaac

SEQ ID NO: 173565 - DNA, 282 bp, Saccharomyces pastorianus
acttcttcttctggagcaatggttaggtccaatgattgttggcattggccttctggagacaaagttaaaagaacagattcttggaactcgtcgtcttcgtcatcatcttcatcgtcttcgtcactttcactttcactctcgctttcaactttcttgcccttgttcttcttcttcttttcagttttttcttcttcttcttcttcttcttcagcaggggattcttcgtccatttcgtcttcatcgaaatcaccgcccaaaaagtcgtcgtcgtcgtcttcaaaa

SEQ ID NO: 173566 - DNA, 453 bp, Saccharomyces pastorianus
acaaactgtatcaagtttcgtaccgaatgtgtattcactcaacaagacttaaggaacaacagatattctacgacttacgtagaagctttacagagccagattcggtctttgaaagaacagttgcaaatattaagttcctcgtcttccacaattgctagcaatgctctctcctcgttaaaaaacaacagtgatcatggtgatgctcctaatgaaaaaatcttaaagtatggcgaaacagaacaatcagcactaccatcatctgaaagcaacgatgagaatgagtctgatgcgttcaccaagaaaatgccttccgagagccctccaccagttggcacaaatagtatatatccatcagattccttgtctataataaaaaagaagacggatggaagcacaagataccagcaacagcaggtcagcctaaacaattatctcaggaagtccccttatctt

SEQ ID NO: 173567 - DNA, 129 bp, Saccharomyces pastorianus
aacatgaacacgaacacgaacacgaacacgaacacgaacacgaacacgaacacgaacacgaacacgaacacgaacacgaacacgaacacgaacacgaacatggaaacattcaagaaaagaaagagcagg

SEQ ID NO: 173568 - DNA, 309 bp, Saccharomyces pastorianus
ggcaacactttccatagatcctggtatgttcctcaaggtgctcgtgtttacactgggaagttccagtgctctaacgatacctatgttagatacgtcatcaacgacgctgtcgttccaattgaaacctgttccactggtccagggttttcttgtgaaataaacggcttctacgactttgctgaaaagagagtagctggtactgatttccttaaagtctgtaacgttagcagcgtcagtaactctactgaattgacctttttctgggactggaataccaagaactacaacgacactttattaaaacagtag

SEQ ID NO: 173569 - DNA, 1059 bp, Saccharomyces pastorianus
tatttagtggatcgaattggtagaagaccagtccttcttgctggaggtgtcataatggcaatagcaaatttagtcattgccatcgttggtgtttccgagggaaaaactgttgttgctagtaaaattatgattgcttttatatgccttttcattgctgcattttcggcgacatggggtggtgtcgtgtgggtggtatctgctgaactgtacccacttggtgtcagatcgaaatgtaccgccatatgcgctgccgcaaattggctagttaatttcatctgtgccctgattacaccttacattgttgatgtcggatcacacacttcttcaatggggcccaaaatattcttcatttggggcggcttaaatgtcgtggccgttatcgttgtttatttcgctgtttatgaaacgaggggattgaccctggaagagattgacgagttatttagaaaggccccaaatagcgtcatttctagcaaatggaacaaaaaaataaggaaaaggtgcttagcctttcccatttcacaacaaatagagatgaaaactaatatcaagaacgctggaaagttggacaacaacaacagtccaattgtacaggatgacagccacaacataatcgatgtagagggattcttggagaaccaaatacagtccaatgatcatatgattgcggcggataaaggaaatggctcgttagtaaacatcatcgatactgcccccctaacatctacagagtttaaacccgtggaacatccgccagtaaattacgtcgacttggggaatggtttgggtctgaatacatacaatagaggtcctccttctatcatttctgactctactgatgagttctatgaggaaaatgactcttcttattacaataacaacactgaacgaaatggagctaacagcgtcaatacatatatggctcaactaatcaatagcccatctactacaagcaacgacacatcgttctctccatcacacaatagcaatgcaagaacgtcctctaattggacgagtgacctcgctagtaagcacagccaatacacttccccccaataa

SEQ ID NO: 173570 - DNA, 276 bp, Saccharomyces pastorianus
  modified_base (258)..(258): a, c, g, t, unknown, or other
tctgctaagaaaggtgctacacttttcaagactagatgtctacaatgccacaccgtggaaaagggtggcccacataaggttggtccaaacttgcatggtatctttggcagacactctggtcaagctgaagggtattcgtacacagatgccaatatcaagaaaaacgtgttgtgggacgaaaataacatgtcagagtacttgactaacccaaagaaatatattcctgtaccaagatggcgacctgcaggcatgcaagcntggcactgccgtcgttta

SEQ ID NO: 173571 - DNA, 183 bp, Saccharomyces pastorianus
gcggaggacataaagaaacccgccaaaattgcagtttcgccacatcggacactacagagctcaccagggagtgataatagttctaaaagctctcgcagtagggggaatctgttatctgtggaagctagaagaaaagttacaccctccacctacctagaagatatgttagagggtaaggaaaca

SEQ ID NO: 173572 - DNA, 243 bp, Saccharomyces pastorianus
gccgctgctggatctttgattggtattggtgaaattgttcttttgccgctggacgtgttgaagattaagagacagaccaatcccgaatcgttcaaaggtagaggtttcatcaagattttgagagacgaaggcctgttcaacttatataggggattggggagtggacggttgccagaaatgctcccgggttcattcgcccttataggtgggaatgcttccgccaaggaatatatctggagttga

SEQ ID NO: 173573 - DNA, 1299 bp, Saccharomyces pastorianus
atgcctgcaggtcattcctccaaagcatatgttatagcagtagcagaagtatattttccaacagaagctttatcatttcttcaggagttaatccttgacagcaactcaactctatacaacaatcctcaaaccccgctacgaaccttagctggcctaatcgatagtagtattcccttaggaggtttaacgttgtatggatccaacaatgggtgttctatatgtgattcatcaccgagtgtttcagattcttcaaataaaagctcaacagggaacgctggaactaatgagtacggctctttagacgattttgctaactcattaaccgatcatatgccttggagaattacaaaaagatttatcatatatctaacttgtttgacagctggcgtactcatgtggttactacttgcattgcttgctttccgtcacaggaacattttattaggaagacgtccgagaaattgtattgaaaaaactcccaataatgaaagaggacttgaaggtattggggttagcacctcccgctcatcttctgaaaaccataattataacgaaaagaatacaaacaatgaaagcgaaagctttcacttaatggaagacgatcgatatatcgccactggagaaaacacgatttatagcgccacccacggattgcattacaccgtagatgaagatggcgacttattttatagaaaatcgatgcctgatgattttgacgaaataaatgaaaatgaagattcgggtatagatagcattttaagagaatgcgtgtatgacaaacatcaagatacgaccgaggcttatttaaacgacgaagaatcgatctcaagcaatctagatgttgatgaaaatggtaatattaggttatacgacacttattccgatgaagatgaaccaaactgttcccatttgcaagacgaagttatcgaagactacaataacagccatgtgtacaaaatgcaacttcaaggattagaaatcggttcatatactacaggagatgatccaaacacaggaaacttgatcacaaacgagttctcttcaggtagtcagacgtgcttgccaagcaccgcctatactactccgcttgatacagattcaatcaaattacacattttaggtcatgcaggctcttcattgcagaaaccagttcaagcctttatttctaaccacgaagagcttgaaatagaggacattgatgacaatggtagtgtctcagacattcaagtcgaagagttagatgctttagatgaggagctttacaagagaatgtcaaagattgtaaaacaacagaacaac

SEQ ID NO: 173574 - DNA, 477 bp, Saccharomyces pastorianus
aaatcaggaacggtctcgctcaataatactgttaaagatgggtctcagacacctactgttgattcagttactaaagacaacacggcaaacggtgtgaactcctccattcctactgtaactggctcttctatccctcccgctagtcctactactgtatccgccattgaaagtaatggactgtcaaatggttcaactagtgcagctaacggtttggatggcaatgcatctacagcgaatctagctaacggaaggccgttagtgacaaaactagaggatgcaggcccagctgaagaccctactaaagttggaatggtcaagtacgacggaaaagaagtgactaacgaaccggaatttgaagaaggaacaatggatccactagcagatgtggcaccagatggaggcggtagggccaaacgaggaaatttgagaaggaaaactcgtcaattaaaagttctgatgagaacgccaaaaagctga

SEQ ID NO: 173575 - DNA, 99 bp, Saccharomyces pastorianus
gatagagccagagacgaagcggacgaagacgaagaagacgcgaacgcaagaagctccggtaagaagaaggacgccaacaaaggggaatctctgatctaa

SEQ ID NO: 173576 - DNA, 240 bp, Saccharomyces pastorianus
tcaaatgcaacagcaacaacaagcccaggcgcaagctcaggctcaagcgcaagctcaagcgcaggctcaggctcaggtgcaagctcaggctcaggcgcaagctcaggctcaagcgcaagctcaagcgcaggctcaggctcaggctcaagcacaagctcaggcacaggctcaggcgcaagctcaagctcaagcacaggcccaggcgcagcaacagccccctcaacagccacaaactcaagc

SEQ ID NO: 173577 - DNA, 456 bp, Saccharomyces pastorianus
gtgctggtagagatcatgatggttactactggactcaggggtagagttgacgacgttgtaaatgtttccggtcatagattatccacatcagaaattgaagcatccatctcaaatcacgaaaacgtctcggaagctgctgttgtcggtattccagatgaattgagcggtcaaaccgtcgttgcatatgtttccctaaaagatggttatctacaaaacaacgctactgaacacatcacaccagataatttacgtagagaattgatcttacaagttaggggtgagattggtcctttcgcctcaccaaaaaccattattctagttagggatctaccaagaacaaggtcaggaaagattatgagaagagttctaagaaaggttgcttctaacgaagccgaacagctaggtgacctaactactttggccaacccagaagttgtacctgccatcatttctgct

SEQ ID NO: 173578 - DNA, 690 bp, Saccharomyces pastorianus
gaacatttactgataacgaagaacaattctcaacagcagaaggactattcacacgtgccatgcaaattttttaagatgggcaattgccaagctggctcgtcttgtcccttttcccattccccagatattatcagttctgcgaataatttaccttgcaagtatttcgcaaagggtaactgtaaattcggtaacaagtgtgttaatgctcatgtgctgccaaatgggttcaagatgaacagtaaagaacctattgacatcactcccccttcacaaaacaactacttatcccatgctagatcagcttctttctctacctacacgtctcctcctctgtctgcacaaacggaattctctcactctgcttcgaatgcaaactacttttcctcgcaatacctaatgtattcgcctcagaaaagtccagaggccctatatactgaattcttttctcccccttcgtcttcttcttcgtacatcaactataactataataactccaacattaatgcctattctccagtctcttcgtcttcatctaacatttggcaagagcaaggccaaactacgttatcgaatccgagtgtgaatcagaatttaaggtatcgtacaggccctgcaattcaagaagaatcagataatgaaattgaagatttacttattcacaatttcaattccagatactgtcatgaatga

SEQ ID NO: 173579 - DNA, 411 bp, Saccharomyces pastorianus
tctatacagagtaatactgccctagaaaagaagaagagaaagcctgatacaatcaaaaaggtaagcgacgttcaagttcaccatactgtacctaatttcaataacagttcagagtacatcaacgacatagagaatcttataatatctaaactgatagacgggggaaaggagggtattgcagttgatcacattgaacacgccaatatctcggacagtaaaacagatggaaaagttgccaataagcacgaaaatattagtagcaagcttagtaaagagaaggttgagaaaatgattaattttgattataggtatattaaaaccaaggaaaggactagtatgtataattatttttttttttttttttatgttcttgccagtggaggaatgtttctttcgtcacaaccggagtga

SEQ ID NO: 173580 - DNA, 222 bp, Saccharomyces pastorianus
gccaagccagaggacgttaagaggagaagctacagaaattacggcctagatttgattagaggtaaaattgtggacgagattcacgctggtgttcttgagccaaccataagcaaagtcaaatccttgaaatcagcattggaggcttgtgtagcaattctaagaattgatacaatgattacagtggatccagaaccacccaaagaagatccgcacgatcattga

SEQ ID NO: 173581 - DNA, 81 bp, Saccharomyces pastorianus
gcaaaggcaaagtgttccgaaagaggggtcgtcatcaatgcagaagacgttcagcaggctttaaataagcatatgaactaa

SEQ ID NO: 173582 - DNA, 126 bp, Saccharomyces pastorianus
atggatcatccacgtaagtggcaccgtaagctcgtcaatggcaacagccactttatttataagagccgcggtcattttgttagcatctcttctcaactttggcagcacaatttcacgatattcaac

SEQ ID NO: 173583 - DNA, 135 bp, Saccharomyces pastorianus
ataaattttgtcataactgttgggattccactgttgttagagactataatattagatatacagataatactagaagtcatacccaaagatatagaaatctacaaaagggaatcggtgtttctacacaatatcatt

SEQ ID NO: 173584 - DNA, 168 bp, Saccharomyces pastorianus
gatttctaccaagaaaaattcggtaagaatgatataaatggcctgctatttctgtatcgctatcgcgatgatgttccgatcggaagctctaatttgaaagaaatgattattagcagtctttctcccttggagcctcactcccagaacgaaattctacagtattacttg

SEQ ID NO: 173585 - DNA, 216 bp, Saccharomyces pastorianus
aacgacagtaaccgcaaaattcgctttggaacacataaaggagcttccggaagatccaccctaacattcttcgatgcgatcgaaactggaaagtggacttggataacattgagtgaaacatataatgagttgacgtatgagaacataaggaagcaatgtcaaatgaaggataacagtatcattgaaaaccacttaatccagttacaagatattttc

SEQ ID NO: 173586 - DNA, 324 bp, Saccharomyces pastorianus
acttcaaccttattaatttcttcttcttctttttctgccttgttatctatgcttttgcttggctcttctggggtcacctcaaccttattaatttcttcttcctctttttctgccttgttatctttggtatttacttcttcctctttttctttttcagccttgtcttctgttttgtttactgtttcattttctatctcattttctgttttcctttctgctccatcatcttcgccttccactttgccttgtacttcctcttgtacatcttctatcgatttattttctgtcacatcttcttcattgttcgctacgctatcttgtttt

SEQ ID NO: 173587 - DNA, 390 bp, Saccharomyces pastorianus
ctgatcattgtttgtgatgatcctacgaaagcaccacaattcgatttggacaataatcatgtcattacatgggtagagattatagatgggtttggtaacgatccagagttccaatacacaccgccagatgacaattctgatgacaagaaactgtttgcgtacgtagcctcaccatggaatggaactaacagcttcaatcagatatgcctggtgagtaacattgcggaatttatcaagagttttcccctaggtaacgaattgaatagcagtgatcatttaaccatctcagcaaaattagcaagttccagtgcaagcttacaaacctgggggaagctcttcgctgtcttgctacacggtggtctgcatcatttgtcgatcgacggccgattg

SEQ ID NO: 173588 - DNA, 87 bp, Saccharomyces pastorianus
aaaatcaactatcatctactaactagtatttacgttactagtatattatcatatacggtgttagaagatgacgtaaatgatgagaaa

SEQ ID NO: 173589 - DNA, 240 bp, Saccharomyces pastorianus
gcatttacagcttcttcagtcttatcattaaccgattcttgttttacgccattggaggcgtttgattctgtctttgcggtgccagctgtatccgttacgtcttcaaattcatcttccaatgcattttctctagcagtttcatcgttatcatccataacatcttccatctcttcttcctcttcttcttcctcatcctcttcttcttcttcctcctcctcttcttctttattgagctttgct

SEQ ID NO: 173590 - DNA, 144 bp, Saccharomyces pastorianus
atgaaacccttttccgtgcctgttaagtttccgttttcggtcaaaaagaatatccgaattttagatttggaccctcgttcagaagcttattgtctaagcctaaattcagtctgctttaaacggcttccgcggaagaagcatttc

SEQ ID NO: 173591 - DNA, 135 bp, Saccharomyces pastorianus
atggagatgctcttgtttctgaacgaatcatacatttttgatagacttcgtatgtggagtactgttttatggcgcttatgtgtattcgtatgcgcagaatgtgggaattcctattataggggtgccgaggtgcct

SEQ ID NO: 173592 - DNA, 297 bp, Saccharomyces pastorianus
aagcttgaagccctgggtgttccgttcgaagtgaaggtggtgtccgcgcatcggacgccggatgtgttgttcagttacgccgagcaggcgggcccgcgtggcctgcgcgcgatcatcgccggtgccggcggggccgcccacctgccgggcatgatcgccgccaagaccgccgtgccggtgctgggcgtgccggtgcagtccaaggccctcaatggcatggattcgctgctgtcgatcgtgcagatgccggccggcatcccggtcgctaccttcgccatcgccatgcgggatcctcta

SEQ ID NO: 173593 - DNA, 1107 bp, Saccharomyces pastorianus
atggtcttgataaatggcataaagtatgcctgtgagaggtgcataagaggccatagagtaacaacatgcaatcatacagatcaaccgcttatgatgatcaaacccaaaggtagaccttccactacatgcgactattgtaaacaacttcgaaaaaacaagaatgcaaatcctgaaggtgtttgcacgtgtggccggctagagaagaaaaaactggcacagaaagccaaagaagaagcaagagctaaagccaaagaaaaacaaagaaaacagtgtacctgcgggactgatgaggtttgcaaatatcatgctcaaaagagacatctaagaaagtccccttcaagttctcaaaagaaaggaagatccatttctcgttctcaaccaatgtttgaaagggtattgtcttctacttcacttgacagcaatatgttatccggccacggagcactatcagatacctctagcatactgacgagcacatttttagacagtgagccgggtgttggtaaaatttcaaaagattaccatcatgtcccttcattggcctccatttcatccttacaatcctcgcaatcgttagatcaaaatttcagtataccacaaagcccgccgttatcttcaatgtcatttaattttctcacgggaaatatcaatgaaaccaaccaaaatcacagtaatcatcagcattcaaaatcaggcaataactggcaagatagttcggtaagcttgccagcgaaagctgattcacgtcttaacatgatggataaaaacaactctgtgggtcttgacctattaggccattcaaaacgaatatcgccgatatcaaactctcgtgtgggcgaagttagcgttccgctagaagaatatattccttctgacattgatggggttggaagagttactgataaaagctctttggtctacgattggccatttgatgaaagtattgagagaaatttcagtacaaccgcaaccgctgcaactggtgaaagtaagttcgacattaacgacaactgtaatagaattattagcaaaagttatagtaagactaatagtatgaatgggaacggtatgaccaatagcaatattaataatatcaacagtattggc

SEQ ID NO: 173594 - DNA, 126 bp, Saccharomyces pastorianus
attattcctcattccgttttatatgtttcattatcctattgcattatcaatccttgcacttcagcttcctctaacttcgatgacagcttttcataccttatgccatcatctctacaccgtatatga

SEQ ID NO: 173595 - DNA, 366 bp, Saccharomyces pastorianus
atgaataagatcaaatcaagccagaagaactacctacaaaaaagcaatttctataatttcgaaagaaacggcactgaatgggaatatatatttgcatcgaactcagcttgccctgattataataacacagctgttaataatgatgtgatttcatcacttaactattgcatcagtgatgaaagatttgagataactgcagcgatgtgtgtggttttgaagctatctcaagattgttcttttgatgtgaggcttcagcgaagtagaaacgggccatataagtatatctgggatatgccttgtggacaattacaacaacacattggttacgagaatggtatatgctataatagtgaaagtgaaatgcta

SEQ ID NO: 173596 - DNA, 108 bp, Saccharomyces pastorianus
gatatactagaagttctcctccaggatttaggaatccataaaagggaatctgcaattctacacaattctataaatattattatcatcattttatatgttaatattcat

SEQ ID NO: 173597 - DNA, 2169 bp, Saccharomyces pastorianus
atgtgtagtatttttgggtactgcaattttttgattgaaaaatcgagaggtgaaataattgacacattgatcgagggcttacaaaccttgggatacagaggttatgactctagcggtttatcaattcaaggtgacgaattggggtctcttaacatttataaacagactggtaaaataggcaatctagaggaagaaattgctctccgcagccccaatagggacctgccattcatttcccactgtggcattgcgcatactaggtgggcaacacatggcaaggtgaagcgtgccaattgtcaccctcataactctgatccgtctaacgaatttgttgtaattcacaacggtgtcatcactaactttaataatttgaaggttttgttggccagtaagggccacgtgtttaaaagtgacactgataccgagtgtattccaaaactatacaagcacatttatgacataagcattcagctagggtataaccttgatttccatgaattaacgaacttggtgcttaaagaattggaagggtcttacggactgctttgcacttcttcccacttcccagacgaagttattgctgcaagaaagggctctccgctagctattggcgttaaaagtaaagcgaagttgaaggtagactttgtcgaagtggaatacttggatcaaaaagaaaactaccttgagattaacatgtcaagtgatcctaataattattcagcccggacttctgtaaactataatgcttgcttaagaaaatcccccccactacgctcgcaatgtgtgaaggtccctacatatgatgaagatgtctttagcacgaatcacgcatcatccagagaattattgtcagaaggtgagttgccacaacccatagaattttatttgtcatccgatttctcttcattaatgcaatacacaaataaggtgttgtatttggaggatgatgatattgctcacatctatgacggagaagttcatattcattgctctcgaaacgaccgcggtgatctaccgttcagaacaatccaaaccatagaatcagagctgttacaacttgttaaaggttcttacgataatttcatgcaaaaagagatatacgaacagcctgaaacaactggaaatgtcatgcgaggaagaattgacgtctctacgaatcgagtaattttgggtggactagaacactggatgttcgagttgagaagggcaagaagaataataatgattgcatgcagagcctcttatcatgcgtgtctagctactcgtgccatcttcgaggaattaattgagatccccattggtgttgaattggcttcggattttattgaccgcaactgctgcatcttcagggacgatgtttgtatatttgtttctcaaagtggagaaacatcagacacgatttgcgctttaaactactgtttaaaaaaagaggcaattaccgttggagttgttaacactaccggttcttcaatttcaagatttacgcattgtggcgttcacataaatgcaggcccagaaaaaggagctacgtcaacaaagtgttatactagtcagtatattgctttggttatgattgctttatgtctatcagaagataaggtgtctcaagtcgaaagaagaaaggaaataatacaaggactaattttgatcccaaagcaaatcgaagaagtgttcaggctggaatcaacaatcattgatttatgtgataatgaactccgagaccaagaatcggtattggttttgggaaggggtttccagtttgcgtctgctttagaaggtgccttaaagatgaaagagatttcctatgttcattccgaaggtcttctagcgggtgagccgaaacatggagtctcagatctggtggatgaggctttatcaatcattgcatttgcgaccaaagactcgctctttcccaaagtcgtatcttccatcgagcgtataatagcaagaaagggcaatccgattatcatttgtaacaagggagacaagatatgggagcagaaaaaactacaaaaaaatttcgttacgctcgaagtaccacagactgtgaactgtctgcagggagtgctgaatatcattcctttgcaattgatttcctactggttagcagtcaaaagaggtgccgaccttgattctccaatagaaccggcaaagacatccaccgcacaa

SEQ ID NO: 173598 - DNA, 1296 bp, Saccharomyces pastorianus
atgtcgattttctggaatcttgtgttgtttcctgagtggggtaccacatatttgggtaatacgactattgatgctatgaatgagctccataagtccattgactattcgataaatttcttcattgcagttgacccgcacaatagtagccagttgtacagtagagatcctgtttcgttaggcaagctattgaagatgaagtcactgatttcttctaaagttaacaactgtcgagtagtacttcacgagtgcatttatgagtttacttacgcttatgtttcgccaactaaactaaagccaatcatatctactttggaaaatttgacagtcttcattaatggattagttaatacatgccaattagaatttattttattggcaagacatgataacaagctcaggcctgatgatgtcgcagctttgacactgccaaagaacaaagaaatcagctttgcaaatgctgagaagttgttgaaagttattgacaagttgcatccagtgatttatagtctacaccggacaatgagtgaatgcatgtacatagcaaagttggtacttgctcatgcatttgatgtgaaagtttcaagggttcattcctgctcaatgttcaaagatggtaacttcccaacattcagtaataacgccaataatctgcccaatgatgttgacatccagaacaagatcaatgacctgaagcaggcattagaagaatgtaaagcaaaattcaagtcagaaatgttaagttttgatattgatattatgagtcctagtgatgaaatatttttgttgtctagctttctactaaattttaggcaaactgcagattcaactttggtaattatggagtccgtcaaggacattttagtcaaacgtcaattacaagagaagaagggctggctgagaggcaaaagactttggtttttagtgttgaccaactacgagacattttctatctggttaaaaggcgataggaactcagtgactgaaaatgatacattaaagggtacgttcaatggtaatactaatggttttgctcatgacacagttattagaaggcctgattatgaagagaatgaacttttatctcaaaaagtttcatcgaataagaacattgtaaaagatgatgcatcgctagatctgccaatgacaagtgaacccaaaggaaattcatcttctacctctgacacttcttcgtcgccattaacgttaacgaaaacaactacgttcggaactaatagaacttccaggaggcaaggcagattttcttttatgtccatgcttatttcaattgataagttc

SEQ ID NO: 173599 - DNA, 165 bp, Saccharomyces pastorianus
actccactccatggcccatctctcactaaatcagtaccaaatgcactcacatcattatgcacggcgcttgcctcagcggtctataccctgtgccatttacccataaagcccatcattatccacattttaatatctatatctcattcggcggccccaaatattgta

SEQ ID NO: 173600 - DNA, 789 bp, Saccharomyces pastorianus
gataatcttgaaagacaaaagcaggagcaacagcatgctcaattgcaaagacaacaagaagaagctagacatcaacaagaacaattgaagctacaacaattgcaaagacaactacaagaggaagctcaattacaccagaagaggcaagaagaagcccaattacaacagcagcaagcccaattgctacaacagcaagcccagttccagcaacaacaacccttgaagcaaacaaggactgggaaccagtctatatcggataaatacagcgacttgaataccttgttagcaactggtacagggattcatacttttggtaacactggagaggcacgtattcctgcacaacatacaaagacaggcacgtttataaattctcagggtacaggctacaaacaggttactaatgaacccaagaacaacccttttttaagcaaccaatacactggtttaccaagcacaaatatcgtgcccacgcaaacagggtacgggtttggtaaccaacctcaaagtcctcctactaattctcctcagcaaaatcctactggtataagctactctcagccacaacagcaacaacagccacagcaacaaccgcaatacatgcaaaatttccaacaacagcaacctcaatacgcccaaaacttccaacaacaaccacaatacactcaaaattatcaacaacaaccacaatacattcaacctcatcaacaacaacaacaacagcagcagcagcaacagcagcaacagggatatactcctgaccaaggtgtaagcttaattgatctttga

SEQ ID NO: 173601 - DNA, 72 bp, Saccharomyces pastorianus
agagaactagaaaagttctactccactcaaattgaagaattgccatccgacatcgctactttgttgaactaa

SEQ ID NO: 173602 - DNA, 339 bp, Saccharomyces pastorianus
attgtaaggagtcttcagaaaagcaccataaggaaatatgggtacaatttggcaccctacatgtttttgttactacacgtagatgagctatcgattttttctgcataccaagcaagtttacctggcgaaaagaaagtcgacacagagcggctgaagcgtgatctatgcccacgtaaacccattgagataaagtacttttcacagatatgtaacgatatgatgaacaaaaaggaccgattgggtgatattttgcatattatcttgcgagcatgtgcgctcaatttcggggcgggtccccgtggtgacctgcaggcatgcaagcttgcactgccgtcgttt

SEQ ID NO: 173603 - DNA, 135 bp, Saccharomyces pastorianus
ctcacttcgccaccgatctggactatttgcaacaacccgtccaacagcaacaacaacaacaacaacaacaacaacaacaacaacaacaacagccaggacagactcaaagtctggaacaagaccaggatcaggagc

SEQ ID NO: 173604 - DNA, 528 bp, Saccharomyces pastorianus
ctttcgatttcttgcatatgtttattattcagctctatatcctttttccactgcgattggtactctgtaagccattcttctttttcaagcatatgcttttgttcaacatcgttcaacatttcctgtaaagtggaagggttcatggtgattttatttcttacctcttctattttatctaaaagcgacgctctttcattttcaaactgtttaatcttcataaatttcaatttctcaatttttgttttgtattcattttccatttgtttcagctcttttttattagatgccgctagctgctttaaatgtatttcatgtccttcattcatgaactgcttctttgacaaaaattcttctttaatcgagataagttcattgtttttcaaattcagttgctgttcaatttttatcttttcttcacgaagggtttcaaatttgagattaacggcattgattttctctttcgtttctgttagttcatctttgagtaaatctagtgttgcctttttctcaaataagattgcttgtgtt

SEQ ID NO: 173605 - DNA, 108 bp, Saccharomyces pastorianus
atgcagtggcacagaaacaaccaggaatactatagtcataggcaatacaaggtatatattggctatgcagacccctccagaaagtaccgacgtaaagttagatacact

SEQ ID NO: 173606 - DNA, 1425 bp, Saccharomyces pastorianus
atggacaattgcggtggtaaccttgtcgattactctatatatggtatgcttgtgggaaaagatgtaggatccggaggaatgtgtttggttggtgagagcaaatatagtatcagaataattccatttggctttgactccaaacccgtcagtgagaagaagtgtgtcaaagatttggaaaatttcgatgccgcagttacaaagagactagaaaaaataaaaaatattctctctaaatcaaaacgaacaattgcgattcatgaggaggatattcggggagcagatgatccggcaacgtctccgagaaggaattatttgtggaatcctgagcctgaaaatgttgagaatgacgcagttgaaaagaaatattattctgaagaaggcatcatcgacactgaaataagctactcggcgacctccatgcttaacgcgggtcttaaaagtatatttcgcaaaggcttacataacacgtcctcatctcagctggagaattctatctcagggaagaatcctgagaaaaatggactgataatgataaaagtaaagctacccggtagctctttgccatattggagccctactttaattcaaaagcagaatgtgttctccatgaaaaacaagcaaggccaacaaaactggtcagatttaagaaacctcctctcgagtgaagaaggagaaaaattggagagtctacaaatagagctcgtatgtgtccaggcggctaacaacgttccccatgaacttcctaaccttactagttcacagatagaactggtttgtttaacagaaaaaacagaagactgtaaaccagtggagtttcactctgacctgcttttgaatgagcgcaggtataacgaagttaaaaaagggttccaagaaatgttggaaaccgttaagacgtactgtgacgatttctctcataatcaaacaaggattaactcgctccttactgaagatgcagaagcaagtctgggtaataaggaactcgtgttttctagtttgatgccgttgagtgtaataaatgacgtacaagccttagctcatatggaagttgatgttgctgtaataaagaatgcattggaatcaaaattgattgcggcaaggaatttgcactctaattcttcatcatccagtatgattcctcaagcatctcgtagcataataaagaacgtttcaccaagcagtcatggctcgatattctcgcatgcgagatcaaatgaatggaatcgcgtcaatacaacagaatataggaaaacactctcattgcatgtaaaatttaacgatgaatataagggtactttagtgcctagtttccgaaactgtctatgctctagatcgtattttcttcgagtaaaactttacttcgataaaggcgcagggacgtctcagattgacgttcctatccaaatcagaaactcacacatcaat

SEQ ID NO: 173607 - DNA, 600 bp, Saccharomyces pastorianus
atggccatagaaatctcatttaaaaagaagctcacgaagaatactcttttggaaagagacattgataccgaagacgaaacaaacccatcagaggctttatttttcgtctttgattcatttgcgcccgtcaataatttcctacaagattataacgacctgattgggaaaatagactttggcttggcatttcaatattttccattatcggaatataggcctcatggtttatttcctattattgggcagtataatgagaggtctaccttaacagtagatacgccaaggtctagaggacaagtttcaatgacgatcaatggcaaacattacaaaagcttccttgatatcctgagtctttggaatataaagggtgtcagttgcggacatgaacataataatgactgttgcttacaatcaaaaaatgagatgtggttatgttacggtgggtccgctggtataggcttgccgagaatccaaggtatatatccaaccgttagattatttaacttggatgatattttggacgaaataacttcgtggaagaggaatagcaatcttgttgacgaggtttacgattatcagtacatctataaggggaagcaa

SEQ ID NO: 173608 - DNA, 90 bp, Saccharomyces pastorianus
atggtctctagcgggatcgaaccgctgatccccgcgttattagcacggtgccttaaccaactgggccaagagaccttgtttttgtgttat

SEQ ID NO: 173609 - DNA, 546 bp, Saccharomyces pastorianus
atgtgtttccttctcgagacctcggcgtctcccagatcgaagctcagcacagattttaaaccgccatttacgctccttttatcggtaactaagaaggaaaaaaaaaaagtaccaccacacaatttccagtgtattcattccttaaacttcgtttattttttattcattcattcatttttatttgaatataaccaactactagtccttcctttaaacgagaatttaccctcccttaatttttcaagaaattccagtatgaaattatccgctctattagctttgtcagcctccaccgccgtcttggccgctccagctgtccaccatagtgacaaccaccaccacaacgacaagcgtgccgttgtcaccgttactcagtacgtcaacgcagacggcgctgttgttattccagctgccaccaccgctacctcggcggctgctgatggaaaggtcgagtctgttgctgctgccaccactactttgtcctcgactgccgccgccgctactacctctgccaccgcctcttcctcctcctcttcctcttcctct

SEQ ID NO: 173610 - DNA, 549 bp, Saccharomyces pastorianus
attttgtccctggtaataggggttttggttttattaaatatattttttaatgacaacgaagcttgtgttttcaattctgcaatacttgcttttacttctcttgtaggtttgttaataatattaggtgatggtaatccaaagctagtcagtcgtcgaaattttaggaccgagcttttagtggatgtcatcacacgtaaaccggcagtagaagggaaagaatggaggatcatcacatacaacatgaaccaatatttgtttaatcatgggcaatggcatactccgtattacttttacagcgatgaggattgctaccgttattttctacgccttgttgagggagtaacccccaagaagcaaacagccacgtcaattggcaattctccggtcaccgctaaacctgaagatgccatcgagtcagcttctcctagttccagactgaattatcgaaacttcctgctcaaggcagcggagatcgaacgacaagctcaggaaaattactggcgaaggcggcatcccaatatcgatgcgcttcttaaaaagacggaatag

SEQ ID NO: 173611 - DNA, 240 bp, Saccharomyces pastorianus
aaaaggggtaaaactggtaatgactacgttgaactatttgaagctggttatggtggatctgacttggtaaccaaaattgcaaagcaagccatcaaatattctcgtgatcaaaacttcgatatagtgttaatggatactgccgggagaaggcataatgatcctactttaatgtcgccattgaagtctttcgctgaccaagccaagcctagatataatcacttatggttggagaggctttag

SEQ ID NO: 173612 - DNA, 690 bp, Saccharomyces pastorianus
gataatgatgtcaaggatgacaccagattggacacattgagtgaacctagtgcgcctttgatcacggagaatgttgctcttcccgatgttattttcaagtcccattttctctacctattatacgaaattgctcactttgccccgatgatgatttgtttcggcatactggtggtttccattttattggctctgacctttcacgaccctgccgtttacactatagcttttttgctgtgtggctttgatgtcttatttttagctggtgcactatcttccttcaataacccactcccctctaatagagctttccaaacaaagcttttactggaggcaataacatgcaaaccagcagtgcttagcgaagaatggaggactattgcatataacatgaaccaataccttttcgatcaaggattatggaacaccccgtactatttctactgtggtcggacatgccaccgttttttgttgaagcttcttgtggggaagagtttcgacgtactctcgctttcatctactagccctatcatggaggcacagctcgaggtgccaaccactggctcgtctaatgaagagaacggaactttcacttttagtcctggcccagattttcgaatgtgcctgtataaagctgctgtgatcgaacagcaggcccaacgagactattggagaaagcaatatccaaacact

SEQ ID NO: 173613 - DNA, 537 bp, Saccharomyces pastorianus
ccattgcatggtattccatttttggtcaaggacaattatgctacaaaagataaaatggatactacatgtggttcatggatgctcttgggttctgtagtgccacgcgattctcatgtcgtatccaaattgagagatgcgggtgctgtattattcggccactctacgttaagtgaatgggcagacatgagatcatcagattactctgagggctactccgccagaggtggacaagcacgttgtccttttaatcttactgtcaatccaggtggtagctcctctggtagcgctagctccgtagctgctaatatgataatgttttctttgggtactgaaactgacggtagtattatcgatcctgcaatgagaaatggtatcgttggttttaaaccaaccgttggtttgacttcaagatctggtgtaattccagagtcagaacatcaggattcaacggggccgatggctagaactgtccgtgatgcagtatatgcctttcaatatatgtggggggttgatgaaagagacgtgtatactctgaat

SEQ ID NO: 173614 - DNA, 171 bp, Saccharomyces pastorianus
atgaacaatgccaatagagccgcacatgtaattactggttcacactcgtggggcccacacgattcctgtgcaaagtttgacaagaggatggagtttcacgtaaatactgccaaaggtgatgcggttttgtttttgggcagcctctaccatgttgcaagtgcgaaccatact

SEQ ID NO: 173615 - DNA, 1179 bp, Saccharomyces pastorianus
ggatatgtcttcccctattgggaaagttacaacgtgagaatatcggattttgagagtggcctattaggtaaaggtttgaattccgttccatcttctacagtaaggaaaagaactacgagaccagatattggttcaccctttattgcgcaagttaacggtgtacagatgaccttgcaaatcgaaccgatgggtaggttcgctttcaacggtaacgatggcaacataaatggcgacgaagatgacgaggatgccagtgaaagacgaatcattcggatatattatgcagctttgaatgattataaaggaacatattcacaaagcagaaattgtgagcgcgccaaaaacttgttggaattaacgtacaaggaatttcaacctcatgtggacaatttggatcctttgcaagtattttactacgtccgttgcttacaattattggggcacatgtatttcactggcgaaggctcctcgaagcctaatattcatatggccgaagagatcttgaccacgtcgctagaaataagcagaagggcacagggacctataggtagagcgtgcatagatctgggcttaataaatcaatacatcacaaacaatatttctcaagcaatttcgtattatatgaaagctatgaaaacacaagctaacaatggaatcgtagaattccaattatccaaattggccacttcattccctgaagaaaaaatcggcgacccatttaacttaatggaaactgcctacttgaatggattcattccagccatatatgagtttgcagtaatgatcgaatctggaatgaacagtaagagtagtgtggaaaacactgcttacctgttcaaaacattcgttgacaaaaacgaagctattatggcacctaaactgaggacagcatttgccgcattaatcaacgatcgttcagaagtggctttatgggcttattcccaactagccgagcaaggctacgagactgctcaagtctctgccgcctacttaatgtaccagttgccatatgagtttgaggatcctccaagaaccacagatcagagaaaaactttggcaatttcctactatacaagagcgtttaaacagggaaatatagatgctggtgttgtcgcgggagatatctattttcagatgcagaattacagtaaagctatggctctttatcagggtgcagct

SEQ ID NO: 173616 - DNA, 582 bp, Saccharomyces pastorianus
atgactactggtaggattcaatttgccgtttctactccttgtaatgctaagggaaaaccatcgggatatagaatatttgaattcaataatggccggcttgcgctgacaccatcagagaggggctgtaccaaagtggacgtgaatgcaaatatacaggcattctgttacttaaggcccaatgggagagacacatcgacatcatcagatacagcccacattatggattcgagtgattacatgatactggcaaagtccaatgggtttattgaaatcataagcaactaccaatacaagataagaagtggcctacgattaacgccttcctttatccttagatgtaccccagaagactttgagtcaaatttcttcagtgactatatgattgccggtcttgaatatagcccaggtttgttatattgctgtatgtgctccggcagaatatacatttttgtaatgaaccttccatcggattatatccagttcaaaaacatgtacaatcctaaatttccagattgcttctttaacaagcatgaacacaccagtacaagtcattcttcagaggaagaaacatatttgaagggc

SEQ ID NO: 173617 - DNA, 72 bp, Saccharomyces pastorianus
ccctctgtggcagtacaggccccaccgggctatggtaagacggagttatttcatctcccggggatcctctag

SEQ ID NO: 173618 - DNA, 417 bp, Saccharomyces pastorianus
gcgacacgcgcattcatggtagtgcctaatgccagtaccaatgcgactgccaactccagcactaatgctactaccagctgccagacatctactgtcaggactagtaacagactaccactgaaagtaccaactccaacactagtgctactaccaccgaaagtaccgactccaacactagtgccactaccaccgaaagtaccaactccaacactagtgccactaccactgctagcaccaactccagcactaatgccactaccaccgaaagcaccaactccagcactaatgccactaccactgctagcaccaactccagcactaatgccactaccactgctagcaccaactccagcactaatgccactaccactgaaagtaccaacgctagtgccaaggaggacgccaataaagatggca

SEQ ID NO: 173619 - DNA, 114 bp, Saccharomyces pastorianus; identical to SEQ ID NO: 173138

SEQ ID NO: 173620 - DNA, 138 bp, Saccharomyces pastorianus
gcgaggatctcagaaaggagagccagaattatatatatatggatgcatctctctgcatataaaattaatttccctttcgtacagttccctactttttttccctctttcgtttgcaaagaaggcggccatactcattaa

SEQ ID NO: 173621 - DNA, 81 bp, Saccharomyces pastorianus
cttaaccaactgggccaagagaccatgatatgtatacgaatacatcttaagcttaacgggtttcataaatacgtaagatga

SEQ ID NO: 173622 - DNA, 96 bp, Saccharomyces pastorianus; identical to SEQ ID NO: 173426

SEQ ID NO: 173623 - DNA, 249 bp, Saccharomyces pastorianus
atgacctactatccactagtgaccatccaggattctttgcaatatatgaaagcaaccctgaacatatccatcagtacatccgatgagttcgatattctgaatgataaagaactgtgggagtttggccaaacccaggaaattctaaaacgtaggcagacgagctcagtcaagaggagatgtgtcaatttaccagaaaactctacgatcgataacagaatgcttatgggtaccacaaagcgaggtcgcttt

SEQ ID NO: 173624 - DNA, 273 bp, Saccharomyces pastorianus
atgtcgtcctccttctcgtctcatagtctaatatcaagaaagaaggcaggtagcacgcaaaagacccgtggaagaaaaccctctttaatcccagatgctacaaaacaattcggttgtgaattttgtgatcggagattcaaaagacaagagcatcttaagagacatgttagatctttacatatgtgcgagaaacctttcacttgccacatttgtaataagaatttcagtagaagtgacaatttaaaccaacacgttaaaactcacacctcttta

SEQ ID NO: 173625 - DNA, 165 bp, Saccharomyces pastorianus
atatttatagaattgtgtagaattgcagattcccttttatggattcctaaatcctcgaggagaacttctagtacattctacatacctaatattattgccttattaaaaatggaatcccaacaattatctcaaaattcacccatttttcaaaaacgaacagaatga

SEQ ID NO: 173626 - DNA, 63 bp, Saccharomyces pastorianus
atgcactcacatcattatgcacggcacttgcctcagcggtctataccctgtgccatttaccca

SEQ ID NO: 173627 - DNA, 138 bp, Saccharomyces pastorianus
atgttatatattttatttcttcctatggggggggtccccagtatgattttcgatgataattatgttagggacccggatatcttcttgttcttatcttattatagtattcattttttatctttatttattctttatatt

SEQ ID NO: 173628 - DNA, 111 bp, Saccharomyces pastorianus
atggttgacgattcaaactatcttacgccacatgaaaccgcattggcggtggtggccaccgcaatgaaaaaagcaaggctgcaactagatacattgttaataaattccgta

SEQ ID NO: 173629 - DNA, 1758 bp, Saccharomyces pastorianus
gaagacgaagtcgattataccacgctacctctggaggatcggttgacgtacaaattatggaaggcacgtttggaagcttataaagaattgaatcagctcttcacaaactctattgatgaaggcaggacggacgatagcattcgtacgtactggagggatcctacgttatttgcgcagtatataaccgactctaatgtggtcgctcaagaacaggcaattgtctccctggattctttgatagatgcctttgcaccactctctttaaaaaacgcacataatgctattttgatatccacatggacgccattgcttgtagagaaaggtttgacatcctcgagggccacgacgaagacgaaatccatgaagtgtatcctctcactttgtggtcttgatacgtctattacacaatctgtagatttggtgatgcccttcttcgagaaaaaactacccaaattgattgccgccgcagttaactgcatttatgaactgatggctgcatttggctttaccaatgtgaacgttcaaacatttttgccagagctattaaaatacatacctcaattagccagtcatggtgataggaatgttagatcacaaacgatgaacttgattgtagagatctataaaagtacaggcaagaacagagatttattagatgatatgcttcttaaaaaacttaagccgattcaagttaaagacctcgataaacttttcgccaaaattggggacgaaccatcttcttcaaagaaattatttgaatgggagaaaagagatttggagaaacaaaggattcaagaggaagaggccagaaagaggaagtctacgacaccgaatgatactggagagtatcaagtagataacgatggcgacactatgatgggtatagaagctgactcgttacctccaaaacagcaagatgtcgttcaaatagatacgtttagtatgttaccggaagagacgattctcgataagttgcctaaagaatttcaagagaggataacgtcagccaaatggaaagatagagttgaagtgttggaagaattctgggacaacgttctatcacagactagaaagttgaaaagctcttcacagaactattccaacctattgggaatatatggacacattatccaaaaagatgccaacattcaagctgttgcactagcagcgcaatcagttgaattgatttgtgacaagttgaaaacccccgggttttcaaaggattatgtttcattagtcttcacacctttgttagacaggacgaaggagaaaaaaccttccgtaatagaggctatacggaaaactttgttgactatctgtaagtactatgacccattggcccccaacggacgcaacgaggacatgttcaaagagattttagagcatatgaaacacaagacaccccaaattagagtggagtgtacacaattgttcaatttaagcatgaagagtgaaagagatggatactcaactttgcaaagatacttaaaggatgaagtgttacccatcgtggttcacatagttaatgatacacaaccagcgataagaactgttggatttgagtgttttgccataataatcaaaatatttggtacaaatacgtttatgaagacgttagagagcttggataacttgaagaggaaaaagatcgaggataccgtcaagaatttacctagtttcaatactggaagtggcggtagtagtaacacttctgaagcgaagaaacaggcaagacccgtggagaacaaatgttattga

SEQ ID NO: 173630 - DNA, 258 bp, Saccharomyces pastorianus
caaggcgaagcagtcctcgttggtcccgtacgttggccagaccttctcgtagttggcaatatcgtaacccatatcgtcctgtggcgagtcgtagaatggcgaaatccagatagcatcggcaccaagatctttgatgtactccaacttggaggcaatacctttcatatcaccccagccatcgttgttagagtctttgaaacttgcggggtagatttgatagacggtggcttctttccaccatttgcgtctcgtttctga

SEQ ID NO: 173631 - DNA, 204 bp, Saccharomyces pastorianus
atgagtgattggtttaaagacagtttggttaatggcttgcaattgacatccgtcagtaggtatccttctaacatgtctgcgcacgggttgacagccgtatacgtagcagatcctcctgatgtcattgcttttttaaagtcacacggtgtagtcattgccggaggtattcacaaggacatcggacccaagtatatccgtattgga

SEQ ID NO: 173632 - DNA, 507 bp, Saccharomyces pastorianus
gaattaatccatgacgctgttctagactattatgggaagcgccttgcaacctgctcttctgacaagacaatcaagatctttgaagtcgagggagaaacacacaagttaatagacacgttgactggccacgaaggcccagtttggcgtgttgattgggcacatcctaaattcggaaccattttggcatcgtgttcttatgatggtaaagtgttgatttggaaggaagaaaacggtagatggtctcaaattgccgttcacgctgtccactctgcttctgtcaactctgttcaatgggctcctcatgaatatggccccctactactggttgcttcctctgatggtaaggtctccgtagtagagttcaaagaaaacggtactacttccccaataatcatcgatgctcatgccattggcgttaactctgcttcttgggctccagctaccattgaagaagatggtgaacacaacggtactaaagatctcgcagtttgttactgggggtgctga

SEQ ID NO: 173633 - DNA, 135 bp, Saccharomyces pastorianus
acatcggggatgggatccaccttcagcaaatgctcattattcatctttaaagcagttatgatcttacacacctgcttaattgttaaatcaataagaatagacctgcaggcatgcaagcttgcactgccgtcgttt

SEQ ID NO: 173634 - DNA, 189 bp, Saccharomyces pastorianus
caacttaccctactctcatattgcactccactccatggcccatctctcactaaatcagtactaaatgcactcacatcactattaacggcacttgcctcagcggtctataccctgtgccatttacccataaagtccatcattatccacattttaatatctatatctcattcgacggccccaaatattgta

SEQ ID NO: 173635 - DNA, 1335 bp, Saccharomyces pastorianus
atgttggcctcaccaggtatgctgcaaagtgggttatcaagagatttacttgaaagtggtgcccgtgaggataagattctagtactaatcaccggttactccatcgaaggaacaatggcgaaatttattatgcttgagccagatacgataccttccataaataatccggaaataaccattccaagacgttgtcaagttgaagaaatctcctttgccgcacacgttgacttccaggaaaatttagaatttattgaaaagattagtgcgccaaatatcatccttgttcatggagaagccaatcccatgggccgtttgaaatctgcattgttatccaatttcgcgtctttaaagggtacagataatgaagtccatgtttttaatcctagaaactgtgttgaagtagatcttgaatttcaaggtgtcaaggttgcaaaagctgtgggaaatattgtgaacgaaatatataaagaagaaaacgtagagataaaggaagaaattgcggctaaaattgaacctataaaggaagaaaacgaagacaacttggattctcaagcagaaaaaggtttggttgatgaagaggaacacaaagacatagtcgtttctgggattctagtttcagatgacaaaaatttcgaattagacttcctttctttgtctgatttaagagagcaccatcccgatctttcttcaacgatattaagagagcgccagtcagttcgtgtaaattgtaaaaaagagctaatttactggcacattttacaaatgtttggagaggctgaagttcttcaagatgatgatagagtaacaaatcaagaaccaaaggttaaagaagagtcaaaagacaatctgaccaatacaggtaaattgattctacagataatgggtgatattaagttaactattgttaatactctagccgttgtggaatggactcaagatttaatgaatgacactgtagcagactccattattgctatacttatgaatgtggattcagctcccgccagtgtcaagctttcgagtcattcttgtgatgatcatgatcataacaatgtgcagtctaatgcacaaggtaagattgatgaagttgagagggtgaagcaaatctcaaggttgtttaaagaacagtttggtgactgttttactttatttctcaataaagatgaatatgcaagtaataaagaggaaactataactggagtggttaccataggtaaaagcactgctaagatcgacttcaacaatatgaaaattttagaatgtaattcaaatcctttgaaaggtagggtggaaagtctcttaaatattggtggtaatttggtcacaccgctatgt

SEQ ID NO: 173636 - DNA, 201 bp, Saccharomyces pastorianus
atgaatgtaacttctccaaaagacgagagtcatagattctctaagaaaaaaagattaagtacgagtggatcacgattccacaaactgaatgggcattcacaagatataagcacatccgaagaccgcgattcaattgtttcaagtaacacaacttcaataatgactgatgatgtgtccgactacgatggtggcggaaaatcg

SEQ ID NO: 173637 - DNA, 222 bp, Saccharomyces pastorianus
atattaggtatacagaatatactaaaagtctcctcgagggtagaggaatcctcaaaggggaagcgatatttctacataatattattacgattattcctcattccgttttatatgtttcattatcctattacattatcaatccttgcacttcagcttcctctaacttcgatgacagtttctcataccttatgtcatcgtctaacaccgtatatgataatatac

SEQ ID NO: 173638 - DNA, 1755 bp, Saccharomyces pastorianus
atgactatttcttctgaacacccggaaacggaacccaaatggtggaaagaagccacgatctatcagatctaccccgcaagttttaaagactcgaataacgatggctggggtgacataaaaggtatcacctccaaactggactacatcaaaggcctcggggtcgatacaatttgggtttgtccattctacgactcgccacaggacgatatgggttatgatattgccaactacgagaaggtctggccaacgtacgggaccaacgaggactgcttcgacctgattgacaagacgcacaaacttggtatgaagtttattactgacttagtcatcaatcattgttctacagagcacacatggttcaaagagagtagatcttccaagaccaaccctaaacgtgactggttcttctggagagcaccaaagggttacgatgagcatggcaagccaattccaccaaacaactggaaatccttcttcggcggttcagcgtggttctttgatgaaaccacgaatgagttttatctgactttgtttgcatctggccaggctgacttgaactgggaaaatgaagaatgcagaaagactatctatgaaagtgctgttggatattggttagatcatggtgtagatggtttcagaattgacactgcaggtctgtattcaaaacgtcctggtctaccagattctccgatttttgacgaaagctcagagttgcagcatccaaactgggggtcccataatggtcctaggatccacgaatttcatcaggagctgcacaagtttatgaagaatagagtgaaggatggaagagaaataatgacggtgggtgaagttgctcacggaagcgacaacgcattatataccagtgcagccagatacgaaatcagcgaactgttctcttttgggcacgttgatattggtaccagtccattctttcgttacaacaaagttcccttttccttgaagcagtggaaggaagctatcgcatcgaacttcttgtttatcaatggtacggatagctgggctaccacctatattgagaaccacgatcaacctcgttcaatctcaagatttggcgacgattcgccaaagtatcgtaatgtatctggtaagctgttggcactattagagtgttcgttgaccggtacgctgtacatttaccaaggccaagagctaggccagatcaatttcaaagattggcccatcgagaagtatgaggatgttgatgtgaaaacaaactatggcatcattaaggagaagtttggcaagaactcaatggaaatgaagaagtttcttgagggcattgccctgttttccagagaccatgcaagaaccccaatgccctggtcccaagaggaacccaatgctggcttcactggcccagatgctagaccctggtatttcttgaatgaatcctttcagcagggaattaacgttgaagaagaatccggagatggcgcttcagttctcaacttctggaaaagggccctccaagccagaagggaaaacaaggagctcatggtgtatggttacgatttccagttcatcgacttggacagtgacaagctattcagcttcactaaggagtacgagggcaagatgctgtttgctgctttgaatttcagtggtgaagaaaccgaattcagcgctccaaaagaggattcttctttatcttttgttcttggaaactacgatgatgttgatgcgtcttctaggattttgaagccttgggaaggtagattgtactatgccaag

SEQ ID NO: 173639 - DNA, 123 bp, Saccharomyces pastorianus
aggtattcgacctcgcgcttcgaagtaaaggagcctaccactctataccaccactaccaccaccgccacttgccacactcaccttcacttctactgatatggcatacgcacacggatgctaca

SEQ ID NO: 173640 - DNA, 3552 bp, Saccharomyces pastorianus
gtcgccaatgagattgatttcacgcttgcacatccagagacgtggcaaccgccaaaatattcagtggtttattattcaatttcttttagggagttggcatatattagaagtttattgaaactcgttctcaaattattaagcacagactcaggggatagaattagaaatttaatagattcgccgatacttgtttcattaaagaaaatcctagaaaataaacttgtattcggtttaacattaataacttacactctggatgtagttcagaaagtaataaatagtgagcctactatttatcctgttctggttgaagcaggacttattccatatgttatcgataattttccaaagttaattgggccttccgccgaattattaagtttacttccagatgtcgtttctgccatatgcttgaatccagaagggctgaagcaagttaaagaaaagggtctcataaacaatttgtttgatttcttactcgatgctgaccacgcgcgtatattaacaggtggagatcgttctacggaatatggtactgacattgatgaattagcaagacattatccagacttaaaggcaaatatcgtggaggctttgtgtaacgtcatcagaaaaatgccaagtacctttagaaatgaaagggagtttctttttacttcaccaaaagatcaaaagtacttttttcacagaaaaaatgaggaaatattgacagataaagaggaacatgaacctgcatactgggagctattagataagggaactatgctggacacatttaccagtgttttgtttggtatgtctttaggaaatggttctttttcacaggtgccacaacatctggaagcgagagattttctggcaataatatttatggaaaatcctccttatgaatactttacctccgtggcaatctcaaatgttactgaggtcctccagtatctggatgaaaaatacgaagactacgcattcatggatgttatgaaagtattgaacgatcaattggagaacctgaatgattttttgaatagtccaaatgatagaagtttctttttagaaagagatggggaaaactcggtgcgttcatgccattcaaaactttgtcgacttgccgctattttgaacattgttacgaatgtatacattgatctcactaccttatcttgtaagagaatcatgcagatctattcttattttgacaaaaaaggattttctttaattaaaaacttaaagttgctattccagaaatgtgcgttggaggaaatgtacatacgccaacatatgccagattctgttattacagaaacaatgccgttgcctatagtggatgtttccggagatggaccaccacttcaaatttatatcgatgacccaaaaaagggtgatcaaaaggggaaaattaccagcgtaaaaacgagaaatactcttcaaatgcgaacaatactgtatacattacaatcaaatactgcaattctatttcgctgctttttaaggttaagccactctaggaatatggatctagagcataaagatttgacgacagaagttcatatatttgagaacgttgttgaaaatgttattgaaatgttgaaggtcaccgaactcgaaggtcatctaccgtatattctcgttttattaaacttcaacacctttgtgtttactattccaaaggcttcccctaattccactgaaatattacaaacaataccggcttatattttctatcaaaaggggggctatttactctatttgcacattataagggatctctttacgagaatgacaaaaataaaagatttatcctcacttgataacataaactacatagatgagtccaacggtatcctaaccttaagctgtttaattaatgctctcaccttttacaacaaatcaatgcaaactgaaaccatggagaatgtccaaagtattggtaagtattacgtttcaatagatgacgattataatattatgaaagctttaacagttcctattaaggtaatggctctcgcaatgattttagatttggataaatcggatagcctcttcaagacacagtctcgtaatgtgccttactcagttttcaagcaacttcttagtatgcttaaaaatatattcactaatgtgaacatctataccaaggaattatatgaattgcattgggacctaatattcccaccaattaaaaaaattagcttgtttgagcaagtcggcattcccggtgatgttgcggcaaactatttaacagatactggtgatgatcttcctgcagataacagtattggcctgttttcgcctgaacaatgggaaaaatataaaaaattaatcggtgaagataaatccatctactatccacaaccaatgcaagctcagtattacaaaggatgttcctcaaaagaattagatgagctgagagatacctttttcaatgacggtttaccatctaggatcttcactgtactccctttctatcctaaacttgtaaacgcgtttgcaaaaactttgctacaaatttttacgaaatacgatgaacccactgaagtgtttgctggtaaaatcttagatcgaattttagagacagatctagatgaccctgctactttatcttccttaatccatttatttggtatattcctgaacgagaaatatatttatcaaaaggcttcgcatttaatgcaaaggttcattgaatatcttgagaagtctctgaagccagaacatgttaatacgccttggttttcgaaagctctttacgtttacgaaattatactggcgaaatctgagcttccacacctcgaagagctttccaaggatgttcttctgagatatccattgctttccatggcgaaagtctttcgcataccagaccctatgaagcagaaattatttgacatactgatcagagtttctgatatttccaatttttattctgcactggcaacatcacgcatacttattttctactctagggatgagttgtatgctaacaacatagctagatctggaatattatctagattgttgaaagtaattggaagtttccaaaaactagacaaaataaactttttagagtcatctttccttttattaaccaggagatgttttgaaacgactgaaaatgttgatgctttaatacgcgcagaaattaatagaagctttacagcaagaccgttaggtggtggggatgatgctgtacgtgagttaaccactattctagaagaaaaggcgcatgtggtcatgcgtagtccctctcaatttattgacgttctttgcgaaacagctcggttccaggaatttgatgatcaaggtgcgttggttgattactcattgaaaagatttcttggtgaaaaagataagaatacgcaagcctcaagtgcagaaaaatcagatatctacgagagaacggggatcatgcatttattactgtcacaacttatggctgcttctgagaaagactggttgtctgaaccggccaactcctcggatttgcctgagaacaaaaaagcccaattggacccatcaagaaatcctgtatgtgcttacaacctgcagcatgca

SEQ ID NO: 173641 - DNA, 96 bp, Saccharomyces pastorianus
gttggaataaaaatcaactatcatctactaactagtatttatgttactagtatattatcatatacggtgttagaagatgacgcaaatgatgagaaa

SEQ ID NO: 173642 - DNA, 294 bp, Saccharomyces pastorianus
ttgattgttagagatgcgttaaagaagaatgaattgttatctgaagcgcaatcttcggacattttagtatggaacttgactcctagacaactatgtgatattgaattgattctaaatggtgggttttctcctctgactgggtttttgaacgaaaacgattactcctctgttgttacagattcgagattagcagacggcacattgtggaccatccctattacattagatgttgatgaagcatttgctaaccaaattagacctgcaggcatgcaagcttgcactgccgtcgtttac

SEQ ID NO: 173643 - DNA, 2262 bp, Saccharomyces pastorianus
gcacacagacgttcccaaagtgagttgacaaatttgatgattgaacaattcactttgcagaagcagttggagcaagttcaagcacagcagcaacagttgatggctcagcaacagcaattggcacaacagacaggacaatacctgtcaggaaattctggctctaacaatcatttcacgcctcaaccgcctcaccctcattacaactcaaacggtaattcacctggtatgagtgcaggtggcagcagaagtagaactcactccaggaacaactccggatattatcataattcatatgataacaataacaatagcaataatcctgggtctaactcacacagaaagacgagttcacaatccagcatatatggccattccagaagacattctttaggtctaaatgaagcgaaaaaggctgctgcggaagaacaagctaaaagaatatctgggggtgaagcaggcgtaactgtgaagatagattctgttcaagctgatagtggctcaaattctactacagaacaatctgattttaaatttccaccaccaccaaatgctcatcagggccatcgtcgcgcaacttcaaacctatcacctccctctttcaaatttcctccaaactctcacggggataatgacgatgaattcatagcaacctcttcaacgcaccgccgttcaaagacaagaaacaatgaatattctccaggcattaattccaactggagaaaccaatcacagcaacctcaacagcagctttctccattccgccacagaggatctaattcaagggattacaattccttcaataccttagaacctcctgcgatatttcagcagggacacaaacatcgtgcctctaattcatcagttcatagtttcagttcacaaggtaataataacggaggtggacgtaagtccctatttgcaccctaccttccccaagccaacattccagagctaatccaagaagggagactagtagctggtatattaagagttaataaaaagaatagatcggatgcctgggtctctacagatggcgctcttgatgcggatatttacatttgcggctccaaagatcgtaatagagcacttgaaggtgatttagtcgcggtagaactattagttgtggacgatgtttgggagtccaagaaagaaaaggaagaaaagaagaggagaaaggatgcctctatgcaacacgatctaattcctttgaacagtagtgacgattaccacaacgatgcatctgttactgctgcaacaagcaacaattttctatcttctccctcctcgtctgattcgctaagcaaggatgatttatccgtcagaagaaagaggtcatctactatcaataatgatagtgattccttatcatctcctaccaaatcaggagtaaggagaagaagttcattgaaacaacgtccaactcaaaagaaaaatgacgatgttgaagttgaaggtcagtcattgttattagttgaagaagaagaaatcaacgataaatataagccactttacgcaggccatgtcgttgctgttttggaccgtatccctggtcagttatttagcggtacattaggtttgttgagaccatcccaacaagctaatagcgacaataacaaaccaccacaaagcccaaaaattgcttggttcaagcctactgataagaaggtgccattaattgcaattcctacagaattagctccaaaggactttgttgaaaacgctgataaatactccgaaaagttattcgttgcctctattaaacgttggccaatcacatctttgcatccatttggtattttagtttccgaacttggagatattcacgatcctgatactgaaattgattccattttaagggataacaattttctttcgaatgaatatttggatcaaaaaaatccgcaaaaagaaaaaccaagttttcagccgctaccattaacggctgaaagtctagaatataggaggaattttacggacactaatgagtacaatatctttgcaatttccgagcttggatgggtgtctgaatttgccttacatgtcaggaataacggaaatggtaccctagagctgggttgtcatgttgttgatgtgaccagccatattgaagaaagctcctctgttgataggcgtgcgagaaagaggtcctctgcggtatcatgccacaaaaacttgtcaatttattaccacaatcgttcaacgacgaactgtcgttggcccctggcaaggaatcagccacgttgtcggttgtttacactctag

SEQ ID NO: 173644 - DNA, 192 bp, Saccharomyces pastorianus
atgcaaagggtaagttcgttggcaacaggcaaaagtactatgccgaaactcagcgacgaagaagaaggtattcttgaagagtctattaggaatgccgaaacatttgataaaatttgcgttttactgagcaagcctaaattagaagtcgaaagctacctaaacgaattaggagaatttaaggtaattaatagc

SEQ ID NO: 173645 - DNA, 126 bp, Saccharomyces pastorianus
atgtatgcgtactcgtcgtcgctgatggtcttgtatcggacccaagggaacgactggtactgcagctgtggctcttcgaccttcaggtattcgactttcagcccgctgcatgtgcaatacgggatc

SEQ ID NO: 173646 - DNA, 87 bp, Saccharomyces pastorianus
caaatcagctatcatctattaactagtatttacgttactagtatattatcatatacggtgttagaagatgacgcaaatgatgagaaa

SEQ ID NO: 173647 - DNA, 1002 bp, Saccharomyces pastorianus
gcattgccatctttattggcgtcctccttggcactagcgttggtactttcagtggcagtagcattagtgctggagttggtgctagcagtggtagtagcactagtgttggagttggtactttcggtggtagtagcactagtgttggagttggtactttcagtggtagtagcatttgtgctggagttggtactttcagtggtagtcgcactagtcctgacgttgatgctggcagtggtagtagcattagtgctggagttgatgctggcagtggtagtcccactagtcctgacgttgatgctggcagtggtagtagcattagtgctggagttggtactttcagtggtagtcgcactagtcctgacgttgatgctggcagtggtagtagcattagtgctggagttggtactttcagtggtagtagcattagtgttggagttggtactttcagtggtagtagcattagtgttggagttggtactttcagtggtagtcgcactagtcctgacgttgatgctggcagtggtagtcgcactagtcctgacgttgatgctggcagtggtagtcccactagtcctgacgttgatgctggcagtggtagtagcattagtgctggagttgatgctggcagtggtagtagcattagtcctgacgttgatgctggcagtggtagtcccactagtcctgacgttgatgctggcagtggtagtagcattagtgctggagttggtactttcagtggtagtcgcactagtcctgacgttgatgctggcagtggtagtagcattagtgctggagttggtactttcagtggtagtagcattagtgttggagttggtactttcagtggtagtagcattagtgttggagttggtactttcagtggtagtcgcactagtcctgacgttgatgctggcagtggtagtcgcactagtcctgacgttgatgctggcagtggtagtcccactagtcctgacgttgatgctggcagtggtagtagcatta

SEQ ID NO: 173648 - DNA, 1767 bp, Saccharomyces pastorianus
atgactatttcatccgcacatccagaaacagaacccaaatggtggaaagaagccaccgtctaccaaatctaccccgcaagtttcaaggactcgaacaacgatggctggggtgatatgaaaggtatcgcctccaagttggagtacatcaaagatctcggtgccgatgctatctggatttcgccattctacgactcgccacaggacgatatgggttacgatattgccaactacgagaaggtctggccaacgtacgggaccaacgaggactgcttcgccttgattgataagacccataagttaggtatgaagttcatcaccgatttggtcatcaaccattgttccagtgaacacgagtggttcaaggagagcaggtcttctaagactaatccaaagcgtgactggttcttctggagagcacctaagggctacgatgccgatggcgcaccaatcccaccaaacaactggagatcgtacttcgggggttccgcatggactttcgacgaaacaacgaacgagttttacttgcgtttgttttgctccacccagcctgatctcaactgggagaacgaggactgcagaaaggcaatctacgaaagcgctgttggatactggttagaccacggtgttgacggtttcagaatcgatgtggggagtttgtactccaaagttgttggtctaccagatgctcctgtgattgacaagaacacaaaatggcaggccagtgatgctttcacaatgaatggaccacgtattcatgaattccaccaagaaatgaacaagttcatgagagacagggtcaaagatggaagagaaatcatgacggttggtgaaatgcaacatgcttccgacgagaccaagaagttgtacacgagtgcctcaagacacgagcttagtgagctgttcaacttttctcacactgatgttggaacttctcccaagttccgccaaaacttggtcccatttgaattgaaggattggaaagttgctcttgccgagctgttcagttatgttaatggaactgattgttggtcgactatttacctagaaaatcatgaccaacctcgttcgattacgagatttggtgacgactcgcccaagaatcgtgtcgtttctggtaagttgctgtctgtattgttagtgtcactgaccggtactttgtatgtgtaccagggacaggagctgggccaaatcaatttcaaaaactggcctattgaaaagtacgaggacgttgaaatcagaaacaactacaaggcgatcaaggaagagcatggggaaaactcgagcgagatgaaaaagtttttagaagccattgctctcatctccagagaccatgccagaacacctatgcaatggtcgcgcgaagagccaaatgctggcttctctgggcccaccggcaagccatggttctacttgaacgaatctttcagagagggaatcaatgtcgaagacgagcaaaaggatccaaactctgtgctggctttctggaaggaagctttgagatttagaaaggcacacaaggatattactgtttatggctatgattttgagttcatcgacctggacaataaaaagctgtttagctttaccaagaagtacgagaacaagactttgtttgcagccttgaactttagctctgataacgtggactttacgattccagataacagtacctcgttcaagttggagtttggaaacttcccaaagaaggaggtagatgcctcttccagaactttgaagccatgggagggtagaatttacgtatctgaa

SEQ ID NO: 173649 - DNA, 132 bp, Saccharomyces pastorianus
gaaaacgatactctgaagcaaagaattcaacagctagtagaaatcaaagaaaatgaacagaaggatcatacaaccaaactggaggctttccaaaagaacaatgagcagctacaaaagctaacgtcgaagtag

SEQ ID NO: 173650 - DNA, 120 bp, Saccharomyces pastorianus
tcaccagcgccaccacggggacccgccccgaaattgagtgcacatgctcgcaagataatatgcaaaacatcacccaatcggtcgggatcctctagagtcgacctgcagcatgcaagctgc

SEQ ID NO: 173651 - DNA, 90 bp, Saccharomyces pastorianus
gagtctgcaagtgaagaaagcaaagttcttgctgcagctttaaatgatgctagacgagacttggatgaaaacgtctggagaagtcctatc

SEQ ID NO: 173652 - DNA, 897 bp, Saccharomyces pastorianus
cgacggaaaactcgcaaaggagatgggccgtggggcagttggtcaagtagtgacgatgaaacttcacaagccagcgaaactcagaaagaagatcaggatatcttcgtgcacgcgctggctgaggacaacctagattcggaacagatagaggtagaggaagtctcccatttttatggtaaatcagaaaaggactatcaaggcagaggatatttatatccaccaaatgacgtcgatgttgatcttcgtgaggaaaggatatcctttcggtgttacttaccaaaaaaagttatacgtaattatccggggcatccagaaggaactactgccttgaaattcttacctaaaactggacacttaattctctctggtggtaatgatcatactataaaaatttgggatttctaccatgactatgaatgcctacgagattttcgaggtcatagcaagcctattaaagcattacgattcaccgaagactgtcaatcttttttgagctcttcctttgatagaagcgttaaaatttgggatactgaaactggtaaagtgaaaaccaggttgcaccttaattcaacgcctgcagatgttgaatctcggcccactaacccacatgagttcattgtaggtttatcgaattcgaaaatattacattatgatgatcgtgtttcagaaaatcaaggtcttgtgcagacatatgatcatcacctaagtagcattctggctctcaagtattttcccgatggttcgaagtttatttcttcttcagaggataagacggtaagaatttgggaaaatcagatcaatgtaccaataaaacaaataagtgacacggctcaacattctatgccatttttaaatgtacatccgtctcagaactatttctgtgcacaaagcatggat

SEQ ID NO: 173653 - DNA, 258 bp, Saccharomyces pastorianus
aacaccatcaagctggtaggagacgagaaaagttattcattgggtgagatcaatggtatggccaagcgtatacttcagaaactttctgtgaagaagtacaaaaatattggtatatctgcgtcagtcgccacggtggaaggattttctcttactttggcctctatgatggcgtctataaaaactggttctgtacctcattttttgccagcggttcctagacaacgagtggcggagatctttcaagatgctaaacggtag

SEQ ID NO: 173654 - DNA, 225 bp, Saccharomyces pastorianus
atgaagagtcaattagattttctagagggtgaaaccaaaaagaacaacggctatttggtcgatgacaaattgagcggtactgatattctaatttcttcccccttgcaaatggcatttgagagaaagtttgccaaagctgaggaatatttcgtcattgccaagtggctggaaaccataacatcagaggacttgtatgccgtttcgaaggaaaaagcacgcgcttta

SEQ ID NO: 173655 - DNA, 282 bp, Saccharomyces pastorianus
atgctatttggtattaaactggctaacgacgtatatcctccctggaaggattcatatatcgactatgaaaggttgaagaaattactaaaggaaagcgtcatacatgatggccgtagttccgtggatagttggtccgaaaggaatgaatctgattttgtggaggccttggataaagaactagaaaaggtttacacatttcaaatttccaaatataatgctgtcttgcgaaaattagatggtttagaggaaaacactaaatcagctgaaaaaatccaaaaaata

SEQ ID NO: 173656 - DNA, 1437 bp, Saccharomyces pastorianus
aacacctctccaaaaagagttgcaacgcggcccaatcactttcctttttcacaggaatctaagcaattacctcaaatatctcaatctcaaactttatcaacaaatcctttattaacgccacaggttcatggagacctatcggaacagaaacaacaacaaattaaaaccgtcacagacggaggctccccatttgtttttgatcaatcagcacagaattctacggtgcaagcttccaaggctcatatgatatccacgaccagcaatggtgcatatgatgagaagttgagttcagagcaagaagaaatgaggaaaaaagaagaacaacgaatagaagaagagaaaactcaattgaaaaagaagcaagaaaatgcggacaaacaagtaatcactgaacaaattgcaaatgacttaataaaagaagtggtaaacagtagcgtggttagtattgttaagcgtgaattttcagaggctaattataggaaggacttcattgacacaatgacccgtgaactttatgacgcatttcttcatgaaaggttgtatctgatatatatggattctcgtgctgaattgaaaaggaattccactctaaaaaaaaagttctttgagaaatggcaagcctcttattctcaagcaaagaagaaccgtatattagaagaaaaaaaaagggaagaaattaaactcgtaagccaccaattaggagtaccaggttttaaaaaatctacatgtttgtttagaaccccgtataagggtaacgtaaattcatcatttatgctatcatcttcagataagaatctaatattttcacctgtaaatgacgagtttaataagtttgcgactcatttaaccaagatttcaaaactttggcagccgttagagatgcaatcaatctattatgataaccttacgaaaaagttcccctccaattctcttactccggcaaatttattcatttatgcgaaagattggacatcactctcaaaccgttggatcttaagtaagttcaatctgcaaacagcacaggattcaaaaaagttcagcaataatattatctctagcagagtaatttgtattgatgatgaatatgaaccatctgattttagtgatttgcaattattgatatttaatacaggtgttacgaatccagatatattcgatttggagatgaaactgaaagatgacggtgaagaactgataaagctaatcactggtatttctctaaatacaaatatatgcttttcccttttgattatttattgggaatccgcagaaaatactttatcggaaagtaccattaaacacttactaaaattaaaccgaatatctaaaaactatagtagtgttattgaacgcattgacttaatgaatctcaccgaagaatcacctcataagtgtttagaggacaaattatctgaaatatcacattcttatgtgggg

SEQ ID NO: 173657 - DNA, 531 bp, Saccharomyces pastorianus
aactcctggtcaaacaacatcatcaaaccatacttaccctttaaaatatccaaatggttgtttagcggttgtattttagcatcgattgtgctattgatatgggaggctatagcgggaatgaggatttacaaaacgggaaatatctctttgacttatgtcaacaatttttccagaaacctaaattcagtgctcaattattccaagttttgtgtttataatatgatcgaacgaaagggttttcgacagaaaatgacattttttactttttttcaactgaaagattgtattagattaatcttcacggataccccaaggcaagttattaatggtcttacgctgtggtcagttctcgtaacagtaaataaaaacgaggatctaggcgatctggaatcatttaccggtttgatcaacaaaataaagaacattggccagaccaatcatgaagaagcagtgatattgtcgctgatgctattttcctttataatctgggcattatttgtcttcagtttctgcttgctgtcattgctcgat

SEQ ID NO: 173658 - DNA, 123 bp, Saccharomyces pastorianus
tcttcatcaaacaatatcttaatcgctattgtccaaggttgcgcaatctacggaaacttccaaagcagtcagactggcagctctgaatgctcttgcagactctttaattttcatcaaaaataa

SEQ ID NO: 173659 - DNA, 528 bp, Saccharomyces pastorianus
gtaaagcccgtcctttttacggatctaattcaccacttgaagatcggcccatccatggccaagaaattaatgtttgactattacaaacagaccaccaatgccaaatacaactgcgtagtgatatgctgctacaaagatcaaactattaaaattattcatgatctttccaacattccacagcaagattcaataattgattgtttcatctatgccttcaatcccatggacagcttcataccatattacgacattatcgatcaaaaggattgtttaaccattaaaaattcatacgaacttaaagtttctgaatcatcgaaaattatagagaggactaagacgttagaagagaaatctaaacctttggtaaggcctacagcaagatcaaagaccacgccagaagaaacaaccggaaggaaatccaaatctaaagacatgggtctcaggtctactgcactgctggctaagatgaaaaaggatagaatgacaaggaaacctctagacagggatcctctagagtcgacctgcagc

SEQ ID NO: 173660 - DNA, 180 bp, Saccharomyces pastorianus
atgaattatgaaatactttttgggatttcgttgttgtcaaaggctataaaatttagtatacaaagtataccagaaagtttcctcgaggatatagaaattcacaaaaggaaatcgatatttctatgtaataatataattaaatttccttccatctcatatcctgtcattaattattccatt

SEQ ID NO: 173661 - DNA, 297 bp, Saccharomyces pastorianus
aacgtcgttacagacttctacgaatacggttggggttcttctttccatttcagtagattctacaagggcgagagttttgctgcctcgatagcaagacatgagcattatttggcctacaaagctggtatcaaaaaggacgatttggttcttgatgtcggttgcggtgtcggtggtccagcaagagaaatcgcaagattcactggctgtaacgtcatcggtctaaataacaacgattatcaaattgccaaagccaaatactacgctgaaaaatacaatttgcagcgatcaaatggattt

SEQ ID NO: 173662 - DNA, 660 bp, Saccharomyces pastorianus
aatctacggctaagttatttgagagaccacacatacccgcatcttcaagtttctgtgcaatcaagagacagagtacataacgatgggattgaagttttggtggtcaattataaattctgcagaaacacgatgaatccttttgaaattcagttcaaaatgttctataaatttgaagattccacactgctgaagtgggaaatcttgcgaatttccacaaacgttagactgaaggccaagcaattactggcaacacgtaacttccagaagtgtctattaagcctttatgagtttgataagatcaagtccaaaaaaactggaattttccaaaatttgattaatttattgaaaaggaaaaccaggtgttatctaatgaataatagtgactcattaattgtggaaagagttattagagaaggaagactcacgacgataaaattgcagataaatttcatcattacaatgcccggtgagagaggcaaacctcgtaactgttttctgcccatgagtaaaatttcaatagcgctatggaaggggggagaaagatttaaccagatagatttggacgagatatgctacggacttatcaaggaatatggtgtgaaaaccgggttaaaggagatctgcaacgtttgcctattcccggacatgtacgccaggtga

SEQ ID NO: 173663 - DNA, 267 bp, Saccharomyces pastorianus
atggtgaatactaggggctacactactcttccgaatgttgaagaaccagcaaataactcacaagatgagctaaactcgcaggactttgagcaagctataggaatgccatcagaacccccggtatatgtggaagagatggggatggaagaaccgcaggctccggaagcctttagtgggaaagtccagcgatttcgtatgtgttttgaaaataacgtggtgattccagtaaagaaaaatgtagtggatccactagcacaaatgatttcc

SEQ ID NO: 173664 - DNA, 1350 bp, Saccharomyces pastorianus
atgcaaatttcggaaatggggaaaaaaataagtgatctaaaggtggagaagacagcttatcgcgaaactttgactaatttgaatcaagaattggcaaggttaactaatgaagaacaatcgcatagaactgaaatttttaccctcaatgcctctttcaaaaagcaattgaatgatataattagccaagacaatgaaaagatagaaaagctaacaggtgactatgatgatgttagcaaatcgagggaacgattgcaaatggatctggatgaatctaataagaagcatgaacaagaggtcaatttgttgaaggctgatattgaaaggctcggtaaacaaattgtgacttcagagaaaagttacgctgagactaactcaagctcgatggaaaaaggtgagaaattcgaaaccattcctcttgctgaggacccaggtagggaaaaccagatatctgcatacacacagactctgcaagatagaatatttgatataatatcgacaaatattttcattttggagaacattgggttgctgttaaccttcgacaataataataacatccaaattagacgagtcaagggattgaaaaagggaaccgcccaaagtaatatactggatgaaagcacacaaatgctggacgcacatgataattctctaataaaaagtccggttttccagaaattgaaagatgagtatgaattaataaagtcagttgccaatggatctgaaaaggatacacagcaaagcatttttctggggaatatcactcaattatatgacaataagctttatgaagttgccgttatcaggagattcaaggatattgagaccttggccaaaaaattaactaaagaaaataagatcaagagaacgctattggagagattccaaagggaaaaggtgactttgaggaactttcaaattggcgatttagcattatttttgccaacacgagaaaacgttaattctgtcgggtctatgtcgtcttccacctcatcattgagctcatcattttcatctgttgatttatcaactccaccgcctttggatgctatgtctatacaatcgtctccctcggtgatacatagtaatgtaatcaatcaagccagtatatctggcagggacaagaataaactgatgaggccttgggctgcatttacagcttttgaagaaagcacaagatattttttaaaggacgaaaaaggattgacgaaggggaaagaatggtttgtaggcagaattgtcactttggaacatttcgtagcagatagcccctctaataatccatttagactaccaaagggctcagtttggtttcaggtcactgcggttgtggtttcataccagggagtt

SEQ ID NO: 173665 - DNA, 78 bp, Saccharomyces pastorianus
gaaccgctgatccccgcgttattagcacggtgccttaaccaactgggccaagagaccaaacttattatgaaaacttga

SEQ ID NO: 173666 - DNA, 120 bp, Saccharomyces pastorianus
atggctctgcttgatccaaaattttcgtacgactttttcagccaacctgatttcaacagaaatttcctagacaatgggcaaagcttaacttggtctttagcttattcaggtgctttttct

SEQ ID NO: 173667 - DNA, 588 bp, Saccharomyces pastorianus
atgtgtgaacaaattttagccgttaggccaacactagtcatcactgaaaaaggtgtttcagatctagcacagcattatttactaaagggtggatgtagtgttttaagaagagtgaagaaatcagacaataatagaattgctcgtgtaactggtgcaaccattgtcaatcgtgtagaggacttgaaggaaagtgatgtcggtacaaactgtggattattcaaagtagaaatgattggggacgaatatttctcatttttggataactgcaaggaaccaaaagcttgtaccataatgttacgtggtggttccaaagatatattaaacgaaatagatcgtaacctacaagatgctatggctgttgctcgtaatgtgatgttgagtccttccttgtccccaggtggtggtgccaccgagatggcagtttctgtcaaattagcagaaaaggcaaagcaattagaagggatccagcaatggccataccaagctgtagctgatgctatggagtgtattccacgtactttgatacaaaatgcaggtggtgatcctattagactcctatcccagctaagagccaaacacgcacaggga

SEQ ID NO: 173668 - DNA, 783 bp, Saccharomyces pastorianus
tccaagttaactaggctgttgaaattttcactgggtggcaattgcaaaacagtcatgattgtttgcatatcgcccagcagttcacattatgatgagacattgaatactttgaaatatgcaaatcgtgctaaagaaataaagaccaaaataatcagaaatcagcagtctttgagtagacacgttggatcttatttgaaaatgattacggaacaaaagcgacaaatcgaagagttacgcgaacgtgaagagaagatgatttctttgaagctaacgaaatacaaactaaacaaagaaaagatccagttagccattaacgagtgcgtcaatcgtgttcagcaaacgtatgcaggagtggaaacgtatcaagtagccaagaccttgaaatcattaatactttgtaaaaggcggtttttgcaaatggtcaagctagaagtggataatttgatactattatttgaacgggaggaaagtacagccgccgagatgcagccggtgattagtaattgccgaatgatcagtggtcagctttataacaaaatacacgagttagaaatgaaatttgatgaaaccgacactctgagttccgtcattcatcaggtacattccattgacttgaacaagttaagagagatggaggactgggatgaaacttacgacctggtgtacttggagtcgtgtttaaatcaaatatcagaattacaaagaaacgaaatcttggttaattcctccataatgacagaaaaattaatgtcagatccgggtttgaactcccgattaaatttc

SEQ ID NO: 173669 - DNA, 372 bp, Saccharomyces pastorianus
atgggtaaatatctgaacgacaaccaacgggaaattttgttgaattacggtggtgaaaagctacgttctttattgtcagatcgatttggagatattgaagtcacaatttacagtccttcggacccaaatgcatcaacagtaacggctgaaaacagtcagtttctctggagagcagctattactctgaatcaatttaaagagtttgtgaaaagctggagcatatacacttcttgggctagagataatccctcgaaaccggatattgccgatatattcattaacgagctcaaagaaatctgtcattgtgaagatttgaatgtacctttaaaaatagagtggtcaacgttttattacttatgtaggaaaagagaa

SEQ ID NO: 173670 - DNA, 372 bp, Saccharomyces pastorianus
gtaagttcctcctgttcctcctcctgttcctgctcttcttctggttcgtcttctgaatcatcttcctcttcattcttggcgggagctcccataccaaacccgtccattgctaattcctcatcgtcgctatcgttttctttttctacttgttctttctcggtttcttcttcttgtttactctcaatatgggccattttcaccagcccaccttttcttctaataatcttatccaagtcaacgtccttcttcacaaaagcttcggcatcgtccttattggactcgccctctgctagaaagttccagccttggaagttcgaagtggtatcatcggcgtccaaatcaaacttaaaccccgcgtccaagtcctcatga

SEQ ID NO: 173671 - DNA, 114 bp, Saccharomyces pastorianus
tgcaggtctctgaagactccttacaataggtgtgccagaaacaaagtcagtgaaagtacgcatcgtagagctgtcgttcggcctggcactcgctatttcgtaacaacgttccag

SEQ ID NO: 173672 - DNA, 129 bp, Saccharomyces pastorianus
cttttgggcttaatatttggtattaggaaacttgaatggtcctcctctttgcaggcagctggtgcatggagcttattaaacattgttctgtggttgttctttgatggcactttaacccgtttttttccc

SEQ ID NO: 173673 - DNA, 228 bp, Saccharomyces pastorianus
tcggtcaaaaagaatatccgaattttagatttggacccttgttcagaagcttattgtctaagcctaaattcagtctgctttaaacggcttccgcggaagaaatatttccatctcttgaaatccgtacaagatattagacgtgtgtttggagtcgtatactgttggcgtctgcaaatttgtgaattctccgcgaatgccttggtgcaattacgtaattgtagccgctga

SEQ ID NO: 173674 - DNA, 933 bp, Saccharomyces pastorianus
atgatagcttccaaaagctccttattagttactaaatcgcgcataccctctctatgctttcctttgataaagaggtcctatgtgtcaaagattccgacacactctaacacggctgctaatctgatggttgaaactccggccgccaatgccaacggcaatagtgtgatggcacctcctaactcaatcaattttctacagacacttcccaagaaggaactattccaactgggattcatcggtattgcgaccttgaacagcttcttcctgaacatgatcattaagttgttcccttacatccccatcccagtaataaaattcttcgtctcttctttatactgtggcggtgagaactttaaagaggtcatcgaatgcggcaaacgtctgcagaagagaggtatatcgaacatgatgctttcattaactattgaaaattccgaaggtacaaagagtttgtccagtactccagtagaccaaattgtcaaggaaacaatcagctctgtccacaacatcctactgcccaatattattggccagctggaatctaagccaatcaatgacattgctccaggttatatcgctctaaaaccctctgctttggtcgataaccctcacgaggttctgtacaatttcagtaatcccgcctacaaggctcaaagggatcagctgatcgagaactgctctaagattacaaaagagatttttgaactaaatcaatctttgttaaagaagtaccctgaaagaaaggccccatttttggtttccactattgacgctgagaagtatgatttgcaggagaatggtgtttacgaattacagagaatcttatttcaaaaattcaatcccacttcatctaaactgatatcatgtgtcggtacttggcagttgtacctaagggactctggtgaccatattatgcacgaattgaagctggcc

SEQ ID NO: 173675 - DNA, 1533 bp, Saccharomyces pastorianus
atgaatccaggttaccgggacgctcccgctagtgcgacgcttattttgcaacgatttcaatgtctcgtgggtgcatccagtcagattactgaatcaataattaccatcaattgcaatagaaagactttgaaaagtcatcgaaacttaaaattggatgcgcatttcctatccattttgaaaagaatattatccagagcacatcccgctaattttcccgctgacactgtccaaaacacaattgacatgtacttgagtgaaattcatcaattaggtgctgattctatatacccacttcgacttcaatcacttccagaatatgtttcctcggacagtacggtctctctttgggatgtcacttcattggaacaattagctcaaaactggccacaattgcatattcccaatgatgtagattacatgatgaagccatctttaaacagcaatgttttactgccgcgaaaagtcatgtctagggattctctcaaacacttgtactctagtatcattctcattaaaaatagccgcgatgagtcgtcatcaccatacgaatggtgcatttggcaattgaagcgatgctttgcacatcagatagagactccgcaagaagttattcccattattatttcggtgtcctcaatggataataaactgtcttctcgcattattcaaacgttttgtaatttgaagtatttaaaactcgatgagcttacgttgaaaaaggtttgtggcggaatcttgccattatggaagcctgaactaatcagtggtacaagggaatttttcgttaagtttatggccagtatttttatgtggagtacacgagatggtcacaacaataattgcacattttctgaaacttgtttttacgttttacaaatgattacaaactgggttttagatgataaattgatagcactcgggttgacactactgcatgacatgcaaagcctgctaactttggacaaaatctttaacaatgctacttcagacagattttctacgatggctttcatcagctcgttagatattttaactcaactgtcgaaacaaacgaagtcggattatgcgatccaatatttgattgtgggccctgacatcatgaataaagtgttcagttcggacgatcctttgctattatcagctgcgtgcaggtacttggttgctacgaaaaataaattgatgcaatacccgtcaacaaacaaattcgttcggatgcagaaccaatatatcatggatttgacaaattatctttacaggaataaagttctgtcatccaaaagtttgtttggagtctcaccagatttctttaagcagattttggagaatctttatatcccaactgcagacttcaagaacgctaaatttttcacgataactggtataccagcgctatcctacatatgtattattattctaagacgactggaaacggccgaaaataccaaaataaaattcaccagtgggatcataaatgaagagacgtttaacaattactttcgagttcatcatgatgagattggacagcatggttgg

SEQ ID NO: 173676 - DNA, 612 bp, Saccharomyces pastorianus
gaagcaagagggatagagtccgatgttgccatagataaagataagattctcaaatccaaattctttttaattgttgagaaattatcgagtgccattaatattgtcttttccggcgtactttttttgaccccatcgttgtgctatttggaagatgaatatccagaatttgtgaacgttagtagcactgcatttactaccttgactttaattgatatttttattcagatgacgtatgggtttttattagtcaagaatgacttacttgaggattcgttcaaaagaaaaccaaaaagatgtttgaaatcagtatgctctcgctgtgctgctaggaggcaagatcccaaatggttcaaattgaagtactcgtttatactactagcgactttctttttcggagcttattcgctatggaaaatcaataccttctttaaagctgatcaaacagttgatttctatcgactatttcatttattcggctttcaactaaacgcacttctcagtctgatggtttttgtcttttatggcaatcagctagaatcacatagtgggcctcttgaaacggacgatgacctccttgaaagccaggcaccgcttggcaataaaatggtttag

SEQ ID NO: 173677 - DNA, 225 bp, Saccharomyces pastorianus
atggatcatccacataagtggcaccgtaagctcgtcaattgcaacagcgactttatttttaagagccgcggtcattttgttagtatctcttctcaacttgggcagcacaatttcacgatatttaacaggtatcatttgaagaaaagaatcgttttccagatactcgtcaattcctcgcttcggttctctgaacaaaacttctcgattacgcaaaatgaggttggc

SEQ ID NO: 173678 - DNA, 168 bp, Saccharomyces pastorianus
atagaattgtgtagaattgcagattcccttttatggattcctaaatcctcgaggagaacttctagtacattctacatacctaatattatagccttaatcacaatggaatcccaacaattacatcaaaattcacccaattttcaaatatattatcatatacggtgttaa

SEQ ID NO: 173679 - DNA, 150 bp, Saccharomyces pastorianus
ttcaatttcagcaacaacaacaacagcaacaacaacaacaacagcaacagcaacagcaacaacaacaacaacaacaacagcaacagcaacaacaacaacagcagcaacagcaacagcaacagcaacaatcacctgttcagggaggcttct

SEQ ID NO: 173680 - DNA, 1533 bp, Saccharomyces pastorianus
gaagagacggtaaagcaaggtgttcttcacaatgatagaacaaagctaaagcaagggcttaaagaacgtcatatcaaaatgttgacacttgttggtgtatttggtacaggactgtttctgtcttctggtggtacattaaaaaaaactgggcctgttggcttgctgattgcatatctctttgttggtattgtcgtaggctgtaaccaaattgcaatagccgaggttgcctctttcatgccagccactggggcaaccattaggcatgctgagcaattcatagacgagtcagttggttttacatttggttggatctctacatactcatcactaatgcctggtgagttatcggcaacagcagttatcatgacttactggacggatgtaagccccgcaattttcataactgtatttggtgttctctttgtggcgacgaacatttatacaattcgattctacggcgaaattgaatatatattcggatggttaaaggttttattaatcgttatattgatcgtctcaggattggttatcgatcttggcggaactaaaggacaagaaaggttaggatttcattactggagggatcctggtccctttgcaaattatttggtgggaggacacatagggaagtttgttggattttgggctgccatttcctccgttgtatactcctactctggtattcaaaatattgccattctcgctggcgagaccaaaaacagcaggcatgcaatttttcacggcgccaaaaatgtctttctacgcattatagttctatatttggtcacagtattcatattaacgttgattgttccctacaatgacaagttaattgctacaggaacaggtactgccaggtcaagtccctttgtcattgcgatgaacagagccgggatcaaagtcttacctcatattgtcaatgccttgatcttaacatctgcatggtctgcaggtaatttggcaatcattgaaggttctaggaatttgttctgcttagcaacaaaaaatcaagcacctaagatatttttgaggacaagcaaaaggggtattccatatgttggtgtgatattcatttcgagctttctaccgttggcgtacatgtcgtgctccaaatcgtctgccactgtctttgggtggttccaagaattggtatcttcaaacactctgctacgttggattttgatttcggcaaaccatattcatatggacagggctttgaaagctcagggatacagtaggtctgacctgccatattccacacgcattggcccttttgccgcttggttctccggtataatgtcgtttattttcttgcttactgggggcttttacaatttcatacatggtcattttgatatcgaatcatttttcaccaggtacttcatcattccattagcaattggattatttactttctggaagctgttcaaaaagactagatatctacgtccgcatgaagtcgatcttgaatccatattcgaggatatcaaggaaaacccagaacatattgaagagtccaaaccaatttgggca

SEQ ID NO: 173681 - DNA, 987 bp, Saccharomyces pastorianus
atgcttgtgcgtaattgggaactttcgggggcactccgttccatgagatcactagaagaccgtttcaataaaaactaccagtatgactggacatttcttaatgatgtcccatttgatcaagagttcatcgaagccacgacagccatggctagtggtagaacgcaatacgctttaatccctgcggaggactggaacaggccatcttggatcaacgaaactctatttgaagaggctttacaattaatggaggaaaaaaatatcttgtacggtgggtcaaagtcatatagaaatatgtgccgatttaattctggatttttctttagacaaaagatattagatccgtacgatttttatttcagagttgagccagatgtagagtatttttgcgattttccctacgatccattcaaggtgatgaggcagaacaataagaaatatggctttgtgataactatgtatgaatacgaagatacaattccgagcctatgggaagctgtagaagaatatctcgaagaaacagagtcagcagatgttgacatggaaagcaacgctttcgggttcgtatcaaatttcgacttcatcggtaaatcttttggtgtcatcgatagtaacagcggctataatttatgtcatttttggacaaattttgaaattggcgatttgaactttttcagaagtgagaaatacattagatttttcgagtacctggattcaaagggcggtttctactatgaaaggtggggagatgcaccagttcattcgattgctgcctcacttcttttaaaaaaagacgaaatcatccattttgatgaattaggctataagcatatgccgtttggcacgtgtccatctgcatactacctgagacttcaacaaagatgtctttgtgatagcaatcacccagacaatattgatctcaatgtcatcagctgcctgagaagatggtggaaggacggcagcggtaaatacttcctcaaacacgattca

SEQ ID NO: 173682 - DNA, 108 bp, Saccharomyces pastorianus
atggaaaacaaactactttgttggtggttgtactggccatgcgtgtattcatctattatagctaccataatatctttttacaccataactagacacttattatattac

SEQ ID NO: 173683 - DNA, 450 bp, Saccharomyces pastorianus
atgaaatgggccatagaacaattcatgatcagtggagagactatcgttgaagggcctgcactggaaacctcgataattgtgaaggaagtcaaccgtattctagtagcagctacaggagactcaaacctcgcgaaatggcgtaagttcagtacgtttactgtagggtccaccaatcttttccaatttcaagaattaacagcaacggacatcgaagacttactactccgattatgcgaactgaaatggttttacaggactcaggaagggaaattcggtattgatcttcgctgtatagcagaactagaagagtatctaacatccatgtacaatttgaacacttgccaaaattgccacaagctggcaattcaaggtgtcaggtgcggcaacgaatcatgccgagaagagaatgaggaaactggagagaatagtctgtctcaaatttggcatgtg

SEQ ID NO: 173684 - DNA, 270 bp, Saccharomyces pastorianus
atggttgacgattcaaactatcttacaccacatgaaactgcattggcggtggtggccactgcaatgaaaaaagcaagactgcaactagatacattgttaataaattccatacttggtggcattctgttcagtagtggttcgttccttttggtagcggtgcattcagatgaccctgacatggtcgcacgaaaaccaggtattgtgaatcttataactggtgttacgttcgccataggcctcttctatgtggtaataatgggtgctgacctt

SEQ ID NO: 173685 - DNA, 2196 bp, Saccharomyces pastorianus
aggaatagccaacatgacattgaagatgtctcgacatctcttggtatagagactacttctcatatcaatcttctagctcgcgtactatcttctcgtactagtaaagagggtccttttgatgggaaatcgcttaaccttgggtttgatgctcaagaaatcttatcacaatacgtaagcaatgctaatgaccaaggcattcatttacgcaaaacaggtgttgtacttgacgatgtgggagtccaaggtattgataccagcttggtagaatcggcaacatttggtgatattttgcgcttgccagtcaccatatataaaggtatcaaatctcaaaggcacaagaagatgagaaacattctgcaaaacatcaatttattagtgaaaccgggagatatgctcttggtacttggtaggcctggtgctggctgttcttctctgttgaagacggctggaggtgtcattgaccaattttctggagtcagtggtacaatctcatatgacggcattacacagtcggagatgatcaaaaatttcaaatcagatgtgatttacaatggtgaattggatgtacatttcccttacctgaccgttaaacaaactttggatttcgctattgcttgtaaaacacctcaaaagagggttaataacatgtcgagagaagaatatatcactacaacgagagacttttatgccacggtcttcggtttaacacatacatacgatactaaagttggaaatgactttgtcaggggagtttctggcggtgaaaggaagagagtttccattgcagaagctgtggtagccaggggttctgtttattgttgggacaacgctactagaggcttggacgcttccacagcgctggaatttgcacaggctattcgtataatgacgaacctgctccaatccaccgctcttgtaacaatttatcaagccagtgaaaatatttaccaaactttcgataatgtgacactcctttatgcgggccgacagatttattatggtcctgttgaagaagcggaagcttactttgagagaattgggtacgaacgcccaccaagacaatcaactcctgaatttttaacagctttaaccgactctaatggacttcacatagttaaacatggtttcgaaaataaagttccaaaaagcgctgaagagtttgaaaaactttggaaagattctcctgagctagccaaattagagagggatatcaaagttcacaatgaaacagtaaactctgacagttcgaagactactttaaagagcaccattcatcaagaacaatcaaaatatgcaaggaagagttcctactacaccatatcgtactggaaacagcttcaactatgtacccagagaagttttcaaagaatttacggtaatagatcttctactattatcaatattattgccgcggttgctattgcttttatcattggttctttaagttacaatacgccatcctcgatggatggtgcttttactagaggcagtgttttgtattttgctctgttatactattccttgatgggtcttgctaatatgacttttgattacaggccgatattacagaagcataaaaattactctttatatcacccgtctgcagaatccttaggaagtaccattgctgcatttccattccggatgattggactaactctgttcatcatcattttgtactttctttctggtctgcatagatctgcaggaagtttttttacggtttttttgtttttagggatgtgttcggaggcgataaatgggttgtttgaactagtagcagccgcgtgcgataatatttcgcaagcaaattcaatagccggtgttctgacgctgtcaatttcaatgtactccacattcatgatccagttgccctcgatgcacccttggtttgtgtggattgcgtatatccttccaatacgatatgcattcgaatccatgcttaatgcagagttccatggaagacgcatgagctgcggcggcagtggtgtgatcccatatgggccaggctacgaaaacgttcaagtaaatgagcgtgtgtgtgcctccgttggctctcgtccgggtcaatcctatgtttcgggtgacgattacttgaaagcacaatacgattacgaatataagcatacatggagaaactttggcatcttatggtattttattatcgggtttattgtcttgaaggcaatcgtaaca

SEQ ID NO: 173686 - DNA, 456 bp, Saccharomyces pastorianus
atgagcggatacacgggaaataattatagcagatactcatccactcctccgagacaaagggggggttatcaccatgcgagacgaagtagaggtggagcaggcggatcgtattacagaggcggtaatgcgtcttatggcgcgagatacaacagtgactatgagcagccgccccaagagggagacttgagacaaaccggagcatactatcgaaacggatacacagatacaaggccgtactattcagctaatagcaggcattaccaagcacaaccatcccccaggtacaacaatggtacaaattcgtaccagctaccgaaacgtggcaatagtcaagatacgaacggcaggaccaagagcgcctcgcaagaagataatgacgaaaaaagagtcaagtccagataccagaacatgccggcagatcatccacgccaacaaccgatgagcgtaggcagcacc

SEQ ID NO: 173687 - DNA, 1035 bp, Saccharomyces pastorianus
atgtctataccccattccttattttcggcagtcttggtcttcgtggcgctagctactacaaccttagccagtacagaagcttgcttaccaacaaacaaaagggaagatggtatgaatattaatttttatgagtacacaataggcgacaaaaccacatatttggagcctgaatatatgggctataaatactccgatacaaagaagttaggttccgttagcggacagaccgatctctccatatactatagtccgccttgtgagagcactcctacctgtgtgacttatgcagttttgaagcgtgatgaggatggatatgatccttgcggacctctttatgaaactaaaaaacgtgatactgaatactgtgacccaaatactgcctattggagttctgatctttttggtttctatactactccaactaatgtaactgtggaaatgacagggtactttttaccaccacagacgggttcttacacattcaagtttgctacagttgacgactctgcaattctatcagtaggtggtgctaccgcgttcgactgttgtgctcaacagcaaccgccgatcacatcaacgaactttaccattaacggtatgaaaccatggggtggaagtttgccacctaatgtcgaaggaactgtctacatgtatgctggattctactacccaatgaaggttgtttactcaaatgctgtttcttggggtacacttccaattagtgtgacactgcctgatggtacagctatcagtgatgacttcgagggatacgtgtattcctttgatgatgatttgactcaatctgattgtaccattccagatccttcaaactatactataacaggcctaatcagcaccaccactgaaccatggaccggaactttcacttctacatctactgaggttaccaccatcaccggtaccaacggtcaaccaactgacgaaactgttattgttgccaaagctccaaccactgtcacctcatccagtttgtcatcatcttcttcagaacaaatcaccagctctatcacgtct

SEQ ID NO: 173688 - DNA, 102 bp, Saccharomyces pastorianus
gcgcgtatgactcttaatcataaggttaggggttcgagccccctacagggctattctttttttgttctatatgaacagagctatttctcttccaagagtcca

SEQ ID NO: 173689 - DNA, 93 bp, Saccharomyces pastorianus
aagttggtgccaacagctggtgagagattagcctggggccaaggtgacagttacataatggcatcgctaatttcttgtttgcttgccacctga

SEQ ID NO: 173690 - DNA, 78 bp, Saccharomyces pastorianus
tctagcgggatcgaaccgctgatccccgcgttattagcacggtgccttaaccaactgggccaagagaccaaattttaa

SEQ ID NO: 173691 - DNA, 546 bp, Saccharomyces pastorianus
  modified_base (498)..(498): a, c, g, t, unknown, or other
atggttaataatatcatgcacgagtacgtaccacccagtcagcggctattccatagcaggcatagaataacaagaaacgatttgaaagaagaggccctacattccgggaccacagattggacaacaattctggacacaacaatagataaagatactaatctcattagttatgctgtccccataatagacaactttgccattcctcgagcaaactctcaggggagtcctgtggccccttcgccgaatcacagatcaacgatgtactcttcttcatcttcttctgcgtcttctgtgttttctgatggtttgtttaatccaaacaacaacaggaactcatcaggatcatcttcattagtcattagaccacaaaaaaatttgagtgtagattctttgattcaggaaaataaaaggaaaatcaatagtgaaaaagaatcgttatcattaattgccaataataacgatgaaaccttgtgcactcatactgatccatccatacanaacctcattaatcgaaacaaagaggaacatcttaatttaaagttcaaa

SEQ ID NO: 173692 - DNA, 213 bp, Saccharomyces pastorianus
atgctctctacccctaacaaacaacaacagcaacagcaacagcagaagcaaaaggaacaacacagctcgttcaactacgcccacgcgtgcaagtgcatcgcagggttcttcgtggtcgcgggcgtcgtgttgatgttcttcgagaccggaattgaccctcagcagaagctgcaggtcaagcagatgcaccagctgagcggcgtgtctgccgca

SEQ ID NO: 173693 - DNA, 288 bp, Saccharomyces pastorianus
ttcgagtacttgctagaagcaaacaggccagagttgtttcataaaatgatatatgatttgtttatccactttattcagaaaaaagactttgttcaagcagctttgagtctagaactcttggcaggtacgtacgcttgggattctaatgatactcttgaagcaatatctttcccgccattgccagagcaatcttcatttgagaggaaggaatatcttcttaaggaatccgcaagaaacttttcgagaggccaaaaaccagaaaaagctttagcggtatacaaggactag

SEQ ID NO: 173694 - DNA, 639 bp, Saccharomyces pastorianus
agccaaatagtgaatgcggtcctgaatcagaacgagactgttacgttcgcagcaagaggccatgtccttgaagatggtatagataataactcattgattccggcagacatgctggaggatattttccaagaagcatcgtttattcccattactaccaatgctacgtttaactccagcgaattgattcaagagtttcagatcaacgatcttcagctacggtgggcagcgcgcaaaaagctcagtcttgtggggacatttttaggattctttgatctatccttctacgagacgcaccagcaagaccgagttcgcatcgataccattcggggacagatcgatctgtaccataacgacatcaatttcttaaacttacccatgaagcaatggatcaactcctcatcgcacattctgcacgatgaggacacaggaaatacgcagatgaagcttcaatttgatctagaatatgacgacatggaagtggtcaatagcttggaactaacacgaaccctgaacgaaatactattccaggttttacatgttattcactttaatgcgacgatagatgcgtcacttacgacggcattgggcccgtgggttctcactgggttagccggagagggtgacactctggtcacgtga

SEQ ID NO: 173695 - DNA, 162 bp, Saccharomyces pastorianus
atggaatctatatttctacatgctaatgttacgattattcctcatttcgttttatatgtttcattatcctattacattatcaatccttgcatttcagcttcctctaacttcgaagctttccataacttctgtcatcatctaataccgtatatgataatatat

SEQ ID NO: 173696 - DNA, 252 bp, Saccharomyces pastorianus
gccccaccgggctatggtaagacggagttatttcatctccccttgatagcactggcgtctaagggcgacgtgaaatatgtgtcgtttctgtttgtaccgtacacagtgttgcttgctaattgcatgatcaggttgggccgacgcggttgcttgaatgtggcccctgtaagaaactttattgaagaaggttacgatggcgttactgatttatacgtggggatccctatagtgagtcgtattatgcggaccgcg

SEQ ID NO: 173697 - DNA, 528 bp, Saccharomyces pastorianus
tcaactataagagagtataaaatagtagttgtcggtggaggtggcgttggtaaatctgctttaacgattcaattcattcaatcatactttgtggacgaatatgaccctactatcgaagactcttacagaaaacaagttgtcatcgatgacaaagtatccattttggacattctagatactgccggacaagaagagtattctgcgatgagagagcagtacatgaggactggggaaggtttcctactggcctattccgtcacctctagaaattcctttgatgagttactgtcttattatcagcaaattcaaagagtaaaagattctgactacattcctgtagtcgtggtaggtaacaaattggaccttgaaaatgaaagacaagtctcttatgaagacgggttacgcctggccaaacagttgaatgcaccctttctagaaacgtctgccaaacaagccatcaatgtagatggggctttttatagccttattcgtttggtaagggacgacgtgggaaatacaacagcatga

SEQ ID NO: 173698 - DNA, 81 bp, Saccharomyces pastorianus
ttttttgatataatgctctctactcactttattgagtggcgatttgctatttttttttcttcgcaccatgcgtcacgttaa

SEQ ID NO: 173699 - DNA, 312 bp, Saccharomyces pastorianus
tggcaaacagagtctggttctcatttaattgctcctttggcaggtgctgtcccaacaaaacctggttctgctaccgtgccattctttggtattaacgcttgtatcattgaccctgttacaggtgttgaattagaaggtaatgatgtcgaaggtgtccttgccgttaaatcaccatggccatcaatggctagatctgtttggaaccaccacgaccgttacatggatacttacttgaaaccttatcctggtcactatttcacaggtgatggtgctggtagagatcatgatggttactactggactcaggggtag

SEQ ID NO: 173700 - DNA, 198 bp, Saccharomyces pastorianus
tatcgatacacacctagtaagggagctgcaatagcactaactgttcttttcatagttacaacactaatatactctttccaggtagtatgggatgcaagaaaggcttctaagccagaagtcgacaatccctttgatactcctgttgataagtgcgagtctatcacagccattagtttgggggagaatataagaaactga

SEQ ID NO: 173701 - DNA, 558 bp, Saccharomyces pastorianus
aatgacggttcgcataaatccggtagaagtactaggcggtctggatctaggagtgcgcacgatgacggtctggattcattctcaaaaggcgattcaggcgctggagccagtgctggtagcagtaatagtcgatttagacatcgaaaaatatctgtgaagcaacatcttaagatatatctgcctaacgatctgaaacacctggataaagatgaattgcaacagagagaggtggttgagatcgaaactggtgtagaaaaaaatgaagaaaaggaggtccatttgcatcgaatattacaaatgggttctggtcatacaaagcacaaagactatattccgaccccggatgcttctatgacttggaatgaatatgataagttttatacgggcagtttccaggagaccaccagctacatcaaattttctgccactgtggaggattgctgtggtaccaactacaatatggatgaaagagatgagacctttttaaatgaacaagtcaacaaaggttcatcagacattttaacgaagacgaatttgaaatactttgttccagtttga

SEQ ID NO: 173702 - DNA, 453 bp, Saccharomyces pastorianus
  modified_base (12)..(12): a, c, g, t, unknown, or other
  modified_base (20)..(21): a, c, g, t, unknown, or other
accttttttttngggttagnntggagctcctcaatcttgtcacttaatgactctgtaatttgcttgagagacttgatttgctcatttttagcttcattagaggattgcaatttcctacactcaaccaacaaattctcgcttagttccaaagtaaagttcatatcctttgatgaattcgccgtgagtactccattgtgggaactactgcctgcaaattccggaagcacgtcttttgtctctcttttactcaaaatactcgaaatcgaaaaccgctttgttttatctccttcaccaccactgccgcattcatcagcctttaagttagccatccttgttacgccgttcgttgagacgctttcctggcttaatgaattgtcaatgctatttgcatactgccctgctgagctgtctttatcgttatttttatgcctgttgttgtgggacatattcgac

SEQ ID NO: 173703 - DNA, 84 bp, Saccharomyces pastorianus
tgtttaactgttcttggcctttgtttcattgcctacaagggcatgcacgaaaagcctcatacggtttcattaagacacaagtaa

SEQ ID NO: 173704 - DNA, 543 bp, Saccharomyces pastorianus
tcccgtccacaagttactgttcactccttgaccggtgaagctgctgccaatgccttgccattgccagctgtcttctccgctcctatccgtccagacattgtccacactgttttcacctctgtgaacaagaacaagagacaagcttacgctgtctctgaaaaggccggtcaccaaacctctgctgaatcctggggtactggtcgtgctgtcgcccgtattccaagagttggtggtggtggtaccggtagatccggtcaaggtgctttcggtaacatgtgtcgtggtggtcgtatgttcgctccaactaaaacctggagaaagtggaacgttaaggttaaccacaacgaaaagcgttacgccactgcttctgctattgctgctactgctgttgcctctttggtcttggccagaggtcacagagtcgaaaagattccagaaattccattggttgtttcctccgatttggaatccgtccaaaagactaaggatgccattgctgctttgaaggctgttggtgctcactccgacttgttgaaggtctga

SEQ ID NO: 173705 - DNA, 165 bp, Saccharomyces pastorianus
acacctacaaaccaatctagtggaacgactaatgcatctgtggaggtactttcagaggatggacctatgccaataaacgttatgatgcaagaaggtgtgaaagcgctgactaaaattctttccaatcagcttcaggacagacaagcttttcaaaacgctccgact

SEQ ID NO: 173706 - DNA, 759 bp, Saccharomyces pastorianus
atgcagcttaaacgcattgccttgacagcagcttcattaactgcggtttctgctcatggttacacaccaggcgaaccatggtccactttaactccttctgctactgtctcatgcgcagctacagaatttacttctaccttcggtatcgctgttcaaacaattgcaactgcttccgccaatgttaagagaggtgttatatctcaaatcaacgacggtcaaattcaggccacagctggacctaccttggccagtgacagtaccgaaatcacaaccactttaactagaacttccgtcattacagtggtaaagggtactattgcaactaatgttgtcgactccgctaattcttccagcaaaagccctacttctactttagccccatcatccgcgattacttcgacagcgacctctacgtctgcctctacatgcaaggctaccactgctgtgtctttagagaatagttcttgtaacaacgacggtaccttagaagtaactttgaaaggaggagttttgactgataataaaggtagaattggttctatcgttgcaaacaggcaattccaattcgatggtccaactccacaagcaggtgccatctatgcggctggttggtctatcacatcagaaggcaatttggcccttggtgatgacgatgttttttaccaatgtttgtcaggaaatttttacaatttgtacgacgaaaagatcggtgaacaatgtagtcaaattcacttacaagctgtttctttagtgaactgc

SEQ ID NO: 173707 - DNA, 102 bp, Saccharomyces pastorianus
tctgtttctgaaatcgaaattgaaagtgttcaagatcaaccctctgttgccgtgggaagtttcttcaagggcttccgtgctcccagtgacactacgttcgag

SEQ ID NO: 173708 - DNA, 1011 bp, Saccharomyces pastorianus
aaaccaacttcttcggcagcggcctctcatatatctgccggaaatgaaaacaacaataaccatgacgtcgcttctttagaaactttatcgtcttctgaaatctctgaattcgatatcaacaacgttaagatgaaacatttacaggatttgattgacgaacctgatgatttttcacaaccaatccatcttagactagaaaggtatttacggttgctaaacattgcgttatgtttaagacctcatgccaatagactgtttgaattttatgaactgtctcctttgggaaacttgttaagtcgtgaaagtggattccagggaaaacaagggtacttggtcatcagatctaccgcaaaagctcaaggttggagagtatctcattttggcaaacacgcgtttaaagatatgatagacagacatactaccaaatggtttatggtaagaaattcttatgttacttatgtttcagatctttcttcaacaacaccactagatgtgttcctgatagactggaaattcaaagttaggttttccgggaataagaacaatattttggataataagaaggaaattaattggatcattcacgatccaaatttggaaattaatgatgaattggaggaacttgctatcgaaaaccacactaacgacatcataaatagaaatggtgattccaaaacgcagcaaaaaaaatcaaacatctcttcgaaattgctgttgctaactctagaaaatagtgaaagaaaactgaaaatcatctgcaaatcagaaaactcgctcaaacaatggatcagttcaatcataaaaatgtctacgtccacaatttggtcgaaaccaaacagatttggtagttttgcgcccgtcagaacaaattcattttgtaaatttttggtggatggtcgtgattatttttggtcattgagtgaagctcttttaatggcgaaagatgtcatttatatccatgactggtggtatcccctgaactctacttgcggcgtccagttaaggtatcag

SEQ ID NO: 173709 - DNA, 306 bp, Saccharomyces pastorianus
caaattattcaatttttgattgacttggtatttgtttactttgctacctatacattctatgctcacaaatacttggacggtattttaccaaacaagggtacttgttatggtactcaggctgctgctgcttatgggtatttgattctaacatcttatttgcttttgtttatttccttctacatccaatcttacaagaaaggtggtaaaaagacagtcaagaaggaatctgaagtttccggctccgttgcatccggttcttctactggtgtcaagacctctaacaccaaggtctcttccaggaaagct

SEQ ID NO: 173710 - DNA, 360 bp, Saccharomyces pastorianus
atggtcaaactaacttcaatcgctgctggtgttgccgccatcgctgctactgcttccgcaaccaccactctagctcaatctgacgaaagagtcaacttggttgaattgggtgtctacgtctctgatatcagagctcacttggcccaatactactctttccaagccgctcatccaactgaaacctacccagttgaaatcgctgaagccgttttcaactacggtgacttcaccaccatgttgaccggtattgccccagaccaagtgaccagaatgatcaccggtgtcccatggtactccagcagattaaagccagccatctctaatgctctatccaaggacggtatctacactatcgcaaac

SEQ ID NO: 173711 - DNA, 1371 bp, Saccharomyces pastorianus
atggtaagcgaacccgaattccagcaggcgtactatgaaatagtttcttctgtgaaggattctacattatttgaaaagttccctcagtatgagaaagtgcttcccgttgtttctgttccggaaagaattattcaattcagagttacctgggagaacgacaaaggcgaacaagaagtggcacagggatacagagtgcaattcaactcggctaagggcccgtacaagggtgggctgcgtttccatccatcggtgaatctgtcgatactgaaatttctagggtttgaacaaatcttcaagaacgccctcactgggttggacatgggcggcggtaaaggtggcctgtgtgtagacctgaagggcaagtccgacaacgagatcagaagaatatgctatgcattcatgagggaactgagcaagcacatcggcaaggatacggatgtccccgctggcgacatcggagtgggcgggcgtgaaataggctacctgtttggcgcttacagatcgtacaagaactcctgggagggtgttttgaccggaaaaggtctaaactggggtggttctttgatcaggcccgaagccactggttacggcttggtctattacactcaagccatgatcgactatgccaccaacggcaaggagtcgttcgagggcaagcgtgtgactatctctggcagcggcaacgtagcacaatatgcggccttgaaagtcatcgagccgggaggcgtcgtggtttcgttgtccgactcgcagggctgcatcgtctcggagacaggtatcactttggagcagatcaacgacatcgccgccaccaagatccacttcaagtcgctgaaggagatcgtaggcgagtacgctaccttcggcgagaacaaggtcaagtacattgctggggcacgtccttggacgcatgtgagcgacgtggacatcgcgttgccttgtgccacgcaaaacgaggttagcggcgacgaggccaagtcgctggtggcctctggcgtgaagttcgtggccgaaggcgccaacatgggctccacgcccgaggccatctctgtcttcgaaaccgcacgctccaccgcagccactgccggcgacgcagtctggtttggaccaccaaaggctgccaaccttggtggtgtcgcagtgtccggcctcgagatggcgcagaactcccagaaagtgacctggaccagcgagcgcgtcgatcaggagttgaagaagatcatgatcaactgcttcaacgactgcatccaagccgcacaagagtacgcaacggaaaagaacactaagatcttgccgtcactggtcaagggtgccaacattgccagcttcgtcatggtggcggacgccatgctcgaccagggagacgtgttt

SEQ ID NO: 173712 - DNA, 180 bp, Saccharomyces pastorianus
ctcttagccaacgcagtggaatcgctatcggagctattgcaaataaaaacccccgaagtgatcatgaaacgaagaccagagttttataataaggccggatatgtggaaaatagaaccactgcattaatggaatgcggtagagaactgctatgtaagggaatttgcaaagctgcagaatga

SEQ ID NO: 173713 - DNA, 102 bp, Saccharomyces pastorianus
tctcgaggaacgatgataccaagagccaacagatccatcacagcaatatgtaacactctgcgacaagcttatatatacaaagatcaaaagcattgcctttga

SEQ ID NO: 173714 - DNA, 381 bp, Saccharomyces pastorianus
atgagaaaagacctcaaagggccgcgtttaatagtcacatcggggatgggatccaccttcagcaaatgctctttattcatctttaaagcagttatgatcttacacacctgcttaattgttaaatcaataagaatattttcgaaaaagaagaaaagaaacgggtctatgcataatatgtactacgcttctgttccttttctattgttctcgaatgcctattcgatagacttttcgcggcacgtaaacgagttcttggaaaaaaaacggtgcgaaatgataataccactgaaattacttgcagatcatacttatttgagcgaaatagaatacgtgtctctaaacgcagatggacaatatagtcagcttcaagacatttttttt

SEQ ID NO: 173715 - DNA, 249 bp, Saccharomyces pastorianus
tacaccattgagaaatgggtgaattttgagataattgttgggattccattgttggtaaaggctataatattaggtatacacaatatactagaagttctcctcgaggatttaggaatcctcaaaatggaatctatatttctacaacctaatattacgattattcctcattccgttttatatgtttcattatcctattacattatcaatccttgcacttcagcttcctctaacttcgatgacagcttctca

SEQ ID NO: 173716 - DNA, 513 bp, Saccharomyces pastorianus
acatttccataccatttagtagcactactttattactacgtttttgtatcttcaaatttcaatacggtgaagttgctaagttttttgattcctacacaagttgcttatttagttttacaattcaataaatgcacagtttacggtaacaaaatcattaagatcaattactcattgaccattatttgtctaggtgttacatttttgttgagctttcccacaatgttattaactatattatttggtgcgccattaatggacttattgtgggaaacctggctgttgtctctgcattttgcatttttagcataccctgcggtttattctgtatttaattgtgatttcaaagtgggattatggaagaagtattttatctttatcgttgtagggggttggattagttgtgttgtcattcctttggattgggatagagattggcagaattggccaattcctattgttgttggaggttatttgggcgctttggtgggctatactatcggtgcctatatataa

SEQ ID NO: 173717 - DNA, 456 bp, Saccharomyces pastorianus
atgacaggatctttaaacagacactcacttttgaacggggtaaaaaaaatgagaataatattatgcgatacaaacgaagtagttaccaatctctggcaggaatctataccccatgcatatattcaaaatgataagtatctttgtattcatcatgggcaccttcaatctcttatggattcaatgcgtaaaggtgatgcaatccatcatggccactcttacgcaattgtttcacctggtaactcgtatggctatcttggaggagggttcgataaagctttgtataattattttgggggaaagccctttgagacatggttcaggaatcagcttggaggaagatatcacacggttggatctgcaacagtggttgacctacagcgatgtcttgaggagaaaacaattgaatgtagagatggtattaggtatattattcatgttccgaccgctgcccccccc

SEQ ID NO: 173718 - DNA, 528 bp, Saccharomyces pastorianus
atgtgggaagatgagaatactatctgctaccaagtagaggcgaacggtatatcagtcgtgcgcagggctgacaacaacatgattaacggcaccaagttgttgaatgtcacgaagatgacaagggggagaagggatggaatattaagatccgagaaggttagggaagtcgtgaagattggctccatgcacctcaagggtgtttggattcctttcgaaagggcttatatcctggctcaacgtgagcagattctagatcatctgtacccgctcttcgtcaaagatatagaatccattgttgatgccagaaagcccagcaacaaggcatctttgacccccaaatctagccctgcccccatcaagcaagaaccatctgataataaacacgaaattgctactgaaattaagccgaagagtattgatgctttatcgaatggagcatctactcagggtgctggcgaactgccccacttaaaaatcaaccatatcgatactgaggcccaaacaagtagagcaaaaaatgaattatca

SEQ ID NO: 173719 - DNA, 753 bp, Saccharomyces pastorianus
gctagttattctttagttgaatcgaattctttcgggtcagaaaattggtgtcttaagttacagcctagttataagcatggtcttttaactggattaagtaatggcgaaatacgtttgctagactggagtactggtaaatcagtacaaaagattaaggcgagcgaaactgcaatcaatgatatgaaggtcatcggtagcgacttctctgctggtcatctagttagtagcgcctctatcgacgcggtgaaagttttcgatataaggacgaatgaccgcattgctcaaattcaaaacgaggccaactccccctttatttctttagattctcgtcatggtctattggcctgtggtaccgaattgcagggaattgacgctgctgtatacatatatgatattcgcaaatgggacactccattgagatcattaattgactctcaccatgatgacgttacctgtattaaatttcatccttctgacgtcaatattttgctcagtggttcaactgatggttacacgaacatttatgacttgaaacaagatgaggaggaggacgctttacaccaagttattaattatgcgtcaatacattcctgtggatggttgtccccaaagaggatatttacactatcacatatggaaacatttgcaattcacgaattgaacgacaaatctgacgaattgaaagagccacaacccttggaatttggtgatgtaagagaaacatggaactgtgactacgtggtagatatttaa

SEQ ID NO: 173720 - DNA, 165 bp, Saccharomyces pastorianus
aaacatttagctatcactgaaaagtacgagggcgagatgcagtttgccgctctgtacttcggtggtaaacaaattgaattcagggctccaaaagacgattcttctttatgttttgttcttggaaactacgatgatgttgatgcgtcttccaaaacattgaaacca

SEQ ID NO: 173721 - DNA, 480 bp, Saccharomyces pastorianus
atgatgcctgccaaactgcagcttgacatactgcggaccctgcagtccagcgcttgtcatggaacgcaaacgctgaaaaacttccagtttctcgagcgcctctacaacgaccgtatcgtcttttgcctcccattcttcctggcactttttttcgtcccagttcaaaaagtactgcagcacctccgtcttcgattcacgcaagttgctccatactttaaaatacaactctttgatttgccttccagacatgcggaaaactcggctcccttgcttgcctcttgtcgaatccaatacactaattgtttctcttcttctagtaatagccaagtaccaagcataatttctttgtatccgagagtagatctctcccctttttacgctaaaatatttcaaatatcctacagggtccccatgatatggctcgatgtcttccaagtattctttgtattcctcgtcatttcgcagcattctctccacagc

SEQ ID NO: 173722 - DNA, 126 bp, Saccharomyces pastorianus
atgatctttgggattccattatttcttaatgttataatattacgtatatatattatactagagattctcctcatggatttaggaatccacagaaaggaatcaataattctgcattatactgtaaat

SEQ ID NO: 173723 - DNA, 828 bp, Saccharomyces pastorianus
gcgttgcgggacgttggccagttgaccactaccacggaaattgagaacttcccagggtttccagaggcgttgaccggcagcgagttgatggaaagaatgaggctacaatctgccaggttcggtacatacataatcacagagaccgtctctaaagtcgatctgtcctctaagccatttaagttgtgggttgaattcagtgaagacgctgaccccgtgaccacggacgctataattttggccaccggtgcttctgccaaaaggatgaatctaccgggggaagagacctactggcaaaagggtatatctgcatgtgctgtgtgtgatggcgcggttccaatcttcagaaacaagccactggctgttattggtggtggcgattctgcgtgcgaagaggctgaatttctaaccaagtatggttcgaaggtatacattttggttagaaaggaccatttccgtgcatccgtaatcatgcaaagaagaatcgaaaaaaactcaaagataattgttttgtttaacacggtcgcattggaagccaaaggtgatggcaagctactggacgtgttgaggatcaagaacatcaagactgatgtggaaaatgatttggaggtgaacgggctgttctatgcaatcggccacaaccctgccacagaaatcgtcaatgggcaagtggacaaacaggaaacagggtacattaaaactgtgcccggatcatctctaacttctgtgccagggttttttgccgccggggacgttcaagactctagatatagacaagctgttacctctgctggatctggatgtattgctgctctggatgcagagcggtac

SEQ ID NO: 173724 - DNA, 150 bp, Saccharomyces pastorianus
atgaataggcacactaacattgaatccataattcacgacctggttcatatcgacgaggagtacgaatcttttgccagaacttttatcgccaatcccgatagcaattctacaaacacaaatatcactataataaacacgacggcagctgac

SEQ ID NO: 173725 - DNA, 495 bp, Saccharomyces pastorianus
gtacgagacttagtgacattgccttcatcactgcccttgattactgctggttttgctactgatcaggttcatttgcttattggtacagggtccacggactcagtaagcgtttgtaagaatagaatccactccattttaaatgctggtggtaatcccatagtagtgaatccctcgtcaccaagccatactaaacaattacaattggaatttggtaagtttgcaaagttcgaaatagtagaaagggagtttaggttatccgatttaactactttggggagagttctggtatgcaaggtagtggatagagtattcgtagatctacccataacacaaagtcgcctatgcgaggagatcttttggcaatgccaaaaactgagaattcccataaatacattccacaaaccagagttttctaccttcaatatgattcctacgtgggtcgacccaaaaggaagtggtttacaaatctcagttactacgaatgggaatggatga

SEQ ID NO: 173726 - DNA, 405 bp, Saccharomyces pastorianus
aaaatagagtttccggtacttgctaacggcaaaaggcgcggctttatttacaacgtaggaggattggtaacagatattgcatggcttaatatagaggaaaatactgatataggcaaggatatacaatatttagccgtcgcggtatcacagtacatggatgagcctttgaacgagcatttagaaatgtttgacaaggagaagcactcctcctgtatacaaattttcaaaatgaatacttctactctacattgcgtaaagttcaaaccattgtacactcatttggtgaagtgtggggatcttaaatggcacggaaggatgtcacgccacctcatctggttgagctggtttaatcatttccgtaaagcccagggaaggggacaaataaaatttttatgggaacgatta

SEQ ID NO: 173727 - DNA, 330 bp, Saccharomyces pastorianus
gataggaaaaggtcttttgaaaaaattgtcatgtccgtcatggtcgggaaaaatgtaaaaaagttcctgacgtttgttgaagacgaaccagatttccagggcggaccaatcccttcaaagtatcttattcccaagaaaatcaacttgatggtctacacgttgtttcaagtgcatactttgaaattcaatagaaaggattacgataccctttctcttttttacctcaacagaggatactataatgagttgagttttccgtgtcctggaacgttgtcacgaaatagcgagtgccaggccgaacgacagctctacgatgcgtactttcactga

SEQ ID NO: 173728 - DNA, 963 bp, Saccharomyces pastorianus
atggacagattggcagaaaatcaggccacagcctccatgtcggttgctgcgttaccgtctagttcccaggagagaaatagcagtgacaggtgcagagagtattgcagcagtgatgaggacagcaacgcgggcgttcatgttagtaccaatactaggactagtgctactaccactaccagcaccaacgccagcactagtgctactaccactgctagtaccaatgctaggactagtgctagcaccacagccagcaccaacgccagcactagtgctactaccactgctagtaccaattctaggactagtgctagcaccacagccagcaccaacgccagcactagtgctactaccactgctagtaccaatgctaggactagtgctagcaccactgatagttccaacgtcaggactagtgctactaccactgatagttccaacgtcaggactagtgctactaccactgatagttccaacgtcaggactagtgctactaccactgctagtaccaacgccaggactagtgctactaccactgatagttccaacgtcaggactagtgctactaccactgctagtaccaacgccaggactagtgctactaccactgctagtaccaacgccaatactaatgctactaccactgctagtaccaacgccaatactaatgctactaccactgctagtaccaacgctagtgccaacgaggacgccaatacaggtggcaatgctgagagtaatagattccgtccagtcactgacattaataaagagccatataagcggaaaggaagtcaaatggttttgctagagagaaagaaactgaaagcacaatatcccaatacttctgagaatatgaatgtattagagtttcttggatttcggtctgacgaaattaaacatcttttccttgtatggatcgatatattcttctgtccagagggagtattcacacaatacggactt

SEQ ID NO: 173729 - DNA, 96 bp, Saccharomyces pastorianus
caggaagacaaagcatgcgagaggccctgggttcaattcccagctcgccccattataatttttccacttttttgttctttgcaagaacgcgcggta

SEQ ID NO: 173730 - DNA, 816 bp, Saccharomyces pastorianus
atggtgaaatcaaatgtggaattttcgcttcaacaagaactagaacaattgcataaatcccttatcacgttatcagaaatatacgatgacgttcgttccagcggcggaacatgcccaaatgaggctgaatttcgagcttatgctctcctgagtaaaataagagaccctcaatacgatgagaatatccaaagattaccaaaacatattttccaagataaattagttcaaatggctttatgtttcagaagggttatatctaactcagcttatactgaacgcgggtttgttaaaactgagaattgtttaaacttctacgcaaggtttttccagttaatgcaatcacccagcttgccgttattaatgggattttttttgcaaatgcatctgacggatattagattttatgcgctaagagctttatcacatactttaaacaaaaagcataaaccaataccatttatttatttggaaaatatgttactctttaataatcggcaagaaataattgaattttgtaattattactcaattgaaatcataaatggggatgcagccgatttgaaaacattgcaacattattctcacaaattgtcagaaacacaacctttaaaaaaaacataccttacctgcttagaaaggagattacagaaaactacttacaagggtttaattaatggcggtggagataatttggcttcttcggtttatgtgaaggacccaaaaaaggatagaataccttctatcgcagaccaatcttttttaatggaaaattttcaaaacaactataatgaaaagttgaaccaaaactcatctgtt

SEQ ID NO: 173731 - DNA, 1515 bp, Saccharomyces pastorianus
atgtttaaagtgtttggttttggtgcgaaggaagagattcctgagctttcacaggaagaaaaaactaaagccattctaaaacaagctcatgatttcgaacaggcactgcgtgcgatggactatgtcttagatgataatgctgacgagggtttggctttgctggatgagagtgatgctaaagaagcttccgaccaaactataaatgcgttagctcgtggtgtcattgaatttttggaggccactttaggttttgaagctgaagagatgaaaaaagcttctgcgactttggccaaggcagaagctttatctttgaaaagtagagagagggctcaaaaaattggattgaagagcagttctttatatcctccaggaacagtttatgccgtgacttatacagaatcatgccttctacatgccctattgatgattttcagtgaaagtatgatggaggcggccaaggccattttaaagctcagaaagtcgtactatatgttacaagaaatcttggaaactattaaagctgctaacaaagccaagaaattgaaaattacgtcaggcagtgaagataaggagtccaccccagcgactttcataactggtggcgatgcgttcaattccgttgatataccttatgaactgactcctgaagaacaaaaggataaggatcttttacaatttgctgaacaaattcatagcatgaggactgaaagattatctggcgcccacattggcaactctcctgcaattaacaggttgagaggtgagctaggactacaagcaatggaagacttgccagaagaggaaataacagatcataaagttctttcggatgatatagatttaagtcaagcaacaattgatgagtttgtccattctggtgtcaatttatgctttggtattttacaggttgtgatatcactattaccacccgctattggcgcggtcctatctgtggttggattcaggggctccagagaagaaggtttgagacttgtttggaaagccacaaagcaaagaaacgtgcatggttgtattggtttgttagccctgatgttttactatgatggacctttccaattcactgacgatgattttgacattcctgcagcagttaaggattccagtaacagtgaagattccgaagatgaagagatggatggccctacgttgttgcatcctgggaaaatactggaagatgcgttgctgcaatcaagagcgctatttcccaatagtgcgctatggttattgaatgaggcaaggatgctatctggtaaagggcgtttagaggaagcagtcgcattgatggattcgattgatgttagcaagatacggatgagacaggtcaaatccttgatgatttttgaccgtgctataacattgatccatttgcatcaatacgatagagctgcagaagatattttatcgctattagacatcagtgattggtcacacgctttttacacatattttgctggctgctgttatttagaaaattggagaatgtgcgaaatggga

SEQ ID NO: 173732 - DNA, 213 bp, Saccharomyces pastorianus
aacatcccccatattgagaaacaataccaactatcattaattattgaaccaaaaccaagaaagaaagtcgttccgaattccaattcgaataataaatcacaagaaaaatccagggatgaccaaaccgatgaaggaaaaacatccactaagaaagacagattttcaaaattccaattacataaaacaaagaaaaaagctcccaaggtttctaag

SEQ ID NO: 173733 - DNA, 657 bp, Saccharomyces pastorianus
atgaacactaccacatctactgttatagcagcagttgccgaccagttccagtctttgaactcttcttcttcatgtttcttgaaggttcatgttccttccattgagaacccattcggtattgaattatggccaattttctccaaagtgtttgaatactttagtggctatccagctgagcaattcgagtttattcacaataagactttcttggctaacgggtatcatgctgttagtattattatcgtttattacattattatctttggtggccaagctatcttacgcgccttgaacgcctctccattaaagtttaaattacttttcgagatacacaacttgtttttgacttctatttctctagttttatggttgctgatgttagaacagttggttcctatggtttatcacaacggtctattctggtctatctgctctaaggaagccttcgcaccaaaattagttactctttactatttgaactatttgaccaaattcgtagaattgattgacactgtgtttttagttttgagaagaaagaagttattgtttttgcacacttaccatcacggtgccaccgctttgttgtgctacactcaattaattggtcgtacttctgttgaatgggtagttatcctactaaacttgggtgttcacgta

SEQ ID NO: 173734 - DNA, 114 bp, Saccharomyces pastorianus
aatatatataagtataaccttaaccagaatggcatcttaacgagaagacatggccttggtgacaactctcttcaaaccaacttcagcctttctcaattcatcagtagaagcgtc

SEQ ID NO: 173735 - DNA, 963 bp, Saccharomyces pastorianus
atgattaatgagatgaacgctactgatgaagcaaatgaagctaacagcgaggaaaaaagcatgactttaaagcaggcgttgctaaaatatccaaaagcagccctgtggtccatattagtgtctactaccctggttatggaaggttatgataccgcactactgaacgcactgtatgccctgccagtgtttcagagaaaattcggtactttgaacggggagggttcttacgaaattacttcccaatggcagattggtttaaacatgtgtgtccaatgtggtgagatgattggtttgcaaatcacgacttatatggttgaatttatggggaatcgttatacgatgattacagcacttggtttgttaactgcttatatctttatcctctactactgtaaaagtttagctatgattgctgtgggacaagttctctcagctatgccatggggttgtttccagggtttgactgttacttatgcttcggaagtttgccctttagcattaagatattacatgaccagttactccaacatttgttggttatttggtcaaatcttcgcctctggtattatgaaaaactcacaagagaatttagggaactctgacttggactataaattgccatttgctttacaatggatttggcctgctcctttaatgatcggtatctttttcgctcctgagtcgccctggtggttggtgagaaaggatagggtcgctgaggcaagaaaatctttaagcagaattttgagtggtaaaggcgccgagaaggacattcaagttgatcttactttaaagcagattgaattgactattgaaaaagaaagacttttagcatctaaatcaggatcattctttgattgtttcaagggagttaatggaagaagaacgagacttgcatgtttagcttgggtagctcaaaatactagcggtgcctgtttacttggttactcgacatattttttt

SEQ ID NO: 173736 - DNA, 99 bp, Saccharomyces pastorianus
aattcaaacctgactgcgcttcggacagtacaagcaagccgtccatttcttagtaataagaaaagaatggctctatttgttcaggaaaaactagcataa

SEQ ID NO: 173737 - DNA, 96 bp, Saccharomyces pastorianus
gattcattagatctattacattatgggtggtatgttggaataaaaatcaactatcatctactaactagtatttacgttactagtatattatcatat

SEQ ID NO: 173738 - DNA, 114 bp, Saccharomyces pastorianus
ggatttagcataggaagccaagaaactagaaaaaaaaaaaaaaaaaaaaaaaaagaaataaagattgcagcacctgagtttcgcgtatggtcacccactacactactcggtcag

SEQ ID NO: 173739 - DNA, 111 bp, Saccharomyces pastorianus
ctaaccattcacaacgatctttgcagcaacaacagcaccaacagcaccaacagcaccaacaacaacaacaacaacaacaacaacaatatcagcagcagcaacaatatcctt

SEQ ID NO: 173740 - DNA, 642 bp, Saccharomyces pastorianus
atgagcttgcacattagtaaactgattgagcaatatcgttccactaaggacaatgaccttaaatatatgcttttaaggcaaaactttaaaattaacgacatagaggatgagctggctcctcttgttaacgaattgctgctcccggtattggtcgaagaacaagacatggaaattctcaacctagtatcgtttcaagtgctccccgatttagttctttctatgatcagcgaccctgcagctgctcagttgggatgggtaataagcttgatatgcgaccctttattaaaccaaagcatgatacatgcaaatcgttcttttgttctgattgagacactaagaaatgtgttacaaaaaattgaaaactcccctcatttagattaccaccaaccagtaaacagttcattagagtttatctccaaatttattgttgaaatgaaaaggcatatgtgtgatgtggatgctgcgcagctttcacattcactttctgaaagcaatatgctaatttacatagaatcccttaatctattgctaaaatttagcttcttttcagacgcggcaagtccttcagtaatggtcacactgccctttgatattttgaatgacgtttttacaattgtgcaggactattctgctacgaataca

SEQ ID NO: 173741 - DNA, 174 bp, Saccharomyces pastorianus
atgatgataataatatttatagaattgtgtagaattgcagattcccttttatggattcctaaatcctcgaggagaacttctagtactttctacatacctaatattattgccttattaaaaatggaatcccaacaattatctcaaaattcacccaattttcaatttgggaaatgc

SEQ ID NO: 173742 - DNA, 1140 bp, Saccharomyces pastorianus
aaaataggaaccttaaacgatagcgatcaatctgcagtgcataatggtacagaaaatggctctgattttcgaaagataactcccacagaggaagagatctgtgatgacgtagttttattatggaaggaagagcccggaactgaagacgctacgattcagcatctttatgacaggattacggaaagaaatcaatcgtggaaattgagtgcttctcgttttcgaaaaattctaaatgagcaccatctttatgacacagatctagagaccgtttctctatataaagataaaatacattttccgaaagccctagattctgatgctaaggtcgaagtgaaatttattgatgacgaacatggaaggggccttttcgctaaaagagatttttccaagggccaaatcatcctgaaagaaaataaacctatcgtatatattccaccactggacaagctttttttcatatctaatggaaaggcatgtgctcgatgtggtaaggcgctatatgatttgacccagcacaaaattatggtccattatttggattgtgaagtttgcaaagctatttggtgcagtgaaaaatgtaaaaaagcacatgcgtcgttacatgagcttttataccactcatggagatcgaatagaatagacattcttcatgctggtaattggaaaagatttgttaactactgtgagaaatattgttttaccgctgccttttcagttggtcttatatatggatccatgcttttggatactacaggagaggtcaaagagcaatggcaaaaattggcaagcatctcacaaagggaaagaattaaattaagagacgccagcggtatcggcagtacgtttagtttactgaatggtacaactgtacatactgaagaggaatctgataatggtaccaaaaagggcgttgagaagaatattgatgacgagactgtttgggagaagtgctacgaattattttgcggtgcatttccaaaagcttctgaagaaatagatttcgagaaatttttgaccatgatcgggacgttcaatatcaatcaatataacggccaggtatatcattggatctccttcataaaccatgattgtgaaccaacgccgtatattgagcaagtagaagacatgagaacgggatcc

SEQ ID NO: 173743 - DNA, 105 bp, Saccharomyces pastorianus
catattattgagctcattcaaggcgtagggagactaagagatgggggcctctgttatctattatctagaaaaaacagttgggcggcaaggaatcgtaagggtgaa

SEQ ID NO: 173744 - DNA, 891 bp, Saccharomyces pastorianus
ggctatcctacacttgtgaaggagtttaatcctgatgaaagatatgctaaagtgcaaagagtagatgttgactgggtaaccaaccaaagagactttacagatgtagatccacaggaaattgaacttatacgctctttaaggaatagtgatgttcctgtttactttggtaagatcaagactacaattattgtatttggcttttttaaagtagacaagtacaagaggatcatcgatgccatcgaaacccataaccctcctgtaataatcaattctaaaggattatggatagatatgccaaaatatgccttagaaatttgccaaaagaagcaattaaatgtagcaggagctattcacggggcgcaacatgcaattatgggtatgttaccgcgatttatagtggcgggtgtggatgaaatacaaactgaatgcaaagctccggaaaaggaatttgcagaacgtcaaactaaacgaaagcgaccagctagattaatattctatgattccaagggcggtaagtacgggtctggcttgtgtgttaaagcgtttgagcatattgatgatattatagagtctagtttaagaagaatagaagaatgcccatgcagcgatggatgtcctgactgtgtagcggcttctttttgtaaggaaaacagcctggtcctgtcgaaacctggcgcccaagtcgttttgcattgtattctaggtcactcggaagatagttttatagatcttatcaaagatggtccagagccaaatatgccagagataaaagtagagactgttattcctgtgtcagagcatgtcaacttttcagatgattttaagattattgacgttagaagagctacgaaagacgatactcatacaaatgaaatcattaaaaaagagata

SEQ ID NO: 173745 - DNA, 333 bp, Saccharomyces pastorianus
atggaaaagatctttactttgtctgttcttccattagccacgacggcaatgctaacgactggtccattgtctaccgcagcagactccttcttttctgttatgctattaggatattgttatatggaattcaattcttgtatcacagattatatatctgagagagtttacggtgtttggcacaaatatgcgatgtacatgctagggttaggttctgctttctctcttttcgggatttataaattggagacagaaaacgatggttttgttggcttggttaagagtctatgggactcttctaaaagagaagattcagcaaagattgaggccaagaaa

SEQ ID NO: 173746 - DNA, 81 bp, Saccharomyces pastorianus
ccaaaggttatcaaactgagccttgcatgcaaagtaaaagccgcggacatactcgcgattaaaaagttttccacatactga

SEQ ID NO: 173747 - DNA, 87 bp, Saccharomyces pastorianus
acaatttcatccttatacgacttggtgtggctggctaactcttccctgttccctttgctcgttattggcgggatctctagagtcgac

SEQ ID NO: 173748 - DNA, 222 bp, Saccharomyces pastorianus
aggtatacgacctcacgcttcgaagtaaaggagctacgcactctataccaccagtaccaccaccgccacttgccacactcaccttcacttctactgatatgtcatacgcacacggatgctacagtatataccatctcaaacttaccctactttcatattccacaccatggccccattctcactaaatcagtactagatgcactcacatcattatgcacggcg

SEQ ID NO: 173749 - DNA, 921 bp, Saccharomyces pastorianus
gactctagtggctctgaatgggagctttatcgatacacacctagtaagggagctgcaatagcactaactgttcttttcatagttacaacactaatatactctttacaggtagtatgggatgcaagaaaggcttctaagccagaagtcgacaatccctttgatactcctgttgataagtgcgaatctatcacagccattagtttgggggagaattataagaaactgacagtaaggtcgacattttctgccttcatcccattattctttggttgcataatggaaattgtgggctacattgcaagagcagtatcatcgtctaacacaaaggagatagcgccgtacgtcatacaagcagtgctgctgttaattgcgcctgccttgtatgcagcgactatttatatgctgtttggtaggctactgcatgttatgaggtgtgaatcccttatgatcgtttcctctcgttttgggactagtttttttgtgtttggagatgtggttagtttttgtcttcaggctgctggtgggggcttaatggcaacagtcaacggtagaacgaccggttcgaatcttattactgcgggcctggttattcaaattgtctttttcggggttttcatcatcaatgagttcagattctcatacagtgttgcgagggtttgccccttctaccgtcatatatcgaaaaaatggtggtttttgaatcttacactaatgctttcgagtatattgatcatggtacgttcgattgtgagactagtcgagtttgtagaagggtatgatggattcataatatcgcacgaatatttcatctacgtctttgacgctgtgcctatgcttttagctgccattgtatttattgttggatccttttttggaaacatttttaccacaattaccgagtgtcagtccttgaaaccataa

SEQ ID NO: 173750 - DNA, 684 bp, Saccharomyces pastorianus
tcctcaatgataaacagaaagaagtacaacggtaactcgagttcaatagaggccgagggtggctctagcgccgctgaatgcaactcgatagaactggaagagcaaggtaaaaaaactgagtttgatcttgcccatcttgggtatggccaaggtccagcaacactgagcgacaataatgaagtaacggatatactcgacactgtgcaggatgctaaggaggccgatgatagtgaaaggatgatgccgctcatgactgctttgaaaacataccccaaagcagcggcttggtcactattagtttccacaacgctgatccaagaaggctatgacaccgccattctcgggtctttttatgccctacccgtctttcagaaggagtacggctctctgaatagcaagacaggagaatatgaaatttcagtttcgtggcagattggactggctttatgctacatggcaggtgagattgtgggtttgcagttgacaggtccctccgtggatttaatgggtaatcgctataccctgattatgtcgttaatgctcctgactgccttcatttttatcctatatttctctaaaagtttaggggtgattgctgtgggacaggcattatgtggtatgccatggggttgtttccaatgtttgacggtctcctatgcctctgaaatctgtctatggcgctga

SEQ ID NO: 173751 - DNA, 69 bp, Saccharomyces pastorianus
aagaaattgagggtcaggaaagaagttgactacaaagacgatgaagatgatgacatcgagatgacttag

SEQ ID NO: 173752 - DNA, 309 bp, Saccharomyces pastorianus
cctatgatatatggattcccatttttggaaggtggagtaatactagagaggatagaagatgatgttgaagtggatgaaagtgaggcagaagaattagaagaggcaacagatgttatagaactgactgaagtagcagtcgttgaagtaccggctgctactgaagtagcggtggttgttgaagcagcggatgtggttaactttggcaaacctctcttaacagcggtgatgatggccatttttgcttatatttttgatttgattcttactcactttctgcagtactatatttttattataactgatgactta

SEQ ID NO: 173753 - DNA, 114 bp, Saccharomyces pastorianus; identical to SEQ ID NO: 173138

SEQ ID NO: 173754 - DNA, 483 bp, Saccharomyces pastorianus
ctcaatatgtccaagagtgaaaaatgtccacgcataatcgcatgtacacactttcatgaactatttaacgagaatgtactcacagagcatataaaaggtatcaaacattactgcactgatatacttatcagccaaaaatataatcttttagaaacagcacatgtcggagaagatcatgaaagtgagggaatcacattcctattcaaagtaaaggaggggatctcaaagcagtcatttggcatatattgcgcaaaagtatgtggtttgagcagagatattgtggaaagggctgaagaactatctcgcatgattaatagaggtgatgacgtagttcagcaatgtggaaatctgaccgaaaaggagatgagagaattccaaaagaatcaggaaatagtgaaaaagtttttatcttgggatttggatctcgaaactacaacaacttccgagaatctcaggcttaaattgaaaaatttccttcgctaa

SEQ ID NO: 173755 - DNA, 1242 bp, Saccharomyces pastorianus
gtgctagactatttccaaaggaatggcggtagagagtgtgatgggtccgaaaatccagcggaatacgttttggagtgcataggcgcaggtgcaactgctagtgtgtctgaaaattggcacgaaatctggaagaggtcatcagaacatgaagctgtcgacagtaccattcaaagattgattcagagttcagggagtagtgatgacttgaaaggtgattctaaaattgaaaaatatgctactgattacttctaccaatttaagtatgtttatttgcgtactgctgttaccttttggagggatttggactatattatgtcaaaaatgatgttactgcttgtaagcggactttatgttggattctcattttacgatgttggtaacagttacagagggctccaaaatgccttgtttgcaacttttatttccattattgtttgtgcaccagcgattaatcaaatccaggcccgtgctttggcatctagagagttgtttgaagtgagagaatcgaagtctaatatgtatcattggtccttacctttattaacccaatatttgtgtgagattccttatcattttgtgttctctacattttattttgtctcgttttacttccctttaaaaatattttttcaagcttccagatcagcagtgttctttttgaactatagtatcatgtttcagttatactatgtggggcttggtttaatggtgttgtatatttcacccaatttggcttcggctactattcttctcagtatgatcttaattttcatgctagcgttttgtggagtcatgcaagtaccatctctaatgcctggattttggacctttatgtggaagttatctccttacacatactttgttcagaacttgttaggtctagtcctacacgataaggaggtagtgtgcagcaaaaaagagttgtctttttttgaccccccaaccggccaaagttgtggtgagtatatgaaaccattccttgaaatggcgccaggctatgttcaaaatccagatgccacgaaccaatgcgcctattgtgttttttcggtaggggatgacttcttgcattatatttcatccagctactcaaacttatggaggaattttggcttctactgggtatacattatttccaatttgtttgccatggttagcgtctactacttatttcacgtgaggaaagtaagtgtatttgacacagccgcagtaagaggaaaattgtcacacttcagatttagaaag

SEQ ID NO: 173756 - DNA, 111 bp, Saccharomyces pastorianus
ggcgtgtggtctagtggtatgattctcgctttgggcaattatctgcttaacaacagaaatgcaaagcatgcgagaggccctgggttcaattcccagctcgccccgttatat

SEQ ID NO: 173757 - DNA, 1125 bp, Saccharomyces pastorianus
atgaattttaatccggctgtaggaaatcacaagctaagtcattatgtgcatgttttctgcacgttcaccactttttgtatactgggaactgaaacaagacaagctataacggcactttcgacctactcgggggcctatataacagcccctacagttctttggtctaatctgacatcatgcatgctgatgggaatcatgcaatccttgaatgcatacagttggatgaaagatcaccaaatcttatttttgggcgtgaccacaggctactgcggttctctgtcttcgttttctaccatgctgttagaaatgtttgaacactctaccagtttaaccaactataacattgcccatcatgcaaaattgcccaacagggcttatggaataatggagtttttgtccgtcttactggttcaccttatggtgtccatgtgcagtcttatttttggcaggcaattagggaagaatattatcgttacttatggctctatagcttttgcgaaggcgtatactcctcctacaggtactgtaagtgaaaatgctggagatgtgaatatagaagaaatggaaaagaatactcttgaatataattttaaaactcctgcaccttatattctgaggttattcgattttatagataacttggcctacgcattagctttcccattaatcgtcttattcgttgttttatgtgcatactacgacaattattcaaggggtaaatggacattgccatgcctattttgtatctttgccggctttctacgatattggttagcaaagcgttttaataaaacaaacaaaaaatttccactggggactttttttgcaaacattctagccacattattagttggtatatttacaatggtacaacgtggaaaaagacattcttttatggatattcccgtcgtgaacagtttgaattcatgccacattgtttccgccttaatatccggcttttgtggcactttaagtaccatcagtacttttattaatgaaggttataaactccaattcattaatatgcttatttattataccgtttcgatcggattctcttactgtttattggtgattactttgggctcttatgcctggacgagaggtttgaccccccctgtttgt

SEQ ID NO: 173758 - DNA, 684 bp, Saccharomyces pastorianus
atgaaattagacaatttggtcatggatatgccatgctatttatcaagaacatttttaagtgttaagccaatggtctgttttctttacaaagataaattagaaaaacatgaggataaatacaaagttcccttagatatccgtaagttttttggtaagctgaaccctggagaaacatcttctttgttttctgtaccactcaatgacttagttatacatcttcttcctgaagccgatgaggatgttaagagttatcaagcagaatattttgagcggaaggagtataagcttcattggggtggaataaaatggttgattatgcattatcattttcacgtagcaaataataacgaaatgccatggttgcaaatcatagaggatttatcaagttcagacgaagacggtgttgatggaggtattttcagattcagggatttgtggggactcacatgtaaaatattattcgacgtttcatgtatagctaatggactaatggacgaaaagttaaaaggagaactagggcacgaagatttgatagttggactacatgactatggtaatcagatgcaaccgaacggaagaagtgaatgggagataggaatgatcaacggcgacagaaacttaaaatatagcgatgtgatacctgaatactacatgaagcacctgctggagtgccgctcgctttgg

SEQ ID NO: 173759 - DNA, 90 bp, Saccharomyces pastorianus
atgtctccattggccaggtactcaaaagaacaaccgggtttatgtgagcgtttcgaggtttttgtatctaaaaaggagatatgtaatgcg

SEQ ID NO: 173760 - DNA, 267 bp, Saccharomyces pastorianus
atggtggtgaacacgatatatatcgcaaggcatggatacagatccaactggcttccggagggtccatatcctgacccacttacaggaattgatagcgatgttcctttaacagaacacggagtccagcaagccaaagagttggcccattaccttttgtccttggataatcaaccagaggccgccttcgcttctccattttatagatgtcttgagactgtacaaccgatagctaagctgttagaaatacctgtttattctagaaagggg

SEQ ID NO: 173761 - DNA, 159 bp, Saccharomyces pastorianus
acttgtaccgaaaattcgcgcccacaggcaattgtaacaggtagtcaggaagacccttggcaattcagagctgcgaatgatctagcgtgcttagtattcggtatctcacagaatgccattcgcgctttaaaccttgatggatgtaattcacaccgatag

SEQ ID NO: 173762 - DNA, 711 bp, Saccharomyces pastorianus
atgtcattgaaatcgtgtcatgatttgaaatttttagacttgggtttagtatcggaaacagttaagctgaaggagttattttctgccattaaaaatttcactaaattaacgcatttatcttttcccagatcgtcgattgactgccaagggttccaagatattcaatggccacagaatctcaggtacttgaaattgagtggaggtataacaaatgaatttgtgattgatacgaaatggccaacaactattacaactttagaattctcttattgtcctcaaataacggaattgtctatttattcgttgttatcacagatcggtgataatttaaagcatttattttttcattatccgatgccatctctggcagaaaattccctagaccatgtcttcacgtactgtgctaatttaatttctttgcagctcatggttgattactgttctaagtggtgcttttctgaattcatgctaagtaaattggtggaatatgataggcctcttaaaacattgtatttagaatgcagcggatccttgggattagcttctaagattcatcccgatgacttgactatagccatactggaatccaggctgccctgcctaaagaatatttgtgtttctcccaagctggggtggaacatgaaaagcgatgaagtcgctgatttggtagtctctttggaagatcaagatggcagtttatatcttaattat

SEQ ID NO: 173763 - DNA, 972 bp, Saccharomyces pastorianus
acgcccccagcgataaacacttttaacggaaacaaaaatggcaacaatactattaataatatctcatcacccagcatcgagctccatacagatgcaaacagtatcgagtcgctaaaaaaaactccaaactctcctagaaataaatcattaacccccaaagttattttgcccactcaaaacatggacggctctcttttgaagataccccgtttaaacgataatccccctggtattcttatagcgaaaaccggctctcccgtaaatttggacgttgaaactacagtacaacctctaccaaaaatcaataagcttactactcattccgtgaaaccaactttgacaaaacaatcagcagagaaagtttcgttgaagcgaagtaacagctcgattacacagagcgattctaatggcaactctaataaaaaacctgcacccgaaagagcgaggaaatcgaattcagtgtcagcaatattaccgaagccagctaacaagacatcaaaaaaggctgctagtggcaacgctgattccaataagaaaaagcctgtttcgaacaaggctgcatccgctattaagaaagaaccgaacacaagctccaaattgagtacagtcaagaaggaaaacagcactttatcttttaacaaagccactgagaaagaaaaagacaaaggcactgacacaaagacctctgcaaacaacgtcaaaaaggaaacaagctcaaaatctcccaggaaactagtacctgcaccaacaatcaattcacctaagattgtacaaacaacagaaacaaaaataaaggaaccctcaatcttgattgacattccgttgtaccaaactgacacaaatgactacttggatgaaaacggtcaagtaatttttaatttgtcaactttaataaaagaaaaatatcacctaaaccagaaagagctgacacagttaaaagattccaaaagaattaataacacagttgaatga

SEQ ID NO: 173764 - DNA, 324 bp, Saccharomyces pastorianus
atgggacctgtggcacataccaatttttatgactatagggtttttggaaaatctgtggacgataacgttgtatgttatggaacactaagtacaacattagaaggaaaaatggtggaaacggaaacaaaccctcatttgaacatagagaagaagcagggtatgttatgtattcgtggttttagcataggtaaaccagtagagtccgatcgtttagagaaagctttgcatttagctgaaaggtttggaggaggtgaaggatggatgcctctagttggcgtttttggactatttggccaagacggttgcttatacatctataatcaa

SEQ ID NO: 173765 - DNA, 105 bp, Saccharomyces pastorianus
atgtcctttgatagacagttgaccgaagaccaggaggtcgtccttaagcaaatttggacacaccttttccatctgtggcaagttcccgtggatggaactcatatt

SEQ ID NO: 173766 - DNA, 537 bp, Saccharomyces pastorianus
atgggggatggtttattgtatttgataatggaatgtggtgatcatgatttgtcacaaatccttaaccaaagaagcggcatgccactggattttaattttgttagattctatacaaaggaaatgttgctgtgcattaaggtagttcatgatgcgggcatagttcattcggatttaaaacctgcaaattttgttttagtgaaaggtatcttaaaaatcattgattttggtatagcaaacgcggtaccggaacatacggtgaatatatatcgtgaaactcaaattgggactccaaattatatggcaccagaagcactagttgctatgaattacacacaaaatagtgagaaccaacatgagggaaacaagtggaaagtggggagaccatctgatatgtggtcatgcggttgtattatatatcagatgatttacgggaaacccccatatggcagtttccaaggccaaaataggctgttggctattatgaatcctgatgtgaaaatcccatttcctgaacatactagcaataatgaaaagatc

SEQ ID NO: 173767 - DNA, 252 bp, Saccharomyces pastorianus
ccacatcagattattccgaacaatccaatcactggtgagcctttgccgatcaaaacatccccttctcctacaggacccaatccaaacaattctccatcaccatcctctcccatatcaaggatttctggcgtaaacttgactagcaaaaaggcaaacggtttggatgatttattgagtttggcaggaggacccaaaccagcaagtacgagaaggaagaagaaaacagcgagaggctatgttaatgtaatggat

SEQ ID NO: 173768 - DNA, 792 bp, Saccharomyces pastorianus
cctatggttattacaagagccgagggctcctatgtctatgctggtgataagaaaattttggactttacttctggccaaatgtctaccctacttgggcatgggcatcctgaaatttgtgaaactatctctgaacatgcatatcacttagatcatttgttcagcgggatgttatctcctccggttctggaattggcagaaaagctcactggtttacttccaaatggcttagacagagctatgtttttgagcactggttccgaggcaaatgaagcagccatcaaattggccaaggtatacactggaaaattcgaagtcgttggattatcattatcgtggcacggtatgacaggtgtatctggtggaactacctaccaagatggccgtaaaaaccatggcccatcaatgcctggtaacttggtcttgcctgctccaaatgcgtacagatccatctttcggaagcaagatggctcctatgattgggagacggagatggactacggtttcggtttgattgatgctgcctctgttggttccttagccgctgttattgtagaaccagttatgagttcaggtggtatgattgtacttccagaaggttacttaaaaaggttacacatgcactgtaaaaaaagaggaatgctcttgattgttgatgaagctcagacagcaataggtagatgtggtgccatgtttgggttcgaagcctacgacatcgttccagacattttgactttaagtaaaaccctagggaatggcctaccattgtctgctgtggttacgtctgatgagata

SEQ ID NO: 173769 - DNA, 552 bp, Saccharomyces pastorianus
gatcaggtggagagggagaacaattctactacaaatgtaatatccttccatagttctgagatttggctagcaatgagatactcccagttgcaaatcttactatacagaccatctgcattgatgccaaaaccgcccattgactcactatccactctaggagagttttgcttgcaagcctggaaacatacttatacactgtacaagaagcggttattacccttgaactggataacccttttcagaacattaaccatttgtaacactatcttatactgtctttgccagtggagcatcgacctcattgaaagtaaaatcgaaattcaacagtgtgtggaaatactaagacatttcggtgaaagatggatttttgctatgagatgcgcggatgtttcccaaaacattagcaacacaattctcgatattagtttaagccatggtaaagttcctaatatggaccaattaacaagagagttatttggcgccagcgattcatatcaagacatattagacgaaaacaatgttgacgtctcttgggttgataaacttgtatga

SEQ ID NO: 173770 - DNA, 378 bp, Saccharomyces pastorianus
ttcaaaagaatctcagttcaatccttactgaatggggaagaaccgatgccaaccccaacaataactccaaagaacgtaatggatcgttctagattagctggtaggaatgcaagacctatcctgcctacgatgggcctatttaaaaggggagaaaaggcctcaattacgaaaacctgcggccaatgcaaagaaacaaaaagctcatctcaatggagagagggtccaaccggtggatcgtgcctctgtaacgcatgtggacttttctatagaaaactgtttttggcctttgggaaacagtctgctaaacgatacttggaagaaatcaaaaaaaccggagcaaaaagacggattccgaggatgctttatgggatgcaaaga

SEQ ID NO: 173771 - DNA, 951 bp, Saccharomyces pastorianus
actttgagaccatccccattgcctcacacgttatatttagcattattacctctgcataaatggatttccagaattgtcgtactcgaatctgttttacacacatggttttacctttattacatgtacattaatggcgcgttatacgtcaagatgaaaaagttacctaatatttatggggttgctgccctgggtcttttcttactcattgctattacctccgtaagatatgccagaagattaagttacagagtcttttactatgtccactacataagtacatggctcattgtcgttttgctgcattaccatgcccgccccggtatctcgtattacaccactttgaatgtggccatcttggtgggacaaattatttataggctctacgtttcaaatactacagtagtaacaatcgtgcccatatcttcatcattatctgttctggagttcccattagttgatttgcccaagcgtcccatcctaccaggtggccatctaagaatcaacgtatatcataaaagttttttgaagagatggctttctcatttaatacccttccaacatccctttaccatagccagtataccaagcgatagcttggtaagattaattattagaaatgggcatttcccattgcgcacaaacgagaagtactacgtaacaggtgcttttgaaccagaactaagttttatttcaaaacccagtttccctattgacggtagtacaaggtcatcgaagaacccattccgtaacaactcctcagcactaattagttcgccgctgaacttcgtcatcaaggcacaaagagtgtttatgtgtgtgggaggctcgggcatttccttcggtttaccattgcttcgtattttgaattttaacggtgtaaatgtaagactactttgggtttccagagattataaggatctagaagtactaaccattccaaaacaattcgaa

SEQ ID NO: 173772 - DNA, 420 bp, Saccharomyces pastorianus
atgcttgttggctatttggtagctaagtttgatattgtttccatggaaaatgcaaaaggtatatcaaatatggttgttaacgctattttgccttgtttgaccttcaacaaaattgtgtccaatatttcatggagggatataaaggagattggagtgataatactttcagcttttatcttgtttgttttaggtgccacgggcgccttatttactacatttgctacgactgtgcccaaaaaattcttctgggggctcatatttgcgggtttctttccaaatatatcagatttacctattgcctatattcagagcatgggtaacggctccatttttactgctgaagaagctgataaaggtgttgcttattcctgcattttttttatttattcaaagtttcctaatgatgaattttggaatgtg

SEQ ID NO: 173773 - DNA, 222 bp, Saccharomyces pastorianus
tttttattattggctgtcagctcaagaaggaaattagtttcagactatagattaatgaggttgcttatgaataaagaacaccgagcggctttgctgcaaggattcatatgggacgttgatttaaggtggttccggatgttttgtctgatcttaggggctgccgaaacagtgattgtgatggccggtattgctattggatttggtgtgggtataacacttgaa

SEQ ID NO: 173774 - DNA, 81 bp, Saccharomyces pastorianus
atgcaactaaatgaggaagtagcagaaaatgacctaaataatcacagtaacaatgatcatgaagatcagaataatatgata

SEQ ID NO: 173775 - DNA, 297 bp, Saccharomyces pastorianus
atcattgccacctatggtaatcgtgcagaacaatttttagaaacagattcagacttcgctaagtaccatgcgaaattgaataaaaagttgcaacacttgaggagccgttgccatttggtcaccaaggatacaaagaaatactcaagtaaaaataagtatggcgaaattaactccgaggattatgataataaaactaaattgattggtgttttgattttactacacgctgaaagggacttggcattggctgaaactttgaaattgagagctcgtcaaaggactctagagatccccggc

SEQ ID NO: 173776 - DNA, 279 bp, Saccharomyces pastorianus
acgccattaagggttgatgtggctcgttccggcggcagacacgtatgggcatatcgcggtaatcatccagcggagcattttgagagccagatgtcgtggctaaggtttcaaacaaggcagtatctaactagattcacagacaaccaatcagatttcgtacattctttacaaaaaaagcacagaacgccttttagagacgtttatttcaaatacacttcgcttatgggttcccacatgttttatgttatcgtgcttcccatgcctgtgtggcttggatac

SEQ ID NO: 173777 - DNA, 2112 bp, Saccharomyces pastorianus
aggccagaaactttatcaaaaaagaacactataagtaaacagggtagaaaaaagcctgctaagtcatgttacttctgtagaacgagaaaacttaagtgtggcagagaaaggccgttttgtggaagttgctcttccagaaaccgaaaacaatgtaattacgaagaaagtgcctctttagaagaaaatcgccttagggcaaaatacaggagatgctcaaagtttcagatggcctgtcgtattgaagagctcgaatctcacataacaaaacaatccgacgctgacactcaagaggaaaaaaaccctctttacaacatgaggtatttatcttcaaagcataatagacacattatatatgggccaacatcatatcgagcaatactagcaacccaaactaatacttttgctaaatacagggaagagatatggaatgtcttaaaacttcgtcgtaacagttggaaaagagaacatcactactcaaccttgtcagagattagttctatcgaaactacctcacagaattcgaattcacggagtgttgtcgaatccttatgcgaatcgcttccgacctatgaggccttccggcaacatctgatagatttcttcgccagtgacttttatcatagctaccaaatcgtaaatgaacagaaagtactaaaaaacctgcaggattgtttcgtgaaaggtccaaaaaatagcaaaacaggctgtcatgcaataattgcgcttaatctagacaccaaaaaaaactattacaaagtgggtgtaatgacggcgattatgtgcctaatatctcacccgagtaaagtcttagaagctgttgagaccttccataaagtcttaatatccttcgtttcggctaaagttttttacattgagcgggtggaatttttatttcttcgttatttgtatataaacgttgcaggtctcgatggaggcgatcagtcacattgcatattccttcatgggctgacaattgacacagctatttatatgggtcttaatgaagatcttcgtcgtttattcatggagaaagtttactcaatagaagaaattccttatttggagaggttatggctatggatattattcacagacgttaaaatttcactttccacaggaattccacctcgtatcagtgatgcttttgtagacaaggtgcgtctggaaaattattctttaaaaaatgatatacttctttataaaacaacactgaaactaagaagtatcatggaacaaattcacgctcataaaatatcgcccaacaacattcctcttattatccaagacttaaaatcgtttaccatggatgtgtttaagccgttgaacttttatctagacatatcaaatgtagatggcagtgagctcaccgaactccaactatggcacgtaacccttcatatgctagcaagtttatccaatcttcatactttgacatgtcaagattacaatccgataatattgaatgcgagcatactggctccattgaacacattacaattgtgtttcaaaattcttgaaggttattttgagttagacgatggtagtttgcccccagcttccgcgtatttctctcaaaaatggccccatctaaacaatgctttatttgtcttttacatgggctctttcaggtcattgattcagatttacaccatatttctccaacgtatggaaaataagagcgtccaattatttatgcagacgaatatgtccagcaatcaaaatatatgttttggggacatcgaaggtccgcacgatggttgtatttcgctgagaactgcatttaaagagatgaaaaagatatttgatacttttcatcaagaaaggtcgagacgccttacccaaatttggcagaactcctattacttttccatcattatatcaatggaaaaaataggaaggagagtatttggtaaggcaatacagaatattgatgacaaacgtgtaatagaagagagcacttctaaagacaatttaacgacaatactaaatgattcagaagagcttttgatggaattttcaaggagttttactgaggatatattagggccatcagacgacttctttgatactgctatttgtggatggaacgatttcgaagatttttttttttaa

SEQ ID NO: 173778 - DNA, 126 bp, Saccharomyces pastorianus
gaatctatatttctacatactaatattacgatcgttcctcattccgttttatacgtttcattatcctattacattatcaatccttgcacttcagcttcctctaacttcgatgacagcttctcataa

SEQ ID NO: 173779 - DNA, 291 bp, Saccharomyces pastorianus
atgataataatatttatagaattgtgtagaattgcagattcccttttatggattcctaaatccttgaggagaacttctagtactttctacatacctaatattattgccttattaaaaatggaatcccaacaattatctcaaaattcacccaatcttcaattatgtatacagaatatactagaagttcttctcaaggatataggaattctcaaaatggaatcggtatttctacataataatattttattattctttttcattttatacgtttcattatcctattacattatc

SEQ ID NO: 173780 - DNA, 96 bp, Saccharomyces pastorianus
gattcattagatctattacattatgggtggtatgttggaataaaaatcaactatcatctactaactagtatttatgttactagtatattatcatat

SEQ ID NO: 173781 - DNA, 135 bp, Saccharomyces pastorianus
acttcaattttacctcccgtgttattgatcaaattcgaagcagctttaagagcaggcccaagtgcaaatttgcttatgtgtgtgtcttggaaaacttcaggtatcgtttttagtagtttttccaaattcttttta

SEQ ID NO: 173782 - DNA, 393 bp, Saccharomyces pastorianus
atgtcggacttcgtaccaattgatgctgacttaaatgaggctccttttcctgaagagaatatcatcgacgcaaagactggaaatgagcaaactaccatccaaactgaaaaagttcgtcctactcccggtgaggtggcttctaaagctattgttcaaatggcgaagattttaaggaaggaattaagcgaagaaaaagaagtaatattcacggatgtactaaaaagtcaagcaaatacagaaccagaaaatattactaaaagagaagccagtagaggatttttcgatattttatcacttgctacagaaggatgtattggtttgagtcaaacagaagcattcggaaatattaaaatagacgccaaacctgcactatttgaaaggtttatcaatgct

SEQ ID NO: 173783 - DNA, 174 bp, Saccharomyces pastorianus
atgtcccagtcgaaccctatcttacgtggcctcgctattacaacagccatagctgctctatcagccaccggttatgctatctactttgactatcaaagaagaaatagcccgcaattcaggaaagtgttgagacaaagggccaaagagcaggccaagatggaagaacaagctaaa

SEQ ID NO: 173784 - DNA, 549 bp, Saccharomyces pastorianus
atgagtgaagttgcaccagaggagatcatagagaatgcagatggatctagatctatcattacatacaagattgaagacggtgtcaagtataagattactcagaaagtaaaagaggttaaagtattggaaaaagtccataaatctgttgcagaaagaaaaaactggcataaatatggctctgaaaaagggtctccagcaggtccaagtgctgttacagcaagattgggtgaagaagtagaattaagattgagtaggaactggaaacaagctgaagaagaaagaatacaaaaagaaaaggcaagtctcacaaagaccggtctacaatgtagattatgtggtaacgaccatatgaccatgaactgtccattcaagacaattttaagtgaactttcagcattagaagacccagccactaatgaaggcggtgtcgaggccgccagtgaagagaaggcaggccaagttggcggagctggttccatcccagggcagtatgttccaccttctcgtcgtgctggtgcaagagatccttcatccgatgcttacagagac

SEQ ID NO: 173785 - DNA, 162 bp, Saccharomyces pastorianus
ttgatatctgctgtcgttacctcagtaaagcgaaatactatggtacgctggcatgtcttaacaatttcaagcttattcaaaaaaagcactcacgatgggggtcgaacccataatcttctgattagaagtcagacgcgttgccattacgccacgcgagctact

SEQ ID NO: 173786 - DNA, 192 bp, Saccharomyces pastorianus
atgacagttttcagtgcccccaattactgtgatagccaagggaaccttggtggtattattcatagtggtcctggtcacggtattttacaagctggtaaaaatgacgatgaagacttaataagtgaaacattcgaagctgttgagcatccagatatgaaaccaatggcctactctaatggtgggtttggttta

SEQ ID NO: 173787 - DNA, 399 bp, Saccharomyces pastorianus
aggtgtttgctaggcgtcggactaccagttgatgtgactgctacggaaactttgactcatgatgaacaagtaccaggtgtagagccaggaccgtgttcgcgaggaagttctatagatggtctgctgccctcgttgctcggtccacatgatgatgtggatgacgattcggcggcttttcacaagtacatgacactatcgcgagacctatccaaggctctagatatgtcatcatcatcatcgtccagcctgcgcgttcaaagtcggcggcaccgtagttctgtgagcgcaatatctgcaatcttacaccaaggaaaatctggccgcgaagacataactggaagccttagcgttccggcagaacaagaaaaactcagttttctgccaaagcctcgagtatga

SEQ ID NO: 173788 - DNA, 120 bp, Saccharomyces pastorianus
atgtcttcctcggtcatttcttcttctgcaacgacctccacttctatattctctgaatcatctaaatcatccgtcattcaaaccagtagttccacctctggttcttctgagagcgaaaca

SEQ ID NO: 173789 - DNA, 252 bp, Saccharomyces pastorianus
atgcacggcacttgcctcagcggtttataccctgtgccatttacccataacgcccatgattatctacattttaatatctatatctcattcggtgcccccaaatattgtataactgctcttaatatatgcgttataccacttttacaccgtatactaaccactcaatttatatacacttatgtcaatatcacagaaaaatcacctccaaaatcacctaaacataaaaatattctattcttcaaccataataca

SEQ ID NO: 173790 - DNA, 174 bp, Saccharomyces pastorianus
cctaaggtggatcatataagtaagtcaagaattaattcatccaaagaaacatccaaatttaacgatgagttcgatctttcttcatcatcaaatgacgacctagagttaaccaacccttccccaatccaaattaaaccagtgagaggacaaatcaagaagggtcaaattgcatga

SEQ ID NO: 173791 - DNA, 747 bp, Saccharomyces pastorianus
ccaaaaagtggtacgccaaatcctcatgcagagctatgggtttacagtatgaaagatggaacatcgttccatccaagaataagtggaaataaaaaagatggaagtctattaattactgaagttacatgggtaggaaatggaaacgttttagttaaaactacagatcgatcctcggacatattgaccgtgtttttgatagatacaattgcaaagacttcaaacgtggtaaggaacgaaagttctaacggaggatggtgggagattactcataatactctgtttattccggcaaatgaaacatttgataggcctcataatggttatgttgatattcttccgattgatggttacaatcatttggcttatttcgaaaatagtaatagttcacactataaaacattgacagaggggaaatgggaagtggtgaatggcccacttgcctttgattcaatggaaaatcgtctttacttcatttctacacgaaagagttcaaccgaacgccacgtgtactacatagatttacggtcaccaaatgaaattattgaagttactgatacctctgaggacggtgtctatgatgtgtccttttcttctggtagaaggtttggtttactcacctataaaggaccaaaagttccatatcaaaaaattgtggacttccattctcgtaaagcagaaaaatgcgccaaaggtaatgttttaggcaaatcactatactatttggaaaagaacgaagtacttaccaaa

SEQ ID NO: 173792 - DNA, 129 bp, Saccharomyces pastorianus
atgaaacttttcaaaaatggtgcacgggctttctgtatattgaactttccgtcgcttttcggagctacaattcccctacccggcttgtcggcattaagtctcttcatcccgtgtactattacccgacag

SEQ ID NO: 173793 - DNA, 381 bp, Saccharomyces pastorianus
atggttgctgaggcagaaaagttcaaggccgaagatgaacaagaagctcaacgtgttcaagctaagaatcagctagaatcgtacgcgtttactttgaaaaattctgtgagcgaaaataacttcaaggagaaggtgggtgaagaggatgccaagaaattggaagccgccgcccaagatgctataaattggttagatgcttcgcaagcggcctccaccgaggaatacaaggaaaggcaaaaggaactagaaggtgttgcaaaccccattatgagtaaattttacggagctgcaggtggtgccccaggagcaggcccagttctgggtgctggagcaggccccactggagcaccagacaacggcccaacggttgaagaggttgat

SEQ ID NO: 173794 - DNA, 87 bp, Saccharomyces pastorianus
atgcacttgaaacaacgtgtacaccatcacgtggtttgtttgaaggcatcggtccgccctggaaatctggttcgtcttcaacaaacc

SEQ ID NO: 173795 - DNA, 438 bp, Saccharomyces pastorianus
ctcagctctttttgtcttagcgcgttctcagctagtgtcctttgcctttcctcctcttctttttcattctgtaatttttcttgttccagtctcttttcttctctaacacgtttgttctcctcttctctcttgcgcttttgttcttctttctgtttccgctgtttttcttgcatttcttctctacgctgttgctcttctaacctccgttttctttcttcgtcctttctccgtttagcttcctcgacctttttcctttgggcctcccgtcttttcatttcacgctcttctaattccttttgcagtctctctttttcttcctctcttttccgtttctcttcctcttttgccaattgttgtaatctcttcttttctttctctttctctctttttttctgcttcttttcctctttttctcttttctttcttttttcttcctct

SEQ ID NO: 173796 - DNA, 165 bp, Saccharomyces pastorianus
gctaagaaaaatgatgacatcacaacgaacaaccagccaaaatttcgtaaaagggctgttgggttagctcgtgtagtcatcaactcggtaaggaagtacatctactctctagcccgtgtattcggttatgagatagaacctgactttgatagattggctgtttag

SEQ ID NO: 173797 - DNA, 171 bp, Saccharomyces pastorianus
atgagctatgagaaaaagtctgtggaaggcgcttacattgacgattctacaacgttcgaagcatttcatctcgactctcgtttattacaagctattaagaatataggatttcagtacccaacattaatcaatcacatgctatcctttggctttcaacagaagagagattta

SEQ ID NO: 173798 - DNA, 198 bp, Saccharomyces pastorianus
atggagatgcgcttgttcttgaacgatgcacgtatctctcacaggtttcgtatgcgatggtattgtttttttggcgcctatgtgtgttcgtatgcgcagaatgtgggaatgccaattatagacttaccgaggtgccttgaaaaacccttttgcgtgcctgtgatgtttccgtttctgggcaaagagaatatccgaatt

SEQ ID NO: 173799 - DNA, 636 bp, Saccharomyces pastorianus
atgaacttctttttgttatttgcacattcttcaggtgtcatcccagcgagaagcctattctttatcattcttctatggtttttagtttctgttccgttgtcgtttgtgggttcaattgttgctcataagcagtgtaattgggatgagcatccaactaaaacaaaccaaatcgccagacagattccatatcaaccctggtacttgagaacagcacaagcaaccttaatcgctggaattttcagtttcggatcaatagcggttgagctgtacttcatttactccagtttatggttcaacaaaattttttatatgtttggatttttactcttttcattcttattgttgaccttgacaacctcattagttaccatcttgatcacatattactcgttatgtctagaaaactggctatggcaatggagaagttttattattggtggtttaggatgttcaatctatacgttcatccactccatactatttactaagttcaagcttggtggagttattactgtcgtgctctatctcggatattcacttattatatctgcattatgttgtgtcgtcactggagcgattggtttttttagcagtatgttttttattaggaagatatactctgccattaaagttgag

SEQ ID NO: 173800 - DNA, 570 bp, Saccharomyces pastorianus
tatgtcgacaacagaaaagtgaacaaaaataaaggttatgtaaaaggcttacaaaattatgcagcccaactagaaaattccatcatcaggatgagagaaacgaataacgaggaggaccgaaaaaaaatattaaattcagtgcccatcaattgtgtacgtatagccgtgccacaggaaaacctgacgttagttccgtcggctgaaagttcaatgaaaaatcaggcatcatcatcttataacaacctagccgttccaggtaccggtgccttttctagtgattttttggcggttaaaaagccccgtcttgccccggaaaatgataagaaatgttcaactattctagaagattacagcactttaactaaaagtccctatattattttgtctctttccttattttttaaatggttatacccgagtcattacttttttatttatagagaggcacttctttctgccttctttcaggatagaaatttgaaaagctattactgttcaaaggagttgatttatgccgtcgctgctcttggttccaaaataagcaataaatctggcgagctatatcacagt

SEQ ID NO: 173801 - DNA, 126 bp, Saccharomyces pastorianus
aagattattaagtcattgaacgcacataaggacggggtcaataatcttttgtgggagaccgagtctgatttggtcagcgcaggtgcagacgcttgtatcaagaagtggaaggtagaatttgaataa

SEQ ID NO: 173802 - DNA, 696 bp, Saccharomyces pastorianus
gaattgagtgaagccaagccactaattagatccgagttattgcccaagttgagacaaattttccaacaatttggcaaggatttgctggccacccatggtaatgacattcaggtgcccgaatctcaggtgaaatctaactacacaagaggtaaccaaaaaagtagctttaccgaaatcaaggactccgcttcaaagccaaaaaagaatgcacttccctcttctacttcaacttcagcaccagtctccagcaccaacaaagtcccccaaaacggaagcggcaatagtacatctatttatttagaaccaacttttaatgtgccttcctccgagctctacgaaacgttccttgataagcaacgcatattggcctggaccagatcagcacaatttttcaacagcggaccgaagctggagaccaaagaaaaattcgagctctttggcggcaacgtgatcagcgagttggtttcatgcgaaaaggacaagaaacttgttttccactggaaactcaaggattggtctgccgctttcaactctactatcgaaatgactttccatgagtcgcaagaattccatgaaaccaaattacaggtgaagtggactggcatacccgttggcgaggaagatcgcgtgcgcgctaattttgaagaatactacgtgcgttctattaaattgacattcggctttggtgccgtatta

SEQ ID NO: 173803 - DNA, 126 bp, Saccharomyces pastorianus
ggcgtgtggtctagtggtatgattctcgctttgggcaattatctgcttaacaacagaaatgcaaagcatgcgagaggccctgggttcaattcccagctcgccccggttaattttttcataattaaa

SEQ ID NO: 173804 - DNA, 159 bp, Saccharomyces pastorianus
gcagattcccttttatggattcctaaatcctcgaggagaacttctagtatatctacataccatattatagccttaatcacaatggaatcccaacaactacatcaaaatccacattcttatcagatatcaagagttaatatacttgaaccacttaaataa

SEQ ID NO: 173805 - DNA, 657 bp, Saccharomyces pastorianus
atggaaaatgatgtagaaaggcctattcaagaccaatatatcgtcaagaaaccaaccaaccaaacagagtttgattggcaagtatttcaacagcaggcctttctacaacagcaactagctcagcacaatttacaagcgtatctatcgtccctgaacaccgatactatgaccaatagaagtccttcaaaatcttctagcatatctactgcctcttcgcattcggatccgattccaatagcgatgacgcaaagcccaactccatatcctcaaacttccaatatgctaccgcaacagcatgtatcacgaccactgccgcaacaacagcgggagcagccacaacaacatattacttctccacaaagattctcagaaagcaattttacgaatcaattaaacaatggtatgatcaacagtaatcctctacaatctgcaatattctctaaccatacaagtgaaaataagcaattaagagatgtcgaagaatcaaatttcagtacatcacccctaagagcagattatggcaataatattatctcctcgataccagcgtcatttactagcaattcaattcctgtcagtgtcaaacaagctcgaaatggctcttcttcgggcgatatacttttcagcaacggtgctcatgacatgatcaacaatatt

SEQ ID NO: 173806 - DNA, 168 bp, Saccharomyces pastorianus
aaactaaaaatgaactatacctacgtttatttgcaagttgtaaagtcgaattgggtagatgcatattgcagaaaggcaatctgtgaaagtgctattgggttttggttaaaccacggagtagatggttttagaattgacaacgcgggtttatatttgaaacttcctggc

SEQ ID NO: 173807 - DNA, 117 bp, Saccharomyces pastorianus
ttatcaactagtagtcacactaccaatatattatcatatacggtgttagaagatgacataaggtatgagaagctttcatcgaaggtagaggaagcagaaatacgaggatttataatg

SEQ ID NO: 173808 - DNA, 426 bp, Saccharomyces pastorianus
atgactgacttaactacacaagaagctattgttctagagcgacctggtaaaatcaccctaactaatgtcagcatcccaaagatttcagatcctaacgaagtaatcatccagatcaaggcgacaggaatatgcgggtcagatatccattactatacccatggaagaatagccaattacgtggtagaatcaccaatggtgctgggacatgaatcatcaggaatagtggccctcataggtgagaacgtcaagacacttaaagtaggagatagggtggcacttgagcccggaatacctgacaggttttcaccggagatgaaagagggcagatacaacctggaccccaatttaaaatttgctgcgacacctccctttgatgggaccttgacaaagtattataagaccatgaaagatttcgtctataaactg

SEQ ID NO: 173809 - DNA, 216 bp, Saccharomyces pastorianus
gcatatgcacacggatgctacagtatataccactctcaaacttaccctactctcacattccactccatcacccatctctcaccatcagtaccaaatgcactcgcatcattatgcacggcacttgcctcagcggtctataccctgtgccatttacgcataacgcccatcattatccacattttaatatctatatctcattcggcgacaccaaatatt

SEQ ID NO: 173810 - DNA, 336 bp, Saccharomyces pastorianus
aaattcaggaaaaactcgagagttactagtttacataccgtattacccgttagcacaccaagccatagtaacaacataccagctgcaagttttagcgggaataacactaccgatatacagtcccaacaattaatcgaaaaccagaagagtacatctgtatatttgaataacgtttctgaaaggattctgggaaatcaagaaatatgtcaaacaccaattaatcccgttactcctgtgctagatggggccgatcaaggtaaggaggacattcctgatagtatattagagctgaagatcctgatcgattctgtcaagaagaaagtaaataatgattaa

SEQ ID NO: 173811 - DNA, 285 bp, Saccharomyces pastorianus
ggtggaattggtgcacgtgaagctgccttaatcttttcagatcgatctcctgtcgttgaagtaccagtaactgtcccttgctcagatcgccttgcatttatttccgccaaaaagggtagcccacttgaaggtggtgacgatacagatgcgttgcccataggtggtttaggtttttcgatatctgagctaggtaccggagctgacatcattggtggagggggtggaggaggtggagcctgtactgggattttggcagatgacgataaagcgaccgatgacagcgga

SEQ ID NO: 173812 - DNA, 372 bp, Saccharomyces pastorianus
tattcagaatccgttattaactggtttgaagagcaccttcctacatttgatgttgatgtagacaaacgttttcgagctttgagggtacgcaagtactcccagatatgtcttttactttctttcattataatatgcattataatacccttattgaattgtttgttattgacgaacaaattcttcaagatatgtcatcatttaaagcatcacgttttcaataggcagtcgtgggtgcacaagacgcatatgtatcacaatcaatcattacagttgtgtttggcatgtttattttacttcaatttttattgttcaaggcgtaacagggatctcttggaaatcactaagcgtatggggaggatctccgttgcttaa

SEQ ID NO: 173813 - DNA, 450 bp, Saccharomyces pastorianus
atggaggagagtaagacaaaaagaaaagaggatcgcatagatttgaagaatacaccgcctcagaagaagtcaaaaagagattcaacaaatgacaaaactgcaagcacatcactacgttcaatcatgcccaggggttacaaaatgatggaaaacatgggttacaaagaaggagaaacattaggtagtaatgaaagtgccctaaaagagcctattaaggtagaaatcaatacaaaaaggaggggaattcgtgcagaaaagcccgacccatcaacaatgaatgacatgcagatgagtgaacaacgatttataaaaagagaaagtgaaatgaaaaataataagcggttaaaaaaaatttggtataggatccaaaaagttgcttttgaaatgatgggtgattccgatttatacaatccaggcgaagatccgagagactttaacgtactttggaga

SEQ ID NO: 173814 - DNA, 81 bp, Saccharomyces pastorianus
gcaacgtatacgtcgacgataaaacaagacgcatccaactgtacactgatcagaacaaaaacggttcatcggagcctcgac

SEQ ID NO: 173815 - DNA, 114 bp, Saccharomyces pastorianus; identical to SEQ ID NO: 173138

SEQ ID NO: 173816 - DNA, 162 bp, Saccharomyces pastorianus
atgattgttgggattccgttgttgataaaggcaataatattatgtatacagaatatactagaagttctcctcgaggatattagaatccttacaatggacttgatatttctacataaaaatattacgattattcctcattctgttttttatgtttcaccatcc

SEQ ID NO: 173817 - DNA, 114 bp, Saccharomyces pastorianus
ttcgctggaacagtgattgatgaccaagtcggtgatgaatttcataccaagcttatgtgtcttttcgatcaaggcaaagcagtcttcattcgtaccatatgttggccagacctt

SEQ ID NO: 173818 - DNA, 615 bp, Saccharomyces pastorianus
tcagccttttcctcaacgccatcaagaccttctgtattctgctcacctcctttctctttgttttcttccatagcagcatcttgctttaactcttcttcatcagacatggcttgctcttctgggccattttcttcgtcttcctttccctcatcattagtcatatccacatcatcttcagcaccttcttcttcgtcaagagctgtttctgtctcgccggcatcttcctcaggaccaggttcgtcgttttcattatcactttcgataccggattcttgtttgacttcttcgtcttcgtttccaacctcttccttgtttaaatcatcaggcattccatctgacatatcaacatcttcgtctgattcttcatgctctgaatctaaattcatatcttcaggaaggtctagggtttcgatttcaggaacattggcctccaaatcctcgccttcttcatctttaacttcgtcctcctgttcaccaacgtcgttttcctcttctgcattttcatcgttttcaatttcctcatcgccatcttcaggtgcatttgggtcctcatcccctctttccttgttatcccgctgttgttcgtcattttcagcagcttgtacatcttcctct

SEQ ID NO: 173819 - DNA, 192 bp, Saccharomyces pastorianus
ggtatgattgaagatgatcattcgacttcgcaacagcagcaaccattggacttcacatccgaacacacattgaagactgccgaaatggaacagcaagtggaaattttgaagttagaacaatccttgagcaatgccaggaagagattgggcgagataagaaggcatgcctactataaccaggatgatgattga

SEQ ID NO: 173820 - DNA, 339 bp, Saccharomyces pastorianus
agacataaggaggatagtgacaaagctgcggaagattctcacaaacacagaactgtagtgcagaatggagctaaccataggggtgacgaccaagaggaggcttccgagattttgggcttccaaatggaggatcttgttacgatgggatgtatcttggggatattcctattaagtatattaatgagtacactggcggcccctagaggctggaatgtccgtttcaatggagcacaattaaatgcaaatggtaaccggcagcaagagcaacaacaacaacaacaacaacaagcacaaggtcccccgggctgggacttcaatgttcagatattcgccatatga

SEQ ID NO: 173821 - DNA, 651 bp, Saccharomyces pastorianus
ctcaacaaaaagtacgactatgttgctactaaagttcctcaattttcctttacaaggttggctggtgcagatcctttcttaggggttgaaatggcatcaactggtgaagttgcttcatttggtagagatttaattgaaagctattggactgctattcaaagtaccatgaacttccatgtaccactacctccaagtggtatattatttggaggtgatacatctcgagaatacttgggccacgtggcttccatagtggccactattggttacagaatatacacaactaatgagaccactaaaacgtatctacaggaacacatcaaagaaaagaacgcaaaggtttctttgattaaattcccaaagaatgataagagaaaattgcgtgaactatttcaagaatatgacataaaagctgttttcaatttagcctccaagagagctgagagcactgacgatgttgactatattatgagaaggaatgctattgattttgctatcccattgttcaatgaacctcaaacggctttgttatttgcaaagtgtttgaaggcaaaaattgcagaaaagatcaaaattttggaatctcatgacgttatagttccaccagaagtccgttcctgggatgaatttattggtttcaaagcatattga

SEQ ID NO: 173822 - DNA, 126 bp, Saccharomyces pastorianus
atggaatctatatttctacaacctaatattacgattattcctcattccgttttatatgtttcattatcttattacattatcaatccttgcacttcagcttcctctaacttcgatgacagcatctca

SEQ ID NO: 173823 - DNA, 429 bp, Saccharomyces pastorianus
aagtcatattatgataaaaacgccatgggtggtgtcatatatgctatcctggtccctaactctctgaacggatttggtcaattctgctgcgttttgttagctttgtccactattgcaaataatattccaaatatgtatactgttgctttatccgctcaagctttgtgggcacctttggctaaaataccaagagtagtctggacaatggcaggtaatgctgccactttaggtatttccatccctgctacctattactttgatggctttatggagaattttatggattccattggttattatttggctatttatattgccattgcatgttcagagcattttatttataggcgttccttcagtgcttacaatgttgatgatgggatagttgggaacgtctacctatcggcattgcaggtactgctgccttaa

SEQ ID NO: 173824 - DNA, 225 bp, Saccharomyces pastorianus
gacctaattagtaagaaaaccaagacatcactgcttcctacgataaagagaacaatttgtaaaaaatgccatcggttgttatggaccccaaaaaaactggaaatcacatccgacggagagctttcggtaatgtgtgggtgcggtaccgttaaacgttttaatattggcgccgatcctaattacaggacctactcggagcgggagggtaatctactaaattcttag

SEQ ID NO: 173825 - DNA, 234 bp, Saccharomyces pastorianus
atgcttaatatctttttgaacagatctgtcattgtatttcaaaccaatcaatctcttaatgtcgaaaatggtgttttgtgggttagcggcgacttggttctttgcagcatcaccaatcaacctttcgtcgtcggtaaaagccacgtaagatggagttattctattaccttgttcattggcaagaatttcagtcttaccgttcttcataacagcaacacaggaataagtggtacc

SEQ ID NO: 173826 - DNA, 312 bp, Saccharomyces pastorianus
atggctttcagagtcccaaccgtcgatgtctccgttgttgacttgactgtcaagttgaacaaggaaaccacctacgatgaaatcaagaaggttgtcaaggctgccgctgaaggtaagttgaagggtgtcttgggttacactgaagacgctgttgtctcctctgacttcttgggtgactctaactcttccatcttcgatgctgccgctggtatccaattgtctccaaagttcgtcaagttggtttcctggtacgacaacgaatacggttactctaccagagttgtcgacttggttgaacacgttgccaaggct

SEQ ID NO: 173827 - DNA, 246 bp, Saccharomyces pastorianus
tggttgaagacattttccttcaagacatcttcatcctcatcttcatcctcatccttctcatccacgtccttcttatcctcatcctcgtccttgttgtcatcatttgaattagcatccttttcttcattttgttcatcttcgtcagaggaggagtacgaagctgcactcaactctccttcttcaaagtcatccaagttcttgaattccaggagctcggattctgaatctgaacttaaaacaggactt

SEQ ID NO: 173828 - DNA, 588 bp, Saccharomyces pastorianus
atgggccagttgctcaaacctaagaagactgaaataaccgagaaattaagacaagaggtgaataaagttgttgctaaatatattgatcaaggtgtcgcagaacttattccaggtgttttgttcattgatgaagttaatatgctagacattgaaatattcacgtatttgaacaaagcgcttgaatctaatatcgcccccgttgttgtattggcttctaataggggcatgactacagtccgtggcactgaggatgtgatatcaccacatggtgtgccacctgatttgatcgatagattgttaattgttcgtacattaccatatgacaaggacgagatccgtaccattatagagagaagagctaccgttgaaagattgcaagtagaaagtagcgcattggaccttttagccacgatgggtacagaaacttcgttacgttacgctttacaattattggcaccatgtggtatcctagcacaaacaagcaatcgtaaggaaattgttgttaatgacgttaatgaagccaaattgctgtttttggatgccaaaaggtcaacaaagattttagaaacttccgcaaattatttgtaa

SEQ ID NO: 173829 - DNA, 96 bp, Saccharomyces pastorianus
atgcatttgagtaacactgctaatccatatagagacattgcagcattcttgtttacatatttgaagagtctctcaaagtatagcgttcaaaattct

SEQ ID NO: 173830 - DNA, 1317 bp, Saccharomyces pastorianus
ggaacgccacagaagaacaagaggtctgcgagtatatctgtttcacctgcgaagaagacagaggaaaaagaaataatacaaaatgattcaaaggcgatattatctaagcaaactaagaggaaaaaaaagtatgcttttgctcctataaataacttaaatgggaagaacaccaaggtatccaatgcaagtgtcctaaagtcaatagccgtttcacaagtacgaaatacatcaagaacaaaagatataaacaaagcagttagcaagagcgtaaagcaattaccaaattcacaagttaaaccgaaacgggaaatgtctaatttgagtaggcatcacgatttcactcaagacgaggacggccccatggaagaagtaatatggaaatattcacctttacaacgagatatgtccgacaaaacaacaagcgctgccgaatattctgatgactacgaagatgtccaaaatccctcttctacacctatagtccctaatcgactgaaaactgttcttagtttcacaaatatccaagtacccaacgctgacgtaaatcaattcattcaagaaaatggaaatgagcaagtgcgtcctaaaccagcagaaatatctaccagggagtctctccgtaatatagatgatattctcgatgatatagagggcgatttaactataaaaccgacgataacgaaattcagcgatttgccatcttcacccatcaaggcacccaacgttgaaaaaaaagcagagatagatgcagaagaagtagacaaaatggattcaacaggagatagtaacgatggcgatgactctttgatagatattttaactcaaaagtatgttgagaaacgcaagagtgagagtcagataacaattcaaggcaacaccaatcaaaaaagtggagcccaggaaagttgtgggaagaatgataacacaaaatcgagaggagaaattgaagatcatgaaaatgtagacaatcaagccaaagcaggcaatgcattttatgagaatgaagaagacagtaattgccaaagaattaaaaaaaatgaaaaaatagaatacaattcttcagacgaattttcagacgattcactaattgaactattgaacgaaactcaaacacaagtggaacctaacactattgaacaagatttggacaaagtggagaaaatggtctctgacgatttgagaattgctactgattccactttatccgcatatgctctcagagctaagtctggtgctccaagagacggcgtagtacgattagtaatagtaagttacgtagtgttgaattgccaaaaattggaacgcaaaaaatactag

SEQ ID NO: 173831 - DNA, 93 bp, Saccharomyces pastorianus
tcgactctagaggatccctgggttttattcgaatattcgttgggtgagcactgttttataccattcgagactattatacaaatagaaaagaag

SEQ ID NO: 173832 - DNA, 660 bp, Saccharomyces pastorianus
gaagtagatgaaccggaggcggatgagcctgattcagtggcagaagttgaaccggagactgatgagcctgattcagtggcagaagttgaaccggagactgatgagcctgattctgtgacggaagttgaaccagaggcggatgagcctgtggcggaagttgaaccagaggcggatgagcctgtggcggaagttgaaccagaggcggatgagcctgattcagtggcggaggatgagcctgatgtaatggaagtagatgaaccagaggcggatgagcctgattcagtggcagaagttgaaccggagactgatgagcctgattcagtggcggaagttgaaccagaggcggatgagcctgtggcggaagttgaaccagaggcggatgagcctgattctgtggcggaggatgagcctgatgtaatggaagtagatgaaccggaggcggatgagcctgattctgtggcagaagataagctggagactgatgagcctgatgaagtaatagaagataagctggagactgatgagcctgatgaagtaatagagctcgagacttcagaggacgaggttgatggagcaatggtgctcgagacttcggtggaggatgatgttaactcagtgagagagctcgagacatcagaagcagatgaggtcgactcaaca

SEQ ID NO: 173833 - DNA, 858 bp, Saccharomyces pastorianus
atgcatgacccaagaatgataatgaatttgaatttgatggcacaagaagatccaaaactaaacactttaatggagactgtcgcaaagggtcttgccaataatagtcaactggaggaatttaaaaagtttattgaaattgccaaaaaaaggtcactagaggagaacccagttaataagcgtccatctgtcacaacaacgcgacctgcacctccctctaaagctaaagacgtagccgaagatcaccggttaaactcgataaccttggtgaaaagttccaaaaccgctgccacggaacctgaaccaaaaaaagctgatgacgagaatgcagagaagcaacagtccaaagaggcaaagacaactgccgaatcgactcaagtagatgtcaagaaagaagaagaagatgtgaaggaaaagggtgtgaaatcagaggatacacaaaagaaagaagataatcaagtggtaccgaaaaggaaaagaagaaagaacgcaataaaggaagataaagatatgcaattgaccgcgttccaacagaaatacgttcaaggtgcggagatcatcctggagtatttagaattcacccattcgaggtattacctgcctaagaaatcagtagtagaatttttggaggatacgggtgagattataatatcttggattgttatacacaattctaaagaaattgagaagttcaaaaccaagaaaataaaagctaaactgaaagccgaccaaaaactaaacaaggaagatgccaagccaggctctgatgtggagaaggaagtcagctttaatcctctttttgaagccgattgccctacccctctctacaccccaatgacaatgaagttatcgggaattcac

SEQ ID NO: 173834 - DNA, 582 bp, Saccharomyces pastorianus
ttccccaaggttgaaagtgaaaacttggcggtattaagaccgaatgacagactaaggaccccgagtgagctacaagaagaacaggaaatagcccaagctgccaaattagaagaattattaagaagcggtaagccggacgatttgaaagaagctaataaactgatgaaagttatggcaggttttaaagacgacactaaattagctgtcaaacaggcgatcaataatgaattaaacaaacttaaaagaaaggcagatttgttcaatgaaatgcttacttctaccgatgaacccgacctagaaaacgaaactgttcaagaactgtatggcgatttaaaatctgcgcagccaaagttcaaaaaacttattgaggaggaacatgatgacgatatgctagttgaaaacttattgaaatttaatgaactggtgctccaactgttagagaagtacaggtcaataaaaggtgtaaaaggtgaagaaaaaagtttcaacagcgcgacagaaccttcaaaagaggttagcttaattgattatggtgatgattcaagttcgagcgctcctcctgacccatacttgagcaaatca

SEQ ID NO: 173835 - DNA, 693 bp, Saccharomyces pastorianus
atggaaaaatggttgaatagaaattctctttggagggccatttggaagtcatttggtaggactatttctgtggctatgctgtatgaaacgacatctgatttactttctgtagtacagccccagtttctacggatattcatagatggtttcaacccggaaacatcttctaaatatcctcctttaaatggtgtatttattgctctaacccttttcgtaattagcgtggtttctgtgttccttacaaatcaattttatattggaatttttgaggctggtttggggataagaggttctttagcttctttagtgtatcagaagtccttaagattgacgctagcagagcgtaacgaaaaatctactggtgacatcttaaatttgatgtctgtggatgtgttaaggatccagcggtttttcgaaaatgcccaaaccattattggcgctcctattcagattattgttgtattaacttccctgtactggttgctaggaaaggctgttattggagggttggttactatggctattatgatgcctatcaatgccttcctatctagaaaggtaaaaaagctatcaaaaactcaaatgaagtataaggacatgagaatcaagactatcacagagcttttgaatgctataaaatctattaaattatacgcctgggaggaacctatgatggcaagattgaatcatgtg

SEQ ID NO: 173836 - DNA, 645 bp, Saccharomyces pastorianus
atggaatctattatcctcagtattgccatctttattggcgtcctccttggcactagcgttggtactttcagtggtagtggcattagtgctggagttggtgctagcagtggtagtagcactagtgttggagtcggtactttcggtggtagtagcactagtgttggagttggtgctagcagtggtagtggcattagtgctggagttggtgctagcagtggtagtggcattagtgttggagtcggtactttcggtggtagtagcactagtgttggagttggtgctagcagtggtagtggcattagtgctggagttggtgctagcagtggtagtggcattagtgctggagttggtgctagcagtggtagtagcactagtgttggagttggtactttcagtggtagtagcactagtgttggagttggtactttcagtggtagtcgcactagtcctgacgttgatgctggcagtggtagtcgcactagtcctgacgttgatgctggcagtggtagtagcattagtgctggagttggtagtcgcattggtactggcattagcactaccatgaatgcatgtgtcgctgtcctcatcactgctgcaatactttctgtacctgtcactgctattgctctcctggaagctagacgg

SEQ ID NO: 173837 - DNA, 1167 bp, Saccharomyces pastorianus
cggtaccggggatcctctagagtcaccattaaaaaaacatggtacaagttgagcaactatactcgccaatttaacggctcattgacatttttgaacgatgattatgaatttttcatcactgatgacaataacttggaaatggaatccacctttgccaactcagttgatgttttgaatccatacactggtgagatggacgctaagagacatgctcgtgagttcttgcaacaatacggctacatggtcgaaaacaagaccgatttccccatttttgcctccaactctaaaagagttcacgataccgctcaatactttattgatggtttgggtgacggcttcaacatttccttgcagaccgttagtgaagctatgtctgccggtgccaacactttgagtgcttgtaattcgtgtcctgcctgggactatgatgtcaacgatgacattttggacgaatatgacaccacctatttggacgacattgccaagagattgaacaaagaaaacaagggcttgaacttgacctcggacgatgctgacactttgttcgcatggtgtgcatacgaaattaacgtcagaggttacagtgatgtctgtgatattttcagcaaagatgagttggtccgttactcttacggccaagatttggagacgttctatcaagaaggacctggttatgatataattaaatccgttggttctaacttgttcaatgctagtgtgaaattgttaaagcaaagtgaaacccaagacctaaaggtctggttgagtttcacccacgatactgatattttgaactatttgacaaccatcggtataattgacgacaaaaacaacttgactgctgaatacgttccatttatgggcaacactttccacaaatcctggtatgttcctcaaggtgcccgtgtgtacactgaaaagttccaatgttctaatgacacttacgtcagatacgccattaacgacgccgttatcccaattgaaacctgttctaccggtccagggttctcttgtgaagtaaatgacttctacgactacgctgaaaaaagagttgccggtaccgacttcctaaaggtctgtaacgtcagcagcgtcagcaacgtcactgaattgaccttcttctgggactggaacaccacccactacaacgccactttactaaaacaa

SEQ ID NO: 173838 - DNA, 2157 bp, Saccharomyces pastorianus
caatttcaagatccccgcggagaaccaagcctggtcatgactttaggcaatatcgtacacgagttattgcaagactcaatcaaatacaagctctcgcataataaaatttctatggaaatcataatacaaaagctggattctttgttagaaacttattctttttcaattatcatttgtaatgaagaaatccagtacgttaaagaattagttatgaaagaacatgctgaaaacattttgtacttcgtcaataaatttgtttcgaaaagtaactatggttgctacacatcaatttccggaacaagaagaacacagccaatttccatatccaatgtgattgatattgaagaaaacattcggtctccaatatatggtcttaaagggttcctagatgcaactgttgaagctaatgttgaaaacaataaaaaacacatcgttcctttagaagtgaaaactggaaaatccagaagcgtttcatacgaggttcaaggccttatttatacacttctgttaaatgatcgctatgagataccgatagagttttttcttctttattttacgagggataaaaatatgacaaagttcccttctgttctgcactccattaaacatattctcatgtcccgaaatagaatgagtatgaattttaagcatcaactccaagaggttttcggacaggctcaatcaaggtttgaattaccacccttactgcgcgattcatcttgtgattcatgtttcatcaaagaatcatgcatggtgttgaataagctactagaggacgggacaccagaagaaagtggcctggtagaaggtgagtttgaaattttgacaaaccatttgtcgcaaaatctcgccaactacaaagagttttttacaaaatataacgatctaataactaaggaggagtcaagtataacatgtgtaaataaagaactcttcttattggatggttccacaagagaatccagaagtggaaggtgcctttctggcttggttgtgtcagaggtggttgaacatgaaaaaacagagggagcgtatacatattgcttctcaagacgtagaaatgataataactcgcagtcgatgttatcatctcaaattgctgctaatgactttgttattattagtgatgaggagggtcatttttgcttgtgccaaggtcgtgtacaatttataaatcccgctaaaattggtatctccgtaaaacgaaagttattaaacaataggcttctagataaggaaaaaggagttactaccatccaaagtgtggtcgaatcagagctagaacaatccaatctcatagctacccaaaatttggtcacatatagaatcgacaaaaatgatatccaacagagtttgtatttagcgcgatttaatcttttaagcttgtttttaccagctgtttcacctggcgtggatattgttgacgaaaggagtaaattatgtcggaagacaaagagatctgatggaggtaatgaaatactgcgatcacttttagttgataatagagcacctaagtttagagatgcaattgatgatcccgtcattccgtataagctttcaaaggatacaacattgaacttgaatcaaaaagaagcaatagacaaagtaatgagggccgaagattatgcattgatattgggaatgccagggactggtaagactactgttatcgcagaaattattaaaattctcgtttccgaggggaaacgcgtgcttttgacatcatacacacattcagcagtggataatattttaataaaattgaggaacaccagcattagcataatgagattgggaatgaaacataaggtccatcctgacacgcaaaaatatgtcccgaattacgcgtcagtgaaaagttataacgattatttgtccaaaattaacagcacctctgttgttgctaccacctgcttaggaattaacgatatactatttacactaaatgaaaaggattttgattatgtgattttggacgaggcaagtcaaatttcaatgcctgtcgctttgggacctctgcggtatggaaataggtttattatggtaggagatcattaccagctaccgccattagttaaaaatgacgcagcccgattaggtgggttagaagagtcactgttcaagactttctgtgaaaagcatccggaaagcgttcag

SEQ ID NO: 173839 - DNA, 3366 bp, Saccharomyces pastorianus
catcatcgtgtattttcagcgctcttggctttcttggcgctagctaatgctgcttcggcgagtacagaagcatgtctgcctacaaacgagagggaaaatgggatgaatatcaacttttacgagtatgcgttaggtgacaaatccacatatactgattctgcatatatggcctatggatatgccaatacaaaaaaagtgggctctgttagtggacagacggctctttccatttattatgacattccttgtgatagcactcccacatgctctgacgatgattccacccctactaatgaagttgcgcttatgaagcgttacgatgaaaactgttccagtgaaaatgttcctatgaaacgagatacagctgattgcaacctagatgctgcttattggagttcagatctatttggcttctatactactccaacaaacgtaactgtggaaatgacaggctactttttaccaccagaaaatggttcttacacatttacctttccaagggtagatgactcagcaattttatcagttggaggtgacgctgcattcggatgctgcgaacaacagcgatcacctgtcacttcaaccgatttcacagtcgatggtgtcggaaaacaggacgagtatgtcgaagggtcagtatacatgtatgttggttactactacccaatgaaaatagttttttcgaatgctaattcttcggctacacttccaattttaatgacattaccaaacggtactactatttacgatgactacgaagggtttgtctattcttttgacaataacctggctcaagccaactgtactattacagatcctgcaagacacacacttgctgccatagcaaggaccagaacagcaccatggacaggagcatatacaacaacactgacacaaacgtctttttatactggcgtgaacggtttgactacgtacgagaccatttacgagattgaaacaccaactagtgttctctcatccaatagtccatctactcacagatcaactgaacctaccacatcatccgaatatctaaccaccagtgctactacatctactgaaacgagagttgtcagttccctggcatcatctactaatttaagcatagtttctgtatcatatcatcaaactgagaccaccagcgctgctacatcatctgaagttgagaccaccagcactgctacatcatctgaagtcgagaccaccagcgctgctacatcatctgaagttgagaccaccagcactgctacatcatctgaagtcgagaccaccagcgctgctacatcatctgaagtcgagaccaccagcactgtgatgtcatcttcggaacccattagtagtgttactaaatcattggctccagccgagatcaccggttcttctacaatctcttccaatttaactacgagcgctgctacatcatctgaagttgagaccaccagcactgctacatcatctgaagtcgagaccaccagcgctgctacatcatctgaagttgagaccaccagcgctgctacatcatctgaagttgagaccaccagcgctgctacatcatctgaagtcgagaccaccagcactgctacatcatctgaagtcgagaccaccagcgctgctacatcatctgaagtcgagaccaccagcgctgctacatcatctgaagttgagaccaccagcgctgctacatcatctgaagttgagaccaccagcgctgctacatcatctgaagtcgagaccaccagcactgctacatcatctgaagtcgagaccaccagcactgtgatgtcatcttcggaacccattagtagtgtcactaaatcattggctccagtcgagatcatcggttcttctctgtcttctgcaaattttaatactaatgtggcgacttctactcaatccagggtcaccagttcctcaacgtcatctaatcatattattgtcccaacgtaccctagcaatcaaactgtagtctctagcttttctacctcaactgcctctgggctcactaaatcatatacgtcttttggatctcttactgtctcactcacttccattgcgaccgatactagattatctgctgttaatgcaagggataccagcgcttccacatccagtagcgaagctaccggctcgtctgtaccaactgctagttcaataattgactcttcaacatccctcagtcaaattggtgctcgtagttcttccaccattaactctatggataaaaaaactacagtttcttccacattcaattcgactagctcaggtagccaaagaaaatccattatttctttcaccacctactccaaaaattatgaaaccattgtttctgacgtacccagtagtaaaaccgattttacaagtctttccactgggtccagcgaatctggaagtaaaattggtgtttttacttcttcctctgcttcatcttccaaatcacaagaaacaaccagtagtgatgtcacttccggaccttaccaggatcgtactactatccaaagagccactcctactgctacaaaaacaaatgaacaaactacattagttactgtaacttcctgtgaatcccatgtgtgtaccgagtctgtatcatcggctatcgtttctacagccacaactacggttagtggcgtggctacagaatacactacatggtgtcctatgtctaccacagagccaacaaaaccaactacgttgattacagttacttcttgcgaatctggtgtctgttctgagaccacctctcctgccatcgtttctactgctacgaccactgttagcggcgtcgctactgaatacactacatggtgtcctatgtctaccacagagccaacaaagcaaactactttagttacagttacttcctgtgaatctggtgtctgttccgagaccacctctcctgccatcgtttctacggccacaactgtcgtcaatgacgctgttacagtgtacaccacatggtgtccattaacaaccagtactactacagttagcgccagtgttaccaccggcgttactagcacccctgccattcctgaagcaaccgaaacggaaaccacaacccacggcaacggcaatggtgtatcttcgatttcgggatctggttatgttgaaggacatactaccgctaccaatgaaatttcacatgtaaatggtgcttcttccgtgttggcaactgccaacaccgaggtacttgctagttccaacttgagcactgtctcacaacaacctcgtagcacttccacaagcggcatgccagcatctagcaccgcctctctagaaatgtccacctacgctggtattgccaacggactactagccaatagtggtctgagtgttttcattgcctccgtattattggcaatcatt

SEQ ID NO: 173840 - DNA, 6438 bp, Saccharomyces pastorianus
atgattaagttaatgtctactttagaggatcaagtctgtaaaagaaaactttggggtaattctggttcgccatgggagttcaatttgagagatacattgcgttggctaaagttactcaaccaatattcgatttgcgaagatgtggacgtgttggactttgttgatataatcgttaagcagaggttccgtactatcagcgataagaataaagcacagcttctcattgaagatatttttggtaaattctcaactaaagagaactttttcaaacttacagaagactatattcaaattaacaacgaggtagctctaagaaatccccattaccgctatccaattacccagaatcttttcccattagagtgcaacatcgccgtttatgaatctgttttgaaggcaatcaacaataattggccgttggtacttgttggaccctcaaactccggtaaaacggaaacaataagatttttagcctcaattttgggtcccagagtagacgtgttttccatgaatagtgatatagatagtatggatatccttggtggttatgaacaagttgatttgactagaaaaatatcatatatcactgaggagttaacaaatatcgtaagagaaataatctcgatgaatatgaagctctcaccaaatgctaccgcaatcatggaaggtttgaacttattgaaatatttgctcaataatattgtcacacctgagaaattccaagatttcagaaatcgttttaataggttcttttcgcacttagaagggcatcccctattaaaaactatgagtatgaatattgaaaaaatgactgaaatcatcactaaggaagcttcggttaaatttgaatggtttgatggcatgttggtcaaagcagttgaaaagggccattggctaatcttagataatgctaatctttgttctccttctgttcttgatagactgaactctctattggagatagacgggtcgctgctcatcaatgaatgtagccaagaagatggccaaccaagggttctcaaaccccaccctaacttcagattatttttgaccatggatccaaaatatggtgaattatcccgagctatgagaaacagaggtgtggagatttatatcgacgaattgcacagtcgttctacagccttcgatcgcctcaccctaggctttgaacttggagagaatatagactttgtttctattgatgatggcatcaaaaaaataaaactaaatgaacctgatatgtcgataccattaaaacactatgttccatcctatttaagcagaccatgcatatttgcacaagtacatgatattttattattatctgacgaagaaccaattgaagaatctcttgctgctgttattccgatttcccatttaggggaagttggtaaatgggccaataatgtattgaattgcacggagtactcagaaaaaaagatcgcagaaaggctttatgtttttataacatttttgactgatatgggtgtcttagaaaagattaataacctatacaaacctgcaaacctaaaattccagaaggctttggggctgcatgataagcaattgacaggggaaactgtctcgcttaccttgaacgaatatgttcttccaacagtcagcaagtattcagataagatcaaatctccagagtcgttatacttattatcaagtttacgtctgctactcaactctttgaacgctctcaaattaatcaatgaaaaatcaactcatggtaaaattgatgaactgacgtatattgaattatctgcggctgcctttaacggtcgccatttgaagaatattcctcgcattccaatattctgtattctctacaatattttaacagtaatgtctgaaaaccttaagacggaaagtttattttgcggctccaaccaatatcaatattattgggatttactggtaattgtaattgcagcattagaaaccgccgttacaaaggatgaagcacgtctaagagtatataaggagttgatagatagctggattgcgtccgtaaaatccaaatcagacattgagataactcccttccttaacatcaatttggaatttaccgatgttttacagttgtcgaggggccactccataactttactatgggatacattcagaaaaaattatccgacaacctccaacagctggctagctttcgaaaagctcattagtttatctgaaaaatttgacaaagtacgtctgctccaattttctgaatcatataattctattaaggatttgatggacgttttccggttgctaaatgatgatgtgttgaataataaattaagtgagtttaatctcttgctatcaaagttagaagatggtataaatgaattggaactaatttcaaataagtttttaaacaaaagaaaacattattttgctgacgaatttgacaatttgatcagatataccttctcagttgacacagccgagctaataaaagaacttgctcccgcttcttctttagccacgcaaaaacttacaaaacttattaccaacaaatacaattatccgcctatctttgatgttctttggacagaaaaaaatgctaaattgacttcctttacttctaccatattttcatcccagtttctcgaagatgtcgttcgtaaatctaataatttgaaatcattttcgggaaatcagatcaaacaatctattagtgatgcagaattgctactttcctccactatcaagtgttcacctaacctacttaagagccaaatggagtactataaaaatatgttactgtcatggctcagaaaaattattgatattcacgtcggcggggactgcttgaaattgactttgaaagaactttgctctctcatagaagaaaaaactgcttcagagacacgcgtgacttttgcagaatacatctttcccgctctagatttggctgaaagttcgaaatcattagaagaactgggagaagcttggatcacatttggtacaggtttacttctgctattcgtcccagattctccctatgatccggcaatacacgactacgttttatatgatttatttttgaagacaaagacattttctcaaaacctaatgaaaagttggagaaatgttcgtaaagtaatcagtggcgatgaggagattttcacagaaaaacttatcaataccataagcgatgacgacgcacctcaatcccctagggtatatcgtacaggcatgtctattgactctttatttgatgaatggatggcatttttgtcgtcaactatgagttctcgtcaaataaaagagctagtgagttcctacaagtgcaattcagatcaatcggatcgtagattagaaatgctccaacaaaatagtgcacattttttgaatcgtctcgaaagcggttattcaaaatttgctgatttaaatgatatcctcgcgggatatatttacagtatcaactttggctttgatttattgaagcttcaaaaatctaaggatagagcatcattccaaatttctcctttatggagtatggaccctatcaatatttcatgcacagagaatgttttaagcgcttatcatgagctgtcaaggttcttcaaaaagggtgatatggaagatacttcgattgaaaaggttttgatgtacttcttgacgctgtttaagttccataagagggatacaaatttactggaaatttttgaggctgctttgtatactctgtattcaagatggtctgtgagacgtttcagacaggagcaggaggaaaacgaaaagtcaaatatgttcaaattcaatgataattcagatgattacgaggcagactttagaaagctgtttccagattatgaggacacagctttggtaactaatgaaaaagatatttcgagtcctgaaaatcttgatgacatctatttcaagcttgccgacacatatatctcggtatttgacaaagatcatgacgccaacttttcttctgagttgaagagcggtgcgataataacaacaattttgagtgaagatttaaaaaacaccaggatagaagagttgaaaagcggatcgttgtctgctgtgattaatacacttgatgcagaaacacaatctttcaaaaacacggaagtttttggtaatatcgatttttaccacgatttctctattccggagtttcaaaaagcaggtgatatcattgaaactgtgcttaagtcagtcttgaaattgttgaagcagtggccagaacatgccaccctcaaagaattatatcgagtttcccaagaatttttaaactaccccattaaaacacccttagcaagacagcttcaaaagatcgaacaaatatatacatacctagctgaatgggaaaaatacgcttcctcggaagtatccctgaataacaccgttaaactgattacagatttgatagtttcatggagaaaactagaattacgcacctggaaaggtcttttcaactcggaagacgaaaaaaccagaaaatctattggaaaatggtggttttatttgtacgagtcaattgtcatttcaaattttgttggtgaaaagaaggaaacggcccctaacgctacacttttggtaagctcacttaacttattttttagtaagagtacattgggcgaattcaacgctaggctagatcttgtaaaagcattctacaagcacattcaactaattggattgaggagctcgaagatagcgggcttgctccataatactataaaattctattatcagttcaaaccattaattgatgagcggattacgaatggaaaaaagagtctggaaaaagaaattgacgatataattcttttagccagttggaaagatgttaacgttgatgccctgaaacaaagttctcgtaagtctcataacaacctttacaaaattgtcagaaaataccgtgatttgctaaatggggatgcgaaaaccattattgaggccggtcttttgtattccaacgaaaataaactaaaactccctactttaaaacaacatttttacgaagaccccaacttagaggcttcgaaaaatttggtgaaagaaatttctacttggagtatgagatctgcgccattaagaaatattgacacggtagcaagtaacatggactcctacttggaaaagatatcatcacaggaattccctaacttcgcagatttagcatcggacttttatgctgaagctgaaaggttacgtaaggaaacctctaatgtatatacaaaggagaacaaaaagaggttggcatacttgaagactcaaaaaagtaaacttttaggtgatgcattgaaagaattgagaagaatcggtttaaaagtcaattttagggaagacattcaaaaagttcaatcttctacaacaactattttggcaaacattgcccctttcaataatgaatatttaaattcgtcagacgcattctttttcaaaatccttgaccttttacccaagctgagaagcgctgcatcgaatccaagtgatgatatccctgttgctgctatagaaagaggtatggcactcgcacagagtttgatgttttccctgattacagttcgtcaccctctatcagagttcacgaatgattactgtaagattaatggtatgatgttagacctagaacactttacttgcttaaagggcgatattgttcattcttcattaaaagcgaatgtagataatgtcagattgtttgaaaagtggctgccttctttgttagactatgccgcacagaccttgtctgttatttcgaaatactcagcaacttcagaacaacaaaagatcttgttagatgcaaaatcgaccttatcttcgtttttcgtacacttcaattccagtcgaatttttgattcttcatttatcgagtcatattctagatttgagttattcattaatgaattattgaagaagcttgaaaatgcaaaggagacagggaacgctttcgtttttgatatcattatagagtggatcaaagcaaataaagggggtcctattaaaaaggaacagaagagaggcccttcggtggaagatgttgaacaggctttccgccgtactttcacatctattatattatctttccagaaggtaattggagatggaattgaatctatatccgaaactgatgataactggttatcagctagcttcaagaaagttatggtaaacgttaaactattacgatccagtgttgtttctaaaaatatagagacagcattatccttgttgaaggactttgattttaccactactgaatcaatttacgttaaatcagttatatcctttacactaccggtaatcacacgttattacaacgcaatgaccgtggttcttgaaagatctagaatctactacacgaacacaagtcgtggtatgtacattctatcgacgatattgcatagcttagccaaaaatgggttctgttctccggagccaccatctgaagaagttgacgaaaaa

SEQ ID NO: 173841 - DNA, 213 bp, Saccharomyces pastorianus
ctcacagtctacttgggcttaaaccccccacttgggcatggcctactgtttagttgcctcaagcctactgttcagtcacttactgttcagtcgcctcgtttcattgccggttacacggcaaatttgttatttggtgtcatttatggtttaccgacattttttttttgtttttttacaagaggaacgaaaagaagcacgctcaagaaaatggtg

SEQ ID NO: 173842 - DNA, 114 bp, Saccharomyces pastorianus
aaaaaaaaaaaagaaataaagattgcagcacctgagtttcgcgtatggtcacccactacactactcggtcaggctcttaccagcttaactacagttgatcggacgggaaacggt

SEQ ID NO: 173843 - DNA, 114 bp, Saccharomyces pastorianus
catgtattactcgatgatcgtaaaggtgaaactaagataattgcggatggcgatctgtcgggaggaagggaattcttagtgtgtgctttcacacttactgaaaagggcagtcat

SEQ ID NO: 173844 - DNA, 168 bp, Saccharomyces pastorianus
ccaccgattaaggaaggctgtataaccgaacaggtacgcgagttctatggacttgaatcaaagaaaggaaaaaagggccagcatgttggatgctgtggctccaggacagacctgtctgctgacacagtggaactgatagaaagaatggacagattggctgaaaatcag

SEQ ID NO: 173845 - DNA, 351 bp, Saccharomyces pastorianus
atggacaacgagttcgaagagtgcgttcttctaactttatctccaaaaggtcaatatcaacaagctttggatattaccattgctccagaggaagatgttcaattcgtcgttaccggttcgtacactatctctttgactggtaactacgttaaacatccattcgatacacctttagaagacaactcttctgattccgatgacgacgaagaggactactacagtgaagaaaaatcctcaaatggagaggaagaaaaagacgacgaagagttgagttctggtgacgatgaacttgatgatatggtagatgctagtgacatcgaaagccgtcttgaggagttagttgaaaaggac

SEQ ID NO: 173846 - DNA, 3105 bp, Saccharomyces pastorianus
atgagaaatccgattgaattgctaactttccagctgactaagtttatgattcaagcttgtgaacagtatcccgttctttatgaaaatataggcggcatcatttcaacttattttgagcgtgtattaaagatttttactattaaacaatctggtctactatcattagtgggctttattaatgcatttatccagtttcccaactctacagagcttactaaattcacctggaaaaagttagcgaaacttgtgcttcgtggatcatttctaaacgaagttgataagattttgaattcctcagcaacgtttaccaatgattcaatcgtccagtattacgatgctggaaatgagctatccagtgcctacttattggaattaatatctcgcttgcaagtttcgctaatatctcatctgttaaacacttcacatgtcggcgccaacttgagtgagttcttactaaatcaacaataccaattttacaaatttgatcaagaagtagccgatgaaaacgatgatacgaagtgtattgatgacttttttttcaacgtaagaagcaataaacagttttttacagacatgtgtaaaatttccctgcaattttgttctgagtcacatattctcgacctatctacagacaaccgtgcaagattttcttttgatactcgagcccactacctacaaacgctatgtttaattccgtttatagaagatacagaaagcgagctttttgaaagttttacaaacgttgtttctgaatctattgataaatttttcttatctgatgtcgttacaccatctttgataaaagcaattgtagcttctgcctcattactgaattttttcacggaaaaattgtcattaactctgattcgtatgtttcctttattggtagcgtctccacatatcacgactgaaacagttaatgatgttgcaaaaatattcaccacagggttataccctctaaatgaagatgcaattgtgagtacaatttattccatgaacaacttattagctgtttccgaggacggatcgcccgtcccggtgctccgtgagcgccaattaacaataacatctggaaaaaatattgagaaagactactttcccttgcgaaattcatctgccagtttggatggcactggtgctctgctcggaaatacaactgtgggccaactttcctcccatgatgtcaatagtggagctactatgacataccatgcctctttgatatctaattgtgtggctgcaacgactacaatcgcctcatactataacacccaaagcataacagctttgactatctctattcttacgcaaaaagttaattctatgtcaaaggaattagacagtgttattttgaattctttggcaagactggctccgaatacttcactgacagaattttcgcttttactaaagttcttcaaatcgagaactgttattgcaacaaaaattgatgatagcgcactattgaaaaatattattaaagcgaaatgtgtgatatcaaaagaattgttggccaggcatttttcaagtgacttatatttcatgtatcttcatgatctattggactcaatcattgccagtggggaagtagaacgattggaacatcacagacctcaaacggagatttcccgtgttgctgatcaaatcgctacctacttagagcccctcgccgctctactacctgttccaggcgatacgccattggacatcaataaggatgaagtcactacaaacaagtttaggaacgcctggtttaattttgtcatccatgggtaccacttgggcgggcctattgtcaaacgaaatttttctttcttattaactattgcctataattcaccaccgctggcttctgaatttcctgctaataacaaggagctttcattggaaatgaatacaattttgcgccgcggttcatctaacgaaaatatcaaacaacaaaaacagcagataaccgaatatttcaataccaatattgttcagtacagaacaacttcatcgtctaaaatcatgtttttagcggctgccgttcttctagaaacgataagatgcgaggcaggtgattgttcgaagactctactgtacttctcagacccctccattctttccggttcaattgagaagtgtattgcagttttgtcggtttccatgattagaaaatatgctaggttgattcaaaagggtaacgatgccatattcaactccaaaatgattgctcaacaacttaataacttgctactttgcctttctcatagggaaccaactttgcaggatgccgcttttcatgcctgtgaaatatttatcagatctattccatcatcgttatgtcatcattcgtctctctacaccttattagatatgtttacagccctatttgatagtatcttggactcagaggcgcataaatttgaaccacggtatgaatttaaattaaaacattctaagacaacaatattggttccaagctcatcgtcctggcgcgctacgacactatcaagattgcacaagtcagctaaagaatgggtaagaattctattgaatagaagcaaccaggatactaagattttgttgcaatcatacatatcagatctcggtgagtacagcaggctaaattctgttgaatttggtgtctcatttgccatggatatggctggtttgattttacctgcagataaggaattatcaaggcttacttattatggtccagagaaacctaacacgatttctggatttatatctttacattcttggaggtcaaaatatcttttcgataccgctattacatcatcaccagaggatatcaaaaggcaaataggtatttccactcaaaacataagaaaaaatttgaccttaggaaataagattataactaaagacgtaactgattttcttgatatggctaccgcgttgttaattcttggcaatggtgcaccagcgtcattgatatatgatattgtgcacatcccgttcgaagtcttcacctctgcatctttaaagattgctacaaacgtatggttaacaatcataactgagaagcccgaagttgcacatttgcttttagttgaagtatgctattgctggatgcgctccattgatgacaatata

SEQ ID NO: 173847 - DNA, 153 bp, Saccharomyces pastorianus
atggaattcttgtatttaggttttcgtaaatcatcgttttgtataatggatttcacaacgtccaatgggtatactgtcaaccacaacattgtcccggaaaatgcaccaaataagcataatttccaaggaggaatttcgtttcttgttagtccc

SEQ ID NO: 173848 - DNA, 924 bp, Saccharomyces pastorianus
atgttagacaacgagaatgcctgggggtccacaaaaggagaatattatggggctgatgatttagatgatgacgaaggtgctaaggaaatagaaaaggaagctttacgacaacaaaagaagcatctggaagaacttaatatgaacgattacttagatgaagaagaagaagaagagtgggccaaaagtgccaaagaatttgacatgggtgaatttaagaactcgaccaagcaggctgatactaaaacttccataacggatattctaaatatggatgacgaagcaagggataactatttaaggacaatgtttcctgaatttgctccactttcaaaagaattcacagaattagctccaaagtttgacgaattaaagaaatctgaggaaaatgagttcaataaattaaagctaattgcacttggaagttacctaggcacaatatcatgttactatagtatcttgttgcacgaactccataataatgaagatttcacatctatgaagggacatccggtcatggaaaagattttaacgacaaaagagatttggaggcaagccagcgaattgccatctagttttgatgtgaatgaaggagatggttctgaaagtgaagaaaccgcaaacattgaggcctttaacgaaaagaagctgaatgagttggaaaacagtgaagattctgatgcagaggatgaaggaaaacacaagcaagaaattgatgaagaagaaagagaaagcgatgaagaagaagaagatgttgatattgacgattttgaagagtacgtagcacaatcacgtctgcattctaaaccgaaaacatcatcaatgcctgaagctgatgatttcattgaatctgagattgctgatgtggacgcacaagacaaaaaagctcgtagaagaactttgcgtttctatacttcgaaaattgat

SEQ ID NO: 173849 - DNA, 384 bp, Saccharomyces pastorianus
atgttcttcgttaacttagcgttgtccacattgggctttttctctgcttctttgatatgcattgtcgtctttctattattttatcctcacgttacctggtgttcatggattttagtaccgggcgctgctttatctttgctagtggttcctctgatattcttggcttattcaagaagctcatgttcaagagaggatgacgaactggacgaactagaggagaagggaatgctgctgaacgacccatatccaggctcagcggccgaaagattcaacatcgatgctgaaggagaattcagcgctcacggagattcaagaacaaatttattgaatagcagcttcaacaaccgtaccaacgcaacggtactgccaaatatcattccacgt

SEQ ID NO: 173850 - DNA, 504 bp, Saccharomyces pastorianus
gaatctattatcctcagcattgccatctttattggcgtcctccttggcactagcgttggtactttcagtggcagtagcattagtgctggagttggtgctagcagtggtagtagcactagtgttggagttggtactttcggtggtagtagcactagtgttggagttggtactttcagtggtagtagcatttgtgctggagttggtactttcagtggtagtcgcactagtcctgacgttgatgctggcagtggtagtagcattagtgctggagttgatgctggcagtggtagtcccactagtcctgacgttgatgctggcagtggtagtagcattagtgctggagttggtactttcagtggtagtcgcactagtcctgacgttgatgctggcagtggtagtagcattagtgctggagttggtactttcagtggtagtagcattagtgttggagttggtactttcagtggtagtagcattagtgttggagttggtactttcagtggt

SEQ ID NO: 173851 - DNA, 1170 bp, Saccharomyces pastorianus
atggtgactaaagatcgtaacgtggtagttctaagtaaactgttcgaacccatatcggaataccatttagaggtagatgatcttaagatttcaaagcacgtcaccgttggttggggtaaaaaggaaacacaattcagaggtaaaggtgcacgtgccatggaaagagaagcattagccagcttaaaggcatcaggtttggtaggtaaccaattaagagatccgaccatgccctatatggtagatactggtgatgtaaccgcattggacagtcatgaaatcacaatttcttggagaggggattgtgattattttgctgtttcttctgtagaggaggtaccagacgaagatgatgaaacaaaatcaataaaaagaagagctttcagagttttttcccgtgaaggccaattggatagtgcttctgagccagtaactgggatggaacaccagttaagctggaaaccacaaggttctttgattgcgtccattcaaagaaaaaccgaccttggtgaggaggattcagtggatgtgattttcttcgaacgtaacggtttaaggcatggtgaatttgatacaagattacctctagatgagaaggtaggaagtgtatgctggaatagtaactcagaggcactagccgtagtattggcaaaccgcattcagttgtggacgtccaagaattaccattggtatttaaaacaagaattgtacgctagcgacatttcctacgttaaatggcacccagaaaaggacttcacgttgatgttttctgatgcgggatttatcaatatcgttgatttcgcttataagatggcgcagggtccgacattagagccgttcgataatggtacctctcttgttgttgatggaaggacagtgaatatcactcctctagctcttgctaatgtccctcctccaatgtactatcgtgattttgaaactccaggaaatgtattggatgtagcgtgcagtttttcaaatgaaatatatgcagcaatcaacaaagatgttctaattttcgcagccgtcccaagtatcgaagaaatgaaaaaaggcaaacatccaagtatagtctgcgaattccccaaatctgagttcacaagtgaggttgactctttaaggcaagttgcatttattaacgattccattgtcggtgtgttgcttgacacagaa

SEQ ID NO: 173852 - DNA, 1644 bp, Saccharomyces pastorianus
actgggatcaaagctcaagtacatgttgcacctgatagtacactcttccgtgaaaatgaggaaaagaaagtaggaggcaatttgcctaagaaggttatcaaccaaaaagaaacaggttctgaacacgcttcatctggtcatcaccaatatcatcagcttattaataacgatggcaatgatgcaaagacttcaggtcctacctccgcctcgtccaaggaccaaggagatgtcagttccaatctggagagtaagaaacagtcgccaaaggacatatttgttgcttccagcgctcaaaacacaagtcaattgcctggccctaaccctcagggcagtataggtaccgtgccattggaggagttacgccctaaggaatttagatcggccccttctagaaagccaaacaagtttgacacttccatcaccaagcctggtgttttggatgatttagggaaaattgatgaaaaagaaattaaagagaaattcgaccctgattctaccgataggttgtacccgtggcaaaacgtcggtgagtttcatgcttcaggaaagggatcgccaaatacaaagatgtccaaaatcactaaagcttacattttggaaaatttttataacgattggtactgtaatatagctacggttgttggtacctgtttcttttcatggttatttgcttacattgggttttcgtggtggtctttaatattcatctttttaggcactgctactgtttacaacgcagaatatacaagattcaatagaaacattagggatgatttgaaaagagtcaatgtcgaagaaaccttgtcggaccgtgtggaatctactacgtggttaaattcatttttgtcgaagttctgggtcatttacatgccagttttatctcaacaagtaaaagataacgtcaatcctcaactggcaggtgttgcgcctggttatggtatcgatgcattggccatcgatgaattcaccctgggttccaaggcaccttcaattaaaggtatcaaatcgtacacaaagaccggtaaaaacactgttgaaatggattggtcgtttgcgttcaccccaagcgatgtctcggatatgacagctactgaagctagggagaagactaatccaaaaattgctcttggtgttactttagggaaaagtttcgtttccaaaacaatgcctattctggtagaagacatcaatgttgctggtaaaatgcgtatcaaagttgaatttggcaaagttttccctaacattaaaatagtatccctgcagctcttggaacctccactaatcgatttcgctttgaagccaattggtggtgacactttaggccttgacgtcatgtcatttttgcccggtttgaagagttttgttaaaaatatcatcaactccaatattgggcctatgttattcccaccgaaccatttggatgttaacgttgaagatattatggctgctcaatccaaggatgctattggtgtccttgccgtaaccattgcctctgccgactctttgaagggttccgactttattactaataccgttgacccttatgttgtcatgactaccgaagatgccgtacctggtaccgatgaagaagtacgtacttccatcaaatcagatgttaaaaatccacgttggaatgaaacctaa

SEQ ID NO: 173853 - DNA, 96 bp, Saccharomyces pastorianus; identical to SEQ ID NO: 173641

SEQ ID NO: 173854 - DNA, 258 bp, Saccharomyces pastorianus
atggacatcagcattcaatgtatatcttatcacaccagtttatccaaagatagatgcagttttgaaattggttacttagaatatttctactacatttcgataacaaatataactattttgaatttaaaagttgagtatccaaaaattttagaaatacatacaattacttcccaattacttcccaaatattctcccccctggtttgatatcataaaagcaccttatggcaacaagattcccgggatagtaatgctattt

SEQ ID NO: 173855 - DNA, 147 bp, Saccharomyces pastorianus
atgctatggccggaaaagaaggaagacgatagaaactgccaagaaacttttagaggggcctgttcgtgtaccataaggttttgcaagggttatttctctgtaaatatttttgggataaacctgaatatatcttatagctctggaaag

SEQ ID NO: 173856 - DNA, 504 bp, Saccharomyces pastorianus
atggatgtaagaccaagactgtcacttctgaagctcctgaagctaccaccacaactactgtttcttctcaatcgtacaccactgccaccgtcacccactgtgatgacaatggctgtaagaccaagaccgtcacttctgaagctcctgaagctaccaccacaactactgtttcttctcaatcgtacaccactgccaccgtcacccactgtgatgacaatggatgtaagaccaagactgtcacttctgaatgtcctgaagaaacttcagcaactactacttctccaaaatcatacactactgttaccgttactcactgtgacgacaacggctgtaacactaagactgtcacctctgaggcccctgaagccacaaccactactgtttctccaaagacatacactaccgctactgttactcagtgcgatgacaatggatgtagcaccaagattgtcacttctgaagctcctaaagaaacttcagaaacttcagaaaccagtgctgccc

SEQ ID NO: 173857 - DNA, 210 bp, Saccharomyces pastorianus
atggaattcttgtatttgggttttcgtaaatcatcgttttgtatgatagatttcacgacatccaatggatacaccgtcaaccacaacattgtgccggaaaatgcaccaaatagacacagtttccaaggaggaatttcgtttcttgttaatccggtgctgatttctttagccatcaatgcctcgtacacaaggaaatacgtccctagcccg

SEQ ID NO: 173858 - DNA, 585 bp, Saccharomyces pastorianus
ggtttcggtttctctgtgatgttttctatctggtgttttgctggtgtttctggtggggctttgaacccagccgtttctctctctttgtgtttggccagagccatctcaccagccagatgtgtagtgatgtggtttcctcagatcattgctgggatggctgctggtggtgccgctagtgctatgactccaggcaaggttctctttactaatgctttgggtttaggctgttccagatctagggggttgtttttggaaatgtttggtactgctgtgttgtgtttaacagttttgatgactgctgttgaaaaacgtgaaactaactttatggctgcgcttccaattggtatttctttattcatggctcacatggctttgaccggttacactggtaccggtgtcaaccctgcaaggtctctaggtgccgccgttgctgccagatatttccctcattaccactggatttactggattggcccacttttgggtgccttcttagcctggtcagtgtggcaattattacaaatccttgattacactacatacgttaatgccgaaaaggcggcaggtcaaaagaaggaagactga

SEQ ID NO: 173859 - DNA, 147 bp, Saccharomyces pastorianus
atgagagaactgccgaacgaatgtggattcactagtgataacgcctctatcattataatctctgctctttgtgctttgaggggtcttcaaccgaaaactggtgtagaagccgatatgaagcttctggatgccgctgacgagtatata

SEQ ID NO: 173860 - DNA, 123 bp, Saccharomyces pastorianus
atggctgggttgactaaaggtgaagatttggaaacctctattgacatgggtcaatggctagctgctttgtctattcaagaagttggtccctcttacccttccgaaaaaatatcgtactctaaa

SEQ ID NO: 173861 - DNA, 507 bp, Saccharomyces pastorianus
atgattagcgaccatcggccagtttacgcagcatatagagcaaaaataacttttgttgatgataaagagagactatctctcaagaaacgtttattcacagaatacaaacaagagcatcccgaagaaccgggttctctgatatcggatcttctcagccttgatctggataataagagtactgatggattcaaaagctcttctgaaagttctctacttgatattgatccgataatggcacaaccgacagcgtccagcgttgcttcttcgtcacctgtttcttcagcatcggcttcactacaacctgtcagaactcaaaacagtagccagtcgcgtacccccataaagaaaccggtattgcgccccccacccccacctgctcataaatctgtatcagcacctgctccttcaacatcgaaggaaaaatcactaacacctcagacctcaactgcatcgttgtcatctgtgactaaaaatatacaggaaaataaaccattggcgcaaaataga

SEQ ID NO: 173862 - DNA, 117 bp, Saccharomyces pastorianus
tcgctatcgcaagctattaaatgggacggctcttctggcggtgtcatcagaatggttgttttgacagaagctggtgtggaacgtttgatattctacccagacgagtacgaaagacta

SEQ ID NO: 173863 - DNA, 333 bp, Saccharomyces pastorianus
ggtaatgcattcgccaaggagtatatcttgggtttgaaagattattctcaagctacttggtcccagaacttcatctcctccatcgtcggtgcttgctcctctctgatcgtttctgctccattagatgtcatcaagacaagaattcaaaatagaaattttgataatcctgaaagcgggttgagaatcgtcaaaaacacactgaaaaatgaaggtgtaactgcgtttttcaagggcttaacacctaaattactaacaacgggtccaaaactggttttctcatttgcgttagctcaatctttgatacctagattcgataacctgttgagcaaatga

SEQ ID NO: 173864 - DNA, 654 bp, Saccharomyces pastorianus
ctggaccggtatttccaactgaattcgtatgtcaatggtatattgcaggtcaatcctgatgctatttcaattgctcaggagagggatcgtgagcgggcagcaggagtagttagaagtccattgcatggaattccatttttagttaaggataattatgctacaaaggataaaatggacactacttgcggttcatggatgcttttaggttcagtagtgccacgagatgctcatgttgtatccaaattaagagatgctggcgctgtattgtttggtcactccacattaagtgaatgggcagacatgagatcatcagattactctgagggctactccgctagaggtggccaagcacgttgtcctttcaatcttactaccaatccaggaggtagttcatctggtagtgccagttctgtagctgccaatatgatcatgttttcgctaggaaccgaaactgatggtagtattattgatccagcgatgaggaatggtgttgttggttttaaacccactgttggtttaacctcaaggtctggtgtaattccagagtccgagcatcaggattctactggacctatggctagaactgtccgcgacgcaatatatgctttccaatatatgtggggggtcgatgagaaagacgtgtataccttgaat

SEQ ID NO: 173865 - DNA, 156 bp, Saccharomyces pastorianus
atggaaaacaagaacgtggagagatcgcagggcattcgctcttccaatgtagggccttcgccaatgatgaaacccgcacatttcagaaggcgatcctctggtagatttagcgatatttctatagaccatattctttctgacaattcagaaattcct

SEQ ID NO: 173866 - DNA, 426 bp, Saccharomyces pastorianus
caattgaaaactctcactgaaaaagagcttgaattagaagaggaatacttgaaaaagaaagatctacacttgaaaaatcaattagagttcagtaagttagaagaaagcttatcgaaagacctgaaaaactcagaagggaggttccaaaaggtcaatcaagaattagttcaactaggctctaaactggacaaattgaacgcgagaaacgagaagttacaaaaggaggtcgatcagaacgcagaagagatagaaaagttcagtactcaatttttgagtaaaagagaaaaggatagatttagaagaaaggagtacaggatacgcgaagccaataaatttgaattgactataaaggggttagagcaagatatcaacagattagaaaatgagaatgaaaatatacatagtctaattggtaatagttactga

SEQ ID NO: 173867 - DNA, 168 bp, Saccharomyces pastorianus
aaagaaggcggccaactcattaaaaccctccccattgtcccgttttttttgtttccatataggaagaactctacagctcgaacaatacatcaaatcaatcaagcagtcgctctcgttctattgtgtgtttctcaccaccttacatatctcccctcagttcccagccta

SEQ ID NO: 173868 - DNA, 2958 bp, Saccharomyces pastorianus
accttgaaatgttttgatttcaatgacgtcagaaaggacactgtcattggcgaccttcaagtcaatttggcagatttgctacaaaatcctgttttagacaaccaaactgccgacttgagagctggaacaaagtcaaaaggtgttttgcattattcgttacactggtttcctgttagggaagataaatcagaagaaaaagctgccgaacgtgccaaggctaaggccaagggtgaaggagaggatgaaaacaaaaatatcattggggatgaagacgatgatgatgacgaaaattcccaaaccgatgttggtattgcgaagattactttacaaaaggttaaatatttggatacagctagctctatgaccggtagtttgagtccatgtgctgaattgtttattgatggacaaaaagtcaagaactatagaacactgagacgtatcaatgaaccatcttggggcgaaaccatcgaggttttggttccatcaaaatctagctctaaatttgttttgaagatttttgatgaaagaatgaatggtaaagtacaaatttgtgaatactcgtcttccttggatgacataatgaatacattagacaccgctcaagaatttgtcaagggttccccacaaggtgacatatatttggatgtttcttggaaatctattgaaatgacaggtgcctttgccgccgcaaactctgttagcgaacccatcggctgtattaaattggacattaaagatgctgctattaaaggtgacttatctggtgttggcgacattgatccctattacactgtctctttgaacagacgtgttttatacaaatccatatatcactccgataccgatcatcctattttcgataatagcacatatgttcctgtactttccccaaatcaaactttaagtgtcgaatttcatgactaccaaaagattggtaaagatcgttttattggctcggtacaaatcccgttatcagatattttcaagaaagatcctaaatcggagaaatatgtttcaattaacaataaagacggagtatctaggctaaagttaaaagaccacaaacacaatatcactgaaagtgttgtcaatctctctacatcatttatcccaattactccagtttatacccctgaggaattggcgaatgttgataaattagaaaaggaactagaagaaaagaagaaaaaatttgaagccacccaaaacgagaataagcagaaaatggaagaaagtccaaaggaatgggaagtagtcgaaattgaaagcccatttgaagacgatgaaaagaagatcaataagaaggctaaactgtctttgggtgagttgattaaacacaaatctggtatattatctatgcaaatattagaaggtacattgaacccaacttctgcttacctggcggttctggctgatgatatttcatatcctgtcttcacttgcatgaaaccatctcatggaaaattgaactcggaggtggcaaatatcttcatcagggacttaaagttcagtaaactatacttgagaatatcaaaaaaacatgttgctaaggattctgacgatgtcatatccgaaacttcttacagcactttaaagttattgaaacaagcttacgaagagcctacatggttgaactttaatggatcaaaagcgaaggtcagatttttgtatacgccttctaccgtaagcttgcctagctcagaaagtgttgaagataccggttacttgaatttaaagctcatttctggtcacggtttgaaatctgccgacagaaacggttattccgatccattcgttaccatttatgtcaatgataagagggtcttcaaatcaaatatcaaaaagaaaacactagatccggtttggaatgaagatgccaaagttccgattctttcaagaagtaagaaccaggtagttttgaacgttcttgactgggaccgtgcaggtgacaatgacgacttaggccaagccacattggatacttctaatctagaattgggcaaatcttataactggaaccttaacctaaacactcaaggtagtataaaactacaaggttcattcagcccagaatatatcaagccaagcttcgacgtcgtgaaaggcggtattgccgataagccaatgaagatggccagtggtgcagcccatgctactgtcggcatagctggtacaggtttgggtgccgccacaggagttgcagcaggtggtttacaaaagggtgggcgtcttctaaaatctttaggaagcaatccaatgaggaggagtaagagcggcaatggcaatgaatctaacggcgcaaaaaaatcttctgaaaaaaaatcgttcgataggagatctccaagtaacttcgatagtaacaatggcacaccaagggcatcagtagactatgacccatcagttcctaatacgagttacgcacccgtccaaagcgcctcccccgcagtgaaacaagctgacaacaattcaagcttgagcaataaaaaagaagctcctaccaacggatcaagagcaggttctcgtgcaagcagtttcgctcgtaccttggctcctcacggtacttacaacggttttattaccgtacttgcagcggaaaacatcgccaaacacgttcaaattaagatttccttaactcaaggtggtaggttaaaacacatttacaagaccaagagccaaaaaaccaacgatgatggaattgctctatttgacgaggaatgctcattcaaggcctcccctgaagccaacctggtactaggtgcgatttcccaccaaagattatcgagagataaagatctcggcattgctcaaattaacttgggcgacccacaaattcaacaagacggccaaatatctgtaaaattaggtgatggtcatctgattgtaaagattagttacggtaaagacaaaaatagtcaagtacccccactaccagaagtccctcaagaatacacacaataa

SEQ ID NO: 173869 - DNA, 249 bp, Saccharomyces pastorianus
atgcacggtacttgcctcagcggtccataccctgtgccatttacccataactcccacgattatccacattttaatatctatatctcattcggcggccccaaatattgtataacagctcttaatacatacgttataccacttttacgccatatgctaaccactcaatttatacacacttatgttaatattacaaaaaaatcaccaccaaaatcacctaaacataaaaatattctattcctcaataataat

SEQ ID NO: 173870 - DNA, 594 bp, Saccharomyces pastorianus
atgatgagtggcacaggaaacgtttcctcgatgctccacagctatagcgccaacatacagcacaacgatggctctccggacttggatttactagaatcagaattactggatattgctctgctcaactctgggtcctttctgcaagaccctggtttattgagtctgaaccaagagaaaatgataacagcagctactactacaccaggtaaggaagatgaaggggagctcagggatgacatcgcatctttgcaaggattgcttgatcgacacgttcaatttggcagaaagctacctctgaggacgccatacgccaatccactggattttatcaacattaacccgcaatcccttccattgtctctagaaattattgggttgccgaaggtttctagggtggaaactcagatgaagctgagttttcggattagaaacgcacatgcaagaaaaaacttctttattcatctgccctctgattgtatagcgaaggacaagtttttcaccagctcggacgatcccaccaacttgacaatacccaatagggacatcaacgaaagatcttttcttggacccttccttttgtgtgcgggatcctct

SEQ ID NO: 173871 - DNA, 174 bp, Saccharomyces pastorianus
atgtctactaaagcccaaaaccctatgcgtgatttgaagatcgagaaattggtcttgaacatctccgtcggtgaatctggtgacagattaaccagagcctccaaggttttagaacaattgtctggtcaaactccagttcaatccaaggccagatacactgtcagaactttcggt

SEQ ID NO: 173872 - DNA, 84 bp, Saccharomyces pastorianus
atgaatgcacgtgtcgctgtcctcatcactgctgcaatactttctgcacctgtcactgctattgctctcctggaagctagacgg

SEQ ID NO: 173873 - DNA, 1029 bp, Saccharomyces pastorianus
atgtctgaatcagtggccattataggtgcaggattagtaggctgccttgcagctttggcattctccaaagaaggctacaatgtcacactttatgattttagacaagatcctcgattggacaccaccaaaaataaaaatttgaaatccattaatttggctatttctgctcgtggcattgatgctctgaaatcaatagatccggatgcttgtgaacatattctgcaagatatgattcccatgaaaggcaggatgattcatgatttgaaaggcagacaggaatcacaattgtatggcttgcatggagaagctattaattctatcaatagatctgtattaaataatagccttttggacgaattagaaaaatctacaacagaactgaagttcggtcacaaattagtcaaaatcgaatggacagatgataaacaaatctgtcattttgccattggggaagatttgaaaaccccacatactgaaaagtatgattttgtcataggttgtgacggagcatactctgcgacgagatcgcaaatgcaacgtaaagttgagatggatttttcacaagaatatatgaatttacgttacattgaactttacatcccgcctactgaggaattcaagccaaactatggcggaaattttgcaatagctcctgaccatttgcacatttggcctcgtcataaattcatgttaattgcgctcgccaacagtgacggctcgttcacttcaacctttttcggttctaaagatcaaatatcagatctgataacttccaagtcacgtgtgagggaattcttaatcgagaactttcccgatattattaatattatggatttggacgatgctgtcaaaaggtttatcacttatccaaaggaaagtcttgtctgtgtaaactgtaagccatacgatgtaccaggcggaaaggccatcctactcggcgacgctgcccatgcaatggttccattttacggccaaggtatgaattgcggatttgaagatgtgagaattcttatggcgctacttgaaaaa

SEQ ID NO: 173874 - DNA, 243 bp, Saccharomyces pastorianus
atgggtattacagtaataggttccctaaactatgatttggacacatttacggatagattacctaacgctggagaaactttcagggctaaccacttcgaaacacatgctggtggtaagggattgaaccaagctgcggccattggtaaattaaaaaaacccagcagcagatatagtgttcgaatgattggtaatgttggacatgatacggttggtaaaccaattgaaggacatttatccgattgc

SEQ ID NO: 173875 - DNA, 756 bp, Saccharomyces pastorianus
tccgagtatctgaccaagttccaaacaacagatcgagaatcatatcctcgcttgcaggacccatccagagaactgaatgttatcatagaccaattggccgtttcacccgaacaaatagatgctagtccagattcactagaagcattaatagatctttgccatgacttcccgcacttaacaccgaaattacaaactcaactaagctatttgataagttcatctctgtcgaatctgtcaaaagatattaaggctaatctctcatcaaatgttaactttactgaaattggtggcctgataccgcagtggaaaaggcatttagaagagtatggctaccttattcaggtacttttgacgtttttacaagatgagttacataaggtctcctcgcagtctactaatttaaaccgttctgccaaaaacagtaagaatgatagtgcaaacgtcgagctgtttaaaagagactgtaatcaaatggaaaacttgcttgaatctataacaaagctactggagattaacttatctaagatatttcagacaactcctgaaaaagatttgtttattggtttgttcacaagaccattatttgtgttattagagattgaacctgtgacgaaggtatcatcactaaagatgtttattcaaaggattttggctatgtgtgttaaaaatcacggtcaaagttcaagtatacaaagttcattgatgaccaatttaacttattttcttcatttgtcggttttaatgcagaattactaa

SEQ ID NO: 173876 - DNA, 99 bp, Saccharomyces pastorianus
ggcggttgttgttgttgctgttgttgttgttgttgttgttgttggtcgggctcgtcttggaacccatttcgggtgtcagcatgcgaaatgtgttggaaa

SEQ ID NO: 173877 - DNA, 135 bp, Saccharomyces pastorianus
atgttttatggaagtttcaataaatgcgtgactggctatagttgttggatggatattcattattatgtagaccatattattaagaagaatgcaattaggcccgactataaatctcacactcagaaccttgttctg

SEQ ID NO: 173878 - DNA, 534 bp, Saccharomyces pastorianus
  modified_base (223)..(258): a, c, g, t, unknown, or other
aacaacaggtcccattgctttgcaagagctttctaccaactacaagtatccgatataccattagacactttggaacttaccaggtcattcggttgggacactgcggaatccttcactcaacacgatgtgcaagaattgaataggatattaatggacaggctggaaaataatatgaagggaacacccgtggaggggaagttaaatgaaatatttgtcggaaaannnnnnnnnnnnnnnnnnnnnnnnnnnnnnnnnnnngaatctgctagagtggaggacttttgggatctgcaactgaatgtcaaaaatttcaagaatttacaagaatcttttgacaattacattgagatggaactaatgaatggtgaaaatcagtatgctgctcaagactatggtttgcaagatgctcaaaaaggtgttatattcgaatcatttccgccagttttacatctgcagttgaaaagatttgaatacgattttaattatgatcagatggtaaaggttaacgataaatatgaatttcctgaaacattg

SEQ ID NO: 173879 - DNA, 693 bp, Saccharomyces pastorianus
aagtacctcggtggcgtggaagaaactttcggtttgaatttttcaagacctggatttcaagttgtccatcaatacttcaattttgtttctctaggccattcagggtatagaacacaattccaaaattctctatttgttgcaagagcattttctttcgaattattgaattcgtcaaaattgcccggatgctttgaaattgttagcagtatccatgaaagcattgagaacgattccgcccctaagtcagttaaagactattgggaacacccccaggcttacaaaccgggtgtaccgctggtagctttcaaattgtccaagaaattccacgaagaatatccagaagtgccacaagcaatcctttcctctttgttgagaggtagaggctggataataccaaattacccattaccaaaggcgacggatgggtccgatgagaaggaggtattgagagtggttttcagatcggagatgaagttggatttagcacagttgttgattgttgacatcgagagtatcttgacaaagttgattcatagttacgaaaaggtttgtcatcatatagaacttgcctctgagcaaactccagagcgcaagagttcgttcatctacgaaatgttattggcattggcatctccacaagatgacatcccaacgccggatgaaatcgaaaagaaaaataagacctgcaggcat

SEQ ID NO: 173880 - DNA, 810 bp, Saccharomyces pastorianus
gattcaaatgatatagtggcgcatagaaagaatgctctcgtttttaatggtaactcacgtttgatgatgattccaaaaaaaccaaatacagaggaccacttagtttataagattaatcatgataaaaatttaactacagaaagatttccctctgtcagctcagtggcaaatacaagacctaacgttatcttgaaaaatggtaaatacgcttatgatattttggacgaaatgacaaataaagctgcctttcttcttgcagaaaagaagacccgactaaatcccaaaaaaaatcacaaaattatggatggctacgaaggaggtcaggaaaacgaagataatgatgaagactcagcagatagtggctcgcataaaaataagagaaaggaaggtaatagttctttatcggcaacactgaacacttggctttcaaaattttcaagtacttctgaaggttcacagaagaagaaggaacaggcaaatgaattaggcaacgattttgaatatgatgaagatgtggctgattttgcagaaattttgccgaagcagtcatctagtaatattgaaaaaatttttaagcatggtaacaattcaggatcaatggtatcatctaattcaagtatcaagctcaataggagggagaatatattgataggtccaccagagttgagattttctaatgaaatcaaggaacacaatagtattgctacaatattcaaactggtatttattcaaaccaatagaagagtcgtcgaaaaaatagatttggcgaacatgaaatgggggacaatccacggaggcataagtacatga

SEQ ID NO: 173881 - DNA, 240 bp, Saccharomyces pastorianus
ttgttggaagaactaacggaacttgaagaagaaacggatgtagcggatgatgaagtagcggatgatgaagtagcggatgatgaagtagcggatgatgaagtagcggatgatgatgtagcggatgatgattcaacggatgatgatttggctgaagatgatgtagctgaagatgaagtggatgatgatttggctgatgatgtagccgaagatgaagcggatgatgacgtagctgaggatgat

SEQ ID NO: 173882 - DNA, 633 bp, Saccharomyces pastorianus
ttatctttgaaaaaaggaataacaaaatcatacatcttgcaaagaactttcacttcttcctctgttgttcgtcaaattggggaagtgaaatctgaatcgaaaccgccggccaaatatcatattatcgaccatgaatatgattgtgtggtggtaggcgctggcggtgcaggtttaagagcagctttcggtttggctgaagctggatacaagactgcttgtttatccaagttgtttccaacaaggtcacatactgtggctgctcagggtggaattaatgctgcgctgggaaatatgcatccagatgattggaaatcgcacatgtacgacactgtcaagggttctgactggctcggagaccaagatgcaatccattacatgacaagagaagcacctaagtctgtcattgaactagaacattacggtatgcccttttcgaggactgaagatggaaggatttaccagagagcatttgggggacaatccaaagattttggtaaaggtggacaggcctataggacttgtgcggtggcagatagaacaggtcacgcaatgcttcatacattgtatggacaagcgctgaaaaataatacacacttctttattgaatactttgcaatggatttgttgaccata

SEQ ID NO: 173883 - DNA, 213 bp, Saccharomyces pastorianus
tttacccataaagcccatgattatccacattttaatatctatatctcattcggcggccccaaatattgtataactgctcttaatacatacgttataccacttttacaccgtatactaaccactcaatttatatacacttatgccaatattacagaaaaatcaccactaaaatcacctaaacataaaaatattctatccctcaataataataca

SEQ ID NO: 173884 - DNA, 837 bp, Saccharomyces pastorianus
atgactaaatctgtagatacactgctgattccaggccccattatcctaagcggagcagtccagaaggccctggacgttccctccttgggccacacctctcctgagttcgtctctatttttcaaagggtgctaaagaacacaagagctgtcttcaaatccgctgctgcctcgaagtctcagccttttgtgcttgccggctctggtacgttggggtgggacatatttgcctcgaactttattctttcgaaggcccccaacaagaacgtgctggtcgtatccactgggacattttctgacaggtttgctgactgtctgcgtagctacggtgcgcaagtagatgttgttaggcccctcaagataggcgaatcagttcccttagaactgattactgaaaagttgtcgcaaaatagctatggggctgtcacagttacgcacgttgacacttcaacggcagtgctgtccgatctgaaagccatttcgcaagcgattaagcagacttcgccggaaacgttcttcgtagtcgatgctgtatgctcgattggatgcgaagagtttgaatttgatgaatggggggtggatttcgccttgactgcttcgcaaaaggctattggcgctccagcgggtctttctatctcgctatgcagtagcagattcatggattatgcactcaacgacagcaaaaatggtcatgtacatgggtatttttcctcgttgagaagatggacaccaataatggaaaattatgaggctggtaaaggagcttattttgcaaccccacccgtacaactaattaatagccttgatgtagccttgaaagaaattctcgaagagggggtt

SEQ ID NO: 173885 - DNA, 117 bp, Saccharomyces pastorianus
gtgacgacgagaagcagcaatgatgttgttcatttcttcgaccttagccttggctctggtgaaagaacccaatctcttcttggcgacctttctagctctcttttcaccagagtttct

SEQ ID NO: 173886 - DNA, 516 bp, Saccharomyces pastorianus
atgtccgacaagatacaggaggagatattaggactagtaagcaggtccaacttcaaacaatgctatgaaaaactggggcaattgcaaaaacaatttcccaatgcgttgtacttcaagattttggaaacctatgttaaattcaagcagtcacctggtaagttcgattacaataaactgctagaagaaccatatgggctgaaagggacaacgattacgggcgacacgcgttccttggagtttttgcacaacttcttcgtagagttagggaaatacgacgaagcattgcacgtgtatgaaagaggaaatttcaaattccctagctacgaattgtcttatcactggtttatgaaagcattggaagattccaattataaccaaatgagcaaagcatctctacagctagctaaatacagtgacagtggaaacctgcctaaaagagcatattatttttggaatgcaatctcgattttagccgtatcaaggtttcaggaaaacactctttcagatcccaagaaa

SEQ ID NO: 173887 - DNA, 153 bp, Saccharomyces pastorianus
atgcgtactttcactgactttgtttctggcgcacctattgtaaggagtcttcagaaaagcaccataaggaaatatgggtacaatttggcaccctacatgtttttgttactacacgtagatgagctatcgattttttctgcataccaagcaagt

SEQ ID NO: 173888 - DNA, 462 bp, Saccharomyces pastorianus
atgcgccaggcaggtcgttacctgccggaatatcacgaggtgaaaaacaatcgtgatttctttcaaacttgcagggatgcggaaattgcttctgagattactatccagccggtaagacgctatagaggcctcattgatgctgctattatttttagtgatatcttagttattccgcaagccatgggtatgagggtcgagatgctcgaaggtaaaggtccacatttcccagaacctttaagaaatccggaagacctccaaacggtattagactacaaggttgatgttttgaaagagttagattgggctttcaaggcaatcaccatgacaaggatcaagttggatggtgaggttcccttatttggcttttgcgggggaccttggactctaatggtttatatgacggaaggcggtggatcccgtcttttcagatttgccaaacaatggattaacatgtatccagag

SEQ ID NO: 173889 - DNA, 579 bp, Saccharomyces pastorianus
atggtagagaaggatacatggaaactgataactgccactgcactattcactgtggcagtgacgacgattacagattatgcttggaccagttggcaagcacaaaagcaagtaattgcgcaacaaaaaaataagaatgaaggtgggcaaacaaaatctgacacggataaatatcatcaatatgatgaacagtttatccgccaatctttgaaaaacaatgttgagtttcttggtgaggacacaattgaaaaactatccaatcaatatgttgttgtcgtgggagcaggtggagttggatcttgggtggttaactctttggtgcggtccggatgccgaaagatcagggtcgttgattttgaccaggtctcactaagttcactaaatagacacagctgtgccatactaaatgatgttggcacgccaaaagtggaatgtctacgaaggcatatgcgggaaattgcaccatggtgtgagattgatccgattaatgaattatggacgttacaaaatggcgaaagactgacccttggtattggaactcctgactttatcgtggactgcattgatcatattgatccaagg

SEQ ID NO: 173890 - DNA, 123 bp, Saccharomyces pastorianus
atgggttacagggtcattggtatcgatggtggtaatgccaagcgaaagttatttgaacaattaggcggagaaatattcatcgatttcacggaagaaaaagacattgttggtgctataataaag

SEQ ID NO: 173891 - DNA, 579 bp, Saccharomyces pastorianus
  modified_base (548)..(548): a, c, g, t, unknown, or other
atgtccaattcggaaagagataaattggaaagtacattgaggagaaggtttttctacacaccctcgtttgagatatatggtggtgtgtcaggtttatttgatttagggcctccgggttgtcagttgcaaaataacttgattcgactgtggcgagaacattttattatggaagaaaacatgcttcaggttgatgggccaatgctaactccttacgatgtgttgaagacttctgggcatgtagacaaatttactgattggatgtgccgaaatcctaagactggggaatactacagagcagaccatttgattgaacagacgttgaaaaaacggctgttggacaaggatgtcaatccacaggatatgaaaaatatggagaaaatattgaccacgattgacgggttttcgggtcctgagttgaatctcgtcatgcaggaatataacattaatgatccagtcactaacgatgttttagacgcactaacttcctttaatttgatgttcgaaactaaaattggagcctcaggacagttgaaggcctttctaaggcncagagactgcacaggacatttctcattcaca

SEQ ID NO: 173892 - DNA, 387 bp, Saccharomyces pastorianus
ctctcgttactttcgtcatctcctccttcctctctatacattgccgcaccttctctttttaagtttcttaagcgtgccgcattgtcttcgtcgacttcttcttcttcttcttcttcctcctcgttgtcatcatcgtcatcaaattcaccctcttcttcatcatcgtcgactaaaaagtcgtcttcttcgtactcgtttcttctggtggctccatatgcagtaggggagctctgttttctgaatgcagtttcaaaaccaacatctggagattcttgtttctctttttctttgagttgtcttttccttctgtctcttaggatttggctttgtttcttttccagttctcttttttctacttccggatccatattgataatatatgtacca

SEQ ID NO: 173893 - DNA, 84 bp, Saccharomyces pastorianus
aatgcacgtgttgctgtcctcatcactgctgcaatactttctgtacctgtcactgctattgctctcctggaagttagacggtaa

SEQ ID NO: 173894 - DNA, 255 bp, Saccharomyces pastorianus
actttaaggaacttgttgaaatatcactgtgatttcatgagcattcctagaacaagttttttcttgaagatttggacctttgcaactgatgtaactaagatggaacgtggccaagaacaactgaatgatcaaagagaaaaattgcgccaatttgctactgatcaagatatgcaggacttatatgactactgtaatagacccagaaggtcaattcttgaagtactggaagattttatctccgtaaagttgccctga

SEQ ID NO: 173895 - DNA, 417 bp, Saccharomyces pastorianus
atgagtaaaaacagggaccctctactggctaatttgaacgccttcaaaagcaaagtgaagtctgccccggtgatcgcacccgctaaagttggacagaagaagaccaatgacacagtgattactatagatggaaacactaggaaaaggacggcctccgaacgtgcgcaagaaaacactttgaactctgcgaaaaatcctgtgttagtggatatcaagaaagaagctgggagcaatagctctaatgctatttcattagatgacgacgatgacgacgaagattttggtagctctccttcaaaaaaagtaaggcctggctctattgctgcagccgctttacaagcaaatcaaacagatatttccaagagtcacgattcttcaaagtgctttgggcgactgaatacattcaaaagaaaggga

SEQ ID NO: 173896 - DNA, 1539 bp, Saccharomyces pastorianus
atggatggtgtgacaagagagttagaagtattgcaaaagctcaatcatccaaggatagtacgattgaaaggattttatgaagatactgagagttattatatggtgatggagttcgtttctggtggtgacttaatggattttgttgctgctcatggtgcggttggagaagatgctgggagggagatatccaggcagatactcacagcaataaaatacatccactctatgggcatcagccatcgtgacctaaagcccgataatattcttattgaacaagacgatcctgtattggtaaagataaccgactttggtctggcaaaagtacaaggaaatgggtcttttatgaaaaccttctgtggcactttggcatatgtggcacctgaagtcatcagaggtaaagatacatccgtatctcctgatgaatacgaagaaaggaatgagtactcttcgttagtggatatgtggtcaatgggatgtcttgtgtatgttatcctaacgggccacttaccttttagtggtagcacacaggaccaattatataaacagattggaagaggctcatatcatgaagggcccctcaaagatttccggatatctgaagaagcaagagatttcatagattcattgttacaggtggatccaaataataggtcgacagctgcaaaagccttgaatcatccctggatcaagatgagtccattgggctcacaatcatatggtgatttttcacaaatatccttatcacaatcgttgtcgcagcagaaattattagaaaatatggacgatgctcaatacgaatttgtcaaagcgcaaaggaaattacaaatggagcaacaacttcaagaacaggatcaggaagaccaagatggaaaaattcaaggatttaaaatacctgcacacgcccctattcgatatacacagcccaaaagcattgaagcagaaactagagaacaaaaacttttacattccaataatactgagaatgtcaagagctcaaagaaaaagggtaatggtaggtttttaactttacaaccattgcctgacagcattattcaagaaagcctggagattcagcaaggtgtgaatccatttttcattggtagatccgaggattgcaattgtaaaattgaagacaataggttgtctcgagttcattgcttcattttcaaaaagaggcatgctgtaggcaaaagcatgtatgaatctccggcacaaggtttagatgatatttggtattgccacaccggaactaatgtgagctatttaaataataaccgcatgatacagggtacgaaattccttttacaagacggagatgaaatcaagatcatttgggataaaaacaataaatttgtcattggctttaaagtggaaattaacgatactacaggtctgtttaacgagggattaggtatgttacaagaacaaagagtagtacttaagcaaacggccgaagaaaaagatttggtgaaaaagttaacccagatgatggcagctcaacgtcaatcaaccctcgcttcttcttcatcgggatcctct

SEQ ID NO: 173897 - DNA, 288 bp, Saccharomyces pastorianus
tggcacccgtacacatcaataagtactccattgaaagtttaccccgttactaaagcagaaggtagttatctgtacctcgataatggcaccagggtagtagatggtatggcaagctggtggtgcgtccaacaacgatacaacaatcagagactaaatgcagccgccatttcacagattaataaaatatcacatgtgatgtttggtggaattactcataaggcaggcattgatttttgtaaaaaagttgctcgccttattgccagataccctggaatgtgctttactggc

SEQ ID NO: 173898 - DNA, 96 bp, Saccharomyces pastorianus; identical to SEQ ID NO: 173780

SEQ ID NO: 173899 - DNA, 405 bp, Saccharomyces pastorianus
atggactgggcaatcaatgtcgcccatccacgattactttacaaggatcctaaactttcagtaacgtttattgtgccgagcttatttcatatcattattgctttcgtgttattaggaatatgtgcatccgattttctttgccccaacgtggcccatatatcagatcccaacagccttcgatcgaatggttctttagtttcaaaaacggcgtcccatgcatctcatactggggcattaatggcagttctactatcttggtgtaactcttcgcctgacctgttttccaacttaatgagctgggcaacctctacgagagaaacaaggtcaacctcagtatcgctatcaattggcgaagtgcttggcgcttgcggcattatcctgtgcacttgtagagggctccatttt

SEQ ID NO: 173900 - DNA, 96 bp, Saccharomyces pastorianus
aagtccatcaagttactggacgacgcttctgcactgaggtttttctcaaccgttagcttgaggtggacatattcgtcctccattttagggatcgtt

SEQ ID NO: 173901 - DNA, 183 bp, Saccharomyces pastorianus
ggcgtgaccatgcttaccggtcttggaagtggacatgtcgacaatcttacatggtctacctttaatgacaacgaaaccaccctttctcaaagcagaacattgcattgggtaggtggcagaggaaccggcatcggcagtttcaaaggtgtgttcttcgtcagacatgtttctgtatatggatga

SEQ ID NO: 173902 - DNA, 156 bp, Saccharomyces pastorianus
atcaagaacaagacctctaaatcacataaaaaaaccggcataccaaaaaaagtggaaggtaagcgtatagcaaaactgataaatccaagttgttttaatattattcgtccactaaaaaaaacattcaaattccagctccttcacctttatttttaa

SEQ ID NO: 173903 - DNA, 570 bp, Saccharomyces pastorianus
aaggtcagactattccacactgttacaagatgtagattacactctcatgaccataagccacccgtttcagaaagcagcgactggcagaaggaggtttcttgttatggttacagcggattcgacggtgatgctaatgatgactgggttgttgagattgataaaaagaattctgctcctggagttgcccaagaacgggtcatagctttggacacaaagtttagattgagacatgctatgacaggctgttatttgttttcccacgaagtcaagttgccagcttgggggttcgaacaacaagaagttacctgtgcctcctccggtagacatgatttaacattgtggtacgttgagaacaacagtaacccattgttaccagaagataccaagcgtatttcctataaacctgcaagcttcatttctaaatttattgaatcccataaaaagatgtggcatatcaataaaaatttggtcgaacctcatgtttatgaatcacaaccaacttcatggccattcttgttacgtggtataagttactggggtgaaaataacagaaacgtctatctattaggt

SEQ ID NO: 173904 - DNA, 309 bp, Saccharomyces pastorianus
gttatcactgtgtccagggataggggtgttttacaggagattagacctgccaaaccactatacagagcagcattcacatatttgattaacgatgctgaactttcaaaggtgttgaaaactcgctacttattaaaggttgtaggttttgaaaccggcaggatcaagaagtgggaagaagagttaaagcccttagggaaagttcctgaccagaaactgttcaaaagtagactggactatttatctggaaagataaacgctagtaacgctgtcattaataagtgtgaagaagaaataaaaaagttatctaag

SEQ ID NO: 173905 - DNA, 357 bp, Saccharomyces pastorianus
cagaaagagcttgaagaattgaaaacttctcttccccacgaagatgcgtcatacagcaatgtaactataaaacagttaaccgaaactaagagagacctcgaatctcaagtacaagacttgcaaactcgtatctcgcaaattactagggagtctactgaaaatatgtcacttttaaacaaggagatacaggacctgtatgacagcaagagcgacatatccattaagcttggaaaggaaaaatcatcgagaatattggcagaggaacgatttaaactactttcgaatacgttagatctaactaaagctgagaacgaccaactgcgcaaaggtttgattatttacagaatactattttaa

SEQ ID NO: 173906 - DNA, 243 bp, Saccharomyces pastorianus
tcttctttatcttcatcgtcgccgcttagttccaagtcggaatctatttctttttcgtcagctttatccttttcttcgtcactatcttccatattgacctcgtattctttgtcactgtccatggtgacccattcaccatcgacttctccgtcttggccgccggcatctacttcccagttagcctctgcatcctcatcctcatcttcgtcaccattttcttttttccatttagctagtagttca

SEQ ID NO: 173907 - DNA, 354 bp, Saccharomyces pastorianus
atagcgctagctgaacaagctagcaaactaagaaaatccattctacctgtaaagttaacttacaagaacatgctaagggatccatccgaaaaatataaggcattcgtcccaccaaagatgaccaaaaggatctggccagataaaacaattcaaaaggccccacgttggttatccaccgacttgagagacggtaaccaagctttgccagacccaatgtctgtggctcaaaaaaaggagtatttccataaactgatcaatattggtttcaaagaaatagaggtttccttcccatctgcatctcaaactgatttcgatttcaccaggtacgccgtggagacgctccagacgatgtag

SEQ ID NO: 173908 - DNA, 453 bp, Saccharomyces pastorianus
cagggagtaaacccactttgcgatgtcaaattcattttccagaaaagtgatagaacagttgccttcgggttgacctccatgaggaccatgtttcacttacactgtgattccaaatttaacaagtatttcactactgcttggagtaagcttaaagaagaacgtcaatcttggaagactaataataattacggctcgtctaatgaatggaatttgttaagggagcccagtgtatgcaagaaaggtgaatccgtaattgatgcgatttgccgggtactacccagctatgaggagattgagctgcatttagaagactatttcaaaggacccgtttttaaaacattcaagatagtggatccaacaaaaactattcgcgacttggaggcatgcttcgtgaagggccctcctagtactagagggagcaaccatcctatcttggaccttgtgtatgagagc

SEQ ID NO: 173909 - DNA, 186 bp, Saccharomyces pastorianus
cttggcgtgaccgtgcttaccggtcttggaagtggacatgtcgacaatcttacatggtctacctttgatgacaacgaaaccattctttctcaaggcagaacattgcattgggtaggtggcggaggcaccagcgtcagcattttcaaaggtgtgttcttcgtcagacatgttttagtgtgtgaatga

SEQ ID NO: 173910 - DNA, 441 bp, Saccharomyces pastorianus
ggtgacgaatttcgagtgactatactttccaatggtttcttgtttgcatttaatagagaaccaaggccaagaagaatacctccaacagatgaagatgatgaagatatggaagagggagaagacgggttctttacggagggaaatgacgaaatggatgttgatgatgaaactggacaggccgccaacttatttggggttggcgcagatggtattgctggtggcggagtacgtgattttttccaattcttcgaaaactttaggaacactctacaaccgcagggaaatggcgatgatgatgcacctcagaatcccccaccaatattgcagttcttaggacctcaatttgatggagctactatcataagaaatacaaatccaagaaacctcgatgaggatgactctgatgataatgatgactctgatgagcgagagatttggtag

SEQ ID NO: 173911 - DNA, 663 bp, Saccharomyces pastorianus
ttaccgtctagcttccaggagagcaatagcagtgacagccgcagaaagtattgcagcagtgatgaggacagcgacacgtgcattcatggtagtgctaatgccagtaccaatgcgactaccaactccagcactaatgctactaccactgccagcaccaacgtcaggactagtgctactaccactgccagcatcaacgtcaggactagtgcgactaccactgaaagtaccaactccagcactaatgctactaccactgccagcaccaacgtcaggactagtgctactaccactgccagcatcaacgtcaggactagtgcgactaccaccgaaagtaccaactccaacactagtgctactaccaccgaaagtaccgactccaacactagtgctactaccactgccagcaccaacgtcaggactagtgctactaccactgccagcatcaacgtcaggactagtgcgactaccactgaaagtaccaactccaacactagtgctactaccaccgaaagtaccgactccaacactagtgctactaccactgctagcaccaactccagcactaatgccactaccactgctagcaccaactccagcactaatgccactaccctgaaagtaccaacgctagtgccaaggaggggatcctctagagtcgacctg

SEQ ID NO: 173912 - DNA, 234 bp, Saccharomyces pastorianus
atgcaagttaatgaaagatggctgagtgaaaatagtttgagagaagaaatattgtttccattcgctcctattccaagagtttctgttgttagaaacaaagaaacagggaaatcaagaggtttggccttcgttactttctccagtgaagaagttgctgaacaagctttacgtttcttggatggtagaggttacatgaacttaattctacgtgttgaatggtctaaaccaaaggtg

SEQ ID NO: 173913 - DNA, 99 bp, Saccharomyces pastorianus
ttatacaacattatgatccgatatagtgtaacggctatcacatcacgctttcaccgtggagaccggggttcgactccccgtatcggagtattttttcaa

SEQ ID NO: 173914 - DNA, 162 bp, Saccharomyces pastorianus
atggaatctatatttctacataataatattacgattattcctcattccgttttatatgtttcattatcccattacattatcaatcgttgcatttcagcttccattaagttcgatgactgtgtcccaatcctatgtcatcttcttacaccgcatgtaataata

SEQ ID NO: 173915 - DNA, 297 bp, Saccharomyces pastorianus
atgttgattgatttttgctgtagttatatagcagggacccacggaagagagcgagcgccttctttcacagggacttttgtcagccacgtctccggggaaaacaattgccgtccgcgtcgcagtgagattaggcagccgtgcgcttcagggacagaaaagaagcatttcgcggctacggagaaacagtgcactaactctctcgagggtagccgcaaagatttcttgtctcttccattaggacatagctatctttttcttttctgtttttggcgtatgatctgttctgagccaaagtta

SEQ ID NO: 173916 - DNA, 138 bp, Saccharomyces pastorianus
attatttctccttccgttctatatttttcattaccctattacattgtcaatccttgcatttctgctttcattagaattgatgactgtttctcaatgtttatgccatcttcttacaacctatttgacaataaattagta

SEQ ID NO: 173917 - DNA, 819 bp, Saccharomyces pastorianus
atgtcaactttcttacaccacgtctttttaacttctcaaccctcttcttcgtccgattatgcatttgatactgcgttgaccacgttcgaagttgtcactgccgttgattccttcaacgaacctgtcaaatctgtcccatttacggccgttcatgattactcgacagaagatgaaattaaatgcttatttaattcgacaatcagtggcggtctatacttgcgtgttacttactacaccaaggagctgtccggttcttccatttctaacacgattgacttaagctatcctgacgtaagctcgtccagtaatattttgacaaagagagattctgcagtcaccatggattcagaactgttttcagagtcaacggctaatttcggttctgctactaatgatgaatcaacgacttcaaattctgctctaaccccaacgtattcaaatacgaccctttcttcttacacttcacaatccttaactacatctgcagtggaaactgctgcgtcctcgagtagccaggtctctatttctacaagtgacaattccagcgctttgggagacgcatcttcatccgttaccaccatatccactcctaattccatgcaaagcaataaacaaacttcatctaatacgccttcagtctcgacaagcactttttctgcttcttcatcagccgtatctggttcaatagcaagctttagttcgggtccctcttcatcatatgacgcaaattatgcctccacaactgttcttgcagcggcttcttcaaattcaactttgtccacgtcttcatcgtccgctcatcatgttaccacaattcca

SEQ ID NO: 173918 - DNA, 984 bp, Saccharomyces pastorianus
ggtcctaatccagcagaaaagaagcaagacggagccgctaaaccagcgttctcgtttggttctaagcctgatgaaaaaaagaatgatgaagctgccaaaccagctttttcatttggagccaagactggtgaaaagaaagacgatgattcagctaaacctgccttttcatttggttccaaacctacagaaaaaaaggaaggtgacgcaacaaagcctgccctttctttcggtgctaaacctcaagagaataaggagagcgatgcggccaagccagggttttcgtttggcgctcaaaaggacgacgataaaaaaccagtggattccccggcaactaagacaactggggaagctgattcaagtgataacctgaaactaaatgcaaagccagtagaactaaagccagtttctcttgacaataaaacacttgatgatttagtaacgaaatggactaaccaggtgaccgagtcagcctctcattttgaacaatatacaaaaaagattaatagttgggaccaagtattggtaaagggaggtgaacagattagtcagctatactctgatgctgtgatggcagaacatagtcaaaacaaaataaatcaatctctgcaatatattgaaaggcaacaagacgaattggagaactttttagacaactttgaaacgaaaacggaagctctcctgtctgatgttgtatcaacaagttccggggctgctgccaataacaatgaccaaaagagacaacaagcttataaaacagcccaaactttggacgaaaacttaaattcattatcatctaacctatcttctctaatcacggagattaacaatgtgagcaatacattcaataaaaccgctaatatcgatataaacaatgaagacgagaacattcaactgattaagattttgaattcacattttgatgcattaagatctcttgacgatagctcatcttccctggagaaaaagataagtttgataaaaaaa

SEQ ID NO: 173919 - DNA, 696 bp, Saccharomyces pastorianus
atggtgaaaaactctcccgtctttagtgaagtacaccatatgattagcagtgaacgtttatttgaaggcattgatgtgttattgaacctacaaaacatcggatcttttgaatatggttcctttgcaacctatgataaaatcaaggccccactagcaatggaaaccttgaatcctgctgaagtttttggtaacataatggtagaatacccatacgtggaatgtactgattcatccgttctggggttgacatattttcacaagtacttcgactataggaaagaggaaatacgtacacgcatcagaatcgccatcgaattcataaaaaaatctcaattaccagatggaagttggtatggaagctggggtatttgttttacatatgccggtatgtttgcattggaggcattacacaccgtgggggagacctatgagaattcctcaacggtaagaaaaggttgcgacttcttggtcagtaaacagatgaaggatggcggttggggggaatcaatgaagtccagtgaattacatagttatgtggatagtgaaaaatcgctagtcgttcaaaccgcatgggcgctaattgcacttcttttcgctgaatatcctaataaagaagtcatcgaccgcggtattgaccttttaaaaaatagacaagaagaatccggggaatggaaatttgaaagtgtagaaggtgtt

SEQ ID NO: 173920 - DNA, 327 bp, Saccharomyces pastorianus
agtcgtgaacgtactttttcaaaacaatatactcggttttgcaaagaaatgattgaaagtgctccaggtactgacaccgaagactgggagtttattgtagcaaacctcaactcatacatgtatgaaaacagactttggaataataagcactttttttttgatggtcagcgttgcaaacaatcatttagactatgcattctaattccgtcctctctaaaaaaagacaatgatgcaaagtacaagtcatttaaggagtcagtgccatacatcgaagaggctttggaggtttactttgcaaaattagatgaacgattgaaccagagctga

SEQ ID NO: 173921 - DNA, 276 bp, Saccharomyces pastorianus
atgagtcttatactagatgatatcatcctctcactaacgaatgctaacgaacgaacgccaccacaggcccttaaaaccactttaagcctgctatacgaaaaatcaaaacaatatggtctttcttcgccgcaactacaagcacttgtaaggttactctgtgaaacttccataatagacacagttacaaaagtgtacatcgtcgaaaattgctttttacctgatggctacttgacgaaggaacttcttttggagatcattaaccatctcggtacgcct

SEQ ID NO: 173922 - DNA, 150 bp, Saccharomyces pastorianus
cttactaccttaattttcttagtctgtttctgtacaagtaatgtcttcaaactgcaggaagagtcagtcaatgcacaatcgtcgtggagtttcccaacccaagaaatcgacaaaacgaacttggacttcgaggaagctgtgtctgaagtc

SEQ ID NO: 173923 - DNA, 129 bp, Saccharomyces pastorianus
aaaatggaatctatatttctatatactaatattacgattattcctcattccgttttatatgtttcattatcctattacattatcaatccttgcacttcagcttcccctaacttcgatgacagcttctca

SEQ ID NO: 173924 - DNA, 447 bp, Saccharomyces pastorianus
atgtggaaatggatcaaaattctgtaccacgaagtagcgcaggaaaccacgctgaaggactcttatagaataactttggtaccttcttctgatggtatatcagtatgtggaaaactttttaatcgcgagtatgtccgcggcttttactttgcatgcaaggctcagtttgataacctttggggagagttgaacaactgcttttatatgcctacagtggttgatattgccaacctcattttgcgtaatcgagaagttttgttcagagaaccgaagcgaggaattgacgagtatctggaaaacgattcttttcttcaaatgatacctgttaaatatcgtgaaattgtgctgcccaagttgagaagagatactaacaaaatgaccgcggctcttaaaaataaagtcgctgttgcaattgacgagcttacggtgccacttatgtggatgatc

SEQ ID NO: 173925 - DNA, 690 bp, Saccharomyces pastorianus
actttaaagtacagatttcaattgctggacgagttacccatgatatacgccatgtgtgttccgacatggagtctagtttgtgaggccaaagaggcgctgctcaatggggacaatcaaagaaaggttccattattcgaacagatatttatcggactcattattgctgtagccgtcacaacagcaagcatactttacgttatatacaagaacgtcgatattcaccagattctgtttggggtgcaaatcgtagtcgttgctgctgccgcggtaatcttaacatatcgatacgtccatgacccacttgccaaaagaaatcttcgcacttcaatggcacttggagcagtgttattcttatcgggttacatatcatggctattagacatccatctatgttcattctgggtgtatgttagaagaagcattctggccttaccgcttggtgtactacttgaattacacggatggtggcatattttgactggaatgggaatttatttctatattgtttctttggaacatttaagggtcattacattgaacgttagctctgattacctgtttatttggagatggaaagtgttccctgaattggtaagaaaaggacgcaatccgtcaacaagatactctcttgaactatttgggccttatgtagaaaatcagtcagtcgaggctaataagaagaagaattag

SEQ ID NO: 173926 - DNA, 162 bp, Saccharomyces pastorianus; identical to SEQ ID NO: 173243

SEQ ID NO: 173927 - DNA, 195 bp, Saccharomyces pastorianus
gtgggtcgtttgcggcttgctgaggggttaaatattcccagctttctcggcctagctcatcagttctcagtctccaaagacgtggatctgtctttggtagaccgattgtgtcagaataaaattctgtcatctgttttgtactttctttgtgggcgacgattattggtaaggttattgggcacagcagtacattaa

SEQ ID NO: 173928 - DNA, 348 bp, Saccharomyces pastorianus
actttaattgttgtggatatgcaaaacgacttcgtctcgcctttgggttcgttgaccgtccccaaaggtgaggaaatagtcgatccaatttccaagttaatgcaggatgctgatagagactggcacagaattgtggtgaccagagactggcaccccgcaagacacgtatcgttcgccaaaaatcataaagacaaagagcctttctcaacctacacctaccgttctccaagaccaggtgatgactccacccaggaaggtatcttgtggcccgtgcactgtgtgaaaaacacttggggcagccaattggtcgaccatataatggatcgacaagctgatccgcataagcat

SEQ ID NO: 173929 - DNA, 159 bp, Saccharomyces pastorianus
atggattttacgtctgatacgacgaattcgcacgacacatcgaattcgcatttaagtctggaagacgctgtgggtacacatcatgctggtgaagcggatgtcaacattgatggggacgagaagcaacaactatcgctattagatgatgatcaggtacgc

SEQ ID NO: 173930 - DNA, 156 bp, Saccharomyces pastorianus
ttcttcgagatcctctttttgataacgtcggattttaaagataatggcctcatggtaccatgcaatttttggaaaagaccgcatgcattacagagggtgtttccctcagggcttctcctccaaagtggtgtcttgaatgtcttacagttaaagcat

SEQ ID NO: 173931 - DNA, 552 bp, Saccharomyces pastorianus
atgatgtctactatctaccgtcatttatctaccgctagaccggctttaactgaatacgcaaccaatgccgcagttaaatcgacaactgcatcctcagaagctagtactctgggtgctctacaatatgcattgtctttagatgaaccaagtcattcgtggacaaaatcgcaattaaaagaaatttatcataccccactgctcgaacttactcatgcagcacaattgcagcacagaaagtggcacgatccaaccaaagtgcaattgtgcacattgatgaacatcaaatctggtggttgttctgaggactgtaagtattgtgcgcagtcttcgagaaacgataccggtctaaaggctgagaaaatggttaaagtggatgaagtgattaaagaggcagaagaggccaaaagaaacggatctactagattctgcctaggtgctgcatggagagacatgaaaggtcgtaaatcagccatgaaaagaattcaggaaatggtgaccaaagtgaatgatatggggctagaaacgtgtgttactttaggtatggttgatcaa

SEQ ID NO: 173932 - DNA, 267 bp, Saccharomyces pastorianus
actaaagtagagcaacatacattacacaaaaatatttctaacaataggttagaaatataccaccacattaaaaaagagaagagcccaaagggaaaatcatcaatatcaccccaagcacgggcatttttagaacaggtttttagaagaaagcaaagccttaattccaaggaaaaagaagaagttgcaaagaaatgtggcattactccacttcaagtaagagtttgggtatgtaatatgagaatcaaacttaaatatatcctatactaa

SEQ ID NO: 173933 - DNA, 84 bp, Saccharomyces pastorianus
agtagtatgggcatcgttttgggcaaaaaggaaaaacggcttattagtttgtgttttcgaaaaagttccttgcgattatgttga

SEQ ID NO: 173934 - DNA, 858 bp, Saccharomyces pastorianus
atgtcacaagacgctgctattgcagagaatactcctgtggagcatctctctccagttgactcggcatccaactcgatgctatccactcccaccaataaggctgaaagagatgaactaaaggcctacggtgaagatgaagaccaggagcctaccgttgaaattccaaagagacctgcctccgcctacgttactgtctctatcatgtgtatcatgattgctttcggtggtttcgttttcggttgggatactggtactatttctggtttcgttaaccagactgatttcatcagaagattcggtatgaaacataaagacggcacgccctacttatctaaggttagaaccggtttaattgtctctattttcaacattggttgtgcctttggtggtattattttgtccaagttaggtgacatgtacggtcgtaagctgggtttgattgtcgttgttgttatttatattatcggtattatcattcaaatcgcttctattgacaagtggtaccaatatttcatcggtagaattatctctggtttgggtgttggtggtattgctgtcttatctccaatgttgatttctgaagtttctccaaagcatttgagaggtactttagtcgcctgttaccaattgatgattaccgctggtatcttcttgggttactgtaccaactacggtactaagacttactccaactctgttcaatggagagtcccattgggtctaggtttcgcttgggccttgtttatgattggtggtatgactttcgttccagagtctccacgttacttagctgaagttggtaaagtcgaagaagctaagcgttctattgctgtttctaacaaggttgctatcgacgat

SEQ ID NO: 173935 - DNA, 2706 bp, Saccharomyces pastorianus
aaatctttgattgaaaactgtaaaaaaagaaatatgccgttacaatcaataccagaaatcggcaacagaaaaataaatcttttttatctttatatgttggttcaaaaattcggtggtgcagatcaagtaacaaggacccaacagtggtctatggtggcccaaaggctgcaaatttccgattaccaacaattagaatcaatctattttagaattttattaccttacgaaagacacatgatttcccaagaaggtataaaggaaactcaagcgaaaagaatattcttgcaacagttcttacaagaactattgaagaaagttcaacaacagcagcaggccgctgcattggccaatgccaacaataacattaatagtgcatcgtcagcaccaacccccgcggctcctggcgcgtccgttcctgctacagcagcaccaggaacagaagcagggatcgttccggtttcagcaaacactccaaaaagcttgaatagcaatattaatatcaacgtaaataataacaatattggccaacagcaagttaagaagccaagaaagcaaagagtgaaaaaaaagaccaaaaaggaattggaactagaacgtaaagaaagggaggattttcagaaacgacaacaaaaacttttagaggatcaacaaaggcaacagaaattgctattagagacaaaattacgtcaacaatatgaaatcgaactaaaaaaattgcctaaagtctacaagagatcaattgttaggaactacaaacccctaatcaaccgcctcaagcattacaatggttacgatatcaattacatctctaaaataggagagaaaatagattccaacaagccaatttttctcttcgcgccagagttaggtgcaattaatttacatgctttatcaatgtccctccaatcgaagaatcttggagaaataaacaccgccttgaacaccttgttggtcacaagcgctgactcgaacttaaaaatatctctggtcaaataccctgaattattagactccttggcaatactcggcatgaatttactgtcaaatttgtcacaaaatgttgttccataccatcaaaacacttctgactattattatgaggatgctggatcaaatcaatactatgttacccaacacgataaaatggttgataaaatttttgaaaaggtaaacaacaacggtacacttacaccaaatgattctaacgatgaaaaagtcactatcctggtagattctttaacaggtaatcaattgcccacccctactcctactgaaatggagcctgatctcgacactgaatgttttataagtatgcagtcgacatctcccgtagttaaacagtgggacttattgcctgaaccaataagattcctccctaaccaatttcctttgaaaattcacagaactccttatttgacttctttgaaaaaaatcaaagacgaaattgatgatccatttacaaaaataaataccagaggggcagaggatcccaaagtcctgattaacgatcaactgtctaccatctcgatgattttgaggaatatttcattctccgataacaactccagaatcatgtcgagaaatttttacctaaagagatttatatctgatctactttggttagtcttaatccatccagaaaactttacatgcaataggaaaatactaaatttcaagaaggatttggttattgttttatcaaatatttctcatttattagagatcgcttcgtccattgattgcttgttaattcttattctagtcataagttttggtcaaccaaaactcaatccaatggcgtcttcgtcatcatttggctctgaatctttgaccttccacgaattccagttgcaatggggaaaatatcaaactttcggtgtagatattttggccaaattattttcattggaaaaaccgaacctaaattatttcaaatcaatccttctgaacaaaaacacaggtaacaacctctatgatcgcaacagtaacaacaaccacaaggacaaaaagttgttacgaagacttttgaatttatacaatgataacaataaaaataataacaataggcacaacttgctaaatgatgtggtttcgtttttattttctgccataccgctgcagcaagtgttatcgcaatcagctgatccaagtttgctgatcgaccaattttctccggtaatttctcagagtctaactagcatcttagtcattgtacaaaaaatattgccgttatccaatgaagtatttgaaatcagtgagaataattcagacagtaacagtaacaataacggcaacaaagattctagcttcaatttcaacaagaatttaccatttgtgtggttgagctctgaagaaaatattggatctggactattgaagttaagtgagataatattgaatattaacaattccacaagtaagaatactttgttacagcaacaaaattattcaaaggtgctcctaccgtcaattaacatatcctgtgttcagttaatcaaatgtttggttgaaaaaagtatttgttttgaaaactgcctaaacaacgacccggaaatattaaaaaaaatagcatcgattccaaatttgttccccacggatttagaaattttccagttattcactaatccatcagttgatattcaaataataaaccagtatcaattactttacaatttaaaaaatgatatcctaaccaatttgaaatga

SEQ ID NO: 173936 - DNA, 255 bp, Saccharomyces pastorianus
cagttaggtggagtcgaattccatatatatcatttatcgcagaaactaatcgatttgggccattctgtcgtcattataactcacgcttacaaagatcgagtcggcgtacgacatcttaccaacggtttaaaggtctatcacgtaccattttttgtgattttcagagaaaccactttccccactgttttttcaacatttccaataataaggaatattcttctcagagcagatccaaattgttcattctcatggtag

SEQ ID NO: 173937 - DNA, 345 bp, Saccharomyces pastorianus
gaagtctcttcttctttcttctatagaggtaactacaccgactttgaaaacaccttccaaaagactgtggagcctgtctaccaaatgcatatcaaaacatcaaaggatattgctgttttgcgttccaaagaatggttccaattagatgatgaagattgcgatttactgaacaagactttgaccttcgaaaccgaaactgaagtcactttcaagaacgctaaaagacaagatgggacaagacgcgacggttcccatccaacccaacagcagcggaaacggaaaccgcctcaacgatatgaacaagccaaggcctctgtggggcccatatttcggcctttctcttca

SEQ ID NO: 173938 - DNA, 144 bp, Saccharomyces pastorianus
cataggataactccaaaatctttagaaaatcaaattaacatcatcatccaaaaggaactgtacccttttgctttacaattagcgaaacagcattcattatcaccgctagatgttcaggaaattcataaaaaatatggtgatatc

SEQ ID NO: 173939 - DNA, 159 bp, Saccharomyces pastorianus
caccaacatcaccatcgtactcaccaacatcaccatcgtactcacctacatcaccatcgtattcaccaacgtcaccatcatattcgccaacgtcaccatcatattcgccaacgtcgccatcgtattctccaacgtcaccatcgtattcgccaacgtcgc

SEQ ID NO: 173940 - DNA, 1131 bp, Saccharomyces pastorianus
gttcgtggtcttgcgacagtctccaacttgactagagattcaaaagtcaaccaaaacttattagaagatcattcttttattaactacaagcagaatgtggaaacgctggatatcgtaagaaaaagattaaacaggccatttacctacgcggaaaagattttgtacggtcacttggatgaccctcatggtcaagatattcagagaggtgtttcatacctaaaattaagaccagatcgtgttgcctgtcaagatgctactgctcaaatggctattttacaatttatgtccgctggtttaccacaggttgctaagccagtcactgtccactgtgaccatttgattcaagcacaagttggtggtgaaaaagatttgaagagagctatagatctaaacaaggaagtttatgatttcttggcctctgccactgcgaaatataacatgggtttctggaagccaggttccggtatcattcaccaaattgttctggaaaactacgctttcccaggtgctttgatcattggtactgactcccatacaccaaatgctggtggtttaggtcaattggctattggtgttggtggtgctgatgccgttgatgttatggcaggtcgtccatgggaattgaaggctccaaagatcttaggtgttaagttgactggtaagatgaacggttggacttctccaaaggatattattttgaaattggctggtatcacaactgtcaaaggtggtactggtaaaattgttgaatatttcggtgatggtgttgacaccttctccgctactggtatgggtaccatttgtaatatgggtgctgaaatcggtgctaccacatctgttttcccattcaacaaatctatgattgaatatttggaagcaactggtcgtggtaagatcgctgactttgctaaattataccacaaggatctattatctgctgataaggatgctgaatacgatgaggtcgtcgaaattgacttgaacactctggaaccatacatcaatgggccatttacccccgatttggctactccagtttctaagatgaaggaagttgctgttgctaataactggccattggatgtcagagtcggatttgatcggttcttgataccaacttcctctatatga

SEQ ID NO: 173941 - DNA, 264 bp, Saccharomyces pastorianus
tacaacttgcttaagtcagtgggggtggccttggtggtcacaatctcgtcgtacaataacgtagtcaagaattcactgaatttctcacctctgatttctggcaagaaatacttagcggccagcgcgaacttgttcttgtcgcctagtggacttgccttggatagtctttccacttgctcctccaggatcttttgggtcaattgtggggtgaccttttcgccggtgtcacttagtgtgacgccgtgtctcacccactggtacaat

SEQ ID NO: 173942 - DNA, 435 bp, Saccharomyces pastorianus
acgtcaggactagtgctactaccaccgaaagtaccaactccagcactagtgccactaccactgccagcaccaactccagcactaatgccactaccactgaaagtaccaactccagcactaatgctactaccactgaaagtaccaactccaacactagtgccactaccactgctagcaccaactccagcactaatgccactaccactggaagtaccaactccagcactaatgctactaccactgaaagtaccaactccaacactagtgctactaccaccgaaagtaccaactccaacactagtgccactaccactgctagcaccaactccagcactaatgccactaccactgctagcaccaactccagcactaatgccactaccactgctagcaccaactccagcactaatgccactaccactgctagcaccaact

SEQ ID NO: 173943 - DNA, 348 bp, Saccharomyces pastorianus
ccatttgttcaaatggatcaaatttcccaatttttatcattttcgagaaaatatggtgtgcctgaagatgaactgtttcagacaattgatctttttgagaaaaaggatcctgccattgttttccaaacgttgaagtcactatctcgttacgccaacaaaaaacatccagatagatttccagttctaggaccacaactgtcaacaaagaagccaagacctccggttaagtctaaaccaaaacatctacaagattgtactggatggagcacttttgaatacggttatatgaaaggtgcatctcaggctactgaaggagtggtgttaggacaacggagagatatagtttag

SEQ ID NO: 173944 - DNA, 195 bp, Saccharomyces pastorianus
gtgccaaagacaacctacgggaaccttcagtgttcctctttagcgatgacttttcatgagaggggggagagcggtgatgtgttatcttgcacctgtaggctttacctctatataatgcctcttttttttaacacttttttgaggcagaagcattttcagctatgttctaatacaccatacagggaacaatggtga

SEQ ID NO: 173945 - DNA, 321 bp, Saccharomyces pastorianus
atgtcaattgccagtgcatgtaactggatctggggtttcctgatcagttttttcactccattcatcacttcagcaattaatttttactatggatatgtctttatgggctgtatggtgttcgcatacgtatacgtattcttcgttgttcccgagactaagggcttgacactagaggaagtcaacgaaatgtacgaagaaaacgtcttaccttggaagtccaccaaatgggttcctccttctagaagaaccgaggattatgatttgaatgctaccagaaacgacactagaccaatctataagaggatgtttactaaagagaag

SEQ ID NO: 173946 - DNA, 288 bp, Saccharomyces pastorianus
atggtcggttcagacattcacgaggccctacattatccagtttacaaaatgataatgagtgcgaatgggtataaactaagacaactgctaagttggttaacgactttgggaggttacaatagtgtgtattattgcggccgttttagttatttagtctcatggccatttgcttcacttatattcaaccatcacacacgtctttccctgaaacgcttgagaggaagattagccaaggtatatagcagcattatttcgtttttttgccggtcatcttctaaatcatccaaa

SEQ ID NO: 173947 - DNA, 774 bp, Saccharomyces pastorianus
atggaacttcagagggcacaacggaatttgaagtttttacaaaacgaggattatgtgaacgttaccgatcaaactaacctgaatggagagagccagaatgcttactctttaggaatggaaactcaagtaccggaaatgcagttttccttatcatctgatgatgattcaataggtacgcaagtaaaaagcgtaactgcacaaaaatcgcctatgacgcaagagactacgaaaaacgatacagaaagaaataaggatgttgataaaagttgtaacccagtcagcacttcccatcccgatttaggtgaatcaaatatcgaggagaacatattcattaacactcaaattcaaagccgacttgatgacgcagaggaagaaacaaatcttaagttaaaacttgaaaaattcaagtattcgttcaagagtagtaacgcagatgatacccacagcaatgcaaatgtaacagctaaaagaagaccagcaataaggaaggctaattcgaaactcaaaacaaaacctaaaactaaacgagaccgtaaaattatcaaaaatataactgatttcaatattaataactacgaacgttcaaggactgccagcttattaaagcaattatcaggtaagcacaagaaggttttggacataataaagacgcaaaatgaaggaaacagtgataaacttcccagagcaaggaataacaagggtgaaaaagctacttttgatacatatagtgaacaggagtggaaagatattatgaacttcttctacaaaagtttc

SEQ ID NO: 173948 - DNA, 870 bp, Saccharomyces pastorianus
tcaaaggaaggctttgagagaacgttcaaatcagaaataattcatgccctttgctttgatacatgctcttacgcacaaattgttaactgtattccagaacatatcaccaagcacccttcatttgatatatatctcgaaaaatacgccaattacacttctcctgtaagcttgactgacaatggcgttttcgtgttgaaagaaaagtataaagatgagattgatccttattatatagggttgtcttccagtagaaggtatgatgtagagaaaaatatcaggctgaatatggcaaatttgaagaaaatgaaatatgaagatacttttgtaccagcaaaaaaggttaaagatttgttgaaaaatacattattttctgggttgtattcaatatcatcagtgaatacttttggtttatttttgaaaaatactttagatcacattataaaatatgattatgacaatttattgccgagagtggttcatttgattcatttatgcgtggttaataatctgaatgaatttatggggatactgtggcatgaatacgcaattgtggacacagaattctgtcattaccacagcattggttctatcctgtattactgtctgttgaaggataatttttcggaatctcatggtaagattagggaaattttcaggtatttaatggaaacagcgcctcacgtaaatgtaaacagttatttgagggagcaaaccacgtcatacacaccaggaatattgtggcctacaaaggaagataaaagccacaaggataaagaatttgaaaggaaaaaacatcttgctcgattgagaaagaaaaaattaatgaagaagttggctcaacagcaaatgaaattcatggaaaaacaatag

SEQ ID NO: 173949 - DNA, 774 bp, Saccharomyces pastorianus
atgagcttgctgggatacgataatcctcggatgtctttgaatgaaaatggtgataaaataagaagtggtagttgctcattagacaaatacgaaattcttaaaaaaagctacgatactatagatgaaactgatgatcaaacatcctttacctatataccatttagtgacagaaaatgggttttaacgatgaatgggaataccgaatttttgagtagtggtgaagaaatgaattggaattttgattgtgtggcagaagctggttcagatgctgatatcaaaaagagacaaatgacaaaaaaaaccagctcaccaataccagaagcagatgatcaaaccgaagtagaaaccgtttatatcagtgttgatattcccagcggcaattacaaagagaggaccgagatagcaaagagcgcaattttacaatattccggtttagaaacagatgctccgttgtttagaatcggaaatagattgtatgagggaagctgggagagacttgttggcacggagcttgctttcccaaatgctgcacatgtacataaaaagacagccggtctactatcaccgactgaagagaatgaaacaacaaatgctggtcaaagtaaaggctcatcgactgccaacgacccaaacatacaaatacaagaagaagacgttggactaccggattcaactaacacaagtagagatcacacgggagataaagaagaggttcaatcagaaaagatttatagaataaaagagaggatagtgctaagcaatgtccgccctatg

SEQ ID NO: 173950 - DNA, 1068 bp, Saccharomyces pastorianus
atgcgaaggttctccaaaaggtctctgggctggattataaaaattttcacaccacatctctcaaatttttcccagaaatccatctcagatgcgatcttttccataataactgttccgtttttcattattttcaaactatcatgtcctcaaccgccttcagatattttgagttatgatcccactttgaacagatactctttaacaacgttacccataattttattatttatccaatcaattactgcacccttcctcctttgcagtatactttctgtgcttttgacatatcatctaggctatctcgtttaccttttccctcttatattagctatggccttaattttactattgacggctttcattacaaaggtaaatctgcataacaagtttactctgtcattagacagctctaacattttacaggaaaagctacaaaaaagaaaactcctcgaaaggcttaacacaagcatccaaataatttttctagctatcggcataataaatatcataatttggatatcacttttagccacttctcttattgagatgatggaaatttaccaaaaaatattaggattatcgaaagctattttgggccttaccattttcgcatggggcaactcagtaggagacttgatctccaacatatctatgtgcaggctctacaaaacccaaactcattaccaagacagagttcgtttagccacaaaattttttataatatcatgcgcatcttgcttaggaggcgtaatgctgaattctatgggtggaataggctttagtgggctagtctcaatgctttttattggcgcttttaatgataacgaatggtggttcctaagaaaggttaaattacaagaaacaagtcaattggataatacattaaattacaaattcatagtttcttgcgtcttcattatcctacagattattctcttgctgttattcttcggagggcctaacaatattaaacggcgcctcacaaaggagatgaagttagttggaatctctatgtgcggactatgggcactagccacgttgattaatatacttctagaactgtttagc

SEQ ID NO: 173951 - DNA, 444 bp, Saccharomyces pastorianus
aaaggttctatgatatataacccgaaaactatgaagtgggaaggaaatgaaaacgtcttaagcaaatttagtgatgtagacacggcaaacaggaaagctttattgataaaaaacaagctacaacgagatgcagattctaagaagcaaaaatattctgatctacagcatgcaagagccacttcgagaaatcaaaaggtcatcgggaacatgattttagatgaacaaaatttaagatgggttagtgtttcagaggaagaagcagacccttttgcaggcattcctgagataaacttaccaccagttggcaaaagtatgaaaaaacgtagctcctcaccatttttgcgttccaaaagccaagttaatacgccatttgtctcaaatgacaatgatggcgtttatcaaagtacggctgctcaagcaagactccgtaaataccatcaatga

SEQ ID NO: 173952 - DNA, 114 bp, Saccharomyces pastorianus
aaaaaaaaaaaaaaagaaataaagattgcagcacctgagtttcgcgtatggtcacccactacactactcggtcaggctcttaccagcttaactacagttgatcggacgggaaac

SEQ ID NO: 173953 - DNA, 1290 bp, Saccharomyces pastorianus
atgaaccgcaagcaaagatctgaatactcgacaataccgaaatcttcaccgattagagtgggctttatcggattgtcctcttcgaaaggatgggctgtcaagacgcattatcaagccattttacagttatcatcgcaattccaaattacagcactgtacaacaaaaaaatagattcatctatagccaccatcagagatctgaagttaaccaatgccgtggcatacccgacgctagagtcgttcgcctcatcttccaatgtcgatatggtagtatttagcgtgcgaactgctagctattttgacttactactgccgctactggaatattctcgtgccaattgtaacttgaaatatttattcatggaatggggactcgtatattctgtgaaggaaatggaaactgttttccatgccgcatcagaacgtgggctgcagacaataatctctttacaaggacgtaaatcaccatacatcataagatctaaagagctgatagaggaaggacacataggggatattaattcaatcgaagtaactggaaatggtgggtggtatggttacgaaagacctctaaaatctccctcatacctatatgaagtcagcaaaggcgtagacttagtcactacgtcgtttgcccatacaattgatctcttgcaatatatcacagggtcttatttcggcgtaatcaatgcaatggttttcaataatattcctgaacaggagttggttgatgagttcggtagaaaattgggaaagactgtgccaaagactgtaccggatcatttattgtttcagggaactctattaaagtcgaatgtgcccgtttcttgcagtttcaaaggtggatcgcctacaaagaaattcaccaaaaacttagttatagatatacatggcaccaaaggtgatctaaaattagaaggtgatgccgggtttattgaaatatcaaacttggtgctttactataggggcgttaaggtaaatgaatttccaaataaaaagggtcaagtcatatatgaagaatctttcggggatgaagtaacggaagtgttccatctaaggaattataatgcaatggttggaaatatttatcgcctttatgaatcaattgcagacttccatttcaattctaaaaatattcctgatttgccatcgacattcgtcatgcaaggatttgagtatgaaggttttccgactttgatggacggcttaattctttgcagacttattgaaagtgtctataagagtagtagcttgggagcaactttaaacgttagcaacatatcacgctat

SEQ ID NO: 173954 - DNA, 495 bp, Saccharomyces pastorianus
atgactatttcatctgctcattcagaaacgagacgcaaatggtggaaagaagccaccgtctatcaaatctaccccgcaagtttcaaagactctaacaacgatggctggggtgatatgaaaggtattgcctccaagttggagtacatcaaagatcttggtgccgatgctatctggatttcgccattctacgactcgccacaggacgatatgggttacgatattgccaactacgagaaggtctggccaacgtacgggaccaacgaggactgcttcgccttgattgataagacccataagttaggtatgaagttcatcaccgatttggtcatcaaccattgttccagtgaacacgagtggttcaaggagagcaggtcttctaagactaatccaaagcgtgactggttcttctggagagcacctaagggctacgatgccgatggcgcaccaatcccaccgaacaactggagatcgtacttcgggggttccgcatggact

SEQ ID NO: 173955 - DNA, 171 bp, Saccharomyces pastorianus
ataacgacgacgacgacgacgacgatgacgatgacgacgacgacgacgatgacgatgacgacgacgacgacgatgacgatgacgacgacgacgacgatgacgatgacgatgaagatgaagacgaagatggcggggagaatggcggagagggtcccgatcgctcttagatag

SEQ ID NO: 173956 - DNA, 432 bp, Saccharomyces pastorianus
cacgtacagcttttgttgttgtatttttttgtgtcaacagtcaaagccttctatttaccaggtgtagcgcctaccacttacagggaaaatgacaacatcccattgctcgttaatcatttaactccatcaatgaattatcaacacaaggatgaggacggtaataacgtttctggcgataaagaaaatttcttgtactcatacgactactattacaatagattccatttttgtcagcctgaaaaagtcgaaaagcaacctgaatccttgggatccgttatatttggtgatcgaatttataattcaccattccaattgaatatgttacaagaaaaagagtgtgaatccctgtgtaagaccgtaattccgggagatgatgctaaattcatcaataaattgataaaaaatggctacttcacaaaactggcttattga

SEQ ID NO: 173957 - DNA, 891 bp, Saccharomyces pastorianus
atggcaataatggaaagcagcaatcatgtcgggacttcatcgcctaccactgaaacacagtttacaatagattcttccgcattgaaagaccaagaaaccaaagaaagcataacaaattcaccgacaagcgaggtaccgattgaaacaaaactaccaaaaagttccgatatagtaacagaggaaaaacatcctcaaaacacgactactgatattgaaaacgaggtagagaatcctgttacagacgataatggaaatttgaaacttgaattacctgataaccttgataacgctgatttttcgaagctactggaatttgatgcaaaaaatgatgaagctctgttcaactcaaatgagttgttatcccacaccatggatcctgtaaataacatcaatttaactcatgatcatagcagggaggtttcatcaaaagaagatatcaatatagagccagtaaaccctgatgaggacgaaagggagaaaactcaagataacacagcagcagtgaaaactgaagggataaagaactcagaagatacaagtatacaaaaggatgaacaaactgctgatgctatatacacagatgtgcataaattatcagtaaacaaagataccgagaccctgccaacattagtagatgaaaaaaacaacatgctgcatatgagaaacaattcaataacgccaataatgtttcagcagcatgaattagtgggacaaccgccacaaaagactgtaacggaaaataatagtacagatgctgaaactacccaacgaaaactatctgagccaatcgatgcaagtttaccgctaccgaatgaacaaccgactatcttcgcctatgcaaggctggactttcaaagtttcacattttatgtacaaacatacatgcaataa

SEQ ID NO: 173958 - DNA, 192 bp, Saccharomyces pastorianus
atgaactttgaggaccccttgcactgtttaattatcgcagactcggaagacaagatccaaaaaggtataaaagtttgtcaaaacattgttatcaaagcggtgacatctccggaaggccagaatgacttgaaacgaggacaactgagagaattggcggaacttaatggtactttaagagaagataacaggccc

SEQ ID NO: 173959 - DNA, 288 bp, Saccharomyces pastorianus
gaccacacccttgtggccatcgttgttttctttgggaatggtgaacctttccatgtgtcgttgtctgtagaaatggtgttcgtgctgcttctttcatccactagaattcatgaggtagtagttcttatatgttataaacttcaacacgccacctggtcttggggtaatatgagcaagaatttctctcttaaaccggatataagtctgagctttctgttggatataatttctataaatgatatatgcatctacggttgcattgcccttacagttgtgtttattttttaa

SEQ ID NO: 173960 - DNA, 69 bp, Saccharomyces pastorianus
atatggctcgatgtcttccaagtattctttgtattcctcgtcatttcgcagcattctctccacagctag

SEQ ID NO: 173961 - DNA, 126 bp, Saccharomyces pastorianus
gatttaggaatccacagaaaggaatcaataattttgcataatattataaatgattctgttcctctttttatatgttgtcattcattgatcctattacaatatcaatccttgcgcttcagcttccac

SEQ ID NO: 173962 - DNA, 294 bp, Saccharomyces pastorianus
atggttattattatgttcattgcccaattctacgttgctctattccccgtgggagattctccaagtgcggaaggtttcttcgaagcttatctatccttcccacttgttatggttatgtacatcggacacaagatctataagaggaattggaagcttttcatcccagcagaaaagatggacattgatacgggtagaagagaagtcgatttagatttgttgaaacaagaaattgcagaagaaaaggcaattatggccacaaagccaagatggtatagaatctggaatttctggtgt

SEQ ID NO: 173963 - DNA, 78 bp, Saccharomyces pastorianus
atgaacgtatcttcatcttctcaatcggcatcatcaagaccatttggcatttggaataatgacatgagcgtctggagt

SEQ ID NO: 173964 - DNA, 246 bp, Saccharomyces pastorianus
ctagcgtacctgttggtgctatttcaggtgcatagggtaactgggtgggagttgtcatatgagcagtaccatgcagcgcatctgaacgaagctatcaacctagacagcggttggaacaaaagtaccaagaacctgctgttgccttttaacagaacgcgcgtacccggatcggaaggctcgcgcgagatccagcgcttcatcatcgagcagacctgcaggcatgcaagctgcatgccgtcgtttaca

SEQ ID NO: 173965 - DNA, 636 bp, Saccharomyces pastorianus
atgtctgctaaagttccatctaacgccacgtttaagaacaaggaaaaacctcaagaggttcgcaaagccaacatcatcgctgcacgttctgttgcagatgccatccgtacttcattgggtcccaagggtatggacaagatgattaagacatctcgtggagaaatcatcatctctaatgatggccacaccattctaaaacagatggccattctacatccggtggccagaatgctagtagaggtttctgccgcgcaggactcggaagccggtgatggtaccacttctgtggtgatcttgaccggagctctattgggtgctgctgagaggctgttaaataagggtatccatccaaccatcattgcggactcctttcaaagtgctgcgaagagatctgtcgatattcttttagaaatgtgccataaggtttcgttgagcgatagagaacagctggttcgtgctgcatccacttctttgagttccaagattgtgtctcaatactcttcgttttcggcgcccttggcagtggactccgtattgaagatatctgatgaaaactctaagaatgttgacctgaacgatatcagactggtcaaaaaagttggtggtaccattgatgacacagaaatgatagatggt

SEQ ID NO: 173966 - DNA, 882 bp, Saccharomyces pastorianus
atgctatttcgcgaacggatttcgcaagatttgccccttttccctgggttgatgcctattaactcctatctgcttttccacagagcagcaaagttatcacatgcatctattccacctgcaatactgagtaggttccccccagaaatccaatcggatgataatgccgtgaagtccattggtgtggacattcttatcgaattgattcaggaaatatatcaaagaacatctggtagaattaaagggtttcatttctatacattaaatttggaaaaggctattgctcaaattgtctcgcaatctcccgtcttatcccatatcgtaaatgaatctagcgaagaagagggagaagatgaaaccagtggcgaaataggaagcatagaaaatgtgccaatagaagatgctgacggggatattgtgttggatgattcgaatgaagaaactgtagcaaaccggaaaaggagaaggcattcaagtcttgattcggccaagttgattttcaatagggctatcgtcactgaaaaaggcttacgctataataatgagaatggttccatgccatttaaaaaggctttaatatctatttctaaaggtcacggaactttgggtcgtgatgccacttgggatgagttccccaatggtagatttggtgactccaggtctcccgcatatggtgaaatagacggttatgggccatccatcaaggtaagcaaaagcaaagcacttgaactatggggtataccaaagacaattggcgattttacagatatttttataaaatatttggaaggttcaacggatgcgattccctggtctgacctgggtttatcagctgaaacggcgttaatacaagaagaactaatccaactaaactatcgcggatat

SEQ ID NO: 173967 - DNA, 306 bp, Saccharomyces pastorianus
atgtgttctgaaaacaatgtaaccgctaataattttcaacagacgcagaatgacccttcgtataacagaaatttgttcatgatgtccaatcaggaaggtgtacaatataatcttgacgaaacagagaagaatggacctaaaacacaggtggaagcaaacactagcgcaaatctgcatttcgacaatgttattcctatagtaactaacgcagacatcaggaaaaagcgttctaactgggataacatgatgacatctggtccggtagaagacttttggacgattaatgatgactacggctttttaacg

SEQ ID NO: 173968 - DNA, 387 bp, Saccharomyces pastorianus
tctgccaaactaggccatactgttgtatccaacgaggcatattctgaattgcaacgcaaatactcagaattggagaaggaagtagaacaaccatcactagcatacctagtcgaacacgccaaggctaccgatcaccatctgctatcggatagtgcatacgaagaactagtcaagtgcaaggaaaatcctgatgtagaattcttgaaggagaagtctgcctacctgggccatactgtggtatccaacgaggcatattctgaattggaaaagaaactagaacaaccatcactggaatacctagttgaacatgccaaggccatcaatcaccatttactatcggatagtgcatacgaagacctagtcaagttgcaaggagaaatcctgatg

SEQ ID NO: 173969 - DNA, 135 bp, Saccharomyces pastorianus; identical to SEQ ID NO: 173280

SEQ ID NO: 173970 - DNA, 183 bp, Saccharomyces pastorianus
actctgtgcaatgacataattgcacagcacacagatgaagctttcatacggaacctcgtctctggcaaaaagaaaacttctttgaagtttctagtcggacaaggtatgagacaaagccaaggacgtataaaggcaggcgaatttgagaaaaaattcaaagagattttagatattcagtggtaa

SEQ ID NO: 173971 - DNA, 405 bp, Saccharomyces pastorianus
atgacaagagggattccattaaatgacgacgaccgttgggactggttgaaaaaagttgccgtagaatctacaaaagctgcagcaagcactaaggagcatttgtcaattgttgcttgctcgagcttgaagaagaaatacagagatttgattaggcacacatgccctgaatcggagttccattttatctttttgtatgcaagtaaaatagaagttctgaaaaggctcaaaacaaggaagggtcatttcatgaaagctgatatgatggagtctcaattcagggatctggagttaccagacatcaacgacgaaactgactgtgacattgttcccttagatttcaaaacgttttatcaaattgaaaaagatgttacacaggtggtaaaaagtaaagttttgaatattgag

SEQ ID NO: 173972 - DNA, 129 bp, Saccharomyces pastorianus; identical to SEQ ID NO: 173923

SEQ ID NO: 173973 - DNA, 780 bp, Saccharomyces pastorianus
ggaacaatggttatgattattttcggtagtgctgttgtttgtcaggtcaatgttgctgggaaaatacagcaggacaatttcaacgtggctttggataaccttaacgttaccgggtcttctgcagaaacgatagacgctatgaagagtttaacatccttggtttcatccgttgcgggcggtacctttgatgatgtggcattgggctgggctgctgccgtggtgatgggctatttctgcgctggtggtagtgccatctcaggtgctcatttgaatccgtctattacattagccaatttggtgtatagaggttttcccctgaagaaagttccttattactttgctggacaattgatcggtgccttcacaggcgctttgatcttgtttatttggtacaaaagggtgttacaagaggcatatagcgattggtggatgaatgaaagtgttgcgggaatgttttgcgtttttccaaagccttatctaagttcaggacggcaatttttttccgaatttttatgtggagctatgttacaagcaggaacatttgcgctgaccgatccttatacgtgtttgtcctctgatgttttcccattgatgatgtttattttgattttcattatcaatgcttccatggcttatcagacaggtacagcaatgaatttggctcgtgatctgggcccacgtcttgcactatatgcagttggatttgatcataaaatgctttgggtgcatcatcatcatttcttttgggttcccatggtaggcccatttattggtgcgtaa

SEQ ID NO: 173974 - DNA, 267 bp, Saccharomyces pastorianus
atgcgtactttcactgactttgtttctggcacacctattgtaaggagtcttcagaaaagcaccataaggaaatatggatacaatttggcaccctacatgtttttgttactacacgtagatgagctatcgattttttctgcataccaagcaagtttacctggcgaaaagaaagtcgacacagagcggctgaagcgtgatctatgcccacgtaaacccactgagataaagtacttttcacagatatgtaacgatatgatgaacaaaaag

SEQ ID NO: 173975 - DNA, 531 bp, Saccharomyces pastorianus
aacgatggccgtggttgggatcttaacataaacaagaagccaaatctccacggatacggccatccaaatccaccaaacgaaaaatcgagaaaacatagaaacagacagctccaaatgcaacagctccaacagcaacagctccaacaacagcaacagcaacagcaatatgctcaaaaaactgaggcagatatgcgcaattctcaatataaaccaaagttagaccctacttcttatgaagcttaccagcatcaaacccagcagaaatacctgcaagaacaacaaaagagacagcagcaacaaaaacttcaggagcaacaacttcaagagcaacaattgcaacagcagcaacagcaacagcaacagctacgtgcaacaggccaacctccatctcagcctcaagcgcaaactcaatctcagcagtttggcgctcgttatcaaccacaacaacaaccttctgctgctttaagaactcctgaacagcacccaaatgacgataattcaagtctagctgcttctcataaggcgacttag

SEQ ID NO: 173976 - DNA, 390 bp, Saccharomyces pastorianus
agatattttataactaataataaacaatcggcaagtaacttttatttttcttctataaaaattaataagaataaaaaaacaattcttaaaaatcatttaaatgatataaatgaaataaaaatctcagaacataaacctttatataaaaaattaaaagatgatgaaatattaggttattatttagcaggtttaattgaaggagatggtcatatcggtgctaaatatattactattgctattaattataaagatattaaaaatgcttattatttaaaaaaattaattggttatggtaatattagaaaatactctaatacttataaagctgtaagtttaaatttggattctaaagcagctatattaagagtatttaatttaattaatggtaaa

SEQ ID NO: 173977 - DNA, 234 bp, Saccharomyces pastorianus
atgactggtcctggacctgaaataaataaggaggagcaccccagttctccgggcaagaaacagataacatataatagtatacccaagaatgcaaatctaattgatggatctacgaattcatcgaagaggccaattgaaaagtatgacaagagcatagccgacccaacaaaaagctatttccacatagcatatcaagaacaccaaggagaaaattacttcattctagtcctcact

SEQ ID NO: 173978 - DNA, 840 bp, Saccharomyces pastorianus
ctacaaacttaccgtcaacacatgccgttcctgatatttggaaattttcaatggcaaactagaaagtttaagttggataagtctattaaagatttgattacattgatttctgacgaatcatctcaattggatgctgatgtgagagctacatttgcaaattacaatagtgccaaaaccaacctggctgctgctgaaagaaagaaaactggtgacctttctgttagatccttacatgatattgtcaagccagaaaattttgttctacattctgaacacttgaccactgttcttgtagcagttccaaaaagtttgaaatctgatttcgagaattgttatgaaactttgtccaagaacgttgtaccagcatctgcaggtgtaattgccgaagatgctgagtatgtcttattcaatgttcacttgttcaagaaaaatgtccaagagttcacagcggctgcaagggagaagaagtttatccctcgtgaattcaattactctgaggaactaattgaccaattgaaaaaggaacatgactctgctgcaagtttagagcaatctttacgtgtccaactagttagattggccaagactgcttatgttgatgtcttcataaattggttccacatcaaggccttgagagtctacgtggaatccgtgttgcgttatggtttaccacctcattttaacatcaagatcatagctgttccaccaaagaacctctctagatgtaaatccgaattaactgatgctttcggatttcttggtggtaatgcttttatcaaagacaaaaaagggaaaattaacaagcaagatacttcgcttcatcaatacgcttcccttgtc

SEQ ID NO: 173979 - DNA, 1104 bp, Saccharomyces pastorianus
atgaaagccgtcgttattgatgacggcaaagccgtcgttaaagagggcgtgcccattcctgaattggaggatggtttcgttttgatcaagaccgttgctgttgccggtaatcccactgattgtggacatatcgactacaggataggccctcaagattccatcctaggttgtgatgctgcaggtcaaattgttaaactggggctgggcgtcgattgcaaacgctttgcccttggagattacatttccgggtttattcacggttcctccgtaagattcccctccaatggtgcctttgctgaatactccgctgtttcagcggacactgcctacagattgcccaacgatattggaccttgtggtgaggatagtctacctgaaggtcccgtcaagtctttagaaggtgctgtcacctttccggtatcattgaccactgccggtatgatcctgacctataacttgggcttgaacatggaatggaagccttctgtgccacaaaggggtcatcctatcttaatctggggtggcgctactgccgtaggccaactactgattcagttgacaaaaaaattaaatgcattcactaagatcattgtcgtcgcttctcagaaacacgaaaaacaattgaaagagtacggtgccgatgaactgtttgattatcatgattctgatgttgttgaacaaatcaagaggaaatacaacaatattccttatttggtcgactgtgtcgctaatttaaacacccttgaacaggtgtatagaagtgcggctgatgaattggatgccaccatcattgaattgacaaatttgaacgtcgaaaacgtcaaagaggaatacaggagacaaaatgtcaccattgccaaaacaagcctatacgcgataggtggacacgaagttccatttggaaaattcacttttccagctgatcttgagtgtaagaaggccgccattagattagtcaagttccttaatccaaagatcaaagaaggggaaatccatcatatcccagtcaaggtctataagaaggggttgtatgacgtcccgcagttgcttgatgacatcaggaacaacaaaaactctggtaaaaagctggtcgcggtattaaat

SEQ ID NO: 173980 - DNA, 78 bp, Saccharomyces pastorianus
atggtctctagcgggatcgaaccgctgatccccgcgttattagcacggtgccttaaccaactgggccaagagaccaaa

SEQ ID NO: 173981 - DNA, 192 bp, Saccharomyces pastorianus
ctgatactgaatatcttcatttgcagctatgcaatatttcagataccccattttacccaagagtttcttactggtggttggattttctttaagacgagaagattaccagtcctggatgttcgtgaatgtgcctattgcgtcatcagcgactccgcgccaagaaaagaaatactcgcatgctcggatttatag

SEQ ID NO: 173982 - DNA, 174 bp, Saccharomyces pastorianus
acgttgtttcaagtgcatactttgaaattcaatagaaaggattacgataccctttctcttttttacctcaccagaggatactataatgagtggagttttccgtgtcctggaacgttgtcacgaaatagcgagtgccaggccgaacgacagctctacgatgcgtactttcactga

SEQ ID NO: 173983 - DNA, 105 bp, Saccharomyces pastorianus
acagacatagatgatatggatagcaactctcgaaattacttgaaaacaaggacgttcagaattgttagattatttgcaataatttttgcactgcttttgatagcg

SEQ ID NO: 173984 - DNA, 132 bp, Saccharomyces pastorianus
gaccctcgttcagaagcttattgtctaagcccatattcagtctgctctaaacggcttccgcggaagaagcatttctatctcttgaaatccgtacaagatattagacgtgtgttgggagtcgtatactgttag

SEQ ID NO: 173985 - DNA, 1398 bp, Saccharomyces pastorianus
atgagattctcacactttctcaaatacaacgctgtccctgaatggcagaatcattacctagattataacgaattgaaaaatttgatctacacattacagacagatgaattgaaacaagaaacgccaaccggtgacttaaacgatgacgctgactctcagactccaggtccaatcgctgatatagaaagcaacatagctgcaggagaaccatcttcatcgaaaagaagatttacacataaactcaagcgtaagctctttggttctaaaacaccttcaggaagcaaaaggggagactccgacgaaaaggccatagatgggaacaatattaacgaggaaacaattgagttagacgagttatctcctcaagggaaaaccacctctttcaataagaattttatacgtaagaaattctttgaatcacgcagctcatctgtgagtagcgagggaaagacgctcttcagttcttatgatacattcgtaactaacctgagcgacgagaaattgaaagtagatgatttctacaaaagaatggaagctaagttctatgaaagatttgaccacttgattaatgatttggagaaggaaggcattgtaacaagattgaatgaaactttcaatcctgaaattcaagcattgcctcctttaagagaaattatttctggtacatcagagacacattcatctaataacccatttgaaatacactcttcaaacatcgacagtgaattgagaaataggtttgattacagcgaagaagaaatggatgaagatgatgacgttgacgtgtttgctgacactaccgacaataccgccctcttgaattattcgcaatttaacattaaatctcagaaaaaatcattattaaaacagacaataataaatctttacatagacctttgccagttgaaatcttttatcgaattgaacagaatgggtttcagtaaaattactaagaagtctgataaagtattgcacatgaacactaggcaagaattaatagaaagtgaagaatttttcaaagacacctacatcttccagcatgaaactttaagcagtttaaacagtaaaattgcacaacttattgaattttatgctgttctcatgggtcagcctgggaacgtagattcatgcaagcaagagttaaagtcgtacctgcacgaccacattgtttgggaaagaagcaacacatggaaagacatgttgggcctctcttcgcaaaataacgatataataactattgaagatgaagctgagaaacttatgcaagaaaagcttcaaattgaatatttcaagtatccattgcctaagccaattaatttgaagtttactaaaattgaaaatttggcagttcctaagctattttttgggaaaagagcaatgaaaataggcttcattatc

SEQ ID NO: 173986 - DNA, 1083 bp, Saccharomyces pastorianus
tttatggtgctggcttcaaccttgtgttttgtacaggtaactcaaggaaccgacattgaggctactccaaaaggggcagaaaccaccgataaggatgtggaattggaaacacgtaatgatcgtaacatggtgaaaacttacgaattgccttactttgccaaccatttcgatattatgattgaatatcacgatcgtggtgaaggtaactatcgtgtagttggtgttatcgtcgaaccagtttccataaaacgttccagtccaggtacatgtgaaacgactggcagcccattgatgctagacgaagaaaatgataatgaagtttattttacttattccgttaaattcagtgaatcagcgacttcttgggccaccagatgggacaaatatttacacgtatatgatccttctattcaatggttttctttgataaatttctccttagttgttgtcttattgtcatctgttgttatccattcgctattgcgcgcactgaaaagtgatttcgcacgttacaacgagttaaatttggacgacgattttcaagaagattcaggttggaaattgaatcatggtgatgtttttcgttcgccaagtcaatcgctaaccctttcaattttggttggttcaggagttcaattatttttgatggtaacttgcagtatcttcttcgctgcattgggtttcctatcacctagttctagaggttccttagccactgttatgtttatcttatatgcattattcgggtttgtcggctcttatacatctatgggcatctacaaatttttcaatgggccatactggaaggcaaacttgatattgactccacttctagttcctggtgctattctgctaataattattgcgttgaactttttcttaatgtttgttcattcttctggtgtcataccagcaagtactctgttttttatggtttttctctggtttttgttctcaattccattatcatttgctggttcattgattgccaggaaaagatgtcactgggatgaacatccaaccaagacaaccaatcgcaagacaaatacccttccagccttggtatttaaagactataccagc

SEQ ID NO: 173987 - DNA, 333 bp, Saccharomyces pastorianus
  modified_base (181)..(216): a, c, g, t, unknown, or other
cccaagaggcccacaaatgcatacttattgtactgtgaaatgaataaggaaaggattaggcagaatggctctctggacgtgacaagagatctggcagaaggttggaaaaatcttaacgaacaagataggaaaccgtactataagctttatagtgaggacagagaaagataccagatggaannnnnnnnnnnnnnnnnnnnnnnnnnnnnnnnnnnngcggatgatgataaagaagagaatgaacagaagataaaaaataacgaggaaggatcatctacaaaagtagctgattctaaaggaggtgaagatggaagtttagtttcctctaactaa

SEQ ID NO: 173988 - DNA, 393 bp, Saccharomyces pastorianus
tctgctaaagccgaaaagaaaccagcctccaaagccccagctgaaaagaaaccagccgctaaaaagacttccacttccactgatggtaagaagagaagcaaggctagaaaggaaacatactcttcttacatttacaaagttttgaagcaaactcaccctgacactggtatttcccaaaagtccatgtctatcttgaactctttcgttaacgatatctttgaaagaatcgctactgaagcttctaaattggctgcgtataacaagaagtctactatctctgctagagaaattcaaaccgctgttagattgatcttaccaggtgaattggctaagcatgctgtctctgaaggtactagagctgttaccaagtactcttcctctactcaagcataa

SEQ ID NO: 173989 - DNA, 120 bp, Saccharomyces pastorianus
cactcaccttcacttctactgatatgtcatacgcacacggatgctacagtatataccactctcaagttaccctactttcatattccacaccatggcccattctcactaaatcagtactaa

SEQ ID NO: 173990 - DNA, 216 bp, Saccharomyces pastorianus
agtgtggaacgtggcatcagatgggaacttatctccagactgtgtccaaactctaccggtgcagaattaagatctgtttgcacagaagccggtatgtttgccattagagcaagaagaaaggtggctactgaaaaggatttcctgaaggctgttgataaagttattagcggatacaagaagtttagttccacatcgcgttatatgcaatataattga

SEQ ID NO: 173991 - DNA, 210 bp, Saccharomyces pastorianus
atagaagacagacgactggaagccttaaaaagggcggcactgaaggcgtgtgaactctcctatagcccctattctcacttccgtgtcggttgttccatattaacaaataacgatgttatcttcactggtgctaatgtcgagaatgcagctacagtaattgtatatgtgcagacgatctgctatgatacaagttctaatggcagccatcgc

SEQ ID NO: 173992 - DNA, 429 bp, Saccharomyces pastorianus
gatgaatcgaatgctgaaggagtagagacgattcaattgaaatctctagatgattctacagagttagaagtaaacttgccagacttcaattctaaagatccagaagagatgaaaaaggttaaagttttcaaaactttaataccggaaaaaatgcaagaagccataatgaccaaaaatttggataatattaataaagtctttgaagatataccaattgaagaggctgagaaacttttggaagtgtttaatgacattgacattattggaataaaagcgatcttagaaaacgagaaagactttcaaagtttgaaagatcaatacgaacaggaccatgaaggcgccactatggagaatctgtccttaaacgaccgtgatggtggcggagataaccatgaagaggtcaaacatactgccgacactgttgactag

SEQ ID NO: 173993 - DNA, 810 bp, Saccharomyces pastorianus
atgtcagaagaagattttaaaaagctgccccattataaagagatttcgctacacctaagagtccaccatcataagaacattgtcaccatacatgaggtgctacaatctgcagtctgcacgttcattgtcatggattattacccaacagacctattcacgtctattgtagataacagacattttgtcactaatggactgctagtaaaaaaggtttttctacagatctgttctgctcttaattattgccatgagcacggcatctaccactgtgacatcaagcctgaaaacttgctactggatacagaagataacgttttcctatgcgattttggtctatccactacttccacatatataaagccaaatgtttgcattggtagctcgtattatatgccccctgaaagaatctcatttgatgggagagtttccagctctaaaagtgggggacataagttgggtaaggtttgtccctcatgtaatggcgatttgtggtcattaggtatcatccttatcaatttgacatgcatcagaaatccctggctgaaggctgacaaaaccgaggataatacctactattatttcactaaggatcccaatatactaaagcaaatcctaccgctttccgatgacttttactcattattatctaagattttacaagtgaatccgaagaatagaatgagcttgcaagagttgatgaaagaagttagttctatgacaagcttcaccaatgaaggcccgttatcaagagtgccgcctctttccaggtctgtttatgaaaagttcgttagccccgtcgataacacgaat

SEQ ID NO: 173994 - DNA, 96 bp, Saccharomyces pastorianus
ccccgagatgttaaaaaaggctctttggtaacgagaaagggagaggtcctgcatatcaacgtcattgcgcaaatagacgagttgttcgaaggcttt

SEQ ID NO: 173995 - DNA, 321 bp, Saccharomyces pastorianus
atgtcaatttcgactgcattcaactggttatggcaattcttgattggttttttcacaccattcattactgggtctatccacttctattatggttatgtgttcgtaggttgtttggttgctatgtttttgtacgttttcttctttttaccagaaacaattggtctatctttggaggaaatccagttactatatgaagaaggtataaaaccatggaaatctgcatcttgggtaccaccctcaaggagaggagcttcttccagggaaactgaggctaagaagaaaagctggaaagaagttttgaagttcccaaagagttttaat

SEQ ID NO: 173996 - DNA, 213 bp, Saccharomyces pastorianus
gtgccctgtcagccccgcgccttctcgaagataaaggtgttagtcatctcgtttctttttctaatggtcgcctttttgcctttttcctcccacggcaaactgcaagagcagatcgcttcatacgttagctggaagttggaaactcgcgcaatacatcggtttggtgggtgcactttgcgcaccaatgcacgaaacggattcacggagatcgtc

SEQ ID NO: 173997 - DNA, 171 bp, Saccharomyces pastorianus
atggaatccatatttctacataatagtattacgattattcttcactctgttttacatgtttcattatcctattacattatcaatccttgcatttcagcatcctctaacttcgatgacagcttctcataccttatgccatcatctaacaccgtatatcataatatactggta

SEQ ID NO: 173998 - DNA, 75 bp, Saccharomyces pastorianus
gagttggatgatggattattcaagtacactaccaaggattgtatcttgtacaatttagaacttggatgcacaagc

SEQ ID NO: 173999 - DNA, 96 bp, Saccharomyces pastorianus; identical to SEQ ID NO: 173426

SEQ ID NO: 174000 - DNA, 495 bp, Saccharomyces pastorianus
gtgcctttcgccatcttgcatgcagtagctttcccttggaacaaatacacagcatttagcataccttatggggccaggatgaaattcatttacgctttgaaagattttcttggttgcggtgatctaatatgggattttaaacagactttgtttgctggtcccttgtactataattataggaacttcgatcctgaagccatggatctattaagcactagacaacaatccggtgcgactatggaaagactaaagcatgggctaagatttactgataatggaagaaatagttattgggtggcatatggaagtatagataacaaccttgttccggaatcaatagaggaatcatgggaagatgatattgctggtcagagaacttttcctgaggatccaaattatccggttgttcacgactacacgatgggccatcgatatagtagatcaatgaatgatttaagaagagatgttcaaagtaggtcatcaatggcttgttaa

SEQ ID NO: 174001 - DNA, 105 bp, Saccharomyces pastorianus
gtttatgctacggggattcctatcttattcgttggcgtgggacaaacctataccgatttgaggacattaagcgtaaaatgggctgttaatacattaatgtcttaa

SEQ ID NO: 174002 - DNA, 114 bp, Saccharomyces pastorianus
tggccattggtaaccaagacattttctaccaatgtttgtccggtaacttctacaatctgtacgatgaacacattgggtctcaatgtaacgaggttcacttacaagctatcgatt

SEQ ID NO: 174003 - DNA, 171 bp, Saccharomyces pastorianus
attacgattattcctcattccgttttatatgtttcattatcctattacattatcaatccttgcatttctgcttcctctaacttcgatgacagtttcccgtatcttatgtcatcgtctaacaccgtatatgataatatattggtagtgtcactattagttaccaggcgatag

SEQ ID NO: 174004 - DNA, 255 bp, Saccharomyces pastorianus
gaagatgccttggaagatgcagaagaggcagcagaagaggcagcagaagaggcagcagaagaggcagagctcttggcagaagaggaagcggcagcagaggaagaggaagcagcagcggaggaggatgccttagaggattcggaagctgaagaagattcagaagctgaagaggaagcagcagcggaggaggatgccttagaggattcggaagctgaagcagattcggaagcagattcggaagcagcagctgaagaa

SEQ ID NO: 174005 - DNA, 1140 bp, Saccharomyces pastorianus
tcgaatgctctaccacaaacgacaatcaataaaaccaatgataagttgtacatctctaacctacaatcacgtaaaagtgagacggtcgagaagcaaagtgaagatatttttactgagctagccgacattctgcattccaaccagattccacggaatcatattttatctgcgtcattattaattagagatatgtctaatttcggaaaaatcaacaaaatatacaatgaatttttagatttgtcaaaatacggacctttgccaccatcaagagcatgcgtaggttcgaagtgcttgccagaagattgtcacgtacagttatcagttgttgttgatgtaaaaaatacaggcaaagaaaaaatcaacaagaataagggcggactacatgttcaaggccgttcatattgggctccatgtaatatcggaccatattcccaaagtacttggttaaacgatgatgcaaaccaagtcagttttatcagtgggcaaatcggactagtaccgcagtcaatggaaatattaggaacacctctcactgaccaaatagttttggcattacaacattttgatactttgtgtgaaacaataggagctcaagaaaagttactcatgacatgctatatttcagacgaatcggttctcgactctgtcatcaaaacatgggcgttttattgttcaaatatgaatcatagatcagatctatggatggacaaatctgatgatgttgaaaaatgcctagttcttgtaaagatttctgaattacctagaggcgctgttgcagaatttggtggtgttacttgtaagagattaatagtggacgataatgattccgacaagaaagaaagggaagagaatgatgatgtttcaaccgtattccagaaattgaatttgaatattgaaggttttcataacactacagttagtgcgtttggatataatagaaactttattacgggatttgtagatagtagagaggagttagaacttatcttggaaaaaaccccaaaatcagcccagattaccctctattataatcccaaagaaatcatcactttccaccatcacattggatactatccggtggagaaactttttgattaccgtggtaaagaacaccgctttgggttgcatattcgttcctaa

SEQ ID NO: 174006 - DNA, 147 bp, Saccharomyces pastorianus
atggagatgctcttgtttctgaacgaatcatacatctttcatagacttcgtatgtggagtattgttttatggcactcatgtgtattcgtatgcgcagaatgtgggaatgccaattatagggtgccgaggtgccttataaaacccttt

SEQ ID NO: 174007 - DNA, 354 bp, Saccharomyces pastorianus
atgagatttaccagaggattgaaagcctcttcatctttaagagcgaaagctattggaagactaactaaactttcgacgggtgcaccaaatgatcaaaacaataatggtacaacattagatttgataactcatacattgcctattttttattccacaaatacgtcaaagatatatactataccacttacattgagtgaatgggaagtactaacttcgctttgtgttgcaatccctaccacgctcgatctggtagagacaatgcttaaagaaataattacgccttattttctggtctccagacaaagatttcagatgttctgtcctcgaattcaagtgacagatgaaatccggtcg

SEQ ID NO: 174008 - DNA, 1221 bp, Saccharomyces pastorianus
atgaatatcttcataaaagccctgagaagatatactataatgtctacgccgaagattgtgcagcccaaatggaaggttccaacgccacaagctaaagaaactgtgttgaagttgtacaacagtttaacaagatctaaggttgaattcattccgcaatctggcaatagaggtgtcacttggtactcttgcggtcctactgtttacgatgcctcccatatgggtcatgccagaaactatgtctctattgatatcaatagaagaattattcaagattattttggttacgacgtgcaatttgtgcaaaatgttactgatatcgacgataaaattattttgagagctagacaaaactatttatttgacaattttgtcaaagaaaatgataccaaattcaacggcactgttgttgacaaggtcaaaaccgcacttttccaatatatcaacaaaaattttactattcaaggcagcgagatcaaaactatcgaagaatttgaaacttggttatcgaatgctgatactgaaactttaaaattggagaatcctaaattccctatgcatgtcaccgcagttcaaaatgctattgaatcaatcactaagggcgattccatggacgcagaagttgcctttgaaaaagtcaaggacgttacggttcctctattggataaagaattgggctctaccattagcaatccagagattttccgccaacttccagcttactgggaacagaaattcaatgatgacatgttatcattaaacgtgctacctcccaccgttacaactcgtgtttctgagtacgttccagaaattattgactttgttcaaaaaattattgataatggttacgcatatgccacttccgacggttccgtgtactttgatactttaaaatttgacaaatccccaaatcatgactatgctaaatgccagccatggaataagggccagttagacttaattaatgatggtgaagggtccttaagcaactttgctgataacggaaaaaagtcgaataatgattttgctttatggaaagcttccaaggcaggtgaacctgagtgggaatcaccatggggtaagggtagaccaggatggcatattgaatgttctgtgatggccagtgatatcctaggctctaacatcgatattcattcaggtggcatcgatttggcctttcctcaccatgataacgaattggctcaatccgaggctcgcttcgac

SEQ ID NO: 174009 - DNA, 945 bp, Saccharomyces pastorianus
ttgggtattataccttaccaggaaggtactgatattgtttacaagaatgctctccagggtcagcaagaagggaagagacctaatttaccacagatggaagcaacgcaccaaatcaagtcatcggttcagggtacaagttatgagtttgtccgcacagaagatattccattgaatcgaagacattttgtgtacagaccgtgttccgcaaatccctttttcactattttggggtatggctgtacagaatacccatttgaccactctggaatgagcgtcatggacagatctgaagggttgtcaattagtcgagatggaaatgatctggtaagtgtcccggatcaatacggttggagaactgcaagaagcgatgtgtgtattaaagaaggaatgacgtattgggaagtggaggtaattcgtggaggaaacaagaaattcgcagacggtgttaataataaggaaaatgctgatgattcagtagacgaagtacaaagtggcatatacgaaaaaatgcacaaacaagtgaatgacaccccgcatctacgatttggagtttgcagaagagaggccagtttagaggctcccgtagggtttgatgtgtacgggtatggtattagagacatttcgttagaatctatccacgaaggaaaattgaattgcgtcctagaaaatggttcgccattgaaagagggtgataaaatcggatttctactgagtcttcctagcattcatacacaaatcaaacaagctaaggagtttaccaaaagaagaatttttgcactgaactcccatatggatacgatgaatgaaccatggagagaagatgctgagaatgggccttcaaggaaaaaattaaaacaagagacaacgaacaaagaatttcaaagggcgctattagaagatattgaatataacgacgtcgtccgcgatcaaatcgccattgaccta

SEQ ID NO: 174010 - DNA, 771 bp, Saccharomyces pastorianus
atggtcagaaaagttaacaaagaactgattgataccaagttgacggacgtaactcaaaaattccaaagtaaatttggtatagataacctgatggaaacaaatgttgcagagcagtttagcagggaactaacggaccttgaaaaagatttagcagagataatgaattcattgacacagcactttgataagacattgctgttacaagataaaaaaattgataacgatgaacgtgaggagctgtttaaggtggtacaaggcgacgacaaagaactatacaacattttcaaaactctgcatgaggtaattgatgacgtgaacaaaacaattcttaacttgggtcaatttttgcaggcaaaaataaaggaaaagacagaactacacagcgaagtttctgaaataataaacgatttcaatagaaatttggaatatctattaatctttaaagatatttccaatctgattgatagcttcaaaaattcctgtacacaagatattcaaacaactaaggaactttgtgaattttatgataattttgaagaaagctacggtaacttagttctagaagcaaagaggagaaaggatgtggcaaacagaatgaaaactatattgaaagattgtgaaaagcagttgcagaatttagatgctcaggaccaggaagaacgtcagaattttatagcggaaaatggaacttatcttcctgagacaatctggcccggtaaaattgacgatttttcttccctgtacactttaaattacaacgtgaagaatcct

SEQ ID NO: 174011 - DNA, 2073 bp, Saccharomyces pastorianus
gaaaagacaattaaaaagtcgattctttcatcttccaatgatgaaaaaataatatacaaatcgcgaataaagaaatttcaaaagaatcataaattttatattattctattagttttcatcgccattttacaattcatatcaatagcttttttcactcggggattcttactgtcaaggcacgttcttgataatatttcctcacaaaacgaaacaagtaagttacctcctaggttcaacaaggcggtgattttggttattgacgctttgagatttgatttcgctattcctgtaaacgaatcccactctaattacaacttgaactatcataataatatattatcattgtatgattcttttgcaagcgataaggatgcatcttccctattgttgaagttcattgcggacccaccaaccactactttacaaagactcaagggtctcacaacagggtccttaccgactttcattgatgccgggtctaacttcgatggaacagtaatcgaagaggataactttcttaaacagctccatttggcaaataagactgtcaaatttgccggagatgatacatggatggctctgttccatccgttcctttccaacgatagtttcccactagaatcactcaatgtgtgggacttagatactgtcgataacggtgttatggattacttccatgatcatttacagcaggacaaggaatgggacgtcatgattggacacatgctaggtattgaccatgtgggccacaaatatggccccgaccattttactatgagggaaaaacaaattcaagtagatcaatttatcgattggatactaaaatcgatcgatgatgataccttattggttattttgggtgatcatggaatggaccatacgggcaatcacggtggcgactccatcgacgagctcgaaagcactttatttctttattctaagaagccggacatgtggagacttaaagaaacttcgaattacaacattgataatttgggacacgattaccgttcagtgagacaaattgatttggtgtctagtttggcgttattgatgggccaaccgataccatttaacaatcttggatggcctattgacgaaatagcaagaaacgatagagaatggtctcaatttgtcaactcagcgataagccaattacaattatataaggacacgatgcagatccaccatggcaatgacgaaatattggaaccgttagggaaaaatatatctaacacccccccaacaagcgatccagaaaaatttgttaagctgggtcataaataccaaaaggtcttcttgcagacctgcgaagaactatgggccaaattcgattattatttcattgccaccggtataacgctactggccacttcactggtcctgttgatatccattacaaaattaattccttctattgttgtgaatcaaatggttccagaattcgttccgggaattatcataatggtcttagttacaaacctatgtttccatggaattttttacgtttatcaacaaccaagttttgtagaccaattctggggtaccctgttagcgactgcaattggtatcattattggttgtcatatcacaatatttgataggtacaactttatttggattgctatgagactgggtgaaacattagctgattattggtcaagaattgctgtcatgtttatgattattcatgctttgcttttcacttccaattcatttactatttgggaggatagaattgtagcattccttttatctactttcggcatgttgacgttgtatgaatttgtcttcttaccaaaaaggcaatccaccactgcattattaactgcaacaatcagtgaaaaggaaggaaccacttcaggggtcaatccttcgacagcaaattcaaattacttaccattaacaagatttgcaagattattaggaggttaccattctgcagttttaatcattttaacccggttagcttctatgattaccatttgtagagaggaacaaggcgaatattgtattccaacatttaataatcaaaacaattcctcatggtggggtaagggtctctgttcctaa

SEQ ID NO: 174012 - DNA, 312 bp, Saccharomyces pastorianus
atgctttactccagagaatcaaggacaaccgtccttttccttgcgttggttacctccctaaccgtactttgtcactcggtcgatgtaacaactgtatttactacgtcaacaatcaccgaaatcacaactgtgactgccgcaccgcaaccacaaaacaaagcggaaaccgctttgaatactgctactaacataattcaaaccatgcagtttcttttcaactgcgcaccatttaagtggaagggtcctttgaaaataacttcttgtgcgctgaactttatggtcctactactcaccgcttggggctatctcctg

SEQ ID NO: 174013 - DNA, 1566 bp, Saccharomyces pastorianus
atgatttcgactacggttagtggtaaaagacctatagagcaggttgatgatgagctactttcactgactgcgcagcaggaaaacgaagagcagcagcagcagagaaaacgcagacgtcatcaatttgcccccatgacacagtttaacagcaatacactagatgaagacagtgggtttaggagctcctctgacgtggccacggcggatcaagataactttttggaagagtcaccttcaggatatattaagaaagtgatcttgcgaaactttatgtgccatgaacattttgaacttgagcttggttctaggctgaattttattgttggtaataatggtagtggtaaaagtgcaattttgaccgccattactattggtttgggagccaaggctagcgagactaacagaggttcctctttgaaggatttgattcgtgaaggttgttattctgctaaaatcacccttcatctggataatagcaagtatggtgcttatcagcaaggtatttttggtaacgaaattatagtagaaaggataattaagagagatgggcccgcttcttttagtttaaggtcggaaaacggcaaggaaattagcaataagaaaaaggatattcagacggtagtggactatttttctgttcctgtaagcaaccccatgtgtttcctgtcacaagacgctgctaggtctttcttaactgctagcacctcacaggataagtatagccattttatgaagggtactttacttcaagaaattaccgagaatttgctttacgccagtgctattcacgatagtgcacaagaaaatatggctctgcacctggagaatttgaagtctttgaaagctgaatacgaagatgccaaaaaactgttaagggaattaaatcagacttcagacttgaacgaaaggaaaatgcttttgcaagcgaaatcgttatggatcgatgttgcccataatacagatgcttgtaaaaatttagagaatgaaatcagtggcattcaacagaaagttgatgaagttactgagaaaattaggaataggcaagaaaagattgaaagatatacatctgatggtactactattgaagcgcaaattgatgcaaaggtcatttatgttaatgaaaaagatagtgagcatcaaaatgcaagggaactgttaagagatgtcaaaagcaggtttgaaaaggagaaaagcaaccaagcagaagcacaaagcaatatcgatcaaggtagaaaaaaagtagatgctttgaataaaacaattgcgcatttagaagaagaactcacgaaggaaatgggcggtgataaagatcagatgagacaggagcttgaacagttagaaaaagctaatgaaaaattgagagaggtaaacaattctttagttgtaagtttgcaagatgtgaagaatgaggaaagagacatccaacatgaacgtgagtctgaattgaggacaatttcacgcagcattcaaaacaaaaaagtggaattgcagaatattgctaagggtaatgatactttcttaatgaattttgatcgtaacatggatcggcttttaaggacaatagag

SEQ ID NO: 174014 - DNA, 1308 bp, Saccharomyces pastorianus
  modified_base (1300)..(1300): a, c, g, t, unknown, or other
atgagtagtatacaatacgtggagaataataacccaaataatattaacaacgatgttatcccgtattctctagatatcaaaaacactgtcttagatagtgcggatctcaatgacattcaaaatcaagaaacttcactgaatttggggcttcctccactatctttcgactctccactgcccgtaacggaaacgataccatccactaccgataacagcttgcatttgaaagctgatagcaacaaaaatcgcgatgcaagaactattgaaaatgatagtgaaattaagagtactaataatgctaatggctctggggcaaatcaatacacaactcttacttcaccttatcctatgaacgacattttgtacaacatgaacaatccgttacaatcaccgtcaccttcatcggtacctcaaaatccgactataaatcctcccataaatacagcaagtaacgaaactaatttatcgcctcaaacttcaaatggtaatgaaactcttatatctcctcgagcccaacaacatacgtccattaaagataatcgtctgtccttacctaatggtgctaattcgaatcttttcattgacactaacccaaacaatttgaacgaaaaactaagaaatcaattgaactcagatacaaattcatattctaactccatttctaattcaaactccaattctacgggtaatttaaattccagttattttaattcactgaacatagactccatgctagatgattacgtttctagtgatctcttattgaatgatgatgatgatgacactaatttatcacgccgaagatttagcgacgttataacaaaccaatttccgtcaatgacaaattcgaggaattctatttctcactctttggacctttggaaccatccgaaaattaatccaagcaatagaaatacaaatctcaatatcactactaattctacctcaagttccaatgcaagtccgaataccactactatgaacgcaaatgcagactcaaatattgctggcaacccgaaaaacaatgacgctaccatagacaatgagttgacacagattcttaacgaatataatatgaacttcaacgataatttgggcacatccacttctggcaagaacaaatctgcttgcccaagttcttttgatgccaatgctatgacaaagataaatccaagtcagcaattacagcaacagctaaaccgagttcaacacaagcagctcacctcgtcacataataacagtagcactaacatgaatccttcaacagcgatctttattcaagaaggcaaagagcttcttnacccataa

SEQ ID NO: 174015 - DNA, 147 bp, Saccharomyces pastorianus
gatctgggtgataagttattagaaacagagagggagatgataagacccataggccttgtggattttaagaacagttcagagtatattaaggcctctgtatcccagggagggttaagtggagtacgaaaagtggggttacaatttggg

SEQ ID NO: 174016 - DNA, 669 bp, Saccharomyces pastorianus
atttttgccatttgtttaggtgttctattatctaaggcactctccatcccactcggaagttttgcggatattgaactaattggctctcagaagagtctgtttccctttcttggagggtctgcgccatatttctcctttcccgctaactacggtatacccaccgatattcctgaaggttgtagattaacgcaagttcaaatgattggcagacatggcgaaaggtatcctaccagaagtgaggccaaggatatttttgaagtatggtataaaatatccaattacacaggtaagtacgagggatcattatcgtttttgaatagtggatatgaattttttattcccgatgaaagtcttctagaaatggagacaactttgcaaaattcgattgatgtgttgaacccatatacaggagaaatgaatgcaaagaggcatgcaagggagtttttagcaaaatatggaaaattgatggagaactgtaccaactttcctatcttcaccacaaattcgaaaagaatctacgatactgcgcaatattttgccgaggctttgggcgatggctttaatatatcacttcaaacacttagcgaaaattcctcgtcaggagcaaacacattagctgccaaagttcgtgcccctcaaagaaggaagaaagctatgaccgaagaatga

SEQ ID NO: 174017 - DNA, 141 bp, Saccharomyces pastorianus
atgcttatgccaagttacttgaagaaagaaagcggagggagaagaagaagaaggaggaagaggagaagaagaagaaggaagaagaggaaaagaagaagaaggaagaagaagaaaagatatagaaggaagaggtatagtaga

SEQ ID NO: 174018 - DNA, 102 bp, Saccharomyces pastorianus
ttatcgccttataaaaaatggaatcccaacaattacatcaaaatccacattctcttcaaatggaatcccaacaactatctgaaaattcacgtgattctcatg

SEQ ID NO: 174019 - DNA, 228 bp, Saccharomyces pastorianus
cacggcgcttgcctcagcggtctataccctgtgccatttacccataaagcccatcattatccacattttaatatctatatctcattcggcggccccaaatattgtataactgctcttaatacatacattacaccacttttacaccatatactaaccactcaatttatatacacttatttcaatattatagaaaaatcaccaccaaaatcacctaaacgtaaaaattaa

SEQ ID NO: 174020 - DNA, 111 bp, Saccharomyces pastorianus
atggtctctagcgggatcgaaccgctgatccccgcgttattagcacggtgccttaaccaactgggccaagagaccagatatttcatatgttccatggtatggaaaaacata

SEQ ID NO: 174021 - DNA, 126 bp, Saccharomyces pastorianus; identical to SEQ ID NO: 173722

SEQ ID NO: 174022 - DNA, 75 bp, Saccharomyces pastorianus
cacgttccctccgccttggcaagaggtgagaggcctatccccaaaccttttggatgggaacacattgcgttgtga

SEQ ID NO: 174023 - DNA, 636 bp, Saccharomyces pastorianus
  modified_base (615)..(615): a, c, g, t, unknown, or other
agaccagcggactgcacggccaagtacctacatgttagggataagattttgcaacttaacgataggtttcaggcattgtcttcccatttggagattctgcagcctttattcagcaccgtcccagaatacttgaaaaccgcagacaacaaagacagaagcttccagctcttggaaccgctgagcacatacaaccggaacagtgccgttccgggccctgctgcagctacaggagttacgaatgctggccactccacggcgggttcgacccccacaaccacgacccctcatcctatacccaacacacatgcgcattcgctttccaacccgggtgccactactacagtgcaacaaaaccccatggccagtaagagaggttcaaaagggaatgtcaatagcggaactcccaacgcatctggcacttctgcagctgcagtagctgcagctgccaaaaaaccaagaaaaccaagacaaaccaagaaggcaaaggcccaagctcaggcccaggctcaggctcaggcccaggcccaggctcaagcacaagtgtacgcgcagcaatccgctgcccaaacaccaatacggatccatgacgcgcgctgccaaccacccccaatgtgncgacaagctgatccgcataag

SEQ ID NO: 174024 - DNA, 618 bp, Saccharomyces pastorianus
  modified_base (1)..(25): a, c, g, t, unknown, or other
nnnnnnnnnnnnnnnnnnnnnnnnnaggataacacataccagattactattcatgtcaaagccgtaaaagatatccctttgaaatatttatggtctttaaagattattggtgtcaacggtccctcaagcaccgtacaactttacggcaaaaatgagaagacatacctaatcagtgatccaacagattttacatccacttttcaggtttatgcttacccttcttctgacggttgcacagtttggatgccaaatttccaaatccagttcgaatatctacaaggtgatgctgctcagtactggcaaacttggcaatgggggacaaccaccttcgatttatcgacaggttgtaacaattatgacaatcaaggccactcacaaacggatttccctggattttattggacctaccagtgcaagggaaacaatgatggcacttgtacaaaagcctcgtcttcatccattactacttcatccattactacttcatccactactacttcatccactactacttcatccactacgaaaacttccactactacgtcatctactgtgaaaagctcttccactacatccattgatgttactacttccgttgactcacatacttcatcaagt

SEQ ID NO: 174025 - DNA, 513 bp, Saccharomyces pastorianus
atgtatcccctcatgccatcaaaagacgtcatcaaccttattcagaaggaaactcacactttttttgaatacctcccggacttgcaaatgtacaagatttcagccctaagccccaagaaaatatccatggccaaagtctttttattaaatgccgtcgcttctaatccgaacacaactcaacaccaccacacaatagcctcaccagcactcaaaacagaactctatccgtttaacaatactctagagaacttggactggctaaacaagtcacaagattgggcaagattacagtcagttgtccctaaaaactgcacagatctgatgactcccactgaaaatgccacaccagaattgacagatgcgcagatcagccaattcgaatcttccttgtctaaaaatataccatctctctccccttccgactctatttcccaatctttatcaataacgctaggtcactccttacagtccgcgtctttttctagtattttccaacctctaatacataagagt

SEQ ID NO: 174026 - DNA, 639 bp, Saccharomyces pastorianus
atgttaggatacgttgttcttttatattctctatctgcttttgccatgagtttgggctatacaagcaagcaaggctcatacgtatcatgtatggtgagtgtaggctctttggtagggagaccaatcgcaggctatatcgctgacaagtatggaccattgacagttggtatgatattgcatcttgtcatggctattctttgttgggctatgtggataccatgtaaaaatctggccactgcgatagtctttggattgttagccggttctattatgggaacaatttggccaacaattgcttccattgttgcacgcatcgttggtctccaaaaactagctgttacttttggcgtcacttggatttttattgccacctttgccttagtcgctccaataattggtctggagcttcgcacgactgatacaaatggaaatgaatattaccggaccgcaatcttcgtaggattttcgtatttcggtgcgagtttatgccagtggttattgaggggatttataatagctcgagatcaaataggtgtgagcgagggttattcgactgatcaaaacgaactacatataaatgttaaaagttcacacttcagcaaatgtctcttccgttaccgaaaattaccaagaagagtt

SEQ ID NO: 174027 - DNA, 432 bp, Saccharomyces pastorianus
atggctcccggtctacctggtatcgcttgggaagtcaacaataactatttccacgactcaggtattgttaaatttttttatggtgattctttcttctcctttttgatttcttttttcgtttactgggggctatgcattttcttcccattcaaaattactgttaaacatgatgacaaagattattatggtgcctttactgacgaagaagcaagaaagaagggcatggttccatacagtgaaatttctgaagaagaaatccgcgcttacacattaggcgaaggttacactaccggccacgagtacagacctgaaggctccgacgatgaaatatctgagttggtcaaaactagctctgaaaacaccaatgagtttgaaatagttcatcataagaataatgaaaagcaatcctccaccgccagtgaaaaagctgct

SEQ ID NO: 174028 - DNA, 90 bp, Saccharomyces pastorianus
atgatggtgatcatgcttgataatagacttaatattattgagctcattcaaggcgtagggagactaagagatgggggcctctgtaatcta

SEQ ID NO: 174029 - DNA, 129 bp, Saccharomyces pastorianus
ggccgcttaattggtacatatggtggtaacattgggttcgagttgggtgcaagttgggccttcatcatctacaacatcttaagaccctttagaattcaaatacttcggtcgttaggaagtactgattag

SEQ ID NO: 174030 - DNA, 402 bp, Saccharomyces pastorianus
atgtcttcagacaaatctattgagaaaaatacagatacgatcgcctctgaagttcacgaaggtgataatcattcgaataatttggtttcaatggaggaagagataaaatcaacgccatcagaccaatatgaagagatagctataattccaactgagcccctccattcggacaaagaactaaatgacaagcaacaaagtttaggccatgaagcacccacaaatgtatcaagagaagaacctattgggatctctggtgatgaagacacccaaatcactgaacaaaacgttaatgaacaaaggcaagaaacgagagaacctagttctgaaattgatttaaatgagccattggatgttgaaaaagatgtgacaacggatgtgcaagccccaaatgggctgaatatc

SEQ ID NO: 174031 - DNA, 126 bp, Saccharomyces pastorianus
gatttaggaatccacagaaaggaatcaataattttgcataatattataaatgattctgttcctctttttatatgttgtcattcattgatcctattacaatatcaatccttgcgcttcagcttccat

SEQ ID NO: 174032 - DNA, 96 bp, Saccharomyces pastorianus; identical to SEQ ID NO: 173426

SEQ ID NO: 174033 - DNA, 933 bp, Saccharomyces pastorianus
atgttcaatagaagtaacaccgcaggcggatctcaggctatgaaagagggacttggcataaacaagctctccccgatatcatcgaattcgaacccaagctcattgacttcctccaattatgaaaaatatctgcagctggccacagagaagaatccgtgtatgatcttggagctggaactggacggcaaggtgcgatatggctctccacagtggaacacgatcacaggagtcgccgatgatagtggctcttctccgacgtacattgcagaccttattctcggatccgatcaagataaaggtgtctttcaaaaggccacagacatgctgctcatgaatgatgacaccagttgcactataacgttcaagataaaggcagccgactatgaaggtagcgcaggctgtgacgatgaaagtacgataacgaccttggaagcacgtggtatcttaatcagggatggccacacacagttgccctctcacacgatgtggatagtcaagcctcgcacaaacgactggtcagacttttatgccaacgaagacgctcaagacgacatggtcatccagttatccgataattgcgacgatatcgatatccaacttcccgaagagttcgccaagacgcttgggttcggcgctaagatcttcgtgcagtacttgaagagaatacgactggaaatgataatagacgagttcaatctacctctgccaaaaatggaactatgccgggtctgtgagaactttgtccctgtttggtggttggagacccattcgcaaagttgcgtttgcgagcatagaacggaatcgctcatacaattactacacgataatcttcttgagcaacaggcgatcttggcaaacttcacgaaagattcagagtataagggcagtcagatacaggtacgttccacaacttccttaaccagtttagactct

SEQ ID NO: 174034 - DNA, 438 bp, Saccharomyces pastorianus
cttttattaagtttacccttaaatggctatttaccatttgatagtttgttgaaaaagttaagattaaaggattttcggtggttgttcatttctgatatttggttcaccaagcacaattttgaaaacttgaatcaattggcgatttgtttcatttcctggctatttagacaactaattcccaaaattatacagacttttttttactgcaccgaaatatcttctacagtgacaattgtttactttagacatgatacttggaataaacttatcaccccttttatcgtagaatattttaagacgtacttagtcgaaaacaacgtatgtagaaaccataatagttacacgttgtccaatttcaatcatagcaaaatgaggattataccaaaaaaagtaataatgagttcaggattattgccatcccatgacctgcagcatgca

SEQ ID NO: 174035 - DNA, 1542 bp, Saccharomyces pastorianus
atggtaccaactggagataatcacactaacggtaaggcaccttcaattctagataagaaggcgtatgaattaaccagtaccaaaccaggtgatgttggctaccgccaaaagaaaatacaagaagaagaaaatctagcaaatagcgatgacacgcccctagacacaccaaaatttaatgacctttttacgaaaaatggcactagagcgaaggttaaaggacaaatgcgtacctctcgttcaatctctaattccaatctactagaagctcacaagaaactaaagaccttccccgctgaacgggttgaagatattacgtccatttccgaagtaaacacctcgttcaacgaaactgaaaagcagctaatatcaatcttgactagtaaactatctggttctccaagctatgattccgattgggaaaaaatcctgaaagttgacctatcaaggggcaaactgaagaatatgtttggcatgcaaagactactaccgaatgtattagtgctaaaccttagtgacaatgaaatgaacactctagaaggtataccctcgaacgttgtacagctattttgttcaaacaacaaaataacgagcgctcattgttcattagccggattccacgatctggaatgcctcgacttatcgtacaacctcttgaatacaagtttaaaatttttgtcactttgtcatcacttgcaagaggtgaacctttcttacaactccatccaatccttagaagggataggatcctccaggatgaaaaaaatgaacctttctaacaacgagattaatggtatcatcgatttcgaacaattgatactaacaaacaactccgtcgtgggcggctggttgaccgtggaagtcttagacctgagcaacaataacataattggcgtaagaaacatcaattgcttgccccacctgaaggttttaaacctcaatggtaacccgctagtttccatcgtggaatcttctaagattgagaacggaacgttgagagcgctttccatcaaaaatacaggagacgcgctatccaaattacaaaattacaagttggatgatcaattcacgttcccctaccaaaatctaaagattctaaaactggacggcttcgctcaacttagcaaatggcaaaaatggcctgccactttgcaaattctggagatcaacggcggcctggcctcctctttgccgcgattctcttctctaaaatccaccaacttatattctctaactatagctaatgttagagacttcacacacttaccagtggacctctccaaggaactaccgttcttgcaagagctacatctgccaggcaacaacctacaaaacgcacacaagttaacaaaaactctcccacgccaatcagtaaaatttcttgatctacgaaataacccaatcacgacaccacgccacgatcgcgccagcacgagcttgcattaccggcagttgctccagcttgctggcctctgccagcagcaatgtcccgccctggcgaccctctggttagatgacactcctgccccaactgccacgaatctg

SEQ ID NO: 174036 - DNA, 366 bp, Saccharomyces pastorianus
tctttttctgctgattttggttctgacttttggtctgaactaaggttagctattttttcttcttcttcttcttcttcttcttcttcttcttcttcttcttcttcttcctcttcttcttttacctcttgttcggctgcggcaacaggtttctgttcttttttcttttcctgtacaggcttttcaaattccttggagctagaggtatttccttctacgtcgtcatcattcgcgtcttcgagcttgtgtttgtcaaaacctatattcttcatgaagtcttggagatcatttttaaacactttatcgtttgcaccctcgtccgcagcagcatcgaattcctgctcgcttttactgtcctcgtcatcatca

SEQ ID NO: 174037 - DNA, 78 bp, Saccharomyces pastorianus
atttgccctaattgcagttgttgttgttttctctgttgctcgacatccattataacagcaattgtttttgatgtgcca

SEQ ID NO: 174038 - DNA, 2712 bp, Saccharomyces pastorianus
tcaagtgctaaatcttcaattacctcctctactaaagcgtccagtcacactatgagcatttctttgagtagtggcgtacaacaatctagcagtacgtctgtaggtcactcctcgggtacgagtagacaagaggtgagctcctctctattttcttcgagcacagccggccaacctgcaactgatcattttagtatttccacgagtgaatcttccactggctctgttggccagtcctcaagcgctgtttccactgacggttccactagcgcatacaacccatcatcaagcactgttgccactgaatcttctactagctctgttggccagtcctcaagcgctgttgcaactaaatcttccactggctttgttggccagtcctcaagcactgttgccactgaagcttctactagcgtattcactccatcatcgagcattgttgccactgaatcttccactggctttgttggccagtcctcaagcgctgtttccactgacgcttccactagcgcattcaacccctcttcaagcactgttgccattgaagcttcttctagcgtattcactccatcatcaagcattgtttccactgacgcttccactagcgcattcaatccatcatcaagcactgctgccactgaagcttcctctagctctgttggtcaatcgtcaagctcagccgccactttctcttctggaagtaacagcgtgcatgcatccagcactttagcaggacattacttaactcgttcttcatccaacccatcatccagtactgtttccactgaagcttctactagctctgttagccagtcctcaagcactgttgccactgaaacttcctctagctctgttggccagtcctcaagcgctgttgcaactgaatcttccactggctttgttggccagtcctcaagcgctgtttccactgacgcttccactagcgcattcaacccatcatcaagcactgttgccactgaagcttctactagcgcattcaacccctcttcaagcactgttgccattgaagcttctactagcgcattcactccatcttcaagcactgcctccactgaatcttccactagcgcattcactccatcatcaagcactgttgccactgaagcttctactagcgcattcacctcatcatcaagcgctgttgcttctgaaggctccactagctcatccgccccatcttcaaaaaatcttgttgtttcatctactaggactgttgccactgtcccatggagcaacatcacacattatgtgtccaatactctttcctctcaatattcaactcgcaccatctccaataccattgaaaaatctaccggcctatcttcatttcaatatctcagctcagggtcagtcaaccctgttgggaagtcatcaggtcaatccgcagattttcctttatccagttccactagacaacttttaagtaccacagctaccgacgcttcaagtagcttctctagccaatactcaagcaacgttgcggctggaactgcaactagatctggtagccatttgactcgatctaccgaaaatggcttgagtaacagtattagtttaatgtcgagccattcaacaatagcagttagttctgttgctagctcatcaagacatagtactgcaagtgctttgagcacttccggcagccaatatttcggcaaggaaacctcccatcggtcgatccacagtactactcaaacaccagttcaatccttgtcaaaggcctctttagggtctgaaacatccactgcagaattatccacttttactacttccacgactgtatacaaagaatggaccggcaccttcacaagcacttattccacccaagtatctacaatggtggagagaacaagtgaaggtccagacggcaaagtaactatagaaattatttattacgttgaaaccccattaacgcgtgaagcttcatctactgcaactaccaaccctagctctgcttctttgccaaggatcagcaacattgcaacgattgctaatgaaagaactacaatggttacagtcacttcttgtaattctcacttctgtaccgaaacagtctcgccagctattatttcaactgtcaccaccaatgttaaaaacattgttacggaatatactacctggtgtccaatctccgcaacagccgcgttggagcaaactacagaggaaacaatgacttcatcggtatttgatgcctactccaagtctgtttctgctgccgtcgcatctactgccgcccttacaaatggcaacgatgctatcaccaagggtaccatagggcacccaattgccactgagacaacagttgttccaagttctagggcaagtgacagtgaagatgctgtggtatcaggatctaccaaaactgcaattcctaatagcagcacttccataattgcagaagttagtacacgcagcgctatagcccttggtagtgatgtctcttcaacatcaacggtcattaaagttacaagtggcgctgctataattccagaacctgctacatcacagactaactttcaaactcacataacaacctacttcaccaccaactcacagcaacctcaagtctcttcttcaagaagttcttcgaacactgtttctttgcaattgtcaagctatgctggtattgccaacaatttgatatcccatagcgcttggagtgtttttattgcttccatattgctcgcaattgtt

SEQ ID NO: 174039 - DNA, 576 bp, Saccharomyces pastorianus
gcagaggaaaatccccaaccgaaagccttcatagctctctctcgagtattgcaaaccctcattttttttcaagtggtcgaaagtacattggtaccagacctaacatttctaggcaaaaaatatccaatttttatgaactacccgaagtttctttacgtctcacttatagtgtattgtgtaagcgctttcacttgttgtgttctgctatttttgttcagaccaaaaaacgacgctgcacaggctttaaaatgctctgtggtaagatgttcgaagttgagttgttctcgttgtgatgcaagaagagcgcatccaagatggttcaaattcaagtattggctgttatttttgttcatatatgttgttttagtcattttcgtcatttgcattcaacagttctttgcatgggaccaaacgattaacttaccaagacttctaaaattattcagcttacaaattggtgttatcacattcaactcgattatgtggtactatgtaaaacaatacgttttacacaacggtccccttgagactagcgatgattgcgttgacgatgaaaagaaactgctgaccgaggga

SEQ ID NO: 174040 - DNA, 126 bp, Saccharomyces pastorianus
atggaatctatatttctatttactaatatcacgattattcttcattccgttttatatgtttcattatcctattacattatcaatccttgcatttcagcttcctctaacttcgatgacagcttctca

SEQ ID NO: 174041 - DNA, 237 bp, Saccharomyces pastorianus
  modified_base (17)..(17): a, c, g, t, unknown, or other
  modified_base (75)..(75): a, c, g, t, unknown, or other
  modified_base (86)..(86): a, c, g, t, unknown, or other
ttgatcattccattttnggacaatcaggttaatttcaaggatcgatatgagccaggtacaaacggtaaagtccanaagcctttganatacttgtccgtggaagaagtcatcaaactggtgagagactcgttcacttctgctacagaaagacatatacaagtgggtgatgggctggaaatccttattgtcaccaaggatggtgtaaggaaagaattttatgagctaaaaagagattaa

SEQ ID NO: 174042 - DNA, 864 bp, Saccharomyces pastorianus
atgctaagcccgcaaagaccatactctactagtcctaaacagtttccagcaacaactaaaagtccgttactgcgatttgcctcagtctcaccctaccctaaatttcatcctgataatcaaattatggcatcagctggtcttacatacgtctcaccgcataataaaaataaatacacaaggccgttgattagaaaaggtttaaattttaccacagaatcagttaatgattgcacttataaaatcatctttgaaccggatgaattggctattaacatatataaggaactattcggaaccatgggttcccaacctgcatcgcagcctttgctgatattttcgaatgttaatttacgccaggatgtaccgcctttagatatcttaaatgttgtagactatgttcctacgaatgaagaaatttcgcagcagaaaactcaaccaacagaccatggggccgttggtgtttttcatctagacgatcatatttctccgggcgaacaaagtcttaagcaaacaattggtgataaagcagatcttaaaggtaaagatggcaatagcagccctcaggaatttaaattaataactgatgaagagcaattgagaagagcgtcacaagaactgaaggatgaggaaaaggatgccgagtctccttggcaagcaatcttgctgttaccaaaaggttataaaggaggggtagattttcgaaataaaccagtggcccacacggattcatctttcaataatgaagacacaattactcattcagagttagaagtgaacaccggatccccttcgcaagaaagcggatcacttaatgaagctggtataggcataatgcaacccatgtcggaagtacaaagaagaaaa

SEQ ID NO: 174043 - DNA, 1143 bp, Saccharomyces pastorianus
aggaattccctgtcaatctcaaatttggcttatgtgagaatattacacggactgttcactttatttggtaagttcactaaaagtttaattgattactttcaactactagaaattgacgacagtaaccaaatcttatcaacaaccctagaacaatgttttgctgatttgttttcgcattatctatatgataggtccaaatatttcggtattgagaaaagatccttggaagcgattctagtagatatgacatccaagtttactgtaaactatgataaagaaatcaacaagagggttttattagataagtataaggagaaactatcaactaatgtggatgcattcatgcattctcctagagggaatacacactctcgtcaagattcaacatcaaggagtaaattgtcacaatttaattcctttttgaaaactcatttagataaagatcatttgagtctaaaccgtacaaatactttgagcgattcgtttaacaacagctcttcttctacacagtatgatgtagcaaacaactcttcaagtttggtaaattctagttttacagcaagcgatattgataacagtccaaacagtccggcgaactattctttgaacgatgttgattctatgttaaaatgtgtggtggagtctactgcaagagtaatggaactaattccaaacaaagcacatctatacatcctagaaatattaaaaataatgtttttggggattgttgattcgtacatggaaattgcgttagaagtcgcttactggaaaatttgtaaagttgatattaataaaacagcaggagtggtaaacttaaatttcttgaaatttatttcaatgagcacggagatattagatttattgtcaatttcaatcaaatccattttcttaccattattaaataattcgccagaaattaaagctcagattattgagatgacaaattcacaaattcaaaagatggaaatacttattaatataattttgcaagagaccattacggtaatttcgactaaattttccgcaattttgtgcaagcaaaagaagaaggattttgtgccaaaatctcaagagctattggatcaagacaccttaccggctattgagattgtcaatattttaaacttaatcttcgaacagtct

SEQ ID NO: 174044 - DNA, 450 bp, Saccharomyces pastorianus
gtcgcgctatgttctgtgctagactctgataagagcaaagacaaatcagctaaaatttggacaactgatgtagctgttcctgtgtcgcagttcgacaaggttattcacgaaactaaaaaggacatgcaagctagtaagctgatcaacgccattgttggtcatgcaggtgatggtaacttccatgcattcatcgtctacagaacccctgaagaacacgaaacctgtagccaacttgttgacagaatggtcaagagagcactgaacgcagaaggcacttgcacgggtgaacacggtgttggtattggtaaaagagagtacttgctcgaagaattaggtgaagcacccgtcgatttgatgagaaagattaagctagctattgacccaaagagaatcatgaacccggacaaaatctttaaaactgatccaaacgagcccgctaatgattacagg

SEQ ID NO: 174045 - DNA, 288 bp, Saccharomyces pastorianus
gttttggtaaatttgtttgatcctgattatacacctcaaaggaccacgttaagtggccatatgacgagtgttattgcgtgcttgcaagttgaagataattatgtcattacaggaggatgtgataaaatgatcagagtttataacttagtaaataaaagatttcttttacaactatcaggtcatgatggtgaggtttgggcattgaagtatgcccatggcggtattttagtcagcggttctacagacagaacggtgcgagtttgggatattaagaaaggttgttgtacc

SEQ ID NO: 174046 - DNA, 81 bp, Saccharomyces pastorianus
atgtccaaggaaggtcagtatgaaatcaattctagctctataataaaagaggaggagtttgtagatgaacaatattctggg

SEQ ID NO: 174047 - DNA, 63 bp, Saccharomyces pastorianus
cattcgcatcattatgcacggcacttgcctcagcggtctataccctgtgccatttacccataa

SEQ ID NO: 174048 - DNA, 273 bp, Saccharomyces pastorianus
  modified_base (225)..(225): a, c, g, t, unknown, or other
  modified_base (253)..(253): a, c, g, t, unknown, or other
aaggaggggcttgatgaatttgacaatacaatactgaatgaaggccctctagaagcaccaaagagaggatttttgggatacctgactatctatttactttgtattcctatctctttcggagggtttttacctggctgggatagtggtatcactgccggtttcattaacatggacaattttaaaatgacttcggatcttacaagcacagtaccggagagtactatntggactctagagatccccggtaccgagntgaattgtatcatgttatac

SEQ ID NO: 174049 - DNA, 135 bp, Saccharomyces pastorianus
atgtacttgataaccttcgttgcattgacggctagattctttaacctagctgccgcctcggccaataatagttccttccctgatattgaccttactagttttttgagtcacttcaccaatattccagcaggactt

SEQ ID NO: 174050 - DNA, 993 bp, Saccharomyces pastorianus
gttcgttgtttgaacacctcaaccaacgctaacggtgcagtagctaaaaaaatgactgcactaaactttgcgatgattcactcacccatcgatgttttgaaatctatcaagaatgacatcgaaataaaaaacgcacacaaggcgcaggtcaaagacgcagtatgtttagtgcagtattttgcatggctggagcagcaattagtggggcgcgaggcactgatagatgaatatcgtgccgcagaaaaattgaccgagattaggaaaacccaaaggaacttcatgggcaattcgttcgaaacaatatcctccacaggtagtaacgccgccatcatacattattcgccgcccgtagagaactcttcgatgattgatcctaccaagatatatctttgcgactccggttcgcaattcttggagggtacaactgatataacaagaacaattcacttaacaaagccaaccaaagaagaaatggataattacacactggtacttaaaggtggcttagccctagagaggttgatttttcccgaaaacactcccgggtttaatatcgacgccatcgctaggcagtttttatggtcccgcgggttagattacaaacatggcacaggccatggtatcggatcatttttaaacgttcacgaaggacccatgggtgtcggctttaggccacatctgatgaatttccccttaagagcgggtaacataataagtaacgaaccaggttattataaggatggtgagtatggtatcaggattgaaagcgacatgttaatcaagaaggccactgagaagggtaacttcttgaaattcgaaaacatgactgtggttccctattgcaggaagttgatcaatactaagttactaaacgaagaagaaaaaacacagattaacgagtaccacgcaagggtatggaggacaatagtgcattttctgcagcctcagagtatttcatacaagtggctgaaaagagaaacaagcccactatga

SEQ ID NO: 174051 - DNA, 72 bp, Saccharomyces pastorianus
ctagcgacctttgcattacaagtgcaacgctctaccactaagctaaggaggcaactttttaaaagtcaataa

SEQ ID NO: 174052 - DNA, 108 bp, Saccharomyces pastorianus
atgccattttttgttaatgttaaaatttccaaatctgttttcagaagtttcaggctttctttttcatcattccaagatttttccagtcttttttcttgcaattctttt

SEQ ID NO: 174053 - DNA, 957 bp, Saccharomyces pastorianus
cccacattaataaaatcagatatggctgatttcaatctaagaaaccagctgaatcatgaaataaattctcataaaactcattttatcacacaattcgaccccgtatctcaaatgaatacgagacctttaattcagctgatagagaagttcggctctaaaatttatgattattggagagaaagaaaaattgaagttaacgggtacgaaatttttccgcagctgaaatttgaaaggccgggtgaaaaagaagagattgatccctacgtctgtttcagaagaagagaagtgagacatccgcggaaaacaagacgtatagatatcttaaacagtcagcgtttaagggcgttgcatcaagaattgaaaaacgcgaaggacttggccctgcttgttgctaaacgtgagaacgtttccctaaattggattaatgatgaattaaaaatattcgatcaaagggtaaaaattaagaatttgaaaagatctttgaacattagtggagaagacgatgacttaattaaccacaagagaaaacgccccacgattgttacggtcgaacaaagggaagctgaactaagaaaagctgaacttcagagagctgcagctgcagcagcggcagcgaaggcaaagaacaataaaaggaataaccaacttgaagacaaatcttctaggctcaccaagcagcaacagcagcaactgttacagcaacaacaacaacaacagcaaaatgcccttaagactgaaaacggaaagcaactcgcgaatgcatcctcttcttcaacatcacagccaattacgtctcatgtctatgtcaaactaccatcttccaaaattcctgacattgtttcggaagacgtggatgctctattgaaacagcaaagacaaattgcacgaagtccgtcacgaaagatggaaaacgcgaaatggagacgcgatttcttttcactttcggagatcctttaa

SEQ ID NO: 174054 - DNA, 228 bp, Saccharomyces pastorianus
acttttatcgtagagatcatggacgatgaaagtgtacgcgattacttcaaaacgctctctaaagttgcatatagggacttcagaggatctgagaagatgaaagtttgcaggctcttaagccccatcaagggcaagataattcattgttgctgtatgtggacattaaaaagagatatctctggtttgcccctcatgatcttgggtaacttcatgcccatactcaattga

SEQ ID NO: 174055 - DNA, 435 bp, Saccharomyces pastorianus
tcgaattcttcatcactcccccgttggttttcagattcatcatcatccatcgatgttatctcattttccgatactactgggaatcgcctaacatcttctggttctacgacgtcatattcatctagcgccgttatcatcgaagataaactcatacatgtctcctcttcgatgtcatgcacgctagtatctgccatgctaggattatccacatcttcgaaatcgttcaaaatttctagtccttcatcatttagcgaggcaacttcggacattgaatcgtatacagtatcgttatctatatcatatgtcctttctatagatatattgtcgctactgttttcatcttctataaaatcctcgtcatcaatatcatcttcagcatcggcctcttcttcttcatcttcttcttcatggactagttcgtcatcactgtatgct

SEQ ID NO: 174056 - DNA, 792 bp, Saccharomyces pastorianus
atggacatggatagaaatgtgccgttggcaccgaatctgaatgtgaatatgaacatgaaaatgaatgcgagcaggaacggggatgaattcggtctgacttctagtaggtttggtggagtggtgattggcagtaatggggatgtaaattttaagcccattttggagaaaattttccgcgaattaaccagtgattacaaggaggaacgaaaattggccagtatttcattatttgatctactagtatccttggaacatgaattgtcgatagaagagttccaagcagtttcaaatgacataaacaataagattttggagctggtccatacaaaaaaaacgaacactagggtaggggctgttctatccatagacactttgatttcattctacgcatatactgaaaggttgcccaacgaaacttcacgactggctggttaccttcgagggctgataccttctaatgatgtagaggtcatgagactcgctgcaaagactctgggcaagttagccgttccaggaggtacatatacctctgatttcgtggaatttgagataaagtcttgcctagaatggcttactgcctccacggaaaagaattcattctcgagttcgaagccagaccatgctaaacatgctgcgcttctgattataacagcgttggcagagaattgtccttatttactttaccaatacttgaattccatactagataacatttggagagcactcagaagaccgcatttggtgatcagaattgatgcgtccattacattggccaaatgtctttccactcta

SEQ ID NO: 174057 - DNA, 591 bp, Saccharomyces pastorianus
aaaaccttatcgattcgagttatgcaaactcaccaaccaattaagaccgcactgagtggtaccattgctaccattgctgcggatgcattgatgaacccctttgacaccgttaaacaaagactacaattggatactaatctaagagtttggaatgttactaagcaaatatatcaaaatgaaggctttgcagcattttactactcctatcccacaacattggccatgaatatcccatttgcagcgttcaatttcatgatatatgaatctgccagcaaattcttcaacccacaaaattcctacaatccattgattcattgtctttgcggtgggataagtggtgcaacatgtgctgcgttaactacaccgttggattgcataaagactgtattacaggttagaggcagcgaaactgtctccatcgaaataatgaaggatgcgaacacttttggtagagcctcaagagccatactggaggttcatggttggaaggggttttggcgaggtttgaaaccaagaatagtggctaatataccagccactgccatttcttggactgcatatgaatgtgctaagcattttttaatgaaaaat

SEQ ID NO: 174058 - DNA, 96 bp, Saccharomyces pastorianus
ttagagtggctataccccagggatgaaatcgatctagctccaaaatggcccaagtattcagtgtctaacgagacgaagaaagcaggagaaacttaa

SEQ ID NO: 174059 - DNA, 906 bp, Saccharomyces pastorianus
  modified_base (888)..(888): a, c, g, t, unknown, or other
atgtctgttaaagagcataacgaagaagatattattggtgatgaattacagaattcgaggcaactctccattgattgcgactcagttaaaatttcactaaggaacacatattggaccaaagactatacaacaggtatcaaattattcataaaacatatgaagagagaaaatgatttgctgattaaagacatcaaattttacaatgattttgtcaacaaattttggaaaccaacattgaacaatttacaaaaaatggaagcaaccaattcaatgaatagcaggctgctggaagtgatgagcaaacagtttaatataatatcaacagagcaagttgaaagagattgtaaaattccattgcaagaactaagagatcttaatgagagcttccttcgtgaggcagaaaacgatttgtcatctcgttattcagcttacattaaggatttagtcgcagctaaagaggcactaattggatgtgagaaaagagttcagtctatatataaattgaaaaaagccaatacgccagtggaaaattcttcctctgtttttgataatggaaaggatagtgcaccgttaaccaggttgaacttcgtatgcgagtttccttacactttagacgagaggttaaaatttgaggattgcgaccaatttatgtcatttttgcaaaccttgaagggaaaagtcatcctggagaaaagtgtcttttccgttccaggattgccaaatcaaagtttccaaggcaggtcattgatcaaagaattgaaaaaacttgaacccagactaaacctgtccttatttaatatcgataggataggtaacgaattcatccaactgggtataatacaagaatattccctgagtttttactctagcaaagttttcagtttgacncaggaaaaatactattac

SEQ ID NO: 174060 - DNA, 189 bp, Saccharomyces pastorianus
ttattgttacaggctacgatattgcgtatagaaaaaatgttgaaagttcttctgcaagatacaggaatccaaagggaatcaatatatctacctaatagtattattatttcttttccattttatatgtttcactatcctactatttcatcgatcctcttatttaagcttttattaaacctaatgactgtt

SEQ ID NO: 174061 - DNA, 90 bp, Saccharomyces pastorianus
atggattttacaacaatgactatggcaagcaatatggctactagtactactacgacggctacatcggcacatgcatctataaattcgtca

SEQ ID NO: 174062 - DNA, 468 bp, Saccharomyces pastorianus
atgattgggtctccaccatacactccgccagaggtaatgtacttcgatgccaagaagcactaccccgaaaagttccaaaaaccctataatccgttggccatggattcctatgccctcggaatcatgttgattaccatgattaacaatatcatccccttcatcgattcttgtaacactgatgcgagattcagggaatttgaagtgtcatatgacaacttcatcaatcatcaaaacccacatttcagggacaagggctgccacaagccgggtcctggttccgaatactctttagcaagaaatttcaagaatactgatgccacgcgtatcgcatggagattggctgacccgaaccctgcaactagatatacaatggatgatttatttaatgatccgtttttccaacaaattgaaacatgtgtcgagccaaatgatgatgacttagtacgggttcctgaattaaggaaaagt

SEQ ID NO: 174063 - DNA, 84 bp, Saccharomyces pastorianus
atgattctcgctttgggcgacttcctgactaaacaggaggacaaagcatgcgagaggccctgggttcaattcccagctcgcccc

SEQ ID NO: 174064 - DNA, 225 bp, Saccharomyces pastorianus
atggatcatccacgtaagtggcaccgtaagctcgtcaattgcaacagccactttatttttaagagccgcggtcattttgttagcatctcttctcaactttggcagcacaatttcacgatatttaacaggtatcatttgaaggaaagaatcgttctccagatactcgtcaattcctcgctttggctctctgaacaaaacgtctcgattacgcagaatgagactggc

SEQ ID NO: 174065 - DNA, 366 bp, Saccharomyces pastorianus
aatatactattatttatcttcgtatttactgtttccttttattattttcgtttcagagatgcaaaagctttagtcgatgccgcagtgattgcttcacctatggtgggcaatcatctaaagaaaaggcaaaactactattgggcgttggctggaggtgccagtgggttcttaatcacgctagcaggaatatccggagcgtatgctgccaataaatgtacaagtaatctaggtagcacctcatgttgggttggagctgcagttgcattgatcgcaggttgtttaggcggtgttgctaccacagcagcagccatggccggggcagcgggttcagtagcatcagcttcaaaaagatccaccagatatatt

SEQ ID NO: 174066 - DNA, 1128 bp, Saccharomyces pastorianus
aaaaagatcgaagatgaaaagagcgtaggcttattatcgtctaagagtgttgaatcacaaaacatcgtactaccaaaggatatcttcagaaattcatttacttggttctgttacgagacttacaagtccctagcgtttcgtatctggttaatattatggttgccgctcactgcttggtggaaggtgtccagtgaatggatttatcccttcttagctaccctttttttggttgaagtgctattcttcctccccctcatcctaattataggtcgcaaacgtgctatctccaaacaatatacccagttttgcaaagaaatcattaatcatgctccaggtactgatgacgaggactgggagcctgttctaataaatttcaactcatacatgtatgaaaacaaactttggaaaaccgagcatatgttttttgattgctcgagcttccgagaatcatttagaatattcattctagagccattttgcttgaaaaaggacaacgatgcaaaggtcaaatcatttaaagagtcagtaccctacatcgaggaggctttgcaggtctactttgcgagagtagatgaactatggaatcaggtctgttctgaaaagtcgttgagcgccattgactccaaagacactccacttcctaagcaattataccgtttcaaggctgtctggactttcaagacagcccttaataatggagcattaggggcaatcatcccttacttatattgtatcttcgtttcatggcgttacaacatttttgttcgcgtcttctacctcgggtttatgttattcgtgttgatagcatatttcaaaaatgtaagagttgcaccaatgaaattggaacacaagatgcactacatttcaactgttattagcgagcaagaagttggcgctaatggatgggaccaaatcgcaaagaaaatgaatgtgtatctgttcgaacagaaagtttgcaagagtcaagagtttttttttgacggaactgattgcaaatggttctttgatcacaacttctctagttctctatcttcaaagaagtctatgtggcttttgccattgaatgctgaactatggccatacattaaggaagcgcaatcagcctggagtgaagaatctctagcgtag

SEQ ID NO: 174067 - DNA, 1038 bp, Saccharomyces pastorianus
tcactaaaagacatctttggccattccttagagttttgcaaagatcaacatggttcacggttcattcagcgcgagttggccacctcaccagcctcagaaaaggaggtcatattcaatgaaattcgcgatgacgccattgagctttcgaacgatgtatttggtaattacgtcattcagaagttctttgaatttggtagcaaaattcaaaaaaatactttggttgatcaatttaaaggtaacatgaaacagttatctctacaaatgtacgcatgtcgtgtaattcaaaaggcgttagaatatattgattccaatcaaagaattgagttagtcctggaattatctgactccgttttgcaaatgatcaaagatcagaacggtaatcacgtaattcaaaaggccatcgaaacaattcctatcgaaaaattaccttttatcttaagttctttaactggccacatttaccatctatctacccactcctacggctgtagggtcattcaaagattgttagaatttggttcgagcgaagatcaggaaagcattttaaacgaattgaaagatttcataccatatctaattcaagaccaatatggtaactatgtcattcaatatgttttgcaacaagatcagttcaccaataaggaaatggtcgatatcaaacaggaaatcatagaaactgtggccaataatgttgtcgaatactctaaacataaatttgcctccaacgtggtcgaaaaatctattctttatggctctaaagatcagaaggattcaataatttctaagattttaccaagagacaaaaatcatgctttgaatctggaagacgattctccaatgattttaatgatcaaggatcaatttgccaactatgtgattcaaaaattagttaatgtctctgagggtgagggtaagaaattgatcgtcattgccattagagcatatttggataaactaaacaaatctaactccttgggaaatagacatttagccagtgttgagaaacttgcagcactggttgaaaatgcggaggtgtga

SEQ ID NO: 174068 - DNA, 114 bp, Saccharomyces pastorianus
gaagaaaaaaaggcacaaaaggacaaagaaaagaagaaagaatattttgccaagaatggtaaaagaacaaccatggatggtgacgacgagtctcgtccacgcaagatgagaaga

SEQ ID NO: 174069 - DNA, 264 bp, Saccharomyces pastorianus
tatcaaagaaagataggatgtttcatacaaatcccaaatttggggcgcggacaactgaaatacgtgggtccagtggacacgaaagctggaatgtttgctggtgtagacttacttgccaacattggtaagaacgatggatcattcatggggaagaagtattttcaaacggagtatcctcaaagtggactatttatccagttgcaaaaagtcgcatcattgatcgagaaggcatcgatatcgcaaacctcgagaagacgacgatga

SEQ ID NO: 174070 - DNA, 348 bp, Saccharomyces pastorianus
atggcacggtcttcgatgacaataccgccttccaagaccttggtctttggcttttgcttgttgtcttgctcctttttgctttttggttttgttggaccttcttctaaatcctttttgaactcaaccttttttactttcttggctttcttttcttcttccttttcgtcgtgctttctcttcttttcctttttagttttctttggctctggtttaggttcttcctcttcttcttcttcttcttcttcttcgacttcttcaatacgaacttcttcttcctcctcgtcgtccaaatcatccaagttgtcactgataatttcgtcttcgtctggtgtcaagtcatattcatca

SEQ ID NO: 174071 - DNA, 195 bp, Saccharomyces pastorianus
cttaaactaccagatatcgtttctataagaagcagtaaaagtcatctcagtaataaaagtaacagaaacaagcatggtatagatttgacgttcatgcctcgaagatctctacaaaattccaaagctggtttgaaaaaactgaatacctcctcgcaaggttattttaatatcccggtaaccatagaccgagcaagt

SEQ ID NO: 174072 - DNA, 201 bp, Saccharomyces pastorianus
ccgccgccgccgccaaacgcagcaccgaacaaatcttcgaaattgatgccgccaaagggagagccaccgcttgcattggtgaatcccgagaagtcatggaactgcgagccgaagggagatccgccgccgggacctccggcggctccaccgccgccgccaccaaaggcagcgggtccaaattggtcgtattgctgtctcttc

SEQ ID NO: 174073 - DNA, 159 bp, Saccharomyces pastorianus
atgagaattttgatgtcaaacatgacaaaccaggcagattgtctatggccaatcgtggtaaaaacaccaacggatcccaatttttcatcaccaccgtcccatgcccatggttggacggtaagcacgttgtctttggagaagtcttggatggtatggacg

SEQ ID NO: 174074 - DNA, 462 bp, Saccharomyces pastorianus
atgcacacggggcaaagatacattggctgtagcgcattaaatggccaattaacggagacagtggagctgctggacgtatccactagcgaattccattggaacgacatggatgagtccattgaggacacctatgattacgcaaaggaagctgagctattcttggagcaggaatttggcgaggtccttgacagggaacccgatgagttcaccaaatggaaaatgatcaaagctcaaccaaacatcaagactgggtcacagccagctgaacagcaaacttcaaacaatcctcactctcggttgttcaaggtcgtgctgaccatatggcattatagcgagattttgctattgatcatgggcatttatcttttttctgcttgcataagagttttccaaagaaggttcaaaaaaattagatccagaagaaaaagggcaggctcgcattctgtggggctattgcccatg

SEQ ID NO: 174075 - DNA, 96 bp, Saccharomyces pastorianus
atgcctattataggggtgccggggtgccttatgaaacccttttccgtgcctgttaagtttccgtttttggtcaaaaagaatatccgaattttagat

SEQ ID NO: 174076 - DNA, 309 bp, Saccharomyces pastorianus
aaagtaagtgcaagaaatagtcaaaattttggaccagacgtagcgaacaatggcattctggacgagagttatgacatagaatctgatccaagggcctttctgcaccaacctaaagaaactaaaaaggaaaagctacttaacagacagaatactttcttatctaacttgaaggggaaatccacacttaacgatggcatagctgccaattttgatggtatttctaaatcttccattagacgtaggaaaagaaagctaagagaagaactaaaaccaagatacctgcaggcatgcaagcttgcactgccgtct

SEQ ID NO: 174077 - DNA, 1641 bp, Saccharomyces pastorianus
atgttttacaataggtggctcggaacgtggctagccatgtctgctttaataaggatctcagtatcccttccgtcatctgaggagtacaaagtggcatatgagctgttgccagggttatctgaagtgccagacccttcaaatattccacagatgcatgctggccatattcctttacgttccgaagatgcggatgaacaggatagctctgacttggagtactttttttggaagtttaccaataacgactctaatggcaatgtcgaccgtcccttaattatatggttaaatggtggacccggttgctcttccatggatggtgccttggtcgaatctggcccttttagggtgaattcagacggtaaactttatctaaatgaagggtcctggatatccaaaggcgatcttttatttatcgaccaacctactggtactgggttttctgtcgaacaaaataaagacgaaggtaaaatcgacaaaaacaaatttgacgaagacctagaagatgtgaccaagcattttatggattttctggagaactatttcaagatttttccagaagacctcactaggaaaatcatactatcgggtgaaagttacgctggccaatacataccattctttgccaatgcaattttgaaccataacaaattttcaaagatcgacggggatacatacgacttgaaggcgctattgattggtaacggttggattgaccccaatacacagtccctatcgtaccttccgtttgctatggagaagaaactgattgatgaaagcaaccccaatttcaaacacttaacgaacgcacacgagaattgccagaatctgataaactcggccagtacagatgaggcagcccatttttcgtatcaggaatgtgagaatattttaaaccttctattgtcttataccagggaatcttcgcaaaagggaacagcggattgcttgaacatgtataacttcaatttaaaagatagttatccatcttgtggtatgaattggccgaaagatatttcctttgtcagtaaattcttcagcacacctggtgttattgattcgttgcatcttgattctgataaaattgatcattggaaggaatgcactaatagcgttggaactaaattgtctaatcctatttcaaagccatctatccatttattacctggtctacttgaaagtggaatagagattgtcttgttcaatggtgacaaagacttgatttgtaataacaagggcgtattagatactatagacaatctaaaatggggtggaataaagggatttagcgacgatgctgtttcgttcgattggatccataaatcgaagagtacagacgacagcgaagaatttagcggatacgtgaagtatgatagaaatttgacgtttgttagcgtttataatgcttctcacatggtacccttcgataaaagtttagtgagtagaggcattgtcgatatttactcgaacgatgttatgatcattgacaacaatgggaaaaatgttatgattactactgacgacgatagtgatcaagatgctactactgaaagcggtgataagccaaaagaaaacctcgaagaggaagaacaggaagcgcagaatgaggaaggaaaggaaaaagaaggccataaagatcacgac

SEQ ID NO: 174078 - DNA, 708 bp, Saccharomyces pastorianus
atgctcgatttaaatgagattaggcggcagagaggaacaaagtttccgcctgttctaaacactttcgtctctggattttatggatatatatatctggtactctcagaaacacattttgttttgcaagcacacccagatagtaagaagtatgatttacggttacagaacccttggcctgaactaataaattacgtagatacatttgacctaagtaaaatggatatagccacgttttctggtattccatatactgttttgctcatgaagtgtattgcaaaacttgaaagggatggtaataatgggaggataacgattgatcagatgaagaaagttttagaccaaatttgccttcctttagggaatgatgttatctacgaacccaattatgtggaagctaaacgctatgcttacttggcctgctctcaaaatgattgttgtaaagaactggaagatctgctccgaaatttggaaatatcagattatgggaacgattggcatgatacttataactacgagattctcacactattattgactttgaaaaatattgctaaagagaatggggagctcagctttcaacctttaacgggcactctcccagatatggagtcaacaacggaaaattatatcagactcaagaaactgtatgaagtaaaagcaaagcttgacaagtctcgtgtggaggaaagtttggctcgcagtaaaaaa

SEQ ID NO: 174079 - DNA, 1326 bp, Saccharomyces pastorianus
atggcaagcgaacagtcctcaccagaaattaatgcagataatctaaacagtagtgcagctgacgttcatgtacagccacccggagagaaagaatggtcagacgggttttatgacaaagaagtcattaatggaaatacgccagacgcaccgaagagaggctttttaggttaccttattatctacttactatgctatcctgtatcctttggcggttttttacctggttgggatagtggtattactgcaggcttcatcaatatggataactttaaaatgaattttggttcttacaagcacagtactggtgaatattatttgagcaacgtgcgtatgggtcttctcgtggccatgttcagtgtaggatgttccattggcggtgttggttttgcgagacttgctgatactttaggtagaaggctagcaattgtaatcgtggttttggtatatatggttggtgcaattattcagatcagttcgaatcacaaatggtaccaatactttgtcggtaagatcatctacggtcttggtgctggtggctgttcggtgttgtgtccaatgcttttatctgaaatagcccccacagatttgagaggtggacttgtctcattgtaccaacttaacatgaccttcggtattttcttgggttattgtagcgtttatggaacaaggaagtatagtaatactgcgcaatggaggattcctgtgggactatgctttctgtgggctctaattatcatcgttggcatgttattagttccagagtccccaagatatctgattgaatgtgagagacatgaagaggcctgtgtctccatcgccaagatcaacaaggtttcaccagaggatccatgggtactcaaacaggctgatgaaatcaacgccggtgtccttgcccaaagagaactaggggaagcctcatggaaagaacttttctccgtcaaaacaaaagtccttcaacgtttgatcacaggtattcttgtgcaaacctttttgcaacttactggtgaaaactacttcttcttctacggaactaccattttcaaatcagttgggcttactgatgggtttgagacgtcgatcgtcctaggtacagtgaatttcttctccactattattgctgttatggtcgtagacaaaataggccgtcgtaaatgtctgttattcggagcggcttcaatgatggcttgtatggtcatatttgcaagtatcggggtaaaatgtctttaccctcatggccaggatggtccatcctcgaaaggtgcaggtaatgccatgattgtgttcacatgcttctatatattctgctttgcaacgacatgggccccc

SEQ ID NO: 174080 - DNA, 324 bp, Saccharomyces pastorianus
  modified_base (178)..(211): a, c, g, t, unknown, or other
attaatccggataattcacaagcaacgaaaggtcaaaatagcgctcaaactaaattcaacagccaatcctatcaaccgacgtatgcacagcaggatatattaacgcagtcacaaccaccatttgtggacacaaacgataacaacaacaacaataatattaacaatactactactactnnnnnnnnnnnnnnnnnnnnnnnnnnnnnnnnnnccaactttctggccacgcgctataatataggaactctagatgaatttgttaataacggtgatcttgaagatctctacagtatcctatggagcgatgtttatccagatacttag

SEQ ID NO: 174081 - DNA, 123 bp, Saccharomyces pastorianus
ccagactcaataaacaccttttgtgctcctccagaattaaagaaaattcattcacttgggagatcaccgttgttggaggttgaagacagggaaactagtaagaaagttggaatctctcttata

SEQ ID NO: 174082 - DNA, 168 bp, Saccharomyces pastorianus
ttgctgtttcgctacttcttaatagtttggcactatttttttgaaaaaatggaatcgatatttctgcatattaatatcaccatcatttctcctcccttatatgttccattaccctattacattataaatcctcgtatttctgcttcctctaccttcgatgaaagcttc

SEQ ID NO: 174083 - DNA, 543 bp, Saccharomyces pastorianus
tacaactttggcgctaattgggtcaatgatgccttcaactccttatattccaataaggaacaaatatcgttaccagatttcattacttctaacacctctgaaaacttcaatgaacaagctattgttaccgtcacaccattgttatattatagacctatcaaatcttaccaacgtgttgaggatatgattcttctattacttcgtaatgttagcgttgccattcgtgacagatttgtcagtaaattagtcctttttgccttagtattcagtgccttcatcaatgtttatttgctaaatgccgctaggattcataccagttacaccgcagaccaattagtaaagaccgaattcactaaaaaatctcgtacagctccagtagcaagagcttctactccaattttaactaaaaaaactgtgactgctgaatctaaaacaaaagtttcaacaattgttcaggcaagttcttcagtatcctcattttcttctagtgaagaagatgatcccgtgatattgaaagcttggataagaaaatacgtcctctag

SEQ ID NO: 174084 - DNA, 126 bp, Saccharomyces pastorianus
gaatcaatatttctatatactaatattacgattatccctcattccgttttatatgtttcattatcctattacattatcaatcctttcacttcagcttcttctaacctcgatgacagcttctcataa

SEQ ID NO: 174085 - DNA, 210 bp, Saccharomyces pastorianus
gaagcggctgaagtactaggagtactgaaacaatcatgcaggcagaaaccacagcgaccagaggacgtctcgcgaggtgacgaggggagatcggcgagtgaatcgtcgacgacgcctctgaatatactggatcgcgtcagcaacgaacttattaacaacgtcgtgacgattgtacagacgacttacagctaccaccaagagaccggttag

SEQ ID NO: 174086 - DNA, 201 bp, Saccharomyces pastorianus
ccaaccctcgtaacttcagcagtaaatgtttctgatactgtttctgcctacgagaggattgctaggagaaatgatgacgattcatcatcttcctctgtatccagcacgacacatagtacgtcagccaagtgtacaggctcccaacaagaatgtcaactgcctacaaataccagtcccagacctagatgtgactgtaggtgt

SEQ ID NO: 174087 - DNA, 345 bp, Saccharomyces pastorianus
caaagcgacaacaatgatggtagcaccgctaaggaccaagttcctccgccgttactcataagatttagtacgaaggcgatgcgactgttttttattgtagatatgcttggacgcacaatgataccaagtagtacacttacttcctttttaaacaaggccgatttatattggtttatagcatattcagccattgtttccgcttgggggtttttagtatggatggaaagagcatatagaaagaagaggaacctgcaaccttcaaggtgcacgaaaataatctgctctcgttgtgatacaataaaaaaacatcctcgatggttcaaatacaaatatctccttttgtaa

SEQ ID NO: 174088 - DNA, 1464 bp, Saccharomyces pastorianus
ttccataaaaaagttaacccaaactttaatttgaaaaggaatttctttcttccgctggagcatgattgcagttcaagaggtagccgaattccaagggaagatcctagtccagaggcaagttcgagctttttcccactacacgacacattgtttacatcagaggatagttcaataaccccaaaaagtaacttggttcattacgttgttatagaaacagttgaaaatcgcaactttgcacacacagctcaaacagatttccccaaaaaagaaggaacttggatcagcatccaacgagatggtagttctaactcaaaccgaaccaccgacagcagggatgaaaacgatgaaagcaaaaaatcgtattgtaaagagtacttgcaccactcaaaaaagttcagctcttctaaaaaaaaaaacaacctggaatctatccgtttaagtaaaacaagttttacacttaatcttgaagacgaagatgtagtagaatgcgactttaatgataaagtgccttgttgtattgatttactttctggcgctactctggaaaaaagttctttaacgctgaatgaactaaatataaaaatgtttgatacactgcatcggttccgagtaagtaaagataatcctgaagaaaaattagtagaaatgattcttccaaattgtgtgacgctattagacatattcgatgagtcggaactttcgtctagttgttgtgacgatatttttgaaagctccacgttcctcaacacaatcgaacacatagtgcatgatatttgggtggagactctaacagaaaacctaactctatttccaatattcaatagctatttagaattgtacaaggacaggtatatgatttgcaaagtaaaagatcggcgcacctccacaaatatagtagagatactagaaagttttaagcattttcccacttctgtcctggaaactttcaggcttggaatcaagtcaacaggaaaagacctgtggcacacagagagcgccattatgaactacattattttcaacaggacattctgtactataattttagaaatccgaaaatgcttcatcttgatcatcagatttatgcactctgccgatcttttgaggattttttcgaatcaagtgtttttatcattcattgacgttctagtaaaaatcgtattcgaatgccagatcccgcagttgtttctgggaatcaacgaagttgttgaactgtggctacaaggcgacgagacaggacgcgaacaactcttgcgtgcatggtgcgacgcaattgtcggtagtacaaatgcagttgagtcaagagacaccccgaatttagaatcggagtcgttcacgtcaagcacagatgaaggcgaagacagcctcaaatttaacaagtgggatgtaatagaaccgttcatcgacaatatcagggccgcctgttcccggcagcagctacaatccgccaagttacagcaataa

SEQ ID NO: 174089 - DNA, 1005 bp, Saccharomyces pastorianus
tcaaccgtttattcaattttagccgcttctttggttaatgcaggtaccattcctctccaaaaattatcagacattgataaaatcggaactcaaacagagattttcccattcctgggtggttctgggccatactactctttccctggtgattatggtatttctcttgacttaccagaaagttgtgaaatgaagcaagtgcaaatggttggtagacacggtgaaagataccccactgtgagcaaagctaagagtatcatgacgacatggtacaagttgagtaactatactggtcaattcgacggaccattgtctttcttgaacgatgactacgagtttttcattcgtgacaccaagaacttagaaatggagaccacacttgccaactcggtcaatgttttaaacccgtataccggcgaaatgaatgctaagagacatgctcgtgattttttggcgcaatatggttacatggtcgaaaatcaaaccagttttgccgtttttacctctaattcaaacagatgtcatgacactgcccaatatttcattgacggtttaggtgaccaattcaacatctccttgcaaaccatcagtgaagccgagtccgctggcgccaatactttgagtgctcatcattcgtgtcctgcttgggacgatgatgtcaacaatgacattttggaagaatataatacaaaatatttgactggcatcgccaagagattaaataaggaaaacaagggtttgaatctaacttcaagcgacgcaaagaccttttttgcatggtgtgcatatgaattgaatgctaggggttacagtgatatctgcaacatctttaccaaagacgaattggtccgtttctcctacagccaagacttggaaacttattatcaaacaggacctggccatgaagtagtcagatctgtcggcgccaacttgttcaatgcttcagtgaaactactaaaagaaagtgaggtccaggaccaaaaaggtttggttaattttcacccatga

SEQ ID NO: 174090 - DNA, 243 bp, Saccharomyces pastorianus
  modified_base (34)..(34): a, c, g, t, unknown, or other
atgaatatttatgtgcctccttgccataaaaaanatttggatgaacagcctgaagatttcaaatggataatcgtaagaaacaagacagaaacgcccttctgtgacttgcttccatcgcatcgcgctataacttgggaccctagtatacaaataccgtttgcaacatttgaaagaaggaagaaattagaacatgtctggaaggttcgtaaaaatgtgatgagacgtgggcaattcatgaaaagg

SEQ ID NO: 174091 - DNA, 1341 bp, Saccharomyces pastorianus
acagaaaatgatactgtagctccagtgtttcccatggagcaagatataaatgcagcacctgatgccgtcccactggtgcagacaacaacactacaagtctttgtaaagcttgccgaacccatagtgtttttaaaaggatttgaaactaacggactgtctgaaatagcccccagtatcttacgaggatctcttatcgtcagggtgttgaaaccgaataaattaaaaagtatatcgataaccttcaaaggaatatccagaacagagtggccggagggtataccaccgaagagagaagaattttcagatgttgaaactgttgtcaatcacacatggccattttatcaggcggatgacggcatgaattctttcaccttagaacatcacagctcaaataattcgtccaatcgcccatctatgagcgatgaagattatctacttgaaaaaagcggtgcttcagtatatatcccaccaaccgctgaaccccctaaagataatagcaatctaagtctggatgcctatgagtgcaactcattgtcatccgataatttgagtaacaagccagtatcaagtgatgtttcccatgacgacagtaaactgttggctattcaaaagacaccattaccatcatctagtcgaagaggatcggtaccggcaaattttcacggtaactctttgtcacctcataccttcatatctgatttgtttacaaaaacattcagtaatagtggcgctactccaagtcctgagcaagaggataactatcttacaccatccaaagattctaaagaagtttttatttttcgaccaggcgattatatttacacttttgaacagccaatatcgcaatcttatccagaaagtataaaagccaattttggttccgtggagtataaactgtcaatagacatagagaggtttggcgcattcaaatcaactatacatactcaattacccatcaaagtcgtaaggcttccttctgatggatccgtagaagagactgaagctattgcaatttccaaggactggaaagatcttcttcattatgacgtggtaattttctcgaaagagatcgttttgaatgcatttttacccatcgatttccatttcgctcctctagataaagttactctgcatcgtattagaatttatctaacagagtctatggaatacacttgtaatagtaatggaaatcacgagaaggctcgtcgattagagccaactaaaatgtttctgttggctgaacataacggtcctaaactgcctcatataccagctggttcgaatcctttgaaggctaataatagagggaacatccttttggatgaaaatccggcgatctag

SEQ ID NO: 174092 - DNA, 573 bp, Saccharomyces pastorianus
gtctccgtctttgtcgttttcatgttcctgtctatttgctgtttgagtgcagaatactttcttatgggcagacattacgcctcaatccatcctctagccaattccaacctcaacacgcaatcctctgaaaaaagcttcaaccagagctttaatattgtagacgacctaccctggtacaagtggcaaggtcacatttggaacaaatttacaatcagtgccaccctaaaaactatatggctggccttggctgttgtttgggctatttgcttcggtgccattaatgataggtctaagagtgcctgtttcgagtggctgttggccttttggtttggtgttatatttataatcctttccgtcgatttttatatgggtggtagatacagaaaatctcgctattttaagcacgtggaatcattttccggttattacaagtacgataaggcgctaggcctttaccacagcgaagaagttttgccttccgaggacaatgctgatgccattactacagacacggcttcttcaaataatcacgataacaccgcttcaaatgaatcccttcaggtcgttgtatga

SEQ ID NO: 174093 - DNA, 549 bp, Saccharomyces pastorianus
atgatctacgttcttggttattcaatttatttgagtggctacttaaaggattattggtgcctaccaaggccaaaatcaccgccagttgacagaatcacactaagtgaatacactacgaaagaatatggtgcacccagttcacattctgctaacgctactgcggtaagtctattattcttttggagaatatgtttatctgacacactggtatggccaacaaagcttcttttactgagtctggtgatattttactacttaaccctggtttttggtagagtttactgcggtatgcatggtatgctggatttatttagcggcgccgcagttggagctatctgtttttttataagaatctgggtggtgcatgctttacgaaatttccagattggtgaacatctctggtttccccttttgagtgtagcatggggcttgtttattctgtttaaccacgtcaggcccattgatgaatgtccttgtttcgaagatagcgtagcgttcattggcgtagtcagtgggctggattgcagcgactggttaaccgaaagatac

SEQ ID NO: 174094 - DNA, 126 bp, Saccharomyces pastorianus
atggaatctatatttctacatactaatattacgaatattcctcattccgttttatatgtttcattatcctattacattatcaatccttgcacttcagcttcctctaacttcgatgacagcttctca

SEQ ID NO: 174095 - DNA, 837 bp, Saccharomyces pastorianus
atgtccaagttagaaaccgtttacttatacgctggtgaagaacaaccacgtgttaaattgacctgtattaaggaaggtctcactttaactcaggttatcaagttcgtgcattctattcaagaattgtacgggattgagttgcaaacttctgagaccataacagaaaatttgaagatagattgtgcacccgcatatttgaagccgaattgtattccccatttctacattctcgaatatgaagaaataagtgacacctttttcatttggaaatctgatggtcgttggcaattaaataagttgtctgccttgttgtacgtggataacgacgctaacgtggttaagaacacttcctggaaggaggttttccagaatgatcaacgatttaaaaattatgataaacgggcctggttacaaaattgtctagaaaaaatgaatagagatctctcaaaactaaacgttgaacaattttggtctcaatatgataaaatatgtcaaagcattgccaaacaaaagaaaaaacaggaacagttcaacatggaggttttcgataacttcaaaaatattgtttctattgctatcataaagaccaaagttttatcgaataagcgacttttgacaacaactttaaaaaattatcataactcgatgaagaaaaagtataacatccaggaacaaaatcttaaggaaaatagtttggcatcgtgctcgaacaatgagccttccgcatctctgggaagcgaatcaagacatttttctccggtaaattcgctgtctccttcatctttgagtaccgatgatgaggctgtctcgacagactacatctataaaggtcctgag

SEQ ID NO: 174096 - DNA, 1362 bp, Saccharomyces pastorianus
atggtttatgattgtccagaatatgacttaaagacctgctacagaaaccttaccttcaaggtgcgcaaaaaaaattcagaggcaacaaatagacagaacttgcagaaacagtcgaagaaaaacgataacttccagccttccgttgcctttgacactgtccctttcactctaggttattcttctatacacgacagtagagaaggatttctaggtgtacctgttcccaatgattacactatggaagagtgttacgataaagaaacagactctctctcagcgaatttacaatattacctaaaggacacattccaatcgccttctttgaaggccaggaaagaggatgactctgtttccaacattcctccaataaaatctccaaagcttttgaagaaaagaactgacattaagaagattttcttagtatctcaaaatgggaaaatcgtaaggagagactatccaagtacttcagtgattactaatgaagcactaatggtaaacaagttagaaaagaattggaacaaattatggcgtcaaaggaaagcacaaataaatgaaaggctaaacgaaaaaaaaaagtggtttgttcagccagatattattttccccaaagaacacattaaaccgttatatagaggtgatgacgctacgccttgtactaaggagcaaagaagaaaacacaaaatcttccaacaaaaaattggatatcctaataatccgaaaacaatactttgttatattagtggtagaaggcatacttgggttgctctagattggaccctttgcaagattgcacaagacatggatcatattgtggttttaactacactaccaagattgatatgtaacaagaaaaaaggacgaaaaggggacacagaatgggcatcgggatatcaaaaggaatcaatcgaccgaaaactcagtgatatctttgagtacattttacagcttctgaaggcagttaaagcttctgtaaaagttactttggaaatagttataggcaaaaccaaaaaatcactggtggatgcaattaacgtttatacaccggacttcctagttatcgctactttgaagcatgaaagaaatgaaaagctcatcatatataaatctaaaaaactggctgatgtttttgctgtaagctttcctattccagtacttatcgttccctcaaaaagaatgtattccttcgaactaaatttacaaagaaaaatgaatggatgcataaataatagtagcaatacccatataaacaatgaaaatactgacagaaataatacgaatgattcaccatttgaaaacaacgaaatagtagctatatcttccgagatttccttagattcatttgcagaagacttcaaaaaaaaa

SEQ ID NO: 174097 - DNA, 174 bp, Saccharomyces pastorianus
agctctgacgaggtaaccacatcaacagatccaactagctcaagtgacgttgctacttcagcagatccaactagttcaagcgctgtgactactttagttgacccaactacttctgtagtcatttcaacctcagttgatcaaactagctcaagtgacgtttgctacttcagttga

SEQ ID NO: 174098 - DNA, 105 bp, Saccharomyces pastorianus
aactatctaatcaaggtactaccaagcctccgccaagcgatgctatcgggaatctactttaatgtgaacccggaattgcatgcgtacgaatctatctatgactga

SEQ ID NO: 174099 - DNA, 186 bp, Saccharomyces pastorianus
atactgctttcgtataacaagacttttattacagattcagaagaatgtagacaagtagtcgaagaagcgatccaagatttattccagctactggagaattggacaaccaaataccacacgtatgaaaaatgtagtatccagatggctacaacagccattttagccctacagtgtatgaacagtaga

SEQ ID NO: 174100 - DNA, 1809 bp, Saccharomyces pastorianus
atacagaatcacaagaaagcggtgacaaaacccagaagaagagaaaaagtcatcgagctaattgaagtggacggcaaaaaggtgagtacgacttcaaccggtaaacgtaaattccataacaaatcaaagaatgggtgcgataactgtaaaagaagaagagttaagtgtgatgaagggaagccagcctgtaggaagtgcacaaatatgaagttggaatgtcagtatacaccaatccatttaaggaaaggtagaggagcaacagtagtgaagtatgtcacgagaaaggcagacggtagcgtggagtctgattcatcggtagatttacctcctacgatcaagaaggagcagacaccgttcaatgatatccaatcagcggtaaaagcttcaggctcatccaatgattcctttccatcaagcgcctctacaactaagagtgagagcgaggaaaagtcatcggcccctatagaggacaaaaacaatatgactcctctaagtatgggcctccagggtaccatcaataagaaagatatgatgaataactttttctctcaaaatggcactattggttttggttctcctgaaagattgaattcaggtatcgatggcttactattaccgccattgccttctggaaatatgggtgcgttccaacttcagcaacagcagcaagtgcagcagcaatctcaaccacagacccaagcgcagcaagcaagtggaactccaaacgagagatatggttcattcgatcttgcgggtagtcctgcattgcaatccacgggaatgagcttatcaaatagtctaagcgggatgttactatgtaacaggattccttccggccaaaactacactcaacaacaattacaatatcaattacaccagcagctgcaattgcaacagcatcagcaagttcagctgcagcagtatcaacaattacgtcaggaacaacaccaacaagttcagcaacaacaacaggaacaactccagcaataccaacaacattttttgcaacagcagcaacaagtactgcttcagcaagagcaacaacctaacgatgaggaaggtggcgttcaggaagaaaacagcaaaaaggtaaaggaagggcctttacaatcacaaacaagcgaaactactttaaacagcgatgctgctacattacaagctgatgcattatctcagttaagtaagatggggctaagcctaaagtcgttaagtacctttccaacagctggtattggtggtgtttcctatgactttcaggaactgttaggtattaagtttccaataaataacggcaattcaagagctactaaggccagcaacgcagaggaagctttggccaatatgcaagagcatcatgaacgtgcagctgcttctgtaaaggagaatgatggtcagctctctgatacgaagagtccagcgccatcaaataacgcccaagggggaagtgctagtattatggaacctcaggcggctgatgcggtttcgacaatggcgcctatatcaatgattgaaagaaacatgaacagaaacagcaacatttctccatcaacgccctctgcagtgttgaatgataggcaagagatgcaagattctataagttctctaggaaatctgacaaaagcagccttggagaacaacgaaccaacgataagtttacaaacatcacagacagagaatgaagacgatgcatcgcggcaagacatgacctcaaaaattaataacgaagctgaccgaagttctgtttctgctggtaccagtaacatcgctaagcttttagatctttctaccaaaggagaggggatcctctag

SEQ ID NO: 174101 - DNA, 111 bp, Saccharomyces pastorianus
atggtctctagcgggatcgaaccgctgatccccgcgttattagcacggtgccttaaccaactgggccaagagaccattatttgttgtttttcggagtatgtaaagagcatc

SEQ ID NO: 174102 - DNA, 135 bp, Saccharomyces pastorianus
atgttcatggtaggtaccccacccagccataaggaaattttcaaaggcgttggatcaaaaaataggcctttatttcatcgcgtgattgaggagcataacatgtttagtgaaggtttcttttggaaaacttcagtc

SEQ ID NO: 174103 - DNA, 258 bp, Saccharomyces pastorianus
cggatcgcgctgaaggactcttatagaataagtttggtaccttcttctgatggaatatctgtatgtggaaaactttggggagagttgaacaactgcttccatgtgccagcctcattttgcgtaatcgagaagttttgttcagagagccaaagcgaggaattgacgagtacgattctttcttttaaatatcgtgaaattgtgctgcccaagttgagaagagatactggcaaaatgaccgcggctcttaaaaataattga

SEQ ID NO: 174104 - DNA, 114 bp, Saccharomyces pastorianus; identical to SEQ ID NO: 174068

SEQ ID NO: 174105 - DNA, 144 bp, Saccharomyces pastorianus
ctgcatagaagaggtacggccacacaaggtactttacatttgactactcaccatttgatctttgagtcaccacaattgtcgacggaattctggtttccatatcctgacctgcaggcaagcaagcttgcactgccgtcgtttaca

SEQ ID NO: 174106 - DNA, 1485 bp, Saccharomyces pastorianus
ccacaaaaacttgtcaatttattaccacaatcgttcaacgacgaactgtcgttggcccctggcaaggaatcagccacgttgtcggttgtttacactctagactcatctactttaaggattaaatctacttgggtaggcgaatctacaatttccccctcaaacatcttgtctttagaacaattagacgaaaaattatctactggaagtcccagtagctacctctctactgtacaggaaattgctagatcattttatgctagaagaataaatgatccagaagctacattacttcccaccctgtccttattggaaagcttggatgacgaaaaagttaaggttgacttgaacatcctggatagaactttaggctttgttgtaattaatgagattaaaagaaaggtcaactccactgttgcagagaaaatttacaccaaacttggtgatctagctcttttgagaaggcagatgcaacccattgcaaccaagatggcgtcatttagaaagaaaattcaaaattttggttacaattttgataccaatacggcggatgaattaatcaaaggggtgctaaaaattaaagatgacgatgttagagtcggaattgaaattttactgtttaaaaccatgccaagagctagatactttattgctggcaaattagacccggaccaatatgggcattatgccttgaacctacctatctacacacatttcacagcgccaatgagaagatacgctgatcatgtcgttcataggcaattaaaggccgttatccacgatactccatacaccgaagatatggaagctttgaagattacctccgaatattgtaattttaaaaaggactgtgcttatcaagcacaggaacaagcaattcatctattgttgtgtaaaacaatcaacgacatgggaaatactacaggacaattattaacaatggctactgtcttacaagtttacgagtcctcctttgatgtatttattccagaatttggtattgaaaagagagttcatggagatcaactacctttgatcaaagctgagtttgatggtaccaatcgtgtcttggaattgcattggcagcccggcgtagatagtgcaacttttataccagcagatgaaaaaaatccaaaatcctatagaaattccattaagaacaaattcagatccacagccgctgagattgcgaatattgaactagataaagaagcggaatctgaaccattgatcagcgatccattgagtaaggaactcagcgatttgcatctaacagtaccaaatttaaggctaccatctgcaagcgacaacaagcaaaatgctttagaaaaattcatttctactactgaaaccagaattgaaaatgataactatatacaagaaatacatgaattgcaaaagattcctattctattgagagctgaggtggggatggctttgccatgtttatccgtccgtgcattaaatccattcatgaagagggtataa

SEQ ID NO: 174107 - DNA, 1575 bp, Saccharomyces pastorianus
atgtacagaattaatagtaggtttttgataattgacggttgggtgattgatctagtaaagaaagctttgataaaccccaaggaatcggctacatttcaaaattttataagtagctatcaccttttagactgggatgatatctatgatgaggaatttaatatatattgtgaagatgatcgtaacctgtttgaagtaatagatgcagatgagtactggttccaaatagaccccataactggctcggtattgaaagtttccaaaaaccagttgagtgatttagtaggcttgaggtgccataggctatcaatggggcataagaaaacgctatatattcattaccatccatacgaaaaaaatatgccaaggacgtgtcagatgcagtacatgcacaaagacttaaagcaacggttttatccgctgtgcacctttaagggtaaaaaattcatcgaaattgaaggatttgtcattaagttgagcaagttcatcaaaaaaccacccaaattagtggaacaaactttatttgacccttcatcatcaaatggcaaggaaggtacgttgtccgtgaatgattgctaccttctaaggaaggttttcaagggtagatcgctcttgtatttaaagttgatcaattcgaattttttgaccattaaagacataaccctttttcatttgtctttgaagcaaattctggtaaaattgaagaaaatcaatgactattacgtttgtgaaaaatatcacggtcaaaggaccactgaccaggtctcgatacatttagcaataccaataatttgtattgataatcatactaaatatattgtttgggagaatcccattttttctacacgaaattttgatgcagaaagtgtcggaaagcaattgaagtcggaaatgagaattgttgatcgattgtttaaaaacgatattataacgttagaaaactacatcctcagaaatgaacaattttccaatactcaacaaatagatcatcaaagcactattgattcaatttcatcgacttgcatttgtgtcaacggaaaaatcgttgcacagaaattcggatcacttctaaaccagatcatttttcaaggaaagattcaggatacttccgtgtatctgatcgaagaagatttcattttcggtcggctatcaaaaataatatctaatttttgtttaactgagtcaatggctaggttacaatggtggcaaaactgtatacgaagtgagtttggtataacagatttcgatgtttgtcaccaaagctgtaatgaaataaagcagattgttgataaggcgattgaattttttttacctgcattaatcacgcaacaccaaaaggttttctcaggacacagaatgtatggattaacaaatccggagctttcaaagaggtatatgataatcgacaaatttatagttgatgtgtttgaacgaagggtggtgaatccattgagcgacgatattttccgaataatgagcttcagaaatgcaaaactaaatatgagcaatggtcttttggattggagctcattggtattcgattctataccgtatcctgtattttcaccggtgttgttt

SEQ ID NO: 174108 - DNA, 108 bp, Saccharomyces pastorianus
atgagtgggataaagaaggaaccgattgaatctgatgaggttcctcaacaagagacaaaaaataacttacctagtgcaccttctgagatgtcaccccttttcctaaac

SEQ ID NO: 174109 - DNA, 267 bp, Saccharomyces pastorianus
atggctggagaagcagtcttagagcatatgtcagattcacaagaagaaattgtaactactgtggtttgttttgttgtttctgtggtttgctctgttgtccccttggtttgctttgttgtccccttggtttgctttgttgtctccgtagtttgctttgttatctctgtggtagaaatagggcaccatgtggtatactctgttgtaacgccgctaacagtaacggtggccgtggaaacaatcgcagaggagatggattcagtgcacaca

SEQ ID NO: 174110 - DNA, 120 bp, Saccharomyces pastorianus
tcatcgggttgttttctgatcgcgtctttatcttgtgtggggcttactgtatttgaaaccttattttcgctagtctttgatacggcgtatttcatatgtgggatggtcatccagctttaa

SEQ ID NO: 174111 - DNA, 1023 bp, Saccharomyces pastorianus
atgtttggctgggataccggtactatttccgggtttgttgcccaaacagacttcctaagaagatttggtatgaaacataaggacggtacctactacatgtctaatgtcagggttggtttattcgttgccattttcaacattgtttgtgctttcggcggaattattctgtccaagggtggcgacatgtacggtcgtaagaagggtctttttattgtcattattgtttacatcattggtatcatcattcaaatcgcctcaattgacaagtggtaccaatatttcattggtagaattatttctgggctgggtgtcggtggtattgctgttttatgtcctatgcttatttccgagatttctccaaaacatttgagaggtccgctagtttcctgttaccaactgatgatcacagccggtatctttctgggttactgtactaattttggtaccaagaactactccaactctgtgcaatggagagtccccttggggttgtgttttgcatggtctatcttcatgatttttgggatgagttttgttcctgaatccccacgttatctggtcgaagtgggtaaaatggatgaagccaagcgtgctttagcaaaggttaacaagaccactgaagattcaccgttagttactctggaaatggagaattaccaatcttccattgaggctgaaagactagccggctctgcctcgtggagcgaattagtcacaggtaaacctcaaatgctaagacgtacaatcatgggtatgatgattcaatctctacaacaattgactggtgacaactacttcttctactacggtactacaattttccaagctgtcggtttacaggattcatttgaaactgccatcgttttaggggtagtcaactttgtttctactttcttctcattgtatactgttgaccgtttcggccgtcgtaactgtctactgtggggatgtgttggtatgatttgttgctacatggtctatgcctctgtaggtgtaaccagattgtggaaaaacggacaaagt

SEQ ID NO: 174112 - DNA, 282 bp, Saccharomyces pastorianus
atagcaacaaaggagggtggcagattccttttaggtaattgtagagtttggcagaagtctgtgttaaacaaaccaacacaatttataaacatatataatgttttagccattgaaacttcctgtgacgatacgtgcgtttccatactggtaaggttctcagcgaatgtagctccaaatgtgttgatcaatttgaaagatactctggatagtgttgatgaaggagctattattcctacaaaggctcatgtccatcaccaagctcggatacggaccttaacataa

SEQ ID NO: 174113 - DNA, 816 bp, Saccharomyces pastorianus
tattcaattgttaaagagattattgtagatccttacaaaagactaaaatgggggtttattccagtaaagcggcatgtggaagacctgccagatgacttaaattcaacagaagttttcactatctccaacagtatccagagtcatgaaacagctgaaaatttcatcacgaatacaagtgaaaaagagcaactacattttgagagtagtagctatagtgaacataaagacaatgtgaaccttactagaagttatgaatatagagatgaagccgataggccatggtggagatttttcgatgaacaagagtatcggatcaatgaaaaggaaagatctcacaataaatggtatagttggttcaaacagggtatctcttttaaagaaaaaaaattattaattaaattggatgtccttttagccttttattcttgtattgcttattgggtcaaatatttggatacggttaatataaacaacgcttacgtttcgggaatgaaggaagatttaggctttcaaggtaatgatttggtgcatactcaagtaatgtacacagttggtaatattatatttcaattgccatttttgatttacttgaacaagttcccattaaactatgttttaccaagcctagacttatgttggtcgcttttaaccgttggtgctgcatatgtcaattctgtaccacacttgaaaaccattaggtttttcattggggcttttgaagcgccaagttatttggcataccaatatttgtttggttccttttacaaacatgatgaaatggtgcgtcgttctgctttttactatttgggccagtaa

SEQ ID NO: 174114 - DNA, 1020 bp, Saccharomyces pastorianus
atgacttcaaaatgggaaaaatgcttcaatgacaccttgagtaagttgactgctttagagggtgattctttacaaaagttcattaatattgaatctctcctggagaacgaaaaatctgtaaagattctaaatcattcaatcaatggtaagctgaataaaattaagagggaaattgacgaaaatgcaagttttagagatattataacagtaaacatcgatcgactgcggcaaatgtttaccccgaatgaatctaaattcgagcttgaagaccaaatggcagagagctttgaggtactggtatcagaaatgcgaacaagaagcagaaatgtacttgataaagaagaagaagaattcaatagtcaagaatttttgaaaagcatgaatgtgatgttggaaaaggataaaaaagaatcagtgaaaactctcttcactatatcacaagcgctgtattcacaaataggagaactaatagatttaaaaaaaagtctacaaaagcatgcagtagccattttgggtaacatagcattcacccagatggaaatcctaggtattaaaagactattattgaatgaatgtaataaagatttagagctatacaagaaatatgaggtagaatttgcacaggtagaagatttgcctctgatatatgggctttatttaatcgaaaaatatcgtaggctatcatggttccaacaaattttgtcatttatctcaaattttaatcaagatttagagttgttcaaacaaaatgaattacgaacaagaaataaatgggttaaaaatttcggttccatcgcgactgttttttgcgaagatctattgtcttcctctgatttcaaacgtctaaacgaatatcactctcatacttctccaccaaatgaagatgaggaagatgaaaatgagaactctatagcaaattaccgccaagacctggtaaaagtatcgcaagccattgataattatatgacgcaaattaaagaaacagatgtttctgaaccgatcattgatctactttcgaaa

SEQ ID NO: 174115 - DNA, 1251 bp, Saccharomyces pastorianus
atggatgacaaaagtgaaattatgaaagacgaagaaagcataattatttcacggggagattctacaagctctcaagaatatggaaacgggttagagccacaacaaccggtaggaaatgttgttggtgaagatattgaactggctgtgggaacacgtataaatgcattttcactgacagattataaagcttgcaaacctatgtctgttgaggtaagtagaagatgcgaaaacagtacggataatgattatgacaatatttctattgtctcagatactacagatgagacatccacattgtttccactagaccagtatcgatatgttttcattgaaaatgatgaaagaccaccattagccaccgacacgataggcagcacacagtttttcactccaaacacatcgcctttggatgggataatcgatttaacacaggaatcattcaaagctgttcgatcgttaatatcacctttgaaagtcgaaaacaacaaaacaggggtaacatcacaagcatcaaatcaggttcaggtaccagctacaagaacccctacaattattcctcaaaagaaccttactacaactttaaaaactgaagaagaaaagaataacataggaagttccatcagagttaaattattgcaagaaagcgtagttaagctaaaccccaaactggtgaaacataacttttatagagttgaggcaaatgattctgaagaagaggacacagaatttgatgaccaattctgcattgctgatatccaattggtagattcctccaaaatttcgactaaagattctacacaaaatcctactactagcaacgacattattgatacctctgcagctagttccatagcttctcccgagaaattttgtgagatcatgatgtcccaatcaatgaaagagcttcgacaaagcttgaaaacagtggggttgaaacctatgaggacgaaggttgaaatcattcaatccttacaaactgcatctcaaattctgtccacagctaatccagataataaaggtgagcatggtggggtggcaaaattcagtaagatagaaatatttgatcatttaaccgaactaattgaagccttccctgattttttggagcgaatatatacctttgaacccattccgctaaatgagctaattgaaaagctgttcagcgccgagccatttgtttcgcaaatcgacgaaatgaccatcagagaatgggccgatgttcaaggaatatgtctgagaaacgataaaaag

SEQ ID NO: 174116 - DNA, 582 bp, Saccharomyces pastorianus
atgttcaatcgttttaacaaattccaagctgctgtagctttggccctactctctcgcggcgctctcggtgactcttacaccaatagcacctcctccgcagacttgagttctatcacttccgtctcgtcagctagtgcaagtgccaccgcctccgactcactttcttccagtgacggtaccgtttatttgccatccacaacaattagcggtgatctcacagttactggtaaagtaattgcaaccgaggccgtggaagtcgctgccggtggtaagttgactttacttgacggtgaaaaatacgtcttctcatctgatctaaaagttcacggtgatttggttgtcgaaaagtctgaagcaagctacgaaggtaccgcgttcgacgtttctggcgagacttttgaagtttccggtaacttcagtgctgaagaaactggcgctgtctccgcatctatctattcattcacacctagctcgttcaagagcagcggtgacatttctttgagtttgtcaaaggccaagaagggtgaagtcaccttttctttgtcaaatgctattctcaacggtggttctgtttccggtttg

SEQ ID NO: 174117 - DNA, 1242 bp, Saccharomyces pastorianus
ttggaacaacttctctactttttagacctactattttggttatccgagatttatgggttcgaaaaagttctgaatgttgcagtccatttcgttttcataattggtttatcaagatgggaattttatgtaggcctcgacgaagcctttgctgagcgaagaagaaacctttggtggaaagcttattatttcgaaaaaacacttgcatctaaattgggctttccttcaaatattgatgactctaaaattaattgtttgttacctaaggatttcagagatgctggatttttggataatagagatttcattgaaaatgtttgttcagtgcatagaaatgacacttttgataacatgtccatatccgatttaaaatactatggggaattggccattttacagattgttagcaatttttcatcatctgtcttgtttaatgagaaatttacatcaattagaaacacttcaaaaccaactgttgtaagagaaaaattactcttcgatgttcttgcgacttttaaagaaacagaattaaaatttgatgccatcaaggagcaaactggcaagctatttgatattgcattttcggaagatactgctaaatttaaagtttcaagggaggataaaattatagcttcaagatttgttttattttatgagcatcatttttgcagaatggttaatgaatctgataacgtcgttgccagactatgcgctgatcgaaaactcacactgttacttgaaaacttaaagatatatcttcataagatctacaaatcgtggactgatatgaataagatcctgttggcgtttgacaatgactattttgtgtaccgttcgtttgctcattattctattagttgcatcattttagtatcacaggcattttctgtagccgagtttatcaatatgaacgatgttttgaatatgatcagagtattcaaaaggtttcttaacattaggatattctcagaaaatgaaaaaaaagaacatgtctctaacagccaaagcttcaaagattacaccagagcgttttccttcttgacaatcgtcactcgtattatgcttttggcgtatggcgaatcttcgagtaccaacctggatgctctctcaaaatacgtcgaagaaagtgctccagatttgaaaggaataatagagctcgttttggataccaattcctgcgcttatcgatttttactagaaccagtacagaagtcagggttccatctaactgtctcacaaatgtta

SEQ ID NO: 174118 - DNA, 753 bp, Saccharomyces pastorianus
atgatgaacaaagaagttatggccaagactgcccaattatctcaatttgatgaagaattatacaaagtcattgacggtgatgatgaaaaatatttgatcgctacttctgaacaacctatttccgcttaccacagtggtgaatggtttgaaaagccacaagagcaattgccaatccattacgctggttactcttcttgtttccgtagagaagctggttcccatggtaaggacgcttggggtatcttcagagttcatgcttttgaaaaaattgaacaatttgtcataaccgaacctgaaaaatcttgggaagagtttgaaaagatgatctcttactctgaagaattctacaagtcattaaagttgccataccgtatcgttggtattgtctctggtgaattaaacaatgccgcagccaagaagtacgatttggaagcttggttcccataccaaaaggagtacaaaggactggtctcttgttcaaactgtaccgactaccaatccagaaacttggaaatcagatgtggtataaagaaaatgggtgacagagaaaagaaatacgtccattgtttgaactctaccttggctgctacccaaagagctttgtgttgtgttctagaaaactaccaaactgaagatggtttagttgttccagaagtcttgagaaagtacattccaggtgaaccagaattcttgccatttatcaacgagctcccaaagaactctacttctagtaaagacaagaaaaagaaaaat

SEQ ID NO: 174119 - DNA, 2925 bp, Saccharomyces pastorianus
tataattatttattctcggcggccttagccttcctggcgctaactgatgcagcatccgctagtacagaagcgtgtttgccaacgaatgagaggaaaaacgggatgaatatcaacttttacgagtatgcattaggtgacgaatccacatacactgatcctacatatatggcttctggatacgcaaatacgaaaaaattaggctctgttagtggtcagacggatctttcgatttactataacactccttgtgatacctataactcatgtaatgatcccacccctgttaccgagatggcacttatgaagcgttacgatgaaaactgtcccaccgaaaccgaaccggtctacgctagtataaaacgtgacacagacgattgcgaccgagatgctgcttattggagttcagatctatttggcttctatactactccaacaaacgtgaccatagaaatgacaggctacttcttaccaccagaagatggttcttacacattcacctttccaatggtggatgactcagcaattttatcaattgggggtgacactgcatttggatgttgtgcacaagaggaactgcctgccacatcaactgatttcacagtcgatggtgttggaaaacagtttgggtatgtggaagggtcaaaatacatgtatgctggttattactacccaatgaaaatagttttttcgaatgctaattcttcagctacacttccaattggcatgacattgccaaacggtagtactatttacgataactatgaaggatacgtctattcttttgacaataacctggcccaagcgaattgtgatgttacgaatcccgaaaacaacacaattactggcattctgacaaccacaacggaaccatggactggtgtgtatacaacgacagacactaagacatctactatcacaggactcaatagtttaccaacggttgaaaccataattgaagttaaaacaccaaccggcgtcagctcatccagtgtcccatctactgaggtcacaacgggatccaccacatcctctactccggtcacaaccattagttctactacctcatccaatgtaactagctccgttgccacatcctctgctgtctccagttctgttgtctccagttttgttgtctcaagttctgcttccacatcctccgacgagaccagctctgcttcaagctctactgtcacttcttctgacgtaaccagttctgctgtttcatcctctgtagtgacaagttctgcaacctctactccagccacgatcattagttcaattaactcgtctaatgtaactagctccgttgttacatcttctgctgtctccagctcagttgccacatcttctgacgtgaccagctctgcttcaagctctactatcacttcttctgacgtaaccagttctgctgtttcatcctctgtagtgacaagttctgcaacctctactccggtcacaaccattagttctactacctcatccaatgtaactagctccgttgcctcatcttctgctgtctccagttcagttgtctcatcttctgctgtctccagttcagttgtctcatcttctgctgtctccagttcagttgtctcgtcttccgatgtgactagttcgggctcttcgaggttttctaagtcatctaaaacatccactgctccatccacatattcaactgctactccaatctatcctatgaatcaaactgtagttaccagttccgcttcctctacactggctacgtctggatcatccatattgcttgagtcatccagatcatctactataggcccaattttccgcactgtttcggaatcgtctgctggttcagctgttagcactgccacatccgcagacccagccgttagttcttctacatcatccgctgatccaacaaccagctcctccacatcatctgctaacccaactgttagctcttccggaccatctgctgacccaaccattagttctttcactacaggctccgaggatcatgaatctacagtttcttctacttccgctagaaccagctcagcttctaactcttctgataatcaatccaagattattagcacctctaccatttattccaacaattttgaaactaccactgtttctgcttcaatctcttccaagtcgccaagttctcatagtttattgtctatctcgtctactccagctatcactgataccaaatcatccggtatgaaaactgaaaccacgagttctgctattgggtctactccatctagtatgaaaactgaagttattacttcttcctctgcttcatctttcaagggacaggaaactactagcgaagacgctacttctgcatcttaccgcgatcgtactactattgaaaaagtgacttctgctgtcacaacaggcgaaaaaacttctttgattacagttactttctgtgagtctggcgtctgttctgagactgccacttctgctatcttttctaccgccacgaccactgtcagtggcgttgctacggaatacactacgtggtgtcctgtttccactaataaaccaacaaagcaaactactttagttacagttacttcttgtgagtctggtgtctgctccgaaactgcctctcctgccatcgtttctacagccacaactgtcgtcaatgacgctgttacagcatacaccacatggtgcccattaacaaccaatagagtgacggttagcgcaagtactaccactggcgttactgataactctgtcaaccccgaagctgctgaaacgaaaaccgtgacccacagcaacgacgtgccttcgatttcagaatctggtcatgctgaagcacatccaactaccatggctgatgcgattggccatagcagtagcgtgccttcggtttcagggactgctaataccaagggctttgcaagttccaacttgaacactgcctac

SEQ ID NO: 174120 - DNA, 225 bp, Saccharomyces pastorianus
atgccaattataggggtgccggggtgccttatgaaacccttttccgtgcctgtgaagtttccgctttcggtcaaaaagaatatccgaattttagatttggacccttgttcagaagcttattgtctaagcctaaattcagtctgctttaaacggcttccgcggaagaagtatttccatctcttgaattcgtacaacattaaacgtgtgttgggagtcgtatactgt

SEQ ID NO: 174121 - DNA, 90 bp, Saccharomyces pastorianus
gcgttattagcacggtgccttaaccaactgggccaagagaccatgaaaactgtttgggggattggacgttctagattacataccaaaagt

SEQ ID NO: 174122 - DNA, 219 bp, Saccharomyces pastorianus
caattcaaaaacatcgtcgctgttctagccacagtcactgctatacaagctgccaactcgactaccagtccaaacaacactattccaaacaacaccacccctaacaacaccactcccaacgtgaccacgaccgtctcgaccggggccgccgttgccaactccatggcagctggtgttttcggcgcagccattgctgccggtgtagccttcttgttctaa

SEQ ID NO: 174123 - DNA, 1623 bp, Saccharomyces pastorianus
tcggttttagaggcctccactaagatgtccacttctccaagtgggaaagaggaagtcaagcaaactcctgaagtaagagaacttagtccggatataccaaacaagcccatcattgcttactggacggtaatgtgtctctgtctcatgattgcctttggggggttcatctttggttgggatacaggaaccatttccggatttatcaaccaaactgacttcaagagaaggtttggccaagagcagagagacggcagctatcaactatcggacgttagaacagggttgattgttggtatctttaatataggttgtgcagtgggagggttaacactaggacgcttaggtgacatttatgggcgtagaattggcttgatgtgcgttatcctggtgtacatagttggaattgtcatccagatcgcttctattgacaagtggtaccaatactttattggtaggatcgtttctggaatgggtgttggcggtgttgctgtattgtctccaactttaatttcagagatttctccaaaacacttaagaggcacttgcatctctttctaccagttgatgattactcttggtatattcttaggctactgtaccaactacggtactaagaagtattccaactccattcaatggagagttcccttggggttgtgcttcgcatgggccatcttcatgatagttggaatggttatggttccagaatcgccaagatttttagtcgagaaggggagatatgaagaagcaagaagatctttagcaaagtcaaataaggtcacagttaccgaccccggtgtggtttcagaggttgacgcaataactgctaatatggaagcggagagggctgctgggaacgcaagctggagcgaactgttctcaaacaagggagcaattttaccaagagtcattatgggagtcgtcattcagtccttacaacaacttactggctgcaactactttttttactacggtaccaccattttcaacgcagttggaatggaagactctttcgagacgtccattgtgctcgggattgtcaactttgcatccacctttgttgcgctatacatcgtcgataaatttggacgccggaagtgtttattgtgggggtctgcatcaatggccatctgttttgtcatatttgccacagtcggtgtcacaagattatggccacatggaaaagaccagccatcgtcgcaaagcgcaggtaatgtcatgattgtttttacgtgttttttcattttctgttttgctattacttgggccccaatttcctacgtcattgtagcagaaagttacccattaagagtgaggaatcgtgctatggctattgcagttggagcaaactggatgtggggctttttgatcggctttttcacaccctttattactagagccataggtttctcttatggctacgttttcatgggctgtttaatcttttcctacttttatgttttcttctttgtttgtgagacaaagggactaactctagaagaagtcaacgaaatgtatgaagagaggataaagccatggaagtctggcgactgggtaccaagcgctaagaggttagaacaactaacagatggtaccccgctagacacagaggatattaaatag

SEQ ID NO: 174124 - DNA, 114 bp, Saccharomyces pastorianus
tccgataggcgtaagtttgaaaaagcaaactttgacgagtttgagtcggctctaaataacaaaaacgacttggtacattgtccctcaataactttatttgaatcgttcctttag

SEQ ID NO: 174125 - DNA, 81 bp, Saccharomyces pastorianus
gatcaagctgtcgatcatattacaaacgcttggcatgttccagtaacagcacagattacagagaagcaactgaatcaatta

SEQ ID NO: 174126 - DNA, 234 bp, Saccharomyces pastorianus
gtagtggaagaggtagtggaagaggtagtagaggaggtagtagaagaggtagtggaagaggtagtagaagaggtggtagaagaggtggtagaagaggtggtagaagaggtagtagaggaagtcgaggaagaggttgttgaagtggtagaaattgtcgtggctatcatttcagaacttttcatatctgttgacgttctcctagtagttgaagaaatttgggcggaggacaatgaa

SEQ ID NO: 174127 - DNA, 531 bp, Saccharomyces pastorianus
gtttttaatatcctcctcagcactttttttcgactgtctaatttttcatctgatttccttatggtttccattgaggatttcaactccgtttcattgctctcaatcgtactctctagctttttcatcatttctttagacttttcaagctctgctttctcttttgaagattcttcctcaagttttttcagcccttcttcaactttagctttggattcttgtgcagcccgcagctgttctttcaagctctccaggtctcgtttactatctcgctctattgatagaagcttttcgtcatttctagttattttgtctttatatgaaagaatttcatcttgtaagctttttattgtgttttgtttctcttctaaaagctcatcattgcttaaactaaccttctctagttcactcctcgtattatcgatctctttggcttttaattcgttttcattttgtagcctaattaattcatcttccaaagtattgatcttttcagaatattcttgtgtaattgttgaagatccttcattaagt

SEQ ID NO: 174128 - DNA, 246 bp, Saccharomyces pastorianus
gaagcgctttctaatattatttttggacgttatgacggaactttatctgctgcgaagttagttgatctatgtaaaaaagccagaattttgcagtatgctgatagagagattgacttaataaagttaatttgtaaactagtaaagtgttcagtatcagaagccagaagaaaactttcccagggaagcgtgtatctgcatcattcaaaatctaaagtaaacgaaaatatttctaacttccttagatga

SEQ ID NO: 174129 - DNA, 126 bp, Saccharomyces pastorianus
atggatatggaaatcgaagattcaagccccatagatgacctgaagttacaaaaactggataccaatgtttattttggaccctgtgagatattgacacaacctatacttttgcaatatgaaaatatt

SEQ ID NO: 174130 - DNA, 447 bp, Saccharomyces pastorianus
atgcatgataataatggtgctgacctagacgataaggattacggttctgaagatgaagctgtgtctaggagcatcaacactcaaggcgagaacgattattatcaacaggttcagagaggtaaacaagacaagaaaatatctcgtaaagaggctcataagaatgctgttattgctgcaagggaaggaaaattggcggaattggctgaaaatgtctcaggtgatggtaagcgtgccattaattatcaaattttaaagaacaagggtctaacgcctaaaagaaacaaggataacagaaactctcgtgtcaagaagagaaagaaataccaaaaggcacaaaagaaactcaagtcggttcgtgcagtttattctggtggtcaatctggcgtctatgaaggtgaaaagacaggtatcaagaagggtttgacgaggtctgttaaattcaagaat

SEQ ID NO: 174131 - DNA, 447 bp, Saccharomyces pastorianus
atgaatgaacaccaggaaattgttgagaaacttcagaatcaggctttgattgcttcaagattgagcactcaaattcaagagtcagaacacacacataagaaaattactgacgagttagctggaaaacaaagtgaaatattaaaactcgaagaaacaattctatcactaaaagaagatgtattccaagagaagctgaatttaaaaaaactatatggtgatccttctaccgaacttaattttgaaactgttggaaaatcttttccacatataacgaaggaaaagtacgactccttgggtcttgatattctgacagaccttacctatgtgcaatcgcaaaatctaatcaaaaatttattaattgtgttggatatcccattaaaaaccttcttaaaaattgtaccaacaattgtcattcaacttagatgtgagcttacacttctcacaaaa

SEQ ID NO: 174132 - DNA, 612 bp, Saccharomyces pastorianus
atgcctggaaatgactcatcgcactctgatcacaataaaaatatcgctaatctaaagaactctctaataggcaatcagtcaaagggtacagaatacagaaaatcattaattccatattctccttcacaagaacagctccatttggataccgttctccccagcacctcaccaacgtcccaaatcaagtttgccaactcagtcaagcacaaagatgggagagctgcccttggcaaagtcaaaaacctagcagatatggaacatactaggtcttttgaagaagagaatttaaccactgacctgcccgataatagaagtagtgtcgataatgacatttcgttaagaaaagttaaaagcactggcacactgagaaaagtcaaaagcaacgactcttccagtagttctggctctagaaaaagctcatccagttataccaccgcaaatgcttttactggtggcggggttggaatctttagggtgtttaaaagtggaagttcctctgggaacaaatcatctagtaatagaagaagaagtaccggcagtgacgttttagataacagtgatcgtagcggcaagaaaaagaagaaaaagaaaaagtcattgttttccgtttgg

SEQ ID NO: 174133 - DNA, 120 bp, Saccharomyces pastorianus
tggaaaactttggggagagttgaacaactgcttccatgtgccagcctcattttgcgtaatcgagaagttttgttcagagagccaaagcgaggaattgacgagtacgattctttcttttaa

SEQ ID NO: 174134 - DNA, 63 bp, Saccharomyces pastorianus
atgcacccacatcattatgcacggcacttgcctcagcggtctataccctgtgccatttaccca

SEQ ID NO: 174135 - DNA, 243 bp, Saccharomyces pastorianus
tgtacacaacatgagaaatgggtaaatgatgagataattgttgggattccattgttgataaaggctataatattaggtatacagaatatactagaagttctcctcgaggatataggaatcctcaaaatggaatctatatttctacatactaatattacgattattcctcattccgttttatatgtttcattatcctattacattatcaatccttgcacttcagcttcctctaacatcgatgac

SEQ ID NO: 174136 - DNA, 99 bp, Saccharomyces pastorianus
atggaatctatatttctacatactaatattacgattattcctcattccgtttcatatgtctcattatcctattacattatcaatccttgcacttcaagt

SEQ ID NO: 174137 - DNA, 525 bp, Saccharomyces pastorianus
ctatacgcttctaagttattcagcaatctttttggcaacaaagagatgcgtatacttatggttggtctagatggtgccggtaagaccaccgttttgtacaagttgaagttgggcgaagttatcactaccattccaaccattggtttcaacgttgagactgtccaatataagaacatttccttcactgtctgggacgtcggtggacaagacaggattagatctttatggagacactactacagaaacaccgaaggtgttatttttgtcatcgattccaacgatagatcgcgtattggtgaagccagagaagtcatgcagagaatgctgaatgaagatgaattgagaaatgctgtctggttagtcttcgctaacaaacaagatttgccagaagccatgtctgctgctgaaatcaccgaaaaattaggtttacattctattagaaaccgtccatggtttatccagtctacttgtgcaacctcgggtgaaggtctgtacgaaggtctggagtggttaagcaacacttga

SEQ ID NO: 174138 - DNA, 249 bp, Saccharomyces pastorianus
atgaaggaaacaatttacaaagtcctcgtaagtttttatcaatatgtcggtttaggtaaaaagttccatcctagccatgatacagtattaatcattggcggttcttcaaatgagttaggcatcgagctctgcgagacatttatagaagattatcatacaaaggttataaatattgacactatagacagtattaatggaaaaaacgcaaggagaagtgaaaaactgtatacttttatttcttgcaaagat

SEQ ID NO: 174139 - DNA, 369 bp, Saccharomyces pastorianus
tgtcctgtcgaatttcccaagatagtctctggattcgctgaggaagtgaaaatacgtagacaaagttcccaaggacagtacgccgtcgattcacatcctccgaaaagccctgaactgaaacacagaagacagaggtcatcctcttttgttaacggtaaatgcaggaacagggaccttacattgttagataacaagaaagcacaagaaataaacaccaattcacacggccaagacatcggtatcaaaaacttaccaagtcaacgtgagttgttgaatgccaaaaatggaattgattttacgctgatggtggcgggtcaaagtggattgggtaaaaccagacctgcaggcatgcaagcttgcactgccgtc

SEQ ID NO: 174140 - DNA, 168 bp, Saccharomyces pastorianus
tatttgtatgagaggagagtttacgggaatttggcgtatttctttgaagatgacatatgtggtccctcatcttcagagaaacctgtgtctcagttaccattgcattttgaactatggccatatattgaagaagcgcaatcagcctgtggcgatgaatcgttagcgtag

SEQ ID NO: 174141 - DNA, 135 bp, Saccharomyces pastorianus
atggctcatagcgccatctcacatgttccgaaaatttcagctttaagcaatgaaatacaaactgaagtctcacattccggtgaaaaaaactcaagttcaaatcaccatcctcatttccatcatcagcatgggaag

SEQ ID NO: 174142 - DNA, 165 bp, Saccharomyces pastorianus
atgatgataataatatttatagaattgtgtagaattgcagattcccttttatggattcctaaatcctcgaggagaacttctagtacattctacatacctaatattattgccttattaaaaatggaatcccaacaattatctcaaaattcacccactcttcactta

SEQ ID NO: 174143 - DNA, 1212 bp, Saccharomyces pastorianus
atgtgtaatatagagaccctgcggtttatttctttgtggaaatattaccaatttgtgatggacacgtcgtcttcgtcctctttcgtaattgattacgacgaagatatgcatatggcatgtttactatcgttaaatcatgaaactcaaaatcaatctcatattttgacctggaatttcatatttaagaactactgctggagacaccttttcttaggtcaattgccgttgctaatgtctgaacctttcacaaattctaccccaattattgatcctttgttgaacaacgattttgaattgattgattttgaagtaaacttgatgaaatatttgcaaagtaaagatcaacaactatccattgataaaattatacagttaatcaagcttttgaaaaataagaatatcgaggtcagccaaggatgtttaacgactccttcaataattaataatattatggattctctaatctacaggaattcaatgttatatttgaacttttacctcttattgcaatttgagacattgaaaaattatgctaaatttaacgaaattttggaagactttttggagttgtcgagggagaccttgttctttgttttctcgaacttagccaatattaaatttgctggtcatgaattcacattcatcaataaatctattgtggttctgcaaactttagttttaatgcttttggcgctctatcaaaggtcttttgattcttcaaagaggacgaatgatgctaatgaaatcagtgagcaaacagatattcatagtaataacgacaatagtaagagaataaagaataaaaatgttattcatttaattatcaacaaaattgcaatgttgttaagtgattataccaagaattgtaaaaagcaaaataaactcatcgaaaatctgattattaaaattaagacaatctccaagtatatcaaaaatcttgaggagaataaggtaacgactagcgccgattcaaagtattccattaataacggattttctggcatatctgcagagcagttgattaaattaaatcacgagttgagtaaaatttcagaatctctgataaaaacggatttttatgaacagaggaaaaatagcacagtttctaatggagttttaggcgctgcagctcctgttgatagcgacgcaaattcggatactttcggtttaacaaaggagaatttcaacgaagtttttgaggctattcgtagc

SEQ ID NO: 174144 - DNA, 135 bp, Saccharomyces pastorianus
gaaaccctacccgttatccagagcttcagctactcgctttgccgggtcctcagcgcaacgtatacgtcgatgatacaacaagacgcatccaactgtacactgattacaacaagaacggttcatcggagcctcgag

SEQ ID NO: 174145 - DNA, 186 bp, Saccharomyces pastorianus
agcagcagcagcagcagcagcgacaacaacaacaacaacaacaacaacaacatcagcagcagcagcagcagcaacaacaacaacaacaacagcaacaacatcaacagcagcagcaacagcagcaacaacagcagcagcaacatcagcaacagcatcagttgcaggctttaccaagacaacaacagc

SEQ ID NO: 174146 - DNA, 1038 bp, Saccharomyces pastorianus
aaagatggagaagcttctagcaatcattccttatttaataattgcaatttaaagcagtatcagacatttggcacaatgaacacgaaatcacttcaattttacgaaccatacgaggttgaaggtcaaaaatacattaaaatggctgagaagaaggaccttggggtatatgagcctggattaacacaggatgcattcactgccaaggacaggtttgattacaaaggaattatagaaagtatagaaaaatatgggctctgtgtagtcccaaacttcatagaaccatccaaatgtgatcagatattggaggagcttggtccccatttctacaggcacgacgcatggcaaggttctccatttccaaaggaaactacggtagtaacaagggcggtcctccactcgcctaccgtcttgaaggatgttgtatctgaccgtctgttttgcaatatggcaaaccattttgtaaatgagaaaaattacttcatgaccggaaatgtcattaggaagtgttcaagtggtgttcagctgaactccggcattgtctacaaggttggtgctggcactggtgaccaaggctatcatcgagaagaccacatccatcataccattcaccaagcatgtgaccatttcaaatatggaaaggaaacgctacttggagtaggagttgcttttacagatatgaacaaggctaatggagctacacgtgtaattgttggttcccatttgtggggcccacacgattcgtgtgggaagtttgacaagaggatggagtttcatgtaaatgctcgcaagggtgacgcggttttattcttgggcagtctttaccatgctgcaagtgcgaaccatactctagaagatagaattgcgggatatttctttatgtcacagggttacttaaaacaagaggagaatcttcacttcgggacagaccctaaagtcttcaaagctatgtcactagacactttgcaactcttgggattgaaaactagtgagccatattgcggtcacatagactacaaaagtccaggacatcttgcgaac

SEQ ID NO: 174147 - DNA, 198 bp, Saccharomyces pastorianus
cctcaccgtcatcgtcatcgtcatcgtcctcactatcatcgtcctcactatcatcgtcctcaccgtcatcgtcatcgtcaccgtcctcactatcatcatcatcatcctcagtgttaccgtcatcatcctcagagtcctcatcggtatcatcatcttcattgtcctcaccatttcccacctcttcactttgttgatctg

SEQ ID NO: 174148 - DNA, 324 bp, Saccharomyces pastorianus
atgtggacaaacactttcaaatggtgcagcaaaactgagaaggagaccactactgcagacgccaaggtgtgtgctagcgtgcagggcctgaaggccctgcagcagcagattatggatagcaccactgtgcgtgggtccgttaataacacgatgactccaggcgggattaaccagtggcatttccacaataagcgtgcgaacaaagtgtgcacgcctacagtactaatccatgggtacgctgcctcgtcgatggcgttctacaggacgtttgagaacctgtcagacaacattaaagatctatatgccatcgacctgccagccaat

SEQ ID NO: 174149 - DNA, 105 bp, Saccharomyces pastorianus
aaggatgtaatggcaacaacaataaatgagctgagtgttacgcaaaaaggacttataatgggagtacaagaagaactattaacgtcatcagggatattcaactga

SEQ ID NO: 174150 - DNA, 237 bp, Saccharomyces pastorianus
caaatcaaaaacattgtcgctgttctagctacagtcactgctatcaacgcccaagttggcattgaacctaacgccactactccaaatgctacgcagccaaatgctacgcagccaaatactactcttcctaccgcttcggtgactacgacagtttcgattggcgaagccgtagttaataccatggcggcgggtgcctttggagcagcaatcgctgccggtgttgccttcttattctag

SEQ ID NO: 174151 - DNA, 165 bp, Saccharomyces pastorianus
ataagtacactttttctgtgcttcattatcgtagcgataggtatatcactcatcgtaagtgtggacgtagcgatggaggtttctgtgccattaccaccacaaccattctactcttgtagtgatgccgccaacgtggaattatgtggtatcgttgttatctgccgt

SEQ ID NO: 174152 - DNA, 282 bp, Saccharomyces pastorianus
acgaataaaatttgtaagcacctgatccaatccttattattgagcaagagacgtcttgtttctgtactctttgataactatcaaggcgacatgaaactaaggtcatctccatctgccattcctctagttccgtcaacgaaaattcttcaagctatggaggcccggaacgacattgttgacagtctgatcatcaatagtcacgcaacggaaagtgatcgccggactttaggagaccatgaggttagacaatgtgaggataccaacttcggcttcaaaatttga

SEQ ID NO: 174153 - DNA, 201 bp, Saccharomyces pastorianus
gcggaaggcgccaaggtcgtcgtcaacgatcccggcgtggccgccgacggcgcgggcaccagcgcggcgcctgccgaggaagtggtcgaggagatcaagaagcgcggcggcacggccgttgccaatttcgagtccgtcgccgaagcgatcccggcgagcaagatcgtaaaggccgcgaccgaccatttcgggactctagag

SEQ ID NO: 174154 - DNA, 276 bp, Saccharomyces pastorianus
tatataccactctcaaacttaccctactctcacattccactccatgacccatctctcaccatcagtaccaaatgcattcgcatcattatgcacggcacttgcctcagcggtctataccctgtgccatttacccataaagcccatcattatccacattttaatatctatatctcattcggcggccccaaatattgtataactgcaccatatactaaccactcaatttatacacacttatgtcaatataaccacaaaatcaccaccaaaatcacctaa

SEQ ID NO: 174155 - DNA, 351 bp, Saccharomyces pastorianus
gatatccttagaaaaataattattccaaagaggaatacaaatatttactccagttcagtgtcctcaccaaagtcaccaaaagcatatcctaaactaccagatattcagaatttaaacttttctgcaacacctgatgaagctcgcgattggattgcggtaaaatgtcacttgaacagagcaaggactcttaccaaatatgacaaacatccgaggtacatgagagctctcgaagaaaatcgcgacttgatcttacatcctcaagattcgatttataacgggctaaataccaatgaagtcaaaggtaatacaaagcccggtttggtcgatgtggaactggccgaattaacatag

SEQ ID NO: 174156 - DNA, 252 bp, Saccharomyces pastorianus
atgcacggcgcttgcctcagcggtctataccctgtgccatttacccataaagcccatcattatccacattttaatatctatatctcattcggcggccccaaatattgtataactgctcttaatacatacgttatacctctttttcaccgtatactaaccactcaatttatatacacttatgccaatattacaaaaaaatcaccactaaaatcacctaaacataaaaatattctatccttcaacaataataca

SEQ ID NO: 174157 - DNA, 114 bp, Saccharomyces pastorianus
ccagcagcgattgaagttaatttgaccatggtatttgttttgtttgttagtgctgatgtaatcttaacaagaaatagtgaaatgaaagcgcatacctcaaaggcatatagttga

SEQ ID NO: 174158 - DNA, 96 bp, Saccharomyces pastorianus; identical to SEQ ID NO: 173641

SEQ ID NO: 174159 - DNA, 99 bp, Saccharomyces pastorianus
atggccttggtctctagaaggtcgacaagatcggaaagcacctcaattacaaaggaagagcatacaggagaaggttcattgaccaaggtgttcttccgt

SEQ ID NO: 174160 - DNA, 132 bp, Saccharomyces pastorianus
ttttatggaagcttcaataaatgcgtgactggctatagttgtcggatggcaatccattattatgtataccgtattattaagagtgcaactaggcccgactataaatctaacactcagatccttgtactgtaa

SEQ ID NO: 174161 - DNA, 189 bp, Saccharomyces pastorianus
tcgcttaaaacgttactgtgtacgttgttgactgtgtcatcagtactcgctaccccagtccctgcaagagacccttcttccattcaatttgttcatgaggagaacaagaaaagatactacgactatgaccacggttccctcggagaaccaatccgtggtgtcaacattggtggttggttactttcttga

SEQ ID NO: 174162 - DNA, 768 bp, Saccharomyces pastorianus
atgtacattgaaaaggtcattgtaactgattattctaccggtaaaaagtacacatatggtgaccaatctggttcttgggaatctattgaagctgacggtggttctatttacggcaggtatgaccaagcccaagaagatttcgcagttttagccaacggtggtagtatttccagcagctctacatcctcttctactgtatcttcctcggcgtcttccaccgtgtcttccactgtgtcttcctcggtttcttccactgtatcttcttcgtcttctgtatcttcctcttcatccacatctccatcttcttcgaccgctacttcatctaaaacacttgcttcctcatcagccaccacatctagttccattagttcactcgaaaagcaatcctcctcttcatccaagaaaacagtggcttcctcttctacaagtgagtccattatttcctccactaagacccctgccactgtttcctctacccctgccactgtctcctctaccactaggtctacagttgccccaactacccaacaatcttccgtatcatcggacagtcctgtacaagataagggtggtgtcgcaacatcaagtaatgacgtgaccagttctactacccaaatatcaagcaaatacacatctacaatccaaagttcttcctccgaagccagctcgacaaactctgttcaaatttctaacggtgctgatttagctcagagtttaccaagagaggggaaacttttttccgtactcgtagctttactagccttgcta

SEQ ID NO: 174163 - DNA, 150 bp, Saccharomyces pastorianus
cacacggatgctacagtatataccactctcaaacttaccctactctcactttccactccatcacccatctctcaccatcagtaccaaatgcactcgcatcattatgcacggcacttgcctcagcggtctataccctgtgccatttaccca

SEQ ID NO: 174164 - DNA, 1641 bp, Saccharomyces pastorianus
ggttgtccaggacacgataaccgagattttgagttttggcaaacaaattgtcctggtgaacatatcaagacgtgcatagcacctttttttgacgatgcttcaaaagtaactgaacaggaaagacaaagaataattgatactgtcccgttcacatctactgacggtgtcctaaccaaagaatgcggagaacactcaggagttctcgctgcagtggcaaggaaatcgataatggggatgttgaatagcgaaggactgtctaagagcgtcgttagatacaagattagagattggctgataagtagacaaagatactggggtactccaatacccatcattcactgcgacaactgtggacctgtccccgttccagaaagtgatctacctgtcaagctaccagaacttgaaggcttggatacaaaagggaatccgctgtcaacaatcgatgaatttgtaaatgttgcctgtccttcgtgcgggagccctgcgaaaagagaaactgacaccatggatacttttatcgatagttcttggtattatttcagattcttggatcccaaaaacacttcaaaaccatttgatcgtgaaattgcaagtaaaaatatgccggttgatatttatattggtggagtagaacatgctatcttacacttgttatactcaaggtttattgctaaatttctcggatctatcaatgcatggagcgaccctgctggcatcttcgaaccattcaaaaaactggtgacacaaggaatggttcaagggaaaacctatgttgaccccgattctggtaaatttttgaagcctgacgagttaacctttgtaaatgactctccagatggcaacacagtgattattaaatcaaatggcaaggttccggtagtctcttatgaaaaaatgtcgaaatctaaatacaatggtgcagatccaaatgaatgtattttaagacatggacctgatgctacgagagcacatatcctcttccaaagtccaattgcagatgccctgaattgggatgaatccaagattgttggtatagaacgttggttgcagaaggttcttcatttgaccaaaaatattctcagtctcgagaaggatttggcaataagtaaagactacaagaccccgaccgacttaaatgatgcagaagtgaaatttcacaacgatttccaacgcttcttgaaatcaattacggaatcatttgaagttaatctatcgttaaacactgtaatatctgattatatgaagctaaccaatattttagaaagtgcattgaaaaaaggtgaagtaaggaatgaaatgatagtacagaatttacaaaagttggtaaccgttatatatcctgctgtcccgtcaatttcagaagaagctgcagagatgatcaactcccaaatggaatggaaccaataccgctggccagaagttgagcgcactactgagtccaaattcaaaaagtttcaaattgtggtaaatggcagagtcaaattcatgtacacggctgacaaaaactttttgaaattaggtagggatgctgttattgaaactttgatgaacttaccggaagggagaatgtatttgatgaataaaaaaatcaaaaaatttgtcatgaaattcaatgtgattagtttcttattccacaagtaa

SEQ ID NO: 174165 - DNA, 612 bp, Saccharomyces pastorianus
tcagcaaaagatcatccgaaggtgaaagaaatcaagactgttgtgctggtacctcaattaggccacgtaggatccgttcagataagcaacatccctgacatcggagaccttccggatactgaaggccttgaactactcggttggatccatacccagacagaagaacttaaattcatggctgcgtctgaggtagcaactcattctaaactttttgcggataagaaaagagactgcattgatatttcaattttttccaccccgggatcagtatcattaagcgcttataacctgaccgacgaaggttaccaatggggtgaagaaaataaggatataatgaacgtgctatcggaagggtttgagcctactttcagcacgcatgcccaattacttctctctgaccgtatcacaggtaattttataattccatctggaaacgtttggaactacacatttatgggaacagcatttaaccaagaaggtgactacaattttaaatacggcattcctttggaattctataatgagatgcatcgtccagtacactttttacagtttagcgaattggcgggggacgaagagttagaggccgaacaaatcgatgtatttagctga

SEQ ID NO: 174166 - DNA, 267 bp, Saccharomyces pastorianus
cttgtcatccaattcaaccaacttagaggtgaagtgcttagattcttgctcgaaatctggatggtggtaatccaaaccaataattcttttcaagttggcgacagtgttcttgatgttggaagtctgcttgttcttaccagtttcacccaagtatctgttctttggaccaaaaccaacaacagatggggtggaacggttagagacttcattaacgacaatgtcgatacctctgtttctagcaacggccaggacagagttattgttacc

SEQ ID NO: 174167 - DNA, 126 bp, Saccharomyces pastorianus
atggaatctatatttctatatgccaatattacgattattcctcattccgttttatatgtttcattatcctattacattatcaatccttgcacttcagcttcctctaacttcgatgacagcttctca

SEQ ID NO: 174168 - DNA, 159 bp, Saccharomyces pastorianus
cgcggtcattttgttagtatctcttctcaacttgggcagcacaatttcacgatatttaacaggtatcatttgaagaaaagaatcgttttccagatactcgtcaattcctcgcttcggttctctgaacaaaacttctcgattacgcaaaatgaggttggc

SEQ ID NO: 174169 - DNA, 765 bp, Saccharomyces pastorianus
atgactttcccctacgattcccatgtcaagttcccagcatttatttggcaaacttggtccaatgatgaaggtcccgagcgtgttcaagatataaagggcatgtgggaaagcaagaatccgggctttgcgcacgaagtgttgaaccatgacgtgataaacgcactagtacaccactacttctactccataccagaaatcctagagacttacgaagctctgccctccatcatcctaaagatagattttttcaaatacttaatactgttagttcatggaggtgtttatgctgacatcgacacgttccctgttcagccaattccaaactggattcctgaagagttgtcgccatccgacattgggttgatagttggagttgaggaagacgctcaaagagctgactggagaaccaagtatatcagaagacttcagttcggtacttggattatacaagcaaaacctggccaccctgttttgagggaaatcatttctcgaattattgagaccactttacagagaaagagggacgaccaactagacgtcaatctaaggaatgatctgaatattatgagttggacgggttctgggttgtggactgacactattttcacgtatttcactgactttatgagaagtggtgtcagggagaaggttacatggaaattattccataacctaaatcaaccaaaattgctaagtgatgttctggtctttccaaaattctcctttaaatgtccaaaccaaatcgataatgacgatccacacaag

SEQ ID NO: 174170 - DNA, 663 bp, Saccharomyces pastorianus
atgctaacaattgcaaggctggggttcttttataacgaccaactttatgttaaggagaagctggaagcagtcaattctatgattgaaaaaggtggtgactgggaaagaagaaatagatataaaacatactatggtatccactgcttggccgtaagaaactttaaggaagcggcaaagttattggtcgattctctagcaactttcacctctattgaattaacttcctatgaaagcattgccacatatgcatcggtcacaggtttattcactctggaaagaacagacctaaaatccaaagtcatcgattcacctgaattgttatctttaatctcaacaactgccgcactacaatctatctcgtcgttaacaatttccctttacgcgtccgattatgccagttactttccatatcttttggaaacatatgcaaatgttttgattccatgtaaatatttgaatagacctgcagatttctttgttagagaaatgagaagaagagtctacgcacaattgttggaatcatataagactttgtcgctgaaatctatggcaagtgcatttggtgtatcggttgcgtacttggatcacgacctgggtaagtttattccaactaagcaaataaattgtgtcattgctagcgttactgggatcgtagagaccaac

SEQ ID NO: 174171 - DNA, 303 bp, Saccharomyces pastorianus
aacaacaacagcagcaacaacaacagcaacaacggcaacgacaataacagtaacaatagcaataacagttactatagtaataatgaacatgcacccgtaaatggagctgctatttcagaacatactaccgatggtgactcgaacaatcagtccaactcaagtacatatgatgctgctgccaccgcatataatggaaataccgggttgactccatacataaatactgctcagacaccactaggcactaaattctttaatttttcgactgatatttcaggagaaaaaaattcaagcaaaatataa

SEQ ID NO: 174172 - DNA, 318 bp, Saccharomyces pastorianus
ctatgttcatctgccctcgaggaaactaaaccgaactatcgattaaataagttactgaaaatattcacaacgaaagaaaaaatgtctacccttttgaagtccgctaaatctattgttccattaatggaccgtgttcttgtccaaagaattaaagcacaagcaaaaacagcttccggtctatatttgcctgaaaaaaatgttgaaaagctaaatcaagctgaagttgttgccgtaggcccaggtttcactgatgctaatggcaataaggttgttccacaggttaaagtaggtgaccaagttttgattccacagtttggc

SEQ ID NO: 174173 - DNA, 2121 bp, Saccharomyces pastorianus
agctatccgttttcagcacaactcgggtaccacatctcattgatagttgctacgataacaagattttaccatatagataaaccaaatcaagtaattttcgatgaaactcattttggtaaattcgcatcatattacttagaaaggacgtatttctttgacttacacccaccgtttgccaaattaatcatcgcattgactggatatcttttcaattacgatggaagtttcaaatttgatagtattggcgattcttatgacataccagatcatgcgccgcctttcgttgcatatcgctctttgaatgccacttgtggtgtaattactgtcggtgtggtctacaaaatcatgcagcgtttagggttcaagctattgacttgtagtactagtgctttgttggtcgcccttgataatgggcatattatccagtcaagaatcatcactttggattctatcttggttatgtgtataagtttgaccttttactcttacattagattccacaagtgccaatccagggcagcgtttacccgtgaatggtatacctggctttatcttactggtgtatcactttccctggttatatcaacgaagtatgtcggtctcatgacatacatggcaatcggaacctctgttttgagaaacttatggcgtatctcagatattgagaggaaactgagcaaaagagttgtaacaagacatttttttaagagattgaacggattaatatttggacctctcattatatatctattttggttttgggtgcatttcacaattctaaccaaatctggccccgacgatgaattcatgtcagtaagatttcaagaaacattgctcaattcagcggtaggtcacccacaactaaactatcacgatatagttgtcataaatcataaacaaacgaatacatttctccactcttgtgatgttcagtaccctttagtttatgaagatggtagggtatcaacagagggtcaacaagttacttgtcacgcattcaatgacacgaataatgaatgggaagtcatacccactaaagttttttcaccggttgataagattcagcctgttcttttgaacgatacagttcaattgaggcacgtaaagacaaatacgctattactgacacatgatgttgcttcacccttagacgctacgactgaagaggttactacagtttcctttgatgcaggtatgaacgacttttatcaggagacattatttcaattgaagcctattttatctaatgatgtgggacttaaaattagagagaaacgtacaccttttcgacttttccatattgacaccgaagtagtgctttggacacagaacgatactttgttaccggagtgggggtttgaacagcaagaagttagtggtgtgaggaaagccaggtcattcgaagacaattggattattgatcaaatcttaacggaacatgaacaggaagatcacgataatggtgacgataaattattgaaggaggtagcgttttttgacaaatggtcagaattacaaaaatctatgctgatacataacaatctgatccctaaataccatccatatgcatccgaaccatatacctggcctgcgagtgtatcaggaatatcgttctggtcagatgcttcgacaaggaggcagatatattatatcggaaacataatagggtattggtttcaaattatctcgataatgctgtactgtggtatcatcgttatggaccaattaactagaaaacgtggagttttcatcttgaaaagtaaggtcagggataagctgtatggtcctttactatttttgttcatttcgtggtcatggcattattttccattttatttgatgtcacggcaaaagttcttgtaccattacttgccagcccatttgattttgagtttatttgcacctgggttatgggaaatactattaagtgatttcaagaatgtagacaagtcaagagaggaggaacgtgacgttcaatcggaggacggtccaaaagtgaatgatacaaaattatgttgcatatttggcattttaatagccatgctatttggatttttcttttttttttcaccgttgatatatggtaatcgtggactgtcacccatgcagatacagaataga

SEQ ID NO: 174174 - DNA, 291 bp, Saccharomyces pastorianus
  modified_base (200)..(252): a, c, g, t, unknown, or other
atcaaggttgttacagaattgcgttctaaacatgagaatggtgaattgaacgatggtatatctgtcagacgatccggtactacaaacacttatgaagaacatattttacaacctgtactggttagcacaagcgcaatcactttggcttccgaatgtgttaaatcgatcctacgtattgatgatattgcattcagtcgttnnnnnnnnnnnnnnnnnnnnnnnnnnnnnnnnnnnnnnnnnnnnnnnnnnnnnatagtgtacttttctattaaacaaaaacataaaacataa

SEQ ID NO: 174175 - DNA, 174 bp, Saccharomyces pastorianus
attctcaattttctcaacagcagccatacaatccatcgatatcatccttcggccaattcgctgcgaatggattccattctaggcaaggatcagtggctagcgaggcaatgtcccccagtgcgcctgctatgtttgccagcgcatctacaaacccaacgagtaacgtacagcaag

SEQ ID NO: 174176 - DNA, 831 bp, Saccharomyces pastorianus
atgctaacctctccttacacacaagatgaaatcatcaatcatgaaatgaatttcttgaaaggcagactactggaattgcaagaaattacaggtaagaaaattacgggagtaaatcttgatctcaagcaggattcctcagcgcaaatgcagtcttcacactccaatagaaaccaagaggagtttttgacaattaagaaaagaaaactgagtgaagacggcgttacggacggggacggtaagccaattccagagagtgaaagaagacctcatcttaatgaatttaaggatttagatcctcaatttttggatactaataaagtttttaatgtgtttaattctgctatttcagaagaaggtagaaacagattatggctgttaccaaaaaatataaataaaagttctatcttccagattcagtatttgattgaacgtgatcctttcctattcaaattcttcaatgacttgaatatattaattgaaacgcaatttaatggacctttgcacgatttggtagcaagccgtaacagtattgagcgcaacagtggcatatctcaaatattaaagtttccttcacaatcgataacacagacccttatcaacaaatacttatccacgataacggaaacgaattcaatacttccaatattaaaaccaaagagactattacccatagttgagcagctttttccttctaacaccattaataagccaaattctaaagattttgaaactatttttcaagttttcagtgtgaccaatgatcagctactaaatctaggatttattactctctgtctcctgattctttttgaatcgttgaattctacggtt

SEQ ID NO: 174177 - DNA, 129 bp, Saccharomyces pastorianus
catacggatgctacagttatataccatctcagctttaccctgcccattctcactaaatcagtaaatatgcacccacatcattatgcacggcacttgcctcagcggtttataccctgtgccatttaccca

SEQ ID NO: 174178 - DNA, 84 bp, Saccharomyces pastorianus
atggtctctagcgggatcgaaccgctgatccccgcgttattagcacggtgccttaaccaactgggccaagagacctatatcttg

SEQ ID NO: 174179 - DNA, 282 bp, Saccharomyces pastorianus
ggtgagccttgcttatttttgttttgctctttcagttttttcagttcttcctttcttttcaatcgcagtgcctcctgttctagtttctgtttagctttattttccttttgcagttgtaacttctgttctttggccagttttttctgcaattgttgctttttcctctcctccattctcgttttcttggcctctgcatcgttcttccttttcagttccttttctcttttccttgaatcttgttcctcctgccatttttgttcaattttgtcattcttcagtatg

SEQ ID NO: 174180 - DNA, 387 bp, Saccharomyces pastorianus
cacgggtacgctctgcagacgatagtcgtagccaattttgaaagcccaacgggaaccaaacacaggagaaaaccaatatatgcgctcgttgtacccgtttcaaacaacggaagcaaaataaatagaagtccgccaacaaggatcataaaaaacgtaaaaataaaacttagaaaccgcagtggctatcaaacatcaatcacatatcatcaacacaaccggcttttcacgaatccacgccccagcaagacgtacggtataaaaggcgttcacgtaaacttttcatccagcaagaagaggtcctctttcatactcgcctccaattccaacaatggttctccaataccttcaagaagcagcaaaagaactccgtttctcaacacggcgtct

SEQ ID NO: 174181 - DNA, 63 bp, Saccharomyces pastorianus
cactcacatcattatgcacggcacttgcctcagcggtctataccctgtgccatttacccataa

SEQ ID NO: 174182 - DNA, 1008 bp, Saccharomyces pastorianus
atgacaagagacaatttagcaaggtacttcgtttgcggagacgttaaagctgatttctatgggataaatatgtacgaatggtgtgggtattccacgtatggtactagtggatatagggaaagaacgaaagaatttgaaggttatccaattcccgtgtttttttcggaattcggctgcaatcttgtaagaccaaggccattcactgaagttagtgccctttatggcaataaaatgtcctctgtttggtctggtggccttgcatacatgtattttgaagaagaaaatgaatacggagttgttaagataaatgataatgatggagtggatattcttcctgatttcaagaatttgaagaaagaatttgcaaaggcagatcctaaaggcattacagaggaagaatacttaacggcaaaagaaccaactgaagtagaaagtgttgaatgtccacatattgctgtcggagtttgggaggcaaacgaagaactacctgaaacacctgatagaagcaagtgcgcctgtttggatgagattttgccctgtgaaatagtcccttttggtgctgaatctggaaaatatgaagaatattttagttatttgtgctctaaggttgactgttccgatattcatgcaaatggcaaaaccggtgagtacggtgaattctcagattgttctgtcgaacaaaaactttcccttcagctgagtaaattgtattacaaaatcggcgcaaatgatcgccattgtcctctaaatgataagaacgtttacttcaacttagaaagcctgcagccccttacaagcgagtcgatctgtaagaatgtttttgattctataaggaacatcacatacaatcatggcgattattcaaaatcaaatccatcgcgtagcaaggaaagtttgaacgtaaagtacccatcgagtgaagagagagaaaatgacggcaccatcgcatttaaaacttcagggtttgttatacttctaatttctataatagctgctggaattcttcta

SEQ ID NO: 174183 - DNA, 303 bp, Saccharomyces pastorianus
ctcttgttctttttcttggcggccttagcagcttccttagccttctttttgtcagcttttgcggaggcgttagccttggcttcagattcagctttagccttggcttcagcttcggccttggccttagcttcagcttcagctctggcaccggcttctctttcccattttcttctttccttttccttcttctcttcttctttgaacattttaatacggggatcttcactgacagctctttcaacaagtttgaccaatctagcgttatcagcagtcttcttcttgtctcttgcggccttgttcttt

SEQ ID NO: 174184 - DNA, 441 bp, Saccharomyces pastorianus
atgccaagtttgtttggattgaccatcactacgtggattttatctaatatatccgataaacctctagaacctgttgagggtaagaatagaattaaggtatacgatggtatatatcaatcgttggcaggtcaaatgagcagagtcggtataccgagccaaagaatcccattggctttgaaggatgttagttaccttgtcgaagaggtgtttaagggtaaatctccaattagcggcatttccactagactaactttaaccaaatgggatccctctaagcctatctctttgcaaaatgtggtagtactaactaaaaacgaacagaaagtgcacgaagaccgtgtcttgaagggtaaggaaagcttacaagatgtttatgatgccaaagttctaaaactggtttcacaaagattcagagaagaagcttattactctcaattcaga

SEQ ID NO: 174185 - DNA, 456 bp, Saccharomyces pastorianus
ctaactcgtttaaatgacgagctcccaaagtatgaagacttgttcccaaaaaaacccaaaaactgggaacttggtagcaaatctgtggagattgggccagataattctgcccaaatgaccgtggatgattctcaaacttcttctgaagacgatgaattagaagctttacaggtcgggttcaacacaatcttttccaagaagcaaaactttcagaatgataagatgcttctattcttttggatccccttaactttagtactcttattatgtttcacattatcgaatttggggaaagatgatgatatgtttcataatttatccaaaattgttcaggaatatttaagaattggtttagccaaggtactactaggcaacgaaaggatgaaaacctcttttaaaatgcagttatcgaactttcaaaacaataacattctaaaagacatgcgagtcaattaa

SEQ ID NO: 174186 - DNA, 771 bp, Saccharomyces pastorianus
gatggcttagttcatatttcagaaatgtcagaccaaagaacattagatccacatgatgtggtgagacaaggccaacatatctttgtcgaagtgataaaaatacaaaataatggaaaaatatcgctctccatgaaaaatattgatcaacatagtggagaaatccggaaaagaaatactgaaagtgtcgaagatagaggtaggtccaacgatgctcatacaagcagaaatatgaaaaacaaaattaaaaggcgtgctttgacttcaccagaaagatgggaaattcgccaactaattgccagcggtgctgcttccatcgatgactatcctgaattgaaggatgaaatacccataaatacttcctatttgaccgcgaaaagagatgacggcagtatcgttaacggtaatacagagaaagtggactcaaaattggaagaacaacaacgagacgagacggatgaaattgatgtcgagctgaatacagatgatgggcccaaatttttaaaggatcagcaagtcaagggggccaagaaatatgaaatgcctaaaattacaaaagtcccgagaggatttatgaatcgttcagcaatcaacggctctaatgcaatacgagatcatagagaagaaaagttaaggaaaaaaagagagattgaacaacagattaggaaacaacagtcgtttgatgatcctacgaaaaacaaaaaagattccaggaacgaaattcaaatgttgaaaaaccagctgattgttactgaatgggagggatcctctaga

SEQ ID NO: 174187 - DNA, 789 bp, Saccharomyces pastorianus
  modified_base (774)..(774): a, c, g, t, unknown, or other
ctgataaaggagaaatctgaggtgcctttggggcacgttcataaaatttggaggaaagtcgaatcacctcccgaagaagcactgaagcttcttctagccctgtttgaaattgaaccagagtcgaaggccattgtagttgcaagcacaaccaaccaagtggaagaattggcctgctcttggagggagtatttcagggtggtatggatacacgggaagctgggtgctgcagaaaaggtgtctcgcacggaggagtttgtcactgatgggagcatgcgagttctcatccgaacgaaattagtgactgaagaaattgacattaaggaattgaagatggtgatcatgcttgataatagacttaatattattgagctcattcaaggcgtgggaagactaagagatggaggcctctgttatctattatctagaaaaaatagttgggcggcaaggaatcgtaagggtgtattatcaccaattaaggaaggctgtataaccgagcaggtacgtgagttttatggacttgaatcaaagaaaggaaaaaagggccagcatgttggatgctgtggctccgggacagacctgtcggcagacacagtggaactgataaaaagaatggacagattggcagaaaatcaggccacagcctccatgtcggttgctgcgttaccgtctagttcccaggagagaaatagcagtgacaggtgcagagagtattgcagcagtgatgaggacagcaacgcgggcgttcatgttagtagacctgcaggcatgcaagcntgcactgccgtcttt

SEQ ID NO: 174188 - DNA, 486 bp, Saccharomyces pastorianus
atgctggcgctgaaagcggaagaacaagctataagggccattcaatcaataggctgtacaggctccgacggaacctcgaattgtggcttcccaccaaatgtgctgtactgtcagcctcagattggctgggtcggatacactgaggaggggttggcaaaggctcgcatcccatatcaaaaaggcaaggttttgttctcacagaacgttagatataacacgttattaccacgggaagagaatactacagtttctcctttcattaaagttctgatagattctcgtgacatgaaaatactaggcgttcatatgataaacgacgatgcaaatgaattgctgtcgcaagcatcgatggcggtgtcgcttggccttaccgcccatgatgtctgcaaagtaccgttccctcatccgagcttatcggaatcgtttaagcaagccgtccagttggcaatggcaaatggaacatcacctggcgtacatgtccgggaa

SEQ ID NO: 174189 - DNA, 906 bp, Saccharomyces pastorianus
atgcttgcaaactgctacaaggatgatgaaggtatacaagaagatgaaatcaaaccaactctagatcgtattagggagcgtatggtttcaagtttcagccaatctcatcgcgatttttacgaacgtgaatttgaattcttcgacgaagtaactggcatatctggtaagttgaaaccatacataaaaaaaagtaaggctgaaaagaaacataagatcgatgaagaaatgagcaaaattgaggtgaaacctgatgtttatttaccttctaatcctgacggtgtagttattgatattgatcggaagagtggtaagccacttcaatctcacgcaaaggcgccttttatggcgacctttaaaataaagaaagacgtaaaagatcctttgacaggtaaaaacaaggaagttgaaaaatggcaagctgctatcttcaaagtcggtgatgactgtaggcaagatgttctagcgttacaattgatctcgctatttagaaccatttggtctagtattggcttggatgtctacgtttttccctacagagttactgcgacggcaccgggttgtggtgtcatcgatgtgctacccaattcggtatcccgtgatatgttaggacgtgaagctgttaatggattatatgaatatttcactagtaaatttggtaatgaatctactatcgaatttcaaaacgcacgaaacaactttgttaaatccttagcgggatatagcgtaatttcgtatttgttgcaattcaaggatagacataatggtaacattatgtacgatgatcaaggacattgtctacatatcgattttgggtttatttttgatattgtcccaggtggtatcaagtttgaagcagtaccattcaagctgacgaaagaaatggttaaagtgatgggaggttcgccc

SEQ ID NO: 174190 - DNA, 177 bp, Saccharomyces pastorianus
caaatatatgacctatttcccaataagcataatatccaattcacagattctcattcacaggagcatgatacttcgtccagcattgctaagaatgatacagacggaagtataagtataccaggtagtatagacactggcattttaaagagcattattgaggagcacaggttggtatga

SEQ ID NO: 174191 - DNA, 1371 bp, Saccharomyces pastorianus
atgagagcatatggaaagaggggcccagttctcagaactccttgtagatctaataaaggcttgccatcttcttccgatgttgaatttagtgatgacgatgtaaactccgtgattcctgatgtaagttctaccatttcgagcagtattgcagaccacccgatagagggattattggacgagcctagaaaggctcaggacagctcgtcgtcatttgatggtgcaaatgagaagccctcttcacaactggactcaaaaaggaatgaccaaaacgtcaaaattatcactagcagtgatacctcaatggcatttatgaaagatgaaaagttaagtgcctttaatttccttgatggttcaaaggcatctaagagaaaaagaagaagaacttaccaaaagcatgatgcgaacataacgtcttcaattgaaccagacgtacaagatgaagacagcattacaatgcacaatgaatttgaatcaataaggaaaatatacaatgacatcaatgaattcatattgaagctaccgagagctgacgatgatatactgaataaaatgcttgaaaatgagatgaagatggacgacgctatagagaataatagcatacgcacatccaaagacaaaaaatatggcaaatttagaacaatattaataaacaaaaataaagaaaatgaaataatgggagaagaggtagatcagaaagctaacaccttgtccctaaataacgctgacaacagtaatgctgaaaaagaaggattaacttcaacaaatcactacaacgaattaaaaaatatgggagatacaataaaataccaggatgatattgagtttcttctgtccaattctaaaagtaatgacaatactacggtaccaatcaatgaatactttaaaaaacttttaaatttatccctaatgattattaatgacgaagaattttttcaatatgcgaaaagatatttcaaaaaggaaataattaagcttagttttgcgcaatttagatcggattttcctgaattaatcttattacagggttatttactacataaagttagtgaatcacaatccgatttcccgccaagctttgacaatttctctatcgaattaagtaaagatgatggtaaaatacggacaaaaaagaataagcatattaaaaaactctcacacctaaatttcgaagactttcttcggaagactcaattcaaaacgggactttattattcattatcactctgggaaatgcatggtaatttatcgttagatataatcaagagaatctccatccttgcttcaaataaggacttattcagtcggcacgttaagacttttattcctcttttagaaaaattaataaccgcttccgaattttgccacatgtat

SEQ ID NO: 174192 - DNA, 819 bp, Saccharomyces pastorianus
atgtttccttgtttttcagattctagggacccagatgtagtgatttataaattgcacggttctttatcccaacaaatgagaacctctacattgcagcattttgctcgtgataatgaagccaccaagggaaaacatcttattatgttctgtacagatgtcgcaagtagaggcctagaccttccccacgttggatctgttattgagttggatccaccatttgctgttgaagaccatttacatagagttggtcgtacagcaagggccggtgagaagggtgaaagtttgttatttttacttcctggcgaagaagaaaaatatatggactatatccagccgtatcatccgatgggttgggaattactgaaattcgataaagaaatactaatgccggctttcaaagatgtgaatgtcaacagaaatgataaattcattagaaaagatgagaaatcgtccaaaaataaagacgtgggcgataaagaatatgagtgggataccaatgctacgacatggcatttgaatatagaaagacgagtagtgggagattccgcattcaaaaatttggccgttaaaggtttcattagtcatgtgagggcttacgcaacgcatatctctcaagaaaagaagtttttcaacgtgaagttcttacatctaggccatttagctaaaagttttgggttacgtgaaaggccaaaggctatgggattgcaaagtagtaaggatggtaatagtgaaaagaagccaactaaggaaaactctaaaaataaaatgtttcgtatggctcgtatggcagagaagcaaatagcaagtgagtttaactac

SEQ ID NO: 174193 - DNA, 354 bp, Saccharomyces pastorianus
atgtctcaacatgaagctaatgcgtacttaatcaacaccggctggactggttcttcctacgtatctggtggtaaacgttgcccattgaagtacacaagggccattctggattctattcatgatggttcgttagccaatgaaacgtacgaaactttaccgattttcaatcttcaagtacctaccaaggttaacggtgttccagctgagctcttgaatcctgctaaaaactggtctcaaggtgaatccaaatacagaggtgcagttaccaacttggccaacttgtttgttcaaaatttcaagatttatcaagacagagccacaccagatgtattagccgctggtcctcaattcgag

SEQ ID NO: 174194 - DNA, 339 bp, Saccharomyces pastorianus
gacggccagtgccaagcttgccatgcctgcaggtcattggtacgtgattttagagtaaaaagagtccataacacatcagcagaagatgatggcaactggtctgcagaaagttctgagttagttgcatttggtatcacaaataacggtaagttatttgctaatcaagttcttttggcttcggcagttacttccttggagattaccgattcctttctgttgttcaccacggcacaacacaatttacagtttgtgcatttaaattccaccgatttccagccattgcctttggtagaggagggtgtggaagatgaaagagtgcgtgccattgaaagaggttcc

SEQ ID NO: 174195 - DNA, 1302 bp, Saccharomyces pastorianus
atggaggttaaagctagaatcttaaggcatctacctgctttggtttatgcgtcggttccaaatgacaatgacgatttcgtcgataatctagaatcagatgtccgcgtacaacctgaagcgcgcttgaatattggttcaaagagtaacagcctttctagtgatggtaatagcaaccaagatgttgaaattggaaaatcaaagagcgttattttcccacagtcatatgatccaacaatcactacattatatttcgacaacgattttcttgatttgtacaataacagattgttgaaaatcagcggtgcacctacgctgagattgagatggatcggtaaactgctagacaaacctgacatatttttggaaaagagaacttttacagaaaataccgaaactggtaattcaagttttgaagaaatcagattgcaaatgaaagccaaattcatcaacaattttatttttaaaaatgatcccagttacaaaaactatttaattaatcaactaagagaaaggggtactcaaaaggaggaactggaaaaactttctagagactttgataacatccaaaactttattgttgaggagaagttgcagccagttttgagagctacctataatagaactgctttccaaattcctggagatcaaagtattagagtcactatcgattccaatatcatgtacattagagaggattctttggacaaaaataggcccattaggaaccctgagaattggcaccgtgacgatattgattccaatattcccaacccattgaggtttttaagagcaggagaatattcgaagttcccctattctgtaatggagattaaggttataaaccaagataattctcaaatgcctaattatgagtggattaaagatttaactaattcacatttagttaacgaagttccaaaattttctttgtacttgcaaggtgtggcttcactgtttggtgaagacgataaatatgtcaacattttgccattctggttgcccgatttagaaaccgacatcagaaagaaccctcaggaggcttacgaagaagagaagaaaactttacaaaaacaaaagagcattcatgataaacttgataatatgagaaggttatccaaaatctccgtaccagatggaaagaccactgaaagacaagggcaaaaagatcagagtactcgtcacattattgcagatttagaagatcacgaatcatcagatgaagaaggtaccgcattgcccaagaaatctgcagtcaaaataggggagaaattcaaaacgaatgcagctttcttgaaaaatctt

SEQ ID NO: 174196 - DNA, 162 bp, Saccharomyces pastorianus
atgatgataataatatttatagaattgtgtagaattgcagattcccttttatggattcctaaatcctggaggagaacttctagtacattctacatacctaatattattgccttattaaaaatggaatcccaacaattatctcaaaattcacccactcttcaa

SEQ ID NO: 174197 - DNA, 261 bp, Saccharomyces pastorianus
atggaggagtacgattattcagacgttaaacctttgcccattgagacagacttgcaggatgaactgtgcaggattatgtataccgaggattataagcggttgatgggactcgcgagggctctgatcagccttaacgaactgtcacccagggcactacagctaacagccgaaattatcgacgtgacgccagccttctacaccatatggaactaccgattcaatatcgtcaggcacatgatgagtgaatccgaagacactgtc

SEQ ID NO: 174198 - DNA, 564 bp, Saccharomyces pastorianus
gagggtcttaaaaagaaccatcatttgaggtattatgggagacaacaactgagtctgtttttgaaaggtatcggcctgagcgctgatgaagcgttaaaattttggtctgaggcatttacaagaaatgggaacatgacaatggagaagttcaataaagaataccgttacagcttcaggcataattacggtcttgaaggtaacagaatcaactacaaaccatgggactgtcacactattctttccaagcccagacctgggcgcggagattatcatggatgccccttccgtgattggagtcacgagagattatctgcagaattgcgctctatgaagttgacccaagcgcagatcatcagtgttctggattcctgccagaaaggtgaatacacaattgcttgcactaaagtgtttgaaatgacacacaactctgcatcagcggatttggaaattggcgagcaaacgcatatcgcgcatcctaacctatacttcgaaagatcaaggcaactgcaaaagaaacagcagaagccggaaaaggaaaaactattcaataatggtaataattag

SEQ ID NO: 174199 - DNA, 252 bp, Saccharomyces pastorianus
atgacctcgaataatggagtcgaagacagcagcaaaatgagacaatcttcactcaatgaatttcacgtattcgtatgtgctgcattcctcattaagtggagtgatcagttaatggaaatggatttccaagaaactataactttcttacaaaatccacccacaaaagactggactgaaaccgatatcgaaatgctgttgagtgaggcctttatttggcaatctctttataaagacgctacatcccattggctg

SEQ ID NO: 174200 - DNA, 1875 bp, Saccharomyces pastorianus
gatttatctaacttggacgtttctatagggtctaagtcacatttctcgttccatgatgtgaatctgtcacttgatgatctcaacattccaaacgtgcaaataaacgaaggcatagttgacgagcttgtgttaaaattaacagtttctggcggtgtagaaatcgatgggtctggtttaagatttatcatgacacctttatattccagtggctcacaggaacttcactcagattttttggttaaaagcatccaagatcttacgaattcgatgttacaatttagtgatccattgaccacatataataggtacaaagaagatgacattagctcttcagacagtagtagtgatctcaactctaatatagaagcttcaaaaccagccgcaaatggttcttatactcttcaaaatatgcggaacaaggcccttaatgtagccttagcgaaattgaaaatagcattaaaggacgttaccatacgtttaatagtaaatgatagagatccttccgataacatcgtggaggttcatctagaaagcatacaacttattactacagacgcaaatttacgacatataaacattgaaaatatcaccatttcctcaatacaaaaacaagctgtacccgactctcctgtgcatcctttcaataatgacgatctgtcacaaagcgtttatttatcaaaaatggaggctacttcactttatatgagcgccatggaagagcaatcaaatgaagaccccagtgaaccccaagttacacaagaagaacaagagaatgataagtgcaaggaatctttaatggaaataaataatttgaacatagcttttaagggtttatcatcggtcaatgatctcagaatgtctaatattgttattgatattcaggatgttcatttagcgatacacaaaattgtcgaaatcaaaaactccactttgaagaatattatagatatcattgttacacatttggatgccaatgaaagcttttcttgccaggattcccaaagtccttcacctgacaagcaggaaccatcagctctttcttctgttgatatcaaatgtatatacttaaacttaggccaagatatcacagtaattttgaagagctttaaattagagcaaaaggaaaataattcattggcattttctttaggctcattttattctaattcgagtccattgacaattagccataaaactaagccattgctcactggagaacaaacccctcaaagcatctcattaaatatgggcgacgaactagatattattatcagtcatgatggcattgcgcatttctttaaaatctttcagtttgtttcaaaatgtatgtccttttatcagaataagtcaaaagggatgatgcctcaaatagcatcggatactaaaaggaccgtacaacttacctcaaaagcagtgaagttgtcgcttaagtttccatattttttattatgtttccaggtttcacccttcatttacgactctaaccgtgagttgtacattgagcttgtagacgtatttaaaaaactaccttctcggtgcacgaaaatattgacaatgtcgagcattacgatctcgaacttgcaatcccctctacgactgggttcatatgacgatactttgaaagaagcgctaatttatagttctgtccatgcaatcatcaaagaagtgatatttaacgaagaatatgctggaatagtacaattagtcgaagatatttctgcgttgggaaaacttttcacggattcaaagaacagtgaatgtacaggaaagtctaaaagcaagagaggctcctttggcagagaagtgtcagagtacttaattcttccaggttcgtttactagcagagtttatccgctaatttttctctcaaaatag

SEQ ID NO: 174201 - DNA, 99 bp, Saccharomyces pastorianus
ttaatccgatgtagtgtaacggctatcacatcacgttctcaccgtggagaccggggttcgactccccgtttcggagtgatttattttttttttcgtaat

SEQ ID NO: 174202 - DNA, 225 bp, Saccharomyces pastorianus
atgccaattgtaggggtgccgagatgtgccttgaaaaaacccttttcgcgtgcctgtgatgcttccattttggtcaaaaaaagaacgtctgaattgaaccctcattcagaagcttattgtctaagcctttattcggtgttttctaaacgatctccatggaagaaatatttctatctcttgaaatccgtacaagatatcagacgtgtgtcgggagtcgtatactgt

SEQ ID NO: 174203 - DNA, 135 bp, Saccharomyces pastorianus
tcatacatctttgatagacttcgtatgtggagtactgttttatggcgcttatgtgtattcgtatgcgcagaatgtgggaatgcctattataggggtgccggggtgccttatgaaacccttttccgtgcctgttaa

SEQ ID NO: 174204 - DNA, 465 bp, Saccharomyces pastorianus
atgccatttgttaaggactttaagccacaagctttgggtgacaccaacttattcaaaccaatcaaaattggtaacaatgaacttctacaccgtgctgtcattcctccattgactagaatgagagcccaacatccaggtaatattccaaacagagactgggccgttgaatactacgctcaacgtgctcaaagaccaggaaccttgattatcactgaaggtacctttccctctccacaatctgggggttacgacaatgctccaggtatctggtccgaagaacaaattaaagaatggaccaagattttcaaggctattcatgagaagaaatcgttcgcatgggtccaattatgggttctaggttgggctgctttcccagacacccttgctagggatggtttgcgttacgactccgcttctgacaacgtgtatatgaatgcagaacaagaagaaaaggctacgaaggct

SEQ ID NO: 174205 - DNA, 1470 bp, Saccharomyces pastorianus
cttattcctgtgtcttctgggttctcaggactggcttctagatttgtagaggatgctttcggatttgcattgggctggacgtattggatttcctgtatgcttgctcttcctgcccaagtttcctcaagtacattctatctcagctattataataatgtcaatatatcaaagggagtaacagcagggtttatcacgctgttttctgcatttagtattgtagtaaatttactggatgtcagcataatgggtgaaattgtatatattgctggaatcagcaaagtgataattgcaattttgatggttttcacgatgatcatcctaaatgccggacatggaaatgacattcacgaaggagtcggttttagatattgggatagctctaaatctgtccgaaatttgacctacgggctatatcgtccaacatttgacctggctgatgctggcgaaggaagcaaaaaaggcatttcaggcccaaaaggccgatttttagctacggcatcagtaatgctaatttcaacatttgcgtttagcggtgttgagatgacttttttagctagtggggaagctataaatccaaggaaaacaattccttctgctacaaaaaggacattttccattgtactgatatcttacgtttttttgattttttcggtaggcatcaacatatacagtggcgatccaagactactatcatattttcctggtatttccgaaaagaggtatgaagccattataaaaggcacaggaatggactggagacttaggactaattgtcgcggcggtattgattataggcagatttcagtaggaacaggttattctagtccttgggttgttgcattgcagaactttgggctatgtactttcgcatctgcttttaacgcaatactgatatttttcactgctacagcaggaatatcctcgttatttagttgttcaagaacattatacgccatgtctgtacaacggaaggcaccgccagttttcgaaatttgcagcaagagaggtgttccttatgtttcagtgatattctcctctttattttcagtcattgcttatattgcagttgaccaaacagcgattgaaaacttcgacgtcttggccaatgtttctagtgctagtacatctattatatggatgggattgaatctttcctttttgcgattctattacgccctaaaacaaaggaaggatattatatcaagaaatgattcatcatacccatataaatcgccatttcaaccatatctagcgatttatggtctagttggatgttcattatttgtcatatttatgggatatcctaactttatacatcatttctggagtactaaagcttttttttcagcatatggtggcctgatgtttttctttatcagttacacagcttataaggttctcggaacgtcaaagattcaaagactagatcagttagatatggacctgcaggcatgcaagcttgcactgccg

SEQ ID NO: 174206 - DNA, 315 bp, Saccharomyces pastorianus
cgaaggagatttttatcctcccgtggtataaagaatttgctttatagagaacctgaaaacaaaatacaaactgtttcctgtaaagtacgatattactcaattgatcaggtcaagaaaaagcacaagaaagacattgaagactggatcaaaacacaactgagagagcccttaataatgaccaatgtatgtgaacgtcataaaaattttgaacggaatgatcccataaccaaaaatcttggtggattaaaacctctcagaaatcaatataatatagtgaaaaacaaagattttgaaatactgtggaagcaaatttaa

SEQ ID NO: 174207 - DNA, 252 bp, Saccharomyces pastorianus
gaactagatgtggtggctgatgaggaagcaagtgttttagatgaagtagcggtcgaagaagatggagatgtggatgaagaggaagatacagaagacgaagaagatacagtggaagaaaccgaggaagatacagtggaagacgccgaggaagatacagtggaagaaaccgaggaagatacagtggaagacgccgaggaagatacagtagaagaggatgtagagctgctggaaatactaccaccgttggctaaa

SEQ ID NO: 174208 - DNA, 1038 bp, Saccharomyces pastorianus
caaggctatatgattgttgctgctggattcatgtgtaattttattatatttgggttcgcatttacatttggtgtgtttcaggatttttatcttagtaaaggtggtcccttatatggcaaacctgttgctacagtttctgtcattgggactctagcaacttcattaacatatatggtaaccatcggtaataacgtactacagcacttcttttcaatccaacaaacgatggtgctcgggtcacttttgatggccatgggtctaataagcgcatcgtgggcacaggaaacattgagtcaaggagtaatgtttggcattggaggttttctgacatacctaccggctattgttcatgcaccgccctatttcagtgctcacagaggaattgcgatgggaattttattctctggcacaggaattggtgggttagctttagcccctctaacgagatacctgataaccaaatatggatggcaatgggcactaagaatatgtggaataaccacatttgtctgtcttctccctgcaacatttctggtccatccacatcccagctatgttgccacacataaaatcaaatcggctaaaattgaggtactacatttgaatatgagcctagtaacgagcaaaaagtttatcttccacatgacaggagcactattacaatcggctggatatttgattcctggttattatatgtcctcatacggacaaactttgggcttcagctctaacgagggcgcagtatttatcgggataaacaatgccgtgaatggagtttcaaaggtgatagtaggatactttgcagataatttcggccgtttaaatatgttactttgttgctgctttttaagtgcagtgactgtattcgccctatggttagtatctactcgtagcactctcatagatttcgtgattctatacggtgtggtatctggtccaataatttcactgcctccaacttgcatggtcgaattatttggcgtgcaacactatcaatcaagtatatggtctctctatttctgtagaggtgtgggaaca

SEQ ID NO: 174209 - DNA, 78 bp, Saccharomyces pastorianus
ccatggtactctaccagattgagaccagccatctctagtgctttgtccaatgacggtatctacaccgctattccaaaa

SEQ ID NO: 174210 - DNA, 90 bp, Saccharomyces pastorianus
ccaattataggggtgccgaggtgccttgaaaaacccttttgcgcgcctgcgaagtttccgctttcggtcaaaaagaaaatccgaatttag

SEQ ID NO: 174211 - DNA, 267 bp, Saccharomyces pastorianus
ggtttgattttattttgtggggagattgtcaccgaaaatagcagagaaaagagggttgccattggtattgaaccatacaaacctattagcacaactttatatatctgtgataacaagtttcatacagaagttctttccgaattacttcaagatgataagtttggtttcatagttataggagatcaaggtgctttgtttggttccgtttctggtaataacgaagaaatgttttgcataaattcacatacgatttgccaaaaaagcgta

SEQ ID NO: 174212 - DNA, 402 bp, Saccharomyces pastorianus
atgggacccataggctccaaattgtgctcaaactacatctccaccgcatacgtaaaagttccggatcagatatataaggactatcttttgcactcatttgtcgggaagaaccagacggtgcaaccacagacaatcaaggtgttcacccatttgtttgaaaggaatctgatcgctagagatccggtaataaaccacgttcgttttttgaacccagcaacgcctgtcatgttcatgtatggcgagcacgattggatggataaatatgcgggctacttgactactgaatcaatgctaaaaaacaaggcaaaggctagctacgttgaagtccctgatgctggccataatcttttcctggacaacccgcagcactttgcctcttctttagtctcgttcctgtcaaag

SEQ ID NO: 174213 - DNA, 285 bp, Saccharomyces pastorianus
atgctacagtatataccactctcaaacttaccctactctcactttccactccatcacccatctctcaccatcagtaccaaatgcactcgcatcattatgcacggcacttgcctcagcggtctataccctgtgccatttacccataaagtccatcattatccacattttaatatctatatctcattcggcggccccaaatatagtataactgctcttaatacatacgttataccacttttacgccatatactaaccactcaatttatacacacttatgttaatatt

SEQ ID NO: 174214 - DNA, 105 bp, Saccharomyces pastorianus
atcgtaatattagtatgtagaaatatagattccattttatggattcctaaatcctcgaggagaacttctagtatattctgtatacctaatattatagcctttatc

SEQ ID NO: 174215 - DNA, 303 bp, Saccharomyces pastorianus
atgctcaattcattcttgtctaactgtctgaacagtcaagaaataagcaacgatattgtttttcaaaaatttctaaaccctgaatttaattggaaagatgttttaagttcgtcgccgataatcatactacctttgaataaccttttagctccacctttaagcccaacaaaaccaagcccccttcattctattttacctattccatccaactcgtctctgagaaattataattcgatttggcaacaacacatcacagtaaaaagtcataatgaaatttccaacctcccaacagaaattttacaa

SEQ ID NO: 174216 - DNA, 1392 bp, Saccharomyces pastorianus
atgaaaataggcttcattatcattgtcacaggtgttttgttgggtgttaaaactttcaatgaccctgtcgaacaccggtgtatggcattggtagaatgctgtgctttcttatgggctagtgaagccattccattacacatcacaggtttattggttccccttctaactgtcctttttagggtactaaaagacgatgacggtaaggtaatgggagcagcagctgcctctacagaaatcttaggtacaatgtggtcgtcaacaattatgattttattagcaggtttcacattgggtgaagccttgtcgcaatataacgttgcgaaagttttggcatcgtggttattggcccttgcaggtaccaagccaagaaatgtccttttaatggcaatgagtgttgtattctttctttcgatgtggatttccaacgttgcctccccagtattgacatattctctattaacacccttactagatccgctggactacacttcaccgtttgctaaggcattagtcatgggtgttgcactttcggcagatattggtggtatggcttcacctatttcttcgccacagaatatcatctccatgcagtacttaaaaccttatggaatcggctgggggcaattttttgctgtcgctctgcctacaggtattctatcgatgctgtgttcctgggccttgatgatactcacctttaaaataggcaaaactaaactggaaaaatttaaaccaataaggaccagatttactataaagcagtattttatcattattgtaactattgctactattcttctatggtgtgtagagtcacaaatagaaagtgcttttggatcgtccggtgaaattgcagtaataccgatagtcctgttttttggtacaggtctactatcaacaaaggatttcaacacattcccttggtcaattgttgttcttgctatgggtggtatagcccttggtaaggcagtttcatcttcaggcttgttggtaactattgcaagagcattacaaaagaaaattcagaacgatggtgtttttgctatcttatgtattttcggtattttaatgttagttgtaggcacttttgtctcacatactgtgtcagcaatcatcattattcccttggtgcaagaagttggtgacaaattatccgatccaaaggcagctccaattcttgtgttcggttgcgccttgttagcctcatgcggtatggggttggcttcatctggatttccaaacgttactgctatttctatgaccgatagaaagggtaatagatggctaactgtaggcgcttttatctccagaggtgttcctgcttcgttgttagcgtttgtctgcgtgattactctcggttatggcattagttcttccgtcttaaaaggtagcact

SEQ ID NO: 174217 - DNA, 363 bp, Saccharomyces pastorianus
gtcaaattagcttctatcgccgctggtgtcgtcgccatcgcttccggtgccgccgccgccaccaccaccctagctcaatccgacgaaagagtcaacttggttgaattgggggtctacgtctctgatatcagagctcacatggcccaatactacctgttccaagccgctcacccaaccgaaacctacccagtcgaagttgctgaagccgttttcaactacggtgacttcaccaccatgttgaccggtattgctccagaccaagtcaccagaatgatcactggtgtcccatggtactccaccagattgagaccagccatctccagcgccttgtccaaggacggtatctacactgtcgccaaatag

SEQ ID NO: 174218 - DNA, 186 bp, Saccharomyces pastorianus
ttcgaagattgtatttttcttgtgcatcatataatcttaggaagaaggacactattatataaatatcgtctattaagtactattcgtgttactggtatattattatatatggttgttggaataaaaatccactatcgtctatcaactaatagttatactatcaatatattatcatatacagtgtta

SEQ ID NO: 174219 - DNA, 126 bp, Saccharomyces pastorianus
gtgattgtgacttttcttggtaataatgtcattaaatattatgagaaatgggagtgggtaccaaagtacgctgttttcttagtaatcatcgcgagtttgacaagatctggaaaatttgtcatagga

SEQ ID NO: 174220 - DNA, 1077 bp, Saccharomyces pastorianus
atgaccaccgtcaccggtaccaacggtttgccaactgatgaaaccatcatcgtcatcagaacacctacaactgccaacaccatcataactacaactgagccatggactggcactttcacctctacgtctactgagatgactactgtcactggaaccaacggtgtaccaactgacgaaaccatcattgttgtcaaaacaccaacaactgccaacaccatcataactacaactgagccatggactggcactttcacctctacgtctactgagatgactactgtcactggaaccaacggtgtaccaactgacgaaaccatcattgttgtcaaaacaccaacaactgccaacaccatcataactacaactgagccatggactggcactttcacctctacgtctactgagatgactactatcactggcaccaacggtgtaccaactgacgaaaccatcatcatagtcagaaccccagccagcgtcagctcatcttccgccgcatcctctaacgtgactagctctgccgccacatcagacacaattacaggctcgaaggatctaacatctatagtttcttcgaccaccacttcaaccgactctggctcccctaagccttctggatccacagctacggtaacaaacgaacaaactactttaatcacagttacttcctgcgagtctggtgtctgttctgaaactacctctcctgctatcgtttctacagctaccacaactgttggcggtgtcgctacagaatacactacatggtgtcctgtttccacttctgaaccaacaaagcaaactactttagttacagttacttcctgcgagcctgatgtatgttctgagactgcctcttctgccattgtttctaccgctacggccactgttagtggcgtcgctactgaatacactacatggtgtcctgtttctactacagagccaacaaggcaaactactttagttacagttacttcctgtgaatctggtgtctgttccgagaccacctctcctgccatcgtttctacggccacaactgtcgtcaatgacgctgttacagtgtacaccacctggtgccca

SEQ ID NO: 174221 - DNA, 111 bp, Saccharomyces pastorianus
ggcgtgtggtctagtggtatgattctcgctttgggcagccttctgcgttacaacagaaagacaaagcatgcgagaggccctgggttcaattcccagctcgccccatttttt

SEQ ID NO: 174222 - DNA, 453 bp, Saccharomyces pastorianus
gccatgcttgcttgttgggctggccaaggccaccccatctactggttcatgcacactgagcaattcccggtatacatatcagatattggtgccaccaacctaaggcctctgtttatatcgtgcgcagcgtggcaaggtctaggctatgtaattactgtcgcctgcgagtttttccagaggtccggatacctaccattccaactgaagaagcatgacccatctatttctgactcaacgtcttatgctgaaaaatttcatagtggtaagttcttgatgcctccttactacaccaaagatgaacgaaatctgatcttcacggccttcgtctttggttgcatcggtgagttgggtctttgttctgctctatcttctccaccgctcactacgatcacgtccacgtcgccatggtctccgtctttgtcgttttcatgttcctgtctatttgctgtttga

SEQ ID NO: 174223 - DNA, 1170 bp, Saccharomyces pastorianus
atgacatcgatttatacatcaacagagcctacgaattctgcttttactaccgaggactacaaacctcaattagttgaaggagtaaattctgtacttgtcattggatcaggagggctctctattggtcaagctggtgaattcgattacagtggttctcaagctatcaaagctctgaaggaagataacaagtttactatattggttaacccaaatatcgctactaaccagacttctcattccctggcggacaagatttattacttgcccgttacaccagaatacatcacatatatcattgaacttgaaaggccggatgctatacttttaaccttcggtggtcaaacaggtctaaattgtggggtggctctggatgaatctggtgttttggctaaatacaacgtcaaagttttaggtactcctatcaaaactttgatcacttctgaagatagggatcttttcgcatctgcgttaaaggatatcaacattcccatcgcagaatcatttgcttgtgaaaccgtggatgaagctttggaggctgctgaaagggtcaaatacccagttattgtcagatctgcatacgctttgggtgggttaggctcaggtttcgctaacaatgcaagtgaaatgaaggaacttgccgcacagtccttgtcgttggccccacaaattcttgttgaaaaatctttgaaaggttggaaagaagttgaatatgaagtggtcagagatagggttggtaactgtattacagtatgtaatatggaaaatttcgacccacttggtgttcatactggtgattctatggtttttgctccttcgcagaccctatcagatgaagagtttcatatgttaagatccgccgcaattaaaatcattagacaccttggtgttattggtgaatgtaatgtccaatacgctttgcaacctgatgggctagactatagagttattgaagtgaacgcgcgtctatctcgttcctctgcattggcgtctaaggccactggttatcccttagcatacactgccgccaaaattgggctaggctatactttgccagaattgccaaacccaatcacaaaaactacagtggctaactttgagccatctttggattatattgtggcaaaaatacctaagtgggatctttctaagttccaatacgtggacagttcc

SEQ ID NO: 174224 - DNA, 150 bp, Saccharomyces pastorianus
atgagcccgaaaaacaaatatgtatatatctgtgtagaatatatatatatatatttcgcaaaaatacataaacaatcaaccctctcctcagatactactaagatgtttgtactgatagataatgtcctcgcctaccttcttgaacaagat

SEQ ID NO: 174225 - DNA, 114 bp, Saccharomyces pastorianus
tctatacaaattttattccatttctgcatccaatctggtatttggtcaatacggcgtcattggatcctcattcatgcaataatactgtccgtattaactaagaatgtaaattag

SEQ ID NO: 174226 - DNA, 327 bp, Saccharomyces pastorianus
atctcatcatcgtcatcatcgtcattagcatttgattttgcgcctgcttctgcatctgcgtccacctttgtatctgcagcagttgaagcggcagatgtttttgagttttcttcgatattgctgtcattggggttttgtttaacgctgtttaaattactgtcttttggttctgttttgactgtatcagttgcatcagtcacatcttcaaactcatcctcgaatgcgttttcagccgcatcttcatcatcttcatctcctacatcttccatatcctcttctacgtcttcttcctcttcctcctcctcttcttcttcttcctgttccttg

SEQ ID NO: 174227 - DNA, 387 bp, Saccharomyces pastorianus
atgaatgcgcatttcttcaagcctgatattcaagaagagacggaacttgcctttgaaattttgagcaagacaacgctgacagagaaatacgttaacagtttggagtacttcttgatggaattcaggtgggagaataaactagttggtctaggcttaaaacttcgggaatccaaaagaacctggcaaaggagaaaggcgttatttgcccttttcgaattttggagagaccaatcaagagacaaaagaagattccacaactacaccatcctgcatgcggtgaaagagatggaaaactacagaatatttattaatcgatccgtttcatggttctacaaccatattaccctgctaaaaatgatcctctacgacctctgcgacaatgtgaca

SEQ ID NO: 174228 - DNA, 645 bp, Saccharomyces pastorianus
atgaattataataactttgaaaattcgaagggtgatggacattctaggcttcccaaacctacatactccggaacgctgtcagatggctatgatgaatcgaaaattaaaaggcaaaaaacagactctgcttttaatgcagcttactcacctcatatgtatccgaactctccgtattatgaaggttcatggaataccggttatactcctcaacttcatcatgtagcccctcataatcaatatttccatccaatacaaccgtccactcagtacaattatacgagtcctcccaattatacagaaaattacataccgccagttcatcagaatatatcttatgcaccagcgcttaatttacagaagtggccatcatcatattgtgaaaacactcaagccttaaagaatgataaagattaccaaacatcaattagttatgaagatgttgcaataccgaccgcaaaggaaatacaattgattgagaaaaacagagggaaagatacgtttatgaatgaaataagtccagtaccatcaagcaaggatcaagcatctgcggagcctacagaaatcccaagaaaggatcccgagctggcaaattctaatgccgaagatgatcataataacttagggctagaagatgatgatcgtgat

SEQ ID NO: 174229 - DNA, 105 bp, Saccharomyces pastorianus
agtgaaagtacgcatcgtagagctgtcgttcggcctggcactcgctatttcgtaacaacgttccaggacacggaaaactcaactcattatagtatcctctgttga

SEQ ID NO: 174230 - DNA, 579 bp, Saccharomyces pastorianus
gtcgtagacaaaataggccgtcgtaaatgtctgttatttggtgcagctgggatgatggcttgtatggtcatatttgcaagtatcggggtgaaatgtctttaccctcatggccaggatggtccatcttcgaaaggtgcaggtaatgccatgattgtgttcacttgcttctatatattctgctttgcaacgacatgggctcctgttgcttatattgtggttgccgagtcgttcccttcgaaggtcaaatctagggccatgtcgatttcgactgcatgcaactggttgtggcaatttttgatcgggtttttcacaccattcattactgggtctatccacttctattatggttatgtgttcgtaggttgtttggttgcgatgtttttgtacgttttcttctttttaccagaaacaattggtctatctttggaggaaatccaattactatatgaagaaggtataaaaccatggaaatctgcatcttgggtcccaccttctaggagaggtatttcttcggaagaaagtaagaccgagaagaaggattggaagaaatttttgaaattctctaagagttctgattga

SEQ ID NO: 174231 - DNA, 216 bp, Saccharomyces pastorianus
tcgaggtcattttggtcaagctcgtgtgtttcttctgctggagcctcaccggcatcgccggtaatcttgccctcttgcgtgtgttccccttcgtcgttctcatcctcttcttcgttctcatcctcttcatcttcttcttcttctgcctcgtcttcttcttcttcgtcctcgtcctcatcctcgtcttcttcttcgttgtgtgggacttctgtgtca

SEQ ID NO: 174232 - DNA, 810 bp, Saccharomyces pastorianus
atgaacgagacagatactactctttgtcaggttaggtttcagaaaagcttttttgaggagtatgagtttaaaccacatgagattgtatttggagaaaatggggttcaagttatagaagatacgtacggcaatagtcataagttatactccttccgtgttaatggaagacacctaacaactatatcaagaaagccggatggtgatggcatcaaatcattcacaattgcggtaaacaacacttctacctgtcctgaatcacttgcaaatagattgattgtggtgattgaaatggattcgttaatagtcaaagaatactgtccccaattccagccaataaaatacgatcccataataatcaaccttaagtacaaaaggaggtttttggatgtttttggaactgctgcctccgatcggaatccacaggagcccttggaccctaagctattggacgtttttacaaatacagagcgtgagctaacatcagccttatttaacgaagaagtggaatcagacatacgtaaaaggaatcagttaacggctgctgatgagattaattacatttgttgtaattcaactttattgaagaattttttagacaactgcaatgttaatgtaaccgatgaagtaaaattggaaattaacgtacataggctaagcataactgcattcaccaaggccgtctacggcaaaaataacgaccttttaagaaatgcgttaagcatgagtaacactatcagtacgctcgatcttgagcattattgcttatttacaacaatcgaagatgaaaaacaagataagcgatcacatagt

SEQ ID NO: 174233 - DNA, 96 bp, Saccharomyces pastorianus
gattcagtagatctagtacattatgggtggtatgttggaatgtggatcgactatcatctactaactagtatttatgttactagtatattatcatat

SEQ ID NO: 174234 - DNA, 750 bp, Saccharomyces pastorianus
atgacagaattttattctgacacaatcggtctaccaaagacagatccacgtctttggagactgagaactgatgagctaggccgagaaagctgggaatatttaacccctcagcaagccgcaaacgacccaccatccactttcacgcagtggcttcttcaagatcccaaatttcctcaacctcatccagaaagaaataagcattcaccagatttttcagccttcgatgcgtgtcataatggtgcatcttttttcaaactgcttcaagagcctgactcaggtatttttccgtgtcaatataaaggacccatgttcatgacaatcggttacgtagccgtaaactatatcgccggtattgaaattcctgagcatgagagaatagaattaattagatacatcgtcaatacagcacatccggttgatggtggctggggtctacattctgttgacaaatccaccgtgtttggtacagtattgaactatgtaatcttacgtttattgggtctacccaaggaccacccggtttgcgccaaggcaagaagcacattgttaaggttaggcggtgctattggatcccctcactggggaaaaatttggctaagtgcactaaacttgtataaatgggaaggtgtgaaccctgcccctcctgaaacttggttacttccatattcactgcccatgcatccggggagatggtgggttcatactagaggtgtttacattccggtcagttacctgtcattgtcaaatttc

SEQ ID NO: 174235 - DNA, 231 bp, Saccharomyces pastorianus
aaatacaacagcagcaacaaaagcaacaacaacagcagcagcagcatcagcaacaacaacaacaacaacaacaacaacaacaacaacaacaacagcaacagcagcaacagcagcaacagcaacagcagcagcaacaacaacagcaacaacaacaacagcagcagcagcagcagcagcagcagcagcagcaaggacaaataccgcaatctcagcaagttcctcaagttagat

SEQ ID NO: 174236 - DNA, 114 bp, Saccharomyces pastorianus
cccagaaatctcatgactaattcaaacgtcaggaatgtcgcaccattaacgggcgcggacctaaccattgttggcccaaaccctttgaaaaaggctctgataccttcttttgca

SEQ ID NO: 174237 - DNA, 531 bp, Saccharomyces pastorianus
tctggagaaactactttttcttcttctaattcattctcttcatcctcttcgtcttcttcgttcaattctgggacttcttcttcactagattcttcggaaaattctgctctttcggcttcctcctcatcttcctcctccttttcaacggcctctgtttcgttggcctgttctggaccagattccgccttttgttcttccttcttaatttcacttatttccttcttcatttcatcaacattctccaaaggagagtctgtctttttaacagcttttggttttggtgtggcaatagcagcccatgacatcttctttggttgggaggtagttggctcagaagccttctttgacattaatgaaggttgttctgtatgcttgtgttcttctttgttttcttgttctacttgcagttgctgttcttcttgcagttgctgttcttcttgctcctgtgcttgcttctgttcaagttctttttctttttcttcttcttcttcttcttctgattcttcttcattatcattagtatttgtatct

SEQ ID NO: 174238 - DNA, 489 bp, Saccharomyces pastorianus
gatactacccctagcactgctcaaggtgaatattgtacatctaaggctatttgggttttgaagaagatatctatactggtctttatttattttgtaattttgtttcaattgacaccagatctgcagtacctcggtagcaagtaccccatgttttcgggatattctgggtatgttcaaagttcaagtctggtattagcattgctaagtgggattttttatttttcttgtatatttaatccaacccttaatcgagagaaggaagaccccctaaagcttccggaaacggattgtttgaaaaatgacatgacgaaaaatcatccaaggagaatttattggttattattttctctcatgatttctggggctttttttgcaatcaaaattagggatttcttccgcaacgatcaaacgatctatgcaagaaggttattacagttattgggctgggatgtcggttatctaggtaatttttttgtgttttaccaaata

SEQ ID NO: 174239 - DNA, 1149 bp, Saccharomyces pastorianus
gcgctgaggtactatctaacgacatattcgaatctatgttggttgttcggtcagttgttcgccgcaggtattatgaaaaattcccaagatagatactcagactcggacatgggatataccctcccttttgctttacaatggatctggcctgttcctctagcagtagcgatattttttgcacctgaatctccatggtggcttgtcaaaaaagggagactagagcaggcaaagagagcgctcgaaagaacattaagtggtaagggagccgagaaagaattacttgtggctatggagctggataaaatcaaaatgactatagagaaggacaagaagctgtcagacaatgaaggctcctatttggattgtctgaggggaaaggttaatcggagaagaacgagaatagcctgtctgtgctgggccggccaaactgtttgtggtgcatcgctaataggttactcaacttacttctatgaaaaagctggtgttagcactgaaaccgcattcacttttagtatcattcaatactgtcttggtattgccgcgacatttttatcctggtgggcctcaaaatattatggtagatttgatctctacgcttgtggactggccttccagaccgttatgctgttcattataggcggcttgggatgctctgacacccacggtgccaaaatgggaagtggcgctcttttaatggtcgtcgcattctcttacaacttgggaattgctcctgtcgttttttgcctagtctctgaaataccatcttcgaggctgaggactaaatcgatcattttggctcgtaatgcgtacaacataggaaatatcgtggtcgcggttttgattttgtaccaactgaactctgaaaaatggaactggggtgcgaagtcaggctttttctgggggggattatgcctggctgttttaatttgggctgtctttgatctgcccgaaactgcaggtagaacatttattgaaataaatgaactatttagacttggagttccagcaagaaaattcaagtcaacaaaagtggacccatttgccgccgccaaagcaatctctgatgacatcacccctaaagatcccaaggaagatatggaagctttcgccgaggagagagagcaaagcaccccatctctcatgatttga

SEQ ID NO: 174240 - DNA, 177 bp, Saccharomyces pastorianus
gagaccagtgctctggactccacctacgtcgaggacgcgttcttgaccatggccagacagatcaaggagagtatgtcccaacagaacctgaacgagaccactcagaagaaggatgacaagggcaacgtcaacctaaagggccagagcttgacctacaccagcggcggctgctgttaa

SEQ ID NO: 174241 - DNA, 237 bp, Saccharomyces pastorianus
cctatattggaaacgatagcctatccacgtatacaccaccagttactgcccgaccgcatagaactggaaagcttccccatgatcggcaaagccgtactaagcactctcaaggaaatgggatatacgatgaaagaagtatttcccaagagcgtagttaatgctatacgcaatgtcaggggagaatggcatgcggtgagtgactattggagaaagagaggaatctcctccgtatactaa

SEQ ID NO: 174242 - DNA, 72 bp, Saccharomyces pastorianus
tttgcattacaagtgcaacgctctaccactaagctaaggaggcaagtctttcttatgttacagcaaaattag

SEQ ID NO: 174243 - DNA, 90 bp, Saccharomyces pastorianus
atgatcaccggtgttccatggtactccagcagattaaagccagccatctccagtgctctatccaaggacggtatctacactatcgcaaac

SEQ ID NO: 174244 - DNA, 615 bp, Saccharomyces pastorianus
atgcctaaatttgaaaaaattaccgaggaacaggataatggaaaagctttatcgaaaaaccttatctccaacgaaccagttgatctgctgtcagatttattgggtgaggatagcaaggctgaaagcaaggcttctactggcgacaatgtgaaaccaattgacatattagaagagatttttggagagaagaatgacattgctcagctgcccaaaaatgcgaacaaggaagaatcaatcaatcattcgtcggcagtggaggcaaactcaggtgtcaccttaccattggatgccaacaagatatatgacagttcctcactgaatgtatatgcttccttgctctctgcaaattctggattagcacatttggatttatattttcaggcaaagtctttaatatctgacttaaaaactttctgtgccgttcctaaagctcaaaagctaacactaggccagttatatccatcttccacaataaacgccagccaaatttgcaagcagtcattgaaaatttctggatctgggaaactgaagttaagagttaagttggattttcatttaaatggctcttcatctatcaccaatgaacagtttgatcacaaattcgatgaaactcta

SEQ ID NO: 174245 - DNA, 96 bp, Saccharomyces pastorianus
gattcattagatctattacattatgggtggtatgttggaataaaaatcaactatcatctactaactagtatttacgttactagtatatcatcatat

SEQ ID NO: 174246 - DNA, 210 bp, Saccharomyces pastorianus
atggtcaaattaacttcaatcgctgctggtgtcgctgccatcgctgctactgcttctgcaaccaccactctagctcaatctgacgaaagagtcaacttggttgaattgggtgtctacgtctctgatatcagagctcacttggcccaatactacatgttccaagccgcccacccaactgaaacctacccagtcgaagttgctgaagccgtt

SEQ ID NO: 174247 - DNA, 912 bp, Saccharomyces pastorianus
atgcagctctttccttttctatcgttgacattgtttttgacgtattccgaggctgtttttggctcttcctcaaactcttatgtcaaacttccgattcagaagttagctaatattccaaacataaacttagaggatgcatctggtatttctaaaagaagcgaagctttcaattctaccttgataaatgtgtttgcaagtgcacaaatgtatgttgtcaagatggaaatcgggacccctccccaaacggcttatctccagttagacactggctcttcggatttgtgtgttaatgaggccgatacctcttactgtaaatcattggccgacgatgataacatttggactagtaattacgagctcacagcaactgcttctgagatttcctctacaactacttcatctaaggcttctaatacaccctgctcgtactggggtaccttcaatcccaacacctcttccacgtttaagtctaacgagacgttttttaatatatcatatggtgatggtacgtattatgcaggaacttttgggacggatgttgtctctttgggtaacattactctaagtaatttcacttttggggtatccaatgatacggcaaataatggtggcattttaggcgtatcgcttccttctgcagaagaaacagatgaattgggaacgccctccggtaaaacaccctttgtatacgataactttccaatggcattgaaaaaccaaggaaagatcaaaaagatggcatattctttgtttttgaatgaccctaatgcacgctttggaagcatcttgtttggcgctgttgacaaaagtaaatactcaggacagctttacactcttcctatgctgcaggctttcaacaccttcgattctgagtttgcaggaatgtttgttacagcacagagcgtcgccata

SEQ ID NO: 174248 - DNA, 279 bp, Saccharomyces pastorianus
atggaagacaaaaagatcgaagatgaaaagagcgtaggcttattatcgtctaagagtgttgaatcacaaaacatcgtactaccaaaggatatcttcagaaattcatttacttggttctgttacgagacttacaagtccctagcgtttcgtatctggttcatattatggttgccgctcactgcttggtggaaggtgtccagtgaatggatttatcccttcttagctaccctttttttggttgaagtgctattcttcctccccctcattctaattttagtc

SEQ ID NO: 174249 - DNA, 84 bp, Saccharomyces pastorianus
ctacaaatgtcatgctacagcatagctacgaatctatcagcccgtaacttaaacgtgcttgaaataaatcattataagtcataa

SEQ ID NO: 174250 - DNA, 345 bp, Saccharomyces pastorianus
atgcaaacaccttcagaaaataccgacgttaagatggatactctcgacgaacccagtgcacatttaatcgaagagaatgtagctcttcccgaagacacattcagttcacatctgagttatgtactttatgaaattgctcattgtaaaccgatcatgtttatgatcatcataatcgtgagtttgatctcattgattgtgctttttcatgataacgacgagtgcactgtgatcttaatgatatcccttttagtagcctccatggctttactggtggttgcagcattcacattcgggaaagcgataactgaacaggagttcatgataaagcttttagcggaggtgatc

SEQ ID NO: 174251 - DNA, 165 bp, Saccharomyces pastorianus
atgatgataataatatttatagaattgtgtagaattgcagattcccttttatggattcctaaatcctcgaggagaacttctagtactttctacatacctaatattattgccttattaaaaatggaatcccaacaattatctcaaaattcacccaatcttcacatt

SEQ ID NO: 174252 - DNA, 408 bp, Saccharomyces pastorianus
ctgcaggtcatggaaagaggcagatatggtatttcaaagtcaatgaacacaattttggaaagcatacatccattgacagacgcgaaagttgataacatactcttgcatttagggctctgcctcaatatttgcagtagagaaaatagtcgtttaaaacttgacggcaaattatggtatgatatgaaaactatatttgttaaaatgatccgtgacggttctgacactgaaaataggttagtacagggcctgttttacttaaatttttcatttttaattaaacaacggaaagaaaatagtaatttagacccaggggagctcaatttgttactagtagagctggaagcatttaaatcggaaacatctcaatttaatgaaggtatttcaaataaaatcgaaatagcgttaaat

SEQ ID NO: 174253 - DNA, 192 bp, Saccharomyces pastorianus
atggtttctaccacgcaatcgaggtctttgaaggccatgggagaagagatctggaaaaataaaacagaaaaaatcaatacagaattatttacgctaacatatgggtccatagtggcacaattgtgccaagattatgaacgggactttaacaaagtgaatgatcatttgtatagcatggatataatattgggt

SEQ ID NO: 174254 - DNA, 816 bp, Saccharomyces pastorianus
gagattctaggttattacaggttgtataggagagcgagtgcgagcgcgagatcgcgtaaggcgggtgacgacggagcgcccattgcgtacgaaatgagcgctgagtgggttgccctggagacaaaactgagcaagacagtgatggccatcacggaaggcgcagccgaggttgccgatgaggaaggatactgcgagggccttatcgattatgaaagctggaaacgcaggtgggtggccatctactcgcacagccgtatcgcggagataagacccttgccccgccacgcgctgccgctatcgcgcagcgcgacgcagactttggagcgctgcgtaagtcgctacacacgtacattgctgtggtgcacggcccttgcgggtatggcttcccgcagcgtcagcgccagggcggccgaatctcgaggacacaagtcgctaccgacggtggtaactcgccggcaagttgagcgtgcactatgcacagaagcccgatcacgtgacctacacgtgcttccaaggcgcattgctttgacactgcgcaaatgggaactagactatccgcgagagggcaaactgttccgcaccaaggagatggcacatctgtttctacaaagccagttgtccagacgggatgcgcccccagtccatcaagacgaaaatcaagaaaatcaagaaaatcaagaaaatcaagaaaatcaagaacaagataacactgcaagtgaaggtgaaagcgaggcagaaagggatgaaatcgacgaagcggacttgttccgatcagcattacatgaaaatcagttgctaaaatggttatccaaatga

SEQ ID NO: 174255 - DNA, 351 bp, Saccharomyces pastorianus
actttaactaagcaaacatgcgccaagcaggcatgcgactgctgtcgtattcgtcgagtgaaatgcgatggtaaaaggccgtgtagcagttgcctacagaatagtttggattgcacttatctgcaaccgtcgagaaaaagaggtccgaagtccattaggttgaggagcttgaaaagaatagcagaagtgcagagggaaagcggtcctaacaccattgcaactgctcctgtaatatataagagggttcccaaaaagctaatcgatcagtgcttgcggctctatcacgataatttatacgtaatatggccccttctttcgtacgatgaccttcacaaacttctggaggaataa

SEQ ID NO: 174256 - DNA, 204 bp, Saccharomyces pastorianus
atgagtcaggcaagtaaggacaaggcttcgctcaataaaaaaagatcttcattggcttatgaccctgtcaacatggctaaaaggttgagaacacaaaaggagatctttgatcagaataacaaagctctaagaaagggaggtcatgacagcaaaactggaagtaataatgccgacgatgattttgacgcagatatggaactggaa

SEQ ID NO: 174257 - DNA, 306 bp, Saccharomyces pastorianus
actgtggtatccagcgaggaatattctgaattgcaacgcaaatactcagaattggaaaaggaagtagaacaaccatctctagcatacttagttgaacacgccaaggctaccgatcaccatttactatcggatagtgcatacgaagacctagtcaagtgcaaggagaatcctgatgtggaattcttgaaggagaagtctgctaaactgggccatactgtggtatccagcgaggaatattctgaattgcaacgcaaatactccagaattggagaaggaagtagaacaacccgtcactggaatacctag

SEQ ID NO: 174258 - DNA, 90 bp, Saccharomyces pastorianus
atgcctgcaggtcttttatatgtttcattatcctattacattatcaatccttgcacttcagcttcctctaacctcgatgacagcttctca

SEQ ID NO: 174259 - DNA, 612 bp, Saccharomyces pastorianus
atgaataatgagcatttgctgaaggtggatcccatccccgatgtgactattaaacgcggccctttgaggtcttttctcataacaaaaccctgtgataatttgagttcattacgaacagttacttcatctaaggaaaagcttctagttggctgtttgctgatatttactactatcgtaaggctacacaatatctccctgccaaatagtgttgtttttggtgaaaatgaagttgatacatttgtttctcaatacgtgaacaacatattcttcaccgatgttcatcctcctttagtggcaatgctatatgcaaccgtgtcctctgtttttggttataaagggcttttcaattatgggaacattggtactgaatacacggcaaacgttccatacgtcgcgatgaggttcttttctgctactttgggcatcgtgtccgttttggtattatacttaacgttacgagtttctggcgtgaaaattgcggtagctgccatttgtgcagtatggtttgcaattgaaaactcctttgtagcgttgtctcgtttcaccttgatagagggaccctttgttttttcatgggatgtgcagttaattcttagaagatcgaacttattt

SEQ ID NO: 174260 - DNA, 1983 bp, Saccharomyces pastorianus
atgaggttaaaagtatcagaaatgatagggccgcaattcggtgctgtggaagcattactatcaaatgatttctttgcgattacggatgactctcaaattgtatattttacaaagaacttaaaggtagaaagaaagacaccgtcattattagagccacaagaaatcatgtcagtagttttgaataaagcagttaacgaacctgtactatatgttcatagaagggcgaatggaaagttaaaagtcatttttaacaacattcgcatacattactatgcaaggtggttagaaatactaaagaaaaacatcggcccggataatgccagttcaaaagatgaacctgttgcacaaaagcttagtaaaaaacaaccgacttcaggatttccctgggaactcaaatgtctggactgctctctaattctgcaccctttcagattaaaaagtgtaatggtcattgtacttgacaatctaacaactggtggaagttcatttattccgcaggcaaagcttctttcaaaggcgaatacactcttcctaatagatgactatcagaatttcaaaattcaaaaagataagaactggcctagtttgataaatttttatgctggtcaaggtttctctgcaatcggtaaaatagatactttgaattttttaataaacaaatccgatggtgcccttttattggattgtaaaatagaacaagttggtctttcattatgcgcggattcttttcaaactttttgtcagctttgtattgatttaaagtatcctcagacgtttcctgatgaggaaaaatttagaacgcagttgaaaaatcctatcgatgtattcaaagacatcgattgtgatcttttcaattctgccttcatccgggagaacaatcatcaaaatgattacgactcagtgcatttggtagacagttttctcgacaaaactcacgagttcaacaatggtgccagaagtaaactatcctctcagggttcatatgaaatggacagttcctctggaactgccacgggtggtattttacttccccatgagagttatctagactctgctcagccaaaaaaagaagatactccaccaatcgcctcaaatgagcaagaaagggatgtggatataaggggtagtatagacgtcgaaaaagttgttataaaactattcgatgggtatgattggaaatatacgcggaaatttatcgctaatactgttgaaaaactggataaagagctcagtaaagcggaagcaagtagttcgaaatcaaatgtaccccaatcagaggcaaatatttttgactctatttatatatctgctaacaaaaacaatgtcaccgatttgagaagaaatcttgatggtgagatccagggggttcaaaattccttctctgatgtctctaaagttaatttgcgaccttctaagcattacaaagccctgattcaattgaacaaagtacatgtcaatttgaagaattatcgagtagatgaacccgatgagtctaactctgataattccacagatgttttgaaccgatgtgtagtttccatttacgaatttgaaattatcgataatgttcccacgtccgcctggaataaatttgtaactttgctaaagcacgaaccgtggccacacagttctccgatgtttcttctggacctggaatttatccggccggtcgactttttgcaagcagtggaattagtcatgcaattaaatgttgcgcctttacgccttcacgtggatcaagacactttagagtttctaataaggttcttagggttcaaagataaaagatttgaattaattgatgagtatccagatattgtatttattcaaaaatttagcattaattcaattaagttaagattagattataagccgaaaaaagttgattatgcgggtttaagatcgggccaaacttctgaactgatgaatttttttacccttgatggatccaagattattttgaaaagcgtagtcctgtatgga

SEQ ID NO: 174261 - DNA, 558 bp, Saccharomyces pastorianus
atgtcgatcgttgcgttaccgtctagcttccaggagagcaatagcagtgacaggtgcagaaagtattgcagcagtgatgaggaaagcgacacgtgcattcatggtagtgctaatgccagtaccaatacgactaccaactccagcactaatgctactaccactgccagcaccaacgtcaggactagtgctactaccactgccagtaccaacgtcaggactagtgcgactaccactgaaagtaccaactccagcactaatgcgactaccactgccagcatcaacgtcaggactagtgcgactaccactgaaagtaccaactccagcactaatgctactaccactgccagcaccaacgtcaggactagtgctactaccactgccagcatcaacgtcaggactagtgctactaccactgccagcatcaacgtcaggactagtgcgactaccactgaaagtaccaactccagcactaatgctactaccactgccagcaccaacgtcaggactagtgcgactaccactgaaagtaccaactccaacactagtgctactaccacc

SEQ ID NO: 174262 - DNA, 339 bp, Saccharomyces pastorianus
gcaccattagattcaccacccgacgcccaagtggatgcaccgccccaacttgatttgttaccccaggctgaagcaccaccccaagtagaagtagcaccagtaccttggccgccccaagctgaggcaccgccgccagcaccgccccaagcggatgcacctccattaccttggccaccccaagtggaagcaccaccccatgaggagacaccaccaccacctgagcctccatgcgcatttacagctggtgttttgccaccatcgaaggagctccatcctggtgtcataccaccgctaagaccagaagaggtagccgcagcacctgctgcaataccgccagtg

SEQ ID NO: 174263 - DNA, 486 bp, Saccharomyces pastorianus
gaaattcgtgttcagggtacaaattacgtggaggatagaattattgccttaaggaacaatacagcttcaaaacatggatttcaaaacattaatgtcttgagaggtaacgctatgaaattcttgcccaacttttttgaaaagggccagctttctaaaatgtttttttgtttccccgatcctcatttcaaacaaagaaagcataaggcaagaattatcactaacaccttgctgagtgagtacgcatatgttttgaaagagggcggtgtcgtgtacacaattacagacgtcaaagacctgcatgagtggatggtaaaacatttagaagagcatcctttatttgaacggttgagcaaagaatgggaagaaaacgatgaatgtgtgaaaataatgagaaatgccacagaagaaggtaaaaaagtggaaagaaagaagggtgacaagttcgtcgcttgtttcacaagattaccaacgccagccatattgtaa

SEQ ID NO: 174264 - DNA, 84 bp, Saccharomyces pastorianus
cccgcgttattagcacggtgccttaaccaactgggccaagagaccaagaacttgtatgatagtccagaggagagtagcgggaaa

SEQ ID NO: 174265 - DNA, 288 bp, Saccharomyces pastorianus
gatttcatcaagcctgtaataagaaattttatgaccaacgcattgaataagcacaaattagatggtattggtctagaacttttagatattctaatagtgactacctattatggtccgaataaaatcaatgctttcttaatggatacatttatcttaaacttgctaaaacagtgccattacaagttttttgtcagtaatatctctgagctggttattcaaatttctaaaatcgattgtgacttagtcattctgctagaagatttaaggtcacggattgatttagattga

SEQ ID NO: 174266 - DNA, 1140 bp, Saccharomyces pastorianus
atgttaatttcaaaccatgaaaacttcaaaaagtttgatatttacgaaaagtttatcaaatgcctaggaaagttatatttcaatttagtcactggctctccggctaatttcatattactgccatgctctacgcaaattctaatcacttatactaggctaatttttgataaggcccctaaagtatatagagagaattctgatgtcacgggggacttttgggaacagactgctattagagggcttttaattttgaaaagggtcattaatttcattcacaaaaagggggcaattacgttaaaggcaagaagtgataaactaaccatagatgcttctatcaacaaaatcaacacagaatttctgaatgagaatttgataacaaggttggttgacactttaatggaatggtacttgaggttaagaccaactgaattagaaaattggtttatggatccagaagaatggataaacgaacaaatggccacgagttacgaatatcaaatcagaccatgtgcagagaacgtttttcaagacttaatgaatactttctctgagctgttggttccctacctgttaaagaaaattgaaaatgatgcttcaaagctatcaaactcattagacgattttttaaggaaagacgcaatttatgcaagtttccaattaagtgcatccgctgttagtgaaatggtagattttgacaggttactaattcaggtttttttaccagaagctacaaatacaaacatatcaggcgacgaattaaggattatcagaagaagagttgctttaattataaacgaatggtctactgtgaagtgttcggaagaatctaaaagtttatgttacaagttatttacaaacttcctgacagatgaagacgacaaagttgttttgttaaccacagtccagactgtcagaaccatggttgatgactggaacttcaacaaggatacttttcagccatttttaactgaaaatgttcatttattgttgaggaaaattttaccatctgtgtcgttaaccgagacaaggctatatgttctaaacaccttgagcgatatcataattcaaacaaaacctttaattagcagggatctattagtcgaaattttgcaaatcataccaaacctttgggaaatagca

SEQ ID NO: 174267 - DNA, 165 bp, Saccharomyces pastorianus
atggatcaagataaagtcaatttcgcatcgggcgataacaacgccgcctcaaacatgctgggaaccaacgaagacgtgatgatgtcgggtgctgagcaagatccatatttcaacgcatctcaaatgggtaatactggatcatcaggcgggtatgacaatgcttgg

SEQ ID NO: 174268 - DNA, 66 bp, Saccharomyces pastorianus
atgtggttgtccaagcaagagtggcaagaaagtgggccagccgcaatgagtaaatttggtccgaga

SEQ ID NO: 174269 - DNA, 660 bp, Saccharomyces pastorianus
  modified_base (497)..(531): a, c, g, t, unknown, or other
  modified_base (607)..(607): a, c, g, t, unknown, or other
atgaatttagggtatatggggcatattgtattgatcgctgaagaagtggtcaagttttccaagctgtacaaagttgaattgatctcgcctgatattcaagaaattctgcaaaccgaggattggcaatactactctgaagaagtactgaacgaaacgagaatgatgtactcaaagattcttggtggtggcagctacatagacgatggtaacggtaatattattcctcaactacccgataatagcgcagtactgggctccaatatggatgctaatgataacaatgaaatgtttgattcagatacagggaatgacagtgacagtaatggtggcggtcaattgatcaacgttgagtctttagaggaacaactgtgtttatccacggaatcagatttacacaacaagttaagagaaatgttgattaataaggctcaagaagacgttgataacaagaacacagaaaatggggtcttcatactgggaccaccagatgatgacgnnnnnnnnnnnnnnnnnnnnnnnnnnnnnnnnnnngacaataacaataacaacgacaataataacaataacaataataataataacgataataatgataatgacaatgacnaaactcgtgattataatgaaaatgctgctaatgataatgattatgatagtgaa

SEQ ID NO: 174270 - DNA, 1491 bp, Saccharomyces pastorianus
atgggtcctgccatacataatcaactatatgaatgtggattaaagactacgtctcaagatggcttcttgatcgacaattatgaaactcaattatttcaatcgttgaacaggtttatcaatttcataaacaatgctaatcagtcagctagtaataaagaacaaaatacaaaattttgcaaatcctcctcaaattttttacgcttgaaactactaacggttctaagacaatggtgtgattcttcacgaagcaactgtacactggaggttagagatgttttgacccaatggtgggtcacacttttaaactttctaaattctgacacctcgcttcaaatagatactgcccttgaattgagcttgagcatagaactaacttctgtgtgtctcgagtgcctcagcaaaattatgaccatactaataatattgcctttccattcatccagagacatggaaatatactcacatcatcttttgctgaccattcattgcataacaaacaagttgattttgatttctaaaaactccaaaaaacttaaacgtacaaatagtgatgacaagtgctctataaacgacaagaagctgcaataccttaacaaatattcttccttgctgcgagcattcatcgggaagttaaatgcttacgcatttttttatctaccagaagactttcatttcgatacaattttgttattgacagtttctcctcaaatctcttcaagtattcaaacatctttgttttcatggaagaagagacaatataaattcaccgacgatcagggacaaatgatccgcactgaagcttttgaaaataaagatactaaattttttaagatcattgtttcttatattaaaaatgattttgtacttatgtcattttattggcactattggtatatcatacttcaatttatgaaattctctgattcagatgtaggaattaaaaaatcgacattgtcatgcatacctggctcagaaattttattgacgcatgtaaccactagattcttgaattcagatttgaataaattcacgcgaattattaaacaaacgccgaatccaaggatagcaaatgagaatgtgacagagtcacatccaaatttcaagagtttgaatagtagcaatgctttaattacatctgaaaggattaatgattacgtattttctaattttaagacaatcaaattatgggaatgtcttagaagcctttcaggatgcattcttaaagaaaatcatccggaatacctggaaaatatgctttccttacatgagtctctattgatagactatgtctccactatttcagcgtacgattatattgcagcgaacgtcatttacaataaggttctccagtttattattttccagtttgaaagtttaccttctctgaaattcattcaatggaggtcgtggtacaatgggcttttgagtatgttaaggaccacaaatgtttactgccagactgtttctttattatgccttttcaatatttgg

SEQ ID NO: 174271 - DNA, 411 bp, Saccharomyces pastorianus
atggccctgattgcaaagacaacatctgatgactacaatcttttaaatttagtttccaccaatgaaaatattttcaatagaaatgataatgactacaaagtttgcattattgatattagcacaaactctattacattccatattgaaaatttacatgatggcgaactcattgttttagtaaacggtgttatctggtcagaagtttcatgcgcttcaattttagagcatgtaggcgaagaatacgttgtcgttaacggattagtcccttcttgttcttatgatattcaattcatcaacagactaaatcaccgagatgattatctggtctctgattcacttgtaaggacttgtgggaataacaatgcgattgccggaaaatttgaaaaccttgatttcagctacccttcatac

SEQ ID NO: 174272 - DNA, 528 bp, Saccharomyces pastorianus
atggctacactggtgaccaattcaaaggcgtacgccgttactacattacctcaagaacagtctgatcaaattttgaccctggtgaagagatgtgccagagaggcccaatatttcttcgaggatttgatgtctgaaaatcttaaccaggtcggtgatgaggagaaaactgatatcgtcatcaatgccaacgtggacatgcaagagaagttgcaagagctatctttggctatcgaaccgttattgaacatacaatctgtcaaatcaaataaagaaacgaacccacattctgaattggttgccactactgacaaaattgtcaaatcctcagaacacttacgtgttgacgttcctacaccattgttgtcattggcattaatgattattgatgctgttgtggatttggtaaaggctgctattcagtgccacaatgaaattgccaccacgacaagtattcctctgaaccaattctacttgaaaaacagcagatggacagaaggtttgatctccgcggaaaaggctgtggcaggt

SEQ ID NO: 174273 - DNA, 1104 bp, Saccharomyces pastorianus
gaatcattgtatcgctccgttgagagtggtgagtttgaatttgacctgtttaaagaaatacttcctgatttacaaaatttaaacttgaacactgacaaactgaagaataataccagccgatctcaattagaaaaaggtgaggttacattatcagacggttcgactttcaaactgaaccaagagttcatatttgaagctatctctttgtctgatgaattaaatctagatgaaatcgttgtatgtgaattaatactttccggtgatgccactgccaacaatggcaaagtacaatactttttgagaaggcaatacattctgcaaattgtttcctttatagtcaactgcttcgataaagatactcaattgtaccaagaattgataaaaaatggagccttggtttctaatatactcttagcattcaagttcattcatactcaactatctgaaatcaagcaacaaatcaataaggcccaaatactagaaaattataatgctctattcaggcaaaacattaaattccgaagagacttcttgttgagggaatatgatattttgagtcaaattttatatggtttagtggacaaaggtgccgtcacaggaaataaagatttcatagtatctttactcgaccacgtatcagagttggattccgatgattttttcataatatattacatccctgcattcttccatctattcgcatctttgagagttttacctgatacagatgttaaatttttacactctaaattcttgacggacttaaaggatgactcagtatattctaaaccggttaaagtagctctcatatttatttttttggcttacttcattggatggtgtaaagaggatcctaagaagagggctgacatgatggacttcaaaaccgatgttgatgagccaatgacttctgcggtagaattgggcgccattgaacaacttttaatatttgccgcagacacttctattgtggaacaagacaagagtatggaacttttctacgatacaaggtctttgctagaaagacacattccaagattagttcccaaacagcttcttgatgatgagaaaatattccatccaaacaaacaaatctacctataa

SEQ ID NO: 174274 - DNA, 84 bp, Saccharomyces pastorianus
tgtggtcgaggatgctgtgacatttgttgctgtgacatttgctgctgtggttgttgttgctgttgctgttgtggttgtgaattc

SEQ ID NO: 174275 - DNA, 165 bp, Saccharomyces pastorianus
atattggatatactggaagatactgaggcagctcttttgaaattggccagggacgtggacgacattggcttgataagtgagttttttcttacagaatttgttgtgttggatgaagataatcctatcgaatcgctcttcttcagaaaaggatgctggatatactat

SEQ ID NO: 174276 - DNA, 426 bp, Saccharomyces pastorianus
atgtccatcagagatttatatcatgcgagggcttccccgtttatatctttagaattcttccctccaaagactgaattagggacgagaaatttgatggaacgtatgcatcgtatgactgctttagatccactgtttatcacggttacttggggagcaggtggtactactgcggaaaagactctggcattagcttccttggcacagcagacactaaatataccagtttgtatgcatttgacctgtacaaacacagacaaagccatcattgatgatgcgctggatagatgttataatgcaggaatcaggaatattttggctcttcgaggtgacccacctattggggaagattggctagattctcaatcgaacgaatcaccttttaaatatgcggttgatttagttcgttatatcaagcaaagttacgga

SEQ ID NO: 174277 - DNA, 96 bp, Saccharomyces pastorianus
gtgtcgaccttcttttcgccacgtaaacttgcttggatagctcatctacgtgtagtaaccatatttccttatggtgctttcccttacaataggtgc

SEQ ID NO: 174278 - DNA, 249 bp, Saccharomyces pastorianus
atgcccttattaaatctttcgttgaatgattttataatccccctaacaatactattaagatacaggtaccaaagaaccaacgataatttttcatataaaccggtagagaatgacattgagaaattgaacaagctcttgcccaggggcaagtcgtcggatatagaaggtatcccatggacgtttcaaaatggtcatttaacatttgaaaactcaaacgacgctagcaatgagaacgaaaactacttctga

SEQ ID NO: 174279 - DNA, 285 bp, Saccharomyces pastorianus
atgcatgagctcataggaaacaacaattttggtaaaaagacctactacgtggaaagaagcaggaccggaaatctaccggtgtattccgcttataaaaatggaggtaacaaaattatcacggagatcagaaagattgaaggagatgtaattcaactaagaaatgacttgcaggagcaactgcctttcatacccaaaaaatcatggtctgtggtgatgcaatcgaaaaaaattattatcaagggcaatgcagtagaggctgtcaaaagggtattaaccaagaaattt

SEQ ID NO: 174280 - DNA, 609 bp, Saccharomyces pastorianus
atggctgcctccagagctgctgccgctgaaaagaacgtcccattgtacaagcatttggctgacttgtccaagtctaagacttctccatacgttttgccagttccattcttgaacgttttgaacggtggttcccacgctggtggtgctttggctttgcaagaattcatgattgctccaactggtgccaagaccttcgctgaagctttgagaatcggttccgaagtttaccacaacttgaagaagttggctaagcaaagatacggttcctccgccggtaacgtcggtgacgaaggtggtgttgctccaaacatccaaactgctgaagaagctttggacttgattgttgacgctatcaaggctgctggtcacgacggtaaggtccaaatcggtttggactgtgcctcctctgaattctacaaggacggtaagtacgacttggacttcaagaacccagaatccgacaaatctaagtggttgactggtgttcaattagctgacatgtaccactccttgatgaagaagtacccaattgtctctattgaagatccatttgccgaagatgactgggaagcttggtcccacttcttcaagaccgctggtattcaattg

SEQ ID NO: 174281 - DNA, 906 bp, Saccharomyces pastorianus
atggatgtgcatcctcctcttgcaaagatgttgtatgctggtgtggcatcgcttggtgggttccagggtgattttgacttcgaaaatattggtgacagttttccatctacgacgccatacgtgttgatgagatttttctctgcttctttgggggctcttactgttattttgatgtacatgactttacgttattccggtcttcgtatgtgggttgctttgatgagcgctatctgctttgccgttgaaaactcgtacgtcactatttctcgttacattctgttggacgccccattgatgtttttcattgcagctgcagtctactctttcaagaaatacgaaatgtaccctgccaactcgctcaatgcttacaagtccttgcttgctactggtattgctcttggtatggcatcttcatccaaatgggttggtcttttcacggttacatgggtgggtcttttatgtatctggagactatggttcatgattggggatttgactaagtcttccaagtccatcttcaaagtagcatttgccaaattggccttcttgttgggtgtgccttttgccctttatctggtcttcttttatatccacttccaatcattaactttggacggggatggcgcaagcttcttttcgcctgaatttagatctacactaaagaacaataagatcccccaaaatgtcgttgctgatgtcggcattggctccattatcagcttacgtcatctctctaccatgggcggttatttgcattctcattcacacaattatccagctggttcggaacaacaacaaatcactttatatcctcacatggatgccaataacgattggttgttggaactttacaacgcacccggcgaatctttaacaacattccaaaacctaaccgatggtacccaa

SEQ ID NO: 174282 - DNA, 198 bp, Saccharomyces pastorianus
aacttccgtggcatctttgcagcacacaccaaaggcgccactgataccatccaaatgccatgggtgcacgtgcactgttttgaaaagtacccgcctggcgaccaagtcactgaggacgagttgcatgcacgcgttcatgcccgtattattgccgcgcttcaaggtcactgcagacgatcttccgttgacatgccgtaa

SEQ ID NO: 174283 - DNA, 240 bp, Saccharomyces pastorianus
acggtgatcttactttgcttattctttatttatcgttcgcggatatcaaatattttcggtcatatcctttatcctggttgtattttcctcgtactggcaaaaagtttccaaaactcaagaactgtaccagtgaaaattgaagacaagatgcaatatcttttagttattattagtgagcaagaaataggtgctagcggaggggatgtaatcgcaaaaaaaaacgaatgtgtatttgtttga

SEQ ID NO: 174284 - DNA, 165 bp, Saccharomyces pastorianus
atgttcaacttcgtgagtacctcacggattttagatttaaatcttgatcaacctttggcagaagatgaactctggcatgaaagagatcattcttacatttcgtatttaaagcgcaagaggaaaaatatacgactcaaatctcaaaatgttgttacatattacaaa

SEQ ID NO: 174285 - DNA, 1293 bp, Saccharomyces pastorianus
atacccaaagagttggagacgttttccagattcttaacatcttctgttccggtaaagtctttcaacatagaaagacttcaatgcataatgttaaaagtgtgccatttcgatttcacatctttttcaggttgcgatttctccagagtgtatatgcttatccagaccgcttgttcgttagcatgcactttaggtttaaaccgtgatattgagattcccatcaattctcatgatcaggtatacattgaaaatctttggtggtggattttatacatggacgttcaagtatcctttaatcttggcatcgcactgcagattaatggtctacccataggtcgcttcaattattcaccaatggaggacaggcaagacgtaatttttaggaaatctatactgatgcttagaagtatacttgaaaaaatatatgacaaaaacaacattccaagcgttaaacagcttatactggatgctaaagaatttgtcaatctgaattacaaatccctttcatattatatgtcacctgatagctgtgatttcaatgagaggattgaagtacacactctcttacttcttcttaccagcatttcaaatttatctaatatacagagatacttcttcaatgataaaggctttgaaatattcaacacgtcaatacacttgtcctttacttccctgtatatatcaatcgcggtattgaattcctatttcaaaatggatattgaagatccccattatgaatctaccatgaagtttggtgggctgcctccacatattcagctaggcatgtgggttacatatcacacgatagggagagttctttacgaaatgtatggtacactattttcgagcctcttgtctccaatacctcagtctgcttacacagaagagtttgacttttcccaacctccgtttgagtcatttcaaatacccactgatcattacataagcctcaaaaatgtcagtaagagcttaaattcggcatttgatacattttatgcgccagattgcaaacagctcttaaaaataatgaaaaagcattattcttttctttttatcttttcgctggagaatatctgccgtatgatatttgagaatggactcagagtaaatcaagaatctcaaaacacaacaaatgctgtgccgagtttagatatggatgaaaatataaattcacgtgagattaagaacatttttacaaatagttttaaggagaatggaacaacggaccttttctgggatcactacgatagctccatcgctgcctggatgaacaaagatctagaacctttcctttca

SEQ ID NO: 174286 - DNA, 174 bp, Saccharomyces pastorianus
ggcgatagtactttcagcaatcagagcggtcgccgccataatattaactgcattcaccggataatcacccttcgccgtttctccagaaagcataacacaatcagcaccatccaacacagcgttaaccacatccgatacttcggcccttgtcggtctcggattgtgtgtcattga

SEQ ID NO: 174287 - DNA, 1314 bp, Saccharomyces pastorianus
ttgacttccgtaccgcaaagaacgaacaatgaaaatggtaaagagcgaccatccactgctaattctagctccatcacaccaacacctgttacgccgaacaacttaattcaaatcaaaagaaaaagaggcaggcccccaaaaaagagaacagtggaaacaatgatatccaattccacggatacgatagataagtcagatgcatccaatcggattaaaaacgagattccaataaattccttgcttccatcttccaaatttcatcaaataccatcatctccatccaatcctgtgtcacaaccggctccggttcggacttcaaggtcagccacacaagaaatagacattaaaagtttagaactggcctctccaatttcaactaatggtgatccaaacgcagaggattcgaatactactgatactgttcataataacgtggaaggaaaggtaaatgttgaagaaaataaaaccgagaaggagaaaataataaccatcaaatcatccagcgaaaatagtggtaataatacgaccaataataataatactgacaacgtcattaaattttcagctaattcagatatcaatagtgatattcgccgattaatggttaacgatcagttttcattaagttatgacgccagcggtaatattacggtcaaattaccacccgtttcctctccagcaggagcaacagctgccgctgctgcggcggttacgtcagagatgaatagacaacaaagagaattagataaaagacgtgattcaagggagaaaatgcttgttaatatgaaatataacgatcgcgataaagcaaagtcatttatggagtctaataagaaactcttaaaagcaatgaaagaagaagagaggaggaaaagaatgacttcgataatacatgataatcacttgaacttaaatttgaatgagatctccacccgttcaaagataaaaagtgcagaaaaaccaacaactaaaggttcttcaatgtcgccaaaaccaagatcggcctccatcagcggcatttcagaccaccaacaggaaggatatcaaccattagagcaagaaaaactcgtcgatattgacaatgagggctcaaacgcaaacagcgactctctcaagatgggtctaaccatatccgctgccgatacggttcacaaagttggaatacagtccatgctaaattctggggaagaggcaattaccaaggagaatgcagaatatgaaaggaagaccccgggagatgaagaaactaccacattcgttccattagaaaactcacaacctttggacacgattaggaaaagaacagcagcgatg

SEQ ID NO: 174288 - DNA, 126 bp, Saccharomyces pastorianus
atgaatcctaagggtactgacaaatttagcatcgagaacacgctatgtaatcatttcacactattaacatttggaactatttccatcgggattatagctattgtcttcaagatcctttcccccaac

SEQ ID NO: 174289 - DNA, 96 bp, Saccharomyces pastorianus; identical to SEQ ID NO: 173780

SEQ ID NO: 174290 - DNA, 1149 bp, Saccharomyces pastorianus
aaagacaatgaaattggggatgagaagagcgtagatgtgttatctgtcaaaagtctcaaatcccaaaagactgttctacctcaagatgttttccgaaacgaattgacctggttttgttacgaaatgtccaagtctttagcgtttcgcatctggatgctgttatggctaccacttagcgtctggtggaagctttccaataattgggtttacccacttatagtttcacttcttgtcctagttttgggaccaatatttctccttgttattcgtgaaccttctcgtaagcgctctttatcgaaacaactcactcagttttgcaaagagattactaaaaacacaccaagttcggatactcataattgggaagtcgttgtagcaaatctaaattcgtacttatatgaaaataaggcttggaatactaagtacttctttttcaatgctacggattgtgagaaaatgttcagaacaactgttcttgaaccattttctttgaaaaaagataaagctgccaaggttaagtcatttaaggattccgttccttacatcgaagaagcattgggagtttattttacagaagttgaaaaacattggaagttgtttaatactgaaaaatcatggagccctgttggcctggaagatgctaaacttcccaaggaagctcagcggtcaaagtttacttggttactagggaggattttcactatttactttcttccattatgccttgctttttttaattgtatctacacgtcacgaaatgatgaccttatatcagatttcttgtgtacggtggtaatctttctcttcatggtgtggcttttccgtaatataagaatgattgttttatccgttaaaatggaacacaagatgcagttcttgtcaactattataaatgagcaagaaagtggtgcgaatggatgggacgaaattgcaaggaaaataaataggtacttgtttgagaaaaaagtctggaataatgaagagtttttctttgatgggattgactgtgaatggttttttagccacttcttctaccgccttctatctgcaaagaaatctatgtggcttttaccattgaatgtggaactatggccatatattaaagaagcgcaattgtcccgcaatgaagagtctttaatgaagaaatga

SEQ ID NO: 174291 - DNA, 204 bp, Saccharomyces pastorianus
atggaaatgactgattttgaactaactagtaattcgcaatcgaacttggctatccctaccaacttcaagtcgactctgcctccaaggaaaagagccaagacaaaagaggaaaaggaacagcgaaggatcgagcgtattttgaggaacagaagagctgctcaccagagcagagagaaaaaacgactacctctgcagtatctcgag

SEQ ID NO: 174292 - DNA, 99 bp, Saccharomyces pastorianus
tttcccaagaaaaaagccttgttggcgcaatcggtagcgcgtatgactcttaatcataaggttaggggttcgagccccctacagggctttctttttttt

SEQ ID NO: 174293 - DNA, 135 bp, Saccharomyces pastorianus
ttattttttcttccttgtcgtacattatcttacttcatcatcaatcctcgtgtctctgcttatattaagtttgatgaccgtttctcaatctttatgacatcttcttacacagtatattgcaaagtactagtaata

SEQ ID NO: 174294 - DNA, 198 bp, Saccharomyces pastorianus
atgatatatcttggaactggtgtattgttacttctatatgaaaagcaagcaagcgacgaggaaacggatgagacttttgagaagagaagagaactttttcagaatgtttttacttatctaggatatataaccgcaatgactacagtcatgagcggagcatcctatgcattgaaaagaaatgccgtcaagcttctaaaa

SEQ ID NO: 174295 - DNA, 675 bp, Saccharomyces pastorianus
atgaattactttaaacctagcattaagttgattcatttcattgggaaacacaagccatggtcattgtggtcccaaaagattttcattaaaaacgagtatcatgatcaatggaatgaggtatacgaggaatttaaggaagaacatcaattaaataacgaagtttcgaagccaaagattagtgattccgataaaactgagactcctgaaacgataaccccagtggatgcccctccatcgaacgaacccactacgaatcaagagatcgacacaattagtacagtggaagaaaacgtggacaaccagaacgccgagcctgttcctaactcggatcatagccctgctcctaaccctgtcccattggattttaccaagtggttaacaacctttattaacaaagatcacttgactaatcagccagtaaatgaaagcagagaatattcgaaagagaatgataacaatataatcaatagcagttcaaaccgcgaccaagaaagtcctccaaatagtactcaggaaccaaacagctcttatagcgttgtgagtactcaagctgatagcgatgagcaccaaaatgcagaagaggaggatagtacgacagataacgcttcaaattctggagaagaaagccacctcgatgatataagcacggccgcttcttccaataacaatgtaagt

SEQ ID NO: 174296 - DNA, 123 bp, Saccharomyces pastorianus
ggggagctcagggatgacatcgcatctttgcaaggattgcttgatcgacacgttcaatttggcagaaagctacctctgcaggacgccatacgccacatccactggaattttatcacacattaa

SEQ ID NO: 174297 - DNA, 483 bp, Saccharomyces pastorianus
  modified_base (433)..(433): a, c, g, t, unknown, or other
atggaaaaaaatacggcaccatttgtcgtcgatacggcacccacaactcctccagataaacttgtagcaccttctatagaggaagtaaatagtaatcccaacgaattaagagctcttagagggcagggtagatattttggcgtaagcgatgatgacaaggatgccattaaagaggcagcacctaaatgtaataattgctctcaaagaggtcatttgaagaaggattgtccccatataatatgttcgtactgtggggcgacggatgatcattattctcgacattgtccgaaggctatccagtgttcaaagtgtgatgaggtgggtcattacaggtcacaatgtccacataaatggaaaaaagttcagtgcgctctttgtaagagtaagaaacactcaaaagaaagatgtcctagtatatggagagcatatattntagtagatgataatgaaaaggctaagcccaaagtccttccctttcatact

SEQ ID NO: 174298 - DNA, 198 bp, Saccharomyces pastorianus
atttgcgcatatataacagagataggtttaaataatttaataattgttgggatttcacaactattgaaggctataatattatgtataaagaatataccaggaagtcaactcccagaccttgaaatcctcaaaatgaagacgatagttttacataataatattactttttcttctttccttctatatttgtccttcaca

SEQ ID NO: 174299 - DNA, 627 bp, Saccharomyces pastorianus
cctgcaggtcctgccaaatatcaggctacggaactcggagagcaaatgagacaagattttgacctattgaataagagcattctacaaaacatcaagatattttcatcgtctgagagacgtgttcttcatacggcgcagtactggaccagagctctttttggggccgatgaattaggtagcgatgaaatcagtattagaaaggatcttttagatgacagtaatgccgccaaagatttaatggataaggtgaaaaagaagttgaagccacttttaagagagggtaaggaagctcccccacaatttgcctggccttcaaagatgccggagccatatttagtcataaagcgagtggttgaattgatgaattaccataaaaaaattatggataacaactttgctaaaaaggatgtcaactcgatgcaaacaagatggtgtacttctgaagatcctagtttgtttaaggaaaggtgggataaacttttcaaagaattcaataatgctgaaaaagtcgatccttctaaaatttctgaattgtatgatactatgaagtatgatgctcttcacaacaggcagttcctagagaacatatttgacccgggtcttccaaatgaagctatcgccgatgaa

SEQ ID NO: 174300 - DNA, 2547 bp, Saccharomyces pastorianus
ttgactgtagaaaatcaggaacacaatgttcaacccccatcggtaactagtgctggagattcgtattcgacacttgctacagatcttcccttaccaagtacgaatgatattatagaaagtcgagatcaacttacagaaagtgacttagatgaagcgataaatgccactgagaattttgcacaggagttatcatctcaaaggaaatcttctaaattgaaaggtcataaaaagaaaaaccagggacaaataaaggcgaatcgtgacagagatactattgtaaaactttccagttctgttggtgaaaccgaggaagcttccacacgggatgcaatctctcatgatttggaaagaaaagacgacgtaatagagatagccacagatacaataaatgacgctacagaatctcccacacagatcccaatagacgtcaatgtagttatcaaagaaacttctactaacaatgtagcggaaggcacagaaaatgtaccaccaatcaaagaatccacaggaattgaggttggcaatagcccaattacgagaagaaaaaaaaacaaaaagaaaaaaaccacgaatagaagaagtcgtaattcttcaaatcctgcagatactactgatttgtcaaaacagtcaactttagattccatactagtaggcattgaagagtacctacaggaagatggttcaaagaacgaggatatcaaagtaaatattgtccaagatgagcctgttaatgtcgaaaaaatggatatcggaaccagaaatgaatctagtgacgaaaccttcgacatagatgtgcctaacaaagataatgttgacgaaacttcctcaaagtccgagaacaatatcaacgaggaaaaggcagaacataccttacctcgagaagagactgagatcttaaatgttaatgagggaaatgcaacttcttttaaacaccaactagagccgcacggtttggagggaggtgatgaaaatgggcaagcgtctactaaggatgttgaaagtgaaagtttaactaagaatgggtttaatttcaaagagaacgaatcaaaacatttgaaagctggggaaaagcagcagactgaaagtgatagagacggaataagtccttcagttcttgcaaaaaatgagaaagaaacagaaatcgggaaagaagaccatgtttttgaacagaaggataaagaagacgaaaaatgtaggaaagaattatctgttaatcatgagaataacatgagccataattttaacgcagctggtagtgatagtatcatccctccagaaactgagcgagagacttatgatgacgaaacgatgggaccaacaaagcgcattagtgacaatgaaaaaaatctacaacacggtactaacgatatatctgtagaagttgaaaaagaagaagaagaagaagaagaagaaaattcgactttttcaaaagttaaaaaagaaaatgtaaccggggagcaagaagctgtaagaaataatgaagtgtccggtaccgaagaagaatctacatcaaaaggagaggaaattatggggggagatgaaaagcagtcagaagcgggagaaaaatcttccattattgaaatagagggaagcgcaaactctgcaaaaatttctaaagataaccttgttcttgaagatgaagctgaagcacctactcaggaaaacaagcctacggaagttgtcggagaaatcgatatacctgacgcgcctagggatgatgtagagattgttgaggctgtggaaaaaaatataatacctgaagatctcgaggttgccaaagaagatcaagaaggggaacaagtcaagctggatgaacctgttaaggccatgaaagatgataaaatagcaatgagaggtgctgagtctatcagtgaagacatgaaaaagaagcaagaggggactgctgagctttccaacgagaaagcaaaaaaagaggttgatgaaacagcaagagaaagtgcagaaggtgtagaggttgagaaatcgaagactcctgagtctccaaaagtagttaagcgttgtacctccggaagaccagaagatcttcaaatcaacgaaagagatcctgaggttctaaaggaagatgttagagttcccgatgaagatgtaaagccagaaattgcaacaaccattgagaattccgaagaagaagatcccaaatcccagcgcgttcaaatttcaacagaacaagctgaaactacacaaaaggatatgggagatgtaggatctactactagtttcaaagaagaagaaaaacccaaacgctttgaaattacacaagaaggcgataaaatcaccggcaaagatacaaatcatgaacatggtgaagctactgaggctgcgagcgaaaattcaaaagcaagtgatgttggaactgccgaaaaatatatagaacctagcagcgaatctgtcaagaaggacaccgaggaagatgcagaagtggagaattccgaaaaaactgaatttatcaaggtaaaggcagagcttggaaatcttgacgctccaaaagaggcagaagtcactgctgaactgaataatcgaaaatga

SEQ ID NO: 174301 - DNA, 372 bp, Saccharomyces pastorianus
atgaagggcgccaattttttttcgaatagtaacaatgcccacataccagtcgaaattgccagggatatgctagacgatatatttctaagtccaaaaaatctttatgaagttcacggtcctgggatatcagcaaaagctctagaaatagccaatgcattagtggatgttgtaaaccactatgaccaaaatatggagttggaggcttggaatgttttgcgcgatgtggttaagtttgttttctccctgaaatactgtgatcctaacatgatacagaaattcacgactaaatgtcaaagtgctctaattactctgcctatcacgagacttttgcaatcaagcgttagttccaaagaccatgccgatatagtcctt

SEQ ID NO: 174302 - DNA, 255 bp, Saccharomyces pastorianus
atggctaatttggcaggtgtgtcgaaattcgaatatttaaacaaaatacttgaaaccttggtcgagaagcgcaaagtaagatctgttatttctttagctaagcacttgtttttttatggtgactatcacggtaatcgatcaccgatagcagatccgaatatgcgcgcttgtattataggacaatctatggataactcaattgaagacttagcggttatgtatttgagtgcctgtgaattcatatcacaacaaaca

SEQ ID NO: 174303 - DNA, 465 bp, Saccharomyces pastorianus
ttagatatcagttctttatccacggattctgagtcgcttgacttcttcagcatacttaaggcttttgttagatgctcgtttagtatgatagcttcatggcgcagcttgccgatctgtaaaacatgctgttttgattcttcctcgtatttttccttcatagacacgtcctctttcatgtcctctatttcttttttcaagctttcaagaattgtaatatcattgttgtgtgcttccagctctgtgtcaagttgtgagcgcaaatcttttacttccagatccttttctcttaattcctcttcctttttgctgacaagttcttcgatttttagttccagatcgttcaccgagttttgcaatgctgttttctcactttcgtgtaattccaaagcttgcttcaaatcatctttttcgtttctcaggtcagatatatcttgtttgaggttctctaaaattatcatcagctct

SEQ ID NO: 174304 - DNA, 243 bp, Saccharomyces pastorianus
ctagaggggaacccgttcgcggtgagagatcctctccagctaaggaggttctacaaaattcacaatgcctgcgtgcaattaagggaggcaataaaagtcatctacgatagcgcccctaccaatgaagatatcaatgatatggtcaagaatgggtctcagctagaacaaagcattggggtgagccccgccatgtccgtagctagctatttgaagatggaacaaagatcactagacatagaaagt

SEQ ID NO: 174305 - DNA, 1032 bp, Saccharomyces pastorianus
aggaaccaggctagacagaaactggccaatctatcacaaactcgattcaatgatttgttggacgatatcctttttgagatcaagagaagagggttcgacaaggatttggatgctccacggcccccattaccgcagccgatgaaacaagaggtcagcaaagacagcgatgatactgcaagaacatccacagattcttcctctgtgactcaagtagctccaaacgtctccgtacaaccttctttggtcattcctaagatggcatctatcgattggtcttctgaggaagaagaagaggagcaagtaaaggagaagccaaatgaaccggagggaaaacaaacaagcatggatgaaaagaaagaggctaaacctgctctaaaccccatagttacagattctgatctgcctgactcccaagtgctcgctcgtgatatcacatcaatggcaaggactccaacaacgacgcataaaaattactgggacgttaatgattctccaattatcaaggtagataatgatatcgataacgaaaagggtcccgaacagttgaagagccctgaagtacaacgggctgagaacaataaccctaactcagagatggaagacaaggttaaagaactgactgatttaaacagcgacttacatttgcaaattgaagatttgaatgctaagttagcatctttaaccagcgagaaggaaaaggagaagaaggaagagaaggaggaaaaagaaaaggaaaagaacttaaagagtaactacaccattgatgaaagttttcagaaagaattgctgtcattaagctctcaaatcggtgaattatcaattgagaatgaaaatttgaagcagaaaatttcagaattcgaactgcatcaaaaaaagaatgacaaccataatgatttgaaaatcactgacggttttattagcaagtactcttctgccgatgggctcattccagctcaatacatcttaaacgctacacacttgatcatccacttactactacgcttccgcagtaccataggcgactcacggcaa

SEQ ID NO: 174306 - DNA, 447 bp, Saccharomyces pastorianus
atgagtttcggtagtaaagtctccagggctttgagatttttggaaattcctgtcaaagacagggcatctgtgagtttcttgaagaacccggatttgcaacctattaagtcggttaaccaaacatgggggttctggtctaattttgcatactggggtgttatgtccttttcagtgagtacatggatgagtgcctctgctgcactaggtgttggattaagttacccagaaaccattggtacatttatcgtcggtgatgtgttgaccattattttcacattggcaaactcgtgtcctggttacgactggaaggtcggtttcactttggcccaaagattcgtcttcggtatttacggttctgccttcggtatcatcatcagaattttgatgagtattgtcaactacgggtccaacgcttggttgggaggtctttgtatcaatatgatcttg

SEQ ID NO: 174307 - DNA, 84 bp, Saccharomyces pastorianus
gctgataaggatcatatgtggttgtccaagcaagagtggcaagaaagtgggccagccgcaatgagtaaatttggtccgagatag

SEQ ID NO: 174308 - DNA, 684 bp, Saccharomyces pastorianus
atgttgggtatggtgatttatttagctaaccaggctcacggtgttggagaattgtttacctccactaaatccactgccactggctccaccaaagcttgggcttgggtttatatgatctcgtactggttcggttccgtttctccaggttccaccaaccaaagtgattactcgagatttggttcctccaattgggctatctgggccggaaccatctgtgcattgttaattccaaccactttaatcccagtttttggtgttattggtgcctccacctgtgacaaactatacggtgaacaattttggatgcctatggatatcttcaaccattggttgacaactaactattctgcaggtgctcgtgccggtgcgttcttctgtggtctttcatttgtcctatctcaaatgtcctacaccatctccaactgtgggtttgccagtggtatggatttggccggtttattacccaagtacgtcgacatcaagaggggtgccctttttgccgcatgtgtctcctgggcttgtttgccatggaacttctacaactcttcttctactttcttgactgtcatgagttctttcggtgttgtcatgactcctattattgctgtcatgatctgtgataactttctgatcaggaagaggcaatattccattactaatgcctttattttaaagggtgaatac

SEQ ID NO: 174309 - DNA, 237 bp, Saccharomyces pastorianus
atggagatgctcttgtttctgaacgaatcatacatctttcataggtttcgtatgtggagtactgttttatggcactcatgtgtattcgtatgcgcagaatgtgggaatgccaattataggggtgccggggtgccttatgaaacccttttccgtgcctgtgaagtttccgctttcggtcaaaaagaatatccgaattttagatttggacccttgttcagaagcttattgtctaagcct

SEQ ID NO: 174310 - DNA, 240 bp, Saccharomyces pastorianus
atgatcactatgaagatgtttttgtttttaaacgaggcatgtatctttatagattctgtatgcgaaggtattgttttctggggcctttgtctattcgtatgcgccgaatgtgagaatgccaattataggggtgccgaggtgccttataaaacccttttccgtgcctgtgatacttccttttttggtatagcagaatgtctgaatttagttgctatagatcctcgttcagaagcgtattgc

SEQ ID NO: 174311 - DNA, 570 bp, Saccharomyces pastorianus
atggatatggagtcggctagcaaagaggaattgttggaaaagctggaccaagaaatcacggtaaacttgcagaagatcgactcgaatttcagtttttgctttaataagatcacccaagacatcataccgcatgtggctaagtactcagaagtatgcgagcggatcatggacagcaccgaatggctgggtaccatgttccaggagactgggcttgtgaacttgcaggccaacgccgtgtcggagaagaacacccccgccaagaagaagatcgataatgatgctagcatgtttcccacatccacggaggacccgagcggggcgtttcaagcccatggtgatggcgactttgttccggtcatggatgccaaccggaacactcattcaatgttcactaacgacgacacagacgatttccacacagcaaacataacgtcaaccggacaggtattgaagctgcccgattctagtgatgaagacaacggcggcgaggcgccatcttcaaggagccaacgagacctcgctgaagaggatcatagcgacaccggtcacgaccaggacgaaagcacaatc

SEQ ID NO: 174312 - DNA, 2442 bp, Saccharomyces pastorianus
aaaaaggcaaagagaagcaatttatatactcctaaagccgagatgccaccggaacatctgcgaaagattattaatactcacagtgacatggcctccaaaatgtacaatactgataaaaaggcttttctaggcgccctaaagtatttaccgcacgcgatcttaaaattgttagagaacatgcctcatccatgggagcaagccaaagaagttaaagttttatatcacactttaggagccataacatttgtgaatgaaacaccaagagtaatagagcctgtatatactgcccaatggtcagctacttggatagcaatgaggagagaaaaacgagatagaacacattttaaaagaatgagatttccacctttcgatgatgacgaaccacctctgtcatatgaacagcacatagaaaatatcgagccactggatcctataaatcttcccttagactctcaagatgatgaatatgttaaagattggctctacgattcccggcccttggaggaggatagtaaaaaggtcaatggtacatcttataaaaagtggagttttgatttacctgaaatgtcgaacttatataggttatcaacgccacttagagatgaagtaactgacaaaaattactattatcttttcgataaaaaatctttttttaacggtaaagcccttaataacgcaatccctggaggtcctaaatttgaacctttatacccaagagaagaggaggaagattataacgaattcaactctatagatagagtaatatttagggttcctattagaagcgaatataaggtagcgtttcctcatctatataattcccggccccgttcagtgcgcataccatggtataataatccagtgtcgtgtattatccagaacgatgaggagtacgacacgcctgcacttttttttgatccatcgctgaacccaatacctcactttattgataataattcatccctcaacgtatcaaatacaaaggaaaacggtgatttcactttacctgaagattttgcacctcttttggctgaagaagaagaacttattttgccaaatacaaaagatgcgatgtcgttatatcattcaccttttccatttaatagaactaaaggaaaaatggtgagagcacaagatgttgccctggctaaaaaatggtttttgcaacatcctgacgagaagtatcccgttaaagttaaggtctcttaccaaaagctcttgaagaactacgtgctaaatgaattgcaccctactttgccaacaaaccacaacaaaactaagttattgaagagtttaaaaaataccaagtattttcaacaaactacaattgattgggtagaggcaggactccagctatgtcgacaaggacacaatatgttaaatttattaatccacagaaagggcctaacttatttacatctcgactacaatttcaatttaaaaccaactaaaaccttaaccacaaaagaacgtaaaaagtcaagacttggaaactcatttcatttgatgcgtgaattgctaaaaatgatgaaactgattgtagatacacatgtgcagtttaggttaggaaatgtagatgccttccagttagcagatggtatacattatattttgaaccacataggacaattgaccggtatttatcgttataaatataaagtaatgcatcaaatccgcgcatgtaaagatctgaaacatatcatatattataagtttaataaaaatttgggaaaaggacctggttgtggattttggcaacctgcgtggagagtgtggctaaatttcttaagaggcactataccactactcgaaagatatattggaaaccttatcacacgtcaatttgaaggccgttctaatgaaattgtcaaaactacaactaaacaaagacttgacgcctactacgatcttgagttacgaaactcggtcatggatgacattttagaaatgatgcctgagagtattcgacagaaaaaggcaagaactatactgcaacatttaagtgaggcttggagatgttggaaggctaatattccatgggatgttcctggtatgccagccccaatcaaaaaaataattgaacggtatataaaatccaaagctgatgcctgggtatctgcagctcattacaatcgagaacgtataaagcgtggagctcacgtcgaaaagactatggttaaaaaaaatctggggcgtttaacgagactttggatcaaaaatgagcaggaacgtcaaaggcaaatacagaaaaacggtcccgaaattactcccgaagaggctacgaccatattttctgttatggttgagtggcttgaatcaaggagcttttcaccaataccatttccacctttaacttacaaaaatgatactaagatattagttcttgccctcgaagacctaaaagatgtctacgcatcaaaagtacgtttaaatgcattctga

SEQ ID NO: 174313 - DNA, 1098 bp, Saccharomyces pastorianus
gtaccagctatgaaaagattgcctattccacctttgaaggatacattgcaaagatttttggacagggtcgagccattacaggatgctttgcaaaatgaaaggacgagatcgaccgtcttatcgccgacgaatttaaagctaatggaaactttacataataaactgctggaatatgactcacaaatcgccaaagaaactccacattcttcgtatatcgaacaattttggtatgattcttatctgacatacgacgcctcagtagtgctaaatgttaatccctttttcaaattggaagatgaccccataattaataatcacaccttccattcggaatctgctccatatggggagcatactttgcagattaaaagatgtgccaaactggtcacctcgatgttaaagttcgttaaaagcatccgttgtaggacactaaagcctgataccattcatggtgagattcaattatctatggatcaatatgataagttgttcggatcaagtagaataccacctagtacaggccaagagtcgtgccatttacagacagaccctacttcccatcacgtcataatcgtgtataaatcccaattctattggtttgatgtactggatattgacaattcgcctattttttcaacatctgtggaattagaatggaatttgtactcaattattaacgactatgaagaagcctacaagcatcatcgtcgccaccacaatcacccacagaacgataataaaccctttccatttggtcttttcactacagaaagtagaagatcgtgggcaaaagtaagagattacatatctaaggatccagagtcaactaattgcaggaatttgaagttaattgaaagtgccttattcgtgatatgcctagatgatgtgtcatttgaagagggacaagaagatgagctggtgaagtctatgctatgcggcacttcgaatgtcgatttgagctccaaattgttacataatagtagcatgccgattacgttaagtttgcagcatggcacttgcttaaatcgttggtatgacaaattgcaactgatagttacgaaagatgggaaagcaggcataaatttcgagcataccggg

SEQ ID NO: 174314 - DNA, 216 bp, Saccharomyces pastorianus
tatgcacacggatgctacagtatataccactctcaaacttaccctaatctcactttccactccatcacccatctctcaccatcagtaccaaatgcactcgcatcattatgcacggcacttgcctcagcggtctataccctgtgccatttacccataaagtccatcattatccacattttaatatctatatctcattcggcggccccaaatattgta

SEQ ID NO: 174315 - DNA, 702 bp, Saccharomyces pastorianus
atgcaagctactgccacactagctatggacaatttagtcgataacttcaattatgcaatgttactgcatggagaacaatattttaagctctgcacgccgacaatgccaagtaatggaactctaaagacacttgctaaacctttacaagtacttgacaagaatggtaaagccgctttagttgttggtggcttcgaaacttatgacattaaaactaagaaactcatagcttataacgaaggatcgttcttcatcaggggcgcacatgtacctccagaaaaggaagtgagggatgggaaaagagtcaagtttgctgtccaaaattttgaagtgccacatggaaaggtaccagattttgaggcggagatttctacgaataaagatcaagccgcattgtacaggttatctggcgatttcaatcctttacatatcgatcccacgctagccaaagcagttaaatttcctacgccaattctgcatgggctttgtacattaggtattagtgcgaaagcattgtttgaacattatggtccatatgaggagttgaaagtgagatttaccaatgttgttttcccaggtgatactctaaaggttaaagcttggaaacaaggctcggttgtcgtttttcaaacaattgatacgaccagaaacgtcattgtattggataacgccgctgtaaaactatcgcaggcaaaatctaaacta

SEQ ID NO: 174316 - DNA, 138 bp, Saccharomyces pastorianus
cagtttaataggattattgaaaaccctactgtgcaaactgctgtacaaaatggagaattacaggtatacggtctgctttacaacgtagaggacggtctactgcaaacagttagcacttacacaaaagttacccccaaa

SEQ ID NO: 174317 - DNA, 1401 bp, Saccharomyces pastorianus
atgttgaagtcagccgtttattcaattttagccgcttctttggttaatgcaggtaccatacccctcggaaagttatctgacattgacaaaatcggaactcaaacggaaattttcccatttttgggtggttctgggccatactactctttccctggtgattatggtatttctcgtgatttgccggaaagttgtgaaatgaagcaagtgcaaatggttggtagacacggtgaaagataccccactgtcagcaaagccaaaagtatcatgacaacatggtacaaattgagtaactataccggtcaattcagcggagcattgtctttcttgaacgatgactacgaatttttcattcgtgacaccaaaaacctagaaatggaaaccacacttgccaattcggtcaatgttttgaacccatataccggtgagatgaatgctaagagacacgctcgtgatttcttggcgcaatatggctacatggtcgaaaaccaaaccagttttgccgtttttacgtctaactcgaacagatgtcatgatactgcccagtatttcattgacggtttgggtgataaattcaacatatccttgcaaaccatcagtgaagccgagtctgctggtgccaatactctgagtgcccatcattcgtgtcctgcttgggacgatgatgtcaacgatgacattttgaaaaaatatgataccaaatatttgagtggtattgccaagagattaaacaaggaaaacaagggtttgaatctgacttcaagtgatgcaaacactttttttgcatggtgtgcatatgaaataaacgctagaggttacagtgacatctgtaacatcttcaccaaagatgaattggtccgtttctcctacggccaagacttggaaacttattatcaaacgggaccaggctatgacgtcgtcagatccgtcggtgccaacttgttcaacgcttcagtgaaactactaaaggaaagtgaggtccaggaccaaaaggtttggttgagtttcacccacgataccgatattctgaactatttgaccactatcggcataatcgatgacaaaaataacttgaccgccgaacatgttccattcatggaaaacactttccacagatcctggtacgttccacaaggtgctcgtgtttacactgaaaagttccagtgttccaatgacacctatgttagatacgtcatcaacgatgctgtcgttccaattgaaacctgttctactggtccagggttctcctgtgaaataaatgacttctacgactatgctgaaaagagagtagccggtactgacttcctaaaggtctgtaacgtcagcagcgtcagtaactctactgaattgacctttttctgggactggaataccaagcactacaacgacactttattaaaacag

SEQ ID NO: 174318 - DNA, 438 bp, Saccharomyces pastorianus
catagttattcatttttctccattactaaaggctcttcatggcatttagatgatgcaaaattgatgaaagcactagaaaaccacatcttatcctgcgtcgttaccggatttatttttggcttctttatcctatatggtgaattcacgttctattgctggttgtgttccaagaatttcagtaatctaaccaaaaattggaaacttaatgctataaaagtaagatttgtcgcaattctaaattcattaggcttaagactaaagttgagtaaaagtaccagtgatactgccagtgccactttgctggcaaggcagcagaaacgattgaggaaagattccaatacaaacatagtattactaaaatcttcaaggaaaagtgatgtttacgatttagaaaagaatgattcttctaagtactcactgggaaataacagctcgtaa

SEQ ID NO: 174319 - DNA, 372 bp, Saccharomyces pastorianus
ttcagtatggaagatggacctcatcagttgacagtgaacaattgtggaaacaccaaccacagtagcatcagctccttccatctcaagaagtataaggcatccaaggtccaaaatcctcttgatgacctttacattgttgaatttacgttattggatgaccacacactgcccaatgaatttccgggagatctagctgtaaacttaaagtacacattgaacgttgctgacatgaccttggacttggaatacgaggcaaaactggtcagcggtgaggctactcccatcaacatgacgaatcacacgtacttcaatttaaacaaaactatggataaaaaatccattagcggtacggaggttaggctctgctcataa

SEQ ID NO: 174320 - DNA, 225 bp, Saccharomyces pastorianus
atgggggattctaattccagccaagaagcgtattctgatacaacatccacgaacacttctagaatcgcagatcaaaatcaacttaatttaaacgtggatcttgaaaaaaatcaaacagtaaggaagtcaggttcactggaagcattacagaatgcaaagatacatgttcccaaacacagtgatggttcaccactagatatccagaaattaaatacttacacgttt

SEQ ID NO: 174321 - DNA, 96 bp, Saccharomyces pastorianus
cctattataggggtgccggggtgccttatgaaacccttttccgtgcctgttaagtttccgtttttggtcaaaaagaatatccgaattttagattaa

SEQ ID NO: 174322 - DNA, 1011 bp, Saccharomyces pastorianus
aacattagaataccgtctgatcttccagtagtgcgtaatagagctgaaagcgtaaagaaaagcaagtcagataatacctccaagaggaatgatcaaagtagcaatgtcttcgcatccaaacagctggtcgcaaacatttataagcccaatcagattccaagagaattaacttctcctcaggcgttaccattatcgcccatcacctcaccaattctcaattaccaaccattatcaaactccccgcctccagattttgattttgatctagctaagcgcggcgcagccgattctcatgctattcctgtggatcctccatcatattttgatgtattaaaggccgatgggattgatttgccatactacgatacaagttcatctaaaattcctgaactaaaactaaacaaatctagagagacattggccagcattgaggaggactcattcaatggttggtctcaaattgatgacttatccgacgaagatgacaatgatggcgatatagcatctggtttcaacttcaagctgtcaaccagtgctccgagtgagaacgttaattcacacactcctattttgcagtctttaaacatgagtcttgatgggagaaaaaaaaatcgtgccagtctacacgcaacatcagtgttacctagtacaataagacagaacaatcagcatttcaatgacataaaccagatgctaggcagtagtgacgaagatgcctttcccaaaagccaatcattaaatttcaataagaaactaccaatacttaaaattaatgataacgtcatacaatcaaacagcaatagtaataacagagttgataatccagaagatacagtggattcttcagtcgatattacagcattttatgatccaagaatgtcatcagattccaaatttgattgggaggtaagcaagaaccatgttgacccagcagcctactcggttaacgttgctagtgaaaaccgtgtactggacgactttaagaaagcatttcgcgaaaagagaaaataa

SEQ ID NO: 174323 - DNA, 1665 bp, Saccharomyces pastorianus
aaagaaggaagaaacattgttactgaaaagagcaccgtatcttctgcccatgaaggctttcagcaaagctcatctgcgttttcgtctcaggacggaaataaaattatcaaaaccagaggtgtcacaagaattgaggtagtcaaagaaaagatgacaaccaaggtcaaatggattctggcagcttccgttcttttaacatcgtggattgctgctttggatgccacaacaacgtataactatcaaccgtatgccacatcctcattcaacaggcactcgatgctatcaactttgacaattgcaaattctgtcattggggctgtttgtaaaccgtttattgccaaaatctcagatttgagttccagacctgttacatactttgtggtgttagtactatatgttataggtttcattgtcacggcttgttccccaactattggtgcgtatgtgatcggttctgtttttattgcagttggccagtcaggtatcagtttaatgaacatggtcattgtagctgacacaacttcactcaaatggaggtcttttgtcacctctctattagcggttccttacttggttaccacttggatctccggttacattgtcgagaatattattagtagcaactggagatgggggtacggtatgtttgctattattacaccagttgctttaactcccgcaattcttattatggcctacctggagcaccaagctaacaagacgggggaaattcccgttgggtccgatccgcttgccgagaagaaaagagaggttagagaatctggtattagtgggttcaaagcgtattggcaactcctgaagacttctctaatagagatcgatgcatttggtttagttctacttggccttgctttttctttaatcttgcttccatgctccctgtactcttacgctgaaggcggctggaaaaacccaagtatgattgccatggaagtatttggtggcatttttttaatttcgtatgtcatcttcgaggttttcttcgcaccatttccgttactgccaaagagagtcttagtaaacagaaccttcatttgttgtgtcatcattgatttcatctaccaaatgggcggctatttctctcttttgttctttacatcttacaccttcgttgttttgaatttatcctacagagactgggtctacctctcaaacactaccactatgggtctctgtttctttggagtagtttggggtggcctgttcaggtatttccaccgttataaaatattccaagtcattggtattgctattaaattaatcggtatgggtctttacgttgcatgttccaaaaagagcggtagcccaggaattggtcttgttgctgctgcgttgattgttactagcattggtgacgctgctaacgttatgggtactcaagttgcagcacaagctgccgtccctcaccaagatatggctgcaactatttccgttttgtctctttatacttcgataggtgcagctgttggtacggctattacttctgctgtttggaccaaagaattgcctggcgccttgtccaaatacgttccggacagtgaaaaggcgatcgcattttatgagtctttaactcttatctggcaagagccatggggctcagcaaacagggaaggcgctatcgcagcgtatcaagaggtcaattat

SEQ ID NO: 174324 - DNA, 786 bp, Saccharomyces pastorianus
atgagtgataaaaacagtcgtatcgctatcgttagcgctgataaatgtaaaccaaaaaagtgtcgtcaagagtgtaaacgttcgtgtcccgttgtgaaaactggtaaattatgtattgaagtcactccaacttcaaaaatcgcattcatttccgaaatcttgtgtattggttgtggtatttgcgttaagaaatgtccatttgatgctattcaaattatcaatttgccaactaatttagaagcccatgtaactcaccgttactctgccaatagtttcaaactgcacagattgccaacaccaagaccgggtcaagtccttggtttagtcggtaccaacggtattggtaagtctaccgccttgaaaatcttagccggtaaacaaaaacctaatttaggtcgttttgatgatcctcctgaatggcaggaaattattaaatatttccgtggttctgaattacaaaattacttcaccaagatgctggaagatgatatcaaggctataatcaaacctcaatatgttgataacattcctcgtgctattaaaggtccggttcaaaaagttggcgaacttttgaaattgagaatggaaaaaagtcctgaagatgtgaaacgctacatcaaaattttacagttggaaaacgttttgaaaagagatattgaaaagttatctggtggtgaactgcaaagatttgccattggtatgtcatgtgttcaagaggctgatgtttatatgttcgatgaaccttcatcttatttggatgttaagcaacgtttgaatgccgctcaa

SEQ ID NO: 174325 - DNA, 180 bp, Saccharomyces pastorianus
ctaaattactacagaatgagcaacacagtgaacaccgagcccaataggtataccgaggagtttcggtcaagccactacaactcacaacctttcatgccctttgcatcatcgcctccttgtaacggggccctttgcgaagagtacgcggtggatatgaactacgtttacaggttaccatta

SEQ ID NO: 174326 - DNA, 219 bp, Saccharomyces pastorianus
ctggcagaggtaagaaagaatatcatggcaaaccgttataaagaggcgtttattgtttgtcgtacacacagaattaaccttgatattttgcatgactatgcgccagagttatttattgaaaacttagaagtatttatcaaccaaatcggaagggttgattatctcaatttatttatttcctgtttgtcggaagatgacgttaccaaaacaaaaatataa

SEQ ID NO: 174327 - DNA, 834 bp, Saccharomyces pastorianus
gtccttagaattttcttcggtcgagcacaagtccccccaactagtggacagaaaagaagccgcaaaatagctgtcatttcagttttgccaaattttaagaagccatatattaatgattttttgagtttggctagtgaaaggctggattataattatttttttgggaacagccatcaaataaatagctcaaaggctaccttgaaaactatcagacggatgactggtttcgttaacattgtaaattctactctgtctgtattaagaacaaattttcctttgcatactaattcagtgctgcagccgttgatctattcaattgctatggcatactatgtcttagatactgagagcacagaggaggtacatttaagaaagatggcaagtaatttaaggcaacaaggtctaaaatgtttaagtagtgtctttgaatttgttggaaatgcatttgattggtctacttctatggaagatatttacgccgttgtagttaagcctcgtatttcacatttttcggatgaaaacttacaacaaccctcctctttactaagacttttcctttattgggcacacaatccatctctgtaccagtttttgtattacgatgaatttgcaactgccactgcattgatggacaccatatcaaaccaacacgttaaggaagctgttattggcccaataattgaagcggcggactcaattattagaaatccagtaaatgatgatcactacgtagatttggtgactctcatctgcacatcatgtctgaaaatacttccttcgctatatgtcaaactttctgactcaaactcgatttccacatttttgatttgctag

SEQ ID NO: 174328 - DNA, 384 bp, Saccharomyces pastorianus
atggacacatatgttgtctatgatttagaaaatcacgaagtttctcttgctcaggccagctttaataatgaagaagaagatattgagattatctctgacagtgtcccaggtgccacacctgctcccggatactccagtacgtgggtgcatacgcctggtagtcccatcggaacaggagactttctcgatgtaagttggacctcctattcagagttttcacaataccaaccaattcattccaccgaaattggtgatgggactagttcttcctcaagcggtagtagttccagtgaaacgaccaccaaaaagaaaaattcgggttacagatgccgtcgttcatctttctccttttcaatattatctgttatatcttattttcttttg

SEQ ID NO: 174329 - DNA, 504 bp, Saccharomyces pastorianus
atgaccaccgtcaccggtaccaacggtttaccaactgacgaaaccattatcgtcatcagaacacctacaacagcaagtactgcgataactacaaccgagccatggaccggtactttcacatctacatccacagaaatgaccaccgtcaccggtaccaacggtttaccaactgacgaaaccattatcgtcatcagaacacctacaacagcaagtactgcgataactacaactgagccatggactggcacttttacatctacatccacagaaatgaccaccgtcaccggtaccaacggtttaccaactgacgaaaccattatcgtcatcagaacacctacaacagcaagtactgcgataactacgaccgaagcatggactggcacttttacatctacatccacagaaatgaccaccgtcaccggaaccaacggtcaaccaactgacgaaactgtgattgtcgtcaaaacacccaaaactgctagcaccgtcataactacaactgag

SEQ ID NO: 174330 - DNA, 366 bp, Saccharomyces pastorianus
atggatattcgtggtagaaaaatgaaaaaaccgcctgcatgcgtgcagtgccgtaagaggaagataggctgcgatcgtgttaagccgatttgtgggaactgtatgaagcataataaaatggactgcttttatccggacgttcccggacaatacgttccctctagttcttcctcttccaatacacgccaagtagccaacggtccgtacttaaactcttattacgcttctcgtcgtgtctccaaggaaactgctgtacttttgcagaaaaatccagaactggcttctttggagcaaataagagaatacaacacgcgtctgcaactgctcaatgctcaaaatcaacttaataatagatcatctgcggca

SEQ ID NO: 174331 - DNA, 231 bp, Saccharomyces pastorianus
gaagaggacagcgacttagcacttccaccaccaccaccaccaccgcctggatacgaaatcgaagaactggataatccgatggtgccatcatcggtaaatgaggatacattccttccgcctccaccacctcctccaagcaacttcgaaataaacgctgaagaaagttgtgacttcacattaccaccgccacgggatcctctagagacaccctgcagcatcagctgcctgccg

SEQ ID NO: 174332 - DNA, 489 bp, Saccharomyces pastorianus
tttcacctttcgcacacagaagaggacaagttaaatgagttccaggtcatcacgaatttccccccagaagacttgccagatgtggtgagactgttgaggaaccatggttggcagttagaaccagcattgagccgatatttcgatggagagtggaaaggcgaaccagaccagatgggagagtccactcaaacgtctacacccatggctgagaccttggttcctcccgcgttgggacctagaccgttgttatttacagcctcactgcccgtagtcagaccattgccagcgaacttccgcaatgatttcagaacaattggtttaaatggacgctctaacactgtatggtccatgtttgaatcttttagttatgatggtaacccctttctttttattttactgttgatccctcggataatcaataggttatctgccacaatattcacgtctttgcactctattgtccctgcattcgataagtggtggcggtaa

SEQ ID NO: 174333 - DNA, 915 bp, Saccharomyces pastorianus
agagtcctactttccttgttagaagccgaactcttggtcggtacagaggactgtggtccaattggtacattccttaaagaggtcgagacacaaaaaaacgcaaaactggcgttgtccgaagtcaaagaaggatgttctgatagagtcttaattatcgaaagtgaggacgctagaaacgtctgtgaagctctggcaaagattttggaatgctttactggcgatgatgagatcatggaaaaactgcaccaaaatgaccataaatttcatttcttgaaaattcttctccccacaccaacggagtttgattttgagaaagttacaaacaaaaatatgctaactacagttagattacttttttccaattcagaaacttctgctattattggaaagaatggcgttgtaattaagaagctaatggatgacaacgaggtcagaatacttgcctcgaagcattgcttaccagacagcgaagatcgggtactagaaatccaaggtctgccatcctccattggccaaacttggctgcatatttcccaattggatatggagcccacctcagaaagttcgtctaatgataagcgttcggaaaggatgtattttcctcatcttgcaaaggctctaagaggctctaatgatagatcagcagagtttaaatctaccgtcatgattccggaagaatttgtcggcgctcttgtgggtagaggtggtaatagaattgctaatttgagaaaatatactaagaccaagatactaattgaaaaccaagataatgcaaaggggaaaccttcacaagaaagagctttcaccattgtgggaaacttggaaagaaatgtccaaattgctgaaaagatgctatttaacaatttgaagactgaaagggaaagacgtcaaaattattcctcaaaaaagtcatca

SEQ ID NO: 174334 - DNA, 606 bp, Saccharomyces pastorianus
atgacaaaatcagacgaaacaacagctaccagcttgaatgctaaaactctaaagagttttgaatccactcttccaataccaacttatccaagagaaggtgttaaacaaggtattgttcatctgggagtcggtgcattccaccgttcccatttagctgttttcatgcaccgtctgatgcaggagcaccacttaaaggactggtccatatgtggtgttggtttaatgaaggcagatgcacttatgcgcgatgccatgaaggcccaagattgcctatacacccttgtggagcgtggtatcaaggacactaacgcttatatcgtcggttccattactgcttacatgtacgctcccgatgatccaagagctgttattgaaaagatggccaatccagacacacacattgtttctttgacggtcacagaaaacggttactaccacagtgaagcaacaaactccttaatgacagatgctcccgagattatcaatgatttgaaccacccagaaaagccagatactctgtatgggtatctatatgaggccctgttgttgcgttacaagagaggtcttaccccattcactattatgtcatgtgacaacatgcccaaa

SEQ ID NO: 174335 - DNA, 330 bp, Saccharomyces pastorianus
atggataggaaaaggtcttttgaaaaaattgtcgtttccgtcatggtcgggaaaaatgtacaaaagttcctgacgtttgttgaagacgaaccagatttccagggcggaccaatcccttcaaagtatcttattcccaagaaaatcaacttgatggtctacacgttgtttcaagtgcatactttgaaattcaatagaaaggattacgataccctttctcttttttacctcaacagaggatactataatgagttgagttttccgtgtcctggaacgttgtcacgaaatagcgagtgccaggccgaacgacagctctacgatgcgtactttcac

SEQ ID NO: 174336 - DNA, 75 bp, Saccharomyces pastorianus
tgccttaaccaactgggccaagagacctatttttttcggaagtcactgattaatagtttgataatacaggtgtaa

SEQ ID NO: 174337 - DNA, 525 bp, Saccharomyces pastorianus
ctgacaagattaaactggccctttttcaatatgctttattgtaggacggtaggtgccttaatgaggaaaaaggagattcacacgtacaacggggtattgtggtacctcctggggttggtgttttcctttagttttttttccaaagacgttactttgatatcattgttcctactgagttggtccgatacagccgccgcgacgatcggaaggaaatatggtcatttaacacccaaattggcgagaaacaaatctcttgcaggctcgatagctgcatttacagttggggccatcacctgttggacattttatggttattttataccaacttactactacgtcaataaacctggagagattgaatggactccagaaacaagtaaattaagcttgaatatgttatcgttgttaggtggtgtggttgctgcattgagcgaaggtattgatttgttcaactgggatgacaacttcactattcctgtactatcatcacttttcctaaatgctctaatcaaagctttcaaaata

SEQ ID NO: 174338 - DNA, 1017 bp, Saccharomyces pastorianus
atgaacattgttaatatctataaagagcttgaatcagttaaatctttaagtgacttgagtaaagatctcttgcagagagccaagaaattagggttttcagataagcagattgcggttactataaataaacacgcctccacaaacattaacgaactggaaatcagaagtttaagaaaaacgttaggtataatcccttttgtcaagagaatcgatactttagccgcagaatttccagcgcaaaccaattatttgtataccacttacaatgctacaaagaacgatgtggagttcaacgaaaatggtatgctggttttaggctctggtgtctatcgtattggttcatctgtagaatttgattggtgtgccgtgaacaccgcgaagacattaagagatcaaggcaagaaaactatcatgataaattataacccagaaacagtttccacagatttcgatgaagttgatagattatactttgaagaattatcgtatgaaagagtgatggacatttatgagttggagcaatctgagggttgcattatttctgtcggtggtcaattacctcaaaacattgccttgaaactttacgataacggctgtaatataatgggtaccaatccaaacgatattgatagagctgagaacagacacaaattctcatctattttggattctattgatgttgaccaacctgaatggagtgaattaacatcagtagaagaagcaaaattatttgcttctaaagttaactaccctgtgttgattcgtccctcatatgtgctttccggtgcagcaatgagtgttgttaataatgaggaggaactgaaggctaaattaactttggcatctgacgtttctccagaccacccagtcgtcatgtctaaatttattgaaggtgctcaagaaattgatgtggacgccgttgcttataatggtaatgtcttggtacatgccatttccgagcatgttgaaaatgcgggtgtgcactccggtgatgcttctttagtcttaccaccacaa

SEQ ID NO: 174339 - DNA, 189 bp, Saccharomyces pastorianus
atgcattcgttaaaaggcgtttttgtatcaaataacgtcactatcagccattgtcacttgccactgtcgcctgccaccgctattgccattatcatttgctttcgcatcgtcaccgatttaaagctctctaggctaacgtacgcatttcacctcccaggccctatctcttttctacctgtcatccctata

SEQ ID NO: 174340 - DNA, 129 bp, Saccharomyces pastorianus
ccgtattgcacatgcagcgggctgaaagtcgaatacctgaaggtcgaagagccacagctgcagtaccagtcgttcccttgggtccgatacaagaccatcagcgacgacgagtacgcatacatcgtctga

SEQ ID NO: 174341 - DNA, 828 bp, Saccharomyces pastorianus
atgaacaagtctgccgctagaatttgtttgccaactttcgaatctgaagaattgatcaaacttaccgggaaattgatcgaacaagataaacacttggttcctcaaggtaatggttactcattatacatcagaccaacaatgattggtacatccaagggtttaggtgttggcactccctccgaggctcttctttatgttattacttctccagtcggtccttattataagactggtttcaaagccgtacgtcttgaagcaacagactatgctacaagagcttggccaggtggtgttggtgacaaaaaattgggtgctaactatgccccatgcatcttacctcaactacaagctgccaaaagagggtaccaacaaaatctatggttgttcggcccagaaaagaacatcactgaggttggtactatgaacgtgttcttcgttttcctcaacaaagtcactggcaagaaggaattggttaccgctccattagatggtaccattttagaaggtgttaccagagactctgttttaacattggctcgtgacaaactagatcctcaagaatgggacatcaacgaacgttattacactattactgaagtcgccactagagcaaaacaaggtgaactattagaagccttcggttctggtactgctgctgtcgtttcacctatcaaggaaattggctggaacaacgaagatattcatgttccactattgcctggtgaacaatgtggtgcattgaccaagcaagttgctcaatggattgctgatatccaatacggtagagtcaattatggtaactggtcaaaaactgttgccgacttgaac

SEQ ID NO: 174342 - DNA, 183 bp, Saccharomyces pastorianus
tctttttcttcttcttcctcttctctgtacattgctgctccttctctttttaaatttcttagacgagaggcgttctcttcatccgcgtcctcttcttcttcttcttcctcattatcatcctcttcgtcgtcaaacgcagcctcctcttcttcatcgtcgtcgactaaaaagtcatcttcttca

SEQ ID NO: 174343 - DNA, 360 bp, Saccharomyces pastorianus
atgtccttctctgtgggtgcctggattagtgcctcgtgtgcactgtccgagggactgagttattcagagactatcggtacgtttattatcggtgatgtgttgactatcctatccaccctggcctactcatgtcctggttacgactggaaggttggttacacgttggctcaaagatttgtcttcggtatcaatggttgcgctttcagtattatcatcaactatggttccaacgcttggttgggtggtctttgtattaacgtgatctcagattcctggtctcatcactatttgcatttacgtaacactttgttccccagtgtcgccatgactactaaggagttgatctctttctttgtttac

SEQ ID NO: 174344 - DNA, 585 bp, Saccharomyces pastorianus
aaaaagcaaaatggtaggagaaatgtacaaccattcaatagagatactcaaattaagaatcccagtaaaatcataagattcaatgacccaaacgaggacgatgatgtctccaacagacttttgaaaggtgatgttgttacatacaaatccttgaagagtcgggcaaatgagttacttcgagtgagaaagacattgccggtttatcaacacaagagcgagataatgccctatatcaatgctaatcctgttacagtgcttattggtgaaacgggttctggtaaatcgacgcaaattccacagttcattttggagcagatatatgataaaaagaaacacggatccattgctgtcactcaacctcgtcgtgtggcagcgattaatttggctacccgtgttgcccaagaacatggttgtaaattgggtgaccaagtgggttattctgttagattcgacaatactaccactgcaaaaactagacttaagtacttaaccgatggtatgctacttagagagctaatgatgaataataacctcaggaatacagtgtcattatcatcgatgaagcgcacgaaagaaccgtactga

SEQ ID NO: 174345 - DNA, 135 bp, Saccharomyces pastorianus
  modified_base (66)..(66): a, c, g, t, unknown, or other
atatctggatcgatcatggaagacttgattaggaacgctgttagatacggttctgagaaacctcanatatcgcacgatgatcttaatgatgtcgtagagactgttctaaggaagtttgcggattacaaaatctaa

SEQ ID NO: 174346 - DNA, 162 bp, Saccharomyces pastorianus
ttagaagttctcctcgatgatataggattcctcgaaatggaatctatatttctatataccaatattacgattattcctcattccgttttatatgtttcattatcctattacattatcaatccttgcacttcagcttcctctaacttcgatgacagcttctca

SEQ ID NO: 174347 - DNA, 81 bp, Saccharomyces pastorianus
ttgtgtgggttattaaacgtgggactttggaaatacatccaagaagcacaattgagctctaacgatgaaccgttaccataa

SEQ ID NO: 174348 - DNA, 102 bp, Saccharomyces pastorianus
atgagacatggctcaaatatacagacaggtattctggcgtactataatgtgtgcgatgccatcgagcaagagatagatcgcctactgaatgaccccgtaacg

SEQ ID NO: 174349 - DNA, 774 bp, Saccharomyces pastorianus
atgccttgtttcgacaagaagctggaagcctcccgtccagagtccctggacgacgccatcgattgtgtgatcacaccccgcgaggtggtcacgatgctgcaagaactggggttggactacaaaacgtttgccaccgagaacaagaccctgtacgggcggctatcgccgcccgggtgggacccgcacgtgcactgggcgtcgaacctgggcggctcctgcggcggctacgcataccagtacgtggccgccatgcagcggctgcacccgggtagccaggtggccgtcctggagggtaagaacagcgacatcgtcgagtaccgcctgcagatgcacggctcggacaccccgatagccgccgcgagcgagctgtctggtttcagaaacatccagaacctggtgcgcaagctgaccgtgggcggcgccgggcccgagcgcaccaggagaaacgtgaccgtgctgcgaaagaggcgcgctggccccggccccggcgcaagctcacgccgggtggcgtccgccgccacggccgacccgttccattgcgactacatcgaggtgaacgcgtgccccggcgcgtgcatgaacggcggcggcctgctcaacggcgagcaaaacagtctcaagcgcaagcagctcgtgcaggcgctgaacgagcgacacgcgcaagagctcgccatggtggatccgctgacgctggacttggagctggacctggacttgaagtctctcccgctggagtattcttcgcgccccgtcgagcagtccgtcgagaaggat

SEQ ID NO: 174350 - DNA, 411 bp, Saccharomyces pastorianus
acaagtgactcgaatgtatacccaggaaaggctaagtcgcatgaacccagctggatagaaatggatgatcaaactaagaaggacggcttagatattgttcatgttgagttcagtccggatacaagagcgccaagcgatagcaataaagtaataacagagatatttgacgctactgaggatgccaaggaggcagacgaaagtgaaagaggaatgccacttgcgacagcattgaatacatatcccaaggcagcagcttggtcactattggtctctacaactttaatcatggaagggtacgacacagctattcttggagctttctacgccttgcctatttttcagagaaagtttggctcacaaaatgacaaactggagaatgggaaatttcagcgtcatggcaaatcgggctga

SEQ ID NO: 174351 - DNA, 177 bp, Saccharomyces pastorianus
gaaacggttggggcagaagtagttgaagctgtagaggtgattgtcgagggggacgaagaagtggacgatggtgtagatgaagaggaggaagaaaaagatgttgatgacgactcggacgtagacgatgatgctgaagacgttgaggttgaagaaacggaagagctcgaagaatccgat

SEQ ID NO: 174352 - DNA, 312 bp, Saccharomyces pastorianus
aaactcgaatatgaaaagagcgtaggttcattttcgtctaaatgtcttgaaacccaaagtattgcgctaccaaaggacgtttttagaagttcatttacctggttctactatgggatctacaagtcattcgcctttcgtatctggctagtgctatggttgctgatcattttttggcaaaagttatccaatgattggctttatcctttcatggcttccagatttgtgcttttagggctaattcccttgccctatattgtaaagatgtatcataaatgtgccctctcgaaacaagttactcaaagaaatcattga

SEQ ID NO: 174353 - DNA, 1077 bp, Saccharomyces pastorianus
atggatggtcccaattttgcacatcaaggcgggagatcacaacgtactactgaattgtattcgtgcgcacgatgcagaaaattaaagaagaagtgtggtaaacaaataccgacatgtgcaaactgcgataaaaatggggcacactgttcatatccaggtagagccccaagacgtaccaagaaggagttagcggatgctatgctacgaggggaatatgttccagtgaaaaggaacaagaaggtaggaaaaagcccattgagcactaagagcatgccaaactcttctagtccgctatccgcaaatggcgctataactcccgagttttcgccttacgaaaacgatgatgcacataagatgaaacagctaaaaccgtcagatccaataaatcttgtcatgggggcaagtccaaattctagcgaaggtgtctcatcgctaatttcggtgcaaacatcactaaatgataattgtaatcattcttcgcacttatcctctaatgaaaattccatgattccttcccgatcattaccagcttccgtgcagcaaagttcgacaacttcatcattcggaggatataacacgccttcaccactaattagcagtcatgtgcctgcgaacgcccaagccgtaccgctacaaaacaacaatcgcaatactagcaacggggataacggcagtaatgttaaccacgataataacaatggcagtaccaacacaccgcaattgagtcttaccccatatgcaaacaattcagcccccaatgggaaattcgattctgtgccggttgatgcatcctcgatcgaatttgaaactatgtcctgttgctttaaaggtggtagaacaacatcgtgggtcagagaggatggctcgttcaagtcaatagatagatccttactggacaggttcattgccgcatacttcaaacacaatcaccgtctatttcccatgattgataaaatagcattcctaaacgacgccgcgacaattaccgatttcgaaaggttatatgacaacaaaaactaccctgacagctttgttttcaaagtatacatgatcatggctattggttgtacaagactc

SEQ ID NO: 174354 - DNA, 168 bp, Saccharomyces pastorianus
atgatgataataatatttatagaattgtgtagaattgcagattcccttttatggattcctaaatcctcgaggagaacttttagtactttctacatacctaatattattgccttattaaaaatggaatcccaacaattatctcaaaattcacccactcttcagaacgag

SEQ ID NO: 174355 - DNA, 426 bp, Saccharomyces pastorianus
atgttattccctaaacgtctgattgtgtggggtgttctattgattttaagtttatcacaatttgtcctctacctgccagccacaacatgtacgaactctaagggacttaggctatgcgctccacagtttactataactgtgattggaggatccagtactgcaaacgagtttattgcaagtgtaagagaatttctgcgattgatttcgtacctgacaattgacatgggttggtcgaatgaattcactgatccaagtgtgtatgaggatgaaaatttggtggacacatttcagcctgataaggtttttgagctcaattattttggattttgtaaacggagtaataaaagcaaagtttattgtacctctaatgagaattatggcatggacgtacttgaagtacttgtcagagacgttgggattcaactt

SEQ ID NO: 174356 - DNA, 402 bp, Saccharomyces pastorianus
aacttaccaacatatctcattccaactctggtaccctttttggcatgtgggccttttcctgtgacgcggtcttcaatgataataccgccttccagtagcttcgtctttggctttgttttgctctcttccgagtctttaactttctctgctttcttgtctttcttggtcgtttgttttttctcggcaggtttagcactttcttcctcatcttcttcatgtttccttttactgtccttcttgttgtttttcttcttttcgtccttttcgactaattcatcaagacgactttcgatgtcactagcatctactaaatcatcaagatcgtcatcaccggaacttagttcctcatcgtcctcttcttcttcttcttcttcttcttctccattggaagattcttcgtca

SEQ ID NO: 174357 - DNA, 615 bp, Saccharomyces pastorianus
tacgtaaaggcaaataaaggtatcactcgagttttgttatcgaaagttctaagtgctccaaatcatactgttgattgtaaaatattccttgaaggcccatatggtgtaacggttccacatatcgctaagctaaaaagaaatttggtaggtgtagccgctggtttgggtgttgcggctatttatccgcactttgtcgaatgtttacggttaccatctactgatcaacttcagcataaattttactggattgttaatgacctatcccatttgaaatggtttgaaaatgaattgcaatggttaaaggagagaagttgtgaagtctcagtcatatatactggttccagtgttgaggacacaaattcagatgagagtacaaaaggttttgatgataaagaagaaagcgaaatcactgttgcatgtctcaataaaagacctgatttgaaagaactagtgcgctcggaaataaaactctcagaactagagaataataatattaccttttattcctgcgggccagcaacgtttaacgacgattttagaaacgcagtggtccaaggtatagactcttccttgaagattgacgttgaactagaagaagaaagttttacatggtaa

SEQ ID NO: 174358 - DNA, 111 bp, Saccharomyces pastorianus
cttgcatttcagcttccattatatttgatgactgtttctcaatctttatgccatcttcttacaccgcatatgataatacattctaataacatgaatactactaataaatga

SEQ ID NO: 174359 - DNA, 984 bp, Saccharomyces pastorianus
atgacttcgaaaccatccaccagtgacggcagggctcactcgatttcccatgtacctggcacgcacatgagaggaacatcggcatcacacagccccagaccgtttaggccatgtgcggattgtacgtgttctccaggcttactgtctaggcaaggtcgtagagcctctctatttttaagacagttagaaaattcaaggaggtcctccagcatgcttctcaacgagttgaagggcgctggcggaggtagcagtgctggaaatgggtctgtttactcatgtgactctctatgcgctgttaacagggaagttaacactactgatagattgttgaagttgcgtcaggagatgaagaaacacgatttgtgttgttatattgtgcccagttgtgacgaacatcagtccgaatatgtatcattgcgagatcaaaggcgcgccttcatttcagggttttccggatcggccggtgtagcctgtatcaccagagacttgttaaatttcaacgatgaccatccggatgggaaatccattttgagtactgatggaagatatttcaatcaagctagacaagaactggattataattggacacttttgaggcaaaacgaagacccaatcacttggcaagaatggtgtgtcagagaagctttggaaatggccaagggacttggcaataaagagggaatggtgttgaagataggtattgacccaaagcttatcactttcgacgactatgtttcttttagaaaaatgattgacactaaatatgacgcaaagggtaaagtggagctggttcccgtggaggaaaacttagttgacagtatttggcccgattttgaaactctacctgaaaggccttgtaatgatttactactgttaaaatacgagtttcatggtgaagaattcaaagacaagaaggaaaagttactgaaaaagctgaatgataaggcttcctctgcgacgaccggtaggaatactttcatagta

SEQ ID NO: 174360 - DNA, 294 bp, Saccharomyces pastorianus
atgaagaaactactaatcacattttacttactgttagcgactttgctaacaaagtcggtagcagctgacaaatcttattctgacctcgttaaaagagacgaaagtgctgccatcaacggttgtcccaatttggacttcaactggcacatgagccaacaaaacattttacattatgacatggatgtcacttctgtgtcctggatcaaagacaacgtttaccaaatcaccattcatgttactgcagtcaaagacatcccattgaagtacttatattccttaaaggttatcggcgtc

SEQ ID NO: 174361 - DNA, 564 bp, Saccharomyces pastorianus
atgtttgttaagtctttgtttgataagactctaacagatagacggagaattgaattacttcatcaatcgtgtaaggaacattctcggattacaaaagaatgctccatgggattgggtcaagaccgtcatttgtatgcaatgtactgtgtctggaatgaatggttcaaaggcatactaccgttaccaccattatatcatgataactcctggagtattctgaatacaaatatcctaagtacttcaaattgtggtaatccttgtttaaaaagctttggctttggccccgtgactgctaatgggtttgggattggttatgttattcgtgaagaatctatatccatcgttgtatcttccaaacataggcaaacgcatagatttgcatctttaatggagaaagcactactagtcatggatcgtatcttccagaaagaatcaagaatacccagtgatggacctatttctaagcaaagtccagatgagtctgcacatcattcacaacatcaggccgaagctctagactttttgttgtccggatacggctgtttcgatgttaatgtttctggg

SEQ ID NO: 174362 - DNA, 75 bp, Saccharomyces pastorianus
aaccaactgggccaagagaccaatttggatcgaaagttaaccattaatatttcacctaattacacactcttctaa

SEQ ID NO: 174363 - DNA, 549 bp, Saccharomyces pastorianus
tcttccgcatggtatttttcaggactggcgtttaggattgtccatgagattggtctgcagttaaatcctgctgctttaaatgacgtcagcgatggagacctaactaaaatggatattgaagtgcgagtacgaatttattggggttgttatctagtggatcactttatagctgaattatacggtagggtaaccgttttaacattatcaaattctgctgttccggagacagatgagctaccagatatcaatgcaggttatgaggactacatgtattccgatccagataaacctttacttgttgcagctccagtaaaaagtttgattttgctgtctagaattactgagttgtataaacgagaaaatacacaacttaaaactacatctgagaaaatgaacgccctttctgccttaaatatagatttacagaaatggagatctagcttgccggacaatcttacatggacaagcaaaacactaatcacagtaaatgacttcgatcccaccatatcgtttgtgtggtaccattactatgatactgctttcgtataa

SEQ ID NO: 174364 - DNA, 3909 bp, Saccharomyces pastorianus
aataacgtgaacggtgacagcttatggagctcgccttatcctggaacgatggcctccaccagtaccactcaattggatagtgtatccactaatgccagtgaacactcctatacaaacattgttttatccgatcaaactcaagagttttttctcgcagcctttgatgacatgctacaaacgattatcacagattgtgcctttctacttacaaaaatcaaagatgcggaggaagattcgttgttatctggtgaagatttaactttggacgatatttcactaaaggcagatttagaaaggtttttcttgtcaatatattttttctatgcatcaaggcctgaatattcccgtgctttctggtctgataaagagtcaaacgcttacggtttcattgaatggtgttccagatgcaatgataacttaatgaggtcttgtttctacctaatgatttctagtttatcctttggtcccgaaaattccttggatgtttatcgttattttggtgagaataattcggtttcatggaaaaatattgcacaatgtgtcggcgattacactaaaaaaataagtaacttcaacacaagccttcaaaaaagacagcgattcagtgaagtaacccataatgatatcgattctacggcggttgctttagaagaaggtttaaatgaagaggccgtaatatttctttcttctctattaactctggttggttcggttacataccatgtcaatgaagatgtaaaaagttcgctatcaaccgtcttttcagaggttctgttcgaatttacgagaataaacacccccctggtaggcgcttcattcaaagttttaagcaatttggttccaaaacttgaatcatcaagggcaaattattgggctttcttggactctttagttttcaaaaatatatcacagaattcttcctcagaatcctataaaactgcatttgcaagcgtattaactaaatattctgaagttttaggatttttgcaactgttccagaatttggtcgttattgattcctgtgaaaatggtagtgaatacatggtttttggtaagttagcatttccagcaaaattgggccaaggctatagaaagataggaatatggccatattttgattatattctcaatgatattttagctcatgtacatcagatcactgatattagaaacagaagggccatccaactccctattttaaaaattatctacacagggctatgttcttttgactacagcgtaatattgaactctattcctgctgctgctaacttgaattctttagtcgattgtgaaagcttcttcaattacgtccaagagtgtccaacaactccagtattcaactatatttttactgaaaaggtttacaaaagtatatttaacattattgatgtaggtgttgatcaattatccatagagttggaaggtggtaaaaaccaagctgaattgttacaagtggctgtgaaaattatcaataaagccttggagtatcaagagacttacgtagaagaattgtttccgattgtcaaaagacacggcaaaagcgattatttcatgccgaaaagtttttcacttcatggcttacgttcattttacgatgctattttttttaatatcccacttgtcgcgcacttaggtttatatgtcggcgttgatgatcggattttagcctctaattcattacaaattttgaaaaaactgtcagaacgccctgatgactcttcagcattattctccaagagaggtaaattattgactatatttgattctgttgatgaatctgctagaataaaggatgcattcattacacagttagaaacgccaataacaaatgatagtgttcttactttgaaattagaattactggatttcttaacttcaaatctgactaactccacccgaatcacgagtgtttctcatttactattagggttccaagtttcaaacgtcatatctctagggcctaacttagcgacgtttatttcttctgaaacttctttgctaaattctctcataaatctattagaagcttcattgaacagcatcactatagacaatatcgattatgcacctatgcgactagctacagcagcactagaaattatcctaaaattgtgtcgtaatccgttaacctctggtttattatactcgtacctaatcgaagagaacttctttgaaagaataatgattctcgatccacaaattacaggatataccatgtggaacggttccccatttgataattcaacagaggagaaacgcaaagacctagtcgagagcgaatctattggggcgtttttatcatttttagcgtacagaaattattggacacaatatttgggtttacttattcacaaaatgtcattctctgggacgaaatcagaagtttcaacatatgttaattacttgatatcaaatacaatgtactcggtaaggttgttctccttcttggacccactaaattacgaaaatattcccgaatcgagagaaaccctgtctactttttctgatgttcctttcaatttagatcaagtcaccattaacaaaaactgttctggtaacatctatgatttcagcgaaatggaaaagctcatgcgcctaatcaaaagagttcgcgttgaaagcttgtattccaataattcgggtttcgggatgacgaaggatcaatttttaaaagaagcaagcatcgaatgcacaaaagcaaagagccatttcacaaattacatttctagaaataaagcattggagttaaacctatcagtacttcactcgtgggtgcagttggtacaagttattgtcactgatggtaaattggaaccacctactagatccaactttattttagaggtttttggtacgatcattcctaaaattaccgactatgtcgagtttgacataactttctcagaagaactggtttctctcgctgttttcctattcgatatatacaaccgcgaccgtaagttcataactgatagaggtacggtagacggcagattgtaccaattgttcaagacctgcattcagggtattaactctccactttcctctgtgacattgagatctgatttttacatattagcaaaccactatctgagtagggttttaagtgacaaacaaggatccgaaagagttttacaagatttgaggttaggaagtaagaagttggtagaaattatatggaatgacgttatctatggcgaaggtactagcaggattacaggtattttgctgttggattctttgatacaactagcaaataaaagcaaggaaaatttcatattggactcattgacgagaaccacgaggttgcttttgattgtacgctcattgaaaaacactgacgctttgctaaactccaccacagaacatataaatatcgatgatttattatatgaactgacagctttcaaagcgaccgtattctttttaattcgtgtggccgaaactaggagtggagcaagttccttgatcgaaaacaacttattccgaataatcggcgaattgtcgttcttaaaagtcgatcctgatttaggtttagagcttatgtttgacgaggtttacgctcaaaattctaacttcttgaaagtcaatgtcactttagacaatccgctaatagtcgacaaagattcgaacggcgtttccctgtttgaattgatcgtccctgtctttcaattaatagctgctgttttagtgagtatggggagtgcaaataaaagtgttgttcagaaggtgaaaagccttttgagtgcgtacaaaaggttagtgataggtatcttcaaaagagacctattaagtgaaaaagaaggtgaaactaagttgacggattccaatcgtcaaagtttagacgagatggtgaagttaattgtgatgttatgcactttgacagggtatcaaaatgaggattga

SEQ ID NO: 174365 - DNA, 216 bp, Saccharomyces pastorianus
tggctggtcgatcagtgcctgtatggcagaaaacttcccaatgttgtcgagcaatgcgtttgggatagcgtagatagatatgcttccaccacggttgtgccagtgagtacgctaaaggcgatggccaaacaaaagagaaaacagatgaaagaagaaatcaagaatatcaagaaggaaaaccgtgtagttcttgtagaccacaatagctcgtcgtga

SEQ ID NO: 174366 - DNA, 408 bp, Saccharomyces pastorianus
atggccagtcaccattttcccaacgagaatatagtttataatccatacggcataagcccaaaccatgctaggccagatactgcatttgcagacactctgaatacgaataaggagaacgatttgagtttttacatgcatgatggtaacagcaagatacggatgttgccccttccaattgctaatccgaacgattttttgcccgaagatatgaaacaatatagtgtccacttgacggataatttcgtatttgatacggacaataaacctattggttcgggtgggtctagtgaagttagaaaggttaaatcaagttacaggcaaaaggatgtttacgctctaaaaaaactgaatatgatataccacgagtcacccgagaagtttacaagagatgctcaaagaattatcata

SEQ ID NO: 174367 - DNA, 129 bp, Saccharomyces pastorianus
gacaggatagctgcgtgggagaatattgttgagtgcacctttaggaccaacaacgtaaaattgggttacctcattgtagatgagtttcacaactttgaaacggacgtctacggcagtcgcatttggggg

SEQ ID NO: 174368 - DNA, 648 bp, Saccharomyces pastorianus
agtgcgttactatcggaatcagacctcaacgacttcatcagtcccgcgctggcgtgcgtcaagcccacccaagtaagcgggggcaagagcaccaacacgaacggcgagtacgaagtgaccacggagccggaccagccggagaaggtttccatcacgctgtcagactgcctcgcctgctccggctgcataacctccagcgaagagatcctactgcgcagccaaagccattctgttttcctagagaactgggggaagctttcacagcacccggacaagttcctcgtggtgagcgtttcgccgcagtgcagactgtccctggcacagtactacgacatgacgctggaggcggccgatctgtgcttgatgaattttttcgaaacgcagttccgctgcaaatacatggtcggcaccgagatgggcaggatcgtgtccatcaacaagaccgtggagaagatcatcgcccacaaggaccacgagcgccagcagggcaccgcggcggacagcaagccattgctgtccgcggtgtgtcctggctttctcatctacacggagaagaccaagccgcagttggcctccatgctactgaacgtcaagtcgccacagcaagataacaggctccttgatcaagaaaccttccacgacctcggc

SEQ ID NO: 174369 - DNA, 138 bp, Saccharomyces pastorianus
tttgtattaggagatgctttccttgtcgacgcatatgttgtctatgacatagaaaacccacggactttcaatgctcaggcaagttttaaaaatcgcgaagaagacattaaaataatatttgataaagccgctggtgcc

SEQ ID NO: 174370 - DNA, 288 bp, Saccharomyces pastorianus
atgactgcaggcagtctgcagcacgacccaagcgtactggcaagcccattcggcgacccaactccctccagaagagcctctacattcgtccattcgcccactccgaggcaccatgataaggtagcatctactattaccctcggtgaagacaccgtactggtggaccagagactggaccccagcaagatgttaaacaccatggccaatgacgacgccacaacccactctgcggtctcgttatcagataacgtggactactctagaagagtgctgcgtgtcatgaacgag

SEQ ID NO: 174371 - DNA, 144 bp, Saccharomyces pastorianus
atgaattttgaggtaatttttgggatgccattgctgttagagatcatagtattaggtgcacaaaatgaacaaggagttctccttaaggacatacgaatccacaaaagggtatggaaatttctacatagtattgtgattatcgtg

SEQ ID NO: 174372 - DNA, 216 bp, Saccharomyces pastorianus
acagaactgacaagttttgtacacatcaggcacacaaggcccgatttccacgaactgataaacgagtcaatgaagaatgggagtccagcggactccgtagcaatcgtatgctgcggcccgcccgccttggtcgacgacgtaagaaacaccgtttcccaaacagtcatcgaccaccctggaaggattatcgagtactttgaagaataccagtgctgg

SEQ ID NO: 174373 - DNA, 186 bp, Saccharomyces pastorianus
atgggatcgtctagttttgctctttcgtataagtcaggaagtagcaccaccacactttctcctaagtctgtatcaccaatatccgtcgtcgaaaaaagaaagaaaggggaaaagagtggtgttacgtcaacagcaaatttagacttaccgtccattggaaattcctcgattgtggtgaaacagatc

SEQ ID NO: 174374 - DNA, 333 bp, Saccharomyces pastorianus
atgttgcagagacattccttgaagttggggaaattctccatcagaacactcgctactggtgccccattagatgcatccaaactaaaaattactagaaacccaaatccatccaagccaagaccaaatgaagaattagtgttcggccagacattcaccgatcatatgttgaccattccttggtcagccaaagaagggtggggcactccacacatcaagccttacggtaatctttctcttgacccatctgcttgtgtattccattatgcatttgaattatttgaaggtttgaaagcctacagaactcctcaaaatactatcaccatgttccgtccg

SEQ ID NO: 174375 - DNA, 585 bp, Saccharomyces pastorianus
ttcaaagaaaactaccccgcatccaccaccatcttgttcgatctgaacgggttctccatgtccaatatggactatgcccccgtcaagtttctaatcacttgttttgaggctcactacccggaatctttgggccatctacttatccataaggccccttggatctttaacccgatttggaacatcatcaagaattggctggatccggtcgtcgcgtccaagattgttttcactaagaatatcgacgaattgcacaagtttatccaaccccaatacatccctaggtatctgggcggagaaaatgacaatgatttggatcattacactccaccagatggctctttggacgtccatctgaaagacaccgagactcgcgctatgatcgaaaaggagagagaagaattggtcgaacaattcttgactgtcactgcccaatggattgaacaccagccattgaacgatccagcatacattcaactgcaggagaaaagagtacaactttccaccgctctttgtgaaaactactccaagttagatccgtacatcagatcaagatccgtttatgactacaatggttctctaaaagtt

SEQ ID NO: 174376 - DNA, 774 bp, Saccharomyces pastorianus
accatctccaactgtgggtttgccagtggtatggatttggctggtttattaccgaaatatgttgatattaagagaggtgctatttttgccgcatgcgtctcctgggcctgtttgccatggaacttttacaactcttcttctactttcttgactgttatgagctctttcggtgtcgtaatgacacctattatcactgtcatgatctgtgacaatttcctcattaggaagagacaatactccgttaccaatgcctttgttttaaagggtgaatactattttaccaagggtgtcaactggagagctatcgttgcctgggtgtgtggtatggctcccggtctacctggtatcgcttgggaagtcaataatgactatttccacaacactggtattataaattttttctatggtgattctttcttctcctttttgatttcctttttcgtctattggggactatgcctcctcttcccattcaaaattactgtcaaacatgatgacaaagattactacggtgcgtttaccgacgaagaagcaaggaagaagggcatggttccatacagtgaaatttctgaagaagaaatccgtgcttacacattaggcgaatgcttcacaagtggacacgaatacaaacctgagagctccgatgatgaactacctgagttgacaaaaactagttcagaaaacacaaaagtgtttgaaattgttcatcagaaagataatgaaaaggaatcctctacttccagtgaaaaacaattgcctaatgagccaaaaacg

SEQ ID NO: 174377 - DNA, 846 bp, Saccharomyces pastorianus
atggctgaaagtaccacgttagaaactattgagatacacccaattacttttccacctgaagttcttgcgagaatatctccagaattgtctttacaaagacacttatccctaggaatcaggccatgtctaagaaaatatgaagaatttagagatgttgctatagaaaataatactttatcgcgttatgcggatgctggtaatatagacactaaaaacaacattttaggctcaaatgttttgaaaagtgggaaaaccatagtcataacttctattacgggtggaataatagaagaaactagcgcctcgatcaaagatttggatgatttcggtgaggaagaattgttcgaagtgaccaaagaggaggacataattgcaaattatgcttctgtctatccggtggtggaagttgaaagaggtagagtgggcgcttgcaccgatgaagaaatgactatatcacaaaaactacacgattccatattgcactctaggatattgcctaaaaaagccttgaaggtaaaagctggtgttcgtagtgcgaatgaagacggtacgttttccgtcttgtatcccgatgaattagaagatgatacgctgaatgaaacaaacctgaaaatgaaaagaaaatggtcatacgttttgtatgcgaagattgtagtcttgagtcgcactggtccagtcttcgatttgtgttggaattctttgatgtacgctttacagagcgtaaaattacctagagcatttatagatgagcgtgcgtccgatttaagaatgactataagaacaagaggaagaagtgccaccataagagaaacgtatgaaattatttgcgaccaaactaagtcagta

SEQ ID NO: 174378 - DNA, 306 bp, Saccharomyces pastorianus
atactcattgaatttgctaaagcagagatcagcgacccgatttcaaaaatgacaatagcaaatagcatggtctccttgaatccgataggtgtggcaattcttccccatatcaacgccaacagagcgtttggtaagctatacccggtaaataaccacccgatctcagagtacgatccaaactgtttagctacttcttcaatgattgtagaaactatcatgatatccaaggctgccagaaacagcgacaaagccaatgctatcaaagatgcgtacaagataaaccctttaggtagttcattactttcg

SEQ ID NO: 174379 - DNA, 252 bp, Saccharomyces pastorianus; identical to SEQ ID NO: 173789

SEQ ID NO: 174380 - DNA, 1761 bp, Saccharomyces pastorianus
cttgtcgatccaaatttcgctgcaaaagagcttcaaaagaagacgtacttaaagcaaatatcatctccgctggtgctacatgaagctcaaaaccttgccaataagaggttgcgggacattgactctaacaatacttatttgattctgtttggtaatcaagcttacaacaagcttgctgtagacattgctttaaagcactactcggctaatcaagagcagaagaaaaaaatctacctaggtggtggcttgtggataactccagaagaagttaatactgtagccaaaaatttgatatcgcccgtaataaacgaaattagcgagagggctaatagacagcgtaacgttgaccgggatattgagaaaaggacaagtatccttgaccaagagcatgaaaactggaaatctatggaacgtacaaaagagcaaaatgacaagcagattttgttagtgatggaatcaaaacggcaccaggaaaaagtagccaaaaaagcagagagtgaacaaacctacaacatgctggtatataatatggatgctgaagtagaggagaaggagaaggagttggaaattattaagcaagatcgggaacatttgagggttgaattgcaaagaatgctgtccaaaagcatatcagaagaagaaggtaacataaaagattggagtgaatcctgtcaaagagatctcgataatacaaatattgaacacgctcaggcagctagactgtaccctgatgatttgagagcctcgacaaatgaatatgacgaactgctagacgagcacgacggagtacaggatcggatcaaaaagttgaatttatctattaatgagcacagaagtgtcatccatgattttaaagtaagaattgatacggggggaggtttgacagccacacaaaaagagaaagttggtagtggagggcatcttatggatgctactgtgaatgattctgttgttattcttgcagaaaaggcgaaacaagaagctgaattggcttcagaagaggccatgctgcaacaattggaaattgatgatatggtcaataaaagaacaactaggctgtacgcccataaaaaccaactcaggaaggagaaaccatcatcgacaagatcacagaaggtcactgaaggcggagaagacttaaggaatgaactcaatgctgctcaaggcgacatattgtacgcgccaaccacagatgaaaaatcggcacgcgtggtaagaagtgcgtctactgtaaagaaccgattcctttctgcatacagttcagggaaagatgtggatagctcggcaagcgccagatcggtcaccggtgttagtggtgttttggatgaaagaactgaaaccccgactactgataaggaagcttttccggttgataaggaagcgaggccaggcaatgtacgccaagcccctgtcctagttgaaaacgagaagacctcaaggccagttaccgaagcgcgaggaccgacaacaatcgagcaattcttatttggtaagaccgccggtaaaaaagggccatccggtaaagaatttgcaaccttaaaaagtgggccagtggtgaacgcaacagaatcagaaatggagaaggaatctgttcatcgcaatgacaaaccccgtgaatccttcagtggattttctcaaggttcattcgaaaacgattacggtaacgaagttaccgatgatcaagatgaatccgacataaagattcgggactcgagcgattcgaatgttcgcggtgaagaaagttttttcaaggagattatt

SEQ ID NO: 174381 - DNA, 75 bp, Saccharomyces pastorianus
gacgctcttcctactgagctactgaagctatctgttattgaagattctagcattaaatgctttaatattcaataa

SEQ ID NO: 174382 - DNA, 111 bp, Saccharomyces pastorianus
attccccattccgttttatatgtttcattatgctattacattatcaatcttgcatttcagcttccattagggttgataactgtttctcaacttttatgtcatcttcctgaa

SEQ ID NO: 174383 - DNA, 507 bp, Saccharomyces pastorianus
  modified_base (497)..(497): a, c, g, t, unknown, or other
ggggagaacgttacgaaggccatcaccacagagagaaaagtcgaggatgatgctgctaaggaaacagagagttcaccacaagaaagaagagaggtgaagcggaagttaaggcagcggcatatagggatgattgctctcggcggcaccattgggacgggcctcataattggtattggtccgccattggcacacgccggccctgttggtgccttgatatcgtatttatttatggggacagtgatttactccgttacacaatcgttaggagagatggccacttttatcccggttacatcttcattttctgtcttcgcccaaagatttctgtcgccagcgctgggagcgactaacggatatatgtactggctgtcgtggtgtttcaccttcgcactggaactatccgttttggggaaagttattcagtactggacagaagcagtgcctctagcggcttggatcgtgatcttttggtgcctgttaacttcaatgaacatgtntcccgtaaag

SEQ ID NO: 174384 - DNA, 96 bp, Saccharomyces pastorianus
ggaagctgtttaataggttttcatggcatgactaggccactagagctttgtccaataatcgaagaattactgaatcaaccaccagaagtacagatt

SEQ ID NO: 174385 - DNA, 438 bp, Saccharomyces pastorianus
aagcggttgaaaccgatggcaaaactatgtggcaaagaccgtattgttgtagatttaagttgtaggaagacgcaagatgggcgttggattgtcgcgatgaacaagtggcagaccttgactgacctcgagcttaacgcggaaacgtttcgagaactaaaagagtacacaaatgagtttctgattcacgccgccgatgttgaaggtttgtgcggtggtattgatgagcaactggtatctaaattatatgaatggaccaagaattacgacgacttgaaaattgtttatgccggcggagccaaaagcattgatgatttgagattggttgatgaattaagccacggtaaagtcgatttgacgtttggtagttccttggatatatttggtgggaacttggtcaaattcgaagactgctgtaaatggaatggagtgcaaaattag

SEQ ID NO: 174386 - DNA, 336 bp, Saccharomyces pastorianus
  modified_base (105)..(105): a, c, g, t, unknown, or other
  modified_base (112)..(112): a, c, g, t, unknown, or other
  modified_base (176)..(176): a, c, g, t, unknown, or other
  modified_base (239)..(239): a, c, g, t, unknown, or other
cccacttatgaaaaatactattcaagtgattacgtttttgttcagggattcagaaattcagattcatctgcaatgacaatggcatatactgctatggggtacctngatagtnattgggatggtggttgctattcgtgggacgtgtgtgctggatggtgtattttgaaagaggtggncggtcgtgtagtaggtgccaatccaggtgaatggagtattgatgtcgacaataggacatattnggctgtgaggggaacaattaataacgaaagtgacgaacaaacaaaatatatcacagacttttggaactgtgttgatggccatttgaaatatgactga

SEQ ID NO: 174387 - DNA, 279 bp, Saccharomyces pastorianus
aacaacaacagcaacagcagcagcaacagcaacaacaacaacaacaacaacaacaacaacaacaacaacaacaacaacaacaacaacaacaacaacaacaacaacaacaacaacaacaacaacaacaacaacaacaacaacaacaacaacaacaacaacaacaacaacaagtacaagtacaacaacaacaagtacaacaacaacaagtacaacaacaacaagcacaacaacaacaagcacaacaacaacaaatactacagcagcagcaacaacaacaac

SEQ ID NO: 174388 - DNA, 141 bp, Saccharomyces pastorianus
catttaaattgtatgatgatctttgggattccattgtttcttaatgttataatattacgtatatatattatactagagattctcctcatggatttaggaatccacagaaaggaatcaataattctacataatattataaat

SEQ ID NO: 174389 - DNA, 90 bp, Saccharomyces pastorianus
atgatcaccggtgtcccatggtactccagcagattaaagccagccatctctagtgctctatccaaggacggtatctacactattgcaaac

SEQ ID NO: 174390 - DNA, 222 bp, Saccharomyces pastorianus
aacgcttatagatatgttcaaagattggaaactattgttgcgttggtgttctgtgcccctttgattgcgttctcgttgtgtctaagagatcctaaattaaccgatacagtcgctgtcgaaaacatcgaagaaggtgaatacgtcgacaccaaggacaatgacccaattcttgactggtttaaaaagtttacatcaaagttttcttcttccaaaaaggaatag

SEQ ID NO: 174391 - DNA, 894 bp, Saccharomyces pastorianus
  modified_base (849)..(849): a, c, g, t, unknown, or other
  modified_base (884)..(884): a, c, g, t, unknown, or other
acgagaatccagtatgatcaacgcctgctagacgaaatcgcggccaatgtggtatactacgtcccaagagtcaaatcccccgacactttgtatcgcttggtcggagcacttttccgatcgcagttcattgtccagttaccaccactacgccttttgcacatcgtcaaagatgttttcctttggaaactggaagtttctgagcccacgctcccaatttcgaagttttacttggtttggaatgctgttttcgaatctcaccgagccacgtggaacctttcacagttgatggttttggatggtgtactagtcacatacccgaggttcaaacaattgaacaacgcctattttattgatgaatccagcaacaaaactgcgctttattacagaaactggaaattacaactgttttccccaatatgggcgcagctatggaatactgccattgtcaaggctaatttatcgattcagcattgccttctgatagcattagctttactttttaatcagtcaaaccgaagcgcccttttgcacggagttgacgtatcatggaatttggtcacagagaaactattggaccttttggaagagtatgtacacggcattgtgcagccgatggaaaatttttcgactaattcagtcttatcaaccaacttgaatcatttggccagttgcttgaccggttcaatcacgaggtcaaatgaggcaactttggtaaattcagtacgcaaactagaaaggatatgtcgatacttgtccgatactgtggcttcgttgaaagaacaacaactagatttcaagttccaaaatgtatttatcctgataatcctcgcgttaaaagaattatccgcncatgaatatgacaatgacctgcaggcatgcaagcntgcactgccg

SEQ ID NO: 174392 - DNA, 285 bp, Saccharomyces pastorianus
agcaacgcctgctttaaagtcatgcttttttcctcgctgttagcttcatttgcttcatcagtagcgttcatctcattaatcatattctcgttatcttcgtcagaatctcctaactgggctgaattggtggtgaactctaagtggtctagctcaaaggcactatcctttttcccttcttcaaaattttcagtattgaaaacctcctgttggtttacatatctcttgaagactcagaaatgtttttatcctcattttttgaggcagccttcttcttgctaccaatga

SEQ ID NO: 174393 - DNA, 141 bp, Saccharomyces pastorianus
atgaacgcgtgcatgcaactcgtcctcagtgacttggtcgccaggcgggtacttttcaaaacagtgcacgtgcacccatggcatttggatggtatcagtggcgcctttggtgtgtgctgcaaagatgccacggaagtttcc

SEQ ID NO: 174394 - DNA, 537 bp, Saccharomyces pastorianus
gaatctattatcctcagcattgccatctttattggcgtcctccttggcactagcgttggtactttcagtggtaatggcattagtgctggagttggtgctagcagtggtagtggcattagtgctggagttggtgctagcagtggtagtagcactagtgttggagtcggtactttcggtggtagtagcactagtgttggagttggtactttcagtggtagtcgcactagtcctgacgttgatgctggcagtggtagtagcactagtcctgacgttggtgctggcagtagtagtagcattagtgctggagttggtactttcagtggtagtcgcactagtcctgacgttgatgctggcagtggtagtagcactagtcctgacgttgatgctggcagtggtagtagcactagtcctgacgttggtgctggcagtggtagtagcattagcactaccatgaatgcacgtgtcgctgtcctcatcactgctgcaatactttctgtacctgtcactgctattgctctcctggaagctagacggtaa

SEQ ID NO: 174395 - DNA, 396 bp, Saccharomyces pastorianus
atgtacgatttacaggaactaaaagaggcagaaacatataagaaatcaatcgaaaattatacaatatgtttagaaaacaaaatgccattaccatcgggcgctattccctttgagttcctgtttggaacagattttcaacgtaaagtttggaatgagcttttaaacgtggaacacggtcacgtcgcaacatatggtgatattgcaaagagaatagggaagccaactgccgcaagatctgtcggaagagcttgcggctcaaataacctggcattgttagtaccttgccatagaatcgttggtagcaatagaaaattaaccggatataaatggagctgtaaactgaaagaacagttattaaataatgaaaaggaaaatagcttaagccttagtagattg

SEQ ID NO: 174396 - DNA, 120 bp, Saccharomyces pastorianus
atggtcaggtcgttagctcagaaaattgtgagcatcaaacctttcatttatcaatactgtcaaccttctaaatataagcacgagaaaggtatttctatcgttgagagcaccttcattagt

SEQ ID NO: 174397 - DNA, 528 bp, Saccharomyces pastorianus
gatttccaaacatataacaaacgtgttcaaagggaatatgagctcagggaaaggatggaagaattcttccgtcaaaacaccaaaaatgatttacatattttaaacgaggattcattaaatcagcaatattccccgttagggcctgcagattatgttctgcccctcgatagatactccagaatgaaacacattgcctcaaactttttcagaaaaaaacttggtattcctggaaaactgaaaagaagaagccattataatcccaacgcagagggccacaccaaagggaattcttctatattgagttccactactgatgtaattgataaagccagctacaggaatattgcaatagatgaaaatgttgacataacacataaagaacacgccattgacgaaataaacgagcagggtgcatcaggtagtgaatctgttgtggaaggtggatcgttattgcatgacattgaaaaggttttccctgaggttaaaaataatccgacactaaagcaagccccgatagagagcatttga

SEQ ID NO: 174398 - DNA, 360 bp, Saccharomyces pastorianus
atggtcaaagtaacttcaatccccgctggtttcgctgccatcgctgctactgcttctgcaaccaccactcgagctcaatctgacgaaagagtcaacttggttgaattgggtgtctacgtctctgatatcagagctcacttggcccaatactacatgttccaagccgcccacccaacggaaacctacccagtcgaagttgctaaagccgttttcaactacggtgacttcaccaccatgttgactggtattgccccagaccaagtgaccagaatgatcaccggtgttccatggtactccagcagattaaagccagccatctccaaggctctatccaaggacggtatctacactatcgcaaac

SEQ ID NO: 174399 - DNA, 75 bp, Saccharomyces pastorianus
atgggtggtatttccatccaatcgatcaacgaggcagccaacaaaaacggcacaagactttctgaaatcggatgg

SEQ ID NO: 174400 - DNA, 216 bp, Saccharomyces pastorianus
ggctcctttgtactggtactcgatgctatactatttcactcggtcctagctgaagatgacttgaaacagttgttgagcataaataagacggaactggggccgctcattgctagactaagatcagacaggttaatatccatacacaaacaagagaataccctccaaactcaaaagtgtggaaagagtttactactatgtaaaatatcctcatgctag

SEQ ID NO: 174401 - DNA, 1119 bp, Saccharomyces pastorianus
ggaaccgattctagtacagaacagaattataagctagtttgcaagttaactttaaaagatgaccagaatatctcaacgtgttctttatcacctgatggacaagttttagtcgtagggaggccctctaccactaaagtttttcatttacagcccgtaggtaataaattgaaagtgactaaactagataatgacctattattgagaacttccacaaaattagtcaagttcatcgataattccaaaattgtcatatgctcttgcgaagatgatgtatttattgtggatctagaatctgaagaagatgaaaaaccgcaagaagttgaacttttggaggttacttcaactaagagcagtatcaaagttccctatattaacaggatcaaccatttggaagtagaccagaacattgcagtaatttctcgtggctgtggagtcgtagacatattagacttaaaagcaaggatttctaaaccacttgctcgtttgaataatttcatcaccgctgttcatatcaatacttctagaaaatctgtagtagtaattactgcagacaataagatttatgaattcaatatgaatttgaattcggaagccgagaatgaagatagcgaaagcgtattaactcaatggtcaaaaaacaatacggataacttaccaaaagaatggaagacattaaaagagaactgtgtagggatattttcagacatagaaaatagtagcagattatggttttggggggctacttggatatcaagaatagactttgatgttgacttccctataaataagagaagaaaacagaaaaaacgtacacacgaagggctaactatcacagatgaaagtaatttcatgaacgacgaggaagatgacgaagatgacgatattgatatggaaatcagcgaaaacttgaatgtattattaaaccaaggaaacaaaataaagtccacagatgtacaaagaaacgaagaaagctccggtcacttcttctttactgataaatataaacctttactgtttgttgacttaatttctagtaatgaattggcaataattgaaagaaatccattaacttttcactccaaacaaaaggcgtttattcaaccaaagttagtgttttga

SEQ ID NO: 174402 - DNA, 90 bp, Saccharomyces pastorianus
caaatagtgcaaaccaaaataaaccgggagtcattgatatttctacagcagaggagcaggaacaaagcgcttgtcagtgttaacacctaa

SEQ ID NO: 174403 - DNA, 189 bp, Saccharomyces pastorianus
atggcaaaagacggcttcgagttatatagatacactccggaattaggtgcaagtatactttttacggtactttttgcagtatcgggggtagcatttgtaattttactattccgttattctgtgaaaagtaaaaggagagttggctctcttatgaagtcccaacccgtattgcggtattacggtacggta

SEQ ID NO: 174404 - DNA, 1608 bp, Saccharomyces pastorianus
atgaggtcgtgtggcataagaagtaatatacccattgttacttatcgcttgagtcaatttgattattcgaaaggtagagcgcatggaaattatccaactattgtggatgcactagaattttcaaagcctgaaattgaatgcttattcgttgatttaagtagaattgaaagaatagtgttaattgaagataaaaacgaagccagaaatttcttgcaacgaaatcccgtgaacgtgaatatggctttatcgctaagagatagacgtagtgggttccagctctctggcggatatcgactagatacggttacttatcaagataaaattagattaaaggtcaactcttcatccgacaatgggactcaatatttaaaggacttgattgaacaagagaccaaagaattacaaaatatacgggaccgttacgaggaaaagctaagtgaagtgaggtcaagattaaaggaaatagatggcagactcaagagtaccaaaaatgaaatgagaaaaactaattttaggatgacagaattaaaaatgaatgttggcaaagtagttgatactggtatattaaattcgaaaataaatgagaggaaaaatcaagaacaagccatcgccagttacgaagccgctaaagaagaattagggctgaaaattgagcaaattgcacaggaagctcagccaattaaagagcaatacgattctacgaaattagcattggtggaagcacaagatgaactgcaacaattaaaagaggacatcaacagtcgtcaatctaaaattcaaaaatacaaagatgataccatttactacgaggataaaaaaaaagtctacttagaaaatataaagaaaattgaagttaacgtagcagctttaaaagaaggtatacagaggcaaattcaaaatgcttgtgcattttgttcaaaagagcgaattgagaatgttgatttaccagatacacaagaggagattaagcgtgaattggataaagtctcgagaatgattcaaaaagctgaaaaaagcctaggattatcgcaagaggaagtcatcgcattatttgagaagtgtaggaataaatataaagaaggtcaaaagaagtacatggagatagacgaagcactgaacaggttacataattccctcaaagctcgtgatcaaaactataaaaatgcggaaaaagggacttgttttgatgcagatatggattttcgcgcatcattgaaagtaaggaagttctcgggaaacctttcctttattaaggataccaaaagtttagaaatatacatcttgactactaacgatgagaaggcaagaaacgttgacaccttgtctggtggtgaaaaatcgttttcccaaatggcgctgttattggctacatggaagccgatgcggtcaaggattattgcgttggacgaattcgacgttttcatggaccaggttaacaggaagattggtactactctcatagtgaaaaaactaaaggatattgccagaactcaaactattatcattactcctcaagatatcgggaaaattgcagatatcgatagttctggtgttagtatccacagaatgagagaccctgagagacagaataattccaatttttataat

SEQ ID NO: 174405 - DNA, 561 bp, Saccharomyces pastorianus
aaacgaaagcacaaagtaattaccgcgtgcaaaaactgcaggaacaggaaagtaaaatgtgatggtagtctaccctgcttttcgtgcctgcaacggcatattacttgtacatatatgattaagggtgatgagggaaaactcagcttttacaagcaagatgatcatattctagagcagatcaagattcttaaaaagagcattgatattttggaaaaattaaagctcagcgtcgttacttcgtctgaatacgcaactaatgcaatcgcagatatcaatagacagcttgaaactctgctctcatttcaacatgttaatataaattcagaatcagttcgtacatacaaggataacggcgcactcgaaaatcagctgctaggcggtaattatgttgcgtttgatgcttttagtacttttgaaaatgttagcaaaggaaaggcagtggatgttatttttggcctctattcgcctatatcagtaatgtcaccaaaaggaatatgctggctaatacaacagcttatagtaagtccagagagaaggatacggaagagactgtatatattc

SEQ ID NO: 174406 - DNA, 252 bp, Saccharomyces pastorianus
tgcctcagcggtctataccctgtgccatttacccataaagtccatcattatccacattttaatatctatatctcattcggcgacaccaaatattgtataactgcccttaatacatacgttataccacttttgcaccatatactaaccactcaatttatacacacttatgtcaatattacagaaaaattaccactaaaatcacctaaacataaaaatattctatccttcaacaataatacacaaacatattga

SEQ ID NO: 174407 - DNA, 81 bp, Saccharomyces pastorianus
atgggtttacgtgggcatagatcacgcttcagccgctctgtgtcgactttcttttcgccaggtaaacttgcttggtatgca

SEQ ID NO: 174408 - DNA, 321 bp, Saccharomyces pastorianus
gcaatctatcgtgtgggaactatgtttttgctttgttacacagaatttgccttctttgtcaataatcagggttggagaaagaaagaatcgcatattattcattgggagggagagccccaaaaatttgcaatttggtacccgtacatcttggcattcgacagcaacttcattgagatcagaaagattgaaactggcgaattaattcgttgcgtccttgctgataagattcgacttctacaaacaagtactcaagaaatcctgtactgctacgaggattatcgcgggtatgatacagttgcgtcgttagatttctggggttaa

SEQ ID NO: 174409 - DNA, 375 bp, Saccharomyces pastorianus
gcggatcaagcttgtcgatcattggctagtgtgaaagccattttcaaccagagagctaaactggggtatcttttggtaattatagaaaatgatatgaaaaagaaacattcacagttagagaaaatgggccaaaatattcattcggaaaaattcaaagaaactaaaaaggaatttttaacttttgagaggcattataaccttacaaagacgaaatggcaagaagttggtgaaaggataaaggatgaatttcaaaacttttctattgacaagattcgggagtttcggaacggcatggaaatatcgctagaggcagccattgaatctcaaaaggagtgcattgaactttgggaaacattctaccaaactagtctttag

SEQ ID NO: 174410 - DNA, 1476 bp, Saccharomyces pastorianus
agccagaatccaggagatgatgtactgaaaacattttccctggattgtcattctcttactttaaccgatggtcgggacgtgtacatacacagtcatatgggcggaaataatgatctcaaaaaatgcttgaacaccgacctagtttcacaaagcaaatactacaccgcaattgcctttgataccaggtcctttatcgaaattggaggatttttgattgacttaaagtcccacaacttttgctctctctttgatattgaatttcaaaaggaaatatctgcgcctgtttggctaggtctacgaagtatatcgtttgctagcgtgtttgaaaagctgcaaattttagatttgaattaccgaattacggattgtaaatccctattttacgttatgcatgagaacgtatacgtcaattttcagaaaaacgaacaaggcagctacgtgtgcaaaatttgtgagagggaagtcgcctctaatatagcccttccagtatcgacagttgtgaatggcgccgaagttgttaagtatatcgtactatcggaaaaaatccaagattacggtccaagtttacatgatctcgaacgggccttggggaaagaatcattttcagtggacagtaaactatctcagcattatcccttaatggaatgtgattattttgattatgatgaagaggtggaaactcctaatattatgtatgttcccggttgggaaatatggcaactgcctaccaaaattatgcaagatgtcttagaacccaaaattttccatttcggaatgcccaagcatatacagaatcttcacaatacgttgttggaaagaatgctacaggggggccaatggaaaattaaaaagatcaaagaaataatggcgtatgaccccgagttagcgggcttactcgtccctgtcctccctgaatacgaaaaattgcataaagaagcagttctaatgagcttgaaaaccgggttaagtacattcaccaagcaaatccataatgaggtcagaaacaaagacggagaattgatacccaatatcaaaattatggaaagactactaattgatatcaaagagggggtcatggtgagcccgaaggaagccaaatacagattcgaggataacatcacgttcaagtataatctgttggattggagtgtattcattcttaaagagccaccaatcgaaattttctcaagcaatttgttcgatacagttcaaacaaaaaaagtgcatgatattgggacaaagcttaacggtagacgatatgttgttttgagttttggaaaatttggaaccatatatttatacgaaggaaaggatagcatgcaaacgtttaaaacaccattggttgttgataaagccggatctccaagaattcggttctacatttcggaactaaacggattattagatgtttctgaacacttgtcaaattttgaaatgctgtggaaagccatcaaagaggctggttctcaaaacaaa

SEQ ID NO: 174411 - DNA, 126 bp, Saccharomyces pastorianus
tgctgtgttggcacttgttggaatgaagctctaaaacatcatgatgattgtgtggattctgatgtaattgttgggattccatttttaataaggcaatatgttggaacgagagtaattaatagtgac

SEQ ID NO: 174412 - DNA, 429 bp, Saccharomyces pastorianus
ttccgtgtcaccacgtatggtgaatcgcattgcaggtccgtcggatgcattgtcgacggtgtgcccccaggaatgtcattgactgaagaggacatccagccgcagttaaccagaagaagaccgggtcagtctaagctgtcaactcccagggacgagaaggaccgagtggaaattcaggctggtaccgagttcggcaagacgttgggaacgcccatcgccatgatgatcaagaatgaggaccacagaccccacgactactctgatatggataagttccccagaccctctcatgcggacttcacctactccgagaagtacgggatcaaggcctcgtctggtggtggtagagcgtccgccagagagacgattggacgtgtcgcttctggtgcgattgctgatgaagatcttggctcaaaattcaaacgttga

SEQ ID NO: 174413 - DNA, 120 bp, Saccharomyces pastorianus
cgttcaagagcaaatatgaataattccactactacggggcctgctaacaatacaagctctaacagaccttttggatatttcgaagaacgcgcacagggatcctctagagtcgacctgcag

SEQ ID NO: 174414 - DNA, 213 bp, Saccharomyces pastorianus
agctcaagctcattctcaggcacaggctcaagcacaagctcaagcacaggcggcacaagcggcgcaagcgcaagcacaagcacaagcacaagcacaggcacaggcacaggcacaagcccaggcgcaggcccaagcccaagctcaagcacaagcacaagcacacgctcagcaccagccctcccaacaaccacaacaagctcagcaacaacctaa

SEQ ID NO: 174415 - DNA, 132 bp, Saccharomyces pastorianus
gctgccatcgctgctactgcttctgcaaccaccactctagctcaatctgacgaaagagtcaacttggtggaattgggtgtctacgtctctgatatcagacctgcagcatgcagcttgcactgccgtcgttta

SEQ ID NO: 174416 - DNA, 183 bp, Saccharomyces pastorianus
caatgtcagtcatcttcctccattaggggagagtactcatttttaaatgacttcattcccagagtacatcccgatttaactcaagagattattaaaattaaattattcaatgatcaattcgtggcaagtaaagtggattacgacttggacactttacaaactgcaagtcagtatcttccatag

SEQ ID NO: 174417 - DNA, 705 bp, Saccharomyces pastorianus
aagtttatagcattaatatcaggtgggaaggactcgttctacaatatttttcactgcctgaagaacaaccatgaattgattgccctgggaaatatatacccaaaagaatcagaagagcaagaattagactctttcatgttccaaacagtaggacatgacttaatagactattattctaaatgtattggtgttccactatttagacgctcaatattacggaacacttctaacaacgtcgagttgaattatactgctactcaggatgatgaaattgaagaactatttgaacttctaagaactgtcaaagataaaattccagatttagaagctgttagtgtaggtgccatcttatcgtcttaccagaggaccagagtggaaaatgtttgttccagattgggtctagtagtgctaagctatttatggcaaagggatcaagccgaactaatgggtgaaatgtgccttatgtccaaggatgttaacaatgttgaaaacgatactaattcaggaaataaatttgacgccaggataatcaaggtggcagcaattggattgaacgagaaacatttaggaatgtccttgcctatgatgcaaccggtgttacagaaacttaaccaactttatcaagttcatatctgtggagagggtggggagtttgagacaatggtcttggatgccccttttttccaacatggatacttggaataa

SEQ ID NO: 174418 - DNA, 531 bp, Saccharomyces pastorianus
atgcctgcaggtctgttggagttggtactttcagtggtagtcgcactagtcctgacgttgatgctggcagtggtagtagcattagtgctggagttggtactttcagtggtagtcgcactagtcctgacgttgatgctggcagtggtagtagcattagtgctggagttggtactttcagtggtagtcgcactagtcctgacgttgatgctggcagtggtagtagcattagtgctggagttggtactttcagtggtagtcgcactagtcctgacgttgatgctggcagtggtagtagcattagtgctggagttggtactttcggtggtagtcgcactagtcctgacgttgatgctggcagtggtagtcgcattagtgctggagttggtactttcagtggtagtcgcactagtcctgacgttgatgctggcagtggtagtcgcactagtcctgacgttgatgctggcagtggtagtagcattagtgctggagttggtactttcggtggtagtagcactagtgctggagttggta

SEQ ID NO: 174419 - DNA, 528 bp, Saccharomyces pastorianus
gagtggaagagtttaaaacagcaacttgaatcatcacaagatatttttttctccaagtgttgccagttggaatattctaaagtgcagttggaaaaaaccatttatgattattgtaaaaattactctaaaatggaggacggaatcaaacgagctctagaatcatcaaacaagatgtttcaacaaaaatgtgaaaaatttactgactcacctgtgtgttctctacaagaagcacaactgccacaggaaactgccaatgcggatgtaagagggtttttcctcagggataatggcataccctttcgcaggtggaatatcctagaggcgagtgatccagtcgacgcttgcaaagaaatctccataaaaagcgaaaagtttttctgtggtagtgaaataaataatgaactggctgctcttgagtcgttaggggcaataaagatcatattgcagcagatcgaaaaagaaccaaatgcaaacaaaatcgtacgaagttggcacgacgatatagattttgtaaggtctcgaacctga

SEQ ID NO: 174420 - DNA, 201 bp, Saccharomyces pastorianus
atggacgacgaagctggtgtgaagctgcttgaaaagcaaaacaaggaaagaattcaagatattgaagcccagttgggacaatgctacaatgacaaggattacgccgccgcagtgaagttgaccgtggagctaaagtactggtacaacttagccaaggcattcaaagactgggctccaggaaaacaattggaaatgaatcac

SEQ ID NO: 174421 - DNA, 1314 bp, Saccharomyces pastorianus
tcatggtctttaacttcttatgctgtcacatttgctggttttatagcatttatgggtcgacttggtgacatcgtgggaaactcgattctgtttactattagctgtttctttttcgctattctgtcacttctttgcgcggttatgcccaatttcccagcgtttgctgttttcagagctattcaaggcatttctgccgcgggtcttgtaccatgtgcttatgccttaattcctatgttagctccggaggaagaagtccaaaagtacttctcaattgtgtcctgtggattcagctccaccattggtctaggactgataattgggggtgcattcgctgctacaaagataggctacaaaggcattttttatctgacatttgcagtaatgtctttaattgcaatagttgctttcttttttacgtatggtgttgaaaatcttaacgaaaacctaccaaaggatcaagttgcaaacagggtcaggtcgcttgattttataggatcgcttatatttgtaaccgggagtatactgattgttgtgggtttaacagaaggaggtgaatcatggaacagacctgccacctacgtaacactcgtcattgggattattcttttttttggattttttttttggaactgctcatacgcaaggattgttcgaggtattaggcgttgtggaattgacacttctagatacttcgaaaaggttcagcttttaattcctgtagatgttcttttcatgaaaaactttatacccattattttggcttttgctctaaacaatgcttgcctattttcgtgtatttatatcattgatcaatattcccaatacgaagagaaaaacagtccactatatgccggtgtcaagctagttcccctaataatatgtatggttataggcaatggcttgtgtgcattcgagtctaccaaactaaatcctagagtgggagtggtgcttggcttttttctggcccttgctgggtcgattattctcacccaattgcatttgatcaaagaggatatgttttggaagattttctttagttcacaagcattagtgggttttggggttgctattttctatccttatgcgcttcagattgcagtgggtggggctcctgatcagtcaaaaggtattgcttctggtgtagcgcaaacttttggtcaacttggaatcgagataaccttttcggttatggcatcagttttgggaaatatagatggaatcagagggcattttggtgcatcccagaaattccgaaccggattccaaaactgcacatactttactgttgcggtgggtgcgcttggatttctggta

SEQ ID NO: 174422 - DNA, 1509 bp, Saccharomyces pastorianus
tttgatcccggaacctctaaagtcaacaaaatatgcgatgctgtgctaaatgttttattaagcaatcctgaatacaagaagaaatacttgcaaacgatcattacagcatatgcatcccaaaaccctcaaaacttatcggctgcactaaaactaattagtgaactagaaaattctgaagaaaaagactcttgtgtaacttacttgtgttttttgcaagacgtcaacgtggtttataaatctgccctatctttgtatgatgtcagtttagcattattagtcgcccaaaaatcacaaatggatcctcgtgaatatctgccatttttacaagaattacaagataatgagcctttacgccgtaagtttttgattgatgattacttagggaactatgaaaaagctttggaacacttgtccgaaattgataaagatggtaatgtttcagaggaagtcatagactatgttgaatctcatgatttgtataagcatggtttagcactttaccgttatgattctgagaagcagaatgttatttataacatttacgcaaagcatttgtcatcaaatcaaatgtatacggatgcggcggtggcgtacgagatgctaggaaagctcaaagaagcaatgggggcataccaatcagcgaaaagatggcgtgaggccatgtccatcgctgttcagaaattcccagaggaagttgagtcagtcgcagaagagttgatatcttctttgacttttgaacatagatatgttgatgctgctgatattcaattggaatatttggacaatgttaaagaagccgtagctttgtactgtaaggcctatagatatgatattgcttctcttgtggcgataaaggccaagaaagatgaactcttggaagaagttgtcgatcccggtttaggcgaaggttttggtataattgcagaattactcgccgattgtaaaggccagattaattcacagttaagaagattgagagagctacgcgcgaagaaggaggagaacccatacgccttttatggccaggaaactgagcaagcggatgacgtttctgttgctccttctgagacgtcaacacaagaatcattcttcaccagatacacaggcaaaactgggggtactgcaaagactggtgcttccagacgtacagctaaaaacaagcgtagggaagagcgtaagcgtgctcgtggtaagaagggaactatttatgaagaagaatatttggttcagtcagtcggaagattgattgagaggttaaaccaaacaaaaccagacgctgtgagagttgttgagggtctttgtagacgaaacatgagagagcaagctcaccaaattcaaaagaactttgttgaagtacttgatttattgaaggctaacgttaaagaaatttattctattagcgaaaaggatagagaaagggttaatgaaaatggggaagtatattatatcccagaaatacctgttccagagattcatgatttccctaagagtcatattgttgatttttga

SEQ ID NO: 174423 - DNA, 552 bp, Saccharomyces pastorianus
atggaggacttgatggaggggaatcatcatctattaagtgattcttcagaggctggcagtagctccgaaggtgagcacattagtagtataccaacccgaggagaaattgcaaaactgaaggcacagaagtcattatctagaaggaaaattagtgagagtgatgttacaacagaaagagattatgtaaaattgttggacagtgaggataaacgcgaaattatggagacaataagattaaatggtggtctgaaacgtaacaatgaaaaggagattacgaacttcagtgacgatgaaatgcaaggctttcaagacgaaatgctagccctcacggataatcaaattgctattcaaaaggattctaaaagaaagattatagagaaggccataaatgaagtgccctacagagctaatgaagaatgggaaacccagcttttaagcaaaggaaatataaacaaatcgaatgagaaaatcatcacgcccttaccggtacttttcccagacgatgatgaaagtgggaacagcattgagagaataaacgagatggactctaga

SEQ ID NO: 174424 - DNA, 87 bp, Saccharomyces pastorianus
atgcacttgaaacaacgtgtacaccatcacgtggtttgtttgaagggattggtccgccctggaaatctggttcgtcttcaacaaacc

SEQ ID NO: 174425 - DNA, 201 bp, Saccharomyces pastorianus
atgaccatcccacatatgaaatacgccgtatcaaagactagcgaaaataaggtttcaaatacagtaagccccacacaagataaagacgcgatcagaaaacaacccgatgacattataaataatgatgaaccttcacataagaagataaaagtagcacagccggattccttgagggaaaccaacacacagatccacttgggc

SEQ ID NO: 174426 - DNA, 129 bp, Saccharomyces pastorianus
gctgcgaaaaagaagtactccggagcaacttcgtccaaacaagtctctgccgagaaacatttgagttcagtatttaaattcaacacagatctaggtcagcatattttgaagaatcccttgggatcctct

SEQ ID NO: 174427 - DNA, 819 bp, Saccharomyces pastorianus
  modified_base (132)..(158): a, c, g, t, unknown, or other
gccgacgcctctcacaagtccatggtcaccaagaaaaggagcatatcgaggacacaatcctataatgctccgagacgtacaccttcaccggcacctgaaacatcaagccaagtgcgccaagatgacgagagnnnnnnnnnnnnnnnnnnnnnnnnnnngactccttcatcttccgttgacgaagaggtaagcttctacccacaagagtctttaaacttacagtttcaggcacacccgcctaagccagaccgccgtggcagcaatacgcaacatcccttaacaagaacgatgagcactaattatctttcctggcaacccacgtttggcagaaactctgtattcattggactcacaaagcaacaaaaggaggaactcggtggagtcgagtatcgtgctttgagattgctgtgctgcattctcatggtatactacatcggattcaacattttggcgtttgtgaccatcgttccatgggcctgtatgaggcaccactactcagagattattagacgaaatggagtttctccaacctggtgggggtttttcactgcaatgagtgcattcagcaacttgggtctgtctttgaccgctgattcaatggtttcctttgatactgcgccgtatccgctgattttcatgatgttcttcatcatcataggcaatacaggcttcccaattatgttacgatttatcatttggatcatgttcaagacctcgagagacctatctcagtttaaggaaagtcttgggtttctcttggatcatccgccaggtgttgtacgttgctgttccccagcgggggatcctctagagtcgacc

SEQ ID NO: 174428 - DNA, 204 bp, Saccharomyces pastorianus
atggttattaaagaggactgtatcaataatcttgccaggtggcaggcagacgaggaagctcacagctgttttcaatgcaagacgaacttttcgtttctcgtaagaagacaccattgtaggtgttgtggaaggatattttgttcgtcttgtaccgaaaattttgttaattataataaaaagagagtccatgccttgcagaaaaaa

SEQ ID NO: 174429 - DNA, 114 bp, Saccharomyces pastorianus
caggaactatatataagaacttcccaaatttctgtgaaccgatatcaagttgtattgcccgaacacctaattagtgggaaattttgtcctcattgtgaatgcgtttatgttccc

SEQ ID NO: 174430 - DNA, 168 bp, Saccharomyces pastorianus
atggcttggataagtttcaatcatgtggttgaagataaaaaaacggtgctctgtttgcaagttccaatgtttttattctgggtcgctgtgcttgtgaaaagatgggctcgaaatatcgaagatgaaatcgcagatctaagatgcttgaaatacaaatacaaaaatgct

SEQ ID NO: 174431 - DNA, 366 bp, Saccharomyces pastorianus
gatataaccattagagagtgttatgcaattttcgctcttgcggaaggtgtgaaaagtatagaattacaagcaagaaatccttcatcaagccttgttaacgcttctctggaagatgaaaacgatgtgtgcataattgcgaagtttgaattgttaaatctagcgattaataatgctgttattttgaattccaaagatgagctttttggacctagttttcctaataagactaccgtagagataatagacgagacaacaaaaaacttaatatcgttcccgtcatctaatattttcagcgaaaactctaaattgaataatccaaactcggccataaaaaggccaagtttatatcccaaaggtcaagatttt

SEQ ID NO: 174432 - DNA, 81 bp, Saccharomyces pastorianus; identical to SEQ ID NO: 174407

SEQ ID NO: 174433 - DNA, 441 bp, Saccharomyces pastorianus
atcacaacaactttggcattatctgtaccatccggccctcagattataccggtatctattgcggcgataattctgggtagagatgtgctactagccataagtgctttgtttatacgatatagcactttaaagttgaaatatcctggtcgtgtggcatggaattcctattgggatattgttcgctatcccagcgctgaggtcagaccttcccaactatcaaaatggaacacgtttttccaaatggtatatcttggatctggagtattattacttttatatgagaaagaagagggctgtgaaaaaaccgaggaggatttcgaagatagaaaacaggactttcaaaaggcctttagctatttagggtatgtaaccgccacgaccacaataatgagcggagtatcctacgcattaaagagaaacgcttttaaacttttaaaatag

SEQ ID NO: 174434 - DNA, 555 bp, Saccharomyces pastorianus
atgtcacagaatattcaaatcggcactagaaaacgttcaagagctaatatgaataattccactactacgggccctgcagacaatgtgagcgccaacaaggcctttctggacagcttcgaagacacacgcacaaacaacctgctggacgagatgtttgcccggcagaactccttcctgagcgacaacctcaggaacagtctggatctgaaccaggcggaaaactcgcacctcccccgccaacatcagcaccagctgtttctggacaacgaaaacgccatagatctggacgacgagccccgcaccacaaacactacgatcaataatattaacaacaatgacagcagccgcgttgacgaggacgccgacgacgacattatatttatcaaggagcagtccatacaattctcgtcgccgtggattctgcccagcagcagtagcaacaacaacaatgcggacaacacgtacatcacgacaccaaagaaattcaaaaaacagcgaaccatgttgctgccccaactgacactatcgaaactcacctaccagccaagctacttc

SEQ ID NO: 174435 - DNA, 195 bp, Saccharomyces pastorianus
tttatagaattgtgtagaattgcagattcccttttatggattcctaaatcctcgaggagaatttataatatagtctgtatacataatattatagcttctaacgacaatggaattctaacaattatcaaattgtccgccagttcctcaaaaagatccatgtataatcttcattattacagccctcttgacctctaa

SEQ ID NO: 174436 - DNA, 273 bp, Saccharomyces pastorianus
gcagtacatgacagtatcaagcgtgacggcgctgctgatatcaactttggggggtatactgcggagtatggaacccacgtcagcactagcagcgtgcattatgtaagcaggatcatcaatcaaatcgtagcagcggtaccagaggtctctgatacgagtggcaacgcttcggacataacgttccagagacacagtcaggagttcgctatctcatggatattaatgacgtatgaccaaagttatggtgatctggcacagaactggcaaaatgac

SEQ ID NO: 174437 - DNA, 822 bp, Saccharomyces pastorianus
attgagaaacatgcttcttttggtgggtcgcaagaagtgtatcgccatcagtcaatagcattaaactgttcaatgaaattctcaatatatctgccacctcatgacaaagatgagcggttgccagttttatattggttatcaggactgacttgcaacgaacagaactttattactaaagccggagcacaaaagtatgcggctgaacataaagtcattattgttgcaccagataccagcccacgtggagaagatgtaccagatcatgcagattatgatttaggccaaggcgcaggattctatgtgaatgcaacacaagcaccctggtcacagcatttcaaaatgtatgattatattgtggaagagctgagaaatctgattgacctgaattttccgaccaatcaagtccaaagcattatggggcatagcatgggtggtcatggtgcattagtaattgggttaaaaaatcctgagctgtataaaagtatttctgcttttgcaccaattgttgcacctagccaagtaccttgggggaaaaaggcttttacacactacctaggtgaaaccgaaactttatggaaaagctatgatgcgattgaattaatcaaaaacgctgaagttcatttacctattttagtcgatcagggaacagctgatgattttcttgaagaacagttaaggcctaagcttcttagtaatatttgtttggaacaagaatatcctcttacacttaacctaagagaagggtatgaccatagctattacttcattgcgagctttatagagaaacatatagagtttcacagcaaattcctagctaaataa

SEQ ID NO: 174438 - DNA, 579 bp, Saccharomyces pastorianus
gtcgtggatacaggtattatataccatcataaagctggcgatcctttcaagccaagtttaaaatacttgagcgaaacctttctgaataaaagcattcaaaacggagaacacgattctgtcgaagatgcaagggcttgtcttgaattgacgaaattaaaaatcttaaatgggttagcatttgggataggtatcaatacggagaacttgttcaccaaattacatcgttttgaagtgaaaaccgttcttctcaacgatatgattattaaaaatcatactgaggacgattctaagggccagttaatccgttgcgtcgaagatgatgagacatggacccatattcacgagaatctaaataaagatgtcaaacttattgtggggagaatcaagaacttagagaggtcacgcaactataataaaaagccacggaaggaaactccttcgttcgatgcgtccatggttcttcatgatatagggcaacatctaacacaattatacgagaatgctacaccaggtactatgattttgatcatgtcgggtacaggcgacacaagaccatggactatctttcaactgagttag

SEQ ID NO: 174439 - DNA, 765 bp, Saccharomyces pastorianus
atgcacgctttgttggcattcagtgccacccatctttcgaggactgaaactggactggagcaatacgtttcatctcaccgcctagacgctctgagattattaagagaagctgttttagaaatatctgagaataacaccgatgcgctagttgccagcgccctgatactaatcatggactcgttagcaaatgctagtggtaacggcactgtaggaaaccaaagtttgaatagcatgtcaccaagcgcttggatctttcatgtcaaaggtgctgcaacaattttaaccgctgtgtggcctttgagtgaaagatctaaatttcataacattatatctgttgatcttagcgatttaggcgatgtcattaaccctgatgttggaacaattactgaattggtatgttttgatgaaagtattgccgatttgtatcctgtcggcttagattcgccatatttgataacactagcttatttagataaattgcaccgtgaaaaaaaccagggtgattttattctgcgggtatttacatttccagcattgctagacaagacattcctggcattactgatgacaggtgatttaggtgcaatgagaattatgagatcatattataaactacttcgaggatttgccacagaggtcaaggataaagtctggtttctcgaaggagtcacgcaggtgctgcctcaagatgttgacgaatacagtggaggtggtggtatgcatatgatgctagatttcctcggtggcggattaccatcgatgaca

SEQ ID NO: 174440 - DNA, 132 bp, Saccharomyces pastorianus
ccatcatctcctatatttaatccgcagtatcccctcaagacaggtttgaaccggttttcaacgccatgtggaacgcttatgatgcattctccaaaagacattgatggtcttattattcctggattatgtact

SEQ ID NO: 174441 - DNA, 453 bp, Saccharomyces pastorianus
actagcgttggtactttcagtggtagtggcattagtgctggagttggtgctagcagtggtagtggcattagtgctggagttggtgctagcagtggtagtggcattagtgctggagttggtgctttcggtggtagtggcattagtgctggagttggtgctagcagtggtagtggcactagtgttggagttggtactttcggtggtagtggcactagtgttggagtcggtactttcggtggtagtagcactagtgttggagttggtactttcagtggtagtctgttactagtcctgacagtagatgtctggcagctggtagtagcattagtgctggagttggcagtcgcattggtactggcattaggcactaccatgaatgcgcgtgtcgctgtcctcatcacctgctgcgatactttctgcacctgtcactgctatagctctcctggcagttag

SEQ ID NO: 174442 - DNA, 81 bp, Saccharomyces pastorianus
aatcaagctaatcaaatccgatgtagtgtaacggctatcacatcacgttctcaccgtggagaccggggttcgactccccgc

SEQ ID NO: 174443 - DNA, 513 bp, Saccharomyces pastorianus
atggataggaaaaggtcttttgaaaaagttgtcatttccgtcatggtcgggaaaaatgtaaaaaagttcctgacgtttgttgaagacgaaccagatttccagggcggaccaatcccttcaaagtatcttattcccaagaaaatcaacttgatggtctacacgttgtttcaagtgcatactttgaaattcaatagaaaggattacgataccctttctcttttttacctcaacagaggatactataatgagttgagtttccgtgtcctggaacgttgtcacgaaatagcgagtgctaggccgaacgacagctctacgatgcgtactttcactgactttgtttccggcgcacctattgtaaggagtcttcagaaaagcaccataaggaaatatgggtacaatttggcaccctacatgtttttgttactacacgtagatgagctatcgattttttctgcataccaagcaagtttacctggcgaaaagaaagtcgacacagagcggctgaagcgtgat

SEQ ID NO: 174444 - DNA, 93 bp, Saccharomyces pastorianus
ataacactatgtagaactatcgattcccttttgtggattcctatatcctggaggagaacttctagtatattctatatacctaatattatagcc

SEQ ID NO: 174445 - DNA, 678 bp, Saccharomyces pastorianus
atcgttgcgttaccgtctagcttccaggagagcaatagcagtgacaggtgcagaaagtattgcagcagtgatgaggacagcgacacgtgcattcatggtagtgctaatgccagtaccaatgcgagtaccaactccagcactagtgctactaccaccgaaagtaccaactccagcactaatgctactaccactgccagcatcaacgtcaggactagtgcgactaccactgccagcatcaacgtcaggactagtgcgactaccactgaaagtaccaactccagcactaatgcgactaccactgccagcatcaacgtcaggactagtgcgactaccaccgaaagtaccaactccagcactaatgctactaccactgccagcatcaacgtcaggactagtgcgactaccactgaaagtaccaactccagcactaatgctactaccactgccagcatcaacgtcaggactagtgcgactaccactgaaagtaccaactccagcactaatgctactaccactgccagcatcaacgtcaggactagtgcgactaccactgaaagtaccaactccagcactaatgctactaccactgccagcatcaacgtcaggactagtgcgactaccactgaaagtaccaactccaacagacctgcaggcatgcaagcttgcactgccgtcttt

SEQ ID NO: 174446 - DNA, 801 bp, Saccharomyces pastorianus
ttagaataccagattgtttcgaacgatgagtacattgcattgaaaaatacgatggaaaagccggacgttgagttactaagatccaagttgaaaggttaccatataattgatacaacaacgtacaatgagctagtcagcaatttcaattctcctacgttgaagtttattgaagagaaagccaaaagcaaaggttatagattaatagaacctaatgaataccttgacttgaatagaatagccactacaccttctaaagaagagattgataacttctgcaaacaaattgggtgttacgctttggactctaaagaatatgaaagactaaaaaattctctgcagaatccctccaagaaatttatagaagaaaatgccgcattacttgatcttgtgctagtggacaaaacggagtaccaagcaatgaaagataatgcaagcaacaagaaatcacttattccttcaactaaggcacttgatttcgttgcaatgcctgccccacagcttgcttctgcagagaagtcatcactacaaaaaagaactttatctgatattgaaaatgagttaaaggccttaggctacgtcgcaattcgtaaagaaaacctgccaaacctagagaaaccaattgttgacaatgcctccaaaaatgatgtcttgaacctatgttcgaaattcagtttagtaccattgtctactgaagaatatgataatatgagaaaggaacacactaaaatcttaaatattctcggtgatccatctattgatttcctgaaggaaaatgtgaccatttcaaatgctcataattag

SEQ ID NO: 174447 - DNA, 357 bp, Saccharomyces pastorianus
tgcgacgacactgacaagcctttgaacttagatgctatgactacaaaggacactggagtttgggttgaaaatggcaagaagaaagttgctagtgttggaatacacgtcagacgttccataacatcgcacggggtagcaattaatgttaatacagatctatcgtatatgaatagttttgaaatgtgcggtttgaaaaatacactgactacttcaattatggaacaacgacccgatgctgttgtaaatgtgcaaagtgtagcaattagttttgtcaaagaaatgacaaagctgctaggaataaaaactttggaaagaatgcaaattgacgacgtcaatattttgaaaaagaatccgtga

SEQ ID NO: 174448 - DNA, 648 bp, Saccharomyces pastorianus
tggcttgcgattaccttacacggtaggtctaggctacaaaggtacactaagtctgcggattgggactacgtgagtcaagtggctgacaccttgagatccgccgaagcggatttcatcgaaaccgaacaaggcaaagaaggcagggattccaagaacagaattcaatttgtcggaaatggtgatgtcaacaattttgaagactggtaccgctatttggacggaaatgaaaatattgatagtgttatggttgctcgaggggccctgatcaaaccatggatttttgaagaggttgagtcgcagcagtatctagacaagacaagtacggaaagattagacattttaagggattatgcgcagttctctatggaacactggggcaccgacgaatacggcatttctcaatgtcgtagattcttctgcgagttcatgtccttttttcataggtatgtccccatgggtatttgtgaaagataccctgtgaagttgaatgagagaccgccaaattggtgtggaagagacgaacttgaaactctaatgggtagtacggatgttaatgattggatcaagctaagtgatctattcttcggtaaaaccgacgagaactttgtatttgtccccaaacataagagcagctcttatgcaaacaga

SEQ ID NO: 174449 - DNA, 708 bp, Saccharomyces pastorianus
cctgtttgcgagcatatttcttctgtgggagagtatgttacgatcggtgacaaaattttcaaaagaagtgattttgaaaattatttatcaagtaacccaagtagcgatgtgcgcctggagcagccaagaccaactaactttgcaaaccctcttccactaggattggcgtccttctcgttcatgtgtttaacactggggttagttaacgcgagagtgcgtggagttactgacctcaatcttttgaatgcttctttcatttttggtggcgcagttgttttgttgtcaggactgctatccttctgcgtcggtgatacattttgtatgacagtctttggaacatttggggggttttggattagttggggctgccttaacctggagcaatttggagtggctaaagcttacgcagataatccacaggcattgaacaatatacttgggttttacctggctggatggacagtatttaatttcatggtaatggtctgctcgatgaagagtacctggggtatattcctactactacttttcctagacttgacgtttttaatgctgtgcgtcggttcttttacatcaaacgttaacgcttcgatggcagggggttactttggtatattaagcagctgttgtggttggtattcattatattgttcaattgcaaacaaagaaagctcctattttcctttggttgcatatccgatgccaagt

SEQ ID NO: 174450 - DNA, 120 bp, Saccharomyces pastorianus
agcaacaacagcaacagcaacaacagcaacaacaacctcaatcacaatcacaacaacaacaatcacaacaacaacaacaaccacaaccccaatcccaacaaagtccacaaagtcaaaaac

SEQ ID NO: 174451 - DNA, 645 bp, Saccharomyces pastorianus
cattctaatcccaagcgtgtacttatcattggcggtggggacggaggtgtcttaagggaagtagccaagcacagctgtgtagaagatatcactatggtagaaattgactcatcagtgatcgaattatcccgtaagttcttgcccacattgagtaatggtgctttcgatgacgaaaggttggacttgaaactttgcgatggcctcaagttcttacaagatataggtgcttccgacgtccataagaaatttgacgtcattattacagatagttctgatcctgaaggtccagctgaagcgttttttcaagagaggtatttcgaactattgaaagatgctttaaatcctaatggcgttgttattatgcaaagctctgaaaatttttggttaaatttaaaatacttacatgatttgaaaaatacagccaagaaggtatttcctaatacagaatattgctataccatggttccaacctatacatctggccaattaggtttaattgtttgcagtaataacgccaatataccgttgaacattgcgcaaagaaagatatctgagcaagaacaagggaagctgaagtactataatcctcaaatacattctagtgcgtttgttttgcctacttgggcagacaaggtcattaatgaa

SEQ ID NO: 174452 - DNA, 381 bp, Saccharomyces pastorianus
atgttgaaagatattttggagcatatgaagcacaagacacctcaaatcagaatggagtgtacgcaattgtttaatgcaagcatgaaagaagaaaaggatggatactcgaccctgcaaagatacttgaaggatgaagtggtaccaattgtgattcagatcgtcaacgacacccaacctgctataagaactattggatttgagagtttcgccattctaattaaaatatttggcatgaatacctttgtgaaaacattagagcacttggataatttgaaaaggaaaaaaattgaagaaacggtcaaaactctacctaatttcagtattgcaagtggtagtacccatagcactattgaaacgaataaacaaactgggccaatggag

SEQ ID NO: 174453 - DNA, 726 bp, Saccharomyces pastorianus
caactgttatggatcactctaatcatggatactctagcagctttagctttagccactgataaacccgatccaaatatcatggacagaaaacctgggggccgctcaacttctttgatttctgtgtcaacttggaaaatgattctatcacaagctacattgcagttgatagttactttcactttgcatttttacgggccagagttattcttcaagaaacatgaagatgaaataacaagtcaccaacagcagcaactgaatgccatgacattcaacacttttgtttggttgcaattttttaccatgttagtatcgagaaaattagatgaaggtgatggtatatcaaactggagaggcaggatttctgccgccaatttgaatttcttccaagacttgggtagaaattattattttctcacgatcatggcgatcattggcagctgtcaagttttaatcatgttttttggtggcgcaccattttctattgccagacaaaccaaatcaatgtggataaccgcggtactgtgtggtatgttgtctctaatcatgggggtgctagtgagaatctgccccgatgaagtagcagtgaaggtatttccggctgctttcgttcaaagattcaagtacgtatttggactcgagttcctcagaaaaaaccatactggaaaacacgacgatgaagaagcgctgttggaggaatctgatagtccagggtccaccgccttttat

SEQ ID NO: 174454 - DNA, 2460 bp, Saccharomyces pastorianus
ttcagtcgcttaaacacgtttcaagctgctttagctttggcgctttactcgcaaagtgcattgggtcaattctacagcaacagcacttcactttcgagcaacacttcatcaactgctgttccatcaacttcatctagttcctattcgattagtagttctatctcttcgtctggttctgatgtctcgagctctataacccagtcaacctcatctggttctggtgtctcaagttctgttaacccatctgcctcttctggttctggtgtctcaagctctgttaacccatctgcctcttctggttctggtgtctcaagttctgttaacccatctgccccttctggttctggtgtctcaagttctgttaacccatctgcctcttctggttctggtgtctcaagttctgttaacccatctgcctcttctggttctggtgtctcaagttctgttaacccatctgcctcttctggttctggtgtctcaagttctgttaacccatctgcctcttctggttctggtgtctcaagctctgttgccccatcaacctcatctggttctggtgtctcaagctccaactctcaacaaacctcctctggttccgcttccggcgcctcgagcactattacttccttctctgcttctggaacaagtgctactgtctctggttctctttcttccagtgacggtactatttacttgccatccacaacaatttctggcgatatcacacttacaggtgatgtatttgcaacagatgcagttgaaatcgccgctggcggcaaactaacccttcttgacggtgacaaatacggattctcaggtgacttgagagtttacggtggtctgttcgtcgcaaagtcaaaggcatcttacttaggttccgctttcgacatctcaggtccacttttcgaagtctctggtgaattcgatgctcaagaacctgctgctacttccgcatccatctactcgttcacacctggctcttttgaaaacagtggtgatatttctttatctctatctgaagccaagaagggtgaggttactttctctccatactctaacactggtgccttctctttctccaatgctatcctaaacggtggtactgtctctggtttgcaacgtagagctgaagatgaaggatccacaaataacggtgaaataaacttagacaatggaagtacttacgttattgtcgaacctgtttccggaaagggtacaatcaacatcatctccggtaacctatacttgcactacccagacactttcactggtcaaactgttgacttcaagggcgaaggtgttcttgccgttgacccaaccgaaaccaacactacccctattcctgttgttggctacactggtaagaaccagattgccattaccgcagacgtcactgtctcgtatgacagcgccactggcgttttgactgcaaccaagggtaacgctgacttctctttcgctatcggtactggcttctccagttctggcttcagcgtctccgaaggaactttcgcaggtgcctatgcttacttcctaaactacggtggagctgttgcctctagttctgctccatcatctgtttcctctacatctggtgcttcatctgtttcctccatatctggtgcttcatctgtttcctccatatctggtgcttcatccgttacctccggtccagttactggttccactttagagaccgcatccgtttacaccactacattgacttccggtgaagttacaagcacagtcgtagtttcctgttcaaaaacaactgacgctagtggtcacatctatacagttacaacaaccgttccatgtactactaccactgctacaatcacttcttgtgatgacaatggatgccacgttgttccagctccaaccaccactaccgccacaatcacttcttgtgatgacaacggatgtcatgttgttccagccccaatcgctactgccaccactgaaactgtctcttcaaagtcgtacaccactttcactgttactcactgtgaggacaacgcctgtagtgtcaagactgtaacctctgaggctcctaaaaccacttcagccaccactgtcacgtctgaagctccagtatctcacaccaccctcacagttactaactgcgataataatggttgtgaagtcaagactgtcacctctgaagctcctaaaccaactaccgctaccactgtcgtcacctctgaggctcctaagggaactacagctaacactgtcgtcacctctgaggctcctaagggaactacagctaacactgtcgtcacctctgaggctcctaagggaactacagctaacactgtcgtcacctctgaggctcctaaagtaacttccgccactactactggttccgaagcatctagttcaatcatcaagtatggttcctctgcttctaaaaccctcactggtgttgttgtccaatctgaaggtatcgccgctggt

SEQ ID NO: 174455 - DNA, 192 bp, Saccharomyces pastorianus
aaaaggccgggagtcataaagtcggatgacgttatcgtgaataattctagtaataatctaccagtgaccaatcctagcggtttaagagagtctattattagaagacgtatgagtagtagtagttgtggcgattctatctcgagacaaggaagtatctcaagtggacctccaccaagatctccaaataaatga

SEQ ID NO: 174456 - DNA, 396 bp, Saccharomyces pastorianus
  modified_base (47)..(47): a, c, g, t, unknown, or other
gtgaacacaccgggtactaaagaatctcgcaagtttgttactggggntgctgacaatttggtaaagatttggaagtacaattcagatgcccaaacttatgttctggaaagcaccttagaaggtcacagcgattgggttagagacgtagcatggtcacctactgttcttctacgttcttatttggccagtgtttctcaagatcgcacctgtattatttggactcaagacaatgaacaaggcccatggaaaaaaactttattaaaagaagaaaaattcccagatgttttatggagagccagttggtctttgtcaggtaatgtactagctctttccggtggcgataataaagttactttatggaaggaaaatcttgagggtaaatgggaacccgctggt

SEQ ID NO: 174457 - DNA, 1083 bp, Saccharomyces pastorianus
cctgtttattcagttgatcccttggaaaagattaccgatgcatatcttgatcagtatttatggtacgaagctgaccaacgaaagcttttcccaaactggattaaaccaagtgattcagagataccacctcttctggtatacaagtggactcagggtataaacaacctatctgaaatttgggatgtatccagaggccaatctgcagttttgcttgagactactttgggtgaaatggccgaaaaaattgactttactttacttaatagattacttcgcctgattgtagatcctaatattgctgactatattactgcaaaaaataatgttgttatcaactttaaagatatgagtcacgtcaacaaatatggcttaatacgcgggttgaagttcgcttctttcatattccaatattacggactagttatagatcttttactattgggtcaggaaagggctacagatttggctggtccagctaacaatccaaatgaatttatgcaattcaagagcaaagaagtagaaaaggcacatccgatcagactttacaccagatatttagatcgtatatatatgctttttcactttgaagaagatgagggagaggaattgactgatgaatacttggcagagaatccagatccaaactttgaaaacagcatcggatacaataatagaaaatgttggcccaaagattcgcgcatgaggctaatacgtcaggacgttaacctagggcgagcagtgttttgggaaattcaaagtagggtgccaacttcgttaacgtcaattaaatgggaaaatgcttttgtttccgtatacagtaaaaacaatccgaacttactcttctctatgtgtggttttgaagtcagaatattaccaagacaaagaatggaagagctggtttctaacgatgaaggtgtttgggatttagttgacgaaagaaccaagcaaagaactgcaaaagcatatctaaaggtgtctgaagaagatgtcacacaattgacagccgaatacgaggctattgatgtcttccggttcaaccactttactaaagtggcgttaatggaacacttcgtgatatccttt

SEQ ID NO: 174458 - DNA, 993 bp, Saccharomyces pastorianus
atggatatgccaatgacagtcgcattacttagagtgagatacactttggaagctgctttggcaagaggtttcacaacagtgagggattgtggaggtgctgaaacctttcttaagtctgagatgctcaaaggcactttgaatggccccagattgataacttgtggtcacgccatttcgcaaactggtggtcatggtgacctgagatctggtgacttgcctgcaagtgcttttgagagctgttcgtgccactacggtcaagttggtgttgtagcagacggtgtttccgaatgctataaagcagccagagaggagtttagaagaggtgcggactttatcaaaataatgggtggaggaggtgtggcatcaccaactgacaagatatctaacaatcaattttgtgatgatgaaataagtgctttggtaaatgtagcaaactgctaccacacgtatgtaacggcccatgcctacactccggaggcgatacaaaagtgtatcaaattaggcgttaaaggtattgagcacggaaatttattagatgaacgtagtgctgaactaatggcagaacagaactgttatttgactccaactctggtgacctacaaagtgatggcttcagatcaattttctacattcttaggaccagaaaatagcagaaaaaatgcagaggtactgtacaaaggagttgaagcaataaaaattgcccagagcaaaaaagtcaaaatttgttacggctctgatttgttgggccctctatatggttaccaaacacaagagttccgcattagggggaaaattcagactgctcaggaggttttactttcggcgaccgttacacctgcagagatgaatggtctggacgacaaattaggacagattaaaccagggttctttgccgatttattgatgatgaactcaaatcccttagaaaatattgagattttggatgaaccagagaccaatctattgcttgtaatgaaagatggaagaatttac

SEQ ID NO: 174459 - DNA, 150 bp, Saccharomyces pastorianus
tctactaatacttgcaatcctttcaatttttctgttgatgaggctcgggaattaactgatgaagttgaaacattttggcgtaaatcaaacagatatggtgctttattgttcaagggcaagacttatgatttacaaaatttcatatgtttg

SEQ ID NO: 174460 - DNA, 96 bp, Saccharomyces pastorianus; identical to SEQ ID NO: 173737

SEQ ID NO: 174461 - DNA, 105 bp, Saccharomyces pastorianus
atgttagaagttctcctccaggatttaggaatccataaaagggaatctgcaattctacacaattctataaatattattatcatcattttatatgttaatattcat

SEQ ID NO: 174462 - DNA, 210 bp, Saccharomyces pastorianus
aactttgtttctggcacacctattgtaaggagtcttcagaaaagcaccataaggaaatatggatacaatttggcaccctacatgtttttgttactacacgtagatgagctatcgattttttctgcataccaagcaagtttacctggcgaaaagaaagtcgacacagagcggctgaagcgtgatctatgcccacgtggggatcctctagag

SEQ ID NO: 174463 - DNA, 96 bp, Saccharomyces pastorianus
ttacattatgggtggtatgttggaataaaaatcaactatcatctactaactagtatttacgttactagtatattatcatatacggtgttagaagat

SEQ ID NO: 174464 - DNA, 327 bp, Saccharomyces pastorianus
gctcgtcttttggggtccgcctctgcaggcataatggaaattgccgtcttccatcctgtggacaccatttccaaaagactgatgtccaaccacaccaaaataacctctggccaggaattgaatcgtgttatttttcgtgatcatttcagcgaacctttgggcaaacgtttgtttaccttgttcccgggtctcggttacgctgcatcatacaaagttcttcaaagagtgtataaatatggtggtcagccttttgctaacgagtttttgaataagcactacaaaaaggattttgatatcttttcggtgaaaagactggtaaggcaatga

SEQ ID NO: 174465 - DNA, 1533 bp, Saccharomyces pastorianus
atgataccggcacttacggcaaacgcaaatattactagagctcagcctagcgtagcaaataatctcttgaagttaaaggaaatgttaatccgacagtgccaaactgatgatgagaagagccgtgttaatgagtttaccgataggatattacagaatacgaattccaatagaaacttgaaaatcggtatgttgttgtcaatgctttacaattccgttggccaccaatacttagaagatcactgtcctcaaggtggcgagtattcagatttattgaaaaatttgatcgctgagtgtgatgccattttaccaccatatgaaattattgaacgctataagaatcatttcttcgaatacgtttatccgagtttaccgttcatcgagttggatctttttgaagagtctctcagtcaaacaatttttcccgatgaaaacgatccttccagggtgaaaatacggatggggagcactcatttgagatccaaagtagaaaatttaagtctacttttggttatcctgaaactatcatacatgtcaataagatttttagaccacaaaacagcagagtcaagtgtttatttatcaaaggaaataattgataaatacccaataccgaatgattttatcttgttaagtcaaagatgcttggcgtcagaaaattggtgcgcatgtgctaatgaaaatatcatatcgtgcttattatatatttggtcgttttttgccttttcgcctgaagagggtgatttctttcttgagcaccctactgatgttatcagtagtttaataatgatgctttccacttcgattggtctccatagagatccatcagatttccctcaattaatatcgccatccacctcagataaaagagtattgaaccataggaggatactgtggttgagtattgtcactgtttgttcgttcgaagcaagtctcaagggtagacattccgtctcaccaatatctttaatggcattatttttgaatattaaagatcccgattccttgacagtttatatgaacagggttaggaatgatctgagcgatctcaacgatactaaactgttgagaattcatgaattctcatttaagagagcgcaactggctttgctgttatcagatttggataatctaacaatgacttactacgggagctttcatttgcattcaattgaattcattagagaaaaactagacattttcgtagaagaaaactttcccatagtgcctttgaaaagtgtcacacaggataaatctgattttgatgataccgacgtaatatcagaaatgaacttgttgtcatcagagaattcttcttcatttcacagtcgaataatgaataaactattgatgctaagaacctcaatggctatacttttacattttgaatcattgatcactaaggataaaaacgttttcccattctacaagaagtattttatgctcagttgtatggatgcattgtcattgataaactattttaacaaattcttcaacggtgactatcgatacgcaatttcttctctgacaagtttt

SEQ ID NO: 174466 - DNA, 138 bp, Saccharomyces pastorianus
tcatcatctttattactgtcgccaaaggtggattgtccaagtaaaaccttttcccttttagaagcaaaatcatcaacttcgtttaaaccataccggattaatctcatccccaacttcagaggtcttagttctgtctga

SEQ ID NO: 174467 - DNA, 219 bp, Saccharomyces pastorianus
tcatacgcacacggatgctacagtatataccactctcaagttaccctactttcatattccacaccatggcccattctcactaaatcagtactaaatgcactcacatcattatgcacggcacttgcctcagcggtctataccctgtgccatttacccataaagtccatcattatccacattttaatatctatatctcattcggcgacaccaaatattgta

SEQ ID NO: 174468 - DNA, 138 bp, Saccharomyces pastorianus
atgatagggcatataggaccactgagaacatatctaggtcggttgggcacacgggtgcagtccaggatggttcatcacaaggtcacaattataggctctggtccagctgctcacacagcggccatctacttggcaaga

SEQ ID NO: 174469 - DNA, 561 bp, Saccharomyces pastorianus
atggaggatagcactttcctgaatgagctactacatctagtccatggtatattcagggatgatgaattgataaatggtaaggactctataccaggagcttatttgtcaaagcctatatgtaatttactcttgagcatagccaatgctaaatcagacgtattttccgagagtattgtccgtaaagccgactatttgttagagaagatgataatgaaaaaaccgaatgaactttttgagtcattaattgccagttttggcaaccaatacgttaatgattataagaataagaaactacgccaaggagttaacttacaagagacagagaaggaacgaaaaagaagattggccaagaagcatcaagcaaggcttctggccaagtttaacaatcaacaaacgaaattcatgaaagaacatgagtctgaatttgatgagcaggataacgatgttgacatggtcggtgaaaaagtatatcaatcggaggactttacctgcgcactatgtcaagatgccagttcgaccgatttttacgtgatacctgcgtaccatgatcattccccgata

SEQ ID NO: 174470 - DNA, 705 bp, Saccharomyces pastorianus
gactctgatgatgagctccaggaggaacttacgaggcagacaactcaagcatctcaaagttctaaaattaaaaatgaagatgaactcgacgactccaatcatcttaatgaggtggaaaatgaagatagcaaagttttagatgacgatgcagtgttataccctcttatacctaatgagccagatgacatagaaacgtctaagcccaatattaacgatattaggccagttgatattcaattgactttaccattgccgtttcagcaaaaagtggtagagaattcattgattactgaagatgcattgattgtaatggggaaaggactaggcttgcttgatattgtggccaatttattgcatgttttagctacaccaacatccattaacggacaactaaagcgagcgctcgtcctagtgttgaatgcaaaacctatagataatgtaagaatcagggaggccttagaagagctgtcgtggttctctaatactgggaaggacgaaggcgatgctgctgtcgagagcgatgatgaactttttgaaaggccttttaacgtagttaccgcggactcgctgagcattgaaaagagaagaaagctatatatttctggtggaatcttgagcattacttctagaattctcattgtggatctcttatccggcattgttcacccaaatagggtgacctgcaggcatgcaagctggcactgc

SEQ ID NO: 174471 - DNA, 606 bp, Saccharomyces pastorianus
gttgacaccgtgccgctcacgtggtcagacacgctggccacgtatgcgcaggcgtacgcggacgagtacgattgctcgggcacgctgacacattccgacggtccgtacggtgagaacctggcgttgggctataccgacacgggcgccgtggacgcttggtacggagagattagtaagtacaactactcgaatcccgggttttccgaatccacgggccacttcacccaggtcgtctggaagtctaccacccaggtcgggtgcggctacaagtactgtggtaccacgtggaacaactacgtgatatgttcttataaccctcctggaaactacctgggcgagtttgctgaggaagtggagccgctgataagcacggtgtcctcttcgtcctcgtcctcttcgtccacttcgtccacttctaccaccaccgcggtgtcgtccagtatggctgctccaaaagcacagggctcctcgacttcgacatcctctgcggcggctagttcttctgaagttaccaccataaatcctgccaagcctgccacctctgcagcatcatcctcatctgtcgtttcttccaccaccacaaaagcgtcctcatctgtcgtttcg

SEQ ID NO: 174472 - DNA, 930 bp, Saccharomyces pastorianus
atgtcttcgtcttctttaccatcttctgcttcttcagcgttttttagattgaagaaattgaagctcttggatattgacccatacacatatgccacacaattgactgtacttgaacatgacttatacctcaggatcactatgtttgaatgcttggatagggcatggggtaccaagtattgtaatatgggtggttctccgaacattacgaaatttatagctaatgctaatacgctaactaattttgtttctcataccattgtaaaacaggcagatgtcaagacacgttcaaaattaacgcaatattttgttaccgttgcccagcattgtaaagagttgaataatttttcttcaatgactgccatagtgtccgctttgtattcctccccaatctaccgactgaaaaagacatgggatttagtttccactgagtcgaaggaccttctgaagaacctaaacaaccttatggattccaagagaaattttgtgaagtatagagagctgttgcgatccgtgacggacgttgcatgtgttcccttttttggtgtatacctatctgatttaacatttacgtttgtcggaaacccagattttcttcacaattcaaccaacataataaacttcagcaagaggactaaaatcgcaaatatagtggaggaaattataagctttaaaagattccattacaagctgaaacgattggatgatattcagaccgttatagaagcgtctttggaaaatgtcccccacattgaaaagcagtatcaattatcactgcaagtggaaccgagatcaggaaacaccaaaggcagtacgcatgcttcttctgctagcggtacaaaaactgcaaaattcctaagtgaatttacagatgataaaaatggcaattttttgaagctaggtaagaaaaaacctccttctaggttatttcga

SEQ ID NO: 174473 - DNA, 306 bp, Saccharomyces pastorianus
cgtactttcactgactttgtttctggcacacctattgtaaggagtcttcagaaaagcaccataaggaaatatgggtacaatttggcaccccacatgtttttgttactacacgtagatgagctatcgattttttctgcataccaagcaagtttacctggcgaaaagaaagtcgacacagagcggctgaagcgtgatctatgcccacgtaaacccactgagataaagtacttttcacagatatgtaacgatatgatgaacaaaaaggaccgattgggtgatgttttgcatgtgtgctgcccaagttga

SEQ ID NO: 174474 - DNA, 231 bp, Saccharomyces pastorianus
aaacggaagcaccaagtaattaccgcgtgcagaaactgcaggaacaggaaagtaaaatgtgatggtagtctaccctgcttttcgtgcttgcaacggcatatcacttgtacatatatgattaagggtgatgagggaaatctcagcttttacaagcaagatgatcatattctagagcagatcaagattcttaagaaggttattgttttttttgatctgcagatgccaccctct

SEQ ID NO: 174475 - DNA, 471 bp, Saccharomyces pastorianus
gtcaatgatgaaacattttatgataacaacaataataaaaattatcatctcttcataactaccttcaaacaggggaagaaagaggaagaaaaacaaaacattgctgtcgttgtcgagccagctgccatcatcaaaaaaaatagtaataatccaccaaagaacgtaacctcaaagttaatttcttcgaatccaagtctttcaaaattttcttctcaatctagaaaattcagtgaagacacagattactataacacatctccattaaaacatctttatcacaatgatacaacaactttcatcaaacctaaaagactgaacgcagttttagaaaaattagacaacaccactccttctcctcctcctccttctccttctctagccggtactgccaaaattgaaaatgtagccaaaaatgagaacagcacatctactagcaccactgccagaaataatgttgcctaccaatattag

SEQ ID NO: 174476 - DNA, 2334 bp, Saccharomyces pastorianus
atgttgattgttcaacgtagaaaccatcctatggctattatcagaccatcttttgccaacagaggtgcatcttattctcaatatggtattcaaattagatccgtcagaccagaccaaacctctcaaactaatgttctacattatttgaatgacggtcaagtaacatttagattttcttggagaaaaaacgaatatttagtccctgctgttatgattttgaaagctttatgccatactagtgatagagaaatttttgatggtattatcggtgatgatgttaaggattcatttctaactgatcgtttagaattgttattgcgtggctttaagaaaagataccctcaattacaaaatcgtacacaagttttacaatatctaggggacaaattccgtgtcgtctttcaagcttcccctgaccaatctgatttagaggtcgggcaagaagtccttgaccgtattgtcttagcgcatttgggcaaggatggtaaccaagataaatttagaatgttgttgtttatgattagaaagttgtattctttggttgcgggtgaatgttctcctgataatccagatgccacacaacatcaagaagtcttattgggtggtttcttatatggtatgattttgaaagaaaagatcgacgagtacttgcaaaacattattgctcaagtcaggatggatatcagccgtggtatggccatcaatttcaaggacaaaagatatatgtcaagagtcttaatgagagtcaacgagaacattggttccaaaatgcagtactttttatcgacaggtaacctagtctctcaatctgggttggatttgcaacaagtctctggttacactgttgttgctgaaaaaattaatttctaccgtttcatttctcattttagaatggttcatagagggtcattttttgcgcaattgaagacaaccacagtcagaaaattgttaccagagtcatggggcttcttatgtcctgttcatacaccggatggttctccttgtggtttgctaaaccattttgcccacaagtgtcgtatatcaactcaacaatccgatgtttcaaaaatcccttccttattatactcactcggagttgctccagcttctcacacattcgctgctggtccttctctatgctgtgttcaaatcgatggtaaaatcattggttgggtctctcatgagcaaggtaagattattgctgatacgttgagatattggaaggtggaaggtaagacacctgggctgcctgtagatctagaaattggttacgtgcctccatcaaccagaggccaatacccaggtctttacttatttggtggccgctccagaatgctccgtcccgttcgttacctgcctttagataaggaagacattgttggtcctttcgaacaagtttacatgaacattgctgtcacatctcaagaacttcaaaatgatgttcatacacatgttgaatctacaccaacaaatattttgtctattttggctaatttgaccccattttctgactttaaccaatctccaagaaatatgtatcaatgtcaaatgggtaagcaaactatgggtactccaggtgttgctttgtgccaccgttctgacaataaactttatagattgcaaactggccaaacacctatcgttaaagctaacttatatgatgactatggtatggataattttccaaacggtttcaacgccgtcgttgctgtcatttcatacactggttacgatatggatgacgcgatgattatcaacaaatctgctgatgaaagaggtttcggttacggtactatgtataagactgaaaaagtggatttggctcttaacagaagtcgtggtgacccaattacacaacattttggtttcggaaatgatgaatggccaaaagaatggctagaaaaactagacgaggatggtttgccatatattggcacttatgttgaagagggtgatccaatctgtgcatactttgacgatactttgaacaagacaaaaatcaagacatatcattcctcagaaccagcatatatagaggaagtaaacttgattggtgacgaatcaaacaagtttcaagaactacaaactgttagcataaaataccggattagaagaacgcctcaaattggtgataaattttcttctagacacggtcaaaagggtgtctgttccagaaaatggcctaccattgacatgcccttcagtgaaactggtattcaaccagatatcatcattaaccctcacgcttttccttcacgtatgactatcggtatgttcgtcgaatctttggcaggtaaggcgggtgctttgcacggtatcgcgcaagattccacg

SEQ ID NO: 174477 - DNA, 501 bp, Saccharomyces pastorianus
atgtacattccaaaaaatttcgaagtccaagatttgccaagacaagtggagatcatccgcatttaccctctaggcactttgttcactgcaagccctccttcaaaaggtttacttaatatctggagcaatgacccggtaggtaggccggattctgagttatgtgtcactcatgttcccttttgctttgtgccaggtgccgaaggtagctgtgggaagctcgtcgcacatctagcggttcaaaatcagcagattgaacacttggaaaatcgatccaaatgcctcgtcgtttttcaaagtgttgattcgtacatttccccatcttggtatccactaaagaagaacactcacgagcgtgttcctacgtgggactttgcagctgttcatgtttatggtactcctaaaattattagaggcgataaagaatggctaatcaacctcttgaatctgctgaccgatcaagaagagtcgaagaggcccgagggtgaacaatatgagcaaaaa

SEQ ID NO: 174478 - DNA, 213 bp, Saccharomyces pastorianus
atgagcgggtccgaagacggcaagatttacatttgggatagaatcagaggtaatttgatctctgtgctctccggtcattccacactgatcaacaactcctcaaaacccgttgtgaaaaactgtaacgtggtcgcatcaaatcctgtcgataaagaaatgtttgtgtctggcggcgatgacggtaagataaaaatctggaaaatatcaagaaac

SEQ ID NO: 174479 - DNA, 153 bp, Saccharomyces pastorianus
ttttcctgcataccaagcaagttacctggcgaaaagaggccgacacagagcggcttgaagcgtgatctatgcccacgtaaacccactgagataaagtacttttcacagatatgtaacgatatgatgaacaacaaggaccgattgggtgatatt

SEQ ID NO: 174480 - DNA, 594 bp, Saccharomyces pastorianus
ggtagcaccgctaaggacgaagttcctccgccgttactcataagatttactaccaaggcgatgcgactgttttttattgtagatatgcttggacgcacaatggcaccaagtagtagacttacttgcttttcaaacaagggtcctttatattggtctatagcatattcagccattatttccgcctggggttttttagtatggatggaaagagcatatagaaagaagaggaacctgcaaccttcaaggtgcacgaaaataatctgctctcgttgtgatacaataaagaaacatcctcgatggttcaaatacaaatatggactatacttccttttaacatacgttgctcaaacttggctcgtctggatgattcaggtatctcctttttttatagaacacacgattgatgagggacgagaagaaccttcatttgtcccagttacagttagtatcatgatggcccatatgatgacagtatatctcttcaaagtgtattatttgcatattgatcttcttaagatgaattccagcagtgttgccgataaagaaagcggtaacagaaaaggacgtgatttagtattaaaccaacctcagtag

SEQ ID NO: 174481 - DNA, 1869 bp, Saccharomyces pastorianus
ttctttattcatctgccctctgattgtatagcgaaggacaagtttttcaccagctcggacgatcccaccaacttgacaatacccaatagggacatcaacgaaaggactcttttcttggacgccttccttttgtgtgcatctaacaacaatagcaacaacttcaagcagacctatgtttgtaatagatgtatcaacagggaaaagagaagagcgtcgagaagaaagtctgggttgaacgacaactccatctggcaaaataacgaaaacaaaagagcaatcatattcaatagtaaacaacttttcatcattagtaataacggtttgagtggtaactctaactgtatcaatttcgacttaccgacgagaatcgtctgttactgcagacaccacaaggcaactaacgggtttgtagttttgttccttctaagggaccataacggcgatatcttggcgaaaactataacagatcccataatgatcatggacaagaaaaatgccagcaataccacaactccaaccagcaccagcaatgcccaggtttcgccaatgacaaatgacactagatccttttcatcgccgcaaagtgacttaaacttcccatccgaattccccctgccttctaacagtaaaaattttgtcatttctacgaactgtatgcttgatagcaattgtaataacaacaacaatgataatgataacaaaaacaacattaagactaataccgcaatgatgaacaacaacagacactttccatcaccaaattcctccagtgaggacagcaaccattctttttcagatattcatttttctaataacaacgacaacaatttacatcgttcactagactcttggtcgtccacaggttttaatagttcatctaatcccgctcttactacattaactagtgatttcagtgcggcctctgcgagacacactggcaagaggcagcgttcggtaaacgagccttttatgtctacgcctaatacgttttcccgtcttccccagaaattcatcgattcttccaaagatatatcgaaccataatagtgtccccgtggcgctcaatgacaagccttctattcagcgtgtcatccccgcacaaggttccattaacggaggtatagaagtgactctacttggctcaaagtttaagcagggcttaatcatcaagtttggcgaaaatatagcattgtccagccaatgctggaatgaatctacgatggtgacttttttaccgccttcatctaaacctggaccggttttggtaaccataatcgacccaagtgaaacatctatgagaaataatagcaatagtagtgtttccaccagcaatagtaccaatgacattctgcacttaaacaagtataccggtgagaaagcaatctttacttatgttgatgatactgataggcaactaattgaattggctctgcaaattgtggggctgaaaatgaacggtaaactggaagatgcaagaaacattgctaaaaggattgttggcagtgattcatctccatctaataataacgcaggattacactcacagaatagctctttaaattcatacacgaatatgatgcgaaatataaacgatgaacaattgatcactgaagttattaagtcatttaagagaaataataatctttctaccgtcaatctttccatgtgtgacgttaggggtaggactctattacatctggcggcattcaataactggtatagtcttgtttcattactaatcaaatatgggtcgcatttgaacgaccaagatttgtttggttttactccgctacatatggcgtgtattaatggtgacttgagaattataagactattgttagaatgcaacgttaatattatgatagaaaac

SEQ ID NO: 174482 - DNA, 387 bp, Saccharomyces pastorianus
  modified_base (36)..(36): a, c, g, t, unknown, or other
atggataggaaaaggtcttttgaaaaaattgtcatntccgtcatggtcgggaaaaatgtacaaaagttcctgacgtttgttgaagacgaaccagatttccagggcggaccaatcccttcaaagtatcttattcccaagaaaatcaacttgatggtctacacgttgtttcaagtgcatactttgaaattcaatagaaaggattacgataccctttctcttttttacctcaacagaggatactataatgagttgagtttccgtgtcctggaacgttgtcacgaaatagcgagtgccaggccgaacgacagctctccgatgcgtactttcaccaactttgtttctggcacacctattgtaagaagtcttcagaaaagcaccataaggaag

SEQ ID NO: 174483 - DNA, 333 bp, Saccharomyces pastorianus
atgtcgacttcccctttatcgttgactatattatcaggtaagtttagcgctttgattagtgcacttgtagcttccttatcgatattcacgacgtcttcgttggcttcatcttcttcatccctttcttcatcatcattgctttcgctttcgctttcactttcgctttcgctttcgctttcacttttcgagtcgtcttcaatagcactttcttcttcatcaacttcttcaaactctccttcgccttcgaataactgggcaaacccttgtttgttctctctggctttcaaaacatccaataatatttgcaattctttcaatccaacatccccgata

SEQ ID NO: 174484 - DNA, 96 bp, Saccharomyces pastorianus; identical to SEQ ID NO: 173780

SEQ ID NO: 174485 - DNA, 114 bp, Saccharomyces pastorianus
atggcagcgacaccagcggcgattgaagttaatttgaccattgtattggtttggtatgttagtgctgatgtaatcttaacaagaaatagtgaaatgaaagcgcatacctcaaag

SEQ ID NO: 174486 - DNA, 108 bp, Saccharomyces pastorianus
atggtaggcaattcaaaagaattgcaagaaaaaagactggaaaaatcttggaatgatgaaaaagaaagcctgaaacttctgaaaacagatttggaaattttaacatta

SEQ ID NO: 174487 - DNA, 105 bp, Saccharomyces pastorianus
gtgtggtctagtggtatgattctcgctttgggcaaatatctgcttaacaacagaaatgcaaagcatgcgagaggccctgggttcaattcccagctcgccccgtta

SEQ ID NO: 174488 - DNA, 198 bp, Saccharomyces pastorianus
tgggccaccgggatgccacccaacatctactacgtcgacaacaacagcagcatcagcaacaacaacaacagcaacaacaacagcaggaggtacaacaacaacctcagcagctacaacaacaacctcagcagctacaacaacaacctcagcagctacagcaacaacctcagcagccacagcaacaaccagacgcacaga

SEQ ID NO: 174489 - DNA, 270 bp, Saccharomyces pastorianus
ggaaggaataatcgtataggacaagatgaagaaacttttgtgtggaatttcatgatcagaaataccgttgaagaaaacatcctcagatataaatgtatactcgaagagcgcaaaagaaaggagaagtcaaaaaaaggcgataaatacgacgaagcacaagatgaaacggataatgaggaaagcgatgatgcgaagtttgagataagcgtggtagaccaagaagtcagtaatgaacacttatggaactgcttttttcacggtagtgattag

SEQ ID NO: 174490 - DNA, 384 bp, Saccharomyces pastorianus
ttcagtataatggcacaccttttgtttatggaaaggtatatggtatttcctgcaaaatacaatacactgttctttcttgtgggtgatatgactgggcgtgttctacaagctgcgggtggtgggttgctctcttcattggataacttgaatactgcgcgtatcttgattatcgtgggtcttttcattcagattttctgttacagtgttttgatgttgaatcaaatattcttccattacaaaatgaggacggattccaacgggatcgtccaaagcaataaagtctggttccgatttaattacatccttttgggcgggaacattcttattattgccagatctattgtcagagcaatagaattcattatggcctacaaagctatataa

SEQ ID NO: 174491 - DNA, 81 bp, Saccharomyces pastorianus
atggtctctagcgggatcgaaccgctgatccccgcgttattagcacggtgccttaaccaactgggccaagagaccttgatt

SEQ ID NO: 174492 - DNA, 618 bp, Saccharomyces pastorianus
gtagtcaccagaaaatcgacccaagccaaattgtcatttagcagtccccatgtttttccgcaattttccgtactcgatccgaataaaacttttagcttgccgacgcgccagttagcaaatggcgtggtcgatgcatttattcatgtcatggaacagtacttaacttaccctgtcaatgcacaagtacaagatcgttttgccgaaggtctattgcaaactctgattgagattggaccgaaaatcttggacgattcagcagattatgacacgcgtgcgaatttgatgtgggctgctagcatggcactgaatgggctaattggagctggtgtaccacaagattggtcaacccatttgattggacatgagctcacggctttacatggtattgatcatgctcgtaccttggccattgtgtttccggccaatctacaagtgcgtcgtcaagagaagcgagaaaaattactacagtatgcagctcgtgtctggcagattgtcgaaggtgatgaagaacaacgtattgatactgttattgctcgtactcgagccttctttgagcaacttggattgccgactcgtcttagcgattatggactggtggagacagatattgagatcatc

SEQ ID NO: 174493 - DNA, 804 bp, Saccharomyces pastorianus
tcttctggatcctcacttcaaagcaatatgagagaaacagtacaatctcaaaatgcggaaatacccccacaaatgtcgaatgaaaacaaaaataaacctagctgcgaacactttgagtctgtaggtgaatatatcatggttgggggcagactttttaaaaagagtgacacgaatacatatttggaagacctaggacctggaacgcctgtagagcaaccaggacaagttggtttcgccaatccactcccactagggttagcttctttctcatttatgtgcttaacattagggttggtcaatgcaagagtgcgcggggtcaccaacctttatttattgaacgcatcctttatctttggtggggctgttgttttgctttcgggacttctctccttctgcgtcggagacaccttttgtatgacagtttttggctcatttgggggtttttggattagttgggggtgcctcaacctcgaacaattcggtgtgactaaagcatatgccgatgatcctcaagcactgcaaaatgtgctgggattttacctagcaggatggacagtattcaatttcttggtcatggtctgttccatgaagagcacttgggggatatttctattgctactttttctggacttgacgttcttaatgttatgcatcggttctttcacacaaagcactaatgtatcaatggcaggaggatactttggtatattgagcagctgttgcggttggtattccttatattgttcattcgcgaataaagatagttcctacgttcctttgatcgcatatccaatgccaggttct

SEQ ID NO: 174494 - DNA, 96 bp, Saccharomyces pastorianus; identical to SEQ ID NO: 173641

SEQ ID NO: 174495 - DNA, 93 bp, Saccharomyces pastorianus
atgtctgcattacctccagtatactcattccctccactatatacccgtcaacccaattctttaacaaggagacaacagataagtacgtggatt

SEQ ID NO: 174496 - DNA, 930 bp, Saccharomyces pastorianus
  modified_base (29)..(29): a, c, g, t, unknown, or other
  modified_base (110)..(110): a, c, g, t, unknown, or other
  modified_base (169)..(169): a, c, g, t, unknown, or other
tataccaatttgcgcccatcttggccatnttattatcaacaacttggattgcctggtaacgtcactttccagggcgtaatcctattcgaaatattggtctttgggatatnaggtaatgtgggcttttcatctgtcccttctattcatgtagttccatattgtctctgtngtatgttacactatgcatatgggttcgccagaaagacgtttccagaatggcatgctttgaaagatgaaaagtcttactaccaagaacacggtttcgccaagattttggtacaattgttctggaagttagatgtcataggtgtcatcctgatgggttgctccttgggttgcatcttggttccattgactttggctggtggtgtcaagaccacttggaatgactcaagattgatcggtccatttgtacttggttttgttttgattcctattctgtgggtttgggaatatagggttgctagggacccaattatcccgtacaaattggttaaagatagaggtgtatggtcttccatgggtatctctttcttaatcgattttatctactacatggccgctgactatctgtacaccgtgatgcttgttgctgttaatgaatctgtcaagtctgctactagaatctctacattatcatcatttgtttcagttgtggcctctccatttttcggtttgataatgacaaggtgcactagattgaagcctttcatcatgtttggttgctgtttgtggatgttagcaatgggtctattataccgcttcagaggtggcagaaaatctcattcaggtatcattggtgcgttatgtgtttggggtcttggtactaccttgtttacttacccagttaccgtctctgtgcaatctgctgtttcccacgaaaacttggctaccgtcactgctttgaactatatcttatataaaatcggt

SEQ ID NO: 174497 - DNA, 210 bp, Saccharomyces pastorianus
atgtccgacgaaattgtttggcaagtgattaatctaagtttctgctctcatagaattaaggcaccgaatggtcaaaatttgtgcagaaatgagtataacgtcactgggttgtgtacaaggcaatcatgcccacttgccaactccaagtatgcaacagtgaagtgtgacaatgggaaactgtacttgtatatgaagacgcctgataagagc

SEQ ID NO: 174498 - DNA, 96 bp, Saccharomyces pastorianus
aatcctaatataaacagtcttagggaagtaaccagttgtcaaacggtgtatcaggttaattcacggaatgttactgttggaataaaaatcaactat

SEQ ID NO: 174499 - DNA, 381 bp, Saccharomyces pastorianus
atggtggcaggaattaagaaatttgccggcttggactttgttcccacaatcagtgacagtgaagacgatgtcccagtgctagattcctctgatgacgaaaaggtcgaggtaaagaagaccgctaagaagaccaagagcaagaaaaacaagaacaaggccaccggtgcggatgggctggatgaagacgtccatgaagacttaaacgcagggttcaagttcgatttggatgcggacgacactacttcgaactttcaaggttggaacttcttggccgaggccaacaaggatgatccagaggctcctgtaaagaaggacgtggacttggacccaaatacctcagaacgaaagggtgggctggtgaaaatggcccatatcgacacc

SEQ ID NO: 174500 - DNA, 75 bp, Saccharomyces pastorianus
catctactaactagtatttacgttactagtatattatcatatacggtgttagaagatgacgcaaatgatgagaaa

SEQ ID NO: 174501 - DNA, 876 bp, Saccharomyces pastorianus
atgttcaaaaactcagcgctgggaatgtatgacgtagaggacattgaagaagacgacgatgacgacacatcattaattggagacgatgatgctatggcatttgttgatagtgataacggatttgaagtagtatttagtgacgaagatgatgatatgggagaagaagatgcagatgatgctcgttcagattcggaagaaaatgaattatcttctgaaatgcaatcaagtacagcggacggcacggatgtggactatgaggttgatgatgcagatggactaattatcaatattgaccagccctcaggagatgatgaagaaatggcagactatgatgctaacattagccattcttctcacagtgaaaatgaagatgacgcttcaatggacgtcatagaagtttacgacgacgagctaagttctggatatgatgttgatttaagcgattatgacgtagatgaatctgattgggactccgggttatccagcctatctatttctgatgaagatagtgaaagtagcgaagatgagcctattaactccaccagaatgggagattcaagaaggagatggctgatagctgaaggcgtggagctaactgacgactcgcaaggtgagagtgaagaagatgatagaggtgttttccgtggtattgaacatatattttcaaatgagaatgagcctttgtttagagttcatgacgaaatgcgtcatagaaaccatcatcgctcaatcaatcgtacacattttcactctgctatgagtgccccctctttaagcttattaaatcgtggaagaagaaaccaaagcaacctaataaatccactagggcctacaggattggaacaagtggagaacgatatttcagatcaagtgact

SEQ ID NO: 174502 - DNA, 1305 bp, Saccharomyces pastorianus
atggagcaaaacgctgaaaaacgctctattgttggcgacgacaactcaaccgtgaagagacaagacacttccccgtccaaaggtattgcacatatcaaaccagaatatattgttccattgaagcagaatgaaaaccagaaggtcgccatctatgatgaagagatgtcttccgacagaatgacaaacgagtttgcaggtgggacgaataagaaaaataagaacggaagaggtaagaagcgtgggcaaaacaagaatagagataacaggcaggtcaaggaacagaatgtcttgtgcccacgcttgatccatggcgatatatccaaatgctcctttggtgataactgtaggtttgttcacgatatcaatctgtacctttcaacaaaaaagcctgaagttgaaagtaatatatttccttcctgtccggtcttcaactcgttgggattttgccccatgggattcaaatgcagatttttatcgtctcatctgaataaagaagataatatcctaatatcgaagaaggagattgatccagatgcgcaaacaatatggtccgttaaaggtgaagtaaaccatatctcaccggaaagaaaactcgatcttataaaaagaagatttcctttcacaaaaagtaatgaaatattggaaatcatcgactctttccaacaagaatgtagagattccatgaagccagaagaagaagttgagtcaacgccacagctgaagaaacaggacccagatgtggaacaaccagttgccccccaagtcgaacagaggaacaaagaattgtcacaacatagaatgaaacagcgtgaagtatacttgaagtacaaggacactcgttattttgctcaagaaaaaaagccactggatttgtaccataaaaaaatcgtgtcgccattgacaaccgtaggcaatttaccataccgtcgtctaatgagaaagttaggtgcagatgtgacatattcggaaatggccttggcagttcccttaattcaaggaactaattctgagtgggcgttacctaaagctcacacatcagagttccccgggttcggggttcaagtggcctgttctaaagcctggcaggcggcaaaggctgcagaagcactcgcaaactccgtcagtgaaataagtgaaatcaacttaaactctggctgccccatcgatttgctatacagacaaggttctggtagcgccctgttggataaccctgccagaatgattcgttgtttaaacgcgatgaactacgtatcgaaagatattcctatcacggtgaagatcagaacaggtacaaaggaaggtcat

SEQ ID NO: 174503 - DNA, 114 bp, Saccharomyces pastorianus
atggtcaaattaacttcaatcgctgctggtgtcgctgccatcgctgctactgcttctgcaaccaccactctagctcaatctgacgaaagagtcaacttggttgaattgggtgtg

SEQ ID NO: 174504 - DNA, 480 bp, Saccharomyces pastorianus
ctcgaggtagaagattttagtgatatgagcacccacgaagatgtcaacggagcaagtccgtcgccaaatctgggccggtcgaagaagaatgagaagcgaaggaaaaacgccaaggagctgtcatacgatgaactaaaagacaaactagaagttaccgctcgcaaatcacgtcttgagtgcaaagacttgaaaaagaaagttcatgggctcgaaagaaggaaccttgaacttgaacagcgtttagaagagctgaagattgagaaccagactttgatagagattaacaataaactgttgaaaaacactaatgaggatgagattaacaagagccagaggaacaaggagaaggaccgaaagcggagggaaagaagaacggcaaggagaaaagatgaaagaaagcaggaaaaaaagcaggataataaaacatctcaatcttttccttcctcaactgacatgaatggacagcctatagaattttga

SEQ ID NO: 174505 - DNA, 288 bp, Saccharomyces pastorianus
atggtcgggaaaaatgtacaaaagttcctgacgtttgttgaagacgaaccagatttccagggcggaccaatcccttcaaagtatcttattcccaagaaaatcaacttgatggtctacacgttgtttcaagtgcatactttgaaattcaatagaaaggattacgataccctttctcttttttacctcaacagaggatactataatgagttgagttttccgtgtcctggaacgttgtcacgaaatagcgagtgccaggccgaacgacagctctacgatgcgtactttcac

SEQ ID NO: 174506 - DNA, 66 bp, Saccharomyces pastorianus
tgtattaaagctctcgatgggggtcgaacccataatcttctgattagaagtcagacgcgttgccat

SEQ ID NO: 174507 - DNA, 1353 bp, Saccharomyces pastorianus
atgaattcaactccggatctaatatctccacaaaaatccaattcatccaattcatatgagttggaatctagtcgttcgagagcaatgaacaccccagaaggtaaaaatgaaagctttcacgacaacttgagtgaaagcgaagcacaacctgctgtcccacctccaaacactggtaagggcgcctatgtcactgtttctatttgttgtgttatggttgctttcggtggtttcattttcggttgggatactggtaccatttctggttttgttgctcaaactgatttcttaaaaagattcggtatgaagcatcacgacggttctcactacttgtctaaggttagaactggtttaattgtctctattttcaacatcggttgtgccgttggtggtattcttttggccagactgggtgatatgtacggtcgtagaatcgggcttattgtcgttgttgttatttatactattggtatcattattcaaattgcctccattgacaagtggtaccaatatttcattggtagaattatctctggtttaggtgttggtggtattaccgttttgtcacccatgttaatttcagaggttgcccctagtgaaatgagaggtacattagtttcatgttaccaagttatgattaccttaggtattttcctgggttactgtactaatttcggtaccaagaattactctaactctgtgcaatggagagtccccttggggttgtgtttcgcctgggctttgtttatgatcggtggtatgatgtttgttccagaatctccacgttacttagttgaagttggaaaaatcgacgaagccagagcttctcttgccaaggttaacaaatgtccaccagaccatccatttatccaacatgagctggaatctattgaagctagcgttgaagaaatgaaatctgctggtactgcatcttggggtgaattgtttactggtaaacctgccatgctccaacgtactatgatgggtattatgattcaatctctacaacaattgactggtgacaactacttcttctactacggtactattgttttcaaggctgtcggtttacaggattctttcgaaacttctattgtctttggtgttgttaatttcttttccacctgttgttccctatacacagtcgaccgttttggccgtcgtaactgtttgatgtggggtgctgttggtatggtctgctgttacgttgtctacgcttctgtcggtgtcactaaattatggccagaaggtcaaaatggtccttcatctaagggtgctggtaactgtatgatttgtttcgcctgtttctatattttctgtttcgccaccacttgggctccaattgcttacgttgta

SEQ ID NO: 174508 - DNA, 156 bp, Saccharomyces pastorianus
atgaaagtttccgataggcgtaagtttgaaaaagcaaactttgacgagtttgagtcggctctaaataacaaaaacgacttggtacattgtccctcaataactttatttgaatcgatccccacggaagtgcggtcattctacgaagacgaaaagtcg

SEQ ID NO: 174509 - DNA, 645 bp, Saccharomyces pastorianus
atggcaaacaaatcacgacccaagaaaatcaaggctccttacaggaagtacgtggcgggagagggtttctcctctacaagaaatgataataaagctaaagaattcactatcactataccggaggatgcagaactcattgagactccacaggggtcttattactatgatgaaaccaatgatactatagtgaaattgacacgactgagtaatgaaaaaaaggataaaaaaggacgtaagcagtcgctatcgtcatcatcgacatcgtcctccaaagaagaaaagaatggcaaagccatagagagtgaggaagcgaggatgcattcagtatcggtaaagatggttttgccatgggagatacagcatagaataattcattatcttgatataccagagaacgaagaaaaattaaataaaactactaatggaaaaaaaaccacgactggtataaatatgaactacttactagtttgcaggaactggtacgccatgtgtctaccaaagctttattatgcaccagcgttaacaagtaagaacttcaacgagtttgttgatacaataatcataaataaaaagaagaatttaggacactatgtttttgagttgaacttgtctacaattttacaaagtggtagaaattcatttgtc

SEQ ID NO: 174510 - DNA, 291 bp, Saccharomyces pastorianus
atgaatgacaacctgccgaaggagtacttcgaactaatacggaaagttcttaaagagaaggaaaccgataatgcgcctttgcaaagacgaaggggactaagaaggagaaaccaggccctaccggatgccaaaaagtttaaaaaaggtttgaatgaaccaccgggagaaagcgtcgttagtgtaaacttggactcttcggataatgatattataacagtgacatcggatgacagtatagaggaaatccactcatcggaacaagacgacggagaagatgactatgattctgaa

SEQ ID NO: 174511 - DNA, 480 bp, Saccharomyces pastorianus
cagcccaatcgaatgctttcagaatcaaatatgagggttataaacaataatgaacatacgatcggccagtcggcccagcagcaacaacaacaaccgcagcagcagcagcagcaatatctcagccagggtgttcaacctctggtgcctgtatcataccaatatgtagttcctgaacaatggccgtatccacaatactaccagcaatcacaaccgcaaccgcaatctcaacagcaacagcaaccacaaatgtgtcaagttcaagaaccttaccagaggaatagttctgattcgaacggctctaacccgtcgtccacatcagtagctatttcctccgccgtcagtggtgctgctttgtccaacgcttctggtcctgccatcggtggcaatagcaacagcaataacagtaacagtaacagcagtagcaacgtgccatactattattacgacctgcaggcatgcaagcttgcactgccgtcgttt

SEQ ID NO: 174512 - DNA, 168 bp, Saccharomyces pastorianus
aacaagtgtgaccatcctcatggtggtgttcgtggtaaatctaagtctaacaaattgtcaatgtctccttggggacaattggcaaaaggctacaagactagaagaggtaagaatcaaaatacaatgaaagtgaaagacagaccaagaggaaaagacaagagattataa

SEQ ID NO: 174513 - DNA, 159 bp, Saccharomyces pastorianus
ctggtaatgatgactgtatcgatgatggtgccgatggtgccgataatgatgattgtgttgatggtggtgccagaggtgcagacggaacagacggcggcgctagaggagctggttgtgttggttgtgttggttgtgttggttgtgttggttgtgttggtt

SEQ ID NO: 174514 - DNA, 417 bp, Saccharomyces pastorianus
tacattattatttgggcaagtttcagcccattctgcggtatactcggatttttcgttgatgcgtttggtttgaaacataagttcgaaatgttcctattggccatttggtacggattatcattaggtggctgttccgccgtttcaagatcagtctttagtttgattgtgcctcccggaaaagaatctacatttttcagtatgttcagcattacagataaaggttcatccattctggggccctttatcgttggtctactcactgacagaacgcataatattcgatattcgttttatttcttcttttttcttttaattctatcattgcccgtattgaactgtttggacgttaaaagaggcaggagagaggctgagcaattgagccaaatttctccagagactgaaagaagattggattga

SEQ ID NO: 174515 - DNA, 114 bp, Saccharomyces pastorianus
atggcagcgacaccagcggcgattgaagttaatttgaccattgtatttgttttatttttcagtgttgatgtgagcttaactaaagataaagaaatgaaggattattctcaaagg

SEQ ID NO: 174516 - DNA, 324 bp, Saccharomyces pastorianus
caacctcagtttaaagaaccagcattaaagattaccggtgatgctgatttctgggacttccgcgaagatgacaatgactacttcagccagccccgtgccctgttcaatttgatgaatgatgagcagaaacaagcattgtttaataacacggccgcagcgatgggtgatgcgctagatttcatcaaataccgtcatatccgcaactgttatgcttgcgatccagcttatgggcaaggcgttgctaatgccttaggtatgactgtagcagatgctcaagcggcacgtgaaacagatcctgctaaaggtttaccaagttttctttaa

SEQ ID NO: 174517 - DNA, 150 bp, Saccharomyces pastorianus
ctctccgccttgaattctgacaatatgatctattccatattccattatacgaaaatggcggtagaacagcgcgttcagcaatcttatcgaactgttgggatgaccgatatccttttatacgatccgaatctggttctgaacgagacgaga

SEQ ID NO: 174518 - DNA, 414 bp, Saccharomyces pastorianus
atgtggaaatggatcaaaattctgtaccacgaagtagcgcaggaaaccacgctgaaggactcttatagaataactttggtaccttcttctgatggtatatcagtatgtggaaaactttttaatcgcgagtatgtccgcggcttttactttgcatgcaaggctcagtttgataacctttggggagagttgaacaactgcttttatatgcctacagtggttgatattgccaacctcattttgcgtaatcgagaagttttgttcagagaaccgaagcgaggaattgacgagtatctggaaaacgattcttttcttcaaatgatacctgttaaatatcgtgaaattgtgctgcccaagttgagaagagatactaacaaaatgaccgcggcgggatcctctagagtcacctgcagcatg

SEQ ID NO: 174519 - DNA, 210 bp, Saccharomyces pastorianus
atgtttttgttactacacgtagatgagctatcgattttttctgcataccaagcaagtttacctggcgaaaagaaagtcgacacagagcggctgaagcgtgatctatgcccacgtaaacccactgagataaagtacttttcacagatatgtaacgatatgatgaacaaaaaggaccgattgggtgatgttttgcatgtgtgctgcccaagt

SEQ ID NO: 174520 - DNA, 1212 bp, Saccharomyces pastorianus
atggttacagaaaatcctcaacgtcttactgttttaagacttgccaccaataagggtccattagcacaaatatggcttgcttcaaatatgtcgaatataccaagaggatcggttatccaaacacatattgctgaatcagcaaaggaaattgcaaaagcttctggctgtgatgacgaatcaggggacaatgaatacataactttacgaacatctggcgaattacttcaaggcattgttcgtgtatattccaaacaggccacttttctccttacagatataaaggacacattaacgaagataagtatgttatttaaaacaagccagaagatgacttctacagtaaacagactgaacactgtaacaagggttcatcaattgatgttagaagatgccgttacagaaagagaagttttggtcaccccagggttagagttcttagatgatactactataccagtgggcttaatggcgcaggagaattcgatggaaagaaaagtccaaggtgctgctccctgggatacttcacttgaggtcggtagacgattcagtccagatgaagatttcgagcataataatttgtctagtatgaaccttgattttgacatcgaggaaggtccgataacttcaaaatcttgggaagaaggaacaagacaaagctcacgcaactttgatacgcacgaaaattacatacaagatgacgatttccctcttgatgatgctggaactattggttgggatctagggattaccgaaaaaaatgaccagaacaacgatgatgacgataactctgttgagcaaggaagaaggctaggtgaatcaatcatgtctgaggagcctacggattttggatttgatctggatatagaaaaagaagcacccgcaggcaatatagatacgacaaccgatgccatgacagaatcacagccaaaacaaactggcacaagaaggaactcaaaattactgaataccaaaagtattcaaatcgatgaagaaacagaaaattcagaaagcatagcttcatccaatacatacaaagaggagagatcgaataatttattgactccacagcccaccaattttacgactaaaagattatggagtgaaataactgaaagtatgtcctatttaccagattcaatccttaagaacttcttatcctacgatctcgaaaaaaaagaaaaatacataatgggcgagaagggtcaattgaag

SEQ ID NO: 174521 - DNA, 138 bp, Saccharomyces pastorianus
gaaaatggattccatattccagcaccagctgctagcgatgcaactacaaccgctttcaaggctgttaccgttactcactgtgatgacaagggctgttacactaagaccgtcgattccgaggcttctaaacaaacatca

SEQ ID NO: 174522 - DNA, 456 bp, Saccharomyces pastorianus
ccaataattagaaactgggggctggctcaagctgctggagtttcatatggtacctttggttactgtaaaactttgaattctttttcctgctctcgagtacgtttaatatataacacctcgaaagaaaaactacctggcccttctcttgaacgttggtggctgagtcctaaggcaagacatacaataggaggacttttgatttcgataccggttgctacatgtttgaccttcatttcttttgcacttcccttggttattatttttctctttcagactggaggaactaatgtctcacttattacttccaacgctatattacacatattgacacttttatcaactatttttgcatgcaccgtggtcctgttacaatttcatccttatacgacttggtgtggctggctaactcttccctgttccctttgctcgttattggcgggatctctagagtcgact

SEQ ID NO: 174523 - DNA, 213 bp, Saccharomyces pastorianus
cagtatataccactctcaaacttaccctactctcacattccactccatcacccatctctcaccatcagtaccaaatgcactcgcatcattatgcacggcacttgcctcagcggtctataccctgtgccatttacgcataacgcccatcattatccacattttaatatctatatctcattcggcgacaccaaatattgtataactgctccttaa

SEQ ID NO: 174524 - DNA, 612 bp, Saccharomyces pastorianus
gtggtagtggcattagtgctggagttggtgctagcagtggtagtggcattagtgctggagttggtgctagcagtggtagtggcattagtgctggagttggtgctagcagtggtagtggcactagtgttggagttggtactttcggtggtagtagcactagtgttggagttggtactttcagtggtagtagcattagtgctggagttggtacttccagtggtagtggcattagtgctggagttggtgctagcagtggtagtggcactagtgttggagttggtactttcagtggtagtagcattagtgctggagttggtactttcagtggtagtggcattagtgctggagttggtgctggcagtggtagtggcactagtgctggagttggtactttcggtggtagtagcactagtcctgacgttgatgctggcagtggtagtcgcattagtgctggagttggtactttcagtggtagtcgcactagtcctgacgttgatgctggcagtggtagtcgcactagtcctgacgttgatgctggcagtggtagtagcattagtgctggagttggtactttcggtggtagtagcactagtgctggagttggtacttacg

SEQ ID NO: 174525 - DNA, 315 bp, Saccharomyces pastorianus
atgagcgctgaacaggttggtagaaagaagtcgtatagatgggtgagtgcatcacaagccagttatgacggtgctggttgggatagtagtgacgaatacgattactcctccgaggatgataccaaaggtgatggaagtcataagaaaaaggtttcaaacttgccggctctgcccaagctcaattataccgatgagaatgatcaacctattaataatgaaaatgataatgaaaagaatgatgatgatgatgatgatgatgatgatgaggatgaggatgatgatgaggatgatgaggatgatgaggatgaggatgat

SEQ ID NO: 174526 - DNA, 126 bp, Saccharomyces pastorianus
atgcagtattatgacacacatctaaaagttaataaaacacacatgcaacttgttggaataaaaatcaactatcatctactaactagtatttacgttactagtatatcatcatatacggtgttagaa

SEQ ID NO: 174527 - DNA, 654 bp, Saccharomyces pastorianus
atggccaccgacaaggcgtttactttttctgtaattcagtactgtcttgggttagcgggtacactttgctcctgggtaatatctggccgtgttggtagatggacaatactgacctatggtcttgcatttcaaatggtctgcttatttgttattggtggaatgggttttggttctggaagcggcgctagtaatggtgccggtggtttattgctggctttatcattcttttacaatgctggtatcggtgcagttgtttactgtatcgtagctgaaattccatcagcggagttgagaactaagactatagtgctggcccgtatttgctacaatctcatggccgttatcaacgctatattaacgccctatatgctaaacgtgagcgattggaactggggtgccaaaactggtctatactggggtggtttcacagcagtcactttagcttgggtcatcatcgatctgcctgagacaactggtagaaccttcagtgaaattaatgaacttttcaaccaaggggttcctgccagaaaatttgcatctactgtggttgatccattcggaaagggaaaaactcaacatgattcgctagctgatgagagtatcagtcagtcctcaagcataaaacagcgagaattaaatgcagctgataaatgt

SEQ ID NO: 174528 - DNA, 177 bp, Saccharomyces pastorianus
cctttttctccagcgggaacaccttttggctttactgacaggcgttatttgacaatgaatgaggtgggctacgtatctactgtcaagaatagtgagcaatacagcataactgtctctttttttgatgttggacgttttagagaataccatttcgaggacttatttggctacaattga

SEQ ID NO: 174529 - DNA, 789 bp, Saccharomyces pastorianus
atccaggcaggtgacattgtctttgggacacaaaaggattcctcttcatcgtctgttggaaaaggtggatgttcaatgtacgctgataaagaggaagtgaaaaccgatgatgaatctttctgttacgggaattttgaagacgaaaacttgggagagtttgtagaaccctttaccttaggtatggccaatttaggttctccaaatacgaacaattcccagtttttcataactacatacgccgcacctcatttgaacggcaagcattctatttttgggcaggtggttcatggaaaatcagtggttcgcactatagaaaactgcagggtagattctgatggagtccctgaatcagacgttagaatcagcgactgtggagtgtgggaaaaaactatgggtgtcccgctttacaacgcttctaatgaccaaattggcggtgacgtatacgaagaatatccagacgatgatacacatttcggtgacgatgattttggtaaggcttttgaggctgctaatataatcaaagaatctgggacgctcttatttaagaaaaaggattactctaatgcctttttcaaatacagaaaatctttaaattatatcaatgaatacatgcctgaacccgacgtagacaaagaaagaaacatccaatttattaacctaaagatgaaaatttacctaaatttatctttggtgctctttaatctggaaagatacgatgatgctatcatgtatgctacgtatttattggagatggataacgttcctaacagagatcaagcaaaggcttag

SEQ ID NO: 174530 - DNA, 837 bp, Saccharomyces pastorianus
atgtcgctaatctcttcgttgggaaccactagtgtagagcctattcggacatcttctgaattgactacggaaagtgagacggtcaaagtgtctactttgcgcaagtccctgcattcttctgaaatgcatcgctcagcttcaaaaacacctcgcacgcttccagaccatgtgcaaaagttaaaaagtatatactcggcttatcagcaagatgggcaacctttgagtaaagaggctgtattccacgcgaaacaaaagtacggtatcttaaatactccagcctaccataagacactcggcttaggagatactggtagtgaatctgcagacttgactgctcgtttggcgaataggagcaagagatcaactaatgaacctgtcgggcccacaatcgaacaaaaggctctggatgaggcctccaaaataacattttctaaaattcccctaacgcaacccgaagagattcccatgaaggttaatttgggtctgaagggtaaaagggactttttaaccaggtcagccgcacaaaaggcattagcttccaatttttcgtcagatagttccacgattggtgtctctgaaagaggcaagcgtgcgtcctctgctgcgacagttattgcaaatgactttaatgcaaacagtgtgaatccccaccatccggcaggatttgaatcactagatttgtccaaggtcttagatggggctgaaagaaaagcaattaaaagaattaacggtaggttatatccagaaaaggtgaattttcaaaatggactactgactggtagggagagcggtgtgtctaaagccaacaaggaagtttccaaaaagggaaccttaaaa

SEQ ID NO: 174531 - DNA, 117 bp, Saccharomyces pastorianus
ggcgtgtggtctagtggtatgattctcgctttgggcaattacctgtttaactgcaggtatgcaaagcatgcgagaggccctgggttcaattcccagctcgccccatttttttgtatt

SEQ ID NO: 174532 - DNA, 1986 bp, Saccharomyces pastorianus
atggacagtaagggtaagatcactattggcattcaaagaacaacagaaagtcttatcttgaaatgggacaaccagagtgcatcaagggccaaaaatatgcctgtaatttataacaatattgtatctaatatcgaagggattttggatgaaattatgttcaatcatgctagaatcatcagatcggagctgttggcaagggatatattccaagaagacgaagaaaattcggatgttctattatttcaactccctaccacatgtgtttccatggcgcctattcaattaaaaattgatttattgagcgggcagttttattttaggaatcctactccactattatcaaattacgcgtcaaagataaatagagctgaaggtccagaggaattggcaagaatactacagcagctgaaactggacaagattattcatgttttaaccaccatgtttgaaaacacgggatggtcatgcagcaggattattaagattgataaaccaatcaggactcaagtgaatactggcggcgaaagcgttgttaaaaaagaagataataaatatgctattgctggtaacagcactactaatagtgatgtttccttgttattacaaagagacctatttatcagactaccacattggccgctcaactggtatttgattttatcgataatatcctctaaaacatcatgtgtggtggaaaaaagaatcggtaaaattgtctctcaacgtgggaaatggaatctcaaatatttagacaattccaacgtgatgactgtcaaattggagtcaataacatatcaaaaaattatgatattgcaaagaactattttaaacagaattataaaccatatgttgatcgattctttgaaccaactagaaattcgcaataagatttgttcttctgaaatgatcaacgagcaaaaactacctcaatatattatccaaggaagtaatactaatgataacatatcaataataactctagaattggagtcatttttggaaggttcaaaagcgctgaactccatattagaaagttccatgtttctgaggatagattactccaattcccaaatacgattgtatgctaaatttaaaagaaacacaatgatgattcaatgccagattgataaactatacattcattttgtacaagaagaaccgttagccttttatttggaggagagttttacaaatcttggtataatagtgcaatatctaaccaaatttaggcaaaaattgatgcaattggttgtactaacggatgtcgtggaaagattgcacaagaattttgagtccgaaaacttcaagataattgcattacaaccgaatgaaatttccttcaagtatctctccaataatgacgaagatgataaagactgcacaataaagatatcaacgaatgacgactctattaaaaatctgacagttcaactatcaccttcaaacccacaacatataattcaacctttcttagataattcgaaaatggattatcattttatttttagctacctacaattcacgtcatccttgtttaaagctctaaaagtaattctcaatgaaagagggggcaaattccatgagagtggaagtcagtactccactatggtgaacattgggttgcataatctaaacgagtatcagatagtatattataaccctcaggcaggcactaagattacaatatgtatagaattgaaaactgttttgcataacggccgtgataaaattcaatttcacattcattttgcagacgtagcacacataaccacgaaatctcccgcctatccaatgatgcatcaagtgagaaatcaagtatttatgctggatactaagagattaggtaccccagaatctgtcaaacccgcaaacgcatcacatgccattcgtttgggcaatggcgtggcttgcgatcccagtgagatagagcctatcctaatggaaatccataatatcctcaaagtggactcgaactcaagttcatct

SEQ ID NO: 174533 - DNA, 435 bp, Saccharomyces pastorianus
cattattatgactatttagatgagttgtcagataccttcaaggaccttattgatgaaatagttcatgatgtcgtcctgcccaagtttcctgataaaagtttcgttcttgacgtttatattccaagacctttcaataaaatcttcattgttgatataaatccgtttgccaggaagacagattctttgctattttcatggaacgagattgctgcgatagcacctccgaagaatgatgttgaagattatgaattaaggttagtgacgaggcataacacggggagattcgcttcgaaagagcattccgaaaatcatgttccacaggatctcgtagaagctagtttaaatcctgaagcaatccgagagctcactcaaaaatggaaagaactactctctcaacaggcaaaggaagaaagcagtgatagtgagagtgaaact

SEQ ID NO: 174534 - DNA, 1368 bp, Saccharomyces pastorianus
caacaaaccggatcgggccaaaactatgcgacgatcaatcaacaacaattttccgagttttacaactcctttttaagtcatttaactcaaaaacagacaaacccttctgtcacgggtacaggcgcgtctagtaacaacaacagtaacaacaacaatgttagtagcggcaataacagcactagcagtaatcctgcccagctggcagcctcccaattaaaccctgccacggctgctgcggccgccgcaaacaatgctgctggcccggcttcgtacttgtctcagctcccacaggtgcagagatactacccgaacaacatgaacgctctgtctagtcttttggacccttcctctgcaggaaatgctgcaggaaatgctaacaccgctactcatcctggtttgttaccacccaatctgcaacctcaattgactcaccaccagcagcagatgcagcaacagctgcaattacaacaacaacagcagttgcagcaacagcagcagctacaacagcaacaccagttgcaacaacaacaacaacttcaacaacaacatcatcatctacaacagcaacagcagcaacaacagcatccagtggtgaagaaattatcttccactcaaagcagaattgagagaagaaaacaactgaaaaagcaaggcccaaagagaccttcttccgcttatttcctgttttctatgtccataagaaatgagttgcttcaacaattcccggaagcaaaggtccccgaattgtctaaattggcttctgcaaggtggaaagagttaacggatgatcaaaaaaaaccattctacgaagaattcagaaccaactgggaaaagtacagagttgtgagagatgcttacgaaaagactttgcccccaaagagaccctctggtccctttattcagttcacccaggagattagacctaccgtcgtcaaggaaaatcctgataaaggtttaatcgaaattaccaagataatcggtgaaagatggcgcgagttagaccctgccaaaaaggcggaatacactgaaacttacaagaaaagattaaaggaatgggaaagttgttatcccgacgaaaatgatccaaacggtaacccaaccggtcactcacataaggccatgaacatgaatttgaatatggacactaaaatcatggagaaccaagacagtatcgagcacataaccgcaaatgccatcgactcagttaccggaagcaacagtaacagtaccaacccaaatacgcccgtttctcctccgattacattacagcagcagccgctccaacagcaacaacaacagcagcaacaacaacaacacatgttattggctgaccccactacaaatggttcgatcataaaaaatgaataa

SEQ ID NO: 174535 - DNA, 279 bp, Saccharomyces pastorianus
gatgtcactatcgatgaagatcttgtggaccagaataagcccggtgacagagtcaacgtcatgggtgcattccagtcgctgagtgctgggggtatgaaccaatccaactctaacacgctgattgggttgaagacgctgatcctaggtaacacggtatatcccatgcatgcaagatctacacgtgtctttgcaaggcaagtcttgacagatttagacataagaaacatcaacaaactgtcaaaaaagttaacgtttttgttgttttggcccagtccctga

SEQ ID NO: 174536 - DNA, 792 bp, Saccharomyces pastorianus
aatggaaaggctcctttgcacacgtccatcaataattctagtacatcttcaaatgatgtcctgttagaagccttcacaaacactcaaagaatatgttcaaatttaaagcaagagctacaaaagcagcaacaggataatgcaaagttgaaagttcgactacagtcgtatgcttccaattctgataagatcaatgaaaaagtcggaaaatataaatcttgtttagaaactcttcaagaaaggattgcaacgttgacgagccataaaaataatcaagaaactaaattgaaagatttaagacaaaaccaccaactatatcagagaaggataagcggatttaagacaagtattgaaaacttgaacaaaacaataaatgatttagggaagcacaaaaaggaggcggatgcagaattaatgaaaaaaggtaaagagattgaatacctgaaaagagaactagatgattgttcaggtcagttgagcgaagaaaaaatcaaaaacagttccttaatacaggaaatgggaaagaatagagaagaaatgattaaatcaattgagaatttcttttcagaagataaagcacaccatttactgcaatttaacaaattcgaagaaagagttcatgatttgtttgaaaacaaattacaaaagcacttcgatgttgcaaaagatacccttaacgtgggcttgaggaacaccactgtagagttgagtagtaatacagagaccatgctaaagcagcaatatgaagatatcaagaaaatcttgaacaaaaaatgtcatccagtaaggatgtaa

SEQ ID NO: 174537 - DNA, 138 bp, Saccharomyces pastorianus
ttactacaagtccttctcgagcacataggaatcctcaaaatggaatcgatatttctacataataatattacgattatttctgctttcgttttatatgtttcattatcctattatattatcaatccttgcatttcagct

SEQ ID NO: 174538 - DNA, 114 bp, Saccharomyces pastorianus
atgaatctcagaacaatagatgctaatatgagttctggaataggaaatgaaatggtaaagcttcccgatgacttcgagaattatatctcacatatatacctaataagaaaaaag

SEQ ID NO: 174539 - DNA, 141 bp, Saccharomyces pastorianus
atgaccattatgggaacaaatggtgtgcaaacctgggattgtgcgtttgccattcaatactttttcgtcgcaggcctcgcagaaagacctgaattctataacacaattgtctctgcctataaattcttgtgtcatgctcaa

SEQ ID NO: 174540 - DNA, 483 bp, Saccharomyces pastorianus
atgccacaagtacagtcgtggtttcctgttcagaaacaaccgacgctagcggtaacatttacaccattaccacaactgtcccatgctcatctaccactgccaccatcacatcttgtgacgaaaacggatgccatgttccagcaccaactgctaccgacgcaactgcaaccgtttcctccaagtcatacaccactgttactgttactcactgtgacaacaatggctgtaacaccaagactgtcacttctgaatgttctaaagaaactgcagcaaccaccatttctccaaaatcatacactactgttaccgttactcactgtgacgacaacggctgtaacaccaagactgtcacttccgaggcttccaaacaaacatcattggccactagcacagtcaccaagtctgctgctccaacttctcatactgctgcttccagcaccttcactggtattgtcgttcaatccgaaggtatggctgctggtt

SEQ ID NO: 174541 - DNA, 843 bp, Saccharomyces pastorianus
cctacttacacacctgatgattatcctaatttgaaaggtaggacggctattgtgactggtgcaaataccggcattggccttcacgtcgccaagatattatacgagaaaaattgtgacgttattatagtagtgcggactgcagctaaaggcgaaaaagctcgtgacgagatactggcaggcgccccagactctaagggctccgttatcattgcagatggttgtgacttccttgatctcaacacagtcaaacctactgcgaataagatcaaaactgcgctgggtgacaagccattaaacgtcattattcacaatgcggggttaatgtcacctattaataccggtatctccaaacaaggtatcgaagccatgtttcaagtcaatgacatgggtccacagttgttgcaacacttcttagatcctctgtttttgaagaaggatagtgatctaaaaagaatcgtatgggtcagttctgcatcccatttaatagctttcagagaatatggtattaactgggaaaacccagggtttgaaggtatagatgctggaaaaaggccagcagcagcggcactctacggacaatccaaagcagccaatataatgcaggccaaggcatggagtacaaaaaacaaaacgatcgtagatgagattggatgtgtctcagtgtcctgttatccgggcaatttgaataccgatcttacgagagattggaatcccttattaagaaagataggtggctatctattttgggatgggaaatacggcgcttatactgaattatacggtgcgttatcccctgcgctgacgacaaaagaccaaggtgcttacgttgttccctttggtgaa

SEQ ID NO: 174542 - DNA, 1428 bp, Saccharomyces pastorianus
atgaaacatatgtccatgtgcttactaatgtctttgagtagttcccagtttatagaattcccgctggttcaggggatgggctttgtcacggctatttaccacgatttgggttttgaattaagaagcgccgttggtttcaggagcttagagcgcataagcgtgaatgaaagatatggtaaatataatatacaacttgagaataataggaattggatactttatttgacctcacctgattactcttttccacaagattttcaaatttcattactcgacagcaatacaataatatcatctcataaaatcaatggtcttatctgtcaattatctgcagactccgtccccagtattgacatggcagcgggctgttatccagtatactgtgacctatcagggcaaactgttgatgaacatttcacaaattacagatttaactatacggttgcaggctactcgcagtctggaactactctaatgtatgctttaccacatcataaagcggcattcacaccagaaatgcaggaacgtgaaattgcctcaagcctggattccacagttaaaggcttaatgactggttatctcacaaacagttttgatatgcaggttcaagtacctcaagaattgggctttgaacctgtcgcgttatctttgaataagaaggcagattacagtcaagaaaagctatctaaaattcgggaagctgctgttcaagaagttcaattgagtgaccctcaacaagaatcaaacatagattctatgtatttctctggtaagatacttgcaaagtatgcgtggattctttatgtgacacattacatccttcatgatgaaaatttaacaaaagaattattatctaaactgactattgcaatggagagattcatcagcaatcagcaagtcttacctttaaattacgacgttagttggaaaggcataatttcatcaggctcttctagccaagactttggtaactcttattataatgatcatcattttcattactcttatcatgtcataacggctgccattatctctttagtcgattctgatttaagtggagttactaacaactcctggttagaaaataatagagattgggttgagtgcttaattagagattactctggtgttgacaacgatgatccgtacttccctcaatttaggtcatttgattggtttaatggccattcatgggccaaaggactatttccaagtggtgacggtaaagatgaagaatctacttcagaagatgtcaattcttgctatgcgataaaattgtgggggttggtaactggaagttctaagttaactgacatagcgaacttacaactcggcatcatgagaaatgttttccagagctacttcctatacgaaagtaataatactgtccaaccgaaaggatttatcggtaataaagtaagtggtatt

SEQ ID NO: 174543 - DNA, 96 bp, Saccharomyces pastorianus
gcacggtgccttaaccaactgggccaagagaccaggaatttatgggatatcctgcgtctaaatcaacttgtgtgtacaaaaagccacgaggtgtaa

SEQ ID NO: 174544 - DNA, 282 bp, Saccharomyces pastorianus
tcatcgctgacctccagtatacttttttggtcgttgctttgcaaagacgtcaaccggacaatgtactcgagtagcgtgatcgatgaagttttgtcttccaatagtttttcttcctcgctttccccctcttccccactttcgcccccttcctcattatcttcttcttcttcttcttcttcttctttttcttcttcttcgtcgtcgtctttttctacttcttcatatccacttaccgcataccaagtaatgtcttcgataggcggcttctctgctccagtagtc

SEQ ID NO: 174545 - DNA, 96 bp, Saccharomyces pastorianus; identical to SEQ ID NO: 173737

SEQ ID NO: 174546 - DNA, 114 bp, Saccharomyces pastorianus
aatacttccgagaatatgaatgtcttacagtttcttggatttcggtctgacgaaattaaacatcttttcctcggggatcctctagagtcgacctgcagcatgcaagctgccgtt

SEQ ID NO: 174547 - DNA, 90 bp, Saccharomyces pastorianus
catgagaggttggtgaattttgagataattgttgggattccaatgttgataaaggctgttatattatgtatacagaatatactggaagtg

SEQ ID NO: 174548 - DNA, 120 bp, Saccharomyces pastorianus
ctttctcaccctttgactgagaagactatagaatacaatgaatacaaaaacaaccaggcttcgactggcgtcgtcccgcgattctacaattgtgtggggtctatgcaggatatcgtttga

SEQ ID NO: 174549 - DNA, 219 bp, Saccharomyces pastorianus
aaatgtacttatttacaacctttgagaaaaagagggcccaaaaatattagatcgagaagtttaaagaaaattgccgaaacgcaaacgttcagtgagaacaacaactgtatgacagctttagaaatatctataggaatcattatatcttacatgttattctgttctgttgtagtaactaatttcagagatcttttcggatgctactacccctgtttataa

SEQ ID NO: 174550 - DNA, 633 bp, Saccharomyces pastorianus
agttctacttcaattgccaacacattttcttcatcatcttcttcagttaattcgctccgtactaaaactgaaataaatggtgtttttgtcccattgacacattgttattcctctacatgctctctggaaaaactttgctactctatttcttgccccaatcgtttacaacaacaggctaatttacatttaaaattaggtggtggtcttaagagaaatatttcgttagctctcgataaggaggatgatgaacgaatttcctggacaaattctgtaccaaagagcgtatgggaatcattatccaaacaacaaatcaaaaggcaagaggcaatatatgagttgtttactacagaaaagaagtttgtaaaatctttggaaatcatccgagatactttcatgaagaaattattagaaacgaatattattccatctgatgtaaggataaattttgtaaagcacgttttcgcacatatcaatgaaatatattctgtcaatagagaatttttgaaggctttagcacaaaggcaatcattaagcccaatttgtcctggaattgcagatatatttttgcagtatcttcctttctttgatccttttctgtcatacatagcatcaagacgacctgcaggcatgaca

SEQ ID NO: 174551 - DNA, 198 bp, Saccharomyces pastorianus
atggacttgaatcaaagtaaggaaaaaaagggccagcatgttggatgctgtggctccaggacagacctgtctgctgacacagtggaactgatagaaagaatggacagattggctgaaaaacaggcgacagcttccatgtcgatcgttgcgttaccgtctagcttccaggagagcaatagcagtgacaggtgcagaaag

SEQ ID NO: 174552 - DNA, 966 bp, Saccharomyces pastorianus
ctgtctcgaccttcaagccgattcctatccactaaaaggggccctggacctgcagtgaaaaaattaattgcaattggggagaaatggaaacagaagacaacccgtggcttgcctaagcaggatactctgaatagcgggtcgaaatatattctgtgccagtttccatatccttctggggcgcttcacataggacatctccgagtttatgtcattagcgactctttgaatagattttacaaacaaaaagggtacaacgtgatacatccgatgggatgggatgcttttgggttacctgccgagaacgctgctatagaaagaagcattaatccggccatatggactagggacaatattgcaaaaatgaaacaacaaatgcaaagtatgctggcaaattttgattgggacagagaaataactacatgtgatcccgaatactataaattcacccaatggattttcttaaaactttttgaaaatggcttagcttatcgtaaagaagcagaaattaattgggatcccgttgatatgacagttttggctaatgaacaagtggatgcccagggccgttcttggagatcaggggctattgtggaaaagaagcagctaaaacagtggtttttgggaataacgaaattcgctcctaaattgaaaaagcacttgaaccaactgaaggactggccttccaacgtgaagcaaatgcaaaaaaattggataggcgaatctgtgggtgcagaattagtgttcaaagttgcggaccccaaatttgaaaacttgattgtctttacaacaagaccggaaactctttttgctgtacagtatgttgctctcgcattagaccacccaattgtacaaaaatactgcgaggaaatgccggatttaaaagagtttatacagaaaagtgatcaattaccaaacgatacgaaggaaggatttcagttacctaacataaaggccgtaaatccttaa

SEQ ID NO: 174553 - DNA, 312 bp, Saccharomyces pastorianus
atgaagttattgcatttatatgaagcgagcttaaaaagaaggcccaaaactacgaatgcgataatgacaggtgcgctatttggaattggtgatgtttctgctcaattgttgtttccaacatccaaagtgaacaagggttatgactataaaaggacagctagggctgtcatctatggttctttaattttctcctttataggtgacaagtggtataagatcttgaacaataagatttatatgcgtaatagacctcagtaccactggtctaatatggttttacgggtagctgtcgatcaattggcgtttgcgccg

SEQ ID NO: 174554 - DNA, 138 bp, Saccharomyces pastorianus
atgcaatttaagaagctaactcatgctcaaagaactggtttaagccaaatcccaaatcgtagatataccttatggtggtcaccaactattaacagagcaaatgtctatgtcggttccttggtgcacttggatctgact

SEQ ID NO: 174555 - DNA, 579 bp, Saccharomyces pastorianus
gatgcaacgctcgcgcacagacttttgatagacctaccgaccgtcaatgctacgccatctgaggatgatgacgatacaaaaattccgttaatttggtatgatacgcaaggtgatgaatttcaagagactgcagatgaagctactatccttggatctaagtataatgagggcgaaattgctattgtaaaagaacacattgagaatttaaggtcattcaacgtcccggagaactctataggtgttatttctccataccatgcacaagtttctcatctgaaaaaattgatccatgatgaattagaattaactgataatgaaatatcaactgtagatgggttccagggccgtgaaaaagatgttattatattgagtttagttcgtagcaatgaaaaatttgaagttggtttcctgaaggaagaacgaagactgaacgttgccattacaagacccagaaggcaactagttgttgttggccatatagaagttctgcaaaggtgcggtaacaagtacctaaaaagttggtcagaatggtgtgaagagtacgctgacgtaaggtacccctacattgacgattatttg

SEQ ID NO: 174556 - DNA, 96 bp, Saccharomyces pastorianus
tgttgctgttgctgctgttgctgctgctgctgttgttgttgttgttgctgctgcttcgctcgtcctgccggtggcttgtcccatactactctttgc

SEQ ID NO: 174557 - DNA, 264 bp, Saccharomyces pastorianus
ttttgccagtatgttcatggtgcaagagcagttcatcgtccaaaggagaaaatgactacttccgaggaagttaaaccttgggtccgtacaatttacggatccctaaatgaaattgtcacaccaacggttattgctggcgttactttttctgctaagccagatccaactccgaatctattacaaccttgggtatctttgaagaaagatggtactccacaggactctagaggatccccggtacgagctcgaattgtatatgtcata

SEQ ID NO: 174558 - DNA, 135 bp, Saccharomyces pastorianus
atggagagaatagataagaagtttcttggagcatcaaagaaaatcaaaccagacaaggcaattggcagcttgttcaaagcccctaccatcgaatatgtagtagacgaagtaacacgaacacaccaaccggaacag

SEQ ID NO: 174559 - DNA, 600 bp, Saccharomyces pastorianus
atgcatgaccttcaaagagcatttgaaggctgcgtagacggcgatgacgtaaggaacttgaagtttgacttggtactcagacaatggtgtgacatcaaccctgcgctcgaatttagagtcttcgttagagatgcccatgtcgtcggagcctctcaacgcgatttgaattactatgaatacttggatgaactgtcggacacctttaaggaccttattgacgaattggtacacgatgtcatcctaccaaaattctctgacaaaagttttgtgctagatgtatatattccaagacccttcaacaaaattttcatcattgatataaatccatttgccaggaagacagactccctgttgttttcatggaacgaaattgctacaatagtgccttcgacagatggcagaaatgacgaggattatgaattgagattggtaacgaggcataacactggtaggtttgcttccaaggaacactccgaaaatcacgtcccgcaagatctcgtggaggccggtctataccccgaagcaatcccgagagcttacgcagaaatggagagagttactcaatctacaactcagaagaaagtatggagcgaggataag

SEQ ID NO: 174560 - DNA, 1410 bp, Saccharomyces pastorianus
  modified_base (286)..(286): a, c, g, t, unknown, or other
catgttaacgcgtcgtatgcgcattcgcaaggatcctcgacaagcgtttctcgtgtagagatggagaagccagcaacaaaggaagtctttgaagatcctaccccaaaaaagtttgaattggacgatgatgaggccggtaagacatcatctgtattcaatccagacctaaatctagaagaagaagtgagagccttggatgaattaggtgattcattcaaaagagatcgctccttttggggcaaaatgaaagctttggaattcgaagttgaatttgaaaataaaaaanatatggttttaatgctgggaacttttgcagcatttgctggtattctatctggtatagatcaatctattatctctggtgcttccattggtatgaacaaaatgttgcacctttctacacatgaagcatcactagtttcttctttaatgcctctaggtgctgtcgctggttctatattgctaactccctttagtgaatattttggtcgtaaaaagtctttggctatttcttgtgtcttttacacaattggtgctattgtttgtgcagctgcttctaaccatcacgaaatgtatgctggtagatttttgatcggtgtcggtgttggtttagaaggtggtggtattggtgtatacattgcagaatctgttccgtcttcagttagaggtagtctggtgtccctgtatcaatttaatattgcgctgggcgaattgtttggttatattgttggtgtgattttctttgatgttaagggaggctggagatacatggtcggttcgtcgcttgtgttctcgaccacattgtttattggtttattattcctgcctgaatctccacgttggttgatgcataagggccgtgtcggtgaatcctggaacgtctggaaaagactaagagatgtgaaagaagaaggcaataaaatcgaatttttggaactcagagacgttgcttcgcacgacagagagttacatgcaaacgaatcaagatttcaatcattgtttgatttggtccgtgttccacgtaaccgccgtgctttggtatattcttgtatgatgattggtctgggtcaattaactggtattaatgccatcatgtattacatgtccacgctaatgaagaatattgggttcgatgataaacaatctgtagcaatgtcaatggttggtggtgcagcactattaattggtaccgttcctgctattttatggatggatagatttggtagacgtacatgggcaatgacaatcattatatttatcgttggtttggtgctcgtcggtgtcggctatcaaataaacttgaaaacacacatggcagcagcagaaggtgtgtatttgactggtcaaatcatatataacatggcttttggatcatatgcagcattaacatgggtcctaccttcagagtca

SEQ ID NO: 174561 - DNA, 690 bp, Saccharomyces pastorianus
catttgatgctggttcctgagatgctgagagtcaagatccaggaaaagcgtctgcaaaatgtcaaggtcgggtggtttttgcacacgcccttcccatccagtgaaatctacagaatcttgcccgtcagacaagagatactgaagggggtcttgagttgtgacttggtcgggttccacacgtacgattacgcaagacatttcctctcctccgtgcagagggttctcaacgtgaacacgttgcccaacggggtagagtaccagggccggttcgttaacgtgggggccttccccatcggtatcgacgtggacaagttcaccgacgggttgaagaaggactctgttcaaaagagaatccagcaactgaaagagaccttcaagggctgcaagatcatagtcggtgtcgacagactagattacatcaagggtgttccgcaaaagctgcacgccatggaggtgtttctgagtgagcacccggagtggaggggcaaggtcgtcctcgtacaggtcgcagtgcccagtcgtggggacgtggaagagtaccagtacctgaggtctgtggtcaacgaattggtcggcagaatcaacggccaattcggtaccgtggagttcgtccccattcatttcatgcacaagtccatcccctttgaagagctgagacctgcaggcatgcaagctggcactgccgtcgtt

SEQ ID NO: 174562 - DNA, 630 bp, Saccharomyces pastorianus
atgcccgtgggtccaaacgcgtcgtctactgtatctgcatcagctccagcttcaacaacaacgactcttcctgcctcttctgcagcactctctgccggtaccagttctgcgtcaacaaatactccaacagctatacaacaagagattgcttcatcaaacgcttctgatgttgccaagacattggcatctatctcgttagaggctggtgagtttaatgtcattcccggtatatcgtcagtgatccctaccgtgttagaacaatcatttgacaactccagcttgatatcgtctgttaaggaacttttattgaataaagaccttatccatccgtcgatattattattaacttctcatctagcacactataaaatcgtgggatccatcccacgttgcatagccatgctagaggttttccaaattgttatcaaagactatcaaacacctaagggaactaccttgtcacgtaacttaacaagttatttgtcacaccagattgatcttttgaaaaaagctagacctttaagtgttactatgggtaatgctatcagatggttaaagcaagaaatttcattaattgacccatctacccccgacaaagccgccaaaaaagactttgtgagaaaattgggc

SEQ ID NO: 174563 - DNA, 681 bp, Saccharomyces pastorianus
tcgactggagccaatgatttagtgacactactaatgggttccgaagatgacatcacagtgctggtggtctcgacttcagatgatgtagcagtgctggtggtctcgacttcagatgatgtagcagcgctggtggtctcaacttcagatgatgtagcagcgctggtggtctcaacttcagatgatgtagcagcgctggtggtctcgacttcagatgatgtagcagcgctggtggtctcgacttcagatgatgtagcagtgctggtggtctcgacttcagatgatgtagcagcgctggtggtctcaacttcagatgatgtagcagcgctggtggtctcaacttcagatgatgtagcagcgctggtggtctcgacttcagatgatgtagcagtgctggtggtctcaacttcagatgatgtagcagcgctcgtagttaaattggaagagattgtagaagaaccggtgatctcggctggagccaatgatttagtaacactactaatgggttccgaagatgacatcacagtgctggtggtctcgacttcagatgatgtagcagcgctggtggtctcgacttcagatgatgtagcagtgctggtggtctcaacttcagatgatgtagcagcgctggtggtctcgacttcagatgatgtagcagtgctggtggtctcaacttcagatgat

SEQ ID NO: 174564 - DNA, 99 bp, Saccharomyces pastorianus
atgtcttggaggtactctatcttgaccgtagatggaagctttaaaattttcatcccttgggaaatattcctcacgtggaattttttgagcgctgcatgg

SEQ ID NO: 174565 - DNA, 1392 bp, Saccharomyces pastorianus
gattcccttcgcgctgcgcaagctatcttccagaaccattccaatgaggtcagcagtccatgccctccagtaacggtgagcaggaatcctcaaactaggttatcagagccatcgctacaaaagtcagggcggaaacaagaacaaaagaaggcacgcatacgaacaaaacaggtacctaagattaaaacaacggcgcctaatgatgttgagttgtctaagaaacacaggtcaagccctgcaggtaaagataatgttagtagtactgctcaaatggcagctgctttagcgcattcccaatcgaaacttagttctgacaataactcctcccattcttcggcattggatacactaaaagttctagaaactccgaacttgaatggcttgctgggcattcattcacgctcaagctcaagaaacggctccaatgaatcactgacgcctggccaaagaactcccgacaatagatctcaagagaatttacttacttcctttagtagcggtagaaggctatcctcgagctctatggagcctgcaactaataaagacagcaacaaagctctgcccaaacgcaggccgtctcctcccttgcaatcatcacttgtcggcagtggtcagcttcatgaaaatgaaaacctatcatcaattagcatcgattccagacatagtctcaatccggacacttcagacgttatttctaataggtcacaaacaagtctatctcaaacaattaatcaactctcgttatgtgtatcagagccatctattgcaagctcaaacactactactacgacgagcaaccagggaagtggtttgcccaacttggttccgaactattcatccgatatgaggaagaagaagcttgttaacaagttcaaaaggaaagtatttggtagtaagcccaagcatttatcttcacaatatgaaatggatgcaagcagcgaagaattgggacaacatgaacaacaaccgagtatgagatttaaaacaacattacgtaaaacctctgtaagtacaaacgcagaaaatgatcatgcatcctctctacatgagggaaatctgaggtataagtacaatccgtccaacgacacgtatgatgtgtatgacgatactgattcagattctgaatctgatcagaaccaggacgccttgaccaagccacgcaaaagagatagaattaagagaaagatcaggaattctgccaataaaactgcacatcataggcctatccaccgcacgagagatcggaaattcaatgaggataaaccctggaaatcacataccagatataactttcgtaacagacaacgaaaggaagcgttacgaaagcatgtgggtaagcaacagacaccgtcatttgaacctgttgagctggtggccctctataacgggtga

SEQ ID NO: 174566 - DNA, 99 bp, Saccharomyces pastorianus
cacttcatgaccaccggtaacgctctaggatctgtgaacatgaccactggtgtcgataatttgttctacattgacaagttccaagtaagggaagtaaaa

SEQ ID NO: 174567 - DNA, 648 bp, Saccharomyces pastorianus
gcgcttaaaaaggcgtgttccgttgaggagaccgcacctaagagaaagcacgtacgcgcatgcatagtgtacacatgggaccatcagtcttccaaagctgtttttacaacccttaagacgctgcctctggccaatgacgaagtgcaactgttcaagatgcttattgtactgcataagatcatacaagagggacatccgtcagcgctagctgaggccatccgggatagggactggatcagatctctgggtagggtacattctggcggttcgtcgtacagcaaactgattcgggagtatgtgcggtacctggttttgaagctggactttcatgcgcaccatagagggtttaacaacgggacgtttgagtacgaggagtatgtgtcactggtttcagtttccgacccggacgaagggtacgagacgatcttagatttgatgtcgttacaggattctcttgacgagttctcgcagatcatctttgcgtcgattcagtccgagaggagaaatactgagtgcaaaatttcggcgctgatcccgttgattgcggagtcatatggtatttataaattcatcacctcgatgctgagagctatgcacaggcaattgaatgatgcggaggacctgcagcatgcagctgcacttgccgtc

SEQ ID NO: 174568 - DNA, 552 bp, Saccharomyces pastorianus
aagaactggaaaagaacggtgaatttactgtcaagtaatggcgagatcgtaaaactagatagcagtttggttactatcaaaatgaagacaactttgcaacatatacgagagtacattcctaatgtcattgagccctcgttcggtttaggtcgtatcatatactgcatcttcgaccattgtttccaagttcgagtggatagtgagtcaagaggttttttctcttttccattacagatagcgccgatcaaagtatttgttacgacaatatcgaataacgatagcttccccgctatacttaagaagatctcgcaggctttacgtaaaagagagatatactttaaaattgacgattccaatacttcaattggtaaaaaatacgcccgtaacgatgaattgggaacaccatttggtatcaccatagatttcgaaactataaaagaccaaacggtgacgttaagagaaagaaattctatgaggcaagtaagaggcactattactgatgtgatttcgaccattgacaaaatgcttcacaaccctgatgaatcggactgg

SEQ ID NO: 174569 - DNA, 180 bp, Saccharomyces pastorianus
atgagcggtgttacagacgatatgaaacaagcaagaagggaacaactcttagacgtatctctcctggacgttcatagagtcgccgaaaaatatctactaaacaaagaaggggtgagtacggtcattggacctggaatcgaggggaagactgtttcaccaaattgggaggtgaaggaactg

SEQ ID NO: 174570 - DNA, 717 bp, Saccharomyces pastorianus
atgcctagcccccaatcgtctattgaaagcaccatagacattcgaaatgctcccggtacagagactcatgtagctccacctgtagaaaaggagtggtcagatgagtttgataatgaagtcataaacggggatgcaattgaaccaccaaagagaggactcctaggttatcttatcatatacttactctgttacccaatatcctttggcggtttcctgccaggttgggatagtggtatcacagcaggtttcattaacatggacaactttaaaatgaattttggttcttacaagcacagcactggtgaatattatttgagcaacgtgcgtatgggtcttcttgtggctatgttcagtattggatgtgccataggtggtcttattttcgcccgtcttgctgatactttaggtagaaggctggcaattgtgatcgtggtgttggtatatatggttggtgcaattattcagatcagttcaaatcacaaatggtaccaatactttgtcggtaagatcatctacggtcttggtgctggtggctgttcggtgttgtgtccaatgcttttgtctgaaatagcccccacagatttgagaggtggactggtctcgttgtaccaattgaacatgacgtacggtattttcttgggttattgtagcgtttatggaacgagaacatacgataacactgcacaatggagagtggccctcgggctttgcttttta

SEQ ID NO: 174571 - DNA, 393 bp, Saccharomyces pastorianus
atgcctaaaactagttatttaaacaaaaattttgaatctgctcactataataacgtacgtccctcttaccctttatctttagtcaatgagataatgaaatttcacaaaggcacacgcaaaagtttggttgatattggatgtggcacaggaaaagcaacttttgtcgttgaaccctattttaaggaagtgattgggattgatccttcttctgctatgctttcgattgctgagaaagaaacaaatgaacgtagattagataaaaagattagatttattaatgcgcctggtgaagatttatccagcattcgaccagaaagtgtagatatggttatttcagcagaagccatccattggtgcaatttagaaaggctgtttcagcaggtttcctctata

SEQ ID NO: 174572 - DNA, 1179 bp, Saccharomyces pastorianus
  modified_base (1121)..(1121): a, c, g, t, unknown, or other
catgatatatctcgttatgtgagggcaaaattcctcgattatacaacagataatgtcagcatgtatccctccccaacaggtgttatgatcggtatcgatttggcttataacatgtatgatgcctatggtaattggttcaacggattaaaacctttgatacaaaatagtatgagaacaattatgaaagctaacccagcattatatgtccttcgtgaacgtattagaaaaggtcttcaaatatatcaatctagtgtacaggaaccatttttaaactcctcaaactatgccgagttattcaataacgacattaaactcttcgttgacgacactaatgtgtatagagttactgtccacaagacttttgaagggaacgttgctacaaaagcaattaatggttgcattttcactttaaatccaaagactgggcatctgtttctgaaaattatccatacctctgtatgggccggtcaaaaacgtttaagccaattggccaaatggaaaacagctgaggaagttagtgctcttgtgagatctttgcccaaagaagagcagccaaaacaaattatcgtcacaagaaaggcaatgcttgatcctttagaggttcacatgcttgactttcctaacatagcaatcaggccaacagagctgcgactaccattttctgctgcaatgtcaatagataaactttctgatgttgtgatgaaagctactgaacctcagatggttctgtttaacatttatgatgattggttagaccgtatttcatcgtacactgcattttctagacttacactacttttaagagctttaaaaacgaacgaggaaagtgccaaaatgattctactcagtgaccccacgatcactatcaaatcgtaccatttatggccttcattcactgatgaacaatggatcactatcgaatctcaaatgagagatttgattttgactgagtacggcagaaaatacaatgtcaatatatctgccttaactcaaacggaaattaaagatattatattgggtcagaatatcaaggcaccatctgtgaagagacaaaaaatggttgaattagaagctgccaggtcagaaaagcagaaagacgaagaaactgcaggttcttcaantgttatgaagattaaactatcaatggccagtacgaaatatgtgtataatttcggtaat

SEQ ID NO: 174573 - DNA, 1101 bp, Saccharomyces pastorianus
ttgaaattgactatctgtgaaccagtattaggagcgtgcgggcatgggtctcataccaactgttatcgtggccatatgaagtcgattcgcggaatacaaaaccaaactacagaaaatattccattatcgtatggttcagggttgatatattgtcccgtatgcaattccttaagtaattcatttctaccaaaaacaaatgatatagataagagaacttcgagccagttttttatgtgtattgaaaagcgaagtgaagcggaagaaaaccttgacccaatgagctctatttgtattaaagcagcgatgattctaggtgatcttcagggtaaaaaagtcacgactatcgaagatgcatataaagttgttaatagtgtttttattaatactatttcaaatactgagctcagattaagatcgcacaaaaaggaaggaaaaatagtgaatatggaaagaatatccagtcagtgcattttaaccttacatttagtttgtgagctaaagtcgtttatttataaaaaattggtaaattcaaaaacattcagcagcgaaatctctcgtaaaatatggaattggaatgagtttctaataaagggtaataatgtgaatctacttttgtatatgagtcaaaattttgataatattgatggaggaaaaaccccgcaaccgcctaacctatgtatctatgaaatgttcaaaataaggttccatcaactactactgttgcttgcaagagatatgatgagagtaaacttttacaaagactgtcgaaataaaatcaaaatatcatcaaacggatctgaggaaccatcgacaagcttttcatatctattcaatacttttaaaaagtatgttgatctctttaaaccagacgacgttcggtttgattttacaagtttagagaaaattaaagactttatatgctctctattactagagtcattgtccattttttgtagaagaaccttcttattattcaacattcagtatgatgatgatggtgatgatgataataataataaccgcagcaataatttcatggacgtcaaacagcgtgaaatagagcttattttccggtattttaaattacccaatttaactcac

SEQ ID NO: 174574 - DNA, 159 bp, Saccharomyces pastorianus
gctaagaaaattggtgcattgcgttatttggagtgtagtgcaaaattaaataaaggtgttaatgaagcattcacggaagcagcaagagttgctttaacctcagggccagtagcaactgaagcgaagagcgacgatggatccggctgtaccattatgtag

SEQ ID NO: 174575 - DNA, 1113 bp, Saccharomyces pastorianus
gactgtttacaaaaggtcgacgatgcattgcttttaaataattatctatatcaaaatttccaattcaaattttctgaaaatcttggtagtcaacgaacgatagaatttaatataatgatcaaatttttcaagctaaaagtgtttgaggagcttaatggccagttagaggactactttgaagatttagagtttttgttacaagttttccccaatttcacttttttaaaggcttacaatgctaccattagttacaacaatttggattatgttaccgcagaaagccgatttgatgacatcgttaaacaagacccgtaccgtctcaacgatttggaaacctactccaatattctatacgtcatgcagaagaattcaaaattagcctatttggcgcaattcgtctcccaaatagatagatttagaccggaaacatgttgtatcatagcgaactattacagtgcccgacaggaacatgaaaaatctatcatgtatttccgtcgagcactaactttggataaaaaaacaacaaacgcatggactttgatgggtcacgaatttgttgaactaagcaattcacatgctgcaatagaatgctatcgtcgggctgtagatatatgccctcgagacttcaaagcatggtttggtttgggccaggcttatgctctcctggacatgcatttatattctctttactacttccagaaagcttgcactttgaaaccttgggatcgtcggatttggcaagtattgggagaatgttatagtaagacgggaaataaggtagaagctataaaatgctacaaaagatccataaaagcttcacaaacggtcgatcaaaatacttcaatatattaccggttagcgcaactatatgaagaacttgaagacttgcaagaatgtaagaagttcatgatgaaatgtgtagatgtggaagaacttctggaaggtatagtaacagatgaaaccgtgaaggctaggctttggctggcaatatttgagattaaggcaggaaactaccaattggcttatgattatgccatgggggtatctagtggaacgtctcaagagattgaagaggctcgtatgctggctcgggagtgcagaaggcatatgtag

SEQ ID NO: 174576 - DNA, 108 bp, Saccharomyces pastorianus
tcaatcgctgctggtgtcgctgccatcgctgctactgcttctgcaaccaccactctagctcaatctgacgaaagagtcaacttggtgggattgatcaaccatacctaa

SEQ ID NO: 174577 - DNA, 294 bp, Saccharomyces pastorianus
aacgaacgtataagaatcctgccaaatttaagggtcttagcaaggtcttcgcctgaggataaaaggttattagtagaaacattgaaggggatgggagatgttgttgcggtcactggcgatggtacgaacgatgctccagctttaaagctagctgatgttggtttctcaatgggtatttccggtacggaggttgccagagaggcttctgacattattttgatgactgatgatttctcagctattgtcaacgctattaagtgggaagatgtgtttcagtctcggggatcctctaga

SEQ ID NO: 174578 - DNA, 714 bp, Saccharomyces pastorianus
tgtatgtctcatcatcctagtatgaacacaccaccggccgtgttgcctactcagctgtgggattctattcgtttagaacctgttgttgttaatcaaccaaacaggactactcctttgagtgctaactccactggcgtatcttcactaacaagacactctactatatcacgtctatctactggtgcattcagtaatgctgcttcagattggtctttaagttttgaaaaaaaacaacagtttgatgcaatttttgattcattagataagcaacatgctggttcgctaagctctgctgtgttggttccattcttcttatcctctagattaaaccaagagacgttagccaccatctgggacttagctgacatccacaacaatgctgaatttaccaaattggaatttgctattgccatgttcctaattcaaaaaaagaatgctggtgtcgaattgccggatgttatccccaatgaattattacagtcccccgctttaggactttatccgccaaacccacttcctcaacaacaaagtgcacctcaaattgccatcccctcaagagcaagtaagccttctttacaggatatgccacaccaagtttctgccccagcagttaatactcaaccaacagttccacaagttcttcctcaaaactcaaataacggttctttaaatgatttactggctttggacctgcaggcatgcaagcttgcactg

SEQ ID NO: 174579 - DNA, 216 bp, Saccharomyces pastorianus
gcatacgcacacggatgctacagtatataccactctcaagttaccctactttcatattccacaccatggcccattctcactaaatcagtactaaatgcactcacatcattatgcacggcacttgcctcagcggtctataccctgtgccatttacgcataacgcccatcattatccacattttaatatctatatctcattcggcgaccccaaatatt

SEQ ID NO: 174580 - DNA, 372 bp, Saccharomyces pastorianus
ctgctattgtcatttttggctttagcatttccagaatcagagtcggtatcggatgatatggtgcaatgcttttcgatgtctttttcaagattatcgtgttcaaaactgttgtttttcgtgctatcgtttgaatctccacccttctctaacccattgacctcgttactatcgtcttcatcttgctgttgctcttcttctttttcttcttcttcttctttttcttcttcttcttcgtcttcatcttctttttcttcttcttcttcttcttcttcctcttcttcttcttcttcttcttcttcttcgtcatcatcaccattatcctcatttccactggttttcactttccataaaaatccaaaacccatcacaagt

SEQ ID NO: 174581 - DNA, 456 bp, Saccharomyces pastorianus
  modified_base (369)..(370): a, c, g, t, unknown, or other
  modified_base (378)..(378): a, c, g, t, unknown, or other
  modified_base (400)..(400): a, c, g, t, unknown, or other
  modified_base (403)..(403): a, c, g, t, unknown, or other
  modified_base (447)..(447): a, c, g, t, unknown, or other
gcaaatagcattgacaattcattaagccaggaaagcgtctcaacgaacggcgtaacaaggatggctaacttaaaggctgatgaatgcggcagtggtggtgaaggagataaaacaaagcggttttcgatttcgagtattttgagtaaaagagagacaaaagacgtgcttccggaatttgcaggcagtagttcccacaatggagtactcacggcgaattcatcaaaggatatgaactttactttggaactaagcgagaatttgttggttgagtgtaggaaattgcaatcctctaatgaagctaaaaatgagcaaatcaagtctctcaagcaaattacagagtcattaagtgacaagattgaggagctccannctaacccnaaaaaaaaggtttccttcatgnaanaagaaagttggattttcaaccttaaaagaattttaaaacttggngaattttag

SEQ ID NO: 174582 - DNA, 84 bp, Saccharomyces pastorianus
atgaatgcacgtgtcgctgtcctcatcactgctgcaatactttctgcggctgtcactgctattgctctcctggaagctagacgg

SEQ ID NO: 174583 - DNA, 219 bp, Saccharomyces pastorianus
ttactacaagttcttctcgaggatatggaaatcctcaaaaaggaatcggtatttctacataataatattacgattatttctccttccgttcattatgtttcattatcctattacattaccaatccttgcatttcagcttccattatatttgatgactgtttctcaatttttatgtcatcttcttacaccgcatgtgataatatactactaacacgaatg

SEQ ID NO: 174584 - DNA, 513 bp, Saccharomyces pastorianus
attgccaacctcattttgcgtaatcgagaagttttgttcagagaaccgaagcgaggaattgacgagtatctggaaaacgattcttttcttcaaatgatacctgttaaatatcgtgaaattgtgctgcccaagttgagaagagatactaacaaaatgaccgcggctcttaaaaataaagtcgctgttgcaattgacgagcttacggtgccacttatgtggatgatccattttgccgtaggatacccttaccgttatccagagcttcagctactcgcttttgccggtcctcagcgcaacgtatacgtcgatgatacaacaagacgcatccaactgtacactgattacaacaagaacggttcatcggagcctcgactaaagacgcttgacggactcacctcagattacgtgttttattttgtcactgtgctaaggcaaatgcaaatatgtgcgcttggtaacagttatgacgcttttaatcatgatccctatagtgagtcgtattatgcgagccgc

SEQ ID NO: 174585 - DNA, 252 bp, Saccharomyces pastorianus
atgcacggcgcttgcctcagcggtctataccctgtgccatttacccataaagcccatcattatccacattttaatatctatatctcattcggcggccccaaatattgtataactgctcttaatacatacgttataccacttttacaccatatactaaccactcaatttatatacacttatgccaatataaccaaaaaattaccactaaaatcacctaaacataaaaatattctactcttcaacaataataca

SEQ ID NO: 174586 - DNA, 999 bp, Saccharomyces pastorianus
ggtgctctgatattaccagaaacgatttacagttatgatccatgcattgcactacattttgccgaacttgtcgtggatttcagaagttgtaattataatatggacataatggcggttctcaacgggacttcaataaagcggcacgtttcgaaacaaataaatgaagtatttgattttatacgtcgtaataacggtgctgatgagcaggagcacggattgctttcggacctcaccattcatggacatagaatgtatggattaccacccacagaacctacctacttttgtcaatgggatatcaatctcggagatttatgcattgattcagatattgaatttataaagggattctttaattccttttataagataggttttggctacaatgacttggaaaatatattattatatgacactgagaccattaatgatatgacctcgctaactgtgcacgttgaaaaaataagaataggccttaaagatccggtgatgaaatctcaatcagttattagtgctgaatcgatattgtttactttgatcgactttgaaaacgaaaaatattcacaaagaatagacgtgaaaattccaaaattgacaatttcgttgaattgcgtgatgggcgatggcgtagacacatcatttctcaaattcgaaacaaaattaagatttacaaactttgagcaatacaaggatatcgataaaaaaagatcagaacaacgcagatatataacaatacacgattcaccctatcatagatgtccttttcttcttccgctgttttatcaggattcggatacataccaaaacctgtacggggctatagcaccatcttcgtctatcccaactttacctcttcccactttgcctgatactatagattatatcattgaagatattgtgggcgagtatgctacccttctggagaccacaaatccattcaagaacatattcgcagaaactccatcaactatggagccttcagagccagcttcagtgaag

SEQ ID NO: 174587 - DNA, 126 bp, Saccharomyces pastorianus
atgatttatgatacatgtacacttgattttctatttaggaatctctgtttgcataagagctgctcttatgtttggggacaaatacaaagttctcgtcggttttaccgaagaatagatcacttagct

SEQ ID NO: 174588 - DNA, 783 bp, Saccharomyces pastorianus
cataaagggattatcttgaaaaagcgtgccaagaagagaaatatggtcttgaaaaaattcaccagagaggaccaaaaggcgttcatcaaaaccaccgtcaccaccacaattctaagaccattgaaaatgcttgtagtcgagccaattgtttttgttttcagcatttacgtcgctttcatttttgccattttatttggatttttcgaagcatatgctgtcatctaccgtggtgtttaccacatgggtgctggtgtatctgggttaccattcatcggcattggtgtcggtttatgggtgggtgctttcttctatctatataccgataggaaataccttttccccaaaccacctgcaggcacaccacctctaagtgaaaatcaaagaacttccaagagaactgaaccattcagaggcgcaagaaaccctgataccaatgaactgttaccaattgttcctgaaaagtttttgattgcttgtaaatttggttctgtagcattgcccatcggtctattttggcaagcatggacggccagaccagatgttcactggatggccccagtggctgccggtgtgccatttggctttggtttgattttgatttttttcagtgttttgatgtatttctctacatgttatccacccttaaccgttgcttcctgtttggccgctaacaatctattaaggtatgtcatgagtagtgtcttcccacttttcaccatccaaatgtatacgaaaatgaaaatcgacctgcaggcatgcaagcttgcactgccgtcgtttaca

SEQ ID NO: 174589 - DNA, 378 bp, Saccharomyces pastorianus
aactctacagtcagaatttcaacacttcaaccccaatctagttctctacataaagtaaaggacgtcttcattgagggtgttgattcgaaaaacagcatcataagttcttgctgggatggagatgacatattttatttggccgtatactctgaaggtaaaattttcatatgggataccagcccaaataaacttatatcttctcgactagattattcctttatagtctttgacatattggtaaaaggatctcagtttgatagtaacgccaaaaatgaatctaattttgtcatcgcatcatcatacgtaggttgtgtgagagtctacaaatcaaattcgaatttcctagaagtaagcattagaaatatattcctctcatag

SEQ ID NO: 174590 - DNA, 234 bp, Saccharomyces pastorianus
acaatagtacaggaaacaacaacaatgctgctgccgccaataacaacaacgccacttcaaacgccaatacggtattctacgaaagagccgccatgtttgcagctttacaacaaaagcaacagcaacgttctcaagctttgcaacaacaacaacaacaacaacaacaacaacaacaacaacaacaacaacagcagcagcagcaacaacaacaacaacaacagcaacagaatcaac

SEQ ID NO: 174591 - DNA, 180 bp, Saccharomyces pastorianus
atgcgctctaagcatgaaaatggtgaattgaatgacggtatctctgttagacgatctggtactacgaacacctatgaagaacacatcttacaacccgtacttgttagtacaagtgcaattaccttagcgtctgaatgtgttaaatccatcttacgtattgatgatattgcattcagccgt

SEQ ID NO: 174592 - DNA, 129 bp, Saccharomyces pastorianus
atctatcaaaagatcgtagccccattgaccgacagatatatcctaagagatgttagcaagacagaaaaggatgaaattagagcttccgtcaatgagggttccaaggctacaggtgcttctgttcattaa

SEQ ID NO: 174593 - DNA, 135 bp, Saccharomyces pastorianus
aaaaaaaaaacaacaaaacaccggacattaacgattgcagcacctgagtttcgcgtatggtcacccattacattactcggccaggctcttaccagcttaactacagtcgatcggacgggaaacggtgcttcctgg

SEQ ID NO: 174594 - DNA, 96 bp, Saccharomyces pastorianus; identical to SEQ ID NO: 173426

SEQ ID NO: 174595 - DNA, 1389 bp, Saccharomyces pastorianus
gtatcttattggcagcagaagtatggtcagaactatcgacttcggggatctcagggctcactcgcactaaagtcatttttaataggggtattcactcatcagatagttgatgtttcctggcattcgttagttaccgattatagaatgcacgggctactccgagttctcagcgaaacagaatttgatggagatattgaaactgctcatacgtttttagacgttatgggtgaattcctcaccttaaataatataatccgtgacaataataataacgaaaattgggattttttaactcgctctgattggaaattgcccagagaagaggatttaatggaaattataaggaaagctggactttcaaaggaaaagttgtcctacgcagaactggaattttgcgttaaaagaggaatggcagcggctattagtgaagggtacctattccgctctcaaagaaaccaattgttaactaatatttactcaacatcccccagggctaatgatctaatactgaatcattggctaggagggcagtccaatttggttgcaatgctccaaagatgcgtgcctttcttcgagactttgtttcatgaagaaaatactaatgaagctcaagcagaagaactgagattatgtgctaatttaccgccggtatcacagcaacggataaatgcacgacctttggtctcttcattaaaagcacgtaagggaaatagccacattgtcgtatctcccatgaaatcattttccaattttggcacaagcttgactatgggaaaatttcgagaagacaacaaggattatctcgctgtaagtgcaccacttgaagacacagttggtgcaatctatatagttccatgggatattctaactgtagcaagaaaagaggattttagcattttacaacccatcactgccatgtacggttcaaaggtcgggacatacaaggcaagtgatgttgactacctactcgtttcacagcctggtacctgtacaatcgacttttacttcaaaggagtaaaaatactgacaatcaaggatgagaccaccgaagaagcacatcagttacaatttcctgtaacaggtaatttttatgatgatatgattcctgatttggtggtgtcaagcccaagttatggtgccaacgaaactggaattgcaacatttatcccaggatcttccataataagctatttgatcaattcagacaaatatcaagtagttgatatctcaacttttaagggcattatcaaccttgacgggtaccctatgaatataccatttcagcatttcggcgcaacaattcagatatctgacacgactgacaaacaaaagctaatatgtattacatgtcaaagtcttggtgctgtttttgtttattcgaggctttaa

SEQ ID NO: 174596 - DNA, 666 bp, Saccharomyces pastorianus
atgagtgatatcttgaacgtaagtcaacaacgtgaagcaattaccaaggccgctgcgtatatttctgctattttagaaccacatttcaaaaatacaacaaatttcgagcctccgagaactttgattatatgtggttcagggcttggtggaatatctaccaagctgtctagagacaatccacccccggtaacagtcccataccaagacatcccaggattcaagaaaagtacggttccaggtcattccggtacactaatgttcggatctatgaatggttcaccagtagtattaatgaatggtcgtcttcatggatatgaaggcaacacattgtttgagactacttttcctattagagtgcttaaccacatgggtcatgttcgtaatttaattgtcactaatgccgctggtggtataaacgcgaaatatcaagcctgcgatttgatgtgcatttatgatcatttaaatatccctggccttgctggccagcacccattgagaggtcctaacttggatgaagatggacctcgttttttagccttgagtgatgcatatgatctggagttgaggaagcttttatttaagaaatggaaagagctcaagattcaaaggccactgcatgaaggtacttatacttttgtatctggacccactttcgaaacaagagca

SEQ ID NO: 174597 - DNA, 363 bp, Saccharomyces pastorianus
atgcaagctccagtggtatttatgaatgcttctcaagagagaactaccggtcgtcaggctcaaatctccaatatcactgctgcaaaggcagttgccgatgtcattcgaacttgcttaggtccaaaagctatgttaaagatgttattggatcctatgggcggtcttgtgttgactaacgatggccacgctattttaagggaaattgatgttgcacatccagcagctaaatcaatgttggagttatcccgtactcaagacgaagaggttggtgacgggactacaacagttattattctagctggtgagattttagctcagtgtgcaccttatttgattgaaaaaaatattcacctgttattatta

SEQ ID NO: 174598 - DNA, 297 bp, Saccharomyces pastorianus
tataaaataactactatatatttgtggctgaaatcatacctttcatttttcatcggcttagataatcttgattttctcaccttaatacgcttttttcaatgtcgtttacaaaacaagctaggtttgcaagatatcctggactttttttgtaatctatgtagccacagtatggttcgcacttgcaacatggtagaggctgcccaaaaacaaaaccgcatcacctttggcagtatttacgtgaaactccatcctcttgtcaaactttgcacaggaatcgtgtgggccccacgagtgtga

SEQ ID NO: 174599 - DNA, 114 bp, Saccharomyces pastorianus; identical to SEQ ID NO: 173138

SEQ ID NO: 174600 - DNA, 1206 bp, Saccharomyces pastorianus
attgctgtgggacaagcattgtgcgggatgccatggggttgttttcagtgtttgacggtgtcttacgcttctgaaatatgcccattggctctgagatattaccttacaacctattcaaacttgtgctggttatttggacaactttttgcagctggaatcatgaaaaattctcaaaaaaaatatgcggattcagaattaggatataaactaccatttgccctacagtggattttgccagttcctttagcactgggaattttttttgcacctgaatctccatggtggctagttaaaaaaggaaggtttgatgaggcaaggagatcacttagaagaactttaagcggcaagggacctgaaaaagaaatactagtaactctggaggtggacaaaataaaagtgactatagataaggaaaagagactcacaagtaaagaaggctcctatagtgatagttttgaagacaagattaatcgaagaagaacgagaattacttgtctctgctgggctggtcaagccacttgtggttcaatactaataggttattcaacttacttttacgaaaaggctggcgttagtactgaaatgtccttcacttttagtattattcaatactgtctcggtatttgtgctacatttctatcttggtgggcgtcaaagtattttggtagatatgacctttacgcttttggactagccttccaaaccattgtttttttcattattggcggtttgaggtgctcaagtacgcacggttccaaaatgggaagtggttctcttttaatggctgtagcatttttttacaatttaggaattgccccggtcgttttttgcctagtctctgaaatgccatcttcaagactaagaacgaaaacaatcattctagcacgtaacacttataatgtggtcagtatcatatgtagcgttctcatcttataccaactgaactctaagaagtggaactggggcgctaagtcaggctttttctggggtgtcttatgcttttgtactttaatctgggctgtggttgacctaccagaaactgccggaaagactttcgtggaaataaatgagttatttaaacttggagtttctgcaagaaagttcaaatcgacgaaagtagatccgtctgttgtcaaaaacccccctaaagacgtctctcataacgaccccaagggagatatcgaagcttccattgcagaggaatag

SEQ ID NO: 174601 - DNA, 96 bp, Saccharomyces pastorianus
atgactgttggaataaaaatcaactatcatctactaactagtatttacgttactagtatattatcatatacggtgttagaagatgacgcaaatgat

SEQ ID NO: 174602 - DNA, 75 bp, Saccharomyces pastorianus
ctgatcattaccgctggtaagagtaccgttagatttgttcccgcattgacgattgaagacgaactaatcgaagaa

SEQ ID NO: 174603 - DNA, 528 bp, Saccharomyces pastorianus
ccagcatcaactccagcactaatgctactaccactgccagcatcaacgtcaggactagtgggactaccactgccagcatcaacgtcaggactagtgcgactaccactgccagcatcaacgtcaggactagtgcgactaccactgaaagtaccaactccaacactaatgctactaccactgaaagtaccaactccaacactaatgctactaccactgaaagtaccaactccagcactaatgctactaccactgccagcatcaacgtcaggactagtgcgactaccactgaaagtaccaactccagcactaatgctactaccactgccagcatcaacgtcaggactagtgggactaccactgccagcatcaacgtcaggactaatgctactaccactgccagcatcaactccagcactaatgctactaccactgccagcatcaacgtcaggactagtgggactaccactgccagcatcaacgtcaggactagtgcgactaccactgccagcatcaacgtcaggactagtg

SEQ ID NO: 174604 - DNA, 25 bp, Saccharomyces pastorianus
gactctacagatgcttcttgcactg

SEQ ID NO: 174605 - DNA, 25 bp, Saccharomyces pastorianus
gatatgctgaagagattttccacca

SEQ ID NO: 174606 - DNA, 25 bp, Saccharomyces pastorianus
aacttcctcggaaatagagccatgg

SEQ ID NO: 174607 - DNA, 25 bp, Saccharomyces pastorianus
caccaaatgccagaatgccctaatt

SEQ ID NO: 174608 - DNA, 25 bp, Saccharomyces pastorianus
gatcctcagctttctatggacagtt

SEQ ID NO: 174609 - DNA, 25 bp, Saccharomyces pastorianus
tagctactgctttggtggacattgt

SEQ ID NO: 174610 - DNA, 25 bp, Saccharomyces pastorianus
gaatctttacgatgtccatggtccc

SEQ ID NO: 174611 - DNA, 25 bp, Saccharomyces pastorianus
aaatgtttcttcgatgctttagccg

SEQ ID NO: 174612 - DNA, 25 bp, Saccharomyces pastorianus
gggtagcaacttttcattgaacgct

SEQ ID NO: 174613 - DNA, 25 bp, Saccharomyces pastorianus
atgctttagccgctgactctacaga

SEQ ID NO: 174614 - DNA, 25 bp, Saccharomyces pastorianus
agagccatggtctaacggttacata

SEQ ID NO: 174615 - DNA, 25 bp, Saccharomyces pastorianus
attatggcgctgatagtaactttag

SEQ ID NO: 174616 - DNA, 25 bp, Saccharomyces pastorianus
acggccgagcctgctactaagaaga

SEQ ID NO: 174617 - DNA, 25 bp, Saccharomyces pastorianus
agaattaagcgatcctagtgaaccg

SEQ ID NO: 174618 - DNA, 25 bp, Saccharomyces pastorianus
gacgttgatagttcagcgcagtgat

SEQ ID NO: 174619 - DNA, 25 bp, Saccharomyces pastorianus
gaaacattctgcacagacgccaacg

SEQ ID NO: 174620 - DNA, 25 bp, Saccharomyces pastorianus
gacgccaacgagaagcaactatgta

SEQ ID NO: 174621 - DNA, 25 bp, Saccharomyces pastorianus
ggagtgcatagatgtttcccgcaag

SEQ ID NO: 174622 - DNA, 25 bp, Saccharomyces pastorianus
gagtcgactttgaagccttgcgaaa

SEQ ID NO: 174623 - DNA, 25 bp, Saccharomyces pastorianus
tagcccaaggcgatgagacgttgat

SEQ ID NO: 174624 - DNA, 25 bp, Saccharomyces pastorianus
gatgtttcccgcaagttggcaaata

SEQ ID NO: 174625 - DNA, 25 bp, Saccharomyces pastorianus
gtgaaccgcttactcaatctgatgt

SEQ ID NO: 174626 - DNA, 25 bp, Saccharomyces pastorianus
gggaccattcctgacctgggtcgtg

SEQ ID NO: 174627 - DNA, 25 bp, Saccharomyces pastorianus
agatgggaccattcctgacctgggt

SEQ ID NO: 174628 - DNA, 25 bp, Saccharomyces pastorianus
atgcaagcgatgatgatgatacaga

SEQ ID NO: 174629 - DNA, 25 bp, Saccharomyces pastorianus
tggcgtaaccaaaggctcaatgagc

SEQ ID NO: 174630 - DNA, 25 bp, Saccharomyces pastorianus
tgacctgggtcgtgctgacgctgac

SEQ ID NO: 174631 - DNA, 25 bp, Saccharomyces pastorianus
tgacgcgtcttatccatcaattgaa

SEQ ID NO: 174632 - DNA, 25 bp, Saccharomyces pastorianus
cggcggtttaactcatgcaagcgat

SEQ ID NO: 174633 - DNA, 25 bp, Saccharomyces pastorianus
aaggctcaatgagcggcggtttaac

SEQ ID NO: 174634 - DNA, 25 bp, Saccharomyces pastorianus
atgatgatacagatgggaccattcc

SEQ ID NO: 174635 - DNA, 25 bp, Saccharomyces pastorianus
gtcgtgctgacgctgacgcgtctta

SEQ ID NO: 174636 - DNA, 25 bp, Saccharomyces pastorianus
gcgttcatggcgtaaccaaaggctc

SEQ ID NO: 174637 - DNA, 25 bp, Saccharomyces pastorianus
cacccaatcttcatggtagcgccta

SEQ ID NO: 174638 - DNA, 25 bp, Saccharomyces pastorianus
tttcagcttccaatttaccggaatc

SEQ ID NO: 174639 - DNA, 25 bp, Saccharomyces pastorianus
attcacccaatcttcatggtagcgc

SEQ ID NO: 174640 - DNA, 25 bp, Saccharomyces pastorianus
aattcacccaatcttcatggtagcg

SEQ ID NO: 174641 - DNA, 25 bp, Saccharomyces pastorianus
ccaatttaccggaatctgatagaga

SEQ ID NO: 174642 - DNA, 25 bp, Saccharomyces pastorianus
tcacccaatcttcatggtagcgcct

SEQ ID NO: 174643 - DNA, 25 bp, Saccharomyces pastorianus
aaaattcacccaatcttcatggtag

SEQ ID NO: 174644 - DNA, 25 bp, Saccharomyces pastorianus
caatttaccggaatctgatagagat

SEQ ID NO: 174645 - DNA, 25 bp, Saccharomyces pastorianus
acccaatcttcatggtagcgcctat

SEQ ID NO: 174646 - DNA, 25 bp, Saccharomyces pastorianus
caaaattcacccaatcttcatggta

SEQ ID NO: 174647 - DNA, 25 bp, Saccharomyces pastorianus
aaattcacccaatcttcatggtagc

SEQ ID NO: 174648 - DNA, 25 bp, Saccharomyces pastorianus
tagtttgtaccacttataccttcat

SEQ ID NO: 174649 - DNA, 25 bp, Saccharomyces pastorianus
gatgccattagtttgtaccacttat

SEQ ID NO: 174650 - DNA, 25 bp, Saccharomyces pastorianus
gcaaagcaccatagaaaatactgag

SEQ ID NO: 174651 - DNA, 25 bp, Saccharomyces pastorianus
gtttgtaccacttataccttcatta

SEQ ID NO: 174652 - DNA, 25 bp, Saccharomyces pastorianus
agatgccattagtttgtaccactta

SEQ ID NO: 174653 - DNA, 25 bp, Saccharomyces pastorianus
gccattagtttgtaccacttatacc

SEQ ID NO: 174654 - DNA, 25 bp, Saccharomyces pastorianus
tttgtaccacttataccttcattat

SEQ ID NO: 174655 - DNA, 25 bp, Saccharomyces pastorianus
atctgcaaagcaccatagaaaatac

SEQ ID NO: 174656 - DNA, 25 bp, Saccharomyces pastorianus
tttttgagcaaagtttgccgaactt

SEQ ID NO: 174657 - DNA, 25 bp, Saccharomyces pastorianus
tgagcaaagtttgccgaacttagaa

SEQ ID NO: 174658 - DNA, 25 bp, Saccharomyces pastorianus
aagtttgccgaacttagaatatcta

SEQ ID NO: 174659 - DNA, 25 bp, Saccharomyces pastorianus
gacactcgtctaccttcactgcacg

SEQ ID NO: 174660 - DNA, 25 bp, Saccharomyces pastorianus
actcgtctaccttcactgcacgaaa

SEQ ID NO: 174661 - DNA, 25 bp, Saccharomyces pastorianus
acactcgtctaccttcactgcacga

SEQ ID NO: 174662 - DNA, 25 bp, Saccharomyces pastorianus
tcgtctaccttcactgcacgaaacc

SEQ ID NO: 174663 - DNA, 25 bp, Saccharomyces pastorianus
ctcgtctaccttcactgcacgaaac

SEQ ID NO: 174664 - DNA, 25 bp, Saccharomyces pastorianus
agacactcgtctaccttcactgcac

SEQ ID NO: 174665 - DNA, 25 bp, Saccharomyces pastorianus
tctaccttcactgcacgaaaccaaa

SEQ ID NO: 174666 - DNA, 25 bp, Saccharomyces pastorianus
tagacactcgtctaccttcactgca

SEQ ID NO: 174667 - DNA, 25 bp, Saccharomyces pastorianus
ctaccttcactgcacgaaaccaaaa

SEQ ID NO: 174668 - DNA, 25 bp, Saccharomyces pastorianus
gtctaccttcactgcacgaaaccaa

SEQ ID NO: 174669 - DNA, 25 bp, Saccharomyces pastorianus
gattctgatgatgattctaccggaa

SEQ ID NO: 174670 - DNA, 25 bp, Saccharomyces pastorianus
aatcaagcctattcatctattcaaa

SEQ ID NO: 174671 - DNA, 25 bp, Saccharomyces pastorianus
ccatctttatcttcctttatttcca

SEQ ID NO: 174672 - DNA, 25 bp, Saccharomyces pastorianus
acaggccccagtgatactactagtc

SEQ ID NO: 174673 - DNA, 25 bp, Saccharomyces pastorianus
ttcgtcagcttaataacccctatac

SEQ ID NO: 174674 - DNA, 25 bp, Saccharomyces pastorianus
gaaacttatcgaaccagacacacgg

SEQ ID NO: 174675 - DNA, 25 bp, Saccharomyces pastorianus
agacacacggttctgcacaaaatgt

SEQ ID NO: 174676 - DNA, 25 bp, Saccharomyces pastorianus
gacaacattgctgcgaataaaccca

SEQ ID NO: 174677 - DNA, 25 bp, Saccharomyces pastorianus
tcaccatctttttccgcgtatcaga

SEQ ID NO: 174678 - DNA, 25 bp, Saccharomyces pastorianus
gaaccgatccaaatatcagcgacaa

SEQ ID NO: 174679 - DNA, 25 bp, Saccharomyces pastorianus
tggatttttaagtggttcgtcagct

SEQ ID NO: 174680 - DNA, 25 bp, Saccharomyces pastorianus
aataaactctgatcgacaagcttgg

SEQ ID NO: 174681 - DNA, 25 bp, Saccharomyces pastorianus
aaccaatccaaattggaccaattca

SEQ ID NO: 174682 - DNA, 25 bp, Saccharomyces pastorianus
cagagcagtcatatgatcagaatac

SEQ ID NO: 174683 - DNA, 25 bp, Saccharomyces pastorianus
agagcagtcatatgatcagaataca

SEQ ID NO: 174684 - DNA, 25 bp, Saccharomyces pastorianus
cagaatacagaatctgatcatgact

SEQ ID NO: 174685 - DNA, 25 bp, Saccharomyces pastorianus
gaatacagaatctgatcatgactat

SEQ ID NO: 174686 - DNA, 25 bp, Saccharomyces pastorianus
aaataaactctgatcgacaagcttg

SEQ ID NO: 174687 - DNA, 25 bp, Saccharomyces pastorianus
gagcagtcatatgatcagaatacag

SEQ ID NO: 174688 - DNA, 25 bp, Saccharomyces pastorianus
agcagtcatatgatcagaatacaga

SEQ ID NO: 174689 - DNA, 25 bp, Saccharomyces pastorianus
gttatattacaagacaaccaatcca

SEQ ID NO: 174690 - DNA, 25 bp, Saccharomyces pastorianus
aacagcccataaccaatctttcatt

SEQ ID NO: 174691 - DNA, 25 bp, Saccharomyces pastorianus
ttgagtttcagacccatcatcttac

SEQ ID NO: 174692 - DNA, 25 bp, Saccharomyces pastorianus
ggctcattaatgaccgttgcgcagg

SEQ ID NO: 174693 - DNA, 25 bp, Saccharomyces pastorianus
aatttatcgtagacaccgccctgaa

SEQ ID NO: 174694 - DNA, 25 bp, Saccharomyces pastorianus
tccacggcctattctttgagtgcag

SEQ ID NO: 174695 - DNA, 25 bp, Saccharomyces pastorianus
aagtcctttcctatccatgttagaa

SEQ ID NO: 174696 - DNA, 25 bp, Saccharomyces pastorianus
aggcggacggactgattgctgctac

SEQ ID NO: 174697 - DNA, 25 bp, Saccharomyces pastorianus
cacccatttgtccacatgcattgag

SEQ ID NO: 174698 - DNA, 25 bp, Saccharomyces pastorianus
attttataaccatatgcgccagccc

SEQ ID NO: 174699 - DNA, 25 bp, Saccharomyces pastorianus
atgcaatcgctttaacacccatttg

SEQ ID NO: 174700 - DNA, 25 bp, Saccharomyces pastorianus
aagcctcgcccgatgagtctattaa

SEQ ID NO: 174701 - DNA, 25 bp, Saccharomyces pastorianus
ttggtatgcccaaccgtcaatgcaa

SEQ ID NO: 174702 - DNA, 25 bp, Saccharomyces pastorianus
accaattcaatgctcgcgttctagt

SEQ ID NO: 174703 - DNA, 25 bp, Saccharomyces pastorianus
agttatccagatggatcgtggctcc

SEQ ID NO: 174704 - DNA, 25 bp, Saccharomyces pastorianus
taagaaccaattcaatgctcgcgtt

SEQ ID NO: 174705 - DNA, 25 bp, Saccharomyces pastorianus
ttaagaaccaattcaatgctcgcgt

SEQ ID NO: 174706 - DNA, 25 bp, Saccharomyces pastorianus
ctcgcgttctagttatccagatgga

SEQ ID NO: 174707 - DNA, 25 bp, Saccharomyces pastorianus
attagcatttattaagaaccaattc

SEQ ID NO: 174708 - DNA, 25 bp, Saccharomyces pastorianus
cgcgttctagttatccagatggatc

SEQ ID NO: 174709 - DNA, 25 bp, Saccharomyces pastorianus
ccaattcaatgctcgcgttctagtt

SEQ ID NO: 174710 - DNA, 25 bp, Saccharomyces pastorianus
ttcaatgctcgcgttctagttatcc

SEQ ID NO: 174711 - DNA, 25 bp, Saccharomyces pastorianus
aaccaattcaatgctcgcgttctag

SEQ ID NO: 174712 - DNA, 25 bp, Saccharomyces pastorianus
caattcaatgctcgcgttctagtta

SEQ ID NO: 174713 - DNA, 25 bp, Saccharomyces pastorianus
aaccaagctgctcaatgtgcgggcg

SEQ ID NO: 174714 - DNA, 25 bp, Saccharomyces pastorianus
gacaccttcatacaaggtctgtata

SEQ ID NO: 174715 - DNA, 25 bp, Saccharomyces pastorianus
acaacatgatgtacttgatgtaaca

SEQ ID NO: 174716 - DNA, 25 bp, Saccharomyces pastorianus
gggcgactttatcttacaacatgat

SEQ ID NO: 174717 - DNA, 25 bp, Saccharomyces pastorianus
cacctggcgtcaaaaaattcttcaa

SEQ ID NO: 174718 - DNA, 25 bp, Saccharomyces pastorianus
tgatgtaacatttgacaccttcata

SEQ ID NO: 174719 - DNA, 25 bp, Saccharomyces pastorianus
gagccacctggcgtcaaaaaattct

SEQ ID NO: 174720 - DNA, 25 bp, Saccharomyces pastorianus
tataattatttttacgagccacctg

SEQ ID NO: 174721 - DNA, 25 bp, Saccharomyces pastorianus
aatgtgcgggcgactttatcttaca

SEQ ID NO: 174722 - DNA, 25 bp, Saccharomyces pastorianus
tgcgggcgactttatcttacaacat

SEQ ID NO: 174723 - DNA, 25 bp, Saccharomyces pastorianus
agctgctcaatgtgcgggcgacttt

SEQ ID NO: 174724 - DNA, 25 bp, Saccharomyces pastorianus
tataccaatattacgattattcctc

SEQ ID NO: 174725 - DNA, 25 bp, Saccharomyces pastorianus
accaatattacgattattcctcatt

SEQ ID NO: 174726 - DNA, 25 bp, Saccharomyces pastorianus
ccaatattacgattattcctcattc

SEQ ID NO: 174727 - DNA, 25 bp, Saccharomyces pastorianus
ataccaatattacgattattcctca

SEQ ID NO: 174728 - DNA, 25 bp, Saccharomyces pastorianus
tatataccaatattacgattattcc

SEQ ID NO: 174729 - DNA, 25 bp, Saccharomyces pastorianus
tctatataccaatattacgattatt

SEQ ID NO: 174730 - DNA, 25 bp, Saccharomyces pastorianus
tggaatctatatttctatataccaa

SEQ ID NO: 174731 - DNA, 25 bp, Saccharomyces pastorianus
atggaatctatatttctatatacca

SEQ ID NO: 174732 - DNA, 25 bp, Saccharomyces pastorianus
ctatataccaatattacgattattc

SEQ ID NO: 174733 - DNA, 25 bp, Saccharomyces pastorianus
atataccaatattacgattattcct

SEQ ID NO: 174734 - DNA, 25 bp, Saccharomyces pastorianus
taccaatattacgattattcctcat

SEQ ID NO: 174735 - DNA, 25 bp, Saccharomyces pastorianus
aagaagttgatgccgacatatctga

SEQ ID NO: 174736 - DNA, 25 bp, Saccharomyces pastorianus
aaagaagttgatgccgacatatctg

SEQ ID NO: 174737 - DNA, 25 bp, Saccharomyces pastorianus
agttgatgccgacatatctgaatac

SEQ ID NO: 174738 - DNA, 25 bp, Saccharomyces pastorianus
aaaagaagttgatgccgacatatct

SEQ ID NO: 174739 - DNA, 25 bp, Saccharomyces pastorianus
ttgatgccgacatatctgaatacaa

SEQ ID NO: 174740 - DNA, 25 bp, Saccharomyces pastorianus
tgatgccgacatatctgaatacaat

SEQ ID NO: 174741 - DNA, 25 bp, Saccharomyces pastorianus
aagttgatgccgacatatctgaata

SEQ ID NO: 174742 - DNA, 25 bp, Saccharomyces pastorianus
gttgatgccgacatatctgaataca

SEQ ID NO: 174743 - DNA, 25 bp, Saccharomyces pastorianus
agaagttgatgccgacatatctgaa

SEQ ID NO: 174744 - DNA, 25 bp, Saccharomyces pastorianus
gatgccgacatatctgaatacaata

SEQ ID NO: 174745 - DNA, 25 bp, Saccharomyces pastorianus
cagcgattgaagttaatttgaccat

SEQ ID NO: 174746 - DNA, 25 bp, Saccharomyces pastorianus
gctgatgtaatcttaacaagaaata

SEQ ID NO: 174747 - DNA, 25 bp, Saccharomyces pastorianus
gatgtaatcttaacaagaaatagtg

SEQ ID NO: 174748 - DNA, 25 bp, Saccharomyces pastorianus
tagtgctgatgtaatcttaacaaga

SEQ ID NO: 174749 - DNA, 25 bp, Saccharomyces pastorianus
tgctgatgtaatcttaacaagaaat

SEQ ID NO: 174750 - DNA, 25 bp, Saccharomyces pastorianus
ctgatgtaatcttaacaagaaatag

SEQ ID NO: 174751 - DNA, 25 bp, Saccharomyces pastorianus
ttagtgctgatgtaatcttaacaag

SEQ ID NO: 174752 - DNA, 25 bp, Saccharomyces pastorianus
ccagcagcgattgaagttaatttga

SEQ ID NO: 174753 - DNA, 25 bp, Saccharomyces pastorianus
agtgctgatgtaatcttaacaagaa

SEQ ID NO: 174754 - DNA, 25 bp, Saccharomyces pastorianus
gtgctgatgtaatcttaacaagaaa

SEQ ID NO: 174755 - DNA, 25 bp, Saccharomyces pastorianus
gttagtgctgatgtaatcttaacaa

SEQ ID NO: 174756 - DNA, 25 bp, Saccharomyces pastorianus
gtgtccaccgaggacgtagagtttt

SEQ ID NO: 174757 - DNA, 25 bp, Saccharomyces pastorianus
atcgacgaggccatagagttgttaa

SEQ ID NO: 174758 - DNA, 25 bp, Saccharomyces pastorianus
gaacagtctttaacggtgtccaccg

SEQ ID NO: 174759 - DNA, 25 bp, Saccharomyces pastorianus
tcgcggactccgaacagtctttaac

SEQ ID NO: 174760 - DNA, 25 bp, Saccharomyces pastorianus
aaaggctcaggttgatataccggaa

SEQ ID NO: 174761 - DNA, 25 bp, Saccharomyces pastorianus
acaatggaggtcaattgcgcgcgat

SEQ ID NO: 174762 - DNA, 25 bp, Saccharomyces pastorianus
cttggcgcagacgtgatgctggaat

SEQ ID NO: 174763 - DNA, 25 bp, Saccharomyces pastorianus
atgctggaatatcccatcgacgagg

SEQ ID NO: 174764 - DNA, 25 bp, Saccharomyces pastorianus
ttgcgcgcgattgtataactgggac

SEQ ID NO: 174765 - DNA, 25 bp, Saccharomyces pastorianus
ttaaagaagaaactcgcggactccg

SEQ ID NO: 174766 - DNA, 25 bp, Saccharomyces pastorianus
gacacgctctacacaaaggctcagg

SEQ ID NO: 174767 - DNA, 25 bp, Saccharomyces pastorianus
atggactttaccctcaacaaagact

SEQ ID NO: 174768 - DNA, 25 bp, Saccharomyces pastorianus
cgaatggactttaccctcaacaaag

SEQ ID NO: 174769 - DNA, 25 bp, Saccharomyces pastorianus
ctcaacaaagactatgctgtcattc

SEQ ID NO: 174770 - DNA, 25 bp, Saccharomyces pastorianus
tttaccctcaacaaagactatgctg

SEQ ID NO: 174771 - DNA, 25 bp, Saccharomyces pastorianus
ccctcaacaaagactatgctgtcat

SEQ ID NO: 174772 - DNA, 25 bp, Saccharomyces pastorianus
taccctcaacaaagactatgctgtc

SEQ ID NO: 174773 - DNA, 25 bp, Saccharomyces pastorianus
gactttaccctcaacaaagactatg

SEQ ID NO: 174774 - DNA, 25 bp, Saccharomyces pastorianus
ggactttaccctcaacaaagactat

SEQ ID NO: 174775 - DNA, 25 bp, Saccharomyces pastorianus
ttaccctcaacaaagactatgctgt

SEQ ID NO: 174776 - DNA, 25 bp, Saccharomyces pastorianus
gaatggactttaccctcaacaaaga

SEQ ID NO: 174777 - DNA, 25 bp, Saccharomyces pastorianus
tggactttaccctcaacaaagacta

SEQ ID NO: 174778 - DNA, 25 bp, Saccharomyces pastorianus
gcttacatctgatgatctccttttg

SEQ ID NO: 174779 - DNA, 25 bp, Saccharomyces pastorianus
agttggacatatcgttttcctgcca

SEQ ID NO: 174780 - DNA, 25 bp, Saccharomyces pastorianus
aataccaagatttccagatgctcag

SEQ ID NO: 174781 - DNA, 25 bp, Saccharomyces pastorianus
aattttctagtctttgctgctcaaa

SEQ ID NO: 174782 - DNA, 25 bp, Saccharomyces pastorianus
gaggcgaagcgtatatccccgagtt

SEQ ID NO: 174783 - DNA, 25 bp, Saccharomyces pastorianus
atggcacgatgctccgtttttaaga

SEQ ID NO: 174784 - DNA, 25 bp, Saccharomyces pastorianus
ttaatcaccgctcttgccaatatta

SEQ ID NO: 174785 - DNA, 25 bp, Saccharomyces pastorianus
agtagatcttttcggtgcagacgct

SEQ ID NO: 174786 - DNA, 25 bp, Saccharomyces pastorianus
agatgctcagtcttcatcctttaac

SEQ ID NO: 174787 - DNA, 25 bp, Saccharomyces pastorianus
aatgaatttagcctcccaatccgtc

SEQ ID NO: 174788 - DNA, 25 bp, Saccharomyces pastorianus
gtcttcctaaatctttcgttaatcg

SEQ ID NO: 174789 - DNA, 25 bp, Saccharomyces pastorianus
cacccactcttcatggtagcgccta

SEQ ID NO: 174790 - DNA, 25 bp, Saccharomyces pastorianus
gattccactaaggtaatctcaacaa

SEQ ID NO: 174791 - DNA, 25 bp, Saccharomyces pastorianus
cactcttcatggtagcgcctatgct

SEQ ID NO: 174792 - DNA, 25 bp, Saccharomyces pastorianus
aattcacccactcttcatggtagcg

SEQ ID NO: 174793 - DNA, 25 bp, Saccharomyces pastorianus
actcttcatggtagcgcctatgctt

SEQ ID NO: 174794 - DNA, 25 bp, Saccharomyces pastorianus
agattccactaaggtaatctcaaca

SEQ ID NO: 174795 - DNA, 25 bp, Saccharomyces pastorianus
tcacccactcttcatggtagcgcct

SEQ ID NO: 174796 - DNA, 25 bp, Saccharomyces pastorianus
attccactaaggtaatctcaacaag

SEQ ID NO: 174797 - DNA, 25 bp, Saccharomyces pastorianus
acccactcttcatggtagcgcctat

SEQ ID NO: 174798 - DNA, 25 bp, Saccharomyces pastorianus
ttccactaaggtaatctcaacaagg

SEQ ID NO: 174799 - DNA, 25 bp, Saccharomyces pastorianus
aaattcacccactcttcatggtagc

SEQ ID NO: 174800 - DNA, 25 bp, Saccharomyces pastorianus
tacgcataacgcccatcattatcca

SEQ ID NO: 174801 - DNA, 25 bp, Saccharomyces pastorianus
tacagaaaaattaccactaaaatca

SEQ ID NO: 174802 - DNA, 25 bp, Saccharomyces pastorianus
tcaatattacagaaaaattaccact

SEQ ID NO: 174803 - DNA, 25 bp, Saccharomyces pastorianus
acgcataacgcccatcattatccac

SEQ ID NO: 174804 - DNA, 25 bp, Saccharomyces pastorianus
caatattacagaaaaattaccacta

SEQ ID NO: 174805 - DNA, 25 bp, Saccharomyces pastorianus
atacgttataccacttttgcaccat

SEQ ID NO: 174806 - DNA, 25 bp, Saccharomyces pastorianus
gtcaatattacagaaaaattaccac

SEQ ID NO: 174807 - DNA, 25 bp, Saccharomyces pastorianus
catacgttataccacttttgcacca

SEQ ID NO: 174808 - DNA, 25 bp, Saccharomyces pastorianus
acgttataccacttttgcaccatat

SEQ ID NO: 174809 - DNA, 25 bp, Saccharomyces pastorianus
ttacgcataacgcccatcattatcc

SEQ ID NO: 174810 - DNA, 25 bp, Saccharomyces pastorianus
cgcataacgcccatcattatccaca

SEQ ID NO: 174811 - DNA, 25 bp, Saccharomyces pastorianus
ggtccagtatcaaactcgaactcgg

SEQ ID NO: 174812 - DNA, 25 bp, Saccharomyces pastorianus
gatatctttggtccagtatcaaact

SEQ ID NO: 174813 - DNA, 25 bp, Saccharomyces pastorianus
tccagtatcaaactcgaactcggat

SEQ ID NO: 174814 - DNA, 25 bp, Saccharomyces pastorianus
aactcgaactcggatacgaaaagat

SEQ ID NO: 174815 - DNA, 25 bp, Saccharomyces pastorianus
atacatgtttattatggttgataac

SEQ ID NO: 174816 - DNA, 25 bp, Saccharomyces pastorianus
tttggtccagtatcaaactcgaact

SEQ ID NO: 174817 - DNA, 25 bp, Saccharomyces pastorianus
atctttggtccagtatcaaactcga

SEQ ID NO: 174818 - DNA, 25 bp, Saccharomyces pastorianus
ctcggatacgaaaagatacatgttt

SEQ ID NO: 174819 - DNA, 25 bp, Saccharomyces pastorianus
tcaaactcgaactcggatacgaaaa

SEQ ID NO: 174820 - DNA, 25 bp, Saccharomyces pastorianus
tatcaaactcgaactcggatacgaa

SEQ ID NO: 174821 - DNA, 25 bp, Saccharomyces pastorianus
tggatatctttggtccagtatcaaa

SEQ ID NO: 174822 - DNA, 25 bp, Saccharomyces pastorianus
gtttatgaagacgagctgtcaataa

SEQ ID NO: 174823 - DNA, 25 bp, Saccharomyces pastorianus
attgcccacgaaatcggcctacatt

SEQ ID NO: 174824 - DNA, 25 bp, Saccharomyces pastorianus
agacgagctgtcaataatggatttt

SEQ ID NO: 174825 - DNA, 25 bp, Saccharomyces pastorianus
ggattgcccacgaaatcggcctaca

SEQ ID NO: 174826 - DNA, 25 bp, Saccharomyces pastorianus
gtaatgtttatgaagacgagctgtc

SEQ ID NO: 174827 - DNA, 25 bp, Saccharomyces pastorianus
ccacgaaatcggcctacatttgaat

SEQ ID NO: 174828 - DNA, 25 bp, Saccharomyces pastorianus
ggcatttaggattgcccacgaaatc

SEQ ID NO: 174829 - DNA, 25 bp, Saccharomyces pastorianus
gggctggcatttaggattgcccacg

SEQ ID NO: 174830 - DNA, 25 bp, Saccharomyces pastorianus
taggattgcccacgaaatcggccta

SEQ ID NO: 174831 - DNA, 25 bp, Saccharomyces pastorianus
tgcccacgaaatcggcctacatttg

SEQ ID NO: 174832 - DNA, 25 bp, Saccharomyces pastorianus
tggcatttaggattgcccacgaaat

SEQ ID NO: 174833 - DNA, 25 bp, Saccharomyces pastorianus
ctattatatcacacagctggacata

SEQ ID NO: 174834 - DNA, 25 bp, Saccharomyces pastorianus
tatcctctgcttacttatatgctga

SEQ ID NO: 174835 - DNA, 25 bp, Saccharomyces pastorianus
ctctgcttacttatatgctgatatc

SEQ ID NO: 174836 - DNA, 25 bp, Saccharomyces pastorianus
acagctggacatatcctctgcttac

SEQ ID NO: 174837 - DNA, 25 bp, Saccharomyces pastorianus
acacagctggacatatcctctgctt

SEQ ID NO: 174838 - DNA, 25 bp, Saccharomyces pastorianus
acatcactatgcactgatgacgtca

SEQ ID NO: 174839 - DNA, 25 bp, Saccharomyces pastorianus
gactattatatcacacagctggaca

SEQ ID NO: 174840 - DNA, 25 bp, Saccharomyces pastorianus
ggacatatcctctgcttacttatat

SEQ ID NO: 174841 - DNA, 25 bp, Saccharomyces pastorianus
tggacatatcctctgcttacttata

SEQ ID NO: 174842 - DNA, 25 bp, Saccharomyces pastorianus
agctggacatatcctctgcttactt

SEQ ID NO: 174843 - DNA, 25 bp, Saccharomyces pastorianus
tatcacacagctggacatatcctct

SEQ ID NO: 174844 - DNA, 25 bp, Saccharomyces pastorianus
aaaagcaccaacaagtgcgtatcct

SEQ ID NO: 174845 - DNA, 25 bp, Saccharomyces pastorianus
tgcgtatcctcaaccgaagcggaac

SEQ ID NO: 174846 - DNA, 25 bp, Saccharomyces pastorianus
gtgcgtatcctcaaccgaagcggaa

SEQ ID NO: 174847 - DNA, 25 bp, Saccharomyces pastorianus
gcgtatcctcaaccgaagcggaact

SEQ ID NO: 174848 - DNA, 25 bp, Saccharomyces pastorianus
aagtgcgtatcctcaaccgaagcgg

SEQ ID NO: 174849 - DNA, 25 bp, Saccharomyces pastorianus
acaagtgcgtatcctcaaccgaagc

SEQ ID NO: 174850 - DNA, 25 bp, Saccharomyces pastorianus
aacaagtgcgtatcctcaaccgaag

SEQ ID NO: 174851 - DNA, 25 bp, Saccharomyces pastorianus
agcaccaacaagtgcgtatcctcaa

SEQ ID NO: 174852 - DNA, 25 bp, Saccharomyces pastorianus
gtatcctcaaccgaagcggaacttc

SEQ ID NO: 174853 - DNA, 25 bp, Saccharomyces pastorianus
caacaagtgcgtatcctcaaccgaa

SEQ ID NO: 174854 - DNA, 25 bp, Saccharomyces pastorianus
agtgcgtatcctcaaccgaagcgga

SEQ ID NO: 174855 - DNA, 25 bp, Saccharomyces pastorianus
agtcagtgataaatttcataccgag

SEQ ID NO: 174856 - DNA, 25 bp, Saccharomyces pastorianus
aacagtgattgatgaccaagtcagt

SEQ ID NO: 174857 - DNA, 25 bp, Saccharomyces pastorianus
taccgagcttatgtgtcttttcgat

SEQ ID NO: 174858 - DNA, 25 bp, Saccharomyces pastorianus
gtcagtgataaatttcataccgagc

SEQ ID NO: 174859 - DNA, 25 bp, Saccharomyces pastorianus
tgttcgctggaacagtgattgatga

SEQ ID NO: 174860 - DNA, 25 bp, Saccharomyces pastorianus
tcagtgataaatttcataccgagct

SEQ ID NO: 174861 - DNA, 25 bp, Saccharomyces pastorianus
ggaacagtgattgatgaccaagtca

SEQ ID NO: 174862 - DNA, 25 bp, Saccharomyces pastorianus
caagtcagtgataaatttcataccg

SEQ ID NO: 174863 - DNA, 25 bp, Saccharomyces pastorianus
cagtgataaatttcataccgagctt

SEQ ID NO: 174864 - DNA, 25 bp, Saccharomyces pastorianus
aagtcagtgataaatttcataccga

SEQ ID NO: 174865 - DNA, 25 bp, Saccharomyces pastorianus
agtgataaatttcataccgagctta

SEQ ID NO: 174866 - DNA, 25 bp, Saccharomyces pastorianus
tcacattaatgaatcaaccgtttca

SEQ ID NO: 174867 - DNA, 25 bp, Saccharomyces pastorianus
acaatacttaagcgatgacaacgaa

SEQ ID NO: 174868 - DNA, 25 bp, Saccharomyces pastorianus
tgaatcaaccgtttcatcacaatac

SEQ ID NO: 174869 - DNA, 25 bp, Saccharomyces pastorianus
atcacaatacttaagcgatgacaac

SEQ ID NO: 174870 - DNA, 25 bp, Saccharomyces pastorianus
gatcacattaatgaatcaaccgttt

SEQ ID NO: 174871 - DNA, 25 bp, Saccharomyces pastorianus
attaatgaatcaaccgtttcatcac

SEQ ID NO: 174872 - DNA, 25 bp, Saccharomyces pastorianus
atgatcacattaatgaatcaaccgt

SEQ ID NO: 174873 - DNA, 25 bp, Saccharomyces pastorianus
atcacattaatgaatcaaccgtttc

SEQ ID NO: 174874 - DNA, 25 bp, Saccharomyces pastorianus
cacaatacttaagcgatgacaacga

SEQ ID NO: 174875 - DNA, 25 bp, Saccharomyces pastorianus
aatgaatcaaccgtttcatcacaat

SEQ ID NO: 174876 - DNA, 25 bp, Saccharomyces pastorianus
tcacaatacttaagcgatgacaacg

SEQ ID NO: 174877 - DNA, 25 bp, Saccharomyces pastorianus
gcagagaaactagccatatcactat

SEQ ID NO: 174878 - DNA, 25 bp, Saccharomyces pastorianus
catacagagactagcccctttacaa

SEQ ID NO: 174879 - DNA, 25 bp, Saccharomyces pastorianus
atgtaacgcgtgtgcccaaccatga

SEQ ID NO: 174880 - DNA, 25 bp, Saccharomyces pastorianus
ccaattagtggctgagatttatctc

SEQ ID NO: 174881 - DNA, 25 bp, Saccharomyces pastorianus
gagatttatctcaataatggtgatc

SEQ ID NO: 174882 - DNA, 25 bp, Saccharomyces pastorianus
gtgtgcccaaccatgatgctagttt

SEQ ID NO: 174883 - DNA, 25 bp, Saccharomyces pastorianus
gatcacatgtaacgcgtgtgcccaa

SEQ ID NO: 174884 - DNA, 25 bp, Saccharomyces pastorianus
agtaccatacagagactagcccctt

SEQ ID NO: 174885 - DNA, 25 bp, Saccharomyces pastorianus
gaaactagccatatcactattgatt

SEQ ID NO: 174886 - DNA, 25 bp, Saccharomyces pastorianus
ggtgatcagtaccatacagagacta

SEQ ID NO: 174887 - DNA, 25 bp, Saccharomyces pastorianus
ccatgatgctagtttatctataccg

SEQ ID NO: 174888 - DNA, 25 bp, Saccharomyces pastorianus
agatgaagtatcaggtaataattta

SEQ ID NO: 174889 - DNA, 25 bp, Saccharomyces pastorianus
acgtatactacatcgagaccaagaa

SEQ ID NO: 174890 - DNA, 25 bp, Saccharomyces pastorianus
catcgagaccaagaagaacattgct

SEQ ID NO: 174891 - DNA, 25 bp, Saccharomyces pastorianus
gtatactacatcgagaccaagaaga

SEQ ID NO: 174892 - DNA, 25 bp, Saccharomyces pastorianus
ctacatcgagaccaagaagaacatt

SEQ ID NO: 174893 - DNA, 25 bp, Saccharomyces pastorianus
atactacatcgagaccaagaagaac

SEQ ID NO: 174894 - DNA, 25 bp, Saccharomyces pastorianus
caggtaataatttatacgtatacta

SEQ ID NO: 174895 - DNA, 25 bp, Saccharomyces pastorianus
cgtatactacatcgagaccaagaag

SEQ ID NO: 174896 - DNA, 25 bp, Saccharomyces pastorianus
gaccaagaagaacattgctgatgtg

SEQ ID NO: 174897 - DNA, 25 bp, Saccharomyces pastorianus
atcaggtaataatttatacgtatac

SEQ ID NO: 174898 - DNA, 25 bp, Saccharomyces pastorianus
tactacatcgagaccaagaagaaca

SEQ ID NO: 174899 - DNA, 25 bp, Saccharomyces pastorianus
ttacagcggacctgagccctatgat

SEQ ID NO: 174900 - DNA, 25 bp, Saccharomyces pastorianus
gattttcagagacatcctggtcgaa

SEQ ID NO: 174901 - DNA, 25 bp, Saccharomyces pastorianus
tctgctgctacaaactcaacagttc

SEQ ID NO: 174902 - DNA, 25 bp, Saccharomyces pastorianus
gagccctatgatccagagtctgatt

SEQ ID NO: 174903 - DNA, 25 bp, Saccharomyces pastorianus
aacagttcaacgtagatcttccgat

SEQ ID NO: 174904 - DNA, 25 bp, Saccharomyces pastorianus
gatctgaagttgattctgctgctac

SEQ ID NO: 174905 - DNA, 25 bp, Saccharomyces pastorianus
actggtaagacactgagatccggaa

SEQ ID NO: 174906 - DNA, 25 bp, Saccharomyces pastorianus
gatcttccgattctgacattgacga

SEQ ID NO: 174907 - DNA, 25 bp, Saccharomyces pastorianus
gaatgcgttgacgagccaatgacgt

SEQ ID NO: 174908 - DNA, 25 bp, Saccharomyces pastorianus
ggatctatcaacttacagcggacct

SEQ ID NO: 174909 - DNA, 25 bp, Saccharomyces pastorianus
atgctggttagttcaggcgtcatat

SEQ ID NO: 174910 - DNA, 25 bp, Saccharomyces pastorianus
tggtcataattgatacaggttcagg

SEQ ID NO: 174911 - DNA, 25 bp, Saccharomyces pastorianus
ataattgatacaggttcaggcgtca

SEQ ID NO: 174912 - DNA, 25 bp, Saccharomyces pastorianus
ggtcataattgatacaggttcaggc

SEQ ID NO: 174913 - DNA, 25 bp, Saccharomyces pastorianus
ctggtcataattgatacaggttcag

SEQ ID NO: 174914 - DNA, 25 bp, Saccharomyces pastorianus
cctggtcataattgatacaggttca

SEQ ID NO: 174915 - DNA, 25 bp, Saccharomyces pastorianus
tcataattgatacaggttcaggcgt

SEQ ID NO: 174916 - DNA, 25 bp, Saccharomyces pastorianus
gtcataattgatacaggttcaggcg

SEQ ID NO: 174917 - DNA, 25 bp, Saccharomyces pastorianus
cataattgatacaggttcaggcgtc

SEQ ID NO: 174918 - DNA, 25 bp, Saccharomyces pastorianus
tatactgaaagttctcctcgaggac

SEQ ID NO: 174919 - DNA, 25 bp, Saccharomyces pastorianus
tatacagaatatactgaaagttctc

SEQ ID NO: 174920 - DNA, 25 bp, Saccharomyces pastorianus
tggaatttatatttttacatactaa

SEQ ID NO: 174921 - DNA, 25 bp, Saccharomyces pastorianus
cgttttatatgtttcgttatcctat

SEQ ID NO: 174922 - DNA, 25 bp, Saccharomyces pastorianus
atggaatttatatttttacatacta

SEQ ID NO: 174923 - DNA, 25 bp, Saccharomyces pastorianus
ttacattatcaatttttgtatttca

SEQ ID NO: 174924 - DNA, 25 bp, Saccharomyces pastorianus
ctgaaagttctcctcgaggacatag

SEQ ID NO: 174925 - DNA, 25 bp, Saccharomyces pastorianus
ggaatttatatttttacatactaat

SEQ ID NO: 174926 - DNA, 25 bp, Saccharomyces pastorianus
aatggaatttatatttttacatact

SEQ ID NO: 174927 - DNA, 25 bp, Saccharomyces pastorianus
gaaagttctcctcgaggacatagga

SEQ ID NO: 174928 - DNA, 25 bp, Saccharomyces pastorianus
tactgaaagttctcctcgaggacat

SEQ ID NO: 174929 - DNA, 25 bp, Saccharomyces pastorianus
acaaacaacacagcgaatacaaaaa

SEQ ID NO: 174930 - DNA, 25 bp, Saccharomyces pastorianus
aaaaatgtttctcgcacatctccaa

SEQ ID NO: 174931 - DNA, 25 bp, Saccharomyces pastorianus
tgaatctaaataaaccgtcccaata

SEQ ID NO: 174932 - DNA, 25 bp, Saccharomyces pastorianus
aatgtttctcgcacatctccaaaca

SEQ ID NO: 174933 - DNA, 25 bp, Saccharomyces pastorianus
atgaatctaaataaaccgtcccaat

SEQ ID NO: 174934 - DNA, 25 bp, Saccharomyces pastorianus
aaatgtttctcgcacatctccaaac

SEQ ID NO: 174935 - DNA, 25 bp, Saccharomyces pastorianus
cgaatacaaaaatgtttctcgcaca

SEQ ID NO: 174936 - DNA, 25 bp, Saccharomyces pastorianus
caaaaatgtttctcgcacatctcca

SEQ ID NO: 174937 - DNA, 25 bp, Saccharomyces pastorianus
gtttctcgcacatctccaaacacga

SEQ ID NO: 174938 - DNA, 25 bp, Saccharomyces pastorianus
tcgcacatctccaaacacgactaac

SEQ ID NO: 174939 - DNA, 25 bp, Saccharomyces pastorianus
atgtttctcgcacatctccaaacac

SEQ ID NO: 174940 - DNA, 25 bp, Saccharomyces pastorianus
gacagcagtaataccacctcaaaca

SEQ ID NO: 174941 - DNA, 25 bp, Saccharomyces pastorianus
atcatcagtagcagcagtggtggcg

SEQ ID NO: 174942 - DNA, 25 bp, Saccharomyces pastorianus
taataccacctcaaacaacaacagt

SEQ ID NO: 174943 - DNA, 25 bp, Saccharomyces pastorianus
gctcgcaacaaaacagcactggcaa

SEQ ID NO: 174944 - DNA, 25 bp, Saccharomyces pastorianus
cggtgatggtattgatgacagcagt

SEQ ID NO: 174945 - DNA, 25 bp, Saccharomyces pastorianus
acatcatcatcagtagcagcagtgg

SEQ ID NO: 174946 - DNA, 25 bp, Saccharomyces pastorianus
ataacgttatcaatctcaacagcaa

SEQ ID NO: 174947 - DNA, 25 bp, Saccharomyces pastorianus
agcactggcaacaacagcaacgaga

SEQ ID NO: 174948 - DNA, 25 bp, Saccharomyces pastorianus
attcaactacaacgccaaggaccgc

SEQ ID NO: 174949 - DNA, 25 bp, Saccharomyces pastorianus
tggcaacaacagcaacgagaacaat

SEQ ID NO: 174950 - DNA, 25 bp, Saccharomyces pastorianus
aaggaccgctcgcaacaaaacagca

SEQ ID NO: 174951 - DNA, 25 bp, Saccharomyces pastorianus
caccaaatcttcatggtagcgccta

SEQ ID NO: 174952 - DNA, 25 bp, Saccharomyces pastorianus
attcaccaaatcttcatggtagcgc

SEQ ID NO: 174953 - DNA, 25 bp, Saccharomyces pastorianus
aaatcttcatggtagcgcctatgct

SEQ ID NO: 174954 - DNA, 25 bp, Saccharomyces pastorianus
tcaccaaatcttcatggtagcgcct

SEQ ID NO: 174955 - DNA, 25 bp, Saccharomyces pastorianus
aaaattcaccaaatcttcatggtag

SEQ ID NO: 174956 - DNA, 25 bp, Saccharomyces pastorianus
caaatcttcatggtagcgcctatgc

SEQ ID NO: 174957 - DNA, 25 bp, Saccharomyces pastorianus
attacatcaaaattcaccaaatctt

SEQ ID NO: 174958 - DNA, 25 bp, Saccharomyces pastorianus
ttacatcaaaattcaccaaatcttc

SEQ ID NO: 174959 - DNA, 25 bp, Saccharomyces pastorianus
ccaaatcttcatggtagcgcctatg

SEQ ID NO: 174960 - DNA, 25 bp, Saccharomyces pastorianus
accaaatcttcatggtagcgcctat

SEQ ID NO: 174961 - DNA, 25 bp, Saccharomyces pastorianus
aaattcaccaaatcttcatggtagc

SEQ ID NO: 174962 - DNA, 25 bp, Saccharomyces pastorianus
gaaaacacgttgtctttggtgaggt

SEQ ID NO: 174963 - DNA, 25 bp, Saccharomyces pastorianus
cactgtgccttgtccatggttggat

SEQ ID NO: 174964 - DNA, 25 bp, Saccharomyces pastorianus
attcttcattaccactgtgccttgt

SEQ ID NO: 174965 - DNA, 25 bp, Saccharomyces pastorianus
tgctggaccaaacactaacggttct

SEQ ID NO: 174966 - DNA, 25 bp, Saccharomyces pastorianus
atggcaaatgctggaccaaacacta

SEQ ID NO: 174967 - DNA, 25 bp, Saccharomyces pastorianus
gaccaaacactaacggttctcaatt

SEQ ID NO: 174968 - DNA, 25 bp, Saccharomyces pastorianus
aatcgaatcatacggtactgcttct

SEQ ID NO: 174969 - DNA, 25 bp, Saccharomyces pastorianus
ggacattgtcaaagcaatcgaatca

SEQ ID NO: 174970 - DNA, 25 bp, Saccharomyces pastorianus
cacgttgtctttggtgaggtaacca

SEQ ID NO: 174971 - DNA, 25 bp, Saccharomyces pastorianus
ttctcaattcttcattaccactgtg

SEQ ID NO: 174972 - DNA, 25 bp, Saccharomyces pastorianus
ggtaaccaaaggtatggacattgtc

SEQ ID NO: 174973 - DNA, 25 bp, Saccharomyces pastorianus
agaagtctcttaagaagaatgcagt

SEQ ID NO: 174974 - DNA, 25 bp, Saccharomyces pastorianus
gtctcttaagaagaatgcagttaca

SEQ ID NO: 174975 - DNA, 25 bp, Saccharomyces pastorianus
aagtctcttaagaagaatgcagtta

SEQ ID NO: 174976 - DNA, 25 bp, Saccharomyces pastorianus
ctcttaagaagaatgcagttacata

SEQ ID NO: 174977 - DNA, 25 bp, Saccharomyces pastorianus
gaagtctcttaagaagaatgcagtt

SEQ ID NO: 174978 - DNA, 25 bp, Saccharomyces pastorianus
agtctcttaagaagaatgcagttac

SEQ ID NO: 174979 - DNA, 25 bp, Saccharomyces pastorianus
tcttaagaagaatgcagttacatat

SEQ ID NO: 174980 - DNA, 25 bp, Saccharomyces pastorianus
cagaagtctcttaagaagaatgcag

SEQ ID NO: 174981 - DNA, 25 bp, Saccharomyces pastorianus
tcagaagtctcttaagaagaatgca

SEQ ID NO: 174982 - DNA, 25 bp, Saccharomyces pastorianus
tctcttaagaagaatgcagttacat

SEQ ID NO: 174983 - DNA, 25 bp, Saccharomyces pastorianus
ttcagaagtctcttaagaagaatgc

SEQ ID NO: 174984 - DNA, 25 bp, Saccharomyces pastorianus
atagagaggcccacaatgcacgtca

SEQ ID NO: 174985 - DNA, 25 bp, Saccharomyces pastorianus
gaagaagaaacctgccgtcatctcc

SEQ ID NO: 174986 - DNA, 25 bp, Saccharomyces pastorianus
acatatcggctctgtttcatcaact

SEQ ID NO: 174987 - DNA, 25 bp, Saccharomyces pastorianus
ttccaatccgtcatcttcattacga

SEQ ID NO: 174988 - DNA, 25 bp, Saccharomyces pastorianus
ttgttggtagcttctaaccctgcgt

SEQ ID NO: 174989 - DNA, 25 bp, Saccharomyces pastorianus
gtcaacgagtgatatcccaacagat

SEQ ID NO: 174990 - DNA, 25 bp, Saccharomyces pastorianus
gtaacaatgccctaatcaaccacaa

SEQ ID NO: 174991 - DNA, 25 bp, Saccharomyces pastorianus
ggattccgatgccacgtcacataat

SEQ ID NO: 174992 - DNA, 25 bp, Saccharomyces pastorianus
aaccctgcgtttgcttcagatgttg

SEQ ID NO: 174993 - DNA, 25 bp, Saccharomyces pastorianus
acggcacccagcactagtaataaca

SEQ ID NO: 174994 - DNA, 25 bp, Saccharomyces pastorianus
gatcggcgaatattcatggtccatc

SEQ ID NO: 174995 - DNA, 25 bp, Saccharomyces pastorianus
cgtcacctgcgtattatcaaccgga

SEQ ID NO: 174996 - DNA, 25 bp, Saccharomyces pastorianus
aacgtcacctgcgtattatcaaccg

SEQ ID NO: 174997 - DNA, 25 bp, Saccharomyces pastorianus
acattatcaaacgtcacctgcgtat

SEQ ID NO: 174998 - DNA, 25 bp, Saccharomyces pastorianus
ttcacattatcaaacgtcacctgcg

SEQ ID NO: 174999 - DNA, 25 bp, Saccharomyces pastorianus
gtcacctgcgtattatcaaccggac

SEQ ID NO: 175000 - DNA, 25 bp, Saccharomyces pastorianus
gatgacgtgttcacattatcaaacg

SEQ ID NO: 175001 - DNA, 25 bp, Saccharomyces pastorianus
tcaaacgtcacctgcgtattatcaa

SEQ ID NO: 175002 - DNA, 25 bp, Saccharomyces pastorianus
tctatgatgacgtgttcacattatc

SEQ ID NO: 175003 - DNA, 25 bp, Saccharomyces pastorianus
tatgatgacgtgttcacattatcaa

SEQ ID NO: 175004 - DNA, 25 bp, Saccharomyces pastorianus
tatcaaacgtcacctgcgtattatc

SEQ ID NO: 175005 - DNA, 25 bp, Saccharomyces pastorianus
attatcaaacgtcacctgcgtatta

SEQ ID NO: 175006 - DNA, 25 bp, Saccharomyces pastorianus
cttgcttggtatgcagaaaaaatcg

SEQ ID NO: 175007 - DNA, 25 bp, Saccharomyces pastorianus
cttttcgccaggtaaacttgcttgg

SEQ ID NO: 175008 - DNA, 25 bp, Saccharomyces pastorianus
ttttcgccaggtaaacttgcttggt

SEQ ID NO: 175009 - DNA, 25 bp, Saccharomyces pastorianus
gcttggtatgcagaaaaaatcgata

SEQ ID NO: 175010 - DNA, 25 bp, Saccharomyces pastorianus
ttgcttggtatgcagaaaaaatcga

SEQ ID NO: 175011 - DNA, 25 bp, Saccharomyces pastorianus
tttcttttcgccaggtaaacttgct

SEQ ID NO: 175012 - DNA, 25 bp, Saccharomyces pastorianus
cttggtatgcagaaaaaatcgatag

SEQ ID NO: 175013 - DNA, 25 bp, Saccharomyces pastorianus
tgcttggtatgcagaaaaaatcgat

SEQ ID NO: 175014 - DNA, 25 bp, Saccharomyces pastorianus
ttcttttcgccaggtaaacttgctt

SEQ ID NO: 175015 - DNA, 25 bp, Saccharomyces pastorianus
ttggtatgcagaaaaaatcgatagc

SEQ ID NO: 175016 - DNA, 25 bp, Saccharomyces pastorianus
aatcatacatctttcataggtttcg

SEQ ID NO: 175017 - DNA, 25 bp, Saccharomyces pastorianus
gagatgctcttgtatctgaacgaat

SEQ ID NO: 175018 - DNA, 25 bp, Saccharomyces pastorianus
tcatacatctttcataggtttcgta

SEQ ID NO: 175019 - DNA, 25 bp, Saccharomyces pastorianus
tacatctttcataggtttcgtatgt

SEQ ID NO: 175020 - DNA, 25 bp, Saccharomyces pastorianus
atggagatgctcttgtatctgaacg

SEQ ID NO: 175021 - DNA, 25 bp, Saccharomyces pastorianus
catacatctttcataggtttcgtat

SEQ ID NO: 175022 - DNA, 25 bp, Saccharomyces pastorianus
tggagatgctcttgtatctgaacga

SEQ ID NO: 175023 - DNA, 25 bp, Saccharomyces pastorianus
ggagatgctcttgtatctgaacgaa

SEQ ID NO: 175024 - DNA, 25 bp, Saccharomyces pastorianus
catctttcataggtttcgtatgtgg

SEQ ID NO: 175025 - DNA, 25 bp, Saccharomyces pastorianus
atcatacatctttcataggtttcgt

SEQ ID NO: 175026 - DNA, 25 bp, Saccharomyces pastorianus
gaatcatacatctttcataggtttc

SEQ ID NO: 175027 - DNA, 25 bp, Saccharomyces pastorianus
tgaaactatcttagcacaaatcaag

SEQ ID NO: 175028 - DNA, 25 bp, Saccharomyces pastorianus
tgacctccacacattttaacaaaag

SEQ ID NO: 175029 - DNA, 25 bp, Saccharomyces pastorianus
acaaaagtgctgaaactatcttagc

SEQ ID NO: 175030 - DNA, 25 bp, Saccharomyces pastorianus
aacaaaagtgctgaaactatcttag

SEQ ID NO: 175031 - DNA, 25 bp, Saccharomyces pastorianus
agtgctgaaactatcttagcacaaa

SEQ ID NO: 175032 - DNA, 25 bp, Saccharomyces pastorianus
caaaagtgctgaaactatcttagca

SEQ ID NO: 175033 - DNA, 25 bp, Saccharomyces pastorianus
aaaagtcagggaaatcaattcagat

SEQ ID NO: 175034 - DNA, 25 bp, Saccharomyces pastorianus
gacctccacacattttaacaaaagt

SEQ ID NO: 175035 - DNA, 25 bp, Saccharomyces pastorianus
gtgctgaaactatcttagcacaaat

SEQ ID NO: 175036 - DNA, 25 bp, Saccharomyces pastorianus
aagtgctgaaactatcttagcacaa

SEQ ID NO: 175037 - DNA, 25 bp, Saccharomyces pastorianus
taacaaaagtgctgaaactatctta

SEQ ID NO: 175038 - DNA, 25 bp, Saccharomyces pastorianus
gtaatgatacggtttgcgattctac

SEQ ID NO: 175039 - DNA, 25 bp, Saccharomyces pastorianus
aagacaaagcaactgtttcctgtat

SEQ ID NO: 175040 - DNA, 25 bp, Saccharomyces pastorianus
gtaatgctaacacatctctactgtc

SEQ ID NO: 175041 - DNA, 25 bp, Saccharomyces pastorianus
gccacatcaacagcaacagacgaag

SEQ ID NO: 175042 - DNA, 25 bp, Saccharomyces pastorianus
cagagtcgaaaaggcatgtccatga

SEQ ID NO: 175043 - DNA, 25 bp, Saccharomyces pastorianus
gtatatgcttatttacccaggcgcc

SEQ ID NO: 175044 - DNA, 25 bp, Saccharomyces pastorianus
ggtttgcgattctacgtaatgctaa

SEQ ID NO: 175045 - DNA, 25 bp, Saccharomyces pastorianus
ggcatgtccatgatggcaagcattt

SEQ ID NO: 175046 - DNA, 25 bp, Saccharomyces pastorianus
aggcgcctacctattgtcatgtaag

SEQ ID NO: 175047 - DNA, 25 bp, Saccharomyces pastorianus
agagtggcagcgaacataagacaaa

SEQ ID NO: 175048 - DNA, 25 bp, Saccharomyces pastorianus
actgtttcctgtattcaattgcaag

SEQ ID NO: 175049 - DNA, 25 bp, Saccharomyces pastorianus
caagagacaacacctgggacatcag

SEQ ID NO: 175050 - DNA, 25 bp, Saccharomyces pastorianus
agagacaacacctgggacatcagct

SEQ ID NO: 175051 - DNA, 25 bp, Saccharomyces pastorianus
aacaagagacaacacctgggacatc

SEQ ID NO: 175052 - DNA, 25 bp, Saccharomyces pastorianus
gagaaccatcatcatgtctctcctc

SEQ ID NO: 175053 - DNA, 25 bp, Saccharomyces pastorianus
aagagacaacacctgggacatcagc

SEQ ID NO: 175054 - DNA, 25 bp, Saccharomyces pastorianus
ccagagaaccatcatcatgtctctc

SEQ ID NO: 175055 - DNA, 25 bp, Saccharomyces pastorianus
acctgctgcagtaccacctgacctg

SEQ ID NO: 175056 - DNA, 25 bp, Saccharomyces pastorianus
aacctgctgcagtaccacctgacct

SEQ ID NO: 175057 - DNA, 25 bp, Saccharomyces pastorianus
cagagaaccatcatcatgtctctcc

SEQ ID NO: 175058 - DNA, 25 bp, Saccharomyces pastorianus
agagaaccatcatcatgtctctcct

SEQ ID NO: 175059 - DNA, 25 bp, Saccharomyces pastorianus
acaagagacaacacctgggacatca

SEQ ID NO: 175060 - DNA, 25 bp, Saccharomyces pastorianus
agcgaactcatttttcgtctgtcct

SEQ ID NO: 175061 - DNA, 25 bp, Saccharomyces pastorianus
catcgacaccagtaactgtggttta

SEQ ID NO: 175062 - DNA, 25 bp, Saccharomyces pastorianus
ttacaaccatttagacccggctgag

SEQ ID NO: 175063 - DNA, 25 bp, Saccharomyces pastorianus
cacaaagagcatggaggtcttttac

SEQ ID NO: 175064 - DNA, 25 bp, Saccharomyces pastorianus
tcatttttcgtctgtcctttcgacc

SEQ ID NO: 175065 - DNA, 25 bp, Saccharomyces pastorianus
gaagctttgttttcatcgacaccag

SEQ ID NO: 175066 - DNA, 25 bp, Saccharomyces pastorianus
tagacccggctgagtttagagaaac

SEQ ID NO: 175067 - DNA, 25 bp, Saccharomyces pastorianus
actgtggtttaatgaagcgaactca

SEQ ID NO: 175068 - DNA, 25 bp, Saccharomyces pastorianus
tttcgacctacccaaaatctgtcag

SEQ ID NO: 175069 - DNA, 25 bp, Saccharomyces pastorianus
ttatacagagacacaaagagcatgg

SEQ ID NO: 175070 - DNA, 25 bp, Saccharomyces pastorianus
gagaaaccatgctgagaagctttgt

SEQ ID NO: 175071 - DNA, 25 bp, Saccharomyces pastorianus
gacagtaccaacagaacggcatgat

SEQ ID NO: 175072 - DNA, 25 bp, Saccharomyces pastorianus
aattcacccaatcttcatggtagcg

SEQ ID NO: 175073 - DNA, 25 bp, Saccharomyces pastorianus
ggacagtaccaacagaacggcatga

SEQ ID NO: 175074 - DNA, 25 bp, Saccharomyces pastorianus
acagaacggcatgatgaccccaaac

SEQ ID NO: 175075 - DNA, 25 bp, Saccharomyces pastorianus
aaaattcacccaatcttcatggtag

SEQ ID NO: 175076 - DNA, 25 bp, Saccharomyces pastorianus
ccaacagaacggcatgatgacccca

SEQ ID NO: 175077 - DNA, 25 bp, Saccharomyces pastorianus
gtaccaacagaacggcatgatgacc

SEQ ID NO: 175078 - DNA, 25 bp, Saccharomyces pastorianus
caaaattcacccaatcttcatggta

SEQ ID NO: 175079 - DNA, 25 bp, Saccharomyces pastorianus
acagtaccaacagaacggcatgatg

SEQ ID NO: 175080 - DNA, 25 bp, Saccharomyces pastorianus
agtaccaacagaacggcatgatgac

SEQ ID NO: 175081 - DNA, 25 bp, Saccharomyces pastorianus
aaattcacccaatcttcatggtagc

SEQ ID NO: 175082 - DNA, 25 bp, Saccharomyces pastorianus
ttgcatttcagcttccacttttttt

SEQ ID NO: 175083 - DNA, 25 bp, Saccharomyces pastorianus
ttgttcctcattccgttttatacgt

SEQ ID NO: 175084 - DNA, 25 bp, Saccharomyces pastorianus
cattccgttttatacgtttcattat

SEQ ID NO: 175085 - DNA, 25 bp, Saccharomyces pastorianus
cattatcctattacattatcaatcc

SEQ ID NO: 175086 - DNA, 25 bp, Saccharomyces pastorianus
cgttttatacgtttcattatcctat

SEQ ID NO: 175087 - DNA, 25 bp, Saccharomyces pastorianus
tgttcctcattccgttttatacgtt

SEQ ID NO: 175088 - DNA, 25 bp, Saccharomyces pastorianus
tccgttttatacgtttcattatcct

SEQ ID NO: 175089 - DNA, 25 bp, Saccharomyces pastorianus
tcattccgttttatacgtttcatta

SEQ ID NO: 175090 - DNA, 25 bp, Saccharomyces pastorianus
gttttatacgtttcattatcctatt

SEQ ID NO: 175091 - DNA, 25 bp, Saccharomyces pastorianus
attgttcctcattccgttttatacg

SEQ ID NO: 175092 - DNA, 25 bp, Saccharomyces pastorianus
ttttatacgtttcattatcctatta

SEQ ID NO: 175093 - DNA, 25 bp, Saccharomyces pastorianus
atcacgagaagaaaccattatgctg

SEQ ID NO: 175094 - DNA, 25 bp, Saccharomyces pastorianus
gacctaattgatcatcctgcgtatg

SEQ ID NO: 175095 - DNA, 25 bp, Saccharomyces pastorianus
gctggatctatgaacgaacacggta

SEQ ID NO: 175096 - DNA, 25 bp, Saccharomyces pastorianus
aactccattaaacacagtcaatacg

SEQ ID NO: 175097 - DNA, 25 bp, Saccharomyces pastorianus
gaaaccattatgctggatctatgaa

SEQ ID NO: 175098 - DNA, 25 bp, Saccharomyces pastorianus
ttccccaaaaactagattgatgccc

SEQ ID NO: 175099 - DNA, 25 bp, Saccharomyces pastorianus
ataagcttagaagatgctcataaac

SEQ ID NO: 175100 - DNA, 25 bp, Saccharomyces pastorianus
tcatcctgcgtatgatttcaaaagg

SEQ ID NO: 175101 - DNA, 25 bp, Saccharomyces pastorianus
gtgcaacagattgaaaactccatta

SEQ ID NO: 175102 - DNA, 25 bp, Saccharomyces pastorianus
gaacacggtatcgatcatgaacctg

SEQ ID NO: 175103 - DNA, 25 bp, Saccharomyces pastorianus
gatgcccaaaattataagcttagaa

SEQ ID NO: 175104 - DNA, 25 bp, Saccharomyces pastorianus
cattatcaatccttgcacttcagct

SEQ ID NO: 175105 - DNA, 25 bp, Saccharomyces pastorianus
tcattccgttttatatgtttcatta

SEQ ID NO: 175106 - DNA, 25 bp, Saccharomyces pastorianus
cataacttatgtcatcatcttaaca

SEQ ID NO: 175107 - DNA, 25 bp, Saccharomyces pastorianus
tcctctaacttcgatgacagcttct

SEQ ID NO: 175108 - DNA, 25 bp, Saccharomyces pastorianus
cattccgttttatatgtttcattat

SEQ ID NO: 175109 - DNA, 25 bp, Saccharomyces pastorianus
ttttatatgtttcattatcctatta

SEQ ID NO: 175110 - DNA, 25 bp, Saccharomyces pastorianus
ataacttatgtcatcatcttaacac

SEQ ID NO: 175111 - DNA, 25 bp, Saccharomyces pastorianus
attccgttttatatgtttcattatc

SEQ ID NO: 175112 - DNA, 25 bp, Saccharomyces pastorianus
taacttatgtcatcatcttaacacc

SEQ ID NO: 175113 - DNA, 25 bp, Saccharomyces pastorianus
ctcattccgttttatatgtttcatt

SEQ ID NO: 175114 - DNA, 25 bp, Saccharomyces pastorianus
ttccgttttatatgtttcattatcc

SEQ ID NO: 175115 - DNA, 25 bp, Saccharomyces pastorianus
caactaatacttaaaggtctatccg

SEQ ID NO: 175116 - DNA, 25 bp, Saccharomyces pastorianus
agattggcctgtcaactaatactta

SEQ ID NO: 175117 - DNA, 25 bp, Saccharomyces pastorianus
tacctacgtaatcaatatcgtacca

SEQ ID NO: 175118 - DNA, 25 bp, Saccharomyces pastorianus
cagattggcctgtcaactaatactt

SEQ ID NO: 175119 - DNA, 25 bp, Saccharomyces pastorianus
ttagcgacagattggcctgtcaact

SEQ ID NO: 175120 - DNA, 25 bp, Saccharomyces pastorianus
ttggcctgtcaactaatacttaaag

SEQ ID NO: 175121 - DNA, 25 bp, Saccharomyces pastorianus
ggcctgtcaactaatacttaaaggt

SEQ ID NO: 175122 - DNA, 25 bp, Saccharomyces pastorianus
tcaaatacctacgtaatcaatatcg

SEQ ID NO: 175123 - DNA, 25 bp, Saccharomyces pastorianus
gattggcctgtcaactaatacttaa

SEQ ID NO: 175124 - DNA, 25 bp, Saccharomyces pastorianus
tagcgacagattggcctgtcaacta

SEQ ID NO: 175125 - DNA, 25 bp, Saccharomyces pastorianus
ctgtcaactaatacttaaaggtcta

SEQ ID NO: 175126 - DNA, 25 bp, Saccharomyces pastorianus
tgacaccgtgcagcttgaggaacag

SEQ ID NO: 175127 - DNA, 25 bp, Saccharomyces pastorianus
tcagggacatcggtcttgtgacacc

SEQ ID NO: 175128 - DNA, 25 bp, Saccharomyces pastorianus
tgtgacaccgtgcagcttgaggaac

SEQ ID NO: 175129 - DNA, 25 bp, Saccharomyces pastorianus
gggacatcggtcttgtgacaccgtg

SEQ ID NO: 175130 - DNA, 25 bp, Saccharomyces pastorianus
acatcggtcttgtgacaccgtgcag

SEQ ID NO: 175131 - DNA, 25 bp, Saccharomyces pastorianus
ctgttttcagggacatcggtcttgt

SEQ ID NO: 175132 - DNA, 25 bp, Saccharomyces pastorianus
gcttgaggaacaggccacaggcgtt

SEQ ID NO: 175133 - DNA, 25 bp, Saccharomyces pastorianus
accgtgcagcttgaggaacaggcca

SEQ ID NO: 175134 - DNA, 25 bp, Saccharomyces pastorianus
ggtcttgtgacaccgtgcagcttga

SEQ ID NO: 175135 - DNA, 25 bp, Saccharomyces pastorianus
gaacaggccacaggcgttgcagagg

SEQ ID NO: 175136 - DNA, 25 bp, Saccharomyces pastorianus
tgtctgttttcagggacatcggtct

SEQ ID NO: 175137 - DNA, 25 bp, Saccharomyces pastorianus
gagaattaaaaccatctactacaat

SEQ ID NO: 175138 - DNA, 25 bp, Saccharomyces pastorianus
ccgagaattaaaaccatctactaca

SEQ ID NO: 175139 - DNA, 25 bp, Saccharomyces pastorianus
taaaaccatctactacaatgaagct

SEQ ID NO: 175140 - DNA, 25 bp, Saccharomyces pastorianus
aaaaccatctactacaatgaagcta

SEQ ID NO: 175141 - DNA, 25 bp, Saccharomyces pastorianus
aattaaaaccatctactacaatgaa

SEQ ID NO: 175142 - DNA, 25 bp, Saccharomyces pastorianus
aaaccatctactacaatgaagctat

SEQ ID NO: 175143 - DNA, 25 bp, Saccharomyces pastorianus
cgagaattaaaaccatctactacaa

SEQ ID NO: 175144 - DNA, 25 bp, Saccharomyces pastorianus
attaaaaccatctactacaatgaag

SEQ ID NO: 175145 - DNA, 25 bp, Saccharomyces pastorianus
gaattaaaaccatctactacaatga

SEQ ID NO: 175146 - DNA, 25 bp, Saccharomyces pastorianus
ctaggcgaaagtgatgaggaaattc

SEQ ID NO: 175147 - DNA, 25 bp, Saccharomyces pastorianus
gtgacaatttgtttattcgtagatg

SEQ ID NO: 175148 - DNA, 25 bp, Saccharomyces pastorianus
taaatctaggcgaaagtgatgagga

SEQ ID NO: 175149 - DNA, 25 bp, Saccharomyces pastorianus
gacaatttgtttattcgtagatgat

SEQ ID NO: 175150 - DNA, 25 bp, Saccharomyces pastorianus
cagtcaagtgacaatttgtttattc

SEQ ID NO: 175151 - DNA, 25 bp, Saccharomyces pastorianus
ttgtttattcgtagatgatatggta

SEQ ID NO: 175152 - DNA, 25 bp, Saccharomyces pastorianus
gcttaagatgcaatacgacaccaag

SEQ ID NO: 175153 - DNA, 25 bp, Saccharomyces pastorianus
agtgacaatttgtttattcgtagat

SEQ ID NO: 175154 - DNA, 25 bp, Saccharomyces pastorianus
aaaacagtcaagtgacaatttgttt

SEQ ID NO: 175155 - DNA, 25 bp, Saccharomyces pastorianus
aagcttaagatgcaatacgacacca

SEQ ID NO: 175156 - DNA, 25 bp, Saccharomyces pastorianus
gtgatgaggaaattcaatatgacat

SEQ ID NO: 175157 - DNA, 25 bp, Saccharomyces pastorianus
ataggtttcgtatgtggagtattgt

SEQ ID NO: 175158 - DNA, 25 bp, Saccharomyces pastorianus
ggtttcgtatgtggagtattgtttt

SEQ ID NO: 175159 - DNA, 25 bp, Saccharomyces pastorianus
ttgttttatggcactcatgtgtatt

SEQ ID NO: 175160 - DNA, 25 bp, Saccharomyces pastorianus
gtattgttttatggcactcatgtgt

SEQ ID NO: 175161 - DNA, 25 bp, Saccharomyces pastorianus
gtttcgtatgtggagtattgtttta

SEQ ID NO: 175162 - DNA, 25 bp, Saccharomyces pastorianus
attgttttatggcactcatgtgtat

SEQ ID NO: 175163 - DNA, 25 bp, Saccharomyces pastorianus
cataggtttcgtatgtggagtattg

SEQ ID NO: 175164 - DNA, 25 bp, Saccharomyces pastorianus
ggagtattgttttatggcactcatg

SEQ ID NO: 175165 - DNA, 25 bp, Saccharomyces pastorianus
agtattgttttatggcactcatgtg

SEQ ID NO: 175166 - DNA, 25 bp, Saccharomyces pastorianus
gtggagtattgttttatggcactca

SEQ ID NO: 175167 - DNA, 25 bp, Saccharomyces pastorianus
ttcataggtttcgtatgtggagtat

SEQ ID NO: 175168 - DNA, 25 bp, Saccharomyces pastorianus
catgatcacaccctatttggagaac

SEQ ID NO: 175169 - DNA, 25 bp, Saccharomyces pastorianus
gaacatttttgtgttacagtaacat

SEQ ID NO: 175170 - DNA, 25 bp, Saccharomyces pastorianus
taacattcgggaaaattgtcccaat

SEQ ID NO: 175171 - DNA, 25 bp, Saccharomyces pastorianus
tcacaccctatttggagaacatttt

SEQ ID NO: 175172 - DNA, 25 bp, Saccharomyces pastorianus
ggaaaattgtcccaatatactattg

SEQ ID NO: 175173 - DNA, 25 bp, Saccharomyces pastorianus
tgtcccaatatactattggccaaaa

SEQ ID NO: 175174 - DNA, 25 bp, Saccharomyces pastorianus
gatcacaccctatttggagaacatt

SEQ ID NO: 175175 - DNA, 25 bp, Saccharomyces pastorianus
aattgtcccaatatactattggcca

SEQ ID NO: 175176 - DNA, 25 bp, Saccharomyces pastorianus
tcccatgatcacaccctatttggag

SEQ ID NO: 175177 - DNA, 25 bp, Saccharomyces pastorianus
caccctatttggagaacatttttgt

SEQ ID NO: 175178 - DNA, 25 bp, Saccharomyces pastorianus
gtgttacagtaacattcgggaaaat

SEQ ID NO: 175179 - DNA, 25 bp, Saccharomyces pastorianus
tatgatgatctttgggattccattg

SEQ ID NO: 175180 - DNA, 25 bp, Saccharomyces pastorianus
taaccatttaaattgtatgatgatc

SEQ ID NO: 175181 - DNA, 25 bp, Saccharomyces pastorianus
aataaccatttaaattgtatgatga

SEQ ID NO: 175182 - DNA, 25 bp, Saccharomyces pastorianus
taataaccatttaaattgtatgatg

SEQ ID NO: 175183 - DNA, 25 bp, Saccharomyces pastorianus
aaccatttaaattgtatgatgatct

SEQ ID NO: 175184 - DNA, 25 bp, Saccharomyces pastorianus
atatattatactagagattctcctc

SEQ ID NO: 175185 - DNA, 25 bp, Saccharomyces pastorianus
atatatattatactagagattctcc

SEQ ID NO: 175186 - DNA, 25 bp, Saccharomyces pastorianus
ataaccatttaaattgtatgatgat

SEQ ID NO: 175187 - DNA, 25 bp, Saccharomyces pastorianus
ttaataaccatttaaattgtatgat

SEQ ID NO: 175188 - DNA, 25 bp, Saccharomyces pastorianus
tatatattatactagagattctcct

SEQ ID NO: 175189 - DNA, 25 bp, Saccharomyces pastorianus
tcacctttaataaccatttaaattg

SEQ ID NO: 175190 - DNA, 25 bp, Saccharomyces pastorianus
gcttgttattacgttaggaccccag

SEQ ID NO: 175191 - DNA, 25 bp, Saccharomyces pastorianus
tctttcttcccattagcgctaaaca

SEQ ID NO: 175192 - DNA, 25 bp, Saccharomyces pastorianus
tttgcgtctttgttcttctgcacaa

SEQ ID NO: 175193 - DNA, 25 bp, Saccharomyces pastorianus
ctttggtagaggtggcttcgtcgta

SEQ ID NO: 175194 - DNA, 25 bp, Saccharomyces pastorianus
atgggtacatgatgcccgttcacaa

SEQ ID NO: 175195 - DNA, 25 bp, Saccharomyces pastorianus
aaccgccatctttcaagtcgatttt

SEQ ID NO: 175196 - DNA, 25 bp, Saccharomyces pastorianus
ggatcctatcatttgtcattctcaa

SEQ ID NO: 175197 - DNA, 25 bp, Saccharomyces pastorianus
agtatctcgggttctggatcctatc

SEQ ID NO: 175198 - DNA, 25 bp, Saccharomyces pastorianus
attttagtcgcactcattgccttga

SEQ ID NO: 175199 - DNA, 25 bp, Saccharomyces pastorianus
ttctcaatattgcaccttctttctt

SEQ ID NO: 175200 - DNA, 25 bp, Saccharomyces pastorianus
gtatcgctatgtcatggttcacctt

SEQ ID NO: 175201 - DNA, 25 bp, Saccharomyces pastorianus
ttcctcatgaacaggtattttacat

SEQ ID NO: 175202 - DNA, 25 bp, Saccharomyces pastorianus
ctttcctcatgaacaggtattttac

SEQ ID NO: 175203 - DNA, 25 bp, Saccharomyces pastorianus
tttgcggttaagaaagtagctaggc

SEQ ID NO: 175204 - DNA, 25 bp, Saccharomyces pastorianus
gatgttgaatttgcggttaagaaag

SEQ ID NO: 175205 - DNA, 25 bp, Saccharomyces pastorianus
actttcctcatgaacaggtatttta

SEQ ID NO: 175206 - DNA, 25 bp, Saccharomyces pastorianus
cggttaagaaagtagctaggctagt

SEQ ID NO: 175207 - DNA, 25 bp, Saccharomyces pastorianus
aactttcctcatgaacaggtatttt

SEQ ID NO: 175208 - DNA, 25 bp, Saccharomyces pastorianus
tgcggttaagaaagtagctaggcta

SEQ ID NO: 175209 - DNA, 25 bp, Saccharomyces pastorianus
ttgcggttaagaaagtagctaggct

SEQ ID NO: 175210 - DNA, 25 bp, Saccharomyces pastorianus
gcggttaagaaagtagctaggctag

SEQ ID NO: 175211 - DNA, 25 bp, Saccharomyces pastorianus
cgatgttgaatttgcggttaagaaa

SEQ ID NO: 175212 - DNA, 25 bp, Saccharomyces pastorianus
aagtctggaaccaccaagatcgaag

SEQ ID NO: 175213 - DNA, 25 bp, Saccharomyces pastorianus
gaatatgagaagtctggaaccacca

SEQ ID NO: 175214 - DNA, 25 bp, Saccharomyces pastorianus
agaagtctggaaccaccaagatcga

SEQ ID NO: 175215 - DNA, 25 bp, Saccharomyces pastorianus
atgagaagtctggaaccaccaagat

SEQ ID NO: 175216 - DNA, 25 bp, Saccharomyces pastorianus
atatgagaagtctggaaccaccaag

SEQ ID NO: 175217 - DNA, 25 bp, Saccharomyces pastorianus
gaagtctggaaccaccaagatcgaa

SEQ ID NO: 175218 - DNA, 25 bp, Saccharomyces pastorianus
gagaagtctggaaccaccaagatcg

SEQ ID NO: 175219 - DNA, 25 bp, Saccharomyces pastorianus
tggaaccaccaagatcgaagaaacg

SEQ ID NO: 175220 - DNA, 25 bp, Saccharomyces pastorianus
gtctggaaccaccaagatcgaagaa

SEQ ID NO: 175221 - DNA, 25 bp, Saccharomyces pastorianus
gttcgaacgaccttaagatatgatg

SEQ ID NO: 175222 - DNA, 25 bp, Saccharomyces pastorianus
tcaaaccagttcgaacgaccttaag

SEQ ID NO: 175223 - DNA, 25 bp, Saccharomyces pastorianus
ttcaatgggcaaccagcttttctat

SEQ ID NO: 175224 - DNA, 25 bp, Saccharomyces pastorianus
ctccttcttttcaattctgtggcaa

SEQ ID NO: 175225 - DNA, 25 bp, Saccharomyces pastorianus
ttgtgaactggccttggtatcccaa

SEQ ID NO: 175226 - DNA, 25 bp, Saccharomyces pastorianus
ggtatcccaatctagcgatagggtt

SEQ ID NO: 175227 - DNA, 25 bp, Saccharomyces pastorianus
aggctctgtacttgaatctcctttt

SEQ ID NO: 175228 - DNA, 25 bp, Saccharomyces pastorianus
gatctatgcatttttgagccaatta

SEQ ID NO: 175229 - DNA, 25 bp, Saccharomyces pastorianus
gccgtctttttcctattgattggta

SEQ ID NO: 175230 - DNA, 25 bp, Saccharomyces pastorianus
aacagtcgacatctaacgcatttga

SEQ ID NO: 175231 - DNA, 25 bp, Saccharomyces pastorianus
aattcttctacagctcttcttgata

SEQ ID NO: 175232 - DNA, 25 bp, Saccharomyces pastorianus
ccccgttcatgtactatcctatatt

SEQ ID NO: 175233 - DNA, 25 bp, Saccharomyces pastorianus
atttgggtatttctctccctactca

SEQ ID NO: 175234 - DNA, 25 bp, Saccharomyces pastorianus
ggacaaacacttcaacccatagagc

SEQ ID NO: 175235 - DNA, 25 bp, Saccharomyces pastorianus
aacacttcaacccatagagcatctg

SEQ ID NO: 175236 - DNA, 25 bp, Saccharomyces pastorianus
ggctgctattcatggacaaacactt

SEQ ID NO: 175237 - DNA, 25 bp, Saccharomyces pastorianus
gctggacaagttagtaatcaacatg

SEQ ID NO: 175238 - DNA, 25 bp, Saccharomyces pastorianus
agagcatctgctagtagctggacaa

SEQ ID NO: 175239 - DNA, 25 bp, Saccharomyces pastorianus
atcaacatgtagttattttcgttaa

SEQ ID NO: 175240 - DNA, 25 bp, Saccharomyces pastorianus
tctattgtcgttgtggctgctattc

SEQ ID NO: 175241 - DNA, 25 bp, Saccharomyces pastorianus
tcgttgtggctgctattcatggaca

SEQ ID NO: 175242 - DNA, 25 bp, Saccharomyces pastorianus
cttcaacccatagagcatctgctag

SEQ ID NO: 175243 - DNA, 25 bp, Saccharomyces pastorianus
gaatggttctattgtcgttgtggct

SEQ ID NO: 175244 - DNA, 25 bp, Saccharomyces pastorianus
atctgctagtagctggacaagttag

SEQ ID NO: 175245 - DNA, 25 bp, Saccharomyces pastorianus
aagaagttgatgccgacatatctga

SEQ ID NO: 175246 - DNA, 25 bp, Saccharomyces pastorianus
aaagaagttgatgccgacatatctg

SEQ ID NO: 175247 - DNA, 25 bp, Saccharomyces pastorianus
agttgatgccgacatatctgaatac

SEQ ID NO: 175248 - DNA, 25 bp, Saccharomyces pastorianus
aaaagaagttgatgccgacatatct

SEQ ID NO: 175249 - DNA, 25 bp, Saccharomyces pastorianus
ttgatgccgacatatctgaatacaa

SEQ ID NO: 175250 - DNA, 25 bp, Saccharomyces pastorianus
tgatgccgacatatctgaatacaat

SEQ ID NO: 175251 - DNA, 25 bp, Saccharomyces pastorianus
aagttgatgccgacatatctgaata

SEQ ID NO: 175252 - DNA, 25 bp, Saccharomyces pastorianus
gttgatgccgacatatctgaataca

SEQ ID NO: 175253 - DNA, 25 bp, Saccharomyces pastorianus
agaagttgatgccgacatatctgaa

SEQ ID NO: 175254 - DNA, 25 bp, Saccharomyces pastorianus
gatgccgacatatctgaatacaata

SEQ ID NO: 175255 - DNA, 25 bp, Saccharomyces pastorianus
ttcttttcttctatactttgccatt

SEQ ID NO: 175256 - DNA, 25 bp, Saccharomyces pastorianus
cattcattaccctatcacgttatca

SEQ ID NO: 175257 - DNA, 25 bp, Saccharomyces pastorianus
tcttttcttctatactttgccattc

SEQ ID NO: 175258 - DNA, 25 bp, Saccharomyces pastorianus
cttctatactttgccattcattacc

SEQ ID NO: 175259 - DNA, 25 bp, Saccharomyces pastorianus
taccctatcacgttatcaatccttg

SEQ ID NO: 175260 - DNA, 25 bp, Saccharomyces pastorianus
cttcttttcttctatactttgccat

SEQ ID NO: 175261 - DNA, 25 bp, Saccharomyces pastorianus
cttttcttctatactttgccattca

SEQ ID NO: 175262 - DNA, 25 bp, Saccharomyces pastorianus
gataatattactctaacttcttttc

SEQ ID NO: 175263 - DNA, 25 bp, Saccharomyces pastorianus
ttttcttctatactttgccattcat

SEQ ID NO: 175264 - DNA, 25 bp, Saccharomyces pastorianus
tattactctaacttcttttcttcta

SEQ ID NO: 175265 - DNA, 25 bp, Saccharomyces pastorianus
atattactctaacttcttttcttct

SEQ ID NO: 175266 - DNA, 25 bp, Saccharomyces pastorianus
tcaggaactcgataagaagccaatt

SEQ ID NO: 175267 - DNA, 25 bp, Saccharomyces pastorianus
gacaataagcgatgcctcatacggc

SEQ ID NO: 175268 - DNA, 25 bp, Saccharomyces pastorianus
atgtacctcaactacagaatctgaa

SEQ ID NO: 175269 - DNA, 25 bp, Saccharomyces pastorianus
aagcttccttaacatgtacctcaac

SEQ ID NO: 175270 - DNA, 25 bp, Saccharomyces pastorianus
gcctcatacggcaatcaactatatt

SEQ ID NO: 175271 - DNA, 25 bp, Saccharomyces pastorianus
ctaagttacctagttcaggaactcg

SEQ ID NO: 175272 - DNA, 25 bp, Saccharomyces pastorianus
tgaaatacatgcagttagtgaagct

SEQ ID NO: 175273 - DNA, 25 bp, Saccharomyces pastorianus
aattggtgacaataagcgatgcctc

SEQ ID NO: 175274 - DNA, 25 bp, Saccharomyces pastorianus
gctataccgctattaaacaacctaa

SEQ ID NO: 175275 - DNA, 25 bp, Saccharomyces pastorianus
gccaattatcaaaggcttatttact

SEQ ID NO: 175276 - DNA, 25 bp, Saccharomyces pastorianus
attatagaccccaaattggtaacat

SEQ ID NO: 175277 - DNA, 25 bp, Saccharomyces pastorianus
gacgattccgaatcagacgagtcgg

SEQ ID NO: 175278 - DNA, 25 bp, Saccharomyces pastorianus
tcatcgttcttaattccatccgcat

SEQ ID NO: 175279 - DNA, 25 bp, Saccharomyces pastorianus
ttccacagcctcatcgttcttaatt

SEQ ID NO: 175280 - DNA, 25 bp, Saccharomyces pastorianus
gttcttaattccatccgcatcgtca

SEQ ID NO: 175281 - DNA, 25 bp, Saccharomyces pastorianus
gcatcgtcacccaagagctccaaat

SEQ ID NO: 175282 - DNA, 25 bp, Saccharomyces pastorianus
tgaaggatcctcgtcttcatcctca

SEQ ID NO: 175283 - DNA, 25 bp, Saccharomyces pastorianus
ttcaccgcctgacgattccgaatca

SEQ ID NO: 175284 - DNA, 25 bp, Saccharomyces pastorianus
agacgcatcttcaccgcctgacgat

SEQ ID NO: 175285 - DNA, 25 bp, Saccharomyces pastorianus
acagcctcatcgttcttaattccat

SEQ ID NO: 175286 - DNA, 25 bp, Saccharomyces pastorianus
agtcggagaaactgccttccacagc

SEQ ID NO: 175287 - DNA, 25 bp, Saccharomyces pastorianus
gacgagtcggagaaactgccttcca

SEQ ID NO: 175288 - DNA, 25 bp, Saccharomyces pastorianus
aatccacattctcttcatggtagcg

SEQ ID NO: 175289 - DNA, 25 bp, Saccharomyces pastorianus
cacattctcttcatggtagcgccta

SEQ ID NO: 175290 - DNA, 25 bp, Saccharomyces pastorianus
tctcttcatggtagcgcctatgctt

SEQ ID NO: 175291 - DNA, 25 bp, Saccharomyces pastorianus
atcatcatgtctctcctcaacctgc

SEQ ID NO: 175292 - DNA, 25 bp, Saccharomyces pastorianus
catcatcatgtctctcctcaacctg

SEQ ID NO: 175293 - DNA, 25 bp, Saccharomyces pastorianus
attctcttcatggtagcgcctatgc

SEQ ID NO: 175294 - DNA, 25 bp, Saccharomyces pastorianus
aacaagagacaacacctgggacatc

SEQ ID NO: 175295 - DNA, 25 bp, Saccharomyces pastorianus
atccacattctcttcatggtagcgc

SEQ ID NO: 175296 - DNA, 25 bp, Saccharomyces pastorianus
ccacattctcttcatggtagcgcct

SEQ ID NO: 175297 - DNA, 25 bp, Saccharomyces pastorianus
acattctcttcatggtagcgcctat

SEQ ID NO: 175298 - DNA, 25 bp, Saccharomyces pastorianus
gaaccatcatcatgtctctcctcaa

SEQ ID NO: 175299 - DNA, 25 bp, Saccharomyces pastorianus
caccacctaagccttcacatttaaa

SEQ ID NO: 175300 - DNA, 25 bp, Saccharomyces pastorianus
atgctgaaatcaagtggcccgattt

SEQ ID NO: 175301 - DNA, 25 bp, Saccharomyces pastorianus
acctaagccttcacatttaaagcct

SEQ ID NO: 175302 - DNA, 25 bp, Saccharomyces pastorianus
gatagataagccaacaatgctgaaa

SEQ ID NO: 175303 - DNA, 25 bp, Saccharomyces pastorianus
aatcaagtggcccgatttcaaaaga

SEQ ID NO: 175304 - DNA, 25 bp, Saccharomyces pastorianus
taagccttcacatttaaagcctaaa

SEQ ID NO: 175305 - DNA, 25 bp, Saccharomyces pastorianus
gccttcacatttaaagcctaaacct

SEQ ID NO: 175306 - DNA, 25 bp, Saccharomyces pastorianus
caatgctgaaatcaagtggcccgat

SEQ ID NO: 175307 - DNA, 25 bp, Saccharomyces pastorianus
gggagatagataagccaacaatgct

SEQ ID NO: 175308 - DNA, 25 bp, Saccharomyces pastorianus
ttcacatttaaagcctaaacctcct

SEQ ID NO: 175309 - DNA, 25 bp, Saccharomyces pastorianus
taaacctcctccaaaaccactgctc

SEQ ID NO: 175310 - DNA, 25 bp, Saccharomyces pastorianus
gaatgcaaaggaagactagtggaaa

SEQ ID NO: 175311 - DNA, 25 bp, Saccharomyces pastorianus
tctcatgaccccacaaatgacttac

SEQ ID NO: 175312 - DNA, 25 bp, Saccharomyces pastorianus
aatattgctagcagaatgcaaagga

SEQ ID NO: 175313 - DNA, 25 bp, Saccharomyces pastorianus
acaaatgacttacttacagttgtaa

SEQ ID NO: 175314 - DNA, 25 bp, Saccharomyces pastorianus
actacaatgagttgtcggatgacga

SEQ ID NO: 175315 - DNA, 25 bp, Saccharomyces pastorianus
gtttatagaattccaacggcaatac

SEQ ID NO: 175316 - DNA, 25 bp, Saccharomyces pastorianus
agcgattacagctctcatgacccca

SEQ ID NO: 175317 - DNA, 25 bp, Saccharomyces pastorianus
aaatgtttatagaattccaacggca

SEQ ID NO: 175318 - DNA, 25 bp, Saccharomyces pastorianus
tcggatgacgagagcgattacagct

SEQ ID NO: 175319 - DNA, 25 bp, Saccharomyces pastorianus
gaccccacaaatgacttacttacag

SEQ ID NO: 175320 - DNA, 25 bp, Saccharomyces pastorianus
atagaattccaacggcaatacaaga

SEQ ID NO: 175321 - DNA, 25 bp, Saccharomyces pastorianus
gctgatgtaatcttaacaagaaata

SEQ ID NO: 175322 - DNA, 25 bp, Saccharomyces pastorianus
tagtgctgatgtaatcttaacaaga

SEQ ID NO: 175323 - DNA, 25 bp, Saccharomyces pastorianus
tgctgatgtaatcttaacaagaaat

SEQ ID NO: 175324 - DNA, 25 bp, Saccharomyces pastorianus
ttagtgctgatgtaatcttaacaag

SEQ ID NO: 175325 - DNA, 25 bp, Saccharomyces pastorianus
gcgcatacctcaaaggcatatagtt

SEQ ID NO: 175326 - DNA, 25 bp, Saccharomyces pastorianus
catatagttgtagcagctctgacct

SEQ ID NO: 175327 - DNA, 25 bp, Saccharomyces pastorianus
agtgctgatgtaatcttaacaagaa

SEQ ID NO: 175328 - DNA, 25 bp, Saccharomyces pastorianus
gcatatagttgtagcagctctgacc

SEQ ID NO: 175329 - DNA, 25 bp, Saccharomyces pastorianus
gtgctgatgtaatcttaacaagaaa

SEQ ID NO: 175330 - DNA, 25 bp, Saccharomyces pastorianus
atatagttgtagcagctctgacctg

SEQ ID NO: 175331 - DNA, 25 bp, Saccharomyces pastorianus
gttagtgctgatgtaatcttaacaa

SEQ ID NO: 175332 - DNA, 25 bp, Saccharomyces pastorianus
agtttggcaggcatcatcaacagct

SEQ ID NO: 175333 - DNA, 25 bp, Saccharomyces pastorianus
tcatcaacagctgaggagcaggtat

SEQ ID NO: 175334 - DNA, 25 bp, Saccharomyces pastorianus
gagaaactggaagtttttcagcgtt

SEQ ID NO: 175335 - DNA, 25 bp, Saccharomyces pastorianus
gaggcgctcgagaaactggaagttt

SEQ ID NO: 175336 - DNA, 25 bp, Saccharomyces pastorianus
gtatgaattgagtttaggaatgcac

SEQ ID NO: 175337 - DNA, 25 bp, Saccharomyces pastorianus
atacggtcgttgtagaggcgctcga

SEQ ID NO: 175338 - DNA, 25 bp, Saccharomyces pastorianus
taaactgccgcattggacgcctttc

SEQ ID NO: 175339 - DNA, 25 bp, Saccharomyces pastorianus
tgatgttccagacggcaaaattgat

SEQ ID NO: 175340 - DNA, 25 bp, Saccharomyces pastorianus
gttccagacggcaaaattgatataa

SEQ ID NO: 175341 - DNA, 25 bp, Saccharomyces pastorianus
ggcaggcatcatcaacagctgagga

SEQ ID NO: 175342 - DNA, 25 bp, Saccharomyces pastorianus
cgatacggtcgttgtagaggcgctc

SEQ ID NO: 175343 - DNA, 25 bp, Saccharomyces pastorianus
tccattgatacggatccgccagaat

SEQ ID NO: 175344 - DNA, 25 bp, Saccharomyces pastorianus
ttgggtggtacggaggaaccatata

SEQ ID NO: 175345 - DNA, 25 bp, Saccharomyces pastorianus
gataatacaccctccattgatacgg

SEQ ID NO: 175346 - DNA, 25 bp, Saccharomyces pastorianus
cgactcctaatataatgcctgacaa

SEQ ID NO: 175347 - DNA, 25 bp, Saccharomyces pastorianus
tacgccctcaatagatgaccgttcg

SEQ ID NO: 175348 - DNA, 25 bp, Saccharomyces pastorianus
aatacaccctccattgatacggatc

SEQ ID NO: 175349 - DNA, 25 bp, Saccharomyces pastorianus
agtacgccctcaatagatgaccgtt

SEQ ID NO: 175350 - DNA, 25 bp, Saccharomyces pastorianus
actactcccatcatctccatagaaa

SEQ ID NO: 175351 - DNA, 25 bp, Saccharomyces pastorianus
attgatacggatccgccagaatatc

SEQ ID NO: 175352 - DNA, 25 bp, Saccharomyces pastorianus
ggaggaaccatatattcaacgaaat

SEQ ID NO: 175353 - DNA, 25 bp, Saccharomyces pastorianus
gatacaaatatcaaatacaggacta

SEQ ID NO: 175354 - DNA, 25 bp, Saccharomyces pastorianus
cgtgccatccagcaaatctcatttg

SEQ ID NO: 175355 - DNA, 25 bp, Saccharomyces pastorianus
gatttgtttgtcatggacgctcaga

SEQ ID NO: 175356 - DNA, 25 bp, Saccharomyces pastorianus
gcacgctatgcaagcagttttttca

SEQ ID NO: 175357 - DNA, 25 bp, Saccharomyces pastorianus
tactccattgttcttagcgtgctac

SEQ ID NO: 175358 - DNA, 25 bp, Saccharomyces pastorianus
gaattattattatctcgccccatct

SEQ ID NO: 175359 - DNA, 25 bp, Saccharomyces pastorianus
gatacattcagatgatccgtgccat

SEQ ID NO: 175360 - DNA, 25 bp, Saccharomyces pastorianus
attagagtatttgcgctctcccaag

SEQ ID NO: 175361 - DNA, 25 bp, Saccharomyces pastorianus
ccggaactggaggtgggatttcaat

SEQ ID NO: 175362 - DNA, 25 bp, Saccharomyces pastorianus
taataattggtgcaccggaactgga

SEQ ID NO: 175363 - DNA, 25 bp, Saccharomyces pastorianus
aagccaagcgcatgtactccattgt

SEQ ID NO: 175364 - DNA, 25 bp, Saccharomyces pastorianus
tgtcttcacaagatgttctgataca

SEQ ID NO: 175365 - DNA, 25 bp, Saccharomyces pastorianus
aactccatcaaacataatcactacg

SEQ ID NO: 175366 - DNA, 25 bp, Saccharomyces pastorianus
gaaaactccatcaaacataatcact

SEQ ID NO: 175367 - DNA, 25 bp, Saccharomyces pastorianus
actccatcaaacataatcactacga

SEQ ID NO: 175368 - DNA, 25 bp, Saccharomyces pastorianus
aaacataatcactacgaagaaagta

SEQ ID NO: 175369 - DNA, 25 bp, Saccharomyces pastorianus
aacataatcactacgaagaaagtat

SEQ ID NO: 175370 - DNA, 25 bp, Saccharomyces pastorianus
tcaaacataatcactacgaagaaag

SEQ ID NO: 175371 - DNA, 25 bp, Saccharomyces pastorianus
aaaactccatcaaacataatcacta

SEQ ID NO: 175372 - DNA, 25 bp, Saccharomyces pastorianus
ctccatcaaacataatcactacgaa

SEQ ID NO: 175373 - DNA, 25 bp, Saccharomyces pastorianus
caaacataatcactacgaagaaagt

SEQ ID NO: 175374 - DNA, 25 bp, Saccharomyces pastorianus
aaactccatcaaacataatcactac

SEQ ID NO: 175375 - DNA, 25 bp, Saccharomyces pastorianus
acataatcactacgaagaaagtatt

SEQ ID NO: 175376 - DNA, 25 bp, Saccharomyces pastorianus
aactccatcaaacataatcactacg

SEQ ID NO: 175377 - DNA, 25 bp, Saccharomyces pastorianus
gaaaactccatcaaacataatcact

SEQ ID NO: 175378 - DNA, 25 bp, Saccharomyces pastorianus
actccatcaaacataatcactacga

SEQ ID NO: 175379 - DNA, 25 bp, Saccharomyces pastorianus
aaacataatcactacgaagaaagta

SEQ ID NO: 175380 - DNA, 25 bp, Saccharomyces pastorianus
aacataatcactacgaagaaagtat

SEQ ID NO: 175381 - DNA, 25 bp, Saccharomyces pastorianus
tcaaacataatcactacgaagaaag

SEQ ID NO: 175382 - DNA, 25 bp, Saccharomyces pastorianus
aaaactccatcaaacataatcacta

SEQ ID NO: 175383 - DNA, 25 bp, Saccharomyces pastorianus
ctccatcaaacataatcactacgaa

SEQ ID NO: 175384 - DNA, 25 bp, Saccharomyces pastorianus
caaacataatcactacgaagaaagt

SEQ ID NO: 175385 - DNA, 25 bp, Saccharomyces pastorianus
aaactccatcaaacataatcactac

SEQ ID NO: 175386 - DNA, 25 bp, Saccharomyces pastorianus
acataatcactacgaagaaagtatt

SEQ ID NO: 175387 - DNA, 25 bp, Saccharomyces pastorianus
agtccatcattttcaatcattccaa

SEQ ID NO: 175388 - DNA, 25 bp, Saccharomyces pastorianus
gataaaagtctaaaactgcccacag

SEQ ID NO: 175389 - DNA, 25 bp, Saccharomyces pastorianus
ggatcctttctatagaacttttgaa

SEQ ID NO: 175390 - DNA, 25 bp, Saccharomyces pastorianus
tacacggttatttcttggtatagat

SEQ ID NO: 175391 - DNA, 25 bp, Saccharomyces pastorianus
agctgataacaatatgggtgtcgat

SEQ ID NO: 175392 - DNA, 25 bp, Saccharomyces pastorianus
actgcccacagttacacggttattt

SEQ ID NO: 175393 - DNA, 25 bp, Saccharomyces pastorianus
acagctgcatacatgacggaagtta

SEQ ID NO: 175394 - DNA, 25 bp, Saccharomyces pastorianus
gaaggttttatgatcctagtggaaa

SEQ ID NO: 175395 - DNA, 25 bp, Saccharomyces pastorianus
aaatttgtttggatcctttctatag

SEQ ID NO: 175396 - DNA, 25 bp, Saccharomyces pastorianus
atacatgacggaagttatctgccaa

SEQ ID NO: 175397 - DNA, 25 bp, Saccharomyces pastorianus
atccgttgatatgcttttaaagtcc

SEQ ID NO: 175398 - DNA, 25 bp, Saccharomyces pastorianus
ttaccaccacacactttaacatcag

SEQ ID NO: 175399 - DNA, 25 bp, Saccharomyces pastorianus
ccacacactttaacatcagaagaaa

SEQ ID NO: 175400 - DNA, 25 bp, Saccharomyces pastorianus
cacacactttaacatcagaagaaaa

SEQ ID NO: 175401 - DNA, 25 bp, Saccharomyces pastorianus
accaccacacactttaacatcagaa

SEQ ID NO: 175402 - DNA, 25 bp, Saccharomyces pastorianus
gtcttaccaccacacactttaacat

SEQ ID NO: 175403 - DNA, 25 bp, Saccharomyces pastorianus
ccaccacacactttaacatcagaag

SEQ ID NO: 175404 - DNA, 25 bp, Saccharomyces pastorianus
taccaccacacactttaacatcaga

SEQ ID NO: 175405 - DNA, 25 bp, Saccharomyces pastorianus
acacactttaacatcagaagaaaac

SEQ ID NO: 175406 - DNA, 25 bp, Saccharomyces pastorianus
tcttaccaccacacactttaacatc

SEQ ID NO: 175407 - DNA, 25 bp, Saccharomyces pastorianus
caccacacactttaacatcagaaga

SEQ ID NO: 175408 - DNA, 25 bp, Saccharomyces pastorianus
accacacactttaacatcagaagaa

SEQ ID NO: 175409 - DNA, 25 bp, Saccharomyces pastorianus
gcggcagaatccatacgtccaaatc

SEQ ID NO: 175410 - DNA, 25 bp, Saccharomyces pastorianus
gaaacctacatgacacgtgaggagc

SEQ ID NO: 175411 - DNA, 25 bp, Saccharomyces pastorianus
gaagattcatcgatctctgattttg

SEQ ID NO: 175412 - DNA, 25 bp, Saccharomyces pastorianus
ttatcaggtgaatctgtcgcggcag

SEQ ID NO: 175413 - DNA, 25 bp, Saccharomyces pastorianus
aaggaatgcgttattgatctctcat

SEQ ID NO: 175414 - DNA, 25 bp, Saccharomyces pastorianus
attgaatggttcgtcgtcatcgtcc

SEQ ID NO: 175415 - DNA, 25 bp, Saccharomyces pastorianus
gatgttgggacaattcgtggcagaa

SEQ ID NO: 175416 - DNA, 25 bp, Saccharomyces pastorianus
gagaaacacaaatcccttcaagcaa

SEQ ID NO: 175417 - DNA, 25 bp, Saccharomyces pastorianus
tatgcacgggcaaagtactggcgaa

SEQ ID NO: 175418 - DNA, 25 bp, Saccharomyces pastorianus
aataacgatgttctcaacccagcat

SEQ ID NO: 175419 - DNA, 25 bp, Saccharomyces pastorianus
ggcatactggacgtggaagattcat

SEQ ID NO: 175420 - DNA, 25 bp, Saccharomyces pastorianus
cacccaatcttcatggtagcgccta

SEQ ID NO: 175421 - DNA, 25 bp, Saccharomyces pastorianus
attcacccaatcttcatggtagcgc

SEQ ID NO: 175422 - DNA, 25 bp, Saccharomyces pastorianus
aattcacccaatcttcatggtagcg

SEQ ID NO: 175423 - DNA, 25 bp, Saccharomyces pastorianus
tcacccaatcttcatggtagcgcct

SEQ ID NO: 175424 - DNA, 25 bp, Saccharomyces pastorianus
aaaattcacccaatcttcatggtag

SEQ ID NO: 175425 - DNA, 25 bp, Saccharomyces pastorianus
cccaatcttcatggtagcgcctatg

SEQ ID NO: 175426 - DNA, 25 bp, Saccharomyces pastorianus
acccaatcttcatggtagcgcctat

SEQ ID NO: 175427 - DNA, 25 bp, Saccharomyces pastorianus
caaaattcacccaatcttcatggta

SEQ ID NO: 175428 - DNA, 25 bp, Saccharomyces pastorianus
caatcttcatggtagcgcctatgct

SEQ ID NO: 175429 - DNA, 25 bp, Saccharomyces pastorianus
atcttcatggtagcgcctatgcttc

SEQ ID NO: 175430 - DNA, 25 bp, Saccharomyces pastorianus
aaattcacccaatcttcatggtagc

SEQ ID NO: 175431 - DNA, 25 bp, Saccharomyces pastorianus
atggccattttgacggattttgatc

SEQ ID NO: 175432 - DNA, 25 bp, Saccharomyces pastorianus
ggaaatgttgccactaaagaccttg

SEQ ID NO: 175433 - DNA, 25 bp, Saccharomyces pastorianus
ttcatttttgttcgcgtgtgctgtt

SEQ ID NO: 175434 - DNA, 25 bp, Saccharomyces pastorianus
gagtagcgagtttgttcgaccgcat

SEQ ID NO: 175435 - DNA, 25 bp, Saccharomyces pastorianus
ttgcgctactttctcaaccttgata

SEQ ID NO: 175436 - DNA, 25 bp, Saccharomyces pastorianus
aaagaccttgattatttgcgctact

SEQ ID NO: 175437 - DNA, 25 bp, Saccharomyces pastorianus
aaggaacacgttcggcccataagcg

SEQ ID NO: 175438 - DNA, 25 bp, Saccharomyces pastorianus
ttcgaccgcattacgtgctcagaaa

SEQ ID NO: 175439 - DNA, 25 bp, Saccharomyces pastorianus
ataaggtccgatttgtttcagcaca

SEQ ID NO: 175440 - DNA, 25 bp, Saccharomyces pastorianus
gggttgaacattttactcgaagcag

SEQ ID NO: 175441 - DNA, 25 bp, Saccharomyces pastorianus
cccgccggaatcgatgtttaccata

SEQ ID NO: 175442 - DNA, 25 bp, Saccharomyces pastorianus
gccattagttggcattttgtgctta

SEQ ID NO: 175443 - DNA, 25 bp, Saccharomyces pastorianus
ttggtgggtgcctcatattggcaat

SEQ ID NO: 175444 - DNA, 25 bp, Saccharomyces pastorianus
cttattggtgggtgcctcatattgg

SEQ ID NO: 175445 - DNA, 25 bp, Saccharomyces pastorianus
attggcaatattacagagcagcttc

SEQ ID NO: 175446 - DNA, 25 bp, Saccharomyces pastorianus
gtgcttattggtgggtgcctcatat

SEQ ID NO: 175447 - DNA, 25 bp, Saccharomyces pastorianus
gagcagcttctgtttaagtaaaatc

SEQ ID NO: 175448 - DNA, 25 bp, Saccharomyces pastorianus
tgggtgcctcatattggcaatatta

SEQ ID NO: 175449 - DNA, 25 bp, Saccharomyces pastorianus
ggcaatattacagagcagcttctgt

SEQ ID NO: 175450 - DNA, 25 bp, Saccharomyces pastorianus
cattttgtgcttattggtgggtgcc

SEQ ID NO: 175451 - DNA, 25 bp, Saccharomyces pastorianus
tttgtgcttattggtgggtgcctca

SEQ ID NO: 175452 - DNA, 25 bp, Saccharomyces pastorianus
cagcttctgtttaagtaaaatccag

SEQ ID NO: 175453 - DNA, 25 bp, Saccharomyces pastorianus
atgatataggaatcctcgaaatgga

SEQ ID NO: 175454 - DNA, 25 bp, Saccharomyces pastorianus
gaatcctcgaaatggaatctatatt

SEQ ID NO: 175455 - DNA, 25 bp, Saccharomyces pastorianus
tcctcgatgatataggaatcctcga

SEQ ID NO: 175456 - DNA, 25 bp, Saccharomyces pastorianus
cctcgatgatataggaatcctcgaa

SEQ ID NO: 175457 - DNA, 25 bp, Saccharomyces pastorianus
aatcctcgaaatggaatctatattt

SEQ ID NO: 175458 - DNA, 25 bp, Saccharomyces pastorianus
cgatgatataggaatcctcgaaatg

SEQ ID NO: 175459 - DNA, 25 bp, Saccharomyces pastorianus
tgatataggaatcctcgaaatggaa

SEQ ID NO: 175460 - DNA, 25 bp, Saccharomyces pastorianus
tcgatgatataggaatcctcgaaat

SEQ ID NO: 175461 - DNA, 25 bp, Saccharomyces pastorianus
tataggaatcctcgaaatggaatct

SEQ ID NO: 175462 - DNA, 25 bp, Saccharomyces pastorianus
gatgatataggaatcctcgaaatgg

SEQ ID NO: 175463 - DNA, 25 bp, Saccharomyces pastorianus
ggaatcctcgaaatggaatctatat

SEQ ID NO: 175464 - DNA, 25 bp, Saccharomyces pastorianus
ctgaacgtgtcagcaatcaatggca

SEQ ID NO: 175465 - DNA, 25 bp, Saccharomyces pastorianus
gaacgtgtcagcaatcaatggcatc

SEQ ID NO: 175466 - DNA, 25 bp, Saccharomyces pastorianus
aactatatcctgaacgtgtcagcaa

SEQ ID NO: 175467 - DNA, 25 bp, Saccharomyces pastorianus
taagcaactatatcctgaacgtgtc

SEQ ID NO: 175468 - DNA, 25 bp, Saccharomyces pastorianus
ctgcattaagcaactatatcctgaa

SEQ ID NO: 175469 - DNA, 25 bp, Saccharomyces pastorianus
attaagcaactatatcctgaacgtg

SEQ ID NO: 175470 - DNA, 25 bp, Saccharomyces pastorianus
tatcctgaacgtgtcagcaatcaat

SEQ ID NO: 175471 - DNA, 25 bp, Saccharomyces pastorianus
gcattaagcaactatatcctgaacg

SEQ ID NO: 175472 - DNA, 25 bp, Saccharomyces pastorianus
aagcaactatatcctgaacgtgtca

SEQ ID NO: 175473 - DNA, 25 bp, Saccharomyces pastorianus
agcaactatatcctgaacgtgtcag

SEQ ID NO: 175474 - DNA, 25 bp, Saccharomyces pastorianus
tatatcctgaacgtgtcagcaatca

SEQ ID NO: 175475 - DNA, 25 bp, Saccharomyces pastorianus
cacctttatctcatggtagcgcctg

SEQ ID NO: 175476 - DNA, 25 bp, Saccharomyces pastorianus
tatctaattacccacctttatctca

SEQ ID NO: 175477 - DNA, 25 bp, Saccharomyces pastorianus
tttatctcatggtagcgcctgtgct

SEQ ID NO: 175478 - DNA, 25 bp, Saccharomyces pastorianus
aattacccacctttatctcatggta

SEQ ID NO: 175479 - DNA, 25 bp, Saccharomyces pastorianus
tacccacctttatctcatggtagcg

SEQ ID NO: 175480 - DNA, 25 bp, Saccharomyces pastorianus
atctaattacccacctttatctcat

SEQ ID NO: 175481 - DNA, 25 bp, Saccharomyces pastorianus
ccacctttatctcatggtagcgcct

SEQ ID NO: 175482 - DNA, 25 bp, Saccharomyces pastorianus
cccacctttatctcatggtagcgcc

SEQ ID NO: 175483 - DNA, 25 bp, Saccharomyces pastorianus
acccacctttatctcatggtagcgc

SEQ ID NO: 175484 - DNA, 25 bp, Saccharomyces pastorianus
tcatggtagcgcctgtgcttgtact

SEQ ID NO: 175485 - DNA, 25 bp, Saccharomyces pastorianus
taattacccacctttatctcatggt

SEQ ID NO: 175486 - DNA, 25 bp, Saccharomyces pastorianus
agttcggctaatgaccgggaatcat

SEQ ID NO: 175487 - DNA, 25 bp, Saccharomyces pastorianus
tatccaaaatcgtcgcagaaagcgt

SEQ ID NO: 175488 - DNA, 25 bp, Saccharomyces pastorianus
aagagctcaggtttcctacgatgcc

SEQ ID NO: 175489 - DNA, 25 bp, Saccharomyces pastorianus
agagcagctgacctattggatagac

SEQ ID NO: 175490 - DNA, 25 bp, Saccharomyces pastorianus
gatgatagctttactgccgagatat

SEQ ID NO: 175491 - DNA, 25 bp, Saccharomyces pastorianus
atgtatcgcagtagaaaccgaccaa

SEQ ID NO: 175492 - DNA, 25 bp, Saccharomyces pastorianus
agggaccaaattctgccttgactca

SEQ ID NO: 175493 - DNA, 25 bp, Saccharomyces pastorianus
gacacgccagtcagtttaagttcgg

SEQ ID NO: 175494 - DNA, 25 bp, Saccharomyces pastorianus
gaaattagtccctgctgatagtgat

SEQ ID NO: 175495 - DNA, 25 bp, Saccharomyces pastorianus
gaaactagccacatttctgacacgc

SEQ ID NO: 175496 - DNA, 25 bp, Saccharomyces pastorianus
attctgccttgactcaatttttaag

SEQ ID NO: 175497 - DNA, 25 bp, Saccharomyces pastorianus
gataaagcgttatatggtctcaagc

SEQ ID NO: 175498 - DNA, 25 bp, Saccharomyces pastorianus
atatggtctcaagcagagtcctaag

SEQ ID NO: 175499 - DNA, 25 bp, Saccharomyces pastorianus
caggactataccaatccaaggataa

SEQ ID NO: 175500 - DNA, 25 bp, Saccharomyces pastorianus
gataacacttatactccaggactat

SEQ ID NO: 175501 - DNA, 25 bp, Saccharomyces pastorianus
ggaacgaccatcttagacgatattt

SEQ ID NO: 175502 - DNA, 25 bp, Saccharomyces pastorianus
gagtcctaaggaatggaacgaccat

SEQ ID NO: 175503 - DNA, 25 bp, Saccharomyces pastorianus
gacgatatttaaacagtattggact

SEQ ID NO: 175504 - DNA, 25 bp, Saccharomyces pastorianus
agacattaaccatgcattcctatat

SEQ ID NO: 175505 - DNA, 25 bp, Saccharomyces pastorianus
atccacatgacaggagatgcgttgt

SEQ ID NO: 175506 - DNA, 25 bp, Saccharomyces pastorianus
gaaaacattagacattaaccatgca

SEQ ID NO: 175507 - DNA, 25 bp, Saccharomyces pastorianus
acaggagatgcgttgttaaactaga

SEQ ID NO: 175508 - DNA, 25 bp, Saccharomyces pastorianus
aagctatgtgcagccacctaatgct

SEQ ID NO: 175509 - DNA, 25 bp, Saccharomyces pastorianus
gaatgtctacgaggacggttgttct

SEQ ID NO: 175510 - DNA, 25 bp, Saccharomyces pastorianus
cagcaacttatgtgccagtacggtt

SEQ ID NO: 175511 - DNA, 25 bp, Saccharomyces pastorianus
ggacggttgttctaataagaccata

SEQ ID NO: 175512 - DNA, 25 bp, Saccharomyces pastorianus
caaggtggtagctctatttcggcca

SEQ ID NO: 175513 - DNA, 25 bp, Saccharomyces pastorianus
agtcctcgtcatcatctgggcgcat

SEQ ID NO: 175514 - DNA, 25 bp, Saccharomyces pastorianus
gtggtagtactgagtcctcgtcatc

SEQ ID NO: 175515 - DNA, 25 bp, Saccharomyces pastorianus
taatgctccttcataccaatccgta

SEQ ID NO: 175516 - DNA, 25 bp, Saccharomyces pastorianus
ttttgcaacaaagcggtggtagtac

SEQ ID NO: 175517 - DNA, 25 bp, Saccharomyces pastorianus
ggcgcatccccgtagcacaaacaag

SEQ ID NO: 175518 - DNA, 25 bp, Saccharomyces pastorianus
taagaccatagcaaacgccacccaa

SEQ ID NO: 175519 - DNA, 25 bp, Saccharomyces pastorianus
accaaattttcatggtagcgcctat

SEQ ID NO: 175520 - DNA, 25 bp, Saccharomyces pastorianus
attcaccaaattttcatggtagcgc

SEQ ID NO: 175521 - DNA, 25 bp, Saccharomyces pastorianus
tcaccaaattttcatggtagcgcct

SEQ ID NO: 175522 - DNA, 25 bp, Saccharomyces pastorianus
aaaattcaccaaattttcatggtag

SEQ ID NO: 175523 - DNA, 25 bp, Saccharomyces pastorianus
aaattttcatggtagcgcctatgct

SEQ ID NO: 175524 - DNA, 25 bp, Saccharomyces pastorianus
attttcatggtagcgcctatgcttc

SEQ ID NO: 175525 - DNA, 25 bp, Saccharomyces pastorianus
caccaaattttcatggtagcgccta

SEQ ID NO: 175526 - DNA, 25 bp, Saccharomyces pastorianus
caaaattcaccaaattttcatggta

SEQ ID NO: 175527 - DNA, 25 bp, Saccharomyces pastorianus
ttcaccaaattttcatggtagcgcc

SEQ ID NO: 175528 - DNA, 25 bp, Saccharomyces pastorianus
caaattttcatggtagcgcctatgc

SEQ ID NO: 175529 - DNA, 25 bp, Saccharomyces pastorianus
aaattcaccaaattttcatggtagc

SEQ ID NO: 175530 - DNA, 25 bp, Saccharomyces pastorianus
taatatgcatcttaccagtcggctc

SEQ ID NO: 175531 - DNA, 25 bp, Saccharomyces pastorianus
aaaactggtcaccaagggtcctgct

SEQ ID NO: 175532 - DNA, 25 bp, Saccharomyces pastorianus
atcctcatcagaacctattatctcc

SEQ ID NO: 175533 - DNA, 25 bp, Saccharomyces pastorianus
ttctaccattaccaaacttaccatc

SEQ ID NO: 175534 - DNA, 25 bp, Saccharomyces pastorianus
attatctcctctattgttgactttg

SEQ ID NO: 175535 - DNA, 25 bp, Saccharomyces pastorianus
attaagatggacttccttatgccgc

SEQ ID NO: 175536 - DNA, 25 bp, Saccharomyces pastorianus
ttaccagtcggctccggattaagat

SEQ ID NO: 175537 - DNA, 25 bp, Saccharomyces pastorianus
accatcaagtgctagtacatctgtt

SEQ ID NO: 175538 - DNA, 25 bp, Saccharomyces pastorianus
gatggctctattacacattgttgtg

SEQ ID NO: 175539 - DNA, 25 bp, Saccharomyces pastorianus
ggaaaccacttcaactttgatttct

SEQ ID NO: 175540 - DNA, 25 bp, Saccharomyces pastorianus
acgatgtctactgaagctgctgtct

SEQ ID NO: 175541 - DNA, 25 bp, Saccharomyces pastorianus
gtgaagcggcgagtccaattctcct

SEQ ID NO: 175542 - DNA, 25 bp, Saccharomyces pastorianus
gtccaattctcctcaaaaattccag

SEQ ID NO: 175543 - DNA, 25 bp, Saccharomyces pastorianus
aagcggcgagtccaattctcctcaa

SEQ ID NO: 175544 - DNA, 25 bp, Saccharomyces pastorianus
aagcgaactacattgttcattctcc

SEQ ID NO: 175545 - DNA, 25 bp, Saccharomyces pastorianus
ggccttgaaagcgaactacattgtt

SEQ ID NO: 175546 - DNA, 25 bp, Saccharomyces pastorianus
ggcgagtccaattctcctcaaaaat

SEQ ID NO: 175547 - DNA, 25 bp, Saccharomyces pastorianus
aattctcctcaaaaattccagataa

SEQ ID NO: 175548 - DNA, 25 bp, Saccharomyces pastorianus
gcgagtccaattctcctcaaaaatt

SEQ ID NO: 175549 - DNA, 25 bp, Saccharomyces pastorianus
ctccgaatgcggaaaacgtagtgga

SEQ ID NO: 175550 - DNA, 25 bp, Saccharomyces pastorianus
tcctcaaaaattccagataacgcaa

SEQ ID NO: 175551 - DNA, 25 bp, Saccharomyces pastorianus
aggtgaagcggcgagtccaattctc

SEQ ID NO: 175552 - DNA, 25 bp, Saccharomyces pastorianus
caagcacctttttggcagggtcaca

SEQ ID NO: 175553 - DNA, 25 bp, Saccharomyces pastorianus
atgatcttctagtgcgtctttttga

SEQ ID NO: 175554 - DNA, 25 bp, Saccharomyces pastorianus
aggtcgctgtctaacgttgcatgca

SEQ ID NO: 175555 - DNA, 25 bp, Saccharomyces pastorianus
aagaacgttatcacactcgtccact

SEQ ID NO: 175556 - DNA, 25 bp, Saccharomyces pastorianus
gttgcatgcagaactactaccatca

SEQ ID NO: 175557 - DNA, 25 bp, Saccharomyces pastorianus
gaagggatcatcacacctcagggtc

SEQ ID NO: 175558 - DNA, 25 bp, Saccharomyces pastorianus
gcatatcacagtacaaggccttttt

SEQ ID NO: 175559 - DNA, 25 bp, Saccharomyces pastorianus
ctcagggtccaatcatagccaattt

SEQ ID NO: 175560 - DNA, 25 bp, Saccharomyces pastorianus
tatagtcgtactctcagtgaggcca

SEQ ID NO: 175561 - DNA, 25 bp, Saccharomyces pastorianus
gaacatagcgactcatttggcccaa

SEQ ID NO: 175562 - DNA, 25 bp, Saccharomyces pastorianus
agtggaattgtttccggcacttcaa

SEQ ID NO: 175563 - DNA, 25 bp, Saccharomyces pastorianus
agcatccaaggacaacgccatttat

SEQ ID NO: 175564 - DNA, 25 bp, Saccharomyces pastorianus
gacagttaccttcttgattttagct

SEQ ID NO: 175565 - DNA, 25 bp, Saccharomyces pastorianus
gagcctgccgctattaatcacagta

SEQ ID NO: 175566 - DNA, 25 bp, Saccharomyces pastorianus
attcgctcaaatgctgtcttaggac

SEQ ID NO: 175567 - DNA, 25 bp, Saccharomyces pastorianus
gaagacgtcactgcattattggagc

SEQ ID NO: 175568 - DNA, 25 bp, Saccharomyces pastorianus
atttttcaccgagttagcatccaag

SEQ ID NO: 175569 - DNA, 25 bp, Saccharomyces pastorianus
tttatcgataaggaacggcaccaaa

SEQ ID NO: 175570 - DNA, 25 bp, Saccharomyces pastorianus
atattgtgaaaagagcctgccgcta

SEQ ID NO: 175571 - DNA, 25 bp, Saccharomyces pastorianus
gattatttgtatcgccgtttgcatg

SEQ ID NO: 175572 - DNA, 25 bp, Saccharomyces pastorianus
ggccaaatgcctagacaatccagac

SEQ ID NO: 175573 - DNA, 25 bp, Saccharomyces pastorianus
gggatgatattgcattcgtactaaa

SEQ ID NO: 175574 - DNA, 25 bp, Saccharomyces pastorianus
atttggacggtgtgaccatggacga

SEQ ID NO: 175575 - DNA, 25 bp, Saccharomyces pastorianus
aaacgacgaccaggtggacgacata

SEQ ID NO: 175576 - DNA, 25 bp, Saccharomyces pastorianus
ggacgacatactgcagtctgccaag

SEQ ID NO: 175577 - DNA, 25 bp, Saccharomyces pastorianus
gaggaaagttgcgaaggactccaag

SEQ ID NO: 175578 - DNA, 25 bp, Saccharomyces pastorianus
gtcaacttgaagaaacaactgcgcc

SEQ ID NO: 175579 - DNA, 25 bp, Saccharomyces pastorianus
aaggagctcatgaaaagacgtggga

SEQ ID NO: 175580 - DNA, 25 bp, Saccharomyces pastorianus
acaactgcgccagcgcttgaaggga

SEQ ID NO: 175581 - DNA, 25 bp, Saccharomyces pastorianus
ggagtctgccaagagtttcattcta

SEQ ID NO: 175582 - DNA, 25 bp, Saccharomyces pastorianus
gaagtactaccttgtgttgagcagt

SEQ ID NO: 175583 - DNA, 25 bp, Saccharomyces pastorianus
gagggaaatttgtggcccagttcta

SEQ ID NO: 175584 - DNA, 25 bp, Saccharomyces pastorianus
ttgtggtggacgacccagagtctaa

SEQ ID NO: 175585 - DNA, 25 bp, Saccharomyces pastorianus
cctgtgcttcggttacttctaagga

SEQ ID NO: 175586 - DNA, 25 bp, Saccharomyces pastorianus
gcctgtgcttcggttacttctaagg

SEQ ID NO: 175587 - DNA, 25 bp, Saccharomyces pastorianus
agtccacacaaatcagatcgttaga

SEQ ID NO: 175588 - DNA, 25 bp, Saccharomyces pastorianus
tgcttcggttacttctaaggaagtc

SEQ ID NO: 175589 - DNA, 25 bp, Saccharomyces pastorianus
agcgcctgtgcttcggttacttcta

SEQ ID NO: 175590 - DNA, 25 bp, Saccharomyces pastorianus
gcgcctgtgcttcggttacttctaa

SEQ ID NO: 175591 - DNA, 25 bp, Saccharomyces pastorianus
cacacaaatcagatcgttagacgtt

SEQ ID NO: 175592 - DNA, 25 bp, Saccharomyces pastorianus
ctgtgcttcggttacttctaaggaa

SEQ ID NO: 175593 - DNA, 25 bp, Saccharomyces pastorianus
cgcctgtgcttcggttacttctaag

SEQ ID NO: 175594 - DNA, 25 bp, Saccharomyces pastorianus
gtgcttcggttacttctaaggaagt

SEQ ID NO: 175595 - DNA, 25 bp, Saccharomyces pastorianus
tgtgcttcggttacttctaaggaag

SEQ ID NO: 175596 - DNA, 25 bp, Saccharomyces pastorianus
gagctttcaatgaggaaccgcccgc

SEQ ID NO: 175597 - DNA, 25 bp, Saccharomyces pastorianus
atggctctcaattgaaccgtctatt

SEQ ID NO: 175598 - DNA, 25 bp, Saccharomyces pastorianus
agttcacgtcttctgaaaccactgt

SEQ ID NO: 175599 - DNA, 25 bp, Saccharomyces pastorianus
ggacatattcagacagacttttgga

SEQ ID NO: 175600 - DNA, 25 bp, Saccharomyces pastorianus
ggaaccgcccgcaaatgtgaatgga

SEQ ID NO: 175601 - DNA, 25 bp, Saccharomyces pastorianus
gtttcggttccttatacaatcctga

SEQ ID NO: 175602 - DNA, 25 bp, Saccharomyces pastorianus
atcgtttgttggatcatggctctca

SEQ ID NO: 175603 - DNA, 25 bp, Saccharomyces pastorianus
gccaagttcagttcagtttcggttc

SEQ ID NO: 175604 - DNA, 25 bp, Saccharomyces pastorianus
gagtctcaggttgtaatgccttctg

SEQ ID NO: 175605 - DNA, 25 bp, Saccharomyces pastorianus
tattcgaatcccaggagctttcaat

SEQ ID NO: 175606 - DNA, 25 bp, Saccharomyces pastorianus
aaagtacgcgttcgaggtcagtcct

SEQ ID NO: 175607 - DNA, 25 bp, Saccharomyces pastorianus
acacttgcacaaactctagaggatc

SEQ ID NO: 175608 - DNA, 25 bp, Saccharomyces pastorianus
acttgcacaaactctagaggatccc

SEQ ID NO: 175609 - DNA, 25 bp, Saccharomyces pastorianus
aggaaggaagcttagcgcaccaggt

SEQ ID NO: 175610 - DNA, 25 bp, Saccharomyces pastorianus
cacttgcacaaactctagaggatcc

SEQ ID NO: 175611 - DNA, 25 bp, Saccharomyces pastorianus
gaaggaagcttagcgcaccaggtca

SEQ ID NO: 175612 - DNA, 25 bp, Saccharomyces pastorianus
aacacacttgcacaaactctagagg

SEQ ID NO: 175613 - DNA, 25 bp, Saccharomyces pastorianus
acacacttgcacaaactctagagga

SEQ ID NO: 175614 - DNA, 25 bp, Saccharomyces pastorianus
attcttggcttggaaatcaaatacc

SEQ ID NO: 175615 - DNA, 25 bp, Saccharomyces pastorianus
cacacttgcacaaactctagaggat

SEQ ID NO: 175616 - DNA, 25 bp, Saccharomyces pastorianus
ggaagcttagcgcaccaggtcaacc

SEQ ID NO: 175617 - DNA, 25 bp, Saccharomyces pastorianus
caaaaggaaggaagcttagcgcacc

SEQ ID NO: 175618 - DNA, 25 bp, Saccharomyces pastorianus
ttctaaagtctcactactggccgca

SEQ ID NO: 175619 - DNA, 25 bp, Saccharomyces pastorianus
aaagtctcactactggccgcatctg

SEQ ID NO: 175620 - DNA, 25 bp, Saccharomyces pastorianus
actggccgcatctgcatctgtcgct

SEQ ID NO: 175621 - DNA, 25 bp, Saccharomyces pastorianus
gaaattttctaaagtctcactactg

SEQ ID NO: 175622 - DNA, 25 bp, Saccharomyces pastorianus
atctgtcgctttatctgccccagtt

SEQ ID NO: 175623 - DNA, 25 bp, Saccharomyces pastorianus
ctgccccagttgctgtgactgtcac

SEQ ID NO: 175624 - DNA, 25 bp, Saccharomyces pastorianus
ttttctaaagtctcactactggccg

SEQ ID NO: 175625 - DNA, 25 bp, Saccharomyces pastorianus
tttatctgccccagttgctgtgact

SEQ ID NO: 175626 - DNA, 25 bp, Saccharomyces pastorianus
actactggccgcatctgcatctgtc

SEQ ID NO: 175627 - DNA, 25 bp, Saccharomyces pastorianus
taaagtctcactactggccgcatct

SEQ ID NO: 175628 - DNA, 25 bp, Saccharomyces pastorianus
tatctgccccagttgctgtgactgt

SEQ ID NO: 175629 - DNA, 25 bp, Saccharomyces pastorianus
gaaggcgattcatatgtagtgccag

SEQ ID NO: 175630 - DNA, 25 bp, Saccharomyces pastorianus
catatgtagtgccaggtaatgttcc

SEQ ID NO: 175631 - DNA, 25 bp, Saccharomyces pastorianus
tagtgccaggtaatgttcctcacag

SEQ ID NO: 175632 - DNA, 25 bp, Saccharomyces pastorianus
tgttcctcacagtcctggtcggtgt

SEQ ID NO: 175633 - DNA, 25 bp, Saccharomyces pastorianus
cgattcatatgtagtgccaggtaat

SEQ ID NO: 175634 - DNA, 25 bp, Saccharomyces pastorianus
atcattatctatgaaggcgattcat

SEQ ID NO: 175635 - DNA, 25 bp, Saccharomyces pastorianus
agtgccaggtaatgttcctcacagt

SEQ ID NO: 175636 - DNA, 25 bp, Saccharomyces pastorianus
tatgtagtgccaggtaatgttcctc

SEQ ID NO: 175637 - DNA, 25 bp, Saccharomyces pastorianus
gcgattcatatgtagtgccaggtaa

SEQ ID NO: 175638 - DNA, 25 bp, Saccharomyces pastorianus
tgtagtgccaggtaatgttcctcac

SEQ ID NO: 175639 - DNA, 25 bp, Saccharomyces pastorianus
gtagtgccaggtaatgttcctcaca

SEQ ID NO: 175640 - DNA, 25 bp, Saccharomyces pastorianus
agccaacagcattatctgatgttac

SEQ ID NO: 175641 - DNA, 25 bp, Saccharomyces pastorianus
gggtgagaattcttcatctgtacac

SEQ ID NO: 175642 - DNA, 25 bp, Saccharomyces pastorianus
gcagaaattccagccaaatgagact

SEQ ID NO: 175643 - DNA, 25 bp, Saccharomyces pastorianus
gcaatttttatctactgcttggcta

SEQ ID NO: 175644 - DNA, 25 bp, Saccharomyces pastorianus
agagtaccgttgatgaagctcccaa

SEQ ID NO: 175645 - DNA, 25 bp, Saccharomyces pastorianus
gatgttacattggacgcaattgcaa

SEQ ID NO: 175646 - DNA, 25 bp, Saccharomyces pastorianus
gaggaaacttctactaacgatacag

SEQ ID NO: 175647 - DNA, 25 bp, Saccharomyces pastorianus
cgatggcgacgtgaattctttgggt

SEQ ID NO: 175648 - DNA, 25 bp, Saccharomyces pastorianus
aatctcggaaaacaggacgcatcag

SEQ ID NO: 175649 - DNA, 25 bp, Saccharomyces pastorianus
gaatcgagtccagatgcagcggtga

SEQ ID NO: 175650 - DNA, 25 bp, Saccharomyces pastorianus
ctgcttggctaatgacgccagcgat

SEQ ID NO: 175651 - DNA, 25 bp, Saccharomyces pastorianus
acgtatactacatcgagaccaagat

SEQ ID NO: 175652 - DNA, 25 bp, Saccharomyces pastorianus
tatactacatcgagaccaagatgaa

SEQ ID NO: 175653 - DNA, 25 bp, Saccharomyces pastorianus
gtatactacatcgagaccaagatga

SEQ ID NO: 175654 - DNA, 25 bp, Saccharomyces pastorianus
ctacatcgagaccaagatgaacatt

SEQ ID NO: 175655 - DNA, 25 bp, Saccharomyces pastorianus
atactacatcgagaccaagatgaac

SEQ ID NO: 175656 - DNA, 25 bp, Saccharomyces pastorianus
acatcgagaccaagatgaacattgc

SEQ ID NO: 175657 - DNA, 25 bp, Saccharomyces pastorianus
tacatcgagaccaagatgaacattg

SEQ ID NO: 175658 - DNA, 25 bp, Saccharomyces pastorianus
cgtatactacatcgagaccaagatg

SEQ ID NO: 175659 - DNA, 25 bp, Saccharomyces pastorianus
agaccaagatgaacattgctgatgt

SEQ ID NO: 175660 - DNA, 25 bp, Saccharomyces pastorianus
atcgagaccaagatgaacattgctg

SEQ ID NO: 175661 - DNA, 25 bp, Saccharomyces pastorianus
tactacatcgagaccaagatgaaca

SEQ ID NO: 175662 - DNA, 25 bp, Saccharomyces pastorianus
tcatcgatgaccgtatattcagaaa

SEQ ID NO: 175663 - DNA, 25 bp, Saccharomyces pastorianus
cctttctcttcaactgatcatcgat

SEQ ID NO: 175664 - DNA, 25 bp, Saccharomyces pastorianus
aaacgacttcaacggtgtgatatcg

SEQ ID NO: 175665 - DNA, 25 bp, Saccharomyces pastorianus
ttcaactgatcatcgatgaccgtat

SEQ ID NO: 175666 - DNA, 25 bp, Saccharomyces pastorianus
tttctcttcaactgatcatcgatga

SEQ ID NO: 175667 - DNA, 25 bp, Saccharomyces pastorianus
ggcctttctcttcaactgatcatcg

SEQ ID NO: 175668 - DNA, 25 bp, Saccharomyces pastorianus
gaccgtatattcagaaacgacttca

SEQ ID NO: 175669 - DNA, 25 bp, Saccharomyces pastorianus
gatgaccgtatattcagaaacgact

SEQ ID NO: 175670 - DNA, 25 bp, Saccharomyces pastorianus
actgatcatcgatgaccgtatattc

SEQ ID NO: 175671 - DNA, 25 bp, Saccharomyces pastorianus
cagaaacgacttcaacggtgtgata

SEQ ID NO: 175672 - DNA, 25 bp, Saccharomyces pastorianus
ctcttcaactgatcatcgatgaccg

SEQ ID NO: 175673 - DNA, 25 bp, Saccharomyces pastorianus
agagttttattcaatcaccgacgga

SEQ ID NO: 175674 - DNA, 25 bp, Saccharomyces pastorianus
tgtaatacaattccgctcaagcata

SEQ ID NO: 175675 - DNA, 25 bp, Saccharomyces pastorianus
tcatccaggtaatccggaagcgatt

SEQ ID NO: 175676 - DNA, 25 bp, Saccharomyces pastorianus
tacagccccaagacagtacgagaaa

SEQ ID NO: 175677 - DNA, 25 bp, Saccharomyces pastorianus
tcaagcatatcgactccgggcagga

SEQ ID NO: 175678 - DNA, 25 bp, Saccharomyces pastorianus
gaaatatcaatcttgacctacagcc

SEQ ID NO: 175679 - DNA, 25 bp, Saccharomyces pastorianus
gaaacaggctaccaacgaggacgaa

SEQ ID NO: 175680 - DNA, 25 bp, Saccharomyces pastorianus
ttttcaggttcaggatcctcgggat

SEQ ID NO: 175681 - DNA, 25 bp, Saccharomyces pastorianus
ttctcatcgaaattgtatccaggtg

SEQ ID NO: 175682 - DNA, 25 bp, Saccharomyces pastorianus
ggctgctgcaagacgacgggttact

SEQ ID NO: 175683 - DNA, 25 bp, Saccharomyces pastorianus
gacgctgactttggtctcatatctg

SEQ ID NO: 175684 - DNA, 25 bp, Saccharomyces pastorianus
ttaaaccggagctatctgcaaccca

SEQ ID NO: 175685 - DNA, 25 bp, Saccharomyces pastorianus
ttgaaggcttaaaccggagctatct

SEQ ID NO: 175686 - DNA, 25 bp, Saccharomyces pastorianus
attgaaggcttaaaccggagctatc

SEQ ID NO: 175687 - DNA, 25 bp, Saccharomyces pastorianus
cttaaaccggagctatctgcaaccc

SEQ ID NO: 175688 - DNA, 25 bp, Saccharomyces pastorianus
ccagctattgaaggcttaaaccgga

SEQ ID NO: 175689 - DNA, 25 bp, Saccharomyces pastorianus
tgaaggcttaaaccggagctatctg

SEQ ID NO: 175690 - DNA, 25 bp, Saccharomyces pastorianus
ggcttaaaccggagctatctgcaac

SEQ ID NO: 175691 - DNA, 25 bp, Saccharomyces pastorianus
aggcttaaaccggagctatctgcaa

SEQ ID NO: 175692 - DNA, 25 bp, Saccharomyces pastorianus
tattgaaggcttaaaccggagctat

SEQ ID NO: 175693 - DNA, 25 bp, Saccharomyces pastorianus
gctattgaaggcttaaaccggagct

SEQ ID NO: 175694 - DNA, 25 bp, Saccharomyces pastorianus
gcttaaaccggagctatctgcaacc

SEQ ID NO: 175695 - DNA, 25 bp, Saccharomyces pastorianus
tatgtcagaagttccagcgtctcac

SEQ ID NO: 175696 - DNA, 25 bp, Saccharomyces pastorianus
gctattgacttctacacgcaggtgg

SEQ ID NO: 175697 - DNA, 25 bp, Saccharomyces pastorianus
aattccccgcgttcaaatcaacaga

SEQ ID NO: 175698 - DNA, 25 bp, Saccharomyces pastorianus
gtcccttacgttgccttgaagactg

SEQ ID NO: 175699 - DNA, 25 bp, Saccharomyces pastorianus
aattcatccattttgtcagcgtccc

SEQ ID NO: 175700 - DNA, 25 bp, Saccharomyces pastorianus
gtaacttatcttcttcccatgatgg

SEQ ID NO: 175701 - DNA, 25 bp, Saccharomyces pastorianus
agctgtgcagcattcgacatcggaa

SEQ ID NO: 175702 - DNA, 25 bp, Saccharomyces pastorianus
gacatcggaatctgagctggactat

SEQ ID NO: 175703 - DNA, 25 bp, Saccharomyces pastorianus
aacttcactgccacggtcttgaatg

SEQ ID NO: 175704 - DNA, 25 bp, Saccharomyces pastorianus
ggatttgctcaggacgaatgcgttt

SEQ ID NO: 175705 - DNA, 25 bp, Saccharomyces pastorianus
gatcgtgtttgtttggtaattccca

SEQ ID NO: 175706 - DNA, 25 bp, Saccharomyces pastorianus
acgtctgatgaacccgtacctgaat

SEQ ID NO: 175707 - DNA, 25 bp, Saccharomyces pastorianus
ttcaccaacgtctgatgaacccgta

SEQ ID NO: 175708 - DNA, 25 bp, Saccharomyces pastorianus
gaaaagcagatactagtattcgact

SEQ ID NO: 175709 - DNA, 25 bp, Saccharomyces pastorianus
tctagtcagtaatccacacgaaatt

SEQ ID NO: 175710 - DNA, 25 bp, Saccharomyces pastorianus
gttctaatccaaactctagccttca

SEQ ID NO: 175711 - DNA, 25 bp, Saccharomyces pastorianus
tagccttcattcaccaacgtctgat

SEQ ID NO: 175712 - DNA, 25 bp, Saccharomyces pastorianus
taatccaaactctagccttcattca

SEQ ID NO: 175713 - DNA, 25 bp, Saccharomyces pastorianus
cattggcactaagttctaatccaaa

SEQ ID NO: 175714 - DNA, 25 bp, Saccharomyces pastorianus
tattcgactagaaggtgatgagtta

SEQ ID NO: 175715 - DNA, 25 bp, Saccharomyces pastorianus
aaagattctctagtcagtaatccac

SEQ ID NO: 175716 - DNA, 25 bp, Saccharomyces pastorianus
attctctagtcagtaatccacacga

SEQ ID NO: 175717 - DNA, 25 bp, Saccharomyces pastorianus
ttaccctcaaatatctggctggacc

SEQ ID NO: 175718 - DNA, 25 bp, Saccharomyces pastorianus
tagctacttacgactttaccctcaa

SEQ ID NO: 175719 - DNA, 25 bp, Saccharomyces pastorianus
acgactttaccctcaaatatctggc

SEQ ID NO: 175720 - DNA, 25 bp, Saccharomyces pastorianus
tcaaatatctggctggacccaagaa

SEQ ID NO: 175721 - DNA, 25 bp, Saccharomyces pastorianus
agaacacctagctacttacgacttt

SEQ ID NO: 175722 - DNA, 25 bp, Saccharomyces pastorianus
actttaccctcaaatatctggctgg

SEQ ID NO: 175723 - DNA, 25 bp, Saccharomyces pastorianus
gaatgtcgcagatgcaatataccgt

SEQ ID NO: 175724 - DNA, 25 bp, Saccharomyces pastorianus
gctacttacgactttaccctcaaat

SEQ ID NO: 175725 - DNA, 25 bp, Saccharomyces pastorianus
gaacacctagctacttacgacttta

SEQ ID NO: 175726 - DNA, 25 bp, Saccharomyces pastorianus
gcccagtgctggctagaacacctag

SEQ ID NO: 175727 - DNA, 25 bp, Saccharomyces pastorianus
tctggctggacccaagaatgtcgca

SEQ ID NO: 175728 - DNA, 25 bp, Saccharomyces pastorianus
tcaagtgcatactttgaaattcaat

SEQ ID NO: 175729 - DNA, 25 bp, Saccharomyces pastorianus
cacgttgtttcaagtgcatactttg

SEQ ID NO: 175730 - DNA, 25 bp, Saccharomyces pastorianus
gtctacacgttgtttcaagtgcata

SEQ ID NO: 175731 - DNA, 25 bp, Saccharomyces pastorianus
caagtgcatactttgaaattcaata

SEQ ID NO: 175732 - DNA, 25 bp, Saccharomyces pastorianus
tggtctacacgttgtttcaagtgca

SEQ ID NO: 175733 - DNA, 25 bp, Saccharomyces pastorianus
atggtctacacgttgtttcaagtgc

SEQ ID NO: 175734 - DNA, 25 bp, Saccharomyces pastorianus
ctacacgttgtttcaagtgcatact

SEQ ID NO: 175735 - DNA, 25 bp, Saccharomyces pastorianus
acacgttgtttcaagtgcatacttt

SEQ ID NO: 175736 - DNA, 25 bp, Saccharomyces pastorianus
gtttcaagtgcatactttgaaattc

SEQ ID NO: 175737 - DNA, 25 bp, Saccharomyces pastorianus
agtgcatactttgaaattcaataga

SEQ ID NO: 175738 - DNA, 25 bp, Saccharomyces pastorianus
ggtctacacgttgtttcaagtgcat

SEQ ID NO: 175739 - DNA, 25 bp, Saccharomyces pastorianus
aaccaaccatattacaagtcacaaa

SEQ ID NO: 175740 - DNA, 25 bp, Saccharomyces pastorianus
gtaaccaaccatattacaagtcaca

SEQ ID NO: 175741 - DNA, 25 bp, Saccharomyces pastorianus
tggtaaccaaccatattacaagtca

SEQ ID NO: 175742 - DNA, 25 bp, Saccharomyces pastorianus
atggtaaccaaccatattacaagtc

SEQ ID NO: 175743 - DNA, 25 bp, Saccharomyces pastorianus
tatggtaaccaaccatattacaagt

SEQ ID NO: 175744 - DNA, 25 bp, Saccharomyces pastorianus
accaaccatattacaagtcacaaat

SEQ ID NO: 175745 - DNA, 25 bp, Saccharomyces pastorianus
ggtaaccaaccatattacaagtcac

SEQ ID NO: 175746 - DNA, 25 bp, Saccharomyces pastorianus
taaccaaccatattacaagtcacaa

SEQ ID NO: 175747 - DNA, 25 bp, Saccharomyces pastorianus
taagccttctggatccacagctacg

SEQ ID NO: 175748 - DNA, 25 bp, Saccharomyces pastorianus
aattacaggctcgaaggatctaaca

SEQ ID NO: 175749 - DNA, 25 bp, Saccharomyces pastorianus
tctggctcccctaagccttctggat

SEQ ID NO: 175750 - DNA, 25 bp, Saccharomyces pastorianus
aggctcgaaggatctaacatctata

SEQ ID NO: 175751 - DNA, 25 bp, Saccharomyces pastorianus
aggatctaacatctatagtttcttc

SEQ ID NO: 175752 - DNA, 25 bp, Saccharomyces pastorianus
tacaggctcgaaggatctaacatct

SEQ ID NO: 175753 - DNA, 25 bp, Saccharomyces pastorianus
agccttctggatccacagctacggt

SEQ ID NO: 175754 - DNA, 25 bp, Saccharomyces pastorianus
tcctctaacgtgactagctctgccg

SEQ ID NO: 175755 - DNA, 25 bp, Saccharomyces pastorianus
gcatcctctaacgtgactagctctg

SEQ ID NO: 175756 - DNA, 25 bp, Saccharomyces pastorianus
gccgcatcctctaacgtgactagct

SEQ ID NO: 175757 - DNA, 25 bp, Saccharomyces pastorianus
aacgtgactagctctgccgccacat

SEQ ID NO: 175758 - DNA, 25 bp, Saccharomyces pastorianus
gaggtagaccaggatgatgagtttc

SEQ ID NO: 175759 - DNA, 25 bp, Saccharomyces pastorianus
ggatgatgagtttctaaatgactac

SEQ ID NO: 175760 - DNA, 25 bp, Saccharomyces pastorianus
agaccaggatgatgagtttctaaat

SEQ ID NO: 175761 - DNA, 25 bp, Saccharomyces pastorianus
ccaggatgatgagtttctaaatgac

SEQ ID NO: 175762 - DNA, 25 bp, Saccharomyces pastorianus
gatgatgagtttctaaatgactacc

SEQ ID NO: 175763 - DNA, 25 bp, Saccharomyces pastorianus
tgatgagtttctaaatgactaccag

SEQ ID NO: 175764 - DNA, 25 bp, Saccharomyces pastorianus
gaccaggatgatgagtttctaaatg

SEQ ID NO: 175765 - DNA, 25 bp, Saccharomyces pastorianus
tagaccaggatgatgagtttctaaa

SEQ ID NO: 175766 - DNA, 25 bp, Saccharomyces pastorianus
gtagaccaggatgatgagtttctaa

SEQ ID NO: 175767 - DNA, 25 bp, Saccharomyces pastorianus
ggtagaccaggatgatgagtttcta

SEQ ID NO: 175768 - DNA, 25 bp, Saccharomyces pastorianus
aggtagaccaggatgatgagtttct

SEQ ID NO: 175769 - DNA, 25 bp, Saccharomyces pastorianus
cgaatgctacaccagaatcatcaat

SEQ ID NO: 175770 - DNA, 25 bp, Saccharomyces pastorianus
acaattggtaggaagtagcgaagcg

SEQ ID NO: 175771 - DNA, 25 bp, Saccharomyces pastorianus
ggaaaaaccgaatgctacaccagaa

SEQ ID NO: 175772 - DNA, 25 bp, Saccharomyces pastorianus
aatgctacaccagaatcatcaatta

SEQ ID NO: 175773 - DNA, 25 bp, Saccharomyces pastorianus
aatgaagagttagtacaattggtag

SEQ ID NO: 175774 - DNA, 25 bp, Saccharomyces pastorianus
gtagcgaagcggaaaaaccgaatgc

SEQ ID NO: 175775 - DNA, 25 bp, Saccharomyces pastorianus
ccgaatgctacaccagaatcatcaa

SEQ ID NO: 175776 - DNA, 25 bp, Saccharomyces pastorianus
gcggaaaaaccgaatgctacaccag

SEQ ID NO: 175777 - DNA, 25 bp, Saccharomyces pastorianus
gaatgctacaccagaatcatcaatt

SEQ ID NO: 175778 - DNA, 25 bp, Saccharomyces pastorianus
gcgaagcggaaaaaccgaatgctac

SEQ ID NO: 175779 - DNA, 25 bp, Saccharomyces pastorianus
atgctacaccagaatcatcaattat

SEQ ID NO: 175780 - DNA, 25 bp, Saccharomyces pastorianus
ggatcatccacgtaagtggcaccgt

SEQ ID NO: 175781 - DNA, 25 bp, Saccharomyces pastorianus
agagccgcggtcattttgttagcat

SEQ ID NO: 175782 - DNA, 25 bp, Saccharomyces pastorianus
tgcaacagccactttatttttaaga

SEQ ID NO: 175783 - DNA, 25 bp, Saccharomyces pastorianus
ttgttagcatctcttctcaactttg

SEQ ID NO: 175784 - DNA, 25 bp, Saccharomyces pastorianus
ttgcaacagccactttatttttaag

SEQ ID NO: 175785 - DNA, 25 bp, Saccharomyces pastorianus
gtaagtggcaccgtaagctcgtcaa

SEQ ID NO: 175786 - DNA, 25 bp, Saccharomyces pastorianus
gcacaatttcgcgatatttaacagg

SEQ ID NO: 175787 - DNA, 25 bp, Saccharomyces pastorianus
attgcaacagccactttatttttaa

SEQ ID NO: 175788 - DNA, 25 bp, Saccharomyces pastorianus
cgtaagctcgtcaattgcaacagcc

SEQ ID NO: 175789 - DNA, 25 bp, Saccharomyces pastorianus
aactttggcagcacaatttcgcgat

SEQ ID NO: 175790 - DNA, 25 bp, Saccharomyces pastorianus
gccactttatttttaagagccgcgg

SEQ ID NO: 175791 - DNA, 25 bp, Saccharomyces pastorianus
cttttgcaagaacttaacagacctg

SEQ ID NO: 175792 - DNA, 25 bp, Saccharomyces pastorianus
ccttttgcaagaacttaacagacct

SEQ ID NO: 175793 - DNA, 25 bp, Saccharomyces pastorianus
aatacacgcagtcagtgaagctata

SEQ ID NO: 175794 - DNA, 25 bp, Saccharomyces pastorianus
tcctactcaacggaaaagtgattgg

SEQ ID NO: 175795 - DNA, 25 bp, Saccharomyces pastorianus
accgctattgaataacctcagtcac

SEQ ID NO: 175796 - DNA, 25 bp, Saccharomyces pastorianus
ttggtaacattttcctactcaacgg

SEQ ID NO: 175797 - DNA, 25 bp, Saccharomyces pastorianus
gcagtcagtgaagctataccgctat

SEQ ID NO: 175798 - DNA, 25 bp, Saccharomyces pastorianus
gctataccgctattgaataacctca

SEQ ID NO: 175799 - DNA, 25 bp, Saccharomyces pastorianus
gaaagaaacttagagctccaggtca

SEQ ID NO: 175800 - DNA, 25 bp, Saccharomyces pastorianus
ttttgcaagaacttaacagacctgc

SEQ ID NO: 175801 - DNA, 25 bp, Saccharomyces pastorianus
tttgcaagaacttaacagacctgca

SEQ ID NO: 175802 - DNA, 25 bp, Saccharomyces pastorianus
cgaaaccacagaattactaaacatt

SEQ ID NO: 175803 - DNA, 25 bp, Saccharomyces pastorianus
tttgatggatgacatgtctgatatc

SEQ ID NO: 175804 - DNA, 25 bp, Saccharomyces pastorianus
taatcacgaggatggctttatcgaa

SEQ ID NO: 175805 - DNA, 25 bp, Saccharomyces pastorianus
gatgatgatacgctagatggtgatt

SEQ ID NO: 175806 - DNA, 25 bp, Saccharomyces pastorianus
acgctagatggtgatttgatggatg

SEQ ID NO: 175807 - DNA, 25 bp, Saccharomyces pastorianus
gagatggtgttattgaagccaagat

SEQ ID NO: 175808 - DNA, 25 bp, Saccharomyces pastorianus
gatcctcagcaagtatttgatgaaa

SEQ ID NO: 175809 - DNA, 25 bp, Saccharomyces pastorianus
gaaagaatcaaatttgccaaccaat

SEQ ID NO: 175810 - DNA, 25 bp, Saccharomyces pastorianus
atgatagtgaagatcctcagcaagt

SEQ ID NO: 175811 - DNA, 25 bp, Saccharomyces pastorianus
tgaagccaagattaatcacgaggat

SEQ ID NO: 175812 - DNA, 25 bp, Saccharomyces pastorianus
aagggctattagagatggtgttatt

SEQ ID NO: 175813 - DNA, 25 bp, Saccharomyces pastorianus
caaacagaagttcacatggataaca

SEQ ID NO: 175814 - DNA, 25 bp, Saccharomyces pastorianus
cacatggataacaaacgaaataatt

SEQ ID NO: 175815 - DNA, 25 bp, Saccharomyces pastorianus
agaagttcacatggataacaaacga

SEQ ID NO: 175816 - DNA, 25 bp, Saccharomyces pastorianus
agttcacatggataacaaacgaaat

SEQ ID NO: 175817 - DNA, 25 bp, Saccharomyces pastorianus
cagaagttcacatggataacaaacg

SEQ ID NO: 175818 - DNA, 25 bp, Saccharomyces pastorianus
aagttcacatggataacaaacgaaa

SEQ ID NO: 175819 - DNA, 25 bp, Saccharomyces pastorianus
gttcacatggataacaaacgaaata

SEQ ID NO: 175820 - DNA, 25 bp, Saccharomyces pastorianus
aaacagaagttcacatggataacaa

SEQ ID NO: 175821 - DNA, 25 bp, Saccharomyces pastorianus
gaagttcacatggataacaaacgaa

SEQ ID NO: 175822 - DNA, 25 bp, Saccharomyces pastorianus
aacagaagttcacatggataacaaa

SEQ ID NO: 175823 - DNA, 25 bp, Saccharomyces pastorianus
acagaagttcacatggataacaaac

SEQ ID NO: 175824 - DNA, 25 bp, Saccharomyces pastorianus
gctcaaatcgaagctaatgctaaat

SEQ ID NO: 175825 - DNA, 25 bp, Saccharomyces pastorianus
acagaagaactagctcaaatcgaag

SEQ ID NO: 175826 - DNA, 25 bp, Saccharomyces pastorianus
gaagctaatgctaaatatccatcac

SEQ ID NO: 175827 - DNA, 25 bp, Saccharomyces pastorianus
ttagactacgtcttcgctaacacag

SEQ ID NO: 175828 - DNA, 25 bp, Saccharomyces pastorianus
ttgttcaccacagaagaactagctc

SEQ ID NO: 175829 - DNA, 25 bp, Saccharomyces pastorianus
ccagtgataatctagaaggtaattt

SEQ ID NO: 175830 - DNA, 25 bp, Saccharomyces pastorianus
tgctaaatatccatcacccagtgat

SEQ ID NO: 175831 - DNA, 25 bp, Saccharomyces pastorianus
ggtaatttagactacgtcttcgcta

SEQ ID NO: 175832 - DNA, 25 bp, Saccharomyces pastorianus
gtcttcgctaacacagaagaatctg

SEQ ID NO: 175833 - DNA, 25 bp, Saccharomyces pastorianus
catcacccagtgataatctagaagg

SEQ ID NO: 175834 - DNA, 25 bp, Saccharomyces pastorianus
agactacgtcttcgctaacacagaa

SEQ ID NO: 175835 - DNA, 25 bp, Saccharomyces pastorianus
gattgttcttatttggatacctgtc

SEQ ID NO: 175836 - DNA, 25 bp, Saccharomyces pastorianus
gtgactattcgcatgcatctctatt

SEQ ID NO: 175837 - DNA, 25 bp, Saccharomyces pastorianus
gggacgttaacgtcagcaaccaggg

SEQ ID NO: 175838 - DNA, 25 bp, Saccharomyces pastorianus
tagactgcttggagttctgaactgg

SEQ ID NO: 175839 - DNA, 25 bp, Saccharomyces pastorianus
atggtccaaaatatccgcatgtcag

SEQ ID NO: 175840 - DNA, 25 bp, Saccharomyces pastorianus
taccacgtgaacaactgagcaatcg

SEQ ID NO: 175841 - DNA, 25 bp, Saccharomyces pastorianus
atatattccgtcatgcttgcaagag

SEQ ID NO: 175842 - DNA, 25 bp, Saccharomyces pastorianus
acctcggtgtacattgtcaataaca

SEQ ID NO: 175843 - DNA, 25 bp, Saccharomyces pastorianus
gcatgtcaggaaaaccacccaggat

SEQ ID NO: 175844 - DNA, 25 bp, Saccharomyces pastorianus
aaaccatcatcttttcagcttgcta

SEQ ID NO: 175845 - DNA, 25 bp, Saccharomyces pastorianus
agaccaactgctgggtagactgctt

SEQ ID NO: 175846 - DNA, 25 bp, Saccharomyces pastorianus
gaatttcttactataatcagaagtt

SEQ ID NO: 175847 - DNA, 25 bp, Saccharomyces pastorianus
atttcttactataatcagaagttca

SEQ ID NO: 175848 - DNA, 25 bp, Saccharomyces pastorianus
tcagaagttcattagtctcaccaaa

SEQ ID NO: 175849 - DNA, 25 bp, Saccharomyces pastorianus
cagaagttcattagtctcaccaaaa

SEQ ID NO: 175850 - DNA, 25 bp, Saccharomyces pastorianus
atcagaagttcattagtctcaccaa

SEQ ID NO: 175851 - DNA, 25 bp, Saccharomyces pastorianus
aatttcttactataatcagaagttc

SEQ ID NO: 175852 - DNA, 25 bp, Saccharomyces pastorianus
tcttactataatcagaagttcatta

SEQ ID NO: 175853 - DNA, 25 bp, Saccharomyces pastorianus
cgaatttcttactataatcagaagt

SEQ ID NO: 175854 - DNA, 25 bp, Saccharomyces pastorianus
gaagttcattagtctcaccaaaaaa

SEQ ID NO: 175855 - DNA, 25 bp, Saccharomyces pastorianus
tttcttactataatcagaagttcat

SEQ ID NO: 175856 - DNA, 25 bp, Saccharomyces pastorianus
ttcttactataatcagaagttcatt

SEQ ID NO: 175857 - DNA, 25 bp, Saccharomyces pastorianus
tacgaattttactttacaaactgca

SEQ ID NO: 175858 - DNA, 25 bp, Saccharomyces pastorianus
aaactggtgtccagtgggccctgcg

SEQ ID NO: 175859 - DNA, 25 bp, Saccharomyces pastorianus
gatacccatgtaaactggtgtccag

SEQ ID NO: 175860 - DNA, 25 bp, Saccharomyces pastorianus
tcaaataatggtgccttttttacga

SEQ ID NO: 175861 - DNA, 25 bp, Saccharomyces pastorianus
tggcaacggcaacggatacccatgt

SEQ ID NO: 175862 - DNA, 25 bp, Saccharomyces pastorianus
gccgaccaccgctattagtcaggac

SEQ ID NO: 175863 - DNA, 25 bp, Saccharomyces pastorianus
aaatcgtcgaatcaggatactggat

SEQ ID NO: 175864 - DNA, 25 bp, Saccharomyces pastorianus
ataatagcagcaccgctggcaacgg

SEQ ID NO: 175865 - DNA, 25 bp, Saccharomyces pastorianus
ggccctgcgcttcatcaaataatgg

SEQ ID NO: 175866 - DNA, 25 bp, Saccharomyces pastorianus
gatactggatttagctctcaacacc

SEQ ID NO: 175867 - DNA, 25 bp, Saccharomyces pastorianus
agctctcaacaccaacatccaaatg

SEQ ID NO: 175868 - DNA, 25 bp, Saccharomyces pastorianus
aaaggctctgattttggattcgaag

SEQ ID NO: 175869 - DNA, 25 bp, Saccharomyces pastorianus
ccatgctgtggtgaaactactgatt

SEQ ID NO: 175870 - DNA, 25 bp, Saccharomyces pastorianus
gaatgttctttctcttgactgtgaa

SEQ ID NO: 175871 - DNA, 25 bp, Saccharomyces pastorianus
aagaaccatcagtatccatgctgtg

SEQ ID NO: 175872 - DNA, 25 bp, Saccharomyces pastorianus
gcaagacgttttttcaccatgtgtt

SEQ ID NO: 175873 - DNA, 25 bp, Saccharomyces pastorianus
gactctatgtaggtatcaccctttg

SEQ ID NO: 175874 - DNA, 25 bp, Saccharomyces pastorianus
agtacgcaactgtatgcaccttgtt

SEQ ID NO: 175875 - DNA, 25 bp, Saccharomyces pastorianus
ctactgattccgtttcttttctaag

SEQ ID NO: 175876 - DNA, 25 bp, Saccharomyces pastorianus
gtatgcaccttgtttgcgttgcagc

SEQ ID NO: 175877 - DNA, 25 bp, Saccharomyces pastorianus
tggattttttcaccggcaagacact

SEQ ID NO: 175878 - DNA, 25 bp, Saccharomyces pastorianus
ggtaatgcaaactctatcactacaa

SEQ ID NO: 175879 - DNA, 25 bp, Saccharomyces pastorianus
gaaagtcctgatataatgaacatta

SEQ ID NO: 175880 - DNA, 25 bp, Saccharomyces pastorianus
gtaagattatcagagacggtttcga

SEQ ID NO: 175881 - DNA, 25 bp, Saccharomyces pastorianus
ggacacaacttgtaagaatactgat

SEQ ID NO: 175882 - DNA, 25 bp, Saccharomyces pastorianus
gagacggtttcgatgaaagtcctga

SEQ ID NO: 175883 - DNA, 25 bp, Saccharomyces pastorianus
gaacattaacacagttgacatcttt

SEQ ID NO: 175884 - DNA, 25 bp, Saccharomyces pastorianus
gttgacatctttagaatcattcgtg

SEQ ID NO: 175885 - DNA, 25 bp, Saccharomyces pastorianus
aaggtgttggtggacacaacttgta

SEQ ID NO: 175886 - DNA, 25 bp, Saccharomyces pastorianus
gcttttttggcagagatgtgagatt

SEQ ID NO: 175887 - DNA, 25 bp, Saccharomyces pastorianus
actgatctattaatgaaggaacttc

SEQ ID NO: 175888 - DNA, 25 bp, Saccharomyces pastorianus
aatacacaagcttttttggcagaga

SEQ ID NO: 175889 - DNA, 25 bp, Saccharomyces pastorianus
ggtttcgatgaaagtcctgatataa

SEQ ID NO: 175890 - DNA, 25 bp, Saccharomyces pastorianus
ctccatggcccatctctcactaaat

SEQ ID NO: 175891 - DNA, 25 bp, Saccharomyces pastorianus
actccactccatggcccatctctca

SEQ ID NO: 175892 - DNA, 25 bp, Saccharomyces pastorianus
actctcacactccactccatggccc

SEQ ID NO: 175893 - DNA, 25 bp, Saccharomyces pastorianus
tctcacactccactccatggcccat

SEQ ID NO: 175894 - DNA, 25 bp, Saccharomyces pastorianus
atggcatatgcacacggatgctaca

SEQ ID NO: 175895 - DNA, 25 bp, Saccharomyces pastorianus
cactccactccatggcccatctctc

SEQ ID NO: 175896 - DNA, 25 bp, Saccharomyces pastorianus
cacactccactccatggcccatctc

SEQ ID NO: 175897 - DNA, 25 bp, Saccharomyces pastorianus
ctactctcacactccactccatggc

SEQ ID NO: 175898 - DNA, 25 bp, Saccharomyces pastorianus
ctctcacactccactccatggccca

SEQ ID NO: 175899 - DNA, 25 bp, Saccharomyces pastorianus
acactccactccatggcccatctct

SEQ ID NO: 175900 - DNA, 25 bp, Saccharomyces pastorianus
tcacactccactccatggcccatct

SEQ ID NO: 175901 - DNA, 25 bp, Saccharomyces pastorianus
aaaatcataacaacactcaagaaac

SEQ ID NO: 175902 - DNA, 25 bp, Saccharomyces pastorianus
agaaaatcataacaacactcaagaa

SEQ ID NO: 175903 - DNA, 25 bp, Saccharomyces pastorianus
aaatcataacaacactcaagaaaca

SEQ ID NO: 175904 - DNA, 25 bp, Saccharomyces pastorianus
gaaaatcataacaacactcaagaaa

SEQ ID NO: 175905 - DNA, 25 bp, Saccharomyces pastorianus
acaacactcaagaaacaatacgata

SEQ ID NO: 175906 - DNA, 25 bp, Saccharomyces pastorianus
ataacaacactcaagaaacaatacg

SEQ ID NO: 175907 - DNA, 25 bp, Saccharomyces pastorianus
aacaacactcaagaaacaatacgat

SEQ ID NO: 175908 - DNA, 25 bp, Saccharomyces pastorianus
atcataacaacactcaagaaacaat

SEQ ID NO: 175909 - DNA, 25 bp, Saccharomyces pastorianus
aacactcaagaaacaatacgataca

SEQ ID NO: 175910 - DNA, 25 bp, Saccharomyces pastorianus
aatcataacaacactcaagaaacaa

SEQ ID NO: 175911 - DNA, 25 bp, Saccharomyces pastorianus
acactcaagaaacaatacgatacaa

SEQ ID NO: 175912 - DNA, 25 bp, Saccharomyces pastorianus
ctcgatgtcttccaagtattctttg

SEQ ID NO: 175913 - DNA, 25 bp, Saccharomyces pastorianus
tatggctcgatgtcttccaagtatt

SEQ ID NO: 175914 - DNA, 25 bp, Saccharomyces pastorianus
tgtcttccaagtattctttgtattc

SEQ ID NO: 175915 - DNA, 25 bp, Saccharomyces pastorianus
tggctcgatgtcttccaagtattct

SEQ ID NO: 175916 - DNA, 25 bp, Saccharomyces pastorianus
cgatgtcttccaagtattctttgta

SEQ ID NO: 175917 - DNA, 25 bp, Saccharomyces pastorianus
gatgtcttccaagtattctttgtat

SEQ ID NO: 175918 - DNA, 25 bp, Saccharomyces pastorianus
atatggctcgatgtcttccaagtat

SEQ ID NO: 175919 - DNA, 25 bp, Saccharomyces pastorianus
gatatggctcgatgtcttccaagta

SEQ ID NO: 175920 - DNA, 25 bp, Saccharomyces pastorianus
tgatatggctcgatgtcttccaagt

SEQ ID NO: 175921 - DNA, 25 bp, Saccharomyces pastorianus
atgatatggctcgatgtcttccaag

SEQ ID NO: 175922 - DNA, 25 bp, Saccharomyces pastorianus
atggctcgatgtcttccaagtattc

SEQ ID NO: 175923 - DNA, 25 bp, Saccharomyces pastorianus
gacactcgtctaccttcactgcacg

SEQ ID NO: 175924 - DNA, 25 bp, Saccharomyces pastorianus
actcgtctaccttcactgcacgaaa

SEQ ID NO: 175925 - DNA, 25 bp, Saccharomyces pastorianus
acactcgtctaccttcactgcacga

SEQ ID NO: 175926 - DNA, 25 bp, Saccharomyces pastorianus
tcgtctaccttcactgcacgaaacc

SEQ ID NO: 175927 - DNA, 25 bp, Saccharomyces pastorianus
ctcgtctaccttcactgcacgaaac

SEQ ID NO: 175928 - DNA, 25 bp, Saccharomyces pastorianus
agacactcgtctaccttcactgcac

SEQ ID NO: 175929 - DNA, 25 bp, Saccharomyces pastorianus
tctaccttcactgcacgaaaccaaa

SEQ ID NO: 175930 - DNA, 25 bp, Saccharomyces pastorianus
tagacactcgtctaccttcactgca

SEQ ID NO: 175931 - DNA, 25 bp, Saccharomyces pastorianus
ctaccttcactgcacgaaaccaaaa

SEQ ID NO: 175932 - DNA, 25 bp, Saccharomyces pastorianus
gtctaccttcactgcacgaaaccaa

SEQ ID NO: 175933 - DNA, 25 bp, Saccharomyces pastorianus
cctccttggcactagcgttggtact

SEQ ID NO: 175934 - DNA, 25 bp, Saccharomyces pastorianus
tgctggagttggtgcttgcagtggt

SEQ ID NO: 175935 - DNA, 25 bp, Saccharomyces pastorianus
attagtgctggagttggtgcttgca

SEQ ID NO: 175936 - DNA, 25 bp, Saccharomyces pastorianus
atctttattggcgtcctccttggca

SEQ ID NO: 175937 - DNA, 25 bp, Saccharomyces pastorianus
tggcactagcgttggtactttcagt

SEQ ID NO: 175938 - DNA, 25 bp, Saccharomyces pastorianus
cattagtgctggagttggtgcttgc

SEQ ID NO: 175939 - DNA, 25 bp, Saccharomyces pastorianus
gtcctccttggcactagcgttggta

SEQ ID NO: 175940 - DNA, 25 bp, Saccharomyces pastorianus
ttgccatctttattggcgtcctcct

SEQ ID NO: 175941 - DNA, 25 bp, Saccharomyces pastorianus
tctttattggcgtcctccttggcac

SEQ ID NO: 175942 - DNA, 25 bp, Saccharomyces pastorianus
gccatctttattggcgtcctccttg

SEQ ID NO: 175943 - DNA, 25 bp, Saccharomyces pastorianus
attgccatctttattggcgtcctcc

SEQ ID NO: 175944 - DNA, 25 bp, Saccharomyces pastorianus
gatttgatctactatactacattaa

SEQ ID NO: 175945 - DNA, 25 bp, Saccharomyces pastorianus
gcaaatgttaataggactagcatca

SEQ ID NO: 175946 - DNA, 25 bp, Saccharomyces pastorianus
aagttacctaaagtgaatgtgccct

SEQ ID NO: 175947 - DNA, 25 bp, Saccharomyces pastorianus
aaccaggactctatataaacaaaga

SEQ ID NO: 175948 - DNA, 25 bp, Saccharomyces pastorianus
gatgactacaattcgaaggtacaca

SEQ ID NO: 175949 - DNA, 25 bp, Saccharomyces pastorianus
agaaaattagtgcaccaggtcaacc

SEQ ID NO: 175950 - DNA, 25 bp, Saccharomyces pastorianus
ttcgaaggtacacaaaatgcaaatg

SEQ ID NO: 175951 - DNA, 25 bp, Saccharomyces pastorianus
gtgaatgtgcccttaaatccaaaag

SEQ ID NO: 175952 - DNA, 25 bp, Saccharomyces pastorianus
gaactgaaactagacgaagatgact

SEQ ID NO: 175953 - DNA, 25 bp, Saccharomyces pastorianus
gtcgggtacaagtttagatttgatc

SEQ ID NO: 175954 - DNA, 25 bp, Saccharomyces pastorianus
ggactagcatcatatgtcgggtaca

SEQ ID NO: 175955 - DNA, 25 bp, Saccharomyces pastorianus
gtcaggctcttaccagcttaactac

SEQ ID NO: 175956 - DNA, 25 bp, Saccharomyces pastorianus
ctcggtcaggctcttaccagcttaa

SEQ ID NO: 175957 - DNA, 25 bp, Saccharomyces pastorianus
atggtcacccactacactactcggt

SEQ ID NO: 175958 - DNA, 25 bp, Saccharomyces pastorianus
tcaggctcttaccagcttaactaca

SEQ ID NO: 175959 - DNA, 25 bp, Saccharomyces pastorianus
tcggtcaggctcttaccagcttaac

SEQ ID NO: 175960 - DNA, 25 bp, Saccharomyces pastorianus
tactcggtcaggctcttaccagctt

SEQ ID NO: 175961 - DNA, 25 bp, Saccharomyces pastorianus
cactacactactcggtcaggctctt

SEQ ID NO: 175962 - DNA, 25 bp, Saccharomyces pastorianus
ggctcttaccagcttaactacagtt

SEQ ID NO: 175963 - DNA, 25 bp, Saccharomyces pastorianus
ggtcaggctcttaccagcttaacta

SEQ ID NO: 175964 - DNA, 25 bp, Saccharomyces pastorianus
actcggtcaggctcttaccagctta

SEQ ID NO: 175965 - DNA, 25 bp, Saccharomyces pastorianus
acactactcggtcaggctcttacca

SEQ ID NO: 175966 - DNA, 25 bp, Saccharomyces pastorianus
atttgcggttaagaaagtagctagg

SEQ ID NO: 175967 - DNA, 25 bp, Saccharomyces pastorianus
ggttaagaaagtagctaggctagta

SEQ ID NO: 175968 - DNA, 25 bp, Saccharomyces pastorianus
tttgcggttaagaaagtagctaggc

SEQ ID NO: 175969 - DNA, 25 bp, Saccharomyces pastorianus
gttgaatttgcggttaagaaagtag

SEQ ID NO: 175970 - DNA, 25 bp, Saccharomyces pastorianus
gatgttgaatttgcggttaagaaag

SEQ ID NO: 175971 - DNA, 25 bp, Saccharomyces pastorianus
cggttaagaaagtagctaggctagt

SEQ ID NO: 175972 - DNA, 25 bp, Saccharomyces pastorianus
tgcggttaagaaagtagctaggcta

SEQ ID NO: 175973 - DNA, 25 bp, Saccharomyces pastorianus
tgttgaatttgcggttaagaaagta

SEQ ID NO: 175974 - DNA, 25 bp, Saccharomyces pastorianus
ttgcggttaagaaagtagctaggct

SEQ ID NO: 175975 - DNA, 25 bp, Saccharomyces pastorianus
gcggttaagaaagtagctaggctag

SEQ ID NO: 175976 - DNA, 25 bp, Saccharomyces pastorianus
cgatgttgaatttgcggttaagaaa

SEQ ID NO: 175977 - DNA, 25 bp, Saccharomyces pastorianus
tgatgctttagctagtaactctgcg

SEQ ID NO: 175978 - DNA, 25 bp, Saccharomyces pastorianus
atcagttctctgtatgtcatcgcgc

SEQ ID NO: 175979 - DNA, 25 bp, Saccharomyces pastorianus
aattcgatgactgccacgtttactg

SEQ ID NO: 175980 - DNA, 25 bp, Saccharomyces pastorianus
atcagggttttcactctaccaggaa

SEQ ID NO: 175981 - DNA, 25 bp, Saccharomyces pastorianus
actggtttttggtagctctttcagc

SEQ ID NO: 175982 - DNA, 25 bp, Saccharomyces pastorianus
actgcttgcttcgttgttttgctca

SEQ ID NO: 175983 - DNA, 25 bp, Saccharomyces pastorianus
tcgacgatcttagtaccagcggcat

SEQ ID NO: 175984 - DNA, 25 bp, Saccharomyces pastorianus
gctttccctggatagttttctcgag

SEQ ID NO: 175985 - DNA, 25 bp, Saccharomyces pastorianus
ttagcgatttgcataccgggataga

SEQ ID NO: 175986 - DNA, 25 bp, Saccharomyces pastorianus
tattcgttgtgcgacaagcctggat

SEQ ID NO: 175987 - DNA, 25 bp, Saccharomyces pastorianus
gaagctgtaactgatcctcggcttt

SEQ ID NO: 175988 - DNA, 25 bp, Saccharomyces pastorianus
gcttcgcaaacgcttgtcagatcag

SEQ ID NO: 175989 - DNA, 25 bp, Saccharomyces pastorianus
ccatgcaacacccaattctgaaata

SEQ ID NO: 175990 - DNA, 25 bp, Saccharomyces pastorianus
tacaccatgcaacacccaattctga

SEQ ID NO: 175991 - DNA, 25 bp, Saccharomyces pastorianus
aaacgcttgtcagatcagcccatta

SEQ ID NO: 175992 - DNA, 25 bp, Saccharomyces pastorianus
aggagcttcgcaaacgcttgtcaga

SEQ ID NO: 175993 - DNA, 25 bp, Saccharomyces pastorianus
gtcagatcagcccattatttacacc

SEQ ID NO: 175994 - DNA, 25 bp, Saccharomyces pastorianus
cagcccattatttacaccatgcaac

SEQ ID NO: 175995 - DNA, 25 bp, Saccharomyces pastorianus
acgcttgtcagatcagcccattatt

SEQ ID NO: 175996 - DNA, 25 bp, Saccharomyces pastorianus
ttatttacaccatgcaacacccaat

SEQ ID NO: 175997 - DNA, 25 bp, Saccharomyces pastorianus
tgattcaggagcttcgcaaacgctt

SEQ ID NO: 175998 - DNA, 25 bp, Saccharomyces pastorianus
gatcagcccattatttacaccatgc

SEQ ID NO: 175999 - DNA, 25 bp, Saccharomyces pastorianus
gtcttttcgagagcgcaggcgcaag

SEQ ID NO: 176000 - DNA, 25 bp, Saccharomyces pastorianus
tcaaacaaaccacgtgatggtgtac

SEQ ID NO: 176001 - DNA, 25 bp, Saccharomyces pastorianus
gaatatgcatcaagaggaaaaggtt

SEQ ID NO: 176002 - DNA, 25 bp, Saccharomyces pastorianus
attatgttggtcttttcgagagcgc

SEQ ID NO: 176003 - DNA, 25 bp, Saccharomyces pastorianus
atcccttcaaacaaaccacgtgatg

SEQ ID NO: 176004 - DNA, 25 bp, Saccharomyces pastorianus
ccacgtgatggtgtacacgttgttt

SEQ ID NO: 176005 - DNA, 25 bp, Saccharomyces pastorianus
aagagaatatgcatcaagaggaaaa

SEQ ID NO: 176006 - DNA, 25 bp, Saccharomyces pastorianus
gagaatatgcatcaagaggaaaagg

SEQ ID NO: 176007 - DNA, 25 bp, Saccharomyces pastorianus
atgcatcaagaggaaaaggtttgtt

SEQ ID NO: 176008 - DNA, 25 bp, Saccharomyces pastorianus
caatcccttcaaacaaaccacgtga

SEQ ID NO: 176009 - DNA, 25 bp, Saccharomyces pastorianus
cttcaaacaaaccacgtgatggtgt

SEQ ID NO: 176010 - DNA, 25 bp, Saccharomyces pastorianus
tggcacaaaggcaatgagacttaga

SEQ ID NO: 176011 - DNA, 25 bp, Saccharomyces pastorianus
aacagattttttggcacaaaggcaa

SEQ ID NO: 176012 - DNA, 25 bp, Saccharomyces pastorianus
attttttggcacaaaggcaatgaga

SEQ ID NO: 176013 - DNA, 25 bp, Saccharomyces pastorianus
ttggcacaaaggcaatgagacttag

SEQ ID NO: 176014 - DNA, 25 bp, Saccharomyces pastorianus
cagattttttggcacaaaggcaatg

SEQ ID NO: 176015 - DNA, 25 bp, Saccharomyces pastorianus
ttttggcacaaaggcaatgagactt

SEQ ID NO: 176016 - DNA, 25 bp, Saccharomyces pastorianus
gattttttggcacaaaggcaatgag

SEQ ID NO: 176017 - DNA, 25 bp, Saccharomyces pastorianus
tttttggcacaaaggcaatgagact

SEQ ID NO: 176018 - DNA, 25 bp, Saccharomyces pastorianus
ggcacaaaggcaatgagacttagag

SEQ ID NO: 176019 - DNA, 25 bp, Saccharomyces pastorianus
agattttttggcacaaaggcaatga

SEQ ID NO: 176020 - DNA, 25 bp, Saccharomyces pastorianus
cacaaaggcaatgagacttagagat

SEQ ID NO: 176021 - DNA, 25 bp, Saccharomyces pastorianus
ggaggtggaggaacttttgccattt

SEQ ID NO: 176022 - DNA, 25 bp, Saccharomyces pastorianus
ggcaatgtcacatccaaaggtttga

SEQ ID NO: 176023 - DNA, 25 bp, Saccharomyces pastorianus
atcatagacgacatcgagcgtagta

SEQ ID NO: 176024 - DNA, 25 bp, Saccharomyces pastorianus
aggctctgactttccaaaggaagtt

SEQ ID NO: 176025 - DNA, 25 bp, Saccharomyces pastorianus
acttttgccattttgggtgcatgca

SEQ ID NO: 176026 - DNA, 25 bp, Saccharomyces pastorianus
gggtgcatgcataatatcttccggc

SEQ ID NO: 176027 - DNA, 25 bp, Saccharomyces pastorianus
taatggcatgtttatcatagacgac

SEQ ID NO: 176028 - DNA, 25 bp, Saccharomyces pastorianus
actgatgtgaggtttcgagatgact

SEQ ID NO: 176029 - DNA, 25 bp, Saccharomyces pastorianus
aatatcttccggcaatgtcacatcc

SEQ ID NO: 176030 - DNA, 25 bp, Saccharomyces pastorianus
gaaacgaaaagcctagtcataacta

SEQ ID NO: 176031 - DNA, 25 bp, Saccharomyces pastorianus
tcactataagaatgtcccgggaggt

SEQ ID NO: 176032 - DNA, 25 bp, Saccharomyces pastorianus
aagctgtcaagctgatgccgttgcc

SEQ ID NO: 176033 - DNA, 25 bp, Saccharomyces pastorianus
gtttcggaagctcacttggttgcat

SEQ ID NO: 176034 - DNA, 25 bp, Saccharomyces pastorianus
acaacagcttgattcttaccgagga

SEQ ID NO: 176035 - DNA, 25 bp, Saccharomyces pastorianus
tattcatgcaggttcgacaactcga

SEQ ID NO: 176036 - DNA, 25 bp, Saccharomyces pastorianus
gctcgattagttcattccaagaccg

SEQ ID NO: 176037 - DNA, 25 bp, Saccharomyces pastorianus
gcgaagatttattttgctcccaaga

SEQ ID NO: 176038 - DNA, 25 bp, Saccharomyces pastorianus
gctcttcaggtattattgctcgatt

SEQ ID NO: 176039 - DNA, 25 bp, Saccharomyces pastorianus
tgcattgtcgataccgcatctcaaa

SEQ ID NO: 176040 - DNA, 25 bp, Saccharomyces pastorianus
tttggccctcaattgtttgctgatt

SEQ ID NO: 176041 - DNA, 25 bp, Saccharomyces pastorianus
gcagcggtccaagctttctggaaaa

SEQ ID NO: 176042 - DNA, 25 bp, Saccharomyces pastorianus
aagttctacaattacagcggcccat

SEQ ID NO: 176043 - DNA, 25 bp, Saccharomyces pastorianus
atatccgtcagattttcgtcgccga

SEQ ID NO: 176044 - DNA, 25 bp, Saccharomyces pastorianus
tcaggatcggccactagattatggg

SEQ ID NO: 176045 - DNA, 25 bp, Saccharomyces pastorianus
tcagcacccttgatggagtgtaaaa

SEQ ID NO: 176046 - DNA, 25 bp, Saccharomyces pastorianus
gggcaggtcaatattgggtagatat

SEQ ID NO: 176047 - DNA, 25 bp, Saccharomyces pastorianus
gtgtcttgtatttatgatatccgtc

SEQ ID NO: 176048 - DNA, 25 bp, Saccharomyces pastorianus
tttcatcaaaaacccacattctcac

SEQ ID NO: 176049 - DNA, 25 bp, Saccharomyces pastorianus
attctcacctctggctcgaagatat

SEQ ID NO: 176050 - DNA, 25 bp, Saccharomyces pastorianus
aaagatcaggatcggccactagatt

SEQ ID NO: 176051 - DNA, 25 bp, Saccharomyces pastorianus
aacgttctggtgtcttgtatttatg

SEQ ID NO: 176052 - DNA, 25 bp, Saccharomyces pastorianus
tcgtcgccgatcttttcatcaaaaa

SEQ ID NO: 176053 - DNA, 25 bp, Saccharomyces pastorianus
gatatttaacgttctggtgtcttgt

SEQ ID NO: 176054 - DNA, 25 bp, Saccharomyces pastorianus
acttcaagctactaaggaatttcaa

SEQ ID NO: 176055 - DNA, 25 bp, Saccharomyces pastorianus
aaagttactttcaatagattccgat

SEQ ID NO: 176056 - DNA, 25 bp, Saccharomyces pastorianus
gaagaccaacattctttacacgaaa

SEQ ID NO: 176057 - DNA, 25 bp, Saccharomyces pastorianus
agattccgatgaagaccaacattct

SEQ ID NO: 176058 - DNA, 25 bp, Saccharomyces pastorianus
aacatttctgcgcaggttcgatcaa

SEQ ID NO: 176059 - DNA, 25 bp, Saccharomyces pastorianus
atggcgaccctagcgagagatgaga

SEQ ID NO: 176060 - DNA, 25 bp, Saccharomyces pastorianus
agaactcgaccagttatttgaagtc

SEQ ID NO: 176061 - DNA, 25 bp, Saccharomyces pastorianus
gcgcaggttcgatcaaaagtcaaac

SEQ ID NO: 176062 - DNA, 25 bp, Saccharomyces pastorianus
gttgatatatcagaactcgaccagt

SEQ ID NO: 176063 - DNA, 25 bp, Saccharomyces pastorianus
tgcacgcaaggctagacgggatgtt

SEQ ID NO: 176064 - DNA, 25 bp, Saccharomyces pastorianus
gattctactggaacatactacttgt

SEQ ID NO: 176065 - DNA, 25 bp, Saccharomyces pastorianus
gaagactacccaggacggaaatgat

SEQ ID NO: 176066 - DNA, 25 bp, Saccharomyces pastorianus
gctggaactcgaaacagtcctttga

SEQ ID NO: 176067 - DNA, 25 bp, Saccharomyces pastorianus
gaaagtgtcgtatctgacccctgat

SEQ ID NO: 176068 - DNA, 25 bp, Saccharomyces pastorianus
gggaccctattcttatgcaaatgca

SEQ ID NO: 176069 - DNA, 25 bp, Saccharomyces pastorianus
gagagaaaacctgccacactctgtg

SEQ ID NO: 176070 - DNA, 25 bp, Saccharomyces pastorianus
atgcaaatgcaaaaaccgggcgtaa

SEQ ID NO: 176071 - DNA, 25 bp, Saccharomyces pastorianus
aaaacagcaatctctggctccaaag

SEQ ID NO: 176072 - DNA, 25 bp, Saccharomyces pastorianus
taggtccatcctggaagactaccca

SEQ ID NO: 176073 - DNA, 25 bp, Saccharomyces pastorianus
gaagaggccggactgaaagacaaca

SEQ ID NO: 176074 - DNA, 25 bp, Saccharomyces pastorianus
acactctgtggctggaactcgaaac

SEQ ID NO: 176075 - DNA, 25 bp, Saccharomyces pastorianus
acttcataacgataggtccatcctg

SEQ ID NO: 176076 - DNA, 25 bp, Saccharomyces pastorianus
caagtcacaatctgtttattcgtaa

SEQ ID NO: 176077 - DNA, 25 bp, Saccharomyces pastorianus
tggtcatgtgtgttcaaaaatagtc

SEQ ID NO: 176078 - DNA, 25 bp, Saccharomyces pastorianus
aaaatagtcaagtcacaatctgttt

SEQ ID NO: 176079 - DNA, 25 bp, Saccharomyces pastorianus
aaatagtcaagtcacaatctgttta

SEQ ID NO: 176080 - DNA, 25 bp, Saccharomyces pastorianus
atgtgtgttcaaaaatagtcaagtc

SEQ ID NO: 176081 - DNA, 25 bp, Saccharomyces pastorianus
aatgacatgatattgttcagcgaag

SEQ ID NO: 176082 - DNA, 25 bp, Saccharomyces pastorianus
gtcacaatctgtttattcgtaaatg

SEQ ID NO: 176083 - DNA, 25 bp, Saccharomyces pastorianus
tagtcaagtcacaatctgtttattc

SEQ ID NO: 176084 - DNA, 25 bp, Saccharomyces pastorianus
agtcacaatctgtttattcgtaaat

SEQ ID NO: 176085 - DNA, 25 bp, Saccharomyces pastorianus
atctgtttattcgtaaatgacatga

SEQ ID NO: 176086 - DNA, 25 bp, Saccharomyces pastorianus
acaatctgtttattcgtaaatgaca

SEQ ID NO: 176087 - DNA, 25 bp, Saccharomyces pastorianus
agtacaatcaatcttccattcgtcc

SEQ ID NO: 176088 - DNA, 25 bp, Saccharomyces pastorianus
aacacccaccagaagttacgacaat

SEQ ID NO: 176089 - DNA, 25 bp, Saccharomyces pastorianus
aacagcaatttccaaccatcttctt

SEQ ID NO: 176090 - DNA, 25 bp, Saccharomyces pastorianus
attgtcgctattatgctgtgccttt

SEQ ID NO: 176091 - DNA, 25 bp, Saccharomyces pastorianus
gtttaacgagctatcacaccagagt

SEQ ID NO: 176092 - DNA, 25 bp, Saccharomyces pastorianus
tgaacactcaatctaacgccgcaat

SEQ ID NO: 176093 - DNA, 25 bp, Saccharomyces pastorianus
gccaactcaggctaaatcagggtat

SEQ ID NO: 176094 - DNA, 25 bp, Saccharomyces pastorianus
tttccctgtgatggcagtgatgcct

SEQ ID NO: 176095 - DNA, 25 bp, Saccharomyces pastorianus
aatgttgcccaattagctacgtcgc

SEQ ID NO: 176096 - DNA, 25 bp, Saccharomyces pastorianus
accacaatctccatatcaacaagct

SEQ ID NO: 176097 - DNA, 25 bp, Saccharomyces pastorianus
tcaacaagctgtacttccttatgcc

SEQ ID NO: 176098 - DNA, 25 bp, Saccharomyces pastorianus
aagacagtccgcaattcgtaattta

SEQ ID NO: 176099 - DNA, 25 bp, Saccharomyces pastorianus
gaatgccgttgttgggtacttggac

SEQ ID NO: 176100 - DNA, 25 bp, Saccharomyces pastorianus
aaaatttgagtgtcggttgccgtcg

SEQ ID NO: 176101 - DNA, 25 bp, Saccharomyces pastorianus
aaaagtctccgatagagctgctaga

SEQ ID NO: 176102 - DNA, 25 bp, Saccharomyces pastorianus
ggagcaagagaaccttcccttggaa

SEQ ID NO: 176103 - DNA, 25 bp, Saccharomyces pastorianus
gttgccgtcgtaaatcacagctctg

SEQ ID NO: 176104 - DNA, 25 bp, Saccharomyces pastorianus
gatcacagatatccttcgatttcga

SEQ ID NO: 176105 - DNA, 25 bp, Saccharomyces pastorianus
aatcggatcctcatgggtctaactg

SEQ ID NO: 176106 - DNA, 25 bp, Saccharomyces pastorianus
tcgatgatctttctgcgtttagctc

SEQ ID NO: 176107 - DNA, 25 bp, Saccharomyces pastorianus
tgagcctaccaaccacattgatttt

SEQ ID NO: 176108 - DNA, 25 bp, Saccharomyces pastorianus
accacgggacagtttctatcagcgg

SEQ ID NO: 176109 - DNA, 25 bp, Saccharomyces pastorianus
aacctgataaaattaccagatatga

SEQ ID NO: 176110 - DNA, 25 bp, Saccharomyces pastorianus
ctcaaggctgcccaggaagcggaaa

SEQ ID NO: 176111 - DNA, 25 bp, Saccharomyces pastorianus
tcagcttccactattgcagagtggg

SEQ ID NO: 176112 - DNA, 25 bp, Saccharomyces pastorianus
caacgttgttggttcaggcagatat

SEQ ID NO: 176113 - DNA, 25 bp, Saccharomyces pastorianus
gatcagtaattgtcccatcgggtta

SEQ ID NO: 176114 - DNA, 25 bp, Saccharomyces pastorianus
cagtaattgtcccatcgggttagtt

SEQ ID NO: 176115 - DNA, 25 bp, Saccharomyces pastorianus
gatatgtgagcaataaacctgataa

SEQ ID NO: 176116 - DNA, 25 bp, Saccharomyces pastorianus
gtgggtagcatgtccatggaaatat

SEQ ID NO: 176117 - DNA, 25 bp, Saccharomyces pastorianus
ggttcaggcagatatgtgagcaata

SEQ ID NO: 176118 - DNA, 25 bp, Saccharomyces pastorianus
attgcagagtgggtagcatgtccat

SEQ ID NO: 176119 - DNA, 25 bp, Saccharomyces pastorianus
aggctgcccaggaagcggaaatgca

SEQ ID NO: 176120 - DNA, 25 bp, Saccharomyces pastorianus
acaatacttaagcgatgacgacgaa

SEQ ID NO: 176121 - DNA, 25 bp, Saccharomyces pastorianus
atcacaatacttaagcgatgacgac

SEQ ID NO: 176122 - DNA, 25 bp, Saccharomyces pastorianus
tcatcacaatacttaagcgatgacg

SEQ ID NO: 176123 - DNA, 25 bp, Saccharomyces pastorianus
tccacacacgactaacacaaaggtt

SEQ ID NO: 176124 - DNA, 25 bp, Saccharomyces pastorianus
caatacttaagcgatgacgacgaac

SEQ ID NO: 176125 - DNA, 25 bp, Saccharomyces pastorianus
cacaatacttaagcgatgacgacga

SEQ ID NO: 176126 - DNA, 25 bp, Saccharomyces pastorianus
aatacttaagcgatgacgacgaact

SEQ ID NO: 176127 - DNA, 25 bp, Saccharomyces pastorianus
atacttaagcgatgacgacgaactt

SEQ ID NO: 176128 - DNA, 25 bp, Saccharomyces pastorianus
catcacaatacttaagcgatgacga

SEQ ID NO: 176129 - DNA, 25 bp, Saccharomyces pastorianus
tcacaatacttaagcgatgacgacg

SEQ ID NO: 176130 - DNA, 25 bp, Saccharomyces pastorianus
tctccacacacgactaacacaaagg

SEQ ID NO: 176131 - DNA, 25 bp, Saccharomyces pastorianus
gcaacagacaccgtcatttgaacct

SEQ ID NO: 176132 - DNA, 25 bp, Saccharomyces pastorianus
cagatataactttcgtaacagacaa

SEQ ID NO: 176133 - DNA, 25 bp, Saccharomyces pastorianus
atgtgggtaagcaacagacaccgtc

SEQ ID NO: 176134 - DNA, 25 bp, Saccharomyces pastorianus
gtaacagacaacgaaaggaagcgtt

SEQ ID NO: 176135 - DNA, 25 bp, Saccharomyces pastorianus
gacaccgtcatttgaacctgttgag

SEQ ID NO: 176136 - DNA, 25 bp, Saccharomyces pastorianus
acaccgtcatttgaacctgttgagc

SEQ ID NO: 176137 - DNA, 25 bp, Saccharomyces pastorianus
gtaagcaacagacaccgtcatttga

SEQ ID NO: 176138 - DNA, 25 bp, Saccharomyces pastorianus
gggtaagcaacagacaccgtcattt

SEQ ID NO: 176139 - DNA, 25 bp, Saccharomyces pastorianus
cagacaccgtcatttgaacctgttg

SEQ ID NO: 176140 - DNA, 25 bp, Saccharomyces pastorianus
tacgaaagcatgtgggtaagcaaca

SEQ ID NO: 176141 - DNA, 25 bp, Saccharomyces pastorianus
gaagcgttacgaaagcatgtgggta

SEQ ID NO: 176142 - DNA, 25 bp, Saccharomyces pastorianus
attttcttcatggtagcgcctatgc

SEQ ID NO: 176143 - DNA, 25 bp, Saccharomyces pastorianus
cattttcttcatggtagcgcctatg

SEQ ID NO: 176144 - DNA, 25 bp, Saccharomyces pastorianus
aggttaattctcaacaagagacaac

SEQ ID NO: 176145 - DNA, 25 bp, Saccharomyces pastorianus
ttttcttcatggtagcgcctatgct

SEQ ID NO: 176146 - DNA, 25 bp, Saccharomyces pastorianus
ttcttcatggtagcgcctatgcttc

SEQ ID NO: 176147 - DNA, 25 bp, Saccharomyces pastorianus
agcttccaatttaccggaatttgat

SEQ ID NO: 176148 - DNA, 25 bp, Saccharomyces pastorianus
ttcagcttccaatttaccggaattt

SEQ ID NO: 176149 - DNA, 25 bp, Saccharomyces pastorianus
aaggttaattctcaacaagagacaa

SEQ ID NO: 176150 - DNA, 25 bp, Saccharomyces pastorianus
tttcttcatggtagcgcctatgctt

SEQ ID NO: 176151 - DNA, 25 bp, Saccharomyces pastorianus
ggttaattctcaacaagagacaaca

SEQ ID NO: 176152 - DNA, 25 bp, Saccharomyces pastorianus
tcttcatggtagcgcctatgcttcg

SEQ ID NO: 176153 - DNA, 25 bp, Saccharomyces pastorianus
gaaagttccatttaagctacctgaa

SEQ ID NO: 176154 - DNA, 25 bp, Saccharomyces pastorianus
tgccacagtggctcaagctgaggct

SEQ ID NO: 176155 - DNA, 25 bp, Saccharomyces pastorianus
tgttgaaatcacacccttagcacac

SEQ ID NO: 176156 - DNA, 25 bp, Saccharomyces pastorianus
gtttgttcagggtacttggtgctat

SEQ ID NO: 176157 - DNA, 25 bp, Saccharomyces pastorianus
actacttatcactattactgggcgt

SEQ ID NO: 176158 - DNA, 25 bp, Saccharomyces pastorianus
caaaggatcgctcctatttcattga

SEQ ID NO: 176159 - DNA, 25 bp, Saccharomyces pastorianus
ggttgaacagtcctcctgaaatctt

SEQ ID NO: 176160 - DNA, 25 bp, Saccharomyces pastorianus
aagctgaggcttttggcattccaaa

SEQ ID NO: 176161 - DNA, 25 bp, Saccharomyces pastorianus
gtgctattgtcaaaggtgccacagt

SEQ ID NO: 176162 - DNA, 25 bp, Saccharomyces pastorianus
taccgtgataaagcctggacagttt

SEQ ID NO: 176163 - DNA, 25 bp, Saccharomyces pastorianus
gaaaccttccaaagttgtcagtttg

SEQ ID NO: 176164 - DNA, 25 bp, Saccharomyces pastorianus
ggtacagcacggaagataaaaaatt

SEQ ID NO: 176165 - DNA, 25 bp, Saccharomyces pastorianus
ttggaggtacagcacggaagataaa

SEQ ID NO: 176166 - DNA, 25 bp, Saccharomyces pastorianus
ataaaaaattggacaagattgcctt

SEQ ID NO: 176167 - DNA, 25 bp, Saccharomyces pastorianus
ctggatttggaggtacagcacggaa

SEQ ID NO: 176168 - DNA, 25 bp, Saccharomyces pastorianus
agtctaactgttcattatatttttg

SEQ ID NO: 176169 - DNA, 25 bp, Saccharomyces pastorianus
tgctatctaagggtgggaagactag

SEQ ID NO: 176170 - DNA, 25 bp, Saccharomyces pastorianus
tcctaactggatttggaggtacagc

SEQ ID NO: 176171 - DNA, 25 bp, Saccharomyces pastorianus
atatttttgccatgggattatacag

SEQ ID NO: 176172 - DNA, 25 bp, Saccharomyces pastorianus
gactagaagtctaactgttcattat

SEQ ID NO: 176173 - DNA, 25 bp, Saccharomyces pastorianus
gccatgggattatacagagcattgt

SEQ ID NO: 176174 - DNA, 25 bp, Saccharomyces pastorianus
ttatacagagcattgtatattccta

SEQ ID NO: 176175 - DNA, 25 bp, Saccharomyces pastorianus
tacacacttatgttaatattacaga

SEQ ID NO: 176176 - DNA, 25 bp, Saccharomyces pastorianus
cacacttatgttaatattacagaaa

SEQ ID NO: 176177 - DNA, 25 bp, Saccharomyces pastorianus
acacacttatgttaatattacagaa

SEQ ID NO: 176178 - DNA, 25 bp, Saccharomyces pastorianus
gaccccaatttatacacacttatgt

SEQ ID NO: 176179 - DNA, 25 bp, Saccharomyces pastorianus
aggaccccaatttatacacacttat

SEQ ID NO: 176180 - DNA, 25 bp, Saccharomyces pastorianus
gaggaccccaatttatacacactta

SEQ ID NO: 176181 - DNA, 25 bp, Saccharomyces pastorianus
agaggaccccaatttatacacactt

SEQ ID NO: 176182 - DNA, 25 bp, Saccharomyces pastorianus
accccaatttatacacacttatgtt

SEQ ID NO: 176183 - DNA, 25 bp, Saccharomyces pastorianus
ggaccccaatttatacacacttatg

SEQ ID NO: 176184 - DNA, 25 bp, Saccharomyces pastorianus
atacacacttatgttaatattacag

SEQ ID NO: 176185 - DNA, 25 bp, Saccharomyces pastorianus
ccccaatttatacacacttatgtta

SEQ ID NO: 176186 - DNA, 25 bp, Saccharomyces pastorianus
gaagcagaagtcacaaacattcttg

SEQ ID NO: 176187 - DNA, 25 bp, Saccharomyces pastorianus
gacagttgctgatctgttttcagac

SEQ ID NO: 176188 - DNA, 25 bp, Saccharomyces pastorianus
tctgttttcagacatacattctatg

SEQ ID NO: 176189 - DNA, 25 bp, Saccharomyces pastorianus
tcacaaacattcttgacagactaaa

SEQ ID NO: 176190 - DNA, 25 bp, Saccharomyces pastorianus
caagaacagccagggctcataacgt

SEQ ID NO: 176191 - DNA, 25 bp, Saccharomyces pastorianus
tacatatgacagttgctgatctgtt

SEQ ID NO: 176192 - DNA, 25 bp, Saccharomyces pastorianus
ggtaaatgacattacgaccctagca

SEQ ID NO: 176193 - DNA, 25 bp, Saccharomyces pastorianus
caaatccataactcggaattcccaa

SEQ ID NO: 176194 - DNA, 25 bp, Saccharomyces pastorianus
ccggccctgataacgatctcataag

SEQ ID NO: 176195 - DNA, 25 bp, Saccharomyces pastorianus
gaagaacaacaggaatcaaaacgta

SEQ ID NO: 176196 - DNA, 25 bp, Saccharomyces pastorianus
ttctttccaaaagcattaacaaaat

SEQ ID NO: 176197 - DNA, 25 bp, Saccharomyces pastorianus
tcacgacttggaaacggagttctac

SEQ ID NO: 176198 - DNA, 25 bp, Saccharomyces pastorianus
agcgcattgggcttacgagactgac

SEQ ID NO: 176199 - DNA, 25 bp, Saccharomyces pastorianus
cgcattgggcttacgagactgacca

SEQ ID NO: 176200 - DNA, 25 bp, Saccharomyces pastorianus
tttggggggcatgactaacctcgat

SEQ ID NO: 176201 - DNA, 25 bp, Saccharomyces pastorianus
cattgggcttacgagactgaccaag

SEQ ID NO: 176202 - DNA, 25 bp, Saccharomyces pastorianus
ttcacgacttggaaacggagttcta

SEQ ID NO: 176203 - DNA, 25 bp, Saccharomyces pastorianus
tatccaacacagatgttcaatctga

SEQ ID NO: 176204 - DNA, 25 bp, Saccharomyces pastorianus
atttggggggcatgactaacctcga

SEQ ID NO: 176205 - DNA, 25 bp, Saccharomyces pastorianus
tggggggcatgactaacctcgattt

SEQ ID NO: 176206 - DNA, 25 bp, Saccharomyces pastorianus
ggggggcatgactaacctcgatttt

SEQ ID NO: 176207 - DNA, 25 bp, Saccharomyces pastorianus
ttggggggcatgactaacctcgatt

SEQ ID NO: 176208 - DNA, 25 bp, Saccharomyces pastorianus
tgcgtatatatacaataccttccaa

SEQ ID NO: 176209 - DNA, 25 bp, Saccharomyces pastorianus
aattattctgacatccttacagtcc

SEQ ID NO: 176210 - DNA, 25 bp, Saccharomyces pastorianus
aaattaattattctgacatccttac

SEQ ID NO: 176211 - DNA, 25 bp, Saccharomyces pastorianus
gaaattaattattctgacatcctta

SEQ ID NO: 176212 - DNA, 25 bp, Saccharomyces pastorianus
attattctgacatccttacagtcct

SEQ ID NO: 176213 - DNA, 25 bp, Saccharomyces pastorianus
ttaattattctgacatccttacagt

SEQ ID NO: 176214 - DNA, 25 bp, Saccharomyces pastorianus
attaattattctgacatccttacag

SEQ ID NO: 176215 - DNA, 25 bp, Saccharomyces pastorianus
ttattctgacatccttacagtcctt

SEQ ID NO: 176216 - DNA, 25 bp, Saccharomyces pastorianus
taattattctgacatccttacagtc

SEQ ID NO: 176217 - DNA, 25 bp, Saccharomyces pastorianus
tatatacaataccttccaagcattt

SEQ ID NO: 176218 - DNA, 25 bp, Saccharomyces pastorianus
aattaattattctgacatccttaca

SEQ ID NO: 176219 - DNA, 25 bp, Saccharomyces pastorianus
ttagtgcctactggtttcccattga

SEQ ID NO: 176220 - DNA, 25 bp, Saccharomyces pastorianus
tagaagcatcttagtgcctactggt

SEQ ID NO: 176221 - DNA, 25 bp, Saccharomyces pastorianus
gcatcttagtgcctactggtttccc

SEQ ID NO: 176222 - DNA, 25 bp, Saccharomyces pastorianus
gtgcctactggtttcccattgacta

SEQ ID NO: 176223 - DNA, 25 bp, Saccharomyces pastorianus
gaagcatcttagtgcctactggttt

SEQ ID NO: 176224 - DNA, 25 bp, Saccharomyces pastorianus
gaaactgcatattatagaagcatct

SEQ ID NO: 176225 - DNA, 25 bp, Saccharomyces pastorianus
tagtgcctactggtttcccattgac

SEQ ID NO: 176226 - DNA, 25 bp, Saccharomyces pastorianus
cccattgactactggactaggactc

SEQ ID NO: 176227 - DNA, 25 bp, Saccharomyces pastorianus
aagcatcttagtgcctactggtttc

SEQ ID NO: 176228 - DNA, 25 bp, Saccharomyces pastorianus
gcctactggtttcccattgactact

SEQ ID NO: 176229 - DNA, 25 bp, Saccharomyces pastorianus
atcttagtgcctactggtttcccat

SEQ ID NO: 176230 - DNA, 25 bp, Saccharomyces pastorianus
tatctaattacccacatatatctca

SEQ ID NO: 176231 - DNA, 25 bp, Saccharomyces pastorianus
tctaattacccacatatatctcatg

SEQ ID NO: 176232 - DNA, 25 bp, Saccharomyces pastorianus
aattacccacatatatctcatggta

SEQ ID NO: 176233 - DNA, 25 bp, Saccharomyces pastorianus
caattatctaattacccacatatat

SEQ ID NO: 176234 - DNA, 25 bp, Saccharomyces pastorianus
ttacccacatatatctcatggtagc

SEQ ID NO: 176235 - DNA, 25 bp, Saccharomyces pastorianus
acaattatctaattacccacatata

SEQ ID NO: 176236 - DNA, 25 bp, Saccharomyces pastorianus
attatctaattacccacatatatct

SEQ ID NO: 176237 - DNA, 25 bp, Saccharomyces pastorianus
taattacccacatatatctcatggt

SEQ ID NO: 176238 - DNA, 25 bp, Saccharomyces pastorianus
attacccacatatatctcatggtag

SEQ ID NO: 176239 - DNA, 25 bp, Saccharomyces pastorianus
aattatctaattacccacatatatc

SEQ ID NO: 176240 - DNA, 25 bp, Saccharomyces pastorianus
atctaattacccacatatatctcat

SEQ ID NO: 176241 - DNA, 25 bp, Saccharomyces pastorianus
ttaaaccggagctatctgcaaccca

SEQ ID NO: 176242 - DNA, 25 bp, Saccharomyces pastorianus
ttgaaggcttaaaccggagctatct

SEQ ID NO: 176243 - DNA, 25 bp, Saccharomyces pastorianus
attgaaggcttaaaccggagctatc

SEQ ID NO: 176244 - DNA, 25 bp, Saccharomyces pastorianus
cttaaaccggagctatctgcaaccc

SEQ ID NO: 176245 - DNA, 25 bp, Saccharomyces pastorianus
tgaaggcttaaaccggagctatctg

SEQ ID NO: 176246 - DNA, 25 bp, Saccharomyces pastorianus
ccagctattgaaggcttaaaccgga

SEQ ID NO: 176247 - DNA, 25 bp, Saccharomyces pastorianus
ggcttaaaccggagctatctgcaac

SEQ ID NO: 176248 - DNA, 25 bp, Saccharomyces pastorianus
aggcttaaaccggagctatctgcaa

SEQ ID NO: 176249 - DNA, 25 bp, Saccharomyces pastorianus
tattgaaggcttaaaccggagctat

SEQ ID NO: 176250 - DNA, 25 bp, Saccharomyces pastorianus
gctattgaaggcttaaaccggagct

SEQ ID NO: 176251 - DNA, 25 bp, Saccharomyces pastorianus
gcttaaaccggagctatctgcaacc

SEQ ID NO: 176252 - DNA, 25 bp, Saccharomyces pastorianus
ggcactcgaatttagggtcttcgtt

SEQ ID NO: 176253 - DNA, 25 bp, Saccharomyces pastorianus
gaatccggcactcgaatttagggtc

SEQ ID NO: 176254 - DNA, 25 bp, Saccharomyces pastorianus
caattacataatgcatgaccttcaa

SEQ ID NO: 176255 - DNA, 25 bp, Saccharomyces pastorianus
attgttgaacgcatccaattacata

SEQ ID NO: 176256 - DNA, 25 bp, Saccharomyces pastorianus
ggtacttagacaatggtgtgatatg

SEQ ID NO: 176257 - DNA, 25 bp, Saccharomyces pastorianus
ttcgttaagaatgcgcatatcgttg

SEQ ID NO: 176258 - DNA, 25 bp, Saccharomyces pastorianus
ctttacctattgttgaacgcatcca

SEQ ID NO: 176259 - DNA, 25 bp, Saccharomyces pastorianus
cccagcgtgatttaaattattatga

SEQ ID NO: 176260 - DNA, 25 bp, Saccharomyces pastorianus
gtgtgatatgaatccggcactcgaa

SEQ ID NO: 176261 - DNA, 25 bp, Saccharomyces pastorianus
aggattgaaatttgacttggtactt

SEQ ID NO: 176262 - DNA, 25 bp, Saccharomyces pastorianus
tagggtcttcgttaagaatgcgcat

SEQ ID NO: 176263 - DNA, 25 bp, Saccharomyces pastorianus
gagttggaaatgcaattcataaatt

SEQ ID NO: 176264 - DNA, 25 bp, Saccharomyces pastorianus
gtgagtggtagtggagttggaaatg

SEQ ID NO: 176265 - DNA, 25 bp, Saccharomyces pastorianus
tagtggagttggaaatgcaattcat

SEQ ID NO: 176266 - DNA, 25 bp, Saccharomyces pastorianus
tggagttggaaatgcaattcataaa

SEQ ID NO: 176267 - DNA, 25 bp, Saccharomyces pastorianus
gtggagttggaaatgcaattcataa

SEQ ID NO: 176268 - DNA, 25 bp, Saccharomyces pastorianus
ggagttggaaatgcaattcataaat

SEQ ID NO: 176269 - DNA, 25 bp, Saccharomyces pastorianus
tggaaatgcaattcataaattttta

SEQ ID NO: 176270 - DNA, 25 bp, Saccharomyces pastorianus
gtagtggagttggaaatgcaattca

SEQ ID NO: 176271 - DNA, 25 bp, Saccharomyces pastorianus
ggtagtggagttggaaatgcaattc

SEQ ID NO: 176272 - DNA, 25 bp, Saccharomyces pastorianus
agtggagttggaaatgcaattcata

SEQ ID NO: 176273 - DNA, 25 bp, Saccharomyces pastorianus
gttggaaatgcaattcataaatttt

SEQ ID NO: 176274 - DNA, 25 bp, Saccharomyces pastorianus
aactccatcaaacataatcactacg

SEQ ID NO: 176275 - DNA, 25 bp, Saccharomyces pastorianus
gaaaactccatcaaacataatcact

SEQ ID NO: 176276 - DNA, 25 bp, Saccharomyces pastorianus
actccatcaaacataatcactacga

SEQ ID NO: 176277 - DNA, 25 bp, Saccharomyces pastorianus
aaacataatcactacgaagaaagta

SEQ ID NO: 176278 - DNA, 25 bp, Saccharomyces pastorianus
aacataatcactacgaagaaagtat

SEQ ID NO: 176279 - DNA, 25 bp, Saccharomyces pastorianus
tcaaacataatcactacgaagaaag

SEQ ID NO: 176280 - DNA, 25 bp, Saccharomyces pastorianus
aaaactccatcaaacataatcacta

SEQ ID NO: 176281 - DNA, 25 bp, Saccharomyces pastorianus
ctccatcaaacataatcactacgaa

SEQ ID NO: 176282 - DNA, 25 bp, Saccharomyces pastorianus
caaacataatcactacgaagaaagt

SEQ ID NO: 176283 - DNA, 25 bp, Saccharomyces pastorianus
aaactccatcaaacataatcactac

SEQ ID NO: 176284 - DNA, 25 bp, Saccharomyces pastorianus
acataatcactacgaagaaagtatt

SEQ ID NO: 176285 - DNA, 25 bp, Saccharomyces pastorianus
gcaaatatacatcgtaccgagtgat

SEQ ID NO: 176286 - DNA, 25 bp, Saccharomyces pastorianus
aagtggctcagcattaagtagggct

SEQ ID NO: 176287 - DNA, 25 bp, Saccharomyces pastorianus
gtcgcaaatatacatcgtaccgagt

SEQ ID NO: 176288 - DNA, 25 bp, Saccharomyces pastorianus
gtaccgagtgatgaacgtggttttg

SEQ ID NO: 176289 - DNA, 25 bp, Saccharomyces pastorianus
tcgtaccgagtgatgaacgtggttt

SEQ ID NO: 176290 - DNA, 25 bp, Saccharomyces pastorianus
ggctcagcattaagtagggctaaaa

SEQ ID NO: 176291 - DNA, 25 bp, Saccharomyces pastorianus
atacatcgtaccgagtgatgaacgt

SEQ ID NO: 176292 - DNA, 25 bp, Saccharomyces pastorianus
gtagggctaaaaagagtcgcaaata

SEQ ID NO: 176293 - DNA, 25 bp, Saccharomyces pastorianus
agagtcgcaaatatacatcgtaccg

SEQ ID NO: 176294 - DNA, 25 bp, Saccharomyces pastorianus
gtaaggcaaagtggctcagcattaa

SEQ ID NO: 176295 - DNA, 25 bp, Saccharomyces pastorianus
ggttgtaaggcaaagtggctcagca

SEQ ID NO: 176296 - DNA, 25 bp, Saccharomyces pastorianus
gaattcctattataggggtgccgag

SEQ ID NO: 176297 - DNA, 25 bp, Saccharomyces pastorianus
tcatacatttttgatagacttcgta

SEQ ID NO: 176298 - DNA, 25 bp, Saccharomyces pastorianus
ctgttttatggcgcttatgtgtatt

SEQ ID NO: 176299 - DNA, 25 bp, Saccharomyces pastorianus
tactgttttatggcgcttatgtgta

SEQ ID NO: 176300 - DNA, 25 bp, Saccharomyces pastorianus
ttttgatagacttcgtatgtggagt

SEQ ID NO: 176301 - DNA, 25 bp, Saccharomyces pastorianus
ggaattcctattataggggtgccga

SEQ ID NO: 176302 - DNA, 25 bp, Saccharomyces pastorianus
aattcctattataggggtgccgagg

SEQ ID NO: 176303 - DNA, 25 bp, Saccharomyces pastorianus
atttttgatagacttcgtatgtgga

SEQ ID NO: 176304 - DNA, 25 bp, Saccharomyces pastorianus
ttcctattataggggtgccgaggtg

SEQ ID NO: 176305 - DNA, 25 bp, Saccharomyces pastorianus
attcctattataggggtgccgaggt

SEQ ID NO: 176306 - DNA, 25 bp, Saccharomyces pastorianus
gtactgttttatggcgcttatgtgt

SEQ ID NO: 176307 - DNA, 25 bp, Saccharomyces pastorianus
aagtcggtgatatatatggtcgtcg

SEQ ID NO: 176308 - DNA, 25 bp, Saccharomyces pastorianus
tattggattgattacagttactgcc

SEQ ID NO: 176309 - DNA, 25 bp, Saccharomyces pastorianus
tacgttgtaggcatcctaatccaaa

SEQ ID NO: 176310 - DNA, 25 bp, Saccharomyces pastorianus
gttgtaggcatcctaatccaaataa

SEQ ID NO: 176311 - DNA, 25 bp, Saccharomyces pastorianus
atggtcgtcgtattggattgattac

SEQ ID NO: 176312 - DNA, 25 bp, Saccharomyces pastorianus
gccatttacgttgtaggcatcctaa

SEQ ID NO: 176313 - DNA, 25 bp, Saccharomyces pastorianus
ttgtcttgtcaaaagtcggtgatat

SEQ ID NO: 176314 - DNA, 25 bp, Saccharomyces pastorianus
acagttactgccatttacgttgtag

SEQ ID NO: 176315 - DNA, 25 bp, Saccharomyces pastorianus
atatatggtcgtcgtattggattga

SEQ ID NO: 176316 - DNA, 25 bp, Saccharomyces pastorianus
ggaattgtcttgtcaaaagtcggtg

SEQ ID NO: 176317 - DNA, 25 bp, Saccharomyces pastorianus
cggtgatatatatggtcgtcgtatt

SEQ ID NO: 176318 - DNA, 25 bp, Saccharomyces pastorianus
agtttagcaggcatcatcgacagtt

SEQ ID NO: 176319 - DNA, 25 bp, Saccharomyces pastorianus
tcatcgacagttgaggagcagatat

SEQ ID NO: 176320 - DNA, 25 bp, Saccharomyces pastorianus
ttagcaggcatcatcgacagttgag

SEQ ID NO: 176321 - DNA, 25 bp, Saccharomyces pastorianus
gcatcatcgacagttgaggagcaga

SEQ ID NO: 176322 - DNA, 25 bp, Saccharomyces pastorianus
gtttagcaggcatcatcgacagttg

SEQ ID NO: 176323 - DNA, 25 bp, Saccharomyces pastorianus
tagcaggcatcatcgacagttgagg

SEQ ID NO: 176324 - DNA, 25 bp, Saccharomyces pastorianus
cagtttagcaggcatcatcgacagt

SEQ ID NO: 176325 - DNA, 25 bp, Saccharomyces pastorianus
tcgacagttgaggagcagatatgaa

SEQ ID NO: 176326 - DNA, 25 bp, Saccharomyces pastorianus
tttagcaggcatcatcgacagttga

SEQ ID NO: 176327 - DNA, 25 bp, Saccharomyces pastorianus
agcaggcatcatcgacagttgagga

SEQ ID NO: 176328 - DNA, 25 bp, Saccharomyces pastorianus
cagttgaggagcagatatgaattaa

SEQ ID NO: 176329 - DNA, 25 bp, Saccharomyces pastorianus
attcaccaaatcttcatggtagcgc

SEQ ID NO: 176330 - DNA, 25 bp, Saccharomyces pastorianus
taccaacaaccgtctatgatgacgt

SEQ ID NO: 176331 - DNA, 25 bp, Saccharomyces pastorianus
tcaccaaatcttcatggtagcgcct

SEQ ID NO: 176332 - DNA, 25 bp, Saccharomyces pastorianus
aaaattcaccaaatcttcatggtag

SEQ ID NO: 176333 - DNA, 25 bp, Saccharomyces pastorianus
aaccgtctatgatgacgtgttcaca

SEQ ID NO: 176334 - DNA, 25 bp, Saccharomyces pastorianus
ttacatcaaaattcaccaaatcttc

SEQ ID NO: 176335 - DNA, 25 bp, Saccharomyces pastorianus
attacatcaaaattcaccaaatctt

SEQ ID NO: 176336 - DNA, 25 bp, Saccharomyces pastorianus
caaaattcaccaaatcttcatggta

SEQ ID NO: 176337 - DNA, 25 bp, Saccharomyces pastorianus
gtctatgatgacgtgttcacattat

SEQ ID NO: 176338 - DNA, 25 bp, Saccharomyces pastorianus
acattaccaacaaccgtctatgatg

SEQ ID NO: 176339 - DNA, 25 bp, Saccharomyces pastorianus
aaattcaccaaatcttcatggtagc

SEQ ID NO: 176340 - DNA, 25 bp, Saccharomyces pastorianus
caacgccgctaatgaacgaaattct

SEQ ID NO: 176341 - DNA, 25 bp, Saccharomyces pastorianus
aagacagcggagacggcaggacaac

SEQ ID NO: 176342 - DNA, 25 bp, Saccharomyces pastorianus
gaaaagtgtcccatgccacttactt

SEQ ID NO: 176343 - DNA, 25 bp, Saccharomyces pastorianus
gaaaatataccttcatccactcaac

SEQ ID NO: 176344 - DNA, 25 bp, Saccharomyces pastorianus
gcatggttgtgatttggactctgaa

SEQ ID NO: 176345 - DNA, 25 bp, Saccharomyces pastorianus
aacgaaattctaccgcttgcaagca

SEQ ID NO: 176346 - DNA, 25 bp, Saccharomyces pastorianus
aagccatccacaaaatccatcgtta

SEQ ID NO: 176347 - DNA, 25 bp, Saccharomyces pastorianus
gacgtaaaagatcacgctcgtgtta

SEQ ID NO: 176348 - DNA, 25 bp, Saccharomyces pastorianus
aaagctcgctcaagaataacttcat

SEQ ID NO: 176349 - DNA, 25 bp, Saccharomyces pastorianus
aaatcaagagtatcaacgccgctaa

SEQ ID NO: 176350 - DNA, 25 bp, Saccharomyces pastorianus
catgccacttacttccacagtagtg

SEQ ID NO: 176351 - DNA, 25 bp, Saccharomyces pastorianus
tgagaactcaccagtctaccaagac

SEQ ID NO: 176352 - DNA, 25 bp, Saccharomyces pastorianus
tgctgccggcccaagaggtttaata

SEQ ID NO: 176353 - DNA, 25 bp, Saccharomyces pastorianus
caaagtcttctttggtaggcctaca

SEQ ID NO: 176354 - DNA, 25 bp, Saccharomyces pastorianus
cacatttctcgctcaatgggtcgaa

SEQ ID NO: 176355 - DNA, 25 bp, Saccharomyces pastorianus
agagatcacgccgaatacctatcgc

SEQ ID NO: 176356 - DNA, 25 bp, Saccharomyces pastorianus
tggtaggcctacactcggcgataaa

SEQ ID NO: 176357 - DNA, 25 bp, Saccharomyces pastorianus
ttatcagacgggactgcgccgtatg

SEQ ID NO: 176358 - DNA, 25 bp, Saccharomyces pastorianus
aaccgaagactattgagccgcctgt

SEQ ID NO: 176359 - DNA, 25 bp, Saccharomyces pastorianus
acaccttcgcgggtacagggttatg

SEQ ID NO: 176360 - DNA, 25 bp, Saccharomyces pastorianus
agactatgagtggtgcctgcaaaca

SEQ ID NO: 176361 - DNA, 25 bp, Saccharomyces pastorianus
gaacccaacgagaattctgctctgt

SEQ ID NO: 176362 - DNA, 25 bp, Saccharomyces pastorianus
tcacgtcttcgcgtccaattattac

SEQ ID NO: 176363 - DNA, 25 bp, Saccharomyces pastorianus
ttcacttcgacttccactgggatga

SEQ ID NO: 176364 - DNA, 25 bp, Saccharomyces pastorianus
tcagacacttcttcctcagacactt

SEQ ID NO: 176365 - DNA, 25 bp, Saccharomyces pastorianus
agacacttcttctctagtcacttct

SEQ ID NO: 176366 - DNA, 25 bp, Saccharomyces pastorianus
gaacttcagtaatttcttcctcaga

SEQ ID NO: 176367 - DNA, 25 bp, Saccharomyces pastorianus
ttctatcctagcaatggaacttcag

SEQ ID NO: 176368 - DNA, 25 bp, Saccharomyces pastorianus
aaaactccaactactgccatctcat

SEQ ID NO: 176369 - DNA, 25 bp, Saccharomyces pastorianus
agtcacttcttcagtcatttcttct

SEQ ID NO: 176370 - DNA, 25 bp, Saccharomyces pastorianus
aatttcttcctcagacacttcttcc

SEQ ID NO: 176371 - DNA, 25 bp, Saccharomyces pastorianus
tctctagtcacttcttcagtcattt

SEQ ID NO: 176372 - DNA, 25 bp, Saccharomyces pastorianus
gacacttcttcctcagacacttctt

SEQ ID NO: 176373 - DNA, 25 bp, Saccharomyces pastorianus
caccaaatcatcatggtagcgccta

SEQ ID NO: 176374 - DNA, 25 bp, Saccharomyces pastorianus
attcaccaaatcatcatggtagcgc

SEQ ID NO: 176375 - DNA, 25 bp, Saccharomyces pastorianus
ttcaccaaatcatcatggtagcgcc

SEQ ID NO: 176376 - DNA, 25 bp, Saccharomyces pastorianus
aattcaccaaatcatcatggtagcg

SEQ ID NO: 176377 - DNA, 25 bp, Saccharomyces pastorianus
atatcaaaattcaccaaatcatcat

SEQ ID NO: 176378 - DNA, 25 bp, Saccharomyces pastorianus
ttatatcaaaattcaccaaatcatc

SEQ ID NO: 176379 - DNA, 25 bp, Saccharomyces pastorianus
attatatcaaaattcaccaaatcat

SEQ ID NO: 176380 - DNA, 25 bp, Saccharomyces pastorianus
tcaccaaatcatcatggtagcgcct

SEQ ID NO: 176381 - DNA, 25 bp, Saccharomyces pastorianus
tatcaaaattcaccaaatcatcatg

SEQ ID NO: 176382 - DNA, 25 bp, Saccharomyces pastorianus
atcaaaattcaccaaatcatcatgg

SEQ ID NO: 176383 - DNA, 25 bp, Saccharomyces pastorianus
tatatcaaaattcaccaaatcatca

SEQ ID NO: 176384 - DNA, 25 bp, Saccharomyces pastorianus
ttgtcaacacaattagcgaactgag

SEQ ID NO: 176385 - DNA, 25 bp, Saccharomyces pastorianus
actggttgccaatgatttttttgtc

SEQ ID NO: 176386 - DNA, 25 bp, Saccharomyces pastorianus
ttttgtcaacacaattagcgaactg

SEQ ID NO: 176387 - DNA, 25 bp, Saccharomyces pastorianus
gatctcgtaggcaaaggactggttg

SEQ ID NO: 176388 - DNA, 25 bp, Saccharomyces pastorianus
aattagcgaactgagcagatgcttc

SEQ ID NO: 176389 - DNA, 25 bp, Saccharomyces pastorianus
cacaattagcgaactgagcagatgc

SEQ ID NO: 176390 - DNA, 25 bp, Saccharomyces pastorianus
aacacaattagcgaactgagcagat

SEQ ID NO: 176391 - DNA, 25 bp, Saccharomyces pastorianus
gcaaaggactggttgccaatgattt

SEQ ID NO: 176392 - DNA, 25 bp, Saccharomyces pastorianus
ttgccaatgatttttttgtcaacac

SEQ ID NO: 176393 - DNA, 25 bp, Saccharomyces pastorianus
aaaggactggttgccaatgattttt

SEQ ID NO: 176394 - DNA, 25 bp, Saccharomyces pastorianus
gtcaacacaattagcgaactgagca

SEQ ID NO: 176395 - DNA, 25 bp, Saccharomyces pastorianus
agaagtctcttaagaagaatgcagt

SEQ ID NO: 176396 - DNA, 25 bp, Saccharomyces pastorianus
gtctcttaagaagaatgcagttaca

SEQ ID NO: 176397 - DNA, 25 bp, Saccharomyces pastorianus
aagtctcttaagaagaatgcagtta

SEQ ID NO: 176398 - DNA, 25 bp, Saccharomyces pastorianus
gaagtctcttaagaagaatgcagtt

SEQ ID NO: 176399 - DNA, 25 bp, Saccharomyces pastorianus
agtctcttaagaagaatgcagttac

SEQ ID NO: 176400 - DNA, 25 bp, Saccharomyces pastorianus
tcttaagaagaatgcagttacatat

SEQ ID NO: 176401 - DNA, 25 bp, Saccharomyces pastorianus
cagaagtctcttaagaagaatgcag

SEQ ID NO: 176402 - DNA, 25 bp, Saccharomyces pastorianus
ctcttaagaagaatgcagttacata

SEQ ID NO: 176403 - DNA, 25 bp, Saccharomyces pastorianus
tcagaagtctcttaagaagaatgca

SEQ ID NO: 176404 - DNA, 25 bp, Saccharomyces pastorianus
tctcttaagaagaatgcagttacat

SEQ ID NO: 176405 - DNA, 25 bp, Saccharomyces pastorianus
ttcagaagtctcttaagaagaatgc

SEQ ID NO: 176406 - DNA, 25 bp, Saccharomyces pastorianus
tgtatttctacatactaatattacg

SEQ ID NO: 176407 - DNA, 25 bp, Saccharomyces pastorianus
atctgtatttctacatactaatatt

SEQ ID NO: 176408 - DNA, 25 bp, Saccharomyces pastorianus
atttctacatactaatattacgatt

SEQ ID NO: 176409 - DNA, 25 bp, Saccharomyces pastorianus
tctgtatttctacatactaatatta

SEQ ID NO: 176410 - DNA, 25 bp, Saccharomyces pastorianus
tatttctacatactaatattacgat

SEQ ID NO: 176411 - DNA, 25 bp, Saccharomyces pastorianus
ctgtatttctacatactaatattac

SEQ ID NO: 176412 - DNA, 25 bp, Saccharomyces pastorianus
aatctgtatttctacatactaatat

SEQ ID NO: 176413 - DNA, 25 bp, Saccharomyces pastorianus
gtatttctacatactaatattacga

SEQ ID NO: 176414 - DNA, 25 bp, Saccharomyces pastorianus
acccagctgggtttaaagacatctt

SEQ ID NO: 176415 - DNA, 25 bp, Saccharomyces pastorianus
cccagctgggtttaaagacatctta

SEQ ID NO: 176416 - DNA, 25 bp, Saccharomyces pastorianus
tattctcaattcttaacccagctgg

SEQ ID NO: 176417 - DNA, 25 bp, Saccharomyces pastorianus
ttctcaattcttaacccagctgggt

SEQ ID NO: 176418 - DNA, 25 bp, Saccharomyces pastorianus
ctattctcaattcttaacccagctg

SEQ ID NO: 176419 - DNA, 25 bp, Saccharomyces pastorianus
gctctattctcaattcttaacccag

SEQ ID NO: 176420 - DNA, 25 bp, Saccharomyces pastorianus
ctcaattcttaacccagctgggttt

SEQ ID NO: 176421 - DNA, 25 bp, Saccharomyces pastorianus
tctattctcaattcttaacccagct

SEQ ID NO: 176422 - DNA, 25 bp, Saccharomyces pastorianus
tctcaattcttaacccagctgggtt

SEQ ID NO: 176423 - DNA, 25 bp, Saccharomyces pastorianus
attctcaattcttaacccagctggg

SEQ ID NO: 176424 - DNA, 25 bp, Saccharomyces pastorianus
ctctattctcaattcttaacccagc

SEQ ID NO: 176425 - DNA, 25 bp, Saccharomyces pastorianus
gagtgatagtggcacaccagctcct

SEQ ID NO: 176426 - DNA, 25 bp, Saccharomyces pastorianus
ctcgaataaaagaagcaacaccaat

SEQ ID NO: 176427 - DNA, 25 bp, Saccharomyces pastorianus
gaagcaacaccaatgcaagtagtaa

SEQ ID NO: 176428 - DNA, 25 bp, Saccharomyces pastorianus
taactccccaacaacagcttttaca

SEQ ID NO: 176429 - DNA, 25 bp, Saccharomyces pastorianus
gcaagctttggaacagcagcagaat

SEQ ID NO: 176430 - DNA, 25 bp, Saccharomyces pastorianus
gacaacagcaagctttggaacagca

SEQ ID NO: 176431 - DNA, 25 bp, Saccharomyces pastorianus
aacagcttttacaaagacaacagca

SEQ ID NO: 176432 - DNA, 25 bp, Saccharomyces pastorianus
ttcagataaaccgaaggccaaacga

SEQ ID NO: 176433 - DNA, 25 bp, Saccharomyces pastorianus
tgatagtggcacaccagctcctaaa

SEQ ID NO: 176434 - DNA, 25 bp, Saccharomyces pastorianus
tggtggagccataaaaagctcgaat

SEQ ID NO: 176435 - DNA, 25 bp, Saccharomyces pastorianus
ctccccaacaacagcttttacaaag

SEQ ID NO: 176436 - DNA, 25 bp, Saccharomyces pastorianus
agaagcagtttcaaggttacatgat

SEQ ID NO: 176437 - DNA, 25 bp, Saccharomyces pastorianus
agtagatcagatacgctcaatgaag

SEQ ID NO: 176438 - DNA, 25 bp, Saccharomyces pastorianus
ccaagtagatcagatacgctcaatg

SEQ ID NO: 176439 - DNA, 25 bp, Saccharomyces pastorianus
gaaaactcagaagcagtttcaaggt

SEQ ID NO: 176440 - DNA, 25 bp, Saccharomyces pastorianus
gcagaaaactcagaagcagtttcaa

SEQ ID NO: 176441 - DNA, 25 bp, Saccharomyces pastorianus
ctcagaagcagtttcaaggttacat

SEQ ID NO: 176442 - DNA, 25 bp, Saccharomyces pastorianus
caagtagatcagatacgctcaatga

SEQ ID NO: 176443 - DNA, 25 bp, Saccharomyces pastorianus
tcagaagcagtttcaaggttacatg

SEQ ID NO: 176444 - DNA, 25 bp, Saccharomyces pastorianus
atgaagcagaaaactcagaagcagt

SEQ ID NO: 176445 - DNA, 25 bp, Saccharomyces pastorianus
actcagaagcagtttcaaggttaca

SEQ ID NO: 176446 - DNA, 25 bp, Saccharomyces pastorianus
gtagatcagatacgctcaatgaagc

SEQ ID NO: 176447 - DNA, 25 bp, Saccharomyces pastorianus
ggtatctagtgcagttaaatgtggc

SEQ ID NO: 176448 - DNA, 25 bp, Saccharomyces pastorianus
atgtggcatatgtcgcggagttgat

SEQ ID NO: 176449 - DNA, 25 bp, Saccharomyces pastorianus
gaattttgtccagtactgttaacga

SEQ ID NO: 176450 - DNA, 25 bp, Saccharomyces pastorianus
gatcataaacagttcactcgcaatg

SEQ ID NO: 176451 - DNA, 25 bp, Saccharomyces pastorianus
ggaaagcgaacaacccagggctggt

SEQ ID NO: 176452 - DNA, 25 bp, Saccharomyces pastorianus
aacccagggctggtacagaagctaa

SEQ ID NO: 176453 - DNA, 25 bp, Saccharomyces pastorianus
aatgtcctaaatgtggcgtacgata

SEQ ID NO: 176454 - DNA, 25 bp, Saccharomyces pastorianus
tgctgcaaagcatgttcataaggaa

SEQ ID NO: 176455 - DNA, 25 bp, Saccharomyces pastorianus
aacacggtgaagttccatttggcaa

SEQ ID NO: 176456 - DNA, 25 bp, Saccharomyces pastorianus
ggcgtacgatattgctccttgaaat

SEQ ID NO: 176457 - DNA, 25 bp, Saccharomyces pastorianus
gaaggcattcgatgatatatatcaa

SEQ ID NO: 176458 - DNA, 25 bp, Saccharomyces pastorianus
aacaacgtttacacatctactctgt

SEQ ID NO: 176459 - DNA, 25 bp, Saccharomyces pastorianus
acaacgtttacacatctactctgtt

SEQ ID NO: 176460 - DNA, 25 bp, Saccharomyces pastorianus
taaacaacgtttacacatctactct

SEQ ID NO: 176461 - DNA, 25 bp, Saccharomyces pastorianus
gtttacacatctactctgttgatga

SEQ ID NO: 176462 - DNA, 25 bp, Saccharomyces pastorianus
ttacacatctactctgttgatgaaa

SEQ ID NO: 176463 - DNA, 25 bp, Saccharomyces pastorianus
acgtttacacatctactctgttgat

SEQ ID NO: 176464 - DNA, 25 bp, Saccharomyces pastorianus
aaacaacgtttacacatctactctg

SEQ ID NO: 176465 - DNA, 25 bp, Saccharomyces pastorianus
aacgtttacacatctactctgttga

SEQ ID NO: 176466 - DNA, 25 bp, Saccharomyces pastorianus
tttacacatctactctgttgatgaa

SEQ ID NO: 176467 - DNA, 25 bp, Saccharomyces pastorianus
cgtttacacatctactctgttgatg

SEQ ID NO: 176468 - DNA, 25 bp, Saccharomyces pastorianus
caacgtttacacatctactctgttg

SEQ ID NO: 176469 - DNA, 25 bp, Saccharomyces pastorianus
tataccaatattacgattattcctc

SEQ ID NO: 176470 - DNA, 25 bp, Saccharomyces pastorianus
accaatattacgattattcctcatt

SEQ ID NO: 176471 - DNA, 25 bp, Saccharomyces pastorianus
ccaatattacgattattcctcattc

SEQ ID NO: 176472 - DNA, 25 bp, Saccharomyces pastorianus
ataccaatattacgattattcctca

SEQ ID NO: 176473 - DNA, 25 bp, Saccharomyces pastorianus
caatattacgattattcctcattcc

SEQ ID NO: 176474 - DNA, 25 bp, Saccharomyces pastorianus
aatattacgattattcctcattccg

SEQ ID NO: 176475 - DNA, 25 bp, Saccharomyces pastorianus
tatataccaatattacgattattcc

SEQ ID NO: 176476 - DNA, 25 bp, Saccharomyces pastorianus
tctatataccaatattacgattatt

SEQ ID NO: 176477 - DNA, 25 bp, Saccharomyces pastorianus
ctatataccaatattacgattattc

SEQ ID NO: 176478 - DNA, 25 bp, Saccharomyces pastorianus
atataccaatattacgattattcct

SEQ ID NO: 176479 - DNA, 25 bp, Saccharomyces pastorianus
taccaatattacgattattcctcat

SEQ ID NO: 176480 - DNA, 25 bp, Saccharomyces pastorianus
tacgttactagtatattatcatata

SEQ ID NO: 176481 - DNA, 25 bp, Saccharomyces pastorianus
ttacgttactagtatattatcatat

SEQ ID NO: 176482 - DNA, 25 bp, Saccharomyces pastorianus
tagtatttacgttactagtatatta

SEQ ID NO: 176483 - DNA, 25 bp, Saccharomyces pastorianus
atttacgttactagtatattatcat

SEQ ID NO: 176484 - DNA, 25 bp, Saccharomyces pastorianus
cgttactagtatattatcatatacg

SEQ ID NO: 176485 - DNA, 25 bp, Saccharomyces pastorianus
tatttacgttactagtatattatca

SEQ ID NO: 176486 - DNA, 25 bp, Saccharomyces pastorianus
tttacgttactagtatattatcata

SEQ ID NO: 176487 - DNA, 25 bp, Saccharomyces pastorianus
acgttactagtatattatcatatac

SEQ ID NO: 176488 - DNA, 25 bp, Saccharomyces pastorianus
agtatttacgttactagtatattat

SEQ ID NO: 176489 - DNA, 25 bp, Saccharomyces pastorianus
ctatcatctactaactagtatttac

SEQ ID NO: 176490 - DNA, 25 bp, Saccharomyces pastorianus
gtatttacgttactagtatattatc

SEQ ID NO: 176491 - DNA, 25 bp, Saccharomyces pastorianus
gaaacagatttttaggcacaaaggc

SEQ ID NO: 176492 - DNA, 25 bp, Saccharomyces pastorianus
taggcacaaaggcaatgagacttag

SEQ ID NO: 176493 - DNA, 25 bp, Saccharomyces pastorianus
aacagatttttaggcacaaaggcaa

SEQ ID NO: 176494 - DNA, 25 bp, Saccharomyces pastorianus
tttaggcacaaaggcaatgagactt

SEQ ID NO: 176495 - DNA, 25 bp, Saccharomyces pastorianus
aggcacaaaggcaatgagacttaga

SEQ ID NO: 176496 - DNA, 25 bp, Saccharomyces pastorianus
cagatttttaggcacaaaggcaatg

SEQ ID NO: 176497 - DNA, 25 bp, Saccharomyces pastorianus
gatttttaggcacaaaggcaatgag

SEQ ID NO: 176498 - DNA, 25 bp, Saccharomyces pastorianus
aaacagatttttaggcacaaaggca

SEQ ID NO: 176499 - DNA, 25 bp, Saccharomyces pastorianus
ttttaggcacaaaggcaatgagact

SEQ ID NO: 176500 - DNA, 25 bp, Saccharomyces pastorianus
agatttttaggcacaaaggcaatga

SEQ ID NO: 176501 - DNA, 25 bp, Saccharomyces pastorianus
tttttaggcacaaaggcaatgagac

SEQ ID NO: 176502 - DNA, 25 bp, Saccharomyces pastorianus
ttccgtcggtgtaaccaagctttgg

SEQ ID NO: 176503 - DNA, 25 bp, Saccharomyces pastorianus
tttggcctcagggaagtggtcatca

SEQ ID NO: 176504 - DNA, 25 bp, Saccharomyces pastorianus
tttttctcttcattcgtggcaatat

SEQ ID NO: 176505 - DNA, 25 bp, Saccharomyces pastorianus
gaaacctttccgcttagagtcaaat

SEQ ID NO: 176506 - DNA, 25 bp, Saccharomyces pastorianus
atgctgctttattgtgttcgcttcc

SEQ ID NO: 176507 - DNA, 25 bp, Saccharomyces pastorianus
tgtttttcatttttgcgttcgctac

SEQ ID NO: 176508 - DNA, 25 bp, Saccharomyces pastorianus
ggaagtcagcttcatgggtgccacc

SEQ ID NO: 176509 - DNA, 25 bp, Saccharomyces pastorianus
ggctagaaggcattccaccatggaa

SEQ ID NO: 176510 - DNA, 25 bp, Saccharomyces pastorianus
gctgtctatgtgttgccttctttta

SEQ ID NO: 176511 - DNA, 25 bp, Saccharomyces pastorianus
aggcggctgctttgttatcgtgtca

SEQ ID NO: 176512 - DNA, 25 bp, Saccharomyces pastorianus
ggctatgttttcattggctgtctat

SEQ ID NO: 176513 - DNA, 25 bp, Saccharomyces pastorianus
aaatcaacttacactgtcattcgaa

SEQ ID NO: 176514 - DNA, 25 bp, Saccharomyces pastorianus
aaaccaacgtcactactgtgtgcca

SEQ ID NO: 176515 - DNA, 25 bp, Saccharomyces pastorianus
acgtcactactgtgtgccaacacca

SEQ ID NO: 176516 - DNA, 25 bp, Saccharomyces pastorianus
gaatttccggcaaactccgactgag

SEQ ID NO: 176517 - DNA, 25 bp, Saccharomyces pastorianus
caacgtcactactgtgtgccaacac

SEQ ID NO: 176518 - DNA, 25 bp, Saccharomyces pastorianus
tcattcgaatttccggcaaactccg

SEQ ID NO: 176519 - DNA, 25 bp, Saccharomyces pastorianus
ctctgtgccacaaaaatcaacttac

SEQ ID NO: 176520 - DNA, 25 bp, Saccharomyces pastorianus
cactgtcattcgaatttccggcaaa

SEQ ID NO: 176521 - DNA, 25 bp, Saccharomyces pastorianus
ctgtcattcgaatttccggcaaact

SEQ ID NO: 176522 - DNA, 25 bp, Saccharomyces pastorianus
tacactgtcattcgaatttccggca

SEQ ID NO: 176523 - DNA, 25 bp, Saccharomyces pastorianus
tttccggcaaactccgactgagaaa

SEQ ID NO: 176524 - DNA, 25 bp, Saccharomyces pastorianus
caactaatacttaaaggtctatccg

SEQ ID NO: 176525 - DNA, 25 bp, Saccharomyces pastorianus
cgacagattggcctgtcaactaata

SEQ ID NO: 176526 - DNA, 25 bp, Saccharomyces pastorianus
agattggcctgtcaactaatactta

SEQ ID NO: 176527 - DNA, 25 bp, Saccharomyces pastorianus
cagattggcctgtcaactaatactt

SEQ ID NO: 176528 - DNA, 25 bp, Saccharomyces pastorianus
ttagcgacagattggcctgtcaact

SEQ ID NO: 176529 - DNA, 25 bp, Saccharomyces pastorianus
attggcctgtcaactaatacttaaa

SEQ ID NO: 176530 - DNA, 25 bp, Saccharomyces pastorianus
ttggcctgtcaactaatacttaaag

SEQ ID NO: 176531 - DNA, 25 bp, Saccharomyces pastorianus
ggcctgtcaactaatacttaaaggt

SEQ ID NO: 176532 - DNA, 25 bp, Saccharomyces pastorianus
gattggcctgtcaactaatacttaa

SEQ ID NO: 176533 - DNA, 25 bp, Saccharomyces pastorianus
tagcgacagattggcctgtcaacta

SEQ ID NO: 176534 - DNA, 25 bp, Saccharomyces pastorianus
ctgtcaactaatacttaaaggtcta

SEQ ID NO: 176535 - DNA, 25 bp, Saccharomyces pastorianus
gtcaatgtatgccttacagggtcat

SEQ ID NO: 176536 - DNA, 25 bp, Saccharomyces pastorianus
gcatatccatgcaccaagattcttg

SEQ ID NO: 176537 - DNA, 25 bp, Saccharomyces pastorianus
gaatattctgggaggcgctgatcat

SEQ ID NO: 176538 - DNA, 25 bp, Saccharomyces pastorianus
gatcgtgtatatcctgctatctatg

SEQ ID NO: 176539 - DNA, 25 bp, Saccharomyces pastorianus
caagcgggtctgagggccaattaga

SEQ ID NO: 176540 - DNA, 25 bp, Saccharomyces pastorianus
aaaggtgtatctctgcaggtatgga

SEQ ID NO: 176541 - DNA, 25 bp, Saccharomyces pastorianus
ggtaatattgtcatcagtgcctctt

SEQ ID NO: 176542 - DNA, 25 bp, Saccharomyces pastorianus
acttcagctcgatcacggcatgtta

SEQ ID NO: 176543 - DNA, 25 bp, Saccharomyces pastorianus
ttcttatgatcacaccgacttcagc

SEQ ID NO: 176544 - DNA, 25 bp, Saccharomyces pastorianus
gcctcttatgatagcacactgattg

SEQ ID NO: 176545 - DNA, 25 bp, Saccharomyces pastorianus
ggagagtgctccaatgcaacgaatt

SEQ ID NO: 176546 - DNA, 25 bp, Saccharomyces pastorianus
aaaatcataacaacactcaagaaac

SEQ ID NO: 176547 - DNA, 25 bp, Saccharomyces pastorianus
agaaaatcataacaacactcaagaa

SEQ ID NO: 176548 - DNA, 25 bp, Saccharomyces pastorianus
aaatcataacaacactcaagaaaca

SEQ ID NO: 176549 - DNA, 25 bp, Saccharomyces pastorianus
gaaaatcataacaacactcaagaaa

SEQ ID NO: 176550 - DNA, 25 bp, Saccharomyces pastorianus
acaacactcaagaaacaatacgata

SEQ ID NO: 176551 - DNA, 25 bp, Saccharomyces pastorianus
ataacaacactcaagaaacaatacg

SEQ ID NO: 176552 - DNA, 25 bp, Saccharomyces pastorianus
aacaacactcaagaaacaatacgat

SEQ ID NO: 176553 - DNA, 25 bp, Saccharomyces pastorianus
atcataacaacactcaagaaacaat

SEQ ID NO: 176554 - DNA, 25 bp, Saccharomyces pastorianus
aacactcaagaaacaatacgataca

SEQ ID NO: 176555 - DNA, 25 bp, Saccharomyces pastorianus
aatcataacaacactcaagaaacaa

SEQ ID NO: 176556 - DNA, 25 bp, Saccharomyces pastorianus
acactcaagaaacaatacgatacaa

SEQ ID NO: 176557 - DNA, 25 bp, Saccharomyces pastorianus
aaagatggaatcattcacgtaaaaa

SEQ ID NO: 176558 - DNA, 25 bp, Saccharomyces pastorianus
catgtaaaagatggaatcattcacg

SEQ ID NO: 176559 - DNA, 25 bp, Saccharomyces pastorianus
tcatgtaaaagatggaatcattcac

SEQ ID NO: 176560 - DNA, 25 bp, Saccharomyces pastorianus
aaactcatgtaaaagatggaatcat

SEQ ID NO: 176561 - DNA, 25 bp, Saccharomyces pastorianus
gtaaaagatggaatcattcacgtaa

SEQ ID NO: 176562 - DNA, 25 bp, Saccharomyces pastorianus
atgtaaaagatggaatcattcacgt

SEQ ID NO: 176563 - DNA, 25 bp, Saccharomyces pastorianus
aaaagatggaatcattcacgtaaaa

SEQ ID NO: 176564 - DNA, 25 bp, Saccharomyces pastorianus
aagatggaatcattcacgtaaaaaa

SEQ ID NO: 176565 - DNA, 25 bp, Saccharomyces pastorianus
taaaagatggaatcattcacgtaaa

SEQ ID NO: 176566 - DNA, 25 bp, Saccharomyces pastorianus
actcatgtaaaagatggaatcattc

SEQ ID NO: 176567 - DNA, 25 bp, Saccharomyces pastorianus
tgtaaaagatggaatcattcacgta

SEQ ID NO: 176568 - DNA, 25 bp, Saccharomyces pastorianus
atctgtggtttcgatttgcttcgcg

SEQ ID NO: 176569 - DNA, 25 bp, Saccharomyces pastorianus
tggctatcattatccgtcacgcgga

SEQ ID NO: 176570 - DNA, 25 bp, Saccharomyces pastorianus
aagcttactatgattcatgcgccaa

SEQ ID NO: 176571 - DNA, 25 bp, Saccharomyces pastorianus
ttgagaagtaccttcattgaagcca

SEQ ID NO: 176572 - DNA, 25 bp, Saccharomyces pastorianus
aaagattgttcttcaggccttaaga

SEQ ID NO: 176573 - DNA, 25 bp, Saccharomyces pastorianus
gggtattcaaaggactggctatcat

SEQ ID NO: 176574 - DNA, 25 bp, Saccharomyces pastorianus
aaagtgttagcaaacgctctagaaa

SEQ ID NO: 176575 - DNA, 25 bp, Saccharomyces pastorianus
gtcacgcggacagaacaccaaaaca

SEQ ID NO: 176576 - DNA, 25 bp, Saccharomyces pastorianus
tcaggccttaagaattgcgttagat

SEQ ID NO: 176577 - DNA, 25 bp, Saccharomyces pastorianus
gatttgcttcgcgtttctggtaaaa

SEQ ID NO: 176578 - DNA, 25 bp, Saccharomyces pastorianus
gaagaatctgcccattattcgtgaa

SEQ ID NO: 176579 - DNA, 25 bp, Saccharomyces pastorianus
ctcagtaaactgtagaaagaaatta

SEQ ID NO: 176580 - DNA, 25 bp, Saccharomyces pastorianus
acacagctcagtaaactgtagaaag

SEQ ID NO: 176581 - DNA, 25 bp, Saccharomyces pastorianus
cggaattacacagctcagtaaactg

SEQ ID NO: 176582 - DNA, 25 bp, Saccharomyces pastorianus
atcggaattacacagctcagtaaac

SEQ ID NO: 176583 - DNA, 25 bp, Saccharomyces pastorianus
attacacagctcagtaaactgtaga

SEQ ID NO: 176584 - DNA, 25 bp, Saccharomyces pastorianus
cacagctcagtaaactgtagaaaga

SEQ ID NO: 176585 - DNA, 25 bp, Saccharomyces pastorianus
gaattacacagctcagtaaactgta

SEQ ID NO: 176586 - DNA, 25 bp, Saccharomyces pastorianus
aattacacagctcagtaaactgtag

SEQ ID NO: 176587 - DNA, 25 bp, Saccharomyces pastorianus
ggaattacacagctcagtaaactgt

SEQ ID NO: 176588 - DNA, 25 bp, Saccharomyces pastorianus
tcggaattacacagctcagtaaact

SEQ ID NO: 176589 - DNA, 25 bp, Saccharomyces pastorianus
tacacagctcagtaaactgtagaaa

SEQ ID NO: 176590 - DNA, 25 bp, Saccharomyces pastorianus
cgtgctttctttcgtggtactgata

SEQ ID NO: 176591 - DNA, 25 bp, Saccharomyces pastorianus
gacagtcaagacgatgtgcctataa

SEQ ID NO: 176592 - DNA, 25 bp, Saccharomyces pastorianus
aaatcactcaatttccaccattcgt

SEQ ID NO: 176593 - DNA, 25 bp, Saccharomyces pastorianus
aatactgctcttcccaaagacacat

SEQ ID NO: 176594 - DNA, 25 bp, Saccharomyces pastorianus
aagaaacctaatgcgtctccagtgc

SEQ ID NO: 176595 - DNA, 25 bp, Saccharomyces pastorianus
ggttattgattcgagttctttccaa

SEQ ID NO: 176596 - DNA, 25 bp, Saccharomyces pastorianus
tacgtcctactttttgtgtggttgt

SEQ ID NO: 176597 - DNA, 25 bp, Saccharomyces pastorianus
taatgccgggagcttcgacgacaat

SEQ ID NO: 176598 - DNA, 25 bp, Saccharomyces pastorianus
agtactgctctctttggaaacgtga

SEQ ID NO: 176599 - DNA, 25 bp, Saccharomyces pastorianus
aactgcaatgttcactccttttacg

SEQ ID NO: 176600 - DNA, 25 bp, Saccharomyces pastorianus
tttttctccttttcgtccaagattg

SEQ ID NO: 176601 - DNA, 25 bp, Saccharomyces pastorianus
tatccttatcctttcattcatcgaa

SEQ ID NO: 176602 - DNA, 25 bp, Saccharomyces pastorianus
ttatcctttcattcatcgaatgctt

SEQ ID NO: 176603 - DNA, 25 bp, Saccharomyces pastorianus
ccttatcctttcattcatcgaatgc

SEQ ID NO: 176604 - DNA, 25 bp, Saccharomyces pastorianus
atcctttcattcatcgaatgcttgc

SEQ ID NO: 176605 - DNA, 25 bp, Saccharomyces pastorianus
atccttatcctttcattcatcgaat

SEQ ID NO: 176606 - DNA, 25 bp, Saccharomyces pastorianus
cttatcctttcattcatcgaatgct

SEQ ID NO: 176607 - DNA, 25 bp, Saccharomyces pastorianus
tatcctttcattcatcgaatgcttg

SEQ ID NO: 176608 - DNA, 25 bp, Saccharomyces pastorianus
tccttatcctttcattcatcgaatg

SEQ ID NO: 176609 - DNA, 25 bp, Saccharomyces pastorianus
tgtacagtaatggagcttcccctca

SEQ ID NO: 176610 - DNA, 25 bp, Saccharomyces pastorianus
cgcctattaactcttctgcaacaat

SEQ ID NO: 176611 - DNA, 25 bp, Saccharomyces pastorianus
ctcaacaaacgcctattaactcttc

SEQ ID NO: 176612 - DNA, 25 bp, Saccharomyces pastorianus
acaaacgcctattaactcttctgca

SEQ ID NO: 176613 - DNA, 25 bp, Saccharomyces pastorianus
agtaatggagcttcccctcaattac

SEQ ID NO: 176614 - DNA, 25 bp, Saccharomyces pastorianus
tggagcttcccctcaattacaagct

SEQ ID NO: 176615 - DNA, 25 bp, Saccharomyces pastorianus
agcttcccctcaattacaagctcaa

SEQ ID NO: 176616 - DNA, 25 bp, Saccharomyces pastorianus
tacagtaatggagcttcccctcaat

SEQ ID NO: 176617 - DNA, 25 bp, Saccharomyces pastorianus
atcctgctcaacaaacgcctattaa

SEQ ID NO: 176618 - DNA, 25 bp, Saccharomyces pastorianus
aaacgcctattaactcttctgcaac

SEQ ID NO: 176619 - DNA, 25 bp, Saccharomyces pastorianus
cctattaactcttctgcaacaatgt

SEQ ID NO: 176620 - DNA, 25 bp, Saccharomyces pastorianus
ccaatatccagtacgggtggtacca

SEQ ID NO: 176621 - DNA, 25 bp, Saccharomyces pastorianus
gatttcagacactcagactcgtaca

SEQ ID NO: 176622 - DNA, 25 bp, Saccharomyces pastorianus
tttcagacactcagactcgtacagt

SEQ ID NO: 176623 - DNA, 25 bp, Saccharomyces pastorianus
aaatctaaagatttcagacactcag

SEQ ID NO: 176624 - DNA, 25 bp, Saccharomyces pastorianus
taaagatttcagacactcagactcg

SEQ ID NO: 176625 - DNA, 25 bp, Saccharomyces pastorianus
aacgtaccaatatccagtacgggtg

SEQ ID NO: 176626 - DNA, 25 bp, Saccharomyces pastorianus
gagactaatcatacaaacgtaccaa

SEQ ID NO: 176627 - DNA, 25 bp, Saccharomyces pastorianus
aagatttcagacactcagactcgta

SEQ ID NO: 176628 - DNA, 25 bp, Saccharomyces pastorianus
tcatacaaacgtaccaatatccagt

SEQ ID NO: 176629 - DNA, 25 bp, Saccharomyces pastorianus
atttcagacactcagactcgtacag

SEQ ID NO: 176630 - DNA, 25 bp, Saccharomyces pastorianus
gtaccaatatccagtacgggtggta

SEQ ID NO: 176631 - DNA, 25 bp, Saccharomyces pastorianus
agatgaagtatcaggtaataattta

SEQ ID NO: 176632 - DNA, 25 bp, Saccharomyces pastorianus
acgtatactacatcgagaccaagaa

SEQ ID NO: 176633 - DNA, 25 bp, Saccharomyces pastorianus
catcgagaccaagaagaacattgct

SEQ ID NO: 176634 - DNA, 25 bp, Saccharomyces pastorianus
gtatactacatcgagaccaagaaga

SEQ ID NO: 176635 - DNA, 25 bp, Saccharomyces pastorianus
ctacatcgagaccaagaagaacatt

SEQ ID NO: 176636 - DNA, 25 bp, Saccharomyces pastorianus
atactacatcgagaccaagaagaac

SEQ ID NO: 176637 - DNA, 25 bp, Saccharomyces pastorianus
caggtaataatttatacgtatacta

SEQ ID NO: 176638 - DNA, 25 bp, Saccharomyces pastorianus
cgtatactacatcgagaccaagaag

SEQ ID NO: 176639 - DNA, 25 bp, Saccharomyces pastorianus
gaccaagaagaacattgctgatgtg

SEQ ID NO: 176640 - DNA, 25 bp, Saccharomyces pastorianus
atcaggtaataatttatacgtatac

SEQ ID NO: 176641 - DNA, 25 bp, Saccharomyces pastorianus
tactacatcgagaccaagaagaaca

SEQ ID NO: 176642 - DNA, 25 bp, Saccharomyces pastorianus
tgctaagtcgctgtcctcttcaaaa

SEQ ID NO: 176643 - DNA, 25 bp, Saccharomyces pastorianus
tttcttcagcgtttatttcgaagtt

SEQ ID NO: 176644 - DNA, 25 bp, Saccharomyces pastorianus
atgatggcaccatcggattatccag

SEQ ID NO: 176645 - DNA, 25 bp, Saccharomyces pastorianus
gtcgctgtcctcttcaaaaccagga

SEQ ID NO: 176646 - DNA, 25 bp, Saccharomyces pastorianus
ggattatccagttcttcgatttcgt

SEQ ID NO: 176647 - DNA, 25 bp, Saccharomyces pastorianus
agttcttcgatttcgtatccaggcg

SEQ ID NO: 176648 - DNA, 25 bp, Saccharomyces pastorianus
gtggaagtgctaagtcgctgtcctc

SEQ ID NO: 176649 - DNA, 25 bp, Saccharomyces pastorianus
aggcggaaggaatgtatcctcattt

SEQ ID NO: 176650 - DNA, 25 bp, Saccharomyces pastorianus
gaatgtatcctcatttaccgatgat

SEQ ID NO: 176651 - DNA, 25 bp, Saccharomyces pastorianus
gcgtttatttcgaagttgcttggag

SEQ ID NO: 176652 - DNA, 25 bp, Saccharomyces pastorianus
ttcgatttcgtatccaggcggtggt

SEQ ID NO: 176653 - DNA, 25 bp, Saccharomyces pastorianus
accaaattttcatggtagcgcctat

SEQ ID NO: 176654 - DNA, 25 bp, Saccharomyces pastorianus
attcaccaaattttcatggtagcgc

SEQ ID NO: 176655 - DNA, 25 bp, Saccharomyces pastorianus
tcaccaaattttcatggtagcgcct

SEQ ID NO: 176656 - DNA, 25 bp, Saccharomyces pastorianus
aaaattcaccaaattttcatggtag

SEQ ID NO: 176657 - DNA, 25 bp, Saccharomyces pastorianus
aaattttcatggtagcgcctatgct

SEQ ID NO: 176658 - DNA, 25 bp, Saccharomyces pastorianus
attttcatggtagcgcctatgcttc

SEQ ID NO: 176659 - DNA, 25 bp, Saccharomyces pastorianus
caccaaattttcatggtagcgccta

SEQ ID NO: 176660 - DNA, 25 bp, Saccharomyces pastorianus
caaaattcaccaaattttcatggta

SEQ ID NO: 176661 - DNA, 25 bp, Saccharomyces pastorianus
gaaccatcatcatgtctctcctcaa

SEQ ID NO: 176662 - DNA, 25 bp, Saccharomyces pastorianus
ttcaccaaattttcatggtagcgcc

SEQ ID NO: 176663 - DNA, 25 bp, Saccharomyces pastorianus
aaattcaccaaattttcatggtagc

SEQ ID NO: 176664 - DNA, 25 bp, Saccharomyces pastorianus
agaagaagatggtgttgtcccctcc

SEQ ID NO: 176665 - DNA, 25 bp, Saccharomyces pastorianus
gaagaagatggtgttgtcccctcca

SEQ ID NO: 176666 - DNA, 25 bp, Saccharomyces pastorianus
tagaagaagatggtgttgtcccctc

SEQ ID NO: 176667 - DNA, 25 bp, Saccharomyces pastorianus
cacgatcattaagcaaaccttagaa

SEQ ID NO: 176668 - DNA, 25 bp, Saccharomyces pastorianus
tatccacagatccacgatcattaag

SEQ ID NO: 176669 - DNA, 25 bp, Saccharomyces pastorianus
gatcattaagcaaaccttagaagaa

SEQ ID NO: 176670 - DNA, 25 bp, Saccharomyces pastorianus
agaagatggtgttgtcccctccaca

SEQ ID NO: 176671 - DNA, 25 bp, Saccharomyces pastorianus
aagaagatggtgttgtcccctccac

SEQ ID NO: 176672 - DNA, 25 bp, Saccharomyces pastorianus
gatccacgatcattaagcaaacctt

SEQ ID NO: 176673 - DNA, 25 bp, Saccharomyces pastorianus
attatccacagatccacgatcatta

SEQ ID NO: 176674 - DNA, 25 bp, Saccharomyces pastorianus
atccacgatcattaagcaaacctta

SEQ ID NO: 176675 - DNA, 25 bp, Saccharomyces pastorianus
ttaaaccggagctatctgcaaccca

SEQ ID NO: 176676 - DNA, 25 bp, Saccharomyces pastorianus
ttgaaggcttaaaccggagctatct

SEQ ID NO: 176677 - DNA, 25 bp, Saccharomyces pastorianus
attgaaggcttaaaccggagctatc

SEQ ID NO: 176678 - DNA, 25 bp, Saccharomyces pastorianus
cttaaaccggagctatctgcaaccc

SEQ ID NO: 176679 - DNA, 25 bp, Saccharomyces pastorianus
tgaaggcttaaaccggagctatctg

SEQ ID NO: 176680 - DNA, 25 bp, Saccharomyces pastorianus
ccagctattgaaggcttaaaccgga

SEQ ID NO: 176681 - DNA, 25 bp, Saccharomyces pastorianus
ggcttaaaccggagctatctgcaac

SEQ ID NO: 176682 - DNA, 25 bp, Saccharomyces pastorianus
aggcttaaaccggagctatctgcaa

SEQ ID NO: 176683 - DNA, 25 bp, Saccharomyces pastorianus
tattgaaggcttaaaccggagctat

SEQ ID NO: 176684 - DNA, 25 bp, Saccharomyces pastorianus
gctattgaaggcttaaaccggagct

SEQ ID NO: 176685 - DNA, 25 bp, Saccharomyces pastorianus
gcttaaaccggagctatctgcaacc

SEQ ID NO: 176686 - DNA, 25 bp, Saccharomyces pastorianus
gttcttctggcttttgttctctaca

SEQ ID NO: 176687 - DNA, 25 bp, Saccharomyces pastorianus
aaggagcagctcttctactagcagc

SEQ ID NO: 176688 - DNA, 25 bp, Saccharomyces pastorianus
acattgatcccgctgtggttcagaa

SEQ ID NO: 176689 - DNA, 25 bp, Saccharomyces pastorianus
gggcgtcttgatttcatttggctta

SEQ ID NO: 176690 - DNA, 25 bp, Saccharomyces pastorianus
ggtggacttttattcgctccagtta

SEQ ID NO: 176691 - DNA, 25 bp, Saccharomyces pastorianus
ggagctttatctaacgcagggcgtc

SEQ ID NO: 176692 - DNA, 25 bp, Saccharomyces pastorianus
ggctttaccatgtatcttcggttca

SEQ ID NO: 176693 - DNA, 25 bp, Saccharomyces pastorianus
agctttttctacaactctctgggag

SEQ ID NO: 176694 - DNA, 25 bp, Saccharomyces pastorianus
gttctctacaatttctgtacctggg

SEQ ID NO: 176695 - DNA, 25 bp, Saccharomyces pastorianus
agaaaagatcgctggcctctgggat

SEQ ID NO: 176696 - DNA, 25 bp, Saccharomyces pastorianus
gtgtcattgcacttacgttaactag

SEQ ID NO: 176697 - DNA, 25 bp, Saccharomyces pastorianus
gatagcggaatattttgtctcaaag

SEQ ID NO: 176698 - DNA, 25 bp, Saccharomyces pastorianus
ttctgctaccgatgtacgcaattgt

SEQ ID NO: 176699 - DNA, 25 bp, Saccharomyces pastorianus
gcaaagatcctgatcgtcatggata

SEQ ID NO: 176700 - DNA, 25 bp, Saccharomyces pastorianus
gaatacgcagtgaattctgctaccg

SEQ ID NO: 176701 - DNA, 25 bp, Saccharomyces pastorianus
taaaacaaccaggacttagcgctat

SEQ ID NO: 176702 - DNA, 25 bp, Saccharomyces pastorianus
atcagaaccataatcaccgatgcga

SEQ ID NO: 176703 - DNA, 25 bp, Saccharomyces pastorianus
tcaccgatgcgataactctgttaag

SEQ ID NO: 176704 - DNA, 25 bp, Saccharomyces pastorianus
cacttaaggcgatatctggtcaacc

SEQ ID NO: 176705 - DNA, 25 bp, Saccharomyces pastorianus
attcatcatatattctctggtacac

SEQ ID NO: 176706 - DNA, 25 bp, Saccharomyces pastorianus
gtacaggtcaattgccacttaaggc

SEQ ID NO: 176707 - DNA, 25 bp, Saccharomyces pastorianus
ggacttagcgctataatcttatgca

SEQ ID NO: 176708 - DNA, 25 bp, Saccharomyces pastorianus
ttcgaacctgtttttgccatttata

SEQ ID NO: 176709 - DNA, 25 bp, Saccharomyces pastorianus
tacattgaggatctagttgctacag

SEQ ID NO: 176710 - DNA, 25 bp, Saccharomyces pastorianus
ggactttcaaggcataatatctgac

SEQ ID NO: 176711 - DNA, 25 bp, Saccharomyces pastorianus
aactgtatataagccgtttactgga

SEQ ID NO: 176712 - DNA, 25 bp, Saccharomyces pastorianus
ggccgaaagcatggcattttatcac

SEQ ID NO: 176713 - DNA, 25 bp, Saccharomyces pastorianus
ataccgttgcttatcacaaatacat

SEQ ID NO: 176714 - DNA, 25 bp, Saccharomyces pastorianus
aaggttaataccgttgcttatcaca

SEQ ID NO: 176715 - DNA, 25 bp, Saccharomyces pastorianus
aatatctgacgaattggaggccgaa

SEQ ID NO: 176716 - DNA, 25 bp, Saccharomyces pastorianus
gtgacgggttgttaactgtatataa

SEQ ID NO: 176717 - DNA, 25 bp, Saccharomyces pastorianus
cactgagggctgcagaagagaaata

SEQ ID NO: 176718 - DNA, 25 bp, Saccharomyces pastorianus
ttgctacagttgatagtgacgggtt

SEQ ID NO: 176719 - DNA, 25 bp, Saccharomyces pastorianus
acatcacatacctttattcatacga

SEQ ID NO: 176720 - DNA, 25 bp, Saccharomyces pastorianus
tcgcgacatcacatacctttattca

SEQ ID NO: 176721 - DNA, 25 bp, Saccharomyces pastorianus
ttcgcgacatcacatacctttattc

SEQ ID NO: 176722 - DNA, 25 bp, Saccharomyces pastorianus
cgcgacatcacatacctttattcat

SEQ ID NO: 176723 - DNA, 25 bp, Saccharomyces pastorianus
gacatcacatacctttattcatacg

SEQ ID NO: 176724 - DNA, 25 bp, Saccharomyces pastorianus
gttcgcgacatcacatacctttatt

SEQ ID NO: 176725 - DNA, 25 bp, Saccharomyces pastorianus
aaaggttcgcgacatcacatacctt

SEQ ID NO: 176726 - DNA, 25 bp, Saccharomyces pastorianus
gcgacatcacatacctttattcata

SEQ ID NO: 176727 - DNA, 25 bp, Saccharomyces pastorianus
tcaaaggttcgcgacatcacatacc

SEQ ID NO: 176728 - DNA, 25 bp, Saccharomyces pastorianus
aggttcgcgacatcacataccttta

SEQ ID NO: 176729 - DNA, 25 bp, Saccharomyces pastorianus
ggttcgcgacatcacatacctttat

SEQ ID NO: 176730 - DNA, 25 bp, Saccharomyces pastorianus
ggtggatcagtatcctgatgtcaat

SEQ ID NO: 176731 - DNA, 25 bp, Saccharomyces pastorianus
gacaagtattatatcccggtggatc

SEQ ID NO: 176732 - DNA, 25 bp, Saccharomyces pastorianus
cagtatcctgatgtcaattttgttg

SEQ ID NO: 176733 - DNA, 25 bp, Saccharomyces pastorianus
tgagatagccctaaagaccatccct

SEQ ID NO: 176734 - DNA, 25 bp, Saccharomyces pastorianus
acccgtgagcacaggtatagaaaga

SEQ ID NO: 176735 - DNA, 25 bp, Saccharomyces pastorianus
gagacccaccaaatttcaggacaag

SEQ ID NO: 176736 - DNA, 25 bp, Saccharomyces pastorianus
cccaccaaatttcaggacaagtatt

SEQ ID NO: 176737 - DNA, 25 bp, Saccharomyces pastorianus
attaaacttgttgagatagccctaa

SEQ ID NO: 176738 - DNA, 25 bp, Saccharomyces pastorianus
tagccctaaagaccatcccttactt

SEQ ID NO: 176739 - DNA, 25 bp, Saccharomyces pastorianus
atatcccggtggatcagtatcctga

SEQ ID NO: 176740 - DNA, 25 bp, Saccharomyces pastorianus
ggatgattacaagagacccaccaaa

SEQ ID NO: 176741 - DNA, 25 bp, Saccharomyces pastorianus
ttaaaccggagctatctgcaaccca

SEQ ID NO: 176742 - DNA, 25 bp, Saccharomyces pastorianus
ttgaaggcttaaaccggagctatct

SEQ ID NO: 176743 - DNA, 25 bp, Saccharomyces pastorianus
attgaaggcttaaaccggagctatc

SEQ ID NO: 176744 - DNA, 25 bp, Saccharomyces pastorianus
cttaaaccggagctatctgcaaccc

SEQ ID NO: 176745 - DNA, 25 bp, Saccharomyces pastorianus
tgaaggcttaaaccggagctatctg

SEQ ID NO: 176746 - DNA, 25 bp, Saccharomyces pastorianus
ccagctattgaaggcttaaaccgga

SEQ ID NO: 176747 - DNA, 25 bp, Saccharomyces pastorianus
ggcttaaaccggagctatctgcaac

SEQ ID NO: 176748 - DNA, 25 bp, Saccharomyces pastorianus
aggcttaaaccggagctatctgcaa

SEQ ID NO: 176749 - DNA, 25 bp, Saccharomyces pastorianus
tattgaaggcttaaaccggagctat

SEQ ID NO: 176750 - DNA, 25 bp, Saccharomyces pastorianus
gctattgaaggcttaaaccggagct

SEQ ID NO: 176751 - DNA, 25 bp, Saccharomyces pastorianus
gcttaaaccggagctatctgcaacc

SEQ ID NO: 176752 - DNA, 25 bp, Saccharomyces pastorianus
agcggtttataccctgtgccattta

SEQ ID NO: 176753 - DNA, 25 bp, Saccharomyces pastorianus
cactgcctcagcggtttataccctg

SEQ ID NO: 176754 - DNA, 25 bp, Saccharomyces pastorianus
acggcactgcctcagcggtttatac

SEQ ID NO: 176755 - DNA, 25 bp, Saccharomyces pastorianus
cataacgcccatgattatctacatt

SEQ ID NO: 176756 - DNA, 25 bp, Saccharomyces pastorianus
actgcctcagcggtttataccctgt

SEQ ID NO: 176757 - DNA, 25 bp, Saccharomyces pastorianus
ctgcctcagcggtttataccctgtg

SEQ ID NO: 176758 - DNA, 25 bp, Saccharomyces pastorianus
ggcactgcctcagcggtttataccc

SEQ ID NO: 176759 - DNA, 25 bp, Saccharomyces pastorianus
gcactgcctcagcggtttataccct

SEQ ID NO: 176760 - DNA, 25 bp, Saccharomyces pastorianus
cggcactgcctcagcggtttatacc

SEQ ID NO: 176761 - DNA, 25 bp, Saccharomyces pastorianus
cccataacgcccatgattatctaca

SEQ ID NO: 176762 - DNA, 25 bp, Saccharomyces pastorianus
ccataacgcccatgattatctacat

SEQ ID NO: 176763 - DNA, 25 bp, Saccharomyces pastorianus
acgtatactacatcgagaccaagat

SEQ ID NO: 176764 - DNA, 25 bp, Saccharomyces pastorianus
tatactacatcgagaccaagatgaa

SEQ ID NO: 176765 - DNA, 25 bp, Saccharomyces pastorianus
gtatactacatcgagaccaagatga

SEQ ID NO: 176766 - DNA, 25 bp, Saccharomyces pastorianus
ctacatcgagaccaagatgaacatt

SEQ ID NO: 176767 - DNA, 25 bp, Saccharomyces pastorianus
atactacatcgagaccaagatgaac

SEQ ID NO: 176768 - DNA, 25 bp, Saccharomyces pastorianus
acatcgagaccaagatgaacattgc

SEQ ID NO: 176769 - DNA, 25 bp, Saccharomyces pastorianus
tacatcgagaccaagatgaacattg

SEQ ID NO: 176770 - DNA, 25 bp, Saccharomyces pastorianus
cgtatactacatcgagaccaagatg

SEQ ID NO: 176771 - DNA, 25 bp, Saccharomyces pastorianus
agaccaagatgaacattgctgatgt

SEQ ID NO: 176772 - DNA, 25 bp, Saccharomyces pastorianus
atcgagaccaagatgaacattgctg

SEQ ID NO: 176773 - DNA, 25 bp, Saccharomyces pastorianus
tactacatcgagaccaagatgaaca

SEQ ID NO: 176774 - DNA, 25 bp, Saccharomyces pastorianus
tctacgcctgaattagttccacttg

SEQ ID NO: 176775 - DNA, 25 bp, Saccharomyces pastorianus
aacttgactcttcgtttgacctgaa

SEQ ID NO: 176776 - DNA, 25 bp, Saccharomyces pastorianus
catttagcgcacaatcagcatccag

SEQ ID NO: 176777 - DNA, 25 bp, Saccharomyces pastorianus
aaaactgacgcgcagggcttcattt

SEQ ID NO: 176778 - DNA, 25 bp, Saccharomyces pastorianus
tttgcccgaccaatcttcgctagaa

SEQ ID NO: 176779 - DNA, 25 bp, Saccharomyces pastorianus
gaaacttctccaatgaactctgaat

SEQ ID NO: 176780 - DNA, 25 bp, Saccharomyces pastorianus
atgtcggcgctaacacgaattctaa

SEQ ID NO: 176781 - DNA, 25 bp, Saccharomyces pastorianus
cttattgtcgtcgtcgtactggata

SEQ ID NO: 176782 - DNA, 25 bp, Saccharomyces pastorianus
gaacgcttcatttagtgacgcagac

SEQ ID NO: 176783 - DNA, 25 bp, Saccharomyces pastorianus
taactacacatattcttccggctca

SEQ ID NO: 176784 - DNA, 25 bp, Saccharomyces pastorianus
gcattaaaccgttctgattcttctg

SEQ ID NO: 176785 - DNA, 25 bp, Saccharomyces pastorianus
tcccaacaattatctcaacattcac

SEQ ID NO: 176786 - DNA, 25 bp, Saccharomyces pastorianus
atggaatcccaacaattatctcaac

SEQ ID NO: 176787 - DNA, 25 bp, Saccharomyces pastorianus
tctcaacattcacccatttctcatg

SEQ ID NO: 176788 - DNA, 25 bp, Saccharomyces pastorianus
ggaatcccaacaattatctcaacat

SEQ ID NO: 176789 - DNA, 25 bp, Saccharomyces pastorianus
atcccaacaattatctcaacattca

SEQ ID NO: 176790 - DNA, 25 bp, Saccharomyces pastorianus
tggaatcccaacaattatctcaaca

SEQ ID NO: 176791 - DNA, 25 bp, Saccharomyces pastorianus
aatcccaacaattatctcaacattc

SEQ ID NO: 176792 - DNA, 25 bp, Saccharomyces pastorianus
tcaacattcacccatttctcatggt

SEQ ID NO: 176793 - DNA, 25 bp, Saccharomyces pastorianus
cccaacaattatctcaacattcacc

SEQ ID NO: 176794 - DNA, 25 bp, Saccharomyces pastorianus
gaatcccaacaattatctcaacatt

SEQ ID NO: 176795 - DNA, 25 bp, Saccharomyces pastorianus
atctcaacattcacccatttctcat

SEQ ID NO: 176796 - DNA, 25 bp, Saccharomyces pastorianus
atccatcacgcaaactcttattggc

SEQ ID NO: 176797 - DNA, 25 bp, Saccharomyces pastorianus
catccatcacgcaaactcttattgg

SEQ ID NO: 176798 - DNA, 25 bp, Saccharomyces pastorianus
cattccaaggttacgcccttacatc

SEQ ID NO: 176799 - DNA, 25 bp, Saccharomyces pastorianus
catccttcgtggcattccaaggtta

SEQ ID NO: 176800 - DNA, 25 bp, Saccharomyces pastorianus
ttccaaggttacgcccttacatcca

SEQ ID NO: 176801 - DNA, 25 bp, Saccharomyces pastorianus
ggcattccaaggttacgcccttaca

SEQ ID NO: 176802 - DNA, 25 bp, Saccharomyces pastorianus
tggcattccaaggttacgcccttac

SEQ ID NO: 176803 - DNA, 25 bp, Saccharomyces pastorianus
tccatcacgcaaactcttattggct

SEQ ID NO: 176804 - DNA, 25 bp, Saccharomyces pastorianus
gtggcattccaaggttacgccctta

SEQ ID NO: 176805 - DNA, 25 bp, Saccharomyces pastorianus
gcattccaaggttacgcccttacat

SEQ ID NO: 176806 - DNA, 25 bp, Saccharomyces pastorianus
atccttcgtggcattccaaggttac

SEQ ID NO: 176807 - DNA, 25 bp, Saccharomyces pastorianus
gttctttacattgaagaggccttgc

SEQ ID NO: 176808 - DNA, 25 bp, Saccharomyces pastorianus
gcaagagtagacgaacaatggaatc

SEQ ID NO: 176809 - DNA, 25 bp, Saccharomyces pastorianus
caatggaatcagttcagttctgaaa

SEQ ID NO: 176810 - DNA, 25 bp, Saccharomyces pastorianus
ttctagagccattttccctaacaaa

SEQ ID NO: 176811 - DNA, 25 bp, Saccharomyces pastorianus
agaggccttgcaagtctactttgca

SEQ ID NO: 176812 - DNA, 25 bp, Saccharomyces pastorianus
gttcaagtcattcaaggagtcagtt

SEQ ID NO: 176813 - DNA, 25 bp, Saccharomyces pastorianus
attgaatgtaattgacttgcaaggc

SEQ ID NO: 176814 - DNA, 25 bp, Saccharomyces pastorianus
caaggagtcagttctttacattgaa

SEQ ID NO: 176815 - DNA, 25 bp, Saccharomyces pastorianus
acggcgcaaagttcaagtcattcaa

SEQ ID NO: 176816 - DNA, 25 bp, Saccharomyces pastorianus
ttccctaacaaaagacaacggcgca

SEQ ID NO: 176817 - DNA, 25 bp, Saccharomyces pastorianus
tgctatgagtcatttagaacattca

SEQ ID NO: 176818 - DNA, 25 bp, Saccharomyces pastorianus
aggtattactgcatgctatacaacc

SEQ ID NO: 176819 - DNA, 25 bp, Saccharomyces pastorianus
acagaggtattactgcatgctatac

SEQ ID NO: 176820 - DNA, 25 bp, Saccharomyces pastorianus
gctatacaaccacggcagattctag

SEQ ID NO: 176821 - DNA, 25 bp, Saccharomyces pastorianus
gaacagaggtattactgcatgctat

SEQ ID NO: 176822 - DNA, 25 bp, Saccharomyces pastorianus
tctttacgaacagaggtattactgc

SEQ ID NO: 176823 - DNA, 25 bp, Saccharomyces pastorianus
cagaggtattactgcatgctataca

SEQ ID NO: 176824 - DNA, 25 bp, Saccharomyces pastorianus
tacgaacagaggtattactgcatgc

SEQ ID NO: 176825 - DNA, 25 bp, Saccharomyces pastorianus
atacaaccacggcagattctagagc

SEQ ID NO: 176826 - DNA, 25 bp, Saccharomyces pastorianus
tacaaccacggcagattctagagca

SEQ ID NO: 176827 - DNA, 25 bp, Saccharomyces pastorianus
atgctatacaaccacggcagattct

SEQ ID NO: 176828 - DNA, 25 bp, Saccharomyces pastorianus
gaggtattactgcatgctatacaac

SEQ ID NO: 176829 - DNA, 25 bp, Saccharomyces pastorianus
ccgagacaacgctgttaaggcctat

SEQ ID NO: 176830 - DNA, 25 bp, Saccharomyces pastorianus
gtattgtcacttccaattggctcac

SEQ ID NO: 176831 - DNA, 25 bp, Saccharomyces pastorianus
tacctccgtggtttccaagagctat

SEQ ID NO: 176832 - DNA, 25 bp, Saccharomyces pastorianus
ggtgctgtttgttcttcagtgactt

SEQ ID NO: 176833 - DNA, 25 bp, Saccharomyces pastorianus
ggttccgcagaacatcagtccgtgg

SEQ ID NO: 176834 - DNA, 25 bp, Saccharomyces pastorianus
ggccgacgagctccagttcattatg

SEQ ID NO: 176835 - DNA, 25 bp, Saccharomyces pastorianus
gtgactttcaacatgagctcgccta

SEQ ID NO: 176836 - DNA, 25 bp, Saccharomyces pastorianus
aaccttcatcggtgacgtattgtca

SEQ ID NO: 176837 - DNA, 25 bp, Saccharomyces pastorianus
agcaaagtagtcgacttcgccacaa

SEQ ID NO: 176838 - DNA, 25 bp, Saccharomyces pastorianus
ggctcaccagaggatttgcccgaga

SEQ ID NO: 176839 - DNA, 25 bp, Saccharomyces pastorianus
gatcgagtcctcatatgccctggaa

SEQ ID NO: 176840 - DNA, 25 bp, Saccharomyces pastorianus
ttgatagagattccactaaggttat

SEQ ID NO: 176841 - DNA, 25 bp, Saccharomyces pastorianus
gttattctcaacaagagacaacacc

SEQ ID NO: 176842 - DNA, 25 bp, Saccharomyces pastorianus
aggttattctcaacaagagacaaca

SEQ ID NO: 176843 - DNA, 25 bp, Saccharomyces pastorianus
atcatcatgtctctcctcaacctgc

SEQ ID NO: 176844 - DNA, 25 bp, Saccharomyces pastorianus
ggttattctcaacaagagacaacac

SEQ ID NO: 176845 - DNA, 25 bp, Saccharomyces pastorianus
tgatagagattccactaaggttatt

SEQ ID NO: 176846 - DNA, 25 bp, Saccharomyces pastorianus
gatagagattccactaaggttattc

SEQ ID NO: 176847 - DNA, 25 bp, Saccharomyces pastorianus
ttattctcaacaagagacaacacct

SEQ ID NO: 176848 - DNA, 25 bp, Saccharomyces pastorianus
gaaccatcatcatgtctctcctcaa

SEQ ID NO: 176849 - DNA, 25 bp, Saccharomyces pastorianus
aaggttattctcaacaagagacaac

SEQ ID NO: 176850 - DNA, 25 bp, Saccharomyces pastorianus
tattctcaacaagagacaacacctg

SEQ ID NO: 176851 - DNA, 25 bp, Saccharomyces pastorianus
tagggcggaatcttaccatgactta

SEQ ID NO: 176852 - DNA, 25 bp, Saccharomyces pastorianus
tagccgttcgtatggaacctttact

SEQ ID NO: 176853 - DNA, 25 bp, Saccharomyces pastorianus
gagttaccaaatctaaatttcacaa

SEQ ID NO: 176854 - DNA, 25 bp, Saccharomyces pastorianus
gaaatttcattcagccctttctgta

SEQ ID NO: 176855 - DNA, 25 bp, Saccharomyces pastorianus
aaggacattctcatcattgcacatg

SEQ ID NO: 176856 - DNA, 25 bp, Saccharomyces pastorianus
attgcacatgagtcaacattaagag

SEQ ID NO: 176857 - DNA, 25 bp, Saccharomyces pastorianus
tggagcatacgagcaaggacattct

SEQ ID NO: 176858 - DNA, 25 bp, Saccharomyces pastorianus
aatcttaccatgacttagccgttcg

SEQ ID NO: 176859 - DNA, 25 bp, Saccharomyces pastorianus
gcttgcacctgcgtagagttaccaa

SEQ ID NO: 176860 - DNA, 25 bp, Saccharomyces pastorianus
ctatttaatggcttgcacctgcgta

SEQ ID NO: 176861 - DNA, 25 bp, Saccharomyces pastorianus
atcattttcgattccctagggcgga

SEQ ID NO: 176862 - DNA, 25 bp, Saccharomyces pastorianus
cagtctcattctgcgtaatcgagac

SEQ ID NO: 176863 - DNA, 25 bp, Saccharomyces pastorianus
acatgagccttggatggatgtcgtg

SEQ ID NO: 176864 - DNA, 25 bp, Saccharomyces pastorianus
aagaattgaacgactgcttttatat

SEQ ID NO: 176865 - DNA, 25 bp, Saccharomyces pastorianus
cgttttgttcagagagccaaagcga

SEQ ID NO: 176866 - DNA, 25 bp, Saccharomyces pastorianus
tcgagacgttttgttcagagagcca

SEQ ID NO: 176867 - DNA, 25 bp, Saccharomyces pastorianus
gtctcattctgcgtaatcgagacgt

SEQ ID NO: 176868 - DNA, 25 bp, Saccharomyces pastorianus
agtctcattctgcgtaatcgagacg

SEQ ID NO: 176869 - DNA, 25 bp, Saccharomyces pastorianus
gaagaattgaacgactgcttttata

SEQ ID NO: 176870 - DNA, 25 bp, Saccharomyces pastorianus
gttatgacgcctttaaacatgagcc

SEQ ID NO: 176871 - DNA, 25 bp, Saccharomyces pastorianus
tctcattctgcgtaatcgagacgtt

SEQ ID NO: 176872 - DNA, 25 bp, Saccharomyces pastorianus
tgacgcctttaaacatgagccttgg

SEQ ID NO: 176873 - DNA, 25 bp, Saccharomyces pastorianus
gaacgtcttaggagatgacgacaga

SEQ ID NO: 176874 - DNA, 25 bp, Saccharomyces pastorianus
ctgtggtgaagatggttgcgttaaa

SEQ ID NO: 176875 - DNA, 25 bp, Saccharomyces pastorianus
atcggtttccacgaggccaaggaag

SEQ ID NO: 176876 - DNA, 25 bp, Saccharomyces pastorianus
tccagaaaatttttgggattactct

SEQ ID NO: 176877 - DNA, 25 bp, Saccharomyces pastorianus
aagaatcggtttccacgaggccaag

SEQ ID NO: 176878 - DNA, 25 bp, Saccharomyces pastorianus
tagacgaacctcttattattcaaaa

SEQ ID NO: 176879 - DNA, 25 bp, Saccharomyces pastorianus
gggccgttagatattccagaaaatt

SEQ ID NO: 176880 - DNA, 25 bp, Saccharomyces pastorianus
gccaaggaaggagaaacacaagaaa

SEQ ID NO: 176881 - DNA, 25 bp, Saccharomyces pastorianus
tatactcctgtggtgaagatggttg

SEQ ID NO: 176882 - DNA, 25 bp, Saccharomyces pastorianus
atgacgacagagaaggttccattaa

SEQ ID NO: 176883 - DNA, 25 bp, Saccharomyces pastorianus
gaagatggttgcgttaaaatttggg

SEQ ID NO: 176884 - DNA, 25 bp, Saccharomyces pastorianus
aagacaatatagcagatttactcac

SEQ ID NO: 176885 - DNA, 25 bp, Saccharomyces pastorianus
gacaatatagcagatttactcacaa

SEQ ID NO: 176886 - DNA, 25 bp, Saccharomyces pastorianus
tttactcacaaaaccagtatcaatt

SEQ ID NO: 176887 - DNA, 25 bp, Saccharomyces pastorianus
caatggtaaagacaatatagcagat

SEQ ID NO: 176888 - DNA, 25 bp, Saccharomyces pastorianus
aaccagtatcaatttctgattttga

SEQ ID NO: 176889 - DNA, 25 bp, Saccharomyces pastorianus
acaaaaccagtatcaatttctgatt

SEQ ID NO: 176890 - DNA, 25 bp, Saccharomyces pastorianus
agacaatatagcagatttactcaca

SEQ ID NO: 176891 - DNA, 25 bp, Saccharomyces pastorianus
gagagactataaactaataaaaatc

SEQ ID NO: 176892 - DNA, 25 bp, Saccharomyces pastorianus
caatatagcagatttactcacaaaa

SEQ ID NO: 176893 - DNA, 25 bp, Saccharomyces pastorianus
acaatatagcagatttactcacaaa

SEQ ID NO: 176894 - DNA, 25 bp, Saccharomyces pastorianus
atttactcacaaaaccagtatcaat

SEQ ID NO: 176895 - DNA, 25 bp, Saccharomyces pastorianus
tgtcgccgccgttgcctctgccgct

SEQ ID NO: 176896 - DNA, 25 bp, Saccharomyces pastorianus
tactgtcgcctctatcgccgctgtc

SEQ ID NO: 176897 - DNA, 25 bp, Saccharomyces pastorianus
tctactgtcgcctctatcgccgctg

SEQ ID NO: 176898 - DNA, 25 bp, Saccharomyces pastorianus
tgcaattctctactgtcgcctctat

SEQ ID NO: 176899 - DNA, 25 bp, Saccharomyces pastorianus
tgtcgcctctatcgccgctgtcgcc

SEQ ID NO: 176900 - DNA, 25 bp, Saccharomyces pastorianus
atgcaattctctactgtcgcctcta

SEQ ID NO: 176901 - DNA, 25 bp, Saccharomyces pastorianus
gcaattctctactgtcgcctctatc

SEQ ID NO: 176902 - DNA, 25 bp, Saccharomyces pastorianus
attctctactgtcgcctctatcgcc

SEQ ID NO: 176903 - DNA, 25 bp, Saccharomyces pastorianus
actgtcgcctctatcgccgctgtcg

SEQ ID NO: 176904 - DNA, 25 bp, Saccharomyces pastorianus
ctactgtcgcctctatcgccgctgt

SEQ ID NO: 176905 - DNA, 25 bp, Saccharomyces pastorianus
gctgtcgccgccgttgcctctgccg

SEQ ID NO: 176906 - DNA, 25 bp, Saccharomyces pastorianus
ctttcactacgtctacgcagcatat

SEQ ID NO: 176907 - DNA, 25 bp, Saccharomyces pastorianus
gtattgaggaacatttgcttgagct

SEQ ID NO: 176908 - DNA, 25 bp, Saccharomyces pastorianus
atttgcttgagctagaaactgatgc

SEQ ID NO: 176909 - DNA, 25 bp, Saccharomyces pastorianus
gtaatgttagcaatggtgttccttt

SEQ ID NO: 176910 - DNA, 25 bp, Saccharomyces pastorianus
tcccctttccggattattggtaatg

SEQ ID NO: 176911 - DNA, 25 bp, Saccharomyces pastorianus
tgatgcgaataccttacatttactt

SEQ ID NO: 176912 - DNA, 25 bp, Saccharomyces pastorianus
gtacattgggatctaccttttacat

SEQ ID NO: 176913 - DNA, 25 bp, Saccharomyces pastorianus
gtgttccttttgctactggtacatt

SEQ ID NO: 176914 - DNA, 25 bp, Saccharomyces pastorianus
agcattatcagcacactttcactac

SEQ ID NO: 176915 - DNA, 25 bp, Saccharomyces pastorianus
gaaactgatgcaaatgtcgaacatt

SEQ ID NO: 176916 - DNA, 25 bp, Saccharomyces pastorianus
gaaagaaacaccatcctcaattgta

SEQ ID NO: 176917 - DNA, 25 bp, Saccharomyces pastorianus
tatccttatcctttcattcatcgaa

SEQ ID NO: 176918 - DNA, 25 bp, Saccharomyces pastorianus
ttatcctttcattcatcgaatgctt

SEQ ID NO: 176919 - DNA, 25 bp, Saccharomyces pastorianus
ccttatcctttcattcatcgaatgc

SEQ ID NO: 176920 - DNA, 25 bp, Saccharomyces pastorianus
atcctttcattcatcgaatgcttgc

SEQ ID NO: 176921 - DNA, 25 bp, Saccharomyces pastorianus
atccttatcctttcattcatcgaat

SEQ ID NO: 176922 - DNA, 25 bp, Saccharomyces pastorianus
cttatcctttcattcatcgaatgct

SEQ ID NO: 176923 - DNA, 25 bp, Saccharomyces pastorianus
tatcctttcattcatcgaatgcttg

SEQ ID NO: 176924 - DNA, 25 bp, Saccharomyces pastorianus
tccttatcctttcattcatcgaatg

SEQ ID NO: 176925 - DNA, 25 bp, Saccharomyces pastorianus
ttctccctctgttttatgtgtttca

SEQ ID NO: 176926 - DNA, 25 bp, Saccharomyces pastorianus
attatttctccctctgttttatgtg

SEQ ID NO: 176927 - DNA, 25 bp, Saccharomyces pastorianus
atttctccctctgttttatgtgttt

SEQ ID NO: 176928 - DNA, 25 bp, Saccharomyces pastorianus
ttatttctccctctgttttatgtgt

SEQ ID NO: 176929 - DNA, 25 bp, Saccharomyces pastorianus
tctccctctgttttatgtgtttcat

SEQ ID NO: 176930 - DNA, 25 bp, Saccharomyces pastorianus
ccctctgttttatgtgtttcattat

SEQ ID NO: 176931 - DNA, 25 bp, Saccharomyces pastorianus
ctctgttttatgtgtttcattatcc

SEQ ID NO: 176932 - DNA, 25 bp, Saccharomyces pastorianus
tccctctgttttatgtgtttcatta

SEQ ID NO: 176933 - DNA, 25 bp, Saccharomyces pastorianus
tttctccctctgttttatgtgtttc

SEQ ID NO: 176934 - DNA, 25 bp, Saccharomyces pastorianus
tatttctccctctgttttatgtgtt

SEQ ID NO: 176935 - DNA, 25 bp, Saccharomyces pastorianus
ctccctctgttttatgtgtttcatt

SEQ ID NO: 176936 - DNA, 25 bp, Saccharomyces pastorianus
gacaattacttattggctcattatg

SEQ ID NO: 176937 - DNA, 25 bp, Saccharomyces pastorianus
tttgaccctgggaaacaaggacatg

SEQ ID NO: 176938 - DNA, 25 bp, Saccharomyces pastorianus
gtttctgttaaaggttcaggataca

SEQ ID NO: 176939 - DNA, 25 bp, Saccharomyces pastorianus
gaagacaaccaagaaaatacacaat

SEQ ID NO: 176940 - DNA, 25 bp, Saccharomyces pastorianus
tatcagtggttatgagttggctaaa

SEQ ID NO: 176941 - DNA, 25 bp, Saccharomyces pastorianus
ccattatcagtggttatgagttggc

SEQ ID NO: 176942 - DNA, 25 bp, Saccharomyces pastorianus
gttggctaaagaaaccgatctggtt

SEQ ID NO: 176943 - DNA, 25 bp, Saccharomyces pastorianus
tgaccctgggaaacaaggacatgaa

SEQ ID NO: 176944 - DNA, 25 bp, Saccharomyces pastorianus
ccagtttctgttaaaggttcaggat

SEQ ID NO: 176945 - DNA, 25 bp, Saccharomyces pastorianus
gaatttattacacaattatgaagac

SEQ ID NO: 176946 - DNA, 25 bp, Saccharomyces pastorianus
atacacaattatttggtattggtaa

SEQ ID NO: 176947 - DNA, 25 bp, Saccharomyces pastorianus
cagattaaagccagccatctctagt

SEQ ID NO: 176948 - DNA, 25 bp, Saccharomyces pastorianus
aaagccagccatctctagtgctcta

SEQ ID NO: 176949 - DNA, 25 bp, Saccharomyces pastorianus
tctgatataagagctcacttggccc

SEQ ID NO: 176950 - DNA, 25 bp, Saccharomyces pastorianus
aagccagccatctctagtgctctat

SEQ ID NO: 176951 - DNA, 25 bp, Saccharomyces pastorianus
ctgatataagagctcacttggccca

SEQ ID NO: 176952 - DNA, 25 bp, Saccharomyces pastorianus
atataagagctcacttggcccaata

SEQ ID NO: 176953 - DNA, 25 bp, Saccharomyces pastorianus
ggaaacctacccagtcgaagttgct

SEQ ID NO: 176954 - DNA, 25 bp, Saccharomyces pastorianus
aagagctcacttggcccaatactac

SEQ ID NO: 176955 - DNA, 25 bp, Saccharomyces pastorianus
tgatataagagctcacttggcccaa

SEQ ID NO: 176956 - DNA, 25 bp, Saccharomyces pastorianus
ataagagctcacttggcccaatact

SEQ ID NO: 176957 - DNA, 25 bp, Saccharomyces pastorianus
ctctgatataagagctcacttggcc

SEQ ID NO: 176958 - DNA, 25 bp, Saccharomyces pastorianus
acaggtcaactaccgctaaaggcga

SEQ ID NO: 176959 - DNA, 25 bp, Saccharomyces pastorianus
gcaacaaccttgttaaaacatagta

SEQ ID NO: 176960 - DNA, 25 bp, Saccharomyces pastorianus
gggaatatgcagtaacatctgccac

SEQ ID NO: 176961 - DNA, 25 bp, Saccharomyces pastorianus
gtttagaaaacaagaccacaggtca

SEQ ID NO: 176962 - DNA, 25 bp, Saccharomyces pastorianus
tatgcagtaacatctgccaccaatg

SEQ ID NO: 176963 - DNA, 25 bp, Saccharomyces pastorianus
ggtcaactaccgctaaaggcgatat

SEQ ID NO: 176964 - DNA, 25 bp, Saccharomyces pastorianus
aagaccacaggtcaactaccgctaa

SEQ ID NO: 176965 - DNA, 25 bp, Saccharomyces pastorianus
aacatctgccaccaatgtacgcaat

SEQ ID NO: 176966 - DNA, 25 bp, Saccharomyces pastorianus
atctgccaccaatgtacgcaattgt

SEQ ID NO: 176967 - DNA, 25 bp, Saccharomyces pastorianus
agtaacatctgccaccaatgtacgc

SEQ ID NO: 176968 - DNA, 25 bp, Saccharomyces pastorianus
cgctaaaggcgatatctagtcaacc

SEQ ID NO: 176969 - DNA, 25 bp, Saccharomyces pastorianus
aacaacgtttacacatctactctgt

SEQ ID NO: 176970 - DNA, 25 bp, Saccharomyces pastorianus
acaacgtttacacatctactctgtt

SEQ ID NO: 176971 - DNA, 25 bp, Saccharomyces pastorianus
taaacaacgtttacacatctactct

SEQ ID NO: 176972 - DNA, 25 bp, Saccharomyces pastorianus
gtttacacatctactctgttgatga

SEQ ID NO: 176973 - DNA, 25 bp, Saccharomyces pastorianus
ttacacatctactctgttgatgaaa

SEQ ID NO: 176974 - DNA, 25 bp, Saccharomyces pastorianus
acgtttacacatctactctgttgat

SEQ ID NO: 176975 - DNA, 25 bp, Saccharomyces pastorianus
aaacaacgtttacacatctactctg

SEQ ID NO: 176976 - DNA, 25 bp, Saccharomyces pastorianus
aacgtttacacatctactctgttga

SEQ ID NO: 176977 - DNA, 25 bp, Saccharomyces pastorianus
tttacacatctactctgttgatgaa

SEQ ID NO: 176978 - DNA, 25 bp, Saccharomyces pastorianus
cgtttacacatctactctgttgatg

SEQ ID NO: 176979 - DNA, 25 bp, Saccharomyces pastorianus
caacgtttacacatctactctgttg

SEQ ID NO: 176980 - DNA, 25 bp, Saccharomyces pastorianus
gaagttttgtctcagatgcctcaca

SEQ ID NO: 176981 - DNA, 25 bp, Saccharomyces pastorianus
agttttgtctcagatgcctcacagc

SEQ ID NO: 176982 - DNA, 25 bp, Saccharomyces pastorianus
aagttttgtctcagatgcctcacag

SEQ ID NO: 176983 - DNA, 25 bp, Saccharomyces pastorianus
atgtgcactataataatggaagttt

SEQ ID NO: 176984 - DNA, 25 bp, Saccharomyces pastorianus
ttttgtctcagatgcctcacagcct

SEQ ID NO: 176985 - DNA, 25 bp, Saccharomyces pastorianus
tcagatgcctcacagccttgaaatg

SEQ ID NO: 176986 - DNA, 25 bp, Saccharomyces pastorianus
atggaagttttgtctcagatgcctc

SEQ ID NO: 176987 - DNA, 25 bp, Saccharomyces pastorianus
tctcagatgcctcacagccttgaaa

SEQ ID NO: 176988 - DNA, 25 bp, Saccharomyces pastorianus
aatggaagttttgtctcagatgcct

SEQ ID NO: 176989 - DNA, 25 bp, Saccharomyces pastorianus
ggaagttttgtctcagatgcctcac

SEQ ID NO: 176990 - DNA, 25 bp, Saccharomyces pastorianus
tgtctcagatgcctcacagccttga

SEQ ID NO: 176991 - DNA, 25 bp, Saccharomyces pastorianus
ttatgatgccctaaacatccgtaaa

SEQ ID NO: 176992 - DNA, 25 bp, Saccharomyces pastorianus
ggacgaaatcgttccatttttcaga

SEQ ID NO: 176993 - DNA, 25 bp, Saccharomyces pastorianus
gggactttcaactgatgaagccatt

SEQ ID NO: 176994 - DNA, 25 bp, Saccharomyces pastorianus
aacgacttgtcaggtcagctggcca

SEQ ID NO: 176995 - DNA, 25 bp, Saccharomyces pastorianus
aacatagctcttgcactggagtcga

SEQ ID NO: 176996 - DNA, 25 bp, Saccharomyces pastorianus
gaaaagcttcgcatgcagatgttga

SEQ ID NO: 176997 - DNA, 25 bp, Saccharomyces pastorianus
atttttgcgtagtgccaacgtcaaa

SEQ ID NO: 176998 - DNA, 25 bp, Saccharomyces pastorianus
atataccctcagactatttttgcgt

SEQ ID NO: 176999 - DNA, 25 bp, Saccharomyces pastorianus
gtatattttgctcgctgtggcacca

SEQ ID NO: 177000 - DNA, 25 bp, Saccharomyces pastorianus
atactggcatttttcaacgacttgt

SEQ ID NO: 177001 - DNA, 25 bp, Saccharomyces pastorianus
gtcaggtcagctggccatttatgat

SEQ ID NO: 177002 - DNA, 25 bp, Saccharomyces pastorianus
agaagtctcttaagaagaatgcagt

SEQ ID NO: 177003 - DNA, 25 bp, Saccharomyces pastorianus
gtctcttaagaagaatgcagttaca

SEQ ID NO: 177004 - DNA, 25 bp, Saccharomyces pastorianus
aagtctcttaagaagaatgcagtta

SEQ ID NO: 177005 - DNA, 25 bp, Saccharomyces pastorianus
ctcttaagaagaatgcagttacata

SEQ ID NO: 177006 - DNA, 25 bp, Saccharomyces pastorianus
gaagtctcttaagaagaatgcagtt

SEQ ID NO: 177007 - DNA, 25 bp, Saccharomyces pastorianus
agtctcttaagaagaatgcagttac

SEQ ID NO: 177008 - DNA, 25 bp, Saccharomyces pastorianus
tcttaagaagaatgcagttacatat

SEQ ID NO: 177009 - DNA, 25 bp, Saccharomyces pastorianus
cagaagtctcttaagaagaatgcag

SEQ ID NO: 177010 - DNA, 25 bp, Saccharomyces pastorianus
tcagaagtctcttaagaagaatgca

SEQ ID NO: 177011 - DNA, 25 bp, Saccharomyces pastorianus
tctcttaagaagaatgcagttacat

SEQ ID NO: 177012 - DNA, 25 bp, Saccharomyces pastorianus
ttcagaagtctcttaagaagaatgc

SEQ ID NO: 177013 - DNA, 25 bp, Saccharomyces pastorianus
tttccggccctaataccaagccttg

SEQ ID NO: 177014 - DNA, 25 bp, Saccharomyces pastorianus
cctaatgaaccgaatgccggctttt

SEQ ID NO: 177015 - DNA, 25 bp, Saccharomyces pastorianus
agatcatgcgaggactcccatgcct

SEQ ID NO: 177016 - DNA, 25 bp, Saccharomyces pastorianus
cgcagtttacggttttgatttcaag

SEQ ID NO: 177017 - DNA, 25 bp, Saccharomyces pastorianus
tcccatgccttggacacctaatgaa

SEQ ID NO: 177018 - DNA, 25 bp, Saccharomyces pastorianus
aattgccttggtttctagagatcat

SEQ ID NO: 177019 - DNA, 25 bp, Saccharomyces pastorianus
aaagctattcagtttcacgaaaagg

SEQ ID NO: 177020 - DNA, 25 bp, Saccharomyces pastorianus
tgaagtagatgcctcttctagaaca

SEQ ID NO: 177021 - DNA, 25 bp, Saccharomyces pastorianus
acaaagacatcgcagtttacggttt

SEQ ID NO: 177022 - DNA, 25 bp, Saccharomyces pastorianus
gaatgagtcctttagacagggtata

SEQ ID NO: 177023 - DNA, 25 bp, Saccharomyces pastorianus
tctgattctgttctagcattctgga

SEQ ID NO: 177024 - DNA, 25 bp, Saccharomyces pastorianus
cacccaatcttcatggtagcgccta

SEQ ID NO: 177025 - DNA, 25 bp, Saccharomyces pastorianus
attcacccaatcttcatggtagcgc

SEQ ID NO: 177026 - DNA, 25 bp, Saccharomyces pastorianus
aattcacccaatcttcatggtagcg

SEQ ID NO: 177027 - DNA, 25 bp, Saccharomyces pastorianus
tcacccaatcttcatggtagcgcct

SEQ ID NO: 177028 - DNA, 25 bp, Saccharomyces pastorianus
aaaattcacccaatcttcatggtag

SEQ ID NO: 177029 - DNA, 25 bp, Saccharomyces pastorianus
cccaatcttcatggtagcgcctatg

SEQ ID NO: 177030 - DNA, 25 bp, Saccharomyces pastorianus
acccaatcttcatggtagcgcctat

SEQ ID NO: 177031 - DNA, 25 bp, Saccharomyces pastorianus
caaaattcacccaatcttcatggta

SEQ ID NO: 177032 - DNA, 25 bp, Saccharomyces pastorianus
caatcttcatggtagcgcctatgct

SEQ ID NO: 177033 - DNA, 25 bp, Saccharomyces pastorianus
atcttcatggtagcgcctatgcttc

SEQ ID NO: 177034 - DNA, 25 bp, Saccharomyces pastorianus
aaattcacccaatcttcatggtagc

SEQ ID NO: 177035 - DNA, 25 bp, Saccharomyces pastorianus
tttggcgaaattcagttcagatgat

SEQ ID NO: 177036 - DNA, 25 bp, Saccharomyces pastorianus
gactttctgacaggatttgaagaat

SEQ ID NO: 177037 - DNA, 25 bp, Saccharomyces pastorianus
gttcagatgatgaaggtgactttct

SEQ ID NO: 177038 - DNA, 25 bp, Saccharomyces pastorianus
acgatacgcaggacacaattttggc

SEQ ID NO: 177039 - DNA, 25 bp, Saccharomyces pastorianus
aggtgactttctgacaggatttgaa

SEQ ID NO: 177040 - DNA, 25 bp, Saccharomyces pastorianus
gataacgatacgcaggacacaattt

SEQ ID NO: 177041 - DNA, 25 bp, Saccharomyces pastorianus
gcaggacacaattttggcgaaattc

SEQ ID NO: 177042 - DNA, 25 bp, Saccharomyces pastorianus
gatcaacgagagtttaattacaaga

SEQ ID NO: 177043 - DNA, 25 bp, Saccharomyces pastorianus
gaaagagaagatcaacgagagttta

SEQ ID NO: 177044 - DNA, 25 bp, Saccharomyces pastorianus
gatgaaggtgactttctgacaggat

SEQ ID NO: 177045 - DNA, 25 bp, Saccharomyces pastorianus
gattgataacgatacgcaggacaca

SEQ ID NO: 177046 - DNA, 25 bp, Saccharomyces pastorianus
gaaagcggacgctcttatgcgtgat

SEQ ID NO: 177047 - DNA, 25 bp, Saccharomyces pastorianus
aatgaggccacacactcgttgatgg

SEQ ID NO: 177048 - DNA, 25 bp, Saccharomyces pastorianus
gagtttccaatcgactctaccggta

SEQ ID NO: 177049 - DNA, 25 bp, Saccharomyces pastorianus
ttggctgtctttatgcagcgtctaa

SEQ ID NO: 177050 - DNA, 25 bp, Saccharomyces pastorianus
tctaggtgttggtgcattccaccgt

SEQ ID NO: 177051 - DNA, 25 bp, Saccharomyces pastorianus
aagactgcctttacacgcttgtgga

SEQ ID NO: 177052 - DNA, 25 bp, Saccharomyces pastorianus
ggcctacatgtacgcaccagatgaa

SEQ ID NO: 177053 - DNA, 25 bp, Saccharomyces pastorianus
gtatcaaggacaccaacgcctacat

SEQ ID NO: 177054 - DNA, 25 bp, Saccharomyces pastorianus
acgcctacattgttggttccattac

SEQ ID NO: 177055 - DNA, 25 bp, Saccharomyces pastorianus
acaaggtatcgtccatctaggtgtt

SEQ ID NO: 177056 - DNA, 25 bp, Saccharomyces pastorianus
tatgcgtgatgccatggacgcccaa

SEQ ID NO: 177057 - DNA, 25 bp, Saccharomyces pastorianus
gaagcagaatctcaagtggtattaa

SEQ ID NO: 177058 - DNA, 25 bp, Saccharomyces pastorianus
tattacattgatcccacctgcgaaa

SEQ ID NO: 177059 - DNA, 25 bp, Saccharomyces pastorianus
gactgcggacctgaacttagtccat

SEQ ID NO: 177060 - DNA, 25 bp, Saccharomyces pastorianus
ttaagcattataccccatttgaaga

SEQ ID NO: 177061 - DNA, 25 bp, Saccharomyces pastorianus
gccacctaatttacctgaagcagaa

SEQ ID NO: 177062 - DNA, 25 bp, Saccharomyces pastorianus
taggcttgggaatttctgccacctc

SEQ ID NO: 177063 - DNA, 25 bp, Saccharomyces pastorianus
atcatccatccggagtaatttcatg

SEQ ID NO: 177064 - DNA, 25 bp, Saccharomyces pastorianus
tccctgtgcttataccttgggtata

SEQ ID NO: 177065 - DNA, 25 bp, Saccharomyces pastorianus
tactgggcgatatgaatgatcctat

SEQ ID NO: 177066 - DNA, 25 bp, Saccharomyces pastorianus
ttatatcgcagacggtttacagtat

SEQ ID NO: 177067 - DNA, 25 bp, Saccharomyces pastorianus
tttgttgatgtaccaaggctagcat

SEQ ID NO: 177068 - DNA, 25 bp, Saccharomyces pastorianus
gtggtactgttctcattgtcgccaa

SEQ ID NO: 177069 - DNA, 25 bp, Saccharomyces pastorianus
gataaggtggtactgttctcattgt

SEQ ID NO: 177070 - DNA, 25 bp, Saccharomyces pastorianus
cgccaagtggtccacgagagtgaac

SEQ ID NO: 177071 - DNA, 25 bp, Saccharomyces pastorianus
gaagaggacatgtttccattgcaag

SEQ ID NO: 177072 - DNA, 25 bp, Saccharomyces pastorianus
ggtacccaagtgaaagaagccattt

SEQ ID NO: 177073 - DNA, 25 bp, Saccharomyces pastorianus
gtcgagaagaggacatgtttccatt

SEQ ID NO: 177074 - DNA, 25 bp, Saccharomyces pastorianus
tccacgagagtgaactgcaaatgtt

SEQ ID NO: 177075 - DNA, 25 bp, Saccharomyces pastorianus
atgttagacttaggtacccaagtga

SEQ ID NO: 177076 - DNA, 25 bp, Saccharomyces pastorianus
gcaaatgttagacttaggtacccaa

SEQ ID NO: 177077 - DNA, 25 bp, Saccharomyces pastorianus
agtggtccacgagagtgaactgcaa

SEQ ID NO: 177078 - DNA, 25 bp, Saccharomyces pastorianus
aaggtggtactgttctcattgtcgc

SEQ ID NO: 177079 - DNA, 25 bp, Saccharomyces pastorianus
gacagtaaatctacaatcagtataa

SEQ ID NO: 177080 - DNA, 25 bp, Saccharomyces pastorianus
attgcagacgtaatgaccaaacctc

SEQ ID NO: 177081 - DNA, 25 bp, Saccharomyces pastorianus
aagaatattgcagacgtaatgacca

SEQ ID NO: 177082 - DNA, 25 bp, Saccharomyces pastorianus
taaccgacagtaaatctacaatcag

SEQ ID NO: 177083 - DNA, 25 bp, Saccharomyces pastorianus
ctgcacgtatgctatatcgaaacca

SEQ ID NO: 177084 - DNA, 25 bp, Saccharomyces pastorianus
tcaggaaatcatctgcacgtatgct

SEQ ID NO: 177085 - DNA, 25 bp, Saccharomyces pastorianus
aatcatctgcacgtatgctatatcg

SEQ ID NO: 177086 - DNA, 25 bp, Saccharomyces pastorianus
ggaaatcatctgcacgtatgctata

SEQ ID NO: 177087 - DNA, 25 bp, Saccharomyces pastorianus
tcatctgcacgtatgctatatcgaa

SEQ ID NO: 177088 - DNA, 25 bp, Saccharomyces pastorianus
gtatcaggaaatcatctgcacgtat

SEQ ID NO: 177089 - DNA, 25 bp, Saccharomyces pastorianus
gaagtatcaggaaatcatctgcacg

SEQ ID NO: 177090 - DNA, 25 bp, Saccharomyces pastorianus
gagacttccgtctggacccaaagat
